United States Patent Application Publication US 2022/0259616 A1 - sequence listing, part 3

SEQ ID NO: 53578 - DNA, 20 bp, Artificial Sequence
  MKO10053578_A_Tfg
  gRNA
aagaccccttgaatcaagtc

SEQ ID NO: 53579 - DNA, 20 bp, Artificial Sequence
  MKO10053579_A_Tfip11
  gRNA
ccccgtggccgactcggaag

SEQ ID NO: 53580 - DNA, 20 bp, Artificial Sequence
  MKO10053580_A_Tfip11
  gRNA
cccgcactgatgaagttgac

SEQ ID NO: 53581 - DNA, 20 bp, Artificial Sequence
  MKO10053581_A_Tfip11
  gRNA
ctccgagccataggccccca

SEQ ID NO: 53582 - DNA, 20 bp, Artificial Sequence
  MKO10053582_A_Tfpi2
  gRNA
cgatacttccgcaagtctgt

SEQ ID NO: 53583 - DNA, 20 bp, Artificial Sequence
  MKO10053583_A_Tfpi2
  gRNA
tgtgagactttcacctatac

SEQ ID NO: 53584 - DNA, 20 bp, Artificial Sequence
  MKO10053584_A_Tfpi2
  gRNA
gttgaagaaaaaccgtatat

SEQ ID NO: 53585 - DNA, 20 bp, Artificial Sequence
  MKO10053585_A_Tfpi
  gRNA
cagtgtgaacgattcgtgta

SEQ ID NO: 53586 - DNA, 20 bp, Artificial Sequence
  MKO10053586_A_Tfpi
  gRNA
cgagaaccgatttgataccc

SEQ ID NO: 53587 - DNA, 20 bp, Artificial Sequence
  MKO10053587_A_Tfpi
  gRNA
gaggaccctggactctgccg

SEQ ID NO: 53588 - DNA, 20 bp, Artificial Sequence
  MKO10053588_A_Tfpt
  gRNA
ttctacgatttagttcccgc

SEQ ID NO: 53589 - DNA, 20 bp, Artificial Sequence
  MKO10053589_A_Tfpt
  gRNA
gcgctgccgggagatcgagc

SEQ ID NO: 53590 - DNA, 20 bp, Artificial Sequence
  MKO10053590_A_Tfpt
  gRNA
atctcggtagtcatccccgt

SEQ ID NO: 53591 - DNA, 20 bp, Artificial Sequence
  MKO10053591_A_Tfr2
  gRNA
tctggcgcgagagcttatcg

SEQ ID NO: 53592 - DNA, 20 bp, Artificial Sequence
  MKO10053592_A_Tfr2
  gRNA
cgctccagtacaacgtggtc

SEQ ID NO: 53593 - DNA, 20 bp, Artificial Sequence
  MKO10053593_A_Tfr2
  gRNA
tcagaccatctacagacgcg

SEQ ID NO: 53594 - DNA, 20 bp, Artificial Sequence
  MKO10053594_A_Tfrc
  gRNA
ctacacgcttacaatagccc

SEQ ID NO: 53595 - DNA, 20 bp, Artificial Sequence
  MKO10053595_A_Tfrc
  gRNA
gaatacatacactcctcgtg

SEQ ID NO: 53596 - DNA, 20 bp, Artificial Sequence
  MKO10053596_A_Tfrc
  gRNA
ctaaaccgggtgtatgacaa

SEQ ID NO: 53597 - DNA, 20 bp, Artificial Sequence
  MKO10053597_A_Tgds
  gRNA
attgacgtacgtaaactcaa

SEQ ID NO: 53598 - DNA, 20 bp, Artificial Sequence
  MKO10053598_A_Tgds
  gRNA
tagatttacgatcatatagt

SEQ ID NO: 53599 - DNA, 20 bp, Artificial Sequence
  MKO10053599_A_Tgds
  gRNA
tttacgtacgtcaatgttta

SEQ ID NO: 53600 - DNA, 20 bp, Artificial Sequence
  MKO10053600_A_Tgfa
  gRNA
agctccgcaaacactgtgag

SEQ ID NO: 53601 - DNA, 20 bp, Artificial Sequence
  MKO10053601_A_Tgfa
  gRNA
gatggactcaccactcaggg

SEQ ID NO: 53602 - DNA, 20 bp, Artificial Sequence
  MKO10053602_A_Tgfa
  gRNA
aacagcacatcccccctgag

SEQ ID NO: 53603 - DNA, 20 bp, Artificial Sequence
  MKO10053603_A_Tgfb1i1
  gRNA
cgggtcccggcttccataca

SEQ ID NO: 53604 - DNA, 20 bp, Artificial Sequence
  MKO10053604_A_Tgfb1i1
  gRNA
cggtgcgctggcggacagct

SEQ ID NO: 53605 - DNA, 20 bp, Artificial Sequence
  MKO10053605_A_Tgfb1i1
  gRNA
gggacaaggatcatctatac

SEQ ID NO: 53606 - DNA, 20 bp, Artificial Sequence
  MKO10053606_A_Tgfb1
  gRNA
ctctcccgcagacggaatac

SEQ ID NO: 53607 - DNA, 20 bp, Artificial Sequence
  MKO10053607_A_Tgfb1
  gRNA
cccccactgatacgcctgag

SEQ ID NO: 53608 - DNA, 20 bp, Artificial Sequence
  MKO10053608_A_Tgfb1
  gRNA
gcaacatgtggaactctacc

SEQ ID NO: 53609 - DNA, 20 bp, Artificial Sequence
  MKO10053609_A_Tgfb2
  gRNA
ccaaagcgcgcttcttccgc

SEQ ID NO: 53610 - DNA, 20 bp, Artificial Sequence
  MKO10053610_A_Tgfb2
  gRNA
gagccattcaccctccgctc

SEQ ID NO: 53611 - DNA, 20 bp, Artificial Sequence
  MKO10053611_A_Tgfb2
  gRNA
atacagttcaatccgctgct

SEQ ID NO: 53612 - DNA, 20 bp, Artificial Sequence
  MKO10053612_A_Tgfb3
  gRNA
tcactgacactgtgcgcgag

SEQ ID NO: 53613 - DNA, 20 bp, Artificial Sequence
  MKO10053613_A_Tgfb3
  gRNA
tgccccacagatacttcgac

SEQ ID NO: 53614 - DNA, 20 bp, Artificial Sequence
  MKO10053614_A_Tgfb3
  gRNA
cctgggctgtccagtcggtg

SEQ ID NO: 53615 - DNA, 20 bp, Artificial Sequence
  MKO10053615_A_Tgfbi
  gRNA
cgatgttgacgttgctcacc

SEQ ID NO: 53616 - DNA, 20 bp, Artificial Sequence
  MKO10053616_A_Tgfbi
  gRNA
ggtcgatcccacaactccca

SEQ ID NO: 53617 - DNA, 20 bp, Artificial Sequence
  MKO10053617_A_Tgfbi
  gRNA
ttaccccattgggatagtga

SEQ ID NO: 53618 - DNA, 20 bp, Artificial Sequence
  MKO10053618_A_Tgfbr1
  gRNA
atctattcaagtaatcgaaa

SEQ ID NO: 53619 - DNA, 20 bp, Artificial Sequence
  MKO10053619_A_Tgfbr1
  gRNA
cttctagagaagagcgttca

SEQ ID NO: 53620 - DNA, 20 bp, Artificial Sequence
  MKO10053620_A_Tgfbr1
  gRNA
agtgatggatcctcttcatt

SEQ ID NO: 53621 - DNA, 20 bp, Artificial Sequence
  MKO10053621_A_Tgfbr2
  gRNA
gaccgcaccgccattgtcgc

SEQ ID NO: 53622 - DNA, 20 bp, Artificial Sequence
  MKO10053622_A_Tgfbr2
  gRNA
ccttgtagacctcggcgaag

SEQ ID NO: 53623 - DNA, 20 bp, Artificial Sequence
  MKO10053623_A_Tgfbr2
  gRNA
ccacgcgaagggcaacctgc

SEQ ID NO: 53624 - DNA, 20 bp, Artificial Sequence
  MKO10053624_A_Tgfbr3
  gRNA
cttcaacccaaagccgccga

SEQ ID NO: 53625 - DNA, 20 bp, Artificial Sequence
  MKO10053625_A_Tgfbr3
  gRNA
tgacagttcacaccgggtgc

SEQ ID NO: 53626 - DNA, 20 bp, Artificial Sequence
  MKO10053626_A_Tgfbr3
  gRNA
aacctccgcagtacagacca

SEQ ID NO: 53627 - DNA, 20 bp, Artificial Sequence
  MKO10053627_A_Tgfbrap1
  gRNA
gtcatcgagcgctatgacat

SEQ ID NO: 53628 - DNA, 20 bp, Artificial Sequence
  MKO10053628_A_Tgfbrap1
  gRNA
acgctgggaaatcccggcca

SEQ ID NO: 53629 - DNA, 20 bp, Artificial Sequence
  MKO10053629_A_Tgfbrap1
  gRNA
tctgcgtactcatgaagagg

SEQ ID NO: 53630 - DNA, 20 bp, Artificial Sequence
  MKO10053630_A_Tgif1
  gRNA
tgggttgggtccaactacgc

SEQ ID NO: 53631 - DNA, 20 bp, Artificial Sequence
  MKO10053631_A_Tgif1
  gRNA
tcacccgtccctctacgcgc

SEQ ID NO: 53632 - DNA, 20 bp, Artificial Sequence
  MKO10053632_A_Tgif1
  gRNA
cagtccagattctgcgagac

SEQ ID NO: 53633 - DNA, 20 bp, Artificial Sequence
  MKO10053633_A_Tgif2lx1
  gRNA
cagaacatggaggaggctga

SEQ ID NO: 53634 - DNA, 20 bp, Artificial Sequence
  MKO10053634_A_Tgif2lx1
  gRNA
ctggctacatgaactgttgt

SEQ ID NO: 53635 - DNA, 20 bp, Artificial Sequence
  MKO10053635_A_Tgif2lx1
  gRNA
cgaagagaaagtgccatatc

SEQ ID NO: 53636 - DNA, 20 bp, Artificial Sequence
  MKO10053636_A_Tgif2lx2
  gRNA
ctggctacatgaactgttgt

SEQ ID NO: 53637 - DNA, 20 bp, Artificial Sequence
  MKO10053637_A_Tgif2lx2
  gRNA
cagaacatggaggaggctga

SEQ ID NO: 53638 - DNA, 20 bp, Artificial Sequence
  MKO10053638_A_Tgif2lx2
  gRNA
ccttcgtgactcaagctgta

SEQ ID NO: 53639 - DNA, 20 bp, Artificial Sequence
  MKO10053639_A_Tgif2
  gRNA
ctcttacctgcagcaccgag

SEQ ID NO: 53640 - DNA, 20 bp, Artificial Sequence
  MKO10053640_A_Tgif2
  gRNA
actctttctagatatgtaac

SEQ ID NO: 53641 - DNA, 20 bp, Artificial Sequence
  MKO10053641_A_Tgif2
  gRNA
cctggggagagccacatcag

SEQ ID NO: 53642 - DNA, 20 bp, Artificial Sequence
  MKO10053642_A_Tgm1
  gRNA
gtccgcacccgctctgaagc

SEQ ID NO: 53643 - DNA, 20 bp, Artificial Sequence
  MKO10053643_A_Tgm1
  gRNA
cggagggggatgccatatgg

SEQ ID NO: 53644 - DNA, 20 bp, Artificial Sequence
  MKO10053644_A_Tgm1
  gRNA
gaaccgccgagagcaccaca

SEQ ID NO: 53645 - DNA, 20 bp, Artificial Sequence
  MKO10053645_A_Tgm2
  gRNA
cggtcacagcaccgaacgtg

SEQ ID NO: 53646 - DNA, 20 bp, Artificial Sequence
  MKO10053646_A_Tgm2
  gRNA
ggaatatgtccttacgcaac

SEQ ID NO: 53647 - DNA, 20 bp, Artificial Sequence
  MKO10053647_A_Tgm2
  gRNA
actctgtacttcgagggccg

SEQ ID NO: 53648 - DNA, 20 bp, Artificial Sequence
  MKO10053648_A_Tgm3
  gRNA
tgatgcgcccttcgattcat

SEQ ID NO: 53649 - DNA, 20 bp, Artificial Sequence
  MKO10053649_A_Tgm3
  gRNA
tacagatccaaaacgtcaac

SEQ ID NO: 53650 - DNA, 20 bp, Artificial Sequence
  MKO10053650_A_Tgm3
  gRNA
actcagtgtgtacaatccga

SEQ ID NO: 53651 - DNA, 20 bp, Artificial Sequence
  MKO10053651_A_Tgm4
  gRNA
acgcctcagcacgagcttct

SEQ ID NO: 53652 - DNA, 20 bp, Artificial Sequence
  MKO10053652_A_Tgm4
  gRNA
gtgaagattgccaaacagtc

SEQ ID NO: 53653 - DNA, 20 bp, Artificial Sequence
  MKO10053653_A_Tgm4
  gRNA
agtgacatcctaccgttcta

SEQ ID NO: 53654 - DNA, 20 bp, Artificial Sequence
  MKO10053654_A_Tgm5
  gRNA
tatcggcccacggctgctat

SEQ ID NO: 53655 - DNA, 20 bp, Artificial Sequence
  MKO10053655_A_Tgm5
  gRNA
cctaggacccttgcccgatc

SEQ ID NO: 53656 - DNA, 20 bp, Artificial Sequence
  MKO10053656_A_Tgm5
  gRNA
caacactgatctcttccgtg

SEQ ID NO: 53657 - DNA, 20 bp, Artificial Sequence
  MKO10053657_A_Tgm6
  gRNA
gagtacgtgcttaacgacag

SEQ ID NO: 53658 - DNA, 20 bp, Artificial Sequence
  MKO10053658_A_Tgm6
  gRNA
cgaatgctgccagtcgacct

SEQ ID NO: 53659 - DNA, 20 bp, Artificial Sequence
  MKO10053659_A_Tgm6
  gRNA
catcggtggctgggtcctcc

SEQ ID NO: 53660 - DNA, 20 bp, Artificial Sequence
  MKO10053660_A_Tgm7
  gRNA
ggccgaccactgccgcaaga

SEQ ID NO: 53661 - DNA, 20 bp, Artificial Sequence
  MKO10053661_A_Tgm7
  gRNA
gaagcactccagacgttctc

SEQ ID NO: 53662 - DNA, 20 bp, Artificial Sequence
  MKO10053662_A_Tgm7
  gRNA
agacccgacctgagaacgtc

SEQ ID NO: 53663 - DNA, 20 bp, Artificial Sequence
  MKO10053663_A_Tgoln1
  gRNA
tcgccaccgcgacactcagc

SEQ ID NO: 53664 - DNA, 20 bp, Artificial Sequence
  MKO10053664_A_Tgoln1
  gRNA
ccgcgcagtttcgttcaact

SEQ ID NO: 53665 - DNA, 20 bp, Artificial Sequence
  MKO10053665_A_Tgoln1
  gRNA
cgccgcgaccgatcacagtt

SEQ ID NO: 53666 - DNA, 20 bp, Artificial Sequence
  MKO10053666_A_Tgoln2
  gRNA
tcgccaccgcgacactcagc

SEQ ID NO: 53667 - DNA, 20 bp, Artificial Sequence
  MKO10053667_A_Tgoln2
  gRNA
ccgcgcagtttcgttcaact

SEQ ID NO: 53668 - DNA, 20 bp, Artificial Sequence
  MKO10053668_A_Tgoln2
  gRNA
cgccgcgaccgatcacagtt

SEQ ID NO: 53669 - DNA, 20 bp, Artificial Sequence
  MKO10053669_A_Tgs1
  gRNA
taatcctacctttagctggt

SEQ ID NO: 53670 - DNA, 20 bp, Artificial Sequence
  MKO10053670_A_Tgs1
  gRNA
agctcagaccaaccagctaa

SEQ ID NO: 53671 - DNA, 20 bp, Artificial Sequence
  MKO10053671_A_Tgs1
  gRNA
ttagagttgcaggagtcttc

SEQ ID NO: 53672 - DNA, 20 bp, Artificial Sequence
  MKO10053672_A_Tgtp1
  gRNA
gcaaagacagtgagaagacg

SEQ ID NO: 53673 - DNA, 20 bp, Artificial Sequence
  MKO10053673_A_Tgtp1
  gRNA
ttgtctctattgccccagtg

SEQ ID NO: 53674 - DNA, 20 bp, Artificial Sequence
  MKO10053674_A_Tgtp1
  gRNA
ccaaagccattgcacagatg

SEQ ID NO: 53675 - DNA, 20 bp, Artificial Sequence
  MKO10053675_A_Tgtp2
  gRNA
gtgagaatacgtgacgcttg

SEQ ID NO: 53676 - DNA, 20 bp, Artificial Sequence
  MKO10053676_A_Tgtp2
  gRNA
ttgtctctattgcgccagtg

SEQ ID NO: 53677 - DNA, 20 bp, Artificial Sequence
  MKO10053677_A_Tgtp2
  gRNA
ccaaagccattgcacagatg

SEQ ID NO: 53678 - DNA, 20 bp, Artificial Sequence
  MKO10053678_A_Tg
  gRNA
accgagttggcctgccctgc

SEQ ID NO: 53679 - DNA, 20 bp, Artificial Sequence
  MKO10053679_A_Tg
  gRNA
acctgcagagagtgcaatgc

SEQ ID NO: 53680 - DNA, 20 bp, Artificial Sequence
  MKO10053680_A_Tg
  gRNA
ttgacaaacttgcactggac

SEQ ID NO: 53681 - DNA, 20 bp, Artificial Sequence
  MKO10053681_A_Tha1
  gRNA
ccctgtcgactacctccgcc

SEQ ID NO: 53682 - DNA, 20 bp, Artificial Sequence
  MKO10053682_A_Tha1
  gRNA
ccccgccctgctcatagacg

SEQ ID NO: 53683 - DNA, 20 bp, Artificial Sequence
  MKO10053683_A_Tha1
  gRNA
acctggcggaggtagtcgac

SEQ ID NO: 53684 - DNA, 20 bp, Artificial Sequence
  MKO10053684_A_Thada
  gRNA
gctttacctgtttaatagag

SEQ ID NO: 53685 - DNA, 20 bp, Artificial Sequence
  MKO10053685_A_Thada
  gRNA
ttatcgaccttctccaagag

SEQ ID NO: 53686 - DNA, 20 bp, Artificial Sequence
  MKO10053686_A_Thada
  gRNA
acaaatccactctattaaac

SEQ ID NO: 53687 - DNA, 20 bp, Artificial Sequence
  MKO10053687_A_Thap11
  gRNA
cgctcattgacgccacgcag

SEQ ID NO: 53688 - DNA, 20 bp, Artificial Sequence
  MKO10053688_A_Thap11
  gRNA
acgctgagttgcggcgcctc

SEQ ID NO: 53689 - DNA, 20 bp, Artificial Sequence
  MKO10053689_A_Thap11
  gRNA
ctcaagaacgtgtcccgtgc

SEQ ID NO: 53690 - DNA, 20 bp, Artificial Sequence
  MKO10053690_A_Thap1
  gRNA
ctgcaagaaccgctacgaca

SEQ ID NO: 53691 - DNA, 20 bp, Artificial Sequence
  MKO10053691_A_Thap1
  gRNA
gtagcggttcttgcagccgt

SEQ ID NO: 53692 - DNA, 20 bp, Artificial Sequence
  MKO10053692_A_Thap1
  gRNA
ctatatcgagccacatgaga

SEQ ID NO: 53693 - DNA, 20 bp, Artificial Sequence
  MKO10053693_A_Thap2
  gRNA
aatgccgaccaattgcgccg

SEQ ID NO: 53694 - DNA, 20 bp, Artificial Sequence
  MKO10053694_A_Thap2
  gRNA
acaaacccgacgacttaaaa

SEQ ID NO: 53695 - DNA, 20 bp, Artificial Sequence
  MKO10053695_A_Thap2
  gRNA
acagcccgccgcggcgcaat

SEQ ID NO: 53696 - DNA, 20 bp, Artificial Sequence
  MKO10053696_A_Thap3
  gRNA
cgagatgccgaagtcttgcg

SEQ ID NO: 53697 - DNA, 20 bp, Artificial Sequence
  MKO10053697_A_Thap3
  gRNA
tgtagcggttgcagcattgc

SEQ ID NO: 53698 - DNA, 20 bp, Artificial Sequence
  MKO10053698_A_Thap3
  gRNA
cccgagtgcttcagcgcctt

SEQ ID NO: 53699 - DNA, 20 bp, Artificial Sequence
  MKO10053699_A_Thap4
  gRNA
cgacagaatgacctcgttga

SEQ ID NO: 53700 - DNA, 20 bp, Artificial Sequence
  MKO10053700_A_Thap4
  gRNA
atcggctgaccttctgccga

SEQ ID NO: 53701 - DNA, 20 bp, Artificial Sequence
  MKO10053701_A_Thap4
  gRNA
ggagccgttgtcctggatgc

SEQ ID NO: 53702 - DNA, 20 bp, Artificial Sequence
  MKO10053702_A_Thap7
  gRNA
acgcgcgagactcgcaaccg

SEQ ID NO: 53703 - DNA, 20 bp, Artificial Sequence
  MKO10053703_A_Thap7
  gRNA
cataccgcttcctgcatcgc

SEQ ID NO: 53704 - DNA, 20 bp, Artificial Sequence
  MKO10053704_A_Thap7
  gRNA
tcatccgcctgagcacctag

SEQ ID NO: 53705 - DNA, 20 bp, Artificial Sequence
  MKO10053705_A_Thbd
  gRNA
tcgttgcacgattgaaccac

SEQ ID NO: 53706 - DNA, 20 bp, Artificial Sequence
  MKO10053706_A_Thbd
  gRNA
accgcggcggaactgcctac

SEQ ID NO: 53707 - DNA, 20 bp, Artificial Sequence
  MKO10053707_A_Thbd
  gRNA
agcgcagatgcatcggtagt

SEQ ID NO: 53708 - DNA, 20 bp, Artificial Sequence
  MKO10053708_A_Thbs1
  gRNA
aaggggccccggtcgccgac

SEQ ID NO: 53709 - DNA, 20 bp, Artificial Sequence
  MKO10053709_A_Thbs1
  gRNA
cccttcaccagtcggcgacc

SEQ ID NO: 53710 - DNA, 20 bp, Artificial Sequence
  MKO10053710_A_Thbs1
  gRNA
gctatccgcaccaactacat

SEQ ID NO: 53711 - DNA, 20 bp, Artificial Sequence
  MKO10053711_A_Thbs2
  gRNA
taggcgggcaccccggggtc

SEQ ID NO: 53712 - DNA, 20 bp, Artificial Sequence
  MKO10053712_A_Thbs2
  gRNA
acttgcggtcctgcttcagt

SEQ ID NO: 53713 - DNA, 20 bp, Artificial Sequence
  MKO10053713_A_Thbs2
  gRNA
catgttgctcaactcctcgc

SEQ ID NO: 53714 - DNA, 20 bp, Artificial Sequence
  MKO10053714_A_Thbs3
  gRNA
ctcgccaagacaacacacga

SEQ ID NO: 53715 - DNA, 20 bp, Artificial Sequence
  MKO10053715_A_Thbs3
  gRNA
cagtgctggtgcggtaccag

SEQ ID NO: 53716 - DNA, 20 bp, Artificial Sequence
  MKO10053716_A_Thbs3
  gRNA
gttgtgggcaagatcaacaa

SEQ ID NO: 53717 - DNA, 20 bp, Artificial Sequence
  MKO10053717_A_Thbs4
  gRNA
gtccgcaattcaatggactc

SEQ ID NO: 53718 - DNA, 20 bp, Artificial Sequence
  MKO10053718_A_Thbs4
  gRNA
agtccgcctgagcgcagtcc

SEQ ID NO: 53719 - DNA, 20 bp, Artificial Sequence
  MKO10053719_A_Thbs4
  gRNA
agatgagatagacttcgtgc

SEQ ID NO: 53720 - DNA, 20 bp, Artificial Sequence
  MKO10053720_A_Theg
  gRNA
tcgaaagctcctccatgcgc

SEQ ID NO: 53721 - DNA, 20 bp, Artificial Sequence
  MKO10053721_A_Theg
  gRNA
ggtgtcctcgataaatcgct

SEQ ID NO: 53722 - DNA, 20 bp, Artificial Sequence
  MKO10053722_A_Theg
  gRNA
aggagctttcgaggcccaag

SEQ ID NO: 53723 - DNA, 20 bp, Artificial Sequence
  MKO10053723_A_Them4
  gRNA
aactcttgaatagctcgagt

SEQ ID NO: 53724 - DNA, 20 bp, Artificial Sequence
  MKO10053724_A_Them4
  gRNA
tctgaggtccttagtccagc

SEQ ID NO: 53725 - DNA, 20 bp, Artificial Sequence
  MKO10053725_A_Them4
  gRNA
ggcagtcatggcaacgcctt

SEQ ID NO: 53726 - DNA, 20 bp, Artificial Sequence
  MKO10053726_A_Them5
  gRNA
tttaatccagccgcctgatt

SEQ ID NO: 53727 - DNA, 20 bp, Artificial Sequence
  MKO10053727_A_Them5
  gRNA
cagcatatctgaacaccagc

SEQ ID NO: 53728 - DNA, 20 bp, Artificial Sequence
  MKO10053728_A_Them5
  gRNA
cgaatatgtctcatccatca

SEQ ID NO: 53729 - DNA, 20 bp, Artificial Sequence
  MKO10053729_A_Them6
  gRNA
cgcacacgaaaccatcgcga

SEQ ID NO: 53730 - DNA, 20 bp, Artificial Sequence
  MKO10053730_A_Them6
  gRNA
agtcgcgtgtgtacctcgaa

SEQ ID NO: 53731 - DNA, 20 bp, Artificial Sequence
  MKO10053731_A_Them6
  gRNA
cgctctcagcacggagcagc

SEQ ID NO: 53732 - DNA, 20 bp, Artificial Sequence
  MKO10053732_A_Themis2
  gRNA
cgtcaagatcccgtctacgc

SEQ ID NO: 53733 - DNA, 20 bp, Artificial Sequence
  MKO10053733_A_Themis2
  gRNA
cagccgacgctataacctag

SEQ ID NO: 53734 - DNA, 20 bp, Artificial Sequence
  MKO10053734_A_Themis2
  gRNA
tccaacgtctgacccgtctc

SEQ ID NO: 53735 - DNA, 20 bp, Artificial Sequence
  MKO10053735_A_Themis3
  gRNA
cggtgatcaagttctggacg

SEQ ID NO: 53736 - DNA, 20 bp, Artificial Sequence
  MKO10053736_A_Themis3
  gRNA
cccgcctcgatcgtaagccc

SEQ ID NO: 53737 - DNA, 20 bp, Artificial Sequence
  MKO10053737_A_Themis3
  gRNA
tagtggtagaagagcgttcg

SEQ ID NO: 53738 - DNA, 20 bp, Artificial Sequence
  MKO10053738_A_Themis
  gRNA
taggccgtggggaactcccg

SEQ ID NO: 53739 - DNA, 20 bp, Artificial Sequence
  MKO10053739_A_Themis
  gRNA
tcgacaacttcagctactac

SEQ ID NO: 53740 - DNA, 20 bp, Artificial Sequence
  MKO10053740_A_Themis
  gRNA
gcaaggatgacctagtctgc

SEQ ID NO: 53741 - DNA, 20 bp, Artificial Sequence
  MKO10053741_A_Thg1l
  gRNA
ccgccagtaaaatacgtaac

SEQ ID NO: 53742 - DNA, 20 bp, Artificial Sequence
  MKO10053742_A_Thg1l
  gRNA
gaggacattgtgattgcgta

SEQ ID NO: 53743 - DNA, 20 bp, Artificial Sequence
  MKO10053743_A_Thg1l
  gRNA
ttgccaaacctaatgacagt

SEQ ID NO: 53744 - DNA, 20 bp, Artificial Sequence
  MKO10053744_A_Thnsl1
  gRNA
agcaagagtttgttgccgac

SEQ ID NO: 53745 - DNA, 20 bp, Artificial Sequence
  MKO10053745_A_Thnsl1
  gRNA
tcaagtataaatgtcgctcc

SEQ ID NO: 53746 - DNA, 20 bp, Artificial Sequence
  MKO10053746_A_Thnsl1
  gRNA
acataccgctgttgcaaaag

SEQ ID NO: 53747 - DNA, 20 bp, Artificial Sequence
  MKO10053747_A_Thnsl2
  gRNA
cctttaacaccgttgtcatc

SEQ ID NO: 53748 - DNA, 20 bp, Artificial Sequence
  MKO10053748_A_Thnsl2
  gRNA
gtggtagtgccgacgggagc

SEQ ID NO: 53749 - DNA, 20 bp, Artificial Sequence
  MKO10053749_A_Thnsl2
  gRNA
tgagcttgacgaacccatca

SEQ ID NO: 53750 - DNA, 20 bp, Artificial Sequence
  MKO10053750_A_Thoc1
  gRNA
agctaaaacgttctcacatg

SEQ ID NO: 53751 - DNA, 20 bp, Artificial Sequence
  MKO10053751_A_Thoc1
  gRNA
cctgccaggtaactgactga

SEQ ID NO: 53752 - DNA, 20 bp, Artificial Sequence
  MKO10053752_A_Thoc1
  gRNA
acccttgaccaagctttcag

SEQ ID NO: 53753 - DNA, 20 bp, Artificial Sequence
  MKO10053753_A_Thoc2
  gRNA
catgacagttcgacctacag

SEQ ID NO: 53754 - DNA, 20 bp, Artificial Sequence
  MKO10053754_A_Thoc2
  gRNA
atatgcagaacacgtcagca

SEQ ID NO: 53755 - DNA, 20 bp, Artificial Sequence
  MKO10053755_A_Thoc2
  gRNA
tttaatgtaggaattccgtg

SEQ ID NO: 53756 - DNA, 20 bp, Artificial Sequence
  MKO10053756_A_Thoc3
  gRNA
atcgccactgtgaatacgaa

SEQ ID NO: 53757 - DNA, 20 bp, Artificial Sequence
  MKO10053757_A_Thoc3
  gRNA
ctaactcgtcaacgtcccaa

SEQ ID NO: 53758 - DNA, 20 bp, Artificial Sequence
  MKO10053758_A_Thoc3
  gRNA
gatatagctgaagtcgagac

SEQ ID NO: 53759 - DNA, 20 bp, Artificial Sequence
  MKO10053759_A_Thoc5
  gRNA
ccattgaaattgaagaacga

SEQ ID NO: 53760 - DNA, 20 bp, Artificial Sequence
  MKO10053760_A_Thoc5
  gRNA
ggtgcatcacttcgtagagc

SEQ ID NO: 53761 - DNA, 20 bp, Artificial Sequence
  MKO10053761_A_Thoc5
  gRNA
gtaggcatcgactttctgct

SEQ ID NO: 53762 - DNA, 20 bp, Artificial Sequence
  MKO10053762_A_Thoc6
  gRNA
tgacgggcctgtctacagca

SEQ ID NO: 53763 - DNA, 20 bp, Artificial Sequence
  MKO10053763_A_Thoc6
  gRNA
ccaccgtggaagaccaccac

SEQ ID NO: 53764 - DNA, 20 bp, Artificial Sequence
  MKO10053764_A_Thoc6
  gRNA
ctggcagctggcaacaatta

SEQ ID NO: 53765 - DNA, 20 bp, Artificial Sequence
  MKO10053765_A_Thoc7
  gRNA
cgaatacgaaaaaatcgaca

SEQ ID NO: 53766 - DNA, 20 bp, Artificial Sequence
  MKO10053766_A_Thoc7
  gRNA
ttcctccagacgaagttata

SEQ ID NO: 53767 - DNA, 20 bp, Artificial Sequence
  MKO10053767_A_Thoc7
  gRNA
acagagtgctcagcatgcgt

SEQ ID NO: 53768 - DNA, 20 bp, Artificial Sequence
  MKO10053768_A_Thop1
  gRNA
caagtgtgtgtacgaccgag

SEQ ID NO: 53769 - DNA, 20 bp, Artificial Sequence
  MKO10053769_A_Thop1
  gRNA
ggtctgctcgatgagctgcg

SEQ ID NO: 53770 - DNA, 20 bp, Artificial Sequence
  MKO10053770_A_Thop1
  gRNA
ccaacacgtgtccccgtgca

SEQ ID NO: 53771 - DNA, 20 bp, Artificial Sequence
  MKO10053771_A_Thpo
  gRNA
gatagacaaagggtcgacgt

SEQ ID NO: 53772 - DNA, 20 bp, Artificial Sequence
  MKO10053772_A_Thpo
  gRNA
tcgcccggagctttcaacaa

SEQ ID NO: 53773 - DNA, 20 bp, Artificial Sequence
  MKO10053773_A_Thpo
  gRNA
agtcacgcagcagtttattt

SEQ ID NO: 53774 - DNA, 20 bp, Artificial Sequence
  MKO10053774_A_Thrap3
  gRNA
caagcatacagccctcgtcg

SEQ ID NO: 53775 - DNA, 20 bp, Artificial Sequence
  MKO10053775_A_Thrap3
  gRNA
gatcgagaacggccccgacg

SEQ ID NO: 53776 - DNA, 20 bp, Artificial Sequence
  MKO10053776_A_Thrap3
  gRNA
ggaccccacctgtgtatctc

SEQ ID NO: 53777 - DNA, 20 bp, Artificial Sequence
  MKO10053777_A_Thra
  gRNA
cctgggcgttagtgctgcga

SEQ ID NO: 53778 - DNA, 20 bp, Artificial Sequence
  MKO10053778_A_Thra
  gRNA
ccatcgcagcactaacgccc

SEQ ID NO: 53779 - DNA, 20 bp, Artificial Sequence
  MKO10053779_A_Thra
  gRNA
ctaccgctgtatcacttgtg

SEQ ID NO: 53780 - DNA, 20 bp, Artificial Sequence
  MKO10053780_A_Thrb
  gRNA
cccatcgtgaatgccccaga

SEQ ID NO: 53781 - DNA, 20 bp, Artificial Sequence
  MKO10053781_A_Thrb
  gRNA
gcagcgatagtggtaccctg

SEQ ID NO: 53782 - DNA, 20 bp, Artificial Sequence
  MKO10053782_A_Thrb
  gRNA
aggtcaaccttgccaccttc

SEQ ID NO: 53783 - DNA, 20 bp, Artificial Sequence
  MKO10053783_A_Thrsp
  gRNA
ggctggcaacgaaaccagcg

SEQ ID NO: 53784 - DNA, 20 bp, Artificial Sequence
  MKO10053784_A_Thrsp
  gRNA
agcgtcgttctcagcctcgc

SEQ ID NO: 53785 - DNA, 20 bp, Artificial Sequence
  MKO10053785_A_Thrsp
  gRNA
atcggtactccgcggtggtg

SEQ ID NO: 53786 - DNA, 20 bp, Artificial Sequence
  MKO10053786_A_Thsd1
  gRNA
tcgttggagccgaagtatcc

SEQ ID NO: 53787 - DNA, 20 bp, Artificial Sequence
  MKO10053787_A_Thsd1
  gRNA
gcgaacgggcgtgctgcatt

SEQ ID NO: 53788 - DNA, 20 bp, Artificial Sequence
  MKO10053788_A_Thsd1
  gRNA
cttagtggtaagagtccgat

SEQ ID NO: 53789 - DNA, 20 bp, Artificial Sequence
  MKO10053789_A_Thsd4
  gRNA
cgatcgcccggggaagtacg

SEQ ID NO: 53790 - DNA, 20 bp, Artificial Sequence
  MKO10053790_A_Thsd4
  gRNA
cacctacaaacgaccgaacg

SEQ ID NO: 53791 - DNA, 20 bp, Artificial Sequence
  MKO10053791_A_Thsd4
  gRNA
tcatgatcacgtactcatag

SEQ ID NO: 53792 - DNA, 20 bp, Artificial Sequence
  MKO10053792_A_Thsd7a
  gRNA
tgtttaagcacgtcacgtcc

SEQ ID NO: 53793 - DNA, 20 bp, Artificial Sequence
  MKO10053793_A_Thsd7a
  gRNA
cgcattctcgcgatttctcg

SEQ ID NO: 53794 - DNA, 20 bp, Artificial Sequence
  MKO10053794_A_Thsd7a
  gRNA
ctttggtgatcacgcaggac

SEQ ID NO: 53795 - DNA, 20 bp, Artificial Sequence
  MKO10053795_A_Thsd7b
  gRNA
atcgcgccccctctgtatgg

SEQ ID NO: 53796 - DNA, 20 bp, Artificial Sequence
  MKO10053796_A_Thsd7b
  gRNA
gctgtttccgcgtgtgtgac

SEQ ID NO: 53797 - DNA, 20 bp, Artificial Sequence
  MKO10053797_A_Thsd7b
  gRNA
actatgcagtccatcgagca

SEQ ID NO: 53798 - DNA, 20 bp, Artificial Sequence
  MKO10053798_A_Thtpa
  gRNA
ttattactacgcgaagctcc

SEQ ID NO: 53799 - DNA, 20 bp, Artificial Sequence
  MKO10053799_A_Thtpa
  gRNA
ctgcgacaacgagaaggtag

SEQ ID NO: 53800 - DNA, 20 bp, Artificial Sequence
  MKO10053800_A_Thtpa
  gRNA
cctacagcgcttcaggcctc

SEQ ID NO: 53801 - DNA, 20 bp, Artificial Sequence
  MKO10053801_A_Thumpd1
  gRNA
cgtcgccgtactcgttgagc

SEQ ID NO: 53802 - DNA, 20 bp, Artificial Sequence
  MKO10053802_A_Thumpd1
  gRNA
catgaacgagcgcaagtgcg

SEQ ID NO: 53803 - DNA, 20 bp, Artificial Sequence
  MKO10053803_A_Thumpd1
  gRNA
agtcagagtgatcccccaga

SEQ ID NO: 53804 - DNA, 20 bp, Artificial Sequence
  MKO10053804_A_Thumpd2
  gRNA
cttgaggaatccaaatatag

SEQ ID NO: 53805 - DNA, 20 bp, Artificial Sequence
  MKO10053805_A_Thumpd2
  gRNA
agggtttcctgccgctgcac

SEQ ID NO: 53806 - DNA, 20 bp, Artificial Sequence
  MKO10053806_A_Thumpd2
  gRNA
cctgagtgatgcttactccg

SEQ ID NO: 53807 - DNA, 20 bp, Artificial Sequence
  MKO10053807_A_Thumpd3
  gRNA
ttaccagttcaaagatacga

SEQ ID NO: 53808 - DNA, 20 bp, Artificial Sequence
  MKO10053808_A_Thumpd3
  gRNA
tcaccttcgtatctttgaac

SEQ ID NO: 53809 - DNA, 20 bp, Artificial Sequence
  MKO10053809_A_Thumpd3
  gRNA
aatgtgtaatatttctgcga

SEQ ID NO: 53810 - DNA, 20 bp, Artificial Sequence
  MKO10053810_A_Thy1
  gRNA
gcgggagcggtacgtgtgct

SEQ ID NO: 53811 - DNA, 20 bp, Artificial Sequence
  MKO10053811_A_Thy1
  gRNA
aaagtagtcgccctcatcct

SEQ ID NO: 53812 - DNA, 20 bp, Artificial Sequence
  MKO10053812_A_Thy1
  gRNA
agcgtcgctctcctgctctc

SEQ ID NO: 53813 - DNA, 20 bp, Artificial Sequence
  MKO10053813_A_Thyn1
  gRNA
ctttgctggatggatcgtaa

SEQ ID NO: 53814 - DNA, 20 bp, Artificial Sequence
  MKO10053814_A_Thyn1
  gRNA
tgtctatacctttctctagc

SEQ ID NO: 53815 - DNA, 20 bp, Artificial Sequence
  MKO10053815_A_Thyn1
  gRNA
ttcataagtccaacaatgcc

SEQ ID NO: 53816 - DNA, 20 bp, Artificial Sequence
  MKO10053816_A_Th
  gRNA
acggcggcagagtctcatcg

SEQ ID NO: 53817 - DNA, 20 bp, Artificial Sequence
  MKO10053817_A_Th
  gRNA
tgccgccgtccaatgaacct

SEQ ID NO: 53818 - DNA, 20 bp, Artificial Sequence
  MKO10053818_A_Th
  gRNA
ggagtactttgtgcgcttcg

SEQ ID NO: 53819 - DNA, 20 bp, Artificial Sequence
  MKO10053819_A_Tia1
  gRNA
cattatcttccgcccattca

SEQ ID NO: 53820 - DNA, 20 bp, Artificial Sequence
  MKO10053820_A_Tia1
  gRNA
cttctgtcacatctcgagaa

SEQ ID NO: 53821 - DNA, 20 bp, Artificial Sequence
  MKO10053821_A_Tia1
  gRNA
caatctggctaaagagctgg

SEQ ID NO: 53822 - DNA, 20 bp, Artificial Sequence
  MKO10053822_A_Tial1
  gRNA
ctcagcaacccgatagcaga

SEQ ID NO: 53823 - DNA, 20 bp, Artificial Sequence
  MKO10053823_A_Tial1
  gRNA
aaatcagcatttgccccctt

SEQ ID NO: 53824 - DNA, 20 bp, Artificial Sequence
  MKO10053824_A_Tial1
  gRNA
gctgcattagctgctatgaa

SEQ ID NO: 53825 - DNA, 20 bp, Artificial Sequence
  MKO10053825_A_Tiam1
  gRNA
cgcatccgacagctgtcgtg

SEQ ID NO: 53826 - DNA, 20 bp, Artificial Sequence
  MKO10053826_A_Tiam1
  gRNA
tgaagcggtccgcgtagtac

SEQ ID NO: 53827 - DNA, 20 bp, Artificial Sequence
  MKO10053827_A_Tiam1
  gRNA
gggatccttcctgtactacg

SEQ ID NO: 53828 - DNA, 20 bp, Artificial Sequence
  MKO10053828_A_Tiam2
  gRNA
gaataggtagacgtccccac

SEQ ID NO: 53829 - DNA, 20 bp, Artificial Sequence
  MKO10053829_A_Tiam2
  gRNA
gttccgcatgcgctgctatt

SEQ ID NO: 53830 - DNA, 20 bp, Artificial Sequence
  MKO10053830_A_Tiam2
  gRNA
atcgacgctgatagcgtgag

SEQ ID NO: 53831 - DNA, 20 bp, Artificial Sequence
  MKO10053831_A_Ticam1
  gRNA
acacgaaattagcgttccag

SEQ ID NO: 53832 - DNA, 20 bp, Artificial Sequence
  MKO10053832_A_Ticam1
  gRNA
cctacgtattcgggagaagc

SEQ ID NO: 53833 - DNA, 20 bp, Artificial Sequence
  MKO10053833_A_Ticam1
  gRNA
ccagcttctcccgaatacgt

SEQ ID NO: 53834 - DNA, 20 bp, Artificial Sequence
  MKO10053834_A_Ticam2
  gRNA
gatctactgcaaaacgactt

SEQ ID NO: 53835 - DNA, 20 bp, Artificial Sequence
  MKO10053835_A_Ticam2
  gRNA
atctcggcgaaaacgatccc

SEQ ID NO: 53836 - DNA, 20 bp, Artificial Sequence
  MKO10053836_A_Ticam2
  gRNA
tgcagaagatgacaccgacg

SEQ ID NO: 53837 - DNA, 20 bp, Artificial Sequence
  MKO10053837_A_Ticrr
  gRNA
gtccagctcttgtcgaaaag

SEQ ID NO: 53838 - DNA, 20 bp, Artificial Sequence
  MKO10053838_A_Ticrr
  gRNA
tggggaaataattcccgtta

SEQ ID NO: 53839 - DNA, 20 bp, Artificial Sequence
  MKO10053839_A_Ticrr
  gRNA
tgtgacagctcgccaccaca

SEQ ID NO: 53840 - DNA, 20 bp, Artificial Sequence
  MKO10053840_A_Tie1
  gRNA
atcgtgcgcaccttcccgcc

SEQ ID NO: 53841 - DNA, 20 bp, Artificial Sequence
  MKO10053841_A_Tie1
  gRNA
tcgcacgatgagccgaaaga

SEQ ID NO: 53842 - DNA, 20 bp, Artificial Sequence
  MKO10053842_A_Tie1
  gRNA
cagttgaaaacgcccgtcat

SEQ ID NO: 53843 - DNA, 20 bp, Artificial Sequence
  MKO10053843_A_Tifab
  gRNA
ccagatgctagtccgcaaag

SEQ ID NO: 53844 - DNA, 20 bp, Artificial Sequence
  MKO10053844_A_Tifab
  gRNA
gtcctcgcccaaccaacagc

SEQ ID NO: 53845 - DNA, 20 bp, Artificial Sequence
  MKO10053845_A_Tifab
  gRNA
gtctcgctaccatttgtccc

SEQ ID NO: 53846 - DNA, 20 bp, Artificial Sequence
  MKO10053846_A_Tifa
  gRNA
gtttgtcctgaaacgtatac

SEQ ID NO: 53847 - DNA, 20 bp, Artificial Sequence
  MKO10053847_A_Tifa
  gRNA
tattgaggtagccgagctcc

SEQ ID NO: 53848 - DNA, 20 bp, Artificial Sequence
  MKO10053848_A_Tifa
  gRNA
gctcggctacctcaataaaa

SEQ ID NO: 53849 - DNA, 20 bp, Artificial Sequence
  MKO10053849_A_Tigd2
  gRNA
cgcttggacaccccactagt

SEQ ID NO: 53850 - DNA, 20 bp, Artificial Sequence
  MKO10053850_A_Tigd2
  gRNA
gtcaaaagatattaccgagc

SEQ ID NO: 53851 - DNA, 20 bp, Artificial Sequence
  MKO10053851_A_Tigd2
  gRNA
ctcatacgttgacgacttca

SEQ ID NO: 53852 - DNA, 20 bp, Artificial Sequence
  MKO10053852_A_Tigd3
  gRNA
catgggccccgttacatccc

SEQ ID NO: 53853 - DNA, 20 bp, Artificial Sequence
  MKO10053853_A_Tigd3
  gRNA
caaggaactggccgatatca

SEQ ID NO: 53854 - DNA, 20 bp, Artificial Sequence
  MKO10053854_A_Tigd3
  gRNA
cattgtttcgacgtttccag

SEQ ID NO: 53855 - DNA, 20 bp, Artificial Sequence
  MKO10053855_A_Tigd4
  gRNA
ctgcatccactgctcgaata

SEQ ID NO: 53856 - DNA, 20 bp, Artificial Sequence
  MKO10053856_A_Tigd4
  gRNA
ccgcagccatattcgagcag

SEQ ID NO: 53857 - DNA, 20 bp, Artificial Sequence
  MKO10053857_A_Tigd4
  gRNA
ccgagccccgcgttgtttca

SEQ ID NO: 53858 - DNA, 20 bp, Artificial Sequence
  MKO10053858_A_Tigd5
  gRNA
cgcaggtagcgcttgacgcc

SEQ ID NO: 53859 - DNA, 20 bp, Artificial Sequence
  MKO10053859_A_Tigd5
  gRNA
cggatagcggcacaccgtgc

SEQ ID NO: 53860 - DNA, 20 bp, Artificial Sequence
  MKO10053860_A_Tigd5
  gRNA
accgcccttgacgcgctcga

SEQ ID NO: 53861 - DNA, 20 bp, Artificial Sequence
  MKO10053861_A_Tigit
  gRNA
ttcattgctgtatcgaagac

SEQ ID NO: 53862 - DNA, 20 bp, Artificial Sequence
  MKO10053862_A_Tigit
  gRNA
ctgaagtgacccaagtcgac

SEQ ID NO: 53863 - DNA, 20 bp, Artificial Sequence
  MKO10053863_A_Tigit
  gRNA
tgtacctatcatacgtatcc

SEQ ID NO: 53864 - DNA, 20 bp, Artificial Sequence
  MKO10053864_A_Timd2
  gRNA
gtgaccgtatacaataagaa

SEQ ID NO: 53865 - DNA, 20 bp, Artificial Sequence
  MKO10053865_A_Timd2
  gRNA
aggtgtgtcgaataaataca

SEQ ID NO: 53866 - DNA, 20 bp, Artificial Sequence
  MKO10053866_A_Timd2
  gRNA
cttacagtgttatcatccca

SEQ ID NO: 53867 - DNA, 20 bp, Artificial Sequence
  MKO10053867_A_Timd4
  gRNA
ctacagacatagccgtactc

SEQ ID NO: 53868 - DNA, 20 bp, Artificial Sequence
  MKO10053868_A_Timd4
  gRNA
ggtgtactgctgccgtatag

SEQ ID NO: 53869 - DNA, 20 bp, Artificial Sequence
  MKO10053869_A_Timd4
  gRNA
caccccactgtcacctcgat

SEQ ID NO: 53870 - DNA, 20 bp, Artificial Sequence
  MKO10053870_A_Timeless
  gRNA
ctagccacgtgtagcgccct

SEQ ID NO: 53871 - DNA, 20 bp, Artificial Sequence
  MKO10053871_A_Timeless
  gRNA
gatccgatacctgaggcacg

SEQ ID NO: 53872 - DNA, 20 bp, Artificial Sequence
  MKO10053872_A_Timeless
  gRNA
ctctcttcgatgccgtgatc

SEQ ID NO: 53873 - DNA, 20 bp, Artificial Sequence
  MKO10053873_A_Timm10b
  gRNA
gcgccgcatcgcggactacg

SEQ ID NO: 53874 - DNA, 20 bp, Artificial Sequence
  MKO10053874_A_Timm10b
  gRNA
cagcctcgtagtccgcgatg

SEQ ID NO: 53875 - DNA, 20 bp, Artificial Sequence
  MKO10053875_A_Timm10b
  gRNA
cagcctgcaccaccgagctc

SEQ ID NO: 53876 - DNA, 20 bp, Artificial Sequence
  MKO10053876_A_Timm10
  gRNA
aggcacgcacttccggtggc

SEQ ID NO: 53877 - DNA, 20 bp, Artificial Sequence
  MKO10053877_A_Timm10
  gRNA
ccgatgtgtatccaagtact

SEQ ID NO: 53878 - DNA, 20 bp, Artificial Sequence
  MKO10053878_A_Timm10
  gRNA
ccagctccgcagccagctgc

SEQ ID NO: 53879 - DNA, 20 bp, Artificial Sequence
  MKO10053879_A_Timm13
  gRNA
cgagccgaagccgctgtcca

SEQ ID NO: 53880 - DNA, 20 bp, Artificial Sequence
  MKO10053880_A_Timm13
  gRNA
cgggcttcccgatgcacttc

SEQ ID NO: 53881 - DNA, 20 bp, Artificial Sequence
  MKO10053881_A_Timm13
  gRNA
cctacaactctcgactgcag

SEQ ID NO: 53882 - DNA, 20 bp, Artificial Sequence
  MKO10053882_A_Timm17a
  gRNA
gcgtttaccatgggcaccat

SEQ ID NO: 53883 - DNA, 20 bp, Artificial Sequence
  MKO10053883_A_Timm17a
  gRNA
ttcagatggaccggtagcca

SEQ ID NO: 53884 - DNA, 20 bp, Artificial Sequence
  MKO10053884_A_Timm17a
  gRNA
acagtcatctacaattcgcc

SEQ ID NO: 53885 - DNA, 20 bp, Artificial Sequence
  MKO10053885_A_Timm17b
  gRNA
ttgcagcccatggcgaattg

SEQ ID NO: 53886 - DNA, 20 bp, Artificial Sequence
  MKO10053886_A_Timm17b
  gRNA
actgcccagcagttccgaaa

SEQ ID NO: 53887 - DNA, 20 bp, Artificial Sequence
  MKO10053887_A_Timm17b
  gRNA
ccgcctcccaggtggtccgc

SEQ ID NO: 53888 - DNA, 20 bp, Artificial Sequence
  MKO10053888_A_Timm21
  gRNA
ctctttggagtcggccttac

SEQ ID NO: 53889 - DNA, 20 bp, Artificial Sequence
  MKO10053889_A_Timm21
  gRNA
gtgggcggagacagcatgtc

SEQ ID NO: 53890 - DNA, 20 bp, Artificial Sequence
  MKO10053890_A_Timm21
  gRNA
ctgcaggtgattggtgtatt

SEQ ID NO: 53891 - DNA, 20 bp, Artificial Sequence
  MKO10053891_A_Timm22
  gRNA
ttactaacctcggaagccga

SEQ ID NO: 53892 - DNA, 20 bp, Artificial Sequence
  MKO10053892_A_Timm22
  gRNA
ctgcaatcgattattaccta

SEQ ID NO: 53893 - DNA, 20 bp, Artificial Sequence
  MKO10053893_A_Timm22
  gRNA
catggcggctaccgccccca

SEQ ID NO: 53894 - DNA, 20 bp, Artificial Sequence
  MKO10053894_A_Timm23
  gRNA
ttgccaccaggggccgcatt

SEQ ID NO: 53895 - DNA, 20 bp, Artificial Sequence
  MKO10053895_A_Timm23
  gRNA
gctaatactctaggctccct

SEQ ID NO: 53896 - DNA, 20 bp, Artificial Sequence
  MKO10053896_A_Timm23
  gRNA
cttacctgaacgagatagcg

SEQ ID NO: 53897 - DNA, 20 bp, Artificial Sequence
  MKO10053897_A_Timm44
  gRNA
acgcacagtttctgattcga

SEQ ID NO: 53898 - DNA, 20 bp, Artificial Sequence
  MKO10053898_A_Timm44
  gRNA
agctaccagataagccggcc

SEQ ID NO: 53899 - DNA, 20 bp, Artificial Sequence
  MKO10053899_A_Timm44
  gRNA
tataaaaaagttccgagatg

SEQ ID NO: 53900 - DNA, 20 bp, Artificial Sequence
  MKO10053900_A_Timm50
  gRNA
atcgccggtttgctcggagc

SEQ ID NO: 53901 - DNA, 20 bp, Artificial Sequence
  MKO10053901_A_Timm50
  gRNA
atgccaaaaaaattgcgctc

SEQ ID NO: 53902 - DNA, 20 bp, Artificial Sequence
  MKO10053902_A_Timm50
  gRNA
tcaccgctgtcgaattcatc

SEQ ID NO: 53903 - DNA, 20 bp, Artificial Sequence
  MKO10053903_A_Timm8a1
  gRNA
ttctgaacaggagaagtgca

SEQ ID NO: 53904 - DNA, 20 bp, Artificial Sequence
  MKO10053904_A_Timm8a1
  gRNA
ggagtcctccacgtcctctt

SEQ ID NO: 53905 - DNA, 20 bp, Artificial Sequence
  MKO10053905_A_Timm8a1
  gRNA
cccagcaaagttccgtcatc

SEQ ID NO: 53906 - DNA, 20 bp, Artificial Sequence
  MKO10053906_A_Timm8a2
  gRNA
tcaccaagcagagctccgcc

SEQ ID NO: 53907 - DNA, 20 bp, Artificial Sequence
  MKO10053907_A_Timm8a2
  gRNA
tcgctgtcatggagtccgcc

SEQ ID NO: 53908 - DNA, 20 bp, Artificial Sequence
  MKO10053908_A_Timm8a2
  gRNA
tcttcccgggggaccagcct

SEQ ID NO: 53909 - DNA, 20 bp, Artificial Sequence
  MKO10053909_A_Timm8b
  gRNA
cgaagcggagttacaacgcc

SEQ ID NO: 53910 - DNA, 20 bp, Artificial Sequence
  MKO10053910_A_Timm8b
  gRNA
actccgacaatggccgagct

SEQ ID NO: 53911 - DNA, 20 bp, Artificial Sequence
  MKO10053911_A_Timm8b
  gRNA
gccctcctttctgtacgatc

SEQ ID NO: 53912 - DNA, 20 bp, Artificial Sequence
  MKO10053912_A_Timm9
  gRNA
caggacctctctaccgtggc

SEQ ID NO: 53913 - DNA, 20 bp, Artificial Sequence
  MKO10053913_A_Timm9
  gRNA
tttatagtttaaggagttcc

SEQ ID NO: 53914 - DNA, 20 bp, Artificial Sequence
  MKO10053914_A_Timm9
  gRNA
tttaacacagtccaaaaagc

SEQ ID NO: 53915 - DNA, 20 bp, Artificial Sequence
  MKO10053915_A_Timmdc1
  gRNA
tcatccggtatggctggcgc

SEQ ID NO: 53916 - DNA, 20 bp, Artificial Sequence
  MKO10053916_A_Timmdc1
  gRNA
ctggtggctggtagtataat

SEQ ID NO: 53917 - DNA, 20 bp, Artificial Sequence
  MKO10053917_A_Timmdc1
  gRNA
aactccagcgccagccatac

SEQ ID NO: 53918 - DNA, 20 bp, Artificial Sequence
  MKO10053918_A_Timp1
  gRNA
tgactggggtgtaggcgtac

SEQ ID NO: 53919 - DNA, 20 bp, Artificial Sequence
  MKO10053919_A_Timp1
  gRNA
tcatcttgatcttataacgc

SEQ ID NO: 53920 - DNA, 20 bp, Artificial Sequence
  MKO10053920_A_Timp1
  gRNA
aaggtggtctcgttgatttc

SEQ ID NO: 53921 - DNA, 20 bp, Artificial Sequence
  MKO10053921_A_Timp2
  gRNA
ttcttgcgcgtggtaccgcg

SEQ ID NO: 53922 - DNA, 20 bp, Artificial Sequence
  MKO10053922_A_Timp2
  gRNA
gattccgggaatgacatcta

SEQ ID NO: 53923 - DNA, 20 bp, Artificial Sequence
  MKO10053923_A_Timp2
  gRNA
gcaagagtttcttgacatcg

SEQ ID NO: 53924 - DNA, 20 bp, Artificial Sequence
  MKO10053924_A_Timp3
  gRNA
ggtaattgaggcccttgcgc

SEQ ID NO: 53925 - DNA, 20 bp, Artificial Sequence
  MKO10053925_A_Timp3
  gRNA
tacagtgatccgggccaaag

SEQ ID NO: 53926 - DNA, 20 bp, Artificial Sequence
  MKO10053926_A_Timp3
  gRNA
ccgtgtgaatgtactgcacg

SEQ ID NO: 53927 - DNA, 20 bp, Artificial Sequence
  MKO10053927_A_Timp4
  gRNA
tgatgtcaacgtactccttc

SEQ ID NO: 53928 - DNA, 20 bp, Artificial Sequence
  MKO10053928_A_Timp4
  gRNA
gtccgtccagagacactcat

SEQ ID NO: 53929 - DNA, 20 bp, Artificial Sequence
  MKO10053929_A_Timp4
  gRNA
aagatactgcttgtgactgt

SEQ ID NO: 53930 - DNA, 20 bp, Artificial Sequence
  MKO10053930_A_Tinagl1
  gRNA
tgagggcattcgctaccgcc

SEQ ID NO: 53931 - DNA, 20 bp, Artificial Sequence
  MKO10053931_A_Tinagl1
  gRNA
agggcattgggagtgcgacc

SEQ ID NO: 53932 - DNA, 20 bp, Artificial Sequence
  MKO10053932_A_Tinagl1
  gRNA
ggccggatctacccagtctt

SEQ ID NO: 53933 - DNA, 20 bp, Artificial Sequence
  MKO10053933_A_Tinag
  gRNA
gaaggattcaaattccgcct

SEQ ID NO: 53934 - DNA, 20 bp, Artificial Sequence
  MKO10053934_A_Tinag
  gRNA
acttgcggtggaaaaagccc

SEQ ID NO: 53935 - DNA, 20 bp, Artificial Sequence
  MKO10053935_A_Tinag
  gRNA
ctgatccttcttcataatgc

SEQ ID NO: 53936 - DNA, 20 bp, Artificial Sequence
  MKO10053936_A_Tinf2
  gRNA
attctcacctgcaggctcga

SEQ ID NO: 53937 - DNA, 20 bp, Artificial Sequence
  MKO10053937_A_Tinf2
  gRNA
gggctcgttcatcacttctt

SEQ ID NO: 53938 - DNA, 20 bp, Artificial Sequence
  MKO10053938_A_Tinf2
  gRNA
ggtcccagggtcgcgcctgc

SEQ ID NO: 53939 - DNA, 20 bp, Artificial Sequence
  MKO10053939_A_Tiparp
  gRNA
ctgaatttgaccaactacga

SEQ ID NO: 53940 - DNA, 20 bp, Artificial Sequence
  MKO10053940_A_Tiparp
  gRNA
aggccccctccggtcaaccc

SEQ ID NO: 53941 - DNA, 20 bp, Artificial Sequence
  MKO10053941_A_Tiparp
  gRNA
gtgtagacagccttcgtagt

SEQ ID NO: 53942 - DNA, 20 bp, Artificial Sequence
  MKO10053942_A_Tipin
  gRNA
tacctaagctagatgctacg

SEQ ID NO: 53943 - DNA, 20 bp, Artificial Sequence
  MKO10053943_A_Tipin
  gRNA
tacctcgtagcatctagctt

SEQ ID NO: 53944 - DNA, 20 bp, Artificial Sequence
  MKO10053944_A_Tipin
  gRNA
gtttgataagacgaaattca

SEQ ID NO: 53945 - DNA, 20 bp, Artificial Sequence
  MKO10053945_A_Tiprl
  gRNA
aacgttctaaggatccagca

SEQ ID NO: 53946 - DNA, 20 bp, Artificial Sequence
  MKO10053946_A_Tiprl
  gRNA
gtatctatatgatctgttgt

SEQ ID NO: 53947 - DNA, 20 bp, Artificial Sequence
  MKO10053947_A_Tiprl
  gRNA
tcatcagaatgaatgacacg

SEQ ID NO: 53948 - DNA, 20 bp, Artificial Sequence
  MKO10053948_A_Tirap
  gRNA
tccgaaacaatggcgccacc

SEQ ID NO: 53949 - DNA, 20 bp, Artificial Sequence
  MKO10053949_A_Tirap
  gRNA
actccgattcatgtactatg

SEQ ID NO: 53950 - DNA, 20 bp, Artificial Sequence
  MKO10053950_A_Tirap
  gRNA
ttaccagctatcttgtctcg

SEQ ID NO: 53951 - DNA, 20 bp, Artificial Sequence
  MKO10053951_A_Tjap1
  gRNA
ctcagctaccagacgcactg

SEQ ID NO: 53952 - DNA, 20 bp, Artificial Sequence
  MKO10053952_A_Tjap1
  gRNA
ctcagtgcgtctggtagctg

SEQ ID NO: 53953 - DNA, 20 bp, Artificial Sequence
  MKO10053953_A_Tjap1
  gRNA
tcatccgctctgcgtcagtc

SEQ ID NO: 53954 - DNA, 20 bp, Artificial Sequence
  MKO10053954_A_Tjp1
  gRNA
ggttctcaccttagcggccg

SEQ ID NO: 53955 - DNA, 20 bp, Artificial Sequence
  MKO10053955_A_Tjp1
  gRNA
agagagacaagatgtccgcc

SEQ ID NO: 53956 - DNA, 20 bp, Artificial Sequence
  MKO10053956_A_Tjp1
  gRNA
ggaaaatgaccgagttgcaa

SEQ ID NO: 53957 - DNA, 20 bp, Artificial Sequence
  MKO10053957_A_Tjp2
  gRNA
gaagcttatgaacccgacta

SEQ ID NO: 53958 - DNA, 20 bp, Artificial Sequence
  MKO10053958_A_Tjp2
  gRNA
cgcagccgtgagcgcagccg

SEQ ID NO: 53959 - DNA, 20 bp, Artificial Sequence
  MKO10053959_A_Tjp2
  gRNA
tttggaattgccgtgtcggg

SEQ ID NO: 53960 - DNA, 20 bp, Artificial Sequence
  MKO10053960_A_Tjp3
  gRNA
gtcccttaggacccccgccg

SEQ ID NO: 53961 - DNA, 20 bp, Artificial Sequence
  MKO10053961_A_Tjp3
  gRNA
tgaccgagctagtggatccg

SEQ ID NO: 53962 - DNA, 20 bp, Artificial Sequence
  MKO10053962_A_Tjp3
  gRNA
gaggccactaaagtccgtgc

SEQ ID NO: 53963 - DNA, 20 bp, Artificial Sequence
  MKO10053963_A_Tk1
  gRNA
taggactgaccgatcatgtg

SEQ ID NO: 53964 - DNA, 20 bp, Artificial Sequence
  MKO10053964_A_Tk1
  gRNA
gcaggctggcaatgcgtcca

SEQ ID NO: 53965 - DNA, 20 bp, Artificial Sequence
  MKO10053965_A_Tk1
  gRNA
ttcccagtttcctgacattg

SEQ ID NO: 53966 - DNA, 20 bp, Artificial Sequence
  MKO10053966_A_Tk2
  gRNA
gcacgtacgtctgcagtgtg

SEQ ID NO: 53967 - DNA, 20 bp, Artificial Sequence
  MKO10053967_A_Tk2
  gRNA
ctccaatacaacagacgtcg

SEQ ID NO: 53968 - DNA, 20 bp, Artificial Sequence
  MKO10053968_A_Tk2
  gRNA
atacctgagggcgcgtgtgc

SEQ ID NO: 53969 - DNA, 20 bp, Artificial Sequence
  MKO10053969_A_Tktl1
  gRNA
tgacaggtggaatacttacg

SEQ ID NO: 53970 - DNA, 20 bp, Artificial Sequence
  MKO10053970_A_Tktl1
  gRNA
caaaggcttcacaacgcttc

SEQ ID NO: 53971 - DNA, 20 bp, Artificial Sequence
  MKO10053971_A_Tktl1
  gRNA
gggactaccatttgttaatg

SEQ ID NO: 53972 - DNA, 20 bp, Artificial Sequence
  MKO10053972_A_Tktl2
  gRNA
gcgaaaaattcactgcgacc

SEQ ID NO: 53973 - DNA, 20 bp, Artificial Sequence
  MKO10053973_A_Tktl2
  gRNA
aatctttgacgtgaaccgct

SEQ ID NO: 53974 - DNA, 20 bp, Artificial Sequence
  MKO10053974_A_Tktl2
  gRNA
cgccgcgcccatcctctatg

SEQ ID NO: 53975 - DNA, 20 bp, Artificial Sequence
  MKO10053975_A_Tkt
  gRNA
gcttgcgggatggcatacac

SEQ ID NO: 53976 - DNA, 20 bp, Artificial Sequence
  MKO10053976_A_Tkt
  gRNA
ctaccgagtctattgcatgc

SEQ ID NO: 53977 - DNA, 20 bp, Artificial Sequence
  MKO10053977_A_Tkt
  gRNA
atccagggccttgtaacgca

SEQ ID NO: 53978 - DNA, 20 bp, Artificial Sequence
  MKO10053978_A_Tlcd1
  gRNA
aaaccgaccccctgcgcacc

SEQ ID NO: 53979 - DNA, 20 bp, Artificial Sequence
  MKO10053979_A_Tlcd1
  gRNA
ccctactgttccaccccgcc

SEQ ID NO: 53980 - DNA, 20 bp, Artificial Sequence
  MKO10053980_A_Tlcd1
  gRNA
tggtggcgtcttaacactac

SEQ ID NO: 53981 - DNA, 20 bp, Artificial Sequence
  MKO10053981_A_Tlcd2
  gRNA
caattaatgatcacccaccg

SEQ ID NO: 53982 - DNA, 20 bp, Artificial Sequence
  MKO10053982_A_Tlcd2
  gRNA
cacggtgggtgatcattaat

SEQ ID NO: 53983 - DNA, 20 bp, Artificial Sequence
  MKO10053983_A_Tlcd2
  gRNA
tcaggttatttcgctgcaga

SEQ ID NO: 53984 - DNA, 20 bp, Artificial Sequence
  MKO10053984_A_Tldc1
  gRNA
ctgcatgccgttatacagtc

SEQ ID NO: 53985 - DNA, 20 bp, Artificial Sequence
  MKO10053985_A_Tldc1
  gRNA
tggcgcacgtgctgacccac

SEQ ID NO: 53986 - DNA, 20 bp, Artificial Sequence
  MKO10053986_A_Tldc1
  gRNA
cgccagcgttgccgatgctc

SEQ ID NO: 53987 - DNA, 20 bp, Artificial Sequence
  MKO10053987_A_Tldc2
  gRNA
gcggagactataccgacaga

SEQ ID NO: 53988 - DNA, 20 bp, Artificial Sequence
  MKO10053988_A_Tldc2
  gRNA
ccaaacctgcttaatctccg

SEQ ID NO: 53989 - DNA, 20 bp, Artificial Sequence
  MKO10053989_A_Tldc2
  gRNA
tcagctatccgactcagcaa

SEQ ID NO: 53990 - DNA, 20 bp, Artificial Sequence
  MKO10053990_A_Tle1
  gRNA
acctgtgatactgcgcctgc

SEQ ID NO: 53991 - DNA, 20 bp, Artificial Sequence
  MKO10053991_A_Tle1
  gRNA
gtctctggaccggattaaag

SEQ ID NO: 53992 - DNA, 20 bp, Artificial Sequence
  MKO10053992_A_Tle1
  gRNA
taaattggagtgtgagaaac

SEQ ID NO: 53993 - DNA, 20 bp, Artificial Sequence
  MKO10053993_A_Tle2
  gRNA
catcagcaggatgtaccctc

SEQ ID NO: 53994 - DNA, 20 bp, Artificial Sequence
  MKO10053994_A_Tle2
  gRNA
catctcaatgttgagtccgt

SEQ ID NO: 53995 - DNA, 20 bp, Artificial Sequence
  MKO10053995_A_Tle2
  gRNA
gcctttcaagttctcagtac

SEQ ID NO: 53996 - DNA, 20 bp, Artificial Sequence
  MKO10053996_A_Tle3
  gRNA
ctccctgccatgtatccgca

SEQ ID NO: 53997 - DNA, 20 bp, Artificial Sequence
  MKO10053997_A_Tle3
  gRNA
ctcaccggatgtctgccttg

SEQ ID NO: 53998 - DNA, 20 bp, Artificial Sequence
  MKO10053998_A_Tle3
  gRNA
gcttgtcatactccactttg

SEQ ID NO: 53999 - DNA, 20 bp, Artificial Sequence
  MKO10053999_A_Tle4
  gRNA
catttctatgttcaacccat

SEQ ID NO: 54000 - DNA, 20 bp, Artificial Sequence
  MKO10054000_A_Tle4
  gRNA
acaatcttacctcttgggac

SEQ ID NO: 54001 - DNA, 20 bp, Artificial Sequence
  MKO10054001_A_Tle4
  gRNA
ctcttccttaatccgatcac

SEQ ID NO: 54002 - DNA, 20 bp, Artificial Sequence
  MKO10054002_A_Tle6
  gRNA
tactgaagcgctctatcgcc

SEQ ID NO: 54003 - DNA, 20 bp, Artificial Sequence
  MKO10054003_A_Tle6
  gRNA
cacgatggacaaataccgac

SEQ ID NO: 54004 - DNA, 20 bp, Artificial Sequence
  MKO10054004_A_Tle6
  gRNA
tccgcgtcccagaccggctg

SEQ ID NO: 54005 - DNA, 20 bp, Artificial Sequence
  MKO10054005_A_Tlk1
  gRNA
caaaatagtcgctgatctta

SEQ ID NO: 54006 - DNA, 20 bp, Artificial Sequence
  MKO10054006_A_Tlk1
  gRNA
agatttactggagttgctac

SEQ ID NO: 54007 - DNA, 20 bp, Artificial Sequence
  MKO10054007_A_Tlk1
  gRNA
aagtcagaatgaaagtagtc

SEQ ID NO: 54008 - DNA, 20 bp, Artificial Sequence
  MKO10054008_A_Tlk2
  gRNA
gttgagtgataaagaagtag

SEQ ID NO: 54009 - DNA, 20 bp, Artificial Sequence
  MKO10054009_A_Tlk2
  gRNA
ctaccttggctagtgtcata

SEQ ID NO: 54010 - DNA, 20 bp, Artificial Sequence
  MKO10054010_A_Tlk2
  gRNA
tttcagggaaaggcactcct

SEQ ID NO: 54011 - DNA, 20 bp, Artificial Sequence
  MKO10054011_A_Tll1
  gRNA
gttatattgtgttcacctac

SEQ ID NO: 54012 - DNA, 20 bp, Artificial Sequence
  MKO10054012_A_Tll1
  gRNA
cactctaccaacttatagag

SEQ ID NO: 54013 - DNA, 20 bp, Artificial Sequence
  MKO10054013_A_Tll1
  gRNA
ggagcaaaataacacgatga

SEQ ID NO: 54014 - DNA, 20 bp, Artificial Sequence
  MKO10054014_A_Tll2
  gRNA
gcgttagaggctgtatcgtt

SEQ ID NO: 54015 - DNA, 20 bp, Artificial Sequence
  MKO10054015_A_Tll2
  gRNA
caagttatttcacatcgaca

SEQ ID NO: 54016 - DNA, 20 bp, Artificial Sequence
  MKO10054016_A_Tll2
  gRNA
cctgtgtgaccttcgtagag

SEQ ID NO: 54017 - DNA, 20 bp, Artificial Sequence
  MKO10054017_A_Tln1
  gRNA
actactacatgctccgaaat

SEQ ID NO: 54018 - DNA, 20 bp, Artificial Sequence
  MKO10054018_A_Tln1
  gRNA
tcaccgttccgtctaacatc

SEQ ID NO: 54019 - DNA, 20 bp, Artificial Sequence
  MKO10054019_A_Tln1
  gRNA
atgaccatttgtgcccgaat

SEQ ID NO: 54020 - DNA, 20 bp, Artificial Sequence
  MKO10054020_A_Tln2
  gRNA
atgaaacattgttgctccga

SEQ ID NO: 54021 - DNA, 20 bp, Artificial Sequence
  MKO10054021_A_Tln2
  gRNA
tcctgctgcagatcgtgacc

SEQ ID NO: 54022 - DNA, 20 bp, Artificial Sequence
  MKO10054022_A_Tln2
  gRNA
taaattggctagatcacagc

SEQ ID NO: 54023 - DNA, 20 bp, Artificial Sequence
  MKO10054023_A_Tlr11
  gRNA
gtgcaatctagagttacgac

SEQ ID NO: 54024 - DNA, 20 bp, Artificial Sequence
  MKO10054024_A_Tlr11
  gRNA
gagtagccagtcaaacttgc

SEQ ID NO: 54025 - DNA, 20 bp, Artificial Sequence
  MKO10054025_A_Tlr11
  gRNA
acatttcttacctttgagca

SEQ ID NO: 54026 - DNA, 20 bp, Artificial Sequence
  MKO10054026_A_Tlr12
  gRNA
gtgtaacccccgatgccgcc

SEQ ID NO: 54027 - DNA, 20 bp, Artificial Sequence
  MKO10054027_A_Tlr12
  gRNA
tcccccgccgcttatagtca

SEQ ID NO: 54028 - DNA, 20 bp, Artificial Sequence
  MKO10054028_A_Tlr12
  gRNA
ccagtgctccgtcgtgcctg

SEQ ID NO: 54029 - DNA, 20 bp, Artificial Sequence
  MKO10054029_A_Tlr13
  gRNA
tgtccagctaccaccgactc

SEQ ID NO: 54030 - DNA, 20 bp, Artificial Sequence
  MKO10054030_A_Tlr13
  gRNA
agatcgacgaaggtgccttt

SEQ ID NO: 54031 - DNA, 20 bp, Artificial Sequence
  MKO10054031_A_Tlr13
  gRNA
tcagaatgagtgggctctac

SEQ ID NO: 54032 - DNA, 20 bp, Artificial Sequence
  MKO10054032_A_Tlr1
  gRNA
gtgtccgtcagcactacgat

SEQ ID NO: 54033 - DNA, 20 bp, Artificial Sequence
  MKO10054033_A_Tlr1
  gRNA
caaaccgatcgtagtgctga

SEQ ID NO: 54034 - DNA, 20 bp, Artificial Sequence
  MKO10054034_A_Tlr1
  gRNA
gctaacgtgccgaagagatt

SEQ ID NO: 54035 - DNA, 20 bp, Artificial Sequence
  MKO10054035_A_Tlr2
  gRNA
cgcggatcgactttagactt

SEQ ID NO: 54036 - DNA, 20 bp, Artificial Sequence
  MKO10054036_A_Tlr2
  gRNA
ccgagcgtgtgcgaacctcc

SEQ ID NO: 54037 - DNA, 20 bp, Artificial Sequence
  MKO10054037_A_Tlr2
  gRNA
ttcgacgactgtaccctcaa

SEQ ID NO: 54038 - DNA, 20 bp, Artificial Sequence
  MKO10054038_A_Tlr3
  gRNA
tcagttgggcgttgttcaag

SEQ ID NO: 54039 - DNA, 20 bp, Artificial Sequence
  MKO10054039_A_Tlr3
  gRNA
gttcttcacttcgcaacgca

SEQ ID NO: 54040 - DNA, 20 bp, Artificial Sequence
  MKO10054040_A_Tlr3
  gRNA
aagttcttgaaaaccccgac

SEQ ID NO: 54041 - DNA, 20 bp, Artificial Sequence
  MKO10054041_A_Tlr4
  gRNA
acacgtccatcggttgatct

SEQ ID NO: 54042 - DNA, 20 bp, Artificial Sequence
  MKO10054042_A_Tlr4
  gRNA
gatctactcgagtcagaatg

SEQ ID NO: 54043 - DNA, 20 bp, Artificial Sequence
  MKO10054043_A_Tlr4
  gRNA
taatattacctaccaatgca

SEQ ID NO: 54044 - DNA, 20 bp, Artificial Sequence
  MKO10054044_A_Tlr5
  gRNA
ttagctcgcttagacctatc

SEQ ID NO: 54045 - DNA, 20 bp, Artificial Sequence
  MKO10054045_A_Tlr5
  gRNA
ggaaaactttagggaccgca

SEQ ID NO: 54046 - DNA, 20 bp, Artificial Sequence
  MKO10054046_A_Tlr5
  gRNA
tacacccacctgctgaagtg

SEQ ID NO: 54047 - DNA, 20 bp, Artificial Sequence
  MKO10054047_A_Tlr6
  gRNA
ccggtcggggccaaaagaat

SEQ ID NO: 54048 - DNA, 20 bp, Artificial Sequence
  MKO10054048_A_Tlr6
  gRNA
ggtcatgcttccgactatta

SEQ ID NO: 54049 - DNA, 20 bp, Artificial Sequence
  MKO10054049_A_Tlr6
  gRNA
agatgcctcaggctcgccat

SEQ ID NO: 54050 - DNA, 20 bp, Artificial Sequence
  MKO10054050_A_Tlr7
  gRNA
tatgggacattataacatcg

SEQ ID NO: 54051 - DNA, 20 bp, Artificial Sequence
  MKO10054051_A_Tlr7
  gRNA
tccgtgcatattcatcgtat

SEQ ID NO: 54052 - DNA, 20 bp, Artificial Sequence
  MKO10054052_A_Tlr7
  gRNA
tgttagattctccttcgtga

SEQ ID NO: 54053 - DNA, 20 bp, Artificial Sequence
  MKO10054053_A_Tlr8
  gRNA
gaaatcgtcttgaccgtttg

SEQ ID NO: 54054 - DNA, 20 bp, Artificial Sequence
  MKO10054054_A_Tlr8
  gRNA
gctatccttgtgacgagata

SEQ ID NO: 54055 - DNA, 20 bp, Artificial Sequence
  MKO10054055_A_Tlr8
  gRNA
ttgtgccttatctcgtcaca

SEQ ID NO: 54056 - DNA, 20 bp, Artificial Sequence
  MKO10054056_A_Tlr9
  gRNA
gggccgtagcatcttcgcgc

SEQ ID NO: 54057 - DNA, 20 bp, Artificial Sequence
  MKO10054057_A_Tlr9
  gRNA
ctcgaccgccagagcgaaga

SEQ ID NO: 54058 - DNA, 20 bp, Artificial Sequence
  MKO10054058_A_Tlr9
  gRNA
cgtccatgaagagaacgcgc

SEQ ID NO: 54059 - DNA, 20 bp, Artificial Sequence
  MKO10054059_A_Tlx1
  gRNA
ttcggcggagcgcgctgctc

SEQ ID NO: 54060 - DNA, 20 bp, Artificial Sequence
  MKO10054060_A_Tlx1
  gRNA
ccgatgcgcaagtaaaaacc

SEQ ID NO: 54061 - DNA, 20 bp, Artificial Sequence
  MKO10054061_A_Tlx1
  gRNA
aatcaccagcgtcacgtccg

SEQ ID NO: 54062 - DNA, 20 bp, Artificial Sequence
  MKO10054062_A_Tlx2
  gRNA
cctgcgcgtccgtcatgcgc

SEQ ID NO: 54063 - DNA, 20 bp, Artificial Sequence
  MKO10054063_A_Tlx2
  gRNA
cgaagagcgacgagttgtgc

SEQ ID NO: 54064 - DNA, 20 bp, Artificial Sequence
  MKO10054064_A_Tlx2
  gRNA
cctgcgcatgacggacgcgc

SEQ ID NO: 54065 - DNA, 20 bp, Artificial Sequence
  MKO10054065_A_Tlx3
  gRNA
cgtgcgcggcttcttacgct

SEQ ID NO: 54066 - DNA, 20 bp, Artificial Sequence
  MKO10054066_A_Tlx3
  gRNA
agagacgggtacgcggcgcc

SEQ ID NO: 54067 - DNA, 20 bp, Artificial Sequence
  MKO10054067_A_Tlx3
  gRNA
cgcgctgcccgctatgccct

SEQ ID NO: 54068 - DNA, 20 bp, Artificial Sequence
  MKO10054068_A_Tm2d1
  gRNA
ttacacatttcggcaagata

SEQ ID NO: 54069 - DNA, 20 bp, Artificial Sequence
  MKO10054069_A_Tm2d1
  gRNA
tgtacaaactacacagctca

SEQ ID NO: 54070 - DNA, 20 bp, Artificial Sequence
  MKO10054070_A_Tm2d1
  gRNA
cacctaaggcaggatatccg

SEQ ID NO: 54071 - DNA, 20 bp, Artificial Sequence
  MKO10054071_A_Tm2d2
  gRNA
gtttaatgctacggccgaac

SEQ ID NO: 54072 - DNA, 20 bp, Artificial Sequence
  MKO10054072_A_Tm2d2
  gRNA
atcacagtctacgaactcgt

SEQ ID NO: 54073 - DNA, 20 bp, Artificial Sequence
  MKO10054073_A_Tm2d2
  gRNA
cgcgggaccctcgaggtgag

SEQ ID NO: 54074 - DNA, 20 bp, Artificial Sequence
  MKO10054074_A_Tm2d3
  gRNA
gaacactcgtagtctgtttc

SEQ ID NO: 54075 - DNA, 20 bp, Artificial Sequence
  MKO10054075_A_Tm2d3
  gRNA
ttggcgaaatagcgctgccg

SEQ ID NO: 54076 - DNA, 20 bp, Artificial Sequence
  MKO10054076_A_Tm2d3
  gRNA
actgtgcagtcgaacgtgac

SEQ ID NO: 54077 - DNA, 20 bp, Artificial Sequence
  MKO10054077_A_Tm4sf19
  gRNA
cgaggatgctattgacaaga

SEQ ID NO: 54078 - DNA, 20 bp, Artificial Sequence
  MKO10054078_A_Tm4sf19
  gRNA
tccgtgagcagttcaccaca

SEQ ID NO: 54079 - DNA, 20 bp, Artificial Sequence
  MKO10054079_A_Tm4sf19
  gRNA
atctgtatgaccgttcactt

SEQ ID NO: 54080 - DNA, 20 bp, Artificial Sequence
  MKO10054080_A_Tm4sf1
  gRNA
ctattgctgctctcgccaac

SEQ ID NO: 54081 - DNA, 20 bp, Artificial Sequence
  MKO10054081_A_Tm4sf1
  gRNA
tgctgcggctacgaaaacta

SEQ ID NO: 54082 - DNA, 20 bp, Artificial Sequence
  MKO10054082_A_Tm4sf1
  gRNA
atagcacttggaccacatag

SEQ ID NO: 54083 - DNA, 20 bp, Artificial Sequence
  MKO10054083_A_Tm4sf20
  gRNA
gcgtgctgcaacaataagac

SEQ ID NO: 54084 - DNA, 20 bp, Artificial Sequence
  MKO10054084_A_Tm4sf20
  gRNA
ccacccttcacagcacgtca

SEQ ID NO: 54085 - DNA, 20 bp, Artificial Sequence
  MKO10054085_A_Tm4sf20
  gRNA
ggttatcaattgtatacccc

SEQ ID NO: 54086 - DNA, 20 bp, Artificial Sequence
  MKO10054086_A_Tm4sf4
  gRNA
ccctccgatgaccagcagaa

SEQ ID NO: 54087 - DNA, 20 bp, Artificial Sequence
  MKO10054087_A_Tm4sf4
  gRNA
ggagccttacccatcgtgga

SEQ ID NO: 54088 - DNA, 20 bp, Artificial Sequence
  MKO10054088_A_Tm4sf4
  gRNA
tggggataccccttccacga

SEQ ID NO: 54089 - DNA, 20 bp, Artificial Sequence
  MKO10054089_A_Tm4sf5
  gRNA
gtgtgaggcgccacctcacg

SEQ ID NO: 54090 - DNA, 20 bp, Artificial Sequence
  MKO10054090_A_Tm4sf5
  gRNA
aattgcagcggtccgggcag

SEQ ID NO: 54091 - DNA, 20 bp, Artificial Sequence
  MKO10054091_A_Tm4sf5
  gRNA
cagctggtgaatgcgacctt

SEQ ID NO: 54092 - DNA, 20 bp, Artificial Sequence
  MKO10054092_A_Tm6sf1
  gRNA
tccgacccagtataggccaa

SEQ ID NO: 54093 - DNA, 20 bp, Artificial Sequence
  MKO10054093_A_Tm6sf1
  gRNA
gcctacctaccgtagaacag

SEQ ID NO: 54094 - DNA, 20 bp, Artificial Sequence
  MKO10054094_A_Tm6sf1
  gRNA
aaccacgatgctcattataa

SEQ ID NO: 54095 - DNA, 20 bp, Artificial Sequence
  MKO10054095_A_Tm6sf2
  gRNA
aatgacaaggtccaccaccg

SEQ ID NO: 54096 - DNA, 20 bp, Artificial Sequence
  MKO10054096_A_Tm6sf2
  gRNA
gctgacgagtgctctgatac

SEQ ID NO: 54097 - DNA, 20 bp, Artificial Sequence
  MKO10054097_A_Tm6sf2
  gRNA
agatgccatgtgctgtgcgt

SEQ ID NO: 54098 - DNA, 20 bp, Artificial Sequence
  MKO10054098_A_Tm7sf2
  gRNA
caccattaatagggtagcgc

SEQ ID NO: 54099 - DNA, 20 bp, Artificial Sequence
  MKO10054099_A_Tm7sf2
  gRNA
cgcctgcgctaccctattaa

SEQ ID NO: 54100 - DNA, 20 bp, Artificial Sequence
  MKO10054100_A_Tm7sf2
  gRNA
cgggagctgaaccctcgcct

SEQ ID NO: 54101 - DNA, 20 bp, Artificial Sequence
  MKO10054101_A_Tm7sf3
  gRNA
ggcctcggtgaggtcgccct

SEQ ID NO: 54102 - DNA, 20 bp, Artificial Sequence
  MKO10054102_A_Tm7sf3
  gRNA
gtaccagtacttcctgcccg

SEQ ID NO: 54103 - DNA, 20 bp, Artificial Sequence
  MKO10054103_A_Tm7sf3
  gRNA
aagttcgcaccagcaaacat

SEQ ID NO: 54104 - DNA, 20 bp, Artificial Sequence
  MKO10054104_A_Tm9sf1
  gRNA
gacgtcccgcaccgaaacat

SEQ ID NO: 54105 - DNA, 20 bp, Artificial Sequence
  MKO10054105_A_Tm9sf1
  gRNA
gtcgcacaaagaatatcgcc

SEQ ID NO: 54106 - DNA, 20 bp, Artificial Sequence
  MKO10054106_A_Tm9sf1
  gRNA
cagcgcctgtgttgaaccgt

SEQ ID NO: 54107 - DNA, 20 bp, Artificial Sequence
  MKO10054107_A_Tm9sf2
  gRNA
aatacaaaccttatacggtg

SEQ ID NO: 54108 - DNA, 20 bp, Artificial Sequence
  MKO10054108_A_Tm9sf2
  gRNA
acctcatagcaccacgtgac

SEQ ID NO: 54109 - DNA, 20 bp, Artificial Sequence
  MKO10054109_A_Tm9sf2
  gRNA
aattgaaccctcaccgtata

SEQ ID NO: 54110 - DNA, 20 bp, Artificial Sequence
  MKO10054110_A_Tm9sf3
  gRNA
acatagatgacttaccaata

SEQ ID NO: 54111 - DNA, 20 bp, Artificial Sequence
  MKO10054111_A_Tm9sf3
  gRNA
gatgttaatctaactagtga

SEQ ID NO: 54112 - DNA, 20 bp, Artificial Sequence
  MKO10054112_A_Tm9sf3
  gRNA
atgctatcaagaatcactat

SEQ ID NO: 54113 - DNA, 20 bp, Artificial Sequence
  MKO10054113_A_Tm9sf4
  gRNA
gtattcttctgtgattcgct

SEQ ID NO: 54114 - DNA, 20 bp, Artificial Sequence
  MKO10054114_A_Tm9sf4
  gRNA
agtagtactcgtaaggaagc

SEQ ID NO: 54115 - DNA, 20 bp, Artificial Sequence
  MKO10054115_A_Tm9sf4
  gRNA
tggcttcacggatgtcaaca

SEQ ID NO: 54116 - DNA, 20 bp, Artificial Sequence
  MKO10054116_A_Tma16
  gRNA
cgggagcggcagcagtacga

SEQ ID NO: 54117 - DNA, 20 bp, Artificial Sequence
  MKO10054117_A_Tma16
  gRNA
ccacaggtgacaaacttcaa

SEQ ID NO: 54118 - DNA, 20 bp, Artificial Sequence
  MKO10054118_A_Tma16
  gRNA
actgctgccgctcccgctcc

SEQ ID NO: 54119 - DNA, 20 bp, Artificial Sequence
  MKO10054119_A_Tma7
  gRNA
cttaccttcccggcccgaca

SEQ ID NO: 54120 - DNA, 20 bp, Artificial Sequence
  MKO10054120_A_Tma7
  gRNA
cttacccagggggcccttcc

SEQ ID NO: 54121 - DNA, 20 bp, Artificial Sequence
  MKO10054121_A_Tma7
  gRNA
cctcacctcgtccatctcct

SEQ ID NO: 54122 - DNA, 20 bp, Artificial Sequence
  MKO10054122_A_Tmbim1
  gRNA
ggaagtgacagctttcgtcc

SEQ ID NO: 54123 - DNA, 20 bp, Artificial Sequence
  MKO10054123_A_Tmbim1
  gRNA
ttcctcacgtatttgccgac

SEQ ID NO: 54124 - DNA, 20 bp, Artificial Sequence
  MKO10054124_A_Tmbim1
  gRNA
ttccggtcatcccattctcc

SEQ ID NO: 54125 - DNA, 20 bp, Artificial Sequence
  MKO10054125_A_Tmbim4
  gRNA
ttcttaccctgctccgaatt

SEQ ID NO: 54126 - DNA, 20 bp, Artificial Sequence
  MKO10054126_A_Tmbim4
  gRNA
ggacaaatgtccgcagagct

SEQ ID NO: 54127 - DNA, 20 bp, Artificial Sequence
  MKO10054127_A_Tmbim4
  gRNA
taccttctatgatgtatatc

SEQ ID NO: 54128 - DNA, 20 bp, Artificial Sequence
  MKO10054128_A_Tmbim6
  gRNA
tttgcttctaggagtcggcc

SEQ ID NO: 54129 - DNA, 20 bp, Artificial Sequence
  MKO10054129_A_Tmbim6
  gRNA
tgtgcatcgctgtcaacccc

SEQ ID NO: 54130 - DNA, 20 bp, Artificial Sequence
  MKO10054130_A_Tmbim6
  gRNA
ggctggcctactctccgccc

SEQ ID NO: 54131 - DNA, 20 bp, Artificial Sequence
  MKO10054131_A_Tmbim7
  gRNA
gcgatgacccactttcttac

SEQ ID NO: 54132 - DNA, 20 bp, Artificial Sequence
  MKO10054132_A_Tmbim7
  gRNA
gaaaacacgtctattcgtaa

SEQ ID NO: 54133 - DNA, 20 bp, Artificial Sequence
  MKO10054133_A_Tmbim7
  gRNA
agttacttacaaagaacgcc

SEQ ID NO: 54134 - DNA, 20 bp, Artificial Sequence
  MKO10054134_A_Tmc1
  gRNA
atcctcattgatgacatctc

SEQ ID NO: 54135 - DNA, 20 bp, Artificial Sequence
  MKO10054135_A_Tmc1
  gRNA
tgacccagaaccggagccgg

SEQ ID NO: 54136 - DNA, 20 bp, Artificial Sequence
  MKO10054136_A_Tmc1
  gRNA
ttcaacagtgcaaatccaag

SEQ ID NO: 54137 - DNA, 20 bp, Artificial Sequence
  MKO10054137_A_Tmc2
  gRNA
gcaaacacctctacgcctac

SEQ ID NO: 54138 - DNA, 20 bp, Artificial Sequence
  MKO10054138_A_Tmc2
  gRNA
ccgagcccaatctagccgga

SEQ ID NO: 54139 - DNA, 20 bp, Artificial Sequence
  MKO10054139_A_Tmc2
  gRNA
ccttccggctagattgggct

SEQ ID NO: 54140 - DNA, 20 bp, Artificial Sequence
  MKO10054140_A_Tmc3
  gRNA
ctggcggaaattcgcccgtc

SEQ ID NO: 54141 - DNA, 20 bp, Artificial Sequence
  MKO10054141_A_Tmc3
  gRNA
tccgtaggtcacttcgggtc

SEQ ID NO: 54142 - DNA, 20 bp, Artificial Sequence
  MKO10054142_A_Tmc3
  gRNA
gaccaggactcgaggctacc

SEQ ID NO: 54143 - DNA, 20 bp, Artificial Sequence
  MKO10054143_A_Tmc4
  gRNA
ctacccaccccgatcgaacc

SEQ ID NO: 54144 - DNA, 20 bp, Artificial Sequence
  MKO10054144_A_Tmc4
  gRNA
gctgctacgctgcgataccg

SEQ ID NO: 54145 - DNA, 20 bp, Artificial Sequence
  MKO10054145_A_Tmc4
  gRNA
gtatcgcagcgtagcagcgc

SEQ ID NO: 54146 - DNA, 20 bp, Artificial Sequence
  MKO10054146_A_Tmc5
  gRNA
ccaattctacaatccgacat

SEQ ID NO: 54147 - DNA, 20 bp, Artificial Sequence
  MKO10054147_A_Tmc5
  gRNA
cttcacgatcggagcctgcc

SEQ ID NO: 54148 - DNA, 20 bp, Artificial Sequence
  MKO10054148_A_Tmc5
  gRNA
tttgcacccacggtgaattg

SEQ ID NO: 54149 - DNA, 20 bp, Artificial Sequence
  MKO10054149_A_Tmc6
  gRNA
cggctcaccaatggtacggc

SEQ ID NO: 54150 - DNA, 20 bp, Artificial Sequence
  MKO10054150_A_Tmc6
  gRNA
cacttacccttcgtctcccg

SEQ ID NO: 54151 - DNA, 20 bp, Artificial Sequence
  MKO10054151_A_Tmc6
  gRNA
agcatgcccagccgtaccat

SEQ ID NO: 54152 - DNA, 20 bp, Artificial Sequence
  MKO10054152_A_Tmc7
  gRNA
cgtgccactgaccgatagct

SEQ ID NO: 54153 - DNA, 20 bp, Artificial Sequence
  MKO10054153_A_Tmc7
  gRNA
cactttgcttgtcccgagag

SEQ ID NO: 54154 - DNA, 20 bp, Artificial Sequence
  MKO10054154_A_Tmc7
  gRNA
tcgagagatgacaacccacc

SEQ ID NO: 54155 - DNA, 20 bp, Artificial Sequence
  MKO10054155_A_Tmc8
  gRNA
ctcgtaggcctcttcggaac

SEQ ID NO: 54156 - DNA, 20 bp, Artificial Sequence
  MKO10054156_A_Tmc8
  gRNA
tgttgtcgcgccacccgcct

SEQ ID NO: 54157 - DNA, 20 bp, Artificial Sequence
  MKO10054157_A_Tmc8
  gRNA
gtcctgactgcaccgaccac

SEQ ID NO: 54158 - DNA, 20 bp, Artificial Sequence
  MKO10054158_A_Tmcc1
  gRNA
gccggtccacgtagctaaag

SEQ ID NO: 54159 - DNA, 20 bp, Artificial Sequence
  MKO10054159_A_Tmcc1
  gRNA
gacaagcttgcatagtaggc

SEQ ID NO: 54160 - DNA, 20 bp, Artificial Sequence
  MKO10054160_A_Tmcc1
  gRNA
ccctctttagctacgtggac

SEQ ID NO: 54161 - DNA, 20 bp, Artificial Sequence
  MKO10054161_A_Tmcc2
  gRNA
ccctcatgaagacgcgcctc

SEQ ID NO: 54162 - DNA, 20 bp, Artificial Sequence
  MKO10054162_A_Tmcc2
  gRNA
acctgtttcacagccgccgc

SEQ ID NO: 54163 - DNA, 20 bp, Artificial Sequence
  MKO10054163_A_Tmcc2
  gRNA
gcactaccgtcggcgcctga

SEQ ID NO: 54164 - DNA, 20 bp, Artificial Sequence
  MKO10054164_A_Tmcc3
  gRNA
gacggatgccgtgaacgcca

SEQ ID NO: 54165 - DNA, 20 bp, Artificial Sequence
  MKO10054165_A_Tmcc3
  gRNA
cgttcacggcatccgtctgc

SEQ ID NO: 54166 - DNA, 20 bp, Artificial Sequence
  MKO10054166_A_Tmcc3
  gRNA
ctacccctgaacatacgccg

SEQ ID NO: 54167 - DNA, 20 bp, Artificial Sequence
  MKO10054167_A_Tmco1
  gRNA
atgaaatccatgttcgcgat

SEQ ID NO: 54168 - DNA, 20 bp, Artificial Sequence
  MKO10054168_A_Tmco1
  gRNA
acaaaagccaatcgcgaaca

SEQ ID NO: 54169 - DNA, 20 bp, Artificial Sequence
  MKO10054169_A_Tmco1
  gRNA
ttactgtttaggcataacct

SEQ ID NO: 54170 - DNA, 20 bp, Artificial Sequence
  MKO10054170_A_Tmco2
  gRNA
gggcgacgattatcccctcc

SEQ ID NO: 54171 - DNA, 20 bp, Artificial Sequence
  MKO10054171_A_Tmco2
  gRNA
cccggaaacctgcttcgaag

SEQ ID NO: 54172 - DNA, 20 bp, Artificial Sequence
  MKO10054172_A_Tmco2
  gRNA
acgaagcattcggtcaattc

SEQ ID NO: 54173 - DNA, 20 bp, Artificial Sequence
  MKO10054173_A_Tmco3
  gRNA
tactgatttattgtcgtcga

SEQ ID NO: 54174 - DNA, 20 bp, Artificial Sequence
  MKO10054174_A_Tmco3
  gRNA
ggtcaaaggcgtcaactttg

SEQ ID NO: 54175 - DNA, 20 bp, Artificial Sequence
  MKO10054175_A_Tmco3
  gRNA
cggctttcctcacatcttcg

SEQ ID NO: 54176 - DNA, 20 bp, Artificial Sequence
  MKO10054176_A_Tmco4
  gRNA
cactgtcccgcctccaactg

SEQ ID NO: 54177 - DNA, 20 bp, Artificial Sequence
  MKO10054177_A_Tmco4
  gRNA
aagtgtcctcccaaccataa

SEQ ID NO: 54178 - DNA, 20 bp, Artificial Sequence
  MKO10054178_A_Tmco4
  gRNA
acgctatcttctgataggcc

SEQ ID NO: 54179 - DNA, 20 bp, Artificial Sequence
  MKO10054179_A_Tmco5b
  gRNA
agagatattgccctgtccat

SEQ ID NO: 54180 - DNA, 20 bp, Artificial Sequence
  MKO10054180_A_Tmco5b
  gRNA
tcattgaagtcatccctctc

SEQ ID NO: 54181 - DNA, 20 bp, Artificial Sequence
  MKO10054181_A_Tmco5b
  gRNA
gttccatcacattcttgctt

SEQ ID NO: 54182 - DNA, 20 bp, Artificial Sequence
  MKO10054182_A_Tmco5
  gRNA
gtgcttaccttggactcttc

SEQ ID NO: 54183 - DNA, 20 bp, Artificial Sequence
  MKO10054183_A_Tmco5
  gRNA
ttctctgcatatccctttcg

SEQ ID NO: 54184 - DNA, 20 bp, Artificial Sequence
  MKO10054184_A_Tmco5
  gRNA
gtatctcgagaagcagctcc

SEQ ID NO: 54185 - DNA, 20 bp, Artificial Sequence
  MKO10054185_A_Tmco6
  gRNA
gctctggtcagccttcgtcg

SEQ ID NO: 54186 - DNA, 20 bp, Artificial Sequence
  MKO10054186_A_Tmco6
  gRNA
cggcctcactctccacgatg

SEQ ID NO: 54187 - DNA, 20 bp, Artificial Sequence
  MKO10054187_A_Tmco6
  gRNA
gctccctccgcgccttccgc

SEQ ID NO: 54188 - DNA, 20 bp, Artificial Sequence
  MKO10054188_A_Tmed10
  gRNA
ctttagagtccacgaacacc

SEQ ID NO: 54189 - DNA, 20 bp, Artificial Sequence
  MKO10054189_A_Tmed10
  gRNA
agaggcgaaaaattatgaag

SEQ ID NO: 54190 - DNA, 20 bp, Artificial Sequence
  MKO10054190_A_Tmed10
  gRNA
ctttagatcacagattctgc

SEQ ID NO: 54191 - DNA, 20 bp, Artificial Sequence
  MKO10054191_A_Tmed11
  gRNA
ctccaactcgaatatctaag

SEQ ID NO: 54192 - DNA, 20 bp, Artificial Sequence
  MKO10054192_A_Tmed11
  gRNA
atccacttagatattcgagt

SEQ ID NO: 54193 - DNA, 20 bp, Artificial Sequence
  MKO10054193_A_Tmed11
  gRNA
tctacacagtttgtgtcatt

SEQ ID NO: 54194 - DNA, 20 bp, Artificial Sequence
  MKO10054194_A_Tmed1
  gRNA
gtgtttctatcagtccgcac

SEQ ID NO: 54195 - DNA, 20 bp, Artificial Sequence
  MKO10054195_A_Tmed1
  gRNA
gaaatgtgaactcgccgtcc

SEQ ID NO: 54196 - DNA, 20 bp, Artificial Sequence
  MKO10054196_A_Tmed1
  gRNA
atttcgatcacgagcctcaa

SEQ ID NO: 54197 - DNA, 20 bp, Artificial Sequence
  MKO10054197_A_Tmed2
  gRNA
gcacctccacgtcgatgtcc

SEQ ID NO: 54198 - DNA, 20 bp, Artificial Sequence
  MKO10054198_A_Tmed2
  gRNA
ggtgacgctcgccgagctgc

SEQ ID NO: 54199 - DNA, 20 bp, Artificial Sequence
  MKO10054199_A_Tmed2
  gRNA
tgtctccatgtcttgtcctt

SEQ ID NO: 54200 - DNA, 20 bp, Artificial Sequence
  MKO10054200_A_Tmed3
  gRNA
cccgcagtcgatagtgtgtc

SEQ ID NO: 54201 - DNA, 20 bp, Artificial Sequence
  MKO10054201_A_Tmed3
  gRNA
ttaatagtcgagtgtcctac

SEQ ID NO: 54202 - DNA, 20 bp, Artificial Sequence
  MKO10054202_A_Tmed3
  gRNA
catagcagtccacatcgtag

SEQ ID NO: 54203 - DNA, 20 bp, Artificial Sequence
  MKO10054203_A_Tmed4
  gRNA
gtgttcctgccgtcgacccc

SEQ ID NO: 54204 - DNA, 20 bp, Artificial Sequence
  MKO10054204_A_Tmed4
  gRNA
ctaccccgagatcgctgcta

SEQ ID NO: 54205 - DNA, 20 bp, Artificial Sequence
  MKO10054205_A_Tmed4
  gRNA
cttatccttagcagcgatct

SEQ ID NO: 54206 - DNA, 20 bp, Artificial Sequence
  MKO10054206_A_Tmed5
  gRNA
cgccccgcgcagcaacgctg

SEQ ID NO: 54207 - DNA, 20 bp, Artificial Sequence
  MKO10054207_A_Tmed5
  gRNA
gatcgacagggatgggcggc

SEQ ID NO: 54208 - DNA, 20 bp, Artificial Sequence
  MKO10054208_A_Tmed5
  gRNA
cctcttctcccatattatcc

SEQ ID NO: 54209 - DNA, 20 bp, Artificial Sequence
  MKO10054209_A_Tmed6
  gRNA
agatcccctacacggctcca

SEQ ID NO: 54210 - DNA, 20 bp, Artificial Sequence
  MKO10054210_A_Tmed6
  gRNA
cgacactctggatgcgatta

SEQ ID NO: 54211 - DNA, 20 bp, Artificial Sequence
  MKO10054211_A_Tmed6
  gRNA
tggcaggttcagcgcattct

SEQ ID NO: 54212 - DNA, 20 bp, Artificial Sequence
  MKO10054212_A_Tmed7
  gRNA
agcgtagttaggatccgacg

SEQ ID NO: 54213 - DNA, 20 bp, Artificial Sequence
  MKO10054213_A_Tmed7
  gRNA
ggcttcccccaccgaccaat

SEQ ID NO: 54214 - DNA, 20 bp, Artificial Sequence
  MKO10054214_A_Tmed7
  gRNA
ctacgatgttgattgtcgat

SEQ ID NO: 54215 - DNA, 20 bp, Artificial Sequence
  MKO10054215_A_Tmed8
  gRNA
cacgttctgtagatcttccg

SEQ ID NO: 54216 - DNA, 20 bp, Artificial Sequence
  MKO10054216_A_Tmed8
  gRNA
gatggtatctccagcgagta

SEQ ID NO: 54217 - DNA, 20 bp, Artificial Sequence
  MKO10054217_A_Tmed8
  gRNA
ctgcacggttatatcagtgc

SEQ ID NO: 54218 - DNA, 20 bp, Artificial Sequence
  MKO10054218_A_Tmed9
  gRNA
ccgcatctgccagacgccaa

SEQ ID NO: 54219 - DNA, 20 bp, Artificial Sequence
  MKO10054219_A_Tmed9
  gRNA
cgtttgcatgttcgcccact

SEQ ID NO: 54220 - DNA, 20 bp, Artificial Sequence
  MKO10054220_A_Tmed9
  gRNA
tggaccaccatagcactcgc

SEQ ID NO: 54221 - DNA, 20 bp, Artificial Sequence
  MKO10054221_A_Tmeff1
  gRNA
gcgcgtggaccttgctactc

SEQ ID NO: 54222 - DNA, 20 bp, Artificial Sequence
  MKO10054222_A_Tmeff1
  gRNA
ctcttctcagataacggctc

SEQ ID NO: 54223 - DNA, 20 bp, Artificial Sequence
  MKO10054223_A_Tmeff1
  gRNA
gaaatgcgcatgccagtttc

SEQ ID NO: 54224 - DNA, 20 bp, Artificial Sequence
  MKO10054224_A_Tmeff2
  gRNA
acattccccgtcaaatttac

SEQ ID NO: 54225 - DNA, 20 bp, Artificial Sequence
  MKO10054225_A_Tmeff2
  gRNA
accagaatgagtgctacctg

SEQ ID NO: 54226 - DNA, 20 bp, Artificial Sequence
  MKO10054226_A_Tmeff2
  gRNA
gacttgcgtctgtcagttca

SEQ ID NO: 54227 - DNA, 20 bp, Artificial Sequence
  MKO10054227_A_Tmem100
  gRNA
cgagagtcagaccgctcttg

SEQ ID NO: 54228 - DNA, 20 bp, Artificial Sequence
  MKO10054228_A_Tmem100
  gRNA
gagttcggcacccccggtgg

SEQ ID NO: 54229 - DNA, 20 bp, Artificial Sequence
  MKO10054229_A_Tmem100
  gRNA
ttcagctgatggccgccacc

SEQ ID NO: 54230 - DNA, 20 bp, Artificial Sequence
  MKO10054230_A_Tmem101
  gRNA
ccgtcgataagcagcatgac

SEQ ID NO: 54231 - DNA, 20 bp, Artificial Sequence
  MKO10054231_A_Tmem101
  gRNA
acacacgacgcgtcgagttc

SEQ ID NO: 54232 - DNA, 20 bp, Artificial Sequence
  MKO10054232_A_Tmem101
  gRNA
aacggcttcggggctttcga

SEQ ID NO: 54233 - DNA, 20 bp, Artificial Sequence
  MKO10054233_A_Tmem102
  gRNA
cgagctgcatgaactagccg

SEQ ID NO: 54234 - DNA, 20 bp, Artificial Sequence
  MKO10054234_A_Tmem102
  gRNA
tcccggcgctctacttggcg

SEQ ID NO: 54235 - DNA, 20 bp, Artificial Sequence
  MKO10054235_A_Tmem102
  gRNA
ccagggggcacccccccaga

SEQ ID NO: 54236 - DNA, 20 bp, Artificial Sequence
  MKO10054236_A_Tmem104
  gRNA
gctcgtcagcctcgttctgc

SEQ ID NO: 54237 - DNA, 20 bp, Artificial Sequence
  MKO10054237_A_Tmem104
  gRNA
tcagccaagacaactacgag

SEQ ID NO: 54238 - DNA, 20 bp, Artificial Sequence
  MKO10054238_A_Tmem104
  gRNA
gcgcacctgtgcccacgatg

SEQ ID NO: 54239 - DNA, 20 bp, Artificial Sequence
  MKO10054239_A_Tmem106a
  gRNA
tcacgtacagctcaacacga

SEQ ID NO: 54240 - DNA, 20 bp, Artificial Sequence
  MKO10054240_A_Tmem106a
  gRNA
tgccttacgaagttgccagc

SEQ ID NO: 54241 - DNA, 20 bp, Artificial Sequence
  MKO10054241_A_Tmem106a
  gRNA
ctgtacgtgagcgtcttcaa

SEQ ID NO: 54242 - DNA, 20 bp, Artificial Sequence
  MKO10054242_A_Tmem106b
  gRNA
tacttcacctcaatagatcg

SEQ ID NO: 54243 - DNA, 20 bp, Artificial Sequence
  MKO10054243_A_Tmem106b
  gRNA
cgtaaccgctgatcactata

SEQ ID NO: 54244 - DNA, 20 bp, Artificial Sequence
  MKO10054244_A_Tmem106b
  gRNA
taaacgagcctttccaatca

SEQ ID NO: 54245 - DNA, 20 bp, Artificial Sequence
  MKO10054245_A_Tmem106c
  gRNA
tgatgccgttatcgtccacg

SEQ ID NO: 54246 - DNA, 20 bp, Artificial Sequence
  MKO10054246_A_Tmem106c
  gRNA
aacaggttggtgaccgccac

SEQ ID NO: 54247 - DNA, 20 bp, Artificial Sequence
  MKO10054247_A_Tmem106c
  gRNA
cgaccacagccttcatgtac

SEQ ID NO: 54248 - DNA, 20 bp, Artificial Sequence
  MKO10054248_A_Tmem107
  gRNA
ctttcttcgtattcgagcga

SEQ ID NO: 54249 - DNA, 20 bp, Artificial Sequence
  MKO10054249_A_Tmem107
  gRNA
gctcgaatacgaagaaagac

SEQ ID NO: 54250 - DNA, 20 bp, Artificial Sequence
  MKO10054250_A_Tmem107
  gRNA
gagcccggagatccgaccca

SEQ ID NO: 54251 - DNA, 20 bp, Artificial Sequence
  MKO10054251_A_Tmem108
  gRNA
ccccacgggccaccactcgt

SEQ ID NO: 54252 - DNA, 20 bp, Artificial Sequence
  MKO10054252_A_Tmem108
  gRNA
ggcccctgtcggttgtcgtg

SEQ ID NO: 54253 - DNA, 20 bp, Artificial Sequence
  MKO10054253_A_Tmem108
  gRNA
agtgtctcgatagtcgccat

SEQ ID NO: 54254 - DNA, 20 bp, Artificial Sequence
  MKO10054254_A_Tmem109
  gRNA
ctgtgcccgacccatctacc

SEQ ID NO: 54255 - DNA, 20 bp, Artificial Sequence
  MKO10054255_A_Tmem109
  gRNA
gcgcacacagcactccgtta

SEQ ID NO: 54256 - DNA, 20 bp, Artificial Sequence
  MKO10054256_A_Tmem109
  gRNA
cgccagatagaagagcttag

SEQ ID NO: 54257 - DNA, 20 bp, Artificial Sequence
  MKO10054257_A_Tmem110
  gRNA
cgtacgcgccgtcggtgtct

SEQ ID NO: 54258 - DNA, 20 bp, Artificial Sequence
  MKO10054258_A_Tmem110
  gRNA
ccactccaccaagacaccga

SEQ ID NO: 54259 - DNA, 20 bp, Artificial Sequence
  MKO10054259_A_Tmem110
  gRNA
ggtacgtaccatatcctcca

SEQ ID NO: 54260 - DNA, 20 bp, Artificial Sequence
  MKO10054260_A_Tmem115
  gRNA
gaacgacgctgacgcggacc

SEQ ID NO: 54261 - DNA, 20 bp, Artificial Sequence
  MKO10054261_A_Tmem115
  gRNA
aagatgcaacgcgccctacc

SEQ ID NO: 54262 - DNA, 20 bp, Artificial Sequence
  MKO10054262_A_Tmem115
  gRNA
tccgggacggtcaccttccc

SEQ ID NO: 54263 - DNA, 20 bp, Artificial Sequence
  MKO10054263_A_Tmem116
  gRNA
ctgggaagaaacgcactcgc

SEQ ID NO: 54264 - DNA, 20 bp, Artificial Sequence
  MKO10054264_A_Tmem116
  gRNA
ctgatggcggtgagtgcatt

SEQ ID NO: 54265 - DNA, 20 bp, Artificial Sequence
  MKO10054265_A_Tmem116
  gRNA
gatgacgcctgtgttccttt

SEQ ID NO: 54266 - DNA, 20 bp, Artificial Sequence
  MKO10054266_A_Tmem117
  gRNA
acatcgtcatccacgaccca

SEQ ID NO: 54267 - DNA, 20 bp, Artificial Sequence
  MKO10054267_A_Tmem117
  gRNA
tgcttgtcatcacgaccgac

SEQ ID NO: 54268 - DNA, 20 bp, Artificial Sequence
  MKO10054268_A_Tmem117
  gRNA
agctgggacaaactgaaccg

SEQ ID NO: 54269 - DNA, 20 bp, Artificial Sequence
  MKO10054269_A_Tmem119
  gRNA
cgatgagcatcacgtactgc

SEQ ID NO: 54270 - DNA, 20 bp, Artificial Sequence
  MKO10054270_A_Tmem119
  gRNA
gtacgtgatgctcatcgcgg

SEQ ID NO: 54271 - DNA, 20 bp, Artificial Sequence
  MKO10054271_A_Tmem119
  gRNA
gggaccccgtaccttcagcg

SEQ ID NO: 54272 - DNA, 20 bp, Artificial Sequence
  MKO10054272_A_Tmem11
  gRNA
acagcacgctggatcaccgt

SEQ ID NO: 54273 - DNA, 20 bp, Artificial Sequence
  MKO10054273_A_Tmem11
  gRNA
attgtgcacgaaatctacag

SEQ ID NO: 54274 - DNA, 20 bp, Artificial Sequence
  MKO10054274_A_Tmem11
  gRNA
gagtctccaagatggccgcg

SEQ ID NO: 54275 - DNA, 20 bp, Artificial Sequence
  MKO10054275_A_Tmem120a
  gRNA
aggcttccatgtcgaagaag

SEQ ID NO: 54276 - DNA, 20 bp, Artificial Sequence
  MKO10054276_A_Tmem120a
  gRNA
ctctctcccatccgagtcca

SEQ ID NO: 54277 - DNA, 20 bp, Artificial Sequence
  MKO10054277_A_Tmem120a
  gRNA
ccgcttcttctgccgtgtga

SEQ ID NO: 54278 - DNA, 20 bp, Artificial Sequence
  MKO10054278_A_Tmem120b
  gRNA
ggatgagcgccgcctcctca

SEQ ID NO: 54279 - DNA, 20 bp, Artificial Sequence
  MKO10054279_A_Tmem120b
  gRNA
ggctcgtacccattcttctt

SEQ ID NO: 54280 - DNA, 20 bp, Artificial Sequence
  MKO10054280_A_Tmem120b
  gRNA
gtcgatttgtccttcattac

SEQ ID NO: 54281 - DNA, 20 bp, Artificial Sequence
  MKO10054281_A_Tmem121
  gRNA
gtcaacgccttgcgagccac

SEQ ID NO: 54282 - DNA, 20 bp, Artificial Sequence
  MKO10054282_A_Tmem121
  gRNA
aggcacacgtggcgccggtc

SEQ ID NO: 54283 - DNA, 20 bp, Artificial Sequence
  MKO10054283_A_Tmem121
  gRNA
gacctcgctgagcgctacgc

SEQ ID NO: 54284 - DNA, 20 bp, Artificial Sequence
  MKO10054284_A_Tmem123
  gRNA
gaggcagtaggcgtcacatg

SEQ ID NO: 54285 - DNA, 20 bp, Artificial Sequence
  MKO10054285_A_Tmem123
  gRNA
gcaactactcatcccaccaa

SEQ ID NO: 54286 - DNA, 20 bp, Artificial Sequence
  MKO10054286_A_Tmem123
  gRNA
ttgtcatggatgctgacgtg

SEQ ID NO: 54287 - DNA, 20 bp, Artificial Sequence
  MKO10054287_A_Tmem125
  gRNA
ctagtcgccattcgccggat

SEQ ID NO: 54288 - DNA, 20 bp, Artificial Sequence
  MKO10054288_A_Tmem125
  gRNA
gcctccgccgctgcgcagca

SEQ ID NO: 54289 - DNA, 20 bp, Artificial Sequence
  MKO10054289_A_Tmem125
  gRNA
ctgccctccgatctgtacag

SEQ ID NO: 54290 - DNA, 20 bp, Artificial Sequence
  MKO10054290_A_Tmem126a
  gRNA
cattgacgggtatagccaaa

SEQ ID NO: 54291 - DNA, 20 bp, Artificial Sequence
  MKO10054291_A_Tmem126a
  gRNA
aactagtgcaccccgtgttg

SEQ ID NO: 54292 - DNA, 20 bp, Artificial Sequence
  MKO10054292_A_Tmem126a
  gRNA
atattgtctagacccaagat

SEQ ID NO: 54293 - DNA, 20 bp, Artificial Sequence
  MKO10054293_A_Tmem126b
  gRNA
ccgtctaggtgacataagca

SEQ ID NO: 54294 - DNA, 20 bp, Artificial Sequence
  MKO10054294_A_Tmem126b
  gRNA
tatgtgaaaaaccacgtgca

SEQ ID NO: 54295 - DNA, 20 bp, Artificial Sequence
  MKO10054295_A_Tmem126b
  gRNA
gttctgaggagcgcactaat

SEQ ID NO: 54296 - DNA, 20 bp, Artificial Sequence
  MKO10054296_A_Tmem127
  gRNA
ctacagtgtgctaccgtcat

SEQ ID NO: 54297 - DNA, 20 bp, Artificial Sequence
  MKO10054297_A_Tmem127
  gRNA
tccatggatgtgcaaccaag

SEQ ID NO: 54298 - DNA, 20 bp, Artificial Sequence
  MKO10054298_A_Tmem127
  gRNA
cagctctgaagattactcgt

SEQ ID NO: 54299 - DNA, 20 bp, Artificial Sequence
  MKO10054299_A_Tmem128
  gRNA
gcgccaagatggacgctccg

SEQ ID NO: 54300 - DNA, 20 bp, Artificial Sequence
  MKO10054300_A_Tmem128
  gRNA
cgtagctgctcccgagccca

SEQ ID NO: 54301 - DNA, 20 bp, Artificial Sequence
  MKO10054301_A_Tmem128
  gRNA
acatcacgacccccataaac

SEQ ID NO: 54302 - DNA, 20 bp, Artificial Sequence
  MKO10054302_A_Tmem129
  gRNA
tgctggcactcgccgaccgc

SEQ ID NO: 54303 - DNA, 20 bp, Artificial Sequence
  MKO10054303_A_Tmem129
  gRNA
cacgcccaacgagttctact

SEQ ID NO: 54304 - DNA, 20 bp, Artificial Sequence
  MKO10054304_A_Tmem129
  gRNA
tagcaaacttgtcaatccgt

SEQ ID NO: 54305 - DNA, 20 bp, Artificial Sequence
  MKO10054305_A_Tmem130
  gRNA
tctaacctcgaccatccacg

SEQ ID NO: 54306 - DNA, 20 bp, Artificial Sequence
  MKO10054306_A_Tmem130
  gRNA
tattacaactactcgagccc

SEQ ID NO: 54307 - DNA, 20 bp, Artificial Sequence
  MKO10054307_A_Tmem130
  gRNA
caggcacgccgcccaccacg

SEQ ID NO: 54308 - DNA, 20 bp, Artificial Sequence
  MKO10054308_A_Tmem131
  gRNA
gccctccgtcgtcaaagcgc

SEQ ID NO: 54309 - DNA, 20 bp, Artificial Sequence
  MKO10054309_A_Tmem131
  gRNA
acgattcgaaccgcccatgc

SEQ ID NO: 54310 - DNA, 20 bp, Artificial Sequence
  MKO10054310_A_Tmem131
  gRNA
gtatgggcctgcaattaccc

SEQ ID NO: 54311 - DNA, 20 bp, Artificial Sequence
  MKO10054311_A_Tmem132a
  gRNA
tgctaagttagaccgcttca

SEQ ID NO: 54312 - DNA, 20 bp, Artificial Sequence
  MKO10054312_A_Tmem132a
  gRNA
tagcagtaaccatgataccc

SEQ ID NO: 54313 - DNA, 20 bp, Artificial Sequence
  MKO10054313_A_Tmem132a
  gRNA
ccagggcacagccgcttctc

SEQ ID NO: 54314 - DNA, 20 bp, Artificial Sequence
  MKO10054314_A_Tmem132b
  gRNA
gcccgtctcggttcccgtca

SEQ ID NO: 54315 - DNA, 20 bp, Artificial Sequence
  MKO10054315_A_Tmem132b
  gRNA
tgtgaagataacggctgtgc

SEQ ID NO: 54316 - DNA, 20 bp, Artificial Sequence
  MKO10054316_A_Tmem132b
  gRNA
caatgcccacaaaggtcgtc

SEQ ID NO: 54317 - DNA, 20 bp, Artificial Sequence
  MKO10054317_A_Tmem132c
  gRNA
cattagcctttaccgcgccc

SEQ ID NO: 54318 - DNA, 20 bp, Artificial Sequence
  MKO10054318_A_Tmem132c
  gRNA
tccttagtgaccgaaagccg

SEQ ID NO: 54319 - DNA, 20 bp, Artificial Sequence
  MKO10054319_A_Tmem132c
  gRNA
cgatggcaactaggtccttc

SEQ ID NO: 54320 - DNA, 20 bp, Artificial Sequence
  MKO10054320_A_Tmem132d
  gRNA
aggactcgacccgcgactgc

SEQ ID NO: 54321 - DNA, 20 bp, Artificial Sequence
  MKO10054321_A_Tmem132d
  gRNA
aagagcggtggtactccagc

SEQ ID NO: 54322 - DNA, 20 bp, Artificial Sequence
  MKO10054322_A_Tmem132d
  gRNA
atctgacgaagacgtggtta

SEQ ID NO: 54323 - DNA, 20 bp, Artificial Sequence
  MKO10054323_A_Tmem132e
  gRNA
ccgagcgcttgacggttaac

SEQ ID NO: 54324 - DNA, 20 bp, Artificial Sequence
  MKO10054324_A_Tmem132e
  gRNA
cggtagctaaccggtagtat

SEQ ID NO: 54325 - DNA, 20 bp, Artificial Sequence
  MKO10054325_A_Tmem132e
  gRNA
atgtggcacatcgattaccg

SEQ ID NO: 54326 - DNA, 20 bp, Artificial Sequence
  MKO10054326_A_Tmem134
  gRNA
ggccgctgcacttcgaacgc

SEQ ID NO: 54327 - DNA, 20 bp, Artificial Sequence
  MKO10054327_A_Tmem134
  gRNA
gccgtggcgggctcaaatgg

SEQ ID NO: 54328 - DNA, 20 bp, Artificial Sequence
  MKO10054328_A_Tmem134
  gRNA
gccgccatttgagcccgcca

SEQ ID NO: 54329 - DNA, 20 bp, Artificial Sequence
  MKO10054329_A_Tmem135
  gRNA
tccatttcttaacgtcgtga

SEQ ID NO: 54330 - DNA, 20 bp, Artificial Sequence
  MKO10054330_A_Tmem135
  gRNA
agggctgctcacaatttata

SEQ ID NO: 54331 - DNA, 20 bp, Artificial Sequence
  MKO10054331_A_Tmem135
  gRNA
accatcacgacgttaagaaa

SEQ ID NO: 54332 - DNA, 20 bp, Artificial Sequence
  MKO10054332_A_Tmem136
  gRNA
cccggagaaaccatcgcatc

SEQ ID NO: 54333 - DNA, 20 bp, Artificial Sequence
  MKO10054333_A_Tmem136
  gRNA
gcatcaagaagtaccatgcg

SEQ ID NO: 54334 - DNA, 20 bp, Artificial Sequence
  MKO10054334_A_Tmem136
  gRNA
cggctggtgaccttcaccca

SEQ ID NO: 54335 - DNA, 20 bp, Artificial Sequence
  MKO10054335_A_Tmem138
  gRNA
gtttcctctagaacgtgcga

SEQ ID NO: 54336 - DNA, 20 bp, Artificial Sequence
  MKO10054336_A_Tmem138
  gRNA
cttctcagagctactccgaa

SEQ ID NO: 54337 - DNA, 20 bp, Artificial Sequence
  MKO10054337_A_Tmem138
  gRNA
gcgggggtcacccagtctca

SEQ ID NO: 54338 - DNA, 20 bp, Artificial Sequence
  MKO10054338_A_Tmem139
  gRNA
ggagcatcgttccataacac

SEQ ID NO: 54339 - DNA, 20 bp, Artificial Sequence
  MKO10054339_A_Tmem139
  gRNA
cccgatcgatgccaagctcc

SEQ ID NO: 54340 - DNA, 20 bp, Artificial Sequence
  MKO10054340_A_Tmem139
  gRNA
tggagtactaggctccagtt

SEQ ID NO: 54341 - DNA, 20 bp, Artificial Sequence
  MKO10054341_A_Tmem140
  gRNA
cctgagccacttccacacga

SEQ ID NO: 54342 - DNA, 20 bp, Artificial Sequence
  MKO10054342_A_Tmem140
  gRNA
ccacggttaggttcccgcca

SEQ ID NO: 54343 - DNA, 20 bp, Artificial Sequence
  MKO10054343_A_Tmem140
  gRNA
ggctccatacacaccgagcc

SEQ ID NO: 54344 - DNA, 20 bp, Artificial Sequence
  MKO10054344_A_Tmem141
  gRNA
ccagagcgcttctagtcgtg

SEQ ID NO: 54345 - DNA, 20 bp, Artificial Sequence
  MKO10054345_A_Tmem141
  gRNA
ccagtcgcacgccttcatga

SEQ ID NO: 54346 - DNA, 20 bp, Artificial Sequence
  MKO10054346_A_Tmem141
  gRNA
agtgaaaacgcccttcatga

SEQ ID NO: 54347 - DNA, 20 bp, Artificial Sequence
  MKO10054347_A_Tmem143
  gRNA
tgaagcgctcgcggtactgc

SEQ ID NO: 54348 - DNA, 20 bp, Artificial Sequence
  MKO10054348_A_Tmem143
  gRNA
cgagcgcctgtccagtgaga

SEQ ID NO: 54349 - DNA, 20 bp, Artificial Sequence
  MKO10054349_A_Tmem143
  gRNA
atgaccccatcaaccccgac

SEQ ID NO: 54350 - DNA, 20 bp, Artificial Sequence
  MKO10054350_A_Tmem144
  gRNA
cgatgcttggcggctgcatt

SEQ ID NO: 54351 - DNA, 20 bp, Artificial Sequence
  MKO10054351_A_Tmem144
  gRNA
taggacttggaatcctaatc

SEQ ID NO: 54352 - DNA, 20 bp, Artificial Sequence
  MKO10054352_A_Tmem144
  gRNA
aagccaatgctgaattacgt

SEQ ID NO: 54353 - DNA, 20 bp, Artificial Sequence
  MKO10054353_A_Tmem145
  gRNA
tcgcacctgacagcccgacc

SEQ ID NO: 54354 - DNA, 20 bp, Artificial Sequence
  MKO10054354_A_Tmem145
  gRNA
cttccgattccgataccccg

SEQ ID NO: 54355 - DNA, 20 bp, Artificial Sequence
  MKO10054355_A_Tmem145
  gRNA
ccagtcgtccataatccgaa

SEQ ID NO: 54356 - DNA, 20 bp, Artificial Sequence
  MKO10054356_A_Tmem147
  gRNA
ggtctgaatacaacgccttc

SEQ ID NO: 54357 - DNA, 20 bp, Artificial Sequence
  MKO10054357_A_Tmem147
  gRNA
ggcctggacgcatttccaga

SEQ ID NO: 54358 - DNA, 20 bp, Artificial Sequence
  MKO10054358_A_Tmem147
  gRNA
cttgtcatgtctcggaatgc

SEQ ID NO: 54359 - DNA, 20 bp, Artificial Sequence
  MKO10054359_A_Tmem14a
  gRNA
tttgacatcccgtctgtcat

SEQ ID NO: 54360 - DNA, 20 bp, Artificial Sequence
  MKO10054360_A_Tmem14a
  gRNA
tatgcagcccttgtgacaat

SEQ ID NO: 54361 - DNA, 20 bp, Artificial Sequence
  MKO10054361_A_Tmem14a
  gRNA
aagcctgcaactagaccagc

SEQ ID NO: 54362 - DNA, 20 bp, Artificial Sequence
  MKO10054362_A_Tmem14c
  gRNA
atgcctgcagggttaatcgc

SEQ ID NO: 54363 - DNA, 20 bp, Artificial Sequence
  MKO10054363_A_Tmem14c
  gRNA
tggactcttcttcgggggcc

SEQ ID NO: 54364 - DNA, 20 bp, Artificial Sequence
  MKO10054364_A_Tmem14c
  gRNA
ggttacagctgttacggatg

SEQ ID NO: 54365 - DNA, 20 bp, Artificial Sequence
  MKO10054365_A_Tmem150a
  gRNA
gcacacgtggcggttcatca

SEQ ID NO: 54366 - DNA, 20 bp, Artificial Sequence
  MKO10054366_A_Tmem150a
  gRNA
caagtgtggcacataccccc

SEQ ID NO: 54367 - DNA, 20 bp, Artificial Sequence
  MKO10054367_A_Tmem150a
  gRNA
gaaaattgccgaccaccacg

SEQ ID NO: 54368 - DNA, 20 bp, Artificial Sequence
  MKO10054368_A_Tmem150b
  gRNA
ctccatagtaggcaacttcc

SEQ ID NO: 54369 - DNA, 20 bp, Artificial Sequence
  MKO10054369_A_Tmem150b
  gRNA
cacctggaagttgcctacta

SEQ ID NO: 54370 - DNA, 20 bp, Artificial Sequence
  MKO10054370_A_Tmem150b
  gRNA
ggttctgtggacctcaacga

SEQ ID NO: 54371 - DNA, 20 bp, Artificial Sequence
  MKO10054371_A_Tmem150c
  gRNA
tgctaggtactttatagccg

SEQ ID NO: 54372 - DNA, 20 bp, Artificial Sequence
  MKO10054372_A_Tmem150c
  gRNA
agcgcagaacagctaccacg

SEQ ID NO: 54373 - DNA, 20 bp, Artificial Sequence
  MKO10054373_A_Tmem150c
  gRNA
agaccgctgatattcagcca

SEQ ID NO: 54374 - DNA, 20 bp, Artificial Sequence
  MKO10054374_A_Tmem151a
  gRNA
ctcgccgtccggaacgagcg

SEQ ID NO: 54375 - DNA, 20 bp, Artificial Sequence
  MKO10054375_A_Tmem151a
  gRNA
ggaggtgcccgcgctcgttc

SEQ ID NO: 54376 - DNA, 20 bp, Artificial Sequence
  MKO10054376_A_Tmem151a
  gRNA
cggaccaccactctctcgcg

SEQ ID NO: 54377 - DNA, 20 bp, Artificial Sequence
  MKO10054377_A_Tmem151b
  gRNA
gggtgacctgtcgagttcgt

SEQ ID NO: 54378 - DNA, 20 bp, Artificial Sequence
  MKO10054378_A_Tmem151b
  gRNA
ctacgtccgacgaactcgac

SEQ ID NO: 54379 - DNA, 20 bp, Artificial Sequence
  MKO10054379_A_Tmem151b
  gRNA
gcgcttcttcgccgagaacg

SEQ ID NO: 54380 - DNA, 20 bp, Artificial Sequence
  MKO10054380_A_Tmem154
  gRNA
cgagacgacgagaagtgctc

SEQ ID NO: 54381 - DNA, 20 bp, Artificial Sequence
  MKO10054381_A_Tmem154
  gRNA
tgactactcacgtgtctgca

SEQ ID NO: 54382 - DNA, 20 bp, Artificial Sequence
  MKO10054382_A_Tmem154
  gRNA
attaatggtggcgatcccac

SEQ ID NO: 54383 - DNA, 20 bp, Artificial Sequence
  MKO10054383_A_Tmem158
  gRNA
atcggcgcccccagagcgcg

SEQ ID NO: 54384 - DNA, 20 bp, Artificial Sequence
  MKO10054384_A_Tmem158
  gRNA
gagcagcgccggaccaccgc

SEQ ID NO: 54385 - DNA, 20 bp, Artificial Sequence
  MKO10054385_A_Tmem158
  gRNA
tgagctcgctgctcgtgcgc

SEQ ID NO: 54386 - DNA, 20 bp, Artificial Sequence
  MKO10054386_A_Tmem159
  gRNA
catcgtggtgctcacctcgc

SEQ ID NO: 54387 - DNA, 20 bp, Artificial Sequence
  MKO10054387_A_Tmem159
  gRNA
agccagctgacagtcgacgt

SEQ ID NO: 54388 - DNA, 20 bp, Artificial Sequence
  MKO10054388_A_Tmem159
  gRNA
gacactcgggggctcttctt

SEQ ID NO: 54389 - DNA, 20 bp, Artificial Sequence
  MKO10054389_A_Tmem160
  gRNA
agcgtccgcgcgatccagct

SEQ ID NO: 54390 - DNA, 20 bp, Artificial Sequence
  MKO10054390_A_Tmem160
  gRNA
gccgcctccagtgtccgagc

SEQ ID NO: 54391 - DNA, 20 bp, Artificial Sequence
  MKO10054391_A_Tmem160
  gRNA
agcctcctatgcggtgggtc

SEQ ID NO: 54392 - DNA, 20 bp, Artificial Sequence
  MKO10054392_A_Tmem161a
  gRNA
ctgcgaagtcgacgaaccac

SEQ ID NO: 54393 - DNA, 20 bp, Artificial Sequence
  MKO10054393_A_Tmem161a
  gRNA
gacttcgcagtgtactccgt

SEQ ID NO: 54394 - DNA, 20 bp, Artificial Sequence
  MKO10054394_A_Tmem161a
  gRNA
ccggtacatacacccgtcag

SEQ ID NO: 54395 - DNA, 20 bp, Artificial Sequence
  MKO10054395_A_Tmem161b
  gRNA
attcttaattcttcttcgga

SEQ ID NO: 54396 - DNA, 20 bp, Artificial Sequence
  MKO10054396_A_Tmem161b
  gRNA
catcgagcaagagaatagtg

SEQ ID NO: 54397 - DNA, 20 bp, Artificial Sequence
  MKO10054397_A_Tmem161b
  gRNA
gggtgtgataggtatacagc

SEQ ID NO: 54398 - DNA, 20 bp, Artificial Sequence
  MKO10054398_A_Tmem163
  gRNA
ccgcattgctgtaacgccag

SEQ ID NO: 54399 - DNA, 20 bp, Artificial Sequence
  MKO10054399_A_Tmem163
  gRNA
gctacttactgcaaacccga

SEQ ID NO: 54400 - DNA, 20 bp, Artificial Sequence
  MKO10054400_A_Tmem163
  gRNA
agaggcgctgtacctcatga

SEQ ID NO: 54401 - DNA, 20 bp, Artificial Sequence
  MKO10054401_A_Tmem164
  gRNA
taccagccgggtatttacca

SEQ ID NO: 54402 - DNA, 20 bp, Artificial Sequence
  MKO10054402_A_Tmem164
  gRNA
cgataccaggggccgtagaa

SEQ ID NO: 54403 - DNA, 20 bp, Artificial Sequence
  MKO10054403_A_Tmem164
  gRNA
cagacccattctacggcccc

SEQ ID NO: 54404 - DNA, 20 bp, Artificial Sequence
  MKO10054404_A_Tmem165
  gRNA
ctataaccggctgactgtgc

SEQ ID NO: 54405 - DNA, 20 bp, Artificial Sequence
  MKO10054405_A_Tmem165
  gRNA
gtcatcatagtgtccgaact

SEQ ID NO: 54406 - DNA, 20 bp, Artificial Sequence
  MKO10054406_A_Tmem165
  gRNA
agcgctcacattaacgttct

SEQ ID NO: 54407 - DNA, 20 bp, Artificial Sequence
  MKO10054407_A_Tmem167b
  gRNA
ccagctctcaccgttcgtca

SEQ ID NO: 54408 - DNA, 20 bp, Artificial Sequence
  MKO10054408_A_Tmem167b
  gRNA
acgaggtactttcttgaagt

SEQ ID NO: 54409 - DNA, 20 bp, Artificial Sequence
  MKO10054409_A_Tmem167b
  gRNA
aagtacctcgtctcaaaacc

SEQ ID NO: 54410 - DNA, 20 bp, Artificial Sequence
  MKO10054410_A_Tmem167
  gRNA
gcagactattgggaatattt

SEQ ID NO: 54411 - DNA, 20 bp, Artificial Sequence
  MKO10054411_A_Tmem167
  gRNA
atgtgcttatatccgatccc

SEQ ID NO: 54412 - DNA, 20 bp, Artificial Sequence
  MKO10054412_A_Tmem167
  gRNA
cagactctgaaaattgaaaa

SEQ ID NO: 54413 - DNA, 20 bp, Artificial Sequence
  MKO10054413_A_Tmem168
  gRNA
tacacgctgcacctgccgac

SEQ ID NO: 54414 - DNA, 20 bp, Artificial Sequence
  MKO10054414_A_Tmem168
  gRNA
tagatagccgaggtaccgca

SEQ ID NO: 54415 - DNA, 20 bp, Artificial Sequence
  MKO10054415_A_Tmem168
  gRNA
gcgctttgacacgccataca

SEQ ID NO: 54416 - DNA, 20 bp, Artificial Sequence
  MKO10054416_A_Tmem169
  gRNA
agccgctatgtcacactaac

SEQ ID NO: 54417 - DNA, 20 bp, Artificial Sequence
  MKO10054417_A_Tmem169
  gRNA
ccaatgtggattccccatcc

SEQ ID NO: 54418 - DNA, 20 bp, Artificial Sequence
  MKO10054418_A_Tmem169
  gRNA
tcccggttagtgtgacatag

SEQ ID NO: 54419 - DNA, 20 bp, Artificial Sequence
  MKO10054419_A_Tmem170b
  gRNA
ccactcgatgatcaacctgt

SEQ ID NO: 54420 - DNA, 20 bp, Artificial Sequence
  MKO10054420_A_Tmem170b
  gRNA
cgcggggacgatgagggcgg

SEQ ID NO: 54421 - DNA, 20 bp, Artificial Sequence
  MKO10054421_A_Tmem170b
  gRNA
cccgatgctgacagcaatga

SEQ ID NO: 54422 - DNA, 20 bp, Artificial Sequence
  MKO10054422_A_Tmem170
  gRNA
cgtctaccgagcggcaggga

SEQ ID NO: 54423 - DNA, 20 bp, Artificial Sequence
  MKO10054423_A_Tmem170
  gRNA
tcagcctgaagctcgtgccg

SEQ ID NO: 54424 - DNA, 20 bp, Artificial Sequence
  MKO10054424_A_Tmem170
  gRNA
cactacacagaacgtctgcc

SEQ ID NO: 54425 - DNA, 20 bp, Artificial Sequence
  MKO10054425_A_Tmem171
  gRNA
tgcatctacgggagcgacag

SEQ ID NO: 54426 - DNA, 20 bp, Artificial Sequence
  MKO10054426_A_Tmem171
  gRNA
cttcttacccgtagttaaaa

SEQ ID NO: 54427 - DNA, 20 bp, Artificial Sequence
  MKO10054427_A_Tmem171
  gRNA
catggcggggatgcatcaga

SEQ ID NO: 54428 - DNA, 20 bp, Artificial Sequence
  MKO10054428_A_Tmem173
  gRNA
cggcagttatttcgagactc

SEQ ID NO: 54429 - DNA, 20 bp, Artificial Sequence
  MKO10054429_A_Tmem173
  gRNA
tacttgcggttgatcttacc

SEQ ID NO: 54430 - DNA, 20 bp, Artificial Sequence
  MKO10054430_A_Tmem173
  gRNA
cagcaaaacatcgaccgtgc

SEQ ID NO: 54431 - DNA, 20 bp, Artificial Sequence
  MKO10054431_A_Tmem174
  gRNA
ccttgtcgtcgtcggacacc

SEQ ID NO: 54432 - DNA, 20 bp, Artificial Sequence
  MKO10054432_A_Tmem174
  gRNA
acccagtaccgccgacatcc

SEQ ID NO: 54433 - DNA, 20 bp, Artificial Sequence
  MKO10054433_A_Tmem174
  gRNA
agagcgtatatctcctcata

SEQ ID NO: 54434 - DNA, 20 bp, Artificial Sequence
  MKO10054434_A_Tmem175
  gRNA
tacacttgccttgctcaacc

SEQ ID NO: 54435 - DNA, 20 bp, Artificial Sequence
  MKO10054435_A_Tmem175
  gRNA
gacatttctaatcgtaactg

SEQ ID NO: 54436 - DNA, 20 bp, Artificial Sequence
  MKO10054436_A_Tmem175
  gRNA
agacagcgatcctagttgct

SEQ ID NO: 54437 - DNA, 20 bp, Artificial Sequence
  MKO10054437_A_Tmem176a
  gRNA
ctcacgagacccaataacga

SEQ ID NO: 54438 - DNA, 20 bp, Artificial Sequence
  MKO10054438_A_Tmem176a
  gRNA
tatttagccatgtattccga

SEQ ID NO: 54439 - DNA, 20 bp, Artificial Sequence
  MKO10054439_A_Tmem176a
  gRNA
taccaccccgtttcttgtga

SEQ ID NO: 54440 - DNA, 20 bp, Artificial Sequence
  MKO10054440_A_Tmem176b
  gRNA
ctcgacgtagtagggaacac

SEQ ID NO: 54441 - DNA, 20 bp, Artificial Sequence
  MKO10054441_A_Tmem176b
  gRNA
tatcgcactgtcccataccc

SEQ ID NO: 54442 - DNA, 20 bp, Artificial Sequence
  MKO10054442_A_Tmem176b
  gRNA
tggactgagctgtgcgcctt

SEQ ID NO: 54443 - DNA, 20 bp, Artificial Sequence
  MKO10054443_A_Tmem177
  gRNA
gttgatgcgaaaccagtgtc

SEQ ID NO: 54444 - DNA, 20 bp, Artificial Sequence
  MKO10054444_A_Tmem177
  gRNA
aggctggctggaccgccgca

SEQ ID NO: 54445 - DNA, 20 bp, Artificial Sequence
  MKO10054445_A_Tmem177
  gRNA
gtctgcccaaaagactgcgt

SEQ ID NO: 54446 - DNA, 20 bp, Artificial Sequence
  MKO10054446_A_Tmem178b
  gRNA
gatcttcgtagaatgacagc

SEQ ID NO: 54447 - DNA, 20 bp, Artificial Sequence
  MKO10054447_A_Tmem178b
  gRNA
cgttacccacgctacctata

SEQ ID NO: 54448 - DNA, 20 bp, Artificial Sequence
  MKO10054448_A_Tmem178b
  gRNA
cgccgatgatccagccaaag

SEQ ID NO: 54449 - DNA, 20 bp, Artificial Sequence
  MKO10054449_A_Tmem178
  gRNA
tcgcttatccgtttattagc

SEQ ID NO: 54450 - DNA, 20 bp, Artificial Sequence
  MKO10054450_A_Tmem178
  gRNA
gggggtcggtctcgtaccag

SEQ ID NO: 54451 - DNA, 20 bp, Artificial Sequence
  MKO10054451_A_Tmem178
  gRNA
actggtacgagaccgacccc

SEQ ID NO: 54452 - DNA, 20 bp, Artificial Sequence
  MKO10054452_A_Tmem179b
  gRNA
gctgcatcgaagactcccac

SEQ ID NO: 54453 - DNA, 20 bp, Artificial Sequence
  MKO10054453_A_Tmem179b
  gRNA
tctcccgttacctaattgta

SEQ ID NO: 54454 - DNA, 20 bp, Artificial Sequence
  MKO10054454_A_Tmem179b
  gRNA
tctgcctgtatacttcgatt

SEQ ID NO: 54455 - DNA, 20 bp, Artificial Sequence
  MKO10054455_A_Tmem179
  gRNA
ggtttatcacaactaccgcc

SEQ ID NO: 54456 - DNA, 20 bp, Artificial Sequence
  MKO10054456_A_Tmem179
  gRNA
gagaacggccacgactttcg

SEQ ID NO: 54457 - DNA, 20 bp, Artificial Sequence
  MKO10054457_A_Tmem179
  gRNA
aacagacgcactgcgcgaag

SEQ ID NO: 54458 - DNA, 20 bp, Artificial Sequence
  MKO10054458_A_Tmem17
  gRNA
gcggctggagtcgccgaaca

SEQ ID NO: 54459 - DNA, 20 bp, Artificial Sequence
  MKO10054459_A_Tmem17
  gRNA
ccactcaccggccgcatcac

SEQ ID NO: 54460 - DNA, 20 bp, Artificial Sequence
  MKO10054460_A_Tmem17
  gRNA
taaccttgattgaagcgatc

SEQ ID NO: 54461 - DNA, 20 bp, Artificial Sequence
  MKO10054461_A_Tmem180
  gRNA
tcttcgcctcctacgccttt

SEQ ID NO: 54462 - DNA, 20 bp, Artificial Sequence
  MKO10054462_A_Tmem180
  gRNA
ccgggtcagcaccacgtctc

SEQ ID NO: 54463 - DNA, 20 bp, Artificial Sequence
  MKO10054463_A_Tmem180
  gRNA
cgtgggcatggacctggtac

SEQ ID NO: 54464 - DNA, 20 bp, Artificial Sequence
  MKO10054464_A_Tmem181a
  gRNA
cgcacatcagccatagttgt

SEQ ID NO: 54465 - DNA, 20 bp, Artificial Sequence
  MKO10054465_A_Tmem181a
  gRNA
accctcgatgccgacgaaga

SEQ ID NO: 54466 - DNA, 20 bp, Artificial Sequence
  MKO10054466_A_Tmem181a
  gRNA
cctacaggttggcacccatg

SEQ ID NO: 54467 - DNA, 20 bp, Artificial Sequence
  MKO10054467_A_Tmem182
  gRNA
cttactaattgcggagtcgt

SEQ ID NO: 54468 - DNA, 20 bp, Artificial Sequence
  MKO10054468_A_Tmem182
  gRNA
gaaaaaacgaccagccgtac

SEQ ID NO: 54469 - DNA, 20 bp, Artificial Sequence
  MKO10054469_A_Tmem182
  gRNA
gttgtgctctcccctcatga

SEQ ID NO: 54470 - DNA, 20 bp, Artificial Sequence
  MKO10054470_A_Tmem183a
  gRNA
gtcgcaccttcggtacaacc

SEQ ID NO: 54471 - DNA, 20 bp, Artificial Sequence
  MKO10054471_A_Tmem183a
  gRNA
atgtttcaggcactacacgc

SEQ ID NO: 54472 - DNA, 20 bp, Artificial Sequence
  MKO10054472_A_Tmem183a
  gRNA
cttgtttcagaagacccgga

SEQ ID NO: 54473 - DNA, 20 bp, Artificial Sequence
  MKO10054473_A_Tmem184a
  gRNA
atgacgaagcgctgctctcg

SEQ ID NO: 54474 - DNA, 20 bp, Artificial Sequence
  MKO10054474_A_Tmem184a
  gRNA
tctgtgcgagactgctacga

SEQ ID NO: 54475 - DNA, 20 bp, Artificial Sequence
  MKO10054475_A_Tmem184a
  gRNA
caaacacgcctgaaacgcct

SEQ ID NO: 54476 - DNA, 20 bp, Artificial Sequence
  MKO10054476_A_Tmem184b
  gRNA
cgtcagcaccgttatactcc

SEQ ID NO: 54477 - DNA, 20 bp, Artificial Sequence
  MKO10054477_A_Tmem184b
  gRNA
tgccgaagtacacgtagtac

SEQ ID NO: 54478 - DNA, 20 bp, Artificial Sequence
  MKO10054478_A_Tmem184b
  gRNA
cgtagatgggcacgatgaag

SEQ ID NO: 54479 - DNA, 20 bp, Artificial Sequence
  MKO10054479_A_Tmem184c
  gRNA
tcccaaaattgcaatatacg

SEQ ID NO: 54480 - DNA, 20 bp, Artificial Sequence
  MKO10054480_A_Tmem184c
  gRNA
cgttatgctgctgtccaccg

SEQ ID NO: 54481 - DNA, 20 bp, Artificial Sequence
  MKO10054481_A_Tmem184c
  gRNA
tccccacaatgacacgggta

SEQ ID NO: 54482 - DNA, 20 bp, Artificial Sequence
  MKO10054482_A_Tmem185b
  gRNA
caacccacgctaccgtacag

SEQ ID NO: 54483 - DNA, 20 bp, Artificial Sequence
  MKO10054483_A_Tmem185b
  gRNA
atccgcccgctgcgtgttag

SEQ ID NO: 54484 - DNA, 20 bp, Artificial Sequence
  MKO10054484_A_Tmem185b
  gRNA
cagcgtgcgctggccgcgaa

SEQ ID NO: 54485 - DNA, 20 bp, Artificial Sequence
  MKO10054485_A_Tmem186
  gRNA
ttcggccatagcgtaaggtg

SEQ ID NO: 54486 - DNA, 20 bp, Artificial Sequence
  MKO10054486_A_Tmem186
  gRNA
gtgcgaaccgttccctgtcc

SEQ ID NO: 54487 - DNA, 20 bp, Artificial Sequence
  MKO10054487_A_Tmem186
  gRNA
acacatcctgaacccgttcc

SEQ ID NO: 54488 - DNA, 20 bp, Artificial Sequence
  MKO10054488_A_Tmem189
  gRNA
catacgcaccttcccgacaa

SEQ ID NO: 54489 - DNA, 20 bp, Artificial Sequence
  MKO10054489_A_Tmem189
  gRNA
aagttccggacccagagccc

SEQ ID NO: 54490 - DNA, 20 bp, Artificial Sequence
  MKO10054490_A_Tmem189
  gRNA
cagtctcatcgcccacaact

SEQ ID NO: 54491 - DNA, 20 bp, Artificial Sequence
  MKO10054491_A_Tmem18
  gRNA
tgccgagtacatcaacgaag

SEQ ID NO: 54492 - DNA, 20 bp, Artificial Sequence
  MKO10054492_A_Tmem18
  gRNA
agccacttcgttgatgtact

SEQ ID NO: 54493 - DNA, 20 bp, Artificial Sequence
  MKO10054493_A_Tmem18
  gRNA
gatcgggcacttcctgtgtc

SEQ ID NO: 54494 - DNA, 20 bp, Artificial Sequence
  MKO10054494_A_Tmem190
  gRNA
gtgcagcatgtcttggcgcc

SEQ ID NO: 54495 - DNA, 20 bp, Artificial Sequence
  MKO10054495_A_Tmem190
  gRNA
tcgtcggtccttagacagtg

SEQ ID NO: 54496 - DNA, 20 bp, Artificial Sequence
  MKO10054496_A_Tmem190
  gRNA
gatgatagcacacaccgtcc

SEQ ID NO: 54497 - DNA, 20 bp, Artificial Sequence
  MKO10054497_A_Tmem191c
  gRNA
agcgtgcggagcgggctcgt

SEQ ID NO: 54498 - DNA, 20 bp, Artificial Sequence
  MKO10054498_A_Tmem191c
  gRNA
ctcacatgcctcgcctcgaa

SEQ ID NO: 54499 - DNA, 20 bp, Artificial Sequence
  MKO10054499_A_Tmem191c
  gRNA
gtacctgcagcgccacaagc

SEQ ID NO: 54500 - DNA, 20 bp, Artificial Sequence
  MKO10054500_A_Tmem192
  gRNA
cccagatctaccgctctacg

SEQ ID NO: 54501 - DNA, 20 bp, Artificial Sequence
  MKO10054501_A_Tmem192
  gRNA
gctacgtccagtatcaccac

SEQ ID NO: 54502 - DNA, 20 bp, Artificial Sequence
  MKO10054502_A_Tmem192
  gRNA
ggtcgtcatccatactttgt

SEQ ID NO: 54503 - DNA, 20 bp, Artificial Sequence
  MKO10054503_A_Tmem194b
  gRNA
tcgactcacgcttactatgt

SEQ ID NO: 54504 - DNA, 20 bp, Artificial Sequence
  MKO10054504_A_Tmem194b
  gRNA
gtaggtgacagtaaccagcc

SEQ ID NO: 54505 - DNA, 20 bp, Artificial Sequence
  MKO10054505_A_Tmem194b
  gRNA
atcaacattcgcaaatccag

SEQ ID NO: 54506 - DNA, 20 bp, Artificial Sequence
  MKO10054506_A_Tmem194
  gRNA
tgtggtcggcggttggtcca

SEQ ID NO: 54507 - DNA, 20 bp, Artificial Sequence
  MKO10054507_A_Tmem194
  gRNA
gtcgccggctgcgtggtctg

SEQ ID NO: 54508 - DNA, 20 bp, Artificial Sequence
  MKO10054508_A_Tmem194
  gRNA
tgatatatggacacggatac

SEQ ID NO: 54509 - DNA, 20 bp, Artificial Sequence
  MKO10054509_A_Tmem196
  gRNA
ggggacgagtctccgagctg

SEQ ID NO: 54510 - DNA, 20 bp, Artificial Sequence
  MKO10054510_A_Tmem196
  gRNA
gcaccgcaactgatgtttaa

SEQ ID NO: 54511 - DNA, 20 bp, Artificial Sequence
  MKO10054511_A_Tmem196
  gRNA
cgagagcacacgccgcagct

SEQ ID NO: 54512 - DNA, 20 bp, Artificial Sequence
  MKO10054512_A_Tmem198b
  gRNA
agccccatcagtccgccgac

SEQ ID NO: 54513 - DNA, 20 bp, Artificial Sequence
  MKO10054513_A_Tmem198b
  gRNA
tttctgaccggtctcctgct

SEQ ID NO: 54514 - DNA, 20 bp, Artificial Sequence
  MKO10054514_A_Tmem198b
  gRNA
tccggatattgggggtaagc

SEQ ID NO: 54515 - DNA, 20 bp, Artificial Sequence
  MKO10054515_A_Tmem198
  gRNA
cggcgctatgccgggtacta

SEQ ID NO: 54516 - DNA, 20 bp, Artificial Sequence
  MKO10054516_A_Tmem198
  gRNA
gcaagcgcgggcatcgcact

SEQ ID NO: 54517 - DNA, 20 bp, Artificial Sequence
  MKO10054517_A_Tmem198
  gRNA
ggacatgactacacccgtac

SEQ ID NO: 54518 - DNA, 20 bp, Artificial Sequence
  MKO10054518_A_Tmem199
  gRNA
cactcgcaatgtcacttgtc

SEQ ID NO: 54519 - DNA, 20 bp, Artificial Sequence
  MKO10054519_A_Tmem199
  gRNA
gatccgcttatactcctcat

SEQ ID NO: 54520 - DNA, 20 bp, Artificial Sequence
  MKO10054520_A_Tmem199
  gRNA
cggggaggcttcacaatctc

SEQ ID NO: 54521 - DNA, 20 bp, Artificial Sequence
  MKO10054521_A_Tmem19
  gRNA
ggcccacaaaggtaccgccg

SEQ ID NO: 54522 - DNA, 20 bp, Artificial Sequence
  MKO10054522_A_Tmem19
  gRNA
gatcacaacaggaacgacga

SEQ ID NO: 54523 - DNA, 20 bp, Artificial Sequence
  MKO10054523_A_Tmem19
  gRNA
ggggcgacgatgcagttctc

SEQ ID NO: 54524 - DNA, 20 bp, Artificial Sequence
  MKO10054524_A_Tmem200a
  gRNA
ggaacgagcaaccgatccat

SEQ ID NO: 54525 - DNA, 20 bp, Artificial Sequence
  MKO10054525_A_Tmem200a
  gRNA
gcgcccacgagcagatgttg

SEQ ID NO: 54526 - DNA, 20 bp, Artificial Sequence
  MKO10054526_A_Tmem200a
  gRNA
caggcaaatggcctatacgc

SEQ ID NO: 54527 - DNA, 20 bp, Artificial Sequence
  MKO10054527_A_Tmem200b
  gRNA
acgggccgcacgagcgcctg

SEQ ID NO: 54528 - DNA, 20 bp, Artificial Sequence
  MKO10054528_A_Tmem200b
  gRNA
gctctacgagaaccgcgacc

SEQ ID NO: 54529 - DNA, 20 bp, Artificial Sequence
  MKO10054529_A_Tmem200b
  gRNA
ggcggcccaggcgcgaaacg

SEQ ID NO: 54530 - DNA, 20 bp, Artificial Sequence
  MKO10054530_A_Tmem200c
  gRNA
tctaccgcgagcgctccagt

SEQ ID NO: 54531 - DNA, 20 bp, Artificial Sequence
  MKO10054531_A_Tmem200c
  gRNA
ccgcgttggcgcaaatgaag

SEQ ID NO: 54532 - DNA, 20 bp, Artificial Sequence
  MKO10054532_A_Tmem200c
  gRNA
tcgccggaccacagttgccg

SEQ ID NO: 54533 - DNA, 20 bp, Artificial Sequence
  MKO10054533_A_Tmem201
  gRNA
cagcctcccgacgccggaac

SEQ ID NO: 54534 - DNA, 20 bp, Artificial Sequence
  MKO10054534_A_Tmem201
  gRNA
accccagggccgctacgatg

SEQ ID NO: 54535 - DNA, 20 bp, Artificial Sequence
  MKO10054535_A_Tmem201
  gRNA
gttctgcaaccacgatacac

SEQ ID NO: 54536 - DNA, 20 bp, Artificial Sequence
  MKO10054536_A_Tmem202
  gRNA
tcacatactgctgtcgcttc

SEQ ID NO: 54537 - DNA, 20 bp, Artificial Sequence
  MKO10054537_A_Tmem202
  gRNA
accacagaacatccggatgt

SEQ ID NO: 54538 - DNA, 20 bp, Artificial Sequence
  MKO10054538_A_Tmem202
  gRNA
actgcaccaactaagatagt

SEQ ID NO: 54539 - DNA, 20 bp, Artificial Sequence
  MKO10054539_A_Tmem203
  gRNA
gctagttgacgcgacaagcc

SEQ ID NO: 54540 - DNA, 20 bp, Artificial Sequence
  MKO10054540_A_Tmem203
  gRNA
gcgcgatgttattctcgctg

SEQ ID NO: 54541 - DNA, 20 bp, Artificial Sequence
  MKO10054541_A_Tmem203
  gRNA
gagtcgaacggaaacgatgg

SEQ ID NO: 54542 - DNA, 20 bp, Artificial Sequence
  MKO10054542_A_Tmem204
  gRNA
tgcgtccgtcctccagcgtc

SEQ ID NO: 54543 - DNA, 20 bp, Artificial Sequence
  MKO10054543_A_Tmem204
  gRNA
acttacgtttgacggtgcct

SEQ ID NO: 54544 - DNA, 20 bp, Artificial Sequence
  MKO10054544_A_Tmem204
  gRNA
catgatgcgtgcctgcaacc

SEQ ID NO: 54545 - DNA, 20 bp, Artificial Sequence
  MKO10054545_A_Tmem205
  gRNA
accagtccaaatgtgtgccg

SEQ ID NO: 54546 - DNA, 20 bp, Artificial Sequence
  MKO10054546_A_Tmem205
  gRNA
ccaagtacagtgctctacgc

SEQ ID NO: 54547 - DNA, 20 bp, Artificial Sequence
  MKO10054547_A_Tmem205
  gRNA
ctcaagccagcgagcattga

SEQ ID NO: 54548 - DNA, 20 bp, Artificial Sequence
  MKO10054548_A_Tmem206
  gRNA
gtggatcgctacgacgctcc

SEQ ID NO: 54549 - DNA, 20 bp, Artificial Sequence
  MKO10054549_A_Tmem206
  gRNA
cactcacctggcacgacacc

SEQ ID NO: 54550 - DNA, 20 bp, Artificial Sequence
  MKO10054550_A_Tmem206
  gRNA
tcgcctgaaccagagcaatg

SEQ ID NO: 54551 - DNA, 20 bp, Artificial Sequence
  MKO10054551_A_Tmem207
  gRNA
tatgacgagcgatatcctga

SEQ ID NO: 54552 - DNA, 20 bp, Artificial Sequence
  MKO10054552_A_Tmem207
  gRNA
caatcctcccagacgcacca

SEQ ID NO: 54553 - DNA, 20 bp, Artificial Sequence
  MKO10054553_A_Tmem207
  gRNA
aggacctaaagcaccaaagc

SEQ ID NO: 54554 - DNA, 20 bp, Artificial Sequence
  MKO10054554_A_Tmem208
  gRNA
tggctcccagtatgatccga

SEQ ID NO: 54555 - DNA, 20 bp, Artificial Sequence
  MKO10054555_A_Tmem208
  gRNA
ctaccactctatgagctcga

SEQ ID NO: 54556 - DNA, 20 bp, Artificial Sequence
  MKO10054556_A_Tmem208
  gRNA
acacggccaagctaaagccc

SEQ ID NO: 54557 - DNA, 20 bp, Artificial Sequence
  MKO10054557_A_Tmem209
  gRNA
taccgtagcaccaacaagtc

SEQ ID NO: 54558 - DNA, 20 bp, Artificial Sequence
  MKO10054558_A_Tmem209
  gRNA
gactacacctccccgtgatt

SEQ ID NO: 54559 - DNA, 20 bp, Artificial Sequence
  MKO10054559_A_Tmem209
  gRNA
attacttaccgatataccag

SEQ ID NO: 54560 - DNA, 20 bp, Artificial Sequence
  MKO10054560_A_Tmem210
  gRNA
caataagggcctcacggctg

SEQ ID NO: 54561 - DNA, 20 bp, Artificial Sequence
  MKO10054561_A_Tmem210
  gRNA
caccaatcgccacaacaacg

SEQ ID NO: 54562 - DNA, 20 bp, Artificial Sequence
  MKO10054562_A_Tmem210
  gRNA
atcatggatacgtccagatc

SEQ ID NO: 54563 - DNA, 20 bp, Artificial Sequence
  MKO10054563_A_Tmem211
  gRNA
ccccccgaaggttgtttgcc

SEQ ID NO: 54564 - DNA, 20 bp, Artificial Sequence
  MKO10054564_A_Tmem211
  gRNA
tgtcggaccaaagcccgtcc

SEQ ID NO: 54565 - DNA, 20 bp, Artificial Sequence
  MKO10054565_A_Tmem211
  gRNA
tcagccggcatgctccgctg

SEQ ID NO: 54566 - DNA, 20 bp, Artificial Sequence
  MKO10054566_A_Tmem212
  gRNA
accgacgggaacttcgtgta

SEQ ID NO: 54567 - DNA, 20 bp, Artificial Sequence
  MKO10054567_A_Tmem212
  gRNA
tccgtacacgaagttcccgt

SEQ ID NO: 54568 - DNA, 20 bp, Artificial Sequence
  MKO10054568_A_Tmem212
  gRNA
tgaggccccccagagtaacc

SEQ ID NO: 54569 - DNA, 20 bp, Artificial Sequence
  MKO10054569_A_Tmem213
  gRNA
actactgttacctgtaccgc

SEQ ID NO: 54570 - DNA, 20 bp, Artificial Sequence
  MKO10054570_A_Tmem213
  gRNA
cttccgtagatgaatatggc

SEQ ID NO: 54571 - DNA, 20 bp, Artificial Sequence
  MKO10054571_A_Tmem213
  gRNA
atccttgggctcatgccgcc

SEQ ID NO: 54572 - DNA, 20 bp, Artificial Sequence
  MKO10054572_A_Tmem214
  gRNA
tctctaggggagtcgctaca

SEQ ID NO: 54573 - DNA, 20 bp, Artificial Sequence
  MKO10054573_A_Tmem214
  gRNA
ctcagagtgggctccatccg

SEQ ID NO: 54574 - DNA, 20 bp, Artificial Sequence
  MKO10054574_A_Tmem214
  gRNA
ggatgatcccacgtagctct

SEQ ID NO: 54575 - DNA, 20 bp, Artificial Sequence
  MKO10054575_A_Tmem215
  gRNA
caggtcagactattgtctcg

SEQ ID NO: 54576 - DNA, 20 bp, Artificial Sequence
  MKO10054576_A_Tmem215
  gRNA
agtgggggtagtaacggagc

SEQ ID NO: 54577 - DNA, 20 bp, Artificial Sequence
  MKO10054577_A_Tmem215
  gRNA
agagcaatggcggcgatgcc

SEQ ID NO: 54578 - DNA, 20 bp, Artificial Sequence
  MKO10054578_A_Tmem216
  gRNA
gaccttcccatccgctatga

SEQ ID NO: 54579 - DNA, 20 bp, Artificial Sequence
  MKO10054579_A_Tmem216
  gRNA
tgccagcgaaagatgcccct

SEQ ID NO: 54580 - DNA, 20 bp, Artificial Sequence
  MKO10054580_A_Tmem216
  gRNA
gtgatgctgctgctctatct

SEQ ID NO: 54581 - DNA, 20 bp, Artificial Sequence
  MKO10054581_A_Tmem217
  gRNA
gcctcatgagctacgtcatc

SEQ ID NO: 54582 - DNA, 20 bp, Artificial Sequence
  MKO10054582_A_Tmem217
  gRNA
cctcaccgacgagttcagtg

SEQ ID NO: 54583 - DNA, 20 bp, Artificial Sequence
  MKO10054583_A_Tmem217
  gRNA
ttcccaaagagatacgtcta

SEQ ID NO: 54584 - DNA, 20 bp, Artificial Sequence
  MKO10054584_A_Tmem218
  gRNA
gctgggaattcactggctcg

SEQ ID NO: 54585 - DNA, 20 bp, Artificial Sequence
  MKO10054585_A_Tmem218
  gRNA
tagtaatgatcagagctccg

SEQ ID NO: 54586 - DNA, 20 bp, Artificial Sequence
  MKO10054586_A_Tmem218
  gRNA
gccttacctagctatcccag

SEQ ID NO: 54587 - DNA, 20 bp, Artificial Sequence
  MKO10054587_A_Tmem219
  gRNA
tggcaagggcctcacgtcgt

SEQ ID NO: 54588 - DNA, 20 bp, Artificial Sequence
  MKO10054588_A_Tmem219
  gRNA
atccgcgcccagagttccac

SEQ ID NO: 54589 - DNA, 20 bp, Artificial Sequence
  MKO10054589_A_Tmem219
  gRNA
gtacttacctggggaatgtc

SEQ ID NO: 54590 - DNA, 20 bp, Artificial Sequence
  MKO10054590_A_Tmem220
  gRNA
cgtttgtaggcaacttcatc

SEQ ID NO: 54591 - DNA, 20 bp, Artificial Sequence
  MKO10054591_A_Tmem220
  gRNA
tcatgggaagtgggagtcgc

SEQ ID NO: 54592 - DNA, 20 bp, Artificial Sequence
  MKO10054592_A_Tmem220
  gRNA
gctttgcgtgaagcaagaag

SEQ ID NO: 54593 - DNA, 20 bp, Artificial Sequence
  MKO10054593_A_Tmem221
  gRNA
cgcgccatgggccgttccta

SEQ ID NO: 54594 - DNA, 20 bp, Artificial Sequence
  MKO10054594_A_Tmem221
  gRNA
cttcggcgcgtacgcaccga

SEQ ID NO: 54595 - DNA, 20 bp, Artificial Sequence
  MKO10054595_A_Tmem221
  gRNA
ctcccggagaccccgacgag

SEQ ID NO: 54596 - DNA, 20 bp, Artificial Sequence
  MKO10054596_A_Tmem222
  gRNA
cccggacaggtgtatgcgag

SEQ ID NO: 54597 - DNA, 20 bp, Artificial Sequence
  MKO10054597_A_Tmem222
  gRNA
cgaagagtataagcaccgaa

SEQ ID NO: 54598 - DNA, 20 bp, Artificial Sequence
  MKO10054598_A_Tmem222
  gRNA
gggactcaccgaaacaaaat

SEQ ID NO: 54599 - DNA, 20 bp, Artificial Sequence
  MKO10054599_A_Tmem223
  gRNA
ggctgttggttgcggcacga

SEQ ID NO: 54600 - DNA, 20 bp, Artificial Sequence
  MKO10054600_A_Tmem223
  gRNA
agaagcggccccgctcgtgc

SEQ ID NO: 54601 - DNA, 20 bp, Artificial Sequence
  MKO10054601_A_Tmem223
  gRNA
cctgcaggagtcttggtcct

SEQ ID NO: 54602 - DNA, 20 bp, Artificial Sequence
  MKO10054602_A_Tmem225
  gRNA
tgcacatggacgatgcttcg

SEQ ID NO: 54603 - DNA, 20 bp, Artificial Sequence
  MKO10054603_A_Tmem225
  gRNA
ttatccgcctgaccacctcc

SEQ ID NO: 54604 - DNA, 20 bp, Artificial Sequence
  MKO10054604_A_Tmem225
  gRNA
gaaacaacttcgattgtact

SEQ ID NO: 54605 - DNA, 20 bp, Artificial Sequence
  MKO10054605_A_Tmem229a
  gRNA
ctgcacccgccacaacacgt

SEQ ID NO: 54606 - DNA, 20 bp, Artificial Sequence
  MKO10054606_A_Tmem229a
  gRNA
caccggcggactgcgtagcc

SEQ ID NO: 54607 - DNA, 20 bp, Artificial Sequence
  MKO10054607_A_Tmem229a
  gRNA
gccaatggcgggcagcgatg

SEQ ID NO: 54608 - DNA, 20 bp, Artificial Sequence
  MKO10054608_A_Tmem229b
  gRNA
cgtatgtaccttcgtctgcg

SEQ ID NO: 54609 - DNA, 20 bp, Artificial Sequence
  MKO10054609_A_Tmem229b
  gRNA
cccagggacaggcgttgaac

SEQ ID NO: 54610 - DNA, 20 bp, Artificial Sequence
  MKO10054610_A_Tmem229b
  gRNA
ggtacatacgctccacgatc

SEQ ID NO: 54611 - DNA, 20 bp, Artificial Sequence
  MKO10054611_A_Tmem230
  gRNA
cgatggctacattgaccttc

SEQ ID NO: 54612 - DNA, 20 bp, Artificial Sequence
  MKO10054612_A_Tmem230
  gRNA
gttgccaggttggtacgaga

SEQ ID NO: 54613 - DNA, 20 bp, Artificial Sequence
  MKO10054613_A_Tmem230
  gRNA
tcaaaaacagcacggtagca

SEQ ID NO: 54614 - DNA, 20 bp, Artificial Sequence
  MKO10054614_A_Tmem231
  gRNA
gaaccacgcaccgacacgag

SEQ ID NO: 54615 - DNA, 20 bp, Artificial Sequence
  MKO10054615_A_Tmem231
  gRNA
ccacattgttgccgcctatc

SEQ ID NO: 54616 - DNA, 20 bp, Artificial Sequence
  MKO10054616_A_Tmem231
  gRNA
cctgcgcgtcccgctcgtgt

SEQ ID NO: 54617 - DNA, 20 bp, Artificial Sequence
  MKO10054617_A_Tmem232
  gRNA
aaatatgctccacgcctcct

SEQ ID NO: 54618 - DNA, 20 bp, Artificial Sequence
  MKO10054618_A_Tmem232
  gRNA
atgtgcatcttccgaccgca

SEQ ID NO: 54619 - DNA, 20 bp, Artificial Sequence
  MKO10054619_A_Tmem232
  gRNA
ctgttgcgatgcattcatga

SEQ ID NO: 54620 - DNA, 20 bp, Artificial Sequence
  MKO10054620_A_Tmem233
  gRNA
gtgtttctgcccagcgtacc

SEQ ID NO: 54621 - DNA, 20 bp, Artificial Sequence
  MKO10054621_A_Tmem233
  gRNA
cctggagaagtgcaccgcac

SEQ ID NO: 54622 - DNA, 20 bp, Artificial Sequence
  MKO10054622_A_Tmem233
  gRNA
gggctctggctgtcgactca

SEQ ID NO: 54623 - DNA, 20 bp, Artificial Sequence
  MKO10054623_A_Tmem234
  gRNA
agcaagtgcgtgagcggacg

SEQ ID NO: 54624 - DNA, 20 bp, Artificial Sequence
  MKO10054624_A_Tmem234
  gRNA
tggcccactcaggagtgcga

SEQ ID NO: 54625 - DNA, 20 bp, Artificial Sequence
  MKO10054625_A_Tmem234
  gRNA
tccgctcacgcacttgctcc

SEQ ID NO: 54626 - DNA, 20 bp, Artificial Sequence
  MKO10054626_A_Tmem235
  gRNA
cgtgcgtcacgccgtacgtg

SEQ ID NO: 54627 - DNA, 20 bp, Artificial Sequence
  MKO10054627_A_Tmem235
  gRNA
gtggaggcggcccgcacgta

SEQ ID NO: 54628 - DNA, 20 bp, Artificial Sequence
  MKO10054628_A_Tmem235
  gRNA
agcctcgtcctcatcgtatg

SEQ ID NO: 54629 - DNA, 20 bp, Artificial Sequence
  MKO10054629_A_Tmem236
  gRNA
gcatacctcggtgactgcta

SEQ ID NO: 54630 - DNA, 20 bp, Artificial Sequence
  MKO10054630_A_Tmem236
  gRNA
gtactggcgtgatcgttccc

SEQ ID NO: 54631 - DNA, 20 bp, Artificial Sequence
  MKO10054631_A_Tmem236
  gRNA
aggctgacttgtacaccgcc

SEQ ID NO: 54632 - DNA, 20 bp, Artificial Sequence
  MKO10054632_A_Tmem237
  gRNA
gtcacgtgaagtgctatcca

SEQ ID NO: 54633 - DNA, 20 bp, Artificial Sequence
  MKO10054633_A_Tmem237
  gRNA
atgctgagcccgttgttaac

SEQ ID NO: 54634 - DNA, 20 bp, Artificial Sequence
  MKO10054634_A_Tmem237
  gRNA
tccagaacaaaaagctcgct

SEQ ID NO: 54635 - DNA, 20 bp, Artificial Sequence
  MKO10054635_A_Tmem238
  gRNA
caacatcgagatctcgcgcc

SEQ ID NO: 54636 - DNA, 20 bp, Artificial Sequence
  MKO10054636_A_Tmem238
  gRNA
tgactacggcctacgaccct

SEQ ID NO: 54637 - DNA, 20 bp, Artificial Sequence
  MKO10054637_A_Tmem238
  gRNA
tggcgggcgccgaccagcga

SEQ ID NO: 54638 - DNA, 20 bp, Artificial Sequence
  MKO10054638_A_Tmem239
  gRNA
atgatatccgactccactcg

SEQ ID NO: 54639 - DNA, 20 bp, Artificial Sequence
  MKO10054639_A_Tmem239
  gRNA
acccagtggtggaatacatc

SEQ ID NO: 54640 - DNA, 20 bp, Artificial Sequence
  MKO10054640_A_Tmem239
  gRNA
tccaagtcctgagcgtagcc

SEQ ID NO: 54641 - DNA, 20 bp, Artificial Sequence
  MKO10054641_A_Tmem240
  gRNA
accgactggtccccgtcgta

SEQ ID NO: 54642 - DNA, 20 bp, Artificial Sequence
  MKO10054642_A_Tmem240
  gRNA
cactacgtgatcccatacga

SEQ ID NO: 54643 - DNA, 20 bp, Artificial Sequence
  MKO10054643_A_Tmem240
  gRNA
agacgcggtcctcgccccgc

SEQ ID NO: 54644 - DNA, 20 bp, Artificial Sequence
  MKO10054644_A_Tmem241
  gRNA
gctgagcagagcgtcgtgtc

SEQ ID NO: 54645 - DNA, 20 bp, Artificial Sequence
  MKO10054645_A_Tmem241
  gRNA
actcacccttggaataatgt

SEQ ID NO: 54646 - DNA, 20 bp, Artificial Sequence
  MKO10054646_A_Tmem241
  gRNA
catcgctctcaaagatctgt

SEQ ID NO: 54647 - DNA, 20 bp, Artificial Sequence
  MKO10054647_A_Tmem242
  gRNA
tccggacgatcggttgtttc

SEQ ID NO: 54648 - DNA, 20 bp, Artificial Sequence
  MKO10054648_A_Tmem242
  gRNA
accagaaacaaccgatcgtc

SEQ ID NO: 54649 - DNA, 20 bp, Artificial Sequence
  MKO10054649_A_Tmem242
  gRNA
gccgcagcgggaatgctagc

SEQ ID NO: 54650 - DNA, 20 bp, Artificial Sequence
  MKO10054650_A_Tmem243
  gRNA
tagatctactggtatcgaca

SEQ ID NO: 54651 - DNA, 20 bp, Artificial Sequence
  MKO10054651_A_Tmem243
  gRNA
gcagacgtctccccgaacag

SEQ ID NO: 54652 - DNA, 20 bp, Artificial Sequence
  MKO10054652_A_Tmem243
  gRNA
cgaatcatcaatttagttgt

SEQ ID NO: 54653 - DNA, 20 bp, Artificial Sequence
  MKO10054653_A_Tmem245
  gRNA
gagcagtttcgattcctgtg

SEQ ID NO: 54654 - DNA, 20 bp, Artificial Sequence
  MKO10054654_A_Tmem245
  gRNA
tgctgatggtttcattcaag

SEQ ID NO: 54655 - DNA, 20 bp, Artificial Sequence
  MKO10054655_A_Tmem245
  gRNA
cagccctctgaccctccgac

SEQ ID NO: 54656 - DNA, 20 bp, Artificial Sequence
  MKO10054656_A_Tmem246
  gRNA
ccctcgtagcggttggccac

SEQ ID NO: 54657 - DNA, 20 bp, Artificial Sequence
  MKO10054657_A_Tmem246
  gRNA
gcagctcttcattctaaccg

SEQ ID NO: 54658 - DNA, 20 bp, Artificial Sequence
  MKO10054658_A_Tmem246
  gRNA
atgaaaattgtaccgtaggc

SEQ ID NO: 54659 - DNA, 20 bp, Artificial Sequence
  MKO10054659_A_Tmem247
  gRNA
gacagaacaccgcaacgcga

SEQ ID NO: 54660 - DNA, 20 bp, Artificial Sequence
  MKO10054660_A_Tmem247
  gRNA
tctccagctccatcgcgttg

SEQ ID NO: 54661 - DNA, 20 bp, Artificial Sequence
  MKO10054661_A_Tmem247
  gRNA
tccgcagcacggtggttatc

SEQ ID NO: 54662 - DNA, 20 bp, Artificial Sequence
  MKO10054662_A_Tmem248
  gRNA
ggcacagtcatcggcgttcc

SEQ ID NO: 54663 - DNA, 20 bp, Artificial Sequence
  MKO10054663_A_Tmem248
  gRNA
gaagatcttgtaccagagcg

SEQ ID NO: 54664 - DNA, 20 bp, Artificial Sequence
  MKO10054664_A_Tmem248
  gRNA
catacagcaacgccacgctc

SEQ ID NO: 54665 - DNA, 20 bp, Artificial Sequence
  MKO10054665_A_Tmem251
  gRNA
ccgctctcgtacaagaataa

SEQ ID NO: 54666 - DNA, 20 bp, Artificial Sequence
  MKO10054666_A_Tmem251
  gRNA
cctttattcttgtacgagag

SEQ ID NO: 54667 - DNA, 20 bp, Artificial Sequence
  MKO10054667_A_Tmem251
  gRNA
agtgactcttgctcgcttgc

SEQ ID NO: 54668 - DNA, 20 bp, Artificial Sequence
  MKO10054668_A_Tmem252
  gRNA
cagcacgtacctgtctacag

SEQ ID NO: 54669 - DNA, 20 bp, Artificial Sequence
  MKO10054669_A_Tmem252
  gRNA
cccgcctttagcaccctgct

SEQ ID NO: 54670 - DNA, 20 bp, Artificial Sequence
  MKO10054670_A_Tmem252
  gRNA
aaatcatcaggaagccggtg

SEQ ID NO: 54671 - DNA, 20 bp, Artificial Sequence
  MKO10054671_A_Tmem253
  gRNA
cgcggaggccttcaccctag

SEQ ID NO: 54672 - DNA, 20 bp, Artificial Sequence
  MKO10054672_A_Tmem253
  gRNA
ccgcaacgaagcccaagatc

SEQ ID NO: 54673 - DNA, 20 bp, Artificial Sequence
  MKO10054673_A_Tmem253
  gRNA
tggagaccagcactcccgct

SEQ ID NO: 54674 - DNA, 20 bp, Artificial Sequence
  MKO10054674_A_Tmem254a
  gRNA
cgagatggtggtggcgaagt

SEQ ID NO: 54675 - DNA, 20 bp, Artificial Sequence
  MKO10054675_A_Tmem254a
  gRNA
ccgcgaagtagcccagccct

SEQ ID NO: 54676 - DNA, 20 bp, Artificial Sequence
  MKO10054676_A_Tmem254a
  gRNA
tcttgcagtgggctgtcttc

SEQ ID NO: 54677 - DNA, 20 bp, Artificial Sequence
  MKO10054677_A_Tmem254b
  gRNA
cgagatggtggtggcgaagt

SEQ ID NO: 54678 - DNA, 20 bp, Artificial Sequence
  MKO10054678_A_Tmem254b
  gRNA
ccgcgaagtagcccagccct

SEQ ID NO: 54679 - DNA, 20 bp, Artificial Sequence
  MKO10054679_A_Tmem254b
  gRNA
tcttgcagtgggctgtcttc

SEQ ID NO: 54680 - DNA, 20 bp, Artificial Sequence
  MKO10054680_A_Tmem254c
  gRNA
cgagatggtggtggcgaagt

SEQ ID NO: 54681 - DNA, 20 bp, Artificial Sequence
  MKO10054681_A_Tmem254c
  gRNA
ccgcgaagtagcccagccct

SEQ ID NO: 54682 - DNA, 20 bp, Artificial Sequence
  MKO10054682_A_Tmem254c
  gRNA
tcttgcagtgggctgtcttc

SEQ ID NO: 54683 - DNA, 20 bp, Artificial Sequence
  MKO10054683_A_Tmem255a
  gRNA
caaagtaacggtgacgtaga

SEQ ID NO: 54684 - DNA, 20 bp, Artificial Sequence
  MKO10054684_A_Tmem255a
  gRNA
tctgccgcttgttctcaatc

SEQ ID NO: 54685 - DNA, 20 bp, Artificial Sequence
  MKO10054685_A_Tmem255a
  gRNA
gttccgcttcctcctattga

SEQ ID NO: 54686 - DNA, 20 bp, Artificial Sequence
  MKO10054686_A_Tmem255b
  gRNA
tgcgaacacgctgtcgacta

SEQ ID NO: 54687 - DNA, 20 bp, Artificial Sequence
  MKO10054687_A_Tmem255b
  gRNA
tcgacagcgtgttcgcagcg

SEQ ID NO: 54688 - DNA, 20 bp, Artificial Sequence
  MKO10054688_A_Tmem255b
  gRNA
ccgctcccaccgcccgtgcc

SEQ ID NO: 54689 - DNA, 20 bp, Artificial Sequence
  MKO10054689_A_Tmem256
  gRNA
cgccgcctaggtgccttgtc

SEQ ID NO: 54690 - DNA, 20 bp, Artificial Sequence
  MKO10054690_A_Tmem256
  gRNA
gccttgggtttggcctccta

SEQ ID NO: 54691 - DNA, 20 bp, Artificial Sequence
  MKO10054691_A_Tmem256
  gRNA
ctctacaggcgctcagtttc

SEQ ID NO: 54692 - DNA, 20 bp, Artificial Sequence
  MKO10054692_A_Tmem258
  gRNA
gggaagacagccgggttcac

SEQ ID NO: 54693 - DNA, 20 bp, Artificial Sequence
  MKO10054693_A_Tmem258
  gRNA
gtacaccagcccagtgaacc

SEQ ID NO: 54694 - DNA, 20 bp, Artificial Sequence
  MKO10054694_A_Tmem258
  gRNA
gtaaatatcgcgtgtgtact

SEQ ID NO: 54695 - DNA, 20 bp, Artificial Sequence
  MKO10054695_A_Tmem259
  gRNA
aggtgcgccacaactcgagc

SEQ ID NO: 54696 - DNA, 20 bp, Artificial Sequence
  MKO10054696_A_Tmem259
  gRNA
tagagcatgttcgagatcga

SEQ ID NO: 54697 - DNA, 20 bp, Artificial Sequence
  MKO10054697_A_Tmem259
  gRNA
cccaaagcactggtcccgcg

SEQ ID NO: 54698 - DNA, 20 bp, Artificial Sequence
  MKO10054698_A_Tmem25
  gRNA
agaacctcctgcaacccgac

SEQ ID NO: 54699 - DNA, 20 bp, Artificial Sequence
  MKO10054699_A_Tmem25
  gRNA
ctgccactccccgattagcc

SEQ ID NO: 54700 - DNA, 20 bp, Artificial Sequence
  MKO10054700_A_Tmem25
  gRNA
cttggcacacaacctctcgg

SEQ ID NO: 54701 - DNA, 20 bp, Artificial Sequence
  MKO10054701_A_Tmem260
  gRNA
cggtaggcgacggagccaaa

SEQ ID NO: 54702 - DNA, 20 bp, Artificial Sequence
  MKO10054702_A_Tmem260
  gRNA
ctttctcagatagcggccat

SEQ ID NO: 54703 - DNA, 20 bp, Artificial Sequence
  MKO10054703_A_Tmem260
  gRNA
taccgcgtcaatctcctctg

SEQ ID NO: 54704 - DNA, 20 bp, Artificial Sequence
  MKO10054704_A_Tmem261
  gRNA
ctcggtactccccgaaaaag

SEQ ID NO: 54705 - DNA, 20 bp, Artificial Sequence
  MKO10054705_A_Tmem261
  gRNA
ggccggcacggcggatttcg

SEQ ID NO: 54706 - DNA, 20 bp, Artificial Sequence
  MKO10054706_A_Tmem261
  gRNA
gttgttctggtagaccccaa

SEQ ID NO: 54707 - DNA, 20 bp, Artificial Sequence
  MKO10054707_A_Tmem26
  gRNA
tcaacatcatgccgtccctg

SEQ ID NO: 54708 - DNA, 20 bp, Artificial Sequence
  MKO10054708_A_Tmem26
  gRNA
cggtggcttctccccattgg

SEQ ID NO: 54709 - DNA, 20 bp, Artificial Sequence
  MKO10054709_A_Tmem26
  gRNA
gtccaatgattaatattagc

SEQ ID NO: 54710 - DNA, 20 bp, Artificial Sequence
  MKO10054710_A_Tmem27
  gRNA
ctggaatccggcaacgcaga

SEQ ID NO: 54711 - DNA, 20 bp, Artificial Sequence
  MKO10054711_A_Tmem27
  gRNA
cccgtctggattattgtatt

SEQ ID NO: 54712 - DNA, 20 bp, Artificial Sequence
  MKO10054712_A_Tmem27
  gRNA
gtcgttctggtttgtggtca

SEQ ID NO: 54713 - DNA, 20 bp, Artificial Sequence
  MKO10054713_A_Tmem28
  gRNA
cgacaaaccttgcgccgatt

SEQ ID NO: 54714 - DNA, 20 bp, Artificial Sequence
  MKO10054714_A_Tmem28
  gRNA
agcaccgcgcgaggaggtac

SEQ ID NO: 54715 - DNA, 20 bp, Artificial Sequence
  MKO10054715_A_Tmem28
  gRNA
tggagaaggacactacggta

SEQ ID NO: 54716 - DNA, 20 bp, Artificial Sequence
  MKO10054716_A_Tmem29
  gRNA
accgtccccctcgttcgaag

SEQ ID NO: 54717 - DNA, 20 bp, Artificial Sequence
  MKO10054717_A_Tmem29
  gRNA
atcggaggatcgtccatctt

SEQ ID NO: 54718 - DNA, 20 bp, Artificial Sequence
  MKO10054718_A_Tmem29
  gRNA
ttcttaatcctcttcgaacg

SEQ ID NO: 54719 - DNA, 20 bp, Artificial Sequence
  MKO10054719_A_Tmem2
  gRNA
gtttactccccaaccgatcc

SEQ ID NO: 54720 - DNA, 20 bp, Artificial Sequence
  MKO10054720_A_Tmem2
  gRNA
aagtgctgacgtcgtccaac

SEQ ID NO: 54721 - DNA, 20 bp, Artificial Sequence
  MKO10054721_A_Tmem2
  gRNA
ttccgggtggacattgcgga

SEQ ID NO: 54722 - DNA, 20 bp, Artificial Sequence
  MKO10054722_A_Tmem30a
  gRNA
atagcgccacatggcgcaat

SEQ ID NO: 54723 - DNA, 20 bp, Artificial Sequence
  MKO10054723_A_Tmem30a
  gRNA
gacagaccaattgcgccatg

SEQ ID NO: 54724 - DNA, 20 bp, Artificial Sequence
  MKO10054724_A_Tmem30a
  gRNA
aggcttgggatcagattcat

SEQ ID NO: 54725 - DNA, 20 bp, Artificial Sequence
  MKO10054725_A_Tmem30b
  gRNA
cggtgcgataggcagaccgt

SEQ ID NO: 54726 - DNA, 20 bp, Artificial Sequence
  MKO10054726_A_Tmem30b
  gRNA
gctctatgcgcgcatccgcc

SEQ ID NO: 54727 - DNA, 20 bp, Artificial Sequence
  MKO10054727_A_Tmem30b
  gRNA
cgctgagctgcgcgtcgtcg

SEQ ID NO: 54728 - DNA, 20 bp, Artificial Sequence
  MKO10054728_A_Tmem30c
  gRNA
gtgcgaattgcgctcagctc

SEQ ID NO: 54729 - DNA, 20 bp, Artificial Sequence
  MKO10054729_A_Tmem30c
  gRNA
gtaagcccactctttagcat

SEQ ID NO: 54730 - DNA, 20 bp, Artificial Sequence
  MKO10054730_A_Tmem30c
  gRNA
gatcatacctgcaaatgtac

SEQ ID NO: 54731 - DNA, 20 bp, Artificial Sequence
  MKO10054731_A_Tmem33
  gRNA
atggcggatacgaccccgaa

SEQ ID NO: 54732 - DNA, 20 bp, Artificial Sequence
  MKO10054732_A_Tmem33
  gRNA
gttcggggtcgtatccgcca

SEQ ID NO: 54733 - DNA, 20 bp, Artificial Sequence
  MKO10054733_A_Tmem33
  gRNA
atgctctgaccagcgctctg

SEQ ID NO: 54734 - DNA, 20 bp, Artificial Sequence
  MKO10054734_A_Tmem35
  gRNA
acccggtcgtcccaaagatg

SEQ ID NO: 54735 - DNA, 20 bp, Artificial Sequence
  MKO10054735_A_Tmem35
  gRNA
ggaccatcaagttgaccccc

SEQ ID NO: 54736 - DNA, 20 bp, Artificial Sequence
  MKO10054736_A_Tmem35
  gRNA
cccacgaaccataactatca

SEQ ID NO: 54737 - DNA, 20 bp, Artificial Sequence
  MKO10054737_A_Tmem37
  gRNA
tcaggttacctgcgcgccga

SEQ ID NO: 54738 - DNA, 20 bp, Artificial Sequence
  MKO10054738_A_Tmem37
  gRNA
gagcgcagcatgacggccat

SEQ ID NO: 54739 - DNA, 20 bp, Artificial Sequence
  MKO10054739_A_Tmem37
  gRNA
tggcccacttgcgccgtgag

SEQ ID NO: 54740 - DNA, 20 bp, Artificial Sequence
  MKO10054740_A_Tmem38a
  gRNA
tcgaagcaactgttccacgt

SEQ ID NO: 54741 - DNA, 20 bp, Artificial Sequence
  MKO10054741_A_Tmem38a
  gRNA
cgatcatgatgaaccacccg

SEQ ID NO: 54742 - DNA, 20 bp, Artificial Sequence
  MKO10054742_A_Tmem38a
  gRNA
gagggtccgaaagatcgctg

SEQ ID NO: 54743 - DNA, 20 bp, Artificial Sequence
  MKO10054743_A_Tmem38b
  gRNA
gatcatgctttgagatcgcc

SEQ ID NO: 54744 - DNA, 20 bp, Artificial Sequence
  MKO10054744_A_Tmem38b
  gRNA
tatcttcctcgtgaccataa

SEQ ID NO: 54745 - DNA, 20 bp, Artificial Sequence
  MKO10054745_A_Tmem38b
  gRNA
taggttgatatgaataaccc

SEQ ID NO: 54746 - DNA, 20 bp, Artificial Sequence
  MKO10054746_A_Tmem39a
  gRNA
gccgccgaccaacgtctgta

SEQ ID NO: 54747 - DNA, 20 bp, Artificial Sequence
  MKO10054747_A_Tmem39a
  gRNA
gccagtatacctcggaaatg

SEQ ID NO: 54748 - DNA, 20 bp, Artificial Sequence
  MKO10054748_A_Tmem39a
  gRNA
gaaatactcacggatagcca

SEQ ID NO: 54749 - DNA, 20 bp, Artificial Sequence
  MKO10054749_A_Tmem39b
  gRNA
gcagcgtccgttctcgaagc

SEQ ID NO: 54750 - DNA, 20 bp, Artificial Sequence
  MKO10054750_A_Tmem39b
  gRNA
gttctgggccgccgattcat

SEQ ID NO: 54751 - DNA, 20 bp, Artificial Sequence
  MKO10054751_A_Tmem39b
  gRNA
tgttgatgtagtgcacgaac

SEQ ID NO: 54752 - DNA, 20 bp, Artificial Sequence
  MKO10054752_A_Tmem40
  gRNA
gtgtgttaccactactatgc

SEQ ID NO: 54753 - DNA, 20 bp, Artificial Sequence
  MKO10054753_A_Tmem40
  gRNA
atatttaccctccgctgagc

SEQ ID NO: 54754 - DNA, 20 bp, Artificial Sequence
  MKO10054754_A_Tmem40
  gRNA
aggcctcacctgcatagtag

SEQ ID NO: 54755 - DNA, 20 bp, Artificial Sequence
  MKO10054755_A_Tmem41a
  gRNA
aaccaaagcgaccagggcga

SEQ ID NO: 54756 - DNA, 20 bp, Artificial Sequence
  MKO10054756_A_Tmem41a
  gRNA
ctgaagttcttcgagagtac

SEQ ID NO: 54757 - DNA, 20 bp, Artificial Sequence
  MKO10054757_A_Tmem41a
  gRNA
aaaatttagccagaagcgcc

SEQ ID NO: 54758 - DNA, 20 bp, Artificial Sequence
  MKO10054758_A_Tmem41b
  gRNA
aaccaatacttgtacataaa

SEQ ID NO: 54759 - DNA, 20 bp, Artificial Sequence
  MKO10054759_A_Tmem41b
  gRNA
tatacttactcactaagctg

SEQ ID NO: 54760 - DNA, 20 bp, Artificial Sequence
  MKO10054760_A_Tmem41b
  gRNA
tgccttattccttgtttgtt

SEQ ID NO: 54761 - DNA, 20 bp, Artificial Sequence
  MKO10054761_A_Tmem42
  gRNA
cgcgatgcggcgccgcttct

SEQ ID NO: 54762 - DNA, 20 bp, Artificial Sequence
  MKO10054762_A_Tmem42
  gRNA
ttacccgctcgcctacagaa

SEQ ID NO: 54763 - DNA, 20 bp, Artificial Sequence
  MKO10054763_A_Tmem42
  gRNA
ctccccaccataagatctcc

SEQ ID NO: 54764 - DNA, 20 bp, Artificial Sequence
  MKO10054764_A_Tmem43
  gRNA
agcctaccttggaagtccgc

SEQ ID NO: 54765 - DNA, 20 bp, Artificial Sequence
  MKO10054765_A_Tmem43
  gRNA
taccagctgtgaaactgcga

SEQ ID NO: 54766 - DNA, 20 bp, Artificial Sequence
  MKO10054766_A_Tmem43
  gRNA
cagcccctctgcaagcgatg

SEQ ID NO: 54767 - DNA, 20 bp, Artificial Sequence
  MKO10054767_A_Tmem44
  gRNA
acgcagcgcacagtgtcgac

SEQ ID NO: 54768 - DNA, 20 bp, Artificial Sequence
  MKO10054768_A_Tmem44
  gRNA
cggtgtcacacagactcgtt

SEQ ID NO: 54769 - DNA, 20 bp, Artificial Sequence
  MKO10054769_A_Tmem44
  gRNA
ctccgttgtggcccacggac

SEQ ID NO: 54770 - DNA, 20 bp, Artificial Sequence
  MKO10054770_A_Tmem45a
  gRNA
tcatttcccgaccgtgtgtg

SEQ ID NO: 54771 - DNA, 20 bp, Artificial Sequence
  MKO10054771_A_Tmem45a
  gRNA
gaagtgcgttgttctttacg

SEQ ID NO: 54772 - DNA, 20 bp, Artificial Sequence
  MKO10054772_A_Tmem45a
  gRNA
tttgtgctgtacccccctag

SEQ ID NO: 54773 - DNA, 20 bp, Artificial Sequence
  MKO10054773_A_Tmem45b
  gRNA
ccttcgggataacatcgtgc

SEQ ID NO: 54774 - DNA, 20 bp, Artificial Sequence
  MKO10054774_A_Tmem45b
  gRNA
gtcccgagacaccgaagaat

SEQ ID NO: 54775 - DNA, 20 bp, Artificial Sequence
  MKO10054775_A_Tmem45b
  gRNA
ttacttccacatcgtgcccc

SEQ ID NO: 54776 - DNA, 20 bp, Artificial Sequence
  MKO10054776_A_Tmem47
  gRNA
cataaccccaattgaactcg

SEQ ID NO: 54777 - DNA, 20 bp, Artificial Sequence
  MKO10054777_A_Tmem47
  gRNA
aaatttaccacgagttcaat

SEQ ID NO: 54778 - DNA, 20 bp, Artificial Sequence
  MKO10054778_A_Tmem47
  gRNA
cgcccgggcatggcttcggc

SEQ ID NO: 54779 - DNA, 20 bp, Artificial Sequence
  MKO10054779_A_Tmem50a
  gRNA
aggattaacgcagtatcgaa

SEQ ID NO: 54780 - DNA, 20 bp, Artificial Sequence
  MKO10054780_A_Tmem50a
  gRNA
acgcggctgtcatgtacccc

SEQ ID NO: 54781 - DNA, 20 bp, Artificial Sequence
  MKO10054781_A_Tmem50a
  gRNA
cgaggcgacagctacagcga

SEQ ID NO: 54782 - DNA, 20 bp, Artificial Sequence
  MKO10054782_A_Tmem50b
  gRNA
gataatgattgacgcggcag

SEQ ID NO: 54783 - DNA, 20 bp, Artificial Sequence
  MKO10054783_A_Tmem50b
  gRNA
aaccacgctttccacacgtg

SEQ ID NO: 54784 - DNA, 20 bp, Artificial Sequence
  MKO10054784_A_Tmem50b
  gRNA
cccccgcaggtgctcgggtc

SEQ ID NO: 54785 - DNA, 20 bp, Artificial Sequence
  MKO10054785_A_Tmem51
  gRNA
tgcggataagccaacgtctc

SEQ ID NO: 54786 - DNA, 20 bp, Artificial Sequence
  MKO10054786_A_Tmem51
  gRNA
gtactacgtaccgagctacg

SEQ ID NO: 54787 - DNA, 20 bp, Artificial Sequence
  MKO10054787_A_Tmem51
  gRNA
tcctccgcccctgtacgatg

SEQ ID NO: 54788 - DNA, 20 bp, Artificial Sequence
  MKO10054788_A_Tmem52b
  gRNA
cgaagagcttcctcgtagcc

SEQ ID NO: 54789 - DNA, 20 bp, Artificial Sequence
  MKO10054789_A_Tmem52b
  gRNA
tgatttaccctccgttccag

SEQ ID NO: 54790 - DNA, 20 bp, Artificial Sequence
  MKO10054790_A_Tmem52b
  gRNA
gatgcacccagtcagtagtc

SEQ ID NO: 54791 - DNA, 20 bp, Artificial Sequence
  MKO10054791_A_Tmem52
  gRNA
tgggatgactgtcccgtcac

SEQ ID NO: 54792 - DNA, 20 bp, Artificial Sequence
  MKO10054792_A_Tmem52
  gRNA
cagctacttactgatccgag

SEQ ID NO: 54793 - DNA, 20 bp, Artificial Sequence
  MKO10054793_A_Tmem52
  gRNA
gtggcagctcagacgcatag

SEQ ID NO: 54794 - DNA, 20 bp, Artificial Sequence
  MKO10054794_A_Tmem53
  gRNA
tgggctatcacgcgaagtga

SEQ ID NO: 54795 - DNA, 20 bp, Artificial Sequence
  MKO10054795_A_Tmem53
  gRNA
catgctctaccgctacgtgc

SEQ ID NO: 54796 - DNA, 20 bp, Artificial Sequence
  MKO10054796_A_Tmem53
  gRNA
caccatggcctcggccgagc

SEQ ID NO: 54797 - DNA, 20 bp, Artificial Sequence
  MKO10054797_A_Tmem54
  gRNA
gcactcacataaattcgagt

SEQ ID NO: 54798 - DNA, 20 bp, Artificial Sequence
  MKO10054798_A_Tmem54
  gRNA
cgccaatagtgctctaccct

SEQ ID NO: 54799 - DNA, 20 bp, Artificial Sequence
  MKO10054799_A_Tmem54
  gRNA
attgcagccgccgtgctcca

SEQ ID NO: 54800 - DNA, 20 bp, Artificial Sequence
  MKO10054800_A_Tmem55a
  gRNA
ctggatcggcaatgcaggtt

SEQ ID NO: 54801 - DNA, 20 bp, Artificial Sequence
  MKO10054801_A_Tmem55a
  gRNA
agtcgacgcataattaacct

SEQ ID NO: 54802 - DNA, 20 bp, Artificial Sequence
  MKO10054802_A_Tmem55a
  gRNA
cacacacgacagttgatcac

SEQ ID NO: 54803 - DNA, 20 bp, Artificial Sequence
  MKO10054803_A_Tmem55b
  gRNA
cccactatccgggctagtca

SEQ ID NO: 54804 - DNA, 20 bp, Artificial Sequence
  MKO10054804_A_Tmem55b
  gRNA
acagacgcgacaggtaatca

SEQ ID NO: 54805 - DNA, 20 bp, Artificial Sequence
  MKO10054805_A_Tmem55b
  gRNA
gtctcttaccagtagggccg

SEQ ID NO: 54806 - DNA, 20 bp, Artificial Sequence
  MKO10054806_A_Tmem56
  gRNA
atgcagttagtcctgcgcaa

SEQ ID NO: 54807 - DNA, 20 bp, Artificial Sequence
  MKO10054807_A_Tmem56
  gRNA
ggctggaaagctcggcaagc

SEQ ID NO: 54808 - DNA, 20 bp, Artificial Sequence
  MKO10054808_A_Tmem56
  gRNA
ccactataactgatccgctc

SEQ ID NO: 54809 - DNA, 20 bp, Artificial Sequence
  MKO10054809_A_Tmem57
  gRNA
gtccagtacgtatggcacac

SEQ ID NO: 54810 - DNA, 20 bp, Artificial Sequence
  MKO10054810_A_Tmem57
  gRNA
cacctgtgtgccatacgtac

SEQ ID NO: 54811 - DNA, 20 bp, Artificial Sequence
  MKO10054811_A_Tmem57
  gRNA
gtcgaccgtttgctgctcac

SEQ ID NO: 54812 - DNA, 20 bp, Artificial Sequence
  MKO10054812_A_Tmem59l
  gRNA
ccgaagggagaggcgccccc

SEQ ID NO: 54813 - DNA, 20 bp, Artificial Sequence
  MKO10054813_A_Tmem59l
  gRNA
cgctacagagcatggaaaac

SEQ ID NO: 54814 - DNA, 20 bp, Artificial Sequence
  MKO10054814_A_Tmem59l
  gRNA
ctgcacagaagcttacgtga

SEQ ID NO: 54815 - DNA, 20 bp, Artificial Sequence
  MKO10054815_A_Tmem59
  gRNA
aattcagtatgcaccgcagt

SEQ ID NO: 54816 - DNA, 20 bp, Artificial Sequence
  MKO10054816_A_Tmem59
  gRNA
accagattcacattccagct

SEQ ID NO: 54817 - DNA, 20 bp, Artificial Sequence
  MKO10054817_A_Tmem59
  gRNA
tgacaagcatactgctcatc

SEQ ID NO: 54818 - DNA, 20 bp, Artificial Sequence
  MKO10054818_A_Tmem5
  gRNA
taaaacagagcagtccgctt

SEQ ID NO: 54819 - DNA, 20 bp, Artificial Sequence
  MKO10054819_A_Tmem5
  gRNA
acttacgttgctacacctaa

SEQ ID NO: 54820 - DNA, 20 bp, Artificial Sequence
  MKO10054820_A_Tmem5
  gRNA
tcataacatatgacagcccc

SEQ ID NO: 54821 - DNA, 20 bp, Artificial Sequence
  MKO10054821_A_Tmem60
  gRNA
atattgtgcgatccatgtcg

SEQ ID NO: 54822 - DNA, 20 bp, Artificial Sequence
  MKO10054822_A_Tmem60
  gRNA
aaagccagacttacaccgtc

SEQ ID NO: 54823 - DNA, 20 bp, Artificial Sequence
  MKO10054823_A_Tmem60
  gRNA
tctggctttgaccctcgaca

SEQ ID NO: 54824 - DNA, 20 bp, Artificial Sequence
  MKO10054824_A_Tmem62
  gRNA
agagcatcgccaattattac

SEQ ID NO: 54825 - DNA, 20 bp, Artificial Sequence
  MKO10054825_A_Tmem62
  gRNA
ttccgaacagaacttctcta

SEQ ID NO: 54826 - DNA, 20 bp, Artificial Sequence
  MKO10054826_A_Tmem62
  gRNA
tgcatataacatcccaagtc

SEQ ID NO: 54827 - DNA, 20 bp, Artificial Sequence
  MKO10054827_A_Tmem63a
  gRNA
ggccagtgacgaccagatcc

SEQ ID NO: 54828 - DNA, 20 bp, Artificial Sequence
  MKO10054828_A_Tmem63a
  gRNA
tactcactgcaggcggaaga

SEQ ID NO: 54829 - DNA, 20 bp, Artificial Sequence
  MKO10054829_A_Tmem63a
  gRNA
acaagactttgaaaacgagc

SEQ ID NO: 54830 - DNA, 20 bp, Artificial Sequence
  MKO10054830_A_Tmem63b
  gRNA
tgtccccaggcttcgccggc

SEQ ID NO: 54831 - DNA, 20 bp, Artificial Sequence
  MKO10054831_A_Tmem63b
  gRNA
gctctgtcgactttgaccaa

SEQ ID NO: 54832 - DNA, 20 bp, Artificial Sequence
  MKO10054832_A_Tmem63b
  gRNA
aggtggcctgggactacggg

SEQ ID NO: 54833 - DNA, 20 bp, Artificial Sequence
  MKO10054833_A_Tmem63c
  gRNA
tttccttggaggcggaacgc

SEQ ID NO: 54834 - DNA, 20 bp, Artificial Sequence
  MKO10054834_A_Tmem63c
  gRNA
acagttccaatgtagttaac

SEQ ID NO: 54835 - DNA, 20 bp, Artificial Sequence
  MKO10054835_A_Tmem63c
  gRNA
aagctgcgtgggactacggg

SEQ ID NO: 54836 - DNA, 20 bp, Artificial Sequence
  MKO10054836_A_Tmem64
  gRNA
gagcgccgttatccgcgtcg

SEQ ID NO: 54837 - DNA, 20 bp, Artificial Sequence
  MKO10054837_A_Tmem64
  gRNA
tgtagtccatcgcgctcaag

SEQ ID NO: 54838 - DNA, 20 bp, Artificial Sequence
  MKO10054838_A_Tmem64
  gRNA
cgccctgctcggcgcctatc

SEQ ID NO: 54839 - DNA, 20 bp, Artificial Sequence
  MKO10054839_A_Tmem65
  gRNA
cacaatgcgatacctttcgt

SEQ ID NO: 54840 - DNA, 20 bp, Artificial Sequence
  MKO10054840_A_Tmem65
  gRNA
aaaaagccaaaccctacgaa

SEQ ID NO: 54841 - DNA, 20 bp, Artificial Sequence
  MKO10054841_A_Tmem65
  gRNA
aatcttgtttcagatttagc

SEQ ID NO: 54842 - DNA, 20 bp, Artificial Sequence
  MKO10054842_A_Tmem66
  gRNA
gttgtgaggcctataccccc

SEQ ID NO: 54843 - DNA, 20 bp, Artificial Sequence
  MKO10054843_A_Tmem66
  gRNA
ccgaccgctacaccacctcc

SEQ ID NO: 54844 - DNA, 20 bp, Artificial Sequence
  MKO10054844_A_Tmem66
  gRNA
gtgggaatgtaagaccgact

SEQ ID NO: 54845 - DNA, 20 bp, Artificial Sequence
  MKO10054845_A_Tmem67
  gRNA
attgtccttactaaagtgtg

SEQ ID NO: 54846 - DNA, 20 bp, Artificial Sequence
  MKO10054846_A_Tmem67
  gRNA
ttagagatcatatgatatcc

SEQ ID NO: 54847 - DNA, 20 bp, Artificial Sequence
  MKO10054847_A_Tmem67
  gRNA
cacaaagctcgcaagttgct

SEQ ID NO: 54848 - DNA, 20 bp, Artificial Sequence
  MKO10054848_A_Tmem68
  gRNA
aaggcttctcgaactccgcc

SEQ ID NO: 54849 - DNA, 20 bp, Artificial Sequence
  MKO10054849_A_Tmem68
  gRNA
agcagaagaattagccgaaa

SEQ ID NO: 54850 - DNA, 20 bp, Artificial Sequence
  MKO10054850_A_Tmem68
  gRNA
gtaaagttgcggaccttctt

SEQ ID NO: 54851 - DNA, 20 bp, Artificial Sequence
  MKO10054851_A_Tmem69
  gRNA
ttctatttaatcgggtctct

SEQ ID NO: 54852 - DNA, 20 bp, Artificial Sequence
  MKO10054852_A_Tmem69
  gRNA
gctatcgagtaggtaagtga

SEQ ID NO: 54853 - DNA, 20 bp, Artificial Sequence
  MKO10054853_A_Tmem69
  gRNA
aagatgctccagaaactttc

SEQ ID NO: 54854 - DNA, 20 bp, Artificial Sequence
  MKO10054854_A_Tmem70
  gRNA
gcgctagatgcccgccgctc

SEQ ID NO: 54855 - DNA, 20 bp, Artificial Sequence
  MKO10054855_A_Tmem70
  gRNA
ctagcgctagccgagtcttg

SEQ ID NO: 54856 - DNA, 20 bp, Artificial Sequence
  MKO10054856_A_Tmem70
  gRNA
ctggaattgtcacgtcgtct

SEQ ID NO: 54857 - DNA, 20 bp, Artificial Sequence
  MKO10054857_A_Tmem71
  gRNA
tgctccatagaccccctgac

SEQ ID NO: 54858 - DNA, 20 bp, Artificial Sequence
  MKO10054858_A_Tmem71
  gRNA
gatgactccaggtcagacga

SEQ ID NO: 54859 - DNA, 20 bp, Artificial Sequence
  MKO10054859_A_Tmem71
  gRNA
acccccgagcctctaagtct

SEQ ID NO: 54860 - DNA, 20 bp, Artificial Sequence
  MKO10054860_A_Tmem72
  gRNA
gcagacccaagataccctaa

SEQ ID NO: 54861 - DNA, 20 bp, Artificial Sequence
  MKO10054861_A_Tmem72
  gRNA
agcagcgtcgtgagcaccac

SEQ ID NO: 54862 - DNA, 20 bp, Artificial Sequence
  MKO10054862_A_Tmem72
  gRNA
gaatggtcacatgccagacc

SEQ ID NO: 54863 - DNA, 20 bp, Artificial Sequence
  MKO10054863_A_Tmem74b
  gRNA
ggagatgtactacgcccgct

SEQ ID NO: 54864 - DNA, 20 bp, Artificial Sequence
  MKO10054864_A_Tmem74b
  gRNA
actgggggcgttacccagtc

SEQ ID NO: 54865 - DNA, 20 bp, Artificial Sequence
  MKO10054865_A_Tmem74b
  gRNA
gcaaagaaagatcatcccgc

SEQ ID NO: 54866 - DNA, 20 bp, Artificial Sequence
  MKO10054866_A_Tmem74
  gRNA
ctttgcgatcagccattact

SEQ ID NO: 54867 - DNA, 20 bp, Artificial Sequence
  MKO10054867_A_Tmem74
  gRNA
tcatttcttatatcgtccct

SEQ ID NO: 54868 - DNA, 20 bp, Artificial Sequence
  MKO10054868_A_Tmem74
  gRNA
catcagcgctatcttgttct

SEQ ID NO: 54869 - DNA, 20 bp, Artificial Sequence
  MKO10054869_A_Tmem79
  gRNA
cgcatcctgcatcgcgacgc

SEQ ID NO: 54870 - DNA, 20 bp, Artificial Sequence
  MKO10054870_A_Tmem79
  gRNA
gccagactcaccgagtacga

SEQ ID NO: 54871 - DNA, 20 bp, Artificial Sequence
  MKO10054871_A_Tmem79
  gRNA
ctcggtctgtttccgactac

SEQ ID NO: 54872 - DNA, 20 bp, Artificial Sequence
  MKO10054872_A_Tmem80
  gRNA
caccgactgctgtgaatgcc

SEQ ID NO: 54873 - DNA, 20 bp, Artificial Sequence
  MKO10054873_A_Tmem80
  gRNA
cagctatccttgtaactgtc

SEQ ID NO: 54874 - DNA, 20 bp, Artificial Sequence
  MKO10054874_A_Tmem80
  gRNA
cagcaatgaccaccacttgc

SEQ ID NO: 54875 - DNA, 20 bp, Artificial Sequence
  MKO10054875_A_Tmem81
  gRNA
acttgcatcataagcgggtg

SEQ ID NO: 54876 - DNA, 20 bp, Artificial Sequence
  MKO10054876_A_Tmem81
  gRNA
cgtcccagcgttatactcat

SEQ ID NO: 54877 - DNA, 20 bp, Artificial Sequence
  MKO10054877_A_Tmem81
  gRNA
ccagcctatgagtataacgc

SEQ ID NO: 54878 - DNA, 20 bp, Artificial Sequence
  MKO10054878_A_Tmem82
  gRNA
ggtagccgccctcgtcgtct

SEQ ID NO: 54879 - DNA, 20 bp, Artificial Sequence
  MKO10054879_A_Tmem82
  gRNA
agcagcggctgagcgcgcaa

SEQ ID NO: 54880 - DNA, 20 bp, Artificial Sequence
  MKO10054880_A_Tmem82
  gRNA
gagcggggtccagaatcgca

SEQ ID NO: 54881 - DNA, 20 bp, Artificial Sequence
  MKO10054881_A_Tmem86a
  gRNA
atcctctacgccgcggcctt

SEQ ID NO: 54882 - DNA, 20 bp, Artificial Sequence
  MKO10054882_A_Tmem86a
  gRNA
ctgacagcactccgatcacc

SEQ ID NO: 54883 - DNA, 20 bp, Artificial Sequence
  MKO10054883_A_Tmem86a
  gRNA
cttaaagaagggcaccagtt

SEQ ID NO: 54884 - DNA, 20 bp, Artificial Sequence
  MKO10054884_A_Tmem86b
  gRNA
tgaagtacccacaggtccgc

SEQ ID NO: 54885 - DNA, 20 bp, Artificial Sequence
  MKO10054885_A_Tmem86b
  gRNA
gggtcaggccaaaagccccg

SEQ ID NO: 54886 - DNA, 20 bp, Artificial Sequence
  MKO10054886_A_Tmem86b
  gRNA
acccaagatggctggtccac

SEQ ID NO: 54887 - DNA, 20 bp, Artificial Sequence
  MKO10054887_A_Tmem87a
  gRNA
ccaacactcaccgacggcat

SEQ ID NO: 54888 - DNA, 20 bp, Artificial Sequence
  MKO10054888_A_Tmem87a
  gRNA
ccgttcccattatcgtttct

SEQ ID NO: 54889 - DNA, 20 bp, Artificial Sequence
  MKO10054889_A_Tmem87a
  gRNA
gaaataatcttgatgatgtt

SEQ ID NO: 54890 - DNA, 20 bp, Artificial Sequence
  MKO10054890_A_Tmem87b
  gRNA
ggcttaccgttgatccttcc

SEQ ID NO: 54891 - DNA, 20 bp, Artificial Sequence
  MKO10054891_A_Tmem87b
  gRNA
tcacaatgattaccctgatc

SEQ ID NO: 54892 - DNA, 20 bp, Artificial Sequence
  MKO10054892_A_Tmem87b
  gRNA
ggattgcagcagtgattcac

SEQ ID NO: 54893 - DNA, 20 bp, Artificial Sequence
  MKO10054893_A_Tmem88b
  gRNA
cgagcaccacgagcggcggc

SEQ ID NO: 54894 - DNA, 20 bp, Artificial Sequence
  MKO10054894_A_Tmem88b
  gRNA
ctgcgctgcctgatcccgcg

SEQ ID NO: 54895 - DNA, 20 bp, Artificial Sequence
  MKO10054895_A_Tmem88b
  gRNA
cacccatgctaccccgaaga

SEQ ID NO: 54896 - DNA, 20 bp, Artificial Sequence
  MKO10054896_A_Tmem88
  gRNA
gcccagcgccccgttctcgc

SEQ ID NO: 54897 - DNA, 20 bp, Artificial Sequence
  MKO10054897_A_Tmem88
  gRNA
cagcaatctaggggatcccg

SEQ ID NO: 54898 - DNA, 20 bp, Artificial Sequence
  MKO10054898_A_Tmem88
  gRNA
caagcaacggcacgagcagt

SEQ ID NO: 54899 - DNA, 20 bp, Artificial Sequence
  MKO10054899_A_Tmem89
  gRNA
gccgtgtgatagtgcaccga

SEQ ID NO: 54900 - DNA, 20 bp, Artificial Sequence
  MKO10054900_A_Tmem89
  gRNA
cactgtctcagaccgcacgc

SEQ ID NO: 54901 - DNA, 20 bp, Artificial Sequence
  MKO10054901_A_Tmem89
  gRNA
aggaaatcgcatctaccccg

SEQ ID NO: 54902 - DNA, 20 bp, Artificial Sequence
  MKO10054902_A_Tmem8b
  gRNA
cattcggagccgatacgtgc

SEQ ID NO: 54903 - DNA, 20 bp, Artificial Sequence
  MKO10054903_A_Tmem8b
  gRNA
agtgccgacgcgctcaccta

SEQ ID NO: 54904 - DNA, 20 bp, Artificial Sequence
  MKO10054904_A_Tmem8b
  gRNA
gcacttctgccgttgcattg

SEQ ID NO: 54905 - DNA, 20 bp, Artificial Sequence
  MKO10054905_A_Tmem8c
  gRNA
cttcatgcgccgtgacattc

SEQ ID NO: 54906 - DNA, 20 bp, Artificial Sequence
  MKO10054906_A_Tmem8c
  gRNA
ggggtatactccggtcccat

SEQ ID NO: 54907 - DNA, 20 bp, Artificial Sequence
  MKO10054907_A_Tmem8c
  gRNA
atgaaaagtccgcacagcga

SEQ ID NO: 54908 - DNA, 20 bp, Artificial Sequence
  MKO10054908_A_Tmem8
  gRNA
gcccccactgtgacacgtac

SEQ ID NO: 54909 - DNA, 20 bp, Artificial Sequence
  MKO10054909_A_Tmem8
  gRNA
gcgtggctcaaggtgttgtc

SEQ ID NO: 54910 - DNA, 20 bp, Artificial Sequence
  MKO10054910_A_Tmem8
  gRNA
gcagttccaaccgaagctcc

SEQ ID NO: 54911 - DNA, 20 bp, Artificial Sequence
  MKO10054911_A_Tmem91
  gRNA
agggcaactagggcgggtct

SEQ ID NO: 54912 - DNA, 20 bp, Artificial Sequence
  MKO10054912_A_Tmem91
  gRNA
acagcacagagaataccgcc

SEQ ID NO: 54913 - DNA, 20 bp, Artificial Sequence
  MKO10054913_A_Tmem91
  gRNA
ctcccgccgagctttcctgc

SEQ ID NO: 54914 - DNA, 20 bp, Artificial Sequence
  MKO10054914_A_Tmem92
  gRNA
tacctaaagcggtcatttgc

SEQ ID NO: 54915 - DNA, 20 bp, Artificial Sequence
  MKO10054915_A_Tmem92
  gRNA
atcctgcaaatgaccgcttt

SEQ ID NO: 54916 - DNA, 20 bp, Artificial Sequence
  MKO10054916_A_Tmem92
  gRNA
tagggcacagatgaacaaaa

SEQ ID NO: 54917 - DNA, 20 bp, Artificial Sequence
  MKO10054917_A_Tmem95
  gRNA
agactcctccttgccctcgc

SEQ ID NO: 54918 - DNA, 20 bp, Artificial Sequence
  MKO10054918_A_Tmem95
  gRNA
gtacaactgctccacctgcg

SEQ ID NO: 54919 - DNA, 20 bp, Artificial Sequence
  MKO10054919_A_Tmem95
  gRNA
caataccttccctggtgtac

SEQ ID NO: 54920 - DNA, 20 bp, Artificial Sequence
  MKO10054920_A_Tmem97
  gRNA
cacctcctgcgggtatagtt

SEQ ID NO: 54921 - DNA, 20 bp, Artificial Sequence
  MKO10054921_A_Tmem97
  gRNA
cctttgagtaccaccgcaac

SEQ ID NO: 54922 - DNA, 20 bp, Artificial Sequence
  MKO10054922_A_Tmem97
  gRNA
actgtaccaacctttgaaga

SEQ ID NO: 54923 - DNA, 20 bp, Artificial Sequence
  MKO10054923_A_Tmem98
  gRNA
tggccaaacggattagcccc

SEQ ID NO: 54924 - DNA, 20 bp, Artificial Sequence
  MKO10054924_A_Tmem98
  gRNA
gcagtctgaaccctccgagc

SEQ ID NO: 54925 - DNA, 20 bp, Artificial Sequence
  MKO10054925_A_Tmem98
  gRNA
tcacctggggctaatccgtt

SEQ ID NO: 54926 - DNA, 20 bp, Artificial Sequence
  MKO10054926_A_Tmem9b
  gRNA
gcatgggctccacgacatga

SEQ ID NO: 54927 - DNA, 20 bp, Artificial Sequence
  MKO10054927_A_Tmem9b
  gRNA
cagtgattgccttcatgtcg

SEQ ID NO: 54928 - DNA, 20 bp, Artificial Sequence
  MKO10054928_A_Tmem9b
  gRNA
gtccaaagaggcgcctcttc

SEQ ID NO: 54929 - DNA, 20 bp, Artificial Sequence
  MKO10054929_A_Tmem9
  gRNA
tgctggtggacccgctcatc

SEQ ID NO: 54930 - DNA, 20 bp, Artificial Sequence
  MKO10054930_A_Tmem9
  gRNA
cgtacctacactcgcagagc

SEQ ID NO: 54931 - DNA, 20 bp, Artificial Sequence
  MKO10054931_A_Tmem9
  gRNA
gagcgccttccacccgctcc

SEQ ID NO: 54932 - DNA, 20 bp, Artificial Sequence
  MKO10054932_A_Tmf1
  gRNA
cgaagtctcttgcctcgaac

SEQ ID NO: 54933 - DNA, 20 bp, Artificial Sequence
  MKO10054933_A_Tmf1
  gRNA
tgaatggtatgggcatccga

SEQ ID NO: 54934 - DNA, 20 bp, Artificial Sequence
  MKO10054934_A_Tmf1
  gRNA
ggaagcgtatgataacctga

SEQ ID NO: 54935 - DNA, 20 bp, Artificial Sequence
  MKO10054935_A_Tmie
  gRNA
tcgatctccttccgcgtccg

SEQ ID NO: 54936 - DNA, 20 bp, Artificial Sequence
  MKO10054936_A_Tmie
  gRNA
acggacgcggaaggagatcg

SEQ ID NO: 54937 - DNA, 20 bp, Artificial Sequence
  MKO10054937_A_Tmie
  gRNA
ggcgggtgtcgccacgcagc

SEQ ID NO: 54938 - DNA, 20 bp, Artificial Sequence
  MKO10054938_A_Tmigd1
  gRNA
ctgatcgcgctgtagcttgc

SEQ ID NO: 54939 - DNA, 20 bp, Artificial Sequence
  MKO10054939_A_Tmigd1
  gRNA
caagctacagcgcgatcaga

SEQ ID NO: 54940 - DNA, 20 bp, Artificial Sequence
  MKO10054940_A_Tmigd1
  gRNA
taccacatcatttgcgcttg

SEQ ID NO: 54941 - DNA, 20 bp, Artificial Sequence
  MKO10054941_A_Tmlhe
  gRNA
ctccgtaatttgatgaagag

SEQ ID NO: 54942 - DNA, 20 bp, Artificial Sequence
  MKO10054942_A_Tmlhe
  gRNA
tgatgcgctttgattatgtc

SEQ ID NO: 54943 - DNA, 20 bp, Artificial Sequence
  MKO10054943_A_Tmlhe
  gRNA
cccctagaactgcaatatgc

SEQ ID NO: 54944 - DNA, 20 bp, Artificial Sequence
  MKO10054944_A_Tmod1
  gRNA
gcagaactgtgtgacatcgc

SEQ ID NO: 54945 - DNA, 20 bp, Artificial Sequence
  MKO10054945_A_Tmod1
  gRNA
gaagccaatggatcccgtgc

SEQ ID NO: 54946 - DNA, 20 bp, Artificial Sequence
  MKO10054946_A_Tmod1
  gRNA
gagcccctccttgttcacga

SEQ ID NO: 54947 - DNA, 20 bp, Artificial Sequence
  MKO10054947_A_Tmod2
  gRNA
actgaactctacgaccttgc

SEQ ID NO: 54948 - DNA, 20 bp, Artificial Sequence
  MKO10054948_A_Tmod2
  gRNA
ccccttgcgaccttcgccgt

SEQ ID NO: 54949 - DNA, 20 bp, Artificial Sequence
  MKO10054949_A_Tmod2
  gRNA
agcaggtgttctcggtcaaa

SEQ ID NO: 54950 - DNA, 20 bp, Artificial Sequence
  MKO10054950_A_Tmod3
  gRNA
actcactgggaaaacgctct

SEQ ID NO: 54951 - DNA, 20 bp, Artificial Sequence
  MKO10054951_A_Tmod3
  gRNA
ctttaaactctcttcaacgt

SEQ ID NO: 54952 - DNA, 20 bp, Artificial Sequence
  MKO10054952_A_Tmod3
  gRNA
cacaccgttctgtgatgtgc

SEQ ID NO: 54953 - DNA, 20 bp, Artificial Sequence
  MKO10054953_A_Tmod4
  gRNA
ggtgaacctcaataatatcc

SEQ ID NO: 54954 - DNA, 20 bp, Artificial Sequence
  MKO10054954_A_Tmod4
  gRNA
agatgccctattgcagtacc

SEQ ID NO: 54955 - DNA, 20 bp, Artificial Sequence
  MKO10054955_A_Tmod4
  gRNA
agcgtaatctgttcctgtgc

SEQ ID NO: 54956 - DNA, 20 bp, Artificial Sequence
  MKO10054956_A_Tmpo
  gRNA
ttaccctgccgacggcgccg

SEQ ID NO: 54957 - DNA, 20 bp, Artificial Sequence
  MKO10054957_A_Tmpo
  gRNA
gcccgacttctcgagcgacg

SEQ ID NO: 54958 - DNA, 20 bp, Artificial Sequence
  MKO10054958_A_Tmpo
  gRNA
taatatccgtgctgcctcga

SEQ ID NO: 54959 - DNA, 20 bp, Artificial Sequence
  MKO10054959_A_Tmppe
  gRNA
gtgattacccgtgacgaagt

SEQ ID NO: 54960 - DNA, 20 bp, Artificial Sequence
  MKO10054960_A_Tmppe
  gRNA
caaacgtcgccttgcccact

SEQ ID NO: 54961 - DNA, 20 bp, Artificial Sequence
  MKO10054961_A_Tmppe
  gRNA
cctactatgggatacccatg

SEQ ID NO: 54962 - DNA, 20 bp, Artificial Sequence
  MKO10054962_A_Tmprss11a
  gRNA
catacgttagtccgactacg

SEQ ID NO: 54963 - DNA, 20 bp, Artificial Sequence
  MKO10054963_A_Tmprss11a
  gRNA
tacggttcttcgccctgtag

SEQ ID NO: 54964 - DNA, 20 bp, Artificial Sequence
  MKO10054964_A_Tmprss11a
  gRNA
tacatcaaaaaccacgtagt

SEQ ID NO: 54965 - DNA, 20 bp, Artificial Sequence
  MKO10054965_A_Tmprss11bnl
  gRNA
gctgtcacgctgttgttatc

SEQ ID NO: 54966 - DNA, 20 bp, Artificial Sequence
  MKO10054966_A_Tmprss11bnl
  gRNA
aacaagatctactactatca

SEQ ID NO: 54967 - DNA, 20 bp, Artificial Sequence
  MKO10054967_A_Tmprss11bnl
  gRNA
aagcatcttacgtcagatgc

SEQ ID NO: 54968 - DNA, 20 bp, Artificial Sequence
  MKO10054968_A_Tmprss11c
  gRNA
cttaccacaggcggcaaaat

SEQ ID NO: 54969 - DNA, 20 bp, Artificial Sequence
  MKO10054969_A_Tmprss11c
  gRNA
gcaccgccgttaagatgccc

SEQ ID NO: 54970 - DNA, 20 bp, Artificial Sequence
  MKO10054970_A_Tmprss11c
  gRNA
agtctataagtaatccagtt

SEQ ID NO: 54971 - DNA, 20 bp, Artificial Sequence
  MKO10054971_A_Tmprss11d
  gRNA
cctaaacgttgaatacactg

SEQ ID NO: 54972 - DNA, 20 bp, Artificial Sequence
  MKO10054972_A_Tmprss11d
  gRNA
cctcagtgtattcaacgttt

SEQ ID NO: 54973 - DNA, 20 bp, Artificial Sequence
  MKO10054973_A_Tmprss11d
  gRNA
cagattactgatgaatttcg

SEQ ID NO: 54974 - DNA, 20 bp, Artificial Sequence
  MKO10054974_A_Tmprss11e
  gRNA
ttgacaagttgtccccgtag

SEQ ID NO: 54975 - DNA, 20 bp, Artificial Sequence
  MKO10054975_A_Tmprss11e
  gRNA
caacgtgctgtagtaattgt

SEQ ID NO: 54976 - DNA, 20 bp, Artificial Sequence
  MKO10054976_A_Tmprss11e
  gRNA
tgcacactgccaagacaatc

SEQ ID NO: 54977 - DNA, 20 bp, Artificial Sequence
  MKO10054977_A_Tmprss11f
  gRNA
aggatattccgacgttcttc

SEQ ID NO: 54978 - DNA, 20 bp, Artificial Sequence
  MKO10054978_A_Tmprss11f
  gRNA
gtgaacagagctagtcgtat

SEQ ID NO: 54979 - DNA, 20 bp, Artificial Sequence
  MKO10054979_A_Tmprss11f
  gRNA
gcaatcgtaggaatcacaat

SEQ ID NO: 54980 - DNA, 20 bp, Artificial Sequence
  MKO10054980_A_Tmprss11g
  gRNA
tgcctttaccccatcgttac

SEQ ID NO: 54981 - DNA, 20 bp, Artificial Sequence
  MKO10054981_A_Tmprss11g
  gRNA
tcagattccccgtaagaatg

SEQ ID NO: 54982 - DNA, 20 bp, Artificial Sequence
  MKO10054982_A_Tmprss11g
  gRNA
ccgaaatttcgactgctctt

SEQ ID NO: 54983 - DNA, 20 bp, Artificial Sequence
  MKO10054983_A_Tmprss12
  gRNA
catcaaccgcctgtttaata

SEQ ID NO: 54984 - DNA, 20 bp, Artificial Sequence
  MKO10054984_A_Tmprss12
  gRNA
tatcgccatcttgaacctgc

SEQ ID NO: 54985 - DNA, 20 bp, Artificial Sequence
  MKO10054985_A_Tmprss12
  gRNA
gtggaagggtctcggattat

SEQ ID NO: 54986 - DNA, 20 bp, Artificial Sequence
  MKO10054986_A_Tmprss13
  gRNA
aggatgacacacccgatgag

SEQ ID NO: 54987 - DNA, 20 bp, Artificial Sequence
  MKO10054987_A_Tmprss13
  gRNA
ctaacaaggtacactctcgt

SEQ ID NO: 54988 - DNA, 20 bp, Artificial Sequence
  MKO10054988_A_Tmprss13
  gRNA
gttctgcagtcaggttcgac

SEQ ID NO: 54989 - DNA, 20 bp, Artificial Sequence
  MKO10054989_A_Tmprss15
  gRNA
aattcatctagatgcagccc

SEQ ID NO: 54990 - DNA, 20 bp, Artificial Sequence
  MKO10054990_A_Tmprss15
  gRNA
ttggattaattgcagtgtcc

SEQ ID NO: 54991 - DNA, 20 bp, Artificial Sequence
  MKO10054991_A_Tmprss15
  gRNA
agattccttgactgcaagcc

SEQ ID NO: 54992 - DNA, 20 bp, Artificial Sequence
  MKO10054992_A_Tmprss2
  gRNA
tcatagcaaggtccgattcc

SEQ ID NO: 54993 - DNA, 20 bp, Artificial Sequence
  MKO10054993_A_Tmprss2
  gRNA
ccttcaacagttcgtctcta

SEQ ID NO: 54994 - DNA, 20 bp, Artificial Sequence
  MKO10054994_A_Tmprss2
  gRNA
gctgtgtttagccctcgccc

SEQ ID NO: 54995 - DNA, 20 bp, Artificial Sequence
  MKO10054995_A_Tmprss3
  gRNA
gaactaacagctcgatgcga

SEQ ID NO: 54996 - DNA, 20 bp, Artificial Sequence
  MKO10054996_A_Tmprss3
  gRNA
catcgccttgatactggcgc

SEQ ID NO: 54997 - DNA, 20 bp, Artificial Sequence
  MKO10054997_A_Tmprss3
  gRNA
acttcccagagcagtcgaag

SEQ ID NO: 54998 - DNA, 20 bp, Artificial Sequence
  MKO10054998_A_Tmprss4
  gRNA
ggccttcggggtttgcgaaa

SEQ ID NO: 54999 - DNA, 20 bp, Artificial Sequence
  MKO10054999_A_Tmprss4
  gRNA
cctgatagccctcgtgattg

SEQ ID NO: 55000 - DNA, 20 bp, Artificial Sequence
  MKO10055000_A_Tmprss4
  gRNA
ggccaccttgactgcgcctc

SEQ ID NO: 55001 - DNA, 20 bp, Artificial Sequence
  MKO10055001_A_Tmprss5
  gRNA
gtataacacagccacgttgc

SEQ ID NO: 55002 - DNA, 20 bp, Artificial Sequence
  MKO10055002_A_Tmprss5
  gRNA
gcaacgtggctgtgttatac

SEQ ID NO: 55003 - DNA, 20 bp, Artificial Sequence
  MKO10055003_A_Tmprss5
  gRNA
tccagccctcgtggcagacc

SEQ ID NO: 55004 - DNA, 20 bp, Artificial Sequence
  MKO10055004_A_Tmprss6
  gRNA
aggagctcgcgcactacttc

SEQ ID NO: 55005 - DNA, 20 bp, Artificial Sequence
  MKO10055005_A_Tmprss6
  gRNA
ttccgggtccacctcatatt

SEQ ID NO: 55006 - DNA, 20 bp, Artificial Sequence
  MKO10055006_A_Tmprss6
  gRNA
agtcgtactgaattccacgc

SEQ ID NO: 55007 - DNA, 20 bp, Artificial Sequence
  MKO10055007_A_Tmprss7
  gRNA
agaccacctcgaaaacccat

SEQ ID NO: 55008 - DNA, 20 bp, Artificial Sequence
  MKO10055008_A_Tmprss7
  gRNA
tatcataaaccgcacttctg

SEQ ID NO: 55009 - DNA, 20 bp, Artificial Sequence
  MKO10055009_A_Tmprss7
  gRNA
gtagagccatagaagtgtcc

SEQ ID NO: 55010 - DNA, 20 bp, Artificial Sequence
  MKO10055010_A_Tmprss9
  gRNA
atcgtgtcagtcgagctgac

SEQ ID NO: 55011 - DNA, 20 bp, Artificial Sequence
  MKO10055011_A_Tmprss9
  gRNA
gagttagagtcgagctgcgc

SEQ ID NO: 55012 - DNA, 20 bp, Artificial Sequence
  MKO10055012_A_Tmprss9
  gRNA
tgtcagctcgactgacacga

SEQ ID NO: 55013 - DNA, 20 bp, Artificial Sequence
  MKO10055013_A_Tmsb10
  gRNA
tcccttcgcagccattgaac

SEQ ID NO: 55014 - DNA, 20 bp, Artificial Sequence
  MKO10055014_A_Tmsb10
  gRNA
gcacacttactctctttggt

SEQ ID NO: 55015 - DNA, 20 bp, Artificial Sequence
  MKO10055015_A_Tmsb10
  gRNA
taagaaaatggcagacaagc

SEQ ID NO: 55016 - DNA, 20 bp, Artificial Sequence
  MKO10055016_A_Tmsb15a
  gRNA
aaactccttctcttgctcga

SEQ ID NO: 55017 - DNA, 20 bp, Artificial Sequence
  MKO10055017_A_Tmsb15a
  gRNA
gggtgatagaccagacttgt

SEQ ID NO: 55018 - DNA, 20 bp, Artificial Sequence
  MKO10055018_A_Tmsb15a
  gRNA
aaaaaatactctgccctcga

SEQ ID NO: 55019 - DNA, 20 bp, Artificial Sequence
  MKO10055019_A_Tmsb15b1
  gRNA
catgacttactttcattcga

SEQ ID NO: 55020 - DNA, 20 bp, Artificial Sequence
  MKO10055020_A_Tmsb15b1
  gRNA
cattatgttctttctcttgc

SEQ ID NO: 55021 - DNA, 20 bp, Artificial Sequence
  MKO10055021_A_Tmsb15b2
  gRNA
aaaaaatactcttccgtcga

SEQ ID NO: 55022 - DNA, 20 bp, Artificial Sequence
  MKO10055022_A_Tmsb15b2
  gRNA
catgacttactttccttcga

SEQ ID NO: 55023 - DNA, 20 bp, Artificial Sequence
  MKO10055023_A_Tmsb15l
  gRNA
aaaaaatactcttccgtcga

SEQ ID NO: 55024 - DNA, 20 bp, Artificial Sequence
  MKO10055024_A_Tmsb15l
  gRNA
catgacttactttcattcga

SEQ ID NO: 55025 - DNA, 20 bp, Artificial Sequence
  MKO10055025_A_Tmsb15l
  gRNA
catgacttactttccttcga

SEQ ID NO: 55026 - DNA, 20 bp, Artificial Sequence
  MKO10055026_A_Tmsb4x
  gRNA
catgtctgacaaacccgata

SEQ ID NO: 55027 - DNA, 20 bp, Artificial Sequence
  MKO10055027_A_Tmsb4x
  gRNA
tttctcgatctcagccatat

SEQ ID NO: 55028 - DNA, 20 bp, Artificial Sequence
  MKO10055028_A_Tmtc1
  gRNA
gtagaatgacattgaccgcg

SEQ ID NO: 55029 - DNA, 20 bp, Artificial Sequence
  MKO10055029_A_Tmtc1
  gRNA
ttatactcaccgcctcagtg

SEQ ID NO: 55030 - DNA, 20 bp, Artificial Sequence
  MKO10055030_A_Tmtc1
  gRNA
ccatgtcgccgagagctatg

SEQ ID NO: 55031 - DNA, 20 bp, Artificial Sequence
  MKO10055031_A_Tmtc2
  gRNA
aggacttgtggctaccgctg

SEQ ID NO: 55032 - DNA, 20 bp, Artificial Sequence
  MKO10055032_A_Tmtc2
  gRNA
ccctccttggggacggatac

SEQ ID NO: 55033 - DNA, 20 bp, Artificial Sequence
  MKO10055033_A_Tmtc2
  gRNA
ctccaactccgacaaccccg

SEQ ID NO: 55034 - DNA, 20 bp, Artificial Sequence
  MKO10055034_A_Tmtc3
  gRNA
ccgtacttactgcctcggta

SEQ ID NO: 55035 - DNA, 20 bp, Artificial Sequence
  MKO10055035_A_Tmtc3
  gRNA
agtgactttaatagtcagcg

SEQ ID NO: 55036 - DNA, 20 bp, Artificial Sequence
  MKO10055036_A_Tmtc3
  gRNA
agtgcacccaatccataccg

SEQ ID NO: 55037 - DNA, 20 bp, Artificial Sequence
  MKO10055037_A_Tmtc4
  gRNA
ggcctttaccggtgtactgt

SEQ ID NO: 55038 - DNA, 20 bp, Artificial Sequence
  MKO10055038_A_Tmtc4
  gRNA
aggattaactactacctgtc

SEQ ID NO: 55039 - DNA, 20 bp, Artificial Sequence
  MKO10055039_A_Tmtc4
  gRNA
ccccaaggggcgtgtctgac

SEQ ID NO: 55040 - DNA, 20 bp, Artificial Sequence
  MKO10055040_A_Tmub1
  gRNA
gaggcactacggccgataca

SEQ ID NO: 55041 - DNA, 20 bp, Artificial Sequence
  MKO10055041_A_Tmub1
  gRNA
tgccacgtgtccacgagagt

SEQ ID NO: 55042 - DNA, 20 bp, Artificial Sequence
  MKO10055042_A_Tmub1
  gRNA
aacacctccagactctccgc

SEQ ID NO: 55043 - DNA, 20 bp, Artificial Sequence
  MKO10055043_A_Tmub2
  gRNA
ggtttaccagctggtccaca

SEQ ID NO: 55044 - DNA, 20 bp, Artificial Sequence
  MKO10055044_A_Tmub2
  gRNA
cagtcgcccagaagccccgc

SEQ ID NO: 55045 - DNA, 20 bp, Artificial Sequence
  MKO10055045_A_Tmub2
  gRNA
ggctgcccacgttgacacca

SEQ ID NO: 55046 - DNA, 20 bp, Artificial Sequence
  MKO10055046_A_Tmx1
  gRNA
ttaggcgctatgtgggccca

SEQ ID NO: 55047 - DNA, 20 bp, Artificial Sequence
  MKO10055047_A_Tmx1
  gRNA
catttgtaggactaagtgga

SEQ ID NO: 55048 - DNA, 20 bp, Artificial Sequence
  MKO10055048_A_Tmx1
  gRNA
ggctgaagattctgacaagc

SEQ ID NO: 55049 - DNA, 20 bp, Artificial Sequence
  MKO10055049_A_Tmx2
  gRNA
gtcactgtggagcaacatgt

SEQ ID NO: 55050 - DNA, 20 bp, Artificial Sequence
  MKO10055050_A_Tmx2
  gRNA
ctatacctcacactctgcat

SEQ ID NO: 55051 - DNA, 20 bp, Artificial Sequence
  MKO10055051_A_Tmx2
  gRNA
ttggcaatcattagaccagt

SEQ ID NO: 55052 - DNA, 20 bp, Artificial Sequence
  MKO10055052_A_Tmx3
  gRNA
ttgtgtagttctatgcaccc

SEQ ID NO: 55053 - DNA, 20 bp, Artificial Sequence
  MKO10055053_A_Tmx3
  gRNA
ataatcgaaaagatgacatt

SEQ ID NO: 55054 - DNA, 20 bp, Artificial Sequence
  MKO10055054_A_Tmx3
  gRNA
agcccaacttcattccaaat

SEQ ID NO: 55055 - DNA, 20 bp, Artificial Sequence
  MKO10055055_A_Tmx4
  gRNA
ttccgccgttaccgtggtcc

SEQ ID NO: 55056 - DNA, 20 bp, Artificial Sequence
  MKO10055056_A_Tmx4
  gRNA
cccattcagaatcagtctgc

SEQ ID NO: 55057 - DNA, 20 bp, Artificial Sequence
  MKO10055057_A_Tmx4
  gRNA
ataacttacgttagagaggc

SEQ ID NO: 55058 - DNA, 20 bp, Artificial Sequence
  MKO10055058_A_Tnc
  gRNA
cccaacgactgcttcgaccg

SEQ ID NO: 55059 - DNA, 20 bp, Artificial Sequence
  MKO10055059_A_Tnc
  gRNA
cccgccgattgtcaccaccg

SEQ ID NO: 55060 - DNA, 20 bp, Artificial Sequence
  MKO10055060_A_Tnc
  gRNA
gagacctcctaccgccaaac

SEQ ID NO: 55061 - DNA, 20 bp, Artificial Sequence
  MKO10055061_A_Tnfaip1
  gRNA
tggattctcatagaccgatg

SEQ ID NO: 55062 - DNA, 20 bp, Artificial Sequence
  MKO10055062_A_Tnfaip1
  gRNA
atctcggaggtaattcaaga

SEQ ID NO: 55063 - DNA, 20 bp, Artificial Sequence
  MKO10055063_A_Tnfaip1
  gRNA
catccttgatgaagagcacg

SEQ ID NO: 55064 - DNA, 20 bp, Artificial Sequence
  MKO10055064_A_Tnfaip2
  gRNA
gcgcacgacgttgaactcgt

SEQ ID NO: 55065 - DNA, 20 bp, Artificial Sequence
  MKO10055065_A_Tnfaip2
  gRNA
gctagccgtggtgtcgcagg

SEQ ID NO: 55066 - DNA, 20 bp, Artificial Sequence
  MKO10055066_A_Tnfaip2
  gRNA
tggtacctggagaatgtcga

SEQ ID NO: 55067 - DNA, 20 bp, Artificial Sequence
  MKO10055067_A_Tnfaip3
  gRNA
ctgtcatagcctaggacgat

SEQ ID NO: 55068 - DNA, 20 bp, Artificial Sequence
  MKO10055068_A_Tnfaip3
  gRNA
tacagatatcccatcgtcct

SEQ ID NO: 55069 - DNA, 20 bp, Artificial Sequence
  MKO10055069_A_Tnfaip3
  gRNA
ccgtggtcccagccttgcac

SEQ ID NO: 55070 - DNA, 20 bp, Artificial Sequence
  MKO10055070_A_Tnfaip6
  gRNA
gctcacctacgccgaagcca

SEQ ID NO: 55071 - DNA, 20 bp, Artificial Sequence
  MKO10055071_A_Tnfaip6
  gRNA
aaaacgggtatcatcgatta

SEQ ID NO: 55072 - DNA, 20 bp, Artificial Sequence
  MKO10055072_A_Tnfaip6
  gRNA
ggggtatccgactctaccct

SEQ ID NO: 55073 - DNA, 20 bp, Artificial Sequence
  MKO10055073_A_Tnfaip8l1
  gRNA
cctcgtccaacatcctcccg

SEQ ID NO: 55074 - DNA, 20 bp, Artificial Sequence
  MKO10055074_A_Tnfaip8l1
  gRNA
gcgtgaactccttcgtggcc

SEQ ID NO: 55075 - DNA, 20 bp, Artificial Sequence
  MKO10055075_A_Tnfaip8l1
  gRNA
cacctttgaccggcgtgtgc

SEQ ID NO: 55076 - DNA, 20 bp, Artificial Sequence
  MKO10055076_A_Tnfaip8l2
  gRNA
caggtctgctcgtcgagtgc

SEQ ID NO: 55077 - DNA, 20 bp, Artificial Sequence
  MKO10055077_A_Tnfaip8l2
  gRNA
gtcgataaagagatgcgcca

SEQ ID NO: 55078 - DNA, 20 bp, Artificial Sequence
  MKO10055078_A_Tnfaip8l2
  gRNA
ccaagtcacatgaccgcatc

SEQ ID NO: 55079 - DNA, 20 bp, Artificial Sequence
  MKO10055079_A_Tnfaip8l3
  gRNA
agagagcacattcgtatcaa

SEQ ID NO: 55080 - DNA, 20 bp, Artificial Sequence
  MKO10055080_A_Tnfaip8l3
  gRNA
tccactctctatggtccgca

SEQ ID NO: 55081 - DNA, 20 bp, Artificial Sequence
  MKO10055081_A_Tnfaip8l3
  gRNA
gagcagagcgagggcgagcc

SEQ ID NO: 55082 - DNA, 20 bp, Artificial Sequence
  MKO10055082_A_Tnfaip8
  gRNA
gcttgatgaccgtcttgatg

SEQ ID NO: 55083 - DNA, 20 bp, Artificial Sequence
  MKO10055083_A_Tnfaip8
  gRNA
gtcgatcagcgtggtggcga

SEQ ID NO: 55084 - DNA, 20 bp, Artificial Sequence
  MKO10055084_A_Tnfaip8
  gRNA
cgacagcatgctctccgaag

SEQ ID NO: 55085 - DNA, 20 bp, Artificial Sequence
  MKO10055085_A_Tnfrsf10b
  gRNA
gtaggccagctggacgatta

SEQ ID NO: 55086 - DNA, 20 bp, Artificial Sequence
  MKO10055086_A_Tnfrsf10b
  gRNA
ccagcccataatcgtccagc

SEQ ID NO: 55087 - DNA, 20 bp, Artificial Sequence
  MKO10055087_A_Tnfrsf10b
  gRNA
gcatcgacacaccgtatttg

SEQ ID NO: 55088 - DNA, 20 bp, Artificial Sequence
  MKO10055088_A_Tnfrsf11a
  gRNA
caagtactcatcggggccac

SEQ ID NO: 55089 - DNA, 20 bp, Artificial Sequence
  MKO10055089_A_Tnfrsf11a
  gRNA
ccgatgagtacttggacacc

SEQ ID NO: 55090 - DNA, 20 bp, Artificial Sequence
  MKO10055090_A_Tnfrsf11a
  gRNA
gccgtgcaagcacagcgacg

SEQ ID NO: 55091 - DNA, 20 bp, Artificial Sequence
  MKO10055091_A_Tnfrsf11b
  gRNA
cttaccagcttgcaccacgc

SEQ ID NO: 55092 - DNA, 20 bp, Artificial Sequence
  MKO10055092_A_Tnfrsf11b
  gRNA
gcggttgcactcctgcttca

SEQ ID NO: 55093 - DNA, 20 bp, Artificial Sequence
  MKO10055093_A_Tnfrsf11b
  gRNA
cacacgaactgcagcacatt

SEQ ID NO: 55094 - DNA, 20 bp, Artificial Sequence
  MKO10055094_A_Tnfrsf12a
  gRNA
cgcagtccatgcacttgtcg

SEQ ID NO: 55095 - DNA, 20 bp, Artificial Sequence
  MKO10055095_A_Tnfrsf12a
  gRNA
cggcaatcatggcttcggct

SEQ ID NO: 55096 - DNA, 20 bp, Artificial Sequence
  MKO10055096_A_Tnfrsf12a
  gRNA
cttggtgttgatgcgcgccg

SEQ ID NO: 55097 - DNA, 20 bp, Artificial Sequence
  MKO10055097_A_Tnfrsf13b
  gRNA
gagagcgcgccgcgttcgct

SEQ ID NO: 55098 - DNA, 20 bp, Artificial Sequence
  MKO10055098_A_Tnfrsf13b
  gRNA
ccgtgtatcccgagcgaacg

SEQ ID NO: 55099 - DNA, 20 bp, Artificial Sequence
  MKO10055099_A_Tnfrsf13b
  gRNA
tccatacttacggtgggcgt

SEQ ID NO: 55100 - DNA, 20 bp, Artificial Sequence
  MKO10055100_A_Tnfrsf13c
  gRNA
accgacgagcagcgccacgt

SEQ ID NO: 55101 - DNA, 20 bp, Artificial Sequence
  MKO10055101_A_Tnfrsf13c
  gRNA
gaccgagtgcttcgaccctc

SEQ ID NO: 55102 - DNA, 20 bp, Artificial Sequence
  MKO10055102_A_Tnfrsf13c
  gRNA
ctccgcgctgagacccgacg

SEQ ID NO: 55103 - DNA, 20 bp, Artificial Sequence
  MKO10055103_A_Tnfrsf14
  gRNA
tgcgctgcagcaagttcaaa

SEQ ID NO: 55104 - DNA, 20 bp, Artificial Sequence
  MKO10055104_A_Tnfrsf14
  gRNA
cttcccagggactcacgacc

SEQ ID NO: 55105 - DNA, 20 bp, Artificial Sequence
  MKO10055105_A_Tnfrsf14
  gRNA
acctggatcacagactccgc

SEQ ID NO: 55106 - DNA, 20 bp, Artificial Sequence
  MKO10055106_A_Tnfrsf17
  gRNA
aggccgacaccgagctgact

SEQ ID NO: 55107 - DNA, 20 bp, Artificial Sequence
  MKO10055107_A_Tnfrsf17
  gRNA
gaaatggtcagaatccccct

SEQ ID NO: 55108 - DNA, 20 bp, Artificial Sequence
  MKO10055108_A_Tnfrsf17
  gRNA
ggcgtgaccagttcagtgaa

SEQ ID NO: 55109 - DNA, 20 bp, Artificial Sequence
  MKO10055109_A_Tnfrsf18
  gRNA
gacaactgcacctccgcgaa

SEQ ID NO: 55110 - DNA, 20 bp, Artificial Sequence
  MKO10055110_A_Tnfrsf18
  gRNA
accttctccgcaggtcgtga

SEQ ID NO: 55111 - DNA, 20 bp, Artificial Sequence
  MKO10055111_A_Tnfrsf18
  gRNA
gcagtgaccgtcacgacctg

SEQ ID NO: 55112 - DNA, 20 bp, Artificial Sequence
  MKO10055112_A_Tnfrsf19
  gRNA
accagcgcacagtccgcaca

SEQ ID NO: 55113 - DNA, 20 bp, Artificial Sequence
  MKO10055113_A_Tnfrsf19
  gRNA
cgctggtgaaccgctttcag

SEQ ID NO: 55114 - DNA, 20 bp, Artificial Sequence
  MKO10055114_A_Tnfrsf19
  gRNA
tgtaaagtgagttgcgaaac

SEQ ID NO: 55115 - DNA, 20 bp, Artificial Sequence
  MKO10055115_A_Tnfrsf1a
  gRNA
ctgcagactgtatcccgccc

SEQ ID NO: 55116 - DNA, 20 bp, Artificial Sequence
  MKO10055116_A_Tnfrsf1a
  gRNA
gtgtctcactcaggtagcgt

SEQ ID NO: 55117 - DNA, 20 bp, Artificial Sequence
  MKO10055117_A_Tnfrsf1a
  gRNA
accgtgtgtaactgccatgc

SEQ ID NO: 55118 - DNA, 20 bp, Artificial Sequence
  MKO10055118_A_Tnfrsf1b
  gRNA
caccgtgtgtgcggactgtg

SEQ ID NO: 55119 - DNA, 20 bp, Artificial Sequence
  MKO10055119_A_Tnfrsf1b
  gRNA
cgagtgtgtgcttgcgaagc

SEQ ID NO: 55120 - DNA, 20 bp, Artificial Sequence
  MKO10055120_A_Tnfrsf1b
  gRNA
gtacccaggttccggtttgt

SEQ ID NO: 55121 - DNA, 20 bp, Artificial Sequence
  MKO10055121_A_Tnfrsf21
  gRNA
acttgtcgcaggttagcacc

SEQ ID NO: 55122 - DNA, 20 bp, Artificial Sequence
  MKO10055122_A_Tnfrsf21
  gRNA
cgccatgttgaccgtaccac

SEQ ID NO: 55123 - DNA, 20 bp, Artificial Sequence
  MKO10055123_A_Tnfrsf21
  gRNA
tctccacaacatcattgcgt

SEQ ID NO: 55124 - DNA, 20 bp, Artificial Sequence
  MKO10055124_A_Tnfrsf22
  gRNA
cactccttcaaatgtcccgc

SEQ ID NO: 55125 - DNA, 20 bp, Artificial Sequence
  MKO10055125_A_Tnfrsf22
  gRNA
cggcacgattctggaaattt

SEQ ID NO: 55126 - DNA, 20 bp, Artificial Sequence
  MKO10055126_A_Tnfrsf22
  gRNA
catagtagtaaagacctgtt

SEQ ID NO: 55127 - DNA, 20 bp, Artificial Sequence
  MKO10055127_A_Tnfrsf23
  gRNA
tgcaacagacatcattagac

SEQ ID NO: 55128 - DNA, 20 bp, Artificial Sequence
  MKO10055128_A_Tnfrsf23
  gRNA
tactccttcaactgtcccga

SEQ ID NO: 55129 - DNA, 20 bp, Artificial Sequence
  MKO10055129_A_Tnfrsf23
  gRNA
cggcatgattccggaaattt

SEQ ID NO: 55130 - DNA, 20 bp, Artificial Sequence
  MKO10055130_A_Tnfrsf25
  gRNA
ccttgtaaggccgtggtcac

SEQ ID NO: 55131 - DNA, 20 bp, Artificial Sequence
  MKO10055131_A_Tnfrsf25
  gRNA
actggtgttgtagccccgca

SEQ ID NO: 55132 - DNA, 20 bp, Artificial Sequence
  MKO10055132_A_Tnfrsf25
  gRNA
tgatctgtgcatattgtcga

SEQ ID NO: 55133 - DNA, 20 bp, Artificial Sequence
  MKO10055133_A_Tnfrsf26
  gRNA
ttcctgacgactctgccgtc

SEQ ID NO: 55134 - DNA, 20 bp, Artificial Sequence
  MKO10055134_A_Tnfrsf26
  gRNA
tgaactcaccaatcttacac

SEQ ID NO: 55135 - DNA, 20 bp, Artificial Sequence
  MKO10055135_A_Tnfrsf26
  gRNA
ggcacacacgatcagctgta

SEQ ID NO: 55136 - DNA, 20 bp, Artificial Sequence
  MKO10055136_A_Tnfrsf4
  gRNA
gactgcgtccaagctgtcac

SEQ ID NO: 55137 - DNA, 20 bp, Artificial Sequence
  MKO10055137_A_Tnfrsf4
  gRNA
ttggcctgaatgtagggcgc

SEQ ID NO: 55138 - DNA, 20 bp, Artificial Sequence
  MKO10055138_A_Tnfrsf4
  gRNA
ctatgtcatccgtgtgagac

SEQ ID NO: 55139 - DNA, 20 bp, Artificial Sequence
  MKO10055139_A_Tnfrsf8
  gRNA
tcttcattgacgtagtagtc

SEQ ID NO: 55140 - DNA, 20 bp, Artificial Sequence
  MKO10055140_A_Tnfrsf8
  gRNA
tcacccggattggagcaatt

SEQ ID NO: 55141 - DNA, 20 bp, Artificial Sequence
  MKO10055141_A_Tnfrsf8
  gRNA
gtgaccgcaagacacttact

SEQ ID NO: 55142 - DNA, 20 bp, Artificial Sequence
  MKO10055142_A_Tnfrsf9
  gRNA
tgcactcacactccgcgttg

SEQ ID NO: 55143 - DNA, 20 bp, Artificial Sequence
  MKO10055143_A_Tnfrsf9
  gRNA
tttaatgaccagaacggtac

SEQ ID NO: 55144 - DNA, 20 bp, Artificial Sequence
  MKO10055144_A_Tnfrsf9
  gRNA
accaggctgacagttatcac

SEQ ID NO: 55145 - DNA, 20 bp, Artificial Sequence
  MKO10055145_A_Tnfsf10
  gRNA
cagtccgtactcggcatctc

SEQ ID NO: 55146 - DNA, 20 bp, Artificial Sequence
  MKO10055146_A_Tnfsf10
  gRNA
ctacaagtacaccagctatc

SEQ ID NO: 55147 - DNA, 20 bp, Artificial Sequence
  MKO10055147_A_Tnfsf10
  gRNA
gttcaagatctctccatcag

SEQ ID NO: 55148 - DNA, 20 bp, Artificial Sequence
  MKO10055148_A_Tnfsf11
  gRNA
aagtacgtcgcatcttgatc

SEQ ID NO: 55149 - DNA, 20 bp, Artificial Sequence
  MKO10055149_A_Tnfsf11
  gRNA
gcctcgatcgtggtaccaag

SEQ ID NO: 55150 - DNA, 20 bp, Artificial Sequence
  MKO10055150_A_Tnfsf11
  gRNA
taacttacccgatgggatgc

SEQ ID NO: 55151 - DNA, 20 bp, Artificial Sequence
  MKO10055151_A_Tnfsf12Tnfsf13
  gRNA
gggctacctaccctcataat

SEQ ID NO: 55152 - DNA, 20 bp, Artificial Sequence
  MKO10055152_A_Tnfsf12Tnfsf13
  gRNA
ctagtccggcctcgaagaag

SEQ ID NO: 55153 - DNA, 20 bp, Artificial Sequence
  MKO10055153_A_Tnfsf12Tnfsf13
  gRNA
ccgcccccatggccgcccgt

SEQ ID NO: 55154 - DNA, 20 bp, Artificial Sequence
  MKO10055154_A_Tnfsf12
  gRNA
gggctacctaccctcataat

SEQ ID NO: 55155 - DNA, 20 bp, Artificial Sequence
  MKO10055155_A_Tnfsf12
  gRNA
ctagtccggcctcgaagaag

SEQ ID NO: 55156 - DNA, 20 bp, Artificial Sequence
  MKO10055156_A_Tnfsf12
  gRNA
cttacagttcatcctcggcc

SEQ ID NO: 55157 - DNA, 20 bp, Artificial Sequence
  MKO10055157_A_Tnfsf13b
  gRNA
gacacgccgactatacgaaa

SEQ ID NO: 55158 - DNA, 20 bp, Artificial Sequence
  MKO10055158_A_Tnfsf13b
  gRNA
caggaacagacgcgctttcc

SEQ ID NO: 55159 - DNA, 20 bp, Artificial Sequence
  MKO10055159_A_Tnfsf13b
  gRNA
cggctggagttgtggggtcg

SEQ ID NO: 55160 - DNA, 20 bp, Artificial Sequence
  MKO10055160_A_Tnfsf13
  gRNA
cctctcccacgcctaagtac

SEQ ID NO: 55161 - DNA, 20 bp, Artificial Sequence
  MKO10055161_A_Tnfsf13
  gRNA
agactcgtacaatgtctccc

SEQ ID NO: 55162 - DNA, 20 bp, Artificial Sequence
  MKO10055162_A_Tnfsf13
  gRNA
cccttggaggtaatgttaac

SEQ ID NO: 55163 - DNA, 20 bp, Artificial Sequence
  MKO10055163_A_Tnfsf14
  gRNA
gcgcacatcccgctacccga

SEQ ID NO: 55164 - DNA, 20 bp, Artificial Sequence
  MKO10055164_A_Tnfsf14
  gRNA
cagtgccacagcgccgtctc

SEQ ID NO: 55165 - DNA, 20 bp, Artificial Sequence
  MKO10055165_A_Tnfsf14
  gRNA
gggccaacagctcccgagtc

SEQ ID NO: 55166 - DNA, 20 bp, Artificial Sequence
  MKO10055166_A_Tnfsf15
  gRNA
gagcctgcccgcctactaac

SEQ ID NO: 55167 - DNA, 20 bp, Artificial Sequence
  MKO10055167_A_Tnfsf15
  gRNA
agaacgtggccccaaggtag

SEQ ID NO: 55168 - DNA, 20 bp, Artificial Sequence
  MKO10055168_A_Tnfsf15
  gRNA
ggtgctaagtcctgcgagga

SEQ ID NO: 55169 - DNA, 20 bp, Artificial Sequence
  MKO10055169_A_Tnfsf18
  gRNA
agttcataaacccctcctat

SEQ ID NO: 55170 - DNA, 20 bp, Artificial Sequence
  MKO10055170_A_Tnfsf18
  gRNA
ctcaccaaacttaaccatgc

SEQ ID NO: 55171 - DNA, 20 bp, Artificial Sequence
  MKO10055171_A_Tnfsf18
  gRNA
tgtgtgaatacgacatctga

SEQ ID NO: 55172 - DNA, 20 bp, Artificial Sequence
  MKO10055172_A_Tnfsf4
  gRNA
tctattccaatgctgaacga

SEQ ID NO: 55173 - DNA, 20 bp, Artificial Sequence
  MKO10055173_A_Tnfsf4
  gRNA
cttcgaccatcgttcagcat

SEQ ID NO: 55174 - DNA, 20 bp, Artificial Sequence
  MKO10055174_A_Tnfsf4
  gRNA
tcaacccctggatgagaatc

SEQ ID NO: 55175 - DNA, 20 bp, Artificial Sequence
  MKO10055175_A_Tnfsf8
  gRNA
tcaactctaccatatcagtc

SEQ ID NO: 55176 - DNA, 20 bp, Artificial Sequence
  MKO10055176_A_Tnfsf8
  gRNA
ggactatcaggttcccgtcc

SEQ ID NO: 55177 - DNA, 20 bp, Artificial Sequence
  MKO10055177_A_Tnfsf8
  gRNA
tgtggcagtggcgatcattc

SEQ ID NO: 55178 - DNA, 20 bp, Artificial Sequence
  MKO10055178_A_Tnfsf9
  gRNA
tctgaggagcgccgcatccg

SEQ ID NO: 55179 - DNA, 20 bp, Artificial Sequence
  MKO10055179_A_Tnfsf9
  gRNA
cctaccctgcggttaatgtt

SEQ ID NO: 55180 - DNA, 20 bp, Artificial Sequence
  MKO10055180_A_Tnfsf9
  gRNA
cgtacctcagaccttgagat

SEQ ID NO: 55181 - DNA, 20 bp, Artificial Sequence
  MKO10055181_A_Tnf
  gRNA
agaaagcatgatccgcgacg

SEQ ID NO: 55182 - DNA, 20 bp, Artificial Sequence
  MKO10055182_A_Tnf
  gRNA
aagcctgtagcccacgtcgt

SEQ ID NO: 55183 - DNA, 20 bp, Artificial Sequence
  MKO10055183_A_Tnf
  gRNA
agaaatcttacctacgacgt

SEQ ID NO: 55184 - DNA, 20 bp, Artificial Sequence
  MKO10055184_A_Tnik
  gRNA
cggagagatcgatttcatcc

SEQ ID NO: 55185 - DNA, 20 bp, Artificial Sequence
  MKO10055185_A_Tnik
  gRNA
aaatcgatctctccgccctg

SEQ ID NO: 55186 - DNA, 20 bp, Artificial Sequence
  MKO10055186_A_Tnik
  gRNA
gcagggtcgtcatgtcaaaa

SEQ ID NO: 55187 - DNA, 20 bp, Artificial Sequence
  MKO10055187_A_Tnip1
  gRNA
ttctacctagggcgcctcct

SEQ ID NO: 55188 - DNA, 20 bp, Artificial Sequence
  MKO10055188_A_Tnip1
  gRNA
cagccaccctacgaacatga

SEQ ID NO: 55189 - DNA, 20 bp, Artificial Sequence
  MKO10055189_A_Tnip1
  gRNA
aggccaacctgttgaactcg

SEQ ID NO: 55190 - DNA, 20 bp, Artificial Sequence
  MKO10055190_A_Tnip2
  gRNA
atgagacccaccaactgcgc

SEQ ID NO: 55191 - DNA, 20 bp, Artificial Sequence
  MKO10055191_A_Tnip2
  gRNA
agtcttgcttcggcgaagtg

SEQ ID NO: 55192 - DNA, 20 bp, Artificial Sequence
  MKO10055192_A_Tnip2
  gRNA
ggttgcatgcccagctaaag

SEQ ID NO: 55193 - DNA, 20 bp, Artificial Sequence
  MKO10055193_A_Tnip3
  gRNA
tgaaattaaacgcctcaata

SEQ ID NO: 55194 - DNA, 20 bp, Artificial Sequence
  MKO10055194_A_Tnip3
  gRNA
gttgaaagaaaacaacgctc

SEQ ID NO: 55195 - DNA, 20 bp, Artificial Sequence
  MKO10055195_A_Tnip3
  gRNA
aaacactcacaccctagtga

SEQ ID NO: 55196 - DNA, 20 bp, Artificial Sequence
  MKO10055196_A_Tnk1
  gRNA
cgcccatgacgtagcgtccc

SEQ ID NO: 55197 - DNA, 20 bp, Artificial Sequence
  MKO10055197_A_Tnk1
  gRNA
tccgccaccttgatcattcg

SEQ ID NO: 55198 - DNA, 20 bp, Artificial Sequence
  MKO10055198_A_Tnk1
  gRNA
cccctgaccggtacctcttc

SEQ ID NO: 55199 - DNA, 20 bp, Artificial Sequence
  MKO10055199_A_Tnk2
  gRNA
cgaaacctcattcgcttgta

SEQ ID NO: 55200 - DNA, 20 bp, Artificial Sequence
  MKO10055200_A_Tnk2
  gRNA
ggagaaagacctacgcctgc

SEQ ID NO: 55201 - DNA, 20 bp, Artificial Sequence
  MKO10055201_A_Tnk2
  gRNA
acccctgcgcaccacgccaa

SEQ ID NO: 55202 - DNA, 20 bp, Artificial Sequence
  MKO10055202_A_Tnks1bp1
  gRNA
catatcgagagctgccatcg

SEQ ID NO: 55203 - DNA, 20 bp, Artificial Sequence
  MKO10055203_A_Tnks1bp1
  gRNA
agactctgtcccgcttccga

SEQ ID NO: 55204 - DNA, 20 bp, Artificial Sequence
  MKO10055204_A_Tnks1bp1
  gRNA
gttcgggaagcgagattcct

SEQ ID NO: 55205 - DNA, 20 bp, Artificial Sequence
  MKO10055205_A_Tnks2
  gRNA
aatgtgcaagcgcgtgatga

SEQ ID NO: 55206 - DNA, 20 bp, Artificial Sequence
  MKO10055206_A_Tnks2
  gRNA
ttccaattatcccgagcatt

SEQ ID NO: 55207 - DNA, 20 bp, Artificial Sequence
  MKO10055207_A_Tnks2
  gRNA
tgacattcaatggtgtaagc

SEQ ID NO: 55208 - DNA, 20 bp, Artificial Sequence
  MKO10055208_A_Tnks
  gRNA
ccaaacatccggaacaccga

SEQ ID NO: 55209 - DNA, 20 bp, Artificial Sequence
  MKO10055209_A_Tnks
  gRNA
aatgtccacgcccgtgatga

SEQ ID NO: 55210 - DNA, 20 bp, Artificial Sequence
  MKO10055210_A_Tnks
  gRNA
gatgagacccccgtcatcac

SEQ ID NO: 55211 - DNA, 20 bp, Artificial Sequence
  MKO10055211_A_Tnmd
  gRNA
gcgataatgtgaccatgtac

SEQ ID NO: 55212 - DNA, 20 bp, Artificial Sequence
  MKO10055212_A_Tnmd
  gRNA
cggctcccagacctatgaca

SEQ ID NO: 55213 - DNA, 20 bp, Artificial Sequence
  MKO10055213_A_Tnmd
  gRNA
atcaatcccactctaatagc

SEQ ID NO: 55214 - DNA, 20 bp, Artificial Sequence
  MKO10055214_A_Tnnc1
  gRNA
gatgattgacgaagtagacg

SEQ ID NO: 55215 - DNA, 20 bp, Artificial Sequence
  MKO10055215_A_Tnnc1
  gRNA
actcaccgtcatagtcaatt

SEQ ID NO: 55216 - DNA, 20 bp, Artificial Sequence
  MKO10055216_A_Tnnc1
  gRNA
tgcagccatcctccgcgccc

SEQ ID NO: 55217 - DNA, 20 bp, Artificial Sequence
  MKO10055217_A_Tnnc2
  gRNA
ctttctacagacggaccaac

SEQ ID NO: 55218 - DNA, 20 bp, Artificial Sequence
  MKO10055218_A_Tnnc2
  gRNA
ccttcgcatcctctttcatc

SEQ ID NO: 55219 - DNA, 20 bp, Artificial Sequence
  MKO10055219_A_Tnnc2
  gRNA
ggccaggtcctacctcagcg

SEQ ID NO: 55220 - DNA, 20 bp, Artificial Sequence
  MKO10055220_A_Tnni1
  gRNA
tgagaaggtgcgttacctct

SEQ ID NO: 55221 - DNA, 20 bp, Artificial Sequence
  MKO10055221_A_Tnni1
  gRNA
gtgtgggaatgcgctccgag

SEQ ID NO: 55222 - DNA, 20 bp, Artificial Sequence
  MKO10055222_A_Tnni1
  gRNA
ggcctacctctctggtgttg

SEQ ID NO: 55223 - DNA, 20 bp, Artificial Sequence
  MKO10055223_A_Tnni2
  gRNA
actgcatgcgaagatcgacg

SEQ ID NO: 55224 - DNA, 20 bp, Artificial Sequence
  MKO10055224_A_Tnni2
  gRNA
ctgtcctgcagaagcgcaac

SEQ ID NO: 55225 - DNA, 20 bp, Artificial Sequence
  MKO10055225_A_Tnni2
  gRNA
tgcccgccactgcacatccc

SEQ ID NO: 55226 - DNA, 20 bp, Artificial Sequence
  MKO10055226_A_Tnni3k
  gRNA
gatgttcagcaagcgggata

SEQ ID NO: 55227 - DNA, 20 bp, Artificial Sequence
  MKO10055227_A_Tnni3k
  gRNA
gcccagctattgcagcgatg

SEQ ID NO: 55228 - DNA, 20 bp, Artificial Sequence
  MKO10055228_A_Tnni3k
  gRNA
ttaaattaccgcacagagcg

SEQ ID NO: 55229 - DNA, 20 bp, Artificial Sequence
  MKO10055229_A_Tnni3
  gRNA
ggtggcataggctcggtagt

SEQ ID NO: 55230 - DNA, 20 bp, Artificial Sequence
  MKO10055230_A_Tnni3
  gRNA
gatgctgcagattgcgaagc

SEQ ID NO: 55231 - DNA, 20 bp, Artificial Sequence
  MKO10055231_A_Tnni3
  gRNA
gaggactcgttgccagcctt

SEQ ID NO: 55232 - DNA, 20 bp, Artificial Sequence
  MKO10055232_A_Tnnt1
  gRNA
tggttacctcgctctgccac

SEQ ID NO: 55233 - DNA, 20 bp, Artificial Sequence
  MKO10055233_A_Tnnt1
  gRNA
tagcacctcacctgggtttg

SEQ ID NO: 55234 - DNA, 20 bp, Artificial Sequence
  MKO10055234_A_Tnnt1
  gRNA
aagaagagcgccccaaaccc

SEQ ID NO: 55235 - DNA, 20 bp, Artificial Sequence
  MKO10055235_A_Tnnt2
  gRNA
cgagagcatgtctgacgccg

SEQ ID NO: 55236 - DNA, 20 bp, Artificial Sequence
  MKO10055236_A_Tnnt2
  gRNA
ctgggctgtaccttctacgt

SEQ ID NO: 55237 - DNA, 20 bp, Artificial Sequence
  MKO10055237_A_Tnnt2
  gRNA
acagaggaggccaacgtaga

SEQ ID NO: 55238 - DNA, 20 bp, Artificial Sequence
  MKO10055238_A_Tnnt3
  gRNA
caccgccactatgtctgacg

SEQ ID NO: 55239 - DNA, 20 bp, Artificial Sequence
  MKO10055239_A_Tnnt3
  gRNA
ctatgacagtgaacaagttg

SEQ ID NO: 55240 - DNA, 20 bp, Artificial Sequence
  MKO10055240_A_Tnnt3
  gRNA
attctcagaggaggcccaag

SEQ ID NO: 55241 - DNA, 20 bp, Artificial Sequence
  MKO10055241_A_Tnn
  gRNA
ccattgccactacagtcgcc

SEQ ID NO: 55242 - DNA, 20 bp, Artificial Sequence
  MKO10055242_A_Tnn
  gRNA
caacggccacgggcgctgtg

SEQ ID NO: 55243 - DNA, 20 bp, Artificial Sequence
  MKO10055243_A_Tnn
  gRNA
tgtctttcttcacgttgcgc

SEQ ID NO: 55244 - DNA, 20 bp, Artificial Sequence
  MKO10055244_A_Tnp1
  gRNA
tgccgcatcacaagtgggat

SEQ ID NO: 55245 - DNA, 20 bp, Artificial Sequence
  MKO10055245_A_Tnp1
  gRNA
cctctcttgacgcccttgtg

SEQ ID NO: 55246 - DNA, 20 bp, Artificial Sequence
  MKO10055246_A_Tnp1
  gRNA
caagaaccgagctcctcaca

SEQ ID NO: 55247 - DNA, 20 bp, Artificial Sequence
  MKO10055247_A_Tnp2
  gRNA
tgttcttggggcagctcccg

SEQ ID NO: 55248 - DNA, 20 bp, Artificial Sequence
  MKO10055248_A_Tnp2
  gRNA
agtccgtttccgcctcctga

SEQ ID NO: 55249 - DNA, 20 bp, Artificial Sequence
  MKO10055249_A_Tnp2
  gRNA
ggtgtgactttgaggccgcg

SEQ ID NO: 55250 - DNA, 20 bp, Artificial Sequence
  MKO10055250_A_Tnpo1
  gRNA
atacttgttgcacggtcctc

SEQ ID NO: 55251 - DNA, 20 bp, Artificial Sequence
  MKO10055251_A_Tnpo1
  gRNA
tgctgaagcccttgctcgtc

SEQ ID NO: 55252 - DNA, 20 bp, Artificial Sequence
  MKO10055252_A_Tnpo1
  gRNA
tccagcaggctacagagttt

SEQ ID NO: 55253 - DNA, 20 bp, Artificial Sequence
  MKO10055253_A_Tnpo2
  gRNA
acatcacgtaccggatctta

SEQ ID NO: 55254 - DNA, 20 bp, Artificial Sequence
  MKO10055254_A_Tnpo2
  gRNA
caggagtgtctcaacaacat

SEQ ID NO: 55255 - DNA, 20 bp, Artificial Sequence
  MKO10055255_A_Tnpo2
  gRNA
gtgcaacctgctcaactcag

SEQ ID NO: 55256 - DNA, 20 bp, Artificial Sequence
  MKO10055256_A_Tnpo3
  gRNA
tcaattgttacagatccgac

SEQ ID NO: 55257 - DNA, 20 bp, Artificial Sequence
  MKO10055257_A_Tnpo3
  gRNA
agccttctactctagtaccg

SEQ ID NO: 55258 - DNA, 20 bp, Artificial Sequence
  MKO10055258_A_Tnpo3
  gRNA
aagtacatagtcgttccttg

SEQ ID NO: 55259 - DNA, 20 bp, Artificial Sequence
  MKO10055259_A_Tnrc18
  gRNA
tctagggggacccgccgacg

SEQ ID NO: 55260 - DNA, 20 bp, Artificial Sequence
  MKO10055260_A_Tnrc18
  gRNA
tacaccgtgttccgtgaacc

SEQ ID NO: 55261 - DNA, 20 bp, Artificial Sequence
  MKO10055261_A_Tnrc18
  gRNA
atggatgtactacccgagcg

SEQ ID NO: 55262 - DNA, 20 bp, Artificial Sequence
  MKO10055262_A_Tnrc6a
  gRNA
acctccacgatttcgccacc

SEQ ID NO: 55263 - DNA, 20 bp, Artificial Sequence
  MKO10055263_A_Tnrc6a
  gRNA
aatcgtggaggtacttcacg

SEQ ID NO: 55264 - DNA, 20 bp, Artificial Sequence
  MKO10055264_A_Tnrc6a
  gRNA
aagatttctctctacgtctt

SEQ ID NO: 55265 - DNA, 20 bp, Artificial Sequence
  MKO10055265_A_Tnrc6b
  gRNA
gcgccgcccgctacatgcct

SEQ ID NO: 55266 - DNA, 20 bp, Artificial Sequence
  MKO10055266_A_Tnrc6b
  gRNA
gcgcttggcggttgtccgtt

SEQ ID NO: 55267 - DNA, 20 bp, Artificial Sequence
  MKO10055267_A_Tnrc6b
  gRNA
gtcacggaacaaaaaaccaa

SEQ ID NO: 55268 - DNA, 20 bp, Artificial Sequence
  MKO10055268_A_Tnrc6c
  gRNA
gacccaccccgatactgaag

SEQ ID NO: 55269 - DNA, 20 bp, Artificial Sequence
  MKO10055269_A_Tnrc6c
  gRNA
gaacccctttgtctcgcctc

SEQ ID NO: 55270 - DNA, 20 bp, Artificial Sequence
  MKO10055270_A_Tnrc6c
  gRNA
cattcccagtttcatccggc

SEQ ID NO: 55271 - DNA, 20 bp, Artificial Sequence
  MKO10055271_A_Tnr
  gRNA
aggcattcagacaccgtcgc

SEQ ID NO: 55272 - DNA, 20 bp, Artificial Sequence
  MKO10055272_A_Tnr
  gRNA
gctgatctcccacccgtcga

SEQ ID NO: 55273 - DNA, 20 bp, Artificial Sequence
  MKO10055273_A_Tnr
  gRNA
gacgatcacagagaccaccg

SEQ ID NO: 55274 - DNA, 20 bp, Artificial Sequence
  MKO10055274_A_Tns1
  gRNA
gtgcggcgcccgacccgagg

SEQ ID NO: 55275 - DNA, 20 bp, Artificial Sequence
  MKO10055275_A_Tns1
  gRNA
cgagcgcctcgcagcacacc

SEQ ID NO: 55276 - DNA, 20 bp, Artificial Sequence
  MKO10055276_A_Tns1
  gRNA
tctgccggcaggccatcact

SEQ ID NO: 55277 - DNA, 20 bp, Artificial Sequence
  MKO10055277_A_Tns3
  gRNA
atcttacctggctgagacgt

SEQ ID NO: 55278 - DNA, 20 bp, Artificial Sequence
  MKO10055278_A_Tns3
  gRNA
agatacataccgcttctggg

SEQ ID NO: 55279 - DNA, 20 bp, Artificial Sequence
  MKO10055279_A_Tns3
  gRNA
agtggatgacgaccacatgc

SEQ ID NO: 55280 - DNA, 20 bp, Artificial Sequence
  MKO10055280_A_Tns4
  gRNA
acatagctgacatccgatac

SEQ ID NO: 55281 - DNA, 20 bp, Artificial Sequence
  MKO10055281_A_Tns4
  gRNA
acatacatacctggtcggtt

SEQ ID NO: 55282 - DNA, 20 bp, Artificial Sequence
  MKO10055282_A_Tns4
  gRNA
ccaagcatcactcgagagca

SEQ ID NO: 55283 - DNA, 20 bp, Artificial Sequence
  MKO10055283_A_Tnxb
  gRNA
ccacgccggcgacagtcggc

SEQ ID NO: 55284 - DNA, 20 bp, Artificial Sequence
  MKO10055284_A_Tnxb
  gRNA
gggctctgcgagtgcgacga

SEQ ID NO: 55285 - DNA, 20 bp, Artificial Sequence
  MKO10055285_A_Tnxb
  gRNA
tcactgttcgtgctctacga

SEQ ID NO: 55286 - DNA, 20 bp, Artificial Sequence
  MKO10055286_A_Tob1
  gRNA
tcgcacttctccgatcaacc

SEQ ID NO: 55287 - DNA, 20 bp, Artificial Sequence
  MKO10055287_A_Tob1
  gRNA
ggtagaccccgtgatcgagc

SEQ ID NO: 55288 - DNA, 20 bp, Artificial Sequence
  MKO10055288_A_Tob1
  gRNA
ggaggaggccgggtcgctta

SEQ ID NO: 55289 - DNA, 20 bp, Artificial Sequence
  MKO10055289_A_Tob2
  gRNA
gtacccggagaagccgttga

SEQ ID NO: 55290 - DNA, 20 bp, Artificial Sequence
  MKO10055290_A_Tob2
  gRNA
acaacaagctgccccgccgc

SEQ ID NO: 55291 - DNA, 20 bp, Artificial Sequence
  MKO10055291_A_Tob2
  gRNA
cgactcccttctcgccaatc

SEQ ID NO: 55292 - DNA, 20 bp, Artificial Sequence
  MKO10055292_A_Toe1
  gRNA
ggataccctgggcgtactgc

SEQ ID NO: 55293 - DNA, 20 bp, Artificial Sequence
  MKO10055293_A_Toe1
  gRNA
cgtactcctctatgcatagc

SEQ ID NO: 55294 - DNA, 20 bp, Artificial Sequence
  MKO10055294_A_Toe1
  gRNA
gtgcattgaggaacgttaca

SEQ ID NO: 55295 - DNA, 20 bp, Artificial Sequence
  MKO10055295_A_Tollip
  gRNA
gtacattggtgaactccccc

SEQ ID NO: 55296 - DNA, 20 bp, Artificial Sequence
  MKO10055296_A_Tollip
  gRNA
gtgttatacggaggaagtcc

SEQ ID NO: 55297 - DNA, 20 bp, Artificial Sequence
  MKO10055297_A_Tollip
  gRNA
cccttactgccgtctgcgtc

SEQ ID NO: 55298 - DNA, 20 bp, Artificial Sequence
  MKO10055298_A_Tom1l1
  gRNA
gggacagatgtcggtcgatt

SEQ ID NO: 55299 - DNA, 20 bp, Artificial Sequence
  MKO10055299_A_Tom1l1
  gRNA
gatctgaataatgccgtcct

SEQ ID NO: 55300 - DNA, 20 bp, Artificial Sequence
  MKO10055300_A_Tom1l1
  gRNA
gttcaattcccgccctcgga

SEQ ID NO: 55301 - DNA, 20 bp, Artificial Sequence
  MKO10055301_A_Tom1l2
  gRNA
taaccctcccactatcgtcc

SEQ ID NO: 55302 - DNA, 20 bp, Artificial Sequence
  MKO10055302_A_Tom1l2
  gRNA
gctctaaagaagcggcttag

SEQ ID NO: 55303 - DNA, 20 bp, Artificial Sequence
  MKO10055303_A_Tom1l2
  gRNA
agacttcatcgacagcgttc

SEQ ID NO: 55304 - DNA, 20 bp, Artificial Sequence
  MKO10055304_A_Tom1
  gRNA
tcaccgatccgttgtcccac

SEQ ID NO: 55305 - DNA, 20 bp, Artificial Sequence
  MKO10055305_A_Tom1
  gRNA
ttcacagagaaagctacaga

SEQ ID NO: 55306 - DNA, 20 bp, Artificial Sequence
  MKO10055306_A_Tom1
  gRNA
cgcggcaatggactttctcc

SEQ ID NO: 55307 - DNA, 20 bp, Artificial Sequence
  MKO10055307_A_Tomm20l
  gRNA
tgtttcaggggagcgcggaa

SEQ ID NO: 55308 - DNA, 20 bp, Artificial Sequence
  MKO10055308_A_Tomm20l
  gRNA
gttatgggatccagtaaaga

SEQ ID NO: 55309 - DNA, 20 bp, Artificial Sequence
  MKO10055309_A_Tomm20l
  gRNA
agcaactcgaggagacatgc

SEQ ID NO: 55310 - DNA, 20 bp, Artificial Sequence
  MKO10055310_A_Tomm20
  gRNA
gtctgcaggtgactacgaga

SEQ ID NO: 55311 - DNA, 20 bp, Artificial Sequence
  MKO10055311_A_Tomm20
  gRNA
caagcttccgaccattagtc

SEQ ID NO: 55312 - DNA, 20 bp, Artificial Sequence
  MKO10055312_A_Tomm20
  gRNA
aaagaaacagaagcttgcta

SEQ ID NO: 55313 - DNA, 20 bp, Artificial Sequence
  MKO10055313_A_Tomm22
  gRNA
cccagcgccggctgcagcga

SEQ ID NO: 55314 - DNA, 20 bp, Artificial Sequence
  MKO10055314_A_Tomm22
  gRNA
cccaatccacaaagctgccc

SEQ ID NO: 55315 - DNA, 20 bp, Artificial Sequence
  MKO10055315_A_Tomm22
  gRNA
acagctagacgagaccctgt

SEQ ID NO: 55316 - DNA, 20 bp, Artificial Sequence
  MKO10055316_A_Tomm34
  gRNA
ccttcaagtagcacgctgca

SEQ ID NO: 55317 - DNA, 20 bp, Artificial Sequence
  MKO10055317_A_Tomm34
  gRNA
ccgtgcagcgtgctacttga

SEQ ID NO: 55318 - DNA, 20 bp, Artificial Sequence
  MKO10055318_A_Tomm34
  gRNA
ctcccgtagcgcgctggcct

SEQ ID NO: 55319 - DNA, 20 bp, Artificial Sequence
  MKO10055319_A_Tomm40l
  gRNA
cagtggcagtctcaacgccc

SEQ ID NO: 55320 - DNA, 20 bp, Artificial Sequence
  MKO10055320_A_Tomm40l
  gRNA
cagtttgatggcgagtatcg

SEQ ID NO: 55321 - DNA, 20 bp, Artificial Sequence
  MKO10055321_A_Tomm40l
  gRNA
cgccatcaaactgccatgtc

SEQ ID NO: 55322 - DNA, 20 bp, Artificial Sequence
  MKO10055322_A_Tomm40
  gRNA
caggtggatggcgagtaccg

SEQ ID NO: 55323 - DNA, 20 bp, Artificial Sequence
  MKO10055323_A_Tomm40
  gRNA
cccgcaggcgttccccgtgc

SEQ ID NO: 55324 - DNA, 20 bp, Artificial Sequence
  MKO10055324_A_Tomm40
  gRNA
tggactccccaattgtgccg

SEQ ID NO: 55325 - DNA, 20 bp, Artificial Sequence
  MKO10055325_A_Tomm5
  gRNA
gacactcactgactcgcagc

SEQ ID NO: 55326 - DNA, 20 bp, Artificial Sequence
  MKO10055326_A_Tomm5
  gRNA
gatgaagcggaagatgcgtg

SEQ ID NO: 55327 - DNA, 20 bp, Artificial Sequence
  MKO10055327_A_Tomm5
  gRNA
tacctctgccttctgagtgc

SEQ ID NO: 55328 - DNA, 20 bp, Artificial Sequence
  MKO10055328_A_Tomm6
  gRNA
cctccggaagtcgtttcgat

SEQ ID NO: 55329 - DNA, 20 bp, Artificial Sequence
  MKO10055329_A_Tomm6
  gRNA
ccaccgatcgaaacgacttc

SEQ ID NO: 55330 - DNA, 20 bp, Artificial Sequence
  MKO10055330_A_Tomm6
  gRNA
gactctttgctgcgggagtc

SEQ ID NO: 55331 - DNA, 20 bp, Artificial Sequence
  MKO10055331_A_Tomm70a
  gRNA
agtacataccaattgttcaa

SEQ ID NO: 55332 - DNA, 20 bp, Artificial Sequence
  MKO10055332_A_Tomm70a
  gRNA
aatttctcaaccaatgctta

SEQ ID NO: 55333 - DNA, 20 bp, Artificial Sequence
  MKO10055333_A_Tomm70a
  gRNA
gataaagttcttaaacttct

SEQ ID NO: 55334 - DNA, 20 bp, Artificial Sequence
  MKO10055334_A_Tomm7
  gRNA
gagcattaccttaaaaccga

SEQ ID NO: 55335 - DNA, 20 bp, Artificial Sequence
  MKO10055335_A_Tomm7
  gRNA
tcctggaatgcctgaaccgt

SEQ ID NO: 55336 - DNA, 20 bp, Artificial Sequence
  MKO10055336_A_Tomm7
  gRNA
tgacccaggtaaatcacgag

SEQ ID NO: 55337 - DNA, 20 bp, Artificial Sequence
  MKO10055337_A_Tomt
  gRNA
gctcatcgaagcctgccagc

SEQ ID NO: 55338 - DNA, 20 bp, Artificial Sequence
  MKO10055338_A_Tomt
  gRNA
ccagctgaatcgtgcagatc

SEQ ID NO: 55339 - DNA, 20 bp, Artificial Sequence
  MKO10055339_A_Tomt
  gRNA
atagcccaactcacctatac

SEQ ID NO: 55340 - DNA, 20 bp, Artificial Sequence
  MKO10055340_A_Tonsl
  gRNA
tcttccggcaggccgcttca

SEQ ID NO: 55341 - DNA, 20 bp, Artificial Sequence
  MKO10055341_A_Tonsl
  gRNA
acatctgctagagagcgtcc

SEQ ID NO: 55342 - DNA, 20 bp, Artificial Sequence
  MKO10055342_A_Tonsl
  gRNA
gacccgtctctacctcaatc

SEQ ID NO: 55343 - DNA, 20 bp, Artificial Sequence
  MKO10055343_A_Top1mt
  gRNA
tagaggaagtgcactccgtc

SEQ ID NO: 55344 - DNA, 20 bp, Artificial Sequence
  MKO10055344_A_Top1mt
  gRNA
gcatcttgagtgtacgagca

SEQ ID NO: 55345 - DNA, 20 bp, Artificial Sequence
  MKO10055345_A_Top1mt
  gRNA
gaggaggtcgctaccttcta

SEQ ID NO: 55346 - DNA, 20 bp, Artificial Sequence
  MKO10055346_A_Top1
  gRNA
gaagcggatttccgattgaa

SEQ ID NO: 55347 - DNA, 20 bp, Artificial Sequence
  MKO10055347_A_Top1
  gRNA
accttgcagattagagctgc

SEQ ID NO: 55348 - DNA, 20 bp, Artificial Sequence
  MKO10055348_A_Top1
  gRNA
aaaagtctaagcatagcaac

SEQ ID NO: 55349 - DNA, 20 bp, Artificial Sequence
  MKO10055349_A_Top2a
  gRNA
ctcatcgtcgtcatagttac

SEQ ID NO: 55350 - DNA, 20 bp, Artificial Sequence
  MKO10055350_A_Top2a
  gRNA
ctccgcccagatacctacat

SEQ ID NO: 55351 - DNA, 20 bp, Artificial Sequence
  MKO10055351_A_Top2a
  gRNA
tgggtttacgatgaagatgt

SEQ ID NO: 55352 - DNA, 20 bp, Artificial Sequence
  MKO10055352_A_Top2b
  gRNA
cttcgtcctgatacatacat

SEQ ID NO: 55353 - DNA, 20 bp, Artificial Sequence
  MKO10055353_A_Top2b
  gRNA
actgatccaatgtatgtatc

SEQ ID NO: 55354 - DNA, 20 bp, Artificial Sequence
  MKO10055354_A_Top2b
  gRNA
tctactttgtgttctactac

SEQ ID NO: 55355 - DNA, 20 bp, Artificial Sequence
  MKO10055355_A_Top3a
  gRNA
tgatctggacggactgtgat

SEQ ID NO: 55356 - DNA, 20 bp, Artificial Sequence
  MKO10055356_A_Top3a
  gRNA
actcaccagccttgcatacg

SEQ ID NO: 55357 - DNA, 20 bp, Artificial Sequence
  MKO10055357_A_Top3a
  gRNA
accatttccgaaactgcatc

SEQ ID NO: 55358 - DNA, 20 bp, Artificial Sequence
  MKO10055358_A_Top3b
  gRNA
tggctcgctcaggcgggtca

SEQ ID NO: 55359 - DNA, 20 bp, Artificial Sequence
  MKO10055359_A_Top3b
  gRNA
actctcagtggatgcccgcc

SEQ ID NO: 55360 - DNA, 20 bp, Artificial Sequence
  MKO10055360_A_Top3b
  gRNA
cccattcagccctttgtgtg

SEQ ID NO: 55361 - DNA, 20 bp, Artificial Sequence
  MKO10055361_A_Topaz1
  gRNA
tcttcgagctttaccaagaa

SEQ ID NO: 55362 - DNA, 20 bp, Artificial Sequence
  MKO10055362_A_Topaz1
  gRNA
catgcatacctcaaatcgcc

SEQ ID NO: 55363 - DNA, 20 bp, Artificial Sequence
  MKO10055363_A_Topaz1
  gRNA
ggcttcagactcagacgcga

SEQ ID NO: 55364 - DNA, 20 bp, Artificial Sequence
  MKO10055364_A_Topbp1
  gRNA
cgtgcttagccgtgagttgc

SEQ ID NO: 55365 - DNA, 20 bp, Artificial Sequence
  MKO10055365_A_Topbp1
  gRNA
tcagtcactcaccttattgc

SEQ ID NO: 55366 - DNA, 20 bp, Artificial Sequence
  MKO10055366_A_Topbp1
  gRNA
tatatctgtgaccgtttcag

SEQ ID NO: 55367 - DNA, 20 bp, Artificial Sequence
  MKO10055367_A_Topors
  gRNA
ctacatccgccgggcccgac

SEQ ID NO: 55368 - DNA, 20 bp, Artificial Sequence
  MKO10055368_A_Topors
  gRNA
agataatacttcacggtcgc

SEQ ID NO: 55369 - DNA, 20 bp, Artificial Sequence
  MKO10055369_A_Topors
  gRNA
gtctccgctgtctcgcgagg

SEQ ID NO: 55370 - DNA, 20 bp, Artificial Sequence
  MKO10055370_A_Tor1aip1
  gRNA
tcttgactcaagagaatcgc

SEQ ID NO: 55371 - DNA, 20 bp, Artificial Sequence
  MKO10055371_A_Tor1aip1
  gRNA
agcgattctcttgagtcaag

SEQ ID NO: 55372 - DNA, 20 bp, Artificial Sequence
  MKO10055372_A_Tor1aip1
  gRNA
ggtctgcataagttgcttat

SEQ ID NO: 55373 - DNA, 20 bp, Artificial Sequence
  MKO10055373_A_Tor1aip2
  gRNA
acttacgtcctcgctgccac

SEQ ID NO: 55374 - DNA, 20 bp, Artificial Sequence
  MKO10055374_A_Tor1aip2
  gRNA
ttcggctccgtctatggaga

SEQ ID NO: 55375 - DNA, 20 bp, Artificial Sequence
  MKO10055375_A_Tor1aip2
  gRNA
taactgctctcaaagcgact

SEQ ID NO: 55376 - DNA, 20 bp, Artificial Sequence
  MKO10055376_A_Tor1a
  gRNA
gtcatcctaaacgccgtgtc

SEQ ID NO: 55377 - DNA, 20 bp, Artificial Sequence
  MKO10055377_A_Tor1a
  gRNA
attctccgcgatgatcttgc

SEQ ID NO: 55378 - DNA, 20 bp, Artificial Sequence
  MKO10055378_A_Tor1a
  gRNA
aaggcttgatggcgtcgatg

SEQ ID NO: 55379 - DNA, 20 bp, Artificial Sequence
  MKO10055379_A_Tor1b
  gRNA
cctgatcactaagacggccc

SEQ ID NO: 55380 - DNA, 20 bp, Artificial Sequence
  MKO10055380_A_Tor1b
  gRNA
ccgaggggctgccgtcgatg

SEQ ID NO: 55381 - DNA, 20 bp, Artificial Sequence
  MKO10055381_A_Tor1b
  gRNA
cgaggcaatgtgagtgcgtg

SEQ ID NO: 55382 - DNA, 20 bp, Artificial Sequence
  MKO10055382_A_Tor2a
  gRNA
cgcctgaaccacctcctcgc

SEQ ID NO: 55383 - DNA, 20 bp, Artificial Sequence
  MKO10055383_A_Tor2a
  gRNA
gatggacgtgagggctgcga

SEQ ID NO: 55384 - DNA, 20 bp, Artificial Sequence
  MKO10055384_A_Tor2a
  gRNA
ccactgcgtactcaatgagc

SEQ ID NO: 55385 - DNA, 20 bp, Artificial Sequence
  MKO10055385_A_Tor3a
  gRNA
cgtcaaagacgaacgtgctc

SEQ ID NO: 55386 - DNA, 20 bp, Artificial Sequence
  MKO10055386_A_Tor3a
  gRNA
ggaaattacgacgcagcact

SEQ ID NO: 55387 - DNA, 20 bp, Artificial Sequence
  MKO10055387_A_Tor3a
  gRNA
tcctcatgccgtcccgatac

SEQ ID NO: 55388 - DNA, 20 bp, Artificial Sequence
  MKO10055388_A_Tor4a
  gRNA
cgcactggcgctatcacaca

SEQ ID NO: 55389 - DNA, 20 bp, Artificial Sequence
  MKO10055389_A_Tor4a
  gRNA
gcacaacgttacgacctcga

SEQ ID NO: 55390 - DNA, 20 bp, Artificial Sequence
  MKO10055390_A_Tor4a
  gRNA
gagtctgcgtcctgcgcaag

SEQ ID NO: 55391 - DNA, 20 bp, Artificial Sequence
  MKO10055391_A_Tox2
  gRNA
ccaaaatagtggcgtccatg

SEQ ID NO: 55392 - DNA, 20 bp, Artificial Sequence
  MKO10055392_A_Tox2
  gRNA
atccattgcttggtacgagt

SEQ ID NO: 55393 - DNA, 20 bp, Artificial Sequence
  MKO10055393_A_Tox2
  gRNA
agtcttcgttactctcgccc

SEQ ID NO: 55394 - DNA, 20 bp, Artificial Sequence
  MKO10055394_A_Tox3
  gRNA
atcgagcaccatccgtcata

SEQ ID NO: 55395 - DNA, 20 bp, Artificial Sequence
  MKO10055395_A_Tox3
  gRNA
cgaaaatcgtagcatctatg

SEQ ID NO: 55396 - DNA, 20 bp, Artificial Sequence
  MKO10055396_A_Tox3
  gRNA
acaagtgtcacagtaccgcc

SEQ ID NO: 55397 - DNA, 20 bp, Artificial Sequence
  MKO10055397_A_Tox4
  gRNA
attgttctttcgagatacgc

SEQ ID NO: 55398 - DNA, 20 bp, Artificial Sequence
  MKO10055398_A_Tox4
  gRNA
gacaattacctgacgatcac

SEQ ID NO: 55399 - DNA, 20 bp, Artificial Sequence
  MKO10055399_A_Tox4
  gRNA
gcgagggcccagtgatcgtc

SEQ ID NO: 55400 - DNA, 20 bp, Artificial Sequence
  MKO10055400_A_Tox
  gRNA
aaccggattctacctcattc

SEQ ID NO: 55401 - DNA, 20 bp, Artificial Sequence
  MKO10055401_A_Tox
  gRNA
cccgttccatccacaaacca

SEQ ID NO: 55402 - DNA, 20 bp, Artificial Sequence
  MKO10055402_A_Tox
  gRNA
tttgttctttcgtgataccc

SEQ ID NO: 55403 - DNA, 20 bp, Artificial Sequence
  MKO10055403_A_Tpbg
  gRNA
aggaaaaggttgcgcacgta

SEQ ID NO: 55404 - DNA, 20 bp, Artificial Sequence
  MKO10055404_A_Tpbg
  gRNA
ccgccgggagcacggtcatc

SEQ ID NO: 55405 - DNA, 20 bp, Artificial Sequence
  MKO10055405_A_Tpbg
  gRNA
agacgagggtaccgaagagc

SEQ ID NO: 55406 - DNA, 20 bp, Artificial Sequence
  MKO10055406_A_Tpbpa
  gRNA
caaacttactagctgaccgg

SEQ ID NO: 55407 - DNA, 20 bp, Artificial Sequence
  MKO10055407_A_Tpbpa
  gRNA
tgttggagccttccgtctcc

SEQ ID NO: 55408 - DNA, 20 bp, Artificial Sequence
  MKO10055408_A_Tpbpa
  gRNA
tatagtccctgaagcgcagt

SEQ ID NO: 55409 - DNA, 20 bp, Artificial Sequence
  MKO10055409_A_Tpbpb
  gRNA
tataatccctgaaccaactt

SEQ ID NO: 55410 - DNA, 20 bp, Artificial Sequence
  MKO10055410_A_Tpbpb
  gRNA
tgcacttcagtatccaaagt

SEQ ID NO: 55411 - DNA, 20 bp, Artificial Sequence
  MKO10055411_A_Tpbpb
  gRNA
aaggactcaaaaaagcaacg

SEQ ID NO: 55412 - DNA, 20 bp, Artificial Sequence
  MKO10055412_A_Tpcn1
  gRNA
tgggcttccacacgttcgtc

SEQ ID NO: 55413 - DNA, 20 bp, Artificial Sequence
  MKO10055413_A_Tpcn1
  gRNA
gtcgctactgtggcggtgta

SEQ ID NO: 55414 - DNA, 20 bp, Artificial Sequence
  MKO10055414_A_Tpcn1
  gRNA
gctgcaggtccacgccacgc

SEQ ID NO: 55415 - DNA, 20 bp, Artificial Sequence
  MKO10055415_A_Tpcn2
  gRNA
attactcgaacgtctgccaa

SEQ ID NO: 55416 - DNA, 20 bp, Artificial Sequence
  MKO10055416_A_Tpcn2
  gRNA
gcagaacgcctcgatcgtct

SEQ ID NO: 55417 - DNA, 20 bp, Artificial Sequence
  MKO10055417_A_Tpcn2
  gRNA
tggcctgaccgagacgatcg

SEQ ID NO: 55418 - DNA, 20 bp, Artificial Sequence
  MKO10055418_A_Tpd52l1
  gRNA
cacgaaaccctgagccacgc

SEQ ID NO: 55419 - DNA, 20 bp, Artificial Sequence
  MKO10055419_A_Tpd52l1
  gRNA
aacagcagctttcaataacg

SEQ ID NO: 55420 - DNA, 20 bp, Artificial Sequence
  MKO10055420_A_Tpd52l1
  gRNA
cctcatggcaggcatactta

SEQ ID NO: 55421 - DNA, 20 bp, Artificial Sequence
  MKO10055421_A_Tpd52l2
  gRNA
agaaattgtcactctgcgcc

SEQ ID NO: 55422 - DNA, 20 bp, Artificial Sequence
  MKO10055422_A_Tpd52l2
  gRNA
cttctacaactggagtccgg

SEQ ID NO: 55423 - DNA, 20 bp, Artificial Sequence
  MKO10055423_A_Tpd52l2
  gRNA
aacctgaattctcctaacaa

SEQ ID NO: 55424 - DNA, 20 bp, Artificial Sequence
  MKO10055424_A_Tpd52
  gRNA
cgtcacgtcttgccaccctt

SEQ ID NO: 55425 - DNA, 20 bp, Artificial Sequence
  MKO10055425_A_Tpd52
  gRNA
agcatctcgccgagctcaag

SEQ ID NO: 55426 - DNA, 20 bp, Artificial Sequence
  MKO10055426_A_Tpd52
  gRNA
gctgaggcgggagcttacta

SEQ ID NO: 55427 - DNA, 20 bp, Artificial Sequence
  MKO10055427_A_Tpgs1
  gRNA
ggtctacgctcgccgaccaa

SEQ ID NO: 55428 - DNA, 20 bp, Artificial Sequence
  MKO10055428_A_Tpgs1
  gRNA
ctggtcaagcggtggccgat

SEQ ID NO: 55429 - DNA, 20 bp, Artificial Sequence
  MKO10055429_A_Tpgs1
  gRNA
cgcgctgtggcaccttcgcc

SEQ ID NO: 55430 - DNA, 20 bp, Artificial Sequence
  MKO10055430_A_Tpgs2
  gRNA
gaaatcatatgacgctcagc

SEQ ID NO: 55431 - DNA, 20 bp, Artificial Sequence
  MKO10055431_A_Tpgs2
  gRNA
ccaggatgcgagtgacgcct

SEQ ID NO: 55432 - DNA, 20 bp, Artificial Sequence
  MKO10055432_A_Tpgs2
  gRNA
acaacgcccccactgcaagc

SEQ ID NO: 55433 - DNA, 20 bp, Artificial Sequence
  MKO10055433_A_Tph1
  gRNA
gcccgatcagctcactgcga

SEQ ID NO: 55434 - DNA, 20 bp, Artificial Sequence
  MKO10055434_A_Tph1
  gRNA
agggtggtcggcgtcaagtt

SEQ ID NO: 55435 - DNA, 20 bp, Artificial Sequence
  MKO10055435_A_Tph1
  gRNA
cgagtccaccgagaggacgg

SEQ ID NO: 55436 - DNA, 20 bp, Artificial Sequence
  MKO10055436_A_Tph2
  gRNA
cgacttcagaacttcttcgt

SEQ ID NO: 55437 - DNA, 20 bp, Artificial Sequence
  MKO10055437_A_Tph2
  gRNA
ttctgaagtcgaaatcttcg

SEQ ID NO: 55438 - DNA, 20 bp, Artificial Sequence
  MKO10055438_A_Tph2
  gRNA
cagatctcgaggatgtgccg

SEQ ID NO: 55439 - DNA, 20 bp, Artificial Sequence
  MKO10055439_A_Tpi1
  gRNA
agagatacctgcgatgacct

SEQ ID NO: 55440 - DNA, 20 bp, Artificial Sequence
  MKO10055440_A_Tpi1
  gRNA
aagtcgatgtaagcggtggg

SEQ ID NO: 55441 - DNA, 20 bp, Artificial Sequence
  MKO10055441_A_Tpi1
  gRNA
agtgagccacgccctagcag

SEQ ID NO: 55442 - DNA, 20 bp, Artificial Sequence
  MKO10055442_A_Tpk1
  gRNA
atgcacgatttcgccatctt

SEQ ID NO: 55443 - DNA, 20 bp, Artificial Sequence
  MKO10055443_A_Tpk1
  gRNA
aagtccccactgacgaattc

SEQ ID NO: 55444 - DNA, 20 bp, Artificial Sequence
  MKO10055444_A_Tpk1
  gRNA
ttcttgcctgaattcgtcag

SEQ ID NO: 55445 - DNA, 20 bp, Artificial Sequence
  MKO10055445_A_Tpm1
  gRNA
tctcgatgatgaccagctta

SEQ ID NO: 55446 - DNA, 20 bp, Artificial Sequence
  MKO10055446_A_Tpm1
  gRNA
gctgcaggtggcccgtaagc

SEQ ID NO: 55447 - DNA, 20 bp, Artificial Sequence
  MKO10055447_A_Tpm1
  gRNA
ggaggagttggatcgtgctc

SEQ ID NO: 55448 - DNA, 20 bp, Artificial Sequence
  MKO10055448_A_Tpm2
  gRNA
ccgccgcattcagctcgtag

SEQ ID NO: 55449 - DNA, 20 bp, Artificial Sequence
  MKO10055449_A_Tpm2
  gRNA
aagccgcggatgagagcgag

SEQ ID NO: 55450 - DNA, 20 bp, Artificial Sequence
  MKO10055450_A_Tpm2
  gRNA
aaagtattccgagtccgtga

SEQ ID NO: 55451 - DNA, 20 bp, Artificial Sequence
  MKO10055451_A_Tpm3
  gRNA
taacagccgttgccgagaga

SEQ ID NO: 55452 - DNA, 20 bp, Artificial Sequence
  MKO10055452_A_Tpm3
  gRNA
cttctaggtggctcgtaagt

SEQ ID NO: 55453 - DNA, 20 bp, Artificial Sequence
  MKO10055453_A_Tpm3
  gRNA
tctgagtgctgctgaagaaa

SEQ ID NO: 55454 - DNA, 20 bp, Artificial Sequence
  MKO10055454_A_Tpm4
  gRNA
cgaagccgaccgcaagtatg

SEQ ID NO: 55455 - DNA, 20 bp, Artificial Sequence
  MKO10055455_A_Tpm4
  gRNA
tttgtaggttgctcgtaagt

SEQ ID NO: 55456 - DNA, 20 bp, Artificial Sequence
  MKO10055456_A_Tpm4
  gRNA
ggaggaactggaccgggctc

SEQ ID NO: 55457 - DNA, 20 bp, Artificial Sequence
  MKO10055457_A_Tpmt
  gRNA
acttaccgatcatgatcgcc

SEQ ID NO: 55458 - DNA, 20 bp, Artificial Sequence
  MKO10055458_A_Tpmt
  gRNA
aaaacactcgcagtccactc

SEQ ID NO: 55459 - DNA, 20 bp, Artificial Sequence
  MKO10055459_A_Tpmt
  gRNA
aatgcgaaccttaaatactt

SEQ ID NO: 55460 - DNA, 20 bp, Artificial Sequence
  MKO10055460_A_Tpo
  gRNA
aataagtaccggcccatcac

SEQ ID NO: 55461 - DNA, 20 bp, Artificial Sequence
  MKO10055461_A_Tpo
  gRNA
ccggtacttatttgccaggc

SEQ ID NO: 55462 - DNA, 20 bp, Artificial Sequence
  MKO10055462_A_Tpo
  gRNA
aagctgcccgagtccaccag

SEQ ID NO: 55463 - DNA, 20 bp, Artificial Sequence
  MKO10055463_A_Tpp1
  gRNA
gatcctagctctcctcaata

SEQ ID NO: 55464 - DNA, 20 bp, Artificial Sequence
  MKO10055464_A_Tpp1
  gRNA
aatcaactcacatccaccgc

SEQ ID NO: 55465 - DNA, 20 bp, Artificial Sequence
  MKO10055465_A_Tpp1
  gRNA
ctccttgctctcgtcatcgc

SEQ ID NO: 55466 - DNA, 20 bp, Artificial Sequence
  MKO10055466_A_Tpp2
  gRNA
cacaccaagcagtcatatac

SEQ ID NO: 55467 - DNA, 20 bp, Artificial Sequence
  MKO10055467_A_Tpp2
  gRNA
attgatatcattgatacaac

SEQ ID NO: 55468 - DNA, 20 bp, Artificial Sequence
  MKO10055468_A_Tpp2
  gRNA
ataggccaataaactaatca

SEQ ID NO: 55469 - DNA, 20 bp, Artificial Sequence
  MKO10055469_A_Tppp2
  gRNA
gctgggccaaaagcgcttca

SEQ ID NO: 55470 - DNA, 20 bp, Artificial Sequence
  MKO10055470_A_Tppp2
  gRNA
ctccaaagacagcgaatcga

SEQ ID NO: 55471 - DNA, 20 bp, Artificial Sequence
  MKO10055471_A_Tppp2
  gRNA
actactcacagtgacaccgg

SEQ ID NO: 55472 - DNA, 20 bp, Artificial Sequence
  MKO10055472_A_Tppp3
  gRNA
ggccgacggaaaggccgtaa

SEQ ID NO: 55473 - DNA, 20 bp, Artificial Sequence
  MKO10055473_A_Tppp3
  gRNA
cgccatggatggcaaacttc

SEQ ID NO: 55474 - DNA, 20 bp, Artificial Sequence
  MKO10055474_A_Tppp3
  gRNA
tcacgtagccactgtcgtcc

SEQ ID NO: 55475 - DNA, 20 bp, Artificial Sequence
  MKO10055475_A_Tppp
  gRNA
ttccggcggtttgcagtaca

SEQ ID NO: 55476 - DNA, 20 bp, Artificial Sequence
  MKO10055476_A_Tppp
  gRNA
aaggagcgtttcgaccaatc

SEQ ID NO: 55477 - DNA, 20 bp, Artificial Sequence
  MKO10055477_A_Tppp
  gRNA
cattcttcccatcgatcacg

SEQ ID NO: 55478 - DNA, 20 bp, Artificial Sequence
  MKO10055478_A_Tpra1
  gRNA
agccagcacccgcttgatgc

SEQ ID NO: 55479 - DNA, 20 bp, Artificial Sequence
  MKO10055479_A_Tpra1
  gRNA
ccccctgcagggtccggtac

SEQ ID NO: 55480 - DNA, 20 bp, Artificial Sequence
  MKO10055480_A_Tpra1
  gRNA
tatcaccacagtattgtctc

SEQ ID NO: 55481 - DNA, 20 bp, Artificial Sequence
  MKO10055481_A_Tprgl
  gRNA
ggtcgaggagatccgcgccg

SEQ ID NO: 55482 - DNA, 20 bp, Artificial Sequence
  MKO10055482_A_Tprgl
  gRNA
tacacgccgcgcccgcgtca

SEQ ID NO: 55483 - DNA, 20 bp, Artificial Sequence
  MKO10055483_A_Tprgl
  gRNA
cctcctcatcgagacctacg

SEQ ID NO: 55484 - DNA, 20 bp, Artificial Sequence
  MKO10055484_A_Tprg
  gRNA
atactgattgagacctacac

SEQ ID NO: 55485 - DNA, 20 bp, Artificial Sequence
  MKO10055485_A_Tprg
  gRNA
agtcgtatttgcagatcaag

SEQ ID NO: 55486 - DNA, 20 bp, Artificial Sequence
  MKO10055486_A_Tprg
  gRNA
agccaatactcccacgagca

SEQ ID NO: 55487 - DNA, 20 bp, Artificial Sequence
  MKO10055487_A_Tprkb
  gRNA
ggaacacctagtatctcaag

SEQ ID NO: 55488 - DNA, 20 bp, Artificial Sequence
  MKO10055488_A_Tprkb
  gRNA
catttgtagaatgtcaacga

SEQ ID NO: 55489 - DNA, 20 bp, Artificial Sequence
  MKO10055489_A_Tprkb
  gRNA
cgatccatttcagatacttg

SEQ ID NO: 55490 - DNA, 20 bp, Artificial Sequence
  MKO10055490_A_Tprn
  gRNA
cgcgaaccgtgatgcccgcc

SEQ ID NO: 55491 - DNA, 20 bp, Artificial Sequence
  MKO10055491_A_Tprn
  gRNA
tgccgaggtagtagtgtacg

SEQ ID NO: 55492 - DNA, 20 bp, Artificial Sequence
  MKO10055492_A_Tprn
  gRNA
tgccagtcagaacgacctct

SEQ ID NO: 55493 - DNA, 20 bp, Artificial Sequence
  MKO10055493_A_Tpr
  gRNA
gtccgagatcgactgcctga

SEQ ID NO: 55494 - DNA, 20 bp, Artificial Sequence
  MKO10055494_A_Tpr
  gRNA
agtttgttctgcgtcgactt

SEQ ID NO: 55495 - DNA, 20 bp, Artificial Sequence
  MKO10055495_A_Tpr
  gRNA
aactgctcaagaccgtaatc

SEQ ID NO: 55496 - DNA, 20 bp, Artificial Sequence
  MKO10055496_A_Tpsab1
  gRNA
tatcctctctagggcgactc

SEQ ID NO: 55497 - DNA, 20 bp, Artificial Sequence
  MKO10055497_A_Tpsab1
  gRNA
ccccgacttctacatcgtcc

SEQ ID NO: 55498 - DNA, 20 bp, Artificial Sequence
  MKO10055498_A_Tpsab1
  gRNA
ctcaagtagctacactgcgc

SEQ ID NO: 55499 - DNA, 20 bp, Artificial Sequence
  MKO10055499_A_Tpsb2
  gRNA
caccctcggccgtgtaatag

SEQ ID NO: 55500 - DNA, 20 bp, Artificial Sequence
  MKO10055500_A_Tpsb2
  gRNA
tgtggtacttccggtcacac

SEQ ID NO: 55501 - DNA, 20 bp, Artificial Sequence
  MKO10055501_A_Tpsb2
  gRNA
cacgatgcccactcgctgat

SEQ ID NO: 55502 - DNA, 20 bp, Artificial Sequence
  MKO10055502_A_Tpsg1
  gRNA
aaactcgggaagtcgaatcg

SEQ ID NO: 55503 - DNA, 20 bp, Artificial Sequence
  MKO10055503_A_Tpsg1
  gRNA
agccagacatgctatgcgcc

SEQ ID NO: 55504 - DNA, 20 bp, Artificial Sequence
  MKO10055504_A_Tpsg1
  gRNA
agcaggccggcgttgtcagc

SEQ ID NO: 55505 - DNA, 20 bp, Artificial Sequence
  MKO10055505_A_Tpst1
  gRNA
agtcatcaaacccgtcaacg

SEQ ID NO: 55506 - DNA, 20 bp, Artificial Sequence
  MKO10055506_A_Tpst1
  gRNA
ggagtgccatcaccgaatag

SEQ ID NO: 55507 - DNA, 20 bp, Artificial Sequence
  MKO10055507_A_Tpst1
  gRNA
agcgttctcatccaccgttc

SEQ ID NO: 55508 - DNA, 20 bp, Artificial Sequence
  MKO10055508_A_Tpst2
  gRNA
cacgctcatgcgcgccatgt

SEQ ID NO: 55509 - DNA, 20 bp, Artificial Sequence
  MKO10055509_A_Tpst2
  gRNA
gatgctcggcgccgaccacg

SEQ ID NO: 55510 - DNA, 20 bp, Artificial Sequence
  MKO10055510_A_Tpst2
  gRNA
catacgggtcatagccaagc

SEQ ID NO: 55511 - DNA, 20 bp, Artificial Sequence
  MKO10055511_A_Tpt1
  gRNA
tgctaatttcaataactacc

SEQ ID NO: 55512 - DNA, 20 bp, Artificial Sequence
  MKO10055512_A_Tpt1
  gRNA
gtagatggtcagtagaacag

SEQ ID NO: 55513 - DNA, 20 bp, Artificial Sequence
  MKO10055513_A_Tpt1
  gRNA
tcaccttgccctccacctcc

SEQ ID NO: 55514 - DNA, 20 bp, Artificial Sequence
  MKO10055514_A_Tpte
  gRNA
attaaactaaatggcagcac

SEQ ID NO: 55515 - DNA, 20 bp, Artificial Sequence
  MKO10055515_A_Tpte
  gRNA
agtgctgccatttagtttaa

SEQ ID NO: 55516 - DNA, 20 bp, Artificial Sequence
  MKO10055516_A_Tpte
  gRNA
ttctcagccctccagaaaaa

SEQ ID NO: 55517 - DNA, 20 bp, Artificial Sequence
  MKO10055517_A_Tpx2
  gRNA
agaacaagtttcttcgacag

SEQ ID NO: 55518 - DNA, 20 bp, Artificial Sequence
  MKO10055518_A_Tpx2
  gRNA
ttcgtcacaccgttgaaggc

SEQ ID NO: 55519 - DNA, 20 bp, Artificial Sequence
  MKO10055519_A_Tpx2
  gRNA
taccttgcaggtggcacacc

SEQ ID NO: 55520 - DNA, 20 bp, Artificial Sequence
  MKO10055520_A_Tra2a
  gRNA
gctcctccgccgcctatact

SEQ ID NO: 55521 - DNA, 20 bp, Artificial Sequence
  MKO10055521_A_Tra2a
  gRNA
ggacggtagaagaatccgtg

SEQ ID NO: 55522 - DNA, 20 bp, Artificial Sequence
  MKO10055522_A_Tra2a
  gRNA
ggtcctatacacccgagtat

SEQ ID NO: 55523 - DNA, 20 bp, Artificial Sequence
  MKO10055523_A_Tra2b
  gRNA
ttcttacctagattcagacc

SEQ ID NO: 55524 - DNA, 20 bp, Artificial Sequence
  MKO10055524_A_Tra2b
  gRNA
tgaaaatgtagacgatgcca

SEQ ID NO: 55525 - DNA, 20 bp, Artificial Sequence
  MKO10055525_A_Tra2b
  gRNA
aaggctaaagaacgtgccaa

SEQ ID NO: 55526 - DNA, 20 bp, Artificial Sequence
  MKO10055526_A_Trabd2b
  gRNA
acgttccctatacccgagtc

SEQ ID NO: 55527 - DNA, 20 bp, Artificial Sequence
  MKO10055527_A_Trabd2b
  gRNA
gatggcgccgaatagtccac

SEQ ID NO: 55528 - DNA, 20 bp, Artificial Sequence
  MKO10055528_A_Trabd2b
  gRNA
tgctgcagcacgaaagtgtg

SEQ ID NO: 55529 - DNA, 20 bp, Artificial Sequence
  MKO10055529_A_Trabd
  gRNA
tgctttccagactatccggg

SEQ ID NO: 55530 - DNA, 20 bp, Artificial Sequence
  MKO10055530_A_Trabd
  gRNA
actagctgggtcactgtacg

SEQ ID NO: 55531 - DNA, 20 bp, Artificial Sequence
  MKO10055531_A_Trabd
  gRNA
tggcccctggtggcgagttc

SEQ ID NO: 55532 - DNA, 20 bp, Artificial Sequence
  MKO10055532_A_Tradd
  gRNA
ccagcagacgtttgcgcgct

SEQ ID NO: 55533 - DNA, 20 bp, Artificial Sequence
  MKO10055533_A_Tradd
  gRNA
cccatcacgctcatactcgt

SEQ ID NO: 55534 - DNA, 20 bp, Artificial Sequence
  MKO10055534_A_Tradd
  gRNA
ttctgcgggcgcgtgctgtg

SEQ ID NO: 55535 - DNA, 20 bp, Artificial Sequence
  MKO10055535_A_Traf1
  gRNA
tgagcacagtctgcgactca

SEQ ID NO: 55536 - DNA, 20 bp, Artificial Sequence
  MKO10055536_A_Traf1
  gRNA
gctctcggtccaactggctc

SEQ ID NO: 55537 - DNA, 20 bp, Artificial Sequence
  MKO10055537_A_Traf1
  gRNA
caacctagggtctgcaccca

SEQ ID NO: 55538 - DNA, 20 bp, Artificial Sequence
  MKO10055538_A_Traf2
  gRNA
atgcaggacactccgtcagc

SEQ ID NO: 55539 - DNA, 20 bp, Artificial Sequence
  MKO10055539_A_Traf2
  gRNA
aaatgctttaccgtctcccg

SEQ ID NO: 55540 - DNA, 20 bp, Artificial Sequence
  MKO10055540_A_Traf2
  gRNA
agataacgctgcccgcagag

SEQ ID NO: 55541 - DNA, 20 bp, Artificial Sequence
  MKO10055541_A_Traf3ip1
  gRNA
cttgtgctttcgacgtccgc

SEQ ID NO: 55542 - DNA, 20 bp, Artificial Sequence
  MKO10055542_A_Traf3ip1
  gRNA
tcttcgatttccgccgttcc

SEQ ID NO: 55543 - DNA, 20 bp, Artificial Sequence
  MKO10055543_A_Traf3ip1
  gRNA
gaacggcggaaatcgaagaa

SEQ ID NO: 55544 - DNA, 20 bp, Artificial Sequence
  MKO10055544_A_Traf3ip2
  gRNA
cctagcaaccccttagcccg

SEQ ID NO: 55545 - DNA, 20 bp, Artificial Sequence
  MKO10055545_A_Traf3ip2
  gRNA
aacaactcacgtaattcttc

SEQ ID NO: 55546 - DNA, 20 bp, Artificial Sequence
  MKO10055546_A_Traf3ip2
  gRNA
atttaatgatatcaataccc

SEQ ID NO: 55547 - DNA, 20 bp, Artificial Sequence
  MKO10055547_A_Traf3ip3
  gRNA
aactcacttggtttgctgac

SEQ ID NO: 55548 - DNA, 20 bp, Artificial Sequence
  MKO10055548_A_Traf3ip3
  gRNA
ctaggacatcattcaactct

SEQ ID NO: 55549 - DNA, 20 bp, Artificial Sequence
  MKO10055549_A_Traf3ip3
  gRNA
gcctgaggaggaatgatgta

SEQ ID NO: 55550 - DNA, 20 bp, Artificial Sequence
  MKO10055550_A_Traf3
  gRNA
acggaccctgcgccgcgatc

SEQ ID NO: 55551 - DNA, 20 bp, Artificial Sequence
  MKO10055551_A_Traf3
  gRNA
aaaggcctgtaaataccgcg

SEQ ID NO: 55552 - DNA, 20 bp, Artificial Sequence
  MKO10055552_A_Traf3
  gRNA
cgcagggtccgtgctcgtgc

SEQ ID NO: 55553 - DNA, 20 bp, Artificial Sequence
  MKO10055553_A_Traf4
  gRNA
cttcagtggggaggcctacg

SEQ ID NO: 55554 - DNA, 20 bp, Artificial Sequence
  MKO10055554_A_Traf4
  gRNA
gcttagggcagtcgtgctgc

SEQ ID NO: 55555 - DNA, 20 bp, Artificial Sequence
  MKO10055555_A_Traf4
  gRNA
ctcacctgtagatgacgaag

SEQ ID NO: 55556 - DNA, 20 bp, Artificial Sequence
  MKO10055556_A_Traf5
  gRNA
gtctactgcaaaaacgcccc

SEQ ID NO: 55557 - DNA, 20 bp, Artificial Sequence
  MKO10055557_A_Traf5
  gRNA
cttcccggcagctctcgtta

SEQ ID NO: 55558 - DNA, 20 bp, Artificial Sequence
  MKO10055558_A_Traf5
  gRNA
gccgatctgcccggtagaca

SEQ ID NO: 55559 - DNA, 20 bp, Artificial Sequence
  MKO10055559_A_Traf6
  gRNA
acattattgaggattgtccc

SEQ ID NO: 55560 - DNA, 20 bp, Artificial Sequence
  MKO10055560_A_Traf6
  gRNA
agcagtatttcattgtcaac

SEQ ID NO: 55561 - DNA, 20 bp, Artificial Sequence
  MKO10055561_A_Traf6
  gRNA
tctggaaaggacgttggcac

SEQ ID NO: 55562 - DNA, 20 bp, Artificial Sequence
  MKO10055562_A_Traf7
  gRNA
gcccgctacgaccgcttctc

SEQ ID NO: 55563 - DNA, 20 bp, Artificial Sequence
  MKO10055563_A_Traf7
  gRNA
gcggtcgtagcgggcactct

SEQ ID NO: 55564 - DNA, 20 bp, Artificial Sequence
  MKO10055564_A_Traf7
  gRNA
ggtcgaaaaggtaggcccaa

SEQ ID NO: 55565 - DNA, 20 bp, Artificial Sequence
  MKO10055565_A_Trafd1
  gRNA
gctcgtcgtaagcctccgga

SEQ ID NO: 55566 - DNA, 20 bp, Artificial Sequence
  MKO10055566_A_Trafd1
  gRNA
ggccgagtttcgagatgacc

SEQ ID NO: 55567 - DNA, 20 bp, Artificial Sequence
  MKO10055567_A_Trafd1
  gRNA
cggaggcttacgacgagccc

SEQ ID NO: 55568 - DNA, 20 bp, Artificial Sequence
  MKO10055568_A_Traip
  gRNA
ttcactgtagcctaatccag

SEQ ID NO: 55569 - DNA, 20 bp, Artificial Sequence
  MKO10055569_A_Traip
  gRNA
ggaagaacgcaatgctaccg

SEQ ID NO: 55570 - DNA, 20 bp, Artificial Sequence
  MKO10055570_A_Traip
  gRNA
cttacctggattctacactg

SEQ ID NO: 55571 - DNA, 20 bp, Artificial Sequence
  MKO10055571_A_Trak1
  gRNA
atggttacgaccacgatgac

SEQ ID NO: 55572 - DNA, 20 bp, Artificial Sequence
  MKO10055572_A_Trak1
  gRNA
gttctatgtgccgaaagagt

SEQ ID NO: 55573 - DNA, 20 bp, Artificial Sequence
  MKO10055573_A_Trak1
  gRNA
tgtccgctcttagcttgtaa

SEQ ID NO: 55574 - DNA, 20 bp, Artificial Sequence
  MKO10055574_A_Trak2
  gRNA
ctagctgctccacgcccctt

SEQ ID NO: 55575 - DNA, 20 bp, Artificial Sequence
  MKO10055575_A_Trak2
  gRNA
ctagagctagctgcccgaat

SEQ ID NO: 55576 - DNA, 20 bp, Artificial Sequence
  MKO10055576_A_Trak2
  gRNA
cttagatgtctgctccaacg

SEQ ID NO: 55577 - DNA, 20 bp, Artificial Sequence
  MKO10055577_A_Tram1l1
  gRNA
ggctccgcaagaagaacgcc

SEQ ID NO: 55578 - DNA, 20 bp, Artificial Sequence
  MKO10055578_A_Tram1l1
  gRNA
cgcggatatggtctcctgcg

SEQ ID NO: 55579 - DNA, 20 bp, Artificial Sequence
  MKO10055579_A_Tram1l1
  gRNA
ccgggtcagctcatctacat

SEQ ID NO: 55580 - DNA, 20 bp, Artificial Sequence
  MKO10055580_A_Tram1
  gRNA
cacagcaagtttaacgagtc

SEQ ID NO: 55581 - DNA, 20 bp, Artificial Sequence
  MKO10055581_A_Tram1
  gRNA
aatgttacccgccctgcaac

SEQ ID NO: 55582 - DNA, 20 bp, Artificial Sequence
  MKO10055582_A_Tram1
  gRNA
aatgaacgtgccccacacac

SEQ ID NO: 55583 - DNA, 20 bp, Artificial Sequence
  MKO10055583_A_Tram2
  gRNA
ttacgtctaagatgtactcc

SEQ ID NO: 55584 - DNA, 20 bp, Artificial Sequence
  MKO10055584_A_Tram2
  gRNA
ggcacactaatgttatactg

SEQ ID NO: 55585 - DNA, 20 bp, Artificial Sequence
  MKO10055585_A_Tram2
  gRNA
aacattagtgtgcctacagc

SEQ ID NO: 55586 - DNA, 20 bp, Artificial Sequence
  MKO10055586_A_Trank1
  gRNA
aagcctcgttccatttcccg

SEQ ID NO: 55587 - DNA, 20 bp, Artificial Sequence
  MKO10055587_A_Trank1
  gRNA
ttccagggatactaccgagc

SEQ ID NO: 55588 - DNA, 20 bp, Artificial Sequence
  MKO10055588_A_Trank1
  gRNA
agcagcatagccagttcccg

SEQ ID NO: 55589 - DNA, 20 bp, Artificial Sequence
  MKO10055589_A_Trap1a
  gRNA
tttattgcaccggtactccc

SEQ ID NO: 55590 - DNA, 20 bp, Artificial Sequence
  MKO10055590_A_Trap1a
  gRNA
gcgcatgtcctctgtcgatg

SEQ ID NO: 55591 - DNA, 20 bp, Artificial Sequence
  MKO10055591_A_Trap1a
  gRNA
cttccacgaccctaatttcc

SEQ ID NO: 55592 - DNA, 20 bp, Artificial Sequence
  MKO10055592_A_Trap1
  gRNA
acctacctttgaccccgatc

SEQ ID NO: 55593 - DNA, 20 bp, Artificial Sequence
  MKO10055593_A_Trap1
  gRNA
gaagggcactattaccattc

SEQ ID NO: 55594 - DNA, 20 bp, Artificial Sequence
  MKO10055594_A_Trap1
  gRNA
aattgccagatcggggtcaa

SEQ ID NO: 55595 - DNA, 20 bp, Artificial Sequence
  MKO10055595_A_Trappc10
  gRNA
aggatgacatgcggactttg

SEQ ID NO: 55596 - DNA, 20 bp, Artificial Sequence
  MKO10055596_A_Trappc10
  gRNA
ctgcgaatacttcatggttc

SEQ ID NO: 55597 - DNA, 20 bp, Artificial Sequence
  MKO10055597_A_Trappc10
  gRNA
tactgaagtgtacaaagcta

SEQ ID NO: 55598 - DNA, 20 bp, Artificial Sequence
  MKO10055598_A_Trappc11
  gRNA
ggcagagaacgtcgtacgag

SEQ ID NO: 55599 - DNA, 20 bp, Artificial Sequence
  MKO10055599_A_Trappc11
  gRNA
gtctgagtgcgctaccagag

SEQ ID NO: 55600 - DNA, 20 bp, Artificial Sequence
  MKO10055600_A_Trappc11
  gRNA
aagaaaacgcctttaccgcc

SEQ ID NO: 55601 - DNA, 20 bp, Artificial Sequence
  MKO10055601_A_Trappc12
  gRNA
cttaggcccgacttcctccg

SEQ ID NO: 55602 - DNA, 20 bp, Artificial Sequence
  MKO10055602_A_Trappc12
  gRNA
acgtccccctcgctgttgtt

SEQ ID NO: 55603 - DNA, 20 bp, Artificial Sequence
  MKO10055603_A_Trappc12
  gRNA
tactacccacacgtgtaccc

SEQ ID NO: 55604 - DNA, 20 bp, Artificial Sequence
  MKO10055604_A_Trappc13
  gRNA
atcattcttacccgaaattt

SEQ ID NO: 55605 - DNA, 20 bp, Artificial Sequence
  MKO10055605_A_Trappc13
  gRNA
tccttctcttcacacgttac

SEQ ID NO: 55606 - DNA, 20 bp, Artificial Sequence
  MKO10055606_A_Trappc13
  gRNA
gatgatccttcaactgtaaa

SEQ ID NO: 55607 - DNA, 20 bp, Artificial Sequence
  MKO10055607_A_Trappc1
  gRNA
gaagaatcctctgtgcccgc

SEQ ID NO: 55608 - DNA, 20 bp, Artificial Sequence
  MKO10055608_A_Trappc1
  gRNA
cttgctgacaaacgaacgaa

SEQ ID NO: 55609 - DNA, 20 bp, Artificial Sequence
  MKO10055609_A_Trappc1
  gRNA
cattactacgagactcccac

SEQ ID NO: 55610 - DNA, 20 bp, Artificial Sequence
  MKO10055610_A_Trappc2l
  gRNA
tgcggatctcgttgtcccga

SEQ ID NO: 55611 - DNA, 20 bp, Artificial Sequence
  MKO10055611_A_Trappc2l
  gRNA
gagacgtgtgcaccatgtag

SEQ ID NO: 55612 - DNA, 20 bp, Artificial Sequence
  MKO10055612_A_Trappc2l
  gRNA
gtgcaaccccttctacaacc

SEQ ID NO: 55613 - DNA, 20 bp, Artificial Sequence
  MKO10055613_A_Trappc2
  gRNA
gtatcagcctttgtcactgc

SEQ ID NO: 55614 - DNA, 20 bp, Artificial Sequence
  MKO10055614_A_Trappc2
  gRNA
gatatgccctgcagtgacaa

SEQ ID NO: 55615 - DNA, 20 bp, Artificial Sequence
  MKO10055615_A_Trappc2
  gRNA
tgtctatgatctgtatataa

SEQ ID NO: 55616 - DNA, 20 bp, Artificial Sequence
  MKO10055616_A_Trappc3l
  gRNA
atccacaggggttacaacat

SEQ ID NO: 55617 - DNA, 20 bp, Artificial Sequence
  MKO10055617_A_Trappc3l
  gRNA
ttcgtcgaagagctgcctgc

SEQ ID NO: 55618 - DNA, 20 bp, Artificial Sequence
  MKO10055618_A_Trappc3l
  gRNA
tcttcgacgaactctgccag

SEQ ID NO: 55619 - DNA, 20 bp, Artificial Sequence
  MKO10055619_A_Trappc3
  gRNA
ggtggcgttcaagatgtacc

SEQ ID NO: 55620 - DNA, 20 bp, Artificial Sequence
  MKO10055620_A_Trappc3
  gRNA
gagctgttcacgctgaccta

SEQ ID NO: 55621 - DNA, 20 bp, Artificial Sequence
  MKO10055621_A_Trappc3
  gRNA
cgaagacgtgaacaagcagc

SEQ ID NO: 55622 - DNA, 20 bp, Artificial Sequence
  MKO10055622_A_Trappc4
  gRNA
taaggcggggccggccgaat

SEQ ID NO: 55623 - DNA, 20 bp, Artificial Sequence
  MKO10055623_A_Trappc4
  gRNA
gggtaaccctgcgaattacc

SEQ ID NO: 55624 - DNA, 20 bp, Artificial Sequence
  MKO10055624_A_Trappc4
  gRNA
ttcccagctatctccggaac

SEQ ID NO: 55625 - DNA, 20 bp, Artificial Sequence
  MKO10055625_A_Trappc5
  gRNA
atggaggcgcgtttcacacg

SEQ ID NO: 55626 - DNA, 20 bp, Artificial Sequence
  MKO10055626_A_Trappc5
  gRNA
gggcgcattgctcttcgtca

SEQ ID NO: 55627 - DNA, 20 bp, Artificial Sequence
  MKO10055627_A_Trappc5
  gRNA
ctgccaaggttacggcgcac

SEQ ID NO: 55628 - DNA, 20 bp, Artificial Sequence
  MKO10055628_A_Trappc6a
  gRNA
gtgcggcgccctccatacac

SEQ ID NO: 55629 - DNA, 20 bp, Artificial Sequence
  MKO10055629_A_Trappc6a
  gRNA
cggactccgcaccaaccacc

SEQ ID NO: 55630 - DNA, 20 bp, Artificial Sequence
  MKO10055630_A_Trappc6a
  gRNA
atgccacggaggcggtgacc

SEQ ID NO: 55631 - DNA, 20 bp, Artificial Sequence
  MKO10055631_A_Trappc6b
  gRNA
gtatttagaacatgcgtcca

SEQ ID NO: 55632 - DNA, 20 bp, Artificial Sequence
  MKO10055632_A_Trappc6b
  gRNA
cagaggtggtttgtcgaact

SEQ ID NO: 55633 - DNA, 20 bp, Artificial Sequence
  MKO10055633_A_Trappc6b
  gRNA
ggtttacgaaagatactgca

SEQ ID NO: 55634 - DNA, 20 bp, Artificial Sequence
  MKO10055634_A_Trappc8
  gRNA
ttagcgactaatccttctgc

SEQ ID NO: 55635 - DNA, 20 bp, Artificial Sequence
  MKO10055635_A_Trappc8
  gRNA
catggcccagtgcgtgcagt

SEQ ID NO: 55636 - DNA, 20 bp, Artificial Sequence
  MKO10055636_A_Trappc8
  gRNA
ggcttcgtcgctgcacagcg

SEQ ID NO: 55637 - DNA, 20 bp, Artificial Sequence
  MKO10055637_A_Trappc9
  gRNA
ggacgcatgcggaaacacgt

SEQ ID NO: 55638 - DNA, 20 bp, Artificial Sequence
  MKO10055638_A_Trappc9
  gRNA
ggtacactaccacatgtccg

SEQ ID NO: 55639 - DNA, 20 bp, Artificial Sequence
  MKO10055639_A_Trappc9
  gRNA
gtcctagcgattcagaagcg

SEQ ID NO: 55640 - DNA, 20 bp, Artificial Sequence
  MKO10055640_A_Trat1
  gRNA
gagatctgcaagcgatccgc

SEQ ID NO: 55641 - DNA, 20 bp, Artificial Sequence
  MKO10055641_A_Trat1
  gRNA
tcatagcagttctcatccag

SEQ ID NO: 55642 - DNA, 20 bp, Artificial Sequence
  MKO10055642_A_Trat1
  gRNA
actctgatgactacattcca

SEQ ID NO: 55643 - DNA, 20 bp, Artificial Sequence
  MKO10055643_A_Trcg1
  gRNA
taccaccagtgacgtctgtc

SEQ ID NO: 55644 - DNA, 20 bp, Artificial Sequence
  MKO10055644_A_Trcg1
  gRNA
tacctgtccctggccgacca

SEQ ID NO: 55645 - DNA, 20 bp, Artificial Sequence
  MKO10055645_A_Trcg1
  gRNA
atttctatggacgagggatc

SEQ ID NO: 55646 - DNA, 20 bp, Artificial Sequence
  MKO10055646_A_Trdmt1
  gRNA
tacaagaagctagttgtcct

SEQ ID NO: 55647 - DNA, 20 bp, Artificial Sequence
  MKO10055647_A_Trdmt1
  gRNA
tttgacagtaagtgagtatg

SEQ ID NO: 55648 - DNA, 20 bp, Artificial Sequence
  MKO10055648_A_Trdmt1
  gRNA
atagcagccaccacatgtgc

SEQ ID NO: 55649 - DNA, 20 bp, Artificial Sequence
  MKO10055649_A_Trdn
  gRNA
tttgttgtctatcaccgttg

SEQ ID NO: 55650 - DNA, 20 bp, Artificial Sequence
  MKO10055650_A_Trdn
  gRNA
gcaagctccattgccaagat

SEQ ID NO: 55651 - DNA, 20 bp, Artificial Sequence
  MKO10055651_A_Trdn
  gRNA
ggatgtattcctaaatcccc

SEQ ID NO: 55652 - DNA, 20 bp, Artificial Sequence
  MKO10055652_A_Treh
  gRNA
aagtcctcagctaccccgag

SEQ ID NO: 55653 - DNA, 20 bp, Artificial Sequence
  MKO10055653_A_Treh
  gRNA
tagcatccgagatcttctgc

SEQ ID NO: 55654 - DNA, 20 bp, Artificial Sequence
  MKO10055654_A_Treh
  gRNA
gaattcaacaaagcgccccc

SEQ ID NO: 55655 - DNA, 20 bp, Artificial Sequence
  MKO10055655_A_Trem1
  gRNA
cttggagtcactatcataaa

SEQ ID NO: 55656 - DNA, 20 bp, Artificial Sequence
  MKO10055656_A_Trem1
  gRNA
gctcttccatcctgtccgcc

SEQ ID NO: 55657 - DNA, 20 bp, Artificial Sequence
  MKO10055657_A_Trem1
  gRNA
agtcatttgaacttgtagca

SEQ ID NO: 55658 - DNA, 20 bp, Artificial Sequence
  MKO10055658_A_Trem2
  gRNA
agaggcccgcgtcaccggct

SEQ ID NO: 55659 - DNA, 20 bp, Artificial Sequence
  MKO10055659_A_Trem2
  gRNA
cgaggagtcatcgagtttcg

SEQ ID NO: 55660 - DNA, 20 bp, Artificial Sequence
  MKO10055660_A_Trem2
  gRNA
agaattctctcacgtacctc

SEQ ID NO: 55661 - DNA, 20 bp, Artificial Sequence
  MKO10055661_A_Trem3
  gRNA
atgttatcattctgcgtcaa

SEQ ID NO: 55662 - DNA, 20 bp, Artificial Sequence
  MKO10055662_A_Trem3
  gRNA
tcccaccgaatctgtcgtca

SEQ ID NO: 55663 - DNA, 20 bp, Artificial Sequence
  MKO10055663_A_Trem3
  gRNA
gtcagaacgatcaccatcac

SEQ ID NO: 55664 - DNA, 20 bp, Artificial Sequence
  MKO10055664_A_Treml1
  gRNA
aggaatatgcgcccgtttcc

SEQ ID NO: 55665 - DNA, 20 bp, Artificial Sequence
  MKO10055665_A_Treml1
  gRNA
ttctagtgcagtgccactac

SEQ ID NO: 55666 - DNA, 20 bp, Artificial Sequence
  MKO10055666_A_Treml1
  gRNA
ggggtcctcgagcagacttc

SEQ ID NO: 55667 - DNA, 20 bp, Artificial Sequence
  MKO10055667_A_Treml2
  gRNA
tggtcgtagcctacgggttt

SEQ ID NO: 55668 - DNA, 20 bp, Artificial Sequence
  MKO10055668_A_Treml2
  gRNA
atactggtgtatgcgtaaca

SEQ ID NO: 55669 - DNA, 20 bp, Artificial Sequence
  MKO10055669_A_Treml2
  gRNA
gccacccgttaactcccaac

SEQ ID NO: 55670 - DNA, 20 bp, Artificial Sequence
  MKO10055670_A_Treml4
  gRNA
agcggagcaatcgtctgcga

SEQ ID NO: 55671 - DNA, 20 bp, Artificial Sequence
  MKO10055671_A_Treml4
  gRNA
ccttacctggcgacaccacc

SEQ ID NO: 55672 - DNA, 20 bp, Artificial Sequence
  MKO10055672_A_Treml4
  gRNA
cccaagtaaatgtacgagag

SEQ ID NO: 55673 - DNA, 20 bp, Artificial Sequence
  MKO10055673_A_Trerf1
  gRNA
tttctgggtccggatctcgc

SEQ ID NO: 55674 - DNA, 20 bp, Artificial Sequence
  MKO10055674_A_Trerf1
  gRNA
tattgttgacctgaatccgc

SEQ ID NO: 55675 - DNA, 20 bp, Artificial Sequence
  MKO10055675_A_Trerf1
  gRNA
gggtggctgtgtcgcggtcc

SEQ ID NO: 55676 - DNA, 20 bp, Artificial Sequence
  MKO10055676_A_Trex1
  gRNA
tcaacgcttcgatgacaacc

SEQ ID NO: 55677 - DNA, 20 bp, Artificial Sequence
  MKO10055677_A_Trex1
  gRNA
agcaccgtcaagcccatgta

SEQ ID NO: 55678 - DNA, 20 bp, Artificial Sequence
  MKO10055678_A_Trex1
  gRNA
gcatctacacccgcctgtac

SEQ ID NO: 55679 - DNA, 20 bp, Artificial Sequence
  MKO10055679_A_Trex2
  gRNA
ttggcagtaaaggggcgctc

SEQ ID NO: 55680 - DNA, 20 bp, Artificial Sequence
  MKO10055680_A_Trex2
  gRNA
gcagggcttcctaagccgcc

SEQ ID NO: 55681 - DNA, 20 bp, Artificial Sequence
  MKO10055681_A_Trex2
  gRNA
gcactggcattcaggcttcg

SEQ ID NO: 55682 - DNA, 20 bp, Artificial Sequence
  MKO10055682_A_Trf
  gRNA
tccataaaactccgccgcca

SEQ ID NO: 55683 - DNA, 20 bp, Artificial Sequence
  MKO10055683_A_Trf
  gRNA
acagacctactactacgctg

SEQ ID NO: 55684 - DNA, 20 bp, Artificial Sequence
  MKO10055684_A_Trf
  gRNA
gggggttgggtgtacgatgc

SEQ ID NO: 55685 - DNA, 20 bp, Artificial Sequence
  MKO10055685_A_Trhde
  gRNA
ggatcctcttctgatagcgt

SEQ ID NO: 55686 - DNA, 20 bp, Artificial Sequence
  MKO10055686_A_Trhde
  gRNA
agacccgacgctatcagaag

SEQ ID NO: 55687 - DNA, 20 bp, Artificial Sequence
  MKO10055687_A_Trhde
  gRNA
tgtgaagttgcaaatcgccc

SEQ ID NO: 55688 - DNA, 20 bp, Artificial Sequence
  MKO10055688_A_Trhr2
  gRNA
cgggccagacggatcatcgc

SEQ ID NO: 55689 - DNA, 20 bp, Artificial Sequence
  MKO10055689_A_Trhr2
  gRNA
gggcgcatgctgcacgtctc

SEQ ID NO: 55690 - DNA, 20 bp, Artificial Sequence
  MKO10055690_A_Trhr2
  gRNA
accgagactactttgtactc

SEQ ID NO: 55691 - DNA, 20 bp, Artificial Sequence
  MKO10055691_A_Trhr
  gRNA
tgacacatacgtatcggtga

SEQ ID NO: 55692 - DNA, 20 bp, Artificial Sequence
  MKO10055692_A_Trhr
  gRNA
cacctacaaaaacgctgttg

SEQ ID NO: 55693 - DNA, 20 bp, Artificial Sequence
  MKO10055693_A_Trhr
  gRNA
ggtcaccaagatgctcgcag

SEQ ID NO: 55694 - DNA, 20 bp, Artificial Sequence
  MKO10055694_A_Trh
  gRNA
ggccagaacgtcgattcttg

SEQ ID NO: 55695 - DNA, 20 bp, Artificial Sequence
  MKO10055695_A_Trh
  gRNA
aaagacctccagcgtgtgcg

SEQ ID NO: 55696 - DNA, 20 bp, Artificial Sequence
  MKO10055696_A_Trh
  gRNA
cagggtgctgccgcttgact

SEQ ID NO: 55697 - DNA, 20 bp, Artificial Sequence
  MKO10055697_A_Triap1
  gRNA
gactcacctgcacgcactgc

SEQ ID NO: 55698 - DNA, 20 bp, Artificial Sequence
  MKO10055698_A_Triap1
  gRNA
ccccggagccgtcccctttg

SEQ ID NO: 55699 - DNA, 20 bp, Artificial Sequence
  MKO10055699_A_Triap1
  gRNA
agagattcctattgaaggcc

SEQ ID NO: 55700 - DNA, 20 bp, Artificial Sequence
  MKO10055700_A_Trib1
  gRNA
gcagcaggtagtcggcgatt

SEQ ID NO: 55701 - DNA, 20 bp, Artificial Sequence
  MKO10055701_A_Trib1
  gRNA
gcgtatagagcatcaccccg

SEQ ID NO: 55702 - DNA, 20 bp, Artificial Sequence
  MKO10055702_A_Trib1
  gRNA
ttaccttgcagcgcagctcg

SEQ ID NO: 55703 - DNA, 20 bp, Artificial Sequence
  MKO10055703_A_Trib2
  gRNA
gctctgacggctcccgtcgc

SEQ ID NO: 55704 - DNA, 20 bp, Artificial Sequence
  MKO10055704_A_Trib2
  gRNA
cttgcccgaataactgccgc

SEQ ID NO: 55705 - DNA, 20 bp, Artificial Sequence
  MKO10055705_A_Trib2
  gRNA
gaaacgcaatgcgacaagtt

SEQ ID NO: 55706 - DNA, 20 bp, Artificial Sequence
  MKO10055706_A_Trib3
  gRNA
ccggcagatggctagtgccg

SEQ ID NO: 55707 - DNA, 20 bp, Artificial Sequence
  MKO10055707_A_Trib3
  gRNA
ctagatgcgagctacacctc

SEQ ID NO: 55708 - DNA, 20 bp, Artificial Sequence
  MKO10055708_A_Trib3
  gRNA
agcccggcagcctcggactc

SEQ ID NO: 55709 - DNA, 20 bp, Artificial Sequence
  MKO10055709_A_Tril
  gRNA
gcgaaccgcccagcgcaccg

SEQ ID NO: 55710 - DNA, 20 bp, Artificial Sequence
  MKO10055710_A_Tril
  gRNA
tctcgttgccgttggcgtaa

SEQ ID NO: 55711 - DNA, 20 bp, Artificial Sequence
  MKO10055711_A_Tril
  gRNA
ttgcgcatcctttacgccaa

SEQ ID NO: 55712 - DNA, 20 bp, Artificial Sequence
  MKO10055712_A_Trim10
  gRNA
gatccgggacttcccccaac

SEQ ID NO: 55713 - DNA, 20 bp, Artificial Sequence
  MKO10055713_A_Trim10
  gRNA
ccggttcagcaccctgattg

SEQ ID NO: 55714 - DNA, 20 bp, Artificial Sequence
  MKO10055714_A_Trim10
  gRNA
gactgccctcttagcacaac

SEQ ID NO: 55715 - DNA, 20 bp, Artificial Sequence
  MKO10055715_A_Trim11
  gRNA
acattaaggacgccctgtgc

SEQ ID NO: 55716 - DNA, 20 bp, Artificial Sequence
  MKO10055716_A_Trim11
  gRNA
gttctgccgcgcctgcgtga

SEQ ID NO: 55717 - DNA, 20 bp, Artificial Sequence
  MKO10055717_A_Trim11
  gRNA
cgcccagcacattctgccgc

SEQ ID NO: 55718 - DNA, 20 bp, Artificial Sequence
  MKO10055718_A_Trim12a
  gRNA
agaaagatgtgcagaatgtt

SEQ ID NO: 55719 - DNA, 20 bp, Artificial Sequence
  MKO10055719_A_Trim12a
  gRNA
gtgtggagaacatcatagaa

SEQ ID NO: 55720 - DNA, 20 bp, Artificial Sequence
  MKO10055720_A_Trim12a
  gRNA
ataagaaaaaatttgaaaac

SEQ ID NO: 55721 - DNA, 20 bp, Artificial Sequence
  MKO10055721_A_Trim12c
  gRNA
agaagacttcatttcagatg

SEQ ID NO: 55722 - DNA, 20 bp, Artificial Sequence
  MKO10055722_A_Trim12c
  gRNA
catgaactctgaagagaaga

SEQ ID NO: 55723 - DNA, 20 bp, Artificial Sequence
  MKO10055723_A_Trim12c
  gRNA
acaagaaagaatttgaaaac

SEQ ID NO: 55724 - DNA, 20 bp, Artificial Sequence
  MKO10055724_A_Trim13
  gRNA
ggaatgtgcggaattccctg

SEQ ID NO: 55725 - DNA, 20 bp, Artificial Sequence
  MKO10055725_A_Trim13
  gRNA
ctgaatccttcgtgagtaac

SEQ ID NO: 55726 - DNA, 20 bp, Artificial Sequence
  MKO10055726_A_Trim13
  gRNA
ttactccctaaagggtatcg

SEQ ID NO: 55727 - DNA, 20 bp, Artificial Sequence
  MKO10055727_A_Trim14
  gRNA
acgcagactcaagtaaagcc

SEQ ID NO: 55728 - DNA, 20 bp, Artificial Sequence
  MKO10055728_A_Trim14
  gRNA
cgggagcaagccgagacttg

SEQ ID NO: 55729 - DNA, 20 bp, Artificial Sequence
  MKO10055729_A_Trim14
  gRNA
tgcggacaacatagcccatt

SEQ ID NO: 55730 - DNA, 20 bp, Artificial Sequence
  MKO10055730_A_Trim15
  gRNA
tccccgcagggaccgggttg

SEQ ID NO: 55731 - DNA, 20 bp, Artificial Sequence
  MKO10055731_A_Trim15
  gRNA
gcacggtgatgccctcaacc

SEQ ID NO: 55732 - DNA, 20 bp, Artificial Sequence
  MKO10055732_A_Trim15
  gRNA
ggtcgaccggctgagtaccc

SEQ ID NO: 55733 - DNA, 20 bp, Artificial Sequence
  MKO10055733_A_Trim16
  gRNA
tcgaggtcctatacttgcgc

SEQ ID NO: 55734 - DNA, 20 bp, Artificial Sequence
  MKO10055734_A_Trim16
  gRNA
ccattgtccagcgcaagtat

SEQ ID NO: 55735 - DNA, 20 bp, Artificial Sequence
  MKO10055735_A_Trim16
  gRNA
gggccttccgtacagctgcg

SEQ ID NO: 55736 - DNA, 20 bp, Artificial Sequence
  MKO10055736_A_Trim17
  gRNA
acctacctgccactcagtta

SEQ ID NO: 55737 - DNA, 20 bp, Artificial Sequence
  MKO10055737_A_Trim17
  gRNA
ggacataaaatatctacggg

SEQ ID NO: 55738 - DNA, 20 bp, Artificial Sequence
  MKO10055738_A_Trim17
  gRNA
ggaccaccaaagccgctccc

SEQ ID NO: 55739 - DNA, 20 bp, Artificial Sequence
  MKO10055739_A_Trim21
  gRNA
ctgcgtgaatcctcgacttc

SEQ ID NO: 55740 - DNA, 20 bp, Artificial Sequence
  MKO10055740_A_Trim21
  gRNA
cgcacttcagaatagcttgc

SEQ ID NO: 55741 - DNA, 20 bp, Artificial Sequence
  MKO10055741_A_Trim21
  gRNA
gggcatgtgcttgttaggtc

SEQ ID NO: 55742 - DNA, 20 bp, Artificial Sequence
  MKO10055742_A_Trim23
  gRNA
ctgcatacggaccttcactg

SEQ ID NO: 55743 - DNA, 20 bp, Artificial Sequence
  MKO10055743_A_Trim23
  gRNA
atgttcgagaaaaactgatt

SEQ ID NO: 55744 - DNA, 20 bp, Artificial Sequence
  MKO10055744_A_Trim23
  gRNA
gtatttatagcattcagtac

SEQ ID NO: 55745 - DNA, 20 bp, Artificial Sequence
  MKO10055745_A_Trim24
  gRNA
acaaaacactggtcgctgac

SEQ ID NO: 55746 - DNA, 20 bp, Artificial Sequence
  MKO10055746_A_Trim24
  gRNA
catgtattagagctcaccag

SEQ ID NO: 55747 - DNA, 20 bp, Artificial Sequence
  MKO10055747_A_Trim24
  gRNA
tacagtagaaaagtctaatc

SEQ ID NO: 55748 - DNA, 20 bp, Artificial Sequence
  MKO10055748_A_Trim25
  gRNA
cagctccttgcgcaagttaa

SEQ ID NO: 55749 - DNA, 20 bp, Artificial Sequence
  MKO10055749_A_Trim25
  gRNA
cctcgtaggattctatgaag

SEQ ID NO: 55750 - DNA, 20 bp, Artificial Sequence
  MKO10055750_A_Trim25
  gRNA
ttacgaatggtcttcttcga

SEQ ID NO: 55751 - DNA, 20 bp, Artificial Sequence
  MKO10055751_A_Trim26
  gRNA
tgagcttgaccggttgactc

SEQ ID NO: 55752 - DNA, 20 bp, Artificial Sequence
  MKO10055752_A_Trim26
  gRNA
ggtcaagctcactgacgccc

SEQ ID NO: 55753 - DNA, 20 bp, Artificial Sequence
  MKO10055753_A_Trim26
  gRNA
tgaaccacttgaacacccta

SEQ ID NO: 55754 - DNA, 20 bp, Artificial Sequence
  MKO10055754_A_Trim27
  gRNA
gcagctctatcactcgttga

SEQ ID NO: 55755 - DNA, 20 bp, Artificial Sequence
  MKO10055755_A_Trim27
  gRNA
tacctgtaagagctcccgcg

SEQ ID NO: 55756 - DNA, 20 bp, Artificial Sequence
  MKO10055756_A_Trim27
  gRNA
ggagcaaatccagaaccgac

SEQ ID NO: 55757 - DNA, 20 bp, Artificial Sequence
  MKO10055757_A_Trim28
  gRNA
ggacctgctaagactcgaga

SEQ ID NO: 55758 - DNA, 20 bp, Artificial Sequence
  MKO10055758_A_Trim28
  gRNA
ataattctccacgatgtctt

SEQ ID NO: 55759 - DNA, 20 bp, Artificial Sequence
  MKO10055759_A_Trim28
  gRNA
ttacgagcttcgaacctcct

SEQ ID NO: 55760 - DNA, 20 bp, Artificial Sequence
  MKO10055760_A_Trim29
  gRNA
gagctttaccaccaacgaga

SEQ ID NO: 55761 - DNA, 20 bp, Artificial Sequence
  MKO10055761_A_Trim29
  gRNA
aatgaagttgcggctcaaat

SEQ ID NO: 55762 - DNA, 20 bp, Artificial Sequence
  MKO10055762_A_Trim29
  gRNA
gacgcatgcacacattgagc

SEQ ID NO: 55763 - DNA, 20 bp, Artificial Sequence
  MKO10055763_A_Trim2
  gRNA
tggggttcttgtaccgttcc

SEQ ID NO: 55764 - DNA, 20 bp, Artificial Sequence
  MKO10055764_A_Trim2
  gRNA
cagccggccccccatgtcag

SEQ ID NO: 55765 - DNA, 20 bp, Artificial Sequence
  MKO10055765_A_Trim2
  gRNA
tgtctggcgacacaccgggc

SEQ ID NO: 55766 - DNA, 20 bp, Artificial Sequence
  MKO10055766_A_Trim30a
  gRNA
agtcaactctctgcagttga

SEQ ID NO: 55767 - DNA, 20 bp, Artificial Sequence
  MKO10055767_A_Trim30a
  gRNA
ttcaactgcagagagttgac

SEQ ID NO: 55768 - DNA, 20 bp, Artificial Sequence
  MKO10055768_A_Trim30a
  gRNA
tttctacattgatctgtatt

SEQ ID NO: 55769 - DNA, 20 bp, Artificial Sequence
  MKO10055769_A_Trim30b
  gRNA
attaaaatattgaccgtatc

SEQ ID NO: 55770 - DNA, 20 bp, Artificial Sequence
  MKO10055770_A_Trim30b
  gRNA
tgagagagtcctagcttccc

SEQ ID NO: 55771 - DNA, 20 bp, Artificial Sequence
  MKO10055771_A_Trim30b
  gRNA
ggattatagggatgaagtat

SEQ ID NO: 55772 - DNA, 20 bp, Artificial Sequence
  MKO10055772_A_Trim30d
  gRNA
ctcatatgttcagcatcagt

SEQ ID NO: 55773 - DNA, 20 bp, Artificial Sequence
  MKO10055773_A_Trim30d
  gRNA
tgtagcatgcctttcaaatg

SEQ ID NO: 55774 - DNA, 20 bp, Artificial Sequence
  MKO10055774_A_Trim30d
  gRNA
gacattcagatagagtttaa

SEQ ID NO: 55775 - DNA, 20 bp, Artificial Sequence
  MKO10055775_A_Trim31
  gRNA
aaggggcaatctgggcgttc

SEQ ID NO: 55776 - DNA, 20 bp, Artificial Sequence
  MKO10055776_A_Trim31
  gRNA
acattaaagacgccttgagc

SEQ ID NO: 55777 - DNA, 20 bp, Artificial Sequence
  MKO10055777_A_Trim31
  gRNA
cctgcgccagagactagatg

SEQ ID NO: 55778 - DNA, 20 bp, Artificial Sequence
  MKO10055778_A_Trim32
  gRNA
gaagatttccgctgcatcgc

SEQ ID NO: 55779 - DNA, 20 bp, Artificial Sequence
  MKO10055779_A_Trim32
  gRNA
tgctcggggcgacctcattg

SEQ ID NO: 55780 - DNA, 20 bp, Artificial Sequence
  MKO10055780_A_Trim32
  gRNA
ctacagcgtccttattcgag

SEQ ID NO: 55781 - DNA, 20 bp, Artificial Sequence
  MKO10055781_A_Trim33
  gRNA
ccggcggccccggcggttac

SEQ ID NO: 55782 - DNA, 20 bp, Artificial Sequence
  MKO10055782_A_Trim33
  gRNA
ctacattcttgacgacatac

SEQ ID NO: 55783 - DNA, 20 bp, Artificial Sequence
  MKO10055783_A_Trim33
  gRNA
ggtgcggctgggcccgacga

SEQ ID NO: 55784 - DNA, 20 bp, Artificial Sequence
  MKO10055784_A_Trim34a
  gRNA
gtcagatacagagttgctgc

SEQ ID NO: 55785 - DNA, 20 bp, Artificial Sequence
  MKO10055785_A_Trim34a
  gRNA
tcagcctcgtgagagctttc

SEQ ID NO: 55786 - DNA, 20 bp, Artificial Sequence
  MKO10055786_A_Trim34a
  gRNA
atctccagaaagctctcacg

SEQ ID NO: 55787 - DNA, 20 bp, Artificial Sequence
  MKO10055787_A_Trim34b
  gRNA
gtcagatacagagctgctgc

SEQ ID NO: 55788 - DNA, 20 bp, Artificial Sequence
  MKO10055788_A_Trim34b
  gRNA
tcagcctcgtgagagctttc

SEQ ID NO: 55789 - DNA, 20 bp, Artificial Sequence
  MKO10055789_A_Trim34b
  gRNA
atctccagaaagctctcacg

SEQ ID NO: 55790 - DNA, 20 bp, Artificial Sequence
  MKO10055790_A_Trim35
  gRNA
atgcttggatccgttgagtc

SEQ ID NO: 55791 - DNA, 20 bp, Artificial Sequence
  MKO10055791_A_Trim35
  gRNA
tggtgtaggtgcaaacgact

SEQ ID NO: 55792 - DNA, 20 bp, Artificial Sequence
  MKO10055792_A_Trim35
  gRNA
aacacaagagccgaaaacgc

SEQ ID NO: 55793 - DNA, 20 bp, Artificial Sequence
  MKO10055793_A_Trim36
  gRNA
aaacgattgtcgagagatac

SEQ ID NO: 55794 - DNA, 20 bp, Artificial Sequence
  MKO10055794_A_Trim36
  gRNA
gcttatttgcccagcgtgca

SEQ ID NO: 55795 - DNA, 20 bp, Artificial Sequence
  MKO10055795_A_Trim36
  gRNA
atcgacaagattaacagacc

SEQ ID NO: 55796 - DNA, 20 bp, Artificial Sequence
  MKO10055796_A_Trim37
  gRNA
actggtgaactgtcgttggg

SEQ ID NO: 55797 - DNA, 20 bp, Artificial Sequence
  MKO10055797_A_Trim37
  gRNA
agttcaccagttcccgtagc

SEQ ID NO: 55798 - DNA, 20 bp, Artificial Sequence
  MKO10055798_A_Trim37
  gRNA
tctgccatcagtgtgcactt

SEQ ID NO: 55799 - DNA, 20 bp, Artificial Sequence
  MKO10055799_A_Trim38
  gRNA
acgatattacgacgtcacca

SEQ ID NO: 55800 - DNA, 20 bp, Artificial Sequence
  MKO10055800_A_Trim38
  gRNA
catgaagcgaaacccactga

SEQ ID NO: 55801 - DNA, 20 bp, Artificial Sequence
  MKO10055801_A_Trim38
  gRNA
ctcaaacgtctgctgtagat

SEQ ID NO: 55802 - DNA, 20 bp, Artificial Sequence
  MKO10055802_A_Trim39
  gRNA
gcagacactgctttcacgac

SEQ ID NO: 55803 - DNA, 20 bp, Artificial Sequence
  MKO10055803_A_Trim39
  gRNA
agagactggtggagagccgc

SEQ ID NO: 55804 - DNA, 20 bp, Artificial Sequence
  MKO10055804_A_Trim39
  gRNA
gacttcagtatccatagagc

SEQ ID NO: 55805 - DNA, 20 bp, Artificial Sequence
  MKO10055805_A_Trim3
  gRNA
gacgaactcgtctttcgtgt

SEQ ID NO: 55806 - DNA, 20 bp, Artificial Sequence
  MKO10055806_A_Trim3
  gRNA
tactgcaaggcgcacaccat

SEQ ID NO: 55807 - DNA, 20 bp, Artificial Sequence
  MKO10055807_A_Trim3
  gRNA
atgtgtggtgagtgccgcgc

SEQ ID NO: 55808 - DNA, 20 bp, Artificial Sequence
  MKO10055808_A_Trim40
  gRNA
ccatgttccgagggggtcct

SEQ ID NO: 55809 - DNA, 20 bp, Artificial Sequence
  MKO10055809_A_Trim40
  gRNA
agaacctgcgcaccctcttc

SEQ ID NO: 55810 - DNA, 20 bp, Artificial Sequence
  MKO10055810_A_Trim40
  gRNA
ctctctaggaaagactcaac

SEQ ID NO: 55811 - DNA, 20 bp, Artificial Sequence
  MKO10055811_A_Trim41
  gRNA
cgctcacttgcagtagccgc

SEQ ID NO: 55812 - DNA, 20 bp, Artificial Sequence
  MKO10055812_A_Trim41
  gRNA
tgttagccgcccaaactctg

SEQ ID NO: 55813 - DNA, 20 bp, Artificial Sequence
  MKO10055813_A_Trim41
  gRNA
tcctgacagacgccatcgtg

SEQ ID NO: 55814 - DNA, 20 bp, Artificial Sequence
  MKO10055814_A_Trim42
  gRNA
tgcgccgggtgcggcacacc

SEQ ID NO: 55815 - DNA, 20 bp, Artificial Sequence
  MKO10055815_A_Trim42
  gRNA
tgcggcagtactcgttgatg

SEQ ID NO: 55816 - DNA, 20 bp, Artificial Sequence
  MKO10055816_A_Trim42
  gRNA
gcgcccgccaagacgactga

SEQ ID NO: 55817 - DNA, 20 bp, Artificial Sequence
  MKO10055817_A_Trim43a
  gRNA
cgagagaaatcaactaatag

SEQ ID NO: 55818 - DNA, 20 bp, Artificial Sequence
  MKO10055818_A_Trim43a
  gRNA
gttgatccctttcttcacag

SEQ ID NO: 55819 - DNA, 20 bp, Artificial Sequence
  MKO10055819_A_Trim43a
  gRNA
atggaatgggcatggagtct

SEQ ID NO: 55820 - DNA, 20 bp, Artificial Sequence
  MKO10055820_A_Trim43b
  gRNA
ttcagaagtccatgaagcta

SEQ ID NO: 55821 - DNA, 20 bp, Artificial Sequence
  MKO10055821_A_Trim43b
  gRNA
ggaggaacttctaaagcaca

SEQ ID NO: 55822 - DNA, 20 bp, Artificial Sequence
  MKO10055822_A_Trim43b
  gRNA
catacccaccaaccaccaca

SEQ ID NO: 55823 - DNA, 20 bp, Artificial Sequence
  MKO10055823_A_Trim43c
  gRNA
catacccaccaaccaccaca

SEQ ID NO: 55824 - DNA, 20 bp, Artificial Sequence
  MKO10055824_A_Trim43c
  gRNA
ggaggaacttctaaagcaca

SEQ ID NO: 55825 - DNA, 20 bp, Artificial Sequence
  MKO10055825_A_Trim43c
  gRNA
tcacctgcaccagcagctcc

SEQ ID NO: 55826 - DNA, 20 bp, Artificial Sequence
  MKO10055826_A_Trim44
  gRNA
tagcggtgccagtgaagaag

SEQ ID NO: 55827 - DNA, 20 bp, Artificial Sequence
  MKO10055827_A_Trim44
  gRNA
tcatgtgactgagatattgg

SEQ ID NO: 55828 - DNA, 20 bp, Artificial Sequence
  MKO10055828_A_Trim44
  gRNA
agaggtatcaagttgttcct

SEQ ID NO: 55829 - DNA, 20 bp, Artificial Sequence
  MKO10055829_A_Trim45
  gRNA
ctccaagatgcgaacgcgtc

SEQ ID NO: 55830 - DNA, 20 bp, Artificial Sequence
  MKO10055830_A_Trim45
  gRNA
ttccagacgcgttcgcatct

SEQ ID NO: 55831 - DNA, 20 bp, Artificial Sequence
  MKO10055831_A_Trim45
  gRNA
gttgaatacagtgcccgccc

SEQ ID NO: 55832 - DNA, 20 bp, Artificial Sequence
  MKO10055832_A_Trim46
  gRNA
ggcacgggaataggatcgtc

SEQ ID NO: 55833 - DNA, 20 bp, Artificial Sequence
  MKO10055833_A_Trim46
  gRNA
ggagaagtgggctccgaact

SEQ ID NO: 55834 - DNA, 20 bp, Artificial Sequence
  MKO10055834_A_Trim46
  gRNA
ggtttcggaaaagcccggaa

SEQ ID NO: 55835 - DNA, 20 bp, Artificial Sequence
  MKO10055835_A_Trim47
  gRNA
tctggagcgctactgtcgcg

SEQ ID NO: 55836 - DNA, 20 bp, Artificial Sequence
  MKO10055836_A_Trim47
  gRNA
tctctggccgcaccggagcg

SEQ ID NO: 55837 - DNA, 20 bp, Artificial Sequence
  MKO10055837_A_Trim47
  gRNA
cgcacagtcccgccgtactg

SEQ ID NO: 55838 - DNA, 20 bp, Artificial Sequence
  MKO10055838_A_Trim50
  gRNA
gggcttgagggccatacgcg

SEQ ID NO: 55839 - DNA, 20 bp, Artificial Sequence
  MKO10055839_A_Trim50
  gRNA
tcagggtacacaagagcgac

SEQ ID NO: 55840 - DNA, 20 bp, Artificial Sequence
  MKO10055840_A_Trim50
  gRNA
cttccaaaggccgagcctgc

SEQ ID NO: 55841 - DNA, 20 bp, Artificial Sequence
  MKO10055841_A_Trim52
  gRNA
ggcggtagcgaccaaaccga

SEQ ID NO: 55842 - DNA, 20 bp, Artificial Sequence
  MKO10055842_A_Trim52
  gRNA
ttgggtcgaaaactgcgact

SEQ ID NO: 55843 - DNA, 20 bp, Artificial Sequence
  MKO10055843_A_Trim52
  gRNA
ggatagagctgccgacgcac

SEQ ID NO: 55844 - DNA, 20 bp, Artificial Sequence
  MKO10055844_A_Trim54
  gRNA
gctcctccaaaaccgcgcac

SEQ ID NO: 55845 - DNA, 20 bp, Artificial Sequence
  MKO10055845_A_Trim54
  gRNA
cgagaccctgtgcgcggttt

SEQ ID NO: 55846 - DNA, 20 bp, Artificial Sequence
  MKO10055846_A_Trim54
  gRNA
caccatttacaaacgccaga

SEQ ID NO: 55847 - DNA, 20 bp, Artificial Sequence
  MKO10055847_A_Trim55
  gRNA
ctcctcctgtgttcgagtga

SEQ ID NO: 55848 - DNA, 20 bp, Artificial Sequence
  MKO10055848_A_Trim55
  gRNA
ggacacctgtaaaactattg

SEQ ID NO: 55849 - DNA, 20 bp, Artificial Sequence
  MKO10055849_A_Trim55
  gRNA
aacccgtacttacccacaag

SEQ ID NO: 55850 - DNA, 20 bp, Artificial Sequence
  MKO10055850_A_Trim56
  gRNA
agaggccgagatcctttcgc

SEQ ID NO: 55851 - DNA, 20 bp, Artificial Sequence
  MKO10055851_A_Trim56
  gRNA
gttgaccaaaatagagcgcc

SEQ ID NO: 55852 - DNA, 20 bp, Artificial Sequence
  MKO10055852_A_Trim56
  gRNA
aagcgctcccctcgcatcac

SEQ ID NO: 55853 - DNA, 20 bp, Artificial Sequence
  MKO10055853_A_Trim58
  gRNA
gaggatgctccgagcgtctt

SEQ ID NO: 55854 - DNA, 20 bp, Artificial Sequence
  MKO10055854_A_Trim58
  gRNA
tcacaagttccaaagacgct

SEQ ID NO: 55855 - DNA, 20 bp, Artificial Sequence
  MKO10055855_A_Trim58
  gRNA
aagactgtgtgccgcatccc

SEQ ID NO: 55856 - DNA, 20 bp, Artificial Sequence
  MKO10055856_A_Trim59
  gRNA
atttcaacaggctggacctc

SEQ ID NO: 55857 - DNA, 20 bp, Artificial Sequence
  MKO10055857_A_Trim59
  gRNA
tttaatacattgcttactcg

SEQ ID NO: 55858 - DNA, 20 bp, Artificial Sequence
  MKO10055858_A_Trim59
  gRNA
aacagttaactgacacacat

SEQ ID NO: 55859 - DNA, 20 bp, Artificial Sequence
  MKO10055859_A_Trim60
  gRNA
tcgattctggtcgacagtac

SEQ ID NO: 55860 - DNA, 20 bp, Artificial Sequence
  MKO10055860_A_Trim60
  gRNA
tccgaactttaacgttgcaa

SEQ ID NO: 55861 - DNA, 20 bp, Artificial Sequence
  MKO10055861_A_Trim60
  gRNA
gcgcttcgtactcactttgt

SEQ ID NO: 55862 - DNA, 20 bp, Artificial Sequence
  MKO10055862_A_Trim61
  gRNA
tccccccgaatcactttgtt

SEQ ID NO: 55863 - DNA, 20 bp, Artificial Sequence
  MKO10055863_A_Trim61
  gRNA
gaatcttcttccgttcaacc

SEQ ID NO: 55864 - DNA, 20 bp, Artificial Sequence
  MKO10055864_A_Trim61
  gRNA
ctgttcatcagagaaccgtt

SEQ ID NO: 55865 - DNA, 20 bp, Artificial Sequence
  MKO10055865_A_Trim62
  gRNA
tctgtcgctctcgaagtagc

SEQ ID NO: 55866 - DNA, 20 bp, Artificial Sequence
  MKO10055866_A_Trim62
  gRNA
cttgcacctttcgtagttgc

SEQ ID NO: 55867 - DNA, 20 bp, Artificial Sequence
  MKO10055867_A_Trim62
  gRNA
catgaggctgccagtcgcaa

SEQ ID NO: 55868 - DNA, 20 bp, Artificial Sequence
  MKO10055868_A_Trim63
  gRNA
gcaggccgtacaccccgtgc

SEQ ID NO: 55869 - DNA, 20 bp, Artificial Sequence
  MKO10055869_A_Trim63
  gRNA
gccaccgcggttggtccagt

SEQ ID NO: 55870 - DNA, 20 bp, Artificial Sequence
  MKO10055870_A_Trim63
  gRNA
tgacaccctctacgccatcc

SEQ ID NO: 55871 - DNA, 20 bp, Artificial Sequence
  MKO10055871_A_Trim65
  gRNA
ctcaacactgagtgatatag

SEQ ID NO: 55872 - DNA, 20 bp, Artificial Sequence
  MKO10055872_A_Trim65
  gRNA
tgcagtcatccgcctgtgcc

SEQ ID NO: 55873 - DNA, 20 bp, Artificial Sequence
  MKO10055873_A_Trim65
  gRNA
tacccagcagcaggttgccc

SEQ ID NO: 55874 - DNA, 20 bp, Artificial Sequence
  MKO10055874_A_Trim66
  gRNA
cggggggcccactctttgca

SEQ ID NO: 55875 - DNA, 20 bp, Artificial Sequence
  MKO10055875_A_Trim66
  gRNA
tctgcacatactgcaaccgc

SEQ ID NO: 55876 - DNA, 20 bp, Artificial Sequence
  MKO10055876_A_Trim66
  gRNA
tggatttcttatgtgccacc

SEQ ID NO: 55877 - DNA, 20 bp, Artificial Sequence
  MKO10055877_A_Trim67
  gRNA
atcaaggaggacgacccctc

SEQ ID NO: 55878 - DNA, 20 bp, Artificial Sequence
  MKO10055878_A_Trim67
  gRNA
cctgaagctacgccagtcca

SEQ ID NO: 55879 - DNA, 20 bp, Artificial Sequence
  MKO10055879_A_Trim67
  gRNA
tttgacccactgctcttgcg

SEQ ID NO: 55880 - DNA, 20 bp, Artificial Sequence
  MKO10055880_A_Trim68
  gRNA
tgaggcgcgaggcgatcatc

SEQ ID NO: 55881 - DNA, 20 bp, Artificial Sequence
  MKO10055881_A_Trim68
  gRNA
tcttctgcaggagcgagtct

SEQ ID NO: 55882 - DNA, 20 bp, Artificial Sequence
  MKO10055882_A_Trim68
  gRNA
acctgcagcatccagcgcac

SEQ ID NO: 55883 - DNA, 20 bp, Artificial Sequence
  MKO10055883_A_Trim69
  gRNA
ctgtacattcaacctcgtgc

SEQ ID NO: 55884 - DNA, 20 bp, Artificial Sequence
  MKO10055884_A_Trim69
  gRNA
tctaaatgacctccgggatg

SEQ ID NO: 55885 - DNA, 20 bp, Artificial Sequence
  MKO10055885_A_Trim69
  gRNA
actgccctctgtgtaacgac

SEQ ID NO: 55886 - DNA, 20 bp, Artificial Sequence
  MKO10055886_A_Trim6
  gRNA
gtccaccgtagaactgctgc

SEQ ID NO: 55887 - DNA, 20 bp, Artificial Sequence
  MKO10055887_A_Trim6
  gRNA
gaaaagtttgtttcgagcac

SEQ ID NO: 55888 - DNA, 20 bp, Artificial Sequence
  MKO10055888_A_Trim6
  gRNA
caatacctgcagcagttcta

SEQ ID NO: 55889 - DNA, 20 bp, Artificial Sequence
  MKO10055889_A_Trim71
  gRNA
ccccgtccggtccgaacaac

SEQ ID NO: 55890 - DNA, 20 bp, Artificial Sequence
  MKO10055890_A_Trim71
  gRNA
ccagcgcgtccgcctcacca

SEQ ID NO: 55891 - DNA, 20 bp, Artificial Sequence
  MKO10055891_A_Trim71
  gRNA
agtctgcgaggacgacgacg

SEQ ID NO: 55892 - DNA, 20 bp, Artificial Sequence
  MKO10055892_A_Trim72
  gRNA
gcttgacagctcccgacgca

SEQ ID NO: 55893 - DNA, 20 bp, Artificial Sequence
  MKO10055893_A_Trim72
  gRNA
atgctggggttgccttgcgt

SEQ ID NO: 55894 - DNA, 20 bp, Artificial Sequence
  MKO10055894_A_Trim72
  gRNA
atgttccgggctctgatgcc

SEQ ID NO: 55895 - DNA, 20 bp, Artificial Sequence
  MKO10055895_A_Trim75
  gRNA
ggactgcctttccccgatag

SEQ ID NO: 55896 - DNA, 20 bp, Artificial Sequence
  MKO10055896_A_Trim75
  gRNA
gatcccgtcaccgtcgagtg

SEQ ID NO: 55897 - DNA, 20 bp, Artificial Sequence
  MKO10055897_A_Trim75
  gRNA
ctggttgtgcctctcgcaac

SEQ ID NO: 55898 - DNA, 20 bp, Artificial Sequence
  MKO10055898_A_Trim7
  gRNA
acgtctaggacagcgcgccc

SEQ ID NO: 55899 - DNA, 20 bp, Artificial Sequence
  MKO10055899_A_Trim7
  gRNA
tgataccaacacccgcgttc

SEQ ID NO: 55900 - DNA, 20 bp, Artificial Sequence
  MKO10055900_A_Trim7
  gRNA
ctcaagagtttcgtcttaaa

SEQ ID NO: 55901 - DNA, 20 bp, Artificial Sequence
  MKO10055901_A_Trim8
  gRNA
agttcaggtggccgatctta

SEQ ID NO: 55902 - DNA, 20 bp, Artificial Sequence
  MKO10055902_A_Trim8
  gRNA
cgcgttctcgctgcagaact

SEQ ID NO: 55903 - DNA, 20 bp, Artificial Sequence
  MKO10055903_A_Trim8
  gRNA
gcgtctcttcgacaagacag

SEQ ID NO: 55904 - DNA, 20 bp, Artificial Sequence
  MKO10055904_A_Trim9
  gRNA
ggcgctggcgaaacctccgt

SEQ ID NO: 55905 - DNA, 20 bp, Artificial Sequence
  MKO10055905_A_Trim9
  gRNA
ccctgaatggattgtcggac

SEQ ID NO: 55906 - DNA, 20 bp, Artificial Sequence
  MKO10055906_A_Trim9
  gRNA
ggggaaaacgcggacgccgt

SEQ ID NO: 55907 - DNA, 20 bp, Artificial Sequence
  MKO10055907_A_Triml1
  gRNA
acccagcaaatccgccgcct

SEQ ID NO: 55908 - DNA, 20 bp, Artificial Sequence
  MKO10055908_A_Triml1
  gRNA
agttccgtgatggtggtctc

SEQ ID NO: 55909 - DNA, 20 bp, Artificial Sequence
  MKO10055909_A_Triml1
  gRNA
ggcggatttgctgggtcagc

SEQ ID NO: 55910 - DNA, 20 bp, Artificial Sequence
  MKO10055910_A_Triml2
  gRNA
tgatgcagctacgagcttac

SEQ ID NO: 55911 - DNA, 20 bp, Artificial Sequence
  MKO10055911_A_Triml2
  gRNA
ttgtctgtagacgttactcc

SEQ ID NO: 55912 - DNA, 20 bp, Artificial Sequence
  MKO10055912_A_Triml2
  gRNA
tcatcgtctggaggctgcgc

SEQ ID NO: 55913 - DNA, 20 bp, Artificial Sequence
  MKO10055913_A_Triobp
  gRNA
ggacgccgtttataccctgt

SEQ ID NO: 55914 - DNA, 20 bp, Artificial Sequence
  MKO10055914_A_Triobp
  gRNA
ccatgacctcgggcatccgg

SEQ ID NO: 55915 - DNA, 20 bp, Artificial Sequence
  MKO10055915_A_Triobp
  gRNA
tctggaagccatagttgcgc

SEQ ID NO: 55916 - DNA, 20 bp, Artificial Sequence
  MKO10055916_A_Trio
  gRNA
tcaggatgttctcgccaaaa

SEQ ID NO: 55917 - DNA, 20 bp, Artificial Sequence
  MKO10055917_A_Trio
  gRNA
cctctagccgtgacagcata

SEQ ID NO: 55918 - DNA, 20 bp, Artificial Sequence
  MKO10055918_A_Trio
  gRNA
gtaggtggtagagataagcg

SEQ ID NO: 55919 - DNA, 20 bp, Artificial Sequence
  MKO10055919_A_Trip10
  gRNA
gaagttcgtgaaagaacgcg

SEQ ID NO: 55920 - DNA, 20 bp, Artificial Sequence
  MKO10055920_A_Trip10
  gRNA
cctcggtatccgagtgtgtc

SEQ ID NO: 55921 - DNA, 20 bp, Artificial Sequence
  MKO10055921_A_Trip10
  gRNA
tgctggaacgccacacgcag

SEQ ID NO: 55922 - DNA, 20 bp, Artificial Sequence
  MKO10055922_A_Trip11
  gRNA
gtgcgctgccagatcctaag

SEQ ID NO: 55923 - DNA, 20 bp, Artificial Sequence
  MKO10055923_A_Trip11
  gRNA
aaagctttacactgatctag

SEQ ID NO: 55924 - DNA, 20 bp, Artificial Sequence
  MKO10055924_A_Trip11
  gRNA
agccttccatgaagacgaca

SEQ ID NO: 55925 - DNA, 20 bp, Artificial Sequence
  MKO10055925_A_Trip12
  gRNA
tgttacagtcggcgaggctc

SEQ ID NO: 55926 - DNA, 20 bp, Artificial Sequence
  MKO10055926_A_Trip12
  gRNA
gaattacctggtactagcac

SEQ ID NO: 55927 - DNA, 20 bp, Artificial Sequence
  MKO10055927_A_Trip12
  gRNA
tggggactcactgcgtttct

SEQ ID NO: 55928 - DNA, 20 bp, Artificial Sequence
  MKO10055928_A_Trip13
  gRNA
ctccaaacacaatattatgc

SEQ ID NO: 55929 - DNA, 20 bp, Artificial Sequence
  MKO10055929_A_Trip13
  gRNA
ggatagcctcgtgtatgatg

SEQ ID NO: 55930 - DNA, 20 bp, Artificial Sequence
  MKO10055930_A_Trip13
  gRNA
aaccggcataatattgtgtt

SEQ ID NO: 55931 - DNA, 20 bp, Artificial Sequence
  MKO10055931_A_Trip4
  gRNA
gttgcaaaaaactttcgccc

SEQ ID NO: 55932 - DNA, 20 bp, Artificial Sequence
  MKO10055932_A_Trip4
  gRNA
caatcacacgggtgacgacc

SEQ ID NO: 55933 - DNA, 20 bp, Artificial Sequence
  MKO10055933_A_Trip4
  gRNA
tcgtcacccgtgtgattgcc

SEQ ID NO: 55934 - DNA, 20 bp, Artificial Sequence
  MKO10055934_A_Trip6
  gRNA
ccccgatcttccggtacccc

SEQ ID NO: 55935 - DNA, 20 bp, Artificial Sequence
  MKO10055935_A_Trip6
  gRNA
cggatgatccccctgtctgg

SEQ ID NO: 55936 - DNA, 20 bp, Artificial Sequence
  MKO10055936_A_Trip6
  gRNA
acttcaccacgacctgtcag

SEQ ID NO: 55937 - DNA, 20 bp, Artificial Sequence
  MKO10055937_A_Triqk
  gRNA
cacccggccggacccgcagt

SEQ ID NO: 55938 - DNA, 20 bp, Artificial Sequence
  MKO10055938_A_Triqk
  gRNA
cgctttccagagtttcgact

SEQ ID NO: 55939 - DNA, 20 bp, Artificial Sequence
  MKO10055939_A_Triqk
  gRNA
ggcccaactgcgggtccggc

SEQ ID NO: 55940 - DNA, 20 bp, Artificial Sequence
  MKO10055940_A_Trit1
  gRNA
acttgtgaccagctacaccg

SEQ ID NO: 55941 - DNA, 20 bp, Artificial Sequence
  MKO10055941_A_Trit1
  gRNA
cccgcatgacaaacgcaaag

SEQ ID NO: 55942 - DNA, 20 bp, Artificial Sequence
  MKO10055942_A_Trit1
  gRNA
ccacctggcttagccgttta

SEQ ID NO: 55943 - DNA, 20 bp, Artificial Sequence
  MKO10055943_A_Trmt10a
  gRNA
ccaactcagatggcaacgac

SEQ ID NO: 55944 - DNA, 20 bp, Artificial Sequence
  MKO10055944_A_Trmt10a
  gRNA
gaaattagaacgacgccagc

SEQ ID NO: 55945 - DNA, 20 bp, Artificial Sequence
  MKO10055945_A_Trmt10a
  gRNA
acagtaccttgtgatggttg

SEQ ID NO: 55946 - DNA, 20 bp, Artificial Sequence
  MKO10055946_A_Trmt10b
  gRNA
gactcacagtgttcggagtc

SEQ ID NO: 55947 - DNA, 20 bp, Artificial Sequence
  MKO10055947_A_Trmt10b
  gRNA
aactgccagccccctctatg

SEQ ID NO: 55948 - DNA, 20 bp, Artificial Sequence
  MKO10055948_A_Trmt10b
  gRNA
ggacagattcgaaggttgta

SEQ ID NO: 55949 - DNA, 20 bp, Artificial Sequence
  MKO10055949_A_Trmt10c
  gRNA
acttcatgtttcttcgacta

SEQ ID NO: 55950 - DNA, 20 bp, Artificial Sequence
  MKO10055950_A_Trmt10c
  gRNA
tttccacgtgcgcacattta

SEQ ID NO: 55951 - DNA, 20 bp, Artificial Sequence
  MKO10055951_A_Trmt10c
  gRNA
aattcggatcatctgatcta

SEQ ID NO: 55952 - DNA, 20 bp, Artificial Sequence
  MKO10055952_A_Trmt112
  gRNA
tccacagttaaacttggccg

SEQ ID NO: 55953 - DNA, 20 bp, Artificial Sequence
  MKO10055953_A_Trmt112
  gRNA
gcagttacctgcaggcgcag

SEQ ID NO: 55954 - DNA, 20 bp, Artificial Sequence
  MKO10055954_A_Trmt112
  gRNA
ttctcacctcaagcaacacg

SEQ ID NO: 55955 - DNA, 20 bp, Artificial Sequence
  MKO10055955_A_Trmt11
  gRNA
actacgcaccatcttctcca

SEQ ID NO: 55956 - DNA, 20 bp, Artificial Sequence
  MKO10055956_A_Trmt11
  gRNA
ttctcttaaaagttaccccg

SEQ ID NO: 55957 - DNA, 20 bp, Artificial Sequence
  MKO10055957_A_Trmt11
  gRNA
agggcagttcactaacagtc

SEQ ID NO: 55958 - DNA, 20 bp, Artificial Sequence
  MKO10055958_A_Trmt12
  gRNA
ggggccggcattctagatct

SEQ ID NO: 55959 - DNA, 20 bp, Artificial Sequence
  MKO10055959_A_Trmt12
  gRNA
agtgacgtggtccgctgagt

SEQ ID NO: 55960 - DNA, 20 bp, Artificial Sequence
  MKO10055960_A_Trmt12
  gRNA
ttgtgtgctgacgcggctcc

SEQ ID NO: 55961 - DNA, 20 bp, Artificial Sequence
  MKO10055961_A_Trmt13
  gRNA
aatacacttactaattgctc

SEQ ID NO: 55962 - DNA, 20 bp, Artificial Sequence
  MKO10055962_A_Trmt13
  gRNA
ttctctatctgaagagcagt

SEQ ID NO: 55963 - DNA, 20 bp, Artificial Sequence
  MKO10055963_A_Trmt13
  gRNA
tttattcaagatataaatgc

SEQ ID NO: 55964 - DNA, 20 bp, Artificial Sequence
  MKO10055964_A_Trmt1l
  gRNA
gccaaccatcgttggagaac

SEQ ID NO: 55965 - DNA, 20 bp, Artificial Sequence
  MKO10055965_A_Trmt1l
  gRNA
tcgatagatatccagtaaac

SEQ ID NO: 55966 - DNA, 20 bp, Artificial Sequence
  MKO10055966_A_Trmt1l
  gRNA
ggttacctgttctccaacga

SEQ ID NO: 55967 - DNA, 20 bp, Artificial Sequence
  MKO10055967_A_Trmt1
  gRNA
cgcgggtgggcgctcttccc

SEQ ID NO: 55968 - DNA, 20 bp, Artificial Sequence
  MKO10055968_A_Trmt1
  gRNA
ataggaaggtctacgagtgc

SEQ ID NO: 55969 - DNA, 20 bp, Artificial Sequence
  MKO10055969_A_Trmt1
  gRNA
ctgggaagagcgcccacccg

SEQ ID NO: 55970 - DNA, 20 bp, Artificial Sequence
  MKO10055970_A_Trmt2a
  gRNA
ctgtccgctcagcgtacgcc

SEQ ID NO: 55971 - DNA, 20 bp, Artificial Sequence
  MKO10055971_A_Trmt2a
  gRNA
tgtctcgttcagcagcgctt

SEQ ID NO: 55972 - DNA, 20 bp, Artificial Sequence
  MKO10055972_A_Trmt2a
  gRNA
actgttcgtaccagcagccg

SEQ ID NO: 55973 - DNA, 20 bp, Artificial Sequence
  MKO10055973_A_Trmt2b
  gRNA
gtgcttcttagctatcacgc

SEQ ID NO: 55974 - DNA, 20 bp, Artificial Sequence
  MKO10055974_A_Trmt2b
  gRNA
tctcacctaaaagtgctcca

SEQ ID NO: 55975 - DNA, 20 bp, Artificial Sequence
  MKO10055975_A_Trmt2b
  gRNA
tttggagaagaaacccgctc

SEQ ID NO: 55976 - DNA, 20 bp, Artificial Sequence
  MKO10055976_A_Trmt44
  gRNA
tgtctatcctgcgctatagc

SEQ ID NO: 55977 - DNA, 20 bp, Artificial Sequence
  MKO10055977_A_Trmt44
  gRNA
tatagcgcaggatagacacc

SEQ ID NO: 55978 - DNA, 20 bp, Artificial Sequence
  MKO10055978_A_Trmt44
  gRNA
caagtccacgaaagactgct

SEQ ID NO: 55979 - DNA, 20 bp, Artificial Sequence
  MKO10055979_A_Trmt5
  gRNA
aagacaggtgacccgttctc

SEQ ID NO: 55980 - DNA, 20 bp, Artificial Sequence
  MKO10055980_A_Trmt5
  gRNA
tctcattcctcgaacgtcag

SEQ ID NO: 55981 - DNA, 20 bp, Artificial Sequence
  MKO10055981_A_Trmt5
  gRNA
gtagttcagttcatctcgta

SEQ ID NO: 55982 - DNA, 20 bp, Artificial Sequence
  MKO10055982_A_Trmt61a
  gRNA
gggccttgtccgcccgttgc

SEQ ID NO: 55983 - DNA, 20 bp, Artificial Sequence
  MKO10055983_A_Trmt61a
  gRNA
caacgctgcggatgattgcg

SEQ ID NO: 55984 - DNA, 20 bp, Artificial Sequence
  MKO10055984_A_Trmt61a
  gRNA
agccaaatgggcggccaatg

SEQ ID NO: 55985 - DNA, 20 bp, Artificial Sequence
  MKO10055985_A_Trmt6
  gRNA
ttctacctggataacgccat

SEQ ID NO: 55986 - DNA, 20 bp, Artificial Sequence
  MKO10055986_A_Trmt6
  gRNA
caaacgctgagccgtaacta

SEQ ID NO: 55987 - DNA, 20 bp, Artificial Sequence
  MKO10055987_A_Trmt6
  gRNA
tggcttcaagatagtaacga

SEQ ID NO: 55988 - DNA, 20 bp, Artificial Sequence
  MKO10055988_A_Trmu
  gRNA
cgatttctgaacagcccgtc

SEQ ID NO: 55989 - DNA, 20 bp, Artificial Sequence
  MKO10055989_A_Trmu
  gRNA
tatgaagaactgggactcgc

SEQ ID NO: 55990 - DNA, 20 bp, Artificial Sequence
  MKO10055990_A_Trmu
  gRNA
ggagcagatgccgttgccac

SEQ ID NO: 55991 - DNA, 20 bp, Artificial Sequence
  MKO10055991_A_Trnau1ap
  gRNA
attatccgaaaccgcctcac

SEQ ID NO: 55992 - DNA, 20 bp, Artificial Sequence
  MKO10055992_A_Trnau1ap
  gRNA
tcaaagtctacccgtcctgc

SEQ ID NO: 55993 - DNA, 20 bp, Artificial Sequence
  MKO10055993_A_Trnau1ap
  gRNA
ctgacccccgacgtggacga

SEQ ID NO: 55994 - DNA, 20 bp, Artificial Sequence
  MKO10055994_A_Trnp1
  gRNA
tagcagtcgccgccgcgctt

SEQ ID NO: 55995 - DNA, 20 bp, Artificial Sequence
  MKO10055995_A_Trnp1
  gRNA
ctgggccgcaggcgctgatt

SEQ ID NO: 55996 - DNA, 20 bp, Artificial Sequence
  MKO10055996_A_Trnp1
  gRNA
cttagtgggggtcggagtcg

SEQ ID NO: 55997 - DNA, 20 bp, Artificial Sequence
  MKO10055997_A_Trnt1
  gRNA
gtggcgaaatccacatcttg

SEQ ID NO: 55998 - DNA, 20 bp, Artificial Sequence
  MKO10055998_A_Trnt1
  gRNA
tcatgcgaatgccagctgac

SEQ ID NO: 55999 - DNA, 20 bp, Artificial Sequence
  MKO10055999_A_Trnt1
  gRNA
cgaattgatgttaccactga

SEQ ID NO: 56000 - DNA, 20 bp, Artificial Sequence
  MKO10056000_A_Troap
  gRNA
cgttgacgttgagtactgcg

SEQ ID NO: 56001 - DNA, 20 bp, Artificial Sequence
  MKO10056001_A_Troap
  gRNA
gttcctccagagggttccgc

SEQ ID NO: 56002 - DNA, 20 bp, Artificial Sequence
  MKO10056002_A_Troap
  gRNA
tactcaccagagcctctaac

SEQ ID NO: 56003 - DNA, 20 bp, Artificial Sequence
  MKO10056003_A_Trove2
  gRNA
gaagcgcacgaaagacgacc

SEQ ID NO: 56004 - DNA, 20 bp, Artificial Sequence
  MKO10056004_A_Trove2
  gRNA
acttcaagtgatttgtcagc

SEQ ID NO: 56005 - DNA, 20 bp, Artificial Sequence
  MKO10056005_A_Trove2
  gRNA
tgccccttactgcgctcctg

SEQ ID NO: 56006 - DNA, 20 bp, Artificial Sequence
  MKO10056006_A_Tro
  gRNA
tggatagtcggtgtggtaac

SEQ ID NO: 56007 - DNA, 20 bp, Artificial Sequence
  MKO10056007_A_Tro
  gRNA
gacaatgagagttactccca

SEQ ID NO: 56008 - DNA, 20 bp, Artificial Sequence
  MKO10056008_A_Tro
  gRNA
aagatcccaatcaagcgctc

SEQ ID NO: 56009 - DNA, 20 bp, Artificial Sequence
  MKO10056009_A_Trp53bp1
  gRNA
gctgagaatcttctattatc

SEQ ID NO: 56010 - DNA, 20 bp, Artificial Sequence
  MKO10056010_A_Trp53bp1
  gRNA
gcacaaagagaaccccgtgt

SEQ ID NO: 56011 - DNA, 20 bp, Artificial Sequence
  MKO10056011_A_Trp53bp1
  gRNA
aacggttacctcagccaaac

SEQ ID NO: 56012 - DNA, 20 bp, Artificial Sequence
  MKO10056012_A_Trp53bp2
  gRNA
atccgttcgttatcagcaac

SEQ ID NO: 56013 - DNA, 20 bp, Artificial Sequence
  MKO10056013_A_Trp53bp2
  gRNA
gtcatgaacgcccccctaac

SEQ ID NO: 56014 - DNA, 20 bp, Artificial Sequence
  MKO10056014_A_Trp53bp2
  gRNA
tcaaagttcccggcgagcat

SEQ ID NO: 56015 - DNA, 20 bp, Artificial Sequence
  MKO10056015_A_Trp53i11
  gRNA
aagacccccatccgcctcta

SEQ ID NO: 56016 - DNA, 20 bp, Artificial Sequence
  MKO10056016_A_Trp53i11
  gRNA
taaggagggcaccaccgtag

SEQ ID NO: 56017 - DNA, 20 bp, Artificial Sequence
  MKO10056017_A_Trp53i11
  gRNA
cgcactctacacagccgaga

SEQ ID NO: 56018 - DNA, 20 bp, Artificial Sequence
  MKO10056018_A_Trp53i13
  gRNA
gcgtgggcttagccacatac

SEQ ID NO: 56019 - DNA, 20 bp, Artificial Sequence
  MKO10056019_A_Trp53i13
  gRNA
tcccacgtgagactgaagtc

SEQ ID NO: 56020 - DNA, 20 bp, Artificial Sequence
  MKO10056020_A_Trp53i13
  gRNA
gcaggaaccccttgtcctga

SEQ ID NO: 56021 - DNA, 20 bp, Artificial Sequence
  MKO10056021_A_Trp53inp1
  gRNA
tccgtcgccagaaccttacc

SEQ ID NO: 56022 - DNA, 20 bp, Artificial Sequence
  MKO10056022_A_Trp53inp1
  gRNA
tggattaaccactatcaagg

SEQ ID NO: 56023 - DNA, 20 bp, Artificial Sequence
  MKO10056023_A_Trp53inp1
  gRNA
ccctggtaaggttctggcga

SEQ ID NO: 56024 - DNA, 20 bp, Artificial Sequence
  MKO10056024_A_Trp53inp2
  gRNA
ggggcgctcagtagttgaac

SEQ ID NO: 56025 - DNA, 20 bp, Artificial Sequence
  MKO10056025_A_Trp53inp2
  gRNA
cccgggagagccgttcgcgc

SEQ ID NO: 56026 - DNA, 20 bp, Artificial Sequence
  MKO10056026_A_Trp53inp2
  gRNA
ccgcctccagagcaatccgc

SEQ ID NO: 56027 - DNA, 20 bp, Artificial Sequence
  MKO10056027_A_Trp53rk
  gRNA
cctcctgcaccgtccgccga

SEQ ID NO: 56028 - DNA, 20 bp, Artificial Sequence
  MKO10056028_A_Trp53rk
  gRNA
ccgtcggcggacggtgcagg

SEQ ID NO: 56029 - DNA, 20 bp, Artificial Sequence
  MKO10056029_A_Trp53rk
  gRNA
cttcaaacgcggtctcggtg

SEQ ID NO: 56030 - DNA, 20 bp, Artificial Sequence
  MKO10056030_A_Trp53tg5
  gRNA
agatcgtgctatcagcttag

SEQ ID NO: 56031 - DNA, 20 bp, Artificial Sequence
  MKO10056031_A_Trp53tg5
  gRNA
tgtgtagatcgtctacctac

SEQ ID NO: 56032 - DNA, 20 bp, Artificial Sequence
  MKO10056032_A_Trp53tg5
  gRNA
tagacgatctacacatgatc

SEQ ID NO: 56033 - DNA, 20 bp, Artificial Sequence
  MKO10056033_A_Trp53
  gRNA
agtgaagccctccgagtgtc

SEQ ID NO: 56034 - DNA, 20 bp, Artificial Sequence
  MKO10056034_A_Trp53
  gRNA
aacagatcgtccatgcagtg

SEQ ID NO: 56035 - DNA, 20 bp, Artificial Sequence
  MKO10056035_A_Trp53
  gRNA
tgagggcttaccatcaccat

SEQ ID NO: 56036 - DNA, 20 bp, Artificial Sequence
  MKO10056036_A_Trp63
  gRNA
ccgtcacgctattctgtgcg

SEQ ID NO: 56037 - DNA, 20 bp, Artificial Sequence
  MKO10056037_A_Trp63
  gRNA
gcacggataacagcgccctg

SEQ ID NO: 56038 - DNA, 20 bp, Artificial Sequence
  MKO10056038_A_Trp63
  gRNA
ccacgcacagaatagcgtga

SEQ ID NO: 56039 - DNA, 20 bp, Artificial Sequence
  MKO10056039_A_Trp73
  gRNA
cgctgccccaaccacgagct

SEQ ID NO: 56040 - DNA, 20 bp, Artificial Sequence
  MKO10056040_A_Trp73
  gRNA
caacaacctcgcccagtacg

SEQ ID NO: 56041 - DNA, 20 bp, Artificial Sequence
  MKO10056041_A_Trp73
  gRNA
ccttccaataccgactaccc

SEQ ID NO: 56042 - DNA, 20 bp, Artificial Sequence
  MKO10056042_A_Trpa1
  gRNA
ttcctctaggtggacattga

SEQ ID NO: 56043 - DNA, 20 bp, Artificial Sequence
  MKO10056043_A_Trpa1
  gRNA
ctgatggaactgatcatcaa

SEQ ID NO: 56044 - DNA, 20 bp, Artificial Sequence
  MKO10056044_A_Trpa1
  gRNA
catgtacaacgaagtgatca

SEQ ID NO: 56045 - DNA, 20 bp, Artificial Sequence
  MKO10056045_A_Trpc1
  gRNA
tccatcgttgttgaatattc

SEQ ID NO: 56046 - DNA, 20 bp, Artificial Sequence
  MKO10056046_A_Trpc1
  gRNA
ataaattgcgtagatgtgct

SEQ ID NO: 56047 - DNA, 20 bp, Artificial Sequence
  MKO10056047_A_Trpc1
  gRNA
tccagaatattcaacaacga

SEQ ID NO: 56048 - DNA, 20 bp, Artificial Sequence
  MKO10056048_A_Trpc2
  gRNA
ggactatggcttcgagttgc

SEQ ID NO: 56049 - DNA, 20 bp, Artificial Sequence
  MKO10056049_A_Trpc2
  gRNA
tcccgaatcaacacctaccg

SEQ ID NO: 56050 - DNA, 20 bp, Artificial Sequence
  MKO10056050_A_Trpc2
  gRNA
ggcgggcattgctgcactcg

SEQ ID NO: 56051 - DNA, 20 bp, Artificial Sequence
  MKO10056051_A_Trpc3
  gRNA
ccactgatcaggtcgtcgga

SEQ ID NO: 56052 - DNA, 20 bp, Artificial Sequence
  MKO10056052_A_Trpc3
  gRNA
gcgtgacaagggccggcgcc

SEQ ID NO: 56053 - DNA, 20 bp, Artificial Sequence
  MKO10056053_A_Trpc3
  gRNA
acatttccgtccacgtgaac

SEQ ID NO: 56054 - DNA, 20 bp, Artificial Sequence
  MKO10056054_A_Trpc4ap
  gRNA
ggcctcgtacctgcaccgcc

SEQ ID NO: 56055 - DNA, 20 bp, Artificial Sequence
  MKO10056055_A_Trpc4ap
  gRNA
gcggttggcagctaccgcgg

SEQ ID NO: 56056 - DNA, 20 bp, Artificial Sequence
  MKO10056056_A_Trpc4ap
  gRNA
tggcgtttgtaactgaagac

SEQ ID NO: 56057 - DNA, 20 bp, Artificial Sequence
  MKO10056057_A_Trpc4
  gRNA
gatgatattaccgtgggtcc

SEQ ID NO: 56058 - DNA, 20 bp, Artificial Sequence
  MKO10056058_A_Trpc4
  gRNA
ggaaagggtcttcgcttgac

SEQ ID NO: 56059 - DNA, 20 bp, Artificial Sequence
  MKO10056059_A_Trpc4
  gRNA
tacaaacgcgacaatcttca

SEQ ID NO: 56060 - DNA, 20 bp, Artificial Sequence
  MKO10056060_A_Trpc5
  gRNA
gatggggtcctcgcttgata

SEQ ID NO: 56061 - DNA, 20 bp, Artificial Sequence
  MKO10056061_A_Trpc5
  gRNA
tagactatctacctccgaac

SEQ ID NO: 56062 - DNA, 20 bp, Artificial Sequence
  MKO10056062_A_Trpc5
  gRNA
gttaggttcatcaatagctc

SEQ ID NO: 56063 - DNA, 20 bp, Artificial Sequence
  MKO10056063_A_Trpc6
  gRNA
cacgaagaatcgtctgccgc

SEQ ID NO: 56064 - DNA, 20 bp, Artificial Sequence
  MKO10056064_A_Trpc6
  gRNA
cagtgcaaggatttcgttgt

SEQ ID NO: 56065 - DNA, 20 bp, Artificial Sequence
  MKO10056065_A_Trpc6
  gRNA
atttggacggccgaagtccc

SEQ ID NO: 56066 - DNA, 20 bp, Artificial Sequence
  MKO10056066_A_Trpc7
  gRNA
tagttgtgaacgcctccgac

SEQ ID NO: 56067 - DNA, 20 bp, Artificial Sequence
  MKO10056067_A_Trpc7
  gRNA
aagcaacgagttagcccgac

SEQ ID NO: 56068 - DNA, 20 bp, Artificial Sequence
  MKO10056068_A_Trpc7
  gRNA
gagtcttaacgccctcaaac

SEQ ID NO: 56069 - DNA, 20 bp, Artificial Sequence
  MKO10056069_A_Trpd52l3
  gRNA
ggactccgtctaccaagacc

SEQ ID NO: 56070 - DNA, 20 bp, Artificial Sequence
  MKO10056070_A_Trpd52l3
  gRNA
cagtgatccacactcggctc

SEQ ID NO: 56071 - DNA, 20 bp, Artificial Sequence
  MKO10056071_A_Trpd52l3
  gRNA
cccttcaagagatctgaacg

SEQ ID NO: 56072 - DNA, 20 bp, Artificial Sequence
  MKO10056072_A_Trpm1
  gRNA
gatccacgcccccgtggtca

SEQ ID NO: 56073 - DNA, 20 bp, Artificial Sequence
  MKO10056073_A_Trpm1
  gRNA
gtgctataggaattgctccc

SEQ ID NO: 56074 - DNA, 20 bp, Artificial Sequence
  MKO10056074_A_Trpm1
  gRNA
gctgcatctcgaagctttgg

SEQ ID NO: 56075 - DNA, 20 bp, Artificial Sequence
  MKO10056075_A_Trpm2
  gRNA
tcactattggcgtagccacg

SEQ ID NO: 56076 - DNA, 20 bp, Artificial Sequence
  MKO10056076_A_Trpm2
  gRNA
ggcaccatccacaaccgcga

SEQ ID NO: 56077 - DNA, 20 bp, Artificial Sequence
  MKO10056077_A_Trpm2
  gRNA
ccccaccggtcacggagatg

SEQ ID NO: 56078 - DNA, 20 bp, Artificial Sequence
  MKO10056078_A_Trpm3
  gRNA
gtaccataggtatcgccccc

SEQ ID NO: 56079 - DNA, 20 bp, Artificial Sequence
  MKO10056079_A_Trpm3
  gRNA
gaccatgcatctaagtctcg

SEQ ID NO: 56080 - DNA, 20 bp, Artificial Sequence
  MKO10056080_A_Trpm3
  gRNA
ggtgaaactccgcagacaac

SEQ ID NO: 56081 - DNA, 20 bp, Artificial Sequence
  MKO10056081_A_Trpm4
  gRNA
acagtctcgttacccgctct

SEQ ID NO: 56082 - DNA, 20 bp, Artificial Sequence
  MKO10056082_A_Trpm4
  gRNA
tctccggctgtctgaccgca

SEQ ID NO: 56083 - DNA, 20 bp, Artificial Sequence
  MKO10056083_A_Trpm4
  gRNA
ggtgtgcacgacgttcatag

SEQ ID NO: 56084 - DNA, 20 bp, Artificial Sequence
  MKO10056084_A_Trpm5
  gRNA
atccaccaagatccgtgtag

SEQ ID NO: 56085 - DNA, 20 bp, Artificial Sequence
  MKO10056085_A_Trpm5
  gRNA
gcttcgggatgtcctgcgca

SEQ ID NO: 56086 - DNA, 20 bp, Artificial Sequence
  MKO10056086_A_Trpm5
  gRNA
agctgtacgtgatcactctc

SEQ ID NO: 56087 - DNA, 20 bp, Artificial Sequence
  MKO10056087_A_Trpm6
  gRNA
aagcttgtgatctccgtcca

SEQ ID NO: 56088 - DNA, 20 bp, Artificial Sequence
  MKO10056088_A_Trpm6
  gRNA
agtctcacctgactaaattg

SEQ ID NO: 56089 - DNA, 20 bp, Artificial Sequence
  MKO10056089_A_Trpm6
  gRNA
aaatctgccacaatttagtc

SEQ ID NO: 56090 - DNA, 20 bp, Artificial Sequence
  MKO10056090_A_Trpm7
  gRNA
cagaccattcttctattgcc

SEQ ID NO: 56091 - DNA, 20 bp, Artificial Sequence
  MKO10056091_A_Trpm7
  gRNA
gtggcataccttagctctgt

SEQ ID NO: 56092 - DNA, 20 bp, Artificial Sequence
  MKO10056092_A_Trpm7
  gRNA
tagagagcactttgaccaag

SEQ ID NO: 56093 - DNA, 20 bp, Artificial Sequence
  MKO10056093_A_Trpm8
  gRNA
cctcgcctatgtacttcatc

SEQ ID NO: 56094 - DNA, 20 bp, Artificial Sequence
  MKO10056094_A_Trpm8
  gRNA
ctcaaactgaatgtccccga

SEQ ID NO: 56095 - DNA, 20 bp, Artificial Sequence
  MKO10056095_A_Trpm8
  gRNA
gcatgcgcaagatcttcagc

SEQ ID NO: 56096 - DNA, 20 bp, Artificial Sequence
  MKO10056096_A_Trps1
  gRNA
cctgtttgacatccgatgct

SEQ ID NO: 56097 - DNA, 20 bp, Artificial Sequence
  MKO10056097_A_Trps1
  gRNA
aatagttcatccgtatctga

SEQ ID NO: 56098 - DNA, 20 bp, Artificial Sequence
  MKO10056098_A_Trps1
  gRNA
ctcgattcctcacgacaaaa

SEQ ID NO: 56099 - DNA, 20 bp, Artificial Sequence
  MKO10056099_A_Trpt1
  gRNA
ctggccatctattctactaa

SEQ ID NO: 56100 - DNA, 20 bp, Artificial Sequence
  MKO10056100_A_Trpt1
  gRNA
ctgtcctatgcccttcgcca

SEQ ID NO: 56101 - DNA, 20 bp, Artificial Sequence
  MKO10056101_A_Trpt1
  gRNA
aacaccgccacctcacaatt

SEQ ID NO: 56102 - DNA, 20 bp, Artificial Sequence
  MKO10056102_A_Trpv1
  gRNA
cggtgtaagccccttcttgt

SEQ ID NO: 56103 - DNA, 20 bp, Artificial Sequence
  MKO10056103_A_Trpv1
  gRNA
gctggttggtgcacgcagcc

SEQ ID NO: 56104 - DNA, 20 bp, Artificial Sequence
  MKO10056104_A_Trpv1
  gRNA
caggagcatcttcgacgctg

SEQ ID NO: 56105 - DNA, 20 bp, Artificial Sequence
  MKO10056105_A_Trpv2
  gRNA
tgcaccgatgagttctaccg

SEQ ID NO: 56106 - DNA, 20 bp, Artificial Sequence
  MKO10056106_A_Trpv2
  gRNA
ggtagaactcatcggtgcac

SEQ ID NO: 56107 - DNA, 20 bp, Artificial Sequence
  MKO10056107_A_Trpv2
  gRNA
tttcccgaaagttcaccgag

SEQ ID NO: 56108 - DNA, 20 bp, Artificial Sequence
  MKO10056108_A_Trpv3
  gRNA
gcacacttacctcggactgt

SEQ ID NO: 56109 - DNA, 20 bp, Artificial Sequence
  MKO10056109_A_Trpv3
  gRNA
cagaatccgcacgatctctt

SEQ ID NO: 56110 - DNA, 20 bp, Artificial Sequence
  MKO10056110_A_Trpv3
  gRNA
actgaagaagcgcatcttcg

SEQ ID NO: 56111 - DNA, 20 bp, Artificial Sequence
  MKO10056111_A_Trpv4
  gRNA
tgtcgttgcgcccgttgctt

SEQ ID NO: 56112 - DNA, 20 bp, Artificial Sequence
  MKO10056112_A_Trpv4
  gRNA
ctctcgggtgttgtcggcga

SEQ ID NO: 56113 - DNA, 20 bp, Artificial Sequence
  MKO10056113_A_Trpv4
  gRNA
gtgcttgcagcgccgttcga

SEQ ID NO: 56114 - DNA, 20 bp, Artificial Sequence
  MKO10056114_A_Trpv5
  gRNA
gaacctagtccgtgccctgt

SEQ ID NO: 56115 - DNA, 20 bp, Artificial Sequence
  MKO10056115_A_Trpv5
  gRNA
tttgccggaagtcacagttc

SEQ ID NO: 56116 - DNA, 20 bp, Artificial Sequence
  MKO10056116_A_Trpv5
  gRNA
ggatctcaccatagtagatg

SEQ ID NO: 56117 - DNA, 20 bp, Artificial Sequence
  MKO10056117_A_Trpv6
  gRNA
ttcatatagctccgaagtca

SEQ ID NO: 56118 - DNA, 20 bp, Artificial Sequence
  MKO10056118_A_Trpv6
  gRNA
tccgtgctctgcttgcccga

SEQ ID NO: 56119 - DNA, 20 bp, Artificial Sequence
  MKO10056119_A_Trpv6
  gRNA
tgccaaagaaaacgatgtcc

SEQ ID NO: 56120 - DNA, 20 bp, Artificial Sequence
  MKO10056120_A_Trrap
  gRNA
caactcacctcttgcgtgat

SEQ ID NO: 56121 - DNA, 20 bp, Artificial Sequence
  MKO10056121_A_Trrap
  gRNA
ctggcagcaactacggaagc

SEQ ID NO: 56122 - DNA, 20 bp, Artificial Sequence
  MKO10056122_A_Trrap
  gRNA
acgttctgtctgtcatgttt

SEQ ID NO: 56123 - DNA, 20 bp, Artificial Sequence
  MKO10056123_A_Trub1
  gRNA
cttggaccccgacaacatac

SEQ ID NO: 56124 - DNA, 20 bp, Artificial Sequence
  MKO10056124_A_Trub1
  gRNA
gtaacggaagagaagccgta

SEQ ID NO: 56125 - DNA, 20 bp, Artificial Sequence
  MKO10056125_A_Trub1
  gRNA
ttcgccgtgcacaagcccaa

SEQ ID NO: 56126 - DNA, 20 bp, Artificial Sequence
  MKO10056126_A_Trub2
  gRNA
gatgtcccacaccgatcttc

SEQ ID NO: 56127 - DNA, 20 bp, Artificial Sequence
  MKO10056127_A_Trub2
  gRNA
aagaagcgaacacgctgatc

SEQ ID NO: 56128 - DNA, 20 bp, Artificial Sequence
  MKO10056128_A_Trub2
  gRNA
ttgcctttcagtgctcgccg

SEQ ID NO: 56129 - DNA, 20 bp, Artificial Sequence
  MKO10056129_A_Try10
  gRNA
gatgatgacaagatagttgg

SEQ ID NO: 56130 - DNA, 20 bp, Artificial Sequence
  MKO10056130_A_Try10
  gRNA
cccagctcctgtgcagctgc

SEQ ID NO: 56131 - DNA, 20 bp, Artificial Sequence
  MKO10056131_A_Try10
  gRNA
gccaacacagatcatgttct

SEQ ID NO: 56132 - DNA, 20 bp, Artificial Sequence
  MKO10056132_A_Try4
  gRNA
ggggacagaattctctcggc

SEQ ID NO: 56133 - DNA, 20 bp, Artificial Sequence
  MKO10056133_A_Try4
  gRNA
aggaatctttgcctccctct

SEQ ID NO: 56134 - DNA, 20 bp, Artificial Sequence
  MKO10056134_A_Try4
  gRNA
gagctgcagacaccacccac

SEQ ID NO: 56135 - DNA, 20 bp, Artificial Sequence
  MKO10056135_A_Try5
  gRNA
ggatgcttagtttgcggcaa

SEQ ID NO: 56136 - DNA, 20 bp, Artificial Sequence
  MKO10056136_A_Try5
  gRNA
gggcatccaggcattgaagc

SEQ ID NO: 56137 - DNA, 20 bp, Artificial Sequence
  MKO10056137_A_Try5
  gRNA
cccagacctgcttcaatgcc

SEQ ID NO: 56138 - DNA, 20 bp, Artificial Sequence
  MKO10056138_A_Tsacc
  gRNA
cgcaacgctatcttcctctt

SEQ ID NO: 56139 - DNA, 20 bp, Artificial Sequence
  MKO10056139_A_Tsacc
  gRNA
ggttggcatacatgcactcg

SEQ ID NO: 56140 - DNA, 20 bp, Artificial Sequence
  MKO10056140_A_Tsacc
  gRNA
gcacactagtaaccctacta

SEQ ID NO: 56141 - DNA, 20 bp, Artificial Sequence
  MKO10056141_A_Tsc1
  gRNA
ctcccgatgatcccgcagtc

SEQ ID NO: 56142 - DNA, 20 bp, Artificial Sequence
  MKO10056142_A_Tsc1
  gRNA
gccctctttcaccgccttta

SEQ ID NO: 56143 - DNA, 20 bp, Artificial Sequence
  MKO10056143_A_Tsc1
  gRNA
accaacgtgttgacaagcat

SEQ ID NO: 56144 - DNA, 20 bp, Artificial Sequence
  MKO10056144_A_Tsc22d1
  gRNA
actcctagatccatcgccac

SEQ ID NO: 56145 - DNA, 20 bp, Artificial Sequence
  MKO10056145_A_Tsc22d1
  gRNA
cttccgtgagacttgacaat

SEQ ID NO: 56146 - DNA, 20 bp, Artificial Sequence
  MKO10056146_A_Tsc22d1
  gRNA
gaacaatctgctgaagacgc

SEQ ID NO: 56147 - DNA, 20 bp, Artificial Sequence
  MKO10056147_A_Tsc22d2
  gRNA
gccaaatgtacccgcgcctc

SEQ ID NO: 56148 - DNA, 20 bp, Artificial Sequence
  MKO10056148_A_Tsc22d2
  gRNA
ccgagatcttcgacgtttcc

SEQ ID NO: 56149 - DNA, 20 bp, Artificial Sequence
  MKO10056149_A_Tsc22d2
  gRNA
attcctgacacgtgttcaaa

SEQ ID NO: 56150 - DNA, 20 bp, Artificial Sequence
  MKO10056150_A_Tsc22d3
  gRNA
cgcagcggttggccaggtcg

SEQ ID NO: 56151 - DNA, 20 bp, Artificial Sequence
  MKO10056151_A_Tsc22d3
  gRNA
ctgccgaaagttgctcacga

SEQ ID NO: 56152 - DNA, 20 bp, Artificial Sequence
  MKO10056152_A_Tsc22d3
  gRNA
cctctctcacagcgtacatc

SEQ ID NO: 56153 - DNA, 20 bp, Artificial Sequence
  MKO10056153_A_Tsc22d4
  gRNA
gaatggattgctgcgcgccc

SEQ ID NO: 56154 - DNA, 20 bp, Artificial Sequence
  MKO10056154_A_Tsc22d4
  gRNA
acctatcgtcatcgctgtcc

SEQ ID NO: 56155 - DNA, 20 bp, Artificial Sequence
  MKO10056155_A_Tsc22d4
  gRNA
gagagccttatcgtcgaggt

SEQ ID NO: 56156 - DNA, 20 bp, Artificial Sequence
  MKO10056156_A_Tsc2
  gRNA
aacaatcgcatccgaatgat

SEQ ID NO: 56157 - DNA, 20 bp, Artificial Sequence
  MKO10056157_A_Tsc2
  gRNA
aacagctgttgaacttgacc

SEQ ID NO: 56158 - DNA, 20 bp, Artificial Sequence
  MKO10056158_A_Tsc2
  gRNA
cacagatctgccctatcatt

SEQ ID NO: 56159 - DNA, 20 bp, Artificial Sequence
  MKO10056159_A_Tsen15
  gRNA
atttatgctgccagaccctc

SEQ ID NO: 56160 - DNA, 20 bp, Artificial Sequence
  MKO10056160_A_Tsen15
  gRNA
tcgctcacctattatggctg

SEQ ID NO: 56161 - DNA, 20 bp, Artificial Sequence
  MKO10056161_A_Tsen15
  gRNA
acttactctccatgagatcc

SEQ ID NO: 56162 - DNA, 20 bp, Artificial Sequence
  MKO10056162_A_Tsen2
  gRNA
ggcggcggcatcagacgaga

SEQ ID NO: 56163 - DNA, 20 bp, Artificial Sequence
  MKO10056163_A_Tsen2
  gRNA
tggactagccgcagcgagtg

SEQ ID NO: 56164 - DNA, 20 bp, Artificial Sequence
  MKO10056164_A_Tsen2
  gRNA
cacaatcgccaaccccacgc

SEQ ID NO: 56165 - DNA, 20 bp, Artificial Sequence
  MKO10056165_A_Tsen34
  gRNA
cctagtcagcgccccgcgcc

SEQ ID NO: 56166 - DNA, 20 bp, Artificial Sequence
  MKO10056166_A_Tsen34
  gRNA
ttcttaccaagccatggttg

SEQ ID NO: 56167 - DNA, 20 bp, Artificial Sequence
  MKO10056167_A_Tsen34
  gRNA
gcttctagagaagatcgtag

SEQ ID NO: 56168 - DNA, 20 bp, Artificial Sequence
  MKO10056168_A_Tsen54
  gRNA
aagctaccacagcggtcgca

SEQ ID NO: 56169 - DNA, 20 bp, Artificial Sequence
  MKO10056169_A_Tsen54
  gRNA
gcgaccgctgtggtagcttc

SEQ ID NO: 56170 - DNA, 20 bp, Artificial Sequence
  MKO10056170_A_Tsen54
  gRNA
gcagcgacttcaccccgaag

SEQ ID NO: 56171 - DNA, 20 bp, Artificial Sequence
  MKO10056171_A_Tsfm
  gRNA
ccggcgtgaaacgtgagcca

SEQ ID NO: 56172 - DNA, 20 bp, Artificial Sequence
  MKO10056172_A_Tsfm
  gRNA
cagatactcaccaatcgcta

SEQ ID NO: 56173 - DNA, 20 bp, Artificial Sequence
  MKO10056173_A_Tsfm
  gRNA
cacgctcaccttactgtacg

SEQ ID NO: 56174 - DNA, 20 bp, Artificial Sequence
  MKO10056174_A_Tsg101
  gRNA
tatttacctcgataacgcac

SEQ ID NO: 56175 - DNA, 20 bp, Artificial Sequence
  MKO10056175_A_Tsg101
  gRNA
ttaccatatgaatccaatac

SEQ ID NO: 56176 - DNA, 20 bp, Artificial Sequence
  MKO10056176_A_Tsg101
  gRNA
ttagccacggtcagagttgc

SEQ ID NO: 56177 - DNA, 20 bp, Artificial Sequence
  MKO10056177_A_Tsga10
  gRNA
tgagaaccttgacgttgccc

SEQ ID NO: 56178 - DNA, 20 bp, Artificial Sequence
  MKO10056178_A_Tsga10
  gRNA
atagcttgatgatgagcgca

SEQ ID NO: 56179 - DNA, 20 bp, Artificial Sequence
  MKO10056179_A_Tsga10
  gRNA
tcacttggaacagcggatag

SEQ ID NO: 56180 - DNA, 20 bp, Artificial Sequence
  MKO10056180_A_Tsga13
  gRNA
ggatcatctagccgtttcat

SEQ ID NO: 56181 - DNA, 20 bp, Artificial Sequence
  MKO10056181_A_Tsga13
  gRNA
tcttgttgggtttgcaccga

SEQ ID NO: 56182 - DNA, 20 bp, Artificial Sequence
  MKO10056182_A_Tsga13
  gRNA
tgctccaatatacttccccc

SEQ ID NO: 56183 - DNA, 20 bp, Artificial Sequence
  MKO10056183_A_Tsga8
  gRNA
gaaacgcggtggcgcccaaa

SEQ ID NO: 56184 - DNA, 20 bp, Artificial Sequence
  MKO10056184_A_Tsga8
  gRNA
ggtgcgaagaccaacaagcg

SEQ ID NO: 56185 - DNA, 20 bp, Artificial Sequence
  MKO10056185_A_Tsga8
  gRNA
gacttcatccaccgattctc

SEQ ID NO: 56186 - DNA, 20 bp, Artificial Sequence
  MKO10056186_A_Tshb
  gRNA
caagccgcagtctttctatc

SEQ ID NO: 56187 - DNA, 20 bp, Artificial Sequence
  MKO10056187_A_Tshb
  gRNA
cactgagtatacaatgtacg

SEQ ID NO: 56188 - DNA, 20 bp, Artificial Sequence
  MKO10056188_A_Tshb
  gRNA
cttgccacacttgcagctta

SEQ ID NO: 56189 - DNA, 20 bp, Artificial Sequence
  MKO10056189_A_Tshr
  gRNA
acgcacactctttgccccgc

SEQ ID NO: 56190 - DNA, 20 bp, Artificial Sequence
  MKO10056190_A_Tshr
  gRNA
cgagtctgcccaatatttcc

SEQ ID NO: 56191 - DNA, 20 bp, Artificial Sequence
  MKO10056191_A_Tshr
  gRNA
aggttaagcttctggtgttc

SEQ ID NO: 56192 - DNA, 20 bp, Artificial Sequence
  MKO10056192_A_Tshz1
  gRNA
cggttgttcggagtcacgta

SEQ ID NO: 56193 - DNA, 20 bp, Artificial Sequence
  MKO10056193_A_Tshz1
  gRNA
cgacgtctgctgcagcgtct

SEQ ID NO: 56194 - DNA, 20 bp, Artificial Sequence
  MKO10056194_A_Tshz1
  gRNA
cgccgttacctgccgagcgc

SEQ ID NO: 56195 - DNA, 20 bp, Artificial Sequence
  MKO10056195_A_Tshz2
  gRNA
aatcgacgtcagacgcttcg

SEQ ID NO: 56196 - DNA, 20 bp, Artificial Sequence
  MKO10056196_A_Tshz2
  gRNA
tgcggcctacgacactctcg

SEQ ID NO: 56197 - DNA, 20 bp, Artificial Sequence
  MKO10056197_A_Tshz2
  gRNA
tctcttacctgccgcccgct

SEQ ID NO: 56198 - DNA, 20 bp, Artificial Sequence
  MKO10056198_A_Tshz3
  gRNA
ggagacactcgcgggcgtat

SEQ ID NO: 56199 - DNA, 20 bp, Artificial Sequence
  MKO10056199_A_Tshz3
  gRNA
cgacggcagcttcaaaagtc

SEQ ID NO: 56200 - DNA, 20 bp, Artificial Sequence
  MKO10056200_A_Tshz3
  gRNA
ggagaagcatcatgccgagg

SEQ ID NO: 56201 - DNA, 20 bp, Artificial Sequence
  MKO10056201_A_Tsks
  gRNA
aacgtgctgattaacccgcg

SEQ ID NO: 56202 - DNA, 20 bp, Artificial Sequence
  MKO10056202_A_Tsks
  gRNA
gcacggctttctacccccgc

SEQ ID NO: 56203 - DNA, 20 bp, Artificial Sequence
  MKO10056203_A_Tsks
  gRNA
tgtcccacgagccgatgcac

SEQ ID NO: 56204 - DNA, 20 bp, Artificial Sequence
  MKO10056204_A_Tsku
  gRNA
atatcgagacctctcgtagt

SEQ ID NO: 56205 - DNA, 20 bp, Artificial Sequence
  MKO10056205_A_Tsku
  gRNA
gagccataaccgactacgag

SEQ ID NO: 56206 - DNA, 20 bp, Artificial Sequence
  MKO10056206_A_Tsku
  gRNA
cttctcccgactgcgctacc

SEQ ID NO: 56207 - DNA, 20 bp, Artificial Sequence
  MKO10056207_A_Tslp
  gRNA
ggctaagttcgagcaaatcg

SEQ ID NO: 56208 - DNA, 20 bp, Artificial Sequence
  MKO10056208_A_Tslp
  gRNA
tcatcctgcaagtactagta

SEQ ID NO: 56209 - DNA, 20 bp, Artificial Sequence
  MKO10056209_A_Tslp
  gRNA
ccatccgtactagtacttgc

SEQ ID NO: 56210 - DNA, 20 bp, Artificial Sequence
  MKO10056210_A_Tsnaxip1
  gRNA
tcgcttacttggctcgattc

SEQ ID NO: 56211 - DNA, 20 bp, Artificial Sequence
  MKO10056211_A_Tsnaxip1
  gRNA
ctccatcaagaatgcgtacg

SEQ ID NO: 56212 - DNA, 20 bp, Artificial Sequence
  MKO10056212_A_Tsnaxip1
  gRNA
cacctcgtacgcattcttga

SEQ ID NO: 56213 - DNA, 20 bp, Artificial Sequence
  MKO10056213_A_Tsnax
  gRNA
ttacccaccttgtaatccta

SEQ ID NO: 56214 - DNA, 20 bp, Artificial Sequence
  MKO10056214_A_Tsnax
  gRNA
tttaggactgcaggaatacg

SEQ ID NO: 56215 - DNA, 20 bp, Artificial Sequence
  MKO10056215_A_Tsnax
  gRNA
tctttctagtgctcctgata

SEQ ID NO: 56216 - DNA, 20 bp, Artificial Sequence
  MKO10056216_A_Tsn
  gRNA
tccccgctgagcagtattac

SEQ ID NO: 56217 - DNA, 20 bp, Artificial Sequence
  MKO10056217_A_Tsn
  gRNA
ctcgctttcaagcacctctt

SEQ ID NO: 56218 - DNA, 20 bp, Artificial Sequence
  MKO10056218_A_Tsn
  gRNA
gcttcagcgcctggtcttcc

SEQ ID NO: 56219 - DNA, 20 bp, Artificial Sequence
  MKO10056219_A_Tspan10
  gRNA
cgcagccattcttgcagcgc

SEQ ID NO: 56220 - DNA, 20 bp, Artificial Sequence
  MKO10056220_A_Tspan10
  gRNA
gtggccgttgtcatgatcca

SEQ ID NO: 56221 - DNA, 20 bp, Artificial Sequence
  MKO10056221_A_Tspan10
  gRNA
ccccacagtaccagtgcaac

SEQ ID NO: 56222 - DNA, 20 bp, Artificial Sequence
  MKO10056222_A_Tspan11
  gRNA
gtacgcgctgtgctgccagt

SEQ ID NO: 56223 - DNA, 20 bp, Artificial Sequence
  MKO10056223_A_Tspan11
  gRNA
ggcagaggcagcgaacgtgc

SEQ ID NO: 56224 - DNA, 20 bp, Artificial Sequence
  MKO10056224_A_Tspan11
  gRNA
gctgtccgtagtgctcagtc

SEQ ID NO: 56225 - DNA, 20 bp, Artificial Sequence
  MKO10056225_A_Tspan12
  gRNA
cggtgtgtggacatacgagc

SEQ ID NO: 56226 - DNA, 20 bp, Artificial Sequence
  MKO10056226_A_Tspan12
  gRNA
taagccgtaatttgtcattc

SEQ ID NO: 56227 - DNA, 20 bp, Artificial Sequence
  MKO10056227_A_Tspan12
  gRNA
ctgctgcttccttatcatcg

SEQ ID NO: 56228 - DNA, 20 bp, Artificial Sequence
  MKO10056228_A_Tspan13
  gRNA
tcctcgtgcgcccccataat

SEQ ID NO: 56229 - DNA, 20 bp, Artificial Sequence
  MKO10056229_A_Tspan13
  gRNA
tccagcatactctccgatta

SEQ ID NO: 56230 - DNA, 20 bp, Artificial Sequence
  MKO10056230_A_Tspan13
  gRNA
gtgctcgaaatgacatccag

SEQ ID NO: 56231 - DNA, 20 bp, Artificial Sequence
  MKO10056231_A_Tspan14
  gRNA
tggaatcgaccccgtcgtgc

SEQ ID NO: 56232 - DNA, 20 bp, Artificial Sequence
  MKO10056232_A_Tspan14
  gRNA
caggtcgatgtcatcccgat

SEQ ID NO: 56233 - DNA, 20 bp, Artificial Sequence
  MKO10056233_A_Tspan14
  gRNA
caccatcaagaccagcacga

SEQ ID NO: 56234 - DNA, 20 bp, Artificial Sequence
  MKO10056234_A_Tspan15
  gRNA
cgagaattactacgatgatc

SEQ ID NO: 56235 - DNA, 20 bp, Artificial Sequence
  MKO10056235_A_Tspan15
  gRNA
ctgcgtagatccccactgac

SEQ ID NO: 56236 - DNA, 20 bp, Artificial Sequence
  MKO10056236_A_Tspan15
  gRNA
taccatgactgcagcgcccc

SEQ ID NO: 56237 - DNA, 20 bp, Artificial Sequence
  MKO10056237_A_Tspan17
  gRNA
attcctgagcaaagtcgata

SEQ ID NO: 56238 - DNA, 20 bp, Artificial Sequence
  MKO10056238_A_Tspan17
  gRNA
tgggcggtcttgaccccgtg

SEQ ID NO: 56239 - DNA, 20 bp, Artificial Sequence
  MKO10056239_A_Tspan17
  gRNA
ccggagggccccaatgcagc

SEQ ID NO: 56240 - DNA, 20 bp, Artificial Sequence
  MKO10056240_A_Tspan18
  gRNA
cgtgtttcggctgctgacgc

SEQ ID NO: 56241 - DNA, 20 bp, Artificial Sequence
  MKO10056241_A_Tspan18
  gRNA
ctaccaaggcgataacgata

SEQ ID NO: 56242 - DNA, 20 bp, Artificial Sequence
  MKO10056242_A_Tspan18
  gRNA
catccgtatcgttatcgcct

SEQ ID NO: 56243 - DNA, 20 bp, Artificial Sequence
  MKO10056243_A_Tspan1
  gRNA
ggaatctgggtgtccgtcga

SEQ ID NO: 56244 - DNA, 20 bp, Artificial Sequence
  MKO10056244_A_Tspan1
  gRNA
attctctttgacgaaacgtg

SEQ ID NO: 56245 - DNA, 20 bp, Artificial Sequence
  MKO10056245_A_Tspan1
  gRNA
atagtgatccgaagaccttc

SEQ ID NO: 56246 - DNA, 20 bp, Artificial Sequence
  MKO10056246_A_Tspan2
  gRNA
ggatcagccgttattgcatt

SEQ ID NO: 56247 - DNA, 20 bp, Artificial Sequence
  MKO10056247_A_Tspan2
  gRNA
tcgatttggaggtaccatga

SEQ ID NO: 56248 - DNA, 20 bp, Artificial Sequence
  MKO10056248_A_Tspan2
  gRNA
cacacactgtgactcacgca

SEQ ID NO: 56249 - DNA, 20 bp, Artificial Sequence
  MKO10056249_A_Tspan31
  gRNA
ccagtcctgccaccgcgatg

SEQ ID NO: 56250 - DNA, 20 bp, Artificial Sequence
  MKO10056250_A_Tspan31
  gRNA
tctcagtatatgatcatcct

SEQ ID NO: 56251 - DNA, 20 bp, Artificial Sequence
  MKO10056251_A_Tspan31
  gRNA
cagatgtcatcaatgcttcg

SEQ ID NO: 56252 - DNA, 20 bp, Artificial Sequence
  MKO10056252_A_Tspan32
  gRNA
cctatgaaacactgcgctat

SEQ ID NO: 56253 - DNA, 20 bp, Artificial Sequence
  MKO10056253_A_Tspan32
  gRNA
ggttcctctccaacgatgca

SEQ ID NO: 56254 - DNA, 20 bp, Artificial Sequence
  MKO10056254_A_Tspan32
  gRNA
tggaacttaccgcagccatg

SEQ ID NO: 56255 - DNA, 20 bp, Artificial Sequence
  MKO10056255_A_Tspan33
  gRNA
cgtgcattatcgagatgacc

SEQ ID NO: 56256 - DNA, 20 bp, Artificial Sequence
  MKO10056256_A_Tspan33
  gRNA
ctgcagaacctcatcgactt

SEQ ID NO: 56257 - DNA, 20 bp, Artificial Sequence
  MKO10056257_A_Tspan33
  gRNA
acctgcgtgcttcattagcc

SEQ ID NO: 56258 - DNA, 20 bp, Artificial Sequence
  MKO10056258_A_Tspan3
  gRNA
cgactatgaccacttcttcg

SEQ ID NO: 56259 - DNA, 20 bp, Artificial Sequence
  MKO10056259_A_Tspan3
  gRNA
tcacactcacctcggcgtag

SEQ ID NO: 56260 - DNA, 20 bp, Artificial Sequence
  MKO10056260_A_Tspan3
  gRNA
gtcggagttggtcccgttgt

SEQ ID NO: 56261 - DNA, 20 bp, Artificial Sequence
  MKO10056261_A_Tspan4
  gRNA
aatgcagcccacgaagccga

SEQ ID NO: 56262 - DNA, 20 bp, Artificial Sequence
  MKO10056262_A_Tspan4
  gRNA
aggtcccggtgacgatgagc

SEQ ID NO: 56263 - DNA, 20 bp, Artificial Sequence
  MKO10056263_A_Tspan4
  gRNA
tgcttctagttccgatgctg

SEQ ID NO: 56264 - DNA, 20 bp, Artificial Sequence
  MKO10056264_A_Tspan5
  gRNA
atctcgtccatcaccgacct

SEQ ID NO: 56265 - DNA, 20 bp, Artificial Sequence
  MKO10056265_A_Tspan5
  gRNA
atggcacaccgcatcgctct

SEQ ID NO: 56266 - DNA, 20 bp, Artificial Sequence
  MKO10056266_A_Tspan5
  gRNA
aatgcaagccgagagcgatg

SEQ ID NO: 56267 - DNA, 20 bp, Artificial Sequence
  MKO10056267_A_Tspan6
  gRNA
ctacctgtcgagcctccgcc

SEQ ID NO: 56268 - DNA, 20 bp, Artificial Sequence
  MKO10056268_A_Tspan6
  gRNA
acgaactattactcagaaac

SEQ ID NO: 56269 - DNA, 20 bp, Artificial Sequence
  MKO10056269_A_Tspan6
  gRNA
acctttccaatctccgtaat

SEQ ID NO: 56270 - DNA, 20 bp, Artificial Sequence
  MKO10056270_A_Tspan7
  gRNA
agtttcgttcatgcagcaac

SEQ ID NO: 56271 - DNA, 20 bp, Artificial Sequence
  MKO10056271_A_Tspan7
  gRNA
cgccaccaaagttaatcaga

SEQ ID NO: 56272 - DNA, 20 bp, Artificial Sequence
  MKO10056272_A_Tspan7
  gRNA
tggatttgtgtttcgtcatg

SEQ ID NO: 56273 - DNA, 20 bp, Artificial Sequence
  MKO10056273_A_Tspan8
  gRNA
acgtacctcaggtttgaaag

SEQ ID NO: 56274 - DNA, 20 bp, Artificial Sequence
  MKO10056274_A_Tspan8
  gRNA
catgattgtgtttcagtcgg

SEQ ID NO: 56275 - DNA, 20 bp, Artificial Sequence
  MKO10056275_A_Tspan8
  gRNA
ggtatgtggtacactgatct

SEQ ID NO: 56276 - DNA, 20 bp, Artificial Sequence
  MKO10056276_A_Tspan9
  gRNA
gccaacctcgtcatcgccat

SEQ ID NO: 56277 - DNA, 20 bp, Artificial Sequence
  MKO10056277_A_Tspan9
  gRNA
gccccacagatgcggtgttg

SEQ ID NO: 56278 - DNA, 20 bp, Artificial Sequence
  MKO10056278_A_Tspan9
  gRNA
gccgatggcgatgacgaggt

SEQ ID NO: 56279 - DNA, 20 bp, Artificial Sequence
  MKO10056279_A_Tspear
  gRNA
gagagggacacgctactgct

SEQ ID NO: 56280 - DNA, 20 bp, Artificial Sequence
  MKO10056280_A_Tspear
  gRNA
ctggcctcatggacagccga

SEQ ID NO: 56281 - DNA, 20 bp, Artificial Sequence
  MKO10056281_A_Tspear
  gRNA
agctacaagtgggatccgga

SEQ ID NO: 56282 - DNA, 20 bp, Artificial Sequence
  MKO10056282_A_Tspo2
  gRNA
gatggctaaggctggtacgt

SEQ ID NO: 56283 - DNA, 20 bp, Artificial Sequence
  MKO10056283_A_Tspo2
  gRNA
gatgaatgagcatacaaatc

SEQ ID NO: 56284 - DNA, 20 bp, Artificial Sequence
  MKO10056284_A_Tspo2
  gRNA
tggcccctagcactgcccct

SEQ ID NO: 56285 - DNA, 20 bp, Artificial Sequence
  MKO10056285_A_Tspo
  gRNA
gccctcgccacgtacaaagt

SEQ ID NO: 56286 - DNA, 20 bp, Artificial Sequence
  MKO10056286_A_Tspo
  gRNA
ttggcaccgagtgagcccgc

SEQ ID NO: 56287 - DNA, 20 bp, Artificial Sequence
  MKO10056287_A_Tspo
  gRNA
agcctactttgtacgtggcg

SEQ ID NO: 56288 - DNA, 20 bp, Artificial Sequence
  MKO10056288_A_Tspyl1
  gRNA
gaccccgacgtcgcccaata

SEQ ID NO: 56289 - DNA, 20 bp, Artificial Sequence
  MKO10056289_A_Tspyl1
  gRNA
ccggttccgtcttcacgtca

SEQ ID NO: 56290 - DNA, 20 bp, Artificial Sequence
  MKO10056290_A_Tspyl1
  gRNA
tgtcacgaacaccgctgccg

SEQ ID NO: 56291 - DNA, 20 bp, Artificial Sequence
  MKO10056291_A_Tspyl2
  gRNA
cgtctcatatagtagcgtac

SEQ ID NO: 56292 - DNA, 20 bp, Artificial Sequence
  MKO10056292_A_Tspyl2
  gRNA
tggccccggtgccaacgtat

SEQ ID NO: 56293 - DNA, 20 bp, Artificial Sequence
  MKO10056293_A_Tspyl2
  gRNA
ccgctacttgaccaatcttc

SEQ ID NO: 56294 - DNA, 20 bp, Artificial Sequence
  MKO10056294_A_Tspyl3
  gRNA
gcctgccgcccatacaagag

SEQ ID NO: 56295 - DNA, 20 bp, Artificial Sequence
  MKO10056295_A_Tspyl3
  gRNA
gcggggttgcagggcctaag

SEQ ID NO: 56296 - DNA, 20 bp, Artificial Sequence
  MKO10056296_A_Tspyl3
  gRNA
tgcgagaagggctcgggtaa

SEQ ID NO: 56297 - DNA, 20 bp, Artificial Sequence
  MKO10056297_A_Tspyl4
  gRNA
ggtgcgtccccgccctttga

SEQ ID NO: 56298 - DNA, 20 bp, Artificial Sequence
  MKO10056298_A_Tspyl4
  gRNA
cactctctacgccaatccgc

SEQ ID NO: 56299 - DNA, 20 bp, Artificial Sequence
  MKO10056299_A_Tspyl4
  gRNA
gcccaaatttgcgttccagc

SEQ ID NO: 56300 - DNA, 20 bp, Artificial Sequence
  MKO10056300_A_Tspyl5
  gRNA
cttccgcagcggcccggacc

SEQ ID NO: 56301 - DNA, 20 bp, Artificial Sequence
  MKO10056301_A_Tspyl5
  gRNA
gccttggcgaagctgcgacg

SEQ ID NO: 56302 - DNA, 20 bp, Artificial Sequence
  MKO10056302_A_Tspyl5
  gRNA
ggactcgccgatttccaatg

SEQ ID NO: 56303 - DNA, 20 bp, Artificial Sequence
  MKO10056303_A_Tsr1
  gRNA
agctcagccgaatagaccag

SEQ ID NO: 56304 - DNA, 20 bp, Artificial Sequence
  MKO10056304_A_Tsr1
  gRNA
aatagcttgctgcatatcgt

SEQ ID NO: 56305 - DNA, 20 bp, Artificial Sequence
  MKO10056305_A_Tsr1
  gRNA
gctaggttctggccgagaag

SEQ ID NO: 56306 - DNA, 20 bp, Artificial Sequence
  MKO10056306_A_Tsr2
  gRNA
cttcgggggcgtgcacagcc

SEQ ID NO: 56307 - DNA, 20 bp, Artificial Sequence
  MKO10056307_A_Tsr2
  gRNA
cactgcaccccctagccact

SEQ ID NO: 56308 - DNA, 20 bp, Artificial Sequence
  MKO10056308_A_Tsr2
  gRNA
gagcacacgcacatcttcag

SEQ ID NO: 56309 - DNA, 20 bp, Artificial Sequence
  MKO10056309_A_Tsr3
  gRNA
agtacgtgtctccggcagac

SEQ ID NO: 56310 - DNA, 20 bp, Artificial Sequence
  MKO10056310_A_Tsr3
  gRNA
gacctaccgggtgctggcca

SEQ ID NO: 56311 - DNA, 20 bp, Artificial Sequence
  MKO10056311_A_Tsr3
  gRNA
ctgcgaccccaagcgctgca

SEQ ID NO: 56312 - DNA, 20 bp, Artificial Sequence
  MKO10056312_A_Tssc1
  gRNA
gccagatctcacccgcttga

SEQ ID NO: 56313 - DNA, 20 bp, Artificial Sequence
  MKO10056313_A_Tssc1
  gRNA
cctaccaggccacgttgcct

SEQ ID NO: 56314 - DNA, 20 bp, Artificial Sequence
  MKO10056314_A_Tssc1
  gRNA
gcagtgcttgcagggtcgtc

SEQ ID NO: 56315 - DNA, 20 bp, Artificial Sequence
  MKO10056315_A_Tssc4
  gRNA
ggtccgagtccgagtcgctg

SEQ ID NO: 56316 - DNA, 20 bp, Artificial Sequence
  MKO10056316_A_Tssc4
  gRNA
tcggaccttagcttacctag

SEQ ID NO: 56317 - DNA, 20 bp, Artificial Sequence
  MKO10056317_A_Tssc4
  gRNA
gtgcagccattccacctccg

SEQ ID NO: 56318 - DNA, 20 bp, Artificial Sequence
  MKO10056318_A_Tssk1
  gRNA
gctgccgtcctcaagcgacg

SEQ ID NO: 56319 - DNA, 20 bp, Artificial Sequence
  MKO10056319_A_Tssk1
  gRNA
tgatgtagcctcgtcgcttg

SEQ ID NO: 56320 - DNA, 20 bp, Artificial Sequence
  MKO10056320_A_Tssk1
  gRNA
atcatcccgcaagcagcgct

SEQ ID NO: 56321 - DNA, 20 bp, Artificial Sequence
  MKO10056321_A_Tssk2
  gRNA
aacggtggttgacggtcgcc

SEQ ID NO: 56322 - DNA, 20 bp, Artificial Sequence
  MKO10056322_A_Tssk2
  gRNA
ctcgagttcatcaagtgccg

SEQ ID NO: 56323 - DNA, 20 bp, Artificial Sequence
  MKO10056323_A_Tssk2
  gRNA
gtgtcaccagcatccgttgc

SEQ ID NO: 56324 - DNA, 20 bp, Artificial Sequence
  MKO10056324_A_Tssk3
  gRNA
gctccagattgtccgtaccc

SEQ ID NO: 56325 - DNA, 20 bp, Artificial Sequence
  MKO10056325_A_Tssk3
  gRNA
cttgcccagctgatacccat

SEQ ID NO: 56326 - DNA, 20 bp, Artificial Sequence
  MKO10056326_A_Tssk3
  gRNA
caactaacttcttcgattga

SEQ ID NO: 56327 - DNA, 20 bp, Artificial Sequence
  MKO10056327_A_Tssk4
  gRNA
catatcgttggatccattcg

SEQ ID NO: 56328 - DNA, 20 bp, Artificial Sequence
  MKO10056328_A_Tssk4
  gRNA
cagctttgcttacgcctgcc

SEQ ID NO: 56329 - DNA, 20 bp, Artificial Sequence
  MKO10056329_A_Tssk4
  gRNA
ctcctccatgacagagcgat

SEQ ID NO: 56330 - DNA, 20 bp, Artificial Sequence
  MKO10056330_A_Tssk5
  gRNA
ctgcgttgatatgctccaac

SEQ ID NO: 56331 - DNA, 20 bp, Artificial Sequence
  MKO10056331_A_Tssk5
  gRNA
aactttctggagtattccgc

SEQ ID NO: 56332 - DNA, 20 bp, Artificial Sequence
  MKO10056332_A_Tssk5
  gRNA
tcagacctccgatgttgccc

SEQ ID NO: 56333 - DNA, 20 bp, Artificial Sequence
  MKO10056333_A_Tssk6
  gRNA
atacgcggccgagccgcagt

SEQ ID NO: 56334 - DNA, 20 bp, Artificial Sequence
  MKO10056334_A_Tssk6
  gRNA
cgagcgccgcgtcaagatca

SEQ ID NO: 56335 - DNA, 20 bp, Artificial Sequence
  MKO10056335_A_Tssk6
  gRNA
ggccgcgtatgcgtcacctg

SEQ ID NO: 56336 - DNA, 20 bp, Artificial Sequence
  MKO10056336_A_Tsta3
  gRNA
gctacccggcctcatccata

SEQ ID NO: 56337 - DNA, 20 bp, Artificial Sequence
  MKO10056337_A_Tsta3
  gRNA
cgcctaccattgcagcgaga

SEQ ID NO: 56338 - DNA, 20 bp, Artificial Sequence
  MKO10056338_A_Tsta3
  gRNA
cttgcgagcgcccacctcga

SEQ ID NO: 56339 - DNA, 20 bp, Artificial Sequence
  MKO10056339_A_Tstd1
  gRNA
cttcgacgttcgatctccag

SEQ ID NO: 56340 - DNA, 20 bp, Artificial Sequence
  MKO10056340_A_Tstd1
  gRNA
agatcgaacgtcgaagagcc

SEQ ID NO: 56341 - DNA, 20 bp, Artificial Sequence
  MKO10056341_A_Tstd1
  gRNA
cacagggctcggaactatgc

SEQ ID NO: 56342 - DNA, 20 bp, Artificial Sequence
  MKO10056342_A_Tstd2
  gRNA
aacacaccgactcgcaattc

SEQ ID NO: 56343 - DNA, 20 bp, Artificial Sequence
  MKO10056343_A_Tstd2
  gRNA
tgcttcccggaattgcgagt

SEQ ID NO: 56344 - DNA, 20 bp, Artificial Sequence
  MKO10056344_A_Tstd2
  gRNA
cagattcggattgctactga

SEQ ID NO: 56345 - DNA, 20 bp, Artificial Sequence
  MKO10056345_A_Tstd3
  gRNA
catggtatgttgattgatcc

SEQ ID NO: 56346 - DNA, 20 bp, Artificial Sequence
  MKO10056346_A_Tstd3
  gRNA
gccatccaaatctgaccgtc

SEQ ID NO: 56347 - DNA, 20 bp, Artificial Sequence
  MKO10056347_A_Tstd3
  gRNA
tcaagctcaccgccaagcgc

SEQ ID NO: 56348 - DNA, 20 bp, Artificial Sequence
  MKO10056348_A_Tst
  gRNA
gacgcgtcttggtactcacc

SEQ ID NO: 56349 - DNA, 20 bp, Artificial Sequence
  MKO10056349_A_Tst
  gRNA
ctggcggaatccattcggtc

SEQ ID NO: 56350 - DNA, 20 bp, Artificial Sequence
  MKO10056350_A_Tst
  gRNA
cctcattgccacgtgccgca

SEQ ID NO: 56351 - DNA, 20 bp, Artificial Sequence
  MKO10056351_A_Tsx
  gRNA
agtcagcagtaccgatgatg

SEQ ID NO: 56352 - DNA, 20 bp, Artificial Sequence
  MKO10056352_A_Tsx
  gRNA
agatgatgacaccgacgatc

SEQ ID NO: 56353 - DNA, 20 bp, Artificial Sequence
  MKO10056353_A_Tsx
  gRNA
tggctcatctgcctgatcgt

SEQ ID NO: 56354 - DNA, 20 bp, Artificial Sequence
  MKO10056354_A_Ttbk1
  gRNA
gccggctgccctcgacctac

SEQ ID NO: 56355 - DNA, 20 bp, Artificial Sequence
  MKO10056355_A_Ttbk1
  gRNA
gttgagtaccacactgcgcc

SEQ ID NO: 56356 - DNA, 20 bp, Artificial Sequence
  MKO10056356_A_Ttbk1
  gRNA
ctcaacgtgaaagtgcccct

SEQ ID NO: 56357 - DNA, 20 bp, Artificial Sequence
  MKO10056357_A_Ttbk2
  gRNA
gattccacagggacggaatc

SEQ ID NO: 56358 - DNA, 20 bp, Artificial Sequence
  MKO10056358_A_Ttbk2
  gRNA
atctccgccgtagccaatcc

SEQ ID NO: 56359 - DNA, 20 bp, Artificial Sequence
  MKO10056359_A_Ttbk2
  gRNA
aaatgatcgtttcaactacg

SEQ ID NO: 56360 - DNA, 20 bp, Artificial Sequence
  MKO10056360_A_Ttc12
  gRNA
ttcatagtcgcccctgacaa

SEQ ID NO: 56361 - DNA, 20 bp, Artificial Sequence
  MKO10056361_A_Ttc12
  gRNA
gttacccacctgggctcggt

SEQ ID NO: 56362 - DNA, 20 bp, Artificial Sequence
  MKO10056362_A_Ttc12
  gRNA
atccgtggagaaggacgcca

SEQ ID NO: 56363 - DNA, 20 bp, Artificial Sequence
  MKO10056363_A_Ttc13
  gRNA
tcagttcgcagtcagactcg

SEQ ID NO: 56364 - DNA, 20 bp, Artificial Sequence
  MKO10056364_A_Ttc13
  gRNA
ctgtcattgtcggtagcaaa

SEQ ID NO: 56365 - DNA, 20 bp, Artificial Sequence
  MKO10056365_A_Ttc13
  gRNA
gaacattacctggagcatcg

SEQ ID NO: 56366 - DNA, 20 bp, Artificial Sequence
  MKO10056366_A_Ttc14
  gRNA
gcgactgccgcagcaagtcg

SEQ ID NO: 56367 - DNA, 20 bp, Artificial Sequence
  MKO10056367_A_Ttc14
  gRNA
ccatggaccgcgacttgctg

SEQ ID NO: 56368 - DNA, 20 bp, Artificial Sequence
  MKO10056368_A_Ttc14
  gRNA
ttcttccgagatattgaacg

SEQ ID NO: 56369 - DNA, 20 bp, Artificial Sequence
  MKO10056369_A_Ttc16
  gRNA
aagatcctgcgacgcatctt

SEQ ID NO: 56370 - DNA, 20 bp, Artificial Sequence
  MKO10056370_A_Ttc16
  gRNA
taaccccgttctagagctag

SEQ ID NO: 56371 - DNA, 20 bp, Artificial Sequence
  MKO10056371_A_Ttc16
  gRNA
cttctatgtattccgtgctg

SEQ ID NO: 56372 - DNA, 20 bp, Artificial Sequence
  MKO10056372_A_Ttc17
  gRNA
cttgtctcattaatatgact

SEQ ID NO: 56373 - DNA, 20 bp, Artificial Sequence
  MKO10056373_A_Ttc17
  gRNA
ataggtcatctcattcacga

SEQ ID NO: 56374 - DNA, 20 bp, Artificial Sequence
  MKO10056374_A_Ttc17
  gRNA
caaagtgcctttgggagacc

SEQ ID NO: 56375 - DNA, 20 bp, Artificial Sequence
  MKO10056375_A_Ttc18
  gRNA
cccttggaaactcctttgcc

SEQ ID NO: 56376 - DNA, 20 bp, Artificial Sequence
  MKO10056376_A_Ttc18
  gRNA
gttgtactttgcagttcctt

SEQ ID NO: 56377 - DNA, 20 bp, Artificial Sequence
  MKO10056377_A_Ttc18
  gRNA
actcgggttaccttagagcc

SEQ ID NO: 56378 - DNA, 20 bp, Artificial Sequence
  MKO10056378_A_Ttc19
  gRNA
catcacgtacacttatgacc

SEQ ID NO: 56379 - DNA, 20 bp, Artificial Sequence
  MKO10056379_A_Ttc19
  gRNA
gcaacgatgagttatctgct

SEQ ID NO: 56380 - DNA, 20 bp, Artificial Sequence
  MKO10056380_A_Ttc19
  gRNA
ccgtacaacccccacaccgc

SEQ ID NO: 56381 - DNA, 20 bp, Artificial Sequence
  MKO10056381_A_Ttc1
  gRNA
cctatatccgtgcaatactg

SEQ ID NO: 56382 - DNA, 20 bp, Artificial Sequence
  MKO10056382_A_Ttc1
  gRNA
acagaacagatcgatctttc

SEQ ID NO: 56383 - DNA, 20 bp, Artificial Sequence
  MKO10056383_A_Ttc1
  gRNA
tctcttgcttgatgtactga

SEQ ID NO: 56384 - DNA, 20 bp, Artificial Sequence
  MKO10056384_A_Ttc21a
  gRNA
acgctcaccgatggtgtcgc

SEQ ID NO: 56385 - DNA, 20 bp, Artificial Sequence
  MKO10056385_A_Ttc21a
  gRNA
gcagggcgatgaccgcgcac

SEQ ID NO: 56386 - DNA, 20 bp, Artificial Sequence
  MKO10056386_A_Ttc21a
  gRNA
ctgtacctctttggagccgc

SEQ ID NO: 56387 - DNA, 20 bp, Artificial Sequence
  MKO10056387_A_Ttc21b
  gRNA
gcacattggtcgtcatgaca

SEQ ID NO: 56388 - DNA, 20 bp, Artificial Sequence
  MKO10056388_A_Ttc21b
  gRNA
atccctcctcaaaataccgc

SEQ ID NO: 56389 - DNA, 20 bp, Artificial Sequence
  MKO10056389_A_Ttc21b
  gRNA
gtcacctcattgctatcatg

SEQ ID NO: 56390 - DNA, 20 bp, Artificial Sequence
  MKO10056390_A_Ttc22
  gRNA
tgcccgagtacccgtattca

SEQ ID NO: 56391 - DNA, 20 bp, Artificial Sequence
  MKO10056391_A_Ttc22
  gRNA
acctcccattctgaatcgcc

SEQ ID NO: 56392 - DNA, 20 bp, Artificial Sequence
  MKO10056392_A_Ttc22
  gRNA
tgtccatgaatacgggtact

SEQ ID NO: 56393 - DNA, 20 bp, Artificial Sequence
  MKO10056393_A_Ttc23l
  gRNA
tgaagttgtatttcgcttcc

SEQ ID NO: 56394 - DNA, 20 bp, Artificial Sequence
  MKO10056394_A_Ttc23l
  gRNA
ttaggtctttctccgagact

SEQ ID NO: 56395 - DNA, 20 bp, Artificial Sequence
  MKO10056395_A_Ttc23l
  gRNA
gaaagacctaaccattgctt

SEQ ID NO: 56396 - DNA, 20 bp, Artificial Sequence
  MKO10056396_A_Ttc23
  gRNA
cgactggcactggaaactag

SEQ ID NO: 56397 - DNA, 20 bp, Artificial Sequence
  MKO10056397_A_Ttc23
  gRNA
gactctcgatggagttggcc

SEQ ID NO: 56398 - DNA, 20 bp, Artificial Sequence
  MKO10056398_A_Ttc23
  gRNA
ggcgtatgttaatctggctc

SEQ ID NO: 56399 - DNA, 20 bp, Artificial Sequence
  MKO10056399_A_Ttc24
  gRNA
ctcgtccttaggagacgtga

SEQ ID NO: 56400 - DNA, 20 bp, Artificial Sequence
  MKO10056400_A_Ttc24
  gRNA
gggcttcccaatagttgcca

SEQ ID NO: 56401 - DNA, 20 bp, Artificial Sequence
  MKO10056401_A_Ttc24
  gRNA
aaccaagttctgtacgagag

SEQ ID NO: 56402 - DNA, 20 bp, Artificial Sequence
  MKO10056402_A_Ttc25
  gRNA
gaacgacccgactttctgca

SEQ ID NO: 56403 - DNA, 20 bp, Artificial Sequence
  MKO10056403_A_Ttc25
  gRNA
tgaggcctcagcatcgttca

SEQ ID NO: 56404 - DNA, 20 bp, Artificial Sequence
  MKO10056404_A_Ttc25
  gRNA
ctgtacgagagttgctttat

SEQ ID NO: 56405 - DNA, 20 bp, Artificial Sequence
  MKO10056405_A_Ttc26
  gRNA
gtgaagttcaagcgccacgt

SEQ ID NO: 56406 - DNA, 20 bp, Artificial Sequence
  MKO10056406_A_Ttc26
  gRNA
aagctctcttgtagtcaccc

SEQ ID NO: 56407 - DNA, 20 bp, Artificial Sequence
  MKO10056407_A_Ttc26
  gRNA
ctccccgcccacagcgggtt

SEQ ID NO: 56408 - DNA, 20 bp, Artificial Sequence
  MKO10056408_A_Ttc27
  gRNA
gcgtgctattagcagcagta

SEQ ID NO: 56409 - DNA, 20 bp, Artificial Sequence
  MKO10056409_A_Ttc27
  gRNA
acatatctcaacgtccacca

SEQ ID NO: 56410 - DNA, 20 bp, Artificial Sequence
  MKO10056410_A_Ttc27
  gRNA
aaatagtttgtgtcgttgaa

SEQ ID NO: 56411 - DNA, 20 bp, Artificial Sequence
  MKO10056411_A_Ttc28
  gRNA
ccagtaccttggacgtcacg

SEQ ID NO: 56412 - DNA, 20 bp, Artificial Sequence
  MKO10056412_A_Ttc28
  gRNA
gggcatccgcgtgacgtcca

SEQ ID NO: 56413 - DNA, 20 bp, Artificial Sequence
  MKO10056413_A_Ttc28
  gRNA
gaaagttcgtcagagtaacc

SEQ ID NO: 56414 - DNA, 20 bp, Artificial Sequence
  MKO10056414_A_Ttc29
  gRNA
taagctccgggaagctgcga

SEQ ID NO: 56415 - DNA, 20 bp, Artificial Sequence
  MKO10056415_A_Ttc29
  gRNA
atttctaccactacctgacc

SEQ ID NO: 56416 - DNA, 20 bp, Artificial Sequence
  MKO10056416_A_Ttc29
  gRNA
tgaggaatcacttctacgaa

SEQ ID NO: 56417 - DNA, 20 bp, Artificial Sequence
  MKO10056417_A_Ttc30a1
  gRNA
agcagctctaaagttcccga

SEQ ID NO: 56418 - DNA, 20 bp, Artificial Sequence
  MKO10056418_A_Ttc30a1
  gRNA
cacatgatagtgctttgtga

SEQ ID NO: 56419 - DNA, 20 bp, Artificial Sequence
  MKO10056419_A_Ttc30a1
  gRNA
gtatcagctgagaaactttg

SEQ ID NO: 56420 - DNA, 20 bp, Artificial Sequence
  MKO10056420_A_Ttc30a2
  gRNA
tgatagcagcttgtaaacga

SEQ ID NO: 56421 - DNA, 20 bp, Artificial Sequence
  MKO10056421_A_Ttc30a2
  gRNA
attgccaatatcattgagcg

SEQ ID NO: 56422 - DNA, 20 bp, Artificial Sequence
  MKO10056422_A_Ttc30a2
  gRNA
ctgcaaagccgcaaagaatt

SEQ ID NO: 56423 - DNA, 20 bp, Artificial Sequence
  MKO10056423_A_Ttc30b
  gRNA
ccatacaagtacaggattca

SEQ ID NO: 56424 - DNA, 20 bp, Artificial Sequence
  MKO10056424_A_Ttc30b
  gRNA
tatgatggtcagatcaacct

SEQ ID NO: 56425 - DNA, 20 bp, Artificial Sequence
  MKO10056425_A_Ttc30b
  gRNA
ccttgaatcctgtacttgta

SEQ ID NO: 56426 - DNA, 20 bp, Artificial Sequence
  MKO10056426_A_Ttc32
  gRNA
acctcccgtgacgcgcgcac

SEQ ID NO: 56427 - DNA, 20 bp, Artificial Sequence
  MKO10056427_A_Ttc32
  gRNA
tacccagcctgtagcgtatc

SEQ ID NO: 56428 - DNA, 20 bp, Artificial Sequence
  MKO10056428_A_Ttc32
  gRNA
cggcgcaggctcgcttctcc

SEQ ID NO: 56429 - DNA, 20 bp, Artificial Sequence
  MKO10056429_A_Ttc33
  gRNA
tcaagcgtaacccacactcg

SEQ ID NO: 56430 - DNA, 20 bp, Artificial Sequence
  MKO10056430_A_Ttc33
  gRNA
gttcatcggatatatgtgca

SEQ ID NO: 56431 - DNA, 20 bp, Artificial Sequence
  MKO10056431_A_Ttc33
  gRNA
tcaccgggctttgataaaga

SEQ ID NO: 56432 - DNA, 20 bp, Artificial Sequence
  MKO10056432_A_Ttc34
  gRNA
ctcgtccgagcccgctgtta

SEQ ID NO: 56433 - DNA, 20 bp, Artificial Sequence
  MKO10056433_A_Ttc34
  gRNA
ggacccggcagcgcgtgtac

SEQ ID NO: 56434 - DNA, 20 bp, Artificial Sequence
  MKO10056434_A_Ttc34
  gRNA
tgtgagaagcaggcgccaac

SEQ ID NO: 56435 - DNA, 20 bp, Artificial Sequence
  MKO10056435_A_Ttc36
  gRNA
tccgcccgcaggcgccctgg

SEQ ID NO: 56436 - DNA, 20 bp, Artificial Sequence
  MKO10056436_A_Ttc36
  gRNA
ccacgctcagcgcccgttgc

SEQ ID NO: 56437 - DNA, 20 bp, Artificial Sequence
  MKO10056437_A_Ttc36
  gRNA
ggcttgggctcggttgttgt

SEQ ID NO: 56438 - DNA, 20 bp, Artificial Sequence
  MKO10056438_A_Ttc37
  gRNA
tgacgtgtgtaagaaactcg

SEQ ID NO: 56439 - DNA, 20 bp, Artificial Sequence
  MKO10056439_A_Ttc37
  gRNA
gtgcaatcaagtaaatgcta

SEQ ID NO: 56440 - DNA, 20 bp, Artificial Sequence
  MKO10056440_A_Ttc37
  gRNA
tagattgataaagacacggc

SEQ ID NO: 56441 - DNA, 20 bp, Artificial Sequence
  MKO10056441_A_Ttc38
  gRNA
cgttggcacgggaacctccg

SEQ ID NO: 56442 - DNA, 20 bp, Artificial Sequence
  MKO10056442_A_Ttc38
  gRNA
cgcctgacatcccccttaac

SEQ ID NO: 56443 - DNA, 20 bp, Artificial Sequence
  MKO10056443_A_Ttc38
  gRNA
aaaggggtaaactcgagcca

SEQ ID NO: 56444 - DNA, 20 bp, Artificial Sequence
  MKO10056444_A_Ttc39a
  gRNA
ccaggatggtggcatacgtc

SEQ ID NO: 56445 - DNA, 20 bp, Artificial Sequence
  MKO10056445_A_Ttc39a
  gRNA
catgatgaccttcgaccccc

SEQ ID NO: 56446 - DNA, 20 bp, Artificial Sequence
  MKO10056446_A_Ttc39a
  gRNA
caatggtaggacggtgcacc

SEQ ID NO: 56447 - DNA, 20 bp, Artificial Sequence
  MKO10056447_A_Ttc39b
  gRNA
ccctagagttgctacgtcca

SEQ ID NO: 56448 - DNA, 20 bp, Artificial Sequence
  MKO10056448_A_Ttc39b
  gRNA
ccacagatctccatcggaca

SEQ ID NO: 56449 - DNA, 20 bp, Artificial Sequence
  MKO10056449_A_Ttc39b
  gRNA
ctggatgtcctgctgctcga

SEQ ID NO: 56450 - DNA, 20 bp, Artificial Sequence
  MKO10056450_A_Ttc39c
  gRNA
gacgtatgcgagcgaaagta

SEQ ID NO: 56451 - DNA, 20 bp, Artificial Sequence
  MKO10056451_A_Ttc39c
  gRNA
cgacaactcttgtttcacaa

SEQ ID NO: 56452 - DNA, 20 bp, Artificial Sequence
  MKO10056452_A_Ttc39c
  gRNA
ctttcctggagaccgcctac

SEQ ID NO: 56453 - DNA, 20 bp, Artificial Sequence
  MKO10056453_A_Ttc39d
  gRNA
tctatgccgtactcctcgtt

SEQ ID NO: 56454 - DNA, 20 bp, Artificial Sequence
  MKO10056454_A_Ttc39d
  gRNA
gagctcttacttcttacgcg

SEQ ID NO: 56455 - DNA, 20 bp, Artificial Sequence
  MKO10056455_A_Ttc39d
  gRNA
atctcgcctaatgagtagac

SEQ ID NO: 56456 - DNA, 20 bp, Artificial Sequence
  MKO10056456_A_Ttc3
  gRNA
atcacagtaatcttgcagga

SEQ ID NO: 56457 - DNA, 20 bp, Artificial Sequence
  MKO10056457_A_Ttc3
  gRNA
aatatgacatctgcaatatc

SEQ ID NO: 56458 - DNA, 20 bp, Artificial Sequence
  MKO10056458_A_Ttc3
  gRNA
gcccaaagtgagaaaaattt

SEQ ID NO: 56459 - DNA, 20 bp, Artificial Sequence
  MKO10056459_A_Ttc4
  gRNA
catcatcaaaaatcatcgac

SEQ ID NO: 56460 - DNA, 20 bp, Artificial Sequence
  MKO10056460_A_Ttc4
  gRNA
gtgaccgggctttagcttct

SEQ ID NO: 56461 - DNA, 20 bp, Artificial Sequence
  MKO10056461_A_Ttc4
  gRNA
gatagtactgtgctgctgcc

SEQ ID NO: 56462 - DNA, 20 bp, Artificial Sequence
  MKO10056462_A_Ttc5
  gRNA
tgaacattctcgccacgtca

SEQ ID NO: 56463 - DNA, 20 bp, Artificial Sequence
  MKO10056463_A_Ttc5
  gRNA
accagctgggtgaggtgtac

SEQ ID NO: 56464 - DNA, 20 bp, Artificial Sequence
  MKO10056464_A_Ttc5
  gRNA
tccagtacacctcacccagc

SEQ ID NO: 56465 - DNA, 20 bp, Artificial Sequence
  MKO10056465_A_Ttc7b
  gRNA
ccacccgggcgtagatgttc

SEQ ID NO: 56466 - DNA, 20 bp, Artificial Sequence
  MKO10056466_A_Ttc7b
  gRNA
ctgtcagcggcaagtcatcg

SEQ ID NO: 56467 - DNA, 20 bp, Artificial Sequence
  MKO10056467_A_Ttc7b
  gRNA
caagcatctgaccgctgccc

SEQ ID NO: 56468 - DNA, 20 bp, Artificial Sequence
  MKO10056468_A_Ttc7
  gRNA
actatgtggagggctcgtac

SEQ ID NO: 56469 - DNA, 20 bp, Artificial Sequence
  MKO10056469_A_Ttc7
  gRNA
tgggatcgatgacatatccg

SEQ ID NO: 56470 - DNA, 20 bp, Artificial Sequence
  MKO10056470_A_Ttc7
  gRNA
ccggcagtttcccattgttg

SEQ ID NO: 56471 - DNA, 20 bp, Artificial Sequence
  MKO10056471_A_Ttc8
  gRNA
cgatctatgcacgcagatgc

SEQ ID NO: 56472 - DNA, 20 bp, Artificial Sequence
  MKO10056472_A_Ttc8
  gRNA
cgacctatcactagctcatc

SEQ ID NO: 56473 - DNA, 20 bp, Artificial Sequence
  MKO10056473_A_Ttc8
  gRNA
cggccaggtacctgatcata

SEQ ID NO: 56474 - DNA, 20 bp, Artificial Sequence
  MKO10056474_A_Ttc9b
  gRNA
tgccgtggcgttcaaggcgg

SEQ ID NO: 56475 - DNA, 20 bp, Artificial Sequence
  MKO10056475_A_Ttc9b
  gRNA
tgctgtcgagcgccgcagcc

SEQ ID NO: 56476 - DNA, 20 bp, Artificial Sequence
  MKO10056476_A_Ttc9b
  gRNA
gaaggcaatgccggcacgat

SEQ ID NO: 56477 - DNA, 20 bp, Artificial Sequence
  MKO10056477_A_Ttc9c
  gRNA
cattatcgggttgtcgttct

SEQ ID NO: 56478 - DNA, 20 bp, Artificial Sequence
  MKO10056478_A_Ttc9c
  gRNA
ggctactccagcccgataca

SEQ ID NO: 56479 - DNA, 20 bp, Artificial Sequence
  MKO10056479_A_Ttc9c
  gRNA
tgagttctgactgcgtcaac

SEQ ID NO: 56480 - DNA, 20 bp, Artificial Sequence
  MKO10056480_A_Ttc9
  gRNA
gcttggcggcccgatcctcg

SEQ ID NO: 56481 - DNA, 20 bp, Artificial Sequence
  MKO10056481_A_Ttc9
  gRNA
tcttgaactcgtgtgcgcgc

SEQ ID NO: 56482 - DNA, 20 bp, Artificial Sequence
  MKO10056482_A_Ttc9
  gRNA
tcgctcataatttaccagct

SEQ ID NO: 56483 - DNA, 20 bp, Artificial Sequence
  MKO10056483_A_Ttf1
  gRNA
atcccgatacatgcgtctga

SEQ ID NO: 56484 - DNA, 20 bp, Artificial Sequence
  MKO10056484_A_Ttf1
  gRNA
taaattctttgaagcgccct

SEQ ID NO: 56485 - DNA, 20 bp, Artificial Sequence
  MKO10056485_A_Ttf1
  gRNA
ctgcagggaagggcatcgct

SEQ ID NO: 56486 - DNA, 20 bp, Artificial Sequence
  MKO10056486_A_Ttf2
  gRNA
cgtccgcgatggcccgaata

SEQ ID NO: 56487 - DNA, 20 bp, Artificial Sequence
  MKO10056487_A_Ttf2
  gRNA
cgaagccgcatgtgttcgtc

SEQ ID NO: 56488 - DNA, 20 bp, Artificial Sequence
  MKO10056488_A_Ttf2
  gRNA
cagactgtctagttgccacc

SEQ ID NO: 56489 - DNA, 20 bp, Artificial Sequence
  MKO10056489_A_Tti1
  gRNA
tgcccagtagaacccgagtc

SEQ ID NO: 56490 - DNA, 20 bp, Artificial Sequence
  MKO10056490_A_Tti1
  gRNA
gtaagtcggtgtacgagtga

SEQ ID NO: 56491 - DNA, 20 bp, Artificial Sequence
  MKO10056491_A_Tti1
  gRNA
cgaggctagcaccacagccg

SEQ ID NO: 56492 - DNA, 20 bp, Artificial Sequence
  MKO10056492_A_Tti2
  gRNA
gtctggcataggtcctccgt

SEQ ID NO: 56493 - DNA, 20 bp, Artificial Sequence
  MKO10056493_A_Tti2
  gRNA
acctgccagccttcgtgaag

SEQ ID NO: 56494 - DNA, 20 bp, Artificial Sequence
  MKO10056494_A_Tti2
  gRNA
ggttggggatcctaactgtc

SEQ ID NO: 56495 - DNA, 20 bp, Artificial Sequence
  MKO10056495_A_Ttk
  gRNA
ctggaggtgtaagttacgca

SEQ ID NO: 56496 - DNA, 20 bp, Artificial Sequence
  MKO10056496_A_Ttk
  gRNA
aagtagtcacgggcatcatc

SEQ ID NO: 56497 - DNA, 20 bp, Artificial Sequence
  MKO10056497_A_Ttk
  gRNA
tgcccgtgactacttccaga

SEQ ID NO: 56498 - DNA, 20 bp, Artificial Sequence
  MKO10056498_A_Ttll10
  gRNA
cggatggattctggaccgtt

SEQ ID NO: 56499 - DNA, 20 bp, Artificial Sequence
  MKO10056499_A_Ttll10
  gRNA
ttggagctgacacgggttcg

SEQ ID NO: 56500 - DNA, 20 bp, Artificial Sequence
  MKO10056500_A_Ttll10
  gRNA
tactcacattgatgctccgt

SEQ ID NO: 56501 - DNA, 20 bp, Artificial Sequence
  MKO10056501_A_Ttll11
  gRNA
cgaacttgagtttgtcgatg

SEQ ID NO: 56502 - DNA, 20 bp, Artificial Sequence
  MKO10056502_A_Ttll11
  gRNA
ttcatgctcaattcgcatgc

SEQ ID NO: 56503 - DNA, 20 bp, Artificial Sequence
  MKO10056503_A_Ttll11
  gRNA
ggggcttgcggatgtactcc

SEQ ID NO: 56504 - DNA, 20 bp, Artificial Sequence
  MKO10056504_A_Ttll12
  gRNA
ttgtagcacagctcgccccc

SEQ ID NO: 56505 - DNA, 20 bp, Artificial Sequence
  MKO10056505_A_Ttll12
  gRNA
tgaccagtgagagcggcgtc

SEQ ID NO: 56506 - DNA, 20 bp, Artificial Sequence
  MKO10056506_A_Ttll12
  gRNA
tggtacatcatggacgagtt

SEQ ID NO: 56507 - DNA, 20 bp, Artificial Sequence
  MKO10056507_A_Ttll13
  gRNA
agagcttctgcatgcggttg

SEQ ID NO: 56508 - DNA, 20 bp, Artificial Sequence
  MKO10056508_A_Ttll13
  gRNA
cgccgggcagcccaaatgtg

SEQ ID NO: 56509 - DNA, 20 bp, Artificial Sequence
  MKO10056509_A_Ttll13
  gRNA
tccgagccagcagatctttg

SEQ ID NO: 56510 - DNA, 20 bp, Artificial Sequence
  MKO10056510_A_Ttll1
  gRNA
tacgctgaacacgttgcgaa

SEQ ID NO: 56511 - DNA, 20 bp, Artificial Sequence
  MKO10056511_A_Ttll1
  gRNA
cgccgactacaacctgtttg

SEQ ID NO: 56512 - DNA, 20 bp, Artificial Sequence
  MKO10056512_A_Ttll1
  gRNA
ccactacgagctgacccgca

SEQ ID NO: 56513 - DNA, 20 bp, Artificial Sequence
  MKO10056513_A_Ttll2
  gRNA
tgggggtcgcacaaaactca

SEQ ID NO: 56514 - DNA, 20 bp, Artificial Sequence
  MKO10056514_A_Ttll2
  gRNA
cactgactacaccaagtttg

SEQ ID NO: 56515 - DNA, 20 bp, Artificial Sequence
  MKO10056515_A_Ttll2
  gRNA
aatggatggtctgcagagtt

SEQ ID NO: 56516 - DNA, 20 bp, Artificial Sequence
  MKO10056516_A_Ttll3
  gRNA
atccagcacatcccgccgag

SEQ ID NO: 56517 - DNA, 20 bp, Artificial Sequence
  MKO10056517_A_Ttll3
  gRNA
cgtttctgagtcggcccatg

SEQ ID NO: 56518 - DNA, 20 bp, Artificial Sequence
  MKO10056518_A_Ttll3
  gRNA
tccggtgtctcttgcgtcag

SEQ ID NO: 56519 - DNA, 20 bp, Artificial Sequence
  MKO10056519_A_Ttll4
  gRNA
tttgaagtgtgaccgaccga

SEQ ID NO: 56520 - DNA, 20 bp, Artificial Sequence
  MKO10056520_A_Ttll4
  gRNA
tattaatgccactgactcgc

SEQ ID NO: 56521 - DNA, 20 bp, Artificial Sequence
  MKO10056521_A_Ttll4
  gRNA
tgtctcccccagcgagtcag

SEQ ID NO: 56522 - DNA, 20 bp, Artificial Sequence
  MKO10056522_A_Ttll5
  gRNA
ctgtcagaatgcttcgcacc

SEQ ID NO: 56523 - DNA, 20 bp, Artificial Sequence
  MKO10056523_A_Ttll5
  gRNA
gtcttatgaactaacccgca

SEQ ID NO: 56524 - DNA, 20 bp, Artificial Sequence
  MKO10056524_A_Ttll5
  gRNA
gggatcacccatgtattatg

SEQ ID NO: 56525 - DNA, 20 bp, Artificial Sequence
  MKO10056525_A_Ttll6
  gRNA
ggagaggcatattcattacc

SEQ ID NO: 56526 - DNA, 20 bp, Artificial Sequence
  MKO10056526_A_Ttll6
  gRNA
cattgtcacccgcctctcga

SEQ ID NO: 56527 - DNA, 20 bp, Artificial Sequence
  MKO10056527_A_Ttll6
  gRNA
cgcagggccgcccagcaata

SEQ ID NO: 56528 - DNA, 20 bp, Artificial Sequence
  MKO10056528_A_Ttll7
  gRNA
tgacccattgcaccattagc

SEQ ID NO: 56529 - DNA, 20 bp, Artificial Sequence
  MKO10056529_A_Ttll7
  gRNA
tcgtttagtaatagatgaga

SEQ ID NO: 56530 - DNA, 20 bp, Artificial Sequence
  MKO10056530_A_Ttll7
  gRNA
atacctttgttccgagaacg

SEQ ID NO: 56531 - DNA, 20 bp, Artificial Sequence
  MKO10056531_A_Ttll8
  gRNA
gaccagatgctaaatcacta

SEQ ID NO: 56532 - DNA, 20 bp, Artificial Sequence
  MKO10056532_A_Ttll8
  gRNA
cgcggcctaccatcacatcg

SEQ ID NO: 56533 - DNA, 20 bp, Artificial Sequence
  MKO10056533_A_Ttll8
  gRNA
ccgggccaccttgcgaagaa

SEQ ID NO: 56534 - DNA, 20 bp, Artificial Sequence
  MKO10056534_A_Ttll9
  gRNA
ccaactcatgtcgcgacaga

SEQ ID NO: 56535 - DNA, 20 bp, Artificial Sequence
  MKO10056535_A_Ttll9
  gRNA
acgtgcgcataagccacttc

SEQ ID NO: 56536 - DNA, 20 bp, Artificial Sequence
  MKO10056536_A_Ttll9
  gRNA
ttctgcgccacaggcccgga

SEQ ID NO: 56537 - DNA, 20 bp, Artificial Sequence
  MKO10056537_A_Ttl
  gRNA
ttccttgtaggtcacgagcc

SEQ ID NO: 56538 - DNA, 20 bp, Artificial Sequence
  MKO10056538_A_Ttl
  gRNA
cctcaagacgccagtcgctc

SEQ ID NO: 56539 - DNA, 20 bp, Artificial Sequence
  MKO10056539_A_Ttl
  gRNA
cgactcggggaaccatgagc

SEQ ID NO: 56540 - DNA, 20 bp, Artificial Sequence
  MKO10056540_A_Ttn
  gRNA
cggggatcatcaatctagcg

SEQ ID NO: 56541 - DNA, 20 bp, Artificial Sequence
  MKO10056541_A_Ttn
  gRNA
ctcaactgttgcgattgatc

SEQ ID NO: 56542 - DNA, 20 bp, Artificial Sequence
  MKO10056542_A_Ttn
  gRNA
gctaaaggagatctgcacgc

SEQ ID NO: 56543 - DNA, 20 bp, Artificial Sequence
  MKO10056543_A_Ttpal
  gRNA
ggataacaatcccgttcacc

SEQ ID NO: 56544 - DNA, 20 bp, Artificial Sequence
  MKO10056544_A_Ttpal
  gRNA
catcgtccagcgacgtgctc

SEQ ID NO: 56545 - DNA, 20 bp, Artificial Sequence
  MKO10056545_A_Ttpal
  gRNA
ctcggatgttctcggtaatt

SEQ ID NO: 56546 - DNA, 20 bp, Artificial Sequence
  MKO10056546_A_Ttpa
  gRNA
cgtagatctgcacttaattc

SEQ ID NO: 56547 - DNA, 20 bp, Artificial Sequence
  MKO10056547_A_Ttpa
  gRNA
tctttaccgccatattcccg

SEQ ID NO: 56548 - DNA, 20 bp, Artificial Sequence
  MKO10056548_A_Ttpa
  gRNA
tggcggtaaagagttctcca

SEQ ID NO: 56549 - DNA, 20 bp, Artificial Sequence
  MKO10056549_A_Ttr
  gRNA
cacttacatccgcgaattca

SEQ ID NO: 56550 - DNA, 20 bp, Artificial Sequence
  MKO10056550_A_Ttr
  gRNA
aactggacaccaaatcgtac

SEQ ID NO: 56551 - DNA, 20 bp, Artificial Sequence
  MKO10056551_A_Ttr
  gRNA
gtggcgatggccagagtcgt

SEQ ID NO: 56552 - DNA, 20 bp, Artificial Sequence
  MKO10056552_A_Ttyh1
  gRNA
gctcagcaccatcgatgacg

SEQ ID NO: 56553 - DNA, 20 bp, Artificial Sequence
  MKO10056553_A_Ttyh1
  gRNA
ccgcgaccaagagtaccagc

SEQ ID NO: 56554 - DNA, 20 bp, Artificial Sequence
  MKO10056554_A_Ttyh1
  gRNA
tcgcggggagcaaagccgct

SEQ ID NO: 56555 - DNA, 20 bp, Artificial Sequence
  MKO10056555_A_Ttyh2
  gRNA
atcatgctgcgtgacctgga

SEQ ID NO: 56556 - DNA, 20 bp, Artificial Sequence
  MKO10056556_A_Ttyh2
  gRNA
tttgcccgtagtgctgcggt

SEQ ID NO: 56557 - DNA, 20 bp, Artificial Sequence
  MKO10056557_A_Ttyh2
  gRNA
cagcaatgatctcgctgagc

SEQ ID NO: 56558 - DNA, 20 bp, Artificial Sequence
  MKO10056558_A_Ttyh3
  gRNA
tagcacctccagcgatactc

SEQ ID NO: 56559 - DNA, 20 bp, Artificial Sequence
  MKO10056559_A_Ttyh3
  gRNA
cgcacctgtaccagtcatag

SEQ ID NO: 56560 - DNA, 20 bp, Artificial Sequence
  MKO10056560_A_Ttyh3
  gRNA
acgccatgccaaccgcacag

SEQ ID NO: 56561 - DNA, 20 bp, Artificial Sequence
  MKO10056561_A_Tuba1a
  gRNA
gctgccaataactatgctcg

SEQ ID NO: 56562 - DNA, 20 bp, Artificial Sequence
  MKO10056562_A_Tuba1a
  gRNA
caacctacactaacctaaac

SEQ ID NO: 56563 - DNA, 20 bp, Artificial Sequence
  MKO10056563_A_Tuba1a
  gRNA
gagtgcatctccatccatgt

SEQ ID NO: 56564 - DNA, 20 bp, Artificial Sequence
  MKO10056564_A_Tuba1b
  gRNA
ccacatcaccacggtatagc

SEQ ID NO: 56565 - DNA, 20 bp, Artificial Sequence
  MKO10056565_A_Tuba1b
  gRNA
cctgctataccgtggtgatg

SEQ ID NO: 56566 - DNA, 20 bp, Artificial Sequence
  MKO10056566_A_Tuba1b
  gRNA
gagtgcatctccatccacgt

SEQ ID NO: 56567 - DNA, 20 bp, Artificial Sequence
  MKO10056567_A_Tuba1c
  gRNA
ctgctactgtaagctgctca

SEQ ID NO: 56568 - DNA, 20 bp, Artificial Sequence
  MKO10056568_A_Tuba1c
  gRNA
agccagcttaccgatgaccg

SEQ ID NO: 56569 - DNA, 20 bp, Artificial Sequence
  MKO10056569_A_Tuba1c
  gRNA
gagtgcatctccatccacgt

SEQ ID NO: 56570 - DNA, 20 bp, Artificial Sequence
  MKO10056570_A_Tuba3a
  gRNA
gtcgacaatctctttgccga

SEQ ID NO: 56571 - DNA, 20 bp, Artificial Sequence
  MKO10056571_A_Tuba3a
  gRNA
cggcaaagagattgtcgacc

SEQ ID NO: 56572 - DNA, 20 bp, Artificial Sequence
  MKO10056572_A_Tuba3a
  gRNA
cgtccattacagcctccctg

SEQ ID NO: 56573 - DNA, 20 bp, Artificial Sequence
  MKO10056573_A_Tuba3b
  gRNA
cctggaccggatccgaaaac

SEQ ID NO: 56574 - DNA, 20 bp, Artificial Sequence
  MKO10056574_A_Tuba3b
  gRNA
tctctagatgaagtacgcac

SEQ ID NO: 56575 - DNA, 20 bp, Artificial Sequence
  MKO10056575_A_Tuba3b
  gRNA
caagcacctaccgaccacag

SEQ ID NO: 56576 - DNA, 20 bp, Artificial Sequence
  MKO10056576_A_Tuba4a
  gRNA
gtctcaccagcttgcggatc

SEQ ID NO: 56577 - DNA, 20 bp, Artificial Sequence
  MKO10056577_A_Tuba4a
  gRNA
ccactacagccgtggacact

SEQ ID NO: 56578 - DNA, 20 bp, Artificial Sequence
  MKO10056578_A_Tuba4a
  gRNA
gctcaatatctaggttacgg

SEQ ID NO: 56579 - DNA, 20 bp, Artificial Sequence
  MKO10056579_A_Tuba8
  gRNA
aatggcgacattcacgtcct

SEQ ID NO: 56580 - DNA, 20 bp, Artificial Sequence
  MKO10056580_A_Tuba8
  gRNA
gcagctaacaattacgcccg

SEQ ID NO: 56581 - DNA, 20 bp, Artificial Sequence
  MKO10056581_A_Tuba8
  gRNA
gctggaccgaatccgtaaac

SEQ ID NO: 56582 - DNA, 20 bp, Artificial Sequence
  MKO10056582_A_Tubal3
  gRNA
agagtagcgacctcgtgcgt

SEQ ID NO: 56583 - DNA, 20 bp, Artificial Sequence
  MKO10056583_A_Tubal3
  gRNA
gctgccaacacctacgcacg

SEQ ID NO: 56584 - DNA, 20 bp, Artificial Sequence
  MKO10056584_A_Tubal3
  gRNA
cagcctgttgatactagcat

SEQ ID NO: 56585 - DNA, 20 bp, Artificial Sequence
  MKO10056585_A_Tubb1
  gRNA
tgtgccgcgagccgtccttg

SEQ ID NO: 56586 - DNA, 20 bp, Artificial Sequence
  MKO10056586_A_Tubb1
  gRNA
gccttaccttggctccgatc

SEQ ID NO: 56587 - DNA, 20 bp, Artificial Sequence
  MKO10056587_A_Tubb1
  gRNA
gatggatagcacggcattgt

SEQ ID NO: 56588 - DNA, 20 bp, Artificial Sequence
  MKO10056588_A_Tubb2a
  gRNA
agcccaccttagcgccgatc

SEQ ID NO: 56589 - DNA, 20 bp, Artificial Sequence
  MKO10056589_A_Tubb2a
  gRNA
gatgtgcacgatctcgcgca

SEQ ID NO: 56590 - DNA, 20 bp, Artificial Sequence
  MKO10056590_A_Tubb2a
  gRNA
aacctattccattgacaatg

SEQ ID NO: 56591 - DNA, 20 bp, Artificial Sequence
  MKO10056591_A_Tubb2b
  gRNA
aacctactgcatcgataatg

SEQ ID NO: 56592 - DNA, 20 bp, Artificial Sequence
  MKO10056592_A_Tubb2b
  gRNA
aacccaccttggcaccgatc

SEQ ID NO: 56593 - DNA, 20 bp, Artificial Sequence
  MKO10056593_A_Tubb2b
  gRNA
agcagttcactgctatgttc

SEQ ID NO: 56594 - DNA, 20 bp, Artificial Sequence
  MKO10056594_A_Tubb3
  gRNA
gtcccctacatagttgccgc

SEQ ID NO: 56595 - DNA, 20 bp, Artificial Sequence
  MKO10056595_A_Tubb3
  gRNA
catcagcgtatactacaatg

SEQ ID NO: 56596 - DNA, 20 bp, Artificial Sequence
  MKO10056596_A_Tubb3
  gRNA
gcctcaccttggcccctatc

SEQ ID NO: 56597 - DNA, 20 bp, Artificial Sequence
  MKO10056597_A_Tubb4a
  gRNA
ggagttagtggatgccgtcc

SEQ ID NO: 56598 - DNA, 20 bp, Artificial Sequence
  MKO10056598_A_Tubb4a
  gRNA
tctgtccgctccggcccttt

SEQ ID NO: 56599 - DNA, 20 bp, Artificial Sequence
  MKO10056599_A_Tubb4a
  gRNA
tcaatgcggtaaccagatcg

SEQ ID NO: 56600 - DNA, 20 bp, Artificial Sequence
  MKO10056600_A_Tubb4b
  gRNA
ctcctaccttggcgccaatc

SEQ ID NO: 56601 - DNA, 20 bp, Artificial Sequence
  MKO10056601_A_Tubb4b
  gRNA
ttctcttacaggtcagagtg

SEQ ID NO: 56602 - DNA, 20 bp, Artificial Sequence
  MKO10056602_A_Tubb4b
  gRNA
cacagccatgttccgacgca

SEQ ID NO: 56603 - DNA, 20 bp, Artificial Sequence
  MKO10056603_A_Tubb5
  gRNA
acagttgccgccgtcttccg

SEQ ID NO: 56604 - DNA, 20 bp, Artificial Sequence
  MKO10056604_A_Tubb5
  gRNA
tccttaccttagcaccgatc

SEQ ID NO: 56605 - DNA, 20 bp, Artificial Sequence
  MKO10056605_A_Tubb5
  gRNA
caactgtgaggtaccggccg

SEQ ID NO: 56606 - DNA, 20 bp, Artificial Sequence
  MKO10056606_A_Tubb6
  gRNA
tgagtcgcccacgtagcctc

SEQ ID NO: 56607 - DNA, 20 bp, Artificial Sequence
  MKO10056607_A_Tubb6
  gRNA
cagctaagaagtacgtaccc

SEQ ID NO: 56608 - DNA, 20 bp, Artificial Sequence
  MKO10056608_A_Tubb6
  gRNA
cgaccaggccggaggctacg

SEQ ID NO: 56609 - DNA, 20 bp, Artificial Sequence
  MKO10056609_A_Tubd1
  gRNA
cgtcattctcgtgaatgaga

SEQ ID NO: 56610 - DNA, 20 bp, Artificial Sequence
  MKO10056610_A_Tubd1
  gRNA
catacctcacccgttccata

SEQ ID NO: 56611 - DNA, 20 bp, Artificial Sequence
  MKO10056611_A_Tubd1
  gRNA
cactaccgcagaaatccact

SEQ ID NO: 56612 - DNA, 20 bp, Artificial Sequence
  MKO10056612_A_Tube1
  gRNA
cccagaagcagcagccgatc

SEQ ID NO: 56613 - DNA, 20 bp, Artificial Sequence
  MKO10056613_A_Tube1
  gRNA
cagctcatcactgatatctc

SEQ ID NO: 56614 - DNA, 20 bp, Artificial Sequence
  MKO10056614_A_Tube1
  gRNA
ctggctgcagtcggacagtg

SEQ ID NO: 56615 - DNA, 20 bp, Artificial Sequence
  MKO10056615_A_Tubg1
  gRNA
catcgtagaagagttcgcca

SEQ ID NO: 56616 - DNA, 20 bp, Artificial Sequence
  MKO10056616_A_Tubg1
  gRNA
aatgacctgggagaatccgc

SEQ ID NO: 56617 - DNA, 20 bp, Artificial Sequence
  MKO10056617_A_Tubg1
  gRNA
acctgtcatttagccgttcc

SEQ ID NO: 56618 - DNA, 20 bp, Artificial Sequence
  MKO10056618_A_Tubg2
  gRNA
tcttagagcgactgaacgac

SEQ ID NO: 56619 - DNA, 20 bp, Artificial Sequence
  MKO10056619_A_Tubg2
  gRNA
tgtcgttcagtcgctctaag

SEQ ID NO: 56620 - DNA, 20 bp, Artificial Sequence
  MKO10056620_A_Tubg2
  gRNA
ccccagttgggttcgagttc

SEQ ID NO: 56621 - DNA, 20 bp, Artificial Sequence
  MKO10056621_A_Tubgcp2
  gRNA
ggtccaggttggggtcgaca

SEQ ID NO: 56622 - DNA, 20 bp, Artificial Sequence
  MKO10056622_A_Tubgcp2
  gRNA
agctcaagcccgagccaatc

SEQ ID NO: 56623 - DNA, 20 bp, Artificial Sequence
  MKO10056623_A_Tubgcp2
  gRNA
ggattctgtttactagctcc

SEQ ID NO: 56624 - DNA, 20 bp, Artificial Sequence
  MKO10056624_A_Tubgcp3
  gRNA
ggcgtcgagtgagcgtctct

SEQ ID NO: 56625 - DNA, 20 bp, Artificial Sequence
  MKO10056625_A_Tubgcp3
  gRNA
cgacgccttactactatgcc

SEQ ID NO: 56626 - DNA, 20 bp, Artificial Sequence
  MKO10056626_A_Tubgcp3
  gRNA
aacttccagttattcgacaa

SEQ ID NO: 56627 - DNA, 20 bp, Artificial Sequence
  MKO10056627_A_Tubgcp4
  gRNA
gtgtcctgaatcgactctgc

SEQ ID NO: 56628 - DNA, 20 bp, Artificial Sequence
  MKO10056628_A_Tubgcp4
  gRNA
tcgccaagcactgcttgatt

SEQ ID NO: 56629 - DNA, 20 bp, Artificial Sequence
  MKO10056629_A_Tubgcp4
  gRNA
ggagtaattgacatgtgata

SEQ ID NO: 56630 - DNA, 20 bp, Artificial Sequence
  MKO10056630_A_Tubgcp5
  gRNA
tggtccaaatattgatacgc

SEQ ID NO: 56631 - DNA, 20 bp, Artificial Sequence
  MKO10056631_A_Tubgcp5
  gRNA
cttaccggcgtatcaatatt

SEQ ID NO: 56632 - DNA, 20 bp, Artificial Sequence
  MKO10056632_A_Tubgcp5
  gRNA
taccagatttcatcgtttct

SEQ ID NO: 56633 - DNA, 20 bp, Artificial Sequence
  MKO10056633_A_Tubgcp6
  gRNA
gccgactcaagcctttgtag

SEQ ID NO: 56634 - DNA, 20 bp, Artificial Sequence
  MKO10056634_A_Tubgcp6
  gRNA
accaagcatgacccccgatt

SEQ ID NO: 56635 - DNA, 20 bp, Artificial Sequence
  MKO10056635_A_Tubgcp6
  gRNA
tagggctcctctcggtgacc

SEQ ID NO: 56636 - DNA, 20 bp, Artificial Sequence
  MKO10056636_A_Tub
  gRNA
tcggcgagcccggcagtcag

SEQ ID NO: 56637 - DNA, 20 bp, Artificial Sequence
  MKO10056637_A_Tub
  gRNA
ctcgattgccagtgtacagc

SEQ ID NO: 56638 - DNA, 20 bp, Artificial Sequence
  MKO10056638_A_Tub
  gRNA
acctccgtgccacgatgcag

SEQ ID NO: 56639 - DNA, 20 bp, Artificial Sequence
  MKO10056639_A_Tufm
  gRNA
tcctccggtagttctagccg

SEQ ID NO: 56640 - DNA, 20 bp, Artificial Sequence
  MKO10056640_A_Tufm
  gRNA
gcacttactgctagctaaac

SEQ ID NO: 56641 - DNA, 20 bp, Artificial Sequence
  MKO10056641_A_Tufm
  gRNA
cgccccctcaccgctgaagc

SEQ ID NO: 56642 - DNA, 20 bp, Artificial Sequence
  MKO10056642_A_Tuft1
  gRNA
ttactgcaggtttacttgaa

SEQ ID NO: 56643 - DNA, 20 bp, Artificial Sequence
  MKO10056643_A_Tuft1
  gRNA
gcttgctacttatatcctcc

SEQ ID NO: 56644 - DNA, 20 bp, Artificial Sequence
  MKO10056644_A_Tuft1
  gRNA
gtggccaggcatcatggcat

SEQ ID NO: 56645 - DNA, 20 bp, Artificial Sequence
  MKO10056645_A_Tulp1
  gRNA
tagactgtctgcgcagcgcg

SEQ ID NO: 56646 - DNA, 20 bp, Artificial Sequence
  MKO10056646_A_Tulp1
  gRNA
tattccgcagcgacccgccc

SEQ ID NO: 56647 - DNA, 20 bp, Artificial Sequence
  MKO10056647_A_Tulp1
  gRNA
aatccaaaccccgtaaagct

SEQ ID NO: 56648 - DNA, 20 bp, Artificial Sequence
  MKO10056648_A_Tulp2
  gRNA
tctgttggacatggaccgtg

SEQ ID NO: 56649 - DNA, 20 bp, Artificial Sequence
  MKO10056649_A_Tulp2
  gRNA
aagcgctcctccccgcgcct

SEQ ID NO: 56650 - DNA, 20 bp, Artificial Sequence
  MKO10056650_A_Tulp2
  gRNA
ccggcgaccaaggcgcgggg

SEQ ID NO: 56651 - DNA, 20 bp, Artificial Sequence
  MKO10056651_A_Tulp3
  gRNA
tgtaggatgacgtcgctgcg

SEQ ID NO: 56652 - DNA, 20 bp, Artificial Sequence
  MKO10056652_A_Tulp3
  gRNA
gagtagtgtgaactatgacg

SEQ ID NO: 56653 - DNA, 20 bp, Artificial Sequence
  MKO10056653_A_Tulp3
  gRNA
cgcagcgacgtcatcctaca

SEQ ID NO: 56654 - DNA, 20 bp, Artificial Sequence
  MKO10056654_A_Tulp4
  gRNA
agtctccctgcgtacaccac

SEQ ID NO: 56655 - DNA, 20 bp, Artificial Sequence
  MKO10056655_A_Tulp4
  gRNA
gccctatcatctctatctgt

SEQ ID NO: 56656 - DNA, 20 bp, Artificial Sequence
  MKO10056656_A_Tulp4
  gRNA
gtgatcgtcatggactgcca

SEQ ID NO: 56657 - DNA, 20 bp, Artificial Sequence
  MKO10056657_A_Tusc1
  gRNA
cctcggaacgtccggatcat

SEQ ID NO: 56658 - DNA, 20 bp, Artificial Sequence
  MKO10056658_A_Tusc1
  gRNA
ggttctcgcgcctgagccga

SEQ ID NO: 56659 - DNA, 20 bp, Artificial Sequence
  MKO10056659_A_Tusc1
  gRNA
cgcgcagccgcgcgttctgc

SEQ ID NO: 56660 - DNA, 20 bp, Artificial Sequence
  MKO10056660_A_Tusc2
  gRNA
cccgcggcgcgtgaatacga

SEQ ID NO: 56661 - DNA, 20 bp, Artificial Sequence
  MKO10056661_A_Tusc2
  gRNA
atggcagggcatcgtgaagc

SEQ ID NO: 56662 - DNA, 20 bp, Artificial Sequence
  MKO10056662_A_Tusc2
  gRNA
cccttcgtattcacgcgccg

SEQ ID NO: 56663 - DNA, 20 bp, Artificial Sequence
  MKO10056663_A_Tusc3
  gRNA
cgctcgatcttcagaatgaa

SEQ ID NO: 56664 - DNA, 20 bp, Artificial Sequence
  MKO10056664_A_Tusc3
  gRNA
ctgcaaatccaattcgttga

SEQ ID NO: 56665 - DNA, 20 bp, Artificial Sequence
  MKO10056665_A_Tusc3
  gRNA
tacatgaacatccgtcctgt

SEQ ID NO: 56666 - DNA, 20 bp, Artificial Sequence
  MKO10056666_A_Tusc5
  gRNA
gtctcgaagtagtgtgcagc

SEQ ID NO: 56667 - DNA, 20 bp, Artificial Sequence
  MKO10056667_A_Tusc5
  gRNA
atgctcgccgagagctgacc

SEQ ID NO: 56668 - DNA, 20 bp, Artificial Sequence
  MKO10056668_A_Tusc5
  gRNA
tgatgctgagtagccgtgcc

SEQ ID NO: 56669 - DNA, 20 bp, Artificial Sequence
  MKO10056669_A_Tut1
  gRNA
atggacttcgagtccggcca

SEQ ID NO: 56670 - DNA, 20 bp, Artificial Sequence
  MKO10056670_A_Tut1
  gRNA
tggtgcaactccgagctacc

SEQ ID NO: 56671 - DNA, 20 bp, Artificial Sequence
  MKO10056671_A_Tut1
  gRNA
ccagggggtgtttgccatcg

SEQ ID NO: 56672 - DNA, 20 bp, Artificial Sequence
  MKO10056672_A_Tvp23a
  gRNA
agccgtagaggttcgcagct

SEQ ID NO: 56673 - DNA, 20 bp, Artificial Sequence
  MKO10056673_A_Tvp23a
  gRNA
atggtggaaccagatagacg

SEQ ID NO: 56674 - DNA, 20 bp, Artificial Sequence
  MKO10056674_A_Tvp23a
  gRNA
cgtcgcctcccatcttacag

SEQ ID NO: 56675 - DNA, 20 bp, Artificial Sequence
  MKO10056675_A_Tvp23b
  gRNA
tcatcgcctgccccgtcctg

SEQ ID NO: 56676 - DNA, 20 bp, Artificial Sequence
  MKO10056676_A_Tvp23b
  gRNA
tagcagctttatcgcctgca

SEQ ID NO: 56677 - DNA, 20 bp, Artificial Sequence
  MKO10056677_A_Tvp23b
  gRNA
caatatgattccaccaacgc

SEQ ID NO: 56678 - DNA, 20 bp, Artificial Sequence
  MKO10056678_A_Twf1
  gRNA
tgccccgctgaccgccgctg

SEQ ID NO: 56679 - DNA, 20 bp, Artificial Sequence
  MKO10056679_A_Twf1
  gRNA
tcctttcatagagcaactgg

SEQ ID NO: 56680 - DNA, 20 bp, Artificial Sequence
  MKO10056680_A_Twf1
  gRNA
acggcagattaaaatcaacg

SEQ ID NO: 56681 - DNA, 20 bp, Artificial Sequence
  MKO10056681_A_Twf2
  gRNA
agactcaccggcgaattgtc

SEQ ID NO: 56682 - DNA, 20 bp, Artificial Sequence
  MKO10056682_A_Twf2
  gRNA
ttctttgccaaggcccgggc

SEQ ID NO: 56683 - DNA, 20 bp, Artificial Sequence
  MKO10056683_A_Twf2
  gRNA
caggtgcggcacacgatgac

SEQ ID NO: 56684 - DNA, 20 bp, Artificial Sequence
  MKO10056684_A_Twist1
  gRNA
cgggagcccgcagtcgtacg

SEQ ID NO: 56685 - DNA, 20 bp, Artificial Sequence
  MKO10056685_A_Twist1
  gRNA
gcgtggggatgatcttgcgc

SEQ ID NO: 56686 - DNA, 20 bp, Artificial Sequence
  MKO10056686_A_Twist1
  gRNA
agtccagctcgtcgctctgc

SEQ ID NO: 56687 - DNA, 20 bp, Artificial Sequence
  MKO10056687_A_Twist2
  gRNA
tcctcgaaagactgcgcgct

SEQ ID NO: 56688 - DNA, 20 bp, Artificial Sequence
  MKO10056688_A_Twist2
  gRNA
tattgtccatctcgtcgctc

SEQ ID NO: 56689 - DNA, 20 bp, Artificial Sequence
  MKO10056689_A_Twist2
  gRNA
cccgagcgcgcagtctttcg

SEQ ID NO: 56690 - DNA, 20 bp, Artificial Sequence
  MKO10056690_A_Twistnb
  gRNA
cttacctctcggagtagcgc

SEQ ID NO: 56691 - DNA, 20 bp, Artificial Sequence
  MKO10056691_A_Twistnb
  gRNA
gcgcacgccgccgcgtagct

SEQ ID NO: 56692 - DNA, 20 bp, Artificial Sequence
  MKO10056692_A_Twistnb
  gRNA
cataccattaacgtctgccc

SEQ ID NO: 56693 - DNA, 20 bp, Artificial Sequence
  MKO10056693_A_Twsg1
  gRNA
agtcgcagcactcgtcccac

SEQ ID NO: 56694 - DNA, 20 bp, Artificial Sequence
  MKO10056694_A_Twsg1
  gRNA
taagatatcctgcgaatcca

SEQ ID NO: 56695 - DNA, 20 bp, Artificial Sequence
  MKO10056695_A_Twsg1
  gRNA
agaacgggtacctttgtcgc

SEQ ID NO: 56696 - DNA, 20 bp, Artificial Sequence
  MKO10056696_A_Txk
  gRNA
ccgtggttcgccaaactgat

SEQ ID NO: 56697 - DNA, 20 bp, Artificial Sequence
  MKO10056697_A_Txk
  gRNA
atcttacccgaagcggtctc

SEQ ID NO: 56698 - DNA, 20 bp, Artificial Sequence
  MKO10056698_A_Txk
  gRNA
gggcagcggcttgcgcttcg

SEQ ID NO: 56699 - DNA, 20 bp, Artificial Sequence
  MKO10056699_A_Txlna
  gRNA
tccttctcgccgttgacgac

SEQ ID NO: 56700 - DNA, 20 bp, Artificial Sequence
  MKO10056700_A_Txlna
  gRNA
acggcacaaccggtccctga

SEQ ID NO: 56701 - DNA, 20 bp, Artificial Sequence
  MKO10056701_A_Txlna
  gRNA
gcgaaactccaagctgcgcc

SEQ ID NO: 56702 - DNA, 20 bp, Artificial Sequence
  MKO10056702_A_Txlnb
  gRNA
cttcttcctcgcgcgcccgt

SEQ ID NO: 56703 - DNA, 20 bp, Artificial Sequence
  MKO10056703_A_Txlnb
  gRNA
tctcgagtttgcttcgagca

SEQ ID NO: 56704 - DNA, 20 bp, Artificial Sequence
  MKO10056704_A_Txlnb
  gRNA
gcgcaatatgaagctctgcc

SEQ ID NO: 56705 - DNA, 20 bp, Artificial Sequence
  MKO10056705_A_Txlng
  gRNA
caacatcaagaccccagttg

SEQ ID NO: 56706 - DNA, 20 bp, Artificial Sequence
  MKO10056706_A_Txlng
  gRNA
gagctcagtattctgtacac

SEQ ID NO: 56707 - DNA, 20 bp, Artificial Sequence
  MKO10056707_A_Txlng
  gRNA
catgttgttccaactgagct

SEQ ID NO: 56708 - DNA, 20 bp, Artificial Sequence
  MKO10056708_A_Txn1
  gRNA
cgcgggagacaagcttgtcg

SEQ ID NO: 56709 - DNA, 20 bp, Artificial Sequence
  MKO10056709_A_Txn1
  gRNA
cacgacaagcttgtctcccg

SEQ ID NO: 56710 - DNA, 20 bp, Artificial Sequence
  MKO10056710_A_Txn1
  gRNA
ttaggcatattcagtaatag

SEQ ID NO: 56711 - DNA, 20 bp, Artificial Sequence
  MKO10056711_A_Txn2
  gRNA
tttgacgacctttaacgtcc

SEQ ID NO: 56712 - DNA, 20 bp, Artificial Sequence
  MKO10056712_A_Txn2
  gRNA
tcttctctagccgcggtcct

SEQ ID NO: 56713 - DNA, 20 bp, Artificial Sequence
  MKO10056713_A_Txn2
  gRNA
gtgatcgtcaatgtccactt

SEQ ID NO: 56714 - DNA, 20 bp, Artificial Sequence
  MKO10056714_A_Txndc11
  gRNA
gtcaaggaccggagatctcg

SEQ ID NO: 56715 - DNA, 20 bp, Artificial Sequence
  MKO10056715_A_Txndc11
  gRNA
gtggccagtccatcgctgcc

SEQ ID NO: 56716 - DNA, 20 bp, Artificial Sequence
  MKO10056716_A_Txndc11
  gRNA
acattgagaagtttgtccgc

SEQ ID NO: 56717 - DNA, 20 bp, Artificial Sequence
  MKO10056717_A_Txndc12
  gRNA
ttcaagtggcttgccgctga

SEQ ID NO: 56718 - DNA, 20 bp, Artificial Sequence
  MKO10056718_A_Txndc12
  gRNA
atcatccataaatcttggtg

SEQ ID NO: 56719 - DNA, 20 bp, Artificial Sequence
  MKO10056719_A_Txndc12
  gRNA
ttacccaagaaaaggatgcg

SEQ ID NO: 56720 - DNA, 20 bp, Artificial Sequence
  MKO10056720_A_Txndc15
  gRNA
aagagcggcggaacccatgg

SEQ ID NO: 56721 - DNA, 20 bp, Artificial Sequence
  MKO10056721_A_Txndc15
  gRNA
atctccgcgcggacccagag

SEQ ID NO: 56722 - DNA, 20 bp, Artificial Sequence
  MKO10056722_A_Txndc15
  gRNA
taaccatacagatcgcaccc

SEQ ID NO: 56723 - DNA, 20 bp, Artificial Sequence
  MKO10056723_A_Txndc16
  gRNA
caccatacctggtgttccga

SEQ ID NO: 56724 - DNA, 20 bp, Artificial Sequence
  MKO10056724_A_Txndc16
  gRNA
tgatgaaagcgtatttattc

SEQ ID NO: 56725 - DNA, 20 bp, Artificial Sequence
  MKO10056725_A_Txndc16
  gRNA
gtgttgaagaagaagcgtca

SEQ ID NO: 56726 - DNA, 20 bp, Artificial Sequence
  MKO10056726_A_Txndc17
  gRNA
ttcagcccctctcgaatgac

SEQ ID NO: 56727 - DNA, 20 bp, Artificial Sequence
  MKO10056727_A_Txndc17
  gRNA
agctgagccagtcattcgag

SEQ ID NO: 56728 - DNA, 20 bp, Artificial Sequence
  MKO10056728_A_Txndc17
  gRNA
cagcacgctcacctcctcga

SEQ ID NO: 56729 - DNA, 20 bp, Artificial Sequence
  MKO10056729_A_Txndc2
  gRNA
tcggacatgacactcaacaa

SEQ ID NO: 56730 - DNA, 20 bp, Artificial Sequence
  MKO10056730_A_Txndc2
  gRNA
gatggtgtcttcttcggacg

SEQ ID NO: 56731 - DNA, 20 bp, Artificial Sequence
  MKO10056731_A_Txndc2
  gRNA
gacagcgtcccatccaagaa

SEQ ID NO: 56732 - DNA, 20 bp, Artificial Sequence
  MKO10056732_A_Txndc5
  gRNA
ttatcaagttcttcgctccg

SEQ ID NO: 56733 - DNA, 20 bp, Artificial Sequence
  MKO10056733_A_Txndc5
  gRNA
cttccattagacaccggagc

SEQ ID NO: 56734 - DNA, 20 bp, Artificial Sequence
  MKO10056734_A_Txndc5
  gRNA
tggggtatcctcgcactccc

SEQ ID NO: 56735 - DNA, 20 bp, Artificial Sequence
  MKO10056735_A_Txndc8
  gRNA
ccaaaatgtcacgtttgctc

SEQ ID NO: 56736 - DNA, 20 bp, Artificial Sequence
  MKO10056736_A_Txndc8
  gRNA
aaagaattgttcagcgatgc

SEQ ID NO: 56737 - DNA, 20 bp, Artificial Sequence
  MKO10056737_A_Txndc8
  gRNA
tttgggtgtacttgaacatc

SEQ ID NO: 56738 - DNA, 20 bp, Artificial Sequence
  MKO10056738_A_Txndc9
  gRNA
gtgattctccaccagcttag

SEQ ID NO: 56739 - DNA, 20 bp, Artificial Sequence
  MKO10056739_A_Txndc9
  gRNA
gttctgatgttatcaattac

SEQ ID NO: 56740 - DNA, 20 bp, Artificial Sequence
  MKO10056740_A_Txndc9
  gRNA
aattaggagtggctttccaa

SEQ ID NO: 56741 - DNA, 20 bp, Artificial Sequence
  MKO10056741_A_Txnip
  gRNA
aatatggttgcgtagactac

SEQ ID NO: 56742 - DNA, 20 bp, Artificial Sequence
  MKO10056742_A_Txnip
  gRNA
ttacccgagtcaaagccgtc

SEQ ID NO: 56743 - DNA, 20 bp, Artificial Sequence
  MKO10056743_A_Txnip
  gRNA
cctggcttgcggcgtggcca

SEQ ID NO: 56744 - DNA, 20 bp, Artificial Sequence
  MKO10056744_A_Txnl1
  gRNA
ttactcatagagctgaacgc

SEQ ID NO: 56745 - DNA, 20 bp, Artificial Sequence
  MKO10056745_A_Txnl1
  gRNA
gtgagaatcgatcagtatca

SEQ ID NO: 56746 - DNA, 20 bp, Artificial Sequence
  MKO10056746_A_Txnl1
  gRNA
acaggtgtggaccgtgtctt

SEQ ID NO: 56747 - DNA, 20 bp, Artificial Sequence
  MKO10056747_A_Txnl4a
  gRNA
cgcgtggtcgtcattcgttt

SEQ ID NO: 56748 - DNA, 20 bp, Artificial Sequence
  MKO10056748_A_Txnl4a
  gRNA
tctgtacagcatcgccgaaa

SEQ ID NO: 56749 - DNA, 20 bp, Artificial Sequence
  MKO10056749_A_Txnl4a
  gRNA
atcatagagaccgtgtaccg

SEQ ID NO: 56750 - DNA, 20 bp, Artificial Sequence
  MKO10056750_A_Txnl4b
  gRNA
tgctatttacctggtggacg

SEQ ID NO: 56751 - DNA, 20 bp, Artificial Sequence
  MKO10056751_A_Txnl4b
  gRNA
gtcatatttgggcacgttct

SEQ ID NO: 56752 - DNA, 20 bp, Artificial Sequence
  MKO10056752_A_Txnl4b
  gRNA
gatcaaaagcactgcggaga

SEQ ID NO: 56753 - DNA, 20 bp, Artificial Sequence
  MKO10056753_A_Txnrd1
  gRNA
ggggctaccgcgtagctctc

SEQ ID NO: 56754 - DNA, 20 bp, Artificial Sequence
  MKO10056754_A_Txnrd1
  gRNA
ctgaaagactcgcgcaacta

SEQ ID NO: 56755 - DNA, 20 bp, Artificial Sequence
  MKO10056755_A_Txnrd1
  gRNA
tttgtcacaccgactcctct

SEQ ID NO: 56756 - DNA, 20 bp, Artificial Sequence
  MKO10056756_A_Txnrd2
  gRNA
atcgcgtccaactgcaggac

SEQ ID NO: 56757 - DNA, 20 bp, Artificial Sequence
  MKO10056757_A_Txnrd2
  gRNA
tggtggcacctgtgtcaacg

SEQ ID NO: 56758 - DNA, 20 bp, Artificial Sequence
  MKO10056758_A_Txnrd2
  gRNA
tatgcaacccacgttgacac

SEQ ID NO: 56759 - DNA, 20 bp, Artificial Sequence
  MKO10056759_A_Txnrd3
  gRNA
ccgcctacccgcgtgctgtg

SEQ ID NO: 56760 - DNA, 20 bp, Artificial Sequence
  MKO10056760_A_Txnrd3
  gRNA
aacccccgccgatgatgatg

SEQ ID NO: 56761 - DNA, 20 bp, Artificial Sequence
  MKO10056761_A_Txnrd3
  gRNA
ggcctcatgtcgtcgccacc

SEQ ID NO: 56762 - DNA, 20 bp, Artificial Sequence
  MKO10056762_A_Tyk2
  gRNA
ggatctcctcctcgctagac

SEQ ID NO: 56763 - DNA, 20 bp, Artificial Sequence
  MKO10056763_A_Tyk2
  gRNA
aaaccacaccggtatacagc

SEQ ID NO: 56764 - DNA, 20 bp, Artificial Sequence
  MKO10056764_A_Tyk2
  gRNA
tctgcgggacctgtctagcg

SEQ ID NO: 56765 - DNA, 20 bp, Artificial Sequence
  MKO10056765_A_Tymp
  gRNA
tcacatctcgtgcagcatac

SEQ ID NO: 56766 - DNA, 20 bp, Artificial Sequence
  MKO10056766_A_Tymp
  gRNA
gataagctggaatcgattcc

SEQ ID NO: 56767 - DNA, 20 bp, Artificial Sequence
  MKO10056767_A_Tymp
  gRNA
cttgttgacaaacactccac

SEQ ID NO: 56768 - DNA, 20 bp, Artificial Sequence
  MKO10056768_A_Tyms
  gRNA
tcacaaccaaacgagtgttc

SEQ ID NO: 56769 - DNA, 20 bp, Artificial Sequence
  MKO10056769_A_Tyms
  gRNA
acccttccagaacactcgtt

SEQ ID NO: 56770 - DNA, 20 bp, Artificial Sequence
  MKO10056770_A_Tyms
  gRNA
tctacagattactcgggaca

SEQ ID NO: 56771 - DNA, 20 bp, Artificial Sequence
  MKO10056771_A_Tyro3
  gRNA
ggtggcaccgccagatcttt

SEQ ID NO: 56772 - DNA, 20 bp, Artificial Sequence
  MKO10056772_A_Tyro3
  gRNA
cctaccttgaaggcgaacaa

SEQ ID NO: 56773 - DNA, 20 bp, Artificial Sequence
  MKO10056773_A_Tyro3
  gRNA
ccagccattgttcgccttca

SEQ ID NO: 56774 - DNA, 20 bp, Artificial Sequence
  MKO10056774_A_Tyrobp
  gRNA
cttaggattaagtcccgtac

SEQ ID NO: 56775 - DNA, 20 bp, Artificial Sequence
  MKO10056775_A_Tyrobp
  gRNA
acggaagaacagtcgcatct

SEQ ID NO: 56776 - DNA, 20 bp, Artificial Sequence
  MKO10056776_A_Tyrobp
  gRNA
tgtgtactctctgggccgcc

SEQ ID NO: 56777 - DNA, 20 bp, Artificial Sequence
  MKO10056777_A_Tyrp1
  gRNA
tgtgcgcttcgccatatcca

SEQ ID NO: 56778 - DNA, 20 bp, Artificial Sequence
  MKO10056778_A_Tyrp1
  gRNA
tgttcgaagccttcacaacc

SEQ ID NO: 56779 - DNA, 20 bp, Artificial Sequence
  MKO10056779_A_Tyrp1
  gRNA
tctttgacgaatggctaagg

SEQ ID NO: 56780 - DNA, 20 bp, Artificial Sequence
  MKO10056780_A_Tyr
  gRNA
tttccaggattacgtaatag

SEQ ID NO: 56781 - DNA, 20 bp, Artificial Sequence
  MKO10056781_A_Tyr
  gRNA
ccgataggtgcattggcttc

SEQ ID NO: 56782 - DNA, 20 bp, Artificial Sequence
  MKO10056782_A_Tyr
  gRNA
ttcataccgctctatagaaa

SEQ ID NO: 56783 - DNA, 20 bp, Artificial Sequence
  MKO10056783_A_Tysnd1
  gRNA
gggccgatgcggtcgatcaa

SEQ ID NO: 56784 - DNA, 20 bp, Artificial Sequence
  MKO10056784_A_Tysnd1
  gRNA
agtggtcgtggcgcctcgcc

SEQ ID NO: 56785 - DNA, 20 bp, Artificial Sequence
  MKO10056785_A_Tysnd1
  gRNA
cctgtcggccgtggtgcgtg

SEQ ID NO: 56786 - DNA, 20 bp, Artificial Sequence
  MKO10056786_A_Tyw1
  gRNA
cgtccgtgtacgtagcgacc

SEQ ID NO: 56787 - DNA, 20 bp, Artificial Sequence
  MKO10056787_A_Tyw1
  gRNA
tcagctaatgatttccgctt

SEQ ID NO: 56788 - DNA, 20 bp, Artificial Sequence
  MKO10056788_A_Tyw1
  gRNA
cttcaaggtcactcgttccc

SEQ ID NO: 56789 - DNA, 20 bp, Artificial Sequence
  MKO10056789_A_Tyw3
  gRNA
ctcgctcatggaccgtagcg

SEQ ID NO: 56790 - DNA, 20 bp, Artificial Sequence
  MKO10056790_A_Tyw3
  gRNA
aaaactcttcccgcgagttc

SEQ ID NO: 56791 - DNA, 20 bp, Artificial Sequence
  MKO10056791_A_Tyw3
  gRNA
accgtgtgcgagagacgatg

SEQ ID NO: 56792 - DNA, 20 bp, Artificial Sequence
  MKO10056792_A_Tyw5
  gRNA
cccggctgcggggcgtctcc

SEQ ID NO: 56793 - DNA, 20 bp, Artificial Sequence
  MKO10056793_A_Tyw5
  gRNA
gtggattacctgagtcaagt

SEQ ID NO: 56794 - DNA, 20 bp, Artificial Sequence
  MKO10056794_A_Tyw5
  gRNA
acgccccgcagccggggtac

SEQ ID NO: 56795 - DNA, 20 bp, Artificial Sequence
  MKO10056795_A_T
  gRNA
actctcacgatgtgaatccg

SEQ ID NO: 56796 - DNA, 20 bp, Artificial Sequence
  MKO10056796_A_T
  gRNA
tggctggtgatcatgcgttg

SEQ ID NO: 56797 - DNA, 20 bp, Artificial Sequence
  MKO10056797_A_T
  gRNA
cacccagactcgcccaattt

SEQ ID NO: 56798 - DNA, 20 bp, Artificial Sequence
  MKO10056798_A_U2af1l4
  gRNA
tccaggtcacgtgagcgacg

SEQ ID NO: 56799 - DNA, 20 bp, Artificial Sequence
  MKO10056799_A_U2af1l4
  gRNA
cgtgggcaatgtctacgtta

SEQ ID NO: 56800 - DNA, 20 bp, Artificial Sequence
  MKO10056800_A_U2af1l4
  gRNA
caacaaaccgactttcagcc

SEQ ID NO: 56801 - DNA, 20 bp, Artificial Sequence
  MKO10056801_A_U2af1
  gRNA
tgcaggtgctgtgagcgacg

SEQ ID NO: 56802 - DNA, 20 bp, Artificial Sequence
  MKO10056802_A_U2af1
  gRNA
ggtggggaacgtgtatgtca

SEQ ID NO: 56803 - DNA, 20 bp, Artificial Sequence
  MKO10056803_A_U2af1
  gRNA
acacaaacctggctaaaggt

SEQ ID NO: 56804 - DNA, 20 bp, Artificial Sequence
  MKO10056804_A_U2af2
  gRNA
tcgtcgtctcctatcccgag

SEQ ID NO: 56805 - DNA, 20 bp, Artificial Sequence
  MKO10056805_A_U2af2
  gRNA
agtacctcagtaatgccaaa

SEQ ID NO: 56806 - DNA, 20 bp, Artificial Sequence
  MKO10056806_A_U2af2
  gRNA
tgctcctgcgctttcgatct

SEQ ID NO: 56807 - DNA, 20 bp, Artificial Sequence
  MKO10056807_A_U2surp
  gRNA
aagatggccgacaaaacgcc

SEQ ID NO: 56808 - DNA, 20 bp, Artificial Sequence
  MKO10056808_A_U2surp
  gRNA
ggggttgttaatgcagctaa

SEQ ID NO: 56809 - DNA, 20 bp, Artificial Sequence
  MKO10056809_A_U2surp
  gRNA
aaagtgaaaacgtttgttcg

SEQ ID NO: 56810 - DNA, 20 bp, Artificial Sequence
  MKO10056810_A_Uaca
  gRNA
ttcattcagcttccacgtcg

SEQ ID NO: 56811 - DNA, 20 bp, Artificial Sequence
  MKO10056811_A_Uaca
  gRNA
gtacgatgaccggttgatga

SEQ ID NO: 56812 - DNA, 20 bp, Artificial Sequence
  MKO10056812_A_Uaca
  gRNA
ccatcccggcaagctagatg

SEQ ID NO: 56813 - DNA, 20 bp, Artificial Sequence
  MKO10056813_A_Uap1l1
  gRNA
ctcgaacagcactacgttag

SEQ ID NO: 56814 - DNA, 20 bp, Artificial Sequence
  MKO10056814_A_Uap1l1
  gRNA
gtactgcgtagacaacatct

SEQ ID NO: 56815 - DNA, 20 bp, Artificial Sequence
  MKO10056815_A_Uap1l1
  gRNA
cctgggcgtcacatacccaa

SEQ ID NO: 56816 - DNA, 20 bp, Artificial Sequence
  MKO10056816_A_Uap1
  gRNA
tggtaaaagtggctgacccg

SEQ ID NO: 56817 - DNA, 20 bp, Artificial Sequence
  MKO10056817_A_Uap1
  gRNA
acccggcaaaccactccaac

SEQ ID NO: 56818 - DNA, 20 bp, Artificial Sequence
  MKO10056818_A_Uap1
  gRNA
gaatctgaaaaagcgtcttg

SEQ ID NO: 56819 - DNA, 20 bp, Artificial Sequence
  MKO10056819_A_Uba1y
  gRNA
ttcatagttctgcctacgtg

SEQ ID NO: 56820 - DNA, 20 bp, Artificial Sequence
  MKO10056820_A_Uba1y
  gRNA
gtggttgggatatctcagct

SEQ ID NO: 56821 - DNA, 20 bp, Artificial Sequence
  MKO10056821_A_Uba1y
  gRNA
ctcacagctggcgggagtaa

SEQ ID NO: 56822 - DNA, 20 bp, Artificial Sequence
  MKO10056822_A_Uba1
  gRNA
ggggagttctgtcatagccg

SEQ ID NO: 56823 - DNA, 20 bp, Artificial Sequence
  MKO10056823_A_Uba1
  gRNA
agaactcccccactcgcagc

SEQ ID NO: 56824 - DNA, 20 bp, Artificial Sequence
  MKO10056824_A_Uba1
  gRNA
caagtacctggaagctacta

SEQ ID NO: 56825 - DNA, 20 bp, Artificial Sequence
  MKO10056825_A_Uba2
  gRNA
tcgatgtcagcaacctcaac

SEQ ID NO: 56826 - DNA, 20 bp, Artificial Sequence
  MKO10056826_A_Uba2
  gRNA
ccagacacatcctattcacg

SEQ ID NO: 56827 - DNA, 20 bp, Artificial Sequence
  MKO10056827_A_Uba2
  gRNA
gactgctgggtatctcggac

SEQ ID NO: 56828 - DNA, 20 bp, Artificial Sequence
  MKO10056828_A_Uba3
  gRNA
gaacaatatggcggatggcg

SEQ ID NO: 56829 - DNA, 20 bp, Artificial Sequence
  MKO10056829_A_Uba3
  gRNA
atgtaaagaagttcctcgag

SEQ ID NO: 56830 - DNA, 20 bp, Artificial Sequence
  MKO10056830_A_Uba3
  gRNA
ctgtgcagaatggctgttga

SEQ ID NO: 56831 - DNA, 20 bp, Artificial Sequence
  MKO10056831_A_Uba52
  gRNA
tccgactacaacatccagaa

SEQ ID NO: 56832 - DNA, 20 bp, Artificial Sequence
  MKO10056832_A_Uba52
  gRNA
acagcccaccttccttgtct

SEQ ID NO: 56833 - DNA, 20 bp, Artificial Sequence
  MKO10056833_A_Uba52
  gRNA
cccagagtccaccttgcacc

SEQ ID NO: 56834 - DNA, 20 bp, Artificial Sequence
  MKO10056834_A_Uba5
  gRNA
acctacgctgtagcaatagt

SEQ ID NO: 56835 - DNA, 20 bp, Artificial Sequence
  MKO10056835_A_Uba5
  gRNA
acctactattgctacagcgt

SEQ ID NO: 56836 - DNA, 20 bp, Artificial Sequence
  MKO10056836_A_Uba5
  gRNA
gaagaaaagccgattcatgt

SEQ ID NO: 56837 - DNA, 20 bp, Artificial Sequence
  MKO10056837_A_Uba6
  gRNA
aaatcgatgatggattatac

SEQ ID NO: 56838 - DNA, 20 bp, Artificial Sequence
  MKO10056838_A_Uba6
  gRNA
agtcgccagagatatgttct

SEQ ID NO: 56839 - DNA, 20 bp, Artificial Sequence
  MKO10056839_A_Uba6
  gRNA
aagtcctgtgtcttcttaag

SEQ ID NO: 56840 - DNA, 20 bp, Artificial Sequence
  MKO10056840_A_Uba7
  gRNA
ctgagccaattgcgcctgag

SEQ ID NO: 56841 - DNA, 20 bp, Artificial Sequence
  MKO10056841_A_Uba7
  gRNA
ggtgctgactgactccaagc

SEQ ID NO: 56842 - DNA, 20 bp, Artificial Sequence
  MKO10056842_A_Uba7
  gRNA
gccaagaacctagtccttac

SEQ ID NO: 56843 - DNA, 20 bp, Artificial Sequence
  MKO10056843_A_Ubac1
  gRNA
ggtactcacgtctctcatgg

SEQ ID NO: 56844 - DNA, 20 bp, Artificial Sequence
  MKO10056844_A_Ubac1
  gRNA
gagtgacagcaaaacgatct

SEQ ID NO: 56845 - DNA, 20 bp, Artificial Sequence
  MKO10056845_A_Ubac1
  gRNA
taatacatgctgcttcagag

SEQ ID NO: 56846 - DNA, 20 bp, Artificial Sequence
  MKO10056846_A_Ubac2
  gRNA
tgctgtcaagcacgacttgc

SEQ ID NO: 56847 - DNA, 20 bp, Artificial Sequence
  MKO10056847_A_Ubac2
  gRNA
gtattcgcttggtgtcacag

SEQ ID NO: 56848 - DNA, 20 bp, Artificial Sequence
  MKO10056848_A_Ubac2
  gRNA
gacaccaagcgaatactgca

SEQ ID NO: 56849 - DNA, 20 bp, Artificial Sequence
  MKO10056849_A_Ubald1
  gRNA
gatcaaccagttcgtgctga

SEQ ID NO: 56850 - DNA, 20 bp, Artificial Sequence
  MKO10056850_A_Ubald1
  gRNA
tacgcacctcgaactgccag

SEQ ID NO: 56851 - DNA, 20 bp, Artificial Sequence
  MKO10056851_A_Ubald1
  gRNA
ggacacttaccatctggtgg

SEQ ID NO: 56852 - DNA, 20 bp, Artificial Sequence
  MKO10056852_A_Ubald2
  gRNA
gaacacttaccatctgcggg

SEQ ID NO: 56853 - DNA, 20 bp, Artificial Sequence
  MKO10056853_A_Ubald2
  gRNA
cagccaccaccacccgcaga

SEQ ID NO: 56854 - DNA, 20 bp, Artificial Sequence
  MKO10056854_A_Ubald2
  gRNA
ccccccggagcatcgcaggg

SEQ ID NO: 56855 - DNA, 20 bp, Artificial Sequence
  MKO10056855_A_Ubap1
  gRNA
tgctgacttcgagtgtgaag

SEQ ID NO: 56856 - DNA, 20 bp, Artificial Sequence
  MKO10056856_A_Ubap1
  gRNA
tcttcacactcgaagtcagc

SEQ ID NO: 56857 - DNA, 20 bp, Artificial Sequence
  MKO10056857_A_Ubap1
  gRNA
tctacacattgccgctcact

SEQ ID NO: 56858 - DNA, 20 bp, Artificial Sequence
  MKO10056858_A_Ubap2l
  gRNA
ctggcacctctcccccgtct

SEQ ID NO: 56859 - DNA, 20 bp, Artificial Sequence
  MKO10056859_A_Ubap2l
  gRNA
ctaaccgagcccggggaaac

SEQ ID NO: 56860 - DNA, 20 bp, Artificial Sequence
  MKO10056860_A_Ubap2l
  gRNA
gccgactatagtctctgtcc

SEQ ID NO: 56861 - DNA, 20 bp, Artificial Sequence
  MKO10056861_A_Ubap2
  gRNA
acggggaaccaacaaccgca

SEQ ID NO: 56862 - DNA, 20 bp, Artificial Sequence
  MKO10056862_A_Ubap2
  gRNA
acggagagagaagcgagtcg

SEQ ID NO: 56863 - DNA, 20 bp, Artificial Sequence
  MKO10056863_A_Ubap2
  gRNA
aaatcaggatgaatgcatcg

SEQ ID NO: 56864 - DNA, 20 bp, Artificial Sequence
  MKO10056864_A_Ubash3a
  gRNA
acagccccgctgacgccatc

SEQ ID NO: 56865 - DNA, 20 bp, Artificial Sequence
  MKO10056865_A_Ubash3a
  gRNA
caaacgccatggcgaattcc

SEQ ID NO: 56866 - DNA, 20 bp, Artificial Sequence
  MKO10056866_A_Ubash3a
  gRNA
ttaccagtctgctgccgcct

SEQ ID NO: 56867 - DNA, 20 bp, Artificial Sequence
  MKO10056867_A_Ubash3b
  gRNA
atcgactgacagtagtctgc

SEQ ID NO: 56868 - DNA, 20 bp, Artificial Sequence
  MKO10056868_A_Ubash3b
  gRNA
agtcagccgcgaacttcttg

SEQ ID NO: 56869 - DNA, 20 bp, Artificial Sequence
  MKO10056869_A_Ubash3b
  gRNA
ctagcttgacgtcaatgttc

SEQ ID NO: 56870 - DNA, 20 bp, Artificial Sequence
  MKO10056870_A_Ubb
  gRNA
caagaccatcaccttggagg

SEQ ID NO: 56871 - DNA, 20 bp, Artificial Sequence
  MKO10056871_A_Ubb
  gRNA
tgacaccatcgagaatgtga

SEQ ID NO: 56872 - DNA, 20 bp, Artificial Sequence
  MKO10056872_A_Ubb
  gRNA
attaatagccacccctcaga

SEQ ID NO: 56873 - DNA, 20 bp, Artificial Sequence
  MKO10056873_A_Ubc
  gRNA
atctttgtgaaaaccttaac

SEQ ID NO: 56874 - DNA, 20 bp, Artificial Sequence
  MKO10056874_A_Ubc
  gRNA
gccctccttgtgcttgttct

SEQ ID NO: 56875 - DNA, 20 bp, Artificial Sequence
  MKO10056875_A_Ubc
  gRNA
gcccagtgttaccaccaaga

SEQ ID NO: 56876 - DNA, 20 bp, Artificial Sequence
  MKO10056876_A_Ubd
  gRNA
catcgaaaattgtcatccta

SEQ ID NO: 56877 - DNA, 20 bp, Artificial Sequence
  MKO10056877_A_Ubd
  gRNA
aggttgtccgttcagaccaa

SEQ ID NO: 56878 - DNA, 20 bp, Artificial Sequence
  MKO10056878_A_Ubd
  gRNA
ctgagctggatcttcgaact

SEQ ID NO: 56879 - DNA, 20 bp, Artificial Sequence
  MKO10056879_A_Ube2a
  gRNA
accattatgttgttctccga

SEQ ID NO: 56880 - DNA, 20 bp, Artificial Sequence
  MKO10056880_A_Ube2a
  gRNA
gcccgaagggaccccgtttg

SEQ ID NO: 56881 - DNA, 20 bp, Artificial Sequence
  MKO10056881_A_Ube2a
  gRNA
tggatatacttcagaaccgt

SEQ ID NO: 56882 - DNA, 20 bp, Artificial Sequence
  MKO10056882_A_Ube2b
  gRNA
gcgccactgacccccacagg

SEQ ID NO: 56883 - DNA, 20 bp, Artificial Sequence
  MKO10056883_A_Ube2b
  gRNA
tagatatcctgcagaatcga

SEQ ID NO: 56884 - DNA, 20 bp, Artificial Sequence
  MKO10056884_A_Ube2b
  gRNA
ctaacggttggtggtttatt

SEQ ID NO: 56885 - DNA, 20 bp, Artificial Sequence
  MKO10056885_A_Ube2cbp
  gRNA
accgagatccgacttccagc

SEQ ID NO: 56886 - DNA, 20 bp, Artificial Sequence
  MKO10056886_A_Ube2cbp
  gRNA
ctgcagtatatcagtggcga

SEQ ID NO: 56887 - DNA, 20 bp, Artificial Sequence
  MKO10056887_A_Ube2cbp
  gRNA
agtcatttgtaagcgttgca

SEQ ID NO: 56888 - DNA, 20 bp, Artificial Sequence
  MKO10056888_A_Ube2c
  gRNA
ttacggtgccggctgctccg

SEQ ID NO: 56889 - DNA, 20 bp, Artificial Sequence
  MKO10056889_A_Ube2c
  gRNA
agttacctcctagcaggctc

SEQ ID NO: 56890 - DNA, 20 bp, Artificial Sequence
  MKO10056890_A_Ube2c
  gRNA
tggtccccacccacttgaac

SEQ ID NO: 56891 - DNA, 20 bp, Artificial Sequence
  MKO10056891_A_Ube2d1
  gRNA
tgtacttacgggccccatga

SEQ ID NO: 56892 - DNA, 20 bp, Artificial Sequence
  MKO10056892_A_Ube2d1
  gRNA
cccgctttgactgtatcgaa

SEQ ID NO: 56893 - DNA, 20 bp, Artificial Sequence
  MKO10056893_A_Ube2d1
  gRNA
ccaccttgataggcgctgtc

SEQ ID NO: 56894 - DNA, 20 bp, Artificial Sequence
  MKO10056894_A_Ube2d2a
  gRNA
atttaccttaggcggtttga

SEQ ID NO: 56895 - DNA, 20 bp, Artificial Sequence
  MKO10056895_A_Ube2d2a
  gRNA
ccagcactaactatttcaaa

SEQ ID NO: 56896 - DNA, 20 bp, Artificial Sequence
  MKO10056896_A_Ube2d2a
  gRNA
acagaatgacagcccctatc

SEQ ID NO: 56897 - DNA, 20 bp, Artificial Sequence
  MKO10056897_A_Ube2d2b
  gRNA
tcggtctgtgataccgctac

SEQ ID NO: 56898 - DNA, 20 bp, Artificial Sequence
  MKO10056898_A_Ube2d2b
  gRNA
ctggagaacgctcgtctgct

SEQ ID NO: 56899 - DNA, 20 bp, Artificial Sequence
  MKO10056899_A_Ube2d2b
  gRNA
acaaaaatagattggcgcta

SEQ ID NO: 56900 - DNA, 20 bp, Artificial Sequence
  MKO10056900_A_Ube2d3
  gRNA
acttacaggtcccataattg

SEQ ID NO: 56901 - DNA, 20 bp, Artificial Sequence
  MKO10056901_A_Ube2d3
  gRNA
ggtttaggaacttagtgatt

SEQ ID NO: 56902 - DNA, 20 bp, Artificial Sequence
  MKO10056902_A_Ube2d3
  gRNA
acttgccttaggtggtttga

SEQ ID NO: 56903 - DNA, 20 bp, Artificial Sequence
  MKO10056903_A_Ube2dnl1
  gRNA
gggaatccttgtagccctac

SEQ ID NO: 56904 - DNA, 20 bp, Artificial Sequence
  MKO10056904_A_Ube2dnl1
  gRNA
gaaggctgttatgcagttgc

SEQ ID NO: 56905 - DNA, 20 bp, Artificial Sequence
  MKO10056905_A_Ube2dnl1
  gRNA
tcgggttatgaacgaaactt

SEQ ID NO: 56906 - DNA, 20 bp, Artificial Sequence
  MKO10056906_A_Ube2dnl2
  gRNA
aattgcaaaggtctaccgca

SEQ ID NO: 56907 - DNA, 20 bp, Artificial Sequence
  MKO10056907_A_Ube2dnl2
  gRNA
tcgggttatgaacgtaactt

SEQ ID NO: 56908 - DNA, 20 bp, Artificial Sequence
  MKO10056908_A_Ube2dnl2
  gRNA
gaagatggatcaatctactt

SEQ ID NO: 56909 - DNA, 20 bp, Artificial Sequence
  MKO10056909_A_Ube2e1
  gRNA
tagaccctccgccaaactgc

SEQ ID NO: 56910 - DNA, 20 bp, Artificial Sequence
  MKO10056910_A_Ube2e1
  gRNA
ctccttacagactgcaatcc

SEQ ID NO: 56911 - DNA, 20 bp, Artificial Sequence
  MKO10056911_A_Ube2e1
  gRNA
gcagcttacctgcagtttgg

SEQ ID NO: 56912 - DNA, 20 bp, Artificial Sequence
  MKO10056912_A_Ube2e2
  gRNA
cccctaggtggcgtaccgct

SEQ ID NO: 56913 - DNA, 20 bp, Artificial Sequence
  MKO10056913_A_Ube2e2
  gRNA
accaagcggtacgccaccta

SEQ ID NO: 56914 - DNA, 20 bp, Artificial Sequence
  MKO10056914_A_Ube2e2
  gRNA
ttatccgtttaaacccccta

SEQ ID NO: 56915 - DNA, 20 bp, Artificial Sequence
  MKO10056915_A_Ube2e3
  gRNA
gtggctatgcttccgaccag

SEQ ID NO: 56916 - DNA, 20 bp, Artificial Sequence
  MKO10056916_A_Ube2e3
  gRNA
ttaaatagtgctgggcctaa

SEQ ID NO: 56917 - DNA, 20 bp, Artificial Sequence
  MKO10056917_A_Ube2e3
  gRNA
gatgttgcagtgatagattc

SEQ ID NO: 56918 - DNA, 20 bp, Artificial Sequence
  MKO10056918_A_Ube2f
  gRNA
gctactcaccaccatgttgt

SEQ ID NO: 56919 - DNA, 20 bp, Artificial Sequence
  MKO10056919_A_Ube2f
  gRNA
aatagatgagggttactacc

SEQ ID NO: 56920 - DNA, 20 bp, Artificial Sequence
  MKO10056920_A_Ube2f
  gRNA
tttcagctgactgtaagccc

SEQ ID NO: 56921 - DNA, 20 bp, Artificial Sequence
  MKO10056921_A_Ube2g1
  gRNA
acgacaatgatctctatcgt

SEQ ID NO: 56922 - DNA, 20 bp, Artificial Sequence
  MKO10056922_A_Ube2g1
  gRNA
ataggtaaccagcgttcctc

SEQ ID NO: 56923 - DNA, 20 bp, Artificial Sequence
  MKO10056923_A_Ube2g1
  gRNA
ctggttacctatccatactg

SEQ ID NO: 56924 - DNA, 20 bp, Artificial Sequence
  MKO10056924_A_Ube2g2
  gRNA
gctttctgttgtgagcatgc

SEQ ID NO: 56925 - DNA, 20 bp, Artificial Sequence
  MKO10056925_A_Ube2g2
  gRNA
gagatgcagactctgccatc

SEQ ID NO: 56926 - DNA, 20 bp, Artificial Sequence
  MKO10056926_A_Ube2g2
  gRNA
tctcatcttcggagggctca

SEQ ID NO: 56927 - DNA, 20 bp, Artificial Sequence
  MKO10056927_A_Ube2h
  gRNA
tctgttacagcaccatatga

SEQ ID NO: 56928 - DNA, 20 bp, Artificial Sequence
  MKO10056928_A_Ube2h
  gRNA
gagtacaagcagaaaattaa

SEQ ID NO: 56929 - DNA, 20 bp, Artificial Sequence
  MKO10056929_A_Ube2h
  gRNA
cagcattgaaagcaaacatg

SEQ ID NO: 56930 - DNA, 20 bp, Artificial Sequence
  MKO10056930_A_Ube2i
  gRNA
gccagctatcaccatcaaac

SEQ ID NO: 56931 - DNA, 20 bp, Artificial Sequence
  MKO10056931_A_Ube2i
  gRNA
tactaaccagtaaattgtgt

SEQ ID NO: 56932 - DNA, 20 bp, Artificial Sequence
  MKO10056932_A_Ube2i
  gRNA
tccccacagactccatggga

SEQ ID NO: 56933 - DNA, 20 bp, Artificial Sequence
  MKO10056933_A_Ube2j1
  gRNA
agtcggcataaacccgatga

SEQ ID NO: 56934 - DNA, 20 bp, Artificial Sequence
  MKO10056934_A_Ube2j1
  gRNA
atcgggtttatgccgactaa

SEQ ID NO: 56935 - DNA, 20 bp, Artificial Sequence
  MKO10056935_A_Ube2j1
  gRNA
ttctttcatcaatcgcttaa

SEQ ID NO: 56936 - DNA, 20 bp, Artificial Sequence
  MKO10056936_A_Ube2j2
  gRNA
gttaggcattatgttgtccg

SEQ ID NO: 56937 - DNA, 20 bp, Artificial Sequence
  MKO10056937_A_Ube2j2
  gRNA
ccgacgtctctatgctcccc

SEQ ID NO: 56938 - DNA, 20 bp, Artificial Sequence
  MKO10056938_A_Ube2j2
  gRNA
ggtgtaggtggctattatca

SEQ ID NO: 56939 - DNA, 20 bp, Artificial Sequence
  MKO10056939_A_Ube2k
  gRNA
cctaatattagttccgtcac

SEQ ID NO: 56940 - DNA, 20 bp, Artificial Sequence
  MKO10056940_A_Ube2k
  gRNA
ttgccttcatacggtgtgtc

SEQ ID NO: 56941 - DNA, 20 bp, Artificial Sequence
  MKO10056941_A_Ube2k
  gRNA
agatgcagtagtagcgaatc

SEQ ID NO: 56942 - DNA, 20 bp, Artificial Sequence
  MKO10056942_A_Ube2l3
  gRNA
cctctcaccttggtcagtct

SEQ ID NO: 56943 - DNA, 20 bp, Artificial Sequence
  MKO10056943_A_Ube2l3
  gRNA
ccagccaccaagactgacca

SEQ ID NO: 56944 - DNA, 20 bp, Artificial Sequence
  MKO10056944_A_Ube2l3
  gRNA
taccttcatcagcctcctgc

SEQ ID NO: 56945 - DNA, 20 bp, Artificial Sequence
  MKO10056945_A_Ube2l6
  gRNA
cgtcactagacagttggcga

SEQ ID NO: 56946 - DNA, 20 bp, Artificial Sequence
  MKO10056946_A_Ube2l6
  gRNA
tactttcgccactcgcttgc

SEQ ID NO: 56947 - DNA, 20 bp, Artificial Sequence
  MKO10056947_A_Ube2l6
  gRNA
cgccctaccttgataaggct

SEQ ID NO: 56948 - DNA, 20 bp, Artificial Sequence
  MKO10056948_A_Ube2m
  gRNA
tttcaggcagcgctcgaagt

SEQ ID NO: 56949 - DNA, 20 bp, Artificial Sequence
  MKO10056949_A_Ube2m
  gRNA
tcatcccaacattgacctcg

SEQ ID NO: 56950 - DNA, 20 bp, Artificial Sequence
  MKO10056950_A_Ube2m
  gRNA
gttgccctcgaggtcaatgt

SEQ ID NO: 56951 - DNA, 20 bp, Artificial Sequence
  MKO10056951_A_Ube2n
  gRNA
gaagcccaagccatagaaac

SEQ ID NO: 56952 - DNA, 20 bp, Artificial Sequence
  MKO10056952_A_Ube2n
  gRNA
cggttaccttgatgatcctg

SEQ ID NO: 56953 - DNA, 20 bp, Artificial Sequence
  MKO10056953_A_Ube2n
  gRNA
ctacagcgagagcatggact

SEQ ID NO: 56954 - DNA, 20 bp, Artificial Sequence
  MKO10056954_A_Ube2o
  gRNA
actatatcgcctatgactgc

SEQ ID NO: 56955 - DNA, 20 bp, Artificial Sequence
  MKO10056955_A_Ube2o
  gRNA
tgtaccgagtcgctgacgtg

SEQ ID NO: 56956 - DNA, 20 bp, Artificial Sequence
  MKO10056956_A_Ube2o
  gRNA
ctgccctcacgtcagcgact

SEQ ID NO: 56957 - DNA, 20 bp, Artificial Sequence
  MKO10056957_A_Ube2q1
  gRNA
atcggactccaccgaccaga

SEQ ID NO: 56958 - DNA, 20 bp, Artificial Sequence
  MKO10056958_A_Ube2q1
  gRNA
catttaagtaatcttgcctc

SEQ ID NO: 56959 - DNA, 20 bp, Artificial Sequence
  MKO10056959_A_Ube2q1
  gRNA
ggaggttgtagagtttacac

SEQ ID NO: 56960 - DNA, 20 bp, Artificial Sequence
  MKO10056960_A_Ube2q2
  gRNA
gtttactttacctgacccgt

SEQ ID NO: 56961 - DNA, 20 bp, Artificial Sequence
  MKO10056961_A_Ube2q2
  gRNA
gctagatcaaccactaccca

SEQ ID NO: 56962 - DNA, 20 bp, Artificial Sequence
  MKO10056962_A_Ube2q2
  gRNA
agatactaagaacaacagtt

SEQ ID NO: 56963 - DNA, 20 bp, Artificial Sequence
  MKO10056963_A_Ube2ql1
  gRNA
cgcgcagcgatgcgctctgc

SEQ ID NO: 56964 - DNA, 20 bp, Artificial Sequence
  MKO10056964_A_Ube2ql1
  gRNA
gccacgctgctccgtaaaat

SEQ ID NO: 56965 - DNA, 20 bp, Artificial Sequence
  MKO10056965_A_Ube2ql1
  gRNA
aaaaaagtccttcagccgca

SEQ ID NO: 56966 - DNA, 20 bp, Artificial Sequence
  MKO10056966_A_Ube2r2
  gRNA
ggaaccctactcagaacgtt

SEQ ID NO: 56967 - DNA, 20 bp, Artificial Sequence
  MKO10056967_A_Ube2r2
  gRNA
cctgtagatgacccgcagag

SEQ ID NO: 56968 - DNA, 20 bp, Artificial Sequence
  MKO10056968_A_Ube2r2
  gRNA
gcagtgagatcacacttaac

SEQ ID NO: 56969 - DNA, 20 bp, Artificial Sequence
  MKO10056969_A_Ube2s
  gRNA
gggcatacgacatgtgctgc

SEQ ID NO: 56970 - DNA, 20 bp, Artificial Sequence
  MKO10056970_A_Ube2s
  gRNA
acactcaccagggccctcga

SEQ ID NO: 56971 - DNA, 20 bp, Artificial Sequence
  MKO10056971_A_Ube2s
  gRNA
ccgtgcctagaactccaatg

SEQ ID NO: 56972 - DNA, 20 bp, Artificial Sequence
  MKO10056972_A_Ube2t
  gRNA
gctaatacaccttatgagaa

SEQ ID NO: 56973 - DNA, 20 bp, Artificial Sequence
  MKO10056973_A_Ube2t
  gRNA
cgtacaatgtcagccattag

SEQ ID NO: 56974 - DNA, 20 bp, Artificial Sequence
  MKO10056974_A_Ube2t
  gRNA
caatcctgatgacccactaa

SEQ ID NO: 56975 - DNA, 20 bp, Artificial Sequence
  MKO10056975_A_Ube2u
  gRNA
aatacagtagacccatatac

SEQ ID NO: 56976 - DNA, 20 bp, Artificial Sequence
  MKO10056976_A_Ube2u
  gRNA
cttgtccaaaaagtctatac

SEQ ID NO: 56977 - DNA, 20 bp, Artificial Sequence
  MKO10056977_A_Ube2u
  gRNA
aaatgcgtctacgtataaaa

SEQ ID NO: 56978 - DNA, 20 bp, Artificial Sequence
  MKO10056978_A_Ube2v1
  gRNA
cccccgctcacccgagcctg

SEQ ID NO: 56979 - DNA, 20 bp, Artificial Sequence
  MKO10056979_A_Ube2v1
  gRNA
gcaggtggatccgagagcca

SEQ ID NO: 56980 - DNA, 20 bp, Artificial Sequence
  MKO10056980_A_Ube2v1
  gRNA
cgcaagatggcagccaccac

SEQ ID NO: 56981 - DNA, 20 bp, Artificial Sequence
  MKO10056981_A_Ube2v2
  gRNA
tcctctctcaggtggatgca

SEQ ID NO: 56982 - DNA, 20 bp, Artificial Sequence
  MKO10056982_A_Ube2v2
  gRNA
gagaagatggcggtctccac

SEQ ID NO: 56983 - DNA, 20 bp, Artificial Sequence
  MKO10056983_A_Ube2v2
  gRNA
tcatgtcttcatcatcttca

SEQ ID NO: 56984 - DNA, 20 bp, Artificial Sequence
  MKO10056984_A_Ube2w
  gRNA
ccttaggtggatcgtagaca

SEQ ID NO: 56985 - DNA, 20 bp, Artificial Sequence
  MKO10056985_A_Ube2w
  gRNA
gttacatgttcgcacataaa

SEQ ID NO: 56986 - DNA, 20 bp, Artificial Sequence
  MKO10056986_A_Ube2w
  gRNA
gcaccaggaaccttatatga

SEQ ID NO: 56987 - DNA, 20 bp, Artificial Sequence
  MKO10056987_A_Ube2z
  gRNA
gacacataccgtaggggttc

SEQ ID NO: 56988 - DNA, 20 bp, Artificial Sequence
  MKO10056988_A_Ube2z
  gRNA
gttgtcatcagtttgacccg

SEQ ID NO: 56989 - DNA, 20 bp, Artificial Sequence
  MKO10056989_A_Ube2z
  gRNA
tgtgtttgcagtacgtggac

SEQ ID NO: 56990 - DNA, 20 bp, Artificial Sequence
  MKO10056990_A_Ube3a
  gRNA
ctcctgaagtgttaattcgc

SEQ ID NO: 56991 - DNA, 20 bp, Artificial Sequence
  MKO10056991_A_Ube3a
  gRNA
agcacaaaactcattcgtgc

SEQ ID NO: 56992 - DNA, 20 bp, Artificial Sequence
  MKO10056992_A_Ube3a
  gRNA
gatccactagaaaccgaact

SEQ ID NO: 56993 - DNA, 20 bp, Artificial Sequence
  MKO10056993_A_Ube3b
  gRNA
gtaggtgtggtacgtgtccc

SEQ ID NO: 56994 - DNA, 20 bp, Artificial Sequence
  MKO10056994_A_Ube3b
  gRNA
ccaaggacctcacgctgctg

SEQ ID NO: 56995 - DNA, 20 bp, Artificial Sequence
  MKO10056995_A_Ube3b
  gRNA
gaggtacagcgtgatgagcc

SEQ ID NO: 56996 - DNA, 20 bp, Artificial Sequence
  MKO10056996_A_Ube3c
  gRNA
ccaaccttaccctcttggta

SEQ ID NO: 56997 - DNA, 20 bp, Artificial Sequence
  MKO10056997_A_Ube3c
  gRNA
gtttgaccaatgcactgact

SEQ ID NO: 56998 - DNA, 20 bp, Artificial Sequence
  MKO10056998_A_Ube3c
  gRNA
acacaacttacctgcaacag

SEQ ID NO: 56999 - DNA, 20 bp, Artificial Sequence
  MKO10056999_A_Ube4a
  gRNA
acactattatccgagtcatc

SEQ ID NO: 57000 - DNA, 20 bp, Artificial Sequence
  MKO10057000_A_Ube4a
  gRNA
ggtgatccaagcttgaaaag

SEQ ID NO: 57001 - DNA, 20 bp, Artificial Sequence
  MKO10057001_A_Ube4a
  gRNA
gaggagaactgttcgagtgt

SEQ ID NO: 57002 - DNA, 20 bp, Artificial Sequence
  MKO10057002_A_Ube4b
  gRNA
ctcttctgtagattcgacgg

SEQ ID NO: 57003 - DNA, 20 bp, Artificial Sequence
  MKO10057003_A_Ube4b
  gRNA
gtccaccagcaagtcgtgcc

SEQ ID NO: 57004 - DNA, 20 bp, Artificial Sequence
  MKO10057004_A_Ube4b
  gRNA
aactgacgccttcgctgctc

SEQ ID NO: 57005 - DNA, 20 bp, Artificial Sequence
  MKO10057005_A_Ubfd1
  gRNA
agggaccttcacgtcgtgtt

SEQ ID NO: 57006 - DNA, 20 bp, Artificial Sequence
  MKO10057006_A_Ubfd1
  gRNA
cttcggcctccacgcagttg

SEQ ID NO: 57007 - DNA, 20 bp, Artificial Sequence
  MKO10057007_A_Ubfd1
  gRNA
ctttagtgccgatccacagc

SEQ ID NO: 57008 - DNA, 20 bp, Artificial Sequence
  MKO10057008_A_Ubiad1
  gRNA
tgtacacggggccggcaatt

SEQ ID NO: 57009 - DNA, 20 bp, Artificial Sequence
  MKO10057009_A_Ubiad1
  gRNA
acaggcttcccgaacgatcc

SEQ ID NO: 57010 - DNA, 20 bp, Artificial Sequence
  MKO10057010_A_Ubiad1
  gRNA
gcgtgacgatgccagcctct

SEQ ID NO: 57011 - DNA, 20 bp, Artificial Sequence
  MKO10057011_A_Ubl3
  gRNA
gattaatttgcgcctcatct

SEQ ID NO: 57012 - DNA, 20 bp, Artificial Sequence
  MKO10057012_A_Ubl3
  gRNA
cacgtgctttgcgatgtcag

SEQ ID NO: 57013 - DNA, 20 bp, Artificial Sequence
  MKO10057013_A_Ubl3
  gRNA
ctacatggaaacgtcaccct

SEQ ID NO: 57014 - DNA, 20 bp, Artificial Sequence
  MKO10057014_A_Ubl4a
  gRNA
ttgcgttggccgtagtggac

SEQ ID NO: 57015 - DNA, 20 bp, Artificial Sequence
  MKO10057015_A_Ubl4a
  gRNA
ggcgcgcggcaggggaccgt

SEQ ID NO: 57016 - DNA, 20 bp, Artificial Sequence
  MKO10057016_A_Ubl4a
  gRNA
ccggcaaacgccggcaagtg

SEQ ID NO: 57017 - DNA, 20 bp, Artificial Sequence
  MKO10057017_A_Ubl4b
  gRNA
tcgagttccgatgcaacagc

SEQ ID NO: 57018 - DNA, 20 bp, Artificial Sequence
  MKO10057018_A_Ubl4b
  gRNA
tcagcacctacaggtgcccg

SEQ ID NO: 57019 - DNA, 20 bp, Artificial Sequence
  MKO10057019_A_Ubl4b
  gRNA
acaacagcagcttgacgagc

SEQ ID NO: 57020 - DNA, 20 bp, Artificial Sequence
  MKO10057020_A_Ubl4
  gRNA
actggatgacatcgaacgtt

SEQ ID NO: 57021 - DNA, 20 bp, Artificial Sequence
  MKO10057021_A_Ubl4
  gRNA
cgactgtcagattacaacat

SEQ ID NO: 57022 - DNA, 20 bp, Artificial Sequence
  MKO10057022_A_Ubl4
  gRNA
cattcagcttatccgagacc

SEQ ID NO: 57023 - DNA, 20 bp, Artificial Sequence
  MKO10057023_A_Ubl5
  gRNA
gtggatacttgcacttaacg

SEQ ID NO: 57024 - DNA, 20 bp, Artificial Sequence
  MKO10057024_A_Ubl5
  gRNA
ccttcagatgaaatccacga

SEQ ID NO: 57025 - DNA, 20 bp, Artificial Sequence
  MKO10057025_A_Ubl5
  gRNA
taagaacgatcttgttccag

SEQ ID NO: 57026 - DNA, 20 bp, Artificial Sequence
  MKO10057026_A_Ubl7
  gRNA
tccatgttctccgaaaatct

SEQ ID NO: 57027 - DNA, 20 bp, Artificial Sequence
  MKO10057027_A_Ubl7
  gRNA
cacttacgtatctagcatgt

SEQ ID NO: 57028 - DNA, 20 bp, Artificial Sequence
  MKO10057028_A_Ubl7
  gRNA
cttgtacttacctagagcaa

SEQ ID NO: 57029 - DNA, 20 bp, Artificial Sequence
  MKO10057029_A_Ublcp1
  gRNA
tatagtcaacatccagcacc

SEQ ID NO: 57030 - DNA, 20 bp, Artificial Sequence
  MKO10057030_A_Ublcp1
  gRNA
gcagaaaatgatgttaagct

SEQ ID NO: 57031 - DNA, 20 bp, Artificial Sequence
  MKO10057031_A_Ublcp1
  gRNA
aaatactaaaatcatgatga

SEQ ID NO: 57032 - DNA, 20 bp, Artificial Sequence
  MKO10057032_A_Ubn1
  gRNA
tttcttcaaatttccgtgca

SEQ ID NO: 57033 - DNA, 20 bp, Artificial Sequence
  MKO10057033_A_Ubn1
  gRNA
aaaagatgacacttacgaca

SEQ ID NO: 57034 - DNA, 20 bp, Artificial Sequence
  MKO10057034_A_Ubn1
  gRNA
tatcaatcaagtcctgtatt

SEQ ID NO: 57035 - DNA, 20 bp, Artificial Sequence
  MKO10057035_A_Ubn2
  gRNA
gtgggaaagcccgtaaacac

SEQ ID NO: 57036 - DNA, 20 bp, Artificial Sequence
  MKO10057036_A_Ubn2
  gRNA
aatcttgtagccgatccttc

SEQ ID NO: 57037 - DNA, 20 bp, Artificial Sequence
  MKO10057037_A_Ubn2
  gRNA
tggcactctgcagttccgcc

SEQ ID NO: 57038 - DNA, 20 bp, Artificial Sequence
  MKO10057038_A_Ubox5
  gRNA
accggtcgatccgggctttc

SEQ ID NO: 57039 - DNA, 20 bp, Artificial Sequence
  MKO10057039_A_Ubox5
  gRNA
ctcttgcatcaagcgtttag

SEQ ID NO: 57040 - DNA, 20 bp, Artificial Sequence
  MKO10057040_A_Ubox5
  gRNA
aatggacccgcagcacatcc

SEQ ID NO: 57041 - DNA, 20 bp, Artificial Sequence
  MKO10057041_A_Ubp1
  gRNA
tgtctcgtcgtgcagcttaa

SEQ ID NO: 57042 - DNA, 20 bp, Artificial Sequence
  MKO10057042_A_Ubp1
  gRNA
gcatccgaatttcataagac

SEQ ID NO: 57043 - DNA, 20 bp, Artificial Sequence
  MKO10057043_A_Ubp1
  gRNA
cgaggtgatcgagtccgggc

SEQ ID NO: 57044 - DNA, 20 bp, Artificial Sequence
  MKO10057044_A_Ubqln1
  gRNA
cccgatagcaaccccacgtc

SEQ ID NO: 57045 - DNA, 20 bp, Artificial Sequence
  MKO10057045_A_Ubqln1
  gRNA
gcacaacttacctacgccaa

SEQ ID NO: 57046 - DNA, 20 bp, Artificial Sequence
  MKO10057046_A_Ubqln1
  gRNA
ccataatcaattgccgcatc

SEQ ID NO: 57047 - DNA, 20 bp, Artificial Sequence
  MKO10057047_A_Ubqln2
  gRNA
gccggcggcgacgacatcat

SEQ ID NO: 57048 - DNA, 20 bp, Artificial Sequence
  MKO10057048_A_Ubqln2
  gRNA
attagcgcttgcatcgctct

SEQ ID NO: 57049 - DNA, 20 bp, Artificial Sequence
  MKO10057049_A_Ubqln2
  gRNA
acctatgctgaatgccgcac

SEQ ID NO: 57050 - DNA, 20 bp, Artificial Sequence
  MKO10057050_A_Ubqln3
  gRNA
cacgggcctagtgcgccagt

SEQ ID NO: 57051 - DNA, 20 bp, Artificial Sequence
  MKO10057051_A_Ubqln3
  gRNA
ggctcacttccgggtacaac

SEQ ID NO: 57052 - DNA, 20 bp, Artificial Sequence
  MKO10057052_A_Ubqln3
  gRNA
caagaaccaactggcgcact

SEQ ID NO: 57053 - DNA, 20 bp, Artificial Sequence
  MKO10057053_A_Ubqln4
  gRNA
cctgggctccgccaacttta

SEQ ID NO: 57054 - DNA, 20 bp, Artificial Sequence
  MKO10057054_A_Ubqln4
  gRNA
tgccctccgccgcatgtaca

SEQ ID NO: 57055 - DNA, 20 bp, Artificial Sequence
  MKO10057055_A_Ubqln4
  gRNA
tctgatgcgccacatgatca

SEQ ID NO: 57056 - DNA, 20 bp, Artificial Sequence
  MKO10057056_A_Ubqlnl
  gRNA
ggtgatcgagagataatacg

SEQ ID NO: 57057 - DNA, 20 bp, Artificial Sequence
  MKO10057057_A_Ubqlnl
  gRNA
acaatcactcgaatgacacc

SEQ ID NO: 57058 - DNA, 20 bp, Artificial Sequence
  MKO10057058_A_Ubqlnl
  gRNA
tctttgctgaaacgaacctc

SEQ ID NO: 57059 - DNA, 20 bp, Artificial Sequence
  MKO10057059_A_Ubr1
  gRNA
tcataaaaaccatcgttaca

SEQ ID NO: 57060 - DNA, 20 bp, Artificial Sequence
  MKO10057060_A_Ubr1
  gRNA
ccaaataagtaccactccaa

SEQ ID NO: 57061 - DNA, 20 bp, Artificial Sequence
  MKO10057061_A_Ubr1
  gRNA
tccatacagagcacacacgt

SEQ ID NO: 57062 - DNA, 20 bp, Artificial Sequence
  MKO10057062_A_Ubr2
  gRNA
cgttactgaccctatatcga

SEQ ID NO: 57063 - DNA, 20 bp, Artificial Sequence
  MKO10057063_A_Ubr2
  gRNA
gcgcagatgtaccactccat

SEQ ID NO: 57064 - DNA, 20 bp, Artificial Sequence
  MKO10057064_A_Ubr2
  gRNA
tccatagagaccatcgatat

SEQ ID NO: 57065 - DNA, 20 bp, Artificial Sequence
  MKO10057065_A_Ubr3
  gRNA
agagtgctagtaccagcagc

SEQ ID NO: 57066 - DNA, 20 bp, Artificial Sequence
  MKO10057066_A_Ubr3
  gRNA
gacatatcccgaggataagc

SEQ ID NO: 57067 - DNA, 20 bp, Artificial Sequence
  MKO10057067_A_Ubr3
  gRNA
gaactacaaagacctgactg

SEQ ID NO: 57068 - DNA, 20 bp, Artificial Sequence
  MKO10057068_A_Ubr4
  gRNA
gatacagcacatgcctcgtc

SEQ ID NO: 57069 - DNA, 20 bp, Artificial Sequence
  MKO10057069_A_Ubr4
  gRNA
gtgcgtggacagtgcgacaa

SEQ ID NO: 57070 - DNA, 20 bp, Artificial Sequence
  MKO10057070_A_Ubr4
  gRNA
acggctcgtactgcttctcg

SEQ ID NO: 57071 - DNA, 20 bp, Artificial Sequence
  MKO10057071_A_Ubr5
  gRNA
ttacccaattccagtctgtc

SEQ ID NO: 57072 - DNA, 20 bp, Artificial Sequence
  MKO10057072_A_Ubr5
  gRNA
tcacgccgcgtttcttcttg

SEQ ID NO: 57073 - DNA, 20 bp, Artificial Sequence
  MKO10057073_A_Ubr5
  gRNA
gcctgctccagtacattcag

SEQ ID NO: 57074 - DNA, 20 bp, Artificial Sequence
  MKO10057074_A_Ubr7
  gRNA
gcttgcagttacgaatgtca

SEQ ID NO: 57075 - DNA, 20 bp, Artificial Sequence
  MKO10057075_A_Ubr7
  gRNA
ctgcagcacctgcacgccag

SEQ ID NO: 57076 - DNA, 20 bp, Artificial Sequence
  MKO10057076_A_Ubr7
  gRNA
gtgaagactggttccatggc

SEQ ID NO: 57077 - DNA, 20 bp, Artificial Sequence
  MKO10057077_A_Ubtd1
  gRNA
tggcgttacctgctcgcttg

SEQ ID NO: 57078 - DNA, 20 bp, Artificial Sequence
  MKO10057078_A_Ubtd1
  gRNA
ggacacccccgcaagcgagc

SEQ ID NO: 57079 - DNA, 20 bp, Artificial Sequence
  MKO10057079_A_Ubtd1
  gRNA
tcaaaaagacttcgtcatcc

SEQ ID NO: 57080 - DNA, 20 bp, Artificial Sequence
  MKO10057080_A_Ubtd2
  gRNA
tgccgtccgagttctcgttg

SEQ ID NO: 57081 - DNA, 20 bp, Artificial Sequence
  MKO10057081_A_Ubtd2
  gRNA
ctgagattcgtgtccagaat

SEQ ID NO: 57082 - DNA, 20 bp, Artificial Sequence
  MKO10057082_A_Ubtd2
  gRNA
cttacacgccacagagggcg

SEQ ID NO: 57083 - DNA, 20 bp, Artificial Sequence
  MKO10057083_A_Ubtfl1
  gRNA
ttcaacccagcgcttcctaa

SEQ ID NO: 57084 - DNA, 20 bp, Artificial Sequence
  MKO10057084_A_Ubtfl1
  gRNA
ttccttgtaaaagcgcagat

SEQ ID NO: 57085 - DNA, 20 bp, Artificial Sequence
  MKO10057085_A_Ubtfl1
  gRNA
cgcacagctgaccaaaatcc

SEQ ID NO: 57086 - DNA, 20 bp, Artificial Sequence
  MKO10057086_A_Ubtf
  gRNA
caagtacgcgaagctccacc

SEQ ID NO: 57087 - DNA, 20 bp, Artificial Sequence
  MKO10057087_A_Ubtf
  gRNA
ttgggaaaaagttgcgttta

SEQ ID NO: 57088 - DNA, 20 bp, Artificial Sequence
  MKO10057088_A_Ubtf
  gRNA
tgtcacagaccgctggtccc

SEQ ID NO: 57089 - DNA, 20 bp, Artificial Sequence
  MKO10057089_A_Ubxn10
  gRNA
gaggtcggagaaccgtctcc

SEQ ID NO: 57090 - DNA, 20 bp, Artificial Sequence
  MKO10057090_A_Ubxn10
  gRNA
ctccaacatcgaggagccgt

SEQ ID NO: 57091 - DNA, 20 bp, Artificial Sequence
  MKO10057091_A_Ubxn10
  gRNA
tgtgcaaattcggccgcttc

SEQ ID NO: 57092 - DNA, 20 bp, Artificial Sequence
  MKO10057092_A_Ubxn11
  gRNA
tggacagcatctcgtcgttc

SEQ ID NO: 57093 - DNA, 20 bp, Artificial Sequence
  MKO10057093_A_Ubxn11
  gRNA
gcttcaggagcggaagatcc

SEQ ID NO: 57094 - DNA, 20 bp, Artificial Sequence
  MKO10057094_A_Ubxn11
  gRNA
gggtctgtaccaaatcctcc

SEQ ID NO: 57095 - DNA, 20 bp, Artificial Sequence
  MKO10057095_A_Ubxn1
  gRNA
gcatgaagacgaccccgatg

SEQ ID NO: 57096 - DNA, 20 bp, Artificial Sequence
  MKO10057096_A_Ubxn1
  gRNA
agatgagatgcgccgggctg

SEQ ID NO: 57097 - DNA, 20 bp, Artificial Sequence
  MKO10057097_A_Ubxn1
  gRNA
agttgcacgacagaaactgc

SEQ ID NO: 57098 - DNA, 20 bp, Artificial Sequence
  MKO10057098_A_Ubxn2a
  gRNA
atgcttaccttcctagtctg

SEQ ID NO: 57099 - DNA, 20 bp, Artificial Sequence
  MKO10057099_A_Ubxn2a
  gRNA
tgctgtttcactgaacaact

SEQ ID NO: 57100 - DNA, 20 bp, Artificial Sequence
  MKO10057100_A_Ubxn2a
  gRNA
aaaattccccataattctga

SEQ ID NO: 57101 - DNA, 20 bp, Artificial Sequence
  MKO10057101_A_Ubxn2b
  gRNA
gcccacgaacaccgccacat

SEQ ID NO: 57102 - DNA, 20 bp, Artificial Sequence
  MKO10057102_A_Ubxn2b
  gRNA
caccgatgtggcggtgttcg

SEQ ID NO: 57103 - DNA, 20 bp, Artificial Sequence
  MKO10057103_A_Ubxn2b
  gRNA
aagcgatcagagtatatcta

SEQ ID NO: 57104 - DNA, 20 bp, Artificial Sequence
  MKO10057104_A_Ubxn4
  gRNA
cccgagatgcactcgtcaaa

SEQ ID NO: 57105 - DNA, 20 bp, Artificial Sequence
  MKO10057105_A_Ubxn4
  gRNA
ctccccgctattacttccaa

SEQ ID NO: 57106 - DNA, 20 bp, Artificial Sequence
  MKO10057106_A_Ubxn4
  gRNA
aatccctttggaagtaatag

SEQ ID NO: 57107 - DNA, 20 bp, Artificial Sequence
  MKO10057107_A_Ubxn6
  gRNA
aaccttaccgagttggtccc

SEQ ID NO: 57108 - DNA, 20 bp, Artificial Sequence
  MKO10057108_A_Ubxn6
  gRNA
gaactcaccctggttccgga

SEQ ID NO: 57109 - DNA, 20 bp, Artificial Sequence
  MKO10057109_A_Ubxn6
  gRNA
ttcttcatctgtccgctcac

SEQ ID NO: 57110 - DNA, 20 bp, Artificial Sequence
  MKO10057110_A_Ubxn7
  gRNA
gggccgaaatagatctgcaa

SEQ ID NO: 57111 - DNA, 20 bp, Artificial Sequence
  MKO10057111_A_Ubxn7
  gRNA
cccttgtgcatcaagtcgat

SEQ ID NO: 57112 - DNA, 20 bp, Artificial Sequence
  MKO10057112_A_Ubxn7
  gRNA
ccatcaaatattgaacgtgc

SEQ ID NO: 57113 - DNA, 20 bp, Artificial Sequence
  MKO10057113_A_Ubxn8
  gRNA
aactcactgaaaccttcgca

SEQ ID NO: 57114 - DNA, 20 bp, Artificial Sequence
  MKO10057114_A_Ubxn8
  gRNA
tcatttccgtgaccacctcc

SEQ ID NO: 57115 - DNA, 20 bp, Artificial Sequence
  MKO10057115_A_Ubxn8
  gRNA
aacaacgaacctccttcctc

SEQ ID NO: 57116 - DNA, 20 bp, Artificial Sequence
  MKO10057116_A_Uchl1
  gRNA
tggcgcttcgccgacgtgct

SEQ ID NO: 57117 - DNA, 20 bp, Artificial Sequence
  MKO10057117_A_Uchl1
  gRNA
catcgggttgatccacgcag

SEQ ID NO: 57118 - DNA, 20 bp, Artificial Sequence
  MKO10057118_A_Uchl1
  gRNA
cactgcgtggatcaacccga

SEQ ID NO: 57119 - DNA, 20 bp, Artificial Sequence
  MKO10057119_A_Uchl3
  gRNA
gattagtccaatcgttccac

SEQ ID NO: 57120 - DNA, 20 bp, Artificial Sequence
  MKO10057120_A_Uchl3
  gRNA
ctcgtttcaggtcaccaacc

SEQ ID NO: 57121 - DNA, 20 bp, Artificial Sequence
  MKO10057121_A_Uchl3
  gRNA
aggagtaacactgcgcatac

SEQ ID NO: 57122 - DNA, 20 bp, Artificial Sequence
  MKO10057122_A_Uchl4
  gRNA
aatcgttccaatcgttccac

SEQ ID NO: 57123 - DNA, 20 bp, Artificial Sequence
  MKO10057123_A_Uchl4
  gRNA
gaatagcgtcatagttctcc

SEQ ID NO: 57124 - DNA, 20 bp, Artificial Sequence
  MKO10057124_A_Uchl4
  gRNA
aaccagtttctcaagcaatt

SEQ ID NO: 57125 - DNA, 20 bp, Artificial Sequence
  MKO10057125_A_Uchl5
  gRNA
tacacttacgatagcctgag

SEQ ID NO: 57126 - DNA, 20 bp, Artificial Sequence
  MKO10057126_A_Uchl5
  gRNA
acgcatcaagatgtgcattt

SEQ ID NO: 57127 - DNA, 20 bp, Artificial Sequence
  MKO10057127_A_Uchl5
  gRNA
tcttgtttcaggttgccgag

SEQ ID NO: 57128 - DNA, 20 bp, Artificial Sequence
  MKO10057128_A_Uck1
  gRNA
gatgttaggctgtctcgaag

SEQ ID NO: 57129 - DNA, 20 bp, Artificial Sequence
  MKO10057129_A_Uck1
  gRNA
caaaggcggtgtactgagtc

SEQ ID NO: 57130 - DNA, 20 bp, Artificial Sequence
  MKO10057130_A_Uck1
  gRNA
caggttaccagagaccactg

SEQ ID NO: 57131 - DNA, 20 bp, Artificial Sequence
  MKO10057131_A_Uck2
  gRNA
gatacccgtctgtctcgccg

SEQ ID NO: 57132 - DNA, 20 bp, Artificial Sequence
  MKO10057132_A_Uck2
  gRNA
caccatctaccccgccgacg

SEQ ID NO: 57133 - DNA, 20 bp, Artificial Sequence
  MKO10057133_A_Uck2
  gRNA
ccgggtgatcaaagttgaat

SEQ ID NO: 57134 - DNA, 20 bp, Artificial Sequence
  MKO10057134_A_Uckl1
  gRNA
tacgtttgcttgtgcgaagc

SEQ ID NO: 57135 - DNA, 20 bp, Artificial Sequence
  MKO10057135_A_Uckl1
  gRNA
aaacgtaccatctacacagc

SEQ ID NO: 57136 - DNA, 20 bp, Artificial Sequence
  MKO10057136_A_Uckl1
  gRNA
tgatgacattcgcaccatac

SEQ ID NO: 57137 - DNA, 20 bp, Artificial Sequence
  MKO10057137_A_Ucma
  gRNA
caggagaatgacccgtctcc

SEQ ID NO: 57138 - DNA, 20 bp, Artificial Sequence
  MKO10057138_A_Ucma
  gRNA
accgcttgccacgcctcttg

SEQ ID NO: 57139 - DNA, 20 bp, Artificial Sequence
  MKO10057139_A_Ucma
  gRNA
aagtcccgagatgaagttaa

SEQ ID NO: 57140 - DNA, 20 bp, Artificial Sequence
  MKO10057140_A_Ucn2
  gRNA
cctgttccagtaagatccgt

SEQ ID NO: 57141 - DNA, 20 bp, Artificial Sequence
  MKO10057141_A_Ucn2
  gRNA
actggaacaggctcgttaca

SEQ ID NO: 57142 - DNA, 20 bp, Artificial Sequence
  MKO10057142_A_Ucn2
  gRNA
gctcaaatactagcccatgt

SEQ ID NO: 57143 - DNA, 20 bp, Artificial Sequence
  MKO10057143_A_Ucn3
  gRNA
cagacaagcccaaaagcgac

SEQ ID NO: 57144 - DNA, 20 bp, Artificial Sequence
  MKO10057144_A_Ucn3
  gRNA
catcctcttcaacatcgaca

SEQ ID NO: 57145 - DNA, 20 bp, Artificial Sequence
  MKO10057145_A_Ucn3
  gRNA
ccggtacagataccaatccc

SEQ ID NO: 57146 - DNA, 20 bp, Artificial Sequence
  MKO10057146_A_Ucn
  gRNA
gaaccgcatcatattcgatt

SEQ ID NO: 57147 - DNA, 20 bp, Artificial Sequence
  MKO10057147_A_Ucn
  gRNA
tccaggatccgaatctgcga

SEQ ID NO: 57148 - DNA, 20 bp, Artificial Sequence
  MKO10057148_A_Ucn
  gRNA
tccatcgcagattcggatcc

SEQ ID NO: 57149 - DNA, 20 bp, Artificial Sequence
  MKO10057149_A_Ucp1
  gRNA
atcgcacagcttggtacgct

SEQ ID NO: 57150 - DNA, 20 bp, Artificial Sequence
  MKO10057150_A_Ucp1
  gRNA
atttgcctctgaatgcccgc

SEQ ID NO: 57151 - DNA, 20 bp, Artificial Sequence
  MKO10057151_A_Ucp1
  gRNA
cggtccttccttggtgtaca

SEQ ID NO: 57152 - DNA, 20 bp, Artificial Sequence
  MKO10057152_A_Ucp2
  gRNA
cggcgaccagcccattgtag

SEQ ID NO: 57153 - DNA, 20 bp, Artificial Sequence
  MKO10057153_A_Ucp2
  gRNA
ctacaagaccattgcacgag

SEQ ID NO: 57154 - DNA, 20 bp, Artificial Sequence
  MKO10057154_A_Ucp2
  gRNA
agctttgcctccgtccgcat

SEQ ID NO: 57155 - DNA, 20 bp, Artificial Sequence
  MKO10057155_A_Ucp3
  gRNA
atttcaagccatgatacgcc

SEQ ID NO: 57156 - DNA, 20 bp, Artificial Sequence
  MKO10057156_A_Ucp3
  gRNA
cagactccagcgtcgccatc

SEQ ID NO: 57157 - DNA, 20 bp, Artificial Sequence
  MKO10057157_A_Ucp3
  gRNA
ctaggggagcgttcatgtat

SEQ ID NO: 57158 - DNA, 20 bp, Artificial Sequence
  MKO10057158_A_Uevld
  gRNA
tctcatttcagtacaagttc

SEQ ID NO: 57159 - DNA, 20 bp, Artificial Sequence
  MKO10057159_A_Uevld
  gRNA
attcataccataggtgtcca

SEQ ID NO: 57160 - DNA, 20 bp, Artificial Sequence
  MKO10057160_A_Uevld
  gRNA
atcttacgtggctccagttt

SEQ ID NO: 57161 - DNA, 20 bp, Artificial Sequence
  MKO10057161_A_Ufc1
  gRNA
ttaccgggtcccttccttgt

SEQ ID NO: 57162 - DNA, 20 bp, Artificial Sequence
  MKO10057162_A_Ufc1
  gRNA
cacatatcccactactgctc

SEQ ID NO: 57163 - DNA, 20 bp, Artificial Sequence
  MKO10057163_A_Ufc1
  gRNA
tgcaatttccggagcagtag

SEQ ID NO: 57164 - DNA, 20 bp, Artificial Sequence
  MKO10057164_A_Ufd1l
  gRNA
actgcgtggagaagcggttc

SEQ ID NO: 57165 - DNA, 20 bp, Artificial Sequence
  MKO10057165_A_Ufd1l
  gRNA
ccaaaggatacaccgcttta

SEQ ID NO: 57166 - DNA, 20 bp, Artificial Sequence
  MKO10057166_A_Ufd1l
  gRNA
ttctccgtgtccatgctagc

SEQ ID NO: 57167 - DNA, 20 bp, Artificial Sequence
  MKO10057167_A_Ufl1
  gRNA
agagacgagctacatgtccg

SEQ ID NO: 57168 - DNA, 20 bp, Artificial Sequence
  MKO10057168_A_Ufl1
  gRNA
agtccatacacttgacggca

SEQ ID NO: 57169 - DNA, 20 bp, Artificial Sequence
  MKO10057169_A_Ufl1
  gRNA
ctctactctcgatatgagtc

SEQ ID NO: 57170 - DNA, 20 bp, Artificial Sequence
  MKO10057170_A_Ufm1
  gRNA
ctttaaaatcacgttgacgt

SEQ ID NO: 57171 - DNA, 20 bp, Artificial Sequence
  MKO10057171_A_Ufm1
  gRNA
cacactttgtacggcagccg

SEQ ID NO: 57172 - DNA, 20 bp, Artificial Sequence
  MKO10057172_A_Ufm1
  gRNA
ataatcgcacttgtagctgc

SEQ ID NO: 57173 - DNA, 20 bp, Artificial Sequence
  MKO10057173_A_Ufsp1
  gRNA
tccggggggcttgtcgccca

SEQ ID NO: 57174 - DNA, 20 bp, Artificial Sequence
  MKO10057174_A_Ufsp1
  gRNA
taactggatcggctgtgtag

SEQ ID NO: 57175 - DNA, 20 bp, Artificial Sequence
  MKO10057175_A_Ufsp1
  gRNA
ctgccatgatcccgcccgac

SEQ ID NO: 57176 - DNA, 20 bp, Artificial Sequence
  MKO10057176_A_Ufsp2
  gRNA
gaagcgcactacgttcttac

SEQ ID NO: 57177 - DNA, 20 bp, Artificial Sequence
  MKO10057177_A_Ufsp2
  gRNA
cccgtgtttgcgtcgctgtt

SEQ ID NO: 57178 - DNA, 20 bp, Artificial Sequence
  MKO10057178_A_Ufsp2
  gRNA
acagacacaacggcgtcaat

SEQ ID NO: 57179 - DNA, 20 bp, Artificial Sequence
  MKO10057179_A_Ugcg
  gRNA
ccgtatgtagccgacagaca

SEQ ID NO: 57180 - DNA, 20 bp, Artificial Sequence
  MKO10057180_A_Ugcg
  gRNA
aataatctagcatcgacatt

SEQ ID NO: 57181 - DNA, 20 bp, Artificial Sequence
  MKO10057181_A_Ugcg
  gRNA
cagccgtatagcaagctccc

SEQ ID NO: 57182 - DNA, 20 bp, Artificial Sequence
  MKO10057182_A_Ugdh
  gRNA
gaagtagtcgaatcctgtcg

SEQ ID NO: 57183 - DNA, 20 bp, Artificial Sequence
  MKO10057183_A_Ugdh
  gRNA
cacaagcttcgatatacttc

SEQ ID NO: 57184 - DNA, 20 bp, Artificial Sequence
  MKO10057184_A_Ugdh
  gRNA
cgggttctttaggtccttga

SEQ ID NO: 57185 - DNA, 20 bp, Artificial Sequence
  MKO10057185_A_Uggt1
  gRNA
ctcctattacgatgccgtat

SEQ ID NO: 57186 - DNA, 20 bp, Artificial Sequence
  MKO10057186_A_Uggt1
  gRNA
gcgaaacgcagcttccaata

SEQ ID NO: 57187 - DNA, 20 bp, Artificial Sequence
  MKO10057187_A_Uggt1
  gRNA
agaaacgacttgcacccttc

SEQ ID NO: 57188 - DNA, 20 bp, Artificial Sequence
  MKO10057188_A_Uggt2
  gRNA
tgttctccgccactatattc

SEQ ID NO: 57189 - DNA, 20 bp, Artificial Sequence
  MKO10057189_A_Uggt2
  gRNA
acaaatgcagtacatccctc

SEQ ID NO: 57190 - DNA, 20 bp, Artificial Sequence
  MKO10057190_A_Uggt2
  gRNA
cttcaggattaggttgtagt

SEQ ID NO: 57191 - DNA, 20 bp, Artificial Sequence
  MKO10057191_A_Ugp2
  gRNA
ctaaaacttaccgaatcttc

SEQ ID NO: 57192 - DNA, 20 bp, Artificial Sequence
  MKO10057192_A_Ugp2
  gRNA
agtgaaactcaatggtggtt

SEQ ID NO: 57193 - DNA, 20 bp, Artificial Sequence
  MKO10057193_A_Ugp2
  gRNA
cacgacagtgattgtacttc

SEQ ID NO: 57194 - DNA, 20 bp, Artificial Sequence
  MKO10057194_A_Ugt1a10
  gRNA
tccccgagtttccatgcgct

SEQ ID NO: 57195 - DNA, 20 bp, Artificial Sequence
  MKO10057195_A_Ugt1a10
  gRNA
gggggcaccacacctgcgcc

SEQ ID NO: 57196 - DNA, 20 bp, Artificial Sequence
  MKO10057196_A_Ugt1a10
  gRNA
gaggtcctgtggcgctacac

SEQ ID NO: 57197 - DNA, 20 bp, Artificial Sequence
  MKO10057197_A_Ugt1a1
  gRNA
tccccgagtttccatgcgct

SEQ ID NO: 57198 - DNA, 20 bp, Artificial Sequence
  MKO10057198_A_Ugt1a1
  gRNA
gggggcaccacacctgcgcc

SEQ ID NO: 57199 - DNA, 20 bp, Artificial Sequence
  MKO10057199_A_Ugt1a1
  gRNA
gaggtcctgtggcgctacac

SEQ ID NO: 57200 - DNA, 20 bp, Artificial Sequence
  MKO10057200_A_Ugt1a2
  gRNA
tccccgagtttccatgcgct

SEQ ID NO: 57201 - DNA, 20 bp, Artificial Sequence
  MKO10057201_A_Ugt1a2
  gRNA
gggggcaccacacctgcgcc

SEQ ID NO: 57202 - DNA, 20 bp, Artificial Sequence
  MKO10057202_A_Ugt1a2
  gRNA
gaggtcctgtggcgctacac

SEQ ID NO: 57203 - DNA, 20 bp, Artificial Sequence
  MKO10057203_A_Ugt1a5
  gRNA
tccccgagtttccatgcgct

SEQ ID NO: 57204 - DNA, 20 bp, Artificial Sequence
  MKO10057204_A_Ugt1a5
  gRNA
gggggcaccacacctgcgcc

SEQ ID NO: 57205 - DNA, 20 bp, Artificial Sequence
  MKO10057205_A_Ugt1a5
  gRNA
gaggtcctgtggcgctacac

SEQ ID NO: 57206 - DNA, 20 bp, Artificial Sequence
  MKO10057206_A_Ugt1a6a
  gRNA
tccccgagtttccatgcgct

SEQ ID NO: 57207 - DNA, 20 bp, Artificial Sequence
  MKO10057207_A_Ugt1a6a
  gRNA
gggggcaccacacctgcgcc

SEQ ID NO: 57208 - DNA, 20 bp, Artificial Sequence
  MKO10057208_A_Ugt1a6a
  gRNA
gaggtcctgtggcgctacac

SEQ ID NO: 57209 - DNA, 20 bp, Artificial Sequence
  MKO10057209_A_Ugt1a6b
  gRNA
tccccgagtttccatgcgct

SEQ ID NO: 57210 - DNA, 20 bp, Artificial Sequence
  MKO10057210_A_Ugt1a6b
  gRNA
gggggcaccacacctgcgcc

SEQ ID NO: 57211 - DNA, 20 bp, Artificial Sequence
  MKO10057211_A_Ugt1a6b
  gRNA
gaggtcctgtggcgctacac

SEQ ID NO: 57212 - DNA, 20 bp, Artificial Sequence
  MKO10057212_A_Ugt1a7c
  gRNA
tccccgagtttccatgcgct

SEQ ID NO: 57213 - DNA, 20 bp, Artificial Sequence
  MKO10057213_A_Ugt1a7c
  gRNA
gggggcaccacacctgcgcc

SEQ ID NO: 57214 - DNA, 20 bp, Artificial Sequence
  MKO10057214_A_Ugt1a7c
  gRNA
gaggtcctgtggcgctacac

SEQ ID NO: 57215 - DNA, 20 bp, Artificial Sequence
  MKO10057215_A_Ugt1a9
  gRNA
tccccgagtttccatgcgct

SEQ ID NO: 57216 - DNA, 20 bp, Artificial Sequence
  MKO10057216_A_Ugt1a9
  gRNA
gggggcaccacacctgcgcc

SEQ ID NO: 57217 - DNA, 20 bp, Artificial Sequence
  MKO10057217_A_Ugt1a9
  gRNA
gaggtcctgtggcgctacac

SEQ ID NO: 57218 - DNA, 20 bp, Artificial Sequence
  MKO10057218_A_Ugt2a1
  gRNA
ccaatacaagactgtttgat

SEQ ID NO: 57219 - DNA, 20 bp, Artificial Sequence
  MKO10057219_A_Ugt2a1
  gRNA
tactgaccttctgaggaatc

SEQ ID NO: 57220 - DNA, 20 bp, Artificial Sequence
  MKO10057220_A_Ugt2a1
  gRNA
ccaatcaaacagtcttgtat

SEQ ID NO: 57221 - DNA, 20 bp, Artificial Sequence
  MKO10057221_A_Ugt2a2
  gRNA
ccaatacaagactgtttgat

SEQ ID NO: 57222 - DNA, 20 bp, Artificial Sequence
  MKO10057222_A_Ugt2a2
  gRNA
tactgaccttctgaggaatc

SEQ ID NO: 57223 - DNA, 20 bp, Artificial Sequence
  MKO10057223_A_Ugt2a2
  gRNA
ccaatcaaacagtcttgtat

SEQ ID NO: 57224 - DNA, 20 bp, Artificial Sequence
  MKO10057224_A_Ugt2a3
  gRNA
gcctcacaacatcgctcaca

SEQ ID NO: 57225 - DNA, 20 bp, Artificial Sequence
  MKO10057225_A_Ugt2a3
  gRNA
atggtgggcgttcccatgtt

SEQ ID NO: 57226 - DNA, 20 bp, Artificial Sequence
  MKO10057226_A_Ugt2a3
  gRNA
cacagtcttacagaacgttg

SEQ ID NO: 57227 - DNA, 20 bp, Artificial Sequence
  MKO10057227_A_Ugt2b1
  gRNA
tatggctcgttcgaaccttc

SEQ ID NO: 57228 - DNA, 20 bp, Artificial Sequence
  MKO10057228_A_Ugt2b1
  gRNA
ccacttgtagagccgagtgt

SEQ ID NO: 57229 - DNA, 20 bp, Artificial Sequence
  MKO10057229_A_Ugt2b1
  gRNA
tattaaccacatagtagcca

SEQ ID NO: 57230 - DNA, 20 bp, Artificial Sequence
  MKO10057230_A_Ugt2b34
  gRNA
ccatttgtacagacgagtgt

SEQ ID NO: 57231 - DNA, 20 bp, Artificial Sequence
  MKO10057231_A_Ugt2b34
  gRNA
accatgagttataaacgctc

SEQ ID NO: 57232 - DNA, 20 bp, Artificial Sequence
  MKO10057232_A_Ugt2b34
  gRNA
catagtctctgagagtgtcg

SEQ ID NO: 57233 - DNA, 20 bp, Artificial Sequence
  MKO10057233_A_Ugt2b35
  gRNA
aagggcccaagaaattgcgt

SEQ ID NO: 57234 - DNA, 20 bp, Artificial Sequence
  MKO10057234_A_Ugt2b35
  gRNA
tggcgcgaatggactctatg

SEQ ID NO: 57235 - DNA, 20 bp, Artificial Sequence
  MKO10057235_A_Ugt2b35
  gRNA
tgtggttcataagatcctac

SEQ ID NO: 57236 - DNA, 20 bp, Artificial Sequence
  MKO10057236_A_Ugt2b36
  gRNA
tggcgcgaatggactctacg

SEQ ID NO: 57237 - DNA, 20 bp, Artificial Sequence
  MKO10057237_A_Ugt2b36
  gRNA
tgaatatcagaacgatgtca

SEQ ID NO: 57238 - DNA, 20 bp, Artificial Sequence
  MKO10057238_A_Ugt2b36
  gRNA
cctccaacatagtaaacatt

SEQ ID NO: 57239 - DNA, 20 bp, Artificial Sequence
  MKO10057239_A_Ugt2b37
  gRNA
gattgcctcatagacactgt

SEQ ID NO: 57240 - DNA, 20 bp, Artificial Sequence
  MKO10057240_A_Ugt2b37
  gRNA
gagaaaagaccactacacca

SEQ ID NO: 57241 - DNA, 20 bp, Artificial Sequence
  MKO10057241_A_Ugt2b37
  gRNA
tggggccaacagtgtctatg

SEQ ID NO: 57242 - DNA, 20 bp, Artificial Sequence
  MKO10057242_A_Ugt2b38
  gRNA
aagggcccatgcaattgtgt

SEQ ID NO: 57243 - DNA, 20 bp, Artificial Sequence
  MKO10057243_A_Ugt2b38
  gRNA
tggggccaatggtgtctatg

SEQ ID NO: 57244 - DNA, 20 bp, Artificial Sequence
  MKO10057244_A_Ugt2b38
  gRNA
gatcacctcatagacaccat

SEQ ID NO: 57245 - DNA, 20 bp, Artificial Sequence
  MKO10057245_A_Ugt2b5
  gRNA
gatcgcctcgtagacaccat

SEQ ID NO: 57246 - DNA, 20 bp, Artificial Sequence
  MKO10057246_A_Ugt2b5
  gRNA
tggggccaatggtgtctacg

SEQ ID NO: 57247 - DNA, 20 bp, Artificial Sequence
  MKO10057247_A_Ugt2b5
  gRNA
aagggcccatgcaattgcgt

SEQ ID NO: 57248 - DNA, 20 bp, Artificial Sequence
  MKO10057248_A_Ugt3a1
  gRNA
cgtgtgtcgcaaattctgca

SEQ ID NO: 57249 - DNA, 20 bp, Artificial Sequence
  MKO10057249_A_Ugt3a1
  gRNA
cttatagacgaatatgctta

SEQ ID NO: 57250 - DNA, 20 bp, Artificial Sequence
  MKO10057250_A_Ugt3a1
  gRNA
aaagatgtcccttcgcttct

SEQ ID NO: 57251 - DNA, 20 bp, Artificial Sequence
  MKO10057251_A_Ugt3a2
  gRNA
tcagtatgacagcactatcc

SEQ ID NO: 57252 - DNA, 20 bp, Artificial Sequence
  MKO10057252_A_Ugt3a2
  gRNA
gcataggacaagggggcgct

SEQ ID NO: 57253 - DNA, 20 bp, Artificial Sequence
  MKO10057253_A_Ugt3a2
  gRNA
catgaagaacttgcgacaca

SEQ ID NO: 57254 - DNA, 20 bp, Artificial Sequence
  MKO10057254_A_Ugt8a
  gRNA
aacccggccaccctgtcaat

SEQ ID NO: 57255 - DNA, 20 bp, Artificial Sequence
  MKO10057255_A_Ugt8a
  gRNA
tcgtgttaaacacgaaaaga

SEQ ID NO: 57256 - DNA, 20 bp, Artificial Sequence
  MKO10057256_A_Ugt8a
  gRNA
gcatggggatcttgttagaa

SEQ ID NO: 57257 - DNA, 20 bp, Artificial Sequence
  MKO10057257_A_Uhmk1
  gRNA
gcactgtgcccgagatgttc

SEQ ID NO: 57258 - DNA, 20 bp, Artificial Sequence
  MKO10057258_A_Uhmk1
  gRNA
actcattctccgcactccac

SEQ ID NO: 57259 - DNA, 20 bp, Artificial Sequence
  MKO10057259_A_Uhmk1
  gRNA
tttccagtaaaatgattccg

SEQ ID NO: 57260 - DNA, 20 bp, Artificial Sequence
  MKO10057260_A_Uhrf1bp1l
  gRNA
gcaatcggtgacggaccgtt

SEQ ID NO: 57261 - DNA, 20 bp, Artificial Sequence
  MKO10057261_A_Uhrf1bp1l
  gRNA
cctgaatccgagtaaatctc

SEQ ID NO: 57262 - DNA, 20 bp, Artificial Sequence
  MKO10057262_A_Uhrf1bp1l
  gRNA
tcaccgattgcaactgcctc

SEQ ID NO: 57263 - DNA, 20 bp, Artificial Sequence
  MKO10057263_A_Uhrf1bp1
  gRNA
cgcatcactgatccccgccg

SEQ ID NO: 57264 - DNA, 20 bp, Artificial Sequence
  MKO10057264_A_Uhrf1bp1
  gRNA
gttatagtgtcaaccccaac

SEQ ID NO: 57265 - DNA, 20 bp, Artificial Sequence
  MKO10057265_A_Uhrf1bp1
  gRNA
ggcgataggagactgcccgt

SEQ ID NO: 57266 - DNA, 20 bp, Artificial Sequence
  MKO10057266_A_Uhrf1
  gRNA
tcacagtgcgagcacgagca

SEQ ID NO: 57267 - DNA, 20 bp, Artificial Sequence
  MKO10057267_A_Uhrf1
  gRNA
gactctggcgcacgagcagc

SEQ ID NO: 57268 - DNA, 20 bp, Artificial Sequence
  MKO10057268_A_Uhrf1
  gRNA
tcccatccatagttcgaacc

SEQ ID NO: 57269 - DNA, 20 bp, Artificial Sequence
  MKO10057269_A_Uhrf2
  gRNA
actttatttgactacgacgt

SEQ ID NO: 57270 - DNA, 20 bp, Artificial Sequence
  MKO10057270_A_Uhrf2
  gRNA
tgagtctgaattagacgtag

SEQ ID NO: 57271 - DNA, 20 bp, Artificial Sequence
  MKO10057271_A_Uhrf2
  gRNA
gatgccagagatgtcggcct

SEQ ID NO: 57272 - DNA, 20 bp, Artificial Sequence
  MKO10057272_A_Uimc1
  gRNA
gacccttacctgaccacgac

SEQ ID NO: 57273 - DNA, 20 bp, Artificial Sequence
  MKO10057273_A_Uimc1
  gRNA
gaagaaccaacaaccagtcg

SEQ ID NO: 57274 - DNA, 20 bp, Artificial Sequence
  MKO10057274_A_Uimc1
  gRNA
tgctaccagatctcgacctc

SEQ ID NO: 57275 - DNA, 20 bp, Artificial Sequence
  MKO10057275_A_Ulbp1
  gRNA
tccgaagatcaatccgagaa

SEQ ID NO: 57276 - DNA, 20 bp, Artificial Sequence
  MKO10057276_A_Ulbp1
  gRNA
cacgcatagaataatcatca

SEQ ID NO: 57277 - DNA, 20 bp, Artificial Sequence
  MKO10057277_A_Ulbp1
  gRNA
tctcgaattcatgatccagt

SEQ ID NO: 57278 - DNA, 20 bp, Artificial Sequence
  MKO10057278_A_Ulk1
  gRNA
actaaagcacgaaaacatcg

SEQ ID NO: 57279 - DNA, 20 bp, Artificial Sequence
  MKO10057279_A_Ulk1
  gRNA
aatggctaattctgtctacc

SEQ ID NO: 57280 - DNA, 20 bp, Artificial Sequence
  MKO10057280_A_Ulk1
  gRNA
cactgtgcaggtagtcagcc

SEQ ID NO: 57281 - DNA, 20 bp, Artificial Sequence
  MKO10057281_A_Ulk2
  gRNA
cgtagcgctctatgatgttc

SEQ ID NO: 57282 - DNA, 20 bp, Artificial Sequence
  MKO10057282_A_Ulk2
  gRNA
acttatcagtattgcaatgg

SEQ ID NO: 57283 - DNA, 20 bp, Artificial Sequence
  MKO10057283_A_Ulk2
  gRNA
taccttgcaaataatctgcc

SEQ ID NO: 57284 - DNA, 20 bp, Artificial Sequence
  MKO10057284_A_Ulk3
  gRNA
gcggcagtatgatgcgcgtg

SEQ ID NO: 57285 - DNA, 20 bp, Artificial Sequence
  MKO10057285_A_Ulk3
  gRNA
gacgaaaaacacgtgctccg

SEQ ID NO: 57286 - DNA, 20 bp, Artificial Sequence
  MKO10057286_A_Ulk3
  gRNA
gagagatgtttcgttcatgc

SEQ ID NO: 57287 - DNA, 20 bp, Artificial Sequence
  MKO10057287_A_Ulk4
  gRNA
aactctctcacgacatcttc

SEQ ID NO: 57288 - DNA, 20 bp, Artificial Sequence
  MKO10057288_A_Ulk4
  gRNA
tcagtccccttcacgatttc

SEQ ID NO: 57289 - DNA, 20 bp, Artificial Sequence
  MKO10057289_A_Ulk4
  gRNA
tctagaaaccgtgattgctc

SEQ ID NO: 57290 - DNA, 20 bp, Artificial Sequence
  MKO10057290_A_Umodl1
  gRNA
ttggctaccgtcatgagccg

SEQ ID NO: 57291 - DNA, 20 bp, Artificial Sequence
  MKO10057291_A_Umodl1
  gRNA
gtacactacctgacctcgac

SEQ ID NO: 57292 - DNA, 20 bp, Artificial Sequence
  MKO10057292_A_Umodl1
  gRNA
gacacacagtggcggccccc

SEQ ID NO: 57293 - DNA, 20 bp, Artificial Sequence
  MKO10057293_A_Umod
  gRNA
gtgccgccgtgttgcatcgc

SEQ ID NO: 57294 - DNA, 20 bp, Artificial Sequence
  MKO10057294_A_Umod
  gRNA
gccgtgcagacccgcgtcac

SEQ ID NO: 57295 - DNA, 20 bp, Artificial Sequence
  MKO10057295_A_Umod
  gRNA
tattgcagatcctagttccg

SEQ ID NO: 57296 - DNA, 20 bp, Artificial Sequence
  MKO10057296_A_Umps
  gRNA
gtgaatgctcacgtcgtgcc

SEQ ID NO: 57297 - DNA, 20 bp, Artificial Sequence
  MKO10057297_A_Umps
  gRNA
ggaaaagatcgacgctgaca

SEQ ID NO: 57298 - DNA, 20 bp, Artificial Sequence
  MKO10057298_A_Umps
  gRNA
gacgtcctcaatgaccagac

SEQ ID NO: 57299 - DNA, 20 bp, Artificial Sequence
  MKO10057299_A_Unc119b
  gRNA
cgcatacgtactgacgtcct

SEQ ID NO: 57300 - DNA, 20 bp, Artificial Sequence
  MKO10057300_A_Unc119b
  gRNA
tgatcgagcggcactacttc

SEQ ID NO: 57301 - DNA, 20 bp, Artificial Sequence
  MKO10057301_A_Unc119b
  gRNA
tttcttcgcctccggaccgt

SEQ ID NO: 57302 - DNA, 20 bp, Artificial Sequence
  MKO10057302_A_Unc119
  gRNA
gcgaacaaagcgccctgcat

SEQ ID NO: 57303 - DNA, 20 bp, Artificial Sequence
  MKO10057303_A_Unc119
  gRNA
gtccaggtcccgccggttga

SEQ ID NO: 57304 - DNA, 20 bp, Artificial Sequence
  MKO10057304_A_Unc119
  gRNA
acaacttccgcatgatcgag

SEQ ID NO: 57305 - DNA, 20 bp, Artificial Sequence
  MKO10057305_A_Unc13a
  gRNA
caacacatacgtgacgctga

SEQ ID NO: 57306 - DNA, 20 bp, Artificial Sequence
  MKO10057306_A_Unc13a
  gRNA
gcagctcgaaatgagcgtcc

SEQ ID NO: 57307 - DNA, 20 bp, Artificial Sequence
  MKO10057307_A_Unc13a
  gRNA
accttgggcaccgtcaaact

SEQ ID NO: 57308 - DNA, 20 bp, Artificial Sequence
  MKO10057308_A_Unc13b
  gRNA
cactaacctcatccgactga

SEQ ID NO: 57309 - DNA, 20 bp, Artificial Sequence
  MKO10057309_A_Unc13b
  gRNA
actgaagacaatccgtcagt

SEQ ID NO: 57310 - DNA, 20 bp, Artificial Sequence
  MKO10057310_A_Unc13b
  gRNA
cagttgtgctcttcacgttc

SEQ ID NO: 57311 - DNA, 20 bp, Artificial Sequence
  MKO10057311_A_Unc13c
  gRNA
ttacttacccaccgaacacc

SEQ ID NO: 57312 - DNA, 20 bp, Artificial Sequence
  MKO10057312_A_Unc13c
  gRNA
atagcatgcctgacctccgc

SEQ ID NO: 57313 - DNA, 20 bp, Artificial Sequence
  MKO10057313_A_Unc13c
  gRNA
ttccaaattctccgcactcc

SEQ ID NO: 57314 - DNA, 20 bp, Artificial Sequence
  MKO10057314_A_Unc13d
  gRNA
agcagatgctgcggcgcgtc

SEQ ID NO: 57315 - DNA, 20 bp, Artificial Sequence
  MKO10057315_A_Unc13d
  gRNA
ctatactgtcctgcaccgcc

SEQ ID NO: 57316 - DNA, 20 bp, Artificial Sequence
  MKO10057316_A_Unc13d
  gRNA
tcagcgggacctgctgtatg

SEQ ID NO: 57317 - DNA, 20 bp, Artificial Sequence
  MKO10057317_A_Unc45a
  gRNA
ggggcgtcgcgccgagactc

SEQ ID NO: 57318 - DNA, 20 bp, Artificial Sequence
  MKO10057318_A_Unc45a
  gRNA
gagtctcggcgcgacgcccc

SEQ ID NO: 57319 - DNA, 20 bp, Artificial Sequence
  MKO10057319_A_Unc45a
  gRNA
caatgttcctcagcgactcc

SEQ ID NO: 57320 - DNA, 20 bp, Artificial Sequence
  MKO10057320_A_Unc45b
  gRNA
ttcaaacatcgtctgtaccc

SEQ ID NO: 57321 - DNA, 20 bp, Artificial Sequence
  MKO10057321_A_Unc45b
  gRNA
ttctcaggagagctacgccc

SEQ ID NO: 57322 - DNA, 20 bp, Artificial Sequence
  MKO10057322_A_Unc45b
  gRNA
gcttacctgctcttggatgc

SEQ ID NO: 57323 - DNA, 20 bp, Artificial Sequence
  MKO10057323_A_Unc50
  gRNA
gttcgtctccaacaagtacc

SEQ ID NO: 57324 - DNA, 20 bp, Artificial Sequence
  MKO10057324_A_Unc50
  gRNA
agcccgtacagcaccatgag

SEQ ID NO: 57325 - DNA, 20 bp, Artificial Sequence
  MKO10057325_A_Unc50
  gRNA
gtacgggctgtcgctggcac

SEQ ID NO: 57326 - DNA, 20 bp, Artificial Sequence
  MKO10057326_A_Unc5a
  gRNA
ccgtcgccgaagcgcctctg

SEQ ID NO: 57327 - DNA, 20 bp, Artificial Sequence
  MKO10057327_A_Unc5a
  gRNA
aggtccggatcaacgtatca

SEQ ID NO: 57328 - DNA, 20 bp, Artificial Sequence
  MKO10057328_A_Unc5a
  gRNA
ccgcagaggcgcttcggcga

SEQ ID NO: 57329 - DNA, 20 bp, Artificial Sequence
  MKO10057329_A_Unc5b
  gRNA
acggccacagtcatcgtcta

SEQ ID NO: 57330 - DNA, 20 bp, Artificial Sequence
  MKO10057330_A_Unc5b
  gRNA
gcagctgccgtacttcctat

SEQ ID NO: 57331 - DNA, 20 bp, Artificial Sequence
  MKO10057331_A_Unc5b
  gRNA
gcgcttggccacgatattct

SEQ ID NO: 57332 - DNA, 20 bp, Artificial Sequence
  MKO10057332_A_Unc5cl
  gRNA
ccgcgcatgcgtcccccgtg

SEQ ID NO: 57333 - DNA, 20 bp, Artificial Sequence
  MKO10057333_A_Unc5cl
  gRNA
tgggccagacagcccgcaag

SEQ ID NO: 57334 - DNA, 20 bp, Artificial Sequence
  MKO10057334_A_Unc5cl
  gRNA
agccggggactcatatctcc

SEQ ID NO: 57335 - DNA, 20 bp, Artificial Sequence
  MKO10057335_A_Unc5c
  gRNA
tctgcggaagacattcgagc

SEQ ID NO: 57336 - DNA, 20 bp, Artificial Sequence
  MKO10057336_A_Unc5c
  gRNA
ctactctctcgtctactacg

SEQ ID NO: 57337 - DNA, 20 bp, Artificial Sequence
  MKO10057337_A_Unc5c
  gRNA
tcccttcaggtggccgacac

SEQ ID NO: 57338 - DNA, 20 bp, Artificial Sequence
  MKO10057338_A_Unc5d
  gRNA
gctgcattgtcgcccgccag

SEQ ID NO: 57339 - DNA, 20 bp, Artificial Sequence
  MKO10057339_A_Unc5d
  gRNA
agagcaacccgattgcactc

SEQ ID NO: 57340 - DNA, 20 bp, Artificial Sequence
  MKO10057340_A_Unc5d
  gRNA
aacgctgcctcatttcatcg

SEQ ID NO: 57341 - DNA, 20 bp, Artificial Sequence
  MKO10057341_A_Unc79
  gRNA
cgagatgctccttcagaacg

SEQ ID NO: 57342 - DNA, 20 bp, Artificial Sequence
  MKO10057342_A_Unc79
  gRNA
gttctgaaggagcatctcgc

SEQ ID NO: 57343 - DNA, 20 bp, Artificial Sequence
  MKO10057343_A_Unc79
  gRNA
aacatttatcccgtaccatc

SEQ ID NO: 57344 - DNA, 20 bp, Artificial Sequence
  MKO10057344_A_Unc80
  gRNA
gcagtcctttgaacgagtgt

SEQ ID NO: 57345 - DNA, 20 bp, Artificial Sequence
  MKO10057345_A_Unc80
  gRNA
ccgaagcagctcccatgatg

SEQ ID NO: 57346 - DNA, 20 bp, Artificial Sequence
  MKO10057346_A_Unc80
  gRNA
atctgatctcaccttccgac

SEQ ID NO: 57347 - DNA, 20 bp, Artificial Sequence
  MKO10057347_A_Unc93a
  gRNA
tgagtactgttggtggccgc

SEQ ID NO: 57348 - DNA, 20 bp, Artificial Sequence
  MKO10057348_A_Unc93a
  gRNA
ctttgtagaagccatcccag

SEQ ID NO: 57349 - DNA, 20 bp, Artificial Sequence
  MKO10057349_A_Unc93a
  gRNA
gagcagcctctacagtgagc

SEQ ID NO: 57350 - DNA, 20 bp, Artificial Sequence
  MKO10057350_A_Unc93b1
  gRNA
tactaccgccgcaagcgcct

SEQ ID NO: 57351 - DNA, 20 bp, Artificial Sequence
  MKO10057351_A_Unc93b1
  gRNA
ccaggtagacgccgtaagta

SEQ ID NO: 57352 - DNA, 20 bp, Artificial Sequence
  MKO10057352_A_Unc93b1
  gRNA
gtagtagcgttcccagtagt

SEQ ID NO: 57353 - DNA, 20 bp, Artificial Sequence
  MKO10057353_A_Uncx
  gRNA
gcctcgcgcataaacacgtc

SEQ ID NO: 57354 - DNA, 20 bp, Artificial Sequence
  MKO10057354_A_Uncx
  gRNA
cgcccagcgagcccccgaac

SEQ ID NO: 57355 - DNA, 20 bp, Artificial Sequence
  MKO10057355_A_Uncx
  gRNA
gaccggccagctcgtacacg

SEQ ID NO: 57356 - DNA, 20 bp, Artificial Sequence
  MKO10057356_A_Ung
  gRNA
cgggaagccgtacttcgtca

SEQ ID NO: 57357 - DNA, 20 bp, Artificial Sequence
  MKO10057357_A_Ung
  gRNA
ccaccgaccttgacgaagta

SEQ ID NO: 57358 - DNA, 20 bp, Artificial Sequence
  MKO10057358_A_Ung
  gRNA
ttgtcagggtgggcccgaca

SEQ ID NO: 57359 - DNA, 20 bp, Artificial Sequence
  MKO10057359_A_Unkl
  gRNA
agcgctcacctgtcaatcca

SEQ ID NO: 57360 - DNA, 20 bp, Artificial Sequence
  MKO10057360_A_Unkl
  gRNA
gccggtcactgtctgccaca

SEQ ID NO: 57361 - DNA, 20 bp, Artificial Sequence
  MKO10057361_A_Unkl
  gRNA
tcaggtctgaacggcgttcc

SEQ ID NO: 57362 - DNA, 20 bp, Artificial Sequence
  MKO10057362_A_Unk
  gRNA
gggcactcactcgtcgccct

SEQ ID NO: 57363 - DNA, 20 bp, Artificial Sequence
  MKO10057363_A_Unk
  gRNA
ctactgcacgaagtatgacg

SEQ ID NO: 57364 - DNA, 20 bp, Artificial Sequence
  MKO10057364_A_Unk
  gRNA
gctcccctgtttacgacatc

SEQ ID NO: 57365 - DNA, 20 bp, Artificial Sequence
  MKO10057365_A_Uox
  gRNA
cactcgagcccacgtctacg

SEQ ID NO: 57366 - DNA, 20 bp, Artificial Sequence
  MKO10057366_A_Uox
  gRNA
caagaacactgtgcacgtcc

SEQ ID NO: 57367 - DNA, 20 bp, Artificial Sequence
  MKO10057367_A_Uox
  gRNA
cgaagtccacgtcccgtctc

SEQ ID NO: 57368 - DNA, 20 bp, Artificial Sequence
  MKO10057368_A_Upb1
  gRNA
atgcccccagatcgtgcgcg

SEQ ID NO: 57369 - DNA, 20 bp, Artificial Sequence
  MKO10057369_A_Upb1
  gRNA
cgagccccacgcgcacgatc

SEQ ID NO: 57370 - DNA, 20 bp, Artificial Sequence
  MKO10057370_A_Upb1
  gRNA
tctcgtgtacaaaaagcgaa

SEQ ID NO: 57371 - DNA, 20 bp, Artificial Sequence
  MKO10057371_A_Upf1
  gRNA
acattgtgaatcacctcgtg

SEQ ID NO: 57372 - DNA, 20 bp, Artificial Sequence
  MKO10057372_A_Upf1
  gRNA
acctcccagtccacgcctgc

SEQ ID NO: 57373 - DNA, 20 bp, Artificial Sequence
  MKO10057373_A_Upf1
  gRNA
ttacagtaaaccacgcaggc

SEQ ID NO: 57374 - DNA, 20 bp, Artificial Sequence
  MKO10057374_A_Upf2
  gRNA
ggaacgccatcaattacgaa

SEQ ID NO: 57375 - DNA, 20 bp, Artificial Sequence
  MKO10057375_A_Upf2
  gRNA
gggtgtaaatatgtcgattc

SEQ ID NO: 57376 - DNA, 20 bp, Artificial Sequence
  MKO10057376_A_Upf2
  gRNA
tcagtccttagcggaccttt

SEQ ID NO: 57377 - DNA, 20 bp, Artificial Sequence
  MKO10057377_A_Upf3a
  gRNA
acctcgaagtaatcgtgcgc

SEQ ID NO: 57378 - DNA, 20 bp, Artificial Sequence
  MKO10057378_A_Upf3a
  gRNA
cgctagtcccgagacgctgc

SEQ ID NO: 57379 - DNA, 20 bp, Artificial Sequence
  MKO10057379_A_Upf3a
  gRNA
tgaagatatagccgtcaaaa

SEQ ID NO: 57380 - DNA, 20 bp, Artificial Sequence
  MKO10057380_A_Upf3b
  gRNA
aactcaaaataatcgtgctc

SEQ ID NO: 57381 - DNA, 20 bp, Artificial Sequence
  MKO10057381_A_Upf3b
  gRNA
gccaaaaatcgagaattaat

SEQ ID NO: 57382 - DNA, 20 bp, Artificial Sequence
  MKO10057382_A_Upf3b
  gRNA
tatactcacccttattgtca

SEQ ID NO: 57383 - DNA, 20 bp, Artificial Sequence
  MKO10057383_A_Upk1a
  gRNA
ccactgtgctgtcgtcggac

SEQ ID NO: 57384 - DNA, 20 bp, Artificial Sequence
  MKO10057384_A_Upk1a
  gRNA
ccccactcacatagtcgcgg

SEQ ID NO: 57385 - DNA, 20 bp, Artificial Sequence
  MKO10057385_A_Upk1a
  gRNA
gtaccgcgtgtacccactga

SEQ ID NO: 57386 - DNA, 20 bp, Artificial Sequence
  MKO10057386_A_Upk1b
  gRNA
ccccaaccaatgacgacgaa

SEQ ID NO: 57387 - DNA, 20 bp, Artificial Sequence
  MKO10057387_A_Upk1b
  gRNA
ctccaagtttgcaagcgtcc

SEQ ID NO: 57388 - DNA, 20 bp, Artificial Sequence
  MKO10057388_A_Upk1b
  gRNA
ataacgatgctgactacccc

SEQ ID NO: 57389 - DNA, 20 bp, Artificial Sequence
  MKO10057389_A_Upk2
  gRNA
agctccctgcgcccgcgaca

SEQ ID NO: 57390 - DNA, 20 bp, Artificial Sequence
  MKO10057390_A_Upk2
  gRNA
atttgcgggcacccagtgcc

SEQ ID NO: 57391 - DNA, 20 bp, Artificial Sequence
  MKO10057391_A_Upk2
  gRNA
tgcctccatgtcgcgggcgc

SEQ ID NO: 57392 - DNA, 20 bp, Artificial Sequence
  MKO10057392_A_Upk3a
  gRNA
cttacgccggttggtccaga

SEQ ID NO: 57393 - DNA, 20 bp, Artificial Sequence
  MKO10057393_A_Upk3a
  gRNA
ccatcgacacgtggcccggc

SEQ ID NO: 57394 - DNA, 20 bp, Artificial Sequence
  MKO10057394_A_Upk3a
  gRNA
acctcgtaagagccgctgag

SEQ ID NO: 57395 - DNA, 20 bp, Artificial Sequence
  MKO10057395_A_Upk3bl
  gRNA
aagcggatatgaccagtacg

SEQ ID NO: 57396 - DNA, 20 bp, Artificial Sequence
  MKO10057396_A_Upk3bl
  gRNA
gatgagtgccgagggacccg

SEQ ID NO: 57397 - DNA, 20 bp, Artificial Sequence
  MKO10057397_A_Upk3bl
  gRNA
ggctgtaactcgcctttgcc

SEQ ID NO: 57398 - DNA, 20 bp, Artificial Sequence
  MKO10057398_A_Upk3b
  gRNA
tctgcggcacgtaggcaatc

SEQ ID NO: 57399 - DNA, 20 bp, Artificial Sequence
  MKO10057399_A_Upk3b
  gRNA
cgatcatacagccgctccgt

SEQ ID NO: 57400 - DNA, 20 bp, Artificial Sequence
  MKO10057400_A_Upk3b
  gRNA
acgtgccgcagataacagcc

SEQ ID NO: 57401 - DNA, 20 bp, Artificial Sequence
  MKO10057401_A_Upp1
  gRNA
caccaacctggacgcgcagc

SEQ ID NO: 57402 - DNA, 20 bp, Artificial Sequence
  MKO10057402_A_Upp1
  gRNA
cggctttatacatggcgtag

SEQ ID NO: 57403 - DNA, 20 bp, Artificial Sequence
  MKO10057403_A_Upp1
  gRNA
ctcgtgcaacatgatgccga

SEQ ID NO: 57404 - DNA, 20 bp, Artificial Sequence
  MKO10057404_A_Upp2
  gRNA
tacacatcgtgtgtccgatg

SEQ ID NO: 57405 - DNA, 20 bp, Artificial Sequence
  MKO10057405_A_Upp2
  gRNA
aagatgacctgctcaaatcg

SEQ ID NO: 57406 - DNA, 20 bp, Artificial Sequence
  MKO10057406_A_Upp2
  gRNA
acttacactgacggagagca

SEQ ID NO: 57407 - DNA, 20 bp, Artificial Sequence
  MKO10057407_A_Uprt
  gRNA
gccctggttacctgtcggag

SEQ ID NO: 57408 - DNA, 20 bp, Artificial Sequence
  MKO10057408_A_Uprt
  gRNA
gagactgctgtcgatccata

SEQ ID NO: 57409 - DNA, 20 bp, Artificial Sequence
  MKO10057409_A_Uprt
  gRNA
gatcagacttgttgtagaag

SEQ ID NO: 57410 - DNA, 20 bp, Artificial Sequence
  MKO10057410_A_Uqcc1
  gRNA
ggcttctattatcttcgtga

SEQ ID NO: 57411 - DNA, 20 bp, Artificial Sequence
  MKO10057411_A_Uqcc1
  gRNA
ggtgtagaagatcaagatcg

SEQ ID NO: 57412 - DNA, 20 bp, Artificial Sequence
  MKO10057412_A_Uqcc1
  gRNA
ccgcatgtacacgagctgcg

SEQ ID NO: 57413 - DNA, 20 bp, Artificial Sequence
  MKO10057413_A_Uqcc2
  gRNA
agatggccgctctccgctac

SEQ ID NO: 57414 - DNA, 20 bp, Artificial Sequence
  MKO10057414_A_Uqcc2
  gRNA
ccagtggacgagaccaaacg

SEQ ID NO: 57415 - DNA, 20 bp, Artificial Sequence
  MKO10057415_A_Uqcc2
  gRNA
aggagaagtttgcgcccacc

SEQ ID NO: 57416 - DNA, 20 bp, Artificial Sequence
  MKO10057416_A_Uqcr10
  gRNA
cttcgagcgagccttcgatc

SEQ ID NO: 57417 - DNA, 20 bp, Artificial Sequence
  MKO10057417_A_Uqcr10
  gRNA
cgcgtctgcgccctgatcga

SEQ ID NO: 57418 - DNA, 20 bp, Artificial Sequence
  MKO10057418_A_Uqcr10
  gRNA
aaagcacaagtatgagaaca

SEQ ID NO: 57419 - DNA, 20 bp, Artificial Sequence
  MKO10057419_A_Uqcr11
  gRNA
cctaccaggattcccacagc

SEQ ID NO: 57420 - DNA, 20 bp, Artificial Sequence
  MKO10057420_A_Uqcr11
  gRNA
caggatcagccgccagtccg

SEQ ID NO: 57421 - DNA, 20 bp, Artificial Sequence
  MKO10057421_A_Uqcr11
  gRNA
accagtttctggccagttcc

SEQ ID NO: 57422 - DNA, 20 bp, Artificial Sequence
  MKO10057422_A_Uqcrb
  gRNA
aaaatggcgggccgatctgc

SEQ ID NO: 57423 - DNA, 20 bp, Artificial Sequence
  MKO10057423_A_Uqcrb
  gRNA
tagtttcagcatcaagcaag

SEQ ID NO: 57424 - DNA, 20 bp, Artificial Sequence
  MKO10057424_A_Uqcrb
  gRNA
gtttcgaattaagagagccc

SEQ ID NO: 57425 - DNA, 20 bp, Artificial Sequence
  MKO10057425_A_Uqcrc1
  gRNA
gggtaccgcaaccttcgccc

SEQ ID NO: 57426 - DNA, 20 bp, Artificial Sequence
  MKO10057426_A_Uqcrc1
  gRNA
gaaggttgcggtaccccgca

SEQ ID NO: 57427 - DNA, 20 bp, Artificial Sequence
  MKO10057427_A_Uqcrc1
  gRNA
cctggaatgctgtcgcatgc

SEQ ID NO: 57428 - DNA, 20 bp, Artificial Sequence
  MKO10057428_A_Uqcrc2
  gRNA
tgcaagacgtagtaaatgtg

SEQ ID NO: 57429 - DNA, 20 bp, Artificial Sequence
  MKO10057429_A_Uqcrc2
  gRNA
aacatggcgtacactgtaga

SEQ ID NO: 57430 - DNA, 20 bp, Artificial Sequence
  MKO10057430_A_Uqcrc2
  gRNA
actacgtcttgcatctagtt

SEQ ID NO: 57431 - DNA, 20 bp, Artificial Sequence
  MKO10057431_A_Uqcrfs1
  gRNA
gttgtcggtcgccgcccgct

SEQ ID NO: 57432 - DNA, 20 bp, Artificial Sequence
  MKO10057432_A_Uqcrfs1
  gRNA
cccgttcgcgcccgtcctat

SEQ ID NO: 57433 - DNA, 20 bp, Artificial Sequence
  MKO10057433_A_Uqcrfs1
  gRNA
gagtgcttctgctgacgtac

SEQ ID NO: 57434 - DNA, 20 bp, Artificial Sequence
  MKO10057434_A_Uqcrh
  gRNA
gtgataatcgcgtgtcttcc

SEQ ID NO: 57435 - DNA, 20 bp, Artificial Sequence
  MKO10057435_A_Uqcrh
  gRNA
aatcctcttctgtctgtgac

SEQ ID NO: 57436 - DNA, 20 bp, Artificial Sequence
  MKO10057436_A_Uqcrh
  gRNA
ggaagaagaggaagaactag

SEQ ID NO: 57437 - DNA, 20 bp, Artificial Sequence
  MKO10057437_A_Uqcrq
  gRNA
tcacgtgccgtatccgcgcc

SEQ ID NO: 57438 - DNA, 20 bp, Artificial Sequence
  MKO10057438_A_Uqcrq
  gRNA
gtcaccatgggccgcgagtt

SEQ ID NO: 57439 - DNA, 20 bp, Artificial Sequence
  MKO10057439_A_Uqcrq
  gRNA
gatccctacagcgtttgtag

SEQ ID NO: 57440 - DNA, 20 bp, Artificial Sequence
  MKO10057440_A_Urad
  gRNA
gcacagtggcacggtcgctc

SEQ ID NO: 57441 - DNA, 20 bp, Artificial Sequence
  MKO10057441_A_Urad
  gRNA
ctagcctagacaccgacgac

SEQ ID NO: 57442 - DNA, 20 bp, Artificial Sequence
  MKO10057442_A_Urad
  gRNA
attgatgctctcccgagatc

SEQ ID NO: 57443 - DNA, 20 bp, Artificial Sequence
  MKO10057443_A_Urah
  gRNA
tcttcgacacagagcgctac

SEQ ID NO: 57444 - DNA, 20 bp, Artificial Sequence
  MKO10057444_A_Urah
  gRNA
gcccaggacagcgaccgtcc

SEQ ID NO: 57445 - DNA, 20 bp, Artificial Sequence
  MKO10057445_A_Urah
  gRNA
tgtctagaacgtgagtagtc

SEQ ID NO: 57446 - DNA, 20 bp, Artificial Sequence
  MKO10057446_A_Urb1
  gRNA
tgttgtcatcacccgcaatt

SEQ ID NO: 57447 - DNA, 20 bp, Artificial Sequence
  MKO10057447_A_Urb1
  gRNA
tgatcttacgcatttccacg

SEQ ID NO: 57448 - DNA, 20 bp, Artificial Sequence
  MKO10057448_A_Urb1
  gRNA
tacagggagtgcatgacgtc

SEQ ID NO: 57449 - DNA, 20 bp, Artificial Sequence
  MKO10057449_A_Urb2
  gRNA
aaaggacgaccacacaatcg

SEQ ID NO: 57450 - DNA, 20 bp, Artificial Sequence
  MKO10057450_A_Urb2
  gRNA
gtttcacttctaccgccgtg

SEQ ID NO: 57451 - DNA, 20 bp, Artificial Sequence
  MKO10057451_A_Urb2
  gRNA
ccattagagccgtgatgatc

SEQ ID NO: 57452 - DNA, 20 bp, Artificial Sequence
  MKO10057452_A_Urgcp
  gRNA
acgtccgcacaacaccccgc

SEQ ID NO: 57453 - DNA, 20 bp, Artificial Sequence
  MKO10057453_A_Urgcp
  gRNA
tgcggggtgttgtgcggacg

SEQ ID NO: 57454 - DNA, 20 bp, Artificial Sequence
  MKO10057454_A_Urgcp
  gRNA
tctcatagatggtacaaacg

SEQ ID NO: 57455 - DNA, 20 bp, Artificial Sequence
  MKO10057455_A_Uri1
  gRNA
caagctgtcttacgacgtca

SEQ ID NO: 57456 - DNA, 20 bp, Artificial Sequence
  MKO10057456_A_Uri1
  gRNA
acgtcgtaagacagcttgtc

SEQ ID NO: 57457 - DNA, 20 bp, Artificial Sequence
  MKO10057457_A_Uri1
  gRNA
ctgtgggtttagttgagcat

SEQ ID NO: 57458 - DNA, 20 bp, Artificial Sequence
  MKO10057458_A_Urm1
  gRNA
atatacggaacctccttgtc

SEQ ID NO: 57459 - DNA, 20 bp, Artificial Sequence
  MKO10057459_A_Urm1
  gRNA
gcctcagccgccgtgcagtg

SEQ ID NO: 57460 - DNA, 20 bp, Artificial Sequence
  MKO10057460_A_Urm1
  gRNA
tgctgattaatgatgccgac

SEQ ID NO: 57461 - DNA, 20 bp, Artificial Sequence
  MKO10057461_A_Uroc1
  gRNA
ccgttagtgatgaccagccg

SEQ ID NO: 57462 - DNA, 20 bp, Artificial Sequence
  MKO10057462_A_Uroc1
  gRNA
cacttgcccgttgcctccgt

SEQ ID NO: 57463 - DNA, 20 bp, Artificial Sequence
  MKO10057463_A_Uroc1
  gRNA
gttcctcagtcatcttcgac

SEQ ID NO: 57464 - DNA, 20 bp, Artificial Sequence
  MKO10057464_A_Urod
  gRNA
gccggacgtgtgccactaat

SEQ ID NO: 57465 - DNA, 20 bp, Artificial Sequence
  MKO10057465_A_Urod
  gRNA
cccccttaaggcattgggca

SEQ ID NO: 57466 - DNA, 20 bp, Artificial Sequence
  MKO10057466_A_Urod
  gRNA
aaacagactatactcccgtt

SEQ ID NO: 57467 - DNA, 20 bp, Artificial Sequence
  MKO10057467_A_Uros
  gRNA
gccaagtctgtgtacgtggt

SEQ ID NO: 57468 - DNA, 20 bp, Artificial Sequence
  MKO10057468_A_Uros
  gRNA
tccaaccacgtacacagact

SEQ ID NO: 57469 - DNA, 20 bp, Artificial Sequence
  MKO10057469_A_Uros
  gRNA
ttgcaggagctgcgattgtg

SEQ ID NO: 57470 - DNA, 20 bp, Artificial Sequence
  MKO10057470_A_Usb1
  gRNA
tcagatgtttgtaccgagac

SEQ ID NO: 57471 - DNA, 20 bp, Artificial Sequence
  MKO10057471_A_Usb1
  gRNA
accgcatggcctctttccaa

SEQ ID NO: 57472 - DNA, 20 bp, Artificial Sequence
  MKO10057472_A_Usb1
  gRNA
tgctttgcactgtcgtcctc

SEQ ID NO: 57473 - DNA, 20 bp, Artificial Sequence
  MKO10057473_A_Use1
  gRNA
tccaaccgcgacgtcgccag

SEQ ID NO: 57474 - DNA, 20 bp, Artificial Sequence
  MKO10057474_A_Use1
  gRNA
cagcgagtactcccgcaaag

SEQ ID NO: 57475 - DNA, 20 bp, Artificial Sequence
  MKO10057475_A_Use1
  gRNA
agcgacaaagcagccgtacc

SEQ ID NO: 57476 - DNA, 20 bp, Artificial Sequence
  MKO10057476_A_Usf1
  gRNA
cagtgacgatgccgttgaca

SEQ ID NO: 57477 - DNA, 20 bp, Artificial Sequence
  MKO10057477_A_Usf1
  gRNA
acgtacttgacgttggggtc

SEQ ID NO: 57478 - DNA, 20 bp, Artificial Sequence
  MKO10057478_A_Usf1
  gRNA
tacgtcttccgaactgagaa

SEQ ID NO: 57479 - DNA, 20 bp, Artificial Sequence
  MKO10057479_A_Usf2
  gRNA
ggtgacataccgcgtagtcc

SEQ ID NO: 57480 - DNA, 20 bp, Artificial Sequence
  MKO10057480_A_Usf2
  gRNA
agcctgctgcccccccgcga

SEQ ID NO: 57481 - DNA, 20 bp, Artificial Sequence
  MKO10057481_A_Usf2
  gRNA
ggtcgccgaacgccgcctgc

SEQ ID NO: 57482 - DNA, 20 bp, Artificial Sequence
  MKO10057482_A_Ush1c
  gRNA
atcaaacagcggcaggcggt

SEQ ID NO: 57483 - DNA, 20 bp, Artificial Sequence
  MKO10057483_A_Ush1c
  gRNA
ggcccgagaattccgacaca

SEQ ID NO: 57484 - DNA, 20 bp, Artificial Sequence
  MKO10057484_A_Ush1c
  gRNA
ctcggcctcagcgtgcgtgg

SEQ ID NO: 57485 - DNA, 20 bp, Artificial Sequence
  MKO10057485_A_Ush1g
  gRNA
gcgcaagcaccacgagcgca

SEQ ID NO: 57486 - DNA, 20 bp, Artificial Sequence
  MKO10057486_A_Ush1g
  gRNA
aaaagcgtccgatcgctctc

SEQ ID NO: 57487 - DNA, 20 bp, Artificial Sequence
  MKO10057487_A_Ush1g
  gRNA
atggcatgaccccgactctc

SEQ ID NO: 57488 - DNA, 20 bp, Artificial Sequence
  MKO10057488_A_Ush2a
  gRNA
cagccgtgacattcgatgct

SEQ ID NO: 57489 - DNA, 20 bp, Artificial Sequence
  MKO10057489_A_Ush2a
  gRNA
cagccacattgccgatgtcc

SEQ ID NO: 57490 - DNA, 20 bp, Artificial Sequence
  MKO10057490_A_Ush2a
  gRNA
gtctccagcgtgatacaagt

SEQ ID NO: 57491 - DNA, 20 bp, Artificial Sequence
  MKO10057491_A_Ushbp1
  gRNA
agtctcgaagcgtccattgt

SEQ ID NO: 57492 - DNA, 20 bp, Artificial Sequence
  MKO10057492_A_Ushbp1
  gRNA
gcttagcgagtggtggcgca

SEQ ID NO: 57493 - DNA, 20 bp, Artificial Sequence
  MKO10057493_A_Ushbp1
  gRNA
tggagtcactccggaggcgt

SEQ ID NO: 57494 - DNA, 20 bp, Artificial Sequence
  MKO10057494_A_Usmg5
  gRNA
ttacattcattctacctgtg

SEQ ID NO: 57495 - DNA, 20 bp, Artificial Sequence
  MKO10057495_A_Usmg5
  gRNA
cagtgtgtcctggccacata

SEQ ID NO: 57496 - DNA, 20 bp, Artificial Sequence
  MKO10057496_A_Usmg5
  gRNA
atggctggtgcagaaagtga

SEQ ID NO: 57497 - DNA, 20 bp, Artificial Sequence
  MKO10057497_A_Uso1
  gRNA
cgtagcttcctctacgttac

SEQ ID NO: 57498 - DNA, 20 bp, Artificial Sequence
  MKO10057498_A_Uso1
  gRNA
tcggtcatccagtaacgtag

SEQ ID NO: 57499 - DNA, 20 bp, Artificial Sequence
  MKO10057499_A_Uso1
  gRNA
tataatatctaatgacgaag

SEQ ID NO: 57500 - DNA, 20 bp, Artificial Sequence
  MKO10057500_A_Usp10
  gRNA
cgaggcggggtactggtcaa

SEQ ID NO: 57501 - DNA, 20 bp, Artificial Sequence
  MKO10057501_A_Usp10
  gRNA
cattgaccagtaccccgcct

SEQ ID NO: 57502 - DNA, 20 bp, Artificial Sequence
  MKO10057502_A_Usp10
  gRNA
tcgcagctccctccatacag

SEQ ID NO: 57503 - DNA, 20 bp, Artificial Sequence
  MKO10057503_A_Usp11
  gRNA
aactacatggtcagctggta

SEQ ID NO: 57504 - DNA, 20 bp, Artificial Sequence
  MKO10057504_A_Usp11
  gRNA
ccagccacctattgagcgca

SEQ ID NO: 57505 - DNA, 20 bp, Artificial Sequence
  MKO10057505_A_Usp11
  gRNA
tgaacgagcagtagctctag

SEQ ID NO: 57506 - DNA, 20 bp, Artificial Sequence
  MKO10057506_A_Usp12
  gRNA
ccaaaatagtgctcgttgac

SEQ ID NO: 57507 - DNA, 20 bp, Artificial Sequence
  MKO10057507_A_Usp12
  gRNA
tttacagggcgccaatgcct

SEQ ID NO: 57508 - DNA, 20 bp, Artificial Sequence
  MKO10057508_A_Usp12
  gRNA
ccacgtctccgttccgtaat

SEQ ID NO: 57509 - DNA, 20 bp, Artificial Sequence
  MKO10057509_A_Usp13
  gRNA
ttgttggcatacttcgatac

SEQ ID NO: 57510 - DNA, 20 bp, Artificial Sequence
  MKO10057510_A_Usp13
  gRNA
agggctatttcatagtggtc

SEQ ID NO: 57511 - DNA, 20 bp, Artificial Sequence
  MKO10057511_A_Usp13
  gRNA
gctggtaactcctcaatgtt

SEQ ID NO: 57512 - DNA, 20 bp, Artificial Sequence
  MKO10057512_A_Usp14
  gRNA
ctcgccatgccactctactc

SEQ ID NO: 57513 - DNA, 20 bp, Artificial Sequence
  MKO10057513_A_Usp14
  gRNA
gaatactgatgaacctccaa

SEQ ID NO: 57514 - DNA, 20 bp, Artificial Sequence
  MKO10057514_A_Usp14
  gRNA
cggagctcaccagagtagag

SEQ ID NO: 57515 - DNA, 20 bp, Artificial Sequence
  MKO10057515_A_Usp15
  gRNA
tggcgacgcgcagtcactta

SEQ ID NO: 57516 - DNA, 20 bp, Artificial Sequence
  MKO10057516_A_Usp15
  gRNA
gagaagtccagagttatcga

SEQ ID NO: 57517 - DNA, 20 bp, Artificial Sequence
  MKO10057517_A_Usp15
  gRNA
tgccggcctataccaaggac

SEQ ID NO: 57518 - DNA, 20 bp, Artificial Sequence
  MKO10057518_A_Usp16
  gRNA
gtactgtagctcaaaccgat

SEQ ID NO: 57519 - DNA, 20 bp, Artificial Sequence
  MKO10057519_A_Usp16
  gRNA
taggtgctacaagtgtgacg

SEQ ID NO: 57520 - DNA, 20 bp, Artificial Sequence
  MKO10057520_A_Usp16
  gRNA
gagatccgagcctcactacc

SEQ ID NO: 57521 - DNA, 20 bp, Artificial Sequence
  MKO10057521_A_Usp17la
  gRNA
gtggaggagctaactgtcaa

SEQ ID NO: 57522 - DNA, 20 bp, Artificial Sequence
  MKO10057522_A_Usp17la
  gRNA
tgtgctcttctatgtgcagc

SEQ ID NO: 57523 - DNA, 20 bp, Artificial Sequence
  MKO10057523_A_Usp17la
  gRNA
gtgagacttaccttctggga

SEQ ID NO: 57524 - DNA, 20 bp, Artificial Sequence
  MKO10057524_A_Usp17lb
  gRNA
gcttcataacatcccctgag

SEQ ID NO: 57525 - DNA, 20 bp, Artificial Sequence
  MKO10057525_A_Usp17lb
  gRNA
aaagctttatagtgccccaa

SEQ ID NO: 57526 - DNA, 20 bp, Artificial Sequence
  MKO10057526_A_Usp17lb
  gRNA
gttgctctctccttcccaga

SEQ ID NO: 57527 - DNA, 20 bp, Artificial Sequence
  MKO10057527_A_Usp17lc
  gRNA
cttgtaccatgccccatgtc

SEQ ID NO: 57528 - DNA, 20 bp, Artificial Sequence
  MKO10057528_A_Usp17lc
  gRNA
ctgttcctgaggcacaagtt

SEQ ID NO: 57529 - DNA, 20 bp, Artificial Sequence
  MKO10057529_A_Usp17lc
  gRNA
gtgagacttaccttctggga

SEQ ID NO: 57530 - DNA, 20 bp, Artificial Sequence
  MKO10057530_A_Usp17ld
  gRNA
tgcccagatccatagcaaat

SEQ ID NO: 57531 - DNA, 20 bp, Artificial Sequence
  MKO10057531_A_Usp17ld
  gRNA
atccctgccccaatttgcta

SEQ ID NO: 57532 - DNA, 20 bp, Artificial Sequence
  MKO10057532_A_Usp17ld
  gRNA
gtttctctttccttcccaga

SEQ ID NO: 57533 - DNA, 20 bp, Artificial Sequence
  MKO10057533_A_Usp17le
  gRNA
acataccttcgatcccttcc

SEQ ID NO: 57534 - DNA, 20 bp, Artificial Sequence
  MKO10057534_A_Usp17le
  gRNA
gacatccaggaagggatcga

SEQ ID NO: 57535 - DNA, 20 bp, Artificial Sequence
  MKO10057535_A_Usp17le
  gRNA
gtgagactcaccttctggga

SEQ ID NO: 57536 - DNA, 20 bp, Artificial Sequence
  MKO10057536_A_Usp18
  gRNA
acggcacgttgtatttctgc

SEQ ID NO: 57537 - DNA, 20 bp, Artificial Sequence
  MKO10057537_A_Usp18
  gRNA
ctgtacagcccacgcaaatc

SEQ ID NO: 57538 - DNA, 20 bp, Artificial Sequence
  MKO10057538_A_Usp18
  gRNA
ctcaactctaccttacaatc

SEQ ID NO: 57539 - DNA, 20 bp, Artificial Sequence
  MKO10057539_A_Usp19
  gRNA
aacaggtcccgtacgtctgg

SEQ ID NO: 57540 - DNA, 20 bp, Artificial Sequence
  MKO10057540_A_Usp19
  gRNA
ctgtagaattgttgctcgat

SEQ ID NO: 57541 - DNA, 20 bp, Artificial Sequence
  MKO10057541_A_Usp19
  gRNA
gccagtgtcccttcctcgaa

SEQ ID NO: 57542 - DNA, 20 bp, Artificial Sequence
  MKO10057542_A_Usp1
  gRNA
tctctcttctcgcagcttac

SEQ ID NO: 57543 - DNA, 20 bp, Artificial Sequence
  MKO10057543_A_Usp1
  gRNA
actgcactgacctttgtttc

SEQ ID NO: 57544 - DNA, 20 bp, Artificial Sequence
  MKO10057544_A_Usp1
  gRNA
gaagccaagtccggaaacaa

SEQ ID NO: 57545 - DNA, 20 bp, Artificial Sequence
  MKO10057545_A_Usp20
  gRNA
ggttgctggacctaacctat

SEQ ID NO: 57546 - DNA, 20 bp, Artificial Sequence
  MKO10057546_A_Usp20
  gRNA
gtagcaccagacccggaacg

SEQ ID NO: 57547 - DNA, 20 bp, Artificial Sequence
  MKO10057547_A_Usp20
  gRNA
ggccgttacctcgaggcttc

SEQ ID NO: 57548 - DNA, 20 bp, Artificial Sequence
  MKO10057548_A_Usp21
  gRNA
caccttgagatcaaccgacg

SEQ ID NO: 57549 - DNA, 20 bp, Artificial Sequence
  MKO10057549_A_Usp21
  gRNA
caaggtgcaaccgctccatg

SEQ ID NO: 57550 - DNA, 20 bp, Artificial Sequence
  MKO10057550_A_Usp21
  gRNA
ctgtgaatcccacccgattc

SEQ ID NO: 57551 - DNA, 20 bp, Artificial Sequence
  MKO10057551_A_Usp22
  gRNA
tttcatgaactgcatcgtgc

SEQ ID NO: 57552 - DNA, 20 bp, Artificial Sequence
  MKO10057552_A_Usp22
  gRNA
tctgcgtggactgatcaacc

SEQ ID NO: 57553 - DNA, 20 bp, Artificial Sequence
  MKO10057553_A_Usp22
  gRNA
agttccagctcccgtttagt

SEQ ID NO: 57554 - DNA, 20 bp, Artificial Sequence
  MKO10057554_A_Usp24
  gRNA
accaatgatcagtcaaaacg

SEQ ID NO: 57555 - DNA, 20 bp, Artificial Sequence
  MKO10057555_A_Usp24
  gRNA
tacaaccaatttgtatgagc

SEQ ID NO: 57556 - DNA, 20 bp, Artificial Sequence
  MKO10057556_A_Usp24
  gRNA
tatgcccgaggcatttaaga

SEQ ID NO: 57557 - DNA, 20 bp, Artificial Sequence
  MKO10057557_A_Usp25
  gRNA
tattaccagacagcgcttcc

SEQ ID NO: 57558 - DNA, 20 bp, Artificial Sequence
  MKO10057558_A_Usp25
  gRNA
ccgacattcttcagaccgac

SEQ ID NO: 57559 - DNA, 20 bp, Artificial Sequence
  MKO10057559_A_Usp25
  gRNA
ctgatgtacctgtcgttgcc

SEQ ID NO: 57560 - DNA, 20 bp, Artificial Sequence
  MKO10057560_A_Usp26
  gRNA
tggccgaatactaccttgag

SEQ ID NO: 57561 - DNA, 20 bp, Artificial Sequence
  MKO10057561_A_Usp26
  gRNA
tataggggtcggagttctac

SEQ ID NO: 57562 - DNA, 20 bp, Artificial Sequence
  MKO10057562_A_Usp26
  gRNA
cagtgatgatctcgataaga

SEQ ID NO: 57563 - DNA, 20 bp, Artificial Sequence
  MKO10057563_A_Usp27x
  gRNA
atacacgctcgtcatctagc

SEQ ID NO: 57564 - DNA, 20 bp, Artificial Sequence
  MKO10057564_A_Usp27x
  gRNA
attctcgttgttcgcactat

SEQ ID NO: 57565 - DNA, 20 bp, Artificial Sequence
  MKO10057565_A_Usp27x
  gRNA
gtgagatgtcgtcgctcttt

SEQ ID NO: 57566 - DNA, 20 bp, Artificial Sequence
  MKO10057566_A_Usp28
  gRNA
catctttgttgtcgtgagtg

SEQ ID NO: 57567 - DNA, 20 bp, Artificial Sequence
  MKO10057567_A_Usp28
  gRNA
tgcagcagttgtgtcgtgac

SEQ ID NO: 57568 - DNA, 20 bp, Artificial Sequence
  MKO10057568_A_Usp28
  gRNA
ctgggtgatgtcaccattac

SEQ ID NO: 57569 - DNA, 20 bp, Artificial Sequence
  MKO10057569_A_Usp29
  gRNA
tcatcagagcatgtcgcgat

SEQ ID NO: 57570 - DNA, 20 bp, Artificial Sequence
  MKO10057570_A_Usp29
  gRNA
tcctggtgctccccgcaaaa

SEQ ID NO: 57571 - DNA, 20 bp, Artificial Sequence
  MKO10057571_A_Usp29
  gRNA
gatctgaactctcgaacact

SEQ ID NO: 57572 - DNA, 20 bp, Artificial Sequence
  MKO10057572_A_Usp2
  gRNA
attgggggacgacgtccata

SEQ ID NO: 57573 - DNA, 20 bp, Artificial Sequence
  MKO10057573_A_Usp2
  gRNA
tacttatagcccatgaagcg

SEQ ID NO: 57574 - DNA, 20 bp, Artificial Sequence
  MKO10057574_A_Usp2
  gRNA
aggaacttaccgtgttccca

SEQ ID NO: 57575 - DNA, 20 bp, Artificial Sequence
  MKO10057575_A_Usp30
  gRNA
ggcgtccaagacctcgtcct

SEQ ID NO: 57576 - DNA, 20 bp, Artificial Sequence
  MKO10057576_A_Usp30
  gRNA
cggtgggattgccgctgccc

SEQ ID NO: 57577 - DNA, 20 bp, Artificial Sequence
  MKO10057577_A_Usp30
  gRNA
gtcctgccaagaagtcaccg

SEQ ID NO: 57578 - DNA, 20 bp, Artificial Sequence
  MKO10057578_A_Usp31
  gRNA
ggatacagcttcccgaagtc

SEQ ID NO: 57579 - DNA, 20 bp, Artificial Sequence
  MKO10057579_A_Usp31
  gRNA
caggttattacctgatcagt

SEQ ID NO: 57580 - DNA, 20 bp, Artificial Sequence
  MKO10057580_A_Usp31
  gRNA
tgtacaaaagtgctacacac

SEQ ID NO: 57581 - DNA, 20 bp, Artificial Sequence
  MKO10057581_A_Usp32
  gRNA
ttcccgtacaacatagctcc

SEQ ID NO: 57582 - DNA, 20 bp, Artificial Sequence
  MKO10057582_A_Usp32
  gRNA
gaggccgcaggtcctcttga

SEQ ID NO: 57583 - DNA, 20 bp, Artificial Sequence
  MKO10057583_A_Usp32
  gRNA
gactcaaagatgccttcaag

SEQ ID NO: 57584 - DNA, 20 bp, Artificial Sequence
  MKO10057584_A_Usp33
  gRNA
acctcaccactcttcgagta

SEQ ID NO: 57585 - DNA, 20 bp, Artificial Sequence
  MKO10057585_A_Usp33
  gRNA
ataacaccatactcgaagag

SEQ ID NO: 57586 - DNA, 20 bp, Artificial Sequence
  MKO10057586_A_Usp33
  gRNA
ccacagcaccatacactcgc

SEQ ID NO: 57587 - DNA, 20 bp, Artificial Sequence
  MKO10057587_A_Usp34
  gRNA
attactctcatcttgccacg

SEQ ID NO: 57588 - DNA, 20 bp, Artificial Sequence
  MKO10057588_A_Usp34
  gRNA
taatactcatcctactatag

SEQ ID NO: 57589 - DNA, 20 bp, Artificial Sequence
  MKO10057589_A_Usp34
  gRNA
tgatggactacagctcagaa

SEQ ID NO: 57590 - DNA, 20 bp, Artificial Sequence
  MKO10057590_A_Usp35
  gRNA
tagggcagctccccgcacga

SEQ ID NO: 57591 - DNA, 20 bp, Artificial Sequence
  MKO10057591_A_Usp35
  gRNA
ccctcaccaggatgatcgac

SEQ ID NO: 57592 - DNA, 20 bp, Artificial Sequence
  MKO10057592_A_Usp35
  gRNA
ttcgctcgccaaaattgaga

SEQ ID NO: 57593 - DNA, 20 bp, Artificial Sequence
  MKO10057593_A_Usp36
  gRNA
acccgctctaggtcaccaag

SEQ ID NO: 57594 - DNA, 20 bp, Artificial Sequence
  MKO10057594_A_Usp36
  gRNA
ccaggcaccgagcgtgtgtc

SEQ ID NO: 57595 - DNA, 20 bp, Artificial Sequence
  MKO10057595_A_Usp36
  gRNA
caccattgatgcgatgcaga

SEQ ID NO: 57596 - DNA, 20 bp, Artificial Sequence
  MKO10057596_A_Usp37
  gRNA
tctaataatcctgatctaag

SEQ ID NO: 57597 - DNA, 20 bp, Artificial Sequence
  MKO10057597_A_Usp37
  gRNA
gttgatgtcagcgtcaaaga

SEQ ID NO: 57598 - DNA, 20 bp, Artificial Sequence
  MKO10057598_A_Usp37
  gRNA
gctgactgaagattacccta

SEQ ID NO: 57599 - DNA, 20 bp, Artificial Sequence
  MKO10057599_A_Usp38
  gRNA
tgaaccaagttaactatatg

SEQ ID NO: 57600 - DNA, 20 bp, Artificial Sequence
  MKO10057600_A_Usp38
  gRNA
agagcaccaggtctcacgag

SEQ ID NO: 57601 - DNA, 20 bp, Artificial Sequence
  MKO10057601_A_Usp38
  gRNA
agatctctatgagcctattc

SEQ ID NO: 57602 - DNA, 20 bp, Artificial Sequence
  MKO10057602_A_Usp39
  gRNA
gagtcgtcactgcccgtact

SEQ ID NO: 57603 - DNA, 20 bp, Artificial Sequence
  MKO10057603_A_Usp39
  gRNA
catcaacgcatacgcctgtc

SEQ ID NO: 57604 - DNA, 20 bp, Artificial Sequence
  MKO10057604_A_Usp39
  gRNA
taccgtgatatcctccagcg

SEQ ID NO: 57605 - DNA, 20 bp, Artificial Sequence
  MKO10057605_A_Usp3
  gRNA
gcaggtccaacaaaagcccc

SEQ ID NO: 57606 - DNA, 20 bp, Artificial Sequence
  MKO10057606_A_Usp3
  gRNA
tctgtgcctgtccgctgtaa

SEQ ID NO: 57607 - DNA, 20 bp, Artificial Sequence
  MKO10057607_A_Usp3
  gRNA
ggctttgtaaggtatgtgaa

SEQ ID NO: 57608 - DNA, 20 bp, Artificial Sequence
  MKO10057608_A_Usp40
  gRNA
aacaagcgctgcaactgcaa

SEQ ID NO: 57609 - DNA, 20 bp, Artificial Sequence
  MKO10057609_A_Usp40
  gRNA
gttggtccacccgaagctgt

SEQ ID NO: 57610 - DNA, 20 bp, Artificial Sequence
  MKO10057610_A_Usp40
  gRNA
ctcattcatcgtctatacca

SEQ ID NO: 57611 - DNA, 20 bp, Artificial Sequence
  MKO10057611_A_Usp42
  gRNA
caaagtcatcgagttggcgc

SEQ ID NO: 57612 - DNA, 20 bp, Artificial Sequence
  MKO10057612_A_Usp42
  gRNA
ctccaaatatctggcagacc

SEQ ID NO: 57613 - DNA, 20 bp, Artificial Sequence
  MKO10057613_A_Usp42
  gRNA
accctggtctgccagatatt

SEQ ID NO: 57614 - DNA, 20 bp, Artificial Sequence
  MKO10057614_A_Usp43
  gRNA
cacgtacctcgtctggcgca

SEQ ID NO: 57615 - DNA, 20 bp, Artificial Sequence
  MKO10057615_A_Usp43
  gRNA
ccatccccttgcgccagacg

SEQ ID NO: 57616 - DNA, 20 bp, Artificial Sequence
  MKO10057616_A_Usp43
  gRNA
agccaacacgcagaaaccgc

SEQ ID NO: 57617 - DNA, 20 bp, Artificial Sequence
  MKO10057617_A_Usp44
  gRNA
ataggatcgggccttatcgc

SEQ ID NO: 57618 - DNA, 20 bp, Artificial Sequence
  MKO10057618_A_Usp44
  gRNA
gcacgttggatcctcgtttc

SEQ ID NO: 57619 - DNA, 20 bp, Artificial Sequence
  MKO10057619_A_Usp44
  gRNA
agattgggtgccgtcgagta

SEQ ID NO: 57620 - DNA, 20 bp, Artificial Sequence
  MKO10057620_A_Usp45
  gRNA
tgacagcataactgacgtgc

SEQ ID NO: 57621 - DNA, 20 bp, Artificial Sequence
  MKO10057621_A_Usp45
  gRNA
ttacctgcaaaccacacttg

SEQ ID NO: 57622 - DNA, 20 bp, Artificial Sequence
  MKO10057622_A_Usp45
  gRNA
tgtgaagaaaaacgtgaagc

SEQ ID NO: 57623 - DNA, 20 bp, Artificial Sequence
  MKO10057623_A_Usp46
  gRNA
ccgatcaatgaacactactt

SEQ ID NO: 57624 - DNA, 20 bp, Artificial Sequence
  MKO10057624_A_Usp46
  gRNA
ccgaagtagtgttcattgat

SEQ ID NO: 57625 - DNA, 20 bp, Artificial Sequence
  MKO10057625_A_Usp46
  gRNA
tctgttccacatcgacagag

SEQ ID NO: 57626 - DNA, 20 bp, Artificial Sequence
  MKO10057626_A_Usp47
  gRNA
tcaaatagcacgtcatcgcc

SEQ ID NO: 57627 - DNA, 20 bp, Artificial Sequence
  MKO10057627_A_Usp47
  gRNA
tgaaccgcctcagatgttgt

SEQ ID NO: 57628 - DNA, 20 bp, Artificial Sequence
  MKO10057628_A_Usp47
  gRNA
cacgctgtcatccacgttat

SEQ ID NO: 57629 - DNA, 20 bp, Artificial Sequence
  MKO10057629_A_Usp48
  gRNA
cctgccgaagctccaagttg

SEQ ID NO: 57630 - DNA, 20 bp, Artificial Sequence
  MKO10057630_A_Usp48
  gRNA
agacgatacatcgatccttc

SEQ ID NO: 57631 - DNA, 20 bp, Artificial Sequence
  MKO10057631_A_Usp48
  gRNA
gagaaaggtgttgacgtagc

SEQ ID NO: 57632 - DNA, 20 bp, Artificial Sequence
  MKO10057632_A_Usp49
  gRNA
ttacactcgaagaacagttc

SEQ ID NO: 57633 - DNA, 20 bp, Artificial Sequence
  MKO10057633_A_Usp49
  gRNA
tgcctatgatctctccgcag

SEQ ID NO: 57634 - DNA, 20 bp, Artificial Sequence
  MKO10057634_A_Usp49
  gRNA
atgcatcacgggaaagggtt

SEQ ID NO: 57635 - DNA, 20 bp, Artificial Sequence
  MKO10057635_A_Usp4
  gRNA
atcgattaagtgctccttca

SEQ ID NO: 57636 - DNA, 20 bp, Artificial Sequence
  MKO10057636_A_Usp4
  gRNA
agctgggacatgtacaatgt

SEQ ID NO: 57637 - DNA, 20 bp, Artificial Sequence
  MKO10057637_A_Usp4
  gRNA
agccgtgtttcacgttctgc

SEQ ID NO: 57638 - DNA, 20 bp, Artificial Sequence
  MKO10057638_A_Usp50
  gRNA
aagcttcgtgaagctcgttg

SEQ ID NO: 57639 - DNA, 20 bp, Artificial Sequence
  MKO10057639_A_Usp50
  gRNA
tccgcagtcccgtcacgccc

SEQ ID NO: 57640 - DNA, 20 bp, Artificial Sequence
  MKO10057640_A_Usp50
  gRNA
cgtgacgggactgcggaacc

SEQ ID NO: 57641 - DNA, 20 bp, Artificial Sequence
  MKO10057641_A_Usp51
  gRNA
acttgttaagttctccgacg

SEQ ID NO: 57642 - DNA, 20 bp, Artificial Sequence
  MKO10057642_A_Usp51
  gRNA
gcggcgcgggcaaaccgagc

SEQ ID NO: 57643 - DNA, 20 bp, Artificial Sequence
  MKO10057643_A_Usp51
  gRNA
gcaattccagacgtagatcc

SEQ ID NO: 57644 - DNA, 20 bp, Artificial Sequence
  MKO10057644_A_Usp53
  gRNA
tgccctttaccgaactcgtg

SEQ ID NO: 57645 - DNA, 20 bp, Artificial Sequence
  MKO10057645_A_Usp53
  gRNA
agaaatgtacctcacgagtt

SEQ ID NO: 57646 - DNA, 20 bp, Artificial Sequence
  MKO10057646_A_Usp53
  gRNA
cacttccctcagataacata

SEQ ID NO: 57647 - DNA, 20 bp, Artificial Sequence
  MKO10057647_A_Usp54
  gRNA
acatcttccgccgtagcttt

SEQ ID NO: 57648 - DNA, 20 bp, Artificial Sequence
  MKO10057648_A_Usp54
  gRNA
cgacactctccgcagtgctc

SEQ ID NO: 57649 - DNA, 20 bp, Artificial Sequence
  MKO10057649_A_Usp54
  gRNA
agatgaacaacgcttccagc

SEQ ID NO: 57650 - DNA, 20 bp, Artificial Sequence
  MKO10057650_A_Usp5
  gRNA
catactgcttcccgaatccc

SEQ ID NO: 57651 - DNA, 20 bp, Artificial Sequence
  MKO10057651_A_Usp5
  gRNA
ctaccggtcgccgggtcctc

SEQ ID NO: 57652 - DNA, 20 bp, Artificial Sequence
  MKO10057652_A_Usp5
  gRNA
ggacaagtttgaatttgacg

SEQ ID NO: 57653 - DNA, 20 bp, Artificial Sequence
  MKO10057653_A_Usp6nl
  gRNA
cccggtccgcagctgcatta

SEQ ID NO: 57654 - DNA, 20 bp, Artificial Sequence
  MKO10057654_A_Usp6nl
  gRNA
caagtttgagtgctacatcc

SEQ ID NO: 57655 - DNA, 20 bp, Artificial Sequence
  MKO10057655_A_Usp6nl
  gRNA
tacaaagtcaccgatagatt

SEQ ID NO: 57656 - DNA, 20 bp, Artificial Sequence
  MKO10057656_A_Usp7
  gRNA
agacaccagttggcgctccg

SEQ ID NO: 57657 - DNA, 20 bp, Artificial Sequence
  MKO10057657_A_Usp7
  gRNA
ggcagatttcgcacaaaaca

SEQ ID NO: 57658 - DNA, 20 bp, Artificial Sequence
  MKO10057658_A_Usp7
  gRNA
caaaaacttacgcaactcca

SEQ ID NO: 57659 - DNA, 20 bp, Artificial Sequence
  MKO10057659_A_Usp8
  gRNA
atgcagactagatcgtgatg

SEQ ID NO: 57660 - DNA, 20 bp, Artificial Sequence
  MKO10057660_A_Usp8
  gRNA
tgcggcagccaaacgctctg

SEQ ID NO: 57661 - DNA, 20 bp, Artificial Sequence
  MKO10057661_A_Usp8
  gRNA
gaactgaggtagagttcttt

SEQ ID NO: 57662 - DNA, 20 bp, Artificial Sequence
  MKO10057662_A_Usp9x
  gRNA
atgagatcgttagcccatct

SEQ ID NO: 57663 - DNA, 20 bp, Artificial Sequence
  MKO10057663_A_Usp9x
  gRNA
tggctaagttagcccaagac

SEQ ID NO: 57664 - DNA, 20 bp, Artificial Sequence
  MKO10057664_A_Usp9x
  gRNA
acttgaggacactgactcgc

SEQ ID NO: 57665 - DNA, 20 bp, Artificial Sequence
  MKO10057665_A_Usp9y
  gRNA
aaacatcgcgaaaaaaacgc

SEQ ID NO: 57666 - DNA, 20 bp, Artificial Sequence
  MKO10057666_A_Usp9y
  gRNA
aattattaggtcccgatggg

SEQ ID NO: 57667 - DNA, 20 bp, Artificial Sequence
  MKO10057667_A_Usp9y
  gRNA
caaaacaggaaccacccatc

SEQ ID NO: 57668 - DNA, 20 bp, Artificial Sequence
  MKO10057668_A_Uspl1
  gRNA
ccgaagcttagatgcacatt

SEQ ID NO: 57669 - DNA, 20 bp, Artificial Sequence
  MKO10057669_A_Uspl1
  gRNA
ggatacagtctaaccagcac

SEQ ID NO: 57670 - DNA, 20 bp, Artificial Sequence
  MKO10057670_A_Uspl1
  gRNA
atgccactcaggaacaatat

SEQ ID NO: 57671 - DNA, 20 bp, Artificial Sequence
  MKO10057671_A_Ust
  gRNA
aactatttcttccgtcgctt

SEQ ID NO: 57672 - DNA, 20 bp, Artificial Sequence
  MKO10057672_A_Ust
  gRNA
tccatggtcatccaagtaag

SEQ ID NO: 57673 - DNA, 20 bp, Artificial Sequence
  MKO10057673_A_Ust
  gRNA
tgatccgcacccccagcatg

SEQ ID NO: 57674 - DNA, 20 bp, Artificial Sequence
  MKO10057674_A_Utf1
  gRNA
gcgtgcgccgaacttgctga

SEQ ID NO: 57675 - DNA, 20 bp, Artificial Sequence
  MKO10057675_A_Utf1
  gRNA
ggctgaacccggctcgccca

SEQ ID NO: 57676 - DNA, 20 bp, Artificial Sequence
  MKO10057676_A_Utf1
  gRNA
cttcgaccaaaccgtttctc

SEQ ID NO: 57677 - DNA, 20 bp, Artificial Sequence
  MKO10057677_A_Utp11l
  gRNA
gcctggctttcgaaaacgcc

SEQ ID NO: 57678 - DNA, 20 bp, Artificial Sequence
  MKO10057678_A_Utp11l
  gRNA
gctgaagctcatgagaactc

SEQ ID NO: 57679 - DNA, 20 bp, Artificial Sequence
  MKO10057679_A_Utp11l
  gRNA
tgagatgaaaagagttgcag

SEQ ID NO: 57680 - DNA, 20 bp, Artificial Sequence
  MKO10057680_A_Utp14a
  gRNA
agtcaaatcgaagaagactc

SEQ ID NO: 57681 - DNA, 20 bp, Artificial Sequence
  MKO10057681_A_Utp14a
  gRNA
agaccagcctcagatctctc

SEQ ID NO: 57682 - DNA, 20 bp, Artificial Sequence
  MKO10057682_A_Utp14a
  gRNA
gttcccttagtggaaaaaat

SEQ ID NO: 57683 - DNA, 20 bp, Artificial Sequence
  MKO10057683_A_Utp14b
  gRNA
tcatcttcactcgtactcag

SEQ ID NO: 57684 - DNA, 20 bp, Artificial Sequence
  MKO10057684_A_Utp14b
  gRNA
tgagtttctgtaatacctcc

SEQ ID NO: 57685 - DNA, 20 bp, Artificial Sequence
  MKO10057685_A_Utp14b
  gRNA
ccgatcacaagcagctaata

SEQ ID NO: 57686 - DNA, 20 bp, Artificial Sequence
  MKO10057686_A_Utp15
  gRNA
ctgtgaagatattcgatgct

SEQ ID NO: 57687 - DNA, 20 bp, Artificial Sequence
  MKO10057687_A_Utp15
  gRNA
taagacccctgttcagatta

SEQ ID NO: 57688 - DNA, 20 bp, Artificial Sequence
  MKO10057688_A_Utp15
  gRNA
gctcccctcaggcagtttga

SEQ ID NO: 57689 - DNA, 20 bp, Artificial Sequence
  MKO10057689_A_Utp18
  gRNA
gagttgacatgtcgaacaat

SEQ ID NO: 57690 - DNA, 20 bp, Artificial Sequence
  MKO10057690_A_Utp18
  gRNA
acatccacgtctcttccaag

SEQ ID NO: 57691 - DNA, 20 bp, Artificial Sequence
  MKO10057691_A_Utp18
  gRNA
aagctcagatgaatcggaag

SEQ ID NO: 57692 - DNA, 20 bp, Artificial Sequence
  MKO10057692_A_Utp20
  gRNA
cgtcgagacttacttcttcg

SEQ ID NO: 57693 - DNA, 20 bp, Artificial Sequence
  MKO10057693_A_Utp20
  gRNA
cttgtaaagatacgagagcg

SEQ ID NO: 57694 - DNA, 20 bp, Artificial Sequence
  MKO10057694_A_Utp20
  gRNA
cggtaccgaaatgttccgta

SEQ ID NO: 57695 - DNA, 20 bp, Artificial Sequence
  MKO10057695_A_Utp23
  gRNA
ctttgtgaaggcggtcgagg

SEQ ID NO: 57696 - DNA, 20 bp, Artificial Sequence
  MKO10057696_A_Utp23
  gRNA
cgcctcgaccgccttcacaa

SEQ ID NO: 57697 - DNA, 20 bp, Artificial Sequence
  MKO10057697_A_Utp23
  gRNA
ctttctgccaggcggcgctg

SEQ ID NO: 57698 - DNA, 20 bp, Artificial Sequence
  MKO10057698_A_Utp3
  gRNA
agttccatgaagcgcgatct

SEQ ID NO: 57699 - DNA, 20 bp, Artificial Sequence
  MKO10057699_A_Utp3
  gRNA
aaagccaaaatccgacgacg

SEQ ID NO: 57700 - DNA, 20 bp, Artificial Sequence
  MKO10057700_A_Utp3
  gRNA
acagataattcagcggcgct

SEQ ID NO: 57701 - DNA, 20 bp, Artificial Sequence
  MKO10057701_A_Utp6
  gRNA
ttggtcgtgcttcagcgaag

SEQ ID NO: 57702 - DNA, 20 bp, Artificial Sequence
  MKO10057702_A_Utp6
  gRNA
aagcacgaccaaagacaccc

SEQ ID NO: 57703 - DNA, 20 bp, Artificial Sequence
  MKO10057703_A_Utp6
  gRNA
tgcaggatgatgttcagctc

SEQ ID NO: 57704 - DNA, 20 bp, Artificial Sequence
  MKO10057704_A_Utrn
  gRNA
aaatcgagcgtttatccatt

SEQ ID NO: 57705 - DNA, 20 bp, Artificial Sequence
  MKO10057705_A_Utrn
  gRNA
aagctcttggatcttctcga

SEQ ID NO: 57706 - DNA, 20 bp, Artificial Sequence
  MKO10057706_A_Utrn
  gRNA
caatgtcaaccgagtgctac

SEQ ID NO: 57707 - DNA, 20 bp, Artificial Sequence
  MKO10057707_A_Uts2b
  gRNA
tcttctcacactaaaaaacg

SEQ ID NO: 57708 - DNA, 20 bp, Artificial Sequence
  MKO10057708_A_Uts2b
  gRNA
gagaagttgacccgaaatcc

SEQ ID NO: 57709 - DNA, 20 bp, Artificial Sequence
  MKO10057709_A_Uts2b
  gRNA
ttacagaggcccttccacgc

SEQ ID NO: 57710 - DNA, 20 bp, Artificial Sequence
  MKO10057710_A_Uts2r
  gRNA
ttaccgtaagctgttggcgc

SEQ ID NO: 57711 - DNA, 20 bp, Artificial Sequence
  MKO10057711_A_Uts2r
  gRNA
gtacgtctatgtggtcaacc

SEQ ID NO: 57712 - DNA, 20 bp, Artificial Sequence
  MKO10057712_A_Uts2r
  gRNA
aacgctatgcagcagtactg

SEQ ID NO: 57713 - DNA, 20 bp, Artificial Sequence
  MKO10057713_A_Uts2
  gRNA
tgcttgaggaagacgctctt

SEQ ID NO: 57714 - DNA, 20 bp, Artificial Sequence
  MKO10057714_A_Uts2
  gRNA
tgtggtttcaggctttcgct

SEQ ID NO: 57715 - DNA, 20 bp, Artificial Sequence
  MKO10057715_A_Uts2
  gRNA
cactgtactgagtcgtctct

SEQ ID NO: 57716 - DNA, 20 bp, Artificial Sequence
  MKO10057716_A_Uty
  gRNA
gttcaacagcgtcttcatct

SEQ ID NO: 57717 - DNA, 20 bp, Artificial Sequence
  MKO10057717_A_Uty
  gRNA
gatgaagacgctgttgaaca

SEQ ID NO: 57718 - DNA, 20 bp, Artificial Sequence
  MKO10057718_A_Uty
  gRNA
acagtttacagactgactac

SEQ ID NO: 57719 - DNA, 20 bp, Artificial Sequence
  MKO10057719_A_Uvrag
  gRNA
ttcatcaacagaatccgacg

SEQ ID NO: 57720 - DNA, 20 bp, Artificial Sequence
  MKO10057720_A_Uvrag
  gRNA
agcggcgtctccgacatctc

SEQ ID NO: 57721 - DNA, 20 bp, Artificial Sequence
  MKO10057721_A_Uvrag
  gRNA
tgttccgagcagcgatgttc

SEQ ID NO: 57722 - DNA, 20 bp, Artificial Sequence
  MKO10057722_A_Uvssa
  gRNA
tgaagagctcatccacgatc

SEQ ID NO: 57723 - DNA, 20 bp, Artificial Sequence
  MKO10057723_A_Uvssa
  gRNA
tgagcgagtcccgagcagca

SEQ ID NO: 57724 - DNA, 20 bp, Artificial Sequence
  MKO10057724_A_Uvssa
  gRNA
ccgagaggcggatctcggca

SEQ ID NO: 57725 - DNA, 20 bp, Artificial Sequence
  MKO10057725_A_Uxs1
  gRNA
ggggcaactttgttaacatg

SEQ ID NO: 57726 - DNA, 20 bp, Artificial Sequence
  MKO10057726_A_Uxs1
  gRNA
gatcgaaagcaagattgaag

SEQ ID NO: 57727 - DNA, 20 bp, Artificial Sequence
  MKO10057727_A_Uxt
  gRNA
cctataggaaactaatcact

SEQ ID NO: 57728 - DNA, 20 bp, Artificial Sequence
  MKO10057728_A_Uxt
  gRNA
ggtgctggatcatcgagaca

SEQ ID NO: 57729 - DNA, 20 bp, Artificial Sequence
  MKO10057729_A_Uxt
  gRNA
atttcttagttgaagatata

SEQ ID NO: 57730 - DNA, 20 bp, Artificial Sequence
  MKO10057730_A_V1ra8
  gRNA
tactcaagaactattattac

SEQ ID NO: 57731 - DNA, 20 bp, Artificial Sequence
  MKO10057731_A_V1ra8
  gRNA
tgtaataatagttcttgagt

SEQ ID NO: 57732 - DNA, 20 bp, Artificial Sequence
  MKO10057732_A_V1ra8
  gRNA
gaatagctgctattaaaatt

SEQ ID NO: 57733 - DNA, 20 bp, Artificial Sequence
  MKO10057733_A_V1rd18
  gRNA
ggatgtatcgtgagtagaca

SEQ ID NO: 57734 - DNA, 20 bp, Artificial Sequence
  MKO10057734_A_V1rd18
  gRNA
agaattcttcactcgcctcg

SEQ ID NO: 57735 - DNA, 20 bp, Artificial Sequence
  MKO10057735_A_V1rd18
  gRNA
aaatgtcattgcaatgcctc

SEQ ID NO: 57736 - DNA, 20 bp, Artificial Sequence
  MKO10057736_A_V1rd19
  gRNA
ggatgtatcgtgagtagaca

SEQ ID NO: 57737 - DNA, 20 bp, Artificial Sequence
  MKO10057737_A_V1rd19
  gRNA
agaattcttcactcgcctcg

SEQ ID NO: 57738 - DNA, 20 bp, Artificial Sequence
  MKO10057738_A_V1rd19
  gRNA
aaatgtcattgcaatgcctc

SEQ ID NO: 57739 - DNA, 20 bp, Artificial Sequence
  MKO10057739_A_Vac14
  gRNA
gctttaatgacgcagacagc

SEQ ID NO: 57740 - DNA, 20 bp, Artificial Sequence
  MKO10057740_A_Vac14
  gRNA
cctctacaatatcgtcaaag

SEQ ID NO: 57741 - DNA, 20 bp, Artificial Sequence
  MKO10057741_A_Vac14
  gRNA
agtaaatcctctcccgcaaa

SEQ ID NO: 57742 - DNA, 20 bp, Artificial Sequence
  MKO10057742_A_Vamp1
  gRNA
tgaccgggctgacgccttgc

SEQ ID NO: 57743 - DNA, 20 bp, Artificial Sequence
  MKO10057743_A_Vamp1
  gRNA
tacaatcactaccacgatga

SEQ ID NO: 57744 - DNA, 20 bp, Artificial Sequence
  MKO10057744_A_Vamp1
  gRNA
ctgctgtaaccgcctgttac

SEQ ID NO: 57745 - DNA, 20 bp, Artificial Sequence
  MKO10057745_A_Vamp2
  gRNA
ccaagctcaagcgcaaatac

SEQ ID NO: 57746 - DNA, 20 bp, Artificial Sequence
  MKO10057746_A_Vamp2
  gRNA
gcagtctcctgttactagta

SEQ ID NO: 57747 - DNA, 20 bp, Artificial Sequence
  MKO10057747_A_Vamp2
  gRNA
tgcaggggggccaccctcgc

SEQ ID NO: 57748 - DNA, 20 bp, Artificial Sequence
  MKO10057748_A_Vamp3
  gRNA
gtggcagcacttgaccccga

SEQ ID NO: 57749 - DNA, 20 bp, Artificial Sequence
  MKO10057749_A_Vamp3
  gRNA
ttgttgcagatgtgggcgat

SEQ ID NO: 57750 - DNA, 20 bp, Artificial Sequence
  MKO10057750_A_Vamp3
  gRNA
tgaccgcgcagatgcactgc

SEQ ID NO: 57751 - DNA, 20 bp, Artificial Sequence
  MKO10057751_A_Vamp4
  gRNA
catttgccttcgaagctgtt

SEQ ID NO: 57752 - DNA, 20 bp, Artificial Sequence
  MKO10057752_A_Vamp4
  gRNA
acagatccaaacagcttcga

SEQ ID NO: 57753 - DNA, 20 bp, Artificial Sequence
  MKO10057753_A_Vamp4
  gRNA
tcaaactagtgttcagaatc

SEQ ID NO: 57754 - DNA, 20 bp, Artificial Sequence
  MKO10057754_A_Vamp5
  gRNA
tatccggtgccgggtctact

SEQ ID NO: 57755 - DNA, 20 bp, Artificial Sequence
  MKO10057755_A_Vamp5
  gRNA
ccagcttgccgtgacgctcc

SEQ ID NO: 57756 - DNA, 20 bp, Artificial Sequence
  MKO10057756_A_Vamp5
  gRNA
cctggagcgtcacggcaagc

SEQ ID NO: 57757 - DNA, 20 bp, Artificial Sequence
  MKO10057757_A_Vamp7
  gRNA
aactcgctattcatagcata

SEQ ID NO: 57758 - DNA, 20 bp, Artificial Sequence
  MKO10057758_A_Vamp7
  gRNA
taagagcctagacaaagtga

SEQ ID NO: 57759 - DNA, 20 bp, Artificial Sequence
  MKO10057759_A_Vamp7
  gRNA
ttcattacatctgccaagac

SEQ ID NO: 57760 - DNA, 20 bp, Artificial Sequence
  MKO10057760_A_Vamp8
  gRNA
gtgccggaaatgaccgagtt

SEQ ID NO: 57761 - DNA, 20 bp, Artificial Sequence
  MKO10057761_A_Vamp8
  gRNA
gtcatttccggcactcccac

SEQ ID NO: 57762 - DNA, 20 bp, Artificial Sequence
  MKO10057762_A_Vamp8
  gRNA
cttcaagacaacgtcccaga

SEQ ID NO: 57763 - DNA, 20 bp, Artificial Sequence
  MKO10057763_A_Vangl1
  gRNA
gataccgaatccacgtattc

SEQ ID NO: 57764 - DNA, 20 bp, Artificial Sequence
  MKO10057764_A_Vangl1
  gRNA
gctggattgcaagcgctatc

SEQ ID NO: 57765 - DNA, 20 bp, Artificial Sequence
  MKO10057765_A_Vangl1
  gRNA
gcaatacgcagtctctcttg

SEQ ID NO: 57766 - DNA, 20 bp, Artificial Sequence
  MKO10057766_A_Vangl2
  gRNA
accgacaccgctctaagagc

SEQ ID NO: 57767 - DNA, 20 bp, Artificial Sequence
  MKO10057767_A_Vangl2
  gRNA
cgtgttacgagctctgctca

SEQ ID NO: 57768 - DNA, 20 bp, Artificial Sequence
  MKO10057768_A_Vangl2
  gRNA
cctcgtagtagtactcattg

SEQ ID NO: 57769 - DNA, 20 bp, Artificial Sequence
  MKO10057769_A_Vapa
  gRNA
tgttgggccgcacacagtac

SEQ ID NO: 57770 - DNA, 20 bp, Artificial Sequence
  MKO10057770_A_Vapa
  gRNA
ggaagagtgcaagcgactcc

SEQ ID NO: 57771 - DNA, 20 bp, Artificial Sequence
  MKO10057771_A_Vapa
  gRNA
tggcaggggtccgtcttgtt

SEQ ID NO: 57772 - DNA, 20 bp, Artificial Sequence
  MKO10057772_A_Vapb
  gRNA
tctgtcttggatgcactcgt

SEQ ID NO: 57773 - DNA, 20 bp, Artificial Sequence
  MKO10057773_A_Vapb
  gRNA
tccgcctgacacttctgata

SEQ ID NO: 57774 - DNA, 20 bp, Artificial Sequence
  MKO10057774_A_Vapb
  gRNA
gtcagggactttgcggctgc

SEQ ID NO: 57775 - DNA, 20 bp, Artificial Sequence
  MKO10057775_A_Vars2
  gRNA
accaggccgcttcaacatac

SEQ ID NO: 57776 - DNA, 20 bp, Artificial Sequence
  MKO10057776_A_Vars2
  gRNA
gcacgcgatccccacgcatc

SEQ ID NO: 57777 - DNA, 20 bp, Artificial Sequence
  MKO10057777_A_Vars2
  gRNA
tgtggcaggcaccggatgcg

SEQ ID NO: 57778 - DNA, 20 bp, Artificial Sequence
  MKO10057778_A_Vars
  gRNA
taacacttgtgtccggcaac

SEQ ID NO: 57779 - DNA, 20 bp, Artificial Sequence
  MKO10057779_A_Vars
  gRNA
cagtgactcacgtatcggaa

SEQ ID NO: 57780 - DNA, 20 bp, Artificial Sequence
  MKO10057780_A_Vars
  gRNA
acccgcgcagctcaaaaaag

SEQ ID NO: 57781 - DNA, 20 bp, Artificial Sequence
  MKO10057781_A_Vash1
  gRNA
cgctcagggacgggcgtcgt

SEQ ID NO: 57782 - DNA, 20 bp, Artificial Sequence
  MKO10057782_A_Vash1
  gRNA
aagcggcctacggccgctgc

SEQ ID NO: 57783 - DNA, 20 bp, Artificial Sequence
  MKO10057783_A_Vash1
  gRNA
cgccctgggtatgagccgaa

SEQ ID NO: 57784 - DNA, 20 bp, Artificial Sequence
  MKO10057784_A_Vash2
  gRNA
gacaagttgcttccactcga

SEQ ID NO: 57785 - DNA, 20 bp, Artificial Sequence
  MKO10057785_A_Vash2
  gRNA
gctgatagggaaccgctcaa

SEQ ID NO: 57786 - DNA, 20 bp, Artificial Sequence
  MKO10057786_A_Vash2
  gRNA
gagccagtctgggatcgtca

SEQ ID NO: 57787 - DNA, 20 bp, Artificial Sequence
  MKO10057787_A_Vasn
  gRNA
cgacgcgcttgatcgcctcc

SEQ ID NO: 57788 - DNA, 20 bp, Artificial Sequence
  MKO10057788_A_Vasn
  gRNA
gaggcgatcaagcgcgtcga

SEQ ID NO: 57789 - DNA, 20 bp, Artificial Sequence
  MKO10057789_A_Vasn
  gRNA
ccgaattcgccacatccaac

SEQ ID NO: 57790 - DNA, 20 bp, Artificial Sequence
  MKO10057790_A_Vasp
  gRNA
gtacttgacaccccgaatga

SEQ ID NO: 57791 - DNA, 20 bp, Artificial Sequence
  MKO10057791_A_Vasp
  gRNA
caagatgcagccggatcagc

SEQ ID NO: 57792 - DNA, 20 bp, Artificial Sequence
  MKO10057792_A_Vasp
  gRNA
gcatcttgcggccaacaact

SEQ ID NO: 57793 - DNA, 20 bp, Artificial Sequence
  MKO10057793_A_Vat1l
  gRNA
cgagcacggacatgccttcg

SEQ ID NO: 57794 - DNA, 20 bp, Artificial Sequence
  MKO10057794_A_Vat1l
  gRNA
gaaattgccaacctccgcga

SEQ ID NO: 57795 - DNA, 20 bp, Artificial Sequence
  MKO10057795_A_Vat1l
  gRNA
gctctgggggacagcgtaaa

SEQ ID NO: 57796 - DNA, 20 bp, Artificial Sequence
  MKO10057796_A_Vat1
  gRNA
ggtggaactcgtcaatagcg

SEQ ID NO: 57797 - DNA, 20 bp, Artificial Sequence
  MKO10057797_A_Vat1
  gRNA
gtgatggtgttgaaccggtc

SEQ ID NO: 57798 - DNA, 20 bp, Artificial Sequence
  MKO10057798_A_Vat1
  gRNA
caattatatcaccgcctaca

SEQ ID NO: 57799 - DNA, 20 bp, Artificial Sequence
  MKO10057799_A_Vav1
  gRNA
caaagagttcactgcgcttg

SEQ ID NO: 57800 - DNA, 20 bp, Artificial Sequence
  MKO10057800_A_Vav1
  gRNA
caaagtcctgcacatcgaag

SEQ ID NO: 57801 - DNA, 20 bp, Artificial Sequence
  MKO10057801_A_Vav1
  gRNA
aacgacgaagatatttacag

SEQ ID NO: 57802 - DNA, 20 bp, Artificial Sequence
  MKO10057802_A_Vav2
  gRNA
aaaatgatgacgacgtctac

SEQ ID NO: 57803 - DNA, 20 bp, Artificial Sequence
  MKO10057803_A_Vav2
  gRNA
cctttgcagcgagcatgacc

SEQ ID NO: 57804 - DNA, 20 bp, Artificial Sequence
  MKO10057804_A_Vav2
  gRNA
ctataggccatttccatcag

SEQ ID NO: 57805 - DNA, 20 bp, Artificial Sequence
  MKO10057805_A_Vav3
  gRNA
gttcaacagtgtcgcctgcc

SEQ ID NO: 57806 - DNA, 20 bp, Artificial Sequence
  MKO10057806_A_Vav3
  gRNA
tccaggtttgccgaagatgc

SEQ ID NO: 57807 - DNA, 20 bp, Artificial Sequence
  MKO10057807_A_Vav3
  gRNA
tagggacgaaacttagcttc

SEQ ID NO: 57808 - DNA, 20 bp, Artificial Sequence
  MKO10057808_A_Vax1
  gRNA
ccggtgccactcggacaccg

SEQ ID NO: 57809 - DNA, 20 bp, Artificial Sequence
  MKO10057809_A_Vax1
  gRNA
tgtcgccggatcctagtccg

SEQ ID NO: 57810 - DNA, 20 bp, Artificial Sequence
  MKO10057810_A_Vax1
  gRNA
gtcctccgccccgttgacga

SEQ ID NO: 57811 - DNA, 20 bp, Artificial Sequence
  MKO10057811_A_Vax2
  gRNA
aagtacgggtccgcttgggt

SEQ ID NO: 57812 - DNA, 20 bp, Artificial Sequence
  MKO10057812_A_Vax2
  gRNA
acacaggtagcgcgagtccg

SEQ ID NO: 57813 - DNA, 20 bp, Artificial Sequence
  MKO10057813_A_Vax2
  gRNA
tcacggagagcaccgcggag

SEQ ID NO: 57814 - DNA, 20 bp, Artificial Sequence
  MKO10057814_A_Vbp1
  gRNA
ggactgaagctttgcagtac

SEQ ID NO: 57815 - DNA, 20 bp, Artificial Sequence
  MKO10057815_A_Vbp1
  gRNA
ctactgataaagtatgccta

SEQ ID NO: 57816 - DNA, 20 bp, Artificial Sequence
  MKO10057816_A_Vbp1
  gRNA
gattctttcatgaagcagcc

SEQ ID NO: 57817 - DNA, 20 bp, Artificial Sequence
  MKO10057817_A_Vcam1
  gRNA
gtcctcaccttcgcgtttag

SEQ ID NO: 57818 - DNA, 20 bp, Artificial Sequence
  MKO10057818_A_Vcam1
  gRNA
gccggtcacggtcaagtgtt

SEQ ID NO: 57819 - DNA, 20 bp, Artificial Sequence
  MKO10057819_A_Vcam1
  gRNA
agacagcccactaaacgcga

SEQ ID NO: 57820 - DNA, 20 bp, Artificial Sequence
  MKO10057820_A_Vcan
  gRNA
gaactttgccgctgctcaac

SEQ ID NO: 57821 - DNA, 20 bp, Artificial Sequence
  MKO10057821_A_Vcan
  gRNA
cctacacatcccgatgatgt

SEQ ID NO: 57822 - DNA, 20 bp, Artificial Sequence
  MKO10057822_A_Vcan
  gRNA
aaattcactcgtgttgtaat

SEQ ID NO: 57823 - DNA, 20 bp, Artificial Sequence
  MKO10057823_A_Vcl
  gRNA
ttcccctagagccgtcaatg

SEQ ID NO: 57824 - DNA, 20 bp, Artificial Sequence
  MKO10057824_A_Vcl
  gRNA
gcgcgggattacctcattga

SEQ ID NO: 57825 - DNA, 20 bp, Artificial Sequence
  MKO10057825_A_Vcl
  gRNA
ccaggaacaccgtgtgatgt

SEQ ID NO: 57826 - DNA, 20 bp, Artificial Sequence
  MKO10057826_A_Vcpip1
  gRNA
ttcggtcccttcgtttcgaa

SEQ ID NO: 57827 - DNA, 20 bp, Artificial Sequence
  MKO10057827_A_Vcpip1
  gRNA
cgagcgtgtcgtgcaaatac

SEQ ID NO: 57828 - DNA, 20 bp, Artificial Sequence
  MKO10057828_A_Vcpip1
  gRNA
gactaacacaactgagccga

SEQ ID NO: 57829 - DNA, 20 bp, Artificial Sequence
  MKO10057829_A_Vcpkmt
  gRNA
ttgttacgaacaacgtacaa

SEQ ID NO: 57830 - DNA, 20 bp, Artificial Sequence
  MKO10057830_A_Vcpkmt
  gRNA
gtcaccagactacatattga

SEQ ID NO: 57831 - DNA, 20 bp, Artificial Sequence
  MKO10057831_A_Vcpkmt
  gRNA
agactgtatatactatgagg

SEQ ID NO: 57832 - DNA, 20 bp, Artificial Sequence
  MKO10057832_A_Vcp
  gRNA
gtttctctcacctttacgga

SEQ ID NO: 57833 - DNA, 20 bp, Artificial Sequence
  MKO10057833_A_Vcp
  gRNA
taactcacctctcgcttgat

SEQ ID NO: 57834 - DNA, 20 bp, Artificial Sequence
  MKO10057834_A_Vcp
  gRNA
caaacctgatgacatctcct

SEQ ID NO: 57835 - DNA, 20 bp, Artificial Sequence
  MKO10057835_A_Vdac1
  gRNA
tcgtcattctcgccgaacac

SEQ ID NO: 57836 - DNA, 20 bp, Artificial Sequence
  MKO10057836_A_Vdac1
  gRNA
gccctcgatccggggcgctc

SEQ ID NO: 57837 - DNA, 20 bp, Artificial Sequence
  MKO10057837_A_Vdac1
  gRNA
cggcgagaatgacgaatcaa

SEQ ID NO: 57838 - DNA, 20 bp, Artificial Sequence
  MKO10057838_A_Vdac2
  gRNA
ttaccctgtgttcggtgaaa

SEQ ID NO: 57839 - DNA, 20 bp, Artificial Sequence
  MKO10057839_A_Vdac2
  gRNA
agctttgccgaggtcagcat

SEQ ID NO: 57840 - DNA, 20 bp, Artificial Sequence
  MKO10057840_A_Vdac2
  gRNA
ctctgtccccagagtgttat

SEQ ID NO: 57841 - DNA, 20 bp, Artificial Sequence
  MKO10057841_A_Vdac3
  gRNA
aatgtttctagggtttggca

SEQ ID NO: 57842 - DNA, 20 bp, Artificial Sequence
  MKO10057842_A_Vdac3
  gRNA
ctcacacgtgagtatgcagc

SEQ ID NO: 57843 - DNA, 20 bp, Artificial Sequence
  MKO10057843_A_Vdac3
  gRNA
caccactccactacaagact

SEQ ID NO: 57844 - DNA, 20 bp, Artificial Sequence
  MKO10057844_A_Vdr
  gRNA
gtacttacgtctgcacgaat

SEQ ID NO: 57845 - DNA, 20 bp, Artificial Sequence
  MKO10057845_A_Vdr
  gRNA
ctgccggctcaaacgctgcg

SEQ ID NO: 57846 - DNA, 20 bp, Artificial Sequence
  MKO10057846_A_Vdr
  gRNA
tgtccacgcagcgtttgagc

SEQ ID NO: 57847 - DNA, 20 bp, Artificial Sequence
  MKO10057847_A_Vegfa
  gRNA
ttctcgctccgtagtagccg

SEQ ID NO: 57848 - DNA, 20 bp, Artificial Sequence
  MKO10057848_A_Vegfa
  gRNA
ctgccgtccgattgagaccc

SEQ ID NO: 57849 - DNA, 20 bp, Artificial Sequence
  MKO10057849_A_Vegfa
  gRNA
tcggacggcagtagcttcgc

SEQ ID NO: 57850 - DNA, 20 bp, Artificial Sequence
  MKO10057850_A_Vegfb
  gRNA
ctggtacctgcattcggact

SEQ ID NO: 57851 - DNA, 20 bp, Artificial Sequence
  MKO10057851_A_Vegfb
  gRNA
gcaacaccaagtccgaatgc

SEQ ID NO: 57852 - DNA, 20 bp, Artificial Sequence
  MKO10057852_A_Vegfb
  gRNA
ccagtacccgagcagtcagc

SEQ ID NO: 57853 - DNA, 20 bp, Artificial Sequence
  MKO10057853_A_Vegfc
  gRNA
gactcaatgcatgccacgtg

SEQ ID NO: 57854 - DNA, 20 bp, Artificial Sequence
  MKO10057854_A_Vegfc
  gRNA
agcagcccaccctcaatacc

SEQ ID NO: 57855 - DNA, 20 bp, Artificial Sequence
  MKO10057855_A_Vegfc
  gRNA
agacatcagctcatctacgc

SEQ ID NO: 57856 - DNA, 20 bp, Artificial Sequence
  MKO10057856_A_Veph1
  gRNA
gagcaattcccctacctcac

SEQ ID NO: 57857 - DNA, 20 bp, Artificial Sequence
  MKO10057857_A_Veph1
  gRNA
cgtgcagaagccttagtaga

SEQ ID NO: 57858 - DNA, 20 bp, Artificial Sequence
  MKO10057858_A_Veph1
  gRNA
catcaccaaggcggatctgc

SEQ ID NO: 57859 - DNA, 20 bp, Artificial Sequence
  MKO10057859_A_Vezf1
  gRNA
acacacatggtgcgccacga

SEQ ID NO: 57860 - DNA, 20 bp, Artificial Sequence
  MKO10057860_A_Vezf1
  gRNA
ggacagcagccgaacttcgt

SEQ ID NO: 57861 - DNA, 20 bp, Artificial Sequence
  MKO10057861_A_Vezf1
  gRNA
tagttgaaaccaacgaagtt

SEQ ID NO: 57862 - DNA, 20 bp, Artificial Sequence
  MKO10057862_A_Vezt
  gRNA
gtggcaaggacaccgggttt

SEQ ID NO: 57863 - DNA, 20 bp, Artificial Sequence
  MKO10057863_A_Vezt
  gRNA
cagtgagtccagccgaaacc

SEQ ID NO: 57864 - DNA, 20 bp, Artificial Sequence
  MKO10057864_A_Vezt
  gRNA
tccactttaccagtacctac

SEQ ID NO: 57865 - DNA, 20 bp, Artificial Sequence
  MKO10057865_A_Vgf
  gRNA
gaagcgcgccacacgcgctc

SEQ ID NO: 57866 - DNA, 20 bp, Artificial Sequence
  MKO10057866_A_Vgf
  gRNA
gaacgcactcctgttcgccg

SEQ ID NO: 57867 - DNA, 20 bp, Artificial Sequence
  MKO10057867_A_Vgf
  gRNA
gtccgcggccgaatgtagtt

SEQ ID NO: 57868 - DNA, 20 bp, Artificial Sequence
  MKO10057868_A_Vgll1
  gRNA
ctttgcgctctctatccgtg

SEQ ID NO: 57869 - DNA, 20 bp, Artificial Sequence
  MKO10057869_A_Vgll1
  gRNA
agagcatgcccccgaatcag

SEQ ID NO: 57870 - DNA, 20 bp, Artificial Sequence
  MKO10057870_A_Vgll1
  gRNA
acggatagagagcgcaaagt

SEQ ID NO: 57871 - DNA, 20 bp, Artificial Sequence
  MKO10057871_A_Vgll2
  gRNA
acgacccgtacctggtggta

SEQ ID NO: 57872 - DNA, 20 bp, Artificial Sequence
  MKO10057872_A_Vgll2
  gRNA
gtgtaggcggctgcgaaata

SEQ ID NO: 57873 - DNA, 20 bp, Artificial Sequence
  MKO10057873_A_Vgll2
  gRNA
ccccacttcgacccgcgcta

SEQ ID NO: 57874 - DNA, 20 bp, Artificial Sequence
  MKO10057874_A_Vgll3
  gRNA
atgtatcacccccagccgta

SEQ ID NO: 57875 - DNA, 20 bp, Artificial Sequence
  MKO10057875_A_Vgll3
  gRNA
ccctacagcctgctatcatc

SEQ ID NO: 57876 - DNA, 20 bp, Artificial Sequence
  MKO10057876_A_Vgll3
  gRNA
tgccatcagtgcgagctgcc

SEQ ID NO: 57877 - DNA, 20 bp, Artificial Sequence
  MKO10057877_A_Vgll4
  gRNA
accgagttaggcgccggctc

SEQ ID NO: 57878 - DNA, 20 bp, Artificial Sequence
  MKO10057878_A_Vgll4
  gRNA
gggggctgcagcccgttcaa

SEQ ID NO: 57879 - DNA, 20 bp, Artificial Sequence
  MKO10057879_A_Vgll4
  gRNA
agagcacttccgtcggagcc

SEQ ID NO: 57880 - DNA, 20 bp, Artificial Sequence
  MKO10057880_A_Vhl
  gRNA
cgttccaataatgccccgga

SEQ ID NO: 57881 - DNA, 20 bp, Artificial Sequence
  MKO10057881_A_Vhl
  gRNA
taggctgtccatcgacattg

SEQ ID NO: 57882 - DNA, 20 bp, Artificial Sequence
  MKO10057882_A_Vhl
  gRNA
cgcgcgtcgtgctgcctttg

SEQ ID NO: 57883 - DNA, 20 bp, Artificial Sequence
  MKO10057883_A_Vil1
  gRNA
ccagcgactgttgcacgtca

SEQ ID NO: 57884 - DNA, 20 bp, Artificial Sequence
  MKO10057884_A_Vil1
  gRNA
ccttgacgtgcaacagtcgc

SEQ ID NO: 57885 - DNA, 20 bp, Artificial Sequence
  MKO10057885_A_Vil1
  gRNA
gcaacgagagcgagactttc

SEQ ID NO: 57886 - DNA, 20 bp, Artificial Sequence
  MKO10057886_A_Vill
  gRNA
ccctgatgtgaagcagtcgc

SEQ ID NO: 57887 - DNA, 20 bp, Artificial Sequence
  MKO10057887_A_Vill
  gRNA
gcccgggatggacatcaacc

SEQ ID NO: 57888 - DNA, 20 bp, Artificial Sequence
  MKO10057888_A_Vill
  gRNA
tgtgctgcaccgagagtcac

SEQ ID NO: 57889 - DNA, 20 bp, Artificial Sequence
  MKO10057889_A_Vimp
  gRNA
tgccgcttaacaacaacatc

SEQ ID NO: 57890 - DNA, 20 bp, Artificial Sequence
  MKO10057890_A_Vimp
  gRNA
tctgacaaaaagcctttgcg

SEQ ID NO: 57891 - DNA, 20 bp, Artificial Sequence
  MKO10057891_A_Vimp
  gRNA
gcctcaaagccctcagtcga

SEQ ID NO: 57892 - DNA, 20 bp, Artificial Sequence
  MKO10057892_A_Vim
  gRNA
cagggcatcgttgttccggt

SEQ ID NO: 57893 - DNA, 20 bp, Artificial Sequence
  MKO10057893_A_Vim
  gRNA
gcgccagcagtatgaaagcg

SEQ ID NO: 57894 - DNA, 20 bp, Artificial Sequence
  MKO10057894_A_Vim
  gRNA
agcaggagtcaaacgagtac

SEQ ID NO: 57895 - DNA, 20 bp, Artificial Sequence
  MKO10057895_A_Vipas39
  gRNA
cgtcatccacgatgtctcga

SEQ ID NO: 57896 - DNA, 20 bp, Artificial Sequence
  MKO10057896_A_Vipas39
  gRNA
tttagctgttcacgtccctc

SEQ ID NO: 57897 - DNA, 20 bp, Artificial Sequence
  MKO10057897_A_Vipas39
  gRNA
ccctcaggtagaactagacc

SEQ ID NO: 57898 - DNA, 20 bp, Artificial Sequence
  MKO10057898_A_Vipr1
  gRNA
agggctcttaccgtgaatgg

SEQ ID NO: 57899 - DNA, 20 bp, Artificial Sequence
  MKO10057899_A_Vipr1
  gRNA
cctgctggccaacgacccct

SEQ ID NO: 57900 - DNA, 20 bp, Artificial Sequence
  MKO10057900_A_Vipr1
  gRNA
gaaacagcgtcagcagtgcc

SEQ ID NO: 57901 - DNA, 20 bp, Artificial Sequence
  MKO10057901_A_Vipr2
  gRNA
acagtttccccaacgtctgc

SEQ ID NO: 57902 - DNA, 20 bp, Artificial Sequence
  MKO10057902_A_Vipr2
  gRNA
tacctctctgattctccgtt

SEQ ID NO: 57903 - DNA, 20 bp, Artificial Sequence
  MKO10057903_A_Vipr2
  gRNA
ccagatttcatagatgcgtg

SEQ ID NO: 57904 - DNA, 20 bp, Artificial Sequence
  MKO10057904_A_Vip
  gRNA
cagaagtctgctgtaatcgc

SEQ ID NO: 57905 - DNA, 20 bp, Artificial Sequence
  MKO10057905_A_Vip
  gRNA
cagcgattacagcagacttc

SEQ ID NO: 57906 - DNA, 20 bp, Artificial Sequence
  MKO10057906_A_Vip
  gRNA
gagtgtcgtttgattggcac

SEQ ID NO: 57907 - DNA, 20 bp, Artificial Sequence
  MKO10057907_A_Vit
  gRNA
cgagagtccttcatcgtcgc

SEQ ID NO: 57908 - DNA, 20 bp, Artificial Sequence
  MKO10057908_A_Vit
  gRNA
cgacatacctgcgacgatga

SEQ ID NO: 57909 - DNA, 20 bp, Artificial Sequence
  MKO10057909_A_Vit
  gRNA
agacgccagtgccgtaaaca

SEQ ID NO: 57910 - DNA, 20 bp, Artificial Sequence
  MKO10057910_A_Vkorc1l1
  gRNA
agccgggctacctggaggcc

SEQ ID NO: 57911 - DNA, 20 bp, Artificial Sequence
  MKO10057911_A_Vkorc1l1
  gRNA
gtcgtttgtaattgatgatg

SEQ ID NO: 57912 - DNA, 20 bp, Artificial Sequence
  MKO10057912_A_Vkorc1l1
  gRNA
gcccgtcctgctgagagtgt

SEQ ID NO: 57913 - DNA, 20 bp, Artificial Sequence
  MKO10057913_A_Vkorc1
  gRNA
agttccctggtgtccgtcgc

SEQ ID NO: 57914 - DNA, 20 bp, Artificial Sequence
  MKO10057914_A_Vkorc1
  gRNA
ttaccgcgcgctctgcgatg

SEQ ID NO: 57915 - DNA, 20 bp, Artificial Sequence
  MKO10057915_A_Vkorc1
  gRNA
agtgcaagccgcacgagtcc

SEQ ID NO: 57916 - DNA, 20 bp, Artificial Sequence
  MKO10057916_A_Vldlr
  gRNA
gacagcggcgccactgcaag

SEQ ID NO: 57917 - DNA, 20 bp, Artificial Sequence
  MKO10057917_A_Vldlr
  gRNA
gcacactcacggcactgttc

SEQ ID NO: 57918 - DNA, 20 bp, Artificial Sequence
  MKO10057918_A_Vldlr
  gRNA
tcagaaccgtcttcgcaatc

SEQ ID NO: 57919 - DNA, 20 bp, Artificial Sequence
  MKO10057919_A_Vma21
  gRNA
cagggatacctgaactctgg

SEQ ID NO: 57920 - DNA, 20 bp, Artificial Sequence
  MKO10057920_A_Vma21
  gRNA
cgctgcagcctccagagttc

SEQ ID NO: 57921 - DNA, 20 bp, Artificial Sequence
  MKO10057921_A_Vma21
  gRNA
gttgtaaaatacaagccgat

SEQ ID NO: 57922 - DNA, 20 bp, Artificial Sequence
  MKO10057922_A_Vmac
  gRNA
tgagcgcacgattggtgcgc

SEQ ID NO: 57923 - DNA, 20 bp, Artificial Sequence
  MKO10057923_A_Vmac
  gRNA
cgccgtgcaccgacgcgcag

SEQ ID NO: 57924 - DNA, 20 bp, Artificial Sequence
  MKO10057924_A_Vmac
  gRNA
cagcccgaggctgtagctgc

SEQ ID NO: 57925 - DNA, 20 bp, Artificial Sequence
  MKO10057925_A_Vmn1r-ps103
  gRNA
catacacatatctagcatta

SEQ ID NO: 57926 - DNA, 20 bp, Artificial Sequence
  MKO10057926_A_Vmn1r-ps103
  gRNA
accaaaagtttctattgcct

SEQ ID NO: 57927 - DNA, 20 bp, Artificial Sequence
  MKO10057927_A_Vmn1r-ps103
  gRNA
atacattctatcataagtac

SEQ ID NO: 57928 - DNA, 20 bp, Artificial Sequence
  MKO10057928_A_Vmn1r100
  gRNA
catttgaagagcacagaaca

SEQ ID NO: 57929 - DNA, 20 bp, Artificial Sequence
  MKO10057929_A_Vmn1r100
  gRNA
ggcctctccatgtctgctca

SEQ ID NO: 57930 - DNA, 20 bp, Artificial Sequence
  MKO10057930_A_Vmn1r100
  gRNA
gcctacaatgaatccagaag

SEQ ID NO: 57931 - DNA, 20 bp, Artificial Sequence
  MKO10057931_A_Vmn1r101
  gRNA
gccctctccatgtctgctca

SEQ ID NO: 57932 - DNA, 20 bp, Artificial Sequence
  MKO10057932_A_Vmn1r101
  gRNA
cagttgaagagcacagaaca

SEQ ID NO: 57933 - DNA, 20 bp, Artificial Sequence
  MKO10057933_A_Vmn1r101
  gRNA
tagagcaagtgtcacaaaca

SEQ ID NO: 57934 - DNA, 20 bp, Artificial Sequence
  MKO10057934_A_Vmn1r103
  gRNA
accctctcaatgtctgatca

SEQ ID NO: 57935 - DNA, 20 bp, Artificial Sequence
  MKO10057935_A_Vmn1r103
  gRNA
cagttgaagagcacagaaca

SEQ ID NO: 57936 - DNA, 20 bp, Artificial Sequence
  MKO10057936_A_Vmn1r103
  gRNA
taacatccacatttcaatta

SEQ ID NO: 57937 - DNA, 20 bp, Artificial Sequence
  MKO10057937_A_Vmn1r104
  gRNA
cacttgaagagcacagaaca

SEQ ID NO: 57938 - DNA, 20 bp, Artificial Sequence
  MKO10057938_A_Vmn1r104
  gRNA
gccctttccatgtctgctca

SEQ ID NO: 57939 - DNA, 20 bp, Artificial Sequence
  MKO10057939_A_Vmn1r104
  gRNA
gcctacaatgaacccagaag

SEQ ID NO: 57940 - DNA, 20 bp, Artificial Sequence
  MKO10057940_A_Vmn1r107
  gRNA
catttgaagagcacagaaca

SEQ ID NO: 57941 - DNA, 20 bp, Artificial Sequence
  MKO10057941_A_Vmn1r107
  gRNA
gccctctccatgtctgctca

SEQ ID NO: 57942 - DNA, 20 bp, Artificial Sequence
  MKO10057942_A_Vmn1r107
  gRNA
gcctacaatgaatccagaag

SEQ ID NO: 57943 - DNA, 20 bp, Artificial Sequence
  MKO10057943_A_Vmn1r10
  gRNA
cattcacctcagatatgata

SEQ ID NO: 57944 - DNA, 20 bp, Artificial Sequence
  MKO10057944_A_Vmn1r10
  gRNA
atacatccatatcatatctg

SEQ ID NO: 57945 - DNA, 20 bp, Artificial Sequence
  MKO10057945_A_Vmn1r10
  gRNA
tcctctgataataatgttca

SEQ ID NO: 57946 - DNA, 20 bp, Artificial Sequence
  MKO10057946_A_Vmn1r111
  gRNA
taaatccgtgaaaaccactg

SEQ ID NO: 57947 - DNA, 20 bp, Artificial Sequence
  MKO10057947_A_Vmn1r111
  gRNA
catttgaagagcacagaaca

SEQ ID NO: 57948 - DNA, 20 bp, Artificial Sequence
  MKO10057948_A_Vmn1r111
  gRNA
gttattcttgttacagttgt

SEQ ID NO: 57949 - DNA, 20 bp, Artificial Sequence
  MKO10057949_A_Vmn1r112
  gRNA
catttgaagagcacagaaca

SEQ ID NO: 57950 - DNA, 20 bp, Artificial Sequence
  MKO10057950_A_Vmn1r112
  gRNA
ggcctctccatgtctgctca

SEQ ID NO: 57951 - DNA, 20 bp, Artificial Sequence
  MKO10057951_A_Vmn1r112
  gRNA
gtgttattgtctattatctg

SEQ ID NO: 57952 - DNA, 20 bp, Artificial Sequence
  MKO10057952_A_Vmn1r113
  gRNA
ggagttaccatgaacagaca

SEQ ID NO: 57953 - DNA, 20 bp, Artificial Sequence
  MKO10057953_A_Vmn1r113
  gRNA
tgcatactcatttcttcgta

SEQ ID NO: 57954 - DNA, 20 bp, Artificial Sequence
  MKO10057954_A_Vmn1r113
  gRNA
tgtccaccagtttgtcactc

SEQ ID NO: 57955 - DNA, 20 bp, Artificial Sequence
  MKO10057955_A_Vmn1r114
  gRNA
gccctctccatgtctgttcg

SEQ ID NO: 57956 - DNA, 20 bp, Artificial Sequence
  MKO10057956_A_Vmn1r114
  gRNA
cagagcaagtgtcccaaatt

SEQ ID NO: 57957 - DNA, 20 bp, Artificial Sequence
  MKO10057957_A_Vmn1r114
  gRNA
gaccatgatgctcatgaatg

SEQ ID NO: 57958 - DNA, 20 bp, Artificial Sequence
  MKO10057958_A_Vmn1r115
  gRNA
cccagtatctgcctacacaa

SEQ ID NO: 57959 - DNA, 20 bp, Artificial Sequence
  MKO10057959_A_Vmn1r115
  gRNA
gagacgagaatgtatataaa

SEQ ID NO: 57960 - DNA, 20 bp, Artificial Sequence
  MKO10057960_A_Vmn1r115
  gRNA
gagaagtataatggagacac

SEQ ID NO: 57961 - DNA, 20 bp, Artificial Sequence
  MKO10057961_A_Vmn1r116
  gRNA
gtggcttaaaaacacctgtc

SEQ ID NO: 57962 - DNA, 20 bp, Artificial Sequence
  MKO10057962_A_Vmn1r116
  gRNA
catttgaagagcacagaaca

SEQ ID NO: 57963 - DNA, 20 bp, Artificial Sequence
  MKO10057963_A_Vmn1r116
  gRNA
gccctctccatgtctgctca

SEQ ID NO: 57964 - DNA, 20 bp, Artificial Sequence
  MKO10057964_A_Vmn1r117
  gRNA
gccctctcgatgtctgctca

SEQ ID NO: 57965 - DNA, 20 bp, Artificial Sequence
  MKO10057965_A_Vmn1r117
  gRNA
cagttgaagagcacagaaca

SEQ ID NO: 57966 - DNA, 20 bp, Artificial Sequence
  MKO10057966_A_Vmn1r117
  gRNA
cagagcaagtgtcacaaaca

SEQ ID NO: 57967 - DNA, 20 bp, Artificial Sequence
  MKO10057967_A_Vmn1r118
  gRNA
taaatccgtgaaaaccactg

SEQ ID NO: 57968 - DNA, 20 bp, Artificial Sequence
  MKO10057968_A_Vmn1r118
  gRNA
catttgaagagcagagaaca

SEQ ID NO: 57969 - DNA, 20 bp, Artificial Sequence
  MKO10057969_A_Vmn1r118
  gRNA
gttattcttgttacagttgt

SEQ ID NO: 57970 - DNA, 20 bp, Artificial Sequence
  MKO10057970_A_Vmn1r119
  gRNA
cttgtgttccaactgtgtcc

SEQ ID NO: 57971 - DNA, 20 bp, Artificial Sequence
  MKO10057971_A_Vmn1r119
  gRNA
ttctaaacagaagcccagac

SEQ ID NO: 57972 - DNA, 20 bp, Artificial Sequence
  MKO10057972_A_Vmn1r119
  gRNA
gccctctccatgtctgctca

SEQ ID NO: 57973 - DNA, 20 bp, Artificial Sequence
  MKO10057973_A_Vmn1r11
  gRNA
caagaagacacatattagct

SEQ ID NO: 57974 - DNA, 20 bp, Artificial Sequence
  MKO10057974_A_Vmn1r11
  gRNA
cagtcccaatacctcgctgt

SEQ ID NO: 57975 - DNA, 20 bp, Artificial Sequence
  MKO10057975_A_Vmn1r11
  gRNA
gtgaatgaaagtctgttgac

SEQ ID NO: 57976 - DNA, 20 bp, Artificial Sequence
  MKO10057976_A_Vmn1r120
  gRNA
tgcattctcatctcttcaca

SEQ ID NO: 57977 - DNA, 20 bp, Artificial Sequence
  MKO10057977_A_Vmn1r120
  gRNA
gtggcttaaaatcacctttc

SEQ ID NO: 57978 - DNA, 20 bp, Artificial Sequence
  MKO10057978_A_Vmn1r120
  gRNA
ttctaaacagagacccagaa

SEQ ID NO: 57979 - DNA, 20 bp, Artificial Sequence
  MKO10057979_A_Vmn1r121
  gRNA
gccttctccatgtctgttcg

SEQ ID NO: 57980 - DNA, 20 bp, Artificial Sequence
  MKO10057980_A_Vmn1r121
  gRNA
aattcctctccagtcttgac

SEQ ID NO: 57981 - DNA, 20 bp, Artificial Sequence
  MKO10057981_A_Vmn1r121
  gRNA
cagagcaagtgtcccaaatt

SEQ ID NO: 57982 - DNA, 20 bp, Artificial Sequence
  MKO10057982_A_Vmn1r122
  gRNA
accctctccatgtctgatca

SEQ ID NO: 57983 - DNA, 20 bp, Artificial Sequence
  MKO10057983_A_Vmn1r122
  gRNA
cagttgaagagcacagaaca

SEQ ID NO: 57984 - DNA, 20 bp, Artificial Sequence
  MKO10057984_A_Vmn1r122
  gRNA
taacatccacattccaatta

SEQ ID NO: 57985 - DNA, 20 bp, Artificial Sequence
  MKO10057985_A_Vmn1r123
  gRNA
catttgaagatcacagaaca

SEQ ID NO: 57986 - DNA, 20 bp, Artificial Sequence
  MKO10057986_A_Vmn1r123
  gRNA
gtggattaaaatcacctgtc

SEQ ID NO: 57987 - DNA, 20 bp, Artificial Sequence
  MKO10057987_A_Vmn1r123
  gRNA
gccctctccatgtctgctca

SEQ ID NO: 57988 - DNA, 20 bp, Artificial Sequence
  MKO10057988_A_Vmn1r124
  gRNA
caacactaaagtgcagatac

SEQ ID NO: 57989 - DNA, 20 bp, Artificial Sequence
  MKO10057989_A_Vmn1r124
  gRNA
tacattctcttctcttcatg

SEQ ID NO: 57990 - DNA, 20 bp, Artificial Sequence
  MKO10057990_A_Vmn1r124
  gRNA
agaattcttcagtcacatag

SEQ ID NO: 57991 - DNA, 20 bp, Artificial Sequence
  MKO10057991_A_Vmn1r125
  gRNA
ggcctatccatgtctgctca

SEQ ID NO: 57992 - DNA, 20 bp, Artificial Sequence
  MKO10057992_A_Vmn1r125
  gRNA
taaatccatgaaaaccactg

SEQ ID NO: 57993 - DNA, 20 bp, Artificial Sequence
  MKO10057993_A_Vmn1r125
  gRNA
catttgaagagcacagaaca

SEQ ID NO: 57994 - DNA, 20 bp, Artificial Sequence
  MKO10057994_A_Vmn1r126
  gRNA
gccctctccatgtctgttcg

SEQ ID NO: 57995 - DNA, 20 bp, Artificial Sequence
  MKO10057995_A_Vmn1r126
  gRNA
cagagcaagtgtcccaaatt

SEQ ID NO: 57996 - DNA, 20 bp, Artificial Sequence
  MKO10057996_A_Vmn1r126
  gRNA
gaccatgatgctcatgaatg

SEQ ID NO: 57997 - DNA, 20 bp, Artificial Sequence
  MKO10057997_A_Vmn1r127
  gRNA
accctctcaatgtctgatca

SEQ ID NO: 57998 - DNA, 20 bp, Artificial Sequence
  MKO10057998_A_Vmn1r127
  gRNA
cagttgaaaagcacagaaca

SEQ ID NO: 57999 - DNA, 20 bp, Artificial Sequence
  MKO10057999_A_Vmn1r127
  gRNA
taacatccacattccaatta

SEQ ID NO: 58000 - DNA, 20 bp, Artificial Sequence
  MKO10058000_A_Vmn1r128
  gRNA
catttgaagagcacagaaaa

SEQ ID NO: 58001 - DNA, 20 bp, Artificial Sequence
  MKO10058001_A_Vmn1r128
  gRNA
actctagttcctgttaatag

SEQ ID NO: 58002 - DNA, 20 bp, Artificial Sequence
  MKO10058002_A_Vmn1r128
  gRNA
gccctctccatgtctgctca

SEQ ID NO: 58003 - DNA, 20 bp, Artificial Sequence
  MKO10058003_A_Vmn1r129
  gRNA
gagaagtaccatggagatac

SEQ ID NO: 58004 - DNA, 20 bp, Artificial Sequence
  MKO10058004_A_Vmn1r129
  gRNA
gccctctccatgtctgctca

SEQ ID NO: 58005 - DNA, 20 bp, Artificial Sequence
  MKO10058005_A_Vmn1r129
  gRNA
cagttgaagagcacagaaca

SEQ ID NO: 58006 - DNA, 20 bp, Artificial Sequence
  MKO10058006_A_Vmn1r12
  gRNA
tccccatgaactacattgtc

SEQ ID NO: 58007 - DNA, 20 bp, Artificial Sequence
  MKO10058007_A_Vmn1r12
  gRNA
cagtcacaggaactccttgt

SEQ ID NO: 58008 - DNA, 20 bp, Artificial Sequence
  MKO10058008_A_Vmn1r12
  gRNA
gctcctgacaatgtagttca

SEQ ID NO: 58009 - DNA, 20 bp, Artificial Sequence
  MKO10058009_A_Vmn1r130
  gRNA
catttgaagagcacagaaca

SEQ ID NO: 58010 - DNA, 20 bp, Artificial Sequence
  MKO10058010_A_Vmn1r130
  gRNA
gccctctccatgtctgctca

SEQ ID NO: 58011 - DNA, 20 bp, Artificial Sequence
  MKO10058011_A_Vmn1r130
  gRNA
gcctacaatgaatccagaag

SEQ ID NO: 58012 - DNA, 20 bp, Artificial Sequence
  MKO10058012_A_Vmn1r131
  gRNA
taaatccgtgaaaaccactg

SEQ ID NO: 58013 - DNA, 20 bp, Artificial Sequence
  MKO10058013_A_Vmn1r131
  gRNA
catttgaagagcacagaaca

SEQ ID NO: 58014 - DNA, 20 bp, Artificial Sequence
  MKO10058014_A_Vmn1r131
  gRNA
gttattcttgttacagttgt

SEQ ID NO: 58015 - DNA, 20 bp, Artificial Sequence
  MKO10058015_A_Vmn1r132
  gRNA
catttgaagagcacagaaca

SEQ ID NO: 58016 - DNA, 20 bp, Artificial Sequence
  MKO10058016_A_Vmn1r132
  gRNA
ggcctctccatgtctgctca

SEQ ID NO: 58017 - DNA, 20 bp, Artificial Sequence
  MKO10058017_A_Vmn1r132
  gRNA
gtgttattgtctattatctg

SEQ ID NO: 58018 - DNA, 20 bp, Artificial Sequence
  MKO10058018_A_Vmn1r135
  gRNA
catttgaagagcacagaaca

SEQ ID NO: 58019 - DNA, 20 bp, Artificial Sequence
  MKO10058019_A_Vmn1r135
  gRNA
gccctctccatgtctgctca

SEQ ID NO: 58020 - DNA, 20 bp, Artificial Sequence
  MKO10058020_A_Vmn1r135
  gRNA
gtgttattgtctgttatctg

SEQ ID NO: 58021 - DNA, 20 bp, Artificial Sequence
  MKO10058021_A_Vmn1r137
  gRNA
catttgaagagcacagaaca

SEQ ID NO: 58022 - DNA, 20 bp, Artificial Sequence
  MKO10058022_A_Vmn1r137
  gRNA
gccctctccatgtctgctca

SEQ ID NO: 58023 - DNA, 20 bp, Artificial Sequence
  MKO10058023_A_Vmn1r137
  gRNA
gcctacaatgaatccagaag

SEQ ID NO: 58024 - DNA, 20 bp, Artificial Sequence
  MKO10058024_A_Vmn1r138
  gRNA
taaatccgtgaaaaccactg

SEQ ID NO: 58025 - DNA, 20 bp, Artificial Sequence
  MKO10058025_A_Vmn1r138
  gRNA
catttgaagagcacagaaca

SEQ ID NO: 58026 - DNA, 20 bp, Artificial Sequence
  MKO10058026_A_Vmn1r138
  gRNA
gttattcttgttacagttgt

SEQ ID NO: 58027 - DNA, 20 bp, Artificial Sequence
  MKO10058027_A_Vmn1r139
  gRNA
catttgaagagcacagaaca

SEQ ID NO: 58028 - DNA, 20 bp, Artificial Sequence
  MKO10058028_A_Vmn1r139
  gRNA
ggcctctccatgtctgctca

SEQ ID NO: 58029 - DNA, 20 bp, Artificial Sequence
  MKO10058029_A_Vmn1r139
  gRNA
gtgttattgtctattatctg

SEQ ID NO: 58030 - DNA, 20 bp, Artificial Sequence
  MKO10058030_A_Vmn1r13
  gRNA
atacatccataacgtgactg

SEQ ID NO: 58031 - DNA, 20 bp, Artificial Sequence
  MKO10058031_A_Vmn1r13
  gRNA
agtatcctgatcttctatac

SEQ ID NO: 58032 - DNA, 20 bp, Artificial Sequence
  MKO10058032_A_Vmn1r13
  gRNA
cagtccgagtacctctatgc

SEQ ID NO: 58033 - DNA, 20 bp, Artificial Sequence
  MKO10058033_A_Vmn1r142
  gRNA
accctctcaatgtctgatca

SEQ ID NO: 58034 - DNA, 20 bp, Artificial Sequence
  MKO10058034_A_Vmn1r142
  gRNA
cagttgaaaagcacagaaca

SEQ ID NO: 58035 - DNA, 20 bp, Artificial Sequence
  MKO10058035_A_Vmn1r142
  gRNA
taacatccacattccaatta

SEQ ID NO: 58036 - DNA, 20 bp, Artificial Sequence
  MKO10058036_A_Vmn1r143
  gRNA
catttgaagagcacagaaca

SEQ ID NO: 58037 - DNA, 20 bp, Artificial Sequence
  MKO10058037_A_Vmn1r143
  gRNA
gccctctccatgtctgctca

SEQ ID NO: 58038 - DNA, 20 bp, Artificial Sequence
  MKO10058038_A_Vmn1r143
  gRNA
gcctacaatgaatccagaag

SEQ ID NO: 58039 - DNA, 20 bp, Artificial Sequence
  MKO10058039_A_Vmn1r148
  gRNA
catttgaagagcacagaaca

SEQ ID NO: 58040 - DNA, 20 bp, Artificial Sequence
  MKO10058040_A_Vmn1r148
  gRNA
ggcctctccatgtctgctca

SEQ ID NO: 58041 - DNA, 20 bp, Artificial Sequence
  MKO10058041_A_Vmn1r148
  gRNA
gcctacaatgaatccagaag

SEQ ID NO: 58042 - DNA, 20 bp, Artificial Sequence
  MKO10058042_A_Vmn1r149
  gRNA
tatagtgaggaatcgagtca

SEQ ID NO: 58043 - DNA, 20 bp, Artificial Sequence
  MKO10058043_A_Vmn1r149
  gRNA
gccctctccatgtctgctca

SEQ ID NO: 58044 - DNA, 20 bp, Artificial Sequence
  MKO10058044_A_Vmn1r149
  gRNA
cagttgaagagcacagaaca

SEQ ID NO: 58045 - DNA, 20 bp, Artificial Sequence
  MKO10058045_A_Vmn1r14
  gRNA
tgatacgagagtaatccgtg

SEQ ID NO: 58046 - DNA, 20 bp, Artificial Sequence
  MKO10058046_A_Vmn1r14
  gRNA
aagcattcaccacaaacttc

SEQ ID NO: 58047 - DNA, 20 bp, Artificial Sequence
  MKO10058047_A_Vmn1r14
  gRNA
cagtcataggaactctttgt

SEQ ID NO: 58048 - DNA, 20 bp, Artificial Sequence
  MKO10058048_A_Vmn1r151
  gRNA
accctctcaatgtctgatca

SEQ ID NO: 58049 - DNA, 20 bp, Artificial Sequence
  MKO10058049_A_Vmn1r151
  gRNA
cagttgaagagcacagaaca

SEQ ID NO: 58050 - DNA, 20 bp, Artificial Sequence
  MKO10058050_A_Vmn1r151
  gRNA
taacatccacatttcaatta

SEQ ID NO: 58051 - DNA, 20 bp, Artificial Sequence
  MKO10058051_A_Vmn1r152
  gRNA
cacttgaagagcacagaaca

SEQ ID NO: 58052 - DNA, 20 bp, Artificial Sequence
  MKO10058052_A_Vmn1r152
  gRNA
gccctttccatgtctgctca

SEQ ID NO: 58053 - DNA, 20 bp, Artificial Sequence
  MKO10058053_A_Vmn1r152
  gRNA
gcctacaatgaacccagaag

SEQ ID NO: 58054 - DNA, 20 bp, Artificial Sequence
  MKO10058054_A_Vmn1r155
  gRNA
catttgaagagcacagaaca

SEQ ID NO: 58055 - DNA, 20 bp, Artificial Sequence
  MKO10058055_A_Vmn1r155
  gRNA
gccctctccatgtctgctca

SEQ ID NO: 58056 - DNA, 20 bp, Artificial Sequence
  MKO10058056_A_Vmn1r155
  gRNA
gcctacaatgaatccagaag

SEQ ID NO: 58057 - DNA, 20 bp, Artificial Sequence
  MKO10058057_A_Vmn1r157
  gRNA
ccacggtcccaacctcaaaa

SEQ ID NO: 58058 - DNA, 20 bp, Artificial Sequence
  MKO10058058_A_Vmn1r157
  gRNA
ttataaacagaggcccagac

SEQ ID NO: 58059 - DNA, 20 bp, Artificial Sequence
  MKO10058059_A_Vmn1r157
  gRNA
catttgaagagcacagaaca

SEQ ID NO: 58060 - DNA, 20 bp, Artificial Sequence
  MKO10058060_A_Vmn1r158
  gRNA
ctcctcttgctttgtcagtt

SEQ ID NO: 58061 - DNA, 20 bp, Artificial Sequence
  MKO10058061_A_Vmn1r158
  gRNA
acggacaaacagaaagactt

SEQ ID NO: 58062 - DNA, 20 bp, Artificial Sequence
  MKO10058062_A_Vmn1r158
  gRNA
ccccaaactgacaaagcaag

SEQ ID NO: 58063 - DNA, 20 bp, Artificial Sequence
  MKO10058063_A_Vmn1r159
  gRNA
actcccaatcagaacaccag

SEQ ID NO: 58064 - DNA, 20 bp, Artificial Sequence
  MKO10058064_A_Vmn1r159
  gRNA
tggtgttctgattgggagtg

SEQ ID NO: 58065 - DNA, 20 bp, Artificial Sequence
  MKO10058065_A_Vmn1r159
  gRNA
accctctccatgtctgatca

SEQ ID NO: 58066 - DNA, 20 bp, Artificial Sequence
  MKO10058066_A_Vmn1r15
  gRNA
ataaaggacattctctaccg

SEQ ID NO: 58067 - DNA, 20 bp, Artificial Sequence
  MKO10058067_A_Vmn1r15
  gRNA
atttggctcgcagacatatt

SEQ ID NO: 58068 - DNA, 20 bp, Artificial Sequence
  MKO10058068_A_Vmn1r15
  gRNA
caatgtcagtgagaccaagc

SEQ ID NO: 58069 - DNA, 20 bp, Artificial Sequence
  MKO10058069_A_Vmn1r160
  gRNA
gtggattaaaattacctgtc

SEQ ID NO: 58070 - DNA, 20 bp, Artificial Sequence
  MKO10058070_A_Vmn1r160
  gRNA
ctacggtcccaaccccaaac

SEQ ID NO: 58071 - DNA, 20 bp, Artificial Sequence
  MKO10058071_A_Vmn1r160
  gRNA
aaattgttctgttccacttc

SEQ ID NO: 58072 - DNA, 20 bp, Artificial Sequence
  MKO10058072_A_Vmn1r163
  gRNA
catttgaagagcacagaaca

SEQ ID NO: 58073 - DNA, 20 bp, Artificial Sequence
  MKO10058073_A_Vmn1r163
  gRNA
gccctctccatgtctgctca

SEQ ID NO: 58074 - DNA, 20 bp, Artificial Sequence
  MKO10058074_A_Vmn1r163
  gRNA
gtgttattgtctgttatctg

SEQ ID NO: 58075 - DNA, 20 bp, Artificial Sequence
  MKO10058075_A_Vmn1r165
  gRNA
catttgaagagcacagaaca

SEQ ID NO: 58076 - DNA, 20 bp, Artificial Sequence
  MKO10058076_A_Vmn1r165
  gRNA
gccctctccatgtctgctca

SEQ ID NO: 58077 - DNA, 20 bp, Artificial Sequence
  MKO10058077_A_Vmn1r165
  gRNA
gcctacaatgaatccagaag

SEQ ID NO: 58078 - DNA, 20 bp, Artificial Sequence
  MKO10058078_A_Vmn1r166
  gRNA
taaatccgtgaaaaccactg

SEQ ID NO: 58079 - DNA, 20 bp, Artificial Sequence
  MKO10058079_A_Vmn1r166
  gRNA
catttgaagagcacagaaca

SEQ ID NO: 58080 - DNA, 20 bp, Artificial Sequence
  MKO10058080_A_Vmn1r166
  gRNA
gttattcttgttacagttgt

SEQ ID NO: 58081 - DNA, 20 bp, Artificial Sequence
  MKO10058081_A_Vmn1r167
  gRNA
gaggcgtgtaaaccaaattt

SEQ ID NO: 58082 - DNA, 20 bp, Artificial Sequence
  MKO10058082_A_Vmn1r167
  gRNA
atcttatcatttgcccatga

SEQ ID NO: 58083 - DNA, 20 bp, Artificial Sequence
  MKO10058083_A_Vmn1r167
  gRNA
ggaagcttacagccaaaatt

SEQ ID NO: 58084 - DNA, 20 bp, Artificial Sequence
  MKO10058084_A_Vmn1r168
  gRNA
ccatagcattgtgttgcttg

SEQ ID NO: 58085 - DNA, 20 bp, Artificial Sequence
  MKO10058085_A_Vmn1r168
  gRNA
tctatacaggagacgtacca

SEQ ID NO: 58086 - DNA, 20 bp, Artificial Sequence
  MKO10058086_A_Vmn1r168
  gRNA
tagttgaagatcagagaaca

SEQ ID NO: 58087 - DNA, 20 bp, Artificial Sequence
  MKO10058087_A_Vmn1r169
  gRNA
actctcgggtctggttgaga

SEQ ID NO: 58088 - DNA, 20 bp, Artificial Sequence
  MKO10058088_A_Vmn1r169
  gRNA
gcctatactgaaaccagtag

SEQ ID NO: 58089 - DNA, 20 bp, Artificial Sequence
  MKO10058089_A_Vmn1r169
  gRNA
agatttattctgcgacaaca

SEQ ID NO: 58090 - DNA, 20 bp, Artificial Sequence
  MKO10058090_A_Vmn1r16
  gRNA
taataactatgttgaaaaac

SEQ ID NO: 58091 - DNA, 20 bp, Artificial Sequence
  MKO10058091_A_Vmn1r16
  gRNA
acatgttgaatatcttgttc

SEQ ID NO: 58092 - DNA, 20 bp, Artificial Sequence
  MKO10058092_A_Vmn1r16
  gRNA
cagccccagtacatcactgt

SEQ ID NO: 58093 - DNA, 20 bp, Artificial Sequence
  MKO10058093_A_Vmn1r170
  gRNA
atttgtgacctgttatcatc

SEQ ID NO: 58094 - DNA, 20 bp, Artificial Sequence
  MKO10058094_A_Vmn1r170
  gRNA
attgaatatgctgcagtctg

SEQ ID NO: 58095 - DNA, 20 bp, Artificial Sequence
  MKO10058095_A_Vmn1r170
  gRNA
aatttatctccaaacttgaa

SEQ ID NO: 58096 - DNA, 20 bp, Artificial Sequence
  MKO10058096_A_Vmn1r171
  gRNA
gtgagcattatttaagacac

SEQ ID NO: 58097 - DNA, 20 bp, Artificial Sequence
  MKO10058097_A_Vmn1r171
  gRNA
aaggcgtgtcaaagaaattt

SEQ ID NO: 58098 - DNA, 20 bp, Artificial Sequence
  MKO10058098_A_Vmn1r171
  gRNA
atgaactctgagcttctgat

SEQ ID NO: 58099 - DNA, 20 bp, Artificial Sequence
  MKO10058099_A_Vmn1r172
  gRNA
tgaggcatgtcagtggaatt

SEQ ID NO: 58100 - DNA, 20 bp, Artificial Sequence
  MKO10058100_A_Vmn1r172
  gRNA
agaatagtgcacaaatgtcg

SEQ ID NO: 58101 - DNA, 20 bp, Artificial Sequence
  MKO10058101_A_Vmn1r172
  gRNA
agagattgcccacagcaatg

SEQ ID NO: 58102 - DNA, 20 bp, Artificial Sequence
  MKO10058102_A_Vmn1r173
  gRNA
atcattctactccatttgcc

SEQ ID NO: 58103 - DNA, 20 bp, Artificial Sequence
  MKO10058103_A_Vmn1r173
  gRNA
agagattgcctacagtaatg

SEQ ID NO: 58104 - DNA, 20 bp, Artificial Sequence
  MKO10058104_A_Vmn1r173
  gRNA
acaaaaactatgatattgct

SEQ ID NO: 58105 - DNA, 20 bp, Artificial Sequence
  MKO10058105_A_Vmn1r174
  gRNA
tgtttgcacttcgagccacc

SEQ ID NO: 58106 - DNA, 20 bp, Artificial Sequence
  MKO10058106_A_Vmn1r174
  gRNA
cgataaactggtaagagctc

SEQ ID NO: 58107 - DNA, 20 bp, Artificial Sequence
  MKO10058107_A_Vmn1r174
  gRNA
ctcccttaatgttgatcgtt

SEQ ID NO: 58108 - DNA, 20 bp, Artificial Sequence
  MKO10058108_A_Vmn1r175
  gRNA
ctgcagtcccaaacccaacc

SEQ ID NO: 58109 - DNA, 20 bp, Artificial Sequence
  MKO10058109_A_Vmn1r175
  gRNA
ctgataagtgctcagaaagc

SEQ ID NO: 58110 - DNA, 20 bp, Artificial Sequence
  MKO10058110_A_Vmn1r175
  gRNA
cacattccaatgaaagtcaa

SEQ ID NO: 58111 - DNA, 20 bp, Artificial Sequence
  MKO10058111_A_Vmn1r176
  gRNA
acaagtatacctcaaaaaat

SEQ ID NO: 58112 - DNA, 20 bp, Artificial Sequence
  MKO10058112_A_Vmn1r176
  gRNA
attgaatatgctgcagtctt

SEQ ID NO: 58113 - DNA, 20 bp, Artificial Sequence
  MKO10058113_A_Vmn1r176
  gRNA
tggggtagggtgatgctccc

SEQ ID NO: 58114 - DNA, 20 bp, Artificial Sequence
  MKO10058114_A_Vmn1r177
  gRNA
ctatatgcctcaaccacaga

SEQ ID NO: 58115 - DNA, 20 bp, Artificial Sequence
  MKO10058115_A_Vmn1r177
  gRNA
agaagtgatttgtactaaca

SEQ ID NO: 58116 - DNA, 20 bp, Artificial Sequence
  MKO10058116_A_Vmn1r177
  gRNA
atcagctcattgaaattacc

SEQ ID NO: 58117 - DNA, 20 bp, Artificial Sequence
  MKO10058117_A_Vmn1r178
  gRNA
caagaataactcgtcaagtt

SEQ ID NO: 58118 - DNA, 20 bp, Artificial Sequence
  MKO10058118_A_Vmn1r178
  gRNA
ggagcaaaagccatcatgtc

SEQ ID NO: 58119 - DNA, 20 bp, Artificial Sequence
  MKO10058119_A_Vmn1r178
  gRNA
cacttcatttccagacatga

SEQ ID NO: 58120 - DNA, 20 bp, Artificial Sequence
  MKO10058120_A_Vmn1r179
  gRNA
actaccaatcgacactacag

SEQ ID NO: 58121 - DNA, 20 bp, Artificial Sequence
  MKO10058121_A_Vmn1r179
  gRNA
agaattcttcattcgcctag

SEQ ID NO: 58122 - DNA, 20 bp, Artificial Sequence
  MKO10058122_A_Vmn1r179
  gRNA
tatcaagcgtacacatagag

SEQ ID NO: 58123 - DNA, 20 bp, Artificial Sequence
  MKO10058123_A_Vmn1r17
  gRNA
gtatgaccctatcatcctgc

SEQ ID NO: 58124 - DNA, 20 bp, Artificial Sequence
  MKO10058124_A_Vmn1r17
  gRNA
tgcactcaaagcaccaccag

SEQ ID NO: 58125 - DNA, 20 bp, Artificial Sequence
  MKO10058125_A_Vmn1r17
  gRNA
tagggtcatacatccacaat

SEQ ID NO: 58126 - DNA, 20 bp, Artificial Sequence
  MKO10058126_A_Vmn1r180
  gRNA
caagaataacttgccaaatt

SEQ ID NO: 58127 - DNA, 20 bp, Artificial Sequence
  MKO10058127_A_Vmn1r180
  gRNA
tagattcttatctctttgtg

SEQ ID NO: 58128 - DNA, 20 bp, Artificial Sequence
  MKO10058128_A_Vmn1r180
  gRNA
tacaaaaaacatgtgaaaga

SEQ ID NO: 58129 - DNA, 20 bp, Artificial Sequence
  MKO10058129_A_Vmn1r181
  gRNA
gaacttcactgcaatgcctc

SEQ ID NO: 58130 - DNA, 20 bp, Artificial Sequence
  MKO10058130_A_Vmn1r181
  gRNA
tgcagtgaagttctggttgt

SEQ ID NO: 58131 - DNA, 20 bp, Artificial Sequence
  MKO10058131_A_Vmn1r181
  gRNA
tatattctcaccaattcctg

SEQ ID NO: 58132 - DNA, 20 bp, Artificial Sequence
  MKO10058132_A_Vmn1r183
  gRNA
attagaattctttactcgcc

SEQ ID NO: 58133 - DNA, 20 bp, Artificial Sequence
  MKO10058133_A_Vmn1r183
  gRNA
tagattctcgtctctttgtg

SEQ ID NO: 58134 - DNA, 20 bp, Artificial Sequence
  MKO10058134_A_Vmn1r183
  gRNA
actcttgttcctgttaataa

SEQ ID NO: 58135 - DNA, 20 bp, Artificial Sequence
  MKO10058135_A_Vmn1r184
  gRNA
tgccccacataataggactt

SEQ ID NO: 58136 - DNA, 20 bp, Artificial Sequence
  MKO10058136_A_Vmn1r184
  gRNA
gcatgtgcaagatccacatg

SEQ ID NO: 58137 - DNA, 20 bp, Artificial Sequence
  MKO10058137_A_Vmn1r184
  gRNA
gtccccaaagtcctattatg

SEQ ID NO: 58138 - DNA, 20 bp, Artificial Sequence
  MKO10058138_A_Vmn1r185
  gRNA
tgccccacataatagcattt

SEQ ID NO: 58139 - DNA, 20 bp, Artificial Sequence
  MKO10058139_A_Vmn1r185
  gRNA
cctcatgtctagattcaact

SEQ ID NO: 58140 - DNA, 20 bp, Artificial Sequence
  MKO10058140_A_Vmn1r185
  gRNA
gtccccaaaatgctattatg

SEQ ID NO: 58141 - DNA, 20 bp, Artificial Sequence
  MKO10058141_A_Vmn1r186
  gRNA
cctgaaaaccatggaagtgt

SEQ ID NO: 58142 - DNA, 20 bp, Artificial Sequence
  MKO10058142_A_Vmn1r186
  gRNA
tccctaaatatcaacagtaa

SEQ ID NO: 58143 - DNA, 20 bp, Artificial Sequence
  MKO10058143_A_Vmn1r186
  gRNA
tacatgctaatgaatgtcag

SEQ ID NO: 58144 - DNA, 20 bp, Artificial Sequence
  MKO10058144_A_Vmn1r187
  gRNA
cctgaaaaccatggaaatgt

SEQ ID NO: 58145 - DNA, 20 bp, Artificial Sequence
  MKO10058145_A_Vmn1r187
  gRNA
atccctaaatatcaacagta

SEQ ID NO: 58146 - DNA, 20 bp, Artificial Sequence
  MKO10058146_A_Vmn1r187
  gRNA
tacatgctaatgaatgtcag

SEQ ID NO: 58147 - DNA, 20 bp, Artificial Sequence
  MKO10058147_A_Vmn1r188
  gRNA
acacattccattagaagtac

SEQ ID NO: 58148 - DNA, 20 bp, Artificial Sequence
  MKO10058148_A_Vmn1r188
  gRNA
atgtctcccactgttcagcc

SEQ ID NO: 58149 - DNA, 20 bp, Artificial Sequence
  MKO10058149_A_Vmn1r188
  gRNA
gccatcatcatcagtcccac

SEQ ID NO: 58150 - DNA, 20 bp, Artificial Sequence
  MKO10058150_A_Vmn1r189
  gRNA
agataattgtttacttgaca

SEQ ID NO: 58151 - DNA, 20 bp, Artificial Sequence
  MKO10058151_A_Vmn1r189
  gRNA
acgggcttctagttgaatgt

SEQ ID NO: 58152 - DNA, 20 bp, Artificial Sequence
  MKO10058152_A_Vmn1r189
  gRNA
agcctaatccattccatcac

SEQ ID NO: 58153 - DNA, 20 bp, Artificial Sequence
  MKO10058153_A_Vmn1r18
  gRNA
ccacataagagcatcccctg

SEQ ID NO: 58154 - DNA, 20 bp, Artificial Sequence
  MKO10058154_A_Vmn1r18
  gRNA
aggtctgtcaactagtattt

SEQ ID NO: 58155 - DNA, 20 bp, Artificial Sequence
  MKO10058155_A_Vmn1r18
  gRNA
cttaaattgtgctaaaaatg

SEQ ID NO: 58156 - DNA, 20 bp, Artificial Sequence
  MKO10058156_A_Vmn1r191
  gRNA
ggctaaaagatgcgtaagca

SEQ ID NO: 58157 - DNA, 20 bp, Artificial Sequence
  MKO10058157_A_Vmn1r191
  gRNA
ttcctcttcatgattctggt

SEQ ID NO: 58158 - DNA, 20 bp, Artificial Sequence
  MKO10058158_A_Vmn1r191
  gRNA
tgccaaccagaatcatgaag

SEQ ID NO: 58159 - DNA, 20 bp, Artificial Sequence
  MKO10058159_A_Vmn1r192
  gRNA
ctttgtccaaagggcagtcc

SEQ ID NO: 58160 - DNA, 20 bp, Artificial Sequence
  MKO10058160_A_Vmn1r192
  gRNA
agaacttggcatgctgtttg

SEQ ID NO: 58161 - DNA, 20 bp, Artificial Sequence
  MKO10058161_A_Vmn1r192
  gRNA
tgatactggttgtaaaactg

SEQ ID NO: 58162 - DNA, 20 bp, Artificial Sequence
  MKO10058162_A_Vmn1r193
  gRNA
cacaaatatccttgatgatc

SEQ ID NO: 58163 - DNA, 20 bp, Artificial Sequence
  MKO10058163_A_Vmn1r193
  gRNA
accctgagctgtaaagatag

SEQ ID NO: 58164 - DNA, 20 bp, Artificial Sequence
  MKO10058164_A_Vmn1r193
  gRNA
ctccaagtccaacaagtgaa

SEQ ID NO: 58165 - DNA, 20 bp, Artificial Sequence
  MKO10058165_A_Vmn1r194
  gRNA
cacgcttgtgatgcttatac

SEQ ID NO: 58166 - DNA, 20 bp, Artificial Sequence
  MKO10058166_A_Vmn1r194
  gRNA
actaaaacatgtctagtact

SEQ ID NO: 58167 - DNA, 20 bp, Artificial Sequence
  MKO10058167_A_Vmn1r194
  gRNA
aggccaaaccacagacttcg

SEQ ID NO: 58168 - DNA, 20 bp, Artificial Sequence
  MKO10058168_A_Vmn1r195
  gRNA
gcccagaaatccgagctacg

SEQ ID NO: 58169 - DNA, 20 bp, Artificial Sequence
  MKO10058169_A_Vmn1r195
  gRNA
tgagaacactccacgtagct

SEQ ID NO: 58170 - DNA, 20 bp, Artificial Sequence
  MKO10058170_A_Vmn1r195
  gRNA
gataaacctttagttactag

SEQ ID NO: 58171 - DNA, 20 bp, Artificial Sequence
  MKO10058171_A_Vmn1r196
  gRNA
actaatctgcctcagttgta

SEQ ID NO: 58172 - DNA, 20 bp, Artificial Sequence
  MKO10058172_A_Vmn1r196
  gRNA
cctaaagctgcaattgtcac

SEQ ID NO: 58173 - DNA, 20 bp, Artificial Sequence
  MKO10058173_A_Vmn1r196
  gRNA
ggctcagactaaggtctaaa

SEQ ID NO: 58174 - DNA, 20 bp, Artificial Sequence
  MKO10058174_A_Vmn1r197
  gRNA
tgagtccaagacactcaatg

SEQ ID NO: 58175 - DNA, 20 bp, Artificial Sequence
  MKO10058175_A_Vmn1r197
  gRNA
ggctgagaactgcataacca

SEQ ID NO: 58176 - DNA, 20 bp, Artificial Sequence
  MKO10058176_A_Vmn1r197
  gRNA
tgagcaagaatgagatgtat

SEQ ID NO: 58177 - DNA, 20 bp, Artificial Sequence
  MKO10058177_A_Vmn1r198
  gRNA
atcctaatgtttgcgagact

SEQ ID NO: 58178 - DNA, 20 bp, Artificial Sequence
  MKO10058178_A_Vmn1r198
  gRNA
aaaccacttgataatgtgtc

SEQ ID NO: 58179 - DNA, 20 bp, Artificial Sequence
  MKO10058179_A_Vmn1r198
  gRNA
acccaagtctcgcaaacatt

SEQ ID NO: 58180 - DNA, 20 bp, Artificial Sequence
  MKO10058180_A_Vmn1r199
  gRNA
ttgaacgttggcatgttcag

SEQ ID NO: 58181 - DNA, 20 bp, Artificial Sequence
  MKO10058181_A_Vmn1r199
  gRNA
ttctcgaggatttaccatta

SEQ ID NO: 58182 - DNA, 20 bp, Artificial Sequence
  MKO10058182_A_Vmn1r199
  gRNA
gtatttgcatcctgcacaca

SEQ ID NO: 58183 - DNA, 20 bp, Artificial Sequence
  MKO10058183_A_Vmn1r19
  gRNA
ctactagcagcaagatgttt

SEQ ID NO: 58184 - DNA, 20 bp, Artificial Sequence
  MKO10058184_A_Vmn1r19
  gRNA
gagtgaaaaccgccagatga

SEQ ID NO: 58185 - DNA, 20 bp, Artificial Sequence
  MKO10058185_A_Vmn1r19
  gRNA
cattcacctcaaccctgttt

SEQ ID NO: 58186 - DNA, 20 bp, Artificial Sequence
  MKO10058186_A_Vmn1r1
  gRNA
atgtcacctgagcgtcctcc

SEQ ID NO: 58187 - DNA, 20 bp, Artificial Sequence
  MKO10058187_A_Vmn1r1
  gRNA
taccatgagccctactagag

SEQ ID NO: 58188 - DNA, 20 bp, Artificial Sequence
  MKO10058188_A_Vmn1r1
  gRNA
cctgaaagaatgtgaccacg

SEQ ID NO: 58189 - DNA, 20 bp, Artificial Sequence
  MKO10058189_A_Vmn1r200
  gRNA
ctctcgtttatatgtgcaat

SEQ ID NO: 58190 - DNA, 20 bp, Artificial Sequence
  MKO10058190_A_Vmn1r200
  gRNA
atgggcttctggttgattgg

SEQ ID NO: 58191 - DNA, 20 bp, Artificial Sequence
  MKO10058191_A_Vmn1r200
  gRNA
ttcttgagtatttaccatca

SEQ ID NO: 58192 - DNA, 20 bp, Artificial Sequence
  MKO10058192_A_Vmn1r201
  gRNA
tctgtagttgcaacgtacat

SEQ ID NO: 58193 - DNA, 20 bp, Artificial Sequence
  MKO10058193_A_Vmn1r201
  gRNA
tagtgagcacgtaagacatt

SEQ ID NO: 58194 - DNA, 20 bp, Artificial Sequence
  MKO10058194_A_Vmn1r201
  gRNA
atatgtgcacaattctgcct

SEQ ID NO: 58195 - DNA, 20 bp, Artificial Sequence
  MKO10058195_A_Vmn1r202
  gRNA
actaaaaacgctttcatact

SEQ ID NO: 58196 - DNA, 20 bp, Artificial Sequence
  MKO10058196_A_Vmn1r202
  gRNA
tatggacatcaaagataatc

SEQ ID NO: 58197 - DNA, 20 bp, Artificial Sequence
  MKO10058197_A_Vmn1r202
  gRNA
tgtgaaatcatttgccactg

SEQ ID NO: 58198 - DNA, 20 bp, Artificial Sequence
  MKO10058198_A_Vmn1r203
  gRNA
atttcgagtgtttaccatca

SEQ ID NO: 58199 - DNA, 20 bp, Artificial Sequence
  MKO10058199_A_Vmn1r203
  gRNA
gatggcctttggttaaattt

SEQ ID NO: 58200 - DNA, 20 bp, Artificial Sequence
  MKO10058200_A_Vmn1r203
  gRNA
caccctctctaggtaaacaa

SEQ ID NO: 58201 - DNA, 20 bp, Artificial Sequence
  MKO10058201_A_Vmn1r204
  gRNA
agaatatgccatgccgtctg

SEQ ID NO: 58202 - DNA, 20 bp, Artificial Sequence
  MKO10058202_A_Vmn1r204
  gRNA
agatgttattctagtccact

SEQ ID NO: 58203 - DNA, 20 bp, Artificial Sequence
  MKO10058203_A_Vmn1r204
  gRNA
cacaaatatcccagatgatc

SEQ ID NO: 58204 - DNA, 20 bp, Artificial Sequence
  MKO10058204_A_Vmn1r205
  gRNA
agtgccaaacatagtcataa

SEQ ID NO: 58205 - DNA, 20 bp, Artificial Sequence
  MKO10058205_A_Vmn1r205
  gRNA
tttccctttatgactatgtt

SEQ ID NO: 58206 - DNA, 20 bp, Artificial Sequence
  MKO10058206_A_Vmn1r205
  gRNA
gacttgtacttctaatgaaa

SEQ ID NO: 58207 - DNA, 20 bp, Artificial Sequence
  MKO10058207_A_Vmn1r206
  gRNA
atccattccatcacaagtgt

SEQ ID NO: 58208 - DNA, 20 bp, Artificial Sequence
  MKO10058208_A_Vmn1r206
  gRNA
attcagacctacacttgtga

SEQ ID NO: 58209 - DNA, 20 bp, Artificial Sequence
  MKO10058209_A_Vmn1r206
  gRNA
cctgagagatgcattatttc

SEQ ID NO: 58210 - DNA, 20 bp, Artificial Sequence
  MKO10058210_A_Vmn1r207-ps
  gRNA
agaaacttcccagatgccat

SEQ ID NO: 58211 - DNA, 20 bp, Artificial Sequence
  MKO10058211_A_Vmn1r207-ps
  gRNA
ttgaaaagagacttaaaatt

SEQ ID NO: 58212 - DNA, 20 bp, Artificial Sequence
  MKO10058212_A_Vmn1r207-ps
  gRNA
ccaaaaactgctactgtctt

SEQ ID NO: 58213 - DNA, 20 bp, Artificial Sequence
  MKO10058213_A_Vmn1r208
  gRNA
ggctaaaagttggataacaa

SEQ ID NO: 58214 - DNA, 20 bp, Artificial Sequence
  MKO10058214_A_Vmn1r208
  gRNA
cctgagagatgcattgtttc

SEQ ID NO: 58215 - DNA, 20 bp, Artificial Sequence
  MKO10058215_A_Vmn1r208
  gRNA
aaacaaaacacagcatcaaa

SEQ ID NO: 58216 - DNA, 20 bp, Artificial Sequence
  MKO10058216_A_Vmn1r209
  gRNA
agtgccaaccacagttataa

SEQ ID NO: 58217 - DNA, 20 bp, Artificial Sequence
  MKO10058217_A_Vmn1r209
  gRNA
ttgaagagagactaaaaatt

SEQ ID NO: 58218 - DNA, 20 bp, Artificial Sequence
  MKO10058218_A_Vmn1r209
  gRNA
ctatttaatgcaagaaaatc

SEQ ID NO: 58219 - DNA, 20 bp, Artificial Sequence
  MKO10058219_A_Vmn1r20
  gRNA
actgactttcattcacataa

SEQ ID NO: 58220 - DNA, 20 bp, Artificial Sequence
  MKO10058220_A_Vmn1r20
  gRNA
cctccacaacagaactgata

SEQ ID NO: 58221 - DNA, 20 bp, Artificial Sequence
  MKO10058221_A_Vmn1r20
  gRNA
caaccatatcagttctgttg

SEQ ID NO: 58222 - DNA, 20 bp, Artificial Sequence
  MKO10058222_A_Vmn1r210
  gRNA
ttgaagagatgcttataatt

SEQ ID NO: 58223 - DNA, 20 bp, Artificial Sequence
  MKO10058223_A_Vmn1r210
  gRNA
attctcgagtatttagcatc

SEQ ID NO: 58224 - DNA, 20 bp, Artificial Sequence
  MKO10058224_A_Vmn1r210
  gRNA
gctaaatactcgagaatttc

SEQ ID NO: 58225 - DNA, 20 bp, Artificial Sequence
  MKO10058225_A_Vmn1r211
  gRNA
ctgtaaagttgctgtctacc

SEQ ID NO: 58226 - DNA, 20 bp, Artificial Sequence
  MKO10058226_A_Vmn1r211
  gRNA
gtagacagcaactttacagc

SEQ ID NO: 58227 - DNA, 20 bp, Artificial Sequence
  MKO10058227_A_Vmn1r211
  gRNA
cctctgacacattgagtgtc

SEQ ID NO: 58228 - DNA, 20 bp, Artificial Sequence
  MKO10058228_A_Vmn1r212
  gRNA
tctcccaacacttattgaac

SEQ ID NO: 58229 - DNA, 20 bp, Artificial Sequence
  MKO10058229_A_Vmn1r212
  gRNA
tttacctgttcaataagtgt

SEQ ID NO: 58230 - DNA, 20 bp, Artificial Sequence
  MKO10058230_A_Vmn1r212
  gRNA
tgatcttacccataatactg

SEQ ID NO: 58231 - DNA, 20 bp, Artificial Sequence
  MKO10058231_A_Vmn1r213
  gRNA
aagaaatgccacataaccac

SEQ ID NO: 58232 - DNA, 20 bp, Artificial Sequence
  MKO10058232_A_Vmn1r213
  gRNA
gcccctttgtgctaattcac

SEQ ID NO: 58233 - DNA, 20 bp, Artificial Sequence
  MKO10058233_A_Vmn1r213
  gRNA
tttctcatcatgacagtgct

SEQ ID NO: 58234 - DNA, 20 bp, Artificial Sequence
  MKO10058234_A_Vmn1r214
  gRNA
ttctcgaggatttactgtca

SEQ ID NO: 58235 - DNA, 20 bp, Artificial Sequence
  MKO10058235_A_Vmn1r214
  gRNA
aaatgctattataccaactg

SEQ ID NO: 58236 - DNA, 20 bp, Artificial Sequence
  MKO10058236_A_Vmn1r214
  gRNA
tcttacagcctaagttattt

SEQ ID NO: 58237 - DNA, 20 bp, Artificial Sequence
  MKO10058237_A_Vmn1r215
  gRNA
atgattactatttgtacaac

SEQ ID NO: 58238 - DNA, 20 bp, Artificial Sequence
  MKO10058238_A_Vmn1r215
  gRNA
cgaccttattgtaatccact

SEQ ID NO: 58239 - DNA, 20 bp, Artificial Sequence
  MKO10058239_A_Vmn1r215
  gRNA
tttacacttcttagtgggca

SEQ ID NO: 58240 - DNA, 20 bp, Artificial Sequence
  MKO10058240_A_Vmn1r216
  gRNA
gcccctttatcctgattatc

SEQ ID NO: 58241 - DNA, 20 bp, Artificial Sequence
  MKO10058241_A_Vmn1r216
  gRNA
cactgcagatcttagcaata

SEQ ID NO: 58242 - DNA, 20 bp, Artificial Sequence
  MKO10058242_A_Vmn1r216
  gRNA
actaacaatgctttcatatt

SEQ ID NO: 58243 - DNA, 20 bp, Artificial Sequence
  MKO10058243_A_Vmn1r217
  gRNA
ggctgaagactgcataacca

SEQ ID NO: 58244 - DNA, 20 bp, Artificial Sequence
  MKO10058244_A_Vmn1r217
  gRNA
ccagtgacaaacttaaaaac

SEQ ID NO: 58245 - DNA, 20 bp, Artificial Sequence
  MKO10058245_A_Vmn1r217
  gRNA
atgggcttctgcctgcatgt

SEQ ID NO: 58246 - DNA, 20 bp, Artificial Sequence
  MKO10058246_A_Vmn1r218
  gRNA
agaacttggcatgacgtctg

SEQ ID NO: 58247 - DNA, 20 bp, Artificial Sequence
  MKO10058247_A_Vmn1r218
  gRNA
aagatatttcctacaactcc

SEQ ID NO: 58248 - DNA, 20 bp, Artificial Sequence
  MKO10058248_A_Vmn1r218
  gRNA
aagccatttgatgatatgtc

SEQ ID NO: 58249 - DNA, 20 bp, Artificial Sequence
  MKO10058249_A_Vmn1r219
  gRNA
tacctatacttctaatcgaa

SEQ ID NO: 58250 - DNA, 20 bp, Artificial Sequence
  MKO10058250_A_Vmn1r219
  gRNA
gtccatccctgtgaatcagc

SEQ ID NO: 58251 - DNA, 20 bp, Artificial Sequence
  MKO10058251_A_Vmn1r219
  gRNA
ttatatgacactagaaagtc

SEQ ID NO: 58252 - DNA, 20 bp, Artificial Sequence
  MKO10058252_A_Vmn1r21
  gRNA
ctgggtcatatgcccataac

SEQ ID NO: 58253 - DNA, 20 bp, Artificial Sequence
  MKO10058253_A_Vmn1r21
  gRNA
accccgtgaaccacatcatc

SEQ ID NO: 58254 - DNA, 20 bp, Artificial Sequence
  MKO10058254_A_Vmn1r21
  gRNA
tgaccacaaagaaaactacc

SEQ ID NO: 58255 - DNA, 20 bp, Artificial Sequence
  MKO10058255_A_Vmn1r220
  gRNA
tgcctttacttctaatcgaa

SEQ ID NO: 58256 - DNA, 20 bp, Artificial Sequence
  MKO10058256_A_Vmn1r220
  gRNA
atccattcgattagaagtaa

SEQ ID NO: 58257 - DNA, 20 bp, Artificial Sequence
  MKO10058257_A_Vmn1r220
  gRNA
atggacttatacctgtatgt

SEQ ID NO: 58258 - DNA, 20 bp, Artificial Sequence
  MKO10058258_A_Vmn1r221
  gRNA
tgaatgttggtatgttcaga

SEQ ID NO: 58259 - DNA, 20 bp, Artificial Sequence
  MKO10058259_A_Vmn1r221
  gRNA
actctagaatttgtgaccct

SEQ ID NO: 58260 - DNA, 20 bp, Artificial Sequence
  MKO10058260_A_Vmn1r221
  gRNA
tctgaatgtagagaacatgc

SEQ ID NO: 58261 - DNA, 20 bp, Artificial Sequence
  MKO10058261_A_Vmn1r222
  gRNA
gactgaatatatcacacttt

SEQ ID NO: 58262 - DNA, 20 bp, Artificial Sequence
  MKO10058262_A_Vmn1r222
  gRNA
tatttcttccgtttattaga

SEQ ID NO: 58263 - DNA, 20 bp, Artificial Sequence
  MKO10058263_A_Vmn1r222
  gRNA
tatattcagtcttgtatttg

SEQ ID NO: 58264 - DNA, 20 bp, Artificial Sequence
  MKO10058264_A_Vmn1r223
  gRNA
catggacattcccagtgatc

SEQ ID NO: 58265 - DNA, 20 bp, Artificial Sequence
  MKO10058265_A_Vmn1r223
  gRNA
tgacagcctgaaccatgctg

SEQ ID NO: 58266 - DNA, 20 bp, Artificial Sequence
  MKO10058266_A_Vmn1r223
  gRNA
ataatacactgttcattcca

SEQ ID NO: 58267 - DNA, 20 bp, Artificial Sequence
  MKO10058267_A_Vmn1r224
  gRNA
ttgtcgttctctatatgcac

SEQ ID NO: 58268 - DNA, 20 bp, Artificial Sequence
  MKO10058268_A_Vmn1r224
  gRNA
catatagagaacgacaacca

SEQ ID NO: 58269 - DNA, 20 bp, Artificial Sequence
  MKO10058269_A_Vmn1r224
  gRNA
actcagagaaagcttaatct

SEQ ID NO: 58270 - DNA, 20 bp, Artificial Sequence
  MKO10058270_A_Vmn1r225
  gRNA
ctcttagttcagagtatact

SEQ ID NO: 58271 - DNA, 20 bp, Artificial Sequence
  MKO10058271_A_Vmn1r225
  gRNA
ctttgtcacgaccttgagag

SEQ ID NO: 58272 - DNA, 20 bp, Artificial Sequence
  MKO10058272_A_Vmn1r225
  gRNA
aaccaaaagctgccattatc

SEQ ID NO: 58273 - DNA, 20 bp, Artificial Sequence
  MKO10058273_A_Vmn1r226
  gRNA
gtttgtcacgacctatagag

SEQ ID NO: 58274 - DNA, 20 bp, Artificial Sequence
  MKO10058274_A_Vmn1r226
  gRNA
ccaaaagctttcactacttc

SEQ ID NO: 58275 - DNA, 20 bp, Artificial Sequence
  MKO10058275_A_Vmn1r226
  gRNA
aagcaatcaccattagcccc

SEQ ID NO: 58276 - DNA, 20 bp, Artificial Sequence
  MKO10058276_A_Vmn1r227
  gRNA
gatattcatcaaccaccgac

SEQ ID NO: 58277 - DNA, 20 bp, Artificial Sequence
  MKO10058277_A_Vmn1r227
  gRNA
gcatatttactagcatcaac

SEQ ID NO: 58278 - DNA, 20 bp, Artificial Sequence
  MKO10058278_A_Vmn1r227
  gRNA
aaatgccccagggattccga

SEQ ID NO: 58279 - DNA, 20 bp, Artificial Sequence
  MKO10058279_A_Vmn1r228
  gRNA
ccaaaagctcccattacctc

SEQ ID NO: 58280 - DNA, 20 bp, Artificial Sequence
  MKO10058280_A_Vmn1r228
  gRNA
ctattgctagctgtatataa

SEQ ID NO: 58281 - DNA, 20 bp, Artificial Sequence
  MKO10058281_A_Vmn1r228
  gRNA
tcagtcccagtaactcctgc

SEQ ID NO: 58282 - DNA, 20 bp, Artificial Sequence
  MKO10058282_A_Vmn1r229
  gRNA
aatgacttattcgatgatgt

SEQ ID NO: 58283 - DNA, 20 bp, Artificial Sequence
  MKO10058283_A_Vmn1r229
  gRNA
tccataaagtatgactatca

SEQ ID NO: 58284 - DNA, 20 bp, Artificial Sequence
  MKO10058284_A_Vmn1r229
  gRNA
tatcacgaccatcatttcta

SEQ ID NO: 58285 - DNA, 20 bp, Artificial Sequence
  MKO10058285_A_Vmn1r22
  gRNA
attacctcctttaaacagtc

SEQ ID NO: 58286 - DNA, 20 bp, Artificial Sequence
  MKO10058286_A_Vmn1r22
  gRNA
aggaaaattgacataagatc

SEQ ID NO: 58287 - DNA, 20 bp, Artificial Sequence
  MKO10058287_A_Vmn1r22
  gRNA
tacactggtagggtgatgag

SEQ ID NO: 58288 - DNA, 20 bp, Artificial Sequence
  MKO10058288_A_Vmn1r230
  gRNA
atcttgatcatgctctcgaa

SEQ ID NO: 58289 - DNA, 20 bp, Artificial Sequence
  MKO10058289_A_Vmn1r230
  gRNA
ttcaaactctatactattgt

SEQ ID NO: 58290 - DNA, 20 bp, Artificial Sequence
  MKO10058290_A_Vmn1r230
  gRNA
gtctatcacaatgggagctt

SEQ ID NO: 58291 - DNA, 20 bp, Artificial Sequence
  MKO10058291_A_Vmn1r231
  gRNA
cccagtgactcgtgccttaa

SEQ ID NO: 58292 - DNA, 20 bp, Artificial Sequence
  MKO10058292_A_Vmn1r231
  gRNA
tgcccagattcagcttatcc

SEQ ID NO: 58293 - DNA, 20 bp, Artificial Sequence
  MKO10058293_A_Vmn1r231
  gRNA
ccaactctttcagtatacat

SEQ ID NO: 58294 - DNA, 20 bp, Artificial Sequence
  MKO10058294_A_Vmn1r232
  gRNA
tatatgttcaaagacttagc

SEQ ID NO: 58295 - DNA, 20 bp, Artificial Sequence
  MKO10058295_A_Vmn1r232
  gRNA
aaaaacgttgaatgacctaa

SEQ ID NO: 58296 - DNA, 20 bp, Artificial Sequence
  MKO10058296_A_Vmn1r232
  gRNA
acctttggagataatgatca

SEQ ID NO: 58297 - DNA, 20 bp, Artificial Sequence
  MKO10058297_A_Vmn1r233
  gRNA
acctctacctattctgcgaa

SEQ ID NO: 58298 - DNA, 20 bp, Artificial Sequence
  MKO10058298_A_Vmn1r233
  gRNA
tcctttgcttgtgcctatac

SEQ ID NO: 58299 - DNA, 20 bp, Artificial Sequence
  MKO10058299_A_Vmn1r233
  gRNA
cccgagagtcatgactcatg

SEQ ID NO: 58300 - DNA, 20 bp, Artificial Sequence
  MKO10058300_A_Vmn1r234
  gRNA
gcagcacacgtgattatccc

SEQ ID NO: 58301 - DNA, 20 bp, Artificial Sequence
  MKO10058301_A_Vmn1r234
  gRNA
gggtctcatcaaatcacttc

SEQ ID NO: 58302 - DNA, 20 bp, Artificial Sequence
  MKO10058302_A_Vmn1r234
  gRNA
gctcttccctatacttgact

SEQ ID NO: 58303 - DNA, 20 bp, Artificial Sequence
  MKO10058303_A_Vmn1r235
  gRNA
gattgcacccaaaatcactt

SEQ ID NO: 58304 - DNA, 20 bp, Artificial Sequence
  MKO10058304_A_Vmn1r235
  gRNA
tatacctagggccatattcc

SEQ ID NO: 58305 - DNA, 20 bp, Artificial Sequence
  MKO10058305_A_Vmn1r235
  gRNA
ctactgttctcatcttgcac

SEQ ID NO: 58306 - DNA, 20 bp, Artificial Sequence
  MKO10058306_A_Vmn1r236
  gRNA
ccaccttcaccttgccgtgc

SEQ ID NO: 58307 - DNA, 20 bp, Artificial Sequence
  MKO10058307_A_Vmn1r236
  gRNA
ctttatgccacattactgtc

SEQ ID NO: 58308 - DNA, 20 bp, Artificial Sequence
  MKO10058308_A_Vmn1r236
  gRNA
tatcactggttggatcatga

SEQ ID NO: 58309 - DNA, 20 bp, Artificial Sequence
  MKO10058309_A_Vmn1r237
  gRNA
attacacgcctaagggtgta

SEQ ID NO: 58310 - DNA, 20 bp, Artificial Sequence
  MKO10058310_A_Vmn1r237
  gRNA
atctgatgctttactacatg

SEQ ID NO: 58311 - DNA, 20 bp, Artificial Sequence
  MKO10058311_A_Vmn1r237
  gRNA
aacagataccatacaccctt

SEQ ID NO: 58312 - DNA, 20 bp, Artificial Sequence
  MKO10058312_A_Vmn1r238
  gRNA
atttacattccatgtcatct

SEQ ID NO: 58313 - DNA, 20 bp, Artificial Sequence
  MKO10058313_A_Vmn1r238
  gRNA
tcaaaataaaataataaaat

SEQ ID NO: 58314 - DNA, 20 bp, Artificial Sequence
  MKO10058314_A_Vmn1r238
  gRNA
ataggaatgaaaatggatcc

SEQ ID NO: 58315 - DNA, 20 bp, Artificial Sequence
  MKO10058315_A_Vmn1r23
  gRNA
tacactagtagggtgatgag

SEQ ID NO: 58316 - DNA, 20 bp, Artificial Sequence
  MKO10058316_A_Vmn1r23
  gRNA
ataatgatgttactcactgc

SEQ ID NO: 58317 - DNA, 20 bp, Artificial Sequence
  MKO10058317_A_Vmn1r23
  gRNA
cacacagaccatcctgctgc

SEQ ID NO: 58318 - DNA, 20 bp, Artificial Sequence
  MKO10058318_A_Vmn1r24
  gRNA
tcctcactggatgggatatc

SEQ ID NO: 58319 - DNA, 20 bp, Artificial Sequence
  MKO10058319_A_Vmn1r24
  gRNA
acaggcttaggactgtgaca

SEQ ID NO: 58320 - DNA, 20 bp, Artificial Sequence
  MKO10058320_A_Vmn1r24
  gRNA
ttcccatgaacaacattata

SEQ ID NO: 58321 - DNA, 20 bp, Artificial Sequence
  MKO10058321_A_Vmn1r25
  gRNA
aaccaccaacatagactaac

SEQ ID NO: 58322 - DNA, 20 bp, Artificial Sequence
  MKO10058322_A_Vmn1r25
  gRNA
ataaaggatattcgttaatg

SEQ ID NO: 58323 - DNA, 20 bp, Artificial Sequence
  MKO10058323_A_Vmn1r25
  gRNA
ccagaccatcctactactta

SEQ ID NO: 58324 - DNA, 20 bp, Artificial Sequence
  MKO10058324_A_Vmn1r26
  gRNA
ggagtgttagtggacctgta

SEQ ID NO: 58325 - DNA, 20 bp, Artificial Sequence
  MKO10058325_A_Vmn1r26
  gRNA
atcttcatagcatcaattac

SEQ ID NO: 58326 - DNA, 20 bp, Artificial Sequence
  MKO10058326_A_Vmn1r26
  gRNA
gccaaatatcccctgcagta

SEQ ID NO: 58327 - DNA, 20 bp, Artificial Sequence
  MKO10058327_A_Vmn1r27
  gRNA
gctgaccttcattcatataa

SEQ ID NO: 58328 - DNA, 20 bp, Artificial Sequence
  MKO10058328_A_Vmn1r27
  gRNA
gcacaccattatatgaatga

SEQ ID NO: 58329 - DNA, 20 bp, Artificial Sequence
  MKO10058329_A_Vmn1r27
  gRNA
ttatgatccagtcagcctga

SEQ ID NO: 58330 - DNA, 20 bp, Artificial Sequence
  MKO10058330_A_Vmn1r28
  gRNA
agatctgtcacctagtatta

SEQ ID NO: 58331 - DNA, 20 bp, Artificial Sequence
  MKO10058331_A_Vmn1r28
  gRNA
ataaaagacattctctaaag

SEQ ID NO: 58332 - DNA, 20 bp, Artificial Sequence
  MKO10058332_A_Vmn1r28
  gRNA
cattcacctcaaccctgtca

SEQ ID NO: 58333 - DNA, 20 bp, Artificial Sequence
  MKO10058333_A_Vmn1r29
  gRNA
gccaaatatcccctccagca

SEQ ID NO: 58334 - DNA, 20 bp, Artificial Sequence
  MKO10058334_A_Vmn1r29
  gRNA
agtaaccagatcttatatgt

SEQ ID NO: 58335 - DNA, 20 bp, Artificial Sequence
  MKO10058335_A_Vmn1r29
  gRNA
aaccaccaacatataagatc

SEQ ID NO: 58336 - DNA, 20 bp, Artificial Sequence
  MKO10058336_A_Vmn1r2
  gRNA
tcagaaagtattgagcactg

SEQ ID NO: 58337 - DNA, 20 bp, Artificial Sequence
  MKO10058337_A_Vmn1r2
  gRNA
aagttatctcttacctaagc

SEQ ID NO: 58338 - DNA, 20 bp, Artificial Sequence
  MKO10058338_A_Vmn1r2
  gRNA
ataggaatgaaaatggatcc

SEQ ID NO: 58339 - DNA, 20 bp, Artificial Sequence
  MKO10058339_A_Vmn1r30
  gRNA
ccagaccatcttactacttg

SEQ ID NO: 58340 - DNA, 20 bp, Artificial Sequence
  MKO10058340_A_Vmn1r30
  gRNA
atatatgagcaaatgtcagt

SEQ ID NO: 58341 - DNA, 20 bp, Artificial Sequence
  MKO10058341_A_Vmn1r30
  gRNA
atagaatatcatgtgactat

SEQ ID NO: 58342 - DNA, 20 bp, Artificial Sequence
  MKO10058342_A_Vmn1r31
  gRNA
ttacaaacttctgaaccctc

SEQ ID NO: 58343 - DNA, 20 bp, Artificial Sequence
  MKO10058343_A_Vmn1r31
  gRNA
ctgggtcatacatccacaat

SEQ ID NO: 58344 - DNA, 20 bp, Artificial Sequence
  MKO10058344_A_Vmn1r31
  gRNA
aaacatcatcatgtgaataa

SEQ ID NO: 58345 - DNA, 20 bp, Artificial Sequence
  MKO10058345_A_Vmn1r32
  gRNA
tctcaggggaagctcgtaag

SEQ ID NO: 58346 - DNA, 20 bp, Artificial Sequence
  MKO10058346_A_Vmn1r32
  gRNA
ccctacaagaaatacgtctc

SEQ ID NO: 58347 - DNA, 20 bp, Artificial Sequence
  MKO10058347_A_Vmn1r32
  gRNA
ccagggttccaagtccaact

SEQ ID NO: 58348 - DNA, 20 bp, Artificial Sequence
  MKO10058348_A_Vmn1r33
  gRNA
catccataaaaggactgttc

SEQ ID NO: 58349 - DNA, 20 bp, Artificial Sequence
  MKO10058349_A_Vmn1r33
  gRNA
tcccttgatgatatagtcca

SEQ ID NO: 58350 - DNA, 20 bp, Artificial Sequence
  MKO10058350_A_Vmn1r33
  gRNA
ttctgaacagtcaacaagac

SEQ ID NO: 58351 - DNA, 20 bp, Artificial Sequence
  MKO10058351_A_Vmn1r34
  gRNA
gtttggcttacagatttact

SEQ ID NO: 58352 - DNA, 20 bp, Artificial Sequence
  MKO10058352_A_Vmn1r34
  gRNA
acacatcattgtgtgaacga

SEQ ID NO: 58353 - DNA, 20 bp, Artificial Sequence
  MKO10058353_A_Vmn1r34
  gRNA
cacacaatgatgtgtctcac

SEQ ID NO: 58354 - DNA, 20 bp, Artificial Sequence
  MKO10058354_A_Vmn1r35
  gRNA
ctatagctccaagccctgct

SEQ ID NO: 58355 - DNA, 20 bp, Artificial Sequence
  MKO10058355_A_Vmn1r35
  gRNA
aggcaactgcttacataaac

SEQ ID NO: 58356 - DNA, 20 bp, Artificial Sequence
  MKO10058356_A_Vmn1r35
  gRNA
ttctttgtgtcattgaacat

SEQ ID NO: 58357 - DNA, 20 bp, Artificial Sequence
  MKO10058357_A_Vmn1r36
  gRNA
attaaccacatcatctatac

SEQ ID NO: 58358 - DNA, 20 bp, Artificial Sequence
  MKO10058358_A_Vmn1r36
  gRNA
aagcaccagtatagatgatg

SEQ ID NO: 58359 - DNA, 20 bp, Artificial Sequence
  MKO10058359_A_Vmn1r36
  gRNA
gagtgagaccaaccagctga

SEQ ID NO: 58360 - DNA, 20 bp, Artificial Sequence
  MKO10058360_A_Vmn1r37
  gRNA
aagcgccagtatagatgatc

SEQ ID NO: 58361 - DNA, 20 bp, Artificial Sequence
  MKO10058361_A_Vmn1r37
  gRNA
atttgtcattcagcattaac

SEQ ID NO: 58362 - DNA, 20 bp, Artificial Sequence
  MKO10058362_A_Vmn1r37
  gRNA
gagtgagaccaaccagctga

SEQ ID NO: 58363 - DNA, 20 bp, Artificial Sequence
  MKO10058363_A_Vmn1r38
  gRNA
cagtcccaactccgctttgt

SEQ ID NO: 58364 - DNA, 20 bp, Artificial Sequence
  MKO10058364_A_Vmn1r38
  gRNA
tacttaaacagggcaatgag

SEQ ID NO: 58365 - DNA, 20 bp, Artificial Sequence
  MKO10058365_A_Vmn1r38
  gRNA
caacgtgagtgagaccaacc

SEQ ID NO: 58366 - DNA, 20 bp, Artificial Sequence
  MKO10058366_A_Vmn1r39
  gRNA
taatgaaatccacccagtac

SEQ ID NO: 58367 - DNA, 20 bp, Artificial Sequence
  MKO10058367_A_Vmn1r39
  gRNA
tacttaaatagggcgatgag

SEQ ID NO: 58368 - DNA, 20 bp, Artificial Sequence
  MKO10058368_A_Vmn1r39
  gRNA
caacgtgagtgataccaacc

SEQ ID NO: 58369 - DNA, 20 bp, Artificial Sequence
  MKO10058369_A_Vmn1r3
  gRNA
ataggaatgaaaatgggtcc

SEQ ID NO: 58370 - DNA, 20 bp, Artificial Sequence
  MKO10058370_A_Vmn1r3
  gRNA
aagttatctcttacctaagc

SEQ ID NO: 58371 - DNA, 20 bp, Artificial Sequence
  MKO10058371_A_Vmn1r3
  gRNA
acaagaaaaatgcaactaac

SEQ ID NO: 58372 - DNA, 20 bp, Artificial Sequence
  MKO10058372_A_Vmn1r40
  gRNA
gcccacgtctgcatgatcct

SEQ ID NO: 58373 - DNA, 20 bp, Artificial Sequence
  MKO10058373_A_Vmn1r40
  gRNA
tgcagacgtgggcaataaaa

SEQ ID NO: 58374 - DNA, 20 bp, Artificial Sequence
  MKO10058374_A_Vmn1r40
  gRNA
ccaccatgtacccgctggac

SEQ ID NO: 58375 - DNA, 20 bp, Artificial Sequence
  MKO10058375_A_Vmn1r41
  gRNA
caaaatcatccccagaacaa

SEQ ID NO: 58376 - DNA, 20 bp, Artificial Sequence
  MKO10058376_A_Vmn1r41
  gRNA
tcctggtggccctttgttct

SEQ ID NO: 58377 - DNA, 20 bp, Artificial Sequence
  MKO10058377_A_Vmn1r41
  gRNA
tcagtgcaaatcaacacaaa

SEQ ID NO: 58378 - DNA, 20 bp, Artificial Sequence
  MKO10058378_A_Vmn1r42
  gRNA
tagccctcttaagcatgcac

SEQ ID NO: 58379 - DNA, 20 bp, Artificial Sequence
  MKO10058379_A_Vmn1r42
  gRNA
gtatgtgagaacattgactg

SEQ ID NO: 58380 - DNA, 20 bp, Artificial Sequence
  MKO10058380_A_Vmn1r42
  gRNA
atatctcctcatcacatatc

SEQ ID NO: 58381 - DNA, 20 bp, Artificial Sequence
  MKO10058381_A_Vmn1r43
  gRNA
tagaatttatgctttccacg

SEQ ID NO: 58382 - DNA, 20 bp, Artificial Sequence
  MKO10058382_A_Vmn1r43
  gRNA
tctacccttgagttacctcg

SEQ ID NO: 58383 - DNA, 20 bp, Artificial Sequence
  MKO10058383_A_Vmn1r43
  gRNA
gtctggtttcctgaagatgc

SEQ ID NO: 58384 - DNA, 20 bp, Artificial Sequence
  MKO10058384_A_Vmn1r44
  gRNA
aacactcacttcagcaagca

SEQ ID NO: 58385 - DNA, 20 bp, Artificial Sequence
  MKO10058385_A_Vmn1r44
  gRNA
acactgttatcttccactca

SEQ ID NO: 58386 - DNA, 20 bp, Artificial Sequence
  MKO10058386_A_Vmn1r44
  gRNA
ttgcttgctgaagtgagtgt

SEQ ID NO: 58387 - DNA, 20 bp, Artificial Sequence
  MKO10058387_A_Vmn1r45
  gRNA
ttgctacccccaatttgacc

SEQ ID NO: 58388 - DNA, 20 bp, Artificial Sequence
  MKO10058388_A_Vmn1r45
  gRNA
aaactctgtacagatacaca

SEQ ID NO: 58389 - DNA, 20 bp, Artificial Sequence
  MKO10058389_A_Vmn1r45
  gRNA
tgagcagtagcatcagtaag

SEQ ID NO: 58390 - DNA, 20 bp, Artificial Sequence
  MKO10058390_A_Vmn1r46
  gRNA
actcatgggtaaaattgagc

SEQ ID NO: 58391 - DNA, 20 bp, Artificial Sequence
  MKO10058391_A_Vmn1r46
  gRNA
gctgtggatatgtttatgcc

SEQ ID NO: 58392 - DNA, 20 bp, Artificial Sequence
  MKO10058392_A_Vmn1r46
  gRNA
gcttaggcctgctttcacca

SEQ ID NO: 58393 - DNA, 20 bp, Artificial Sequence
  MKO10058393_A_Vmn1r47
  gRNA
atccaagaacatagctcttg

SEQ ID NO: 58394 - DNA, 20 bp, Artificial Sequence
  MKO10058394_A_Vmn1r47
  gRNA
ctcctcaagagctatgttct

SEQ ID NO: 58395 - DNA, 20 bp, Artificial Sequence
  MKO10058395_A_Vmn1r47
  gRNA
ggagacaatgctgtcgaaga

SEQ ID NO: 58396 - DNA, 20 bp, Artificial Sequence
  MKO10058396_A_Vmn1r48
  gRNA
tggccctcttgtacatgcac

SEQ ID NO: 58397 - DNA, 20 bp, Artificial Sequence
  MKO10058397_A_Vmn1r48
  gRNA
gtttcctgtgcatgtacaag

SEQ ID NO: 58398 - DNA, 20 bp, Artificial Sequence
  MKO10058398_A_Vmn1r48
  gRNA
gactgctaattgacatatag

SEQ ID NO: 58399 - DNA, 20 bp, Artificial Sequence
  MKO10058399_A_Vmn1r49
  gRNA
gcccgcctctgcaagctcct

SEQ ID NO: 58400 - DNA, 20 bp, Artificial Sequence
  MKO10058400_A_Vmn1r49
  gRNA
gactgctaaaagacatatag

SEQ ID NO: 58401 - DNA, 20 bp, Artificial Sequence
  MKO10058401_A_Vmn1r49
  gRNA
tttccactcttatggccatc

SEQ ID NO: 58402 - DNA, 20 bp, Artificial Sequence
  MKO10058402_A_Vmn1r4
  gRNA
ttatgtgaacgaaggtcagt

SEQ ID NO: 58403 - DNA, 20 bp, Artificial Sequence
  MKO10058403_A_Vmn1r4
  gRNA
actgacataatattctatgt

SEQ ID NO: 58404 - DNA, 20 bp, Artificial Sequence
  MKO10058404_A_Vmn1r4
  gRNA
cacataatgatgctccttac

SEQ ID NO: 58405 - DNA, 20 bp, Artificial Sequence
  MKO10058405_A_Vmn1r50
  gRNA
agcctttctcatcggactca

SEQ ID NO: 58406 - DNA, 20 bp, Artificial Sequence
  MKO10058406_A_Vmn1r50
  gRNA
cagtaccatcatgctactca

SEQ ID NO: 58407 - DNA, 20 bp, Artificial Sequence
  MKO10058407_A_Vmn1r50
  gRNA
ggtacgtggtagttctccta

SEQ ID NO: 58408 - DNA, 20 bp, Artificial Sequence
  MKO10058408_A_Vmn1r51
  gRNA
ggctgataccttgcagatgc

SEQ ID NO: 58409 - DNA, 20 bp, Artificial Sequence
  MKO10058409_A_Vmn1r51
  gRNA
aacatatagttaactgtttg

SEQ ID NO: 58410 - DNA, 20 bp, Artificial Sequence
  MKO10058410_A_Vmn1r51
  gRNA
acatggtagccctcttgtgt

SEQ ID NO: 58411 - DNA, 20 bp, Artificial Sequence
  MKO10058411_A_Vmn1r52
  gRNA
ctactcaagaactatattac

SEQ ID NO: 58412 - DNA, 20 bp, Artificial Sequence
  MKO10058412_A_Vmn1r52
  gRNA
ctgtaatatagttcttgagt

SEQ ID NO: 58413 - DNA, 20 bp, Artificial Sequence
  MKO10058413_A_Vmn1r52
  gRNA
aagtactatcttctcataca

SEQ ID NO: 58414 - DNA, 20 bp, Artificial Sequence
  MKO10058414_A_Vmn1r53
  gRNA
ctaccatgtaccctccggac

SEQ ID NO: 58415 - DNA, 20 bp, Artificial Sequence
  MKO10058415_A_Vmn1r53
  gRNA
ggccctgtccggagggtaca

SEQ ID NO: 58416 - DNA, 20 bp, Artificial Sequence
  MKO10058416_A_Vmn1r53
  gRNA
atcagggaagccttacttat

SEQ ID NO: 58417 - DNA, 20 bp, Artificial Sequence
  MKO10058417_A_Vmn1r54
  gRNA
tacataagaagtatcgatga

SEQ ID NO: 58418 - DNA, 20 bp, Artificial Sequence
  MKO10058418_A_Vmn1r54
  gRNA
tctcttgtccctaatccacc

SEQ ID NO: 58419 - DNA, 20 bp, Artificial Sequence
  MKO10058419_A_Vmn1r54
  gRNA
cacatcttcaagtacattcg

SEQ ID NO: 58420 - DNA, 20 bp, Artificial Sequence
  MKO10058420_A_Vmn1r55
  gRNA
cttacatcccaatgaatgtc

SEQ ID NO: 58421 - DNA, 20 bp, Artificial Sequence
  MKO10058421_A_Vmn1r55
  gRNA
ttcacatgacatgattgatt

SEQ ID NO: 58422 - DNA, 20 bp, Artificial Sequence
  MKO10058422_A_Vmn1r55
  gRNA
gactggcaaagtcattacag

SEQ ID NO: 58423 - DNA, 20 bp, Artificial Sequence
  MKO10058423_A_Vmn1r56
  gRNA
taatgtctcccctagtcatg

SEQ ID NO: 58424 - DNA, 20 bp, Artificial Sequence
  MKO10058424_A_Vmn1r56
  gRNA
aattgtatatgctccgtctc

SEQ ID NO: 58425 - DNA, 20 bp, Artificial Sequence
  MKO10058425_A_Vmn1r56
  gRNA
gcctggaaatccacatgact

SEQ ID NO: 58426 - DNA, 20 bp, Artificial Sequence
  MKO10058426_A_Vmn1r57
  gRNA
tggtccaagccataatgcca

SEQ ID NO: 58427 - DNA, 20 bp, Artificial Sequence
  MKO10058427_A_Vmn1r57
  gRNA
catatgaatatgttgaaaaa

SEQ ID NO: 58428 - DNA, 20 bp, Artificial Sequence
  MKO10058428_A_Vmn1r57
  gRNA
taattactcccccagtcacg

SEQ ID NO: 58429 - DNA, 20 bp, Artificial Sequence
  MKO10058429_A_Vmn1r58
  gRNA
tctgcacatcattgtcagta

SEQ ID NO: 58430 - DNA, 20 bp, Artificial Sequence
  MKO10058430_A_Vmn1r58
  gRNA
gctattgttgttgcatctgc

SEQ ID NO: 58431 - DNA, 20 bp, Artificial Sequence
  MKO10058431_A_Vmn1r58
  gRNA
ctccagactgaagccaatac

SEQ ID NO: 58432 - DNA, 20 bp, Artificial Sequence
  MKO10058432_A_Vmn1r59
  gRNA
gactggaaatccacgtgact

SEQ ID NO: 58433 - DNA, 20 bp, Artificial Sequence
  MKO10058433_A_Vmn1r59
  gRNA
taatgactcccccagtcacg

SEQ ID NO: 58434 - DNA, 20 bp, Artificial Sequence
  MKO10058434_A_Vmn1r59
  gRNA
atccctaaatatcaaaagta

SEQ ID NO: 58435 - DNA, 20 bp, Artificial Sequence
  MKO10058435_A_Vmn1r5
  gRNA
atgtcccagtactacattgc

SEQ ID NO: 58436 - DNA, 20 bp, Artificial Sequence
  MKO10058436_A_Vmn1r5
  gRNA
caatgacctcattcctgtta

SEQ ID NO: 58437 - DNA, 20 bp, Artificial Sequence
  MKO10058437_A_Vmn1r5
  gRNA
aaacatgattatatgaacga

SEQ ID NO: 58438 - DNA, 20 bp, Artificial Sequence
  MKO10058438_A_Vmn1r60
  gRNA
tcctgggaacaatatcaata

SEQ ID NO: 58439 - DNA, 20 bp, Artificial Sequence
  MKO10058439_A_Vmn1r60
  gRNA
catcatattccttaatatca

SEQ ID NO: 58440 - DNA, 20 bp, Artificial Sequence
  MKO10058440_A_Vmn1r60
  gRNA
tgattgtgcctcgagcaact

SEQ ID NO: 58441 - DNA, 20 bp, Artificial Sequence
  MKO10058441_A_Vmn1r61
  gRNA
gaggtatgtcataaatctcc

SEQ ID NO: 58442 - DNA, 20 bp, Artificial Sequence
  MKO10058442_A_Vmn1r61
  gRNA
ctccagactgaaacccatac

SEQ ID NO: 58443 - DNA, 20 bp, Artificial Sequence
  MKO10058443_A_Vmn1r61
  gRNA
acttgcacatttctttcacc

SEQ ID NO: 58444 - DNA, 20 bp, Artificial Sequence
  MKO10058444_A_Vmn1r62
  gRNA
tccctaaatatcaacagtaa

SEQ ID NO: 58445 - DNA, 20 bp, Artificial Sequence
  MKO10058445_A_Vmn1r62
  gRNA
cctgaaaaccatggaagtgt

SEQ ID NO: 58446 - DNA, 20 bp, Artificial Sequence
  MKO10058446_A_Vmn1r62
  gRNA
gtctacactgaccccagaga

SEQ ID NO: 58447 - DNA, 20 bp, Artificial Sequence
  MKO10058447_A_Vmn1r63
  gRNA
cctgaaaaccatggaaatgt

SEQ ID NO: 58448 - DNA, 20 bp, Artificial Sequence
  MKO10058448_A_Vmn1r63
  gRNA
atccctaaatatcaacagta

SEQ ID NO: 58449 - DNA, 20 bp, Artificial Sequence
  MKO10058449_A_Vmn1r63
  gRNA
tacatgctaatgaatgtcag

SEQ ID NO: 58450 - DNA, 20 bp, Artificial Sequence
  MKO10058450_A_Vmn1r64
  gRNA
taggatccctacaaatcaac

SEQ ID NO: 58451 - DNA, 20 bp, Artificial Sequence
  MKO10058451_A_Vmn1r64
  gRNA
tgatctgattaggattatgc

SEQ ID NO: 58452 - DNA, 20 bp, Artificial Sequence
  MKO10058452_A_Vmn1r64
  gRNA
aatcctaatcagatcaacag

SEQ ID NO: 58453 - DNA, 20 bp, Artificial Sequence
  MKO10058453_A_Vmn1r65
  gRNA
ggctacaaagccgtgtcact

SEQ ID NO: 58454 - DNA, 20 bp, Artificial Sequence
  MKO10058454_A_Vmn1r65
  gRNA
ttggagccaaaactgccata

SEQ ID NO: 58455 - DNA, 20 bp, Artificial Sequence
  MKO10058455_A_Vmn1r65
  gRNA
ttgtcctgtacccttcattg

SEQ ID NO: 58456 - DNA, 20 bp, Artificial Sequence
  MKO10058456_A_Vmn1r66
  gRNA
ctctcgtgcataatccaagt

SEQ ID NO: 58457 - DNA, 20 bp, Artificial Sequence
  MKO10058457_A_Vmn1r66
  gRNA
agcaatgtaacctcgtaaga

SEQ ID NO: 58458 - DNA, 20 bp, Artificial Sequence
  MKO10058458_A_Vmn1r66
  gRNA
gccaaagttgcaaagtatat

SEQ ID NO: 58459 - DNA, 20 bp, Artificial Sequence
  MKO10058459_A_Vmn1r67
  gRNA
tactaatgctgtatagagtg

SEQ ID NO: 58460 - DNA, 20 bp, Artificial Sequence
  MKO10058460_A_Vmn1r67
  gRNA
ttgtactaacggacacactc

SEQ ID NO: 58461 - DNA, 20 bp, Artificial Sequence
  MKO10058461_A_Vmn1r67
  gRNA
cactcagaagatcctagtcc

SEQ ID NO: 58462 - DNA, 20 bp, Artificial Sequence
  MKO10058462_A_Vmn1r68
  gRNA
gaatcagacccagtcgaaga

SEQ ID NO: 58463 - DNA, 20 bp, Artificial Sequence
  MKO10058463_A_Vmn1r68
  gRNA
agtccagaccaaactgaatc

SEQ ID NO: 58464 - DNA, 20 bp, Artificial Sequence
  MKO10058464_A_Vmn1r68
  gRNA
aaattcatttcgctctacaa

SEQ ID NO: 58465 - DNA, 20 bp, Artificial Sequence
  MKO10058465_A_Vmn1r69
  gRNA
gaatcaagcccaatcgaaga

SEQ ID NO: 58466 - DNA, 20 bp, Artificial Sequence
  MKO10058466_A_Vmn1r69
  gRNA
caagagacaggtactgccaa

SEQ ID NO: 58467 - DNA, 20 bp, Artificial Sequence
  MKO10058467_A_Vmn1r69
  gRNA
gtgctcatcacctattccag

SEQ ID NO: 58468 - DNA, 20 bp, Artificial Sequence
  MKO10058468_A_Vmn1r6
  gRNA
ctggatcatatctccataag

SEQ ID NO: 58469 - DNA, 20 bp, Artificial Sequence
  MKO10058469_A_Vmn1r6
  gRNA
gcttgcattgcctctgatgt

SEQ ID NO: 58470 - DNA, 20 bp, Artificial Sequence
  MKO10058470_A_Vmn1r6
  gRNA
gatctcctgtcaactgacct

SEQ ID NO: 58471 - DNA, 20 bp, Artificial Sequence
  MKO10058471_A_Vmn1r70
  gRNA
cttcagtgatgctatatgtt

SEQ ID NO: 58472 - DNA, 20 bp, Artificial Sequence
  MKO10058472_A_Vmn1r70
  gRNA
attgttgaggctaatagtga

SEQ ID NO: 58473 - DNA, 20 bp, Artificial Sequence
  MKO10058473_A_Vmn1r70
  gRNA
caaacatatagcatcactga

SEQ ID NO: 58474 - DNA, 20 bp, Artificial Sequence
  MKO10058474_A_Vmn1r71
  gRNA
caacacatccgtagcactca

SEQ ID NO: 58475 - DNA, 20 bp, Artificial Sequence
  MKO10058475_A_Vmn1r71
  gRNA
tccaacgcagccaagtacat

SEQ ID NO: 58476 - DNA, 20 bp, Artificial Sequence
  MKO10058476_A_Vmn1r71
  gRNA
gagattctattgttcgttca

SEQ ID NO: 58477 - DNA, 20 bp, Artificial Sequence
  MKO10058477_A_Vmn1r72
  gRNA
agtaagtgtatttacattcg

SEQ ID NO: 58478 - DNA, 20 bp, Artificial Sequence
  MKO10058478_A_Vmn1r72
  gRNA
ggcttctgaaaatgttgcaa

SEQ ID NO: 58479 - DNA, 20 bp, Artificial Sequence
  MKO10058479_A_Vmn1r72
  gRNA
atcagccctaataactccaa

SEQ ID NO: 58480 - DNA, 20 bp, Artificial Sequence
  MKO10058480_A_Vmn1r73
  gRNA
caattagccccaacaactac

SEQ ID NO: 58481 - DNA, 20 bp, Artificial Sequence
  MKO10058481_A_Vmn1r73
  gRNA
acacttactcgcagtaacat

SEQ ID NO: 58482 - DNA, 20 bp, Artificial Sequence
  MKO10058482_A_Vmn1r73
  gRNA
actatgtttaccgaataaca

SEQ ID NO: 58483 - DNA, 20 bp, Artificial Sequence
  MKO10058483_A_Vmn1r74
  gRNA
tcagccccaactattccaga

SEQ ID NO: 58484 - DNA, 20 bp, Artificial Sequence
  MKO10058484_A_Vmn1r74
  gRNA
agaattgccaattattccca

SEQ ID NO: 58485 - DNA, 20 bp, Artificial Sequence
  MKO10058485_A_Vmn1r74
  gRNA
tatgtcagtttgaaactcac

SEQ ID NO: 58486 - DNA, 20 bp, Artificial Sequence
  MKO10058486_A_Vmn1r75
  gRNA
ccacgggcaatgtcagattg

SEQ ID NO: 58487 - DNA, 20 bp, Artificial Sequence
  MKO10058487_A_Vmn1r75
  gRNA
ctatcaaccctagcaactgc

SEQ ID NO: 58488 - DNA, 20 bp, Artificial Sequence
  MKO10058488_A_Vmn1r75
  gRNA
aagttaccgcttaccaaagc

SEQ ID NO: 58489 - DNA, 20 bp, Artificial Sequence
  MKO10058489_A_Vmn1r76
  gRNA
tgcagttgcaaaattgctta

SEQ ID NO: 58490 - DNA, 20 bp, Artificial Sequence
  MKO10058490_A_Vmn1r76
  gRNA
acacttatgctccatagcaa

SEQ ID NO: 58491 - DNA, 20 bp, Artificial Sequence
  MKO10058491_A_Vmn1r76
  gRNA
tttggagtaggttgtaaaga

SEQ ID NO: 58492 - DNA, 20 bp, Artificial Sequence
  MKO10058492_A_Vmn1r77
  gRNA
cttcccttgttgctgtcatt

SEQ ID NO: 58493 - DNA, 20 bp, Artificial Sequence
  MKO10058493_A_Vmn1r77
  gRNA
ctggggcctgacactcttac

SEQ ID NO: 58494 - DNA, 20 bp, Artificial Sequence
  MKO10058494_A_Vmn1r77
  gRNA
ttgattccagtaagagtgtc

SEQ ID NO: 58495 - DNA, 20 bp, Artificial Sequence
  MKO10058495_A_Vmn1r78
  gRNA
attcccgttgccaagcttgc

SEQ ID NO: 58496 - DNA, 20 bp, Artificial Sequence
  MKO10058496_A_Vmn1r78
  gRNA
gctgcaactagacttgaaac

SEQ ID NO: 58497 - DNA, 20 bp, Artificial Sequence
  MKO10058497_A_Vmn1r78
  gRNA
gaaaatgactcctgcaagct

SEQ ID NO: 58498 - DNA, 20 bp, Artificial Sequence
  MKO10058498_A_Vmn1r79
  gRNA
aattaatagtgtatatttcc

SEQ ID NO: 58499 - DNA, 20 bp, Artificial Sequence
  MKO10058499_A_Vmn1r79
  gRNA
gagacaccccccttgttatc

SEQ ID NO: 58500 - DNA, 20 bp, Artificial Sequence
  MKO10058500_A_Vmn1r79
  gRNA
ccatcagtcccaataactcc

SEQ ID NO: 58501 - DNA, 20 bp, Artificial Sequence
  MKO10058501_A_Vmn1r7
  gRNA
tgatgaagtccatccagtat

SEQ ID NO: 58502 - DNA, 20 bp, Artificial Sequence
  MKO10058502_A_Vmn1r7
  gRNA
actgtcctttgttcacataa

SEQ ID NO: 58503 - DNA, 20 bp, Artificial Sequence
  MKO10058503_A_Vmn1r7
  gRNA
atacatccgtaacatttctg

SEQ ID NO: 58504 - DNA, 20 bp, Artificial Sequence
  MKO10058504_A_Vmn1r80
  gRNA
tttggagtaggccgtaacga

SEQ ID NO: 58505 - DNA, 20 bp, Artificial Sequence
  MKO10058505_A_Vmn1r80
  gRNA
aacaagtcaagcatatccac

SEQ ID NO: 58506 - DNA, 20 bp, Artificial Sequence
  MKO10058506_A_Vmn1r80
  gRNA
tgatttatggttactgttca

SEQ ID NO: 58507 - DNA, 20 bp, Artificial Sequence
  MKO10058507_A_Vmn1r81
  gRNA
gtgtttaagcataatccatc

SEQ ID NO: 58508 - DNA, 20 bp, Artificial Sequence
  MKO10058508_A_Vmn1r81
  gRNA
gtgacaaacacgaatagtta

SEQ ID NO: 58509 - DNA, 20 bp, Artificial Sequence
  MKO10058509_A_Vmn1r81
  gRNA
atggtttgctccaagcaatc

SEQ ID NO: 58510 - DNA, 20 bp, Artificial Sequence
  MKO10058510_A_Vmn1r82
  gRNA
ttgagctgattatggccgct

SEQ ID NO: 58511 - DNA, 20 bp, Artificial Sequence
  MKO10058511_A_Vmn1r82
  gRNA
ggattcctacagtagtctgc

SEQ ID NO: 58512 - DNA, 20 bp, Artificial Sequence
  MKO10058512_A_Vmn1r82
  gRNA
ggctgaatatagaaccatga

SEQ ID NO: 58513 - DNA, 20 bp, Artificial Sequence
  MKO10058513_A_Vmn1r83
  gRNA
gtgacgaacgtgatgagtta

SEQ ID NO: 58514 - DNA, 20 bp, Artificial Sequence
  MKO10058514_A_Vmn1r83
  gRNA
atgacgccagtaaaagtgat

SEQ ID NO: 58515 - DNA, 20 bp, Artificial Sequence
  MKO10058515_A_Vmn1r83
  gRNA
cacccaaattattctcaccc

SEQ ID NO: 58516 - DNA, 20 bp, Artificial Sequence
  MKO10058516_A_Vmn1r84
  gRNA
aagcgttcttaggagtagat

SEQ ID NO: 58517 - DNA, 20 bp, Artificial Sequence
  MKO10058517_A_Vmn1r84
  gRNA
tctacagcaatcgagtgtcc

SEQ ID NO: 58518 - DNA, 20 bp, Artificial Sequence
  MKO10058518_A_Vmn1r84
  gRNA
taaattccttctactacagc

SEQ ID NO: 58519 - DNA, 20 bp, Artificial Sequence
  MKO10058519_A_Vmn1r85
  gRNA
ctcttgttatgataacgccg

SEQ ID NO: 58520 - DNA, 20 bp, Artificial Sequence
  MKO10058520_A_Vmn1r85
  gRNA
tatgaccatgttgatgaacc

SEQ ID NO: 58521 - DNA, 20 bp, Artificial Sequence
  MKO10058521_A_Vmn1r85
  gRNA
ttaagcctaaactctctaag

SEQ ID NO: 58522 - DNA, 20 bp, Artificial Sequence
  MKO10058522_A_Vmn1r86
  gRNA
gataagtagattaatcagcc

SEQ ID NO: 58523 - DNA, 20 bp, Artificial Sequence
  MKO10058523_A_Vmn1r86
  gRNA
tgagatcatgagtgatgata

SEQ ID NO: 58524 - DNA, 20 bp, Artificial Sequence
  MKO10058524_A_Vmn1r86
  gRNA
ctgattaatctacttatcta

SEQ ID NO: 58525 - DNA, 20 bp, Artificial Sequence
  MKO10058525_A_Vmn1r87
  gRNA
ccaccaatcagatccaatac

SEQ ID NO: 58526 - DNA, 20 bp, Artificial Sequence
  MKO10058526_A_Vmn1r87
  gRNA
ggtggcgaacctggctactt

SEQ ID NO: 58527 - DNA, 20 bp, Artificial Sequence
  MKO10058527_A_Vmn1r87
  gRNA
tagtgcagttacaagtgact

SEQ ID NO: 58528 - DNA, 20 bp, Artificial Sequence
  MKO10058528_A_Vmn1r88
  gRNA
ttaagccaggagacaaacgt

SEQ ID NO: 58529 - DNA, 20 bp, Artificial Sequence
  MKO10058529_A_Vmn1r88
  gRNA
aaaaccaatatgactctcgt

SEQ ID NO: 58530 - DNA, 20 bp, Artificial Sequence
  MKO10058530_A_Vmn1r88
  gRNA
aacgagagtcatattggttt

SEQ ID NO: 58531 - DNA, 20 bp, Artificial Sequence
  MKO10058531_A_Vmn1r89
  gRNA
gcatatacccgtagatgact

SEQ ID NO: 58532 - DNA, 20 bp, Artificial Sequence
  MKO10058532_A_Vmn1r89
  gRNA
cactcacgatctcttctatg

SEQ ID NO: 58533 - DNA, 20 bp, Artificial Sequence
  MKO10058533_A_Vmn1r89
  gRNA
catagaagagatcgtgagtg

SEQ ID NO: 58534 - DNA, 20 bp, Artificial Sequence
  MKO10058534_A_Vmn1r8
  gRNA
cagcagcacgatagtctgcg

SEQ ID NO: 58535 - DNA, 20 bp, Artificial Sequence
  MKO10058535_A_Vmn1r8
  gRNA
aaccatcattatgtgcacaa

SEQ ID NO: 58536 - DNA, 20 bp, Artificial Sequence
  MKO10058536_A_Vmn1r8
  gRNA
cacgcagactatcgtgctgc

SEQ ID NO: 58537 - DNA, 20 bp, Artificial Sequence
  MKO10058537_A_Vmn1r90
  gRNA
acttgaatacttcctacgca

SEQ ID NO: 58538 - DNA, 20 bp, Artificial Sequence
  MKO10058538_A_Vmn1r90
  gRNA
tgcttcttgctaccatgcgt

SEQ ID NO: 58539 - DNA, 20 bp, Artificial Sequence
  MKO10058539_A_Vmn1r90
  gRNA
atcatctcaccaaaattgcc

SEQ ID NO: 58540 - DNA, 20 bp, Artificial Sequence
  MKO10058540_A_Vmn1r91
  gRNA
gcattcgctgatgatgtcta

SEQ ID NO: 58541 - DNA, 20 bp, Artificial Sequence
  MKO10058541_A_Vmn1r91
  gRNA
gggttgctctggacccagct

SEQ ID NO: 58542 - DNA, 20 bp, Artificial Sequence
  MKO10058542_A_Vmn1r91
  gRNA
ccacggtcccaaccacaaac

SEQ ID NO: 58543 - DNA, 20 bp, Artificial Sequence
  MKO10058543_A_Vmn1r93
  gRNA
gccctctccatgtctgttcg

SEQ ID NO: 58544 - DNA, 20 bp, Artificial Sequence
  MKO10058544_A_Vmn1r93
  gRNA
cagagcaagtgtcccaaatt

SEQ ID NO: 58545 - DNA, 20 bp, Artificial Sequence
  MKO10058545_A_Vmn1r93
  gRNA
gaccatgatgctcatgaatg

SEQ ID NO: 58546 - DNA, 20 bp, Artificial Sequence
  MKO10058546_A_Vmn1r94
  gRNA
caaatatgaccaccagcatc

SEQ ID NO: 58547 - DNA, 20 bp, Artificial Sequence
  MKO10058547_A_Vmn1r94
  gRNA
accctctcaatgtctgatca

SEQ ID NO: 58548 - DNA, 20 bp, Artificial Sequence
  MKO10058548_A_Vmn1r94
  gRNA
cagttgaaaagcacagaaca

SEQ ID NO: 58549 - DNA, 20 bp, Artificial Sequence
  MKO10058549_A_Vmn1r95
  gRNA
catttgaagagcacagaaca

SEQ ID NO: 58550 - DNA, 20 bp, Artificial Sequence
  MKO10058550_A_Vmn1r95
  gRNA
gccctctccatgtctgctca

SEQ ID NO: 58551 - DNA, 20 bp, Artificial Sequence
  MKO10058551_A_Vmn1r95
  gRNA
gcctacaatgaatccagaag

SEQ ID NO: 58552 - DNA, 20 bp, Artificial Sequence
  MKO10058552_A_Vmn1r9
  gRNA
tacccatgaacattattatc

SEQ ID NO: 58553 - DNA, 20 bp, Artificial Sequence
  MKO10058553_A_Vmn1r9
  gRNA
tctattgatgctttgactgc

SEQ ID NO: 58554 - DNA, 20 bp, Artificial Sequence
  MKO10058554_A_Vmn1r9
  gRNA
tcccctgataataatgttca

SEQ ID NO: 58555 - DNA, 20 bp, Artificial Sequence
  MKO10058555_A_Vmn2r100
  gRNA
gagaaaacaggagtattgat

SEQ ID NO: 58556 - DNA, 20 bp, Artificial Sequence
  MKO10058556_A_Vmn2r100
  gRNA
ctctcacctcaatattcttg

SEQ ID NO: 58557 - DNA, 20 bp, Artificial Sequence
  MKO10058557_A_Vmn2r100
  gRNA
tgatgttaattgtcatgtgt

SEQ ID NO: 58558 - DNA, 20 bp, Artificial Sequence
  MKO10058558_A_Vmn2r101
  gRNA
tgacacgtcagcaacttcaa

SEQ ID NO: 58559 - DNA, 20 bp, Artificial Sequence
  MKO10058559_A_Vmn2r101
  gRNA
agtcagctctgtcaataaca

SEQ ID NO: 58560 - DNA, 20 bp, Artificial Sequence
  MKO10058560_A_Vmn2r101
  gRNA
aacgacaactgtttaccctg

SEQ ID NO: 58561 - DNA, 20 bp, Artificial Sequence
  MKO10058561_A_Vmn2r102
  gRNA
gatcctttattaagtgacca

SEQ ID NO: 58562 - DNA, 20 bp, Artificial Sequence
  MKO10058562_A_Vmn2r102
  gRNA
cctccatgagatgagacttc

SEQ ID NO: 58563 - DNA, 20 bp, Artificial Sequence
  MKO10058563_A_Vmn2r102
  gRNA
cgctctgcaatttgcaattg

SEQ ID NO: 58564 - DNA, 20 bp, Artificial Sequence
  MKO10058564_A_Vmn2r103
  gRNA
tattcctcattataccttct

SEQ ID NO: 58565 - DNA, 20 bp, Artificial Sequence
  MKO10058565_A_Vmn2r103
  gRNA
gatcttctattaagtgacca

SEQ ID NO: 58566 - DNA, 20 bp, Artificial Sequence
  MKO10058566_A_Vmn2r103
  gRNA
attcaggaaagtagccttgg

SEQ ID NO: 58567 - DNA, 20 bp, Artificial Sequence
  MKO10058567_A_Vmn2r104
  gRNA
atactgaccatcgtcactca

SEQ ID NO: 58568 - DNA, 20 bp, Artificial Sequence
  MKO10058568_A_Vmn2r104
  gRNA
ttcttaggtttacttgtcgt

SEQ ID NO: 58569 - DNA, 20 bp, Artificial Sequence
  MKO10058569_A_Vmn2r104
  gRNA
ggttattgacatggaacatc

SEQ ID NO: 58570 - DNA, 20 bp, Artificial Sequence
  MKO10058570_A_Vmn2r105
  gRNA
cttcacatttaaaccaattc

SEQ ID NO: 58571 - DNA, 20 bp, Artificial Sequence
  MKO10058571_A_Vmn2r105
  gRNA
gaggccaaatgagattagat

SEQ ID NO: 58572 - DNA, 20 bp, Artificial Sequence
  MKO10058572_A_Vmn2r105
  gRNA
gacacttcagcaagtacaaa

SEQ ID NO: 58573 - DNA, 20 bp, Artificial Sequence
  MKO10058573_A_Vmn2r106
  gRNA
atgtgttggtgttctcgccc

SEQ ID NO: 58574 - DNA, 20 bp, Artificial Sequence
  MKO10058574_A_Vmn2r106
  gRNA
ataacagagcaagtatatac

SEQ ID NO: 58575 - DNA, 20 bp, Artificial Sequence
  MKO10058575_A_Vmn2r106
  gRNA
tacaattgttattacctgcc

SEQ ID NO: 58576 - DNA, 20 bp, Artificial Sequence
  MKO10058576_A_Vmn2r107
  gRNA
tgagagtcaacagtttagac

SEQ ID NO: 58577 - DNA, 20 bp, Artificial Sequence
  MKO10058577_A_Vmn2r107
  gRNA
agcagatagccttattctcc

SEQ ID NO: 58578 - DNA, 20 bp, Artificial Sequence
  MKO10058578_A_Vmn2r107
  gRNA
caaccgtgtgaaaatgaaga

SEQ ID NO: 58579 - DNA, 20 bp, Artificial Sequence
  MKO10058579_A_Vmn2r108
  gRNA
taatatgcattccatgtcat

SEQ ID NO: 58580 - DNA, 20 bp, Artificial Sequence
  MKO10058580_A_Vmn2r108
  gRNA
tgatgttgattgtcgacttt

SEQ ID NO: 58581 - DNA, 20 bp, Artificial Sequence
  MKO10058581_A_Vmn2r108
  gRNA
acaccaaagccagaatatac

SEQ ID NO: 58582 - DNA, 20 bp, Artificial Sequence
  MKO10058582_A_Vmn2r109
  gRNA
atatatgaagcccacgtgtc

SEQ ID NO: 58583 - DNA, 20 bp, Artificial Sequence
  MKO10058583_A_Vmn2r109
  gRNA
tgaaaatgatccctgacacg

SEQ ID NO: 58584 - DNA, 20 bp, Artificial Sequence
  MKO10058584_A_Vmn2r109
  gRNA
ttgagatatgagccaaaaac

SEQ ID NO: 58585 - DNA, 20 bp, Artificial Sequence
  MKO10058585_A_Vmn2r10
  gRNA
tcctataagggctataaaac

SEQ ID NO: 58586 - DNA, 20 bp, Artificial Sequence
  MKO10058586_A_Vmn2r10
  gRNA
cacacgtttgtcccatgcaa

SEQ ID NO: 58587 - DNA, 20 bp, Artificial Sequence
  MKO10058587_A_Vmn2r10
  gRNA
ttgatattccccattaatca

SEQ ID NO: 58588 - DNA, 20 bp, Artificial Sequence
  MKO10058588_A_Vmn2r110
  gRNA
acgtgaaattgatgagtact

SEQ ID NO: 58589 - DNA, 20 bp, Artificial Sequence
  MKO10058589_A_Vmn2r110
  gRNA
caaagctctctctatacttg

SEQ ID NO: 58590 - DNA, 20 bp, Artificial Sequence
  MKO10058590_A_Vmn2r110
  gRNA
gaggcaacataagtttagat

SEQ ID NO: 58591 - DNA, 20 bp, Artificial Sequence
  MKO10058591_A_Vmn2r111
  gRNA
caaatacccagatgactatc

SEQ ID NO: 58592 - DNA, 20 bp, Artificial Sequence
  MKO10058592_A_Vmn2r111
  gRNA
gaataacatcatttctgagc

SEQ ID NO: 58593 - DNA, 20 bp, Artificial Sequence
  MKO10058593_A_Vmn2r111
  gRNA
gctcagaaatgatgttattc

SEQ ID NO: 58594 - DNA, 20 bp, Artificial Sequence
  MKO10058594_A_Vmn2r112
  gRNA
tggatctagaaaattcgaga

SEQ ID NO: 58595 - DNA, 20 bp, Artificial Sequence
  MKO10058595_A_Vmn2r112
  gRNA
catccagttactcatttgat

SEQ ID NO: 58596 - DNA, 20 bp, Artificial Sequence
  MKO10058596_A_Vmn2r112
  gRNA
agaatacaccgaatgtgtaa

SEQ ID NO: 58597 - DNA, 20 bp, Artificial Sequence
  MKO10058597_A_Vmn2r113
  gRNA
gggactgcaatcaaaacaac

SEQ ID NO: 58598 - DNA, 20 bp, Artificial Sequence
  MKO10058598_A_Vmn2r113
  gRNA
gatgagatatgaagttgttt

SEQ ID NO: 58599 - DNA, 20 bp, Artificial Sequence
  MKO10058599_A_Vmn2r113
  gRNA
tgaaaatcacaagtatgctc

SEQ ID NO: 58600 - DNA, 20 bp, Artificial Sequence
  MKO10058600_A_Vmn2r114
  gRNA
tcaaaagtttgatctgccca

SEQ ID NO: 58601 - DNA, 20 bp, Artificial Sequence
  MKO10058601_A_Vmn2r114
  gRNA
tgtaagtgccattgtacacc

SEQ ID NO: 58602 - DNA, 20 bp, Artificial Sequence
  MKO10058602_A_Vmn2r114
  gRNA
tctccaaatacaattgttac

SEQ ID NO: 58603 - DNA, 20 bp, Artificial Sequence
  MKO10058603_A_Vmn2r115
  gRNA
gaccatacatctctagcctt

SEQ ID NO: 58604 - DNA, 20 bp, Artificial Sequence
  MKO10058604_A_Vmn2r115
  gRNA
tgtaagcgccattgcacatt

SEQ ID NO: 58605 - DNA, 20 bp, Artificial Sequence
  MKO10058605_A_Vmn2r115
  gRNA
caaatgcccagatgagtatc

SEQ ID NO: 58606 - DNA, 20 bp, Artificial Sequence
  MKO10058606_A_Vmn2r116
  gRNA
gaattgagtctcattcgttt

SEQ ID NO: 58607 - DNA, 20 bp, Artificial Sequence
  MKO10058607_A_Vmn2r116
  gRNA
ggtcagacaagaagttactt

SEQ ID NO: 58608 - DNA, 20 bp, Artificial Sequence
  MKO10058608_A_Vmn2r116
  gRNA
aaccacttcattaaccctgt

SEQ ID NO: 58609 - DNA, 20 bp, Artificial Sequence
  MKO10058609_A_Vmn2r117
  gRNA
tctcaaactacaactgtcac

SEQ ID NO: 58610 - DNA, 20 bp, Artificial Sequence
  MKO10058610_A_Vmn2r117
  gRNA
agaattcaccaagtgtgcaa

SEQ ID NO: 58611 - DNA, 20 bp, Artificial Sequence
  MKO10058611_A_Vmn2r117
  gRNA
gaaccgaagaaacaaactgc

SEQ ID NO: 58612 - DNA, 20 bp, Artificial Sequence
  MKO10058612_A_Vmn2r118
  gRNA
aaatgtgacccaactaatgc

SEQ ID NO: 58613 - DNA, 20 bp, Artificial Sequence
  MKO10058613_A_Vmn2r118
  gRNA
gtggatatcatctgcacaag

SEQ ID NO: 58614 - DNA, 20 bp, Artificial Sequence
  MKO10058614_A_Vmn2r118
  gRNA
taaccattccaataagttgc

SEQ ID NO: 58615 - DNA, 20 bp, Artificial Sequence
  MKO10058615_A_Vmn2r11
  gRNA
ccaacatatctctgatattc

SEQ ID NO: 58616 - DNA, 20 bp, Artificial Sequence
  MKO10058616_A_Vmn2r11
  gRNA
gtaaggtctatgtaacagtt

SEQ ID NO: 58617 - DNA, 20 bp, Artificial Sequence
  MKO10058617_A_Vmn2r11
  gRNA
gctatttacattgttaccca

SEQ ID NO: 58618 - DNA, 20 bp, Artificial Sequence
  MKO10058618_A_Vmn2r120
  gRNA
ttacagtaaacccgtgaaaa

SEQ ID NO: 58619 - DNA, 20 bp, Artificial Sequence
  MKO10058619_A_Vmn2r120
  gRNA
accttggcaccgatttgaca

SEQ ID NO: 58620 - DNA, 20 bp, Artificial Sequence
  MKO10058620_A_Vmn2r120
  gRNA
aaagtagatctgagccatac

SEQ ID NO: 58621 - DNA, 20 bp, Artificial Sequence
  MKO10058621_A_Vmn2r121
  gRNA
tttcctgaatccagcagtac

SEQ ID NO: 58622 - DNA, 20 bp, Artificial Sequence
  MKO10058622_A_Vmn2r121
  gRNA
tgtacccactgttcctccca

SEQ ID NO: 58623 - DNA, 20 bp, Artificial Sequence
  MKO10058623_A_Vmn2r121
  gRNA
tgatggacctgtaaaaccta

SEQ ID NO: 58624 - DNA, 20 bp, Artificial Sequence
  MKO10058624_A_Vmn2r122
  gRNA
ccagaaatgacaccgttctt

SEQ ID NO: 58625 - DNA, 20 bp, Artificial Sequence
  MKO10058625_A_Vmn2r122
  gRNA
caagaatatgcacaaataga

SEQ ID NO: 58626 - DNA, 20 bp, Artificial Sequence
  MKO10058626_A_Vmn2r122
  gRNA
gggaaggtcatgggtggttg

SEQ ID NO: 58627 - DNA, 20 bp, Artificial Sequence
  MKO10058627_A_Vmn2r123
  gRNA
aatgcactcttcgatgccac

SEQ ID NO: 58628 - DNA, 20 bp, Artificial Sequence
  MKO10058628_A_Vmn2r123
  gRNA
tcaggatttattgagagtta

SEQ ID NO: 58629 - DNA, 20 bp, Artificial Sequence
  MKO10058629_A_Vmn2r123
  gRNA
gtgcagtgatgtccattcca

SEQ ID NO: 58630 - DNA, 20 bp, Artificial Sequence
  MKO10058630_A_Vmn2r124
  gRNA
atcccttcgccatttaaata

SEQ ID NO: 58631 - DNA, 20 bp, Artificial Sequence
  MKO10058631_A_Vmn2r124
  gRNA
caaatgcaaccgtatttaaa

SEQ ID NO: 58632 - DNA, 20 bp, Artificial Sequence
  MKO10058632_A_Vmn2r124
  gRNA
tcctcacttcaatgtctttc

SEQ ID NO: 58633 - DNA, 20 bp, Artificial Sequence
  MKO10058633_A_Vmn2r12
  gRNA
tgtgataacgtcccattgca

SEQ ID NO: 58634 - DNA, 20 bp, Artificial Sequence
  MKO10058634_A_Vmn2r12
  gRNA
gtaaaactgtcaattcatca

SEQ ID NO: 58635 - DNA, 20 bp, Artificial Sequence
  MKO10058635_A_Vmn2r12
  gRNA
tatcagtaaattgtacagta

SEQ ID NO: 58636 - DNA, 20 bp, Artificial Sequence
  MKO10058636_A_Vmn2r13
  gRNA
atttaacaagttcacctatg

SEQ ID NO: 58637 - DNA, 20 bp, Artificial Sequence
  MKO10058637_A_Vmn2r13
  gRNA
ttcgcactgaccagaagtaa

SEQ ID NO: 58638 - DNA, 20 bp, Artificial Sequence
  MKO10058638_A_Vmn2r13
  gRNA
gtaaaactgtcaattcatac

SEQ ID NO: 58639 - DNA, 20 bp, Artificial Sequence
  MKO10058639_A_Vmn2r14
  gRNA
gtaaaactctcaacaaattc

SEQ ID NO: 58640 - DNA, 20 bp, Artificial Sequence
  MKO10058640_A_Vmn2r14
  gRNA
ttgatattccctgaagatcc

SEQ ID NO: 58641 - DNA, 20 bp, Artificial Sequence
  MKO10058641_A_Vmn2r14
  gRNA
gcatcaaagtgatcatgcca

SEQ ID NO: 58642 - DNA, 20 bp, Artificial Sequence
  MKO10058642_A_Vmn2r15
  gRNA
ttgatatcccccgttgatca

SEQ ID NO: 58643 - DNA, 20 bp, Artificial Sequence
  MKO10058643_A_Vmn2r15
  gRNA
acctgttacataggtcttat

SEQ ID NO: 58644 - DNA, 20 bp, Artificial Sequence
  MKO10058644_A_Vmn2r15
  gRNA
accttctaaagctgacttgt

SEQ ID NO: 58645 - DNA, 20 bp, Artificial Sequence
  MKO10058645_A_Vmn2r16
  gRNA
aaatgtcataatctgcacac

SEQ ID NO: 58646 - DNA, 20 bp, Artificial Sequence
  MKO10058646_A_Vmn2r16
  gRNA
atttagcaattctgccattg

SEQ ID NO: 58647 - DNA, 20 bp, Artificial Sequence
  MKO10058647_A_Vmn2r16
  gRNA
agatgttactcagaccatgc

SEQ ID NO: 58648 - DNA, 20 bp, Artificial Sequence
  MKO10058648_A_Vmn2r17
  gRNA
cttcttgtagaataccagca

SEQ ID NO: 58649 - DNA, 20 bp, Artificial Sequence
  MKO10058649_A_Vmn2r17
  gRNA
tggagatacattgggatacc

SEQ ID NO: 58650 - DNA, 20 bp, Artificial Sequence
  MKO10058650_A_Vmn2r17
  gRNA
ccagtttccctatatctatc

SEQ ID NO: 58651 - DNA, 20 bp, Artificial Sequence
  MKO10058651_A_Vmn2r18
  gRNA
ccccagcagtgttggtaaat

SEQ ID NO: 58652 - DNA, 20 bp, Artificial Sequence
  MKO10058652_A_Vmn2r18
  gRNA
atccaatttaccaacactgc

SEQ ID NO: 58653 - DNA, 20 bp, Artificial Sequence
  MKO10058653_A_Vmn2r18
  gRNA
tcgctgatttaggcagacag

SEQ ID NO: 58654 - DNA, 20 bp, Artificial Sequence
  MKO10058654_A_Vmn2r19
  gRNA
cagtaccaaatctcaagtaa

SEQ ID NO: 58655 - DNA, 20 bp, Artificial Sequence
  MKO10058655_A_Vmn2r19
  gRNA
caaatgcaacgcaaattcct

SEQ ID NO: 58656 - DNA, 20 bp, Artificial Sequence
  MKO10058656_A_Vmn2r19
  gRNA
gccaacctttacttgagatt

SEQ ID NO: 58657 - DNA, 20 bp, Artificial Sequence
  MKO10058657_A_Vmn2r1
  gRNA
gacccggaaggggattcgtc

SEQ ID NO: 58658 - DNA, 20 bp, Artificial Sequence
  MKO10058658_A_Vmn2r1
  gRNA
gcccctgacgaatccccttc

SEQ ID NO: 58659 - DNA, 20 bp, Artificial Sequence
  MKO10058659_A_Vmn2r1
  gRNA
gctgtatatgctatagctca

SEQ ID NO: 58660 - DNA, 20 bp, Artificial Sequence
  MKO10058660_A_Vmn2r20
  gRNA
tcatttgcaatctctccctc

SEQ ID NO: 58661 - DNA, 20 bp, Artificial Sequence
  MKO10058661_A_Vmn2r20
  gRNA
ctttgactgcaaacagacaa

SEQ ID NO: 58662 - DNA, 20 bp, Artificial Sequence
  MKO10058662_A_Vmn2r20
  gRNA
caaacattatcagcacatat

SEQ ID NO: 58663 - DNA, 20 bp, Artificial Sequence
  MKO10058663_A_Vmn2r21
  gRNA
caaacattatcagcacatat

SEQ ID NO: 58664 - DNA, 20 bp, Artificial Sequence
  MKO10058664_A_Vmn2r21
  gRNA
cattgtagagacttagaact

SEQ ID NO: 58665 - DNA, 20 bp, Artificial Sequence
  MKO10058665_A_Vmn2r21
  gRNA
atagctaccttccaagggag

SEQ ID NO: 58666 - DNA, 20 bp, Artificial Sequence
  MKO10058666_A_Vmn2r22
  gRNA
taggtgagaatacagtaaac

SEQ ID NO: 58667 - DNA, 20 bp, Artificial Sequence
  MKO10058667_A_Vmn2r22
  gRNA
cactggatagaagtgcactc

SEQ ID NO: 58668 - DNA, 20 bp, Artificial Sequence
  MKO10058668_A_Vmn2r22
  gRNA
tgtcttcaatgctgacttta

SEQ ID NO: 58669 - DNA, 20 bp, Artificial Sequence
  MKO10058669_A_Vmn2r23
  gRNA
cacattgacacatgttattg

SEQ ID NO: 58670 - DNA, 20 bp, Artificial Sequence
  MKO10058670_A_Vmn2r23
  gRNA
atcccatgctgttcaaaata

SEQ ID NO: 58671 - DNA, 20 bp, Artificial Sequence
  MKO10058671_A_Vmn2r23
  gRNA
tataggaaaacacccattga

SEQ ID NO: 58672 - DNA, 20 bp, Artificial Sequence
  MKO10058672_A_Vmn2r24
  gRNA
tacagagctacgttgtgcac

SEQ ID NO: 58673 - DNA, 20 bp, Artificial Sequence
  MKO10058673_A_Vmn2r24
  gRNA
aatcgtgtttatagacactt

SEQ ID NO: 58674 - DNA, 20 bp, Artificial Sequence
  MKO10058674_A_Vmn2r24
  gRNA
gttcacaacgttcttctcat

SEQ ID NO: 58675 - DNA, 20 bp, Artificial Sequence
  MKO10058675_A_Vmn2r25
  gRNA
ctatcttagggatattaccg

SEQ ID NO: 58676 - DNA, 20 bp, Artificial Sequence
  MKO10058676_A_Vmn2r25
  gRNA
attgctaccttccatggatg

SEQ ID NO: 58677 - DNA, 20 bp, Artificial Sequence
  MKO10058677_A_Vmn2r25
  gRNA
gttcacactgtactcctcat

SEQ ID NO: 58678 - DNA, 20 bp, Artificial Sequence
  MKO10058678_A_Vmn2r26
  gRNA
ctatcttagggacattacca

SEQ ID NO: 58679 - DNA, 20 bp, Artificial Sequence
  MKO10058679_A_Vmn2r26
  gRNA
agcctggagtaaacatttat

SEQ ID NO: 58680 - DNA, 20 bp, Artificial Sequence
  MKO10058680_A_Vmn2r26
  gRNA
cagtaccgctctgtagagac

SEQ ID NO: 58681 - DNA, 20 bp, Artificial Sequence
  MKO10058681_A_Vmn2r27
  gRNA
tgcaatacaaagtccgtgct

SEQ ID NO: 58682 - DNA, 20 bp, Artificial Sequence
  MKO10058682_A_Vmn2r27
  gRNA
aaatttactgtgttccgaca

SEQ ID NO: 58683 - DNA, 20 bp, Artificial Sequence
  MKO10058683_A_Vmn2r27
  gRNA
gcacaatcgtaacaacagag

SEQ ID NO: 58684 - DNA, 20 bp, Artificial Sequence
  MKO10058684_A_Vmn2r28
  gRNA
tgatagccatcttcatcatc

SEQ ID NO: 58685 - DNA, 20 bp, Artificial Sequence
  MKO10058685_A_Vmn2r28
  gRNA
acttcatactttacttccaa

SEQ ID NO: 58686 - DNA, 20 bp, Artificial Sequence
  MKO10058686_A_Vmn2r28
  gRNA
tggattcagaagatcccgga

SEQ ID NO: 58687 - DNA, 20 bp, Artificial Sequence
  MKO10058687_A_Vmn2r29
  gRNA
atacgtagacatgattgaag

SEQ ID NO: 58688 - DNA, 20 bp, Artificial Sequence
  MKO10058688_A_Vmn2r29
  gRNA
ataatcactttgtctccaag

SEQ ID NO: 58689 - DNA, 20 bp, Artificial Sequence
  MKO10058689_A_Vmn2r29
  gRNA
taaaaaccacaaatatgctt

SEQ ID NO: 58690 - DNA, 20 bp, Artificial Sequence
  MKO10058690_A_Vmn2r2
  gRNA
gtccctgtcgaatccccctt

SEQ ID NO: 58691 - DNA, 20 bp, Artificial Sequence
  MKO10058691_A_Vmn2r2
  gRNA
cccagacccaaccaaagtgt

SEQ ID NO: 58692 - DNA, 20 bp, Artificial Sequence
  MKO10058692_A_Vmn2r2
  gRNA
gtgagtcttatccaacactt

SEQ ID NO: 58693 - DNA, 20 bp, Artificial Sequence
  MKO10058693_A_Vmn2r30
  gRNA
gcggagataagaagctgtcc

SEQ ID NO: 58694 - DNA, 20 bp, Artificial Sequence
  MKO10058694_A_Vmn2r30
  gRNA
taaaaaccacaaatatgctt

SEQ ID NO: 58695 - DNA, 20 bp, Artificial Sequence
  MKO10058695_A_Vmn2r30
  gRNA
tagatccttcagcttaccta

SEQ ID NO: 58696 - DNA, 20 bp, Artificial Sequence
  MKO10058696_A_Vmn2r31
  gRNA
gaaaaaacagagtgaaaaca

SEQ ID NO: 58697 - DNA, 20 bp, Artificial Sequence
  MKO10058697_A_Vmn2r31
  gRNA
taaaaaccacaaatacgctt

SEQ ID NO: 58698 - DNA, 20 bp, Artificial Sequence
  MKO10058698_A_Vmn2r31
  gRNA
gtggagataagaagctgtcc

SEQ ID NO: 58699 - DNA, 20 bp, Artificial Sequence
  MKO10058699_A_Vmn2r32
  gRNA
aatggaacagaagcttgaca

SEQ ID NO: 58700 - DNA, 20 bp, Artificial Sequence
  MKO10058700_A_Vmn2r32
  gRNA
tcttcattacagatataatt

SEQ ID NO: 58701 - DNA, 20 bp, Artificial Sequence
  MKO10058701_A_Vmn2r32
  gRNA
taaaaaccacaaatatgctt

SEQ ID NO: 58702 - DNA, 20 bp, Artificial Sequence
  MKO10058702_A_Vmn2r33
  gRNA
tcctctgtgtgcagtgcaga

SEQ ID NO: 58703 - DNA, 20 bp, Artificial Sequence
  MKO10058703_A_Vmn2r33
  gRNA
accttctgcactgcacacag

SEQ ID NO: 58704 - DNA, 20 bp, Artificial Sequence
  MKO10058704_A_Vmn2r33
  gRNA
taaaaaccacaaatacgctt

SEQ ID NO: 58705 - DNA, 20 bp, Artificial Sequence
  MKO10058705_A_Vmn2r34
  gRNA
taaaaccagaaatcacgcca

SEQ ID NO: 58706 - DNA, 20 bp, Artificial Sequence
  MKO10058706_A_Vmn2r34
  gRNA
tatatctagtaatgcaagac

SEQ ID NO: 58707 - DNA, 20 bp, Artificial Sequence
  MKO10058707_A_Vmn2r34
  gRNA
taaaaaccacaaatatgctt

SEQ ID NO: 58708 - DNA, 20 bp, Artificial Sequence
  MKO10058708_A_Vmn2r35
  gRNA
taaaaaccacaaatatgctt

SEQ ID NO: 58709 - DNA, 20 bp, Artificial Sequence
  MKO10058709_A_Vmn2r35
  gRNA
gtggagataaaaagctgtcc

SEQ ID NO: 58710 - DNA, 20 bp, Artificial Sequence
  MKO10058710_A_Vmn2r35
  gRNA
tagatccttcagcttaccta

SEQ ID NO: 58711 - DNA, 20 bp, Artificial Sequence
  MKO10058711_A_Vmn2r36
  gRNA
tacaaaccacaaatatgctt

SEQ ID NO: 58712 - DNA, 20 bp, Artificial Sequence
  MKO10058712_A_Vmn2r36
  gRNA
gtggagataaaaagctgtcc

SEQ ID NO: 58713 - DNA, 20 bp, Artificial Sequence
  MKO10058713_A_Vmn2r36
  gRNA
tagatctttcagcttaccta

SEQ ID NO: 58714 - DNA, 20 bp, Artificial Sequence
  MKO10058714_A_Vmn2r37
  gRNA
taaaaaccacaaatatgctt

SEQ ID NO: 58715 - DNA, 20 bp, Artificial Sequence
  MKO10058715_A_Vmn2r37
  gRNA
aacctaaagatacctcccaa

SEQ ID NO: 58716 - DNA, 20 bp, Artificial Sequence
  MKO10058716_A_Vmn2r37
  gRNA
tagatccttcagcttaccta

SEQ ID NO: 58717 - DNA, 20 bp, Artificial Sequence
  MKO10058717_A_Vmn2r38
  gRNA
taaaaaccacaaatacgctt

SEQ ID NO: 58718 - DNA, 20 bp, Artificial Sequence
  MKO10058718_A_Vmn2r38
  gRNA
gtggagataagaagctgtcc

SEQ ID NO: 58719 - DNA, 20 bp, Artificial Sequence
  MKO10058719_A_Vmn2r38
  gRNA
tagatccttcagcttaccta

SEQ ID NO: 58720 - DNA, 20 bp, Artificial Sequence
  MKO10058720_A_Vmn2r39
  gRNA
gaaagaaagagtaataatac

SEQ ID NO: 58721 - DNA, 20 bp, Artificial Sequence
  MKO10058721_A_Vmn2r39
  gRNA
ataatcaatttgtccccaac

SEQ ID NO: 58722 - DNA, 20 bp, Artificial Sequence
  MKO10058722_A_Vmn2r39
  gRNA
taaaaaccacaaatatgctt

SEQ ID NO: 58723 - DNA, 20 bp, Artificial Sequence
  MKO10058723_A_Vmn2r3
  gRNA
acccggaagggatttatcac

SEQ ID NO: 58724 - DNA, 20 bp, Artificial Sequence
  MKO10058724_A_Vmn2r3
  gRNA
gtgagccactggcctctatt

SEQ ID NO: 58725 - DNA, 20 bp, Artificial Sequence
  MKO10058725_A_Vmn2r3
  gRNA
ggatcaactatgtcacttgc

SEQ ID NO: 58726 - DNA, 20 bp, Artificial Sequence
  MKO10058726_A_Vmn2r40
  gRNA
agccagttctcactgcttaa

SEQ ID NO: 58727 - DNA, 20 bp, Artificial Sequence
  MKO10058727_A_Vmn2r40
  gRNA
tacctttaagcagtgagaac

SEQ ID NO: 58728 - DNA, 20 bp, Artificial Sequence
  MKO10058728_A_Vmn2r40
  gRNA
tacaaaccacaaatatgctt

SEQ ID NO: 58729 - DNA, 20 bp, Artificial Sequence
  MKO10058729_A_Vmn2r41
  gRNA
tacaaaccacaaatatgctt

SEQ ID NO: 58730 - DNA, 20 bp, Artificial Sequence
  MKO10058730_A_Vmn2r41
  gRNA
gtggagataagaagctgtcc

SEQ ID NO: 58731 - DNA, 20 bp, Artificial Sequence
  MKO10058731_A_Vmn2r41
  gRNA
tagatccttcagcttaccta

SEQ ID NO: 58732 - DNA, 20 bp, Artificial Sequence
  MKO10058732_A_Vmn2r42
  gRNA
taaaaaccacaaatatgctt

SEQ ID NO: 58733 - DNA, 20 bp, Artificial Sequence
  MKO10058733_A_Vmn2r42
  gRNA
gtggagataagaagctgtcc

SEQ ID NO: 58734 - DNA, 20 bp, Artificial Sequence
  MKO10058734_A_Vmn2r42
  gRNA
tagatccttcagctttccta

SEQ ID NO: 58735 - DNA, 20 bp, Artificial Sequence
  MKO10058735_A_Vmn2r43
  gRNA
cttactttcctaccccaccg

SEQ ID NO: 58736 - DNA, 20 bp, Artificial Sequence
  MKO10058736_A_Vmn2r43
  gRNA
taaaaaccacaaatatgctt

SEQ ID NO: 58737 - DNA, 20 bp, Artificial Sequence
  MKO10058737_A_Vmn2r43
  gRNA
cttaaagatacctcccaatt

SEQ ID NO: 58738 - DNA, 20 bp, Artificial Sequence
  MKO10058738_A_Vmn2r44
  gRNA
taaaaaccacaaatacgctt

SEQ ID NO: 58739 - DNA, 20 bp, Artificial Sequence
  MKO10058739_A_Vmn2r44
  gRNA
gtggagataagaagctgtcc

SEQ ID NO: 58740 - DNA, 20 bp, Artificial Sequence
  MKO10058740_A_Vmn2r44
  gRNA
tagatccttcagcttaccta

SEQ ID NO: 58741 - DNA, 20 bp, Artificial Sequence
  MKO10058741_A_Vmn2r45
  gRNA
aagtgagagtgtcgtccatg

SEQ ID NO: 58742 - DNA, 20 bp, Artificial Sequence
  MKO10058742_A_Vmn2r45
  gRNA
aacagagatcatcttcacaa

SEQ ID NO: 58743 - DNA, 20 bp, Artificial Sequence
  MKO10058743_A_Vmn2r45
  gRNA
gtcatcccagatgatgacca

SEQ ID NO: 58744 - DNA, 20 bp, Artificial Sequence
  MKO10058744_A_Vmn2r46
  gRNA
taaaaaccacaaatatgctt

SEQ ID NO: 58745 - DNA, 20 bp, Artificial Sequence
  MKO10058745_A_Vmn2r46
  gRNA
gtggagataaaaagctgtcc

SEQ ID NO: 58746 - DNA, 20 bp, Artificial Sequence
  MKO10058746_A_Vmn2r46
  gRNA
tagatccttcagcttaccta

SEQ ID NO: 58747 - DNA, 20 bp, Artificial Sequence
  MKO10058747_A_Vmn2r47
  gRNA
taaaaaccacaaatatgctt

SEQ ID NO: 58748 - DNA, 20 bp, Artificial Sequence
  MKO10058748_A_Vmn2r47
  gRNA
gcagagataagaagctgtcc

SEQ ID NO: 58749 - DNA, 20 bp, Artificial Sequence
  MKO10058749_A_Vmn2r47
  gRNA
tagatccttcagcttaccta

SEQ ID NO: 58750 - DNA, 20 bp, Artificial Sequence
  MKO10058750_A_Vmn2r48
  gRNA
tacaaaccacaaatatgctt

SEQ ID NO: 58751 - DNA, 20 bp, Artificial Sequence
  MKO10058751_A_Vmn2r48
  gRNA
gtggagataagaagctgtcc

SEQ ID NO: 58752 - DNA, 20 bp, Artificial Sequence
  MKO10058752_A_Vmn2r48
  gRNA
tagatccttcagcttaccta

SEQ ID NO: 58753 - DNA, 20 bp, Artificial Sequence
  MKO10058753_A_Vmn2r49
  gRNA
gcgaatctctcagaacacct

SEQ ID NO: 58754 - DNA, 20 bp, Artificial Sequence
  MKO10058754_A_Vmn2r49
  gRNA
taaaaaccacaaatatgctt

SEQ ID NO: 58755 - DNA, 20 bp, Artificial Sequence
  MKO10058755_A_Vmn2r49
  gRNA
gtggagataagaagctgtcc

SEQ ID NO: 58756 - DNA, 20 bp, Artificial Sequence
  MKO10058756_A_Vmn2r4
  gRNA
ggagagggccaacctttgtg

SEQ ID NO: 58757 - DNA, 20 bp, Artificial Sequence
  MKO10058757_A_Vmn2r4
  gRNA
gtgtctaattagatttacga

SEQ ID NO: 58758 - DNA, 20 bp, Artificial Sequence
  MKO10058758_A_Vmn2r4
  gRNA
gactcggaagggaattctcc

SEQ ID NO: 58759 - DNA, 20 bp, Artificial Sequence
  MKO10058759_A_Vmn2r50
  gRNA
atccacttcactaatactct

SEQ ID NO: 58760 - DNA, 20 bp, Artificial Sequence
  MKO10058760_A_Vmn2r50
  gRNA
atgtgttcgtttctgcttag

SEQ ID NO: 58761 - DNA, 20 bp, Artificial Sequence
  MKO10058761_A_Vmn2r50
  gRNA
ccccaagagtattagtgaag

SEQ ID NO: 58762 - DNA, 20 bp, Artificial Sequence
  MKO10058762_A_Vmn2r51
  gRNA
catcatcactgaacacagat

SEQ ID NO: 58763 - DNA, 20 bp, Artificial Sequence
  MKO10058763_A_Vmn2r51
  gRNA
accattgccaatgctagaga

SEQ ID NO: 58764 - DNA, 20 bp, Artificial Sequence
  MKO10058764_A_Vmn2r51
  gRNA
ttctgctttcagaatccaat

SEQ ID NO: 58765 - DNA, 20 bp, Artificial Sequence
  MKO10058765_A_Vmn2r52
  gRNA
cacatatgcctcaactgaaa

SEQ ID NO: 58766 - DNA, 20 bp, Artificial Sequence
  MKO10058766_A_Vmn2r52
  gRNA
aaagtaaaagtcccatagaa

SEQ ID NO: 58767 - DNA, 20 bp, Artificial Sequence
  MKO10058767_A_Vmn2r52
  gRNA
acatttagacatgtttgagt

SEQ ID NO: 58768 - DNA, 20 bp, Artificial Sequence
  MKO10058768_A_Vmn2r53
  gRNA
actgcctattgtgctgtacc

SEQ ID NO: 58769 - DNA, 20 bp, Artificial Sequence
  MKO10058769_A_Vmn2r53
  gRNA
gccaccaggtacagcacaat

SEQ ID NO: 58770 - DNA, 20 bp, Artificial Sequence
  MKO10058770_A_Vmn2r53
  gRNA
taactgcatgggagcatgtt

SEQ ID NO: 58771 - DNA, 20 bp, Artificial Sequence
  MKO10058771_A_Vmn2r54
  gRNA
caccagaaccctcttggcac

SEQ ID NO: 58772 - DNA, 20 bp, Artificial Sequence
  MKO10058772_A_Vmn2r54
  gRNA
agtaagttccctgaatgcag

SEQ ID NO: 58773 - DNA, 20 bp, Artificial Sequence
  MKO10058773_A_Vmn2r54
  gRNA
gtaaaccacgtaggatgagc

SEQ ID NO: 58774 - DNA, 20 bp, Artificial Sequence
  MKO10058774_A_Vmn2r55
  gRNA
tctaccgctggacttcttgg

SEQ ID NO: 58775 - DNA, 20 bp, Artificial Sequence
  MKO10058775_A_Vmn2r55
  gRNA
gtctatcctgctatatatga

SEQ ID NO: 58776 - DNA, 20 bp, Artificial Sequence
  MKO10058776_A_Vmn2r55
  gRNA
tactctatgcaaaccccagc

SEQ ID NO: 58777 - DNA, 20 bp, Artificial Sequence
  MKO10058777_A_Vmn2r56
  gRNA
ccccgatggtgtatttcact

SEQ ID NO: 58778 - DNA, 20 bp, Artificial Sequence
  MKO10058778_A_Vmn2r56
  gRNA
gcaagccatacaagatgagc

SEQ ID NO: 58779 - DNA, 20 bp, Artificial Sequence
  MKO10058779_A_Vmn2r56
  gRNA
gtatcaaatgaagcatgccc

SEQ ID NO: 58780 - DNA, 20 bp, Artificial Sequence
  MKO10058780_A_Vmn2r57
  gRNA
tttcctcagataaagacaac

SEQ ID NO: 58781 - DNA, 20 bp, Artificial Sequence
  MKO10058781_A_Vmn2r57
  gRNA
tcaccggttgtctttatctg

SEQ ID NO: 58782 - DNA, 20 bp, Artificial Sequence
  MKO10058782_A_Vmn2r57
  gRNA
tagctctcttcactcattgc

SEQ ID NO: 58783 - DNA, 20 bp, Artificial Sequence
  MKO10058783_A_Vmn2r58
  gRNA
acgataatgagaagtcatat

SEQ ID NO: 58784 - DNA, 20 bp, Artificial Sequence
  MKO10058784_A_Vmn2r58
  gRNA
ttcacaccaccatgacgaga

SEQ ID NO: 58785 - DNA, 20 bp, Artificial Sequence
  MKO10058785_A_Vmn2r58
  gRNA
atcataccagatgatcacag

SEQ ID NO: 58786 - DNA, 20 bp, Artificial Sequence
  MKO10058786_A_Vmn2r59
  gRNA
aagaaaaggaattatcccct

SEQ ID NO: 58787 - DNA, 20 bp, Artificial Sequence
  MKO10058787_A_Vmn2r59
  gRNA
tagccttcttcacccatgac

SEQ ID NO: 58788 - DNA, 20 bp, Artificial Sequence
  MKO10058788_A_Vmn2r59
  gRNA
ctattctctaaatgctccgc

SEQ ID NO: 58789 - DNA, 20 bp, Artificial Sequence
  MKO10058789_A_Vmn2r5
  gRNA
cacaattgcttaaatgatcc

SEQ ID NO: 58790 - DNA, 20 bp, Artificial Sequence
  MKO10058790_A_Vmn2r5
  gRNA
attgtaaggcacactgttgt

SEQ ID NO: 58791 - DNA, 20 bp, Artificial Sequence
  MKO10058791_A_Vmn2r5
  gRNA
tcaatgttcttgaacatctt

SEQ ID NO: 58792 - DNA, 20 bp, Artificial Sequence
  MKO10058792_A_Vmn2r60
  gRNA
tatccctgtgcgccaaagaa

SEQ ID NO: 58793 - DNA, 20 bp, Artificial Sequence
  MKO10058793_A_Vmn2r60
  gRNA
cttctacccaatataactat

SEQ ID NO: 58794 - DNA, 20 bp, Artificial Sequence
  MKO10058794_A_Vmn2r60
  gRNA
ctcacctttgtaaaccctat

SEQ ID NO: 58795 - DNA, 20 bp, Artificial Sequence
  MKO10058795_A_Vmn2r61
  gRNA
taaactgacctcgttcattc

SEQ ID NO: 58796 - DNA, 20 bp, Artificial Sequence
  MKO10058796_A_Vmn2r61
  gRNA
gattctatcctgaatgaacg

SEQ ID NO: 58797 - DNA, 20 bp, Artificial Sequence
  MKO10058797_A_Vmn2r61
  gRNA
cctgtatttacctgtatcgt

SEQ ID NO: 58798 - DNA, 20 bp, Artificial Sequence
  MKO10058798_A_Vmn2r62
  gRNA
tatgaactaccagttacttc

SEQ ID NO: 58799 - DNA, 20 bp, Artificial Sequence
  MKO10058799_A_Vmn2r62
  gRNA
gttgtagcagtgtcccaata

SEQ ID NO: 58800 - DNA, 20 bp, Artificial Sequence
  MKO10058800_A_Vmn2r62
  gRNA
tcagtttaaaactctctatc

SEQ ID NO: 58801 - DNA, 20 bp, Artificial Sequence
  MKO10058801_A_Vmn2r63
  gRNA
ttacagatcgactgcttaga

SEQ ID NO: 58802 - DNA, 20 bp, Artificial Sequence
  MKO10058802_A_Vmn2r63
  gRNA
gtcgatctgtaatagatgag

SEQ ID NO: 58803 - DNA, 20 bp, Artificial Sequence
  MKO10058803_A_Vmn2r63
  gRNA
atcagagtttagagacgtta

SEQ ID NO: 58804 - DNA, 20 bp, Artificial Sequence
  MKO10058804_A_Vmn2r65
  gRNA
gcctggataaccattctagt

SEQ ID NO: 58805 - DNA, 20 bp, Artificial Sequence
  MKO10058805_A_Vmn2r65
  gRNA
gcacccttccaactacagta

SEQ ID NO: 58806 - DNA, 20 bp, Artificial Sequence
  MKO10058806_A_Vmn2r65
  gRNA
gtggtattgcaaagatgtgt

SEQ ID NO: 58807 - DNA, 20 bp, Artificial Sequence
  MKO10058807_A_Vmn2r66
  gRNA
cttgtagatactgtccattc

SEQ ID NO: 58808 - DNA, 20 bp, Artificial Sequence
  MKO10058808_A_Vmn2r66
  gRNA
gtgggctacaggtatagacc

SEQ ID NO: 58809 - DNA, 20 bp, Artificial Sequence
  MKO10058809_A_Vmn2r66
  gRNA
ttgtacttacaatacctgaa

SEQ ID NO: 58810 - DNA, 20 bp, Artificial Sequence
  MKO10058810_A_Vmn2r67
  gRNA
tttgatatgatcacaaaact

SEQ ID NO: 58811 - DNA, 20 bp, Artificial Sequence
  MKO10058811_A_Vmn2r67
  gRNA
ttctgcaacaaatagacacg

SEQ ID NO: 58812 - DNA, 20 bp, Artificial Sequence
  MKO10058812_A_Vmn2r67
  gRNA
ctcagaaaatctcctgagga

SEQ ID NO: 58813 - DNA, 20 bp, Artificial Sequence
  MKO10058813_A_Vmn2r68
  gRNA
gatggagtgggcgatagatg

SEQ ID NO: 58814 - DNA, 20 bp, Artificial Sequence
  MKO10058814_A_Vmn2r68
  gRNA
aggtttggctttgcaaagaa

SEQ ID NO: 58815 - DNA, 20 bp, Artificial Sequence
  MKO10058815_A_Vmn2r68
  gRNA
tttgatatgatcacatatct

SEQ ID NO: 58816 - DNA, 20 bp, Artificial Sequence
  MKO10058816_A_Vmn2r69
  gRNA
taaattatgccctcacattg

SEQ ID NO: 58817 - DNA, 20 bp, Artificial Sequence
  MKO10058817_A_Vmn2r69
  gRNA
ttcttgctatactcctctac

SEQ ID NO: 58818 - DNA, 20 bp, Artificial Sequence
  MKO10058818_A_Vmn2r69
  gRNA
gtgtagcctgcttcaaattc

SEQ ID NO: 58819 - DNA, 20 bp, Artificial Sequence
  MKO10058819_A_Vmn2r6
  gRNA
ctttaccagtcatattcact

SEQ ID NO: 58820 - DNA, 20 bp, Artificial Sequence
  MKO10058820_A_Vmn2r6
  gRNA
aatatggagtgagattcttt

SEQ ID NO: 58821 - DNA, 20 bp, Artificial Sequence
  MKO10058821_A_Vmn2r6
  gRNA
aaaatagaacttggcagtaa

SEQ ID NO: 58822 - DNA, 20 bp, Artificial Sequence
  MKO10058822_A_Vmn2r70
  gRNA
caatatgtagtatgccttgc

SEQ ID NO: 58823 - DNA, 20 bp, Artificial Sequence
  MKO10058823_A_Vmn2r70
  gRNA
gaaaaggacatctgctgttt

SEQ ID NO: 58824 - DNA, 20 bp, Artificial Sequence
  MKO10058824_A_Vmn2r70
  gRNA
ttctacaacaagtagacgca

SEQ ID NO: 58825 - DNA, 20 bp, Artificial Sequence
  MKO10058825_A_Vmn2r71
  gRNA
tgctattattatccaaactg

SEQ ID NO: 58826 - DNA, 20 bp, Artificial Sequence
  MKO10058826_A_Vmn2r71
  gRNA
tttgatatgatcacgatact

SEQ ID NO: 58827 - DNA, 20 bp, Artificial Sequence
  MKO10058827_A_Vmn2r71
  gRNA
agcaatcttacttgtcatgt

SEQ ID NO: 58828 - DNA, 20 bp, Artificial Sequence
  MKO10058828_A_Vmn2r72
  gRNA
tgtaatatcccttgcaaacc

SEQ ID NO: 58829 - DNA, 20 bp, Artificial Sequence
  MKO10058829_A_Vmn2r72
  gRNA
ccatagatcttgtcctccat

SEQ ID NO: 58830 - DNA, 20 bp, Artificial Sequence
  MKO10058830_A_Vmn2r72
  gRNA
cactaacccagattctaaaa

SEQ ID NO: 58831 - DNA, 20 bp, Artificial Sequence
  MKO10058831_A_Vmn2r73
  gRNA
caaactttatgggcgagttg

SEQ ID NO: 58832 - DNA, 20 bp, Artificial Sequence
  MKO10058832_A_Vmn2r73
  gRNA
ttcatgctatactccgcctc

SEQ ID NO: 58833 - DNA, 20 bp, Artificial Sequence
  MKO10058833_A_Vmn2r73
  gRNA
gaatgtgtcctactaaaata

SEQ ID NO: 58834 - DNA, 20 bp, Artificial Sequence
  MKO10058834_A_Vmn2r74
  gRNA
ttcttgctatatgcgtccac

SEQ ID NO: 58835 - DNA, 20 bp, Artificial Sequence
  MKO10058835_A_Vmn2r74
  gRNA
tccataaactatcacaactt

SEQ ID NO: 58836 - DNA, 20 bp, Artificial Sequence
  MKO10058836_A_Vmn2r74
  gRNA
ttgtacttacagcaccgtta

SEQ ID NO: 58837 - DNA, 20 bp, Artificial Sequence
  MKO10058837_A_Vmn2r75
  gRNA
catagcattgtataagttat

SEQ ID NO: 58838 - DNA, 20 bp, Artificial Sequence
  MKO10058838_A_Vmn2r75
  gRNA
gaattatatggtgagagaac

SEQ ID NO: 58839 - DNA, 20 bp, Artificial Sequence
  MKO10058839_A_Vmn2r75
  gRNA
tgaaaaaatgaaactccccg

SEQ ID NO: 58840 - DNA, 20 bp, Artificial Sequence
  MKO10058840_A_Vmn2r76
  gRNA
cacatctgtagctattggca

SEQ ID NO: 58841 - DNA, 20 bp, Artificial Sequence
  MKO10058841_A_Vmn2r76
  gRNA
atgtgtccttgatagctatc

SEQ ID NO: 58842 - DNA, 20 bp, Artificial Sequence
  MKO10058842_A_Vmn2r76
  gRNA
attgcagttggtaaccacat

SEQ ID NO: 58843 - DNA, 20 bp, Artificial Sequence
  MKO10058843_A_Vmn2r77
  gRNA
gcaaaagttgtcgtcgtcta

SEQ ID NO: 58844 - DNA, 20 bp, Artificial Sequence
  MKO10058844_A_Vmn2r77
  gRNA
agcatgaagttcagttgtag

SEQ ID NO: 58845 - DNA, 20 bp, Artificial Sequence
  MKO10058845_A_Vmn2r77
  gRNA
tttccacattatcctcaatt

SEQ ID NO: 58846 - DNA, 20 bp, Artificial Sequence
  MKO10058846_A_Vmn2r78
  gRNA
cggtaatggaatttaattcc

SEQ ID NO: 58847 - DNA, 20 bp, Artificial Sequence
  MKO10058847_A_Vmn2r78
  gRNA
ttgatatgatcacagtgata

SEQ ID NO: 58848 - DNA, 20 bp, Artificial Sequence
  MKO10058848_A_Vmn2r78
  gRNA
actactgtaaaaatcagaga

SEQ ID NO: 58849 - DNA, 20 bp, Artificial Sequence
  MKO10058849_A_Vmn2r79
  gRNA
agtatgaagttaaactgtag

SEQ ID NO: 58850 - DNA, 20 bp, Artificial Sequence
  MKO10058850_A_Vmn2r79
  gRNA
ttcatgcttaactctgtgca

SEQ ID NO: 58851 - DNA, 20 bp, Artificial Sequence
  MKO10058851_A_Vmn2r79
  gRNA
atgtttattaggtctccaac

SEQ ID NO: 58852 - DNA, 20 bp, Artificial Sequence
  MKO10058852_A_Vmn2r7
  gRNA
acctaactttgagtctgtaa

SEQ ID NO: 58853 - DNA, 20 bp, Artificial Sequence
  MKO10058853_A_Vmn2r7
  gRNA
gtgtctaattagattcacga

SEQ ID NO: 58854 - DNA, 20 bp, Artificial Sequence
  MKO10058854_A_Vmn2r7
  gRNA
aaaatagaacttggcaggaa

SEQ ID NO: 58855 - DNA, 20 bp, Artificial Sequence
  MKO10058855_A_Vmn2r80
  gRNA
gtacaatgctgtgctcgcag

SEQ ID NO: 58856 - DNA, 20 bp, Artificial Sequence
  MKO10058856_A_Vmn2r80
  gRNA
aaccagtaatctcctcataa

SEQ ID NO: 58857 - DNA, 20 bp, Artificial Sequence
  MKO10058857_A_Vmn2r80
  gRNA
aattcagctgttacacttac

SEQ ID NO: 58858 - DNA, 20 bp, Artificial Sequence
  MKO10058858_A_Vmn2r81
  gRNA
ccaacaatctccttataatg

SEQ ID NO: 58859 - DNA, 20 bp, Artificial Sequence
  MKO10058859_A_Vmn2r81
  gRNA
ctgttgatgattctataatg

SEQ ID NO: 58860 - DNA, 20 bp, Artificial Sequence
  MKO10058860_A_Vmn2r81
  gRNA
tgtctgaatatatgattagt

SEQ ID NO: 58861 - DNA, 20 bp, Artificial Sequence
  MKO10058861_A_Vmn2r82
  gRNA
ataaattacaatcacgtctg

SEQ ID NO: 58862 - DNA, 20 bp, Artificial Sequence
  MKO10058862_A_Vmn2r82
  gRNA
aaccagcaatctcctcataa

SEQ ID NO: 58863 - DNA, 20 bp, Artificial Sequence
  MKO10058863_A_Vmn2r82
  gRNA
cattgacaattgtttccctt

SEQ ID NO: 58864 - DNA, 20 bp, Artificial Sequence
  MKO10058864_A_Vmn2r83
  gRNA
gaacgtacacaactaccagc

SEQ ID NO: 58865 - DNA, 20 bp, Artificial Sequence
  MKO10058865_A_Vmn2r83
  gRNA
ctctgaggaatgtattctac

SEQ ID NO: 58866 - DNA, 20 bp, Artificial Sequence
  MKO10058866_A_Vmn2r83
  gRNA
gtcctatccttataagcctg

SEQ ID NO: 58867 - DNA, 20 bp, Artificial Sequence
  MKO10058867_A_Vmn2r84
  gRNA
agacataattaacataattc

SEQ ID NO: 58868 - DNA, 20 bp, Artificial Sequence
  MKO10058868_A_Vmn2r84
  gRNA
tggctcccttgctgaaaact

SEQ ID NO: 58869 - DNA, 20 bp, Artificial Sequence
  MKO10058869_A_Vmn2r84
  gRNA
tggtaactgtcaagattcat

SEQ ID NO: 58870 - DNA, 20 bp, Artificial Sequence
  MKO10058870_A_Vmn2r85
  gRNA
aattgatacttgggcaccaa

SEQ ID NO: 58871 - DNA, 20 bp, Artificial Sequence
  MKO10058871_A_Vmn2r85
  gRNA
acaaactcgtattctcttgc

SEQ ID NO: 58872 - DNA, 20 bp, Artificial Sequence
  MKO10058872_A_Vmn2r85
  gRNA
gcatttctgagtcaatactg

SEQ ID NO: 58873 - DNA, 20 bp, Artificial Sequence
  MKO10058873_A_Vmn2r86
  gRNA
acatttctcagtcaatactg

SEQ ID NO: 58874 - DNA, 20 bp, Artificial Sequence
  MKO10058874_A_Vmn2r86
  gRNA
tggctctcttgctgaaaact

SEQ ID NO: 58875 - DNA, 20 bp, Artificial Sequence
  MKO10058875_A_Vmn2r86
  gRNA
aaagtatacagaatgtcagc

SEQ ID NO: 58876 - DNA, 20 bp, Artificial Sequence
  MKO10058876_A_Vmn2r87
  gRNA
acatgtgtcatagaccttac

SEQ ID NO: 58877 - DNA, 20 bp, Artificial Sequence
  MKO10058877_A_Vmn2r87
  gRNA
tgcagtgctgtccattccaa

SEQ ID NO: 58878 - DNA, 20 bp, Artificial Sequence
  MKO10058878_A_Vmn2r87
  gRNA
tgtgacccattctaaatctt

SEQ ID NO: 58879 - DNA, 20 bp, Artificial Sequence
  MKO10058879_A_Vmn2r88
  gRNA
cttgtggaaagttccaaatg

SEQ ID NO: 58880 - DNA, 20 bp, Artificial Sequence
  MKO10058880_A_Vmn2r88
  gRNA
cttgatggacatggtgcagc

SEQ ID NO: 58881 - DNA, 20 bp, Artificial Sequence
  MKO10058881_A_Vmn2r88
  gRNA
ctaacctacatgaccatgac

SEQ ID NO: 58882 - DNA, 20 bp, Artificial Sequence
  MKO10058882_A_Vmn2r89
  gRNA
ttgtggtgtgcaaaagtgat

SEQ ID NO: 58883 - DNA, 20 bp, Artificial Sequence
  MKO10058883_A_Vmn2r89
  gRNA
actttgatattcagcatcgt

SEQ ID NO: 58884 - DNA, 20 bp, Artificial Sequence
  MKO10058884_A_Vmn2r89
  gRNA
ttagatgattcatgtaacat

SEQ ID NO: 58885 - DNA, 20 bp, Artificial Sequence
  MKO10058885_A_Vmn2r8
  gRNA
tcctgtaaggtctatgtaac

SEQ ID NO: 58886 - DNA, 20 bp, Artificial Sequence
  MKO10058886_A_Vmn2r8
  gRNA
gcctgttacatagaccttac

SEQ ID NO: 58887 - DNA, 20 bp, Artificial Sequence
  MKO10058887_A_Vmn2r8
  gRNA
atgggacaagtatgtgtctt

SEQ ID NO: 58888 - DNA, 20 bp, Artificial Sequence
  MKO10058888_A_Vmn2r90
  gRNA
tccaaaaggtcttgcgttaa

SEQ ID NO: 58889 - DNA, 20 bp, Artificial Sequence
  MKO10058889_A_Vmn2r90
  gRNA
ctctcatacgatgcttcagt

SEQ ID NO: 58890 - DNA, 20 bp, Artificial Sequence
  MKO10058890_A_Vmn2r90
  gRNA
gtctgacttgagacaagtta

SEQ ID NO: 58891 - DNA, 20 bp, Artificial Sequence
  MKO10058891_A_Vmn2r91
  gRNA
caaatgcaacagtttaagaa

SEQ ID NO: 58892 - DNA, 20 bp, Artificial Sequence
  MKO10058892_A_Vmn2r91
  gRNA
ataaaattctatcagacttt

SEQ ID NO: 58893 - DNA, 20 bp, Artificial Sequence
  MKO10058893_A_Vmn2r91
  gRNA
atcaaatccaagagatgtgt

SEQ ID NO: 58894 - DNA, 20 bp, Artificial Sequence
  MKO10058894_A_Vmn2r92
  gRNA
tcctgtgagtgcagcagtga

SEQ ID NO: 58895 - DNA, 20 bp, Artificial Sequence
  MKO10058895_A_Vmn2r92
  gRNA
atcaaatccaagagatgtat

SEQ ID NO: 58896 - DNA, 20 bp, Artificial Sequence
  MKO10058896_A_Vmn2r92
  gRNA
ctctctaccaaatgtcccca

SEQ ID NO: 58897 - DNA, 20 bp, Artificial Sequence
  MKO10058897_A_Vmn2r93
  gRNA
tgtagtgagagttgtcagtc

SEQ ID NO: 58898 - DNA, 20 bp, Artificial Sequence
  MKO10058898_A_Vmn2r93
  gRNA
cacctctcatgtgcacaaaa

SEQ ID NO: 58899 - DNA, 20 bp, Artificial Sequence
  MKO10058899_A_Vmn2r93
  gRNA
aatcagaattctccctgtaa

SEQ ID NO: 58900 - DNA, 20 bp, Artificial Sequence
  MKO10058900_A_Vmn2r94
  gRNA
tcactcaagattgtatcata

SEQ ID NO: 58901 - DNA, 20 bp, Artificial Sequence
  MKO10058901_A_Vmn2r94
  gRNA
agtgtccctttcagtgtatt

SEQ ID NO: 58902 - DNA, 20 bp, Artificial Sequence
  MKO10058902_A_Vmn2r94
  gRNA
gatacaatcttgagtgaaca

SEQ ID NO: 58903 - DNA, 20 bp, Artificial Sequence
  MKO10058903_A_Vmn2r95
  gRNA
ttccaaaacatgacaattag

SEQ ID NO: 58904 - DNA, 20 bp, Artificial Sequence
  MKO10058904_A_Vmn2r95
  gRNA
ctctcacttcaatatgcttc

SEQ ID NO: 58905 - DNA, 20 bp, Artificial Sequence
  MKO10058905_A_Vmn2r95
  gRNA
agtgcacttgtaacaacaga

SEQ ID NO: 58906 - DNA, 20 bp, Artificial Sequence
  MKO10058906_A_Vmn2r96
  gRNA
gaatatatccaaggtagcat

SEQ ID NO: 58907 - DNA, 20 bp, Artificial Sequence
  MKO10058907_A_Vmn2r96
  gRNA
ctgtcaaaccaatgctacct

SEQ ID NO: 58908 - DNA, 20 bp, Artificial Sequence
  MKO10058908_A_Vmn2r96
  gRNA
ctttcaccacaatattcttc

SEQ ID NO: 58909 - DNA, 20 bp, Artificial Sequence
  MKO10058909_A_Vmn2r97
  gRNA
attcattggaaggtataatt

SEQ ID NO: 58910 - DNA, 20 bp, Artificial Sequence
  MKO10058910_A_Vmn2r97
  gRNA
agagataaggatattgacca

SEQ ID NO: 58911 - DNA, 20 bp, Artificial Sequence
  MKO10058911_A_Vmn2r97
  gRNA
ctgacctctgaaaatattgt

SEQ ID NO: 58912 - DNA, 20 bp, Artificial Sequence
  MKO10058912_A_Vmn2r98
  gRNA
taagcttaactcgttcctga

SEQ ID NO: 58913 - DNA, 20 bp, Artificial Sequence
  MKO10058913_A_Vmn2r98
  gRNA
tttctacaatgttagattca

SEQ ID NO: 58914 - DNA, 20 bp, Artificial Sequence
  MKO10058914_A_Vmn2r98
  gRNA
tctctaccagatatccccca

SEQ ID NO: 58915 - DNA, 20 bp, Artificial Sequence
  MKO10058915_A_Vmn2r99
  gRNA
ttccctcgtcacatatttga

SEQ ID NO: 58916 - DNA, 20 bp, Artificial Sequence
  MKO10058916_A_Vmn2r99
  gRNA
tggataacatctgctctaac

SEQ ID NO: 58917 - DNA, 20 bp, Artificial Sequence
  MKO10058917_A_Vmn2r99
  gRNA
taaaaatgacccccgccaca

SEQ ID NO: 58918 - DNA, 20 bp, Artificial Sequence
  MKO10058918_A_Vmn2r9
  gRNA
gactgttacatacaccttac

SEQ ID NO: 58919 - DNA, 20 bp, Artificial Sequence
  MKO10058919_A_Vmn2r9
  gRNA
gtaaggtgtatgtaacagtc

SEQ ID NO: 58920 - DNA, 20 bp, Artificial Sequence
  MKO10058920_A_Vmn2r9
  gRNA
gtaaacatttctcagtctat

SEQ ID NO: 58921 - DNA, 20 bp, Artificial Sequence
  MKO10058921_A_Vmo1
  gRNA
tcaacgatcgatgcatagcg

SEQ ID NO: 58922 - DNA, 20 bp, Artificial Sequence
  MKO10058922_A_Vmo1
  gRNA
gctccacgccgtctgagcaa

SEQ ID NO: 58923 - DNA, 20 bp, Artificial Sequence
  MKO10058923_A_Vmo1
  gRNA
cctaatctcaccttccggac

SEQ ID NO: 58924 - DNA, 20 bp, Artificial Sequence
  MKO10058924_A_Vmp1
  gRNA
gcagataatctggtcaggat

SEQ ID NO: 58925 - DNA, 20 bp, Artificial Sequence
  MKO10058925_A_Vmp1
  gRNA
tgaccagattatctgcccag

SEQ ID NO: 58926 - DNA, 20 bp, Artificial Sequence
  MKO10058926_A_Vmp1
  gRNA
gcttgtagctacgtattatg

SEQ ID NO: 58927 - DNA, 20 bp, Artificial Sequence
  MKO10058927_A_Vnn1
  gRNA
acaccgtatatgccatcttc

SEQ ID NO: 58928 - DNA, 20 bp, Artificial Sequence
  MKO10058928_A_Vnn1
  gRNA
tatacggtgtgcgtttcacc

SEQ ID NO: 58929 - DNA, 20 bp, Artificial Sequence
  MKO10058929_A_Vnn1
  gRNA
gggatttcagctgagcgaag

SEQ ID NO: 58930 - DNA, 20 bp, Artificial Sequence
  MKO10058930_A_Vnn3
  gRNA
ttatattggtaacggccatc

SEQ ID NO: 58931 - DNA, 20 bp, Artificial Sequence
  MKO10058931_A_Vnn3
  gRNA
ccgagtgtaccactatgaca

SEQ ID NO: 58932 - DNA, 20 bp, Artificial Sequence
  MKO10058932_A_Vnn3
  gRNA
tgacctttgacaccccgttt

SEQ ID NO: 58933 - DNA, 20 bp, Artificial Sequence
  MKO10058933_A_Vopp1
  gRNA
gtggtggcggatacatgcgc

SEQ ID NO: 58934 - DNA, 20 bp, Artificial Sequence
  MKO10058934_A_Vopp1
  gRNA
ccgccatattacaccgaccc

SEQ ID NO: 58935 - DNA, 20 bp, Artificial Sequence
  MKO10058935_A_Vopp1
  gRNA
gtatccgccaccactcattg

SEQ ID NO: 58936 - DNA, 20 bp, Artificial Sequence
  MKO10058936_A_Vprbp
  gRNA
gaaactgaagaatatcgtaa

SEQ ID NO: 58937 - DNA, 20 bp, Artificial Sequence
  MKO10058937_A_Vprbp
  gRNA
ccagtagaatatgtcctaag

SEQ ID NO: 58938 - DNA, 20 bp, Artificial Sequence
  MKO10058938_A_Vprbp
  gRNA
ccatttgatgatcgacatcc

SEQ ID NO: 58939 - DNA, 20 bp, Artificial Sequence
  MKO10058939_A_Vpreb1
  gRNA
ggctgtgtattactgtgccg

SEQ ID NO: 58940 - DNA, 20 bp, Artificial Sequence
  MKO10058940_A_Vpreb1
  gRNA
caaagatacgaccaggaacc

SEQ ID NO: 58941 - DNA, 20 bp, Artificial Sequence
  MKO10058941_A_Vpreb1
  gRNA
agtttccttacctgtgagat

SEQ ID NO: 58942 - DNA, 20 bp, Artificial Sequence
  MKO10058942_A_Vpreb2
  gRNA
ggctgtgtattactgcgctg

SEQ ID NO: 58943 - DNA, 20 bp, Artificial Sequence
  MKO10058943_A_Vpreb2
  gRNA
cctggccgtatctttggacc

SEQ ID NO: 58944 - DNA, 20 bp, Artificial Sequence
  MKO10058944_A_Vpreb2
  gRNA
agttcccttacctgtgaggt

SEQ ID NO: 58945 - DNA, 20 bp, Artificial Sequence
  MKO10058945_A_Vpreb3
  gRNA
gggaagactgagaacgcgtc

SEQ ID NO: 58946 - DNA, 20 bp, Artificial Sequence
  MKO10058946_A_Vpreb3
  gRNA
tctctactattacgcagaag

SEQ ID NO: 58947 - DNA, 20 bp, Artificial Sequence
  MKO10058947_A_Vpreb3
  gRNA
cttctggccatggcctgccc

SEQ ID NO: 58948 - DNA, 20 bp, Artificial Sequence
  MKO10058948_A_Vps11
  gRNA
caactatcccgttactgggc

SEQ ID NO: 58949 - DNA, 20 bp, Artificial Sequence
  MKO10058949_A_Vps11
  gRNA
gccataagctcatcgtgcac

SEQ ID NO: 58950 - DNA, 20 bp, Artificial Sequence
  MKO10058950_A_Vps11
  gRNA
ggactaccctcgtgtggagt

SEQ ID NO: 58951 - DNA, 20 bp, Artificial Sequence
  MKO10058951_A_Vps13a
  gRNA
gtaccattcaaagttaaagt

SEQ ID NO: 58952 - DNA, 20 bp, Artificial Sequence
  MKO10058952_A_Vps13a
  gRNA
tcaaccagttgaagctgttt

SEQ ID NO: 58953 - DNA, 20 bp, Artificial Sequence
  MKO10058953_A_Vps13a
  gRNA
tgaccaactttaactttgaa

SEQ ID NO: 58954 - DNA, 20 bp, Artificial Sequence
  MKO10058954_A_Vps13b
  gRNA
gttatgggatcgtgcattca

SEQ ID NO: 58955 - DNA, 20 bp, Artificial Sequence
  MKO10058955_A_Vps13b
  gRNA
ttctgctgaatgctataccg

SEQ ID NO: 58956 - DNA, 20 bp, Artificial Sequence
  MKO10058956_A_Vps13b
  gRNA
ctcgataaacgaaatgctag

SEQ ID NO: 58957 - DNA, 20 bp, Artificial Sequence
  MKO10058957_A_Vps13c
  gRNA
gcagtcgttgccacgctaga

SEQ ID NO: 58958 - DNA, 20 bp, Artificial Sequence
  MKO10058958_A_Vps13c
  gRNA
ttatacctgcttgtggtccc

SEQ ID NO: 58959 - DNA, 20 bp, Artificial Sequence
  MKO10058959_A_Vps13c
  gRNA
ggacgttcctttcaaagtca

SEQ ID NO: 58960 - DNA, 20 bp, Artificial Sequence
  MKO10058960_A_Vps13d
  gRNA
tctcagggccaccgattacg

SEQ ID NO: 58961 - DNA, 20 bp, Artificial Sequence
  MKO10058961_A_Vps13d
  gRNA
atcagttgtcacgagaatcg

SEQ ID NO: 58962 - DNA, 20 bp, Artificial Sequence
  MKO10058962_A_Vps13d
  gRNA
tgagaagtgcaaccgacagc

SEQ ID NO: 58963 - DNA, 20 bp, Artificial Sequence
  MKO10058963_A_Vps16
  gRNA
caaactccgtcggatgccag

SEQ ID NO: 58964 - DNA, 20 bp, Artificial Sequence
  MKO10058964_A_Vps16
  gRNA
agtgcttcagaaccgtgtcc

SEQ ID NO: 58965 - DNA, 20 bp, Artificial Sequence
  MKO10058965_A_Vps16
  gRNA
cttaccactggctagcctgc

SEQ ID NO: 58966 - DNA, 20 bp, Artificial Sequence
  MKO10058966_A_Vps18
  gRNA
gcgcatccgacgagacttgc

SEQ ID NO: 58967 - DNA, 20 bp, Artificial Sequence
  MKO10058967_A_Vps18
  gRNA
cattgatccgcagcgctatg

SEQ ID NO: 58968 - DNA, 20 bp, Artificial Sequence
  MKO10058968_A_Vps18
  gRNA
cccgccagctcgtagacgcc

SEQ ID NO: 58969 - DNA, 20 bp, Artificial Sequence
  MKO10058969_A_Vps25
  gRNA
cggcaggttacagccgaacg

SEQ ID NO: 58970 - DNA, 20 bp, Artificial Sequence
  MKO10058970_A_Vps25
  gRNA
ttctgccgggtgtccacgtt

SEQ ID NO: 58971 - DNA, 20 bp, Artificial Sequence
  MKO10058971_A_Vps25
  gRNA
actctgtatgaactgacgag

SEQ ID NO: 58972 - DNA, 20 bp, Artificial Sequence
  MKO10058972_A_Vps26a
  gRNA
tccatacctcaggcggacat

SEQ ID NO: 58973 - DNA, 20 bp, Artificial Sequence
  MKO10058973_A_Vps26a
  gRNA
aacctagcctttaagcagcc

SEQ ID NO: 58974 - DNA, 20 bp, Artificial Sequence
  MKO10058974_A_Vps26a
  gRNA
attgatgttgcccttaatga

SEQ ID NO: 58975 - DNA, 20 bp, Artificial Sequence
  MKO10058975_A_Vps26b
  gRNA
tcgctattgtgtcgttctcg

SEQ ID NO: 58976 - DNA, 20 bp, Artificial Sequence
  MKO10058976_A_Vps26b
  gRNA
ccagaactctactatgaccg

SEQ ID NO: 58977 - DNA, 20 bp, Artificial Sequence
  MKO10058977_A_Vps26b
  gRNA
caaagtcgaaggcctgcgat

SEQ ID NO: 58978 - DNA, 20 bp, Artificial Sequence
  MKO10058978_A_Vps28
  gRNA
gtcggaaggcagctttgtac

SEQ ID NO: 58979 - DNA, 20 bp, Artificial Sequence
  MKO10058979_A_Vps28
  gRNA
gtacaaagctgccttccgac

SEQ ID NO: 58980 - DNA, 20 bp, Artificial Sequence
  MKO10058980_A_Vps28
  gRNA
tgccgtggtgaagacgatgc

SEQ ID NO: 58981 - DNA, 20 bp, Artificial Sequence
  MKO10058981_A_Vps29
  gRNA
cgaagtctcctctcacgatg

SEQ ID NO: 58982 - DNA, 20 bp, Artificial Sequence
  MKO10058982_A_Vps29
  gRNA
ggcgacgtccacatcgtgag

SEQ ID NO: 58983 - DNA, 20 bp, Artificial Sequence
  MKO10058983_A_Vps29
  gRNA
acttacgtctatcaactaat

SEQ ID NO: 58984 - DNA, 20 bp, Artificial Sequence
  MKO10058984_A_Vps33a
  gRNA
atgaccctgcaggcgctgta

SEQ ID NO: 58985 - DNA, 20 bp, Artificial Sequence
  MKO10058985_A_Vps33a
  gRNA
gagtacttaacaggaccatt

SEQ ID NO: 58986 - DNA, 20 bp, Artificial Sequence
  MKO10058986_A_Vps33a
  gRNA
tactgtgcgatcagtccaaa

SEQ ID NO: 58987 - DNA, 20 bp, Artificial Sequence
  MKO10058987_A_Vps33b
  gRNA
acgttagcaattcgatccaa

SEQ ID NO: 58988 - DNA, 20 bp, Artificial Sequence
  MKO10058988_A_Vps33b
  gRNA
cttactgttcattggcgctg

SEQ ID NO: 58989 - DNA, 20 bp, Artificial Sequence
  MKO10058989_A_Vps33b
  gRNA
tgctaacgtctctatcctga

SEQ ID NO: 58990 - DNA, 20 bp, Artificial Sequence
  MKO10058990_A_Vps35
  gRNA
gatttggtagaaatgtgccg

SEQ ID NO: 58991 - DNA, 20 bp, Artificial Sequence
  MKO10058991_A_Vps35
  gRNA
ctttagcaaattcatcagtc

SEQ ID NO: 58992 - DNA, 20 bp, Artificial Sequence
  MKO10058992_A_Vps35
  gRNA
ctatgaacttgtacagtacg

SEQ ID NO: 58993 - DNA, 20 bp, Artificial Sequence
  MKO10058993_A_Vps36
  gRNA
tttcatcagcgccaaaatcg

SEQ ID NO: 58994 - DNA, 20 bp, Artificial Sequence
  MKO10058994_A_Vps36
  gRNA
gtgcaggtgaaccacgattt

SEQ ID NO: 58995 - DNA, 20 bp, Artificial Sequence
  MKO10058995_A_Vps36
  gRNA
gtctcagattgtgttcatcg

SEQ ID NO: 58996 - DNA, 20 bp, Artificial Sequence
  MKO10058996_A_Vps37a
  gRNA
tcccacctggattactatac

SEQ ID NO: 58997 - DNA, 20 bp, Artificial Sequence
  MKO10058997_A_Vps37a
  gRNA
atacgtacattgcttactaa

SEQ ID NO: 58998 - DNA, 20 bp, Artificial Sequence
  MKO10058998_A_Vps37a
  gRNA
atgccaaatgaaggcgccac

SEQ ID NO: 58999 - DNA, 20 bp, Artificial Sequence
  MKO10058999_A_Vps37b
  gRNA
cgcgaagcgcgcctcgctca

SEQ ID NO: 59000 - DNA, 20 bp, Artificial Sequence
  MKO10059000_A_Vps37b
  gRNA
gcaaggattctccgcacagt

SEQ ID NO: 59001 - DNA, 20 bp, Artificial Sequence
  MKO10059001_A_Vps37b
  gRNA
cgatgcacagctcggcgaca

SEQ ID NO: 59002 - DNA, 20 bp, Artificial Sequence
  MKO10059002_A_Vps37c
  gRNA
tctctacgcggactcgacgc

SEQ ID NO: 59003 - DNA, 20 bp, Artificial Sequence
  MKO10059003_A_Vps37c
  gRNA
agtccgcgtagagaagctcc

SEQ ID NO: 59004 - DNA, 20 bp, Artificial Sequence
  MKO10059004_A_Vps37c
  gRNA
gatcgaaggcatgaagatcg

SEQ ID NO: 59005 - DNA, 20 bp, Artificial Sequence
  MKO10059005_A_Vps37d
  gRNA
cgggcggtatgtaccgggcc

SEQ ID NO: 59006 - DNA, 20 bp, Artificial Sequence
  MKO10059006_A_Vps37d
  gRNA
cttggcctctaactacgcgc

SEQ ID NO: 59007 - DNA, 20 bp, Artificial Sequence
  MKO10059007_A_Vps37d
  gRNA
tcctgctgagccgcacgatc

SEQ ID NO: 59008 - DNA, 20 bp, Artificial Sequence
  MKO10059008_A_Vps39
  gRNA
cggctcgaaagcgtcatgca

SEQ ID NO: 59009 - DNA, 20 bp, Artificial Sequence
  MKO10059009_A_Vps39
  gRNA
catgcatgacgctttcgagc

SEQ ID NO: 59010 - DNA, 20 bp, Artificial Sequence
  MKO10059010_A_Vps39
  gRNA
cataggttgtaacaggtttg

SEQ ID NO: 59011 - DNA, 20 bp, Artificial Sequence
  MKO10059011_A_Vps41
  gRNA
ctgtatgacggtccatgaca

SEQ ID NO: 59012 - DNA, 20 bp, Artificial Sequence
  MKO10059012_A_Vps41
  gRNA
cgtagattcttcaagagact

SEQ ID NO: 59013 - DNA, 20 bp, Artificial Sequence
  MKO10059013_A_Vps41
  gRNA
aagaatctctgtcaccccat

SEQ ID NO: 59014 - DNA, 20 bp, Artificial Sequence
  MKO10059014_A_Vps45
  gRNA
gagaatcaattcgttcgaag

SEQ ID NO: 59015 - DNA, 20 bp, Artificial Sequence
  MKO10059015_A_Vps45
  gRNA
gtagtacctttgtgggtcga

SEQ ID NO: 59016 - DNA, 20 bp, Artificial Sequence
  MKO10059016_A_Vps45
  gRNA
gaatgtggaatatctgatcc

SEQ ID NO: 59017 - DNA, 20 bp, Artificial Sequence
  MKO10059017_A_Vps4a
  gRNA
acatcattccaccgtatgtt

SEQ ID NO: 59018 - DNA, 20 bp, Artificial Sequence
  MKO10059018_A_Vps4a
  gRNA
gtgactcacatttgatggcg

SEQ ID NO: 59019 - DNA, 20 bp, Artificial Sequence
  MKO10059019_A_Vps4a
  gRNA
gagtgcctcctcgtagttct

SEQ ID NO: 59020 - DNA, 20 bp, Artificial Sequence
  MKO10059020_A_Vps4b
  gRNA
acataccccttctcatcaac

SEQ ID NO: 59021 - DNA, 20 bp, Artificial Sequence
  MKO10059021_A_Vps4b
  gRNA
gtcaggcccagttgatgaga

SEQ ID NO: 59022 - DNA, 20 bp, Artificial Sequence
  MKO10059022_A_Vps4b
  gRNA
atgccttacatttaacaaca

SEQ ID NO: 59023 - DNA, 20 bp, Artificial Sequence
  MKO10059023_A_Vps51
  gRNA
ctcgtgtcggtcctgtagcg

SEQ ID NO: 59024 - DNA, 20 bp, Artificial Sequence
  MKO10059024_A_Vps51
  gRNA
gtgttagagttcaccgaccg

SEQ ID NO: 59025 - DNA, 20 bp, Artificial Sequence
  MKO10059025_A_Vps51
  gRNA
aagccagtgacgtcttgatg

SEQ ID NO: 59026 - DNA, 20 bp, Artificial Sequence
  MKO10059026_A_Vps52
  gRNA
cacctccaggacggcgtcac

SEQ ID NO: 59027 - DNA, 20 bp, Artificial Sequence
  MKO10059027_A_Vps52
  gRNA
tcttcgacactattcaaagc

SEQ ID NO: 59028 - DNA, 20 bp, Artificial Sequence
  MKO10059028_A_Vps52
  gRNA
atccaagatgaattcatcag

SEQ ID NO: 59029 - DNA, 20 bp, Artificial Sequence
  MKO10059029_A_Vps53
  gRNA
tctgacctcttacgacagtc

SEQ ID NO: 59030 - DNA, 20 bp, Artificial Sequence
  MKO10059030_A_Vps53
  gRNA
tatgtaggtattcccaagcc

SEQ ID NO: 59031 - DNA, 20 bp, Artificial Sequence
  MKO10059031_A_Vps53
  gRNA
cgtaagaggtcagacaaatg

SEQ ID NO: 59032 - DNA, 20 bp, Artificial Sequence
  MKO10059032_A_Vps54
  gRNA
tagttacagatcaacataga

SEQ ID NO: 59033 - DNA, 20 bp, Artificial Sequence
  MKO10059033_A_Vps54
  gRNA
ctcctaaagatacctttgac

SEQ ID NO: 59034 - DNA, 20 bp, Artificial Sequence
  MKO10059034_A_Vps54
  gRNA
tacttgctccagatctgtcc

SEQ ID NO: 59035 - DNA, 20 bp, Artificial Sequence
  MKO10059035_A_Vps72
  gRNA
gagctcaacttacgttcact

SEQ ID NO: 59036 - DNA, 20 bp, Artificial Sequence
  MKO10059036_A_Vps72
  gRNA
acacacgacaaacgttcctt

SEQ ID NO: 59037 - DNA, 20 bp, Artificial Sequence
  MKO10059037_A_Vps72
  gRNA
caagcggcaccgtcactgag

SEQ ID NO: 59038 - DNA, 20 bp, Artificial Sequence
  MKO10059038_A_Vps8
  gRNA
agcccacgcacgcgcagtct

SEQ ID NO: 59039 - DNA, 20 bp, Artificial Sequence
  MKO10059039_A_Vps8
  gRNA
cgagctcagacagcggcgac

SEQ ID NO: 59040 - DNA, 20 bp, Artificial Sequence
  MKO10059040_A_Vps8
  gRNA
ggtcccgtcaaggcagacgc

SEQ ID NO: 59041 - DNA, 20 bp, Artificial Sequence
  MKO10059041_A_Vps9d1
  gRNA
ccacgtcttcgagcaatacc

SEQ ID NO: 59042 - DNA, 20 bp, Artificial Sequence
  MKO10059042_A_Vps9d1
  gRNA
tgaggcccggatggcccgtc

SEQ ID NO: 59043 - DNA, 20 bp, Artificial Sequence
  MKO10059043_A_Vps9d1
  gRNA
ctgcatctaggaagcgtacg

SEQ ID NO: 59044 - DNA, 20 bp, Artificial Sequence
  MKO10059044_A_Vrk1
  gRNA
cgcgtcactgccaaccggtt

SEQ ID NO: 59045 - DNA, 20 bp, Artificial Sequence
  MKO10059045_A_Vrk1
  gRNA
ctcgcagagcagtttgccgc

SEQ ID NO: 59046 - DNA, 20 bp, Artificial Sequence
  MKO10059046_A_Vrk1
  gRNA
aggtcctaaccgacatgtct

SEQ ID NO: 59047 - DNA, 20 bp, Artificial Sequence
  MKO10059047_A_Vrk2
  gRNA
aaattaaccgtcctacaact

SEQ ID NO: 59048 - DNA, 20 bp, Artificial Sequence
  MKO10059048_A_Vrk2
  gRNA
tgcaagacatgtcataaagc

SEQ ID NO: 59049 - DNA, 20 bp, Artificial Sequence
  MKO10059049_A_Vrk2
  gRNA
acatgtcttgcatctttgtt

SEQ ID NO: 59050 - DNA, 20 bp, Artificial Sequence
  MKO10059050_A_Vrk3
  gRNA
ctgccgtcccctctgaatca

SEQ ID NO: 59051 - DNA, 20 bp, Artificial Sequence
  MKO10059051_A_Vrk3
  gRNA
acaccttgacttctcctgac

SEQ ID NO: 59052 - DNA, 20 bp, Artificial Sequence
  MKO10059052_A_Vrk3
  gRNA
gtggagattctcactcaaac

SEQ ID NO: 59053 - DNA, 20 bp, Artificial Sequence
  MKO10059053_A_Vrtn
  gRNA
gacccaagagcaccgtcaaa

SEQ ID NO: 59054 - DNA, 20 bp, Artificial Sequence
  MKO10059054_A_Vrtn
  gRNA
caaagatgcccttatctcgt

SEQ ID NO: 59055 - DNA, 20 bp, Artificial Sequence
  MKO10059055_A_Vrtn
  gRNA
ccaagagcaccttctaccgc

SEQ ID NO: 59056 - DNA, 20 bp, Artificial Sequence
  MKO10059056_A_Vsig10
  gRNA
agcgtagagtaacgttgtcg

SEQ ID NO: 59057 - DNA, 20 bp, Artificial Sequence
  MKO10059057_A_Vsig10
  gRNA
gacaacgttactctacgctg

SEQ ID NO: 59058 - DNA, 20 bp, Artificial Sequence
  MKO10059058_A_Vsig10
  gRNA
ggctgcgtacagcgtgccgt

SEQ ID NO: 59059 - DNA, 20 bp, Artificial Sequence
  MKO10059059_A_Vsig1
  gRNA
caattcaaagaccgaataat

SEQ ID NO: 59060 - DNA, 20 bp, Artificial Sequence
  MKO10059060_A_Vsig1
  gRNA
agacgttaagtcaatttcac

SEQ ID NO: 59061 - DNA, 20 bp, Artificial Sequence
  MKO10059061_A_Vsig1
  gRNA
acttctcggtggtggtatag

SEQ ID NO: 59062 - DNA, 20 bp, Artificial Sequence
  MKO10059062_A_Vsig2
  gRNA
aacccgttggtgtagaaatc

SEQ ID NO: 59063 - DNA, 20 bp, Artificial Sequence
  MKO10059063_A_Vsig2
  gRNA
gagctgaacctctccgtgac

SEQ ID NO: 59064 - DNA, 20 bp, Artificial Sequence
  MKO10059064_A_Vsig2
  gRNA
atcccctaccagtcacggag

SEQ ID NO: 59065 - DNA, 20 bp, Artificial Sequence
  MKO10059065_A_Vsig4
  gRNA
cttatatcttgttccgctgc

SEQ ID NO: 59066 - DNA, 20 bp, Artificial Sequence
  MKO10059066_A_Vsig4
  gRNA
atcttcctacgtgactccac

SEQ ID NO: 59067 - DNA, 20 bp, Artificial Sequence
  MKO10059067_A_Vsig4
  gRNA
agatcattgagctccgtgtt

SEQ ID NO: 59068 - DNA, 20 bp, Artificial Sequence
  MKO10059068_A_Vsig8
  gRNA
ggcatcaacgcagacgacga

SEQ ID NO: 59069 - DNA, 20 bp, Artificial Sequence
  MKO10059069_A_Vsig8
  gRNA
cacagtcacccctaccgagc

SEQ ID NO: 59070 - DNA, 20 bp, Artificial Sequence
  MKO10059070_A_Vsig8
  gRNA
ggttgatggaggcatcgtac

SEQ ID NO: 59071 - DNA, 20 bp, Artificial Sequence
  MKO10059071_A_Vsnl1
  gRNA
gaaggcgtgctgcgcgaact

SEQ ID NO: 59072 - DNA, 20 bp, Artificial Sequence
  MKO10059072_A_Vsnl1
  gRNA
tgacggcaagatcacccgag

SEQ ID NO: 59073 - DNA, 20 bp, Artificial Sequence
  MKO10059073_A_Vsnl1
  gRNA
tcgaggttcagcctcccgct

SEQ ID NO: 59074 - DNA, 20 bp, Artificial Sequence
  MKO10059074_A_Vstm2a
  gRNA
atcttggtcccatcgttgtc

SEQ ID NO: 59075 - DNA, 20 bp, Artificial Sequence
  MKO10059075_A_Vstm2a
  gRNA
accgatgatgcgttctttcg

SEQ ID NO: 59076 - DNA, 20 bp, Artificial Sequence
  MKO10059076_A_Vstm2a
  gRNA
gctcttacccgacagagacc

SEQ ID NO: 59077 - DNA, 20 bp, Artificial Sequence
  MKO10059077_A_Vstm2b
  gRNA
gccgtacgattgcaggacga

SEQ ID NO: 59078 - DNA, 20 bp, Artificial Sequence
  MKO10059078_A_Vstm2b
  gRNA
tcgaaatgccctgcgcgttc

SEQ ID NO: 59079 - DNA, 20 bp, Artificial Sequence
  MKO10059079_A_Vstm2b
  gRNA
attaccttgctccgggcgcc

SEQ ID NO: 59080 - DNA, 20 bp, Artificial Sequence
  MKO10059080_A_Vstm2l
  gRNA
cgcgtgatcgacttcagcga

SEQ ID NO: 59081 - DNA, 20 bp, Artificial Sequence
  MKO10059081_A_Vstm2l
  gRNA
ctcgtaggtgccttcgtccg

SEQ ID NO: 59082 - DNA, 20 bp, Artificial Sequence
  MKO10059082_A_Vstm2l
  gRNA
actcaccgtgtccggagacg

SEQ ID NO: 59083 - DNA, 20 bp, Artificial Sequence
  MKO10059083_A_Vstm4
  gRNA
cccctcgacgctcctcgagc

SEQ ID NO: 59084 - DNA, 20 bp, Artificial Sequence
  MKO10059084_A_Vstm4
  gRNA
acctctcatttccgtcgccg

SEQ ID NO: 59085 - DNA, 20 bp, Artificial Sequence
  MKO10059085_A_Vstm4
  gRNA
atgaatcttcgccagctttg

SEQ ID NO: 59086 - DNA, 20 bp, Artificial Sequence
  MKO10059086_A_Vstm5
  gRNA
ttgttggacagtggcgttga

SEQ ID NO: 59087 - DNA, 20 bp, Artificial Sequence
  MKO10059087_A_Vstm5
  gRNA
atggcgtgcccactattgag

SEQ ID NO: 59088 - DNA, 20 bp, Artificial Sequence
  MKO10059088_A_Vstm5
  gRNA
gtcctctccccgcaccgcag

SEQ ID NO: 59089 - DNA, 20 bp, Artificial Sequence
  MKO10059089_A_Vsx1
  gRNA
atttcccgagcgtacacgtc

SEQ ID NO: 59090 - DNA, 20 bp, Artificial Sequence
  MKO10059090_A_Vsx1
  gRNA
ggcgtaagcgagagaagcgc

SEQ ID NO: 59091 - DNA, 20 bp, Artificial Sequence
  MKO10059091_A_Vsx1
  gRNA
tggaatgcagtggcgcacca

SEQ ID NO: 59092 - DNA, 20 bp, Artificial Sequence
  MKO10059092_A_Vsx2
  gRNA
actacccagatgtctacgcc

SEQ ID NO: 59093 - DNA, 20 bp, Artificial Sequence
  MKO10059093_A_Vsx2
  gRNA
tcgccgcttcttacgcttct

SEQ ID NO: 59094 - DNA, 20 bp, Artificial Sequence
  MKO10059094_A_Vsx2
  gRNA
agggatgcacaaaaagtcgc

SEQ ID NO: 59095 - DNA, 20 bp, Artificial Sequence
  MKO10059095_A_Vta1
  gRNA
cgtttatatgctatgcaaac

SEQ ID NO: 59096 - DNA, 20 bp, Artificial Sequence
  MKO10059096_A_Vta1
  gRNA
gataaaaatttacgacactc

SEQ ID NO: 59097 - DNA, 20 bp, Artificial Sequence
  MKO10059097_A_Vta1
  gRNA
gcagacaatgaagatcgagc

SEQ ID NO: 59098 - DNA, 20 bp, Artificial Sequence
  MKO10059098_A_Vtcn1
  gRNA
ttcagagagtttacgctgcg

SEQ ID NO: 59099 - DNA, 20 bp, Artificial Sequence
  MKO10059099_A_Vtcn1
  gRNA
ggggccatcgcactcatcat

SEQ ID NO: 59100 - DNA, 20 bp, Artificial Sequence
  MKO10059100_A_Vtcn1
  gRNA
tgggcatctcaagtcgacca

SEQ ID NO: 59101 - DNA, 20 bp, Artificial Sequence
  MKO10059101_A_Vti1a
  gRNA
tcgcctacagtgacgaagta

SEQ ID NO: 59102 - DNA, 20 bp, Artificial Sequence
  MKO10059102_A_Vti1a
  gRNA
attccgtacttcgtcactgt

SEQ ID NO: 59103 - DNA, 20 bp, Artificial Sequence
  MKO10059103_A_Vti1a
  gRNA
tcgtctcggagactagaggc

SEQ ID NO: 59104 - DNA, 20 bp, Artificial Sequence
  MKO10059104_A_Vti1b
  gRNA
ccttgctaaactccaccgtg

SEQ ID NO: 59105 - DNA, 20 bp, Artificial Sequence
  MKO10059105_A_Vti1b
  gRNA
tgctcttagtacgttccaac

SEQ ID NO: 59106 - DNA, 20 bp, Artificial Sequence
  MKO10059106_A_Vti1b
  gRNA
taccttggagaacgagcatt

SEQ ID NO: 59107 - DNA, 20 bp, Artificial Sequence
  MKO10059107_A_Vtn
  gRNA
tttagagtgccgtccgtccg

SEQ ID NO: 59108 - DNA, 20 bp, Artificial Sequence
  MKO10059108_A_Vtn
  gRNA
gacctaaatcctcggacgga

SEQ ID NO: 59109 - DNA, 20 bp, Artificial Sequence
  MKO10059109_A_Vtn
  gRNA
tatccccgaaacatctccga

SEQ ID NO: 59110 - DNA, 20 bp, Artificial Sequence
  MKO10059110_A_Vwa1
  gRNA
gcatcgtcatctcgcatgcg

SEQ ID NO: 59111 - DNA, 20 bp, Artificial Sequence
  MKO10059111_A_Vwa1
  gRNA
ccgtgttgcaccccaacgta

SEQ ID NO: 59112 - DNA, 20 bp, Artificial Sequence
  MKO10059112_A_Vwa1
  gRNA
agcacgggtccgcgcgccag

SEQ ID NO: 59113 - DNA, 20 bp, Artificial Sequence
  MKO10059113_A_Vwa2
  gRNA
ccgtgacgatgataagaatc

SEQ ID NO: 59114 - DNA, 20 bp, Artificial Sequence
  MKO10059114_A_Vwa2
  gRNA
ggcagcgatggcgaagcgct

SEQ ID NO: 59115 - DNA, 20 bp, Artificial Sequence
  MKO10059115_A_Vwa2
  gRNA
ggcatcgtcgtgtttgccgt

SEQ ID NO: 59116 - DNA, 20 bp, Artificial Sequence
  MKO10059116_A_Vwa3a
  gRNA
agtcttccagagccgacgtc

SEQ ID NO: 59117 - DNA, 20 bp, Artificial Sequence
  MKO10059117_A_Vwa3a
  gRNA
aaagttcgagaagctcacct

SEQ ID NO: 59118 - DNA, 20 bp, Artificial Sequence
  MKO10059118_A_Vwa3a
  gRNA
tggttgttaccagtaagtcc

SEQ ID NO: 59119 - DNA, 20 bp, Artificial Sequence
  MKO10059119_A_Vwa5a
  gRNA
ctaggctcacagcgagtatg

SEQ ID NO: 59120 - DNA, 20 bp, Artificial Sequence
  MKO10059120_A_Vwa5a
  gRNA
gggccaccaagcatacttat

SEQ ID NO: 59121 - DNA, 20 bp, Artificial Sequence
  MKO10059121_A_Vwa5a
  gRNA
ctcctcattctcgtaattta

SEQ ID NO: 59122 - DNA, 20 bp, Artificial Sequence
  MKO10059122_A_Vwa5b1
  gRNA
cgtgggccctgtctgctcgc

SEQ ID NO: 59123 - DNA, 20 bp, Artificial Sequence
  MKO10059123_A_Vwa5b1
  gRNA
gaggagagtcccatcgcacc

SEQ ID NO: 59124 - DNA, 20 bp, Artificial Sequence
  MKO10059124_A_Vwa5b1
  gRNA
aagaaccctcacagccccgc

SEQ ID NO: 59125 - DNA, 20 bp, Artificial Sequence
  MKO10059125_A_Vwa5b2
  gRNA
atcggcgccggctatgcaac

SEQ ID NO: 59126 - DNA, 20 bp, Artificial Sequence
  MKO10059126_A_Vwa5b2
  gRNA
aggcgtgttcgtgtaccctc

SEQ ID NO: 59127 - DNA, 20 bp, Artificial Sequence
  MKO10059127_A_Vwa5b2
  gRNA
gcctgagaacacgtccggag

SEQ ID NO: 59128 - DNA, 20 bp, Artificial Sequence
  MKO10059128_A_Vwa7
  gRNA
gccgttcagcatcgaagtgc

SEQ ID NO: 59129 - DNA, 20 bp, Artificial Sequence
  MKO10059129_A_Vwa7
  gRNA
ggcgggccaatgtatattcg

SEQ ID NO: 59130 - DNA, 20 bp, Artificial Sequence
  MKO10059130_A_Vwa7
  gRNA
gtcgagtccagcatattccc

SEQ ID NO: 59131 - DNA, 20 bp, Artificial Sequence
  MKO10059131_A_Vwa8
  gRNA
catagcgctccgcagacatg

SEQ ID NO: 59132 - DNA, 20 bp, Artificial Sequence
  MKO10059132_A_Vwa8
  gRNA
ttaggtgaaacggttagtat

SEQ ID NO: 59133 - DNA, 20 bp, Artificial Sequence
  MKO10059133_A_Vwa8
  gRNA
actgcatagccaccgagcgc

SEQ ID NO: 59134 - DNA, 20 bp, Artificial Sequence
  MKO10059134_A_Vwa9
  gRNA
ttaagtctatgagtcgttca

SEQ ID NO: 59135 - DNA, 20 bp, Artificial Sequence
  MKO10059135_A_Vwa9
  gRNA
cgactcatagacttaaataa

SEQ ID NO: 59136 - DNA, 20 bp, Artificial Sequence
  MKO10059136_A_Vwa9
  gRNA
ttctagaaagctgatagatc

SEQ ID NO: 59137 - DNA, 20 bp, Artificial Sequence
  MKO10059137_A_Vwc2l
  gRNA
tgttcaaagcgcgaatgcca

SEQ ID NO: 59138 - DNA, 20 bp, Artificial Sequence
  MKO10059138_A_Vwc2l
  gRNA
tcgcgctttgaacactgagc

SEQ ID NO: 59139 - DNA, 20 bp, Artificial Sequence
  MKO10059139_A_Vwc2l
  gRNA
tgaagcttgcatacttctat

SEQ ID NO: 59140 - DNA, 20 bp, Artificial Sequence
  MKO10059140_A_Vwc2
  gRNA
tacgcctacccggactaccg

SEQ ID NO: 59141 - DNA, 20 bp, Artificial Sequence
  MKO10059141_A_Vwc2
  gRNA
agaagcgcgagcacgcgtct

SEQ ID NO: 59142 - DNA, 20 bp, Artificial Sequence
  MKO10059142_A_Vwc2
  gRNA
gcactgatcaggctcatata

SEQ ID NO: 59143 - DNA, 20 bp, Artificial Sequence
  MKO10059143_A_Vwce
  gRNA
atcacagccatactccccgc

SEQ ID NO: 59144 - DNA, 20 bp, Artificial Sequence
  MKO10059144_A_Vwce
  gRNA
ggtagcccgagtatgccctg

SEQ ID NO: 59145 - DNA, 20 bp, Artificial Sequence
  MKO10059145_A_Vwce
  gRNA
ggtacagtgcccgctgccca

SEQ ID NO: 59146 - DNA, 20 bp, Artificial Sequence
  MKO10059146_A_Vwde
  gRNA
ttacttactgcaacccactc

SEQ ID NO: 59147 - DNA, 20 bp, Artificial Sequence
  MKO10059147_A_Vwde
  gRNA
tgaagaatccggtggccccc

SEQ ID NO: 59148 - DNA, 20 bp, Artificial Sequence
  MKO10059148_A_Vwde
  gRNA
ggctatcagaaatcctactg

SEQ ID NO: 59149 - DNA, 20 bp, Artificial Sequence
  MKO10059149_A_Vwf
  gRNA
ccgtaacgcagggtgaccaa

SEQ ID NO: 59150 - DNA, 20 bp, Artificial Sequence
  MKO10059150_A_Vwf
  gRNA
gggccgtcgacggcctgtca

SEQ ID NO: 59151 - DNA, 20 bp, Artificial Sequence
  MKO10059151_A_Vwf
  gRNA
cctttggtcaccctgcgtta

SEQ ID NO: 59152 - DNA, 20 bp, Artificial Sequence
  MKO10059152_A_Wac
  gRNA
ttgaactatgaagtgcactg

SEQ ID NO: 59153 - DNA, 20 bp, Artificial Sequence
  MKO10059153_A_Wac
  gRNA
cattgatggtaatgtatgcg

SEQ ID NO: 59154 - DNA, 20 bp, Artificial Sequence
  MKO10059154_A_Wac
  gRNA
aggggactctcagcctttcc

SEQ ID NO: 59155 - DNA, 20 bp, Artificial Sequence
  MKO10059155_A_Wapal
  gRNA
actaggtcgaaatctagtag

SEQ ID NO: 59156 - DNA, 20 bp, Artificial Sequence
  MKO10059156_A_Wapal
  gRNA
tactccgttccatagtatcc

SEQ ID NO: 59157 - DNA, 20 bp, Artificial Sequence
  MKO10059157_A_Wapal
  gRNA
ccagactcggaagaattgcc

SEQ ID NO: 59158 - DNA, 20 bp, Artificial Sequence
  MKO10059158_A_Wap
  gRNA
tatcatctgccaaaccaacg

SEQ ID NO: 59159 - DNA, 20 bp, Artificial Sequence
  MKO10059159_A_Wap
  gRNA
tccagcgaccgtgagtgttc

SEQ ID NO: 59160 - DNA, 20 bp, Artificial Sequence
  MKO10059160_A_Wap
  gRNA
ccagttggtgttccgaaagc

SEQ ID NO: 59161 - DNA, 20 bp, Artificial Sequence
  MKO10059161_A_Wars2
  gRNA
ctccccgacaggaacgtgtg

SEQ ID NO: 59162 - DNA, 20 bp, Artificial Sequence
  MKO10059162_A_Wars2
  gRNA
tggtgtaaatgctgcaatcg

SEQ ID NO: 59163 - DNA, 20 bp, Artificial Sequence
  MKO10059163_A_Wars2
  gRNA
taagttcacccagctctcga

SEQ ID NO: 59164 - DNA, 20 bp, Artificial Sequence
  MKO10059164_A_Wars
  gRNA
aaccgaatagagcgagccac

SEQ ID NO: 59165 - DNA, 20 bp, Artificial Sequence
  MKO10059165_A_Wars
  gRNA
gaccgcaccgcttcctgcgc

SEQ ID NO: 59166 - DNA, 20 bp, Artificial Sequence
  MKO10059166_A_Wars
  gRNA
ctcgtgaggtccctcaaagc

SEQ ID NO: 59167 - DNA, 20 bp, Artificial Sequence
  MKO10059167_A_Wasf1
  gRNA
taactcgttgcaagagcgcg

SEQ ID NO: 59168 - DNA, 20 bp, Artificial Sequence
  MKO10059168_A_Wasf1
  gRNA
cattcccgccgcctgtcatg

SEQ ID NO: 59169 - DNA, 20 bp, Artificial Sequence
  MKO10059169_A_Wasf1
  gRNA
acatcgtatgtttcttgcaa

SEQ ID NO: 59170 - DNA, 20 bp, Artificial Sequence
  MKO10059170_A_Wasf2
  gRNA
gagtaaactcccttgctgag

SEQ ID NO: 59171 - DNA, 20 bp, Artificial Sequence
  MKO10059171_A_Wasf2
  gRNA
acgtaaaatcaagacacgca

SEQ ID NO: 59172 - DNA, 20 bp, Artificial Sequence
  MKO10059172_A_Wasf2
  gRNA
gagtgactttaacttgtact

SEQ ID NO: 59173 - DNA, 20 bp, Artificial Sequence
  MKO10059173_A_Wasf3
  gRNA
tgagcattctgacaccgtac

SEQ ID NO: 59174 - DNA, 20 bp, Artificial Sequence
  MKO10059174_A_Wasf3
  gRNA
gccgatcgattctgtcttga

SEQ ID NO: 59175 - DNA, 20 bp, Artificial Sequence
  MKO10059175_A_Wasf3
  gRNA
gaatatgatggcgtatgaca

SEQ ID NO: 59176 - DNA, 20 bp, Artificial Sequence
  MKO10059176_A_Wash
  gRNA
gccgactcagctctactcgt

SEQ ID NO: 59177 - DNA, 20 bp, Artificial Sequence
  MKO10059177_A_Wash
  gRNA
agatggagccgtattcctgc

SEQ ID NO: 59178 - DNA, 20 bp, Artificial Sequence
  MKO10059178_A_Wash
  gRNA
cccgacgagtagagctgagt

SEQ ID NO: 59179 - DNA, 20 bp, Artificial Sequence
  MKO10059179_A_Wasl
  gRNA
tgaccacacatttcttgccg

SEQ ID NO: 59180 - DNA, 20 bp, Artificial Sequence
  MKO10059180_A_Wasl
  gRNA
gctcgggccagcagcccccg

SEQ ID NO: 59181 - DNA, 20 bp, Artificial Sequence
  MKO10059181_A_Wasl
  gRNA
taccagatttcctttgtcgt

SEQ ID NO: 59182 - DNA, 20 bp, Artificial Sequence
  MKO10059182_A_Was
  gRNA
tcctacttcatccgccttta

SEQ ID NO: 59183 - DNA, 20 bp, Artificial Sequence
  MKO10059183_A_Was
  gRNA
tccaggctggtcggctactc

SEQ ID NO: 59184 - DNA, 20 bp, Artificial Sequence
  MKO10059184_A_Was
  gRNA
cggggctgtgtgcttcgtga

SEQ ID NO: 59185 - DNA, 20 bp, Artificial Sequence
  MKO10059185_A_Wbp11
  gRNA
gcttccttacccatacgctg

SEQ ID NO: 59186 - DNA, 20 bp, Artificial Sequence
  MKO10059186_A_Wbp11
  gRNA
ccagtactttgatgctgtta

SEQ ID NO: 59187 - DNA, 20 bp, Artificial Sequence
  MKO10059187_A_Wbp11
  gRNA
ccttaacagcatcaaagtac

SEQ ID NO: 59188 - DNA, 20 bp, Artificial Sequence
  MKO10059188_A_Wbp1l
  gRNA
aaatcaacctgatcgcttac

SEQ ID NO: 59189 - DNA, 20 bp, Artificial Sequence
  MKO10059189_A_Wbp1l
  gRNA
aaagattcgcgttctgagcg

SEQ ID NO: 59190 - DNA, 20 bp, Artificial Sequence
  MKO10059190_A_Wbp1l
  gRNA
ggtagccccatggccggcca

SEQ ID NO: 59191 - DNA, 20 bp, Artificial Sequence
  MKO10059191_A_Wbp1
  gRNA
tgccgctatcgtcgcctaac

SEQ ID NO: 59192 - DNA, 20 bp, Artificial Sequence
  MKO10059192_A_Wbp1
  gRNA
gttgtgccttccgccaccga

SEQ ID NO: 59193 - DNA, 20 bp, Artificial Sequence
  MKO10059193_A_Wbp1
  gRNA
gtggtgaaccacatcctcgt

SEQ ID NO: 59194 - DNA, 20 bp, Artificial Sequence
  MKO10059194_A_Wbp2nl
  gRNA
cagaagcttgcaactcgtag

SEQ ID NO: 59195 - DNA, 20 bp, Artificial Sequence
  MKO10059195_A_Wbp2nl
  gRNA
ttggagcctggcggtgactg

SEQ ID NO: 59196 - DNA, 20 bp, Artificial Sequence
  MKO10059196_A_Wbp2nl
  gRNA
cactacgagttgcaagcttc

SEQ ID NO: 59197 - DNA, 20 bp, Artificial Sequence
  MKO10059197_A_Wbp2
  gRNA
aacttacccggtacggagta

SEQ ID NO: 59198 - DNA, 20 bp, Artificial Sequence
  MKO10059198_A_Wbp2
  gRNA
gggaaagacataggccccgc

SEQ ID NO: 59199 - DNA, 20 bp, Artificial Sequence
  MKO10059199_A_Wbp2
  gRNA
ccgtctaccttactccgtac

SEQ ID NO: 59200 - DNA, 20 bp, Artificial Sequence
  MKO10059200_A_Wbp4
  gRNA
cgccctgaaggcgtaccaag

SEQ ID NO: 59201 - DNA, 20 bp, Artificial Sequence
  MKO10059201_A_Wbp4
  gRNA
cgctgatgtacctgagggta

SEQ ID NO: 59202 - DNA, 20 bp, Artificial Sequence
  MKO10059202_A_Wbp4
  gRNA
tctgtgattactgcaagtgc

SEQ ID NO: 59203 - DNA, 20 bp, Artificial Sequence
  MKO10059203_A_Wbp5
  gRNA
acaaacttatagtgacgcgt

SEQ ID NO: 59204 - DNA, 20 bp, Artificial Sequence
  MKO10059204_A_Wbp5
  gRNA
gaggctgatccggtctctgc

SEQ ID NO: 59205 - DNA, 20 bp, Artificial Sequence
  MKO10059205_A_Wbp5
  gRNA
cctctcccgaaaagtttctt

SEQ ID NO: 59206 - DNA, 20 bp, Artificial Sequence
  MKO10059206_A_Wbscr16
  gRNA
aagggagtgtgctcgaccgc

SEQ ID NO: 59207 - DNA, 20 bp, Artificial Sequence
  MKO10059207_A_Wbscr16
  gRNA
caaaacgtactcatagcccc

SEQ ID NO: 59208 - DNA, 20 bp, Artificial Sequence
  MKO10059208_A_Wbscr16
  gRNA
aacaattcccacgggcagtg

SEQ ID NO: 59209 - DNA, 20 bp, Artificial Sequence
  MKO10059209_A_Wbscr17
  gRNA
cctgatccgagcacgcatcg

SEQ ID NO: 59210 - DNA, 20 bp, Artificial Sequence
  MKO10059210_A_Wbscr17
  gRNA
cgctacgagaactccgccca

SEQ ID NO: 59211 - DNA, 20 bp, Artificial Sequence
  MKO10059211_A_Wbscr17
  gRNA
tacgtccacaaacgctaccc

SEQ ID NO: 59212 - DNA, 20 bp, Artificial Sequence
  MKO10059212_A_Wbscr22
  gRNA
ctcacttgcgaacgtatttc

SEQ ID NO: 59213 - DNA, 20 bp, Artificial Sequence
  MKO10059213_A_Wbscr22
  gRNA
ctccaatgtagatgccgcct

SEQ ID NO: 59214 - DNA, 20 bp, Artificial Sequence
  MKO10059214_A_Wbscr22
  gRNA
cccctctgtatctcggtcca

SEQ ID NO: 59215 - DNA, 20 bp, Artificial Sequence
  MKO10059215_A_Wbscr27
  gRNA
cacaatgatcaccgcgtcaa

SEQ ID NO: 59216 - DNA, 20 bp, Artificial Sequence
  MKO10059216_A_Wbscr27
  gRNA
atcatggggtgagccccgaa

SEQ ID NO: 59217 - DNA, 20 bp, Artificial Sequence
  MKO10059217_A_Wbscr27
  gRNA
attgtctcagtcgagccttt

SEQ ID NO: 59218 - DNA, 20 bp, Artificial Sequence
  MKO10059218_A_Wbscr28
  gRNA
gtccggccaggcaagagcat

SEQ ID NO: 59219 - DNA, 20 bp, Artificial Sequence
  MKO10059219_A_Wbscr28
  gRNA
gcaatgttagtccagctcga

SEQ ID NO: 59220 - DNA, 20 bp, Artificial Sequence
  MKO10059220_A_Wbscr28
  gRNA
tgtgctgcactcgtactgtg

SEQ ID NO: 59221 - DNA, 20 bp, Artificial Sequence
  MKO10059221_A_Wdfy1
  gRNA
cggcgtgatcaccgctagcg

SEQ ID NO: 59222 - DNA, 20 bp, Artificial Sequence
  MKO10059222_A_Wdfy1
  gRNA
caaatatccgcctgctgtcg

SEQ ID NO: 59223 - DNA, 20 bp, Artificial Sequence
  MKO10059223_A_Wdfy1
  gRNA
tggcggcggagatccactcc

SEQ ID NO: 59224 - DNA, 20 bp, Artificial Sequence
  MKO10059224_A_Wdfy2
  gRNA
gttgcaggacagttcgtgtt

SEQ ID NO: 59225 - DNA, 20 bp, Artificial Sequence
  MKO10059225_A_Wdfy2
  gRNA
gacaggacaagcagttcgcc

SEQ ID NO: 59226 - DNA, 20 bp, Artificial Sequence
  MKO10059226_A_Wdfy2
  gRNA
cactggtgcggtaacctccc

SEQ ID NO: 59227 - DNA, 20 bp, Artificial Sequence
  MKO10059227_A_Wdfy3
  gRNA
ctacctctagcagagcgccg

SEQ ID NO: 59228 - DNA, 20 bp, Artificial Sequence
  MKO10059228_A_Wdfy3
  gRNA
ccacgttcacgctcagcccg

SEQ ID NO: 59229 - DNA, 20 bp, Artificial Sequence
  MKO10059229_A_Wdfy3
  gRNA
ctcatgaccatctcccgcca

SEQ ID NO: 59230 - DNA, 20 bp, Artificial Sequence
  MKO10059230_A_Wdfy4
  gRNA
ggaacctacttcgcagatat

SEQ ID NO: 59231 - DNA, 20 bp, Artificial Sequence
  MKO10059231_A_Wdfy4
  gRNA
aaacatttgcagcgaatctc

SEQ ID NO: 59232 - DNA, 20 bp, Artificial Sequence
  MKO10059232_A_Wdfy4
  gRNA
aagagtgacgcggatcagga

SEQ ID NO: 59233 - DNA, 20 bp, Artificial Sequence
  MKO10059233_A_Wdhd1
  gRNA
gccggcaacaaaattgctgc

SEQ ID NO: 59234 - DNA, 20 bp, Artificial Sequence
  MKO10059234_A_Wdhd1
  gRNA
aagcgtgttaatatgccatc

SEQ ID NO: 59235 - DNA, 20 bp, Artificial Sequence
  MKO10059235_A_Wdhd1
  gRNA
gaccctaagtccgttaatgt

SEQ ID NO: 59236 - DNA, 20 bp, Artificial Sequence
  MKO10059236_A_Wdpcp
  gRNA
tgccagcacgagattatcct

SEQ ID NO: 59237 - DNA, 20 bp, Artificial Sequence
  MKO10059237_A_Wdpcp
  gRNA
aaaacttcgagattcactga

SEQ ID NO: 59238 - DNA, 20 bp, Artificial Sequence
  MKO10059238_A_Wdpcp
  gRNA
gatctttcttgtcatagtac

SEQ ID NO: 59239 - DNA, 20 bp, Artificial Sequence
  MKO10059239_A_Wdr11
  gRNA
gatgaaaacgatgccctcgc

SEQ ID NO: 59240 - DNA, 20 bp, Artificial Sequence
  MKO10059240_A_Wdr11
  gRNA
cgcctaattacatcgtgctg

SEQ ID NO: 59241 - DNA, 20 bp, Artificial Sequence
  MKO10059241_A_Wdr11
  gRNA
agtatggagagccgatgtta

SEQ ID NO: 59242 - DNA, 20 bp, Artificial Sequence
  MKO10059242_A_Wdr12
  gRNA
atgataagacttctcggatc

SEQ ID NO: 59243 - DNA, 20 bp, Artificial Sequence
  MKO10059243_A_Wdr12
  gRNA
cctcattgtaggatcctgtc

SEQ ID NO: 59244 - DNA, 20 bp, Artificial Sequence
  MKO10059244_A_Wdr12
  gRNA
ccctgccgctgctgaagttg

SEQ ID NO: 59245 - DNA, 20 bp, Artificial Sequence
  MKO10059245_A_Wdr13
  gRNA
ccgaacaacccttgatcgaa

SEQ ID NO: 59246 - DNA, 20 bp, Artificial Sequence
  MKO10059246_A_Wdr13
  gRNA
gtggcgtctcggacttcgcc

SEQ ID NO: 59247 - DNA, 20 bp, Artificial Sequence
  MKO10059247_A_Wdr13
  gRNA
cgtaccgttggcccaatagc

SEQ ID NO: 59248 - DNA, 20 bp, Artificial Sequence
  MKO10059248_A_Wdr16
  gRNA
gccgacattgaggcccgccg

SEQ ID NO: 59249 - DNA, 20 bp, Artificial Sequence
  MKO10059249_A_Wdr16
  gRNA
gtagtgggacaattcgagtg

SEQ ID NO: 59250 - DNA, 20 bp, Artificial Sequence
  MKO10059250_A_Wdr16
  gRNA
cccgcggcgggcctcaatgt

SEQ ID NO: 59251 - DNA, 20 bp, Artificial Sequence
  MKO10059251_A_Wdr17
  gRNA
gtatgcaaaccgatctccgt

SEQ ID NO: 59252 - DNA, 20 bp, Artificial Sequence
  MKO10059252_A_Wdr17
  gRNA
gtttgcatactgcgcaactc

SEQ ID NO: 59253 - DNA, 20 bp, Artificial Sequence
  MKO10059253_A_Wdr17
  gRNA
taaacgttgtgatgcagtaa

SEQ ID NO: 59254 - DNA, 20 bp, Artificial Sequence
  MKO10059254_A_Wdr18
  gRNA
aggactgcttggcgctggcc

SEQ ID NO: 59255 - DNA, 20 bp, Artificial Sequence
  MKO10059255_A_Wdr18
  gRNA
ggcctccgaagccgcagtgc

SEQ ID NO: 59256 - DNA, 20 bp, Artificial Sequence
  MKO10059256_A_Wdr18
  gRNA
aggacacgtcctggtagtgc

SEQ ID NO: 59257 - DNA, 20 bp, Artificial Sequence
  MKO10059257_A_Wdr19
  gRNA
gtgctccgatacaatttgcc

SEQ ID NO: 59258 - DNA, 20 bp, Artificial Sequence
  MKO10059258_A_Wdr19
  gRNA
ggataaagatggcgatatcc

SEQ ID NO: 59259 - DNA, 20 bp, Artificial Sequence
  MKO10059259_A_Wdr19
  gRNA
gttaaaatctttgatcgcca

SEQ ID NO: 59260 - DNA, 20 bp, Artificial Sequence
  MKO10059260_A_Wdr1
  gRNA
aggccctaccgactagcaac

SEQ ID NO: 59261 - DNA, 20 bp, Artificial Sequence
  MKO10059261_A_Wdr1
  gRNA
agacagtaagaggatcgccg

SEQ ID NO: 59262 - DNA, 20 bp, Artificial Sequence
  MKO10059262_A_Wdr1
  gRNA
tatgagtaccagcctttcgc

SEQ ID NO: 59263 - DNA, 20 bp, Artificial Sequence
  MKO10059263_A_Wdr20rt
  gRNA
cgctctccgctgtggccgtt

SEQ ID NO: 59264 - DNA, 20 bp, Artificial Sequence
  MKO10059264_A_Wdr20rt
  gRNA
ggccgactgtactccgagtg

SEQ ID NO: 59265 - DNA, 20 bp, Artificial Sequence
  MKO10059265_A_Wdr20rt
  gRNA
ggcggttgccattaccagtc

SEQ ID NO: 59266 - DNA, 20 bp, Artificial Sequence
  MKO10059266_A_Wdr20
  gRNA
aatgccacaagtccgcctgc

SEQ ID NO: 59267 - DNA, 20 bp, Artificial Sequence
  MKO10059267_A_Wdr20
  gRNA
ggcggtcgccgttgccagac

SEQ ID NO: 59268 - DNA, 20 bp, Artificial Sequence
  MKO10059268_A_Wdr20
  gRNA
cccatttgacacaggttacg

SEQ ID NO: 59269 - DNA, 20 bp, Artificial Sequence
  MKO10059269_A_Wdr24
  gRNA
tcgggagcttggccgcaatc

SEQ ID NO: 59270 - DNA, 20 bp, Artificial Sequence
  MKO10059270_A_Wdr24
  gRNA
catcttgtcacgtccacccg

SEQ ID NO: 59271 - DNA, 20 bp, Artificial Sequence
  MKO10059271_A_Wdr24
  gRNA
gcggcctaccgctcatgaac

SEQ ID NO: 59272 - DNA, 20 bp, Artificial Sequence
  MKO10059272_A_Wdr25
  gRNA
agcagacggagacgctacga

SEQ ID NO: 59273 - DNA, 20 bp, Artificial Sequence
  MKO10059273_A_Wdr25
  gRNA
ctgaccgaaccattatcgcc

SEQ ID NO: 59274 - DNA, 20 bp, Artificial Sequence
  MKO10059274_A_Wdr25
  gRNA
tctccgtctgctcatccgat

SEQ ID NO: 59275 - DNA, 20 bp, Artificial Sequence
  MKO10059275_A_Wdr26
  gRNA
gcattctcctcacgctattg

SEQ ID NO: 59276 - DNA, 20 bp, Artificial Sequence
  MKO10059276_A_Wdr26
  gRNA
agcgtcccggtccaaactgc

SEQ ID NO: 59277 - DNA, 20 bp, Artificial Sequence
  MKO10059277_A_Wdr26
  gRNA
cctcttaccacaatagcgtg

SEQ ID NO: 59278 - DNA, 20 bp, Artificial Sequence
  MKO10059278_A_Wdr27
  gRNA
gtctgaagaccgaagcttta

SEQ ID NO: 59279 - DNA, 20 bp, Artificial Sequence
  MKO10059279_A_Wdr27
  gRNA
gttgtgtttgcgatttagtc

SEQ ID NO: 59280 - DNA, 20 bp, Artificial Sequence
  MKO10059280_A_Wdr27
  gRNA
gagcccaggatagtccctcg

SEQ ID NO: 59281 - DNA, 20 bp, Artificial Sequence
  MKO10059281_A_Wdr31
  gRNA
gcacgagcgggaaatcacga

SEQ ID NO: 59282 - DNA, 20 bp, Artificial Sequence
  MKO10059282_A_Wdr31
  gRNA
agaccgccgtggcctacaat

SEQ ID NO: 59283 - DNA, 20 bp, Artificial Sequence
  MKO10059283_A_Wdr31
  gRNA
agaatacatccctgttcacg

SEQ ID NO: 59284 - DNA, 20 bp, Artificial Sequence
  MKO10059284_A_Wdr33
  gRNA
gatgttgaaacctcggcata

SEQ ID NO: 59285 - DNA, 20 bp, Artificial Sequence
  MKO10059285_A_Wdr33
  gRNA
gcttgctgctgtgcaaaatc

SEQ ID NO: 59286 - DNA, 20 bp, Artificial Sequence
  MKO10059286_A_Wdr33
  gRNA
ttcctccagtggaccccgga

SEQ ID NO: 59287 - DNA, 20 bp, Artificial Sequence
  MKO10059287_A_Wdr34
  gRNA
ctcataggggggctgtatag

SEQ ID NO: 59288 - DNA, 20 bp, Artificial Sequence
  MKO10059288_A_Wdr34
  gRNA
agacctgtacgccaaagcag

SEQ ID NO: 59289 - DNA, 20 bp, Artificial Sequence
  MKO10059289_A_Wdr34
  gRNA
gttcacctcatagccatcga

SEQ ID NO: 59290 - DNA, 20 bp, Artificial Sequence
  MKO10059290_A_Wdr35
  gRNA
gtgctgttcaagttgtaacg

SEQ ID NO: 59291 - DNA, 20 bp, Artificial Sequence
  MKO10059291_A_Wdr35
  gRNA
gaccaagggttcatagcatg

SEQ ID NO: 59292 - DNA, 20 bp, Artificial Sequence
  MKO10059292_A_Wdr35
  gRNA
cgccacatgctatgaaccct

SEQ ID NO: 59293 - DNA, 20 bp, Artificial Sequence
  MKO10059293_A_Wdr36
  gRNA
cgcaagtcgtcacgtagaag

SEQ ID NO: 59294 - DNA, 20 bp, Artificial Sequence
  MKO10059294_A_Wdr36
  gRNA
cttctacgtgacgacttgcg

SEQ ID NO: 59295 - DNA, 20 bp, Artificial Sequence
  MKO10059295_A_Wdr36
  gRNA
atctgttgcatggcagccga

SEQ ID NO: 59296 - DNA, 20 bp, Artificial Sequence
  MKO10059296_A_Wdr37
  gRNA
tgaaggacaagcgatcgatg

SEQ ID NO: 59297 - DNA, 20 bp, Artificial Sequence
  MKO10059297_A_Wdr37
  gRNA
actcttaatgaacgtttagc

SEQ ID NO: 59298 - DNA, 20 bp, Artificial Sequence
  MKO10059298_A_Wdr37
  gRNA
cagcagtgtactgcgaactg

SEQ ID NO: 59299 - DNA, 20 bp, Artificial Sequence
  MKO10059299_A_Wdr38
  gRNA
gggacaagagagcgattgtc

SEQ ID NO: 59300 - DNA, 20 bp, Artificial Sequence
  MKO10059300_A_Wdr38
  gRNA
gtgagcagggtccggccgtc

SEQ ID NO: 59301 - DNA, 20 bp, Artificial Sequence
  MKO10059301_A_Wdr38
  gRNA
gtgaccacagcatccgcctg

SEQ ID NO: 59302 - DNA, 20 bp, Artificial Sequence
  MKO10059302_A_Wdr3
  gRNA
agcttaaagtacgatcagct

SEQ ID NO: 59303 - DNA, 20 bp, Artificial Sequence
  MKO10059303_A_Wdr3
  gRNA
tagctgatcgtactttaagc

SEQ ID NO: 59304 - DNA, 20 bp, Artificial Sequence
  MKO10059304_A_Wdr3
  gRNA
aagtggcctctaccgtctaa

SEQ ID NO: 59305 - DNA, 20 bp, Artificial Sequence
  MKO10059305_A_Wdr41
  gRNA
accgacagtccggtcagccg

SEQ ID NO: 59306 - DNA, 20 bp, Artificial Sequence
  MKO10059306_A_Wdr41
  gRNA
tcgcgacattgtccgcttcc

SEQ ID NO: 59307 - DNA, 20 bp, Artificial Sequence
  MKO10059307_A_Wdr41
  gRNA
tgaagtcatcgagcctcacc

SEQ ID NO: 59308 - DNA, 20 bp, Artificial Sequence
  MKO10059308_A_Wdr43
  gRNA
cgacacctgtttcgtcgctt

SEQ ID NO: 59309 - DNA, 20 bp, Artificial Sequence
  MKO10059309_A_Wdr43
  gRNA
gtgaacctaagcgacgaaac

SEQ ID NO: 59310 - DNA, 20 bp, Artificial Sequence
  MKO10059310_A_Wdr43
  gRNA
ctggtcgaacaatcaaacta

SEQ ID NO: 59311 - DNA, 20 bp, Artificial Sequence
  MKO10059311_A_Wdr44
  gRNA
gcacttgctaaatcgaggga

SEQ ID NO: 59312 - DNA, 20 bp, Artificial Sequence
  MKO10059312_A_Wdr44
  gRNA
actacaacaagattccgaaa

SEQ ID NO: 59313 - DNA, 20 bp, Artificial Sequence
  MKO10059313_A_Wdr44
  gRNA
tttgtactggctactatatc

SEQ ID NO: 59314 - DNA, 20 bp, Artificial Sequence
  MKO10059314_A_Wdr45b
  gRNA
ctcacctttagggttgtagc

SEQ ID NO: 59315 - DNA, 20 bp, Artificial Sequence
  MKO10059315_A_Wdr45b
  gRNA
ctgtcaagttgcggagagat

SEQ ID NO: 59316 - DNA, 20 bp, Artificial Sequence
  MKO10059316_A_Wdr45b
  gRNA
ccgaaataccctcccaacaa

SEQ ID NO: 59317 - DNA, 20 bp, Artificial Sequence
  MKO10059317_A_Wdr45
  gRNA
aggcgtccggatctacaatg

SEQ ID NO: 59318 - DNA, 20 bp, Artificial Sequence
  MKO10059318_A_Wdr45
  gRNA
tccctgtccagaccacgagc

SEQ ID NO: 59319 - DNA, 20 bp, Artificial Sequence
  MKO10059319_A_Wdr45
  gRNA
gctgcaccgatccaacctgc

SEQ ID NO: 59320 - DNA, 20 bp, Artificial Sequence
  MKO10059320_A_Wdr46
  gRNA
cttagaaaccgcggcgctac

SEQ ID NO: 59321 - DNA, 20 bp, Artificial Sequence
  MKO10059321_A_Wdr46
  gRNA
acccccgacagcgtcctctg

SEQ ID NO: 59322 - DNA, 20 bp, Artificial Sequence
  MKO10059322_A_Wdr46
  gRNA
tcgaattgacaagtccaaaa

SEQ ID NO: 59323 - DNA, 20 bp, Artificial Sequence
  MKO10059323_A_Wdr47
  gRNA
ggttaaccagtcatgataag

SEQ ID NO: 59324 - DNA, 20 bp, Artificial Sequence
  MKO10059324_A_Wdr47
  gRNA
cacaaccgttgccacataac

SEQ ID NO: 59325 - DNA, 20 bp, Artificial Sequence
  MKO10059325_A_Wdr47
  gRNA
aagaagtgatacgcctgttg

SEQ ID NO: 59326 - DNA, 20 bp, Artificial Sequence
  MKO10059326_A_Wdr48
  gRNA
taccttatgcgtcctgagtg

SEQ ID NO: 59327 - DNA, 20 bp, Artificial Sequence
  MKO10059327_A_Wdr48
  gRNA
tccgttacaggactatgtaa

SEQ ID NO: 59328 - DNA, 20 bp, Artificial Sequence
  MKO10059328_A_Wdr48
  gRNA
agatccgtacatagcatcta

SEQ ID NO: 59329 - DNA, 20 bp, Artificial Sequence
  MKO10059329_A_Wdr4
  gRNA
gacggacagcccgcagacac

SEQ ID NO: 59330 - DNA, 20 bp, Artificial Sequence
  MKO10059330_A_Wdr4
  gRNA
acataccacgtctagcagca

SEQ ID NO: 59331 - DNA, 20 bp, Artificial Sequence
  MKO10059331_A_Wdr4
  gRNA
gcgtccaccttctccaagtc

SEQ ID NO: 59332 - DNA, 20 bp, Artificial Sequence
  MKO10059332_A_Wdr52
  gRNA
ctccgggtaatcgtaataga

SEQ ID NO: 59333 - DNA, 20 bp, Artificial Sequence
  MKO10059333_A_Wdr52
  gRNA
cagatacgactcttccccgt

SEQ ID NO: 59334 - DNA, 20 bp, Artificial Sequence
  MKO10059334_A_Wdr52
  gRNA
gaccttctattacgattacc

SEQ ID NO: 59335 - DNA, 20 bp, Artificial Sequence
  MKO10059335_A_Wdr53
  gRNA
gcagggtttaggagccgacc

SEQ ID NO: 59336 - DNA, 20 bp, Artificial Sequence
  MKO10059336_A_Wdr53
  gRNA
ttcaaaaagcccgtcctgtt

SEQ ID NO: 59337 - DNA, 20 bp, Artificial Sequence
  MKO10059337_A_Wdr53
  gRNA
gtcatgtggcctggatatgc

SEQ ID NO: 59338 - DNA, 20 bp, Artificial Sequence
  MKO10059338_A_Wdr54
  gRNA
cacctcgcatcgagggatac

SEQ ID NO: 59339 - DNA, 20 bp, Artificial Sequence
  MKO10059339_A_Wdr54
  gRNA
gtacaggctatgtttgcccg

SEQ ID NO: 59340 - DNA, 20 bp, Artificial Sequence
  MKO10059340_A_Wdr54
  gRNA
ggtctttgatatccccgcta

SEQ ID NO: 59341 - DNA, 20 bp, Artificial Sequence
  MKO10059341_A_Wdr55
  gRNA
ccacatcttagatgtcgaac

SEQ ID NO: 59342 - DNA, 20 bp, Artificial Sequence
  MKO10059342_A_Wdr55
  gRNA
agaacttgttaccgtctcta

SEQ ID NO: 59343 - DNA, 20 bp, Artificial Sequence
  MKO10059343_A_Wdr55
  gRNA
tgaggagtacattgccgaca

SEQ ID NO: 59344 - DNA, 20 bp, Artificial Sequence
  MKO10059344_A_Wdr59
  gRNA
catctagattgacgatgtac

SEQ ID NO: 59345 - DNA, 20 bp, Artificial Sequence
  MKO10059345_A_Wdr59
  gRNA
ctagtgagatggcggcgcgc

SEQ ID NO: 59346 - DNA, 20 bp, Artificial Sequence
  MKO10059346_A_Wdr59
  gRNA
tagtgtgcgaagctgtcatg

SEQ ID NO: 59347 - DNA, 20 bp, Artificial Sequence
  MKO10059347_A_Wdr5b
  gRNA
caaaagagcccgaaacgatg

SEQ ID NO: 59348 - DNA, 20 bp, Artificial Sequence
  MKO10059348_A_Wdr5b
  gRNA
ctcgctagccattcgccatt

SEQ ID NO: 59349 - DNA, 20 bp, Artificial Sequence
  MKO10059349_A_Wdr5b
  gRNA
tctgcggctcttcctcgcgc

SEQ ID NO: 59350 - DNA, 20 bp, Artificial Sequence
  MKO10059350_A_Wdr5
  gRNA
agggaatatctgatgtagcg

SEQ ID NO: 59351 - DNA, 20 bp, Artificial Sequence
  MKO10059351_A_Wdr5
  gRNA
acttgccaaccattccccat

SEQ ID NO: 59352 - DNA, 20 bp, Artificial Sequence
  MKO10059352_A_Wdr5
  gRNA
cagtccaacctcatcgtctc

SEQ ID NO: 59353 - DNA, 20 bp, Artificial Sequence
  MKO10059353_A_Wdr60
  gRNA
cttctcccgatctgcgtctt

SEQ ID NO: 59354 - DNA, 20 bp, Artificial Sequence
  MKO10059354_A_Wdr60
  gRNA
cacgcatatctcgactcaag

SEQ ID NO: 59355 - DNA, 20 bp, Artificial Sequence
  MKO10059355_A_Wdr60
  gRNA
gactgcactatgatgacgag

SEQ ID NO: 59356 - DNA, 20 bp, Artificial Sequence
  MKO10059356_A_Wdr61
  gRNA
cagatgaagtctatagatgc

SEQ ID NO: 59357 - DNA, 20 bp, Artificial Sequence
  MKO10059357_A_Wdr61
  gRNA
catcatctgaagccgtgaca

SEQ ID NO: 59358 - DNA, 20 bp, Artificial Sequence
  MKO10059358_A_Wdr61
  gRNA
aatattgatgattccgtcta

SEQ ID NO: 59359 - DNA, 20 bp, Artificial Sequence
  MKO10059359_A_Wdr62
  gRNA
atgacatggtcctcaatgtt

SEQ ID NO: 59360 - DNA, 20 bp, Artificial Sequence
  MKO10059360_A_Wdr62
  gRNA
gtcactatgtacttcccatc

SEQ ID NO: 59361 - DNA, 20 bp, Artificial Sequence
  MKO10059361_A_Wdr62
  gRNA
atgtgcttaccctgctaagt

SEQ ID NO: 59362 - DNA, 20 bp, Artificial Sequence
  MKO10059362_A_Wdr63
  gRNA
tgtagacgtacacgtcttct

SEQ ID NO: 59363 - DNA, 20 bp, Artificial Sequence
  MKO10059363_A_Wdr63
  gRNA
ggaagtcagatactgcggct

SEQ ID NO: 59364 - DNA, 20 bp, Artificial Sequence
  MKO10059364_A_Wdr63
  gRNA
taacccgctttcctgattcc

SEQ ID NO: 59365 - DNA, 20 bp, Artificial Sequence
  MKO10059365_A_Wdr64
  gRNA
atcctgacgcagctttcgac

SEQ ID NO: 59366 - DNA, 20 bp, Artificial Sequence
  MKO10059366_A_Wdr64
  gRNA
caccagtcgaaagctgcgtc

SEQ ID NO: 59367 - DNA, 20 bp, Artificial Sequence
  MKO10059367_A_Wdr64
  gRNA
acttactgtaacgttggtgc

SEQ ID NO: 59368 - DNA, 20 bp, Artificial Sequence
  MKO10059368_A_Wdr65
  gRNA
gatagcgagatatcgccgat

SEQ ID NO: 59369 - DNA, 20 bp, Artificial Sequence
  MKO10059369_A_Wdr65
  gRNA
tcaaggagtctactagctcc

SEQ ID NO: 59370 - DNA, 20 bp, Artificial Sequence
  MKO10059370_A_Wdr65
  gRNA
tgccatcgcagcctattcaa

SEQ ID NO: 59371 - DNA, 20 bp, Artificial Sequence
  MKO10059371_A_Wdr6
  gRNA
ctacgttaccctcgatccag

SEQ ID NO: 59372 - DNA, 20 bp, Artificial Sequence
  MKO10059372_A_Wdr6
  gRNA
cttgaaggatctcgccttcg

SEQ ID NO: 59373 - DNA, 20 bp, Artificial Sequence
  MKO10059373_A_Wdr6
  gRNA
tactcacggtagggaagccc

SEQ ID NO: 59374 - DNA, 20 bp, Artificial Sequence
  MKO10059374_A_Wdr70
  gRNA
gcactcgagcttgacggtgc

SEQ ID NO: 59375 - DNA, 20 bp, Artificial Sequence
  MKO10059375_A_Wdr70
  gRNA
gatgacgagttagacgatga

SEQ ID NO: 59376 - DNA, 20 bp, Artificial Sequence
  MKO10059376_A_Wdr70
  gRNA
aggagaatccgtaactactg

SEQ ID NO: 59377 - DNA, 20 bp, Artificial Sequence
  MKO10059377_A_Wdr72
  gRNA
cctctttacagtcgcccgac

SEQ ID NO: 59378 - DNA, 20 bp, Artificial Sequence
  MKO10059378_A_Wdr72
  gRNA
gtcccatactttgagttcgc

SEQ ID NO: 59379 - DNA, 20 bp, Artificial Sequence
  MKO10059379_A_Wdr72
  gRNA
taaccggcgaactcaaagta

SEQ ID NO: 59380 - DNA, 20 bp, Artificial Sequence
  MKO10059380_A_Wdr73
  gRNA
gacttcaaagtacgccatgg

SEQ ID NO: 59381 - DNA, 20 bp, Artificial Sequence
  MKO10059381_A_Wdr73
  gRNA
actcgagtccttgagtggat

SEQ ID NO: 59382 - DNA, 20 bp, Artificial Sequence
  MKO10059382_A_Wdr73
  gRNA
tggtatctggcacatgcttt

SEQ ID NO: 59383 - DNA, 20 bp, Artificial Sequence
  MKO10059383_A_Wdr74
  gRNA
cacgttccgaggtctcgccc

SEQ ID NO: 59384 - DNA, 20 bp, Artificial Sequence
  MKO10059384_A_Wdr74
  gRNA
cggaacgtgccttccccgcc

SEQ ID NO: 59385 - DNA, 20 bp, Artificial Sequence
  MKO10059385_A_Wdr74
  gRNA
ttgccgcatgtttccgctga

SEQ ID NO: 59386 - DNA, 20 bp, Artificial Sequence
  MKO10059386_A_Wdr75
  gRNA
acggaatcttccgcgtggag

SEQ ID NO: 59387 - DNA, 20 bp, Artificial Sequence
  MKO10059387_A_Wdr75
  gRNA
gctgtctagcttccacgtcc

SEQ ID NO: 59388 - DNA, 20 bp, Artificial Sequence
  MKO10059388_A_Wdr75
  gRNA
gctgcccaaatcaacaagcc

SEQ ID NO: 59389 - DNA, 20 bp, Artificial Sequence
  MKO10059389_A_Wdr76
  gRNA
gtctactttcaacaaccgca

SEQ ID NO: 59390 - DNA, 20 bp, Artificial Sequence
  MKO10059390_A_Wdr76
  gRNA
tacatacctcagctaactga

SEQ ID NO: 59391 - DNA, 20 bp, Artificial Sequence
  MKO10059391_A_Wdr76
  gRNA
gttgttgaaagtagaccctt

SEQ ID NO: 59392 - DNA, 20 bp, Artificial Sequence
  MKO10059392_A_Wdr77
  gRNA
ctctgctggcgtccagaccg

SEQ ID NO: 59393 - DNA, 20 bp, Artificial Sequence
  MKO10059393_A_Wdr77
  gRNA
gtatcactgaattcataccg

SEQ ID NO: 59394 - DNA, 20 bp, Artificial Sequence
  MKO10059394_A_Wdr77
  gRNA
ctttacagctcacgctggac

SEQ ID NO: 59395 - DNA, 20 bp, Artificial Sequence
  MKO10059395_A_Wdr78
  gRNA
tcctagcgctaaaacagtac

SEQ ID NO: 59396 - DNA, 20 bp, Artificial Sequence
  MKO10059396_A_Wdr78
  gRNA
acactaaaccctagcatgtt

SEQ ID NO: 59397 - DNA, 20 bp, Artificial Sequence
  MKO10059397_A_Wdr78
  gRNA
gctgacgcagcatgtggatc

SEQ ID NO: 59398 - DNA, 20 bp, Artificial Sequence
  MKO10059398_A_Wdr7
  gRNA
gcatccacaacgaggatttc

SEQ ID NO: 59399 - DNA, 20 bp, Artificial Sequence
  MKO10059399_A_Wdr7
  gRNA
ttaccctgaaatcctcgttg

SEQ ID NO: 59400 - DNA, 20 bp, Artificial Sequence
  MKO10059400_A_Wdr7
  gRNA
actgtgagcgcgtctgcaaa

SEQ ID NO: 59401 - DNA, 20 bp, Artificial Sequence
  MKO10059401_A_Wdr81
  gRNA
tctgccccgcattagccacg

SEQ ID NO: 59402 - DNA, 20 bp, Artificial Sequence
  MKO10059402_A_Wdr81
  gRNA
gcccgatgcgcaagcagatg

SEQ ID NO: 59403 - DNA, 20 bp, Artificial Sequence
  MKO10059403_A_Wdr81
  gRNA
cacagtagcctctcgccatg

SEQ ID NO: 59404 - DNA, 20 bp, Artificial Sequence
  MKO10059404_A_Wdr82
  gRNA
caccgtacttcttactgtac

SEQ ID NO: 59405 - DNA, 20 bp, Artificial Sequence
  MKO10059405_A_Wdr82
  gRNA
tgcgggcgtcaactcagaaa

SEQ ID NO: 59406 - DNA, 20 bp, Artificial Sequence
  MKO10059406_A_Wdr82
  gRNA
ccggagatcccagagtcgaa

SEQ ID NO: 59407 - DNA, 20 bp, Artificial Sequence
  MKO10059407_A_Wdr83
  gRNA
catctagcacttcgtagccg

SEQ ID NO: 59408 - DNA, 20 bp, Artificial Sequence
  MKO10059408_A_Wdr83
  gRNA
cggctacgaagtgctagatg

SEQ ID NO: 59409 - DNA, 20 bp, Artificial Sequence
  MKO10059409_A_Wdr83
  gRNA
ggcaggtcgtgcgcaaattt

SEQ ID NO: 59410 - DNA, 20 bp, Artificial Sequence
  MKO10059410_A_Wdr86
  gRNA
ctgatgccaccgttcgcgct

SEQ ID NO: 59411 - DNA, 20 bp, Artificial Sequence
  MKO10059411_A_Wdr86
  gRNA
agtgccctcaagtaccacgc

SEQ ID NO: 59412 - DNA, 20 bp, Artificial Sequence
  MKO10059412_A_Wdr86
  gRNA
cacacgagctgtccgatcat

SEQ ID NO: 59413 - DNA, 20 bp, Artificial Sequence
  MKO10059413_A_Wdr89
  gRNA
ctacatctgctacgagaatt

SEQ ID NO: 59414 - DNA, 20 bp, Artificial Sequence
  MKO10059414_A_Wdr89
  gRNA
tcgaactcgctgctgcacgg

SEQ ID NO: 59415 - DNA, 20 bp, Artificial Sequence
  MKO10059415_A_Wdr89
  gRNA
tactgcatgacacacgatga

SEQ ID NO: 59416 - DNA, 20 bp, Artificial Sequence
  MKO10059416_A_Wdr8
  gRNA
ttcaggatgtggcggccatc

SEQ ID NO: 59417 - DNA, 20 bp, Artificial Sequence
  MKO10059417_A_Wdr8
  gRNA
tggccagcttacatgaaatt

SEQ ID NO: 59418 - DNA, 20 bp, Artificial Sequence
  MKO10059418_A_Wdr8
  gRNA
cactaatcggtactggacac

SEQ ID NO: 59419 - DNA, 20 bp, Artificial Sequence
  MKO10059419_A_Wdr90
  gRNA
gcacctcggtggacacgtcc

SEQ ID NO: 59420 - DNA, 20 bp, Artificial Sequence
  MKO10059420_A_Wdr90
  gRNA
agcgctgtgtatcgcatccg

SEQ ID NO: 59421 - DNA, 20 bp, Artificial Sequence
  MKO10059421_A_Wdr90
  gRNA
taacagacaactttgcacgc

SEQ ID NO: 59422 - DNA, 20 bp, Artificial Sequence
  MKO10059422_A_Wdr91
  gRNA
gtcgatagatatcctccaag

SEQ ID NO: 59423 - DNA, 20 bp, Artificial Sequence
  MKO10059423_A_Wdr91
  gRNA
ggtagctccaataatcccga

SEQ ID NO: 59424 - DNA, 20 bp, Artificial Sequence
  MKO10059424_A_Wdr91
  gRNA
tgaaatccatcgactaaaga

SEQ ID NO: 59425 - DNA, 20 bp, Artificial Sequence
  MKO10059425_A_Wdr92
  gRNA
cggctgcccgtcacgatttc

SEQ ID NO: 59426 - DNA, 20 bp, Artificial Sequence
  MKO10059426_A_Wdr92
  gRNA
aggagcccctgaaatcgtga

SEQ ID NO: 59427 - DNA, 20 bp, Artificial Sequence
  MKO10059427_A_Wdr92
  gRNA
caagagagactgttggaccg

SEQ ID NO: 59428 - DNA, 20 bp, Artificial Sequence
  MKO10059428_A_Wdr93
  gRNA
caaatacccatttcgtcgat

SEQ ID NO: 59429 - DNA, 20 bp, Artificial Sequence
  MKO10059429_A_Wdr93
  gRNA
tattgttcctatcgacgaaa

SEQ ID NO: 59430 - DNA, 20 bp, Artificial Sequence
  MKO10059430_A_Wdr93
  gRNA
ggaactcaccacttcattga

SEQ ID NO: 59431 - DNA, 20 bp, Artificial Sequence
  MKO10059431_A_Wdr95
  gRNA
gggggctggatcgaatcatc

SEQ ID NO: 59432 - DNA, 20 bp, Artificial Sequence
  MKO10059432_A_Wdr95
  gRNA
gtacatacatcaccggagcc

SEQ ID NO: 59433 - DNA, 20 bp, Artificial Sequence
  MKO10059433_A_Wdr95
  gRNA
acgttcccaccaagagcccg

SEQ ID NO: 59434 - DNA, 20 bp, Artificial Sequence
  MKO10059434_A_Wdr96
  gRNA
aaagcatgtcgggctcgttt

SEQ ID NO: 59435 - DNA, 20 bp, Artificial Sequence
  MKO10059435_A_Wdr96
  gRNA
gttcaagtgcgatgagcgtg

SEQ ID NO: 59436 - DNA, 20 bp, Artificial Sequence
  MKO10059436_A_Wdr96
  gRNA
agcaaagtagagtgtagtcc

SEQ ID NO: 59437 - DNA, 20 bp, Artificial Sequence
  MKO10059437_A_Wdsub1
  gRNA
agcgagaaggcgcacgatct

SEQ ID NO: 59438 - DNA, 20 bp, Artificial Sequence
  MKO10059438_A_Wdsub1
  gRNA
gaaaagcaacagacgcgcac

SEQ ID NO: 59439 - DNA, 20 bp, Artificial Sequence
  MKO10059439_A_Wdsub1
  gRNA
ttagcatcgtgctcgacaga

SEQ ID NO: 59440 - DNA, 20 bp, Artificial Sequence
  MKO10059440_A_Wdtc1
  gRNA
ggtgcacgtccacgacctta

SEQ ID NO: 59441 - DNA, 20 bp, Artificial Sequence
  MKO10059441_A_Wdtc1
  gRNA
gatatcgccgttcaaagctc

SEQ ID NO: 59442 - DNA, 20 bp, Artificial Sequence
  MKO10059442_A_Wdtc1
  gRNA
tctcctttaccgtaaggtcg

SEQ ID NO: 59443 - DNA, 20 bp, Artificial Sequence
  MKO10059443_A_Wdyhv1
  gRNA
tgaagcacttcgcttctgac

SEQ ID NO: 59444 - DNA, 20 bp, Artificial Sequence
  MKO10059444_A_Wdyhv1
  gRNA
gacacacaaccagtatctgt

SEQ ID NO: 59445 - DNA, 20 bp, Artificial Sequence
  MKO10059445_A_Wdyhv1
  gRNA
gagtacccctgcattgaaac

SEQ ID NO: 59446 - DNA, 20 bp, Artificial Sequence
  MKO10059446_A_Wee1
  gRNA
ggaatcaataactcgcgctt

SEQ ID NO: 59447 - DNA, 20 bp, Artificial Sequence
  MKO10059447_A_Wee1
  gRNA
cagagaaatagcgaacgacg

SEQ ID NO: 59448 - DNA, 20 bp, Artificial Sequence
  MKO10059448_A_Wee1
  gRNA
tctcccacgacaccgtcctg

SEQ ID NO: 59449 - DNA, 20 bp, Artificial Sequence
  MKO10059449_A_Wee2
  gRNA
tggtacgctactactcatca

SEQ ID NO: 59450 - DNA, 20 bp, Artificial Sequence
  MKO10059450_A_Wee2
  gRNA
atgagtagtagcgtaccaca

SEQ ID NO: 59451 - DNA, 20 bp, Artificial Sequence
  MKO10059451_A_Wee2
  gRNA
gtacacttacagatagtctc

SEQ ID NO: 59452 - DNA, 20 bp, Artificial Sequence
  MKO10059452_A_Wfdc10
  gRNA
cccatacgtctttatccaac

SEQ ID NO: 59453 - DNA, 20 bp, Artificial Sequence
  MKO10059453_A_Wfdc10
  gRNA
ttgctgctttccctagccga

SEQ ID NO: 59454 - DNA, 20 bp, Artificial Sequence
  MKO10059454_A_Wfdc10
  gRNA
gggtcgcagttatgctgtcc

SEQ ID NO: 59455 - DNA, 20 bp, Artificial Sequence
  MKO10059455_A_Wfdc11
  gRNA
tcaacgtcatgaagccctcg

SEQ ID NO: 59456 - DNA, 20 bp, Artificial Sequence
  MKO10059456_A_Wfdc11
  gRNA
agctggagaactattactcg

SEQ ID NO: 59457 - DNA, 20 bp, Artificial Sequence
  MKO10059457_A_Wfdc11
  gRNA
caccagacacgggaaccacg

SEQ ID NO: 59458 - DNA, 20 bp, Artificial Sequence
  MKO10059458_A_Wfdc12
  gRNA
ccgactacgtccgctgcatc

SEQ ID NO: 59459 - DNA, 20 bp, Artificial Sequence
  MKO10059459_A_Wfdc12
  gRNA
acctcccgttaccagagtag

SEQ ID NO: 59460 - DNA, 20 bp, Artificial Sequence
  MKO10059460_A_Wfdc12
  gRNA
tggcttcaaatgcgtgctgc

SEQ ID NO: 59461 - DNA, 20 bp, Artificial Sequence
  MKO10059461_A_Wfdc13
  gRNA
ccttaggagagccctagtac

SEQ ID NO: 59462 - DNA, 20 bp, Artificial Sequence
  MKO10059462_A_Wfdc13
  gRNA
atctgcacggtggaggttcc

SEQ ID NO: 59463 - DNA, 20 bp, Artificial Sequence
  MKO10059463_A_Wfdc13
  gRNA
cctactcagaaagtattgct

SEQ ID NO: 59464 - DNA, 20 bp, Artificial Sequence
  MKO10059464_A_Wfdc15a
  gRNA
tcctgcagttacgccgaaac

SEQ ID NO: 59465 - DNA, 20 bp, Artificial Sequence
  MKO10059465_A_Wfdc15a
  gRNA
cccgtatgcagccgtgataa

SEQ ID NO: 59466 - DNA, 20 bp, Artificial Sequence
  MKO10059466_A_Wfdc15a
  gRNA
cagcctagagcaactaggaa

SEQ ID NO: 59467 - DNA, 20 bp, Artificial Sequence
  MKO10059467_A_Wfdc15b
  gRNA
gggcagggaacccgatactc

SEQ ID NO: 59468 - DNA, 20 bp, Artificial Sequence
  MKO10059468_A_Wfdc15b
  gRNA
ctactgccagatgcgctgtg

SEQ ID NO: 59469 - DNA, 20 bp, Artificial Sequence
  MKO10059469_A_Wfdc15b
  gRNA
cattctgctttgctgtaaca

SEQ ID NO: 59470 - DNA, 20 bp, Artificial Sequence
  MKO10059470_A_Wfdc16
  gRNA
catgcagacgttgccgcaga

SEQ ID NO: 59471 - DNA, 20 bp, Artificial Sequence
  MKO10059471_A_Wfdc16
  gRNA
gctggtcggccgcgtcaggc

SEQ ID NO: 59472 - DNA, 20 bp, Artificial Sequence
  MKO10059472_A_Wfdc16
  gRNA
tcaccgagttcctgattgta

SEQ ID NO: 59473 - DNA, 20 bp, Artificial Sequence
  MKO10059473_A_Wfdc17
  gRNA
tttggggcaagacactacat

SEQ ID NO: 59474 - DNA, 20 bp, Artificial Sequence
  MKO10059474_A_Wfdc17
  gRNA
atttgtgttgatcaatgctc

SEQ ID NO: 59475 - DNA, 20 bp, Artificial Sequence
  MKO10059475_A_Wfdc17
  gRNA
ctacagcacttcatgttgcc

SEQ ID NO: 59476 - DNA, 20 bp, Artificial Sequence
  MKO10059476_A_Wfdc18
  gRNA
acttgtgatgaacgatgcac

SEQ ID NO: 59477 - DNA, 20 bp, Artificial Sequence
  MKO10059477_A_Wfdc18
  gRNA
aagccgcccccacgcagttt

SEQ ID NO: 59478 - DNA, 20 bp, Artificial Sequence
  MKO10059478_A_Wfdc18
  gRNA
tcatgacaatgactactgcc

SEQ ID NO: 59479 - DNA, 20 bp, Artificial Sequence
  MKO10059479_A_Wfdc1
  gRNA
gttaagcaacgccggcaagc

SEQ ID NO: 59480 - DNA, 20 bp, Artificial Sequence
  MKO10059480_A_Wfdc1
  gRNA
gcagcccaaaccacgatggc

SEQ ID NO: 59481 - DNA, 20 bp, Artificial Sequence
  MKO10059481_A_Wfdc1
  gRNA
aagggcgggtcctgcgacag

SEQ ID NO: 59482 - DNA, 20 bp, Artificial Sequence
  MKO10059482_A_Wfdc2
  gRNA
caacctttaggaccgagcga

SEQ ID NO: 59483 - DNA, 20 bp, Artificial Sequence
  MKO10059483_A_Wfdc2
  gRNA
cccggggctaccattaggct

SEQ ID NO: 59484 - DNA, 20 bp, Artificial Sequence
  MKO10059484_A_Wfdc2
  gRNA
tccaacacacagtccgtaat

SEQ ID NO: 59485 - DNA, 20 bp, Artificial Sequence
  MKO10059485_A_Wfdc3
  gRNA
tgcctgccgcggagacatcg

SEQ ID NO: 59486 - DNA, 20 bp, Artificial Sequence
  MKO10059486_A_Wfdc3
  gRNA
tacctccctcgatgtctccg

SEQ ID NO: 59487 - DNA, 20 bp, Artificial Sequence
  MKO10059487_A_Wfdc3
  gRNA
agaactgtcaatccggggaa

SEQ ID NO: 59488 - DNA, 20 bp, Artificial Sequence
  MKO10059488_A_Wfdc5
  gRNA
gtctcggcagtcccggccac

SEQ ID NO: 59489 - DNA, 20 bp, Artificial Sequence
  MKO10059489_A_Wfdc5
  gRNA
aaagtcgggcaaatgccccg

SEQ ID NO: 59490 - DNA, 20 bp, Artificial Sequence
  MKO10059490_A_Wfdc5
  gRNA
gggcacttaccaaagacacg

SEQ ID NO: 59491 - DNA, 20 bp, Artificial Sequence
  MKO10059491_A_Wfdc6a
  gRNA
ctctgtaccgaattcatcta

SEQ ID NO: 59492 - DNA, 20 bp, Artificial Sequence
  MKO10059492_A_Wfdc6a
  gRNA
acaaccaccatagatgaatt

SEQ ID NO: 59493 - DNA, 20 bp, Artificial Sequence
  MKO10059493_A_Wfdc6a
  gRNA
tcttcttgtttggacactgt

SEQ ID NO: 59494 - DNA, 20 bp, Artificial Sequence
  MKO10059494_A_Wfdc6b
  gRNA
aagaccccctctgccagcgc

SEQ ID NO: 59495 - DNA, 20 bp, Artificial Sequence
  MKO10059495_A_Wfdc6b
  gRNA
gctttagattcgaagttgtt

SEQ ID NO: 59496 - DNA, 20 bp, Artificial Sequence
  MKO10059496_A_Wfdc6b
  gRNA
aaatgcctggacctcagcga

SEQ ID NO: 59497 - DNA, 20 bp, Artificial Sequence
  MKO10059497_A_Wfdc8
  gRNA
ctgggcactccattcgcatt

SEQ ID NO: 59498 - DNA, 20 bp, Artificial Sequence
  MKO10059498_A_Wfdc8
  gRNA
accagcgcgtcaaaatgtcc

SEQ ID NO: 59499 - DNA, 20 bp, Artificial Sequence
  MKO10059499_A_Wfdc8
  gRNA
gcaatccatgtcgttcttac

SEQ ID NO: 59500 - DNA, 20 bp, Artificial Sequence
  MKO10059500_A_Wfdc9
  gRNA
gtccagcagcacgtgtaatt

SEQ ID NO: 59501 - DNA, 20 bp, Artificial Sequence
  MKO10059501_A_Wfdc9
  gRNA
gtccaaattacacgtgctgc

SEQ ID NO: 59502 - DNA, 20 bp, Artificial Sequence
  MKO10059502_A_Wfdc9
  gRNA
cgagaacgtgcagaaacacc

SEQ ID NO: 59503 - DNA, 20 bp, Artificial Sequence
  MKO10059503_A_Wfikkn1
  gRNA
gcacgacagggtggtgtgcg

SEQ ID NO: 59504 - DNA, 20 bp, Artificial Sequence
  MKO10059504_A_Wfikkn1
  gRNA
atgcgccctgaccaaatgta

SEQ ID NO: 59505 - DNA, 20 bp, Artificial Sequence
  MKO10059505_A_Wfikkn1
  gRNA
cccggtacactcacgctcac

SEQ ID NO: 59506 - DNA, 20 bp, Artificial Sequence
  MKO10059506_A_Wfikkn2
  gRNA
caaccacgtgcgcggtaatg

SEQ ID NO: 59507 - DNA, 20 bp, Artificial Sequence
  MKO10059507_A_Wfikkn2
  gRNA
ccaccacattaccgcgcacg

SEQ ID NO: 59508 - DNA, 20 bp, Artificial Sequence
  MKO10059508_A_Wfikkn2
  gRNA
acccatccgatactcccatg

SEQ ID NO: 59509 - DNA, 20 bp, Artificial Sequence
  MKO10059509_A_Wfs1
  gRNA
actcacattcactgctgacg

SEQ ID NO: 59510 - DNA, 20 bp, Artificial Sequence
  MKO10059510_A_Wfs1
  gRNA
acagctgctcagccgtagcc

SEQ ID NO: 59511 - DNA, 20 bp, Artificial Sequence
  MKO10059511_A_Wfs1
  gRNA
cggtgcctagctgaccggaa

SEQ ID NO: 59512 - DNA, 20 bp, Artificial Sequence
  MKO10059512_A_Whamm
  gRNA
gacaatccttgtcacgcggt

SEQ ID NO: 59513 - DNA, 20 bp, Artificial Sequence
  MKO10059513_A_Whamm
  gRNA
cagagtccaaccgcgtgaca

SEQ ID NO: 59514 - DNA, 20 bp, Artificial Sequence
  MKO10059514_A_Whamm
  gRNA
ctctaggttcttcaagatca

SEQ ID NO: 59515 - DNA, 20 bp, Artificial Sequence
  MKO10059515_A_Whrn
  gRNA
gcgccgcaacgtcttcgacc

SEQ ID NO: 59516 - DNA, 20 bp, Artificial Sequence
  MKO10059516_A_Whrn
  gRNA
gctttccccgatccgggaac

SEQ ID NO: 59517 - DNA, 20 bp, Artificial Sequence
  MKO10059517_A_Whrn
  gRNA
ggcagcagacgccgcttgac

SEQ ID NO: 59518 - DNA, 20 bp, Artificial Sequence
  MKO10059518_A_Whsc1l1
  gRNA
agtcatctcgatccgaagag

SEQ ID NO: 59519 - DNA, 20 bp, Artificial Sequence
  MKO10059519_A_Whsc1l1
  gRNA
gggtagccatttgtgagcgg

SEQ ID NO: 59520 - DNA, 20 bp, Artificial Sequence
  MKO10059520_A_Whsc1l1
  gRNA
gtatgaagagttactagccg

SEQ ID NO: 59521 - DNA, 20 bp, Artificial Sequence
  MKO10059521_A_Whsc1
  gRNA
gctctcaatctccccgaaat

SEQ ID NO: 59522 - DNA, 20 bp, Artificial Sequence
  MKO10059522_A_Whsc1
  gRNA
ccagttgttgaaacctattt

SEQ ID NO: 59523 - DNA, 20 bp, Artificial Sequence
  MKO10059523_A_Whsc1
  gRNA
ccaagggtaacctgacactt

SEQ ID NO: 59524 - DNA, 20 bp, Artificial Sequence
  MKO10059524_A_Wibg
  gRNA
ctgctttcgccacgtcccgt

SEQ ID NO: 59525 - DNA, 20 bp, Artificial Sequence
  MKO10059525_A_Wibg
  gRNA
gagtcggtcacctgtccccg

SEQ ID NO: 59526 - DNA, 20 bp, Artificial Sequence
  MKO10059526_A_Wibg
  gRNA
cttggagagcactaggtatc

SEQ ID NO: 59527 - DNA, 20 bp, Artificial Sequence
  MKO10059527_A_Wif1
  gRNA
cgggtctgcgagtgtccgga

SEQ ID NO: 59528 - DNA, 20 bp, Artificial Sequence
  MKO10059528_A_Wif1
  gRNA
gcctccatttcgacaccctc

SEQ ID NO: 59529 - DNA, 20 bp, Artificial Sequence
  MKO10059529_A_Wif1
  gRNA
ttcatggagtggatattgac

SEQ ID NO: 59530 - DNA, 20 bp, Artificial Sequence
  MKO10059530_A_Wipf1
  gRNA
ttgtgcagactcgacggaac

SEQ ID NO: 59531 - DNA, 20 bp, Artificial Sequence
  MKO10059531_A_Wipf1
  gRNA
ttccgtcgagtctgcacaac

SEQ ID NO: 59532 - DNA, 20 bp, Artificial Sequence
  MKO10059532_A_Wipf1
  gRNA
ttccaagactcatcgtgtga

SEQ ID NO: 59533 - DNA, 20 bp, Artificial Sequence
  MKO10059533_A_Wipf2
  gRNA
agcactccgatcattaacgt

SEQ ID NO: 59534 - DNA, 20 bp, Artificial Sequence
  MKO10059534_A_Wipf2
  gRNA
ccaccgcccatgatccgaaa

SEQ ID NO: 59535 - DNA, 20 bp, Artificial Sequence
  MKO10059535_A_Wipf2
  gRNA
aaaacgccagggcccgtcag

SEQ ID NO: 59536 - DNA, 20 bp, Artificial Sequence
  MKO10059536_A_Wipf3
  gRNA
ctgccgctgttgtttgcgcc

SEQ ID NO: 59537 - DNA, 20 bp, Artificial Sequence
  MKO10059537_A_Wipf3
  gRNA
tgccttgtcgctcagcgccg

SEQ ID NO: 59538 - DNA, 20 bp, Artificial Sequence
  MKO10059538_A_Wipf3
  gRNA
tccgcaggcgtgttccttgc

SEQ ID NO: 59539 - DNA, 20 bp, Artificial Sequence
  MKO10059539_A_Wipi1
  gRNA
cgctccacgatatacacgtc

SEQ ID NO: 59540 - DNA, 20 bp, Artificial Sequence
  MKO10059540_A_Wipi1
  gRNA
gtccgcagatccctagcgat

SEQ ID NO: 59541 - DNA, 20 bp, Artificial Sequence
  MKO10059541_A_Wipi1
  gRNA
gaagttattgaagaccgtcc

SEQ ID NO: 59542 - DNA, 20 bp, Artificial Sequence
  MKO10059542_A_Wipi2
  gRNA
ctagcggctcattgtgtgtc

SEQ ID NO: 59543 - DNA, 20 bp, Artificial Sequence
  MKO10059543_A_Wipi2
  gRNA
cggacttactaccaacagct

SEQ ID NO: 59544 - DNA, 20 bp, Artificial Sequence
  MKO10059544_A_Wipi2
  gRNA
tatccagggagtgcgagcat

SEQ ID NO: 59545 - DNA, 20 bp, Artificial Sequence
  MKO10059545_A_Wisp1
  gRNA
gatcgcccgaggtacgcaat

SEQ ID NO: 59546 - DNA, 20 bp, Artificial Sequence
  MKO10059546_A_Wisp1
  gRNA
gatggcgtacgctacaccaa

SEQ ID NO: 59547 - DNA, 20 bp, Artificial Sequence
  MKO10059547_A_Wisp1
  gRNA
tggtgtagcgtacgccatcc

SEQ ID NO: 59548 - DNA, 20 bp, Artificial Sequence
  MKO10059548_A_Wisp2
  gRNA
ggcgacgctggatctccagt

SEQ ID NO: 59549 - DNA, 20 bp, Artificial Sequence
  MKO10059549_A_Wisp2
  gRNA
caggggccatcggcagatgc

SEQ ID NO: 59550 - DNA, 20 bp, Artificial Sequence
  MKO10059550_A_Wisp2
  gRNA
gctgtgaggtgaatggccgc

SEQ ID NO: 59551 - DNA, 20 bp, Artificial Sequence
  MKO10059551_A_Wisp3
  gRNA
cacacgcctgtctcgtacct

SEQ ID NO: 59552 - DNA, 20 bp, Artificial Sequence
  MKO10059552_A_Wisp3
  gRNA
ccccggagtagtcacagtac

SEQ ID NO: 59553 - DNA, 20 bp, Artificial Sequence
  MKO10059553_A_Wisp3
  gRNA
aattcccattccgcacgttc

SEQ ID NO: 59554 - DNA, 20 bp, Artificial Sequence
  MKO10059554_A_Wiz
  gRNA
gggcacgcctcgagaagata

SEQ ID NO: 59555 - DNA, 20 bp, Artificial Sequence
  MKO10059555_A_Wiz
  gRNA
tgcagtggctaacttcgacc

SEQ ID NO: 59556 - DNA, 20 bp, Artificial Sequence
  MKO10059556_A_Wiz
  gRNA
cgggcccaccttcgtgactt

SEQ ID NO: 59557 - DNA, 20 bp, Artificial Sequence
  MKO10059557_A_Wls
  gRNA
ccttagtgaaacctccgttt

SEQ ID NO: 59558 - DNA, 20 bp, Artificial Sequence
  MKO10059558_A_Wls
  gRNA
tgacaagatccgtgacatcg

SEQ ID NO: 59559 - DNA, 20 bp, Artificial Sequence
  MKO10059559_A_Wls
  gRNA
cggatcttgtcacacttgtt

SEQ ID NO: 59560 - DNA, 20 bp, Artificial Sequence
  MKO10059560_A_Wnk1
  gRNA
cgactccaatgccaccgcgt

SEQ ID NO: 59561 - DNA, 20 bp, Artificial Sequence
  MKO10059561_A_Wnk1
  gRNA
gacttacactggtcactcga

SEQ ID NO: 59562 - DNA, 20 bp, Artificial Sequence
  MKO10059562_A_Wnk1
  gRNA
ccgccggcacactatggaca

SEQ ID NO: 59563 - DNA, 20 bp, Artificial Sequence
  MKO10059563_A_Wnk2
  gRNA
gggcaagcgatgtatcgtgc

SEQ ID NO: 59564 - DNA, 20 bp, Artificial Sequence
  MKO10059564_A_Wnk2
  gRNA
cgaggaacattacgacgagt

SEQ ID NO: 59565 - DNA, 20 bp, Artificial Sequence
  MKO10059565_A_Wnk2
  gRNA
actccaccacgctgcgccgc

SEQ ID NO: 59566 - DNA, 20 bp, Artificial Sequence
  MKO10059566_A_Wnk3
  gRNA
ggacgcctcctattattcac

SEQ ID NO: 59567 - DNA, 20 bp, Artificial Sequence
  MKO10059567_A_Wnk3
  gRNA
agcaaacgatgtgcgcatta

SEQ ID NO: 59568 - DNA, 20 bp, Artificial Sequence
  MKO10059568_A_Wnk3
  gRNA
atcatagaatcgaactatat

SEQ ID NO: 59569 - DNA, 20 bp, Artificial Sequence
  MKO10059569_A_Wnk4
  gRNA
tcacgtcttgagcgtgcccg

SEQ ID NO: 59570 - DNA, 20 bp, Artificial Sequence
  MKO10059570_A_Wnk4
  gRNA
tccgcacggataagaacgag

SEQ ID NO: 59571 - DNA, 20 bp, Artificial Sequence
  MKO10059571_A_Wnk4
  gRNA
acctctcgttcttatccgtg

SEQ ID NO: 59572 - DNA, 20 bp, Artificial Sequence
  MKO10059572_A_Wnt10a
  gRNA
ggttgcgacgcctccagacg

SEQ ID NO: 59573 - DNA, 20 bp, Artificial Sequence
  MKO10059573_A_Wnt10a
  gRNA
tttacccagagcgcacgcgt

SEQ ID NO: 59574 - DNA, 20 bp, Artificial Sequence
  MKO10059574_A_Wnt10a
  gRNA
tccaccgcgccacgctcatc

SEQ ID NO: 59575 - DNA, 20 bp, Artificial Sequence
  MKO10059575_A_Wnt10b
  gRNA
gagcgccgacgccgtcacgt

SEQ ID NO: 59576 - DNA, 20 bp, Artificial Sequence
  MKO10059576_A_Wnt10b
  gRNA
tccagccccgcctacgtccg

SEQ ID NO: 59577 - DNA, 20 bp, Artificial Sequence
  MKO10059577_A_Wnt10b
  gRNA
cgtgctccggcagacgcgag

SEQ ID NO: 59578 - DNA, 20 bp, Artificial Sequence
  MKO10059578_A_Wnt11
  gRNA
gcgcggctacaacccctaca

SEQ ID NO: 59579 - DNA, 20 bp, Artificial Sequence
  MKO10059579_A_Wnt11
  gRNA
aggccggtgtaccaccttcg

SEQ ID NO: 59580 - DNA, 20 bp, Artificial Sequence
  MKO10059580_A_Wnt11
  gRNA
ccatcagtcacaccatcgcc

SEQ ID NO: 59581 - DNA, 20 bp, Artificial Sequence
  MKO10059581_A_Wnt16
  gRNA
gaagccagttccgacacgag

SEQ ID NO: 59582 - DNA, 20 bp, Artificial Sequence
  MKO10059582_A_Wnt16
  gRNA
tgccgctgccacggagtttc

SEQ ID NO: 59583 - DNA, 20 bp, Artificial Sequence
  MKO10059583_A_Wnt16
  gRNA
cctgctgcctagcatccgcg

SEQ ID NO: 59584 - DNA, 20 bp, Artificial Sequence
  MKO10059584_A_Wnt1
  gRNA
atccgtcaacaggttcgtgg

SEQ ID NO: 59585 - DNA, 20 bp, Artificial Sequence
  MKO10059585_A_Wnt1
  gRNA
cacgcgcacgcagcgcgtca

SEQ ID NO: 59586 - DNA, 20 bp, Artificial Sequence
  MKO10059586_A_Wnt1
  gRNA
tgacgcgctgcgtgcgcgtg

SEQ ID NO: 59587 - DNA, 20 bp, Artificial Sequence
  MKO10059587_A_Wnt2b
  gRNA
ccgagggtatgacacaactc

SEQ ID NO: 59588 - DNA, 20 bp, Artificial Sequence
  MKO10059588_A_Wnt2b
  gRNA
tggcaaagcgaacaccgtaa

SEQ ID NO: 59589 - DNA, 20 bp, Artificial Sequence
  MKO10059589_A_Wnt2b
  gRNA
aacttacacaacaaccgctg

SEQ ID NO: 59590 - DNA, 20 bp, Artificial Sequence
  MKO10059590_A_Wnt2
  gRNA
accagttccgccagcatcgc

SEQ ID NO: 59591 - DNA, 20 bp, Artificial Sequence
  MKO10059591_A_Wnt2
  gRNA
tcatgtaggcgtcgcccagt

SEQ ID NO: 59592 - DNA, 20 bp, Artificial Sequence
  MKO10059592_A_Wnt2
  gRNA
tgtttcaggtagtcgggaat

SEQ ID NO: 59593 - DNA, 20 bp, Artificial Sequence
  MKO10059593_A_Wnt3a
  gRNA
accttgaagtacgtgtaacg

SEQ ID NO: 59594 - DNA, 20 bp, Artificial Sequence
  MKO10059594_A_Wnt3a
  gRNA
gtcacgcgtcccgaaggagc

SEQ ID NO: 59595 - DNA, 20 bp, Artificial Sequence
  MKO10059595_A_Wnt3a
  gRNA
ctcgggagtttgccgatgcc

SEQ ID NO: 59596 - DNA, 20 bp, Artificial Sequence
  MKO10059596_A_Wnt3
  gRNA
tgcagcgaggacgccgactt

SEQ ID NO: 59597 - DNA, 20 bp, Artificial Sequence
  MKO10059597_A_Wnt3
  gRNA
tacagttccaccggcggccc

SEQ ID NO: 59598 - DNA, 20 bp, Artificial Sequence
  MKO10059598_A_Wnt3
  gRNA
cagcccgacttccgtgccat

SEQ ID NO: 59599 - DNA, 20 bp, Artificial Sequence
  MKO10059599_A_Wnt4
  gRNA
tcgtgcctagcacgccactg

SEQ ID NO: 59600 - DNA, 20 bp, Artificial Sequence
  MKO10059600_A_Wnt4
  gRNA
gaggtggagccacgacgcgt

SEQ ID NO: 59601 - DNA, 20 bp, Artificial Sequence
  MKO10059601_A_Wnt4
  gRNA
gtgatggactcagtgcgccg

SEQ ID NO: 59602 - DNA, 20 bp, Artificial Sequence
  MKO10059602_A_Wnt5a
  gRNA
tgcggagacaacatcgacta

SEQ ID NO: 59603 - DNA, 20 bp, Artificial Sequence
  MKO10059603_A_Wnt5a
  gRNA
cttcaactccccgaccacgc

SEQ ID NO: 59604 - DNA, 20 bp, Artificial Sequence
  MKO10059604_A_Wnt5a
  gRNA
acgtacgcggtgagcgcagc

SEQ ID NO: 59605 - DNA, 20 bp, Artificial Sequence
  MKO10059605_A_Wnt5b
  gRNA
ggagaagtacgacagcgccg

SEQ ID NO: 59606 - DNA, 20 bp, Artificial Sequence
  MKO10059606_A_Wnt5b
  gRNA
gccaacaccagtttcgacag

SEQ ID NO: 59607 - DNA, 20 bp, Artificial Sequence
  MKO10059607_A_Wnt5b
  gRNA
tgaccgcttcaagagcgttc

SEQ ID NO: 59608 - DNA, 20 bp, Artificial Sequence
  MKO10059608_A_Wnt6
  gRNA
ttgtgccccgcgcacgtcga

SEQ ID NO: 59609 - DNA, 20 bp, Artificial Sequence
  MKO10059609_A_Wnt6
  gRNA
tgcccggcgaacccgtgcgc

SEQ ID NO: 59610 - DNA, 20 bp, Artificial Sequence
  MKO10059610_A_Wnt6
  gRNA
gtagaggagatccgctcgtc

SEQ ID NO: 59611 - DNA, 20 bp, Artificial Sequence
  MKO10059611_A_Wnt7a
  gRNA
ttgtttcgactggcacgcac

SEQ ID NO: 59612 - DNA, 20 bp, Artificial Sequence
  MKO10059612_A_Wnt7a
  gRNA
ccaggcagcgccgcgctttc

SEQ ID NO: 59613 - DNA, 20 bp, Artificial Sequence
  MKO10059613_A_Wnt7a
  gRNA
gcggtgcttacccgatccgg

SEQ ID NO: 59614 - DNA, 20 bp, Artificial Sequence
  MKO10059614_A_Wnt7b
  gRNA
gagaaaagtcgatgccgtag

SEQ ID NO: 59615 - DNA, 20 bp, Artificial Sequence
  MKO10059615_A_Wnt7b
  gRNA
cacgctacctaagttccgcg

SEQ ID NO: 59616 - DNA, 20 bp, Artificial Sequence
  MKO10059616_A_Wnt7b
  gRNA
tggcccacctcgcggaactt

SEQ ID NO: 59617 - DNA, 20 bp, Artificial Sequence
  MKO10059617_A_Wnt8a
  gRNA
tctgacctacaccgccagtg

SEQ ID NO: 59618 - DNA, 20 bp, Artificial Sequence
  MKO10059618_A_Wnt8a
  gRNA
ctaccttgggacgggttatc

SEQ ID NO: 59619 - DNA, 20 bp, Artificial Sequence
  MKO10059619_A_Wnt8a
  gRNA
caaactgtccacgaagagtc

SEQ ID NO: 59620 - DNA, 20 bp, Artificial Sequence
  MKO10059620_A_Wnt8b
  gRNA
gtgcacgccatcagctctgc

SEQ ID NO: 59621 - DNA, 20 bp, Artificial Sequence
  MKO10059621_A_Wnt8b
  gRNA
tccaacggtcccaagcaaac

SEQ ID NO: 59622 - DNA, 20 bp, Artificial Sequence
  MKO10059622_A_Wnt8b
  gRNA
taccgcttcgaagtccacca

SEQ ID NO: 59623 - DNA, 20 bp, Artificial Sequence
  MKO10059623_A_Wnt9a
  gRNA
acccgacctggaaaaccgcg

SEQ ID NO: 59624 - DNA, 20 bp, Artificial Sequence
  MKO10059624_A_Wnt9a
  gRNA
accagttccgctttgagcgc

SEQ ID NO: 59625 - DNA, 20 bp, Artificial Sequence
  MKO10059625_A_Wnt9a
  gRNA
ggacttccacaacaacctcg

SEQ ID NO: 59626 - DNA, 20 bp, Artificial Sequence
  MKO10059626_A_Wnt9b
  gRNA
ttccagcctgaccggtcgtg

SEQ ID NO: 59627 - DNA, 20 bp, Artificial Sequence
  MKO10059627_A_Wnt9b
  gRNA
ctctccccgtttcgcgagac

SEQ ID NO: 59628 - DNA, 20 bp, Artificial Sequence
  MKO10059628_A_Wnt9b
  gRNA
ccggggctgctgccgtaccc

SEQ ID NO: 59629 - DNA, 20 bp, Artificial Sequence
  MKO10059629_A_Wrap53
  gRNA
ctttcgcgcttacaaccacc

SEQ ID NO: 59630 - DNA, 20 bp, Artificial Sequence
  MKO10059630_A_Wrap53
  gRNA
caggtggttgtaagcgcgaa

SEQ ID NO: 59631 - DNA, 20 bp, Artificial Sequence
  MKO10059631_A_Wrap53
  gRNA
tcaagatacaggaaccgtca

SEQ ID NO: 59632 - DNA, 20 bp, Artificial Sequence
  MKO10059632_A_Wrap73
  gRNA
cactaatcggtactggacac

SEQ ID NO: 59633 - DNA, 20 bp, Artificial Sequence
  MKO10059633_A_Wrap73
  gRNA
tccctggcagctgcgaatca

SEQ ID NO: 59634 - DNA, 20 bp, Artificial Sequence
  MKO10059634_A_Wrap73
  gRNA
ctgcagaccactctatgtgc

SEQ ID NO: 59635 - DNA, 20 bp, Artificial Sequence
  MKO10059635_A_Wrb
  gRNA
caattacctgctactcgagt

SEQ ID NO: 59636 - DNA, 20 bp, Artificial Sequence
  MKO10059636_A_Wrb
  gRNA
cgctgatgatctcgctcatt

SEQ ID NO: 59637 - DNA, 20 bp, Artificial Sequence
  MKO10059637_A_Wrb
  gRNA
acgagtttgccagatacgcc

SEQ ID NO: 59638 - DNA, 20 bp, Artificial Sequence
  MKO10059638_A_Wrnip1
  gRNA
tcagaagggcggcgttgact

SEQ ID NO: 59639 - DNA, 20 bp, Artificial Sequence
  MKO10059639_A_Wrnip1
  gRNA
attgtcccgcactccacgtg

SEQ ID NO: 59640 - DNA, 20 bp, Artificial Sequence
  MKO10059640_A_Wrnip1
  gRNA
gcagtccattcaagcccgtc

SEQ ID NO: 59641 - DNA, 20 bp, Artificial Sequence
  MKO10059641_A_Wrn
  gRNA
tggccgcccatatacaagcc

SEQ ID NO: 59642 - DNA, 20 bp, Artificial Sequence
  MKO10059642_A_Wrn
  gRNA
ggtctggttaaacacgtctt

SEQ ID NO: 59643 - DNA, 20 bp, Artificial Sequence
  MKO10059643_A_Wrn
  gRNA
aatcacgcagaagtttccac

SEQ ID NO: 59644 - DNA, 20 bp, Artificial Sequence
  MKO10059644_A_Wsb1
  gRNA
tcagtgagatcacgtactat

SEQ ID NO: 59645 - DNA, 20 bp, Artificial Sequence
  MKO10059645_A_Wsb1
  gRNA
gcgaccattgtttaatcctg

SEQ ID NO: 59646 - DNA, 20 bp, Artificial Sequence
  MKO10059646_A_Wsb1
  gRNA
ccacagtctataacgtgctc

SEQ ID NO: 59647 - DNA, 20 bp, Artificial Sequence
  MKO10059647_A_Wsb2
  gRNA
tgcccctaccgtgcttattc

SEQ ID NO: 59648 - DNA, 20 bp, Artificial Sequence
  MKO10059648_A_Wsb2
  gRNA
ccttctcgccagacggttcc

SEQ ID NO: 59649 - DNA, 20 bp, Artificial Sequence
  MKO10059649_A_Wsb2
  gRNA
tcagatctctcacgacgtct

SEQ ID NO: 59650 - DNA, 20 bp, Artificial Sequence
  MKO10059650_A_Wscd1
  gRNA
catccttgcaggcaattacc

SEQ ID NO: 59651 - DNA, 20 bp, Artificial Sequence
  MKO10059651_A_Wscd1
  gRNA
gctcaccttgcacgggtgtc

SEQ ID NO: 59652 - DNA, 20 bp, Artificial Sequence
  MKO10059652_A_Wscd1
  gRNA
gggcgcactgccacctaccg

SEQ ID NO: 59653 - DNA, 20 bp, Artificial Sequence
  MKO10059653_A_Wscd2
  gRNA
acagtctgattcgctcacgt

SEQ ID NO: 59654 - DNA, 20 bp, Artificial Sequence
  MKO10059654_A_Wscd2
  gRNA
tcaaccgtctctcagtctac

SEQ ID NO: 59655 - DNA, 20 bp, Artificial Sequence
  MKO10059655_A_Wscd2
  gRNA
actcctccgcgctgcacttc

SEQ ID NO: 59656 - DNA, 20 bp, Artificial Sequence
  MKO10059656_A_Wt1
  gRNA
gaactgcgccgcgtgatgcg

SEQ ID NO: 59657 - DNA, 20 bp, Artificial Sequence
  MKO10059657_A_Wt1
  gRNA
ccacacgccctcgcatcacg

SEQ ID NO: 59658 - DNA, 20 bp, Artificial Sequence
  MKO10059658_A_Wt1
  gRNA
gtgtggcagccatacaccgg

SEQ ID NO: 59659 - DNA, 20 bp, Artificial Sequence
  MKO10059659_A_Wtap
  gRNA
tactcagcaaacgatgtgac

SEQ ID NO: 59660 - DNA, 20 bp, Artificial Sequence
  MKO10059660_A_Wtap
  gRNA
cacgggatgagttaattcta

SEQ ID NO: 59661 - DNA, 20 bp, Artificial Sequence
  MKO10059661_A_Wtap
  gRNA
ctcttgcatctcctgctctt

SEQ ID NO: 59662 - DNA, 20 bp, Artificial Sequence
  MKO10059662_A_Wtip
  gRNA
gcctcgctccgtagatgcca

SEQ ID NO: 59663 - DNA, 20 bp, Artificial Sequence
  MKO10059663_A_Wtip
  gRNA
gctgacaagtgtagcgtgtg

SEQ ID NO: 59664 - DNA, 20 bp, Artificial Sequence
  MKO10059664_A_Wtip
  gRNA
tggcatctacggagcgaggc

SEQ ID NO: 59665 - DNA, 20 bp, Artificial Sequence
  MKO10059665_A_Wwc1
  gRNA
atgaagtaatctccgacctg

SEQ ID NO: 59666 - DNA, 20 bp, Artificial Sequence
  MKO10059666_A_Wwc1
  gRNA
catcagtgatgagttaccgc

SEQ ID NO: 59667 - DNA, 20 bp, Artificial Sequence
  MKO10059667_A_Wwc1
  gRNA
tcccgccgccattgcaccct

SEQ ID NO: 59668 - DNA, 20 bp, Artificial Sequence
  MKO10059668_A_Wwc2
  gRNA
tggccctcgatgaatatgtg

SEQ ID NO: 59669 - DNA, 20 bp, Artificial Sequence
  MKO10059669_A_Wwc2
  gRNA
atccccgacacagtcagcga

SEQ ID NO: 59670 - DNA, 20 bp, Artificial Sequence
  MKO10059670_A_Wwc2
  gRNA
gctcaaggactatctctccg

SEQ ID NO: 59671 - DNA, 20 bp, Artificial Sequence
  MKO10059671_A_Wwox
  gRNA
cttcgtcggattatcgtcca

SEQ ID NO: 59672 - DNA, 20 bp, Artificial Sequence
  MKO10059672_A_Wwox
  gRNA
gctcccgtcgtatctctgtc

SEQ ID NO: 59673 - DNA, 20 bp, Artificial Sequence
  MKO10059673_A_Wwox
  gRNA
cgaggccgtgtcccgcatcc

SEQ ID NO: 59674 - DNA, 20 bp, Artificial Sequence
  MKO10059674_A_Wwp1
  gRNA
gctcaatcactaatccatca

SEQ ID NO: 59675 - DNA, 20 bp, Artificial Sequence
  MKO10059675_A_Wwp1
  gRNA
gagcatctgcctttaaagtg

SEQ ID NO: 59676 - DNA, 20 bp, Artificial Sequence
  MKO10059676_A_Wwp1
  gRNA
atcagctgctcgtcccattt

SEQ ID NO: 59677 - DNA, 20 bp, Artificial Sequence
  MKO10059677_A_Wwp2
  gRNA
gcccagaatcaactcctacg

SEQ ID NO: 59678 - DNA, 20 bp, Artificial Sequence
  MKO10059678_A_Wwp2
  gRNA
gggctggcggttgtgcacct

SEQ ID NO: 59679 - DNA, 20 bp, Artificial Sequence
  MKO10059679_A_Wwp2
  gRNA
gccaccaaagcagtttgtac

SEQ ID NO: 59680 - DNA, 20 bp, Artificial Sequence
  MKO10059680_A_Wwtr1
  gRNA
cacccggggcctcgactagc

SEQ ID NO: 59681 - DNA, 20 bp, Artificial Sequence
  MKO10059681_A_Wwtr1
  gRNA
ggggcttaccgagattcggc

SEQ ID NO: 59682 - DNA, 20 bp, Artificial Sequence
  MKO10059682_A_Wwtr1
  gRNA
gcagtgtcccagccgaatct

SEQ ID NO: 59683 - DNA, 20 bp, Artificial Sequence
  MKO10059683_A_Xab2
  gRNA
ccgctacatcgagttcaaac

SEQ ID NO: 59684 - DNA, 20 bp, Artificial Sequence
  MKO10059684_A_Xab2
  gRNA
tgagtgcccgctcatacaac

SEQ ID NO: 59685 - DNA, 20 bp, Artificial Sequence
  MKO10059685_A_Xab2
  gRNA
tcacacaacactctcgcatc

SEQ ID NO: 59686 - DNA, 20 bp, Artificial Sequence
  MKO10059686_A_Xaf1
  gRNA
ttcggcactgacaacagttc

SEQ ID NO: 59687 - DNA, 20 bp, Artificial Sequence
  MKO10059687_A_Xaf1
  gRNA
caaacactgtgacacgtatt

SEQ ID NO: 59688 - DNA, 20 bp, Artificial Sequence
  MKO10059688_A_Xaf1
  gRNA
agcgcaggcagtgggcctcg

SEQ ID NO: 59689 - DNA, 20 bp, Artificial Sequence
  MKO10059689_A_Xbp1
  gRNA
ccaagcgtgttcttaactcc

SEQ ID NO: 59690 - DNA, 20 bp, Artificial Sequence
  MKO10059690_A_Xbp1
  gRNA
gctgctccagctcgctcatc

SEQ ID NO: 59691 - DNA, 20 bp, Artificial Sequence
  MKO10059691_A_Xbp1
  gRNA
cggccttgtggttgagaacc

SEQ ID NO: 59692 - DNA, 20 bp, Artificial Sequence
  MKO10059692_A_Xcl1
  gRNA
gatcgctgctttcacccatt

SEQ ID NO: 59693 - DNA, 20 bp, Artificial Sequence
  MKO10059693_A_Xcl1
  gRNA
aaatcaagacctatatcatc

SEQ ID NO: 59694 - DNA, 20 bp, Artificial Sequence
  MKO10059694_A_Xcl1
  gRNA
agcttaccttccacaaccca

SEQ ID NO: 59695 - DNA, 20 bp, Artificial Sequence
  MKO10059695_A_Xcr1
  gRNA
taccctccgctgccgtgtgc

SEQ ID NO: 59696 - DNA, 20 bp, Artificial Sequence
  MKO10059696_A_Xcr1
  gRNA
ccctgcatcccgcgtccaga

SEQ ID NO: 59697 - DNA, 20 bp, Artificial Sequence
  MKO10059697_A_Xcr1
  gRNA
cctgacatggactcagagtc

SEQ ID NO: 59698 - DNA, 20 bp, Artificial Sequence
  MKO10059698_A_Xdh
  gRNA
ttctcgatctcctcgacagt

SEQ ID NO: 59699 - DNA, 20 bp, Artificial Sequence
  MKO10059699_A_Xdh
  gRNA
caagcctgagcctactgtcg

SEQ ID NO: 59700 - DNA, 20 bp, Artificial Sequence
  MKO10059700_A_Xdh
  gRNA
gtcatacttggagatcatca

SEQ ID NO: 59701 - DNA, 20 bp, Artificial Sequence
  MKO10059701_A_Xiap
  gRNA
cagcatgcgaagtggtaccc

SEQ ID NO: 59702 - DNA, 20 bp, Artificial Sequence
  MKO10059702_A_Xiap
  gRNA
ccatcgctaactaaaaaaat

SEQ ID NO: 59703 - DNA, 20 bp, Artificial Sequence
  MKO10059703_A_Xiap
  gRNA
cacttcgcatgctgttccca

SEQ ID NO: 59704 - DNA, 20 bp, Artificial Sequence
  MKO10059704_A_Xirp1
  gRNA
ggggcgcccctacatacgga

SEQ ID NO: 59705 - DNA, 20 bp, Artificial Sequence
  MKO10059705_A_Xirp1
  gRNA
cggcctctcgtgatcgccaa

SEQ ID NO: 59706 - DNA, 20 bp, Artificial Sequence
  MKO10059706_A_Xirp1
  gRNA
tcccccgaatcacccgcacc

SEQ ID NO: 59707 - DNA, 20 bp, Artificial Sequence
  MKO10059707_A_Xirp2
  gRNA
caccccgtgaaacagctgcc

SEQ ID NO: 59708 - DNA, 20 bp, Artificial Sequence
  MKO10059708_A_Xirp2
  gRNA
ttacattagccgagaagctg

SEQ ID NO: 59709 - DNA, 20 bp, Artificial Sequence
  MKO10059709_A_Xirp2
  gRNA
tcagatgtgtgcaccgtgcc

SEQ ID NO: 59710 - DNA, 20 bp, Artificial Sequence
  MKO10059710_A_Xkr4
  gRNA
tcccacatccgcgaagtaca

SEQ ID NO: 59711 - DNA, 20 bp, Artificial Sequence
  MKO10059711_A_Xkr4
  gRNA
ttcgtccttccacgccgcag

SEQ ID NO: 59712 - DNA, 20 bp, Artificial Sequence
  MKO10059712_A_Xkr4
  gRNA
atgactgattcttcaatccg

SEQ ID NO: 59713 - DNA, 20 bp, Artificial Sequence
  MKO10059713_A_Xkr5
  gRNA
ctaatattggccacggtaac

SEQ ID NO: 59714 - DNA, 20 bp, Artificial Sequence
  MKO10059714_A_Xkr5
  gRNA
tctgccgagtttaccgtgtg

SEQ ID NO: 59715 - DNA, 20 bp, Artificial Sequence
  MKO10059715_A_Xkr5
  gRNA
agttctgcggatatcccact

SEQ ID NO: 59716 - DNA, 20 bp, Artificial Sequence
  MKO10059716_A_Xkr6
  gRNA
ctggtcccccccgtcggcgg

SEQ ID NO: 59717 - DNA, 20 bp, Artificial Sequence
  MKO10059717_A_Xkr6
  gRNA
gcaacacctcctcgtgctac

SEQ ID NO: 59718 - DNA, 20 bp, Artificial Sequence
  MKO10059718_A_Xkr6
  gRNA
tagcccagtagaagcgccgc

SEQ ID NO: 59719 - DNA, 20 bp, Artificial Sequence
  MKO10059719_A_Xkr7
  gRNA
ctacgactactcggagcccg

SEQ ID NO: 59720 - DNA, 20 bp, Artificial Sequence
  MKO10059720_A_Xkr7
  gRNA
cgccgctccatccgacttcg

SEQ ID NO: 59721 - DNA, 20 bp, Artificial Sequence
  MKO10059721_A_Xkr7
  gRNA
ggcaagtcaatccgaatgac

SEQ ID NO: 59722 - DNA, 20 bp, Artificial Sequence
  MKO10059722_A_Xkr8
  gRNA
cttagacgtggtcgtaggcc

SEQ ID NO: 59723 - DNA, 20 bp, Artificial Sequence
  MKO10059723_A_Xkr8
  gRNA
gtgtctgggggccgcactcg

SEQ ID NO: 59724 - DNA, 20 bp, Artificial Sequence
  MKO10059724_A_Xkr8
  gRNA
aaggacgcgagagctgcgaa

SEQ ID NO: 59725 - DNA, 20 bp, Artificial Sequence
  MKO10059725_A_Xkr9
  gRNA
cccgataaaaatcttctccg

SEQ ID NO: 59726 - DNA, 20 bp, Artificial Sequence
  MKO10059726_A_Xkr9
  gRNA
agaactatggtggcactaat

SEQ ID NO: 59727 - DNA, 20 bp, Artificial Sequence
  MKO10059727_A_Xkr9
  gRNA
ccaccgacttgagcatgctc

SEQ ID NO: 59728 - DNA, 20 bp, Artificial Sequence
  MKO10059728_A_Xkrx
  gRNA
attgcacagggtagccccgt

SEQ ID NO: 59729 - DNA, 20 bp, Artificial Sequence
  MKO10059729_A_Xkrx
  gRNA
gggccactccatccggaccc

SEQ ID NO: 59730 - DNA, 20 bp, Artificial Sequence
  MKO10059730_A_Xkrx
  gRNA
aatctgtgacatacgtttgt

SEQ ID NO: 59731 - DNA, 20 bp, Artificial Sequence
  MKO10059731_A_Xk
  gRNA
gaacacggacgctatcaccg

SEQ ID NO: 59732 - DNA, 20 bp, Artificial Sequence
  MKO10059732_A_Xk
  gRNA
taccagtaaagtgatccccg

SEQ ID NO: 59733 - DNA, 20 bp, Artificial Sequence
  MKO10059733_A_Xk
  gRNA
cctcagccgcgatcgcccac

SEQ ID NO: 59734 - DNA, 20 bp, Artificial Sequence
  MKO10059734_A_Xlr3a
  gRNA
acccctacctctgttcacac

SEQ ID NO: 59735 - DNA, 20 bp, Artificial Sequence
  MKO10059735_A_Xlr3a
  gRNA
aacagagaagtccttgatgc

SEQ ID NO: 59736 - DNA, 20 bp, Artificial Sequence
  MKO10059736_A_Xlr3a
  gRNA
ctgttgcctctctgttcctg

SEQ ID NO: 59737 - DNA, 20 bp, Artificial Sequence
  MKO10059737_A_Xlr3b
  gRNA
ctgttgcctctctgttcctg

SEQ ID NO: 59738 - DNA, 20 bp, Artificial Sequence
  MKO10059738_A_Xlr3b
  gRNA
aacagagaagtccttgatgc

SEQ ID NO: 59739 - DNA, 20 bp, Artificial Sequence
  MKO10059739_A_Xlr3b
  gRNA
agaacataccttcgaattct

SEQ ID NO: 59740 - DNA, 20 bp, Artificial Sequence
  MKO10059740_A_Xlr3c
  gRNA
gccacgtaacaaagttcttc

SEQ ID NO: 59741 - DNA, 20 bp, Artificial Sequence
  MKO10059741_A_Xlr3c
  gRNA
tcctgaagaactttgttacg

SEQ ID NO: 59742 - DNA, 20 bp, Artificial Sequence
  MKO10059742_A_Xlr3c
  gRNA
aacagagaagtccttgatgc

SEQ ID NO: 59743 - DNA, 20 bp, Artificial Sequence
  MKO10059743_A_Xlr4a
  gRNA
attcaatgcaggaaacaatc

SEQ ID NO: 59744 - DNA, 20 bp, Artificial Sequence
  MKO10059744_A_Xlr4a
  gRNA
gctttggtccacctgttcca

SEQ ID NO: 59745 - DNA, 20 bp, Artificial Sequence
  MKO10059745_A_Xlr4a
  gRNA
gtaagaaaactctaaatgaa

SEQ ID NO: 59746 - DNA, 20 bp, Artificial Sequence
  MKO10059746_A_Xlr4b
  gRNA
gctttggtccacctgttcca

SEQ ID NO: 59747 - DNA, 20 bp, Artificial Sequence
  MKO10059747_A_Xlr4b
  gRNA
attcaatgcaggaaacaatc

SEQ ID NO: 59748 - DNA, 20 bp, Artificial Sequence
  MKO10059748_A_Xlr4b
  gRNA
agtcttaccttcgctcatgc

SEQ ID NO: 59749 - DNA, 20 bp, Artificial Sequence
  MKO10059749_A_Xlr4c
  gRNA
attcaatgcaggaaacaatc

SEQ ID NO: 59750 - DNA, 20 bp, Artificial Sequence
  MKO10059750_A_Xlr4c
  gRNA
gctttggtccacctgttcca

SEQ ID NO: 59751 - DNA, 20 bp, Artificial Sequence
  MKO10059751_A_Xlr4c
  gRNA
gtaagaaaactctaaatgaa

SEQ ID NO: 59752 - DNA, 20 bp, Artificial Sequence
  MKO10059752_A_Xlr5a
  gRNA
gcagctgacaaaccagcagt

SEQ ID NO: 59753 - DNA, 20 bp, Artificial Sequence
  MKO10059753_A_Xlr5a
  gRNA
gcatgtctgatcctgaagaa

SEQ ID NO: 59754 - DNA, 20 bp, Artificial Sequence
  MKO10059754_A_Xlr5a
  gRNA
gcctgttcagaagaagatgc

SEQ ID NO: 59755 - DNA, 20 bp, Artificial Sequence
  MKO10059755_A_Xlr5b
  gRNA
gcatgtctgatcctgaagaa

SEQ ID NO: 59756 - DNA, 20 bp, Artificial Sequence
  MKO10059756_A_Xlr5b
  gRNA
gcagctgacaaaccagcagt

SEQ ID NO: 59757 - DNA, 20 bp, Artificial Sequence
  MKO10059757_A_Xlr5b
  gRNA
tcctgcatcttcttctgaac

SEQ ID NO: 59758 - DNA, 20 bp, Artificial Sequence
  MKO10059758_A_Xlr5c
  gRNA
gcagctgacaaaccagcagt

SEQ ID NO: 59759 - DNA, 20 bp, Artificial Sequence
  MKO10059759_A_Xlr5c
  gRNA
gcatgtctgatcctgaagaa

SEQ ID NO: 59760 - DNA, 20 bp, Artificial Sequence
  MKO10059760_A_Xlr5c
  gRNA
gcctgttcagaagaagatgc

SEQ ID NO: 59761 - DNA, 20 bp, Artificial Sequence
  MKO10059761_A_Xlr
  gRNA
acgtgaaattagaacaactt

SEQ ID NO: 59762 - DNA, 20 bp, Artificial Sequence
  MKO10059762_A_Xlr
  gRNA
ttctcatcatcacgagttac

SEQ ID NO: 59763 - DNA, 20 bp, Artificial Sequence
  MKO10059763_A_Xlr
  gRNA
gcaaatcctgaagaagtagt

SEQ ID NO: 59764 - DNA, 20 bp, Artificial Sequence
  MKO10059764_A_Xndr-trpc2
  gRNA
tgagcggttcttccccgact

SEQ ID NO: 59765 - DNA, 20 bp, Artificial Sequence
  MKO10059765_A_Xndr-trpc2
  gRNA
ggtcaatcgaagtcgatccc

SEQ ID NO: 59766 - DNA, 20 bp, Artificial Sequence
  MKO10059766_A_Xndr-trpc2
  gRNA
aacgcactcgtaggaaggcc

SEQ ID NO: 59767 - DNA, 20 bp, Artificial Sequence
  MKO10059767_A_Xndr
  gRNA
agttcgtaaactttacgtcg

SEQ ID NO: 59768 - DNA, 20 bp, Artificial Sequence
  MKO10059768_A_Xndr
  gRNA
cgacgtaaagtttacgaact

SEQ ID NO: 59769 - DNA, 20 bp, Artificial Sequence
  MKO10059769_A_Xndr
  gRNA
tgagcggttcttccccgact

SEQ ID NO: 59770 - DNA, 20 bp, Artificial Sequence
  MKO10059770_A_Xpa
  gRNA
ttcacaaggaacctgagcgc

SEQ ID NO: 59771 - DNA, 20 bp, Artificial Sequence
  MKO10059771_A_Xpa
  gRNA
cacctgcagctgtcacacgt

SEQ ID NO: 59772 - DNA, 20 bp, Artificial Sequence
  MKO10059772_A_Xpa
  gRNA
ttctcttgcagggcccgtca

SEQ ID NO: 59773 - DNA, 20 bp, Artificial Sequence
  MKO10059773_A_Xpc
  gRNA
agtttgagacatacctgcgg

SEQ ID NO: 59774 - DNA, 20 bp, Artificial Sequence
  MKO10059774_A_Xpc
  gRNA
aacgcttcatcatcctccgc

SEQ ID NO: 59775 - DNA, 20 bp, Artificial Sequence
  MKO10059775_A_Xpc
  gRNA
aaggaggaagcactcagcga

SEQ ID NO: 59776 - DNA, 20 bp, Artificial Sequence
  MKO10059776_A_Xpnpep1
  gRNA
ctcttcaagggcgaatcgcc

SEQ ID NO: 59777 - DNA, 20 bp, Artificial Sequence
  MKO10059777_A_Xpnpep1
  gRNA
gtagcgcccgtcagtccaca

SEQ ID NO: 59778 - DNA, 20 bp, Artificial Sequence
  MKO10059778_A_Xpnpep1
  gRNA
aaacgccctccgacagtcac

SEQ ID NO: 59779 - DNA, 20 bp, Artificial Sequence
  MKO10059779_A_Xpnpep2
  gRNA
ctgagtccagtaacgactat

SEQ ID NO: 59780 - DNA, 20 bp, Artificial Sequence
  MKO10059780_A_Xpnpep2
  gRNA
cgatagtcgttactggactc

SEQ ID NO: 59781 - DNA, 20 bp, Artificial Sequence
  MKO10059781_A_Xpnpep2
  gRNA
aagccgcattgttgtattga

SEQ ID NO: 59782 - DNA, 20 bp, Artificial Sequence
  MKO10059782_A_Xpnpep3
  gRNA
tgaagcctttctttacgcga

SEQ ID NO: 59783 - DNA, 20 bp, Artificial Sequence
  MKO10059783_A_Xpnpep3
  gRNA
gctcaccttcgcgtaaagaa

SEQ ID NO: 59784 - DNA, 20 bp, Artificial Sequence
  MKO10059784_A_Xpnpep3
  gRNA
ggcttcatccactccggtta

SEQ ID NO: 59785 - DNA, 20 bp, Artificial Sequence
  MKO10059785_A_Xpo1
  gRNA
tcgacccgtgtccaagcatc

SEQ ID NO: 59786 - DNA, 20 bp, Artificial Sequence
  MKO10059786_A_Xpo1
  gRNA
ctctgacccaacttgtgtag

SEQ ID NO: 59787 - DNA, 20 bp, Artificial Sequence
  MKO10059787_A_Xpo1
  gRNA
ttccttacctctacacaagt

SEQ ID NO: 59788 - DNA, 20 bp, Artificial Sequence
  MKO10059788_A_Xpo4
  gRNA
aaccgcttccattatagctg

SEQ ID NO: 59789 - DNA, 20 bp, Artificial Sequence
  MKO10059789_A_Xpo4
  gRNA
gcgctgctcattactgacca

SEQ ID NO: 59790 - DNA, 20 bp, Artificial Sequence
  MKO10059790_A_Xpo4
  gRNA
tgtccgagagtgggttctct

SEQ ID NO: 59791 - DNA, 20 bp, Artificial Sequence
  MKO10059791_A_Xpo5
  gRNA
gatgttcatccttctccgac

SEQ ID NO: 59792 - DNA, 20 bp, Artificial Sequence
  MKO10059792_A_Xpo5
  gRNA
atggaacagcatgtcccgat

SEQ ID NO: 59793 - DNA, 20 bp, Artificial Sequence
  MKO10059793_A_Xpo5
  gRNA
tcagatagaccttctccaat

SEQ ID NO: 59794 - DNA, 20 bp, Artificial Sequence
  MKO10059794_A_Xpo6
  gRNA
agagctagcttgtccacgtg

SEQ ID NO: 59795 - DNA, 20 bp, Artificial Sequence
  MKO10059795_A_Xpo6
  gRNA
catggaaaaattccgtcatc

SEQ ID NO: 59796 - DNA, 20 bp, Artificial Sequence
  MKO10059796_A_Xpo6
  gRNA
tgcaaagttatcgttgatat

SEQ ID NO: 59797 - DNA, 20 bp, Artificial Sequence
  MKO10059797_A_Xpo7
  gRNA
agatacaaccactcgactgc

SEQ ID NO: 59798 - DNA, 20 bp, Artificial Sequence
  MKO10059798_A_Xpo7
  gRNA
gtttgtccgagacacgagct

SEQ ID NO: 59799 - DNA, 20 bp, Artificial Sequence
  MKO10059799_A_Xpo7
  gRNA
acgcaatcacagacgtcaca

SEQ ID NO: 59800 - DNA, 20 bp, Artificial Sequence
  MKO10059800_A_Xpot
  gRNA
gaagccacgtctgttgtgat

SEQ ID NO: 59801 - DNA, 20 bp, Artificial Sequence
  MKO10059801_A_Xpot
  gRNA
ctctggcacagaagacatac

SEQ ID NO: 59802 - DNA, 20 bp, Artificial Sequence
  MKO10059802_A_Xpot
  gRNA
taaagatttccccagatgcc

SEQ ID NO: 59803 - DNA, 20 bp, Artificial Sequence
  MKO10059803_A_Xpr1
  gRNA
ggatatgctgtattcagctc

SEQ ID NO: 59804 - DNA, 20 bp, Artificial Sequence
  MKO10059804_A_Xpr1
  gRNA
cacgctcctcgtgggacagg

SEQ ID NO: 59805 - DNA, 20 bp, Artificial Sequence
  MKO10059805_A_Xpr1
  gRNA
actgaggtagaactcgctga

SEQ ID NO: 59806 - DNA, 20 bp, Artificial Sequence
  MKO10059806_A_Xrcc1
  gRNA
cggacacttaccggaagtgg

SEQ ID NO: 59807 - DNA, 20 bp, Artificial Sequence
  MKO10059807_A_Xrcc1
  gRNA
caggtccaaaaatgcgaaca

SEQ ID NO: 59808 - DNA, 20 bp, Artificial Sequence
  MKO10059808_A_Xrcc1
  gRNA
caatgatggctcggcctttg

SEQ ID NO: 59809 - DNA, 20 bp, Artificial Sequence
  MKO10059809_A_Xrcc2
  gRNA
cgagccgtagcatgtcaaag

SEQ ID NO: 59810 - DNA, 20 bp, Artificial Sequence
  MKO10059810_A_Xrcc2
  gRNA
gtgtagcgactttcgcagag

SEQ ID NO: 59811 - DNA, 20 bp, Artificial Sequence
  MKO10059811_A_Xrcc2
  gRNA
gctcttggcctcgtcgtccc

SEQ ID NO: 59812 - DNA, 20 bp, Artificial Sequence
  MKO10059812_A_Xrcc3
  gRNA
gggccatgcccctcgacagc

SEQ ID NO: 59813 - DNA, 20 bp, Artificial Sequence
  MKO10059813_A_Xrcc3
  gRNA
actccggaccagacttgcag

SEQ ID NO: 59814 - DNA, 20 bp, Artificial Sequence
  MKO10059814_A_Xrcc3
  gRNA
gctgcggacagacgcgcctg

SEQ ID NO: 59815 - DNA, 20 bp, Artificial Sequence
  MKO10059815_A_Xrcc4
  gRNA
tcataaagcccatgctcctc

SEQ ID NO: 59816 - DNA, 20 bp, Artificial Sequence
  MKO10059816_A_Xrcc4
  gRNA
agatctcatttgttactgcc

SEQ ID NO: 59817 - DNA, 20 bp, Artificial Sequence
  MKO10059817_A_Xrcc4
  gRNA
gccgagactccttagaaaag

SEQ ID NO: 59818 - DNA, 20 bp, Artificial Sequence
  MKO10059818_A_Xrcc5
  gRNA
gactatgtttgtccaacgac

SEQ ID NO: 59819 - DNA, 20 bp, Artificial Sequence
  MKO10059819_A_Xrcc5
  gRNA
ggacgccctgattgtgtgca

SEQ ID NO: 59820 - DNA, 20 bp, Artificial Sequence
  MKO10059820_A_Xrcc5
  gRNA
tacaaattataacgtccagt

SEQ ID NO: 59821 - DNA, 20 bp, Artificial Sequence
  MKO10059821_A_Xrcc6bp1
  gRNA
ctttgatgcgtctacgtctc

SEQ ID NO: 59822 - DNA, 20 bp, Artificial Sequence
  MKO10059822_A_Xrcc6bp1
  gRNA
tgcccatgtgcgcctgattc

SEQ ID NO: 59823 - DNA, 20 bp, Artificial Sequence
  MKO10059823_A_Xrcc6bp1
  gRNA
caaacgcgtgaatgagctcg

SEQ ID NO: 59824 - DNA, 20 bp, Artificial Sequence
  MKO10059824_A_Xrcc6
  gRNA
gctagagctcgaccagttta

SEQ ID NO: 59825 - DNA, 20 bp, Artificial Sequence
  MKO10059825_A_Xrcc6
  gRNA
ctttagcactgtcacggcca

SEQ ID NO: 59826 - DNA, 20 bp, Artificial Sequence
  MKO10059826_A_Xrcc6
  gRNA
ttgatgtatccgtgttctac

SEQ ID NO: 59827 - DNA, 20 bp, Artificial Sequence
  MKO10059827_A_Xrn1
  gRNA
taaaacgcctcccgcgttgc

SEQ ID NO: 59828 - DNA, 20 bp, Artificial Sequence
  MKO10059828_A_Xrn1
  gRNA
tttacctggcgtaatacagt

SEQ ID NO: 59829 - DNA, 20 bp, Artificial Sequence
  MKO10059829_A_Xrn1
  gRNA
gattccaactgtattacgcc

SEQ ID NO: 59830 - DNA, 20 bp, Artificial Sequence
  MKO10059830_A_Xrn2
  gRNA
ttaggtttactggcatcaac

SEQ ID NO: 59831 - DNA, 20 bp, Artificial Sequence
  MKO10059831_A_Xrn2
  gRNA
aaatgaatcagcagcgttca

SEQ ID NO: 59832 - DNA, 20 bp, Artificial Sequence
  MKO10059832_A_Xrn2
  gRNA
gccatgtagagaagtcttct

SEQ ID NO: 59833 - DNA, 20 bp, Artificial Sequence
  MKO10059833_A_Xrra1
  gRNA
ctttgcactatcaacgtgag

SEQ ID NO: 59834 - DNA, 20 bp, Artificial Sequence
  MKO10059834_A_Xrra1
  gRNA
gcagctaaggcatccaccga

SEQ ID NO: 59835 - DNA, 20 bp, Artificial Sequence
  MKO10059835_A_Xrra1
  gRNA
aagaaggtttctttcgatac

SEQ ID NO: 59836 - DNA, 20 bp, Artificial Sequence
  MKO10059836_A_Xxylt1
  gRNA
gctgcgcctcgccaaattcg

SEQ ID NO: 59837 - DNA, 20 bp, Artificial Sequence
  MKO10059837_A_Xxylt1
  gRNA
cacctcgtgcgcctcgaatt

SEQ ID NO: 59838 - DNA, 20 bp, Artificial Sequence
  MKO10059838_A_Xxylt1
  gRNA
agataagctcttccccgtcg

SEQ ID NO: 59839 - DNA, 20 bp, Artificial Sequence
  MKO10059839_A_Xylb
  gRNA
gtacctacccaaattccgga

SEQ ID NO: 59840 - DNA, 20 bp, Artificial Sequence
  MKO10059840_A_Xylb
  gRNA
agagttgaacgtcttctatg

SEQ ID NO: 59841 - DNA, 20 bp, Artificial Sequence
  MKO10059841_A_Xylb
  gRNA
tctcaagttctagccttatc

SEQ ID NO: 59842 - DNA, 20 bp, Artificial Sequence
  MKO10059842_A_Xylt1
  gRNA
aacctactgtcgccacaagc

SEQ ID NO: 59843 - DNA, 20 bp, Artificial Sequence
  MKO10059843_A_Xylt1
  gRNA
taagtccaagcattgtcgcc

SEQ ID NO: 59844 - DNA, 20 bp, Artificial Sequence
  MKO10059844_A_Xylt1
  gRNA
cacttgccgatgcaggtaat

SEQ ID NO: 59845 - DNA, 20 bp, Artificial Sequence
  MKO10059845_A_Xylt2
  gRNA
cccgcacattctcgtagtgc

SEQ ID NO: 59846 - DNA, 20 bp, Artificial Sequence
  MKO10059846_A_Xylt2
  gRNA
gtgccactgactatccaacg

SEQ ID NO: 59847 - DNA, 20 bp, Artificial Sequence
  MKO10059847_A_Xylt2
  gRNA
ccgccgctccgctcaggttc

SEQ ID NO: 59848 - DNA, 20 bp, Artificial Sequence
  MKO10059848_A_Yae1d1
  gRNA
gttccgtcagaccaagcgaa

SEQ ID NO: 59849 - DNA, 20 bp, Artificial Sequence
  MKO10059849_A_Yae1d1
  gRNA
cgttactgtcacctttcgct

SEQ ID NO: 59850 - DNA, 20 bp, Artificial Sequence
  MKO10059850_A_Yae1d1
  gRNA
tctccagggctcgcgttctc

SEQ ID NO: 59851 - DNA, 20 bp, Artificial Sequence
  MKO10059851_A_Yaf2
  gRNA
ggaggcttctccccgcggcg

SEQ ID NO: 59852 - DNA, 20 bp, Artificial Sequence
  MKO10059852_A_Yaf2
  gRNA
gtgctgatcgccagcagcgc

SEQ ID NO: 59853 - DNA, 20 bp, Artificial Sequence
  MKO10059853_A_Yaf2
  gRNA
gcggcagccgaagcccgcct

SEQ ID NO: 59854 - DNA, 20 bp, Artificial Sequence
  MKO10059854_A_Yap1
  gRNA
atacccttacctgtcgcgag

SEQ ID NO: 59855 - DNA, 20 bp, Artificial Sequence
  MKO10059855_A_Yap1
  gRNA
ccaaggctggaccctcgttt

SEQ ID NO: 59856 - DNA, 20 bp, Artificial Sequence
  MKO10059856_A_Yap1
  gRNA
gcccaagtcccactcgcgac

SEQ ID NO: 59857 - DNA, 20 bp, Artificial Sequence
  MKO10059857_A_Yars2
  gRNA
ccttaccctcgagggccatc

SEQ ID NO: 59858 - DNA, 20 bp, Artificial Sequence
  MKO10059858_A_Yars2
  gRNA
aggtatcggatgataacaga

SEQ ID NO: 59859 - DNA, 20 bp, Artificial Sequence
  MKO10059859_A_Yars2
  gRNA
tgcatgatgtgatcgatctc

SEQ ID NO: 59860 - DNA, 20 bp, Artificial Sequence
  MKO10059860_A_Yars
  gRNA
tctgatcaacaccgccgaac

SEQ ID NO: 59861 - DNA, 20 bp, Artificial Sequence
  MKO10059861_A_Yars
  gRNA
ttaaaagtagacgcccagtt

SEQ ID NO: 59862 - DNA, 20 bp, Artificial Sequence
  MKO10059862_A_Yars
  gRNA
ggagagtattggcgtgccct

SEQ ID NO: 59863 - DNA, 20 bp, Artificial Sequence
  MKO10059863_A_Ybey
  gRNA
ggagcctagctcccgtgtag

SEQ ID NO: 59864 - DNA, 20 bp, Artificial Sequence
  MKO10059864_A_Ybey
  gRNA
ggaggagctgagccgctaca

SEQ ID NO: 59865 - DNA, 20 bp, Artificial Sequence
  MKO10059865_A_Ybey
  gRNA
tctcccagattataatcatc

SEQ ID NO: 59866 - DNA, 20 bp, Artificial Sequence
  MKO10059866_A_Ybx1
  gRNA
aacaacgccggccctatcgc

SEQ ID NO: 59867 - DNA, 20 bp, Artificial Sequence
  MKO10059867_A_Ybx1
  gRNA
gtcttacaggaatgacacca

SEQ ID NO: 59868 - DNA, 20 bp, Artificial Sequence
  MKO10059868_A_Ybx1
  gRNA
cagtcaaatggttcaatgta

SEQ ID NO: 59869 - DNA, 20 bp, Artificial Sequence
  MKO10059869_A_Ybx2
  gRNA
cggggcagcgacctagacga

SEQ ID NO: 59870 - DNA, 20 bp, Artificial Sequence
  MKO10059870_A_Ybx2
  gRNA
ctccggaacctacgtcgatt

SEQ ID NO: 59871 - DNA, 20 bp, Artificial Sequence
  MKO10059871_A_Ybx2
  gRNA
tgatgaatccgtaaccattc

SEQ ID NO: 59872 - DNA, 20 bp, Artificial Sequence
  MKO10059872_A_Ybx3
  gRNA
ccgccgggctcttaggcgcg

SEQ ID NO: 59873 - DNA, 20 bp, Artificial Sequence
  MKO10059873_A_Ybx3
  gRNA
cggcggcaccacgctcccgc

SEQ ID NO: 59874 - DNA, 20 bp, Artificial Sequence
  MKO10059874_A_Ybx3
  gRNA
acgcaagtatctgcgcagtg

SEQ ID NO: 59875 - DNA, 20 bp, Artificial Sequence
  MKO10059875_A_Ydjc
  gRNA
ccaccggacggccctcagac

SEQ ID NO: 59876 - DNA, 20 bp, Artificial Sequence
  MKO10059876_A_Ydjc
  gRNA
cgcgatgcccgggccgcaat

SEQ ID NO: 59877 - DNA, 20 bp, Artificial Sequence
  MKO10059877_A_Ydjc
  gRNA
gccgaggcgctgcaggcgta

SEQ ID NO: 59878 - DNA, 20 bp, Artificial Sequence
  MKO10059878_A_Yeats2
  gRNA
cattccgtagttcccgtttg

SEQ ID NO: 59879 - DNA, 20 bp, Artificial Sequence
  MKO10059879_A_Yeats2
  gRNA
ggaacagcgaccgagccgaa

SEQ ID NO: 59880 - DNA, 20 bp, Artificial Sequence
  MKO10059880_A_Yeats2
  gRNA
gcaaactattatgcctccgc

SEQ ID NO: 59881 - DNA, 20 bp, Artificial Sequence
  MKO10059881_A_Yeats4
  gRNA
atcgttaagccaatcgttta

SEQ ID NO: 59882 - DNA, 20 bp, Artificial Sequence
  MKO10059882_A_Yeats4
  gRNA
ataaacgattggcttaacga

SEQ ID NO: 59883 - DNA, 20 bp, Artificial Sequence
  MKO10059883_A_Yeats4
  gRNA
gttactcacaggtctctcgt

SEQ ID NO: 59884 - DNA, 20 bp, Artificial Sequence
  MKO10059884_A_Yes1
  gRNA
gcaggcactacgtaattgct

SEQ ID NO: 59885 - DNA, 20 bp, Artificial Sequence
  MKO10059885_A_Yes1
  gRNA
ccctcacctcatcccaatca

SEQ ID NO: 59886 - DNA, 20 bp, Artificial Sequence
  MKO10059886_A_Yes1
  gRNA
aggtggtgtcactatatttg

SEQ ID NO: 59887 - DNA, 20 bp, Artificial Sequence
  MKO10059887_A_Yif1a
  gRNA
ccacttgtatcatcgaagag

SEQ ID NO: 59888 - DNA, 20 bp, Artificial Sequence
  MKO10059888_A_Yif1a
  gRNA
ccactcttcgatgatacaag

SEQ ID NO: 59889 - DNA, 20 bp, Artificial Sequence
  MKO10059889_A_Yif1a
  gRNA
ccctagcttcttagcgacat

SEQ ID NO: 59890 - DNA, 20 bp, Artificial Sequence
  MKO10059890_A_Yif1b
  gRNA
cccgtagaccatcgccatgt

SEQ ID NO: 59891 - DNA, 20 bp, Artificial Sequence
  MKO10059891_A_Yif1b
  gRNA
atctaaagcatgcacgcgac

SEQ ID NO: 59892 - DNA, 20 bp, Artificial Sequence
  MKO10059892_A_Yif1b
  gRNA
ccctatgtccaacatggcga

SEQ ID NO: 59893 - DNA, 20 bp, Artificial Sequence
  MKO10059893_A_Yipf1
  gRNA
caacgactctgacgagaccg

SEQ ID NO: 59894 - DNA, 20 bp, Artificial Sequence
  MKO10059894_A_Yipf1
  gRNA
ttcattccagaatttggcga

SEQ ID NO: 59895 - DNA, 20 bp, Artificial Sequence
  MKO10059895_A_Yipf1
  gRNA
cgcagcaatccagatctcta

SEQ ID NO: 59896 - DNA, 20 bp, Artificial Sequence
  MKO10059896_A_Yipf2
  gRNA
agaaaccgtcccgacctata

SEQ ID NO: 59897 - DNA, 20 bp, Artificial Sequence
  MKO10059897_A_Yipf2
  gRNA
gatggtgccgcacaaagttg

SEQ ID NO: 59898 - DNA, 20 bp, Artificial Sequence
  MKO10059898_A_Yipf2
  gRNA
tcggcttacccttgtggaac

SEQ ID NO: 59899 - DNA, 20 bp, Artificial Sequence
  MKO10059899_A_Yipf3
  gRNA
aaagtcgcgggcgagctcta

SEQ ID NO: 59900 - DNA, 20 bp, Artificial Sequence
  MKO10059900_A_Yipf3
  gRNA
taaaggacaactgagccggc

SEQ ID NO: 59901 - DNA, 20 bp, Artificial Sequence
  MKO10059901_A_Yipf3
  gRNA
gtccatgatccctatcaaga

SEQ ID NO: 59902 - DNA, 20 bp, Artificial Sequence
  MKO10059902_A_Yipf4
  gRNA
tgaaatctccgcttacaccg

SEQ ID NO: 59903 - DNA, 20 bp, Artificial Sequence
  MKO10059903_A_Yipf4
  gRNA
tctgatgccaatgccatcgc

SEQ ID NO: 59904 - DNA, 20 bp, Artificial Sequence
  MKO10059904_A_Yipf4
  gRNA
tgtctattaaaacccagcga

SEQ ID NO: 59905 - DNA, 20 bp, Artificial Sequence
  MKO10059905_A_Yipf5
  gRNA
gtatacgggatcagtgcgat

SEQ ID NO: 59906 - DNA, 20 bp, Artificial Sequence
  MKO10059906_A_Yipf5
  gRNA
gaggagccccctctgttaga

SEQ ID NO: 59907 - DNA, 20 bp, Artificial Sequence
  MKO10059907_A_Yipf5
  gRNA
ctaacttaccagtaacagtg

SEQ ID NO: 59908 - DNA, 20 bp, Artificial Sequence
  MKO10059908_A_Yipf6
  gRNA
atgttcttgagcacgagctc

SEQ ID NO: 59909 - DNA, 20 bp, Artificial Sequence
  MKO10059909_A_Yipf6
  gRNA
acttacaatggtccgacgaa

SEQ ID NO: 59910 - DNA, 20 bp, Artificial Sequence
  MKO10059910_A_Yipf6
  gRNA
acaaatacttctgcgaattc

SEQ ID NO: 59911 - DNA, 20 bp, Artificial Sequence
  MKO10059911_A_Yipf7
  gRNA
gtatacggcatgagtgccat

SEQ ID NO: 59912 - DNA, 20 bp, Artificial Sequence
  MKO10059912_A_Yipf7
  gRNA
agctgccctccgtaatctga

SEQ ID NO: 59913 - DNA, 20 bp, Artificial Sequence
  MKO10059913_A_Yipf7
  gRNA
cattgggtttagcaccgtca

SEQ ID NO: 59914 - DNA, 20 bp, Artificial Sequence
  MKO10059914_A_Ykt6
  gRNA
ccggctacaatccagtacac

SEQ ID NO: 59915 - DNA, 20 bp, Artificial Sequence
  MKO10059915_A_Ykt6
  gRNA
ggacgagaccaaaatcattc

SEQ ID NO: 59916 - DNA, 20 bp, Artificial Sequence
  MKO10059916_A_Ykt6
  gRNA
gatcgtccaggcctgtgtac

SEQ ID NO: 59917 - DNA, 20 bp, Artificial Sequence
  MKO10059917_A_Ylpm1
  gRNA
tcgagtctttctcgctcaat

SEQ ID NO: 59918 - DNA, 20 bp, Artificial Sequence
  MKO10059918_A_Ylpm1
  gRNA
cgtggccagataattaaccg

SEQ ID NO: 59919 - DNA, 20 bp, Artificial Sequence
  MKO10059919_A_Ylpm1
  gRNA
agtttcttggaaggtccgag

SEQ ID NO: 59920 - DNA, 20 bp, Artificial Sequence
  MKO10059920_A_Yme1l1
  gRNA
tacgttcctctagcttgtac

SEQ ID NO: 59921 - DNA, 20 bp, Artificial Sequence
  MKO10059921_A_Yme1l1
  gRNA
aatatgagatgtatgccaac

SEQ ID NO: 59922 - DNA, 20 bp, Artificial Sequence
  MKO10059922_A_Yme1l1
  gRNA
ttaactattacctcactact

SEQ ID NO: 59923 - DNA, 20 bp, Artificial Sequence
  MKO10059923_A_Yod1
  gRNA
gccggccggccgacactatg

SEQ ID NO: 59924 - DNA, 20 bp, Artificial Sequence
  MKO10059924_A_Yod1
  gRNA
gctatcaccggcatcgctcc

SEQ ID NO: 59925 - DNA, 20 bp, Artificial Sequence
  MKO10059925_A_Yod1
  gRNA
taccagtgtgtactatgtcg

SEQ ID NO: 59926 - DNA, 20 bp, Artificial Sequence
  MKO10059926_A_Ypel1
  gRNA
ctgcatgcagcccggttaga

SEQ ID NO: 59927 - DNA, 20 bp, Artificial Sequence
  MKO10059927_A_Ypel1
  gRNA
cacgtatttccacccgagtg

SEQ ID NO: 59928 - DNA, 20 bp, Artificial Sequence
  MKO10059928_A_Ypel1
  gRNA
tcacgatgagcttatctcca

SEQ ID NO: 59929 - DNA, 20 bp, Artificial Sequence
  MKO10059929_A_Ypel2
  gRNA
ggaaatgagttcgtcgtgat

SEQ ID NO: 59930 - DNA, 20 bp, Artificial Sequence
  MKO10059930_A_Ypel2
  gRNA
tcacgacgaactcatttcca

SEQ ID NO: 59931 - DNA, 20 bp, Artificial Sequence
  MKO10059931_A_Ypel2
  gRNA
aggctcgcccttgacttccc

SEQ ID NO: 59932 - DNA, 20 bp, Artificial Sequence
  MKO10059932_A_Ypel3
  gRNA
cctacttggatgactgtcac

SEQ ID NO: 59933 - DNA, 20 bp, Artificial Sequence
  MKO10059933_A_Ypel3
  gRNA
ttcaaagcccaagacgtttc

SEQ ID NO: 59934 - DNA, 20 bp, Artificial Sequence
  MKO10059934_A_Ypel3
  gRNA
aggcacgtccctgactgccc

SEQ ID NO: 59935 - DNA, 20 bp, Artificial Sequence
  MKO10059935_A_Ypel4
  gRNA
ggactcacacggagttaaac

SEQ ID NO: 59936 - DNA, 20 bp, Artificial Sequence
  MKO10059936_A_Ypel4
  gRNA
tcctgagacagggtcaacgt

SEQ ID NO: 59937 - DNA, 20 bp, Artificial Sequence
  MKO10059937_A_Ypel4
  gRNA
agaaaatgtcagctaccgag

SEQ ID NO: 59938 - DNA, 20 bp, Artificial Sequence
  MKO10059938_A_Ypel5
  gRNA
cacggccttccttataacgc

SEQ ID NO: 59939 - DNA, 20 bp, Artificial Sequence
  MKO10059939_A_Ypel5
  gRNA
ctcgaactagtgcacgttcc

SEQ ID NO: 59940 - DNA, 20 bp, Artificial Sequence
  MKO10059940_A_Ypel5
  gRNA
agaatctttcttgaccatat

SEQ ID NO: 59941 - DNA, 20 bp, Artificial Sequence
  MKO10059941_A_Yrdc
  gRNA
agtcaaccacagtagagccg

SEQ ID NO: 59942 - DNA, 20 bp, Artificial Sequence
  MKO10059942_A_Yrdc
  gRNA
cgaataatgccaaactttcc

SEQ ID NO: 59943 - DNA, 20 bp, Artificial Sequence
  MKO10059943_A_Yrdc
  gRNA
cctggtgatggagcgctccg

SEQ ID NO: 59944 - DNA, 20 bp, Artificial Sequence
  MKO10059944_A_Ythdc1
  gRNA
tgattatgacacccgaagtg

SEQ ID NO: 59945 - DNA, 20 bp, Artificial Sequence
  MKO10059945_A_Ythdc1
  gRNA
agatggggaacttaatgttt

SEQ ID NO: 59946 - DNA, 20 bp, Artificial Sequence
  MKO10059946_A_Ythdc1
  gRNA
tacaattcatcatcctgttc

SEQ ID NO: 59947 - DNA, 20 bp, Artificial Sequence
  MKO10059947_A_Ythdc2
  gRNA
gcaatcgctgctagtcgtct

SEQ ID NO: 59948 - DNA, 20 bp, Artificial Sequence
  MKO10059948_A_Ythdc2
  gRNA
acgactagcagcgattgctg

SEQ ID NO: 59949 - DNA, 20 bp, Artificial Sequence
  MKO10059949_A_Ythdc2
  gRNA
aataaaggctctttccgtac

SEQ ID NO: 59950 - DNA, 20 bp, Artificial Sequence
  MKO10059950_A_Ythdf1
  gRNA
agcagccacttcaaccccgc

SEQ ID NO: 59951 - DNA, 20 bp, Artificial Sequence
  MKO10059951_A_Ythdf1
  gRNA
tgaacacggcaacaagcgcc

SEQ ID NO: 59952 - DNA, 20 bp, Artificial Sequence
  MKO10059952_A_Ythdf1
  gRNA
ccggattggactgtccagaa

SEQ ID NO: 59953 - DNA, 20 bp, Artificial Sequence
  MKO10059953_A_Ythdf2
  gRNA
ccttaggaacgtcaaggtcg

SEQ ID NO: 59954 - DNA, 20 bp, Artificial Sequence
  MKO10059954_A_Ythdf2
  gRNA
cgaaccttacttgagcccac

SEQ ID NO: 59955 - DNA, 20 bp, Artificial Sequence
  MKO10059955_A_Ythdf2
  gRNA
agattccagtcgaaatcttt

SEQ ID NO: 59956 - DNA, 20 bp, Artificial Sequence
  MKO10059956_A_Ythdf3
  gRNA
tgagcatggtaataagcgtt

SEQ ID NO: 59957 - DNA, 20 bp, Artificial Sequence
  MKO10059957_A_Ythdf3
  gRNA
aagccggttcccctattccg

SEQ ID NO: 59958 - DNA, 20 bp, Artificial Sequence
  MKO10059958_A_Ythdf3
  gRNA
cctcacctgatccacgctag

SEQ ID NO: 59959 - DNA, 20 bp, Artificial Sequence
  MKO10059959_A_Ywhab
  gRNA
ccgaggcgaatcgggtgtgt

SEQ ID NO: 59960 - DNA, 20 bp, Artificial Sequence
  MKO10059960_A_Ywhab
  gRNA
cctacacacccgattcgcct

SEQ ID NO: 59961 - DNA, 20 bp, Artificial Sequence
  MKO10059961_A_Ywhab
  gRNA
gctgtggacgtcagaaaacc

SEQ ID NO: 59962 - DNA, 20 bp, Artificial Sequence
  MKO10059962_A_Ywhae
  gRNA
ccaacgcaccccattcgttt

SEQ ID NO: 59963 - DNA, 20 bp, Artificial Sequence
  MKO10059963_A_Ywhae
  gRNA
tacgtgataacctgacgctg

SEQ ID NO: 59964 - DNA, 20 bp, Artificial Sequence
  MKO10059964_A_Ywhae
  gRNA
attcccccgaccgtgcctgc

SEQ ID NO: 59965 - DNA, 20 bp, Artificial Sequence
  MKO10059965_A_Ywhag
  gRNA
gcgctacgacgatatggccg

SEQ ID NO: 59966 - DNA, 20 bp, Artificial Sequence
  MKO10059966_A_Ywhag
  gRNA
caccgccgtcgtcgtcttgc

SEQ ID NO: 59967 - DNA, 20 bp, Artificial Sequence
  MKO10059967_A_Ywhag
  gRNA
gatggtggaccgcgagcaac

SEQ ID NO: 59968 - DNA, 20 bp, Artificial Sequence
  MKO10059968_A_Ywhah
  gRNA
cgcgctcaccgccttcatgg

SEQ ID NO: 59969 - DNA, 20 bp, Artificial Sequence
  MKO10059969_A_Ywhah
  gRNA
ctaccgggagaagattgaaa

SEQ ID NO: 59970 - DNA, 20 bp, Artificial Sequence
  MKO10059970_A_Ywhah
  gRNA
cgatgatgctatagctgagc

SEQ ID NO: 59971 - DNA, 20 bp, Artificial Sequence
  MKO10059971_A_Ywhaq
  gRNA
gaaacaatagaaaattccca

SEQ ID NO: 59972 - DNA, 20 bp, Artificial Sequence
  MKO10059972_A_Ywhaq
  gRNA
tgcaactaatccagagagta

SEQ ID NO: 59973 - DNA, 20 bp, Artificial Sequence
  MKO10059973_A_Ywhaq
  gRNA
aagctacttcagcaagatac

SEQ ID NO: 59974 - DNA, 20 bp, Artificial Sequence
  MKO10059974_A_Ywhaz
  gRNA
agtcttctatttgaaaatga

SEQ ID NO: 59975 - DNA, 20 bp, Artificial Sequence
  MKO10059975_A_Ywhaz
  gRNA
gtcatcaccagcagcaacct

SEQ ID NO: 59976 - DNA, 20 bp, Artificial Sequence
  MKO10059976_A_Ywhaz
  gRNA
agcatttgaaatcagcaaaa

SEQ ID NO: 59977 - DNA, 20 bp, Artificial Sequence
  MKO10059977_A_Yy1
  gRNA
cttcttattacaaccgtcga

SEQ ID NO: 59978 - DNA, 20 bp, Artificial Sequence
  MKO10059978_A_Yy1
  gRNA
ccctatgtgtgccccttcga

SEQ ID NO: 59979 - DNA, 20 bp, Artificial Sequence
  MKO10059979_A_Yy1
  gRNA
tcaatgccaggtatccctcc

SEQ ID NO: 59980 - DNA, 20 bp, Artificial Sequence
  MKO10059980_A_Yy2
  gRNA
agaaagcgtgaacgctgacc

SEQ ID NO: 59981 - DNA, 20 bp, Artificial Sequence
  MKO10059981_A_Yy2
  gRNA
gtaggtgtcgattgggcgca

SEQ ID NO: 59982 - DNA, 20 bp, Artificial Sequence
  MKO10059982_A_Yy2
  gRNA
tgatatcgaggcggtttctc

SEQ ID NO: 59983 - DNA, 20 bp, Artificial Sequence
  MKO10059983_A_Zadh2
  gRNA
tagactacgtcaacgccttc

SEQ ID NO: 59984 - DNA, 20 bp, Artificial Sequence
  MKO10059984_A_Zadh2
  gRNA
aaagggcgcttgatagtgat

SEQ ID NO: 59985 - DNA, 20 bp, Artificial Sequence
  MKO10059985_A_Zadh2
  gRNA
ggcgtacgacatgtccacga

SEQ ID NO: 59986 - DNA, 20 bp, Artificial Sequence
  MKO10059986_A_Zak
  gRNA
ggagtgtgtatcgagccaaa

SEQ ID NO: 59987 - DNA, 20 bp, Artificial Sequence
  MKO10059987_A_Zak
  gRNA
gttacctttggctacgtcag

SEQ ID NO: 59988 - DNA, 20 bp, Artificial Sequence
  MKO10059988_A_Zak
  gRNA
acctgtgacgatgccatagt

SEQ ID NO: 59989 - DNA, 20 bp, Artificial Sequence
  MKO10059989_A_Zan
  gRNA
ggccgatggtgcacacttcg

SEQ ID NO: 59990 - DNA, 20 bp, Artificial Sequence
  MKO10059990_A_Zan
  gRNA
acctccggccctatgtactc

SEQ ID NO: 59991 - DNA, 20 bp, Artificial Sequence
  MKO10059991_A_Zan
  gRNA
cctccattggggtacccccc

SEQ ID NO: 59992 - DNA, 20 bp, Artificial Sequence
  MKO10059992_A_Zap70
  gRNA
gccggaatagagtttgcgct

SEQ ID NO: 59993 - DNA, 20 bp, Artificial Sequence
  MKO10059993_A_Zap70
  gRNA
gccgagcgcaaactctattc

SEQ ID NO: 59994 - DNA, 20 bp, Artificial Sequence
  MKO10059994_A_Zap70
  gRNA
tggactaatttaccgcttga

SEQ ID NO: 59995 - DNA, 20 bp, Artificial Sequence
  MKO10059995_A_Zar1l
  gRNA
tagggcggagagccttgatc

SEQ ID NO: 59996 - DNA, 20 bp, Artificial Sequence
  MKO10059996_A_Zar1l
  gRNA
ccgccctacttcccaagctt

SEQ ID NO: 59997 - DNA, 20 bp, Artificial Sequence
  MKO10059997_A_Zar1l
  gRNA
ttcactgtaaagattgtaag

SEQ ID NO: 59998 - DNA, 20 bp, Artificial Sequence
  MKO10059998_A_Zar1
  gRNA
tcgaggggcatccgaatcac

SEQ ID NO: 59999 - DNA, 20 bp, Artificial Sequence
  MKO10059999_A_Zar1
  gRNA
ttcggatgcccctcgagacc

SEQ ID NO: 60000 - DNA, 20 bp, Artificial Sequence
  MKO10060000_A_Zar1
  gRNA
tcccacacaagtcttgccga

SEQ ID NO: 60001 - DNA, 20 bp, Artificial Sequence
  MKO10060001_A_Zbbx
  gRNA
ccaccgaacaactctcttac

SEQ ID NO: 60002 - DNA, 20 bp, Artificial Sequence
  MKO10060002_A_Zbbx
  gRNA
aatagtcttcgccacattcc

SEQ ID NO: 60003 - DNA, 20 bp, Artificial Sequence
  MKO10060003_A_Zbbx
  gRNA
cccagctcgccactgtgtca

SEQ ID NO: 60004 - DNA, 20 bp, Artificial Sequence
  MKO10060004_A_Zbed3
  gRNA
gcgcgaggcggccctaatgc

SEQ ID NO: 60005 - DNA, 20 bp, Artificial Sequence
  MKO10060005_A_Zbed3
  gRNA
gctcgagttccgcctgcatt

SEQ ID NO: 60006 - DNA, 20 bp, Artificial Sequence
  MKO10060006_A_Zbed3
  gRNA
ggccatcatactccgaggcc

SEQ ID NO: 60007 - DNA, 20 bp, Artificial Sequence
  MKO10060007_A_Zbed4
  gRNA
tgtcccgttctccaggcatc

SEQ ID NO: 60008 - DNA, 20 bp, Artificial Sequence
  MKO10060008_A_Zbed4
  gRNA
caatactgaaagcatattaa

SEQ ID NO: 60009 - DNA, 20 bp, Artificial Sequence
  MKO10060009_A_Zbed4
  gRNA
taagcaagaaacttgtccca

SEQ ID NO: 60010 - DNA, 20 bp, Artificial Sequence
  MKO10060010_A_Zbed6
  gRNA
gcaccggaagctaacgaagc

SEQ ID NO: 60011 - DNA, 20 bp, Artificial Sequence
  MKO10060011_A_Zbed6
  gRNA
atctactactgctaccgcag

SEQ ID NO: 60012 - DNA, 20 bp, Artificial Sequence
  MKO10060012_A_Zbed6
  gRNA
tattactcaggccctcaatc

SEQ ID NO: 60013 - DNA, 20 bp, Artificial Sequence
  MKO10060013_A_Zbp1
  gRNA
gaagatctaccactcacgtc

SEQ ID NO: 60014 - DNA, 20 bp, Artificial Sequence
  MKO10060014_A_Zbp1
  gRNA
agtcctttaccgcctgaaga

SEQ ID NO: 60015 - DNA, 20 bp, Artificial Sequence
  MKO10060015_A_Zbp1
  gRNA
gacggcggccctgtgaagat

SEQ ID NO: 60016 - DNA, 20 bp, Artificial Sequence
  MKO10060016_A_Zbtb10
  gRNA
aacgcggaacctgaccaact

SEQ ID NO: 60017 - DNA, 20 bp, Artificial Sequence
  MKO10060017_A_Zbtb10
  gRNA
gtgaagtcgttcaaacttgc

SEQ ID NO: 60018 - DNA, 20 bp, Artificial Sequence
  MKO10060018_A_Zbtb10
  gRNA
cttggcccacacaagaaacg

SEQ ID NO: 60019 - DNA, 20 bp, Artificial Sequence
  MKO10060019_A_Zbtb11
  gRNA
cgatcgctcccgtccaatat

SEQ ID NO: 60020 - DNA, 20 bp, Artificial Sequence
  MKO10060020_A_Zbtb11
  gRNA
accagctcatgtttcgacac

SEQ ID NO: 60021 - DNA, 20 bp, Artificial Sequence
  MKO10060021_A_Zbtb11
  gRNA
tgacgtcacattgctcatcg

SEQ ID NO: 60022 - DNA, 20 bp, Artificial Sequence
  MKO10060022_A_Zbtb12
  gRNA
gatgcacagcgcgcgtattg

SEQ ID NO: 60023 - DNA, 20 bp, Artificial Sequence
  MKO10060023_A_Zbtb12
  gRNA
aacactgttaccccaccgca

SEQ ID NO: 60024 - DNA, 20 bp, Artificial Sequence
  MKO10060024_A_Zbtb12
  gRNA
ttgaactgcttgccgcagcg

SEQ ID NO: 60025 - DNA, 20 bp, Artificial Sequence
  MKO10060025_A_Zbtb14
  gRNA
atgtaaagttccgagcccac

SEQ ID NO: 60026 - DNA, 20 bp, Artificial Sequence
  MKO10060026_A_Zbtb14
  gRNA
gggcactcccccgagtcaag

SEQ ID NO: 60027 - DNA, 20 bp, Artificial Sequence
  MKO10060027_A_Zbtb14
  gRNA
attctgcgacatcgccatcg

SEQ ID NO: 60028 - DNA, 20 bp, Artificial Sequence
  MKO10060028_A_Zbtb16
  gRNA
ccctgtagtgcgtctccaac

SEQ ID NO: 60029 - DNA, 20 bp, Artificial Sequence
  MKO10060029_A_Zbtb16
  gRNA
tatagctgcgcacgcctgcg

SEQ ID NO: 60030 - DNA, 20 bp, Artificial Sequence
  MKO10060030_A_Zbtb16
  gRNA
gcctacctgtatgtgagcga

SEQ ID NO: 60031 - DNA, 20 bp, Artificial Sequence
  MKO10060031_A_Zbtb17
  gRNA
ggactcagtgcgatccccgt

SEQ ID NO: 60032 - DNA, 20 bp, Artificial Sequence
  MKO10060032_A_Zbtb17
  gRNA
ggagggtcagaacctgcgct

SEQ ID NO: 60033 - DNA, 20 bp, Artificial Sequence
  MKO10060033_A_Zbtb17
  gRNA
tgcagccgccatgctgcttg

SEQ ID NO: 60034 - DNA, 20 bp, Artificial Sequence
  MKO10060034_A_Zbtb18
  gRNA
ccgggcacaccgagctgttc

SEQ ID NO: 60035 - DNA, 20 bp, Artificial Sequence
  MKO10060035_A_Zbtb18
  gRNA
cctgcgctcgcaccacttgc

SEQ ID NO: 60036 - DNA, 20 bp, Artificial Sequence
  MKO10060036_A_Zbtb18
  gRNA
atcaagtttatgtgtcctaa

SEQ ID NO: 60037 - DNA, 20 bp, Artificial Sequence
  MKO10060037_A_Zbtb1
  gRNA
gaacgtgtgtctcgacgctt

SEQ ID NO: 60038 - DNA, 20 bp, Artificial Sequence
  MKO10060038_A_Zbtb1
  gRNA
cggcgtattcaccgttgaac

SEQ ID NO: 60039 - DNA, 20 bp, Artificial Sequence
  MKO10060039_A_Zbtb1
  gRNA
acctcgtatgtccatcagcg

SEQ ID NO: 60040 - DNA, 20 bp, Artificial Sequence
  MKO10060040_A_Zbtb20
  gRNA
gacgtgacggttcgcatcca

SEQ ID NO: 60041 - DNA, 20 bp, Artificial Sequence
  MKO10060041_A_Zbtb20
  gRNA
tcgcatcgtgtcacagaacg

SEQ ID NO: 60042 - DNA, 20 bp, Artificial Sequence
  MKO10060042_A_Zbtb20
  gRNA
ccgcgcgggtccgccaggcg

SEQ ID NO: 60043 - DNA, 20 bp, Artificial Sequence
  MKO10060043_A_Zbtb21
  gRNA
cgttccggcacaagcgctcg

SEQ ID NO: 60044 - DNA, 20 bp, Artificial Sequence
  MKO10060044_A_Zbtb21
  gRNA
tttagcagagaacttcgccc

SEQ ID NO: 60045 - DNA, 20 bp, Artificial Sequence
  MKO10060045_A_Zbtb21
  gRNA
ccatagacagtgaccgcctg

SEQ ID NO: 60046 - DNA, 20 bp, Artificial Sequence
  MKO10060046_A_Zbtb22
  gRNA
gacgggagttccgcgctcac

SEQ ID NO: 60047 - DNA, 20 bp, Artificial Sequence
  MKO10060047_A_Zbtb22
  gRNA
cactgcattcgtacggcttg

SEQ ID NO: 60048 - DNA, 20 bp, Artificial Sequence
  MKO10060048_A_Zbtb22
  gRNA
ctcccgtccctgcacgcgga

SEQ ID NO: 60049 - DNA, 20 bp, Artificial Sequence
  MKO10060049_A_Zbtb24
  gRNA
ggtcagcgccttgccgcaca

SEQ ID NO: 60050 - DNA, 20 bp, Artificial Sequence
  MKO10060050_A_Zbtb24
  gRNA
tacctgtatggacacgataa

SEQ ID NO: 60051 - DNA, 20 bp, Artificial Sequence
  MKO10060051_A_Zbtb24
  gRNA
gggacacgtccataaacttt

SEQ ID NO: 60052 - DNA, 20 bp, Artificial Sequence
  MKO10060052_A_Zbtb25
  gRNA
gacaccgaacgggagagatc

SEQ ID NO: 60053 - DNA, 20 bp, Artificial Sequence
  MKO10060053_A_Zbtb25
  gRNA
gtgcctcggctcgagtgctc

SEQ ID NO: 60054 - DNA, 20 bp, Artificial Sequence
  MKO10060054_A_Zbtb25
  gRNA
ctgaacatgcagcgagaatt

SEQ ID NO: 60055 - DNA, 20 bp, Artificial Sequence
  MKO10060055_A_Zbtb26
  gRNA
aattacgccctctcttacac

SEQ ID NO: 60056 - DNA, 20 bp, Artificial Sequence
  MKO10060056_A_Zbtb26
  gRNA
ttgtctacacctcgaatatt

SEQ ID NO: 60057 - DNA, 20 bp, Artificial Sequence
  MKO10060057_A_Zbtb26
  gRNA
gtgtgcaccgttctacaatg

SEQ ID NO: 60058 - DNA, 20 bp, Artificial Sequence
  MKO10060058_A_Zbtb2
  gRNA
ctgttgctgcccatcgatga

SEQ ID NO: 60059 - DNA, 20 bp, Artificial Sequence
  MKO10060059_A_Zbtb2
  gRNA
tgctgcgcagcgtgaagcga

SEQ ID NO: 60060 - DNA, 20 bp, Artificial Sequence
  MKO10060060_A_Zbtb2
  gRNA
actttagttacctggtctga

SEQ ID NO: 60061 - DNA, 20 bp, Artificial Sequence
  MKO10060061_A_Zbtb32
  gRNA
tcggcctcgaggaagagtag

SEQ ID NO: 60062 - DNA, 20 bp, Artificial Sequence
  MKO10060062_A_Zbtb32
  gRNA
gtggagcgtatggtccatcc

SEQ ID NO: 60063 - DNA, 20 bp, Artificial Sequence
  MKO10060063_A_Zbtb32
  gRNA
tgtgcgctcctgactcacac

SEQ ID NO: 60064 - DNA, 20 bp, Artificial Sequence
  MKO10060064_A_Zbtb33
  gRNA
accgaaaattccgggcccat

SEQ ID NO: 60065 - DNA, 20 bp, Artificial Sequence
  MKO10060065_A_Zbtb33
  gRNA
ttggtgcggtattctgcaag

SEQ ID NO: 60066 - DNA, 20 bp, Artificial Sequence
  MKO10060066_A_Zbtb33
  gRNA
ggcgagttattgctagcgca

SEQ ID NO: 60067 - DNA, 20 bp, Artificial Sequence
  MKO10060067_A_Zbtb34
  gRNA
tgacaaaccattccgatgcg

SEQ ID NO: 60068 - DNA, 20 bp, Artificial Sequence
  MKO10060068_A_Zbtb34
  gRNA
aatacggggagctggctgcg

SEQ ID NO: 60069 - DNA, 20 bp, Artificial Sequence
  MKO10060069_A_Zbtb34
  gRNA
tgctggcatggaaagcaccc

SEQ ID NO: 60070 - DNA, 20 bp, Artificial Sequence
  MKO10060070_A_Zbtb37
  gRNA
attataccggaaccatcgtt

SEQ ID NO: 60071 - DNA, 20 bp, Artificial Sequence
  MKO10060071_A_Zbtb37
  gRNA
aacaagaagtgtccgaacga

SEQ ID NO: 60072 - DNA, 20 bp, Artificial Sequence
  MKO10060072_A_Zbtb37
  gRNA
ggtgtagccctatgagactc

SEQ ID NO: 60073 - DNA, 20 bp, Artificial Sequence
  MKO10060073_A_Zbtb38
  gRNA
ccaagagatccgcgttctcg

SEQ ID NO: 60074 - DNA, 20 bp, Artificial Sequence
  MKO10060074_A_Zbtb38
  gRNA
atcgaagttatcgacgagat

SEQ ID NO: 60075 - DNA, 20 bp, Artificial Sequence
  MKO10060075_A_Zbtb38
  gRNA
cgataacttcgattcaactg

SEQ ID NO: 60076 - DNA, 20 bp, Artificial Sequence
  MKO10060076_A_Zbtb39
  gRNA
ggtaatgaagtccaccacgt

SEQ ID NO: 60077 - DNA, 20 bp, Artificial Sequence
  MKO10060077_A_Zbtb39
  gRNA
aatgtctaccgcgttatcag

SEQ ID NO: 60078 - DNA, 20 bp, Artificial Sequence
  MKO10060078_A_Zbtb39
  gRNA
acggaccacgtggaaatctt

SEQ ID NO: 60079 - DNA, 20 bp, Artificial Sequence
  MKO10060079_A_Zbtb3
  gRNA
acgattgcaggcccgagctc

SEQ ID NO: 60080 - DNA, 20 bp, Artificial Sequence
  MKO10060080_A_Zbtb3
  gRNA
cctgggaccgttgctcccgc

SEQ ID NO: 60081 - DNA, 20 bp, Artificial Sequence
  MKO10060081_A_Zbtb3
  gRNA
cctctaccgccacatccgca

SEQ ID NO: 60082 - DNA, 20 bp, Artificial Sequence
  MKO10060082_A_Zbtb40
  gRNA
tcctgccagattccgaaaaa

SEQ ID NO: 60083 - DNA, 20 bp, Artificial Sequence
  MKO10060083_A_Zbtb40
  gRNA
atagaatgtctcacgagtga

SEQ ID NO: 60084 - DNA, 20 bp, Artificial Sequence
  MKO10060084_A_Zbtb40
  gRNA
actcgtgagacattctatta

SEQ ID NO: 60085 - DNA, 20 bp, Artificial Sequence
  MKO10060085_A_Zbtb41
  gRNA
tagactttgtcgaataacgc

SEQ ID NO: 60086 - DNA, 20 bp, Artificial Sequence
  MKO10060086_A_Zbtb41
  gRNA
gatgctttaaccgtgcaaac

SEQ ID NO: 60087 - DNA, 20 bp, Artificial Sequence
  MKO10060087_A_Zbtb41
  gRNA
gtaacgaagtagagtttcat

SEQ ID NO: 60088 - DNA, 20 bp, Artificial Sequence
  MKO10060088_A_Zbtb42
  gRNA
agatctggagacccgtacgc

SEQ ID NO: 60089 - DNA, 20 bp, Artificial Sequence
  MKO10060089_A_Zbtb42
  gRNA
gctcaacggcgacatcgtca

SEQ ID NO: 60090 - DNA, 20 bp, Artificial Sequence
  MKO10060090_A_Zbtb42
  gRNA
cgttgagccgcaccgtgtcg

SEQ ID NO: 60091 - DNA, 20 bp, Artificial Sequence
  MKO10060091_A_Zbtb43
  gRNA
cgcagcctacgatgagcacc

SEQ ID NO: 60092 - DNA, 20 bp, Artificial Sequence
  MKO10060092_A_Zbtb43
  gRNA
cgtcacataactgtccttgc

SEQ ID NO: 60093 - DNA, 20 bp, Artificial Sequence
  MKO10060093_A_Zbtb43
  gRNA
cactcactggttcgacaagt

SEQ ID NO: 60094 - DNA, 20 bp, Artificial Sequence
  MKO10060094_A_Zbtb44
  gRNA
tgatatcactattcgtgtcc

SEQ ID NO: 60095 - DNA, 20 bp, Artificial Sequence
  MKO10060095_A_Zbtb44
  gRNA
ctcatgcagatgacgatgac

SEQ ID NO: 60096 - DNA, 20 bp, Artificial Sequence
  MKO10060096_A_Zbtb44
  gRNA
atgcatcgcctaaagcacga

SEQ ID NO: 60097 - DNA, 20 bp, Artificial Sequence
  MKO10060097_A_Zbtb45
  gRNA
gttcctttacagcggctcgt

SEQ ID NO: 60098 - DNA, 20 bp, Artificial Sequence
  MKO10060098_A_Zbtb45
  gRNA
actcctgtgcgcgccccggg

SEQ ID NO: 60099 - DNA, 20 bp, Artificial Sequence
  MKO10060099_A_Zbtb45
  gRNA
tttctcacaccgtgcactgc

SEQ ID NO: 60100 - DNA, 20 bp, Artificial Sequence
  MKO10060100_A_Zbtb46
  gRNA
gtgagcgcatgtgtcgctta

SEQ ID NO: 60101 - DNA, 20 bp, Artificial Sequence
  MKO10060101_A_Zbtb46
  gRNA
gctctatgctcacatcgatg

SEQ ID NO: 60102 - DNA, 20 bp, Artificial Sequence
  MKO10060102_A_Zbtb46
  gRNA
aagcacggctctcgtcgcca

SEQ ID NO: 60103 - DNA, 20 bp, Artificial Sequence
  MKO10060103_A_Zbtb48
  gRNA
cttcacatgctccgtatgcc

SEQ ID NO: 60104 - DNA, 20 bp, Artificial Sequence
  MKO10060104_A_Zbtb48
  gRNA
agcgcagctccatcctccgt

SEQ ID NO: 60105 - DNA, 20 bp, Artificial Sequence
  MKO10060105_A_Zbtb48
  gRNA
ctgtgagagaacccgcaccc

SEQ ID NO: 60106 - DNA, 20 bp, Artificial Sequence
  MKO10060106_A_Zbtb49
  gRNA
ggacgactgaaatttgccga

SEQ ID NO: 60107 - DNA, 20 bp, Artificial Sequence
  MKO10060107_A_Zbtb49
  gRNA
cctttcaggtttgcggcctc

SEQ ID NO: 60108 - DNA, 20 bp, Artificial Sequence
  MKO10060108_A_Zbtb49
  gRNA
gcacgagcgttcacttcagc

SEQ ID NO: 60109 - DNA, 20 bp, Artificial Sequence
  MKO10060109_A_Zbtb4
  gRNA
caagcgactacagacccacg

SEQ ID NO: 60110 - DNA, 20 bp, Artificial Sequence
  MKO10060110_A_Zbtb4
  gRNA
ctcgtcgacactgagcctcg

SEQ ID NO: 60111 - DNA, 20 bp, Artificial Sequence
  MKO10060111_A_Zbtb4
  gRNA
tgagcgtaggcaccgttgtg

SEQ ID NO: 60112 - DNA, 20 bp, Artificial Sequence
  MKO10060112_A_Zbtb5
  gRNA
cgacgtgacctcccaagcag

SEQ ID NO: 60113 - DNA, 20 bp, Artificial Sequence
  MKO10060113_A_Zbtb5
  gRNA
ggagctattcgtcggtaata

SEQ ID NO: 60114 - DNA, 20 bp, Artificial Sequence
  MKO10060114_A_Zbtb5
  gRNA
attcctccatggaggatcgc

SEQ ID NO: 60115 - DNA, 20 bp, Artificial Sequence
  MKO10060115_A_Zbtb6
  gRNA
accacttgaacatacacagt

SEQ ID NO: 60116 - DNA, 20 bp, Artificial Sequence
  MKO10060116_A_Zbtb6
  gRNA
tattaacgatactgagttcc

SEQ ID NO: 60117 - DNA, 20 bp, Artificial Sequence
  MKO10060117_A_Zbtb6
  gRNA
agattctgccgtttgagatc

SEQ ID NO: 60118 - DNA, 20 bp, Artificial Sequence
  MKO10060118_A_Zbtb7a
  gRNA
gatcggcccccagccggcga

SEQ ID NO: 60119 - DNA, 20 bp, Artificial Sequence
  MKO10060119_A_Zbtb7a
  gRNA
caggtcgtagttgtgcgcga

SEQ ID NO: 60120 - DNA, 20 bp, Artificial Sequence
  MKO10060120_A_Zbtb7a
  gRNA
cgccctctgcagcgcctgac

SEQ ID NO: 60121 - DNA, 20 bp, Artificial Sequence
  MKO10060121_A_Zbtb7b
  gRNA
cgtcatccttgcggcgcctt

SEQ ID NO: 60122 - DNA, 20 bp, Artificial Sequence
  MKO10060122_A_Zbtb7b
  gRNA
ttgcggctgcgacgggcaac

SEQ ID NO: 60123 - DNA, 20 bp, Artificial Sequence
  MKO10060123_A_Zbtb7b
  gRNA
tcccatcgaccccgacctga

SEQ ID NO: 60124 - DNA, 20 bp, Artificial Sequence
  MKO10060124_A_Zbtb7c
  gRNA
cttcgtgatgccacccgcgc

SEQ ID NO: 60125 - DNA, 20 bp, Artificial Sequence
  MKO10060125_A_Zbtb7c
  gRNA
ccgcgtgccgctgctcgttg

SEQ ID NO: 60126 - DNA, 20 bp, Artificial Sequence
  MKO10060126_A_Zbtb7c
  gRNA
gctgccgcatggcacgaccc

SEQ ID NO: 60127 - DNA, 20 bp, Artificial Sequence
  MKO10060127_A_Zbtb8a
  gRNA
gggtaaccgtacttgttcca

SEQ ID NO: 60128 - DNA, 20 bp, Artificial Sequence
  MKO10060128_A_Zbtb8a
  gRNA
gttacatagtctgtagcgcc

SEQ ID NO: 60129 - DNA, 20 bp, Artificial Sequence
  MKO10060129_A_Zbtb8a
  gRNA
agaggacgggtctgccgatc

SEQ ID NO: 60130 - DNA, 20 bp, Artificial Sequence
  MKO10060130_A_Zbtb8b
  gRNA
caccttaggttcaacccgtc

SEQ ID NO: 60131 - DNA, 20 bp, Artificial Sequence
  MKO10060131_A_Zbtb8b
  gRNA
cgctcagggcgtgactccga

SEQ ID NO: 60132 - DNA, 20 bp, Artificial Sequence
  MKO10060132_A_Zbtb8b
  gRNA
acagcaatatgccgccccac

SEQ ID NO: 60133 - DNA, 20 bp, Artificial Sequence
  MKO10060133_A_Zbtb8os
  gRNA
aatttcaagttacgatccat

SEQ ID NO: 60134 - DNA, 20 bp, Artificial Sequence
  MKO10060134_A_Zbtb8os
  gRNA
tccctcagatttggatcata

SEQ ID NO: 60135 - DNA, 20 bp, Artificial Sequence
  MKO10060135_A_Zbtb8os
  gRNA
agtgaaacagcagagactgc

SEQ ID NO: 60136 - DNA, 20 bp, Artificial Sequence
  MKO10060136_A_Zbtb9
  gRNA
acgttcagccttcgcccttt

SEQ ID NO: 60137 - DNA, 20 bp, Artificial Sequence
  MKO10060137_A_Zbtb9
  gRNA
aagcagtccctcgaacgcat

SEQ ID NO: 60138 - DNA, 20 bp, Artificial Sequence
  MKO10060138_A_Zbtb9
  gRNA
cttcgagaactagaaacgtc

SEQ ID NO: 60139 - DNA, 20 bp, Artificial Sequence
  MKO10060139_A_Zbtbd6
  gRNA
tgagtaattgcggccgcgag

SEQ ID NO: 60140 - DNA, 20 bp, Artificial Sequence
  MKO10060140_A_Zbtbd6
  gRNA
tccctttatcgcgtagccga

SEQ ID NO: 60141 - DNA, 20 bp, Artificial Sequence
  MKO10060141_A_Zbtbd6
  gRNA
cccagaacagactccgctcg

SEQ ID NO: 60142 - DNA, 20 bp, Artificial Sequence
  MKO10060142_A_Zc2hc1a
  gRNA
gtacacacctgggtcgtaag

SEQ ID NO: 60143 - DNA, 20 bp, Artificial Sequence
  MKO10060143_A_Zc2hc1a
  gRNA
ctcgtgctttcgtctccaat

SEQ ID NO: 60144 - DNA, 20 bp, Artificial Sequence
  MKO10060144_A_Zc2hc1a
  gRNA
cggtcaaacctctcaaaccc

SEQ ID NO: 60145 - DNA, 20 bp, Artificial Sequence
  MKO10060145_A_Zc2hc1b
  gRNA
ttaaacctcctcatacaata

SEQ ID NO: 60146 - DNA, 20 bp, Artificial Sequence
  MKO10060146_A_Zc2hc1b
  gRNA
tgcagaaattaatatgtcgt

SEQ ID NO: 60147 - DNA, 20 bp, Artificial Sequence
  MKO10060147_A_Zc2hc1b
  gRNA
tgttggcataccttgggctg

SEQ ID NO: 60148 - DNA, 20 bp, Artificial Sequence
  MKO10060148_A_Zc2hc1c
  gRNA
gtccagcaggtaatcgccag

SEQ ID NO: 60149 - DNA, 20 bp, Artificial Sequence
  MKO10060149_A_Zc2hc1c
  gRNA
aggtcgtggcggagctccat

SEQ ID NO: 60150 - DNA, 20 bp, Artificial Sequence
  MKO10060150_A_Zc2hc1c
  gRNA
cggcggtggtcggttcttga

SEQ ID NO: 60151 - DNA, 20 bp, Artificial Sequence
  MKO10060151_A_Zc3h10
  gRNA
ctcgtttgcagacgttcctc

SEQ ID NO: 60152 - DNA, 20 bp, Artificial Sequence
  MKO10060152_A_Zc3h10
  gRNA
gacagctatgccaacggcac

SEQ ID NO: 60153 - DNA, 20 bp, Artificial Sequence
  MKO10060153_A_Zc3h10
  gRNA
cggagccaagttacattcgt

SEQ ID NO: 60154 - DNA, 20 bp, Artificial Sequence
  MKO10060154_A_Zc3h11a
  gRNA
tctgcagcgttgattacaac

SEQ ID NO: 60155 - DNA, 20 bp, Artificial Sequence
  MKO10060155_A_Zc3h11a
  gRNA
accagaagccgctatgttga

SEQ ID NO: 60156 - DNA, 20 bp, Artificial Sequence
  MKO10060156_A_Zc3h11a
  gRNA
tgctctgttgaactgtgagc

SEQ ID NO: 60157 - DNA, 20 bp, Artificial Sequence
  MKO10060157_A_Zc3h12a
  gRNA
cttcgaatccgacggagtgg

SEQ ID NO: 60158 - DNA, 20 bp, Artificial Sequence
  MKO10060158_A_Zc3h12a
  gRNA
ttcacgccatccaggcgggt

SEQ ID NO: 60159 - DNA, 20 bp, Artificial Sequence
  MKO10060159_A_Zc3h12a
  gRNA
atgccccctgacgacccttt

SEQ ID NO: 60160 - DNA, 20 bp, Artificial Sequence
  MKO10060160_A_Zc3h12b
  gRNA
cgccccgatgcaccaattac

SEQ ID NO: 60161 - DNA, 20 bp, Artificial Sequence
  MKO10060161_A_Zc3h12b
  gRNA
tcgtcttcacaccatcgcga

SEQ ID NO: 60162 - DNA, 20 bp, Artificial Sequence
  MKO10060162_A_Zc3h12b
  gRNA
gtccatcgcccgtaaacctg

SEQ ID NO: 60163 - DNA, 20 bp, Artificial Sequence
  MKO10060163_A_Zc3h12c
  gRNA
aaagaagtattctcgtgccg

SEQ ID NO: 60164 - DNA, 20 bp, Artificial Sequence
  MKO10060164_A_Zc3h12c
  gRNA
cgtgcttccctcagagtcgc

SEQ ID NO: 60165 - DNA, 20 bp, Artificial Sequence
  MKO10060165_A_Zc3h12c
  gRNA
atgagcatggctctaccgaa

SEQ ID NO: 60166 - DNA, 20 bp, Artificial Sequence
  MKO10060166_A_Zc3h12d
  gRNA
acgaactccgtgccaagacg

SEQ ID NO: 60167 - DNA, 20 bp, Artificial Sequence
  MKO10060167_A_Zc3h12d
  gRNA
attggagacccgagatcgcc

SEQ ID NO: 60168 - DNA, 20 bp, Artificial Sequence
  MKO10060168_A_Zc3h12d
  gRNA
cgatgaccgctacatcgtga

SEQ ID NO: 60169 - DNA, 20 bp, Artificial Sequence
  MKO10060169_A_Zc3h13
  gRNA
catagacacagtgtcgtaac

SEQ ID NO: 60170 - DNA, 20 bp, Artificial Sequence
  MKO10060170_A_Zc3h13
  gRNA
gctcctctgtattccgtttc

SEQ ID NO: 60171 - DNA, 20 bp, Artificial Sequence
  MKO10060171_A_Zc3h13
  gRNA
aagaatgaagaataagcgtc

SEQ ID NO: 60172 - DNA, 20 bp, Artificial Sequence
  MKO10060172_A_Zc3h14
  gRNA
tcgatactgactccaaaacc

SEQ ID NO: 60173 - DNA, 20 bp, Artificial Sequence
  MKO10060173_A_Zc3h14
  gRNA
tactggcctgcctgtaaaaa

SEQ ID NO: 60174 - DNA, 20 bp, Artificial Sequence
  MKO10060174_A_Zc3h14
  gRNA
gggtgataaaatgtgcagtc

SEQ ID NO: 60175 - DNA, 20 bp, Artificial Sequence
  MKO10060175_A_Zc3h15
  gRNA
aggtgcagatcccaaatctg

SEQ ID NO: 60176 - DNA, 20 bp, Artificial Sequence
  MKO10060176_A_Zc3h15
  gRNA
atttagatactatggataat

SEQ ID NO: 60177 - DNA, 20 bp, Artificial Sequence
  MKO10060177_A_Zc3h15
  gRNA
cttacttaggacaaaacttt

SEQ ID NO: 60178 - DNA, 20 bp, Artificial Sequence
  MKO10060178_A_Zc3h18
  gRNA
tttccctaggaaactgcacg

SEQ ID NO: 60179 - DNA, 20 bp, Artificial Sequence
  MKO10060179_A_Zc3h18
  gRNA
catccgagcgagtctcctcc

SEQ ID NO: 60180 - DNA, 20 bp, Artificial Sequence
  MKO10060180_A_Zc3h18
  gRNA
acctgccgattcttcatgaa

SEQ ID NO: 60181 - DNA, 20 bp, Artificial Sequence
  MKO10060181_A_Zc3h3
  gRNA
ggtcttcctacctggataat

SEQ ID NO: 60182 - DNA, 20 bp, Artificial Sequence
  MKO10060182_A_Zc3h3
  gRNA
ccttgtcataccttccttgg

SEQ ID NO: 60183 - DNA, 20 bp, Artificial Sequence
  MKO10060183_A_Zc3h3
  gRNA
ctcactcacctgtgcggagg

SEQ ID NO: 60184 - DNA, 20 bp, Artificial Sequence
  MKO10060184_A_Zc3h4
  gRNA
gtgtcactcactggtgcgta

SEQ ID NO: 60185 - DNA, 20 bp, Artificial Sequence
  MKO10060185_A_Zc3h4
  gRNA
aaaagaggcgctcgaagaaa

SEQ ID NO: 60186 - DNA, 20 bp, Artificial Sequence
  MKO10060186_A_Zc3h4
  gRNA
caggggtgcgttgtgtgacg

SEQ ID NO: 60187 - DNA, 20 bp, Artificial Sequence
  MKO10060187_A_Zc3h6
  gRNA
ccctagcatagacgtatatc

SEQ ID NO: 60188 - DNA, 20 bp, Artificial Sequence
  MKO10060188_A_Zc3h6
  gRNA
tcgatagtatttcagctgac

SEQ ID NO: 60189 - DNA, 20 bp, Artificial Sequence
  MKO10060189_A_Zc3h6
  gRNA
tgatagttctgactacagcc

SEQ ID NO: 60190 - DNA, 20 bp, Artificial Sequence
  MKO10060190_A_Zc3h7a
  gRNA
gcactttgccacagcgtcgt

SEQ ID NO: 60191 - DNA, 20 bp, Artificial Sequence
  MKO10060191_A_Zc3h7a
  gRNA
cagagaggcctacgacgctg

SEQ ID NO: 60192 - DNA, 20 bp, Artificial Sequence
  MKO10060192_A_Zc3h7a
  gRNA
gtcccaggatatgacagcgg

SEQ ID NO: 60193 - DNA, 20 bp, Artificial Sequence
  MKO10060193_A_Zc3h7b
  gRNA
ggtcgttgccctcggcaaac

SEQ ID NO: 60194 - DNA, 20 bp, Artificial Sequence
  MKO10060194_A_Zc3h7b
  gRNA
ggcgcgcgccctcaacgagc

SEQ ID NO: 60195 - DNA, 20 bp, Artificial Sequence
  MKO10060195_A_Zc3h7b
  gRNA
tgactacgccgcctctgacc

SEQ ID NO: 60196 - DNA, 20 bp, Artificial Sequence
  MKO10060196_A_Zc3h8
  gRNA
ctttgcgttccaccgtgtgc

SEQ ID NO: 60197 - DNA, 20 bp, Artificial Sequence
  MKO10060197_A_Zc3h8
  gRNA
ccttgactcatcctcacacg

SEQ ID NO: 60198 - DNA, 20 bp, Artificial Sequence
  MKO10060198_A_Zc3h8
  gRNA
catgtctcaccatcactata

SEQ ID NO: 60199 - DNA, 20 bp, Artificial Sequence
  MKO10060199_A_Zc3hav1l
  gRNA
ggggcattcacctcgcacaa

SEQ ID NO: 60200 - DNA, 20 bp, Artificial Sequence
  MKO10060200_A_Zc3hav1l
  gRNA
agccctgacactccccgcgc

SEQ ID NO: 60201 - DNA, 20 bp, Artificial Sequence
  MKO10060201_A_Zc3hav1l
  gRNA
gcgcggccacgtggagctgt

SEQ ID NO: 60202 - DNA, 20 bp, Artificial Sequence
  MKO10060202_A_Zc3hav1
  gRNA
tttctttgtgccgcaacgag

SEQ ID NO: 60203 - DNA, 20 bp, Artificial Sequence
  MKO10060203_A_Zc3hav1
  gRNA
ccgttatgggtagatgtacc

SEQ ID NO: 60204 - DNA, 20 bp, Artificial Sequence
  MKO10060204_A_Zc3hav1
  gRNA
aggaacccccctagcatgag

SEQ ID NO: 60205 - DNA, 20 bp, Artificial Sequence
  MKO10060205_A_Zc3hc1
  gRNA
ccacttatctgcgctaaata

SEQ ID NO: 60206 - DNA, 20 bp, Artificial Sequence
  MKO10060206_A_Zc3hc1
  gRNA
ccatatttagcgcagataag

SEQ ID NO: 60207 - DNA, 20 bp, Artificial Sequence
  MKO10060207_A_Zc3hc1
  gRNA
aaaggctttgaaaccggtcc

SEQ ID NO: 60208 - DNA, 20 bp, Artificial Sequence
  MKO10060208_A_Zc4h2
  gRNA
gcaggcccaatgtcatgcgc

SEQ ID NO: 60209 - DNA, 20 bp, Artificial Sequence
  MKO10060209_A_Zc4h2
  gRNA
ggggttccgtgaccgactct

SEQ ID NO: 60210 - DNA, 20 bp, Artificial Sequence
  MKO10060210_A_Zc4h2
  gRNA
aaagatcaaggcccgtttga

SEQ ID NO: 60211 - DNA, 20 bp, Artificial Sequence
  MKO10060211_A_Zcchc10
  gRNA
cctacacagaccttcgagaa

SEQ ID NO: 60212 - DNA, 20 bp, Artificial Sequence
  MKO10060212_A_Zcchc10
  gRNA
tcgagctatgagccgatgca

SEQ ID NO: 60213 - DNA, 20 bp, Artificial Sequence
  MKO10060213_A_Zcchc10
  gRNA
ttcagctctgccgttctcga

SEQ ID NO: 60214 - DNA, 20 bp, Artificial Sequence
  MKO10060214_A_Zcchc11
  gRNA
tgatgacctcagaatccgcc

SEQ ID NO: 60215 - DNA, 20 bp, Artificial Sequence
  MKO10060215_A_Zcchc11
  gRNA
agcaaagtttgcatagatag

SEQ ID NO: 60216 - DNA, 20 bp, Artificial Sequence
  MKO10060216_A_Zcchc11
  gRNA
agcagattcatctattacag

SEQ ID NO: 60217 - DNA, 20 bp, Artificial Sequence
  MKO10060217_A_Zcchc12
  gRNA
gattcttaagcctgaatcga

SEQ ID NO: 60218 - DNA, 20 bp, Artificial Sequence
  MKO10060218_A_Zcchc12
  gRNA
gatcgtatgtttgcgcttcc

SEQ ID NO: 60219 - DNA, 20 bp, Artificial Sequence
  MKO10060219_A_Zcchc12
  gRNA
ggctagcatcctttcacgtt

SEQ ID NO: 60220 - DNA, 20 bp, Artificial Sequence
  MKO10060220_A_Zcchc13
  gRNA
gtacccaggctaaacgagag

SEQ ID NO: 60221 - DNA, 20 bp, Artificial Sequence
  MKO10060221_A_Zcchc13
  gRNA
tgaaactggtcactacgcca

SEQ ID NO: 60222 - DNA, 20 bp, Artificial Sequence
  MKO10060222_A_Zcchc13
  gRNA
acagcaagaggtcgtaccag

SEQ ID NO: 60223 - DNA, 20 bp, Artificial Sequence
  MKO10060223_A_Zcchc14
  gRNA
acgtatgcaatgcattctcc

SEQ ID NO: 60224 - DNA, 20 bp, Artificial Sequence
  MKO10060224_A_Zcchc14
  gRNA
cttgggcagggactcctccg

SEQ ID NO: 60225 - DNA, 20 bp, Artificial Sequence
  MKO10060225_A_Zcchc14
  gRNA
ggaacgtaaccatgttgatt

SEQ ID NO: 60226 - DNA, 20 bp, Artificial Sequence
  MKO10060226_A_Zcchc16
  gRNA
ccccgtgcgtccactaccaa

SEQ ID NO: 60227 - DNA, 20 bp, Artificial Sequence
  MKO10060227_A_Zcchc16
  gRNA
ggtgtcgtttcttgtgtcat

SEQ ID NO: 60228 - DNA, 20 bp, Artificial Sequence
  MKO10060228_A_Zcchc16
  gRNA
atcctttggtagtggacgca

SEQ ID NO: 60229 - DNA, 20 bp, Artificial Sequence
  MKO10060229_A_Zcchc17
  gRNA
aggacgacatgtgagttcga

SEQ ID NO: 60230 - DNA, 20 bp, Artificial Sequence
  MKO10060230_A_Zcchc17
  gRNA
ccaacatctactatctcaga

SEQ ID NO: 60231 - DNA, 20 bp, Artificial Sequence
  MKO10060231_A_Zcchc17
  gRNA
ccaccttgcttccgacagcc

SEQ ID NO: 60232 - DNA, 20 bp, Artificial Sequence
  MKO10060232_A_Zcchc18
  gRNA
gctcattatgcgcatgcatt

SEQ ID NO: 60233 - DNA, 20 bp, Artificial Sequence
  MKO10060233_A_Zcchc18
  gRNA
aatgcatgcgcataatgagc

SEQ ID NO: 60234 - DNA, 20 bp, Artificial Sequence
  MKO10060234_A_Zcchc18
  gRNA
gattgggtacttgcgctttc

SEQ ID NO: 60235 - DNA, 20 bp, Artificial Sequence
  MKO10060235_A_Zcchc24
  gRNA
catcgacacgagcgccgcct

SEQ ID NO: 60236 - DNA, 20 bp, Artificial Sequence
  MKO10060236_A_Zcchc24
  gRNA
cgaggcggcgctcgtgtcga

SEQ ID NO: 60237 - DNA, 20 bp, Artificial Sequence
  MKO10060237_A_Zcchc24
  gRNA
gagggtctgacgccgtacca

SEQ ID NO: 60238 - DNA, 20 bp, Artificial Sequence
  MKO10060238_A_Zcchc2
  gRNA
gccgtcggcccgctagcaac

SEQ ID NO: 60239 - DNA, 20 bp, Artificial Sequence
  MKO10060239_A_Zcchc2
  gRNA
tacgatgaggcgcgagcgca

SEQ ID NO: 60240 - DNA, 20 bp, Artificial Sequence
  MKO10060240_A_Zcchc2
  gRNA
gccacagtgagtccgtctgg

SEQ ID NO: 60241 - DNA, 20 bp, Artificial Sequence
  MKO10060241_A_Zcchc3
  gRNA
atgaccgcgtagatgtcgtc

SEQ ID NO: 60242 - DNA, 20 bp, Artificial Sequence
  MKO10060242_A_Zcchc3
  gRNA
acgaaagtgcctgtccgacc

SEQ ID NO: 60243 - DNA, 20 bp, Artificial Sequence
  MKO10060243_A_Zcchc3
  gRNA
atcttcggtcgtgccgggcc

SEQ ID NO: 60244 - DNA, 20 bp, Artificial Sequence
  MKO10060244_A_Zcchc4
  gRNA
ctgttagcctgatctgctcg

SEQ ID NO: 60245 - DNA, 20 bp, Artificial Sequence
  MKO10060245_A_Zcchc4
  gRNA
acctttctatgcattgtgcc

SEQ ID NO: 60246 - DNA, 20 bp, Artificial Sequence
  MKO10060246_A_Zcchc4
  gRNA
tcaggctccacgagcagatc

SEQ ID NO: 60247 - DNA, 20 bp, Artificial Sequence
  MKO10060247_A_Zcchc5
  gRNA
taatcgcccccacctcagcg

SEQ ID NO: 60248 - DNA, 20 bp, Artificial Sequence
  MKO10060248_A_Zcchc5
  gRNA
gaacgggcaagacgccgcga

SEQ ID NO: 60249 - DNA, 20 bp, Artificial Sequence
  MKO10060249_A_Zcchc5
  gRNA
cattgcgcaagagttagatt

SEQ ID NO: 60250 - DNA, 20 bp, Artificial Sequence
  MKO10060250_A_Zcchc6
  gRNA
ccagacctcgtaagccacgg

SEQ ID NO: 60251 - DNA, 20 bp, Artificial Sequence
  MKO10060251_A_Zcchc6
  gRNA
tttgctgtcgggcagtttcg

SEQ ID NO: 60252 - DNA, 20 bp, Artificial Sequence
  MKO10060252_A_Zcchc6
  gRNA
tcaagagagactgcatcgac

SEQ ID NO: 60253 - DNA, 20 bp, Artificial Sequence
  MKO10060253_A_Zcchc7
  gRNA
aaatacttacgtcagcatgg

SEQ ID NO: 60254 - DNA, 20 bp, Artificial Sequence
  MKO10060254_A_Zcchc7
  gRNA
tgtagaaattgtgataaacg

SEQ ID NO: 60255 - DNA, 20 bp, Artificial Sequence
  MKO10060255_A_Zcchc7
  gRNA
tgtgaccgatgtgatatgat

SEQ ID NO: 60256 - DNA, 20 bp, Artificial Sequence
  MKO10060256_A_Zcchc8
  gRNA
ttagccgtccagtgttatgt

SEQ ID NO: 60257 - DNA, 20 bp, Artificial Sequence
  MKO10060257_A_Zcchc8
  gRNA
tgaacattctgacaagaccc

SEQ ID NO: 60258 - DNA, 20 bp, Artificial Sequence
  MKO10060258_A_Zcchc8
  gRNA
tcttccaacataacactgga

SEQ ID NO: 60259 - DNA, 20 bp, Artificial Sequence
  MKO10060259_A_Zcchc9
  gRNA
gctaacgtagaccccgcgct

SEQ ID NO: 60260 - DNA, 20 bp, Artificial Sequence
  MKO10060260_A_Zcchc9
  gRNA
tgtttccattgtcgacaacc

SEQ ID NO: 60261 - DNA, 20 bp, Artificial Sequence
  MKO10060261_A_Zcchc9
  gRNA
ctctgcagatcggatcatca

SEQ ID NO: 60262 - DNA, 20 bp, Artificial Sequence
  MKO10060262_A_Zcrb1
  gRNA
tatcaaagtagtttcgtctc

SEQ ID NO: 60263 - DNA, 20 bp, Artificial Sequence
  MKO10060263_A_Zcrb1
  gRNA
gaagagcagctgagttcatc

SEQ ID NO: 60264 - DNA, 20 bp, Artificial Sequence
  MKO10060264_A_Zcrb1
  gRNA
catacgtacatttcttcttc

SEQ ID NO: 60265 - DNA, 20 bp, Artificial Sequence
  MKO10060265_A_Zcwpw1
  gRNA
gcccggttcttcatccaatt

SEQ ID NO: 60266 - DNA, 20 bp, Artificial Sequence
  MKO10060266_A_Zcwpw1
  gRNA
gctcaaagccagcttaaaga

SEQ ID NO: 60267 - DNA, 20 bp, Artificial Sequence
  MKO10060267_A_Zcwpw1
  gRNA
ggcgtcctccttccatgagc

SEQ ID NO: 60268 - DNA, 20 bp, Artificial Sequence
  MKO10060268_A_Zdbf2
  gRNA
cgagatgcctcacgacgctt

SEQ ID NO: 60269 - DNA, 20 bp, Artificial Sequence
  MKO10060269_A_Zdbf2
  gRNA
cacgatttacaagagtctgc

SEQ ID NO: 60270 - DNA, 20 bp, Artificial Sequence
  MKO10060270_A_Zdbf2
  gRNA
tgtccgacgtctgctctgtc

SEQ ID NO: 60271 - DNA, 20 bp, Artificial Sequence
  MKO10060271_A_Zdhhc11
  gRNA
agcctgtgccggccttcgac

SEQ ID NO: 60272 - DNA, 20 bp, Artificial Sequence
  MKO10060272_A_Zdhhc11
  gRNA
ttgcgatcaagtgcacgatg

SEQ ID NO: 60273 - DNA, 20 bp, Artificial Sequence
  MKO10060273_A_Zdhhc11
  gRNA
caaccctgatgagcttcgca

SEQ ID NO: 60274 - DNA, 20 bp, Artificial Sequence
  MKO10060274_A_Zdhhc12
  gRNA
ccggctcaccggtgtcgtgc

SEQ ID NO: 60275 - DNA, 20 bp, Artificial Sequence
  MKO10060275_A_Zdhhc12
  gRNA
cacgacagtgccgggcacgc

SEQ ID NO: 60276 - DNA, 20 bp, Artificial Sequence
  MKO10060276_A_Zdhhc12
  gRNA
acgcaaccacccgctctttg

SEQ ID NO: 60277 - DNA, 20 bp, Artificial Sequence
  MKO10060277_A_Zdhhc13
  gRNA
atgccgtgtcgcccaaatcc

SEQ ID NO: 60278 - DNA, 20 bp, Artificial Sequence
  MKO10060278_A_Zdhhc13
  gRNA
gctgaaacaggaccgccaga

SEQ ID NO: 60279 - DNA, 20 bp, Artificial Sequence
  MKO10060279_A_Zdhhc13
  gRNA
gggattcagcagcatccatc

SEQ ID NO: 60280 - DNA, 20 bp, Artificial Sequence
  MKO10060280_A_Zdhhc14
  gRNA
cgggcgatacccccctgaac

SEQ ID NO: 60281 - DNA, 20 bp, Artificial Sequence
  MKO10060281_A_Zdhhc14
  gRNA
cttcatcaggagtggctcga

SEQ ID NO: 60282 - DNA, 20 bp, Artificial Sequence
  MKO10060282_A_Zdhhc14
  gRNA
tcctgatgaagccgctgatc

SEQ ID NO: 60283 - DNA, 20 bp, Artificial Sequence
  MKO10060283_A_Zdhhc15
  gRNA
atagcgctccttgtctgtat

SEQ ID NO: 60284 - DNA, 20 bp, Artificial Sequence
  MKO10060284_A_Zdhhc15
  gRNA
tagctgtacggttctgtgac

SEQ ID NO: 60285 - DNA, 20 bp, Artificial Sequence
  MKO10060285_A_Zdhhc15
  gRNA
agcggtctggcttgattaga

SEQ ID NO: 60286 - DNA, 20 bp, Artificial Sequence
  MKO10060286_A_Zdhhc16
  gRNA
cgtgctgaccgggtccatcg

SEQ ID NO: 60287 - DNA, 20 bp, Artificial Sequence
  MKO10060287_A_Zdhhc16
  gRNA
catcgtcttccattactacc

SEQ ID NO: 60288 - DNA, 20 bp, Artificial Sequence
  MKO10060288_A_Zdhhc16
  gRNA
gcccacacagttgtttagcc

SEQ ID NO: 60289 - DNA, 20 bp, Artificial Sequence
  MKO10060289_A_Zdhhc17
  gRNA
tggaagcgggttacgatgta

SEQ ID NO: 60290 - DNA, 20 bp, Artificial Sequence
  MKO10060290_A_Zdhhc17
  gRNA
atatgaacgctgccgagaat

SEQ ID NO: 60291 - DNA, 20 bp, Artificial Sequence
  MKO10060291_A_Zdhhc17
  gRNA
tgaattcaactccgttgcac

SEQ ID NO: 60292 - DNA, 20 bp, Artificial Sequence
  MKO10060292_A_Zdhhc18
  gRNA
ccacataccgaccgccccct

SEQ ID NO: 60293 - DNA, 20 bp, Artificial Sequence
  MKO10060293_A_Zdhhc18
  gRNA
gtcgcagacactgcagtgcg

SEQ ID NO: 60294 - DNA, 20 bp, Artificial Sequence
  MKO10060294_A_Zdhhc18
  gRNA
gaccacgcaggcgaagatga

SEQ ID NO: 60295 - DNA, 20 bp, Artificial Sequence
  MKO10060295_A_Zdhhc19
  gRNA
cccgaacctaccactgcccg

SEQ ID NO: 60296 - DNA, 20 bp, Artificial Sequence
  MKO10060296_A_Zdhhc19
  gRNA
gcagatgccttgtgcgaaat

SEQ ID NO: 60297 - DNA, 20 bp, Artificial Sequence
  MKO10060297_A_Zdhhc19
  gRNA
tcacctcgatgtaagatacc

SEQ ID NO: 60298 - DNA, 20 bp, Artificial Sequence
  MKO10060298_A_Zdhhc1
  gRNA
gccgcatacgcacttattgc

SEQ ID NO: 60299 - DNA, 20 bp, Artificial Sequence
  MKO10060299_A_Zdhhc1
  gRNA
gcctgcaataagtgcgtatg

SEQ ID NO: 60300 - DNA, 20 bp, Artificial Sequence
  MKO10060300_A_Zdhhc1
  gRNA
gtagctcttgtcccgcacat

SEQ ID NO: 60301 - DNA, 20 bp, Artificial Sequence
  MKO10060301_A_Zdhhc20
  gRNA
aaagaccgttgtttaccttg

SEQ ID NO: 60302 - DNA, 20 bp, Artificial Sequence
  MKO10060302_A_Zdhhc20
  gRNA
ctacaccacatcagcttcaa

SEQ ID NO: 60303 - DNA, 20 bp, Artificial Sequence
  MKO10060303_A_Zdhhc20
  gRNA
cttaccctttgaagctgatg

SEQ ID NO: 60304 - DNA, 20 bp, Artificial Sequence
  MKO10060304_A_Zdhhc21
  gRNA
tccactaaaaaagcgtaact

SEQ ID NO: 60305 - DNA, 20 bp, Artificial Sequence
  MKO10060305_A_Zdhhc21
  gRNA
agggcctccttaactgatcc

SEQ ID NO: 60306 - DNA, 20 bp, Artificial Sequence
  MKO10060306_A_Zdhhc21
  gRNA
gcaacaagtgcaacctgatg

SEQ ID NO: 60307 - DNA, 20 bp, Artificial Sequence
  MKO10060307_A_Zdhhc22
  gRNA
aacccgctaccaggttcgaa

SEQ ID NO: 60308 - DNA, 20 bp, Artificial Sequence
  MKO10060308_A_Zdhhc22
  gRNA
cagccatcccctttcgaacc

SEQ ID NO: 60309 - DNA, 20 bp, Artificial Sequence
  MKO10060309_A_Zdhhc22
  gRNA
taccacgttgagcagccgca

SEQ ID NO: 60310 - DNA, 20 bp, Artificial Sequence
  MKO10060310_A_Zdhhc23
  gRNA
ctgtaattagcgtaaactcc

SEQ ID NO: 60311 - DNA, 20 bp, Artificial Sequence
  MKO10060311_A_Zdhhc23
  gRNA
cccgggcgggtcgtactagc

SEQ ID NO: 60312 - DNA, 20 bp, Artificial Sequence
  MKO10060312_A_Zdhhc23
  gRNA
gattgtcaagacctcgatga

SEQ ID NO: 60313 - DNA, 20 bp, Artificial Sequence
  MKO10060313_A_Zdhhc24
  gRNA
cgccgtcgtggtcctggagc

SEQ ID NO: 60314 - DNA, 20 bp, Artificial Sequence
  MKO10060314_A_Zdhhc24
  gRNA
gacagtgatggtcacgacgt

SEQ ID NO: 60315 - DNA, 20 bp, Artificial Sequence
  MKO10060315_A_Zdhhc24
  gRNA
gcgcagaaggagcgcccgcg

SEQ ID NO: 60316 - DNA, 20 bp, Artificial Sequence
  MKO10060316_A_Zdhhc25
  gRNA
cgcctcgcatgtagctgcac

SEQ ID NO: 60317 - DNA, 20 bp, Artificial Sequence
  MKO10060317_A_Zdhhc25
  gRNA
gtgcccctgggtaacccgcc

SEQ ID NO: 60318 - DNA, 20 bp, Artificial Sequence
  MKO10060318_A_Zdhhc25
  gRNA
cggactatgctgaccgaccc

SEQ ID NO: 60319 - DNA, 20 bp, Artificial Sequence
  MKO10060319_A_Zdhhc2
  gRNA
tcagggcttaccgccggaca

SEQ ID NO: 60320 - DNA, 20 bp, Artificial Sequence
  MKO10060320_A_Zdhhc2
  gRNA
aagaccttcccatctacacc

SEQ ID NO: 60321 - DNA, 20 bp, Artificial Sequence
  MKO10060321_A_Zdhhc2
  gRNA
aaagtagatgataagccatg

SEQ ID NO: 60322 - DNA, 20 bp, Artificial Sequence
  MKO10060322_A_Zdhhc3
  gRNA
gctgcagcatcaagcccgac

SEQ ID NO: 60323 - DNA, 20 bp, Artificial Sequence
  MKO10060323_A_Zdhhc3
  gRNA
ggtacctgcagtggtgtgcc

SEQ ID NO: 60324 - DNA, 20 bp, Artificial Sequence
  MKO10060324_A_Zdhhc3
  gRNA
agtggaatcccaccatgatg

SEQ ID NO: 60325 - DNA, 20 bp, Artificial Sequence
  MKO10060325_A_Zdhhc4
  gRNA
gaggcactgcgggattaccc

SEQ ID NO: 60326 - DNA, 20 bp, Artificial Sequence
  MKO10060326_A_Zdhhc4
  gRNA
tgtgctgctaagcgtgaacc

SEQ ID NO: 60327 - DNA, 20 bp, Artificial Sequence
  MKO10060327_A_Zdhhc4
  gRNA
tggtttccttaaatcgcaag

SEQ ID NO: 60328 - DNA, 20 bp, Artificial Sequence
  MKO10060328_A_Zdhhc5
  gRNA
taaacaactgtattggtcgc

SEQ ID NO: 60329 - DNA, 20 bp, Artificial Sequence
  MKO10060329_A_Zdhhc5
  gRNA
atctaggagggcggtaaaag

SEQ ID NO: 60330 - DNA, 20 bp, Artificial Sequence
  MKO10060330_A_Zdhhc5
  gRNA
cacaccatttcattcgcacc

SEQ ID NO: 60331 - DNA, 20 bp, Artificial Sequence
  MKO10060331_A_Zdhhc6
  gRNA
ggcaaacgcagccaatccga

SEQ ID NO: 60332 - DNA, 20 bp, Artificial Sequence
  MKO10060332_A_Zdhhc6
  gRNA
aacgtggcgccttgtatgct

SEQ ID NO: 60333 - DNA, 20 bp, Artificial Sequence
  MKO10060333_A_Zdhhc6
  gRNA
accattgcagaaagtgtaac

SEQ ID NO: 60334 - DNA, 20 bp, Artificial Sequence
  MKO10060334_A_Zdhhc7
  gRNA
tttcatcattgcatatcgag

SEQ ID NO: 60335 - DNA, 20 bp, Artificial Sequence
  MKO10060335_A_Zdhhc7
  gRNA
cagttcatctcctgcgtccg

SEQ ID NO: 60336 - DNA, 20 bp, Artificial Sequence
  MKO10060336_A_Zdhhc7
  gRNA
cggcttgatgcagcaacact

SEQ ID NO: 60337 - DNA, 20 bp, Artificial Sequence
  MKO10060337_A_Zdhhc8
  gRNA
cactggctttcacgtggtac

SEQ ID NO: 60338 - DNA, 20 bp, Artificial Sequence
  MKO10060338_A_Zdhhc8
  gRNA
gcatccaggtccgcatgaag

SEQ ID NO: 60339 - DNA, 20 bp, Artificial Sequence
  MKO10060339_A_Zdhhc8
  gRNA
atgtccagcggacgaggacg

SEQ ID NO: 60340 - DNA, 20 bp, Artificial Sequence
  MKO10060340_A_Zdhhc9
  gRNA
cgcctttaacatcgtctatg

SEQ ID NO: 60341 - DNA, 20 bp, Artificial Sequence
  MKO10060341_A_Zdhhc9
  gRNA
tttcttcaggtgtcgctacc

SEQ ID NO: 60342 - DNA, 20 bp, Artificial Sequence
  MKO10060342_A_Zdhhc9
  gRNA
atctggaaattcttaatacg

SEQ ID NO: 60343 - DNA, 20 bp, Artificial Sequence
  MKO10060343_A_Zeb1
  gRNA
acctgcccgtattgtgatag

SEQ ID NO: 60344 - DNA, 20 bp, Artificial Sequence
  MKO10060344_A_Zeb1
  gRNA
gaatccgtaagtgctctttc

SEQ ID NO: 60345 - DNA, 20 bp, Artificial Sequence
  MKO10060345_A_Zeb1
  gRNA
gcaaaaccatgatccgaatg

SEQ ID NO: 60346 - DNA, 20 bp, Artificial Sequence
  MKO10060346_A_Zeb2os
  gRNA
gctgtttaaactaatcctcg

SEQ ID NO: 60347 - DNA, 20 bp, Artificial Sequence
  MKO10060347_A_Zeb2os
  gRNA
tcagttctaacctgctcggc

SEQ ID NO: 60348 - DNA, 20 bp, Artificial Sequence
  MKO10060348_A_Zeb2os
  gRNA
ccccccgtcaagcaagcctt

SEQ ID NO: 60349 - DNA, 20 bp, Artificial Sequence
  MKO10060349_A_Zeb2
  gRNA
gtaccttcagcgaagcgaca

SEQ ID NO: 60350 - DNA, 20 bp, Artificial Sequence
  MKO10060350_A_Zeb2
  gRNA
caagcgcttgacatcgctga

SEQ ID NO: 60351 - DNA, 20 bp, Artificial Sequence
  MKO10060351_A_Zeb2
  gRNA
actcttcgatgctcactgcg

SEQ ID NO: 60352 - DNA, 20 bp, Artificial Sequence
  MKO10060352_A_Zer1
  gRNA
gtgcgtaagacgacacaatg

SEQ ID NO: 60353 - DNA, 20 bp, Artificial Sequence
  MKO10060353_A_Zer1
  gRNA
cggggataccgtcaatcatg

SEQ ID NO: 60354 - DNA, 20 bp, Artificial Sequence
  MKO10060354_A_Zer1
  gRNA
cactcgcatccaccttcgtg

SEQ ID NO: 60355 - DNA, 20 bp, Artificial Sequence
  MKO10060355_A_Zfand1
  gRNA
ttgcagacaccgtcatcagt

SEQ ID NO: 60356 - DNA, 20 bp, Artificial Sequence
  MKO10060356_A_Zfand1
  gRNA
aaacttgtcagagacattgt

SEQ ID NO: 60357 - DNA, 20 bp, Artificial Sequence
  MKO10060357_A_Zfand1
  gRNA
aagccttgaacacagaagca

SEQ ID NO: 60358 - DNA, 20 bp, Artificial Sequence
  MKO10060358_A_Zfand2a
  gRNA
gggactagtacctgagccgc

SEQ ID NO: 60359 - DNA, 20 bp, Artificial Sequence
  MKO10060359_A_Zfand2a
  gRNA
tgctcgccgaccaccacatc

SEQ ID NO: 60360 - DNA, 20 bp, Artificial Sequence
  MKO10060360_A_Zfand2a
  gRNA
gtgtccctttgcgttcaaga

SEQ ID NO: 60361 - DNA, 20 bp, Artificial Sequence
  MKO10060361_A_Zfand2b
  gRNA
gccagaacgttcacacttat

SEQ ID NO: 60362 - DNA, 20 bp, Artificial Sequence
  MKO10060362_A_Zfand2b
  gRNA
accaataagtgtgaacgttc

SEQ ID NO: 60363 - DNA, 20 bp, Artificial Sequence
  MKO10060363_A_Zfand2b
  gRNA
gatgaaggcaaggtccggct

SEQ ID NO: 60364 - DNA, 20 bp, Artificial Sequence
  MKO10060364_A_Zfand3
  gRNA
ttcgaccggccgctctcctc

SEQ ID NO: 60365 - DNA, 20 bp, Artificial Sequence
  MKO10060365_A_Zfand3
  gRNA
cctcgcggccacggcccatg

SEQ ID NO: 60366 - DNA, 20 bp, Artificial Sequence
  MKO10060366_A_Zfand3
  gRNA
cgactgtacgttcgaccaca

SEQ ID NO: 60367 - DNA, 20 bp, Artificial Sequence
  MKO10060367_A_Zfand4
  gRNA
ggaccgataagtactagaaa

SEQ ID NO: 60368 - DNA, 20 bp, Artificial Sequence
  MKO10060368_A_Zfand4
  gRNA
ctcttcatcgaaacgttgac

SEQ ID NO: 60369 - DNA, 20 bp, Artificial Sequence
  MKO10060369_A_Zfand4
  gRNA
aaacgtaacttgtttgttgc

SEQ ID NO: 60370 - DNA, 20 bp, Artificial Sequence
  MKO10060370_A_Zfand5
  gRNA
gcagggtttgactgccgatg

SEQ ID NO: 60371 - DNA, 20 bp, Artificial Sequence
  MKO10060371_A_Zfand5
  gRNA
gcttctgctttgtaatcata

SEQ ID NO: 60372 - DNA, 20 bp, Artificial Sequence
  MKO10060372_A_Zfand5
  gRNA
aataactaccccgaaaacag

SEQ ID NO: 60373 - DNA, 20 bp, Artificial Sequence
  MKO10060373_A_Zfand6
  gRNA
tctagcgctgactgagcgtc

SEQ ID NO: 60374 - DNA, 20 bp, Artificial Sequence
  MKO10060374_A_Zfand6
  gRNA
acgtcttcatctatgcagcc

SEQ ID NO: 60375 - DNA, 20 bp, Artificial Sequence
  MKO10060375_A_Zfand6
  gRNA
agaatcgctgtttcatgtgc

SEQ ID NO: 60376 - DNA, 20 bp, Artificial Sequence
  MKO10060376_A_Zfat
  gRNA
agttaagaccacgctgatga

SEQ ID NO: 60377 - DNA, 20 bp, Artificial Sequence
  MKO10060377_A_Zfat
  gRNA
acctgccgtccgcgtctcca

SEQ ID NO: 60378 - DNA, 20 bp, Artificial Sequence
  MKO10060378_A_Zfat
  gRNA
cgtcctcactggggctcacg

SEQ ID NO: 60379 - DNA, 20 bp, Artificial Sequence
  MKO10060379_A_Zfc3h1
  gRNA
tagccgactgaagagccaac

SEQ ID NO: 60380 - DNA, 20 bp, Artificial Sequence
  MKO10060380_A_Zfc3h1
  gRNA
gtacaatcggttcatgaagt

SEQ ID NO: 60381 - DNA, 20 bp, Artificial Sequence
  MKO10060381_A_Zfc3h1
  gRNA
gatccgagacctttccaacc

SEQ ID NO: 60382 - DNA, 20 bp, Artificial Sequence
  MKO10060382_A_Zfhx2
  gRNA
acctacgcacgcctgcccac

SEQ ID NO: 60383 - DNA, 20 bp, Artificial Sequence
  MKO10060383_A_Zfhx2
  gRNA
cgtaagaagccccatccccc

SEQ ID NO: 60384 - DNA, 20 bp, Artificial Sequence
  MKO10060384_A_Zfhx2
  gRNA
cgtgcgtaggtgttgcagca

SEQ ID NO: 60385 - DNA, 20 bp, Artificial Sequence
  MKO10060385_A_Zfhx3
  gRNA
atccccctcgacatgcgcct

SEQ ID NO: 60386 - DNA, 20 bp, Artificial Sequence
  MKO10060386_A_Zfhx3
  gRNA
cgtctgcaacaagttcacga

SEQ ID NO: 60387 - DNA, 20 bp, Artificial Sequence
  MKO10060387_A_Zfhx3
  gRNA
acctgcggatggtgaagatc

SEQ ID NO: 60388 - DNA, 20 bp, Artificial Sequence
  MKO10060388_A_Zfhx4
  gRNA
gcttcaccgaccgaacatgt

SEQ ID NO: 60389 - DNA, 20 bp, Artificial Sequence
  MKO10060389_A_Zfhx4
  gRNA
agcgccgggtcactgatata

SEQ ID NO: 60390 - DNA, 20 bp, Artificial Sequence
  MKO10060390_A_Zfhx4
  gRNA
aagttcgtcctcaccattcc

SEQ ID NO: 60391 - DNA, 20 bp, Artificial Sequence
  MKO10060391_A_Zfml
  gRNA
cccgttctccatatcgtagt

SEQ ID NO: 60392 - DNA, 20 bp, Artificial Sequence
  MKO10060392_A_Zfml
  gRNA
aggagattccgactacgata

SEQ ID NO: 60393 - DNA, 20 bp, Artificial Sequence
  MKO10060393_A_Zfml
  gRNA
aagtagccatgtcgagaccc

SEQ ID NO: 60394 - DNA, 20 bp, Artificial Sequence
  MKO10060394_A_Zfp101
  gRNA
cccccgcatgcgtccgaagc

SEQ ID NO: 60395 - DNA, 20 bp, Artificial Sequence
  MKO10060395_A_Zfp101
  gRNA
gtgatctaatcaagcacgag

SEQ ID NO: 60396 - DNA, 20 bp, Artificial Sequence
  MKO10060396_A_Zfp101
  gRNA
ccttatccgtgtaagtattg

SEQ ID NO: 60397 - DNA, 20 bp, Artificial Sequence
  MKO10060397_A_Zfp105
  gRNA
tgccaacgagtagctcccaa

SEQ ID NO: 60398 - DNA, 20 bp, Artificial Sequence
  MKO10060398_A_Zfp105
  gRNA
gtctgaaagcttccgagacg

SEQ ID NO: 60399 - DNA, 20 bp, Artificial Sequence
  MKO10060399_A_Zfp105
  gRNA
gttacagctcgcaacttgct

SEQ ID NO: 60400 - DNA, 20 bp, Artificial Sequence
  MKO10060400_A_Zfp106
  gRNA
cgacgaattcgcaatgttag

SEQ ID NO: 60401 - DNA, 20 bp, Artificial Sequence
  MKO10060401_A_Zfp106
  gRNA
gtatcgcttgcgtatccctc

SEQ ID NO: 60402 - DNA, 20 bp, Artificial Sequence
  MKO10060402_A_Zfp106
  gRNA
tgcgaagcatgttgcatcac

SEQ ID NO: 60403 - DNA, 20 bp, Artificial Sequence
  MKO10060403_A_Zfp108
  gRNA
tgtgaattctctcgtgtatc

SEQ ID NO: 60404 - DNA, 20 bp, Artificial Sequence
  MKO10060404_A_Zfp108
  gRNA
gttgtgtgtaatcacaatcc

SEQ ID NO: 60405 - DNA, 20 bp, Artificial Sequence
  MKO10060405_A_Zfp108
  gRNA
gtgccccggtgtgtcctctc

SEQ ID NO: 60406 - DNA, 20 bp, Artificial Sequence
  MKO10060406_A_Zfp109
  gRNA
gtttgacgagatgcgatctc

SEQ ID NO: 60407 - DNA, 20 bp, Artificial Sequence
  MKO10060407_A_Zfp109
  gRNA
acttcgtatgtactacgtac

SEQ ID NO: 60408 - DNA, 20 bp, Artificial Sequence
  MKO10060408_A_Zfp109
  gRNA
cacaggaggcagtgaccttc

SEQ ID NO: 60409 - DNA, 20 bp, Artificial Sequence
  MKO10060409_A_Zfp110
  gRNA
gagtcccctgatgaagatcg

SEQ ID NO: 60410 - DNA, 20 bp, Artificial Sequence
  MKO10060410_A_Zfp110
  gRNA
tgtatctctgacgtttaccg

SEQ ID NO: 60411 - DNA, 20 bp, Artificial Sequence
  MKO10060411_A_Zfp110
  gRNA
tagaaaaagccgaagactgc

SEQ ID NO: 60412 - DNA, 20 bp, Artificial Sequence
  MKO10060412_A_Zfp111
  gRNA
cccatactgccgacgtctgt

SEQ ID NO: 60413 - DNA, 20 bp, Artificial Sequence
  MKO10060413_A_Zfp111
  gRNA
gctcatcaaagagtcgaaac

SEQ ID NO: 60414 - DNA, 20 bp, Artificial Sequence
  MKO10060414_A_Zfp111
  gRNA
gagaacaatgaccaagttac

SEQ ID NO: 60415 - DNA, 20 bp, Artificial Sequence
  MKO10060415_A_Zfp112
  gRNA
gctatcagacccggtttgaa

SEQ ID NO: 60416 - DNA, 20 bp, Artificial Sequence
  MKO10060416_A_Zfp112
  gRNA
cacaatcgtttgtgccgtac

SEQ ID NO: 60417 - DNA, 20 bp, Artificial Sequence
  MKO10060417_A_Zfp112
  gRNA
caagtgccacgcgagtgcag

SEQ ID NO: 60418 - DNA, 20 bp, Artificial Sequence
  MKO10060418_A_Zfp113
  gRNA
cagcacttgttcgccatcag

SEQ ID NO: 60419 - DNA, 20 bp, Artificial Sequence
  MKO10060419_A_Zfp113
  gRNA
ctagatggcgattccaaaac

SEQ ID NO: 60420 - DNA, 20 bp, Artificial Sequence
  MKO10060420_A_Zfp113
  gRNA
atgccttaccgctctctaac

SEQ ID NO: 60421 - DNA, 20 bp, Artificial Sequence
  MKO10060421_A_Zfp114
  gRNA
cttcagtgtgcacgcggcag

SEQ ID NO: 60422 - DNA, 20 bp, Artificial Sequence
  MKO10060422_A_Zfp114
  gRNA
caatactcacgtcacaagtg

SEQ ID NO: 60423 - DNA, 20 bp, Artificial Sequence
  MKO10060423_A_Zfp114
  gRNA
gagaacaatgaccaagttac

SEQ ID NO: 60424 - DNA, 20 bp, Artificial Sequence
  MKO10060424_A_Zfp119a
  gRNA
gacaatattcttcattatcg

SEQ ID NO: 60425 - DNA, 20 bp, Artificial Sequence
  MKO10060425_A_Zfp119a
  gRNA
taataaatgaggaatagtct

SEQ ID NO: 60426 - DNA, 20 bp, Artificial Sequence
  MKO10060426_A_Zfp119a
  gRNA
tccactttctttgtccgcag

SEQ ID NO: 60427 - DNA, 20 bp, Artificial Sequence
  MKO10060427_A_Zfp119b
  gRNA
acatattgtcactccaatat

SEQ ID NO: 60428 - DNA, 20 bp, Artificial Sequence
  MKO10060428_A_Zfp119b
  gRNA
gatgttgatcctcaatattg

SEQ ID NO: 60429 - DNA, 20 bp, Artificial Sequence
  MKO10060429_A_Zfp119b
  gRNA
cacttcatttcttagattgc

SEQ ID NO: 60430 - DNA, 20 bp, Artificial Sequence
  MKO10060430_A_Zfp11
  gRNA
ctcctgccttaaacgacacc

SEQ ID NO: 60431 - DNA, 20 bp, Artificial Sequence
  MKO10060431_A_Zfp11
  gRNA
gaggaccgagcggtatttaa

SEQ ID NO: 60432 - DNA, 20 bp, Artificial Sequence
  MKO10060432_A_Zfp11
  gRNA
gaaagcctttaaataccgct

SEQ ID NO: 60433 - DNA, 20 bp, Artificial Sequence
  MKO10060433_A_Zfp120
  gRNA
acttaccatgtcggaacttc

SEQ ID NO: 60434 - DNA, 20 bp, Artificial Sequence
  MKO10060434_A_Zfp120
  gRNA
atttcaggctactattggaa

SEQ ID NO: 60435 - DNA, 20 bp, Artificial Sequence
  MKO10060435_A_Zfp120
  gRNA
tgtgttctgtgtaccgctcc

SEQ ID NO: 60436 - DNA, 20 bp, Artificial Sequence
  MKO10060436_A_Zfp128
  gRNA
cttctgctacgtccacgtag

SEQ ID NO: 60437 - DNA, 20 bp, Artificial Sequence
  MKO10060437_A_Zfp128
  gRNA
atccctatcatagaacgaca

SEQ ID NO: 60438 - DNA, 20 bp, Artificial Sequence
  MKO10060438_A_Zfp128
  gRNA
gccagtgactttccgagatg

SEQ ID NO: 60439 - DNA, 20 bp, Artificial Sequence
  MKO10060439_A_Zfp12
  gRNA
tacacgccttcttcaccgag

SEQ ID NO: 60440 - DNA, 20 bp, Artificial Sequence
  MKO10060440_A_Zfp12
  gRNA
ttgcgtagcttccgtcgctt

SEQ ID NO: 60441 - DNA, 20 bp, Artificial Sequence
  MKO10060441_A_Zfp12
  gRNA
ctgtatgtcgtcctttcctc

SEQ ID NO: 60442 - DNA, 20 bp, Artificial Sequence
  MKO10060442_A_Zfp131
  gRNA
ctcctccgatgattccgctc

SEQ ID NO: 60443 - DNA, 20 bp, Artificial Sequence
  MKO10060443_A_Zfp131
  gRNA
atctgccaacaacgccagag

SEQ ID NO: 60444 - DNA, 20 bp, Artificial Sequence
  MKO10060444_A_Zfp131
  gRNA
agcagagtttctacaaatgc

SEQ ID NO: 60445 - DNA, 20 bp, Artificial Sequence
  MKO10060445_A_Zfp13
  gRNA
caagcgcttcacccgtcgct

SEQ ID NO: 60446 - DNA, 20 bp, Artificial Sequence
  MKO10060446_A_Zfp13
  gRNA
cgagcgacgggtgaagcgct

SEQ ID NO: 60447 - DNA, 20 bp, Artificial Sequence
  MKO10060447_A_Zfp13
  gRNA
cgctggatgtccccgtgtcc

SEQ ID NO: 60448 - DNA, 20 bp, Artificial Sequence
  MKO10060448_A_Zfp142
  gRNA
gcggaattcctcacgacaga

SEQ ID NO: 60449 - DNA, 20 bp, Artificial Sequence
  MKO10060449_A_Zfp142
  gRNA
atatgtagcacctgaccgta

SEQ ID NO: 60450 - DNA, 20 bp, Artificial Sequence
  MKO10060450_A_Zfp142
  gRNA
agaaagttctccccgtgcac

SEQ ID NO: 60451 - DNA, 20 bp, Artificial Sequence
  MKO10060451_A_Zfp143
  gRNA
ctattgtacctttcgaggtg

SEQ ID NO: 60452 - DNA, 20 bp, Artificial Sequence
  MKO10060452_A_Zfp143
  gRNA
tttatccaccacacctcgaa

SEQ ID NO: 60453 - DNA, 20 bp, Artificial Sequence
  MKO10060453_A_Zfp143
  gRNA
ccagacgggagactcattga

SEQ ID NO: 60454 - DNA, 20 bp, Artificial Sequence
  MKO10060454_A_Zfp146
  gRNA
cagcgacgtgcgctgcgaga

SEQ ID NO: 60455 - DNA, 20 bp, Artificial Sequence
  MKO10060455_A_Zfp146
  gRNA
cttctcgtgctccgtcagat

SEQ ID NO: 60456 - DNA, 20 bp, Artificial Sequence
  MKO10060456_A_Zfp146
  gRNA
ttcagggcgtttaatgagta

SEQ ID NO: 60457 - DNA, 20 bp, Artificial Sequence
  MKO10060457_A_Zfp148
  gRNA
taagtgatagttcgttctaa

SEQ ID NO: 60458 - DNA, 20 bp, Artificial Sequence
  MKO10060458_A_Zfp148
  gRNA
gaacgaactatcacttacag

SEQ ID NO: 60459 - DNA, 20 bp, Artificial Sequence
  MKO10060459_A_Zfp148
  gRNA
ccacattcatcacagcgaaa

SEQ ID NO: 60460 - DNA, 20 bp, Artificial Sequence
  MKO10060460_A_Zfp14
  gRNA
agtgctgactaagcgttgag

SEQ ID NO: 60461 - DNA, 20 bp, Artificial Sequence
  MKO10060461_A_Zfp14
  gRNA
gtgaagtatattcgttacag

SEQ ID NO: 60462 - DNA, 20 bp, Artificial Sequence
  MKO10060462_A_Zfp14
  gRNA
tttcagggtttagtgacgtt

SEQ ID NO: 60463 - DNA, 20 bp, Artificial Sequence
  MKO10060463_A_Zfp157
  gRNA
aaaatgcagagagtcgtatg

SEQ ID NO: 60464 - DNA, 20 bp, Artificial Sequence
  MKO10060464_A_Zfp157
  gRNA
cctatagatgtacataatgc

SEQ ID NO: 60465 - DNA, 20 bp, Artificial Sequence
  MKO10060465_A_Zfp157
  gRNA
tactccaaatgagagttgcc

SEQ ID NO: 60466 - DNA, 20 bp, Artificial Sequence
  MKO10060466_A_Zfp160
  gRNA
taggtttgaacgaacactaa

SEQ ID NO: 60467 - DNA, 20 bp, Artificial Sequence
  MKO10060467_A_Zfp160
  gRNA
ggattcttcgatgactctta

SEQ ID NO: 60468 - DNA, 20 bp, Artificial Sequence
  MKO10060468_A_Zfp160
  gRNA
agccatagagttctctcaag

SEQ ID NO: 60469 - DNA, 20 bp, Artificial Sequence
  MKO10060469_A_Zfp169
  gRNA
ggataccggggacgaaagag

SEQ ID NO: 60470 - DNA, 20 bp, Artificial Sequence
  MKO10060470_A_Zfp169
  gRNA
attaatggccttccatgacg

SEQ ID NO: 60471 - DNA, 20 bp, Artificial Sequence
  MKO10060471_A_Zfp169
  gRNA
accaaaactcatcacgcagc

SEQ ID NO: 60472 - DNA, 20 bp, Artificial Sequence
  MKO10060472_A_Zfp174
  gRNA
ctgctcgtgagatccttcgc

SEQ ID NO: 60473 - DNA, 20 bp, Artificial Sequence
  MKO10060473_A_Zfp174
  gRNA
ctgtgcagggtacccccttt

SEQ ID NO: 60474 - DNA, 20 bp, Artificial Sequence
  MKO10060474_A_Zfp174
  gRNA
gtgatgcccgattgttgcaa

SEQ ID NO: 60475 - DNA, 20 bp, Artificial Sequence
  MKO10060475_A_Zfp180
  gRNA
gcgtcctctgatgaacgacg

SEQ ID NO: 60476 - DNA, 20 bp, Artificial Sequence
  MKO10060476_A_Zfp180
  gRNA
gcgcgatgagcttgtaactc

SEQ ID NO: 60477 - DNA, 20 bp, Artificial Sequence
  MKO10060477_A_Zfp180
  gRNA
cccagagaaaaccgtgatcc

SEQ ID NO: 60478 - DNA, 20 bp, Artificial Sequence
  MKO10060478_A_Zfp182
  gRNA
tacctcatgctacatcaacg

SEQ ID NO: 60479 - DNA, 20 bp, Artificial Sequence
  MKO10060479_A_Zfp182
  gRNA
ggcctcgttgatgtagcatg

SEQ ID NO: 60480 - DNA, 20 bp, Artificial Sequence
  MKO10060480_A_Zfp182
  gRNA
gccagatctcattatcaagc

SEQ ID NO: 60481 - DNA, 20 bp, Artificial Sequence
  MKO10060481_A_Zfp184
  gRNA
ataccttccaagggaccgac

SEQ ID NO: 60482 - DNA, 20 bp, Artificial Sequence
  MKO10060482_A_Zfp184
  gRNA
ctgtgtaagtgcaacgaatg

SEQ ID NO: 60483 - DNA, 20 bp, Artificial Sequence
  MKO10060483_A_Zfp184
  gRNA
ggagtaggggacgtccctcg

SEQ ID NO: 60484 - DNA, 20 bp, Artificial Sequence
  MKO10060484_A_Zfp185
  gRNA
gctcggttgtgacgtgagag

SEQ ID NO: 60485 - DNA, 20 bp, Artificial Sequence
  MKO10060485_A_Zfp185
  gRNA
ttgtcaggtctccaaacgca

SEQ ID NO: 60486 - DNA, 20 bp, Artificial Sequence
  MKO10060486_A_Zfp185
  gRNA
tcagagacgaatcaaatgcc

SEQ ID NO: 60487 - DNA, 20 bp, Artificial Sequence
  MKO10060487_A_Zfp189
  gRNA
gataagggcgttcccccgta

SEQ ID NO: 60488 - DNA, 20 bp, Artificial Sequence
  MKO10060488_A_Zfp189
  gRNA
ggcgtccccaagcccaccgc

SEQ ID NO: 60489 - DNA, 20 bp, Artificial Sequence
  MKO10060489_A_Zfp189
  gRNA
ttgtaatctcatccgccatc

SEQ ID NO: 60490 - DNA, 20 bp, Artificial Sequence
  MKO10060490_A_Zfp191
  gRNA
agcatgctcaccggctgacc

SEQ ID NO: 60491 - DNA, 20 bp, Artificial Sequence
  MKO10060491_A_Zfp191
  gRNA
tccgagaactttgccgcctg

SEQ ID NO: 60492 - DNA, 20 bp, Artificial Sequence
  MKO10060492_A_Zfp191
  gRNA
cccaggatgcccacttgagc

SEQ ID NO: 60493 - DNA, 20 bp, Artificial Sequence
  MKO10060493_A_Zfp1
  gRNA
gctaacgagcagcgacttga

SEQ ID NO: 60494 - DNA, 20 bp, Artificial Sequence
  MKO10060494_A_Zfp1
  gRNA
cgctgctcgttagccacaag

SEQ ID NO: 60495 - DNA, 20 bp, Artificial Sequence
  MKO10060495_A_Zfp1
  gRNA
ctacagcaacttactttcag

SEQ ID NO: 60496 - DNA, 20 bp, Artificial Sequence
  MKO10060496_A_Zfp202
  gRNA
ggagaccttgcagcatgacg

SEQ ID NO: 60497 - DNA, 20 bp, Artificial Sequence
  MKO10060497_A_Zfp202
  gRNA
cacctgcccctgccggaatg

SEQ ID NO: 60498 - DNA, 20 bp, Artificial Sequence
  MKO10060498_A_Zfp202
  gRNA
gaggctcttcttctctaatc

SEQ ID NO: 60499 - DNA, 20 bp, Artificial Sequence
  MKO10060499_A_Zfp207
  gRNA
atgcaatgaattgctaaacc

SEQ ID NO: 60500 - DNA, 20 bp, Artificial Sequence
  MKO10060500_A_Zfp207
  gRNA
gcagtaccaaatgcaatacc

SEQ ID NO: 60501 - DNA, 20 bp, Artificial Sequence
  MKO10060501_A_Zfp207
  gRNA
tgcatttggtactgcatcta

SEQ ID NO: 60502 - DNA, 20 bp, Artificial Sequence
  MKO10060502_A_Zfp212
  gRNA
gcttgtagcgaaagctgatc

SEQ ID NO: 60503 - DNA, 20 bp, Artificial Sequence
  MKO10060503_A_Zfp212
  gRNA
ctcgggacatttgtacgggc

SEQ ID NO: 60504 - DNA, 20 bp, Artificial Sequence
  MKO10060504_A_Zfp212
  gRNA
tcgtctgcctcccggcagca

SEQ ID NO: 60505 - DNA, 20 bp, Artificial Sequence
  MKO10060505_A_Zfp213
  gRNA
ctttagccggagcgcctacc

SEQ ID NO: 60506 - DNA, 20 bp, Artificial Sequence
  MKO10060506_A_Zfp213
  gRNA
ccccgacgcgctcccaccag

SEQ ID NO: 60507 - DNA, 20 bp, Artificial Sequence
  MKO10060507_A_Zfp213
  gRNA
tggggagatacgacccagct

SEQ ID NO: 60508 - DNA, 20 bp, Artificial Sequence
  MKO10060508_A_Zfp217
  gRNA
gccgttagtagcgcatcctg

SEQ ID NO: 60509 - DNA, 20 bp, Artificial Sequence
  MKO10060509_A_Zfp217
  gRNA
gccgcaggatgcgctactaa

SEQ ID NO: 60510 - DNA, 20 bp, Artificial Sequence
  MKO10060510_A_Zfp217
  gRNA
cccgtccatgtacacgagga

SEQ ID NO: 60511 - DNA, 20 bp, Artificial Sequence
  MKO10060511_A_Zfp219
  gRNA
tacaccatagccgtcgtgct

SEQ ID NO: 60512 - DNA, 20 bp, Artificial Sequence
  MKO10060512_A_Zfp219
  gRNA
cagatccagctcgccgtcga

SEQ ID NO: 60513 - DNA, 20 bp, Artificial Sequence
  MKO10060513_A_Zfp219
  gRNA
cgagtcgggcttcgcgaagc

SEQ ID NO: 60514 - DNA, 20 bp, Artificial Sequence
  MKO10060514_A_Zfp229
  gRNA
cgcaggtattattgtgtgca

SEQ ID NO: 60515 - DNA, 20 bp, Artificial Sequence
  MKO10060515_A_Zfp229
  gRNA
aagttctctgatgcgtactg

SEQ ID NO: 60516 - DNA, 20 bp, Artificial Sequence
  MKO10060516_A_Zfp229
  gRNA
tggagcaaatctatataccc

SEQ ID NO: 60517 - DNA, 20 bp, Artificial Sequence
  MKO10060517_A_Zfp235
  gRNA
ctccgaggataatggctgtc

SEQ ID NO: 60518 - DNA, 20 bp, Artificial Sequence
  MKO10060518_A_Zfp235
  gRNA
cccacagttgtcgcagcagt

SEQ ID NO: 60519 - DNA, 20 bp, Artificial Sequence
  MKO10060519_A_Zfp235
  gRNA
ggccgtagtcttcagtgaag

SEQ ID NO: 60520 - DNA, 20 bp, Artificial Sequence
  MKO10060520_A_Zfp236
  gRNA
gccagttaacgcgacacatc

SEQ ID NO: 60521 - DNA, 20 bp, Artificial Sequence
  MKO10060521_A_Zfp236
  gRNA
tcctgatgtgtcgcgttaac

SEQ ID NO: 60522 - DNA, 20 bp, Artificial Sequence
  MKO10060522_A_Zfp236
  gRNA
acatattatgctccacgaga

SEQ ID NO: 60523 - DNA, 20 bp, Artificial Sequence
  MKO10060523_A_Zfp239
  gRNA
gtccatcattccgtccatac

SEQ ID NO: 60524 - DNA, 20 bp, Artificial Sequence
  MKO10060524_A_Zfp239
  gRNA
caccggtatggacggaatga

SEQ ID NO: 60525 - DNA, 20 bp, Artificial Sequence
  MKO10060525_A_Zfp239
  gRNA
tgagaagccgtatgcgtgcg

SEQ ID NO: 60526 - DNA, 20 bp, Artificial Sequence
  MKO10060526_A_Zfp248
  gRNA
tcatattcgttacgctcgta

SEQ ID NO: 60527 - DNA, 20 bp, Artificial Sequence
  MKO10060527_A_Zfp248
  gRNA
ccaggagcaagtgtcgttca

SEQ ID NO: 60528 - DNA, 20 bp, Artificial Sequence
  MKO10060528_A_Zfp248
  gRNA
aaagagctttcaccctcgtg

SEQ ID NO: 60529 - DNA, 20 bp, Artificial Sequence
  MKO10060529_A_Zfp251
  gRNA
ccacaccacgtgacgcgtgt

SEQ ID NO: 60530 - DNA, 20 bp, Artificial Sequence
  MKO10060530_A_Zfp251
  gRNA
tctctccaacacgcgtcacg

SEQ ID NO: 60531 - DNA, 20 bp, Artificial Sequence
  MKO10060531_A_Zfp251
  gRNA
actcaccggagtcggggagc

SEQ ID NO: 60532 - DNA, 20 bp, Artificial Sequence
  MKO10060532_A_Zfp259
  gRNA
tcaaggtgtagcgcactccc

SEQ ID NO: 60533 - DNA, 20 bp, Artificial Sequence
  MKO10060533_A_Zfp259
  gRNA
tccctactcacccgtcgtgt

SEQ ID NO: 60534 - DNA, 20 bp, Artificial Sequence
  MKO10060534_A_Zfp259
  gRNA
ctcatcagccgtgcgatctc

SEQ ID NO: 60535 - DNA, 20 bp, Artificial Sequence
  MKO10060535_A_Zfp260
  gRNA
gaataaaccatacgcgtgta

SEQ ID NO: 60536 - DNA, 20 bp, Artificial Sequence
  MKO10060536_A_Zfp260
  gRNA
gagcgatgtaattcgagaaa

SEQ ID NO: 60537 - DNA, 20 bp, Artificial Sequence
  MKO10060537_A_Zfp260
  gRNA
tacatctgagaagtcgccca

SEQ ID NO: 60538 - DNA, 20 bp, Artificial Sequence
  MKO10060538_A_Zfp263
  gRNA
ctttagcattatccgctccc

SEQ ID NO: 60539 - DNA, 20 bp, Artificial Sequence
  MKO10060539_A_Zfp263
  gRNA
atttcagttgcccgagagcc

SEQ ID NO: 60540 - DNA, 20 bp, Artificial Sequence
  MKO10060540_A_Zfp263
  gRNA
catggcaatgtatatctctc

SEQ ID NO: 60541 - DNA, 20 bp, Artificial Sequence
  MKO10060541_A_Zfp266
  gRNA
aacagcactttccgccacct

SEQ ID NO: 60542 - DNA, 20 bp, Artificial Sequence
  MKO10060542_A_Zfp266
  gRNA
tttgcttcgtagacgtagat

SEQ ID NO: 60543 - DNA, 20 bp, Artificial Sequence
  MKO10060543_A_Zfp266
  gRNA
cgtctacgaagcaaacatag

SEQ ID NO: 60544 - DNA, 20 bp, Artificial Sequence
  MKO10060544_A_Zfp26
  gRNA
ccaacttacctacagcggcc

SEQ ID NO: 60545 - DNA, 20 bp, Artificial Sequence
  MKO10060545_A_Zfp26
  gRNA
cttgtcaaaaaatcctgctc

SEQ ID NO: 60546 - DNA, 20 bp, Artificial Sequence
  MKO10060546_A_Zfp26
  gRNA
caaagatttagcaccagagc

SEQ ID NO: 60547 - DNA, 20 bp, Artificial Sequence
  MKO10060547_A_Zfp273
  gRNA
caccagtatggagtctccaa

SEQ ID NO: 60548 - DNA, 20 bp, Artificial Sequence
  MKO10060548_A_Zfp273
  gRNA
cctcaaatcttaaacaccat

SEQ ID NO: 60549 - DNA, 20 bp, Artificial Sequence
  MKO10060549_A_Zfp273
  gRNA
tgctttctccaagccatacc

SEQ ID NO: 60550 - DNA, 20 bp, Artificial Sequence
  MKO10060550_A_Zfp275
  gRNA
attggccctcggggaactcg

SEQ ID NO: 60551 - DNA, 20 bp, Artificial Sequence
  MKO10060551_A_Zfp275
  gRNA
agggcagtgtttactcgcga

SEQ ID NO: 60552 - DNA, 20 bp, Artificial Sequence
  MKO10060552_A_Zfp275
  gRNA
tgtcatttgatattgtaccg

SEQ ID NO: 60553 - DNA, 20 bp, Artificial Sequence
  MKO10060553_A_Zfp276
  gRNA
aatgccccatagcgagagtc

SEQ ID NO: 60554 - DNA, 20 bp, Artificial Sequence
  MKO10060554_A_Zfp276
  gRNA
cctcgtcaacctcggatgat

SEQ ID NO: 60555 - DNA, 20 bp, Artificial Sequence
  MKO10060555_A_Zfp276
  gRNA
accaagccgtgcagacaccg

SEQ ID NO: 60556 - DNA, 20 bp, Artificial Sequence
  MKO10060556_A_Zfp277
  gRNA
ctgtgtgtccgattccgccg

SEQ ID NO: 60557 - DNA, 20 bp, Artificial Sequence
  MKO10060557_A_Zfp277
  gRNA
agctcgttgcagatttccga

SEQ ID NO: 60558 - DNA, 20 bp, Artificial Sequence
  MKO10060558_A_Zfp277
  gRNA
gctggggtccgcggggtccg

SEQ ID NO: 60559 - DNA, 20 bp, Artificial Sequence
  MKO10060559_A_Zfp27
  gRNA
cgccatggctgcgtcgactg

SEQ ID NO: 60560 - DNA, 20 bp, Artificial Sequence
  MKO10060560_A_Zfp27
  gRNA
cgcacggtcgagagatacac

SEQ ID NO: 60561 - DNA, 20 bp, Artificial Sequence
  MKO10060561_A_Zfp27
  gRNA
cgatagagactcctttgagc

SEQ ID NO: 60562 - DNA, 20 bp, Artificial Sequence
  MKO10060562_A_Zfp280b
  gRNA
cgaccgagtgcacacgtcac

SEQ ID NO: 60563 - DNA, 20 bp, Artificial Sequence
  MKO10060563_A_Zfp280b
  gRNA
tccgtcgaccttgattcagc

SEQ ID NO: 60564 - DNA, 20 bp, Artificial Sequence
  MKO10060564_A_Zfp280b
  gRNA
ttagagcaaccacgactcag

SEQ ID NO: 60565 - DNA, 20 bp, Artificial Sequence
  MKO10060565_A_Zfp280c
  gRNA
gcaaccagtgcattcgatga

SEQ ID NO: 60566 - DNA, 20 bp, Artificial Sequence
  MKO10060566_A_Zfp280c
  gRNA
tttctgtagtgttgactcgt

SEQ ID NO: 60567 - DNA, 20 bp, Artificial Sequence
  MKO10060567_A_Zfp280c
  gRNA
agtccctttgaagatgaacc

SEQ ID NO: 60568 - DNA, 20 bp, Artificial Sequence
  MKO10060568_A_Zfp280d
  gRNA
aagaatggtatactcaatcg

SEQ ID NO: 60569 - DNA, 20 bp, Artificial Sequence
  MKO10060569_A_Zfp280d
  gRNA
ttcaggcagcgttgacttgt

SEQ ID NO: 60570 - DNA, 20 bp, Artificial Sequence
  MKO10060570_A_Zfp280d
  gRNA
atctgcttacttgaaatagc

SEQ ID NO: 60571 - DNA, 20 bp, Artificial Sequence
  MKO10060571_A_Zfp281
  gRNA
tcaccgttaccagacgtagt

SEQ ID NO: 60572 - DNA, 20 bp, Artificial Sequence
  MKO10060572_A_Zfp281
  gRNA
aaggccgcggctgacgccgc

SEQ ID NO: 60573 - DNA, 20 bp, Artificial Sequence
  MKO10060573_A_Zfp281
  gRNA
gatttctgcccaactacgtc

SEQ ID NO: 60574 - DNA, 20 bp, Artificial Sequence
  MKO10060574_A_Zfp282
  gRNA
gtagacagcaatgtcgacga

SEQ ID NO: 60575 - DNA, 20 bp, Artificial Sequence
  MKO10060575_A_Zfp282
  gRNA
cggcctgctgcaacgtcgcc

SEQ ID NO: 60576 - DNA, 20 bp, Artificial Sequence
  MKO10060576_A_Zfp282
  gRNA
tctccaggcgacgttgcagc

SEQ ID NO: 60577 - DNA, 20 bp, Artificial Sequence
  MKO10060577_A_Zfp286
  gRNA
cgaactcttcacttaccgtt

SEQ ID NO: 60578 - DNA, 20 bp, Artificial Sequence
  MKO10060578_A_Zfp286
  gRNA
ggccatggactttacgccag

SEQ ID NO: 60579 - DNA, 20 bp, Artificial Sequence
  MKO10060579_A_Zfp286
  gRNA
tcctgggacgttcacacgct

SEQ ID NO: 60580 - DNA, 20 bp, Artificial Sequence
  MKO10060580_A_Zfp287
  gRNA
cggaacccaaaccgtaaaac

SEQ ID NO: 60581 - DNA, 20 bp, Artificial Sequence
  MKO10060581_A_Zfp287
  gRNA
cttggtgacattcaatgacg

SEQ ID NO: 60582 - DNA, 20 bp, Artificial Sequence
  MKO10060582_A_Zfp287
  gRNA
tatctgtcaattgcgatgtc

SEQ ID NO: 60583 - DNA, 20 bp, Artificial Sequence
  MKO10060583_A_Zfp28
  gRNA
gtgcagtgttcacgacacac

SEQ ID NO: 60584 - DNA, 20 bp, Artificial Sequence
  MKO10060584_A_Zfp28
  gRNA
ccatagacctaagtgctcca

SEQ ID NO: 60585 - DNA, 20 bp, Artificial Sequence
  MKO10060585_A_Zfp28
  gRNA
ctacaggaacctagcatccc

SEQ ID NO: 60586 - DNA, 20 bp, Artificial Sequence
  MKO10060586_A_Zfp292
  gRNA
gtcgagctttaacgtagctc

SEQ ID NO: 60587 - DNA, 20 bp, Artificial Sequence
  MKO10060587_A_Zfp292
  gRNA
tgccaagcgttccagcacca

SEQ ID NO: 60588 - DNA, 20 bp, Artificial Sequence
  MKO10060588_A_Zfp292
  gRNA
ggtagcgcatgagacactga

SEQ ID NO: 60589 - DNA, 20 bp, Artificial Sequence
  MKO10060589_A_Zfp296
  gRNA
tctccccatgtcccgccgca

SEQ ID NO: 60590 - DNA, 20 bp, Artificial Sequence
  MKO10060590_A_Zfp296
  gRNA
gatctacgcggcgaggcacg

SEQ ID NO: 60591 - DNA, 20 bp, Artificial Sequence
  MKO10060591_A_Zfp296
  gRNA
aaccgccaccgtcgcaccca

SEQ ID NO: 60592 - DNA, 20 bp, Artificial Sequence
  MKO10060592_A_Zfp2
  gRNA
catcccttatagtgcaccag

SEQ ID NO: 60593 - DNA, 20 bp, Artificial Sequence
  MKO10060593_A_Zfp2
  gRNA
gatcctacctgttggttaaa

SEQ ID NO: 60594 - DNA, 20 bp, Artificial Sequence
  MKO10060594_A_Zfp2
  gRNA
gtacaccaagttatacacac

SEQ ID NO: 60595 - DNA, 20 bp, Artificial Sequence
  MKO10060595_A_Zfp300
  gRNA
tctaaagaggcgatcacttc

SEQ ID NO: 60596 - DNA, 20 bp, Artificial Sequence
  MKO10060596_A_Zfp300
  gRNA
gagcactaaggcttagctta

SEQ ID NO: 60597 - DNA, 20 bp, Artificial Sequence
  MKO10060597_A_Zfp300
  gRNA
gctgcaaagctcatactact

SEQ ID NO: 60598 - DNA, 20 bp, Artificial Sequence
  MKO10060598_A_Zfp30
  gRNA
caagccagttcttgcgattc

SEQ ID NO: 60599 - DNA, 20 bp, Artificial Sequence
  MKO10060599_A_Zfp30
  gRNA
gtgcggcaagagcttccggc

SEQ ID NO: 60600 - DNA, 20 bp, Artificial Sequence
  MKO10060600_A_Zfp30
  gRNA
acgaaattaatctatctccg

SEQ ID NO: 60601 - DNA, 20 bp, Artificial Sequence
  MKO10060601_A_Zfp316
  gRNA
gcgaagcgagcgccgcattc

SEQ ID NO: 60602 - DNA, 20 bp, Artificial Sequence
  MKO10060602_A_Zfp316
  gRNA
tccggacggtttccccattc

SEQ ID NO: 60603 - DNA, 20 bp, Artificial Sequence
  MKO10060603_A_Zfp316
  gRNA
gaggagggagatgtcgtcac

SEQ ID NO: 60604 - DNA, 20 bp, Artificial Sequence
  MKO10060604_A_Zfp317
  gRNA
ccataaataggttatcaggt

SEQ ID NO: 60605 - DNA, 20 bp, Artificial Sequence
  MKO10060605_A_Zfp317
  gRNA
ttatagcaatctaagttcac

SEQ ID NO: 60606 - DNA, 20 bp, Artificial Sequence
  MKO10060606_A_Zfp317
  gRNA
gaactacatctaaagtcaaa

SEQ ID NO: 60607 - DNA, 20 bp, Artificial Sequence
  MKO10060607_A_Zfp318
  gRNA
tcgcgctgccgtctttcgac

SEQ ID NO: 60608 - DNA, 20 bp, Artificial Sequence
  MKO10060608_A_Zfp318
  gRNA
gacggccgcggagaccatcc

SEQ ID NO: 60609 - DNA, 20 bp, Artificial Sequence
  MKO10060609_A_Zfp318
  gRNA
aaggtccagttctcgaaact

SEQ ID NO: 60610 - DNA, 20 bp, Artificial Sequence
  MKO10060610_A_Zfp319
  gRNA
cggaagggccgctcgccgct

SEQ ID NO: 60611 - DNA, 20 bp, Artificial Sequence
  MKO10060611_A_Zfp319
  gRNA
aaaaaaagcggcgctcgcac

SEQ ID NO: 60612 - DNA, 20 bp, Artificial Sequence
  MKO10060612_A_Zfp319
  gRNA
cgccagaatgcgcgtacatg

SEQ ID NO: 60613 - DNA, 20 bp, Artificial Sequence
  MKO10060613_A_Zfp322a
  gRNA
tgatctaagttctcacgcat

SEQ ID NO: 60614 - DNA, 20 bp, Artificial Sequence
  MKO10060614_A_Zfp322a
  gRNA
caacgaagtccatacctagg

SEQ ID NO: 60615 - DNA, 20 bp, Artificial Sequence
  MKO10060615_A_Zfp322a
  gRNA
ctcgaagtgccaacctaatt

SEQ ID NO: 60616 - DNA, 20 bp, Artificial Sequence
  MKO10060616_A_Zfp324
  gRNA
acccgcggtggatttgtcag

SEQ ID NO: 60617 - DNA, 20 bp, Artificial Sequence
  MKO10060617_A_Zfp324
  gRNA
ttgcacgccctacattcgaa

SEQ ID NO: 60618 - DNA, 20 bp, Artificial Sequence
  MKO10060618_A_Zfp324
  gRNA
ggccgctgacaaatccaccg

SEQ ID NO: 60619 - DNA, 20 bp, Artificial Sequence
  MKO10060619_A_Zfp326
  gRNA
attacgtgcactctacttgc

SEQ ID NO: 60620 - DNA, 20 bp, Artificial Sequence
  MKO10060620_A_Zfp326
  gRNA
atagggctggatcgtgacta

SEQ ID NO: 60621 - DNA, 20 bp, Artificial Sequence
  MKO10060621_A_Zfp326
  gRNA
gcttatcctgaaagtacgtt

SEQ ID NO: 60622 - DNA, 20 bp, Artificial Sequence
  MKO10060622_A_Zfp329
  gRNA
tcctgaagagtttacgacac

SEQ ID NO: 60623 - DNA, 20 bp, Artificial Sequence
  MKO10060623_A_Zfp329
  gRNA
gttcccttaactgcataact

SEQ ID NO: 60624 - DNA, 20 bp, Artificial Sequence
  MKO10060624_A_Zfp329
  gRNA
accagtgtcgtaaactcttc

SEQ ID NO: 60625 - DNA, 20 bp, Artificial Sequence
  MKO10060625_A_Zfp330
  gRNA
agcagcttaccaccatagca

SEQ ID NO: 60626 - DNA, 20 bp, Artificial Sequence
  MKO10060626_A_Zfp330
  gRNA
acacactctgcatctgtgag

SEQ ID NO: 60627 - DNA, 20 bp, Artificial Sequence
  MKO10060627_A_Zfp330
  gRNA
gagcgaggggtatgggacca

SEQ ID NO: 60628 - DNA, 20 bp, Artificial Sequence
  MKO10060628_A_Zfp334
  gRNA
tggttctcttgtgcgcgaag

SEQ ID NO: 60629 - DNA, 20 bp, Artificial Sequence
  MKO10060629_A_Zfp334
  gRNA
ttgtcacgacagaaccacgc

SEQ ID NO: 60630 - DNA, 20 bp, Artificial Sequence
  MKO10060630_A_Zfp334
  gRNA
cctacgcctgcaattactgt

SEQ ID NO: 60631 - DNA, 20 bp, Artificial Sequence
  MKO10060631_A_Zfp335
  gRNA
ctccagatcgtcaatcgccc

SEQ ID NO: 60632 - DNA, 20 bp, Artificial Sequence
  MKO10060632_A_Zfp335
  gRNA
aagtgccccacttccgtaca

SEQ ID NO: 60633 - DNA, 20 bp, Artificial Sequence
  MKO10060633_A_Zfp335
  gRNA
aagatcatcgaatctaccat

SEQ ID NO: 60634 - DNA, 20 bp, Artificial Sequence
  MKO10060634_A_Zfp341
  gRNA
tctggccgtccagtccttac

SEQ ID NO: 60635 - DNA, 20 bp, Artificial Sequence
  MKO10060635_A_Zfp341
  gRNA
agcacccgctgccgtccagc

SEQ ID NO: 60636 - DNA, 20 bp, Artificial Sequence
  MKO10060636_A_Zfp341
  gRNA
gatgcagccgtacccgcccc

SEQ ID NO: 60637 - DNA, 20 bp, Artificial Sequence
  MKO10060637_A_Zfp345
  gRNA
gaagatgctcttccatatta

SEQ ID NO: 60638 - DNA, 20 bp, Artificial Sequence
  MKO10060638_A_Zfp345
  gRNA
aaaactactgtgatgtatga

SEQ ID NO: 60639 - DNA, 20 bp, Artificial Sequence
  MKO10060639_A_Zfp345
  gRNA
tataaattctttcttgtctt

SEQ ID NO: 60640 - DNA, 20 bp, Artificial Sequence
  MKO10060640_A_Zfp346
  gRNA
aacattcaacgaccctgcca

SEQ ID NO: 60641 - DNA, 20 bp, Artificial Sequence
  MKO10060641_A_Zfp346
  gRNA
tcagctttaggctctttgcg

SEQ ID NO: 60642 - DNA, 20 bp, Artificial Sequence
  MKO10060642_A_Zfp346
  gRNA
caataaagggggacgtgaag

SEQ ID NO: 60643 - DNA, 20 bp, Artificial Sequence
  MKO10060643_A_Zfp352
  gRNA
cctcaggtgacaagtccaat

SEQ ID NO: 60644 - DNA, 20 bp, Artificial Sequence
  MKO10060644_A_Zfp352
  gRNA
tgtcatatgactgttgtagg

SEQ ID NO: 60645 - DNA, 20 bp, Artificial Sequence
  MKO10060645_A_Zfp352
  gRNA
aaaaacgaccatgtgcaccc

SEQ ID NO: 60646 - DNA, 20 bp, Artificial Sequence
  MKO10060646_A_Zfp354a
  gRNA
ctacatttatagcgtttatc

SEQ ID NO: 60647 - DNA, 20 bp, Artificial Sequence
  MKO10060647_A_Zfp354a
  gRNA
gtggtaaatcctttggccga

SEQ ID NO: 60648 - DNA, 20 bp, Artificial Sequence
  MKO10060648_A_Zfp354a
  gRNA
gtcgttgacatttgaagacg

SEQ ID NO: 60649 - DNA, 20 bp, Artificial Sequence
  MKO10060649_A_Zfp354b
  gRNA
atgatctccgtgttgcaaca

SEQ ID NO: 60650 - DNA, 20 bp, Artificial Sequence
  MKO10060650_A_Zfp354b
  gRNA
agcgttggcctgaagtcaat

SEQ ID NO: 60651 - DNA, 20 bp, Artificial Sequence
  MKO10060651_A_Zfp354b
  gRNA
ctatagaattcatatcgaag

SEQ ID NO: 60652 - DNA, 20 bp, Artificial Sequence
  MKO10060652_A_Zfp354c
  gRNA
gagagaaaccttaccgctgc

SEQ ID NO: 60653 - DNA, 20 bp, Artificial Sequence
  MKO10060653_A_Zfp354c
  gRNA
aactcccacgggcttcgagc

SEQ ID NO: 60654 - DNA, 20 bp, Artificial Sequence
  MKO10060654_A_Zfp354c
  gRNA
gcttcaatacctcctgtgat

SEQ ID NO: 60655 - DNA, 20 bp, Artificial Sequence
  MKO10060655_A_Zfp358
  gRNA
gggccaatcacgtcaggatc

SEQ ID NO: 60656 - DNA, 20 bp, Artificial Sequence
  MKO10060656_A_Zfp358
  gRNA
cttcggtcatggctcgttgc

SEQ ID NO: 60657 - DNA, 20 bp, Artificial Sequence
  MKO10060657_A_Zfp358
  gRNA
cgaagctccacgatccatct

SEQ ID NO: 60658 - DNA, 20 bp, Artificial Sequence
  MKO10060658_A_Zfp35
  gRNA
gtttaaccatgcctgagtgc

SEQ ID NO: 60659 - DNA, 20 bp, Artificial Sequence
  MKO10060659_A_Zfp35
  gRNA
cttgagattcgtaactgaat

SEQ ID NO: 60660 - DNA, 20 bp, Artificial Sequence
  MKO10060660_A_Zfp35
  gRNA
gatcagcgtgaactctttga

SEQ ID NO: 60661 - DNA, 20 bp, Artificial Sequence
  MKO10060661_A_Zfp362
  gRNA
gatttaacaacccgtacttc

SEQ ID NO: 60662 - DNA, 20 bp, Artificial Sequence
  MKO10060662_A_Zfp362
  gRNA
cctcgcgtgcagtgccacgt

SEQ ID NO: 60663 - DNA, 20 bp, Artificial Sequence
  MKO10060663_A_Zfp362
  gRNA
tgggcagcgacatgaccgcc

SEQ ID NO: 60664 - DNA, 20 bp, Artificial Sequence
  MKO10060664_A_Zfp365
  gRNA
ccgagaaaagttcaatcgca

SEQ ID NO: 60665 - DNA, 20 bp, Artificial Sequence
  MKO10060665_A_Zfp365
  gRNA
ccagaaaaccgccgaactgt

SEQ ID NO: 60666 - DNA, 20 bp, Artificial Sequence
  MKO10060666_A_Zfp365
  gRNA
atgatattcacgattgctgt

SEQ ID NO: 60667 - DNA, 20 bp, Artificial Sequence
  MKO10060667_A_Zfp366
  gRNA
cgtagtagctgtcgtcgatc

SEQ ID NO: 60668 - DNA, 20 bp, Artificial Sequence
  MKO10060668_A_Zfp366
  gRNA
ccacacgcgtgctcccgttg

SEQ ID NO: 60669 - DNA, 20 bp, Artificial Sequence
  MKO10060669_A_Zfp366
  gRNA
gcccgttcgcactgcgcttc

SEQ ID NO: 60670 - DNA, 20 bp, Artificial Sequence
  MKO10060670_A_Zfp367
  gRNA
tgtttgctgagtgcgtccgt

SEQ ID NO: 60671 - DNA, 20 bp, Artificial Sequence
  MKO10060671_A_Zfp367
  gRNA
taacaggatggaatccgacg

SEQ ID NO: 60672 - DNA, 20 bp, Artificial Sequence
  MKO10060672_A_Zfp367
  gRNA
tgtgagggctactggcggag

SEQ ID NO: 60673 - DNA, 20 bp, Artificial Sequence
  MKO10060673_A_Zfp369
  gRNA
gagtcccctgatgaagatta

SEQ ID NO: 60674 - DNA, 20 bp, Artificial Sequence
  MKO10060674_A_Zfp369
  gRNA
tgtatcactgagatttaccg

SEQ ID NO: 60675 - DNA, 20 bp, Artificial Sequence
  MKO10060675_A_Zfp369
  gRNA
gggattgaatcagggcattc

SEQ ID NO: 60676 - DNA, 20 bp, Artificial Sequence
  MKO10060676_A_Zfp36l1
  gRNA
tcatcggcgctcaggatagg

SEQ ID NO: 60677 - DNA, 20 bp, Artificial Sequence
  MKO10060677_A_Zfp36l1
  gRNA
cccgtacgggcaaaagccga

SEQ ID NO: 60678 - DNA, 20 bp, Artificial Sequence
  MKO10060678_A_Zfp36l1
  gRNA
aacttcgctcaagtcaaaaa

SEQ ID NO: 60679 - DNA, 20 bp, Artificial Sequence
  MKO10060679_A_Zfp36l2
  gRNA
cgatatcgacttcttgtgca

SEQ ID NO: 60680 - DNA, 20 bp, Artificial Sequence
  MKO10060680_A_Zfp36l2
  gRNA
cgcgtgcgccaaacgctcgc

SEQ ID NO: 60681 - DNA, 20 bp, Artificial Sequence
  MKO10060681_A_Zfp36l2
  gRNA
gccgccgctcgtccgcgttg

SEQ ID NO: 60682 - DNA, 20 bp, Artificial Sequence
  MKO10060682_A_Zfp36l3
  gRNA
cggtgtcgcagatccacccg

SEQ ID NO: 60683 - DNA, 20 bp, Artificial Sequence
  MKO10060683_A_Zfp36l3
  gRNA
tgagtcgctagagttcgacg

SEQ ID NO: 60684 - DNA, 20 bp, Artificial Sequence
  MKO10060684_A_Zfp36l3
  gRNA
ttgacagggtacgcagttcg

SEQ ID NO: 60685 - DNA, 20 bp, Artificial Sequence
  MKO10060685_A_Zfp36
  gRNA
gagctcggtcttgtatcgag

SEQ ID NO: 60686 - DNA, 20 bp, Artificial Sequence
  MKO10060686_A_Zfp36
  gRNA
aactcggactccatcccgtc

SEQ ID NO: 60687 - DNA, 20 bp, Artificial Sequence
  MKO10060687_A_Zfp36
  gRNA
ggatctctctgccatctacg

SEQ ID NO: 60688 - DNA, 20 bp, Artificial Sequence
  MKO10060688_A_Zfp37
  gRNA
ctcaccgcatcgctttccgc

SEQ ID NO: 60689 - DNA, 20 bp, Artificial Sequence
  MKO10060689_A_Zfp37
  gRNA
cgcccacaagcaatctccgc

SEQ ID NO: 60690 - DNA, 20 bp, Artificial Sequence
  MKO10060690_A_Zfp37
  gRNA
gaatccgcatatgtttagtc

SEQ ID NO: 60691 - DNA, 20 bp, Artificial Sequence
  MKO10060691_A_Zfp382
  gRNA
cctaccttatcgagcacgag

SEQ ID NO: 60692 - DNA, 20 bp, Artificial Sequence
  MKO10060692_A_Zfp382
  gRNA
ggatccgctcgtgctcgata

SEQ ID NO: 60693 - DNA, 20 bp, Artificial Sequence
  MKO10060693_A_Zfp382
  gRNA
acctgatatgatccgcaagt

SEQ ID NO: 60694 - DNA, 20 bp, Artificial Sequence
  MKO10060694_A_Zfp383
  gRNA
ggtggaccacgccaaaaata

SEQ ID NO: 60695 - DNA, 20 bp, Artificial Sequence
  MKO10060695_A_Zfp383
  gRNA
ccccatagctgtaccgaatg

SEQ ID NO: 60696 - DNA, 20 bp, Artificial Sequence
  MKO10060696_A_Zfp383
  gRNA
aagcttcgagctctgcgtaa

SEQ ID NO: 60697 - DNA, 20 bp, Artificial Sequence
  MKO10060697_A_Zfp384
  gRNA
ccgcaagaagaagcggatgc

SEQ ID NO: 60698 - DNA, 20 bp, Artificial Sequence
  MKO10060698_A_Zfp384
  gRNA
acctgtagggcttgcgagcc

SEQ ID NO: 60699 - DNA, 20 bp, Artificial Sequence
  MKO10060699_A_Zfp384
  gRNA
caggaaccactgtgatattc

SEQ ID NO: 60700 - DNA, 20 bp, Artificial Sequence
  MKO10060700_A_Zfp385a
  gRNA
cgccatgcccgaagagtcaa

SEQ ID NO: 60701 - DNA, 20 bp, Artificial Sequence
  MKO10060701_A_Zfp385a
  gRNA
gatggtgtagcccctcgtcc

SEQ ID NO: 60702 - DNA, 20 bp, Artificial Sequence
  MKO10060702_A_Zfp385a
  gRNA
ccccatcatgcagccaccga

SEQ ID NO: 60703 - DNA, 20 bp, Artificial Sequence
  MKO10060703_A_Zfp385b
  gRNA
agcgccgtttgtgctcttgg

SEQ ID NO: 60704 - DNA, 20 bp, Artificial Sequence
  MKO10060704_A_Zfp385b
  gRNA
attagcctttgcgctgtcct

SEQ ID NO: 60705 - DNA, 20 bp, Artificial Sequence
  MKO10060705_A_Zfp385b
  gRNA
actctactgctcactatgca

SEQ ID NO: 60706 - DNA, 20 bp, Artificial Sequence
  MKO10060706_A_Zfp385c
  gRNA
acttcagctcccgccgaccc

SEQ ID NO: 60707 - DNA, 20 bp, Artificial Sequence
  MKO10060707_A_Zfp385c
  gRNA
tgagcggggtggtgccattg

SEQ ID NO: 60708 - DNA, 20 bp, Artificial Sequence
  MKO10060708_A_Zfp385c
  gRNA
ggcccataccgtgctgaagt

SEQ ID NO: 60709 - DNA, 20 bp, Artificial Sequence
  MKO10060709_A_Zfp386
  gRNA
gcagttgaccttccgcgacg

SEQ ID NO: 60710 - DNA, 20 bp, Artificial Sequence
  MKO10060710_A_Zfp386
  gRNA
agaagtcaacggccacgtcg

SEQ ID NO: 60711 - DNA, 20 bp, Artificial Sequence
  MKO10060711_A_Zfp386
  gRNA
tgcaataatggatcagtagc

SEQ ID NO: 60712 - DNA, 20 bp, Artificial Sequence
  MKO10060712_A_Zfp395
  gRNA
ggaacatcgacgtcccgaag

SEQ ID NO: 60713 - DNA, 20 bp, Artificial Sequence
  MKO10060713_A_Zfp395
  gRNA
acgtcgatgttcctagacac

SEQ ID NO: 60714 - DNA, 20 bp, Artificial Sequence
  MKO10060714_A_Zfp395
  gRNA
caaagttctccgttcaattg

SEQ ID NO: 60715 - DNA, 20 bp, Artificial Sequence
  MKO10060715_A_Zfp397
  gRNA
agtcgccccagagcctctcg

SEQ ID NO: 60716 - DNA, 20 bp, Artificial Sequence
  MKO10060716_A_Zfp397
  gRNA
aattatttcgccagcaattc

SEQ ID NO: 60717 - DNA, 20 bp, Artificial Sequence
  MKO10060717_A_Zfp397
  gRNA
cttgactaaaactgcccctg

SEQ ID NO: 60718 - DNA, 20 bp, Artificial Sequence
  MKO10060718_A_Zfp398
  gRNA
gtagatggagacgtcatcga

SEQ ID NO: 60719 - DNA, 20 bp, Artificial Sequence
  MKO10060719_A_Zfp398
  gRNA
ttaccttcactggggtctgc

SEQ ID NO: 60720 - DNA, 20 bp, Artificial Sequence
  MKO10060720_A_Zfp398
  gRNA
ggctgaggcgaccgccgctc

SEQ ID NO: 60721 - DNA, 20 bp, Artificial Sequence
  MKO10060721_A_Zfp39
  gRNA
cgtgccggttataagcccta

SEQ ID NO: 60722 - DNA, 20 bp, Artificial Sequence
  MKO10060722_A_Zfp39
  gRNA
ctcggactcgccaaacttac

SEQ ID NO: 60723 - DNA, 20 bp, Artificial Sequence
  MKO10060723_A_Zfp39
  gRNA
tctagtttcaagacatcgac

SEQ ID NO: 60724 - DNA, 20 bp, Artificial Sequence
  MKO10060724_A_Zfp3
  gRNA
cagatgagaggtccgcctga

SEQ ID NO: 60725 - DNA, 20 bp, Artificial Sequence
  MKO10060725_A_Zfp3
  gRNA
aaggctggagttagtcccga

SEQ ID NO: 60726 - DNA, 20 bp, Artificial Sequence
  MKO10060726_A_Zfp3
  gRNA
atcttcaagaagtcgtcctc

SEQ ID NO: 60727 - DNA, 20 bp, Artificial Sequence
  MKO10060727_A_Zfp407
  gRNA
atgccctcaccaagcaccgt

SEQ ID NO: 60728 - DNA, 20 bp, Artificial Sequence
  MKO10060728_A_Zfp407
  gRNA
tgagtagtggcacgtgggcc

SEQ ID NO: 60729 - DNA, 20 bp, Artificial Sequence
  MKO10060729_A_Zfp407
  gRNA
actgacctgtatgctgccga

SEQ ID NO: 60730 - DNA, 20 bp, Artificial Sequence
  MKO10060730_A_Zfp408
  gRNA
caaagctgggccgacgctac

SEQ ID NO: 60731 - DNA, 20 bp, Artificial Sequence
  MKO10060731_A_Zfp408
  gRNA
ctatgggatgactcgtgacc

SEQ ID NO: 60732 - DNA, 20 bp, Artificial Sequence
  MKO10060732_A_Zfp408
  gRNA
gggaatgaagacaccgcacg

SEQ ID NO: 60733 - DNA, 20 bp, Artificial Sequence
  MKO10060733_A_Zfp40
  gRNA
attcattagatggatcccat

SEQ ID NO: 60734 - DNA, 20 bp, Artificial Sequence
  MKO10060734_A_Zfp40
  gRNA
cgtatttaccacatatgcaa

SEQ ID NO: 60735 - DNA, 20 bp, Artificial Sequence
  MKO10060735_A_Zfp40
  gRNA
catgtatagagctctttgag

SEQ ID NO: 60736 - DNA, 20 bp, Artificial Sequence
  MKO10060736_A_Zfp410
  gRNA
tgcagccgactaatgttacc

SEQ ID NO: 60737 - DNA, 20 bp, Artificial Sequence
  MKO10060737_A_Zfp410
  gRNA
cttctgaacctaacgagagc

SEQ ID NO: 60738 - DNA, 20 bp, Artificial Sequence
  MKO10060738_A_Zfp410
  gRNA
cccacctacctgctctcgtt

SEQ ID NO: 60739 - DNA, 20 bp, Artificial Sequence
  MKO10060739_A_Zfp414
  gRNA
ccctcgactgcgcccattcc

SEQ ID NO: 60740 - DNA, 20 bp, Artificial Sequence
  MKO10060740_A_Zfp414
  gRNA
cccagacgccgtccaccgcc

SEQ ID NO: 60741 - DNA, 20 bp, Artificial Sequence
  MKO10060741_A_Zfp414
  gRNA
gccaggaatgggcgcagtcg

SEQ ID NO: 60742 - DNA, 20 bp, Artificial Sequence
  MKO10060742_A_Zfp418
  gRNA
ttgcatctaagtgacctacc

SEQ ID NO: 60743 - DNA, 20 bp, Artificial Sequence
  MKO10060743_A_Zfp418
  gRNA
gtttaataaggttggcgctt

SEQ ID NO: 60744 - DNA, 20 bp, Artificial Sequence
  MKO10060744_A_Zfp418
  gRNA
ccagcatcacatcaagatac

SEQ ID NO: 60745 - DNA, 20 bp, Artificial Sequence
  MKO10060745_A_Zfp41
  gRNA
gacgcttccgatgccggatg

SEQ ID NO: 60746 - DNA, 20 bp, Artificial Sequence
  MKO10060746_A_Zfp41
  gRNA
tgcgcaaaaggccactgtca

SEQ ID NO: 60747 - DNA, 20 bp, Artificial Sequence
  MKO10060747_A_Zfp41
  gRNA
aaagatatgtgcttcgtcct

SEQ ID NO: 60748 - DNA, 20 bp, Artificial Sequence
  MKO10060748_A_Zfp420
  gRNA
tgctgaggtaggcgcgtgcc

SEQ ID NO: 60749 - DNA, 20 bp, Artificial Sequence
  MKO10060749_A_Zfp420
  gRNA
cactacttatgcaacatcaa

SEQ ID NO: 60750 - DNA, 20 bp, Artificial Sequence
  MKO10060750_A_Zfp420
  gRNA
gagttgtgagcttcgaataa

SEQ ID NO: 60751 - DNA, 20 bp, Artificial Sequence
  MKO10060751_A_Zfp422
  gRNA
caagcccgagtcgaagcgaa

SEQ ID NO: 60752 - DNA, 20 bp, Artificial Sequence
  MKO10060752_A_Zfp422
  gRNA
ggtggccattcgcttcgact

SEQ ID NO: 60753 - DNA, 20 bp, Artificial Sequence
  MKO10060753_A_Zfp422
  gRNA
tcccataaatgtgccgattg

SEQ ID NO: 60754 - DNA, 20 bp, Artificial Sequence
  MKO10060754_A_Zfp423
  gRNA
cccagtctcctccgacgtcg

SEQ ID NO: 60755 - DNA, 20 bp, Artificial Sequence
  MKO10060755_A_Zfp423
  gRNA
tcacaacatccggcccggcg

SEQ ID NO: 60756 - DNA, 20 bp, Artificial Sequence
  MKO10060756_A_Zfp423
  gRNA
tctcgttctcgaacgtcatc

SEQ ID NO: 60757 - DNA, 20 bp, Artificial Sequence
  MKO10060757_A_Zfp426
  gRNA
caaatgttcagcgttccagc

SEQ ID NO: 60758 - DNA, 20 bp, Artificial Sequence
  MKO10060758_A_Zfp426
  gRNA
ttccaaccaagagatcaaac

SEQ ID NO: 60759 - DNA, 20 bp, Artificial Sequence
  MKO10060759_A_Zfp426
  gRNA
gattgtggactttacccaag

SEQ ID NO: 60760 - DNA, 20 bp, Artificial Sequence
  MKO10060760_A_Zfp428
  gRNA
gaggaggaaccgtctcgcac

SEQ ID NO: 60761 - DNA, 20 bp, Artificial Sequence
  MKO10060761_A_Zfp428
  gRNA
gatgaccccgaatatgaccc

SEQ ID NO: 60762 - DNA, 20 bp, Artificial Sequence
  MKO10060762_A_Zfp428
  gRNA
acccgtgaacccactgagac

SEQ ID NO: 60763 - DNA, 20 bp, Artificial Sequence
  MKO10060763_A_Zfp429
  gRNA
tccccctcctctaccgcttc

SEQ ID NO: 60764 - DNA, 20 bp, Artificial Sequence
  MKO10060764_A_Zfp429
  gRNA
gacacattcttcatacatgt

SEQ ID NO: 60765 - DNA, 20 bp, Artificial Sequence
  MKO10060765_A_Zfp429
  gRNA
tccagttgtctctgacaaga

SEQ ID NO: 60766 - DNA, 20 bp, Artificial Sequence
  MKO10060766_A_Zfp42
  gRNA
ggggcgagctcattacttgc

SEQ ID NO: 60767 - DNA, 20 bp, Artificial Sequence
  MKO10060767_A_Zfp42
  gRNA
actctgcacacacgtgccgc

SEQ ID NO: 60768 - DNA, 20 bp, Artificial Sequence
  MKO10060768_A_Zfp42
  gRNA
cgcaagagacgcctccgctg

SEQ ID NO: 60769 - DNA, 20 bp, Artificial Sequence
  MKO10060769_A_Zfp433
  gRNA
tattcttaccgatagcagtg

SEQ ID NO: 60770 - DNA, 20 bp, Artificial Sequence
  MKO10060770_A_Zfp433
  gRNA
tgaacttctctcatgaagag

SEQ ID NO: 60771 - DNA, 20 bp, Artificial Sequence
  MKO10060771_A_Zfp433
  gRNA
ttgatagtattcttcaacat

SEQ ID NO: 60772 - DNA, 20 bp, Artificial Sequence
  MKO10060772_A_Zfp438
  gRNA
cgacagatcccgcaactata

SEQ ID NO: 60773 - DNA, 20 bp, Artificial Sequence
  MKO10060773_A_Zfp438
  gRNA
gcacagccgtatgagacgcc

SEQ ID NO: 60774 - DNA, 20 bp, Artificial Sequence
  MKO10060774_A_Zfp438
  gRNA
ggagcatccgatctgctgcc

SEQ ID NO: 60775 - DNA, 20 bp, Artificial Sequence
  MKO10060775_A_Zfp442
  gRNA
tgcgtatcagagccatcctc

SEQ ID NO: 60776 - DNA, 20 bp, Artificial Sequence
  MKO10060776_A_Zfp442
  gRNA
cactataagattaatgaatg

SEQ ID NO: 60777 - DNA, 20 bp, Artificial Sequence
  MKO10060777_A_Zfp442
  gRNA
aaacccttcaagtgtcaaag

SEQ ID NO: 60778 - DNA, 20 bp, Artificial Sequence
  MKO10060778_A_Zfp444
  gRNA
ccgcacgcgtgctgcgaatg

SEQ ID NO: 60779 - DNA, 20 bp, Artificial Sequence
  MKO10060779_A_Zfp444
  gRNA
cgcgcgacctttcgcctgct

SEQ ID NO: 60780 - DNA, 20 bp, Artificial Sequence
  MKO10060780_A_Zfp444
  gRNA
gccacggggagtcgagcgtc

SEQ ID NO: 60781 - DNA, 20 bp, Artificial Sequence
  MKO10060781_A_Zfp445
  gRNA
gtgcagatgttcacgcccca

SEQ ID NO: 60782 - DNA, 20 bp, Artificial Sequence
  MKO10060782_A_Zfp445
  gRNA
cagctcagcgcaatctttat

SEQ ID NO: 60783 - DNA, 20 bp, Artificial Sequence
  MKO10060783_A_Zfp445
  gRNA
agtcaccagtttgttcagcc

SEQ ID NO: 60784 - DNA, 20 bp, Artificial Sequence
  MKO10060784_A_Zfp446
  gRNA
aggctgcacgactccgtttc

SEQ ID NO: 60785 - DNA, 20 bp, Artificial Sequence
  MKO10060785_A_Zfp446
  gRNA
gccggagaagtacgacacag

SEQ ID NO: 60786 - DNA, 20 bp, Artificial Sequence
  MKO10060786_A_Zfp446
  gRNA
tgggttcgagggcagcgacc

SEQ ID NO: 60787 - DNA, 20 bp, Artificial Sequence
  MKO10060787_A_Zfp449
  gRNA
ggcatgggtactgttccaac

SEQ ID NO: 60788 - DNA, 20 bp, Artificial Sequence
  MKO10060788_A_Zfp449
  gRNA
gaagccaaagatgcgttcta

SEQ ID NO: 60789 - DNA, 20 bp, Artificial Sequence
  MKO10060789_A_Zfp449
  gRNA
tatgtaaaaagcgattcact

SEQ ID NO: 60790 - DNA, 20 bp, Artificial Sequence
  MKO10060790_A_Zfp451
  gRNA
aggaccgttaagacccgttt

SEQ ID NO: 60791 - DNA, 20 bp, Artificial Sequence
  MKO10060791_A_Zfp451
  gRNA
tctgatgcctcgggcccagc

SEQ ID NO: 60792 - DNA, 20 bp, Artificial Sequence
  MKO10060792_A_Zfp451
  gRNA
atagaatctgtcccaccagc

SEQ ID NO: 60793 - DNA, 20 bp, Artificial Sequence
  MKO10060793_A_Zfp454
  gRNA
actcatcctttgcacgccat

SEQ ID NO: 60794 - DNA, 20 bp, Artificial Sequence
  MKO10060794_A_Zfp454
  gRNA
tcgatctgcgtgtgaagctc

SEQ ID NO: 60795 - DNA, 20 bp, Artificial Sequence
  MKO10060795_A_Zfp454
  gRNA
aagatgtatgttccggataa

SEQ ID NO: 60796 - DNA, 20 bp, Artificial Sequence
  MKO10060796_A_Zfp455
  gRNA
gaattgcttgatgccttaca

SEQ ID NO: 60797 - DNA, 20 bp, Artificial Sequence
  MKO10060797_A_Zfp455
  gRNA
gaattcttcgtcgtttaata

SEQ ID NO: 60798 - DNA, 20 bp, Artificial Sequence
  MKO10060798_A_Zfp455
  gRNA
gcagcagccactgtgtaccc

SEQ ID NO: 60799 - DNA, 20 bp, Artificial Sequence
  MKO10060799_A_Zfp456
  gRNA
tcgtacaaagcatgagtatg

SEQ ID NO: 60800 - DNA, 20 bp, Artificial Sequence
  MKO10060800_A_Zfp456
  gRNA
aggacacttcttgcaattgt

SEQ ID NO: 60801 - DNA, 20 bp, Artificial Sequence
  MKO10060801_A_Zfp456
  gRNA
tccaggcaatcccactcttc

SEQ ID NO: 60802 - DNA, 20 bp, Artificial Sequence
  MKO10060802_A_Zfp457
  gRNA
aagtcttgatggagaaccga

SEQ ID NO: 60803 - DNA, 20 bp, Artificial Sequence
  MKO10060803_A_Zfp457
  gRNA
gctacacatttcagcattgt

SEQ ID NO: 60804 - DNA, 20 bp, Artificial Sequence
  MKO10060804_A_Zfp457
  gRNA
tctgtacagggatgtgacat

SEQ ID NO: 60805 - DNA, 20 bp, Artificial Sequence
  MKO10060805_A_Zfp458
  gRNA
accctaccagtgtgaagact

SEQ ID NO: 60806 - DNA, 20 bp, Artificial Sequence
  MKO10060806_A_Zfp458
  gRNA
ccgtaccacagtcaagcaag

SEQ ID NO: 60807 - DNA, 20 bp, Artificial Sequence
  MKO10060807_A_Zfp458
  gRNA
ctcacctggatgcacagtga

SEQ ID NO: 60808 - DNA, 20 bp, Artificial Sequence
  MKO10060808_A_Zfp459
  gRNA
aattagtgggcttgctgtaa

SEQ ID NO: 60809 - DNA, 20 bp, Artificial Sequence
  MKO10060809_A_Zfp459
  gRNA
gcctttcatcatcagccctt

SEQ ID NO: 60810 - DNA, 20 bp, Artificial Sequence
  MKO10060810_A_Zfp459
  gRNA
ttgatttctctgcagaagag

SEQ ID NO: 60811 - DNA, 20 bp, Artificial Sequence
  MKO10060811_A_Zfp462
  gRNA
gatcgcgtcttcctgcagtt

SEQ ID NO: 60812 - DNA, 20 bp, Artificial Sequence
  MKO10060812_A_Zfp462
  gRNA
agttctgcgtacgctacttc

SEQ ID NO: 60813 - DNA, 20 bp, Artificial Sequence
  MKO10060813_A_Zfp462
  gRNA
ttacagatggcccgaagcgt

SEQ ID NO: 60814 - DNA, 20 bp, Artificial Sequence
  MKO10060814_A_Zfp467
  gRNA
gttggctgttacgtacaaac

SEQ ID NO: 60815 - DNA, 20 bp, Artificial Sequence
  MKO10060815_A_Zfp467
  gRNA
ttcggccttctgtggggtac

SEQ ID NO: 60816 - DNA, 20 bp, Artificial Sequence
  MKO10060816_A_Zfp467
  gRNA
acaagctgaagctccttgta

SEQ ID NO: 60817 - DNA, 20 bp, Artificial Sequence
  MKO10060817_A_Zfp46
  gRNA
gccgcaccaggtcggagttc

SEQ ID NO: 60818 - DNA, 20 bp, Artificial Sequence
  MKO10060818_A_Zfp46
  gRNA
ccgcaggccgtgcactcgta

SEQ ID NO: 60819 - DNA, 20 bp, Artificial Sequence
  MKO10060819_A_Zfp46
  gRNA
gtctccattcttcccgagtg

SEQ ID NO: 60820 - DNA, 20 bp, Artificial Sequence
  MKO10060820_A_Zfp472
  gRNA
atacacgagcgatctcatag

SEQ ID NO: 60821 - DNA, 20 bp, Artificial Sequence
  MKO10060821_A_Zfp472
  gRNA
gactgtagcaatcatcacgt

SEQ ID NO: 60822 - DNA, 20 bp, Artificial Sequence
  MKO10060822_A_Zfp472
  gRNA
cgcctggatgcatcagaagc

SEQ ID NO: 60823 - DNA, 20 bp, Artificial Sequence
  MKO10060823_A_Zfp473
  gRNA
ccgtacacatgcggcacgtg

SEQ ID NO: 60824 - DNA, 20 bp, Artificial Sequence
  MKO10060824_A_Zfp473
  gRNA
ctatgaatcctacacgtgtc

SEQ ID NO: 60825 - DNA, 20 bp, Artificial Sequence
  MKO10060825_A_Zfp473
  gRNA
tgtgacgctgaaccactacc

SEQ ID NO: 60826 - DNA, 20 bp, Artificial Sequence
  MKO10060826_A_Zfp474
  gRNA
ttgaatggaggtcactcggc

SEQ ID NO: 60827 - DNA, 20 bp, Artificial Sequence
  MKO10060827_A_Zfp474
  gRNA
gacggtctggcaagaacgtg

SEQ ID NO: 60828 - DNA, 20 bp, Artificial Sequence
  MKO10060828_A_Zfp474
  gRNA
ggccacaaatatagcatatc

SEQ ID NO: 60829 - DNA, 20 bp, Artificial Sequence
  MKO10060829_A_Zfp488
  gRNA
ggcgctcccggaagtactcg

SEQ ID NO: 60830 - DNA, 20 bp, Artificial Sequence
  MKO10060830_A_Zfp488
  gRNA
agcaccgaacaagcctcgac

SEQ ID NO: 60831 - DNA, 20 bp, Artificial Sequence
  MKO10060831_A_Zfp488
  gRNA
acatgcggtcacatcacaaa

SEQ ID NO: 60832 - DNA, 20 bp, Artificial Sequence
  MKO10060832_A_Zfp493
  gRNA
gagcgttgtgcgagcactaa

SEQ ID NO: 60833 - DNA, 20 bp, Artificial Sequence
  MKO10060833_A_Zfp493
  gRNA
aagaatgcagcgaccaataa

SEQ ID NO: 60834 - DNA, 20 bp, Artificial Sequence
  MKO10060834_A_Zfp493
  gRNA
gtcgttccagaaatgtgatc

SEQ ID NO: 60835 - DNA, 20 bp, Artificial Sequence
  MKO10060835_A_Zfp503
  gRNA
gcccaaaaccgacgacgagg

SEQ ID NO: 60836 - DNA, 20 bp, Artificial Sequence
  MKO10060836_A_Zfp503
  gRNA
ctgcggcggcggaattaacg

SEQ ID NO: 60837 - DNA, 20 bp, Artificial Sequence
  MKO10060837_A_Zfp503
  gRNA
aattgctccggccacggccc

SEQ ID NO: 60838 - DNA, 20 bp, Artificial Sequence
  MKO10060838_A_Zfp507
  gRNA
tacacaagtacaacgtacgt

SEQ ID NO: 60839 - DNA, 20 bp, Artificial Sequence
  MKO10060839_A_Zfp507
  gRNA
atttcccgtgatgccgctga

SEQ ID NO: 60840 - DNA, 20 bp, Artificial Sequence
  MKO10060840_A_Zfp507
  gRNA
ccataacttcaccgggcagc

SEQ ID NO: 60841 - DNA, 20 bp, Artificial Sequence
  MKO10060841_A_Zfp511
  gRNA
ttatcaaatcggaaatccgc

SEQ ID NO: 60842 - DNA, 20 bp, Artificial Sequence
  MKO10060842_A_Zfp511
  gRNA
cacgcaagtgtccgagacgc

SEQ ID NO: 60843 - DNA, 20 bp, Artificial Sequence
  MKO10060843_A_Zfp511
  gRNA
gataagcccaagacgaacag

SEQ ID NO: 60844 - DNA, 20 bp, Artificial Sequence
  MKO10060844_A_Zfp512
  gRNA
ccttccggacccgacgagcc

SEQ ID NO: 60845 - DNA, 20 bp, Artificial Sequence
  MKO10060845_A_Zfp512
  gRNA
gagccgccagtctatgcagc

SEQ ID NO: 60846 - DNA, 20 bp, Artificial Sequence
  MKO10060846_A_Zfp512
  gRNA
cctcatgagggatggtgtac

SEQ ID NO: 60847 - DNA, 20 bp, Artificial Sequence
  MKO10060847_A_Zfp513
  gRNA
agccggtcacgatgccccga

SEQ ID NO: 60848 - DNA, 20 bp, Artificial Sequence
  MKO10060848_A_Zfp513
  gRNA
cgacatacccgcacccatac

SEQ ID NO: 60849 - DNA, 20 bp, Artificial Sequence
  MKO10060849_A_Zfp513
  gRNA
gcaaatcgctctccaacacc

SEQ ID NO: 60850 - DNA, 20 bp, Artificial Sequence
  MKO10060850_A_Zfp516
  gRNA
ctagttatctccatgctcgc

SEQ ID NO: 60851 - DNA, 20 bp, Artificial Sequence
  MKO10060851_A_Zfp516
  gRNA
ggagcacgcttctttaccgc

SEQ ID NO: 60852 - DNA, 20 bp, Artificial Sequence
  MKO10060852_A_Zfp516
  gRNA
tacttgtttaggggcatccg

SEQ ID NO: 60853 - DNA, 20 bp, Artificial Sequence
  MKO10060853_A_Zfp518a
  gRNA
gcaatataataaagccgacg

SEQ ID NO: 60854 - DNA, 20 bp, Artificial Sequence
  MKO10060854_A_Zfp518a
  gRNA
gaacgctcactgatatatac

SEQ ID NO: 60855 - DNA, 20 bp, Artificial Sequence
  MKO10060855_A_Zfp518a
  gRNA
aacattctcagtcttcaccg

SEQ ID NO: 60856 - DNA, 20 bp, Artificial Sequence
  MKO10060856_A_Zfp518b
  gRNA
tccgtccgagttgctctatt

SEQ ID NO: 60857 - DNA, 20 bp, Artificial Sequence
  MKO10060857_A_Zfp518b
  gRNA
tcagccgcatatggtaccgc

SEQ ID NO: 60858 - DNA, 20 bp, Artificial Sequence
  MKO10060858_A_Zfp518b
  gRNA
ataacggtcagcggcatccc

SEQ ID NO: 60859 - DNA, 20 bp, Artificial Sequence
  MKO10060859_A_Zfp51
  gRNA
attccgatgctgtaacaacg

SEQ ID NO: 60860 - DNA, 20 bp, Artificial Sequence
  MKO10060860_A_Zfp51
  gRNA
gatttctaagatatgcacgc

SEQ ID NO: 60861 - DNA, 20 bp, Artificial Sequence
  MKO10060861_A_Zfp51
  gRNA
ttcaccagtaaacatgcccc

SEQ ID NO: 60862 - DNA, 20 bp, Artificial Sequence
  MKO10060862_A_Zfp521
  gRNA
tatacagctcctcgaccgtg

SEQ ID NO: 60863 - DNA, 20 bp, Artificial Sequence
  MKO10060863_A_Zfp521
  gRNA
cagcagacctccgatatgac

SEQ ID NO: 60864 - DNA, 20 bp, Artificial Sequence
  MKO10060864_A_Zfp521
  gRNA
ctacaacgagtgggacatcc

SEQ ID NO: 60865 - DNA, 20 bp, Artificial Sequence
  MKO10060865_A_Zfp523
  gRNA
atggcgctgtccgacggcac

SEQ ID NO: 60866 - DNA, 20 bp, Artificial Sequence
  MKO10060866_A_Zfp523
  gRNA
agacgaggaaggcttcggca

SEQ ID NO: 60867 - DNA, 20 bp, Artificial Sequence
  MKO10060867_A_Zfp523
  gRNA
cgggcccacctttgggtgtg

SEQ ID NO: 60868 - DNA, 20 bp, Artificial Sequence
  MKO10060868_A_Zfp524
  gRNA
ctgccctcgccgtttccgag

SEQ ID NO: 60869 - DNA, 20 bp, Artificial Sequence
  MKO10060869_A_Zfp524
  gRNA
gtttgcgtttgtaatggcgc

SEQ ID NO: 60870 - DNA, 20 bp, Artificial Sequence
  MKO10060870_A_Zfp524
  gRNA
gggcgccgaggccgacctcc

SEQ ID NO: 60871 - DNA, 20 bp, Artificial Sequence
  MKO10060871_A_Zfp526
  gRNA
cggtggctcgtccgctgcac

SEQ ID NO: 60872 - DNA, 20 bp, Artificial Sequence
  MKO10060872_A_Zfp526
  gRNA
aggcaccggcgcgcggtgca

SEQ ID NO: 60873 - DNA, 20 bp, Artificial Sequence
  MKO10060873_A_Zfp526
  gRNA
agaagcgaaggtcttgccgc

SEQ ID NO: 60874 - DNA, 20 bp, Artificial Sequence
  MKO10060874_A_Zfp52
  gRNA
tctttgatattgccgaatgt

SEQ ID NO: 60875 - DNA, 20 bp, Artificial Sequence
  MKO10060875_A_Zfp52
  gRNA
agagagacgttatcgatgta

SEQ ID NO: 60876 - DNA, 20 bp, Artificial Sequence
  MKO10060876_A_Zfp52
  gRNA
ttctccagtaaacacatccc

SEQ ID NO: 60877 - DNA, 20 bp, Artificial Sequence
  MKO10060877_A_Zfp532
  gRNA
tgcggcgctcagcgctaaaa

SEQ ID NO: 60878 - DNA, 20 bp, Artificial Sequence
  MKO10060878_A_Zfp532
  gRNA
tttagcgctgagcgccgcaa

SEQ ID NO: 60879 - DNA, 20 bp, Artificial Sequence
  MKO10060879_A_Zfp532
  gRNA
tgatgttaccaacgatgagg

SEQ ID NO: 60880 - DNA, 20 bp, Artificial Sequence
  MKO10060880_A_Zfp534
  gRNA
cccaaaaaagacttaagccc

SEQ ID NO: 60881 - DNA, 20 bp, Artificial Sequence
  MKO10060881_A_Zfp534
  gRNA
tctctgatgaatactaagtt

SEQ ID NO: 60882 - DNA, 20 bp, Artificial Sequence
  MKO10060882_A_Zfp534
  gRNA
aacaagaatgagtgtgtgtc

SEQ ID NO: 60883 - DNA, 20 bp, Artificial Sequence
  MKO10060883_A_Zfp536
  gRNA
gggctacatcgggcacgcta

SEQ ID NO: 60884 - DNA, 20 bp, Artificial Sequence
  MKO10060884_A_Zfp536
  gRNA
gctgctagcaagcccgttaa

SEQ ID NO: 60885 - DNA, 20 bp, Artificial Sequence
  MKO10060885_A_Zfp536
  gRNA
aggataggggcgtcgtcatc

SEQ ID NO: 60886 - DNA, 20 bp, Artificial Sequence
  MKO10060886_A_Zfp53
  gRNA
gtattataagatttgaacgc

SEQ ID NO: 60887 - DNA, 20 bp, Artificial Sequence
  MKO10060887_A_Zfp53
  gRNA
ctatgtcacaatagttgcaa

SEQ ID NO: 60888 - DNA, 20 bp, Artificial Sequence
  MKO10060888_A_Zfp53
  gRNA
ttctccattaatcatgtcac

SEQ ID NO: 60889 - DNA, 20 bp, Artificial Sequence
  MKO10060889_A_Zfp541
  gRNA
cgcactcaaggtgcctaaag

SEQ ID NO: 60890 - DNA, 20 bp, Artificial Sequence
  MKO10060890_A_Zfp541
  gRNA
caggtggtcctgccgcttga

SEQ ID NO: 60891 - DNA, 20 bp, Artificial Sequence
  MKO10060891_A_Zfp541
  gRNA
gctgggacttggcaatcatc

SEQ ID NO: 60892 - DNA, 20 bp, Artificial Sequence
  MKO10060892_A_Zfp54
  gRNA
aaatcctatgcctaccgtac

SEQ ID NO: 60893 - DNA, 20 bp, Artificial Sequence
  MKO10060893_A_Zfp54
  gRNA
tgttctcaccgacatatacc

SEQ ID NO: 60894 - DNA, 20 bp, Artificial Sequence
  MKO10060894_A_Zfp54
  gRNA
ttcagtagtgcctcaagcct

SEQ ID NO: 60895 - DNA, 20 bp, Artificial Sequence
  MKO10060895_A_Zfp551
  gRNA
gtcggacaagattcgatcga

SEQ ID NO: 60896 - DNA, 20 bp, Artificial Sequence
  MKO10060896_A_Zfp551
  gRNA
gggaagagacctcggcgacc

SEQ ID NO: 60897 - DNA, 20 bp, Artificial Sequence
  MKO10060897_A_Zfp551
  gRNA
gttgaatcaggctagcactc

SEQ ID NO: 60898 - DNA, 20 bp, Artificial Sequence
  MKO10060898_A_Zfp553
  gRNA
ggtgaacgccccacgatctg

SEQ ID NO: 60899 - DNA, 20 bp, Artificial Sequence
  MKO10060899_A_Zfp553
  gRNA
gtggtctagtgcgttcgccc

SEQ ID NO: 60900 - DNA, 20 bp, Artificial Sequence
  MKO10060900_A_Zfp553
  gRNA
cagtctcgcagcctaccccg

SEQ ID NO: 60901 - DNA, 20 bp, Artificial Sequence
  MKO10060901_A_Zfp558
  gRNA
ctgtacagtcacatcttcga

SEQ ID NO: 60902 - DNA, 20 bp, Artificial Sequence
  MKO10060902_A_Zfp558
  gRNA
gtggcttaccaagtgaggcc

SEQ ID NO: 60903 - DNA, 20 bp, Artificial Sequence
  MKO10060903_A_Zfp558
  gRNA
accaaatctgatatcccagt

SEQ ID NO: 60904 - DNA, 20 bp, Artificial Sequence
  MKO10060904_A_Zfp560
  gRNA
ccgctgaaacattgtccctc

SEQ ID NO: 60905 - DNA, 20 bp, Artificial Sequence
  MKO10060905_A_Zfp560
  gRNA
taccagaacctggctacatt

SEQ ID NO: 60906 - DNA, 20 bp, Artificial Sequence
  MKO10060906_A_Zfp560
  gRNA
aaaagacggtgtctgactgc

SEQ ID NO: 60907 - DNA, 20 bp, Artificial Sequence
  MKO10060907_A_Zfp563
  gRNA
gtacctgtcgagtacacgaa

SEQ ID NO: 60908 - DNA, 20 bp, Artificial Sequence
  MKO10060908_A_Zfp563
  gRNA
agtccgttcgtgtactcgac

SEQ ID NO: 60909 - DNA, 20 bp, Artificial Sequence
  MKO10060909_A_Zfp563
  gRNA
ttaggactgtctaactttcg

SEQ ID NO: 60910 - DNA, 20 bp, Artificial Sequence
  MKO10060910_A_Zfp566
  gRNA
tgagagtgggcacgtcgtca

SEQ ID NO: 60911 - DNA, 20 bp, Artificial Sequence
  MKO10060911_A_Zfp566
  gRNA
gagatccgcgctgtctctca

SEQ ID NO: 60912 - DNA, 20 bp, Artificial Sequence
  MKO10060912_A_Zfp566
  gRNA
agaagtctatgtacacatcg

SEQ ID NO: 60913 - DNA, 20 bp, Artificial Sequence
  MKO10060913_A_Zfp568
  gRNA
tctccttacccacggttact

SEQ ID NO: 60914 - DNA, 20 bp, Artificial Sequence
  MKO10060914_A_Zfp568
  gRNA
ctacagcaacctagtaaccg

SEQ ID NO: 60915 - DNA, 20 bp, Artificial Sequence
  MKO10060915_A_Zfp568
  gRNA
ttcctcagcttggtgtgccg

SEQ ID NO: 60916 - DNA, 20 bp, Artificial Sequence
  MKO10060916_A_Zfp574
  gRNA
ctagccggtgcacaaaacgc

SEQ ID NO: 60917 - DNA, 20 bp, Artificial Sequence
  MKO10060917_A_Zfp574
  gRNA
cggccgcgcagcgatgctca

SEQ ID NO: 60918 - DNA, 20 bp, Artificial Sequence
  MKO10060918_A_Zfp574
  gRNA
gggggcggccgttccgtctg

SEQ ID NO: 60919 - DNA, 20 bp, Artificial Sequence
  MKO10060919_A_Zfp575
  gRNA
acgcaccggctagcgcacgg

SEQ ID NO: 60920 - DNA, 20 bp, Artificial Sequence
  MKO10060920_A_Zfp575
  gRNA
gggtgccgccgtgcgctagc

SEQ ID NO: 60921 - DNA, 20 bp, Artificial Sequence
  MKO10060921_A_Zfp575
  gRNA
acaggtgggactaggttccg

SEQ ID NO: 60922 - DNA, 20 bp, Artificial Sequence
  MKO10060922_A_Zfp579
  gRNA
ctcttccttgatgtgcgcga

SEQ ID NO: 60923 - DNA, 20 bp, Artificial Sequence
  MKO10060923_A_Zfp579
  gRNA
cctatgcggattgggaggcc

SEQ ID NO: 60924 - DNA, 20 bp, Artificial Sequence
  MKO10060924_A_Zfp579
  gRNA
cctggtccctatcgcgtcac

SEQ ID NO: 60925 - DNA, 20 bp, Artificial Sequence
  MKO10060925_A_Zfp57
  gRNA
cgtcaccgacgtgctcattt

SEQ ID NO: 60926 - DNA, 20 bp, Artificial Sequence
  MKO10060926_A_Zfp57
  gRNA
gctgttccgtgccttagccc

SEQ ID NO: 60927 - DNA, 20 bp, Artificial Sequence
  MKO10060927_A_Zfp57
  gRNA
gtctcttaccgacaaatgtc

SEQ ID NO: 60928 - DNA, 20 bp, Artificial Sequence
  MKO10060928_A_Zfp580
  gRNA
gaggtggaccagcgcgcgca

SEQ ID NO: 60929 - DNA, 20 bp, Artificial Sequence
  MKO10060929_A_Zfp580
  gRNA
gcaaagacacgagcgcactc

SEQ ID NO: 60930 - DNA, 20 bp, Artificial Sequence
  MKO10060930_A_Zfp580
  gRNA
catctgctcatcgacgccaa

SEQ ID NO: 60931 - DNA, 20 bp, Artificial Sequence
  MKO10060931_A_Zfp583
  gRNA
cccacattcgacgcatgcgt

SEQ ID NO: 60932 - DNA, 20 bp, Artificial Sequence
  MKO10060932_A_Zfp583
  gRNA
ccctacgcatgcgtcgaatg

SEQ ID NO: 60933 - DNA, 20 bp, Artificial Sequence
  MKO10060933_A_Zfp583
  gRNA
accagccgtgatctcattac

SEQ ID NO: 60934 - DNA, 20 bp, Artificial Sequence
  MKO10060934_A_Zfp58
  gRNA
gaatgacgcaatttatgcca

SEQ ID NO: 60935 - DNA, 20 bp, Artificial Sequence
  MKO10060935_A_Zfp58
  gRNA
gtaagtgtaaagactgcgac

SEQ ID NO: 60936 - DNA, 20 bp, Artificial Sequence
  MKO10060936_A_Zfp58
  gRNA
gcttgtctcttcacgtccca

SEQ ID NO: 60937 - DNA, 20 bp, Artificial Sequence
  MKO10060937_A_Zfp592
  gRNA
gacacgtagctctctcgatc

SEQ ID NO: 60938 - DNA, 20 bp, Artificial Sequence
  MKO10060938_A_Zfp592
  gRNA
gacacatcttctaaccgccc

SEQ ID NO: 60939 - DNA, 20 bp, Artificial Sequence
  MKO10060939_A_Zfp592
  gRNA
cgacagaggacaccgcactc

SEQ ID NO: 60940 - DNA, 20 bp, Artificial Sequence
  MKO10060940_A_Zfp593
  gRNA
ggaatgtgctcggtgcgcgc

SEQ ID NO: 60941 - DNA, 20 bp, Artificial Sequence
  MKO10060941_A_Zfp593
  gRNA
gggcggcctgcatcgctgtc

SEQ ID NO: 60942 - DNA, 20 bp, Artificial Sequence
  MKO10060942_A_Zfp593
  gRNA
gagtgtcgaaccctacagtc

SEQ ID NO: 60943 - DNA, 20 bp, Artificial Sequence
  MKO10060943_A_Zfp595
  gRNA
aaagtctttgaggcggaaaa

SEQ ID NO: 60944 - DNA, 20 bp, Artificial Sequence
  MKO10060944_A_Zfp595
  gRNA
ggaaggccttgccacatatt

SEQ ID NO: 60945 - DNA, 20 bp, Artificial Sequence
  MKO10060945_A_Zfp595
  gRNA
catacctgagtacttagcag

SEQ ID NO: 60946 - DNA, 20 bp, Artificial Sequence
  MKO10060946_A_Zfp597
  gRNA
attcacctgctcatccgatg

SEQ ID NO: 60947 - DNA, 20 bp, Artificial Sequence
  MKO10060947_A_Zfp597
  gRNA
tcagtcaccgaaccaacctg

SEQ ID NO: 60948 - DNA, 20 bp, Artificial Sequence
  MKO10060948_A_Zfp597
  gRNA
ggattcgcttatgtgtcctc

SEQ ID NO: 60949 - DNA, 20 bp, Artificial Sequence
  MKO10060949_A_Zfp598
  gRNA
cctggctcgacaccgtatgc

SEQ ID NO: 60950 - DNA, 20 bp, Artificial Sequence
  MKO10060950_A_Zfp598
  gRNA
agaagtagtggtctcggcgc

SEQ ID NO: 60951 - DNA, 20 bp, Artificial Sequence
  MKO10060951_A_Zfp598
  gRNA
ccgcaccgagatcgacctca

SEQ ID NO: 60952 - DNA, 20 bp, Artificial Sequence
  MKO10060952_A_Zfp599
  gRNA
agctagaaccaccgaaaata

SEQ ID NO: 60953 - DNA, 20 bp, Artificial Sequence
  MKO10060953_A_Zfp599
  gRNA
caagaactcgcatacgtaag

SEQ ID NO: 60954 - DNA, 20 bp, Artificial Sequence
  MKO10060954_A_Zfp599
  gRNA
ctcttacgtatgcgagttct

SEQ ID NO: 60955 - DNA, 20 bp, Artificial Sequence
  MKO10060955_A_Zfp59
  gRNA
catgtcttgagaattagtgc

SEQ ID NO: 60956 - DNA, 20 bp, Artificial Sequence
  MKO10060956_A_Zfp59
  gRNA
tctcttcactatgactgctc

SEQ ID NO: 60957 - DNA, 20 bp, Artificial Sequence
  MKO10060957_A_Zfp59
  gRNA
cttccttgttagtaatctgt

SEQ ID NO: 60958 - DNA, 20 bp, Artificial Sequence
  MKO10060958_A_Zfp600
  gRNA
gaagtcttctaaatgtaatg

SEQ ID NO: 60959 - DNA, 20 bp, Artificial Sequence
  MKO10060959_A_Zfp600
  gRNA
gttcattatagaattcatgc

SEQ ID NO: 60960 - DNA, 20 bp, Artificial Sequence
  MKO10060960_A_Zfp600
  gRNA
ttgttcttctcccagattct

SEQ ID NO: 60961 - DNA, 20 bp, Artificial Sequence
  MKO10060961_A_Zfp605
  gRNA
gtacataaaccttaccgttg

SEQ ID NO: 60962 - DNA, 20 bp, Artificial Sequence
  MKO10060962_A_Zfp605
  gRNA
ccgaaagctttctgacgttc

SEQ ID NO: 60963 - DNA, 20 bp, Artificial Sequence
  MKO10060963_A_Zfp605
  gRNA
tctagcttgaaagttacatc

SEQ ID NO: 60964 - DNA, 20 bp, Artificial Sequence
  MKO10060964_A_Zfp606
  gRNA
ctcacctcgacttgggctac

SEQ ID NO: 60965 - DNA, 20 bp, Artificial Sequence
  MKO10060965_A_Zfp606
  gRNA
gcacatggagggaagcgctg

SEQ ID NO: 60966 - DNA, 20 bp, Artificial Sequence
  MKO10060966_A_Zfp606
  gRNA
ctatggacacctactttctg

SEQ ID NO: 60967 - DNA, 20 bp, Artificial Sequence
  MKO10060967_A_Zfp607
  gRNA
aggtatacctttccgagcat

SEQ ID NO: 60968 - DNA, 20 bp, Artificial Sequence
  MKO10060968_A_Zfp607
  gRNA
ccccaactataatacatcca

SEQ ID NO: 60969 - DNA, 20 bp, Artificial Sequence
  MKO10060969_A_Zfp607
  gRNA
acagaccatgtgttgagaac

SEQ ID NO: 60970 - DNA, 20 bp, Artificial Sequence
  MKO10060970_A_Zfp608
  gRNA
gcgagactgctggcaatcgg

SEQ ID NO: 60971 - DNA, 20 bp, Artificial Sequence
  MKO10060971_A_Zfp608
  gRNA
attcgtgcgcactcgcttcc

SEQ ID NO: 60972 - DNA, 20 bp, Artificial Sequence
  MKO10060972_A_Zfp608
  gRNA
gtctaaagcggccgtcatgt

SEQ ID NO: 60973 - DNA, 20 bp, Artificial Sequence
  MKO10060973_A_Zfp609
  gRNA
atgcggaacggccgaggaag

SEQ ID NO: 60974 - DNA, 20 bp, Artificial Sequence
  MKO10060974_A_Zfp609
  gRNA
ttcatactgctgccgataag

SEQ ID NO: 60975 - DNA, 20 bp, Artificial Sequence
  MKO10060975_A_Zfp609
  gRNA
aggagacggagtctcgaatg

SEQ ID NO: 60976 - DNA, 20 bp, Artificial Sequence
  MKO10060976_A_Zfp60
  gRNA
gagtatcgtagtgtcgtaag

SEQ ID NO: 60977 - DNA, 20 bp, Artificial Sequence
  MKO10060977_A_Zfp60
  gRNA
aagggctttgttcgtagtac

SEQ ID NO: 60978 - DNA, 20 bp, Artificial Sequence
  MKO10060978_A_Zfp60
  gRNA
catgtgttgagaactagagt

SEQ ID NO: 60979 - DNA, 20 bp, Artificial Sequence
  MKO10060979_A_Zfp612
  gRNA
ctcacctggggccaaaccga

SEQ ID NO: 60980 - DNA, 20 bp, Artificial Sequence
  MKO10060980_A_Zfp612
  gRNA
gtgttaaagccaagttcgtc

SEQ ID NO: 60981 - DNA, 20 bp, Artificial Sequence
  MKO10060981_A_Zfp612
  gRNA
caacaggaaatccggtcagc

SEQ ID NO: 60982 - DNA, 20 bp, Artificial Sequence
  MKO10060982_A_Zfp616
  gRNA
cagagtagatttaattgttg

SEQ ID NO: 60983 - DNA, 20 bp, Artificial Sequence
  MKO10060983_A_Zfp616
  gRNA
cttatggtatttcaagctag

SEQ ID NO: 60984 - DNA, 20 bp, Artificial Sequence
  MKO10060984_A_Zfp616
  gRNA
aatgcaacaatgttctacac

SEQ ID NO: 60985 - DNA, 20 bp, Artificial Sequence
  MKO10060985_A_Zfp617
  gRNA
ctttgtccagttctcttcga

SEQ ID NO: 60986 - DNA, 20 bp, Artificial Sequence
  MKO10060986_A_Zfp617
  gRNA
atcatgccttcgaagagaac

SEQ ID NO: 60987 - DNA, 20 bp, Artificial Sequence
  MKO10060987_A_Zfp617
  gRNA
aattaccttagatttccccc

SEQ ID NO: 60988 - DNA, 20 bp, Artificial Sequence
  MKO10060988_A_Zfp618
  gRNA
gccgcagatcccgcattcat

SEQ ID NO: 60989 - DNA, 20 bp, Artificial Sequence
  MKO10060989_A_Zfp618
  gRNA
actgcttccagacgcacgtg

SEQ ID NO: 60990 - DNA, 20 bp, Artificial Sequence
  MKO10060990_A_Zfp618
  gRNA
tgtgcctgccgagatctgcg

SEQ ID NO: 60991 - DNA, 20 bp, Artificial Sequence
  MKO10060991_A_Zfp619
  gRNA
cgcgaagtaaactccgatac

SEQ ID NO: 60992 - DNA, 20 bp, Artificial Sequence
  MKO10060992_A_Zfp619
  gRNA
gaatcctttcgtgccgttga

SEQ ID NO: 60993 - DNA, 20 bp, Artificial Sequence
  MKO10060993_A_Zfp619
  gRNA
ccagcatcacattaatgtat

SEQ ID NO: 60994 - DNA, 20 bp, Artificial Sequence
  MKO10060994_A_Zfp61
  gRNA
attaacggtcagagtgcgag

SEQ ID NO: 60995 - DNA, 20 bp, Artificial Sequence
  MKO10060995_A_Zfp61
  gRNA
tccgagtctgccgctcagtc

SEQ ID NO: 60996 - DNA, 20 bp, Artificial Sequence
  MKO10060996_A_Zfp61
  gRNA
ggctgctggactccgcccag

SEQ ID NO: 60997 - DNA, 20 bp, Artificial Sequence
  MKO10060997_A_Zfp622
  gRNA
gaagatattgattccgatga

SEQ ID NO: 60998 - DNA, 20 bp, Artificial Sequence
  MKO10060998_A_Zfp622
  gRNA
agatactacaaacagcgatt

SEQ ID NO: 60999 - DNA, 20 bp, Artificial Sequence
  MKO10060999_A_Zfp622
  gRNA
aagctccctcgtgaagaatg

SEQ ID NO: 61000 - DNA, 20 bp, Artificial Sequence
  MKO10061000_A_Zfp623
  gRNA
cgctacacgtatagccaact

SEQ ID NO: 61001 - DNA, 20 bp, Artificial Sequence
  MKO10061001_A_Zfp623
  gRNA
gcccaaacgtgcagtaagtc

SEQ ID NO: 61002 - DNA, 20 bp, Artificial Sequence
  MKO10061002_A_Zfp623
  gRNA
cgatgaggtccgagcggtgt

SEQ ID NO: 61003 - DNA, 20 bp, Artificial Sequence
  MKO10061003_A_Zfp628
  gRNA
cggggaccacttgtaccatc

SEQ ID NO: 61004 - DNA, 20 bp, Artificial Sequence
  MKO10061004_A_Zfp628
  gRNA
tccgtaacacttcgtgcctg

SEQ ID NO: 61005 - DNA, 20 bp, Artificial Sequence
  MKO10061005_A_Zfp628
  gRNA
ctagaaaatagcagcgttgc

SEQ ID NO: 61006 - DNA, 20 bp, Artificial Sequence
  MKO10061006_A_Zfp629
  gRNA
caccgcgtgatccacgagag

SEQ ID NO: 61007 - DNA, 20 bp, Artificial Sequence
  MKO10061007_A_Zfp629
  gRNA
gccgcactcggtgcagcgat

SEQ ID NO: 61008 - DNA, 20 bp, Artificial Sequence
  MKO10061008_A_Zfp629
  gRNA
gctgtggggcccggatctgc

SEQ ID NO: 61009 - DNA, 20 bp, Artificial Sequence
  MKO10061009_A_Zfp62
  gRNA
aatcataaaagtgtccaccg

SEQ ID NO: 61010 - DNA, 20 bp, Artificial Sequence
  MKO10061010_A_Zfp62
  gRNA
aactgcaaatgtgacgaatg

SEQ ID NO: 61011 - DNA, 20 bp, Artificial Sequence
  MKO10061011_A_Zfp62
  gRNA
aatcataaaagtgtacaccc

SEQ ID NO: 61012 - DNA, 20 bp, Artificial Sequence
  MKO10061012_A_Zfp637
  gRNA
cggcgaggttactttgattt

SEQ ID NO: 61013 - DNA, 20 bp, Artificial Sequence
  MKO10061013_A_Zfp637
  gRNA
cctacgcgtgttcccactgc

SEQ ID NO: 61014 - DNA, 20 bp, Artificial Sequence
  MKO10061014_A_Zfp637
  gRNA
cactgaaaaaggctacattc

SEQ ID NO: 61015 - DNA, 20 bp, Artificial Sequence
  MKO10061015_A_Zfp639
  gRNA
gagcgtgctcgttgacaacg

SEQ ID NO: 61016 - DNA, 20 bp, Artificial Sequence
  MKO10061016_A_Zfp639
  gRNA
gactaacctgaatagcgaga

SEQ ID NO: 61017 - DNA, 20 bp, Artificial Sequence
  MKO10061017_A_Zfp639
  gRNA
atcacggtcaggtagtctca

SEQ ID NO: 61018 - DNA, 20 bp, Artificial Sequence
  MKO10061018_A_Zfp641
  gRNA
tttccgatgcagctcgcacc

SEQ ID NO: 61019 - DNA, 20 bp, Artificial Sequence
  MKO10061019_A_Zfp641
  gRNA
tccgtaaaagtctgtctgcg

SEQ ID NO: 61020 - DNA, 20 bp, Artificial Sequence
  MKO10061020_A_Zfp641
  gRNA
gttccggccgttccccagga

SEQ ID NO: 61021 - DNA, 20 bp, Artificial Sequence
  MKO10061021_A_Zfp644
  gRNA
acctaactcaacgttatccc

SEQ ID NO: 61022 - DNA, 20 bp, Artificial Sequence
  MKO10061022_A_Zfp644
  gRNA
cgacatctacagactcctcg

SEQ ID NO: 61023 - DNA, 20 bp, Artificial Sequence
  MKO10061023_A_Zfp644
  gRNA
aacggactgtcttcgtttaa

SEQ ID NO: 61024 - DNA, 20 bp, Artificial Sequence
  MKO10061024_A_Zfp646
  gRNA
gccgactgtgacgccgtaaa

SEQ ID NO: 61025 - DNA, 20 bp, Artificial Sequence
  MKO10061025_A_Zfp646
  gRNA
gtcgcagaaagctgattcgg

SEQ ID NO: 61026 - DNA, 20 bp, Artificial Sequence
  MKO10061026_A_Zfp646
  gRNA
gttcggaagcgaggctgtag

SEQ ID NO: 61027 - DNA, 20 bp, Artificial Sequence
  MKO10061027_A_Zfp647
  gRNA
aaggtcggaactcacgcgaa

SEQ ID NO: 61028 - DNA, 20 bp, Artificial Sequence
  MKO10061028_A_Zfp647
  gRNA
gagcacggagcggtcgctga

SEQ ID NO: 61029 - DNA, 20 bp, Artificial Sequence
  MKO10061029_A_Zfp647
  gRNA
cctctaccgacacgtcatga

SEQ ID NO: 61030 - DNA, 20 bp, Artificial Sequence
  MKO10061030_A_Zfp648
  gRNA
cagacgcgagggctgcgcga

SEQ ID NO: 61031 - DNA, 20 bp, Artificial Sequence
  MKO10061031_A_Zfp648
  gRNA
tttccgcatcgcgtccgagt

SEQ ID NO: 61032 - DNA, 20 bp, Artificial Sequence
  MKO10061032_A_Zfp648
  gRNA
tgttgaaggtcaagccgcac

SEQ ID NO: 61033 - DNA, 20 bp, Artificial Sequence
  MKO10061033_A_Zfp64
  gRNA
gtgcaagacgtgcgactacg

SEQ ID NO: 61034 - DNA, 20 bp, Artificial Sequence
  MKO10061034_A_Zfp64
  gRNA
gtcgcacgtcttgcacttgt

SEQ ID NO: 61035 - DNA, 20 bp, Artificial Sequence
  MKO10061035_A_Zfp64
  gRNA
gcaccggacatccacatctg

SEQ ID NO: 61036 - DNA, 20 bp, Artificial Sequence
  MKO10061036_A_Zfp651
  gRNA
tccccgtagtgcatgacatg

SEQ ID NO: 61037 - DNA, 20 bp, Artificial Sequence
  MKO10061037_A_Zfp651
  gRNA
ctcatcctctcgatgatcgc

SEQ ID NO: 61038 - DNA, 20 bp, Artificial Sequence
  MKO10061038_A_Zfp651
  gRNA
ccctcccgggcatagatctt

SEQ ID NO: 61039 - DNA, 20 bp, Artificial Sequence
  MKO10061039_A_Zfp652
  gRNA
ccgctgaccgcacacatcgc

SEQ ID NO: 61040 - DNA, 20 bp, Artificial Sequence
  MKO10061040_A_Zfp652
  gRNA
cgagaagaagttctatacca

SEQ ID NO: 61041 - DNA, 20 bp, Artificial Sequence
  MKO10061041_A_Zfp652
  gRNA
gcgcttgaaagactttccac

SEQ ID NO: 61042 - DNA, 20 bp, Artificial Sequence
  MKO10061042_A_Zfp653
  gRNA
gataagcccactgctgcccg

SEQ ID NO: 61043 - DNA, 20 bp, Artificial Sequence
  MKO10061043_A_Zfp653
  gRNA
ctccacatggtggacgtcaa

SEQ ID NO: 61044 - DNA, 20 bp, Artificial Sequence
  MKO10061044_A_Zfp653
  gRNA
ggctggacaccgctacttcc

SEQ ID NO: 61045 - DNA, 20 bp, Artificial Sequence
  MKO10061045_A_Zfp654
  gRNA
ccagtgaaaagattacgatg

SEQ ID NO: 61046 - DNA, 20 bp, Artificial Sequence
  MKO10061046_A_Zfp654
  gRNA
tgccgcacatttaaatcagt

SEQ ID NO: 61047 - DNA, 20 bp, Artificial Sequence
  MKO10061047_A_Zfp654
  gRNA
gcagattgctactgcacaac

SEQ ID NO: 61048 - DNA, 20 bp, Artificial Sequence
  MKO10061048_A_Zfp655
  gRNA
ggctgtgcatcttacacgag

SEQ ID NO: 61049 - DNA, 20 bp, Artificial Sequence
  MKO10061049_A_Zfp655
  gRNA
gctgggatgagcactcccga

SEQ ID NO: 61050 - DNA, 20 bp, Artificial Sequence
  MKO10061050_A_Zfp655
  gRNA
tcaggagtttgtgacattcg

SEQ ID NO: 61051 - DNA, 20 bp, Artificial Sequence
  MKO10061051_A_Zfp658
  gRNA
cagcgtgaatgagtacgtaa

SEQ ID NO: 61052 - DNA, 20 bp, Artificial Sequence
  MKO10061052_A_Zfp658
  gRNA
tagtcgaacgtccaacctgc

SEQ ID NO: 61053 - DNA, 20 bp, Artificial Sequence
  MKO10061053_A_Zfp658
  gRNA
ggctaccctgttcctagccc

SEQ ID NO: 61054 - DNA, 20 bp, Artificial Sequence
  MKO10061054_A_Zfp65
  gRNA
ggagctccatttatgctccc

SEQ ID NO: 61055 - DNA, 20 bp, Artificial Sequence
  MKO10061055_A_Zfp65
  gRNA
tgctatacgtgcacagagtg

SEQ ID NO: 61056 - DNA, 20 bp, Artificial Sequence
  MKO10061056_A_Zfp65
  gRNA
gacatacctgggagcataaa

SEQ ID NO: 61057 - DNA, 20 bp, Artificial Sequence
  MKO10061057_A_Zfp661
  gRNA
ccggcccacctgttagtgtt

SEQ ID NO: 61058 - DNA, 20 bp, Artificial Sequence
  MKO10061058_A_Zfp661
  gRNA
cagagacgttacgccaaaca

SEQ ID NO: 61059 - DNA, 20 bp, Artificial Sequence
  MKO10061059_A_Zfp661
  gRNA
agcgtctggtacccgtgcag

SEQ ID NO: 61060 - DNA, 20 bp, Artificial Sequence
  MKO10061060_A_Zfp663
  gRNA
acagcagaagacatcgcgtt

SEQ ID NO: 61061 - DNA, 20 bp, Artificial Sequence
  MKO10061061_A_Zfp663
  gRNA
cttctgacgtattgctcttg

SEQ ID NO: 61062 - DNA, 20 bp, Artificial Sequence
  MKO10061062_A_Zfp663
  gRNA
gacacatcttcgaacaacac

SEQ ID NO: 61063 - DNA, 20 bp, Artificial Sequence
  MKO10061063_A_Zfp664
  gRNA
tctacaagtgccccatgtgc

SEQ ID NO: 61064 - DNA, 20 bp, Artificial Sequence
  MKO10061064_A_Zfp664
  gRNA
gtgtataaatgtgacgattg

SEQ ID NO: 61065 - DNA, 20 bp, Artificial Sequence
  MKO10061065_A_Zfp664
  gRNA
gagaagccctataggtgttg

SEQ ID NO: 61066 - DNA, 20 bp, Artificial Sequence
  MKO10061066_A_Zfp667
  gRNA
gccaccgaatatctcttacg

SEQ ID NO: 61067 - DNA, 20 bp, Artificial Sequence
  MKO10061067_A_Zfp667
  gRNA
gatgatatttggcctccggc

SEQ ID NO: 61068 - DNA, 20 bp, Artificial Sequence
  MKO10061068_A_Zfp667
  gRNA
tatgccgcgtaagagatatt

SEQ ID NO: 61069 - DNA, 20 bp, Artificial Sequence
  MKO10061069_A_Zfp668
  gRNA
gcggccagagcgcttgtagc

SEQ ID NO: 61070 - DNA, 20 bp, Artificial Sequence
  MKO10061070_A_Zfp668
  gRNA
ggacctcaagcggcatgcgt

SEQ ID NO: 61071 - DNA, 20 bp, Artificial Sequence
  MKO10061071_A_Zfp668
  gRNA
ttacgccctcatgtgcgcgc

SEQ ID NO: 61072 - DNA, 20 bp, Artificial Sequence
  MKO10061072_A_Zfp672
  gRNA
ccgcacgtgtgtgccacttg

SEQ ID NO: 61073 - DNA, 20 bp, Artificial Sequence
  MKO10061073_A_Zfp672
  gRNA
tcctgggtcgtagccatacc

SEQ ID NO: 61074 - DNA, 20 bp, Artificial Sequence
  MKO10061074_A_Zfp672
  gRNA
agaaacgcttgtcgccacca

SEQ ID NO: 61075 - DNA, 20 bp, Artificial Sequence
  MKO10061075_A_Zfp677
  gRNA
cgttgtaagtgttgacttct

SEQ ID NO: 61076 - DNA, 20 bp, Artificial Sequence
  MKO10061076_A_Zfp677
  gRNA
gtcacaaacattgcacgtgt

SEQ ID NO: 61077 - DNA, 20 bp, Artificial Sequence
  MKO10061077_A_Zfp677
  gRNA
ctgacctgagacatatttcc

SEQ ID NO: 61078 - DNA, 20 bp, Artificial Sequence
  MKO10061078_A_Zfp687
  gRNA
ccaaccaaaagagcccgacg

SEQ ID NO: 61079 - DNA, 20 bp, Artificial Sequence
  MKO10061079_A_Zfp687
  gRNA
ctgcatttctctcgccgtgt

SEQ ID NO: 61080 - DNA, 20 bp, Artificial Sequence
  MKO10061080_A_Zfp687
  gRNA
gtcacatactcgtcacgctc

SEQ ID NO: 61081 - DNA, 20 bp, Artificial Sequence
  MKO10061081_A_Zfp688
  gRNA
tcactgctggttccgatgcc

SEQ ID NO: 61082 - DNA, 20 bp, Artificial Sequence
  MKO10061082_A_Zfp688
  gRNA
tagtgccgaaagagcactgg

SEQ ID NO: 61083 - DNA, 20 bp, Artificial Sequence
  MKO10061083_A_Zfp688
  gRNA
cgcgcatcacctcccgatac

SEQ ID NO: 61084 - DNA, 20 bp, Artificial Sequence
  MKO10061084_A_Zfp689
  gRNA
atcggtatttcgttccaacc

SEQ ID NO: 61085 - DNA, 20 bp, Artificial Sequence
  MKO10061085_A_Zfp689
  gRNA
cgaagcgacgcccacaacta

SEQ ID NO: 61086 - DNA, 20 bp, Artificial Sequence
  MKO10061086_A_Zfp689
  gRNA
tccggtgattggccaacgac

SEQ ID NO: 61087 - DNA, 20 bp, Artificial Sequence
  MKO10061087_A_Zfp68
  gRNA
aagaccttctaccgtaagtc

SEQ ID NO: 61088 - DNA, 20 bp, Artificial Sequence
  MKO10061088_A_Zfp68
  gRNA
gaatcttctgatgccgctta

SEQ ID NO: 61089 - DNA, 20 bp, Artificial Sequence
  MKO10061089_A_Zfp68
  gRNA
gcctcacaccagtgtgtccc

SEQ ID NO: 61090 - DNA, 20 bp, Artificial Sequence
  MKO10061090_A_Zfp691
  gRNA
tggtgaggtccgagcgccgc

SEQ ID NO: 61091 - DNA, 20 bp, Artificial Sequence
  MKO10061091_A_Zfp691
  gRNA
cccggagctccaaccgcatc

SEQ ID NO: 61092 - DNA, 20 bp, Artificial Sequence
  MKO10061092_A_Zfp691
  gRNA
tgtacatcaccggacccacc

SEQ ID NO: 61093 - DNA, 20 bp, Artificial Sequence
  MKO10061093_A_Zfp692
  gRNA
cgggcactaggccgcattcc

SEQ ID NO: 61094 - DNA, 20 bp, Artificial Sequence
  MKO10061094_A_Zfp692
  gRNA
ctgcgggccacacgttctcc

SEQ ID NO: 61095 - DNA, 20 bp, Artificial Sequence
  MKO10061095_A_Zfp692
  gRNA
tctggcaggtacacttcttc

SEQ ID NO: 61096 - DNA, 20 bp, Artificial Sequence
  MKO10061096_A_Zfp697
  gRNA
gttcgtgcgccgctcgcatc

SEQ ID NO: 61097 - DNA, 20 bp, Artificial Sequence
  MKO10061097_A_Zfp697
  gRNA
cgcgaaaagcccttccgctg

SEQ ID NO: 61098 - DNA, 20 bp, Artificial Sequence
  MKO10061098_A_Zfp697
  gRNA
atagcgtccactgtctgttc

SEQ ID NO: 61099 - DNA, 20 bp, Artificial Sequence
  MKO10061099_A_Zfp69
  gRNA
aagcgacgagcgatgccgga

SEQ ID NO: 61100 - DNA, 20 bp, Artificial Sequence
  MKO10061100_A_Zfp69
  gRNA
aaggtgtctaatctgtcgaa

SEQ ID NO: 61101 - DNA, 20 bp, Artificial Sequence
  MKO10061101_A_Zfp69
  gRNA
cattgccgtggacttatccc

SEQ ID NO: 61102 - DNA, 20 bp, Artificial Sequence
  MKO10061102_A_Zfp703
  gRNA
caaatgagcgattcgcccgc

SEQ ID NO: 61103 - DNA, 20 bp, Artificial Sequence
  MKO10061103_A_Zfp703
  gRNA
cggatcgtgcgcgctgcaag

SEQ ID NO: 61104 - DNA, 20 bp, Artificial Sequence
  MKO10061104_A_Zfp703
  gRNA
tccatcgtgggcgcctacgc

SEQ ID NO: 61105 - DNA, 20 bp, Artificial Sequence
  MKO10061105_A_Zfp704
  gRNA
gactcaccattaggccgcac

SEQ ID NO: 61106 - DNA, 20 bp, Artificial Sequence
  MKO10061106_A_Zfp704
  gRNA
gcctcgtcaatgccatcgtc

SEQ ID NO: 61107 - DNA, 20 bp, Artificial Sequence
  MKO10061107_A_Zfp704
  gRNA
gaccttcacgtttcaatcag

SEQ ID NO: 61108 - DNA, 20 bp, Artificial Sequence
  MKO10061108_A_Zfp706
  gRNA
ccttaccctacagacggtgc

SEQ ID NO: 61109 - DNA, 20 bp, Artificial Sequence
  MKO10061109_A_Zfp706
  gRNA
gcagaaaaatgccaaaaagc

SEQ ID NO: 61110 - DNA, 20 bp, Artificial Sequence
  MKO10061110_A_Zfp706
  gRNA
gactccacttcctccagaat

SEQ ID NO: 61111 - DNA, 20 bp, Artificial Sequence
  MKO10061111_A_Zfp707
  gRNA
gatgtcgcgtgaagaagccc

SEQ ID NO: 61112 - DNA, 20 bp, Artificial Sequence
  MKO10061112_A_Zfp707
  gRNA
accgggccttattacccgtc

SEQ ID NO: 61113 - DNA, 20 bp, Artificial Sequence
  MKO10061113_A_Zfp707
  gRNA
gaggttctccttagtccgaa

SEQ ID NO: 61114 - DNA, 20 bp, Artificial Sequence
  MKO10061114_A_Zfp708
  gRNA
cttagaaagaatgcagcgac

SEQ ID NO: 61115 - DNA, 20 bp, Artificial Sequence
  MKO10061115_A_Zfp708
  gRNA
gagtgatgtgtgaacactaa

SEQ ID NO: 61116 - DNA, 20 bp, Artificial Sequence
  MKO10061116_A_Zfp708
  gRNA
ccctctgtcatttacagatg

SEQ ID NO: 61117 - DNA, 20 bp, Artificial Sequence
  MKO10061117_A_Zfp709
  gRNA
gctcgcccgtctccgggcca

SEQ ID NO: 61118 - DNA, 20 bp, Artificial Sequence
  MKO10061118_A_Zfp709
  gRNA
tccggtcagctgagaacccg

SEQ ID NO: 61119 - DNA, 20 bp, Artificial Sequence
  MKO10061119_A_Zfp709
  gRNA
gttctcttcgatatcatgag

SEQ ID NO: 61120 - DNA, 20 bp, Artificial Sequence
  MKO10061120_A_Zfp710
  gRNA
tgcgacactgccagcgtttc

SEQ ID NO: 61121 - DNA, 20 bp, Artificial Sequence
  MKO10061121_A_Zfp710
  gRNA
tgacacggcgggttccacag

SEQ ID NO: 61122 - DNA, 20 bp, Artificial Sequence
  MKO10061122_A_Zfp710
  gRNA
tggccgggagttcacgctgc

SEQ ID NO: 61123 - DNA, 20 bp, Artificial Sequence
  MKO10061123_A_Zfp711
  gRNA
ccattgaaaatcgctagcga

SEQ ID NO: 61124 - DNA, 20 bp, Artificial Sequence
  MKO10061124_A_Zfp711
  gRNA
agcttattacagaaaccgtt

SEQ ID NO: 61125 - DNA, 20 bp, Artificial Sequence
  MKO10061125_A_Zfp711
  gRNA
tccccttgaaattccgcttc

SEQ ID NO: 61126 - DNA, 20 bp, Artificial Sequence
  MKO10061126_A_Zfp712
  gRNA
caacaacataaaattcgtcc

SEQ ID NO: 61127 - DNA, 20 bp, Artificial Sequence
  MKO10061127_A_Zfp712
  gRNA
cagtgttgaccgaacattaa

SEQ ID NO: 61128 - DNA, 20 bp, Artificial Sequence
  MKO10061128_A_Zfp712
  gRNA
tgctttctctaagccgtact

SEQ ID NO: 61129 - DNA, 20 bp, Artificial Sequence
  MKO10061129_A_Zfp715
  gRNA
caactctgatttacgtaaga

SEQ ID NO: 61130 - DNA, 20 bp, Artificial Sequence
  MKO10061130_A_Zfp715
  gRNA
gaccgtgtagttcatactgg

SEQ ID NO: 61131 - DNA, 20 bp, Artificial Sequence
  MKO10061131_A_Zfp715
  gRNA
gaaatttggatctgcagcca

SEQ ID NO: 61132 - DNA, 20 bp, Artificial Sequence
  MKO10061132_A_Zfp719
  gRNA
aaacctttcgtccgtaacaa

SEQ ID NO: 61133 - DNA, 20 bp, Artificial Sequence
  MKO10061133_A_Zfp719
  gRNA
gaattcgatgatgcaccttc

SEQ ID NO: 61134 - DNA, 20 bp, Artificial Sequence
  MKO10061134_A_Zfp719
  gRNA
tggcagaaattcatatcagt

SEQ ID NO: 61135 - DNA, 20 bp, Artificial Sequence
  MKO10061135_A_Zfp72
  gRNA
aagggcttccccattattaa

SEQ ID NO: 61136 - DNA, 20 bp, Artificial Sequence
  MKO10061136_A_Zfp72
  gRNA
gaattctctgatgcttatac

SEQ ID NO: 61137 - DNA, 20 bp, Artificial Sequence
  MKO10061137_A_Zfp72
  gRNA
tgctttctctaagccctatc

SEQ ID NO: 61138 - DNA, 20 bp, Artificial Sequence
  MKO10061138_A_Zfp735
  gRNA
ttgtcataaactcgatttaa

SEQ ID NO: 61139 - DNA, 20 bp, Artificial Sequence
  MKO10061139_A_Zfp735
  gRNA
ttcaaggacttatcatatcc

SEQ ID NO: 61140 - DNA, 20 bp, Artificial Sequence
  MKO10061140_A_Zfp735
  gRNA
tcagggtgtattgacattca

SEQ ID NO: 61141 - DNA, 20 bp, Artificial Sequence
  MKO10061141_A_Zfp738
  gRNA
tccacatattaacacttgta

SEQ ID NO: 61142 - DNA, 20 bp, Artificial Sequence
  MKO10061142_A_Zfp738
  gRNA
tagaaagtagtgatgcaaca

SEQ ID NO: 61143 - DNA, 20 bp, Artificial Sequence
  MKO10061143_A_Zfp738
  gRNA
agcggctacctctatgctcc

SEQ ID NO: 61144 - DNA, 20 bp, Artificial Sequence
  MKO10061144_A_Zfp740
  gRNA
tctgaccttcgtccgccgtg

SEQ ID NO: 61145 - DNA, 20 bp, Artificial Sequence
  MKO10061145_A_Zfp740
  gRNA
accatctcgaacgccacaag

SEQ ID NO: 61146 - DNA, 20 bp, Artificial Sequence
  MKO10061146_A_Zfp740
  gRNA
cttgggttccgtagcccatt

SEQ ID NO: 61147 - DNA, 20 bp, Artificial Sequence
  MKO10061147_A_Zfp746
  gRNA
ccatgcacctggcgtcgcac

SEQ ID NO: 61148 - DNA, 20 bp, Artificial Sequence
  MKO10061148_A_Zfp746
  gRNA
cttgggcccagtgcgacgcc

SEQ ID NO: 61149 - DNA, 20 bp, Artificial Sequence
  MKO10061149_A_Zfp746
  gRNA
tggagaatctgctacgcaac

SEQ ID NO: 61150 - DNA, 20 bp, Artificial Sequence
  MKO10061150_A_Zfp747
  gRNA
gctcctcgaggtgtatggcc

SEQ ID NO: 61151 - DNA, 20 bp, Artificial Sequence
  MKO10061151_A_Zfp747
  gRNA
ggcgaaagcagcgaccagtc

SEQ ID NO: 61152 - DNA, 20 bp, Artificial Sequence
  MKO10061152_A_Zfp747
  gRNA
agtctacatggcgcaggtga

SEQ ID NO: 61153 - DNA, 20 bp, Artificial Sequence
  MKO10061153_A_Zfp748
  gRNA
tctcttccgtatcgtttata

SEQ ID NO: 61154 - DNA, 20 bp, Artificial Sequence
  MKO10061154_A_Zfp748
  gRNA
gacctatcttatgctgaatc

SEQ ID NO: 61155 - DNA, 20 bp, Artificial Sequence
  MKO10061155_A_Zfp748
  gRNA
tttgctccagaaacgtgacc

SEQ ID NO: 61156 - DNA, 20 bp, Artificial Sequence
  MKO10061156_A_Zfp74
  gRNA
ggcctctcatatgcacgatg

SEQ ID NO: 61157 - DNA, 20 bp, Artificial Sequence
  MKO10061157_A_Zfp74
  gRNA
gcctgacaaggtttgacatc

SEQ ID NO: 61158 - DNA, 20 bp, Artificial Sequence
  MKO10061158_A_Zfp74
  gRNA
actagtgacgttcaaagacg

SEQ ID NO: 61159 - DNA, 20 bp, Artificial Sequence
  MKO10061159_A_Zfp750
  gRNA
gccaaaatgagcccccgagc

SEQ ID NO: 61160 - DNA, 20 bp, Artificial Sequence
  MKO10061160_A_Zfp750
  gRNA
tgaagataggacaagccgcg

SEQ ID NO: 61161 - DNA, 20 bp, Artificial Sequence
  MKO10061161_A_Zfp750
  gRNA
ccgccttcaaacctgtccaa

SEQ ID NO: 61162 - DNA, 20 bp, Artificial Sequence
  MKO10061162_A_Zfp758
  gRNA
catcatctttctttccgatg

SEQ ID NO: 61163 - DNA, 20 bp, Artificial Sequence
  MKO10061163_A_Zfp758
  gRNA
tttataaggtgtactttgac

SEQ ID NO: 61164 - DNA, 20 bp, Artificial Sequence
  MKO10061164_A_Zfp758
  gRNA
aagaagaatgaattcttctc

SEQ ID NO: 61165 - DNA, 20 bp, Artificial Sequence
  MKO10061165_A_Zfp759
  gRNA
ccaacctcttcacaactata

SEQ ID NO: 61166 - DNA, 20 bp, Artificial Sequence
  MKO10061166_A_Zfp759
  gRNA
tcgtgttgacaaatagatga

SEQ ID NO: 61167 - DNA, 20 bp, Artificial Sequence
  MKO10061167_A_Zfp759
  gRNA
tccctgtacaatttccactg

SEQ ID NO: 61168 - DNA, 20 bp, Artificial Sequence
  MKO10061168_A_Zfp760
  gRNA
gtgtactaagacccgtgcaa

SEQ ID NO: 61169 - DNA, 20 bp, Artificial Sequence
  MKO10061169_A_Zfp760
  gRNA
tgtgttccatctttatatcg

SEQ ID NO: 61170 - DNA, 20 bp, Artificial Sequence
  MKO10061170_A_Zfp760
  gRNA
ttacagggtctgttgacatt

SEQ ID NO: 61171 - DNA, 20 bp, Artificial Sequence
  MKO10061171_A_Zfp763
  gRNA
acacgccttccgttgaatga

SEQ ID NO: 61172 - DNA, 20 bp, Artificial Sequence
  MKO10061172_A_Zfp763
  gRNA
tctacatcccttcgcaatca

SEQ ID NO: 61173 - DNA, 20 bp, Artificial Sequence
  MKO10061173_A_Zfp763
  gRNA
cacctggatgcatatgaaag

SEQ ID NO: 61174 - DNA, 20 bp, Artificial Sequence
  MKO10061174_A_Zfp764
  gRNA
cgagccttcacacgtcgctc

SEQ ID NO: 61175 - DNA, 20 bp, Artificial Sequence
  MKO10061175_A_Zfp764
  gRNA
gaggccagagcgacgtgtga

SEQ ID NO: 61176 - DNA, 20 bp, Artificial Sequence
  MKO10061176_A_Zfp764
  gRNA
gcctgcgtcctgtaaacccg

SEQ ID NO: 61177 - DNA, 20 bp, Artificial Sequence
  MKO10061177_A_Zfp768
  gRNA
cgtgactggttaacggcggc

SEQ ID NO: 61178 - DNA, 20 bp, Artificial Sequence
  MKO10061178_A_Zfp768
  gRNA
gctccccactatgcacgcga

SEQ ID NO: 61179 - DNA, 20 bp, Artificial Sequence
  MKO10061179_A_Zfp768
  gRNA
agccccgaagggtctctcaa

SEQ ID NO: 61180 - DNA, 20 bp, Artificial Sequence
  MKO10061180_A_Zfp770
  gRNA
atccacgcgtgtacgatctg

SEQ ID NO: 61181 - DNA, 20 bp, Artificial Sequence
  MKO10061181_A_Zfp770
  gRNA
tgccacagatcgtacacgcg

SEQ ID NO: 61182 - DNA, 20 bp, Artificial Sequence
  MKO10061182_A_Zfp770
  gRNA
ataatatgcttcccgttgta

SEQ ID NO: 61183 - DNA, 20 bp, Artificial Sequence
  MKO10061183_A_Zfp771
  gRNA
gccaccgtcgcgcgcacatg

SEQ ID NO: 61184 - DNA, 20 bp, Artificial Sequence
  MKO10061184_A_Zfp771
  gRNA
tagtgtggagcggcgcgcaa

SEQ ID NO: 61185 - DNA, 20 bp, Artificial Sequence
  MKO10061185_A_Zfp771
  gRNA
cgtacctccttgttgtccac

SEQ ID NO: 61186 - DNA, 20 bp, Artificial Sequence
  MKO10061186_A_Zfp772
  gRNA
gcactcgcgcatgataaatg

SEQ ID NO: 61187 - DNA, 20 bp, Artificial Sequence
  MKO10061187_A_Zfp772
  gRNA
cgcgagtgcacactcgagaa

SEQ ID NO: 61188 - DNA, 20 bp, Artificial Sequence
  MKO10061188_A_Zfp772
  gRNA
cttaacactcatgtcttctt

SEQ ID NO: 61189 - DNA, 20 bp, Artificial Sequence
  MKO10061189_A_Zfp773
  gRNA
agtctctgcttattcgacac

SEQ ID NO: 61190 - DNA, 20 bp, Artificial Sequence
  MKO10061190_A_Zfp773
  gRNA
tcatgtacgattccccacac

SEQ ID NO: 61191 - DNA, 20 bp, Artificial Sequence
  MKO10061191_A_Zfp773
  gRNA
cgtgtggttggttgcaggcc

SEQ ID NO: 61192 - DNA, 20 bp, Artificial Sequence
  MKO10061192_A_Zfp775
  gRNA
ccccacgcgggcatcccgag

SEQ ID NO: 61193 - DNA, 20 bp, Artificial Sequence
  MKO10061193_A_Zfp775
  gRNA
tgcgctcgcagtcggcagtc

SEQ ID NO: 61194 - DNA, 20 bp, Artificial Sequence
  MKO10061194_A_Zfp775
  gRNA
tacctgagatgctgccagcc

SEQ ID NO: 61195 - DNA, 20 bp, Artificial Sequence
  MKO10061195_A_Zfp777
  gRNA
gcgacatcatcgaatgtgac

SEQ ID NO: 61196 - DNA, 20 bp, Artificial Sequence
  MKO10061196_A_Zfp777
  gRNA
gaacgcgctcgaggagtcca

SEQ ID NO: 61197 - DNA, 20 bp, Artificial Sequence
  MKO10061197_A_Zfp777
  gRNA
tgtggagttcgcaaatcatc

SEQ ID NO: 61198 - DNA, 20 bp, Artificial Sequence
  MKO10061198_A_Zfp780b
  gRNA
atactagtactagagtcctt

SEQ ID NO: 61199 - DNA, 20 bp, Artificial Sequence
  MKO10061199_A_Zfp780b
  gRNA
aacgaaccttagtattcatc

SEQ ID NO: 61200 - DNA, 20 bp, Artificial Sequence
  MKO10061200_A_Zfp780b
  gRNA
catgtcttgagaattagagt

SEQ ID NO: 61201 - DNA, 20 bp, Artificial Sequence
  MKO10061201_A_Zfp781
  gRNA
tatccagaagatgccccaac

SEQ ID NO: 61202 - DNA, 20 bp, Artificial Sequence
  MKO10061202_A_Zfp781
  gRNA
ttaggatgcagtgacctatg

SEQ ID NO: 61203 - DNA, 20 bp, Artificial Sequence
  MKO10061203_A_Zfp781
  gRNA
cattcttacctatagcagtg

SEQ ID NO: 61204 - DNA, 20 bp, Artificial Sequence
  MKO10061204_A_Zfp784
  gRNA
gtcgcccgcaccaggtccgg

SEQ ID NO: 61205 - DNA, 20 bp, Artificial Sequence
  MKO10061205_A_Zfp784
  gRNA
gagctcggaatcgggggatc

SEQ ID NO: 61206 - DNA, 20 bp, Artificial Sequence
  MKO10061206_A_Zfp784
  gRNA
cagatatgcgagaccacgag

SEQ ID NO: 61207 - DNA, 20 bp, Artificial Sequence
  MKO10061207_A_Zfp786
  gRNA
tggccatggccggacccgct

SEQ ID NO: 61208 - DNA, 20 bp, Artificial Sequence
  MKO10061208_A_Zfp786
  gRNA
ggcccttacccgagcgggtc

SEQ ID NO: 61209 - DNA, 20 bp, Artificial Sequence
  MKO10061209_A_Zfp786
  gRNA
cttccgcctaaagcagtact

SEQ ID NO: 61210 - DNA, 20 bp, Artificial Sequence
  MKO10061210_A_Zfp787
  gRNA
gtcgtgtcagcttcgaccag

SEQ ID NO: 61211 - DNA, 20 bp, Artificial Sequence
  MKO10061211_A_Zfp787
  gRNA
gtgcgcggtgtgccgaatgt

SEQ ID NO: 61212 - DNA, 20 bp, Artificial Sequence
  MKO10061212_A_Zfp787
  gRNA
tggagcttcgagaagaagct

SEQ ID NO: 61213 - DNA, 20 bp, Artificial Sequence
  MKO10061213_A_Zfp788
  gRNA
ctctacttcgaatacatgaa

SEQ ID NO: 61214 - DNA, 20 bp, Artificial Sequence
  MKO10061214_A_Zfp788
  gRNA
tttggttcctgtgaaagtcg

SEQ ID NO: 61215 - DNA, 20 bp, Artificial Sequence
  MKO10061215_A_Zfp788
  gRNA
tacaataaccttgcttgtgt

SEQ ID NO: 61216 - DNA, 20 bp, Artificial Sequence
  MKO10061216_A_Zfp78
  gRNA
ccatatcaatgcaccgtctg

SEQ ID NO: 61217 - DNA, 20 bp, Artificial Sequence
  MKO10061217_A_Zfp78
  gRNA
ccgcagacggtgcattgata

SEQ ID NO: 61218 - DNA, 20 bp, Artificial Sequence
  MKO10061218_A_Zfp78
  gRNA
accatctctaatctccttat

SEQ ID NO: 61219 - DNA, 20 bp, Artificial Sequence
  MKO10061219_A_Zfp790
  gRNA
cgccagtgtgagtccgaacg

SEQ ID NO: 61220 - DNA, 20 bp, Artificial Sequence
  MKO10061220_A_Zfp790
  gRNA
tactcgctaccgagcagttc

SEQ ID NO: 61221 - DNA, 20 bp, Artificial Sequence
  MKO10061221_A_Zfp790
  gRNA
ctttgcatttatcaaccgca

SEQ ID NO: 61222 - DNA, 20 bp, Artificial Sequence
  MKO10061222_A_Zfp791
  gRNA
cgtactgccgcgcgcatgag

SEQ ID NO: 61223 - DNA, 20 bp, Artificial Sequence
  MKO10061223_A_Zfp791
  gRNA
gcgcccttcaagcgcatgag

SEQ ID NO: 61224 - DNA, 20 bp, Artificial Sequence
  MKO10061224_A_Zfp791
  gRNA
agtcacacacacgtcctcaa

SEQ ID NO: 61225 - DNA, 20 bp, Artificial Sequence
  MKO10061225_A_Zfp799
  gRNA
ggagtatgaacgactgatgc

SEQ ID NO: 61226 - DNA, 20 bp, Artificial Sequence
  MKO10061226_A_Zfp799
  gRNA
aactcaagagtatcgagtag

SEQ ID NO: 61227 - DNA, 20 bp, Artificial Sequence
  MKO10061227_A_Zfp799
  gRNA
caccttcacctatataggac

SEQ ID NO: 61228 - DNA, 20 bp, Artificial Sequence
  MKO10061228_A_Zfp7
  gRNA
gaagcaccgtttgaatagcg

SEQ ID NO: 61229 - DNA, 20 bp, Artificial Sequence
  MKO10061229_A_Zfp7
  gRNA
gtgcacagccacgtcgccaa

SEQ ID NO: 61230 - DNA, 20 bp, Artificial Sequence
  MKO10061230_A_Zfp7
  gRNA
atcaggccgataacccacat

SEQ ID NO: 61231 - DNA, 20 bp, Artificial Sequence
  MKO10061231_A_Zfp800
  gRNA
tttcacttcaataccgacgt

SEQ ID NO: 61232 - DNA, 20 bp, Artificial Sequence
  MKO10061232_A_Zfp800
  gRNA
tctgcacttacgaaacccgt

SEQ ID NO: 61233 - DNA, 20 bp, Artificial Sequence
  MKO10061233_A_Zfp800
  gRNA
ataattgagtgctttcgatc

SEQ ID NO: 61234 - DNA, 20 bp, Artificial Sequence
  MKO10061234_A_Zfp804a
  gRNA
ttcatcgctgtattccgaga

SEQ ID NO: 61235 - DNA, 20 bp, Artificial Sequence
  MKO10061235_A_Zfp804a
  gRNA
tcgtagttccatctccaatg

SEQ ID NO: 61236 - DNA, 20 bp, Artificial Sequence
  MKO10061236_A_Zfp804a
  gRNA
atatgaccacgcccacaaac

SEQ ID NO: 61237 - DNA, 20 bp, Artificial Sequence
  MKO10061237_A_Zfp804b
  gRNA
acactcggagaggcctcgcc

SEQ ID NO: 61238 - DNA, 20 bp, Artificial Sequence
  MKO10061238_A_Zfp804b
  gRNA
acatgctagtctacgagact

SEQ ID NO: 61239 - DNA, 20 bp, Artificial Sequence
  MKO10061239_A_Zfp804b
  gRNA
ggcttacctgcttatgagcg

SEQ ID NO: 61240 - DNA, 20 bp, Artificial Sequence
  MKO10061240_A_Zfp808
  gRNA
gtcatctccaaaaccatata

SEQ ID NO: 61241 - DNA, 20 bp, Artificial Sequence
  MKO10061241_A_Zfp808
  gRNA
actgtgagcacgtaaagcaa

SEQ ID NO: 61242 - DNA, 20 bp, Artificial Sequence
  MKO10061242_A_Zfp808
  gRNA
tagtcttacctatagcattg

SEQ ID NO: 61243 - DNA, 20 bp, Artificial Sequence
  MKO10061243_A_Zfp809
  gRNA
cttctgatgtatagcgagtt

SEQ ID NO: 61244 - DNA, 20 bp, Artificial Sequence
  MKO10061244_A_Zfp809
  gRNA
agttgccgcaaacgtgtctt

SEQ ID NO: 61245 - DNA, 20 bp, Artificial Sequence
  MKO10061245_A_Zfp809
  gRNA
cactcagagtactcacgtta

SEQ ID NO: 61246 - DNA, 20 bp, Artificial Sequence
  MKO10061246_A_Zfp810
  gRNA
atgccgagtgagatctgact

SEQ ID NO: 61247 - DNA, 20 bp, Artificial Sequence
  MKO10061247_A_Zfp810
  gRNA
ccccatgcgtgcttagagtg

SEQ ID NO: 61248 - DNA, 20 bp, Artificial Sequence
  MKO10061248_A_Zfp810
  gRNA
ctcgggccacggagcacagc

SEQ ID NO: 61249 - DNA, 20 bp, Artificial Sequence
  MKO10061249_A_Zfp811
  gRNA
acttgtagggaactcgggaa

SEQ ID NO: 61250 - DNA, 20 bp, Artificial Sequence
  MKO10061250_A_Zfp811
  gRNA
taaatgtgcgactgaaacct

SEQ ID NO: 61251 - DNA, 20 bp, Artificial Sequence
  MKO10061251_A_Zfp811
  gRNA
acaatccagatccccaaata

SEQ ID NO: 61252 - DNA, 20 bp, Artificial Sequence
  MKO10061252_A_Zfp819
  gRNA
ctcatattgttccattatcg

SEQ ID NO: 61253 - DNA, 20 bp, Artificial Sequence
  MKO10061253_A_Zfp819
  gRNA
ctgccacggttcctcgataa

SEQ ID NO: 61254 - DNA, 20 bp, Artificial Sequence
  MKO10061254_A_Zfp819
  gRNA
caggctcacccactaccaag

SEQ ID NO: 61255 - DNA, 20 bp, Artificial Sequence
  MKO10061255_A_Zfp81
  gRNA
gttaataagtacatacctcc

SEQ ID NO: 61256 - DNA, 20 bp, Artificial Sequence
  MKO10061256_A_Zfp81
  gRNA
aacagtctaatgacccctgt

SEQ ID NO: 61257 - DNA, 20 bp, Artificial Sequence
  MKO10061257_A_Zfp81
  gRNA
ttacctttcagggaaaagcg

SEQ ID NO: 61258 - DNA, 20 bp, Artificial Sequence
  MKO10061258_A_Zfp820
  gRNA
ctctaccattagtttaactc

SEQ ID NO: 61259 - DNA, 20 bp, Artificial Sequence
  MKO10061259_A_Zfp820
  gRNA
aacaaatttaaacagttaac

SEQ ID NO: 61260 - DNA, 20 bp, Artificial Sequence
  MKO10061260_A_Zfp820
  gRNA
ttctctcctaaatgttcctc

SEQ ID NO: 61261 - DNA, 20 bp, Artificial Sequence
  MKO10061261_A_Zfp821
  gRNA
tatccaacaactacgagatc

SEQ ID NO: 61262 - DNA, 20 bp, Artificial Sequence
  MKO10061262_A_Zfp821
  gRNA
ggacgcactagcagagcgcg

SEQ ID NO: 61263 - DNA, 20 bp, Artificial Sequence
  MKO10061263_A_Zfp821
  gRNA
agtgcgtccccactactgac

SEQ ID NO: 61264 - DNA, 20 bp, Artificial Sequence
  MKO10061264_A_Zfp825
  gRNA
cttcagagtaaacaataccc

SEQ ID NO: 61265 - DNA, 20 bp, Artificial Sequence
  MKO10061265_A_Zfp825
  gRNA
tcttctttgagcgctgctat

SEQ ID NO: 61266 - DNA, 20 bp, Artificial Sequence
  MKO10061266_A_Zfp825
  gRNA
acaatgacataaaaacacag

SEQ ID NO: 61267 - DNA, 20 bp, Artificial Sequence
  MKO10061267_A_Zfp827
  gRNA
gtctaccccaagcgtctccg

SEQ ID NO: 61268 - DNA, 20 bp, Artificial Sequence
  MKO10061268_A_Zfp827
  gRNA
actccgtcagaagcgtccta

SEQ ID NO: 61269 - DNA, 20 bp, Artificial Sequence
  MKO10061269_A_Zfp827
  gRNA
gattgtccttgcgagcacac

SEQ ID NO: 61270 - DNA, 20 bp, Artificial Sequence
  MKO10061270_A_Zfp82
  gRNA
taccacaatgtggcctcgct

SEQ ID NO: 61271 - DNA, 20 bp, Artificial Sequence
  MKO10061271_A_Zfp82
  gRNA
tacctagcgaggccacattg

SEQ ID NO: 61272 - DNA, 20 bp, Artificial Sequence
  MKO10061272_A_Zfp82
  gRNA
gccagatgtgatttccttac

SEQ ID NO: 61273 - DNA, 20 bp, Artificial Sequence
  MKO10061273_A_Zfp830
  gRNA
gatagaatgttaccgccgag

SEQ ID NO: 61274 - DNA, 20 bp, Artificial Sequence
  MKO10061274_A_Zfp830
  gRNA
cgccctagcggcatccaagt

SEQ ID NO: 61275 - DNA, 20 bp, Artificial Sequence
  MKO10061275_A_Zfp830
  gRNA
tgaggtacagtgccggtcga

SEQ ID NO: 61276 - DNA, 20 bp, Artificial Sequence
  MKO10061276_A_Zfp831
  gRNA
aacgcctgtgcaagccaccc

SEQ ID NO: 61277 - DNA, 20 bp, Artificial Sequence
  MKO10061277_A_Zfp831
  gRNA
ctgtctcccccaccgacttg

SEQ ID NO: 61278 - DNA, 20 bp, Artificial Sequence
  MKO10061278_A_Zfp831
  gRNA
tccacaatccaacacgttct

SEQ ID NO: 61279 - DNA, 20 bp, Artificial Sequence
  MKO10061279_A_Zfp839
  gRNA
agcgcgttacctcccggagc

SEQ ID NO: 61280 - DNA, 20 bp, Artificial Sequence
  MKO10061280_A_Zfp839
  gRNA
tgcaactgcgcgtgtacccg

SEQ ID NO: 61281 - DNA, 20 bp, Artificial Sequence
  MKO10061281_A_Zfp839
  gRNA
ctcgatctggacgggtatcc

SEQ ID NO: 61282 - DNA, 20 bp, Artificial Sequence
  MKO10061282_A_Zfp846
  gRNA
tagatgcttacgtaagtacg

SEQ ID NO: 61283 - DNA, 20 bp, Artificial Sequence
  MKO10061283_A_Zfp846
  gRNA
gagttcttaagtgtctacgc

SEQ ID NO: 61284 - DNA, 20 bp, Artificial Sequence
  MKO10061284_A_Zfp846
  gRNA
ccaagagtcaccattgcatc

SEQ ID NO: 61285 - DNA, 20 bp, Artificial Sequence
  MKO10061285_A_Zfp84
  gRNA
cacggtgctgacgtccacaa

SEQ ID NO: 61286 - DNA, 20 bp, Artificial Sequence
  MKO10061286_A_Zfp84
  gRNA
cgagtgtaactactgcgaaa

SEQ ID NO: 61287 - DNA, 20 bp, Artificial Sequence
  MKO10061287_A_Zfp84
  gRNA
aaagtaggaaggacacgcga

SEQ ID NO: 61288 - DNA, 20 bp, Artificial Sequence
  MKO10061288_A_Zfp850
  gRNA
ccgtgaatgtactatagctg

SEQ ID NO: 61289 - DNA, 20 bp, Artificial Sequence
  MKO10061289_A_Zfp850
  gRNA
gtgggaaattctttcgtcga

SEQ ID NO: 61290 - DNA, 20 bp, Artificial Sequence
  MKO10061290_A_Zfp850
  gRNA
caggcttacccactgcaatg

SEQ ID NO: 61291 - DNA, 20 bp, Artificial Sequence
  MKO10061291_A_Zfp85
  gRNA
gagtgttgtgccaacactaa

SEQ ID NO: 61292 - DNA, 20 bp, Artificial Sequence
  MKO10061292_A_Zfp85
  gRNA
cttcgaatcttaaaaatcat

SEQ ID NO: 61293 - DNA, 20 bp, Artificial Sequence
  MKO10061293_A_Zfp85
  gRNA
ccttctgtcattcacagatg

SEQ ID NO: 61294 - DNA, 20 bp, Artificial Sequence
  MKO10061294_A_Zfp865
  gRNA
tcgcaggggtacaccggccg

SEQ ID NO: 61295 - DNA, 20 bp, Artificial Sequence
  MKO10061295_A_Zfp865
  gRNA
ggctcgctgatggcgtaaca

SEQ ID NO: 61296 - DNA, 20 bp, Artificial Sequence
  MKO10061296_A_Zfp865
  gRNA
actattccccattgcggagc

SEQ ID NO: 61297 - DNA, 20 bp, Artificial Sequence
  MKO10061297_A_Zfp866
  gRNA
gagttctttcgtgcaaccga

SEQ ID NO: 61298 - DNA, 20 bp, Artificial Sequence
  MKO10061298_A_Zfp866
  gRNA
gtgtgcgctcgtgtaatcga

SEQ ID NO: 61299 - DNA, 20 bp, Artificial Sequence
  MKO10061299_A_Zfp866
  gRNA
gagccttacctatcgcagcg

SEQ ID NO: 61300 - DNA, 20 bp, Artificial Sequence
  MKO10061300_A_Zfp867
  gRNA
agtccgctcatgctttcgaa

SEQ ID NO: 61301 - DNA, 20 bp, Artificial Sequence
  MKO10061301_A_Zfp867
  gRNA
agcaccttgctcacgtttat

SEQ ID NO: 61302 - DNA, 20 bp, Artificial Sequence
  MKO10061302_A_Zfp867
  gRNA
tgtcctcatcctcaacgttc

SEQ ID NO: 61303 - DNA, 20 bp, Artificial Sequence
  MKO10061303_A_Zfp868
  gRNA
ccatggtttaggatgtgaat

SEQ ID NO: 61304 - DNA, 20 bp, Artificial Sequence
  MKO10061304_A_Zfp868
  gRNA
tgtatcagtgaagttcctga

SEQ ID NO: 61305 - DNA, 20 bp, Artificial Sequence
  MKO10061305_A_Zfp868
  gRNA
tttcatgagcgaagccacac

SEQ ID NO: 61306 - DNA, 20 bp, Artificial Sequence
  MKO10061306_A_Zfp869
  gRNA
ggcttcgttcgtgaaatcga

SEQ ID NO: 61307 - DNA, 20 bp, Artificial Sequence
  MKO10061307_A_Zfp869
  gRNA
tctctcgtgcagtcgaagcg

SEQ ID NO: 61308 - DNA, 20 bp, Artificial Sequence
  MKO10061308_A_Zfp869
  gRNA
tacggcagtgaagttcctga

SEQ ID NO: 61309 - DNA, 20 bp, Artificial Sequence
  MKO10061309_A_Zfp870
  gRNA
gcgttagttcgtgcgatctg

SEQ ID NO: 61310 - DNA, 20 bp, Artificial Sequence
  MKO10061310_A_Zfp870
  gRNA
cccgcattgcaaacacgcgt

SEQ ID NO: 61311 - DNA, 20 bp, Artificial Sequence
  MKO10061311_A_Zfp870
  gRNA
tgaaggcgactctgatatct

SEQ ID NO: 61312 - DNA, 20 bp, Artificial Sequence
  MKO10061312_A_Zfp871
  gRNA
gcatgaatcgtgcgaagatc

SEQ ID NO: 61313 - DNA, 20 bp, Artificial Sequence
  MKO10061313_A_Zfp871
  gRNA
tcttcgcacgattcatgctt

SEQ ID NO: 61314 - DNA, 20 bp, Artificial Sequence
  MKO10061314_A_Zfp871
  gRNA
aaaatatataccgaaactcc

SEQ ID NO: 61315 - DNA, 20 bp, Artificial Sequence
  MKO10061315_A_Zfp872
  gRNA
tcccgcaccgctgacactcg

SEQ ID NO: 61316 - DNA, 20 bp, Artificial Sequence
  MKO10061316_A_Zfp872
  gRNA
tccacatataccgcattcac

SEQ ID NO: 61317 - DNA, 20 bp, Artificial Sequence
  MKO10061317_A_Zfp872
  gRNA
gttgataacctggcttctat

SEQ ID NO: 61318 - DNA, 20 bp, Artificial Sequence
  MKO10061318_A_Zfp873
  gRNA
tacacggctcagtaatctgc

SEQ ID NO: 61319 - DNA, 20 bp, Artificial Sequence
  MKO10061319_A_Zfp873
  gRNA
ccttatgaatgttcgaagtg

SEQ ID NO: 61320 - DNA, 20 bp, Artificial Sequence
  MKO10061320_A_Zfp873
  gRNA
acatcttacctatagcagtg

SEQ ID NO: 61321 - DNA, 20 bp, Artificial Sequence
  MKO10061321_A_Zfp874a
  gRNA
gaacattatagaatgcattc

SEQ ID NO: 61322 - DNA, 20 bp, Artificial Sequence
  MKO10061322_A_Zfp874a
  gRNA
tgtcgccaataaaatgtccc

SEQ ID NO: 61323 - DNA, 20 bp, Artificial Sequence
  MKO10061323_A_Zfp874a
  gRNA
acatcagccaccattcctcc

SEQ ID NO: 61324 - DNA, 20 bp, Artificial Sequence
  MKO10061324_A_Zfp874b
  gRNA
tgtctccactataacgtctc

SEQ ID NO: 61325 - DNA, 20 bp, Artificial Sequence
  MKO10061325_A_Zfp874b
  gRNA
gtactccagagacgttatag

SEQ ID NO: 61326 - DNA, 20 bp, Artificial Sequence
  MKO10061326_A_Zfp874b
  gRNA
cccaggtagtccctctcttc

SEQ ID NO: 61327 - DNA, 20 bp, Artificial Sequence
  MKO10061327_A_Zfp879
  gRNA
tttctcacgagtccgacccc

SEQ ID NO: 61328 - DNA, 20 bp, Artificial Sequence
  MKO10061328_A_Zfp879
  gRNA
gtcggactcgtgagaaatcc

SEQ ID NO: 61329 - DNA, 20 bp, Artificial Sequence
  MKO10061329_A_Zfp879
  gRNA
acaagcagaagacttcccga

SEQ ID NO: 61330 - DNA, 20 bp, Artificial Sequence
  MKO10061330_A_Zfp87
  gRNA
ctactcattcgtacctcatt

SEQ ID NO: 61331 - DNA, 20 bp, Artificial Sequence
  MKO10061331_A_Zfp87
  gRNA
ggcccaatttgtgccgaatg

SEQ ID NO: 61332 - DNA, 20 bp, Artificial Sequence
  MKO10061332_A_Zfp87
  gRNA
gcagctgccaccgtgcaccc

SEQ ID NO: 61333 - DNA, 20 bp, Artificial Sequence
  MKO10061333_A_Zfp882
  gRNA
gcgcactgaaaaaacacgag

SEQ ID NO: 61334 - DNA, 20 bp, Artificial Sequence
  MKO10061334_A_Zfp882
  gRNA
cagtgcgctgctcaacacaa

SEQ ID NO: 61335 - DNA, 20 bp, Artificial Sequence
  MKO10061335_A_Zfp882
  gRNA
tatggcagccaaattcctga

SEQ ID NO: 61336 - DNA, 20 bp, Artificial Sequence
  MKO10061336_A_Zfp90
  gRNA
cgtcactcacgcaacacgag

SEQ ID NO: 61337 - DNA, 20 bp, Artificial Sequence
  MKO10061337_A_Zfp90
  gRNA
cacgtccctcacgcaacatg

SEQ ID NO: 61338 - DNA, 20 bp, Artificial Sequence
  MKO10061338_A_Zfp90
  gRNA
cctccttaccgagcgacacc

SEQ ID NO: 61339 - DNA, 20 bp, Artificial Sequence
  MKO10061339_A_Zfp91
  gRNA
gagtattctcactgtctcga

SEQ ID NO: 61340 - DNA, 20 bp, Artificial Sequence
  MKO10061340_A_Zfp91
  gRNA
tgtcttgcagacgagttgca

SEQ ID NO: 61341 - DNA, 20 bp, Artificial Sequence
  MKO10061341_A_Zfp91
  gRNA
aaacttatacctaatgccac

SEQ ID NO: 61342 - DNA, 20 bp, Artificial Sequence
  MKO10061342_A_Zfp92
  gRNA
atatcgcttatccgcgattc

SEQ ID NO: 61343 - DNA, 20 bp, Artificial Sequence
  MKO10061343_A_Zfp92
  gRNA
cggctccagcaccgcactcg

SEQ ID NO: 61344 - DNA, 20 bp, Artificial Sequence
  MKO10061344_A_Zfp92
  gRNA
cattccatcatctctaatcc

SEQ ID NO: 61345 - DNA, 20 bp, Artificial Sequence
  MKO10061345_A_Zfp930
  gRNA
agcggttctttgcgtgtaac

SEQ ID NO: 61346 - DNA, 20 bp, Artificial Sequence
  MKO10061346_A_Zfp930
  gRNA
tccaggctccgttccgaagc

SEQ ID NO: 61347 - DNA, 20 bp, Artificial Sequence
  MKO10061347_A_Zfp930
  gRNA
aagaccaatgtgacgtgtag

SEQ ID NO: 61348 - DNA, 20 bp, Artificial Sequence
  MKO10061348_A_Zfp931
  gRNA
tttcaaacttctagacgtca

SEQ ID NO: 61349 - DNA, 20 bp, Artificial Sequence
  MKO10061349_A_Zfp931
  gRNA
gacgtctagaagtttgaaaa

SEQ ID NO: 61350 - DNA, 20 bp, Artificial Sequence
  MKO10061350_A_Zfp931
  gRNA
ccctatgaatgtaaacattg

SEQ ID NO: 61351 - DNA, 20 bp, Artificial Sequence
  MKO10061351_A_Zfp932
  gRNA
accatattgaataccttcgt

SEQ ID NO: 61352 - DNA, 20 bp, Artificial Sequence
  MKO10061352_A_Zfp932
  gRNA
taaataactttcatatacaa

SEQ ID NO: 61353 - DNA, 20 bp, Artificial Sequence
  MKO10061353_A_Zfp932
  gRNA
cagtcttacctacagcattg

SEQ ID NO: 61354 - DNA, 20 bp, Artificial Sequence
  MKO10061354_A_Zfp933
  gRNA
catatcaccattatcctcag

SEQ ID NO: 61355 - DNA, 20 bp, Artificial Sequence
  MKO10061355_A_Zfp933
  gRNA
aagatgatagtaacgtgcaa

SEQ ID NO: 61356 - DNA, 20 bp, Artificial Sequence
  MKO10061356_A_Zfp933
  gRNA
ctttgacaatgttcttcagt

SEQ ID NO: 61357 - DNA, 20 bp, Artificial Sequence
  MKO10061357_A_Zfp934
  gRNA
gtctctgcagtatgtgctcc

SEQ ID NO: 61358 - DNA, 20 bp, Artificial Sequence
  MKO10061358_A_Zfp934
  gRNA
ccttatactcagaaagattc

SEQ ID NO: 61359 - DNA, 20 bp, Artificial Sequence
  MKO10061359_A_Zfp934
  gRNA
gctctacaaacatgtcatgc

SEQ ID NO: 61360 - DNA, 20 bp, Artificial Sequence
  MKO10061360_A_Zfp935
  gRNA
gaatgcctagttgtcttaaa

SEQ ID NO: 61361 - DNA, 20 bp, Artificial Sequence
  MKO10061361_A_Zfp935
  gRNA
gacaatattcttcgatatta

SEQ ID NO: 61362 - DNA, 20 bp, Artificial Sequence
  MKO10061362_A_Zfp935
  gRNA
gaagctctacaaagatgtca

SEQ ID NO: 61363 - DNA, 20 bp, Artificial Sequence
  MKO10061363_A_Zfp936
  gRNA
ttcatgtacccgaagatcgc

SEQ ID NO: 61364 - DNA, 20 bp, Artificial Sequence
  MKO10061364_A_Zfp936
  gRNA
aaatacacagtcacgcccaa

SEQ ID NO: 61365 - DNA, 20 bp, Artificial Sequence
  MKO10061365_A_Zfp936
  gRNA
ccagcagtagcacacagagc

SEQ ID NO: 61366 - DNA, 20 bp, Artificial Sequence
  MKO10061366_A_Zfp937
  gRNA
gctcttctctgtcatcttcg

SEQ ID NO: 61367 - DNA, 20 bp, Artificial Sequence
  MKO10061367_A_Zfp937
  gRNA
aaatcctttgtatgtcagag

SEQ ID NO: 61368 - DNA, 20 bp, Artificial Sequence
  MKO10061368_A_Zfp937
  gRNA
tatagcagcaagattcctgt

SEQ ID NO: 61369 - DNA, 20 bp, Artificial Sequence
  MKO10061369_A_Zfp938
  gRNA
acagtaatcatcagatatgt

SEQ ID NO: 61370 - DNA, 20 bp, Artificial Sequence
  MKO10061370_A_Zfp938
  gRNA
tgatgaattcccattgaagc

SEQ ID NO: 61371 - DNA, 20 bp, Artificial Sequence
  MKO10061371_A_Zfp938
  gRNA
tgttattacctatacaagta

SEQ ID NO: 61372 - DNA, 20 bp, Artificial Sequence
  MKO10061372_A_Zfp939
  gRNA
tcacatttacatgaattcgc

SEQ ID NO: 61373 - DNA, 20 bp, Artificial Sequence
  MKO10061373_A_Zfp939
  gRNA
cccaacttactcgacaccag

SEQ ID NO: 61374 - DNA, 20 bp, Artificial Sequence
  MKO10061374_A_Zfp939
  gRNA
tacctcctttgacacccacc

SEQ ID NO: 61375 - DNA, 20 bp, Artificial Sequence
  MKO10061375_A_Zfp93
  gRNA
ttcctgattgtcactactgc

SEQ ID NO: 61376 - DNA, 20 bp, Artificial Sequence
  MKO10061376_A_Zfp93
  gRNA
ttccagcagtagtgacaatc

SEQ ID NO: 61377 - DNA, 20 bp, Artificial Sequence
  MKO10061377_A_Zfp93
  gRNA
gacaacagccacatccctga

SEQ ID NO: 61378 - DNA, 20 bp, Artificial Sequence
  MKO10061378_A_Zfp940
  gRNA
cagtgtgtgcgctccgattc

SEQ ID NO: 61379 - DNA, 20 bp, Artificial Sequence
  MKO10061379_A_Zfp940
  gRNA
gcgcacacacggattcactc

SEQ ID NO: 61380 - DNA, 20 bp, Artificial Sequence
  MKO10061380_A_Zfp940
  gRNA
actgatgacgttcagagacg

SEQ ID NO: 61381 - DNA, 20 bp, Artificial Sequence
  MKO10061381_A_Zfp941
  gRNA
tcgtgaagtcggctcccttt

SEQ ID NO: 61382 - DNA, 20 bp, Artificial Sequence
  MKO10061382_A_Zfp941
  gRNA
cgttgccatagcattcgtcc

SEQ ID NO: 61383 - DNA, 20 bp, Artificial Sequence
  MKO10061383_A_Zfp941
  gRNA
cttatacagggatgtaatgg

SEQ ID NO: 61384 - DNA, 20 bp, Artificial Sequence
  MKO10061384_A_Zfp942
  gRNA
attactaagagtgtgttcgt

SEQ ID NO: 61385 - DNA, 20 bp, Artificial Sequence
  MKO10061385_A_Zfp942
  gRNA
gtacactttgggtgtattcc

SEQ ID NO: 61386 - DNA, 20 bp, Artificial Sequence
  MKO10061386_A_Zfp942
  gRNA
tgaccttgggagcatttacc

SEQ ID NO: 61387 - DNA, 20 bp, Artificial Sequence
  MKO10061387_A_Zfp943
  gRNA
tcctttgcgtgtaaagcatt

SEQ ID NO: 61388 - DNA, 20 bp, Artificial Sequence
  MKO10061388_A_Zfp943
  gRNA
accaaatgctttacacgcaa

SEQ ID NO: 61389 - DNA, 20 bp, Artificial Sequence
  MKO10061389_A_Zfp943
  gRNA
aatatcttgaccgtgctcag

SEQ ID NO: 61390 - DNA, 20 bp, Artificial Sequence
  MKO10061390_A_Zfp944
  gRNA
tcttgtaaatgtaatgatcg

SEQ ID NO: 61391 - DNA, 20 bp, Artificial Sequence
  MKO10061391_A_Zfp944
  gRNA
gacttctaagactgcgtttg

SEQ ID NO: 61392 - DNA, 20 bp, Artificial Sequence
  MKO10061392_A_Zfp944
  gRNA
tgacctggggagcatttacc

SEQ ID NO: 61393 - DNA, 20 bp, Artificial Sequence
  MKO10061393_A_Zfp945
  gRNA
gacatatgagctgctagtaa

SEQ ID NO: 61394 - DNA, 20 bp, Artificial Sequence
  MKO10061394_A_Zfp945
  gRNA
actgtgacaaatccttccac

SEQ ID NO: 61395 - DNA, 20 bp, Artificial Sequence
  MKO10061395_A_Zfp945
  gRNA
ttacaacaatctactctttg

SEQ ID NO: 61396 - DNA, 20 bp, Artificial Sequence
  MKO10061396_A_Zfp946
  gRNA
catcagccagttcatacaag

SEQ ID NO: 61397 - DNA, 20 bp, Artificial Sequence
  MKO10061397_A_Zfp946
  gRNA
attcaacagttgtatctctg

SEQ ID NO: 61398 - DNA, 20 bp, Artificial Sequence
  MKO10061398_A_Zfp946
  gRNA
acaggatctgttaagattca

SEQ ID NO: 61399 - DNA, 20 bp, Artificial Sequence
  MKO10061399_A_Zfp947
  gRNA
attcatcagatgcgtcattc

SEQ ID NO: 61400 - DNA, 20 bp, Artificial Sequence
  MKO10061400_A_Zfp947
  gRNA
gcttgtggataatatgctgt

SEQ ID NO: 61401 - DNA, 20 bp, Artificial Sequence
  MKO10061401_A_Zfp947
  gRNA
acagagtcagataacattca

SEQ ID NO: 61402 - DNA, 20 bp, Artificial Sequence
  MKO10061402_A_Zfp948
  gRNA
tctgttaacatttcgagatg

SEQ ID NO: 61403 - DNA, 20 bp, Artificial Sequence
  MKO10061403_A_Zfp948
  gRNA
cggaggtactgaagcatctc

SEQ ID NO: 61404 - DNA, 20 bp, Artificial Sequence
  MKO10061404_A_Zfp948
  gRNA
agcgatcacagactccatac

SEQ ID NO: 61405 - DNA, 20 bp, Artificial Sequence
  MKO10061405_A_Zfp949
  gRNA
tataatgactgttgtgtagc

SEQ ID NO: 61406 - DNA, 20 bp, Artificial Sequence
  MKO10061406_A_Zfp949
  gRNA
cctatcatagctccccatgt

SEQ ID NO: 61407 - DNA, 20 bp, Artificial Sequence
  MKO10061407_A_Zfp949
  gRNA
acgtcactgtgaagttcacc

SEQ ID NO: 61408 - DNA, 20 bp, Artificial Sequence
  MKO10061408_A_Zfp94
  gRNA
ccgcatatgtcacatcgata

SEQ ID NO: 61409 - DNA, 20 bp, Artificial Sequence
  MKO10061409_A_Zfp94
  gRNA
ggtcgcccgttagcctgcag

SEQ ID NO: 61410 - DNA, 20 bp, Artificial Sequence
  MKO10061410_A_Zfp94
  gRNA
gaggacaatgaccaaggtca

SEQ ID NO: 61411 - DNA, 20 bp, Artificial Sequence
  MKO10061411_A_Zfp951
  gRNA
ccacagtacttacgtgaaga

SEQ ID NO: 61412 - DNA, 20 bp, Artificial Sequence
  MKO10061412_A_Zfp951
  gRNA
ccttcttcacgtaagtactg

SEQ ID NO: 61413 - DNA, 20 bp, Artificial Sequence
  MKO10061413_A_Zfp951
  gRNA
aaatgcatgccccattcaaa

SEQ ID NO: 61414 - DNA, 20 bp, Artificial Sequence
  MKO10061414_A_Zfp952
  gRNA
gattataacaagcatcgcgc

SEQ ID NO: 61415 - DNA, 20 bp, Artificial Sequence
  MKO10061415_A_Zfp952
  gRNA
gactgtaccagccgctataa

SEQ ID NO: 61416 - DNA, 20 bp, Artificial Sequence
  MKO10061416_A_Zfp952
  gRNA
tatggagatcagattcataa

SEQ ID NO: 61417 - DNA, 20 bp, Artificial Sequence
  MKO10061417_A_Zfp953
  gRNA
accatcactttatcaacaca

SEQ ID NO: 61418 - DNA, 20 bp, Artificial Sequence
  MKO10061418_A_Zfp953
  gRNA
gaacacaagttaatgcataa

SEQ ID NO: 61419 - DNA, 20 bp, Artificial Sequence
  MKO10061419_A_Zfp953
  gRNA
attatacagggatgtgacat

SEQ ID NO: 61420 - DNA, 20 bp, Artificial Sequence
  MKO10061420_A_Zfp954
  gRNA
caccagtatgaaatcgataa

SEQ ID NO: 61421 - DNA, 20 bp, Artificial Sequence
  MKO10061421_A_Zfp954
  gRNA
tttatcgagcgtgaatcttc

SEQ ID NO: 61422 - DNA, 20 bp, Artificial Sequence
  MKO10061422_A_Zfp954
  gRNA
gattcctgactccgtgttta

SEQ ID NO: 61423 - DNA, 20 bp, Artificial Sequence
  MKO10061423_A_Zfp955a
  gRNA
gattctaagagagcccacgc

SEQ ID NO: 61424 - DNA, 20 bp, Artificial Sequence
  MKO10061424_A_Zfp955a
  gRNA
aaaattacctcgagtttctc

SEQ ID NO: 61425 - DNA, 20 bp, Artificial Sequence
  MKO10061425_A_Zfp955a
  gRNA
acagtagctagcaatgttaa

SEQ ID NO: 61426 - DNA, 20 bp, Artificial Sequence
  MKO10061426_A_Zfp955b
  gRNA
acggttgcccgcactgctaa

SEQ ID NO: 61427 - DNA, 20 bp, Artificial Sequence
  MKO10061427_A_Zfp955b
  gRNA
gcttgtgatgagcacccgaa

SEQ ID NO: 61428 - DNA, 20 bp, Artificial Sequence
  MKO10061428_A_Zfp955b
  gRNA
gccacgtcctcaaaagtcac

SEQ ID NO: 61429 - DNA, 20 bp, Artificial Sequence
  MKO10061429_A_Zfp956
  gRNA
actctgcaagcgcgtagcaa

SEQ ID NO: 61430 - DNA, 20 bp, Artificial Sequence
  MKO10061430_A_Zfp956
  gRNA
tgacaaacgtttcacacgcc

SEQ ID NO: 61431 - DNA, 20 bp, Artificial Sequence
  MKO10061431_A_Zfp956
  gRNA
tggccgtctgtccacgttgc

SEQ ID NO: 61432 - DNA, 20 bp, Artificial Sequence
  MKO10061432_A_Zfp957
  gRNA
gggggccggttacggtaaca

SEQ ID NO: 61433 - DNA, 20 bp, Artificial Sequence
  MKO10061433_A_Zfp957
  gRNA
tcgtaaaaacgcagccgcta

SEQ ID NO: 61434 - DNA, 20 bp, Artificial Sequence
  MKO10061434_A_Zfp957
  gRNA
aagtacgctacccagccact

SEQ ID NO: 61435 - DNA, 20 bp, Artificial Sequence
  MKO10061435_A_Zfp958
  gRNA
ccgttcgagcttctcagcgg

SEQ ID NO: 61436 - DNA, 20 bp, Artificial Sequence
  MKO10061436_A_Zfp958
  gRNA
ccgccgctgagaagctcgaa

SEQ ID NO: 61437 - DNA, 20 bp, Artificial Sequence
  MKO10061437_A_Zfp958
  gRNA
ctcagctatcttcgagtgca

SEQ ID NO: 61438 - DNA, 20 bp, Artificial Sequence
  MKO10061438_A_Zfp959
  gRNA
cacacttacctatacaagtc

SEQ ID NO: 61439 - DNA, 20 bp, Artificial Sequence
  MKO10061439_A_Zfp959
  gRNA
atacatcaaaatactgaccg

SEQ ID NO: 61440 - DNA, 20 bp, Artificial Sequence
  MKO10061440_A_Zfp959
  gRNA
cggtataagtgtaagcaatg

SEQ ID NO: 61441 - DNA, 20 bp, Artificial Sequence
  MKO10061441_A_Zfp960
  gRNA
aagattgctgtggcgtgcaa

SEQ ID NO: 61442 - DNA, 20 bp, Artificial Sequence
  MKO10061442_A_Zfp960
  gRNA
aagagtgctgtgacgtgcaa

SEQ ID NO: 61443 - DNA, 20 bp, Artificial Sequence
  MKO10061443_A_Zfp960
  gRNA
gatattgtcacttcccacag

SEQ ID NO: 61444 - DNA, 20 bp, Artificial Sequence
  MKO10061444_A_Zfp961
  gRNA
ttagcaatgcgcaaggtacg

SEQ ID NO: 61445 - DNA, 20 bp, Artificial Sequence
  MKO10061445_A_Zfp961
  gRNA
tttcgaagggaatagacgta

SEQ ID NO: 61446 - DNA, 20 bp, Artificial Sequence
  MKO10061446_A_Zfp961
  gRNA
cacccgccacagcgcagctc

SEQ ID NO: 61447 - DNA, 20 bp, Artificial Sequence
  MKO10061447_A_Zfp963
  gRNA
ttataaaccacgtgagcgtg

SEQ ID NO: 61448 - DNA, 20 bp, Artificial Sequence
  MKO10061448_A_Zfp963
  gRNA
cgtgcattcgtagaatcttt

SEQ ID NO: 61449 - DNA, 20 bp, Artificial Sequence
  MKO10061449_A_Zfp963
  gRNA
aaattacctcatatttctcc

SEQ ID NO: 61450 - DNA, 20 bp, Artificial Sequence
  MKO10061450_A_Zfp964
  gRNA
ccatggcgcggcttcgagct

SEQ ID NO: 61451 - DNA, 20 bp, Artificial Sequence
  MKO10061451_A_Zfp964
  gRNA
ccgagctcgaagccgcgcca

SEQ ID NO: 61452 - DNA, 20 bp, Artificial Sequence
  MKO10061452_A_Zfp964
  gRNA
tcagtgtaccgcacacgagc

SEQ ID NO: 61453 - DNA, 20 bp, Artificial Sequence
  MKO10061453_A_Zfp97
  gRNA
tctgtgaatataaccaatgt

SEQ ID NO: 61454 - DNA, 20 bp, Artificial Sequence
  MKO10061454_A_Zfp97
  gRNA
aaaagattggtaacaagcaa

SEQ ID NO: 61455 - DNA, 20 bp, Artificial Sequence
  MKO10061455_A_Zfp97
  gRNA
gatattgtcacttcccacag

SEQ ID NO: 61456 - DNA, 20 bp, Artificial Sequence
  MKO10061456_A_Zfp9
  gRNA
agctacgactgtagcgaatg

SEQ ID NO: 61457 - DNA, 20 bp, Artificial Sequence
  MKO10061457_A_Zfp9
  gRNA
gagtcctttcgtgtaatcta

SEQ ID NO: 61458 - DNA, 20 bp, Artificial Sequence
  MKO10061458_A_Zfp9
  gRNA
actcaccaccacggctctta

SEQ ID NO: 61459 - DNA, 20 bp, Artificial Sequence
  MKO10061459_A_Zfpl1
  gRNA
accacccgtcttgtttgcta

SEQ ID NO: 61460 - DNA, 20 bp, Artificial Sequence
  MKO10061460_A_Zfpl1
  gRNA
tgtgttgcacaggcggcaat

SEQ ID NO: 61461 - DNA, 20 bp, Artificial Sequence
  MKO10061461_A_Zfpl1
  gRNA
gcccagctcaccgtgtgcca

SEQ ID NO: 61462 - DNA, 20 bp, Artificial Sequence
  MKO10061462_A_Zfpm1
  gRNA
gtctggatgctcccgtagaa

SEQ ID NO: 61463 - DNA, 20 bp, Artificial Sequence
  MKO10061463_A_Zfpm1
  gRNA
gcctcactgagggcctatcc

SEQ ID NO: 61464 - DNA, 20 bp, Artificial Sequence
  MKO10061464_A_Zfpm1
  gRNA
ctggttacctggcccactcc

SEQ ID NO: 61465 - DNA, 20 bp, Artificial Sequence
  MKO10061465_A_Zfpm2
  gRNA
ggaagatgccatcgacgacg

SEQ ID NO: 61466 - DNA, 20 bp, Artificial Sequence
  MKO10061466_A_Zfpm2
  gRNA
gaagccgaagtcatctcgaa

SEQ ID NO: 61467 - DNA, 20 bp, Artificial Sequence
  MKO10061467_A_Zfpm2
  gRNA
tcagagtcggcagcaacttc

SEQ ID NO: 61468 - DNA, 20 bp, Artificial Sequence
  MKO10061468_A_Zfr2
  gRNA
gacctcgcaatagtgcatag

SEQ ID NO: 61469 - DNA, 20 bp, Artificial Sequence
  MKO10061469_A_Zfr2
  gRNA
accccacgggtccgagccca

SEQ ID NO: 61470 - DNA, 20 bp, Artificial Sequence
  MKO10061470_A_Zfr2
  gRNA
acgcctatgctgcgcacatg

SEQ ID NO: 61471 - DNA, 20 bp, Artificial Sequence
  MKO10061471_A_Zfr
  gRNA
gtagttgccggtcgccattt

SEQ ID NO: 61472 - DNA, 20 bp, Artificial Sequence
  MKO10061472_A_Zfr
  gRNA
gaataggctacacccgaagc

SEQ ID NO: 61473 - DNA, 20 bp, Artificial Sequence
  MKO10061473_A_Zfr
  gRNA
gagtatactgtgttgcacct

SEQ ID NO: 61474 - DNA, 20 bp, Artificial Sequence
  MKO10061474_A_Zfx
  gRNA
atagttatgtacggttatgt

SEQ ID NO: 61475 - DNA, 20 bp, Artificial Sequence
  MKO10061475_A_Zfx
  gRNA
catcatccctgaacaagtgc

SEQ ID NO: 61476 - DNA, 20 bp, Artificial Sequence
  MKO10061476_A_Zfx
  gRNA
atagaacatgatggttcatc

SEQ ID NO: 61477 - DNA, 20 bp, Artificial Sequence
  MKO10061477_A_Zfy1
  gRNA
cttgtacttccacaacaatc

SEQ ID NO: 61478 - DNA, 20 bp, Artificial Sequence
  MKO10061478_A_Zfy1
  gRNA
ccttcaagatctgctttgct

SEQ ID NO: 61479 - DNA, 20 bp, Artificial Sequence
  MKO10061479_A_Zfy1
  gRNA
agctgacacttcagatatac

SEQ ID NO: 61480 - DNA, 20 bp, Artificial Sequence
  MKO10061480_A_Zfy2
  gRNA
gtagagagtgagaccgacaa

SEQ ID NO: 61481 - DNA, 20 bp, Artificial Sequence
  MKO10061481_A_Zfy2
  gRNA
caatgaggttgatgtaatac

SEQ ID NO: 61482 - DNA, 20 bp, Artificial Sequence
  MKO10061482_A_Zfy2
  gRNA
agccgacatttcagatatac

SEQ ID NO: 61483 - DNA, 20 bp, Artificial Sequence
  MKO10061483_A_Zfyve16
  gRNA
cttactacaccgtctcatac

SEQ ID NO: 61484 - DNA, 20 bp, Artificial Sequence
  MKO10061484_A_Zfyve16
  gRNA
ggcaattcatcccttatgtc

SEQ ID NO: 61485 - DNA, 20 bp, Artificial Sequence
  MKO10061485_A_Zfyve16
  gRNA
gcagatggcatactgccgaa

SEQ ID NO: 61486 - DNA, 20 bp, Artificial Sequence
  MKO10061486_A_Zfyve19
  gRNA
tttcctgacgaagccgtgct

SEQ ID NO: 61487 - DNA, 20 bp, Artificial Sequence
  MKO10061487_A_Zfyve19
  gRNA
ccatcgctgagcgcctagca

SEQ ID NO: 61488 - DNA, 20 bp, Artificial Sequence
  MKO10061488_A_Zfyve19
  gRNA
gctaagacagccgttacaga

SEQ ID NO: 61489 - DNA, 20 bp, Artificial Sequence
  MKO10061489_A_Zfyve1
  gRNA
tctatcgaactcatgcagac

SEQ ID NO: 61490 - DNA, 20 bp, Artificial Sequence
  MKO10061490_A_Zfyve1
  gRNA
caaccgcgtctatacctgca

SEQ ID NO: 61491 - DNA, 20 bp, Artificial Sequence
  MKO10061491_A_Zfyve1
  gRNA
gagcttctcgggcgcctcgg

SEQ ID NO: 61492 - DNA, 20 bp, Artificial Sequence
  MKO10061492_A_Zfyve20
  gRNA
aacaagttgttgaaacgaga

SEQ ID NO: 61493 - DNA, 20 bp, Artificial Sequence
  MKO10061493_A_Zfyve20
  gRNA
ggcagtggtgacggcggttc

SEQ ID NO: 61494 - DNA, 20 bp, Artificial Sequence
  MKO10061494_A_Zfyve20
  gRNA
atcacctacgtgctaagggc

SEQ ID NO: 61495 - DNA, 20 bp, Artificial Sequence
  MKO10061495_A_Zfyve21
  gRNA
acttcggcgcatgtgcttcg

SEQ ID NO: 61496 - DNA, 20 bp, Artificial Sequence
  MKO10061496_A_Zfyve21
  gRNA
gtcgtctttccaacaaccag

SEQ ID NO: 61497 - DNA, 20 bp, Artificial Sequence
  MKO10061497_A_Zfyve21
  gRNA
tgtcataaaactccgcctct

SEQ ID NO: 61498 - DNA, 20 bp, Artificial Sequence
  MKO10061498_A_Zfyve26
  gRNA
ctgtcaggtatactgcccgc

SEQ ID NO: 61499 - DNA, 20 bp, Artificial Sequence
  MKO10061499_A_Zfyve26
  gRNA
cgggcagtatacctgacaga

SEQ ID NO: 61500 - DNA, 20 bp, Artificial Sequence
  MKO10061500_A_Zfyve26
  gRNA
cagatcatcctgatcccgag

SEQ ID NO: 61501 - DNA, 20 bp, Artificial Sequence
  MKO10061501_A_Zfyve27
  gRNA
cagcctaccgtgtacttcac

SEQ ID NO: 61502 - DNA, 20 bp, Artificial Sequence
  MKO10061502_A_Zfyve27
  gRNA
agtgcacctttcccgccctg

SEQ ID NO: 61503 - DNA, 20 bp, Artificial Sequence
  MKO10061503_A_Zfyve27
  gRNA
cttaggtgcgtggtactcca

SEQ ID NO: 61504 - DNA, 20 bp, Artificial Sequence
  MKO10061504_A_Zfyve28
  gRNA
atccggcatgacaacttggc

SEQ ID NO: 61505 - DNA, 20 bp, Artificial Sequence
  MKO10061505_A_Zfyve28
  gRNA
gcggggcactctccgtgacc

SEQ ID NO: 61506 - DNA, 20 bp, Artificial Sequence
  MKO10061506_A_Zfyve28
  gRNA
gagcatggccatgcggccac

SEQ ID NO: 61507 - DNA, 20 bp, Artificial Sequence
  MKO10061507_A_Zfyve9
  gRNA
gctgatgggatcttacctaa

SEQ ID NO: 61508 - DNA, 20 bp, Artificial Sequence
  MKO10061508_A_Zfyve9
  gRNA
aggttcattgcacttccaac

SEQ ID NO: 61509 - DNA, 20 bp, Artificial Sequence
  MKO10061509_A_Zfyve9
  gRNA
gcatcagcaacttctccatt

SEQ ID NO: 61510 - DNA, 20 bp, Artificial Sequence
  MKO10061510_A_Zg16
  gRNA
ccatcaccgccttccgtatc

SEQ ID NO: 61511 - DNA, 20 bp, Artificial Sequence
  MKO10061511_A_Zg16
  gRNA
acactgtgccatagcgcacc

SEQ ID NO: 61512 - DNA, 20 bp, Artificial Sequence
  MKO10061512_A_Zg16
  gRNA
cggtgatggggccgtccagc

SEQ ID NO: 61513 - DNA, 20 bp, Artificial Sequence
  MKO10061513_A_Zglp1
  gRNA
actgccgggttccccttcgc

SEQ ID NO: 61514 - DNA, 20 bp, Artificial Sequence
  MKO10061514_A_Zglp1
  gRNA
aagcagctaaacccgcgaat

SEQ ID NO: 61515 - DNA, 20 bp, Artificial Sequence
  MKO10061515_A_Zglp1
  gRNA
tctacaagaagcacaccgcc

SEQ ID NO: 61516 - DNA, 20 bp, Artificial Sequence
  MKO10061516_A_Zgpat
  gRNA
gtctgcagtaagcttaagtc

SEQ ID NO: 61517 - DNA, 20 bp, Artificial Sequence
  MKO10061517_A_Zgpat
  gRNA
gtctcaccagtgatccgtgc

SEQ ID NO: 61518 - DNA, 20 bp, Artificial Sequence
  MKO10061518_A_Zgpat
  gRNA
tgccatacctctggcatagc

SEQ ID NO: 61519 - DNA, 20 bp, Artificial Sequence
  MKO10061519_A_Zhx1
  gRNA
agcttccgcttcacatgtcg

SEQ ID NO: 61520 - DNA, 20 bp, Artificial Sequence
  MKO10061520_A_Zhx1
  gRNA
tggtaacccgttactccctg

SEQ ID NO: 61521 - DNA, 20 bp, Artificial Sequence
  MKO10061521_A_Zhx1
  gRNA
tccgatatcagctcaagatc

SEQ ID NO: 61522 - DNA, 20 bp, Artificial Sequence
  MKO10061522_A_Zhx2
  gRNA
atgtgtggacgcttcggctc

SEQ ID NO: 61523 - DNA, 20 bp, Artificial Sequence
  MKO10061523_A_Zhx2
  gRNA
accaccgctaccggtgtcag

SEQ ID NO: 61524 - DNA, 20 bp, Artificial Sequence
  MKO10061524_A_Zhx2
  gRNA
taccggctcattgaggtgac

SEQ ID NO: 61525 - DNA, 20 bp, Artificial Sequence
  MKO10061525_A_Zhx3
  gRNA
gtcttaacggggatcatgca

SEQ ID NO: 61526 - DNA, 20 bp, Artificial Sequence
  MKO10061526_A_Zhx3
  gRNA
gagaacgctcctaatcagcc

SEQ ID NO: 61527 - DNA, 20 bp, Artificial Sequence
  MKO10061527_A_Zhx3
  gRNA
catgatccccgttaagaccg

SEQ ID NO: 61528 - DNA, 20 bp, Artificial Sequence
  MKO10061528_A_Zic1
  gRNA
tggccacgcttcgcccaacg

SEQ ID NO: 61529 - DNA, 20 bp, Artificial Sequence
  MKO10061529_A_Zic1
  gRNA
caaccccagttcgcacgaac

SEQ ID NO: 61530 - DNA, 20 bp, Artificial Sequence
  MKO10061530_A_Zic1
  gRNA
gcccttcaagtgcgagttcg

SEQ ID NO: 61531 - DNA, 20 bp, Artificial Sequence
  MKO10061531_A_Zic2
  gRNA
cgcgaagctgcccaccccga

SEQ ID NO: 61532 - DNA, 20 bp, Artificial Sequence
  MKO10061532_A_Zic2
  gRNA
ctacgagtcgtccacacccc

SEQ ID NO: 61533 - DNA, 20 bp, Artificial Sequence
  MKO10061533_A_Zic2
  gRNA
ctcggagcaataccgccaag

SEQ ID NO: 61534 - DNA, 20 bp, Artificial Sequence
  MKO10061534_A_Zic3
  gRNA
gtcgcgcgtggagttgaaag

SEQ ID NO: 61535 - DNA, 20 bp, Artificial Sequence
  MKO10061535_A_Zic3
  gRNA
gctgggcacccgtcgcccac

SEQ ID NO: 61536 - DNA, 20 bp, Artificial Sequence
  MKO10061536_A_Zic3
  gRNA
gtcgcacactttacagatat

SEQ ID NO: 61537 - DNA, 20 bp, Artificial Sequence
  MKO10061537_A_Zic4
  gRNA
ggttcgaagaagcggcgagc

SEQ ID NO: 61538 - DNA, 20 bp, Artificial Sequence
  MKO10061538_A_Zic4
  gRNA
gtaaccgcttcctcatcacc

SEQ ID NO: 61539 - DNA, 20 bp, Artificial Sequence
  MKO10061539_A_Zic4
  gRNA
agacgcaggagtccgttcaa

SEQ ID NO: 61540 - DNA, 20 bp, Artificial Sequence
  MKO10061540_A_Zic5
  gRNA
gcggctgcggccgagcttta

SEQ ID NO: 61541 - DNA, 20 bp, Artificial Sequence
  MKO10061541_A_Zic5
  gRNA
gcatctggccgtttagcggg

SEQ ID NO: 61542 - DNA, 20 bp, Artificial Sequence
  MKO10061542_A_Zic5
  gRNA
ggctgggggccccactggcc

SEQ ID NO: 61543 - DNA, 20 bp, Artificial Sequence
  MKO10061543_A_Zik1
  gRNA
gtttctacacgagcgtcaaa

SEQ ID NO: 61544 - DNA, 20 bp, Artificial Sequence
  MKO10061544_A_Zik1
  gRNA
gtgccattcttaaccaacac

SEQ ID NO: 61545 - DNA, 20 bp, Artificial Sequence
  MKO10061545_A_Zik1
  gRNA
ctttgcactcataaactccc

SEQ ID NO: 61546 - DNA, 20 bp, Artificial Sequence
  MKO10061546_A_Zim1
  gRNA
cgatcacgtcgttgccaacc

SEQ ID NO: 61547 - DNA, 20 bp, Artificial Sequence
  MKO10061547_A_Zim1
  gRNA
gaattcgctcatgttccacg

SEQ ID NO: 61548 - DNA, 20 bp, Artificial Sequence
  MKO10061548_A_Zim1
  gRNA
gtttgacccgaagatgtgcc

SEQ ID NO: 61549 - DNA, 20 bp, Artificial Sequence
  MKO10061549_A_Zkscan14
  gRNA
tgtggtcccgcacgtaggcc

SEQ ID NO: 61550 - DNA, 20 bp, Artificial Sequence
  MKO10061550_A_Zkscan14
  gRNA
gtcccgccacctctcggtgc

SEQ ID NO: 61551 - DNA, 20 bp, Artificial Sequence
  MKO10061551_A_Zkscan14
  gRNA
cccgcagacgacacacgcat

SEQ ID NO: 61552 - DNA, 20 bp, Artificial Sequence
  MKO10061552_A_Zkscan16
  gRNA
aatgacgagtagtcgctgaa

SEQ ID NO: 61553 - DNA, 20 bp, Artificial Sequence
  MKO10061553_A_Zkscan16
  gRNA
gcgcttcgtaccaggctcaa

SEQ ID NO: 61554 - DNA, 20 bp, Artificial Sequence
  MKO10061554_A_Zkscan16
  gRNA
caatttaacccacttcagat

SEQ ID NO: 61555 - DNA, 20 bp, Artificial Sequence
  MKO10061555_A_Zkscan17
  gRNA
gcaagatgcgttcgttgtgc

SEQ ID NO: 61556 - DNA, 20 bp, Artificial Sequence
  MKO10061556_A_Zkscan17
  gRNA
tggtgattgacgatggcgac

SEQ ID NO: 61557 - DNA, 20 bp, Artificial Sequence
  MKO10061557_A_Zkscan17
  gRNA
ttctatggcgaattcatcat

SEQ ID NO: 61558 - DNA, 20 bp, Artificial Sequence
  MKO10061558_A_Zkscan1
  gRNA
aagcctcgtctcttatcccg

SEQ ID NO: 61559 - DNA, 20 bp, Artificial Sequence
  MKO10061559_A_Zkscan1
  gRNA
cggaatacctctgggtcggg

SEQ ID NO: 61560 - DNA, 20 bp, Artificial Sequence
  MKO10061560_A_Zkscan1
  gRNA
agtcgattcaaagcttctcg

SEQ ID NO: 61561 - DNA, 20 bp, Artificial Sequence
  MKO10061561_A_Zkscan2
  gRNA
gaggtctctaccacgaaatc

SEQ ID NO: 61562 - DNA, 20 bp, Artificial Sequence
  MKO10061562_A_Zkscan2
  gRNA
gaatgaagacctacgctcca

SEQ ID NO: 61563 - DNA, 20 bp, Artificial Sequence
  MKO10061563_A_Zkscan2
  gRNA
gctgaatggttgcgagaatg

SEQ ID NO: 61564 - DNA, 20 bp, Artificial Sequence
  MKO10061564_A_Zkscan3
  gRNA
cggttctattgccgtgaatg

SEQ ID NO: 61565 - DNA, 20 bp, Artificial Sequence
  MKO10061565_A_Zkscan3
  gRNA
cctgctgtacattccgaagt

SEQ ID NO: 61566 - DNA, 20 bp, Artificial Sequence
  MKO10061566_A_Zkscan3
  gRNA
aagtagccagatggagcccg

SEQ ID NO: 61567 - DNA, 20 bp, Artificial Sequence
  MKO10061567_A_Zkscan4
  gRNA
tcgcgaacttctctgctgca

SEQ ID NO: 61568 - DNA, 20 bp, Artificial Sequence
  MKO10061568_A_Zkscan4
  gRNA
cgtccgcagccctaaacgct

SEQ ID NO: 61569 - DNA, 20 bp, Artificial Sequence
  MKO10061569_A_Zkscan4
  gRNA
actcttcaagcacgaatctc

SEQ ID NO: 61570 - DNA, 20 bp, Artificial Sequence
  MKO10061570_A_Zkscan5
  gRNA
aacatctgcgtagccacgag

SEQ ID NO: 61571 - DNA, 20 bp, Artificial Sequence
  MKO10061571_A_Zkscan5
  gRNA
tcgctgacttcgccggactc

SEQ ID NO: 61572 - DNA, 20 bp, Artificial Sequence
  MKO10061572_A_Zkscan5
  gRNA
cccagaaatgcgacgcatgc

SEQ ID NO: 61573 - DNA, 20 bp, Artificial Sequence
  MKO10061573_A_Zkscan6
  gRNA
ccatcttctcagcgccgtga

SEQ ID NO: 61574 - DNA, 20 bp, Artificial Sequence
  MKO10061574_A_Zkscan6
  gRNA
gcctgttagagaccaagagt

SEQ ID NO: 61575 - DNA, 20 bp, Artificial Sequence
  MKO10061575_A_Zkscan6
  gRNA
atggcaagactcccctgcaa

SEQ ID NO: 61576 - DNA, 20 bp, Artificial Sequence
  MKO10061576_A_Zkscan7
  gRNA
aatgcctcgccagattcatc

SEQ ID NO: 61577 - DNA, 20 bp, Artificial Sequence
  MKO10061577_A_Zkscan7
  gRNA
tcgcgacattgtgaattcgc

SEQ ID NO: 61578 - DNA, 20 bp, Artificial Sequence
  MKO10061578_A_Zkscan7
  gRNA
ttaccacctccgtctcacac

SEQ ID NO: 61579 - DNA, 20 bp, Artificial Sequence
  MKO10061579_A_Zkscan8
  gRNA
agcgtagacgaaacagttct

SEQ ID NO: 61580 - DNA, 20 bp, Artificial Sequence
  MKO10061580_A_Zkscan8
  gRNA
ggctgtgtctcttattcgag

SEQ ID NO: 61581 - DNA, 20 bp, Artificial Sequence
  MKO10061581_A_Zkscan8
  gRNA
aagtattcacgtacaatcct

SEQ ID NO: 61582 - DNA, 20 bp, Artificial Sequence
  MKO10061582_A_Zmat1
  gRNA
acccatctttggtgagcatg

SEQ ID NO: 61583 - DNA, 20 bp, Artificial Sequence
  MKO10061583_A_Zmat1
  gRNA
ttgatagatcccacgtgtga

SEQ ID NO: 61584 - DNA, 20 bp, Artificial Sequence
  MKO10061584_A_Zmat1
  gRNA
tgctgtagaaccactccaca

SEQ ID NO: 61585 - DNA, 20 bp, Artificial Sequence
  MKO10061585_A_Zmat2
  gRNA
gcgcgtggaacgctccactc

SEQ ID NO: 61586 - DNA, 20 bp, Artificial Sequence
  MKO10061586_A_Zmat2
  gRNA
cgcagaagctcccgcttgac

SEQ ID NO: 61587 - DNA, 20 bp, Artificial Sequence
  MKO10061587_A_Zmat2
  gRNA
tcacccagatcagcgaaacc

SEQ ID NO: 61588 - DNA, 20 bp, Artificial Sequence
  MKO10061588_A_Zmat3
  gRNA
ctcgctcctgtaccgctgct

SEQ ID NO: 61589 - DNA, 20 bp, Artificial Sequence
  MKO10061589_A_Zmat3
  gRNA
gccagccccaacgttacaca

SEQ ID NO: 61590 - DNA, 20 bp, Artificial Sequence
  MKO10061590_A_Zmat3
  gRNA
caacggcggactcggaaaga

SEQ ID NO: 61591 - DNA, 20 bp, Artificial Sequence
  MKO10061591_A_Zmat4
  gRNA
gttgagcgacacactgcacg

SEQ ID NO: 61592 - DNA, 20 bp, Artificial Sequence
  MKO10061592_A_Zmat4
  gRNA
acgggggccgtatccactcg

SEQ ID NO: 61593 - DNA, 20 bp, Artificial Sequence
  MKO10061593_A_Zmat4
  gRNA
tcgagtggatacggcccccg

SEQ ID NO: 61594 - DNA, 20 bp, Artificial Sequence
  MKO10061594_A_Zmat5
  gRNA
attgcaggccagtgcgactt

SEQ ID NO: 61595 - DNA, 20 bp, Artificial Sequence
  MKO10061595_A_Zmat5
  gRNA
tgggcccatacctgctactt

SEQ ID NO: 61596 - DNA, 20 bp, Artificial Sequence
  MKO10061596_A_Zmat5
  gRNA
agagaccgccgagcttcctg

SEQ ID NO: 61597 - DNA, 20 bp, Artificial Sequence
  MKO10061597_A_Zmiz1
  gRNA
agccgccagaacgacccccc

SEQ ID NO: 61598 - DNA, 20 bp, Artificial Sequence
  MKO10061598_A_Zmiz1
  gRNA
ggtgaacttgtctcgatttg

SEQ ID NO: 61599 - DNA, 20 bp, Artificial Sequence
  MKO10061599_A_Zmiz1
  gRNA
aagttcacccccaagtctgc

SEQ ID NO: 61600 - DNA, 20 bp, Artificial Sequence
  MKO10061600_A_Zmiz2
  gRNA
ggcgggtttcatggggttca

SEQ ID NO: 61601 - DNA, 20 bp, Artificial Sequence
  MKO10061601_A_Zmiz2
  gRNA
tatggccgagggagctaccc

SEQ ID NO: 61602 - DNA, 20 bp, Artificial Sequence
  MKO10061602_A_Zmiz2
  gRNA
cacactcacccgtgtggtgc

SEQ ID NO: 61603 - DNA, 20 bp, Artificial Sequence
  MKO10061603_A_Zmpste24
  gRNA
gaatcacatacctcgtattc

SEQ ID NO: 61604 - DNA, 20 bp, Artificial Sequence
  MKO10061604_A_Zmpste24
  gRNA
gaaatctcgattgtatcaac

SEQ ID NO: 61605 - DNA, 20 bp, Artificial Sequence
  MKO10061605_A_Zmpste24
  gRNA
acactcttcagtgcactgac

SEQ ID NO: 61606 - DNA, 20 bp, Artificial Sequence
  MKO10061606_A_Zmym1
  gRNA
gattgcgattactaacgact

SEQ ID NO: 61607 - DNA, 20 bp, Artificial Sequence
  MKO10061607_A_Zmym1
  gRNA
agagatcagtgttcacgacc

SEQ ID NO: 61608 - DNA, 20 bp, Artificial Sequence
  MKO10061608_A_Zmym1
  gRNA
cacaactactatcctccaac

SEQ ID NO: 61609 - DNA, 20 bp, Artificial Sequence
  MKO10061609_A_Zmym2
  gRNA
ggtgagctgatcctttgcgt

SEQ ID NO: 61610 - DNA, 20 bp, Artificial Sequence
  MKO10061610_A_Zmym2
  gRNA
cagacagcttaccaacgcaa

SEQ ID NO: 61611 - DNA, 20 bp, Artificial Sequence
  MKO10061611_A_Zmym2
  gRNA
tgagtccacttgagcaacaa

SEQ ID NO: 61612 - DNA, 20 bp, Artificial Sequence
  MKO10061612_A_Zmym3
  gRNA
ggtgacctacctggcaacga

SEQ ID NO: 61613 - DNA, 20 bp, Artificial Sequence
  MKO10061613_A_Zmym3
  gRNA
tctcagactgccccaagtcg

SEQ ID NO: 61614 - DNA, 20 bp, Artificial Sequence
  MKO10061614_A_Zmym3
  gRNA
cagcgtccaatcccccagtc

SEQ ID NO: 61615 - DNA, 20 bp, Artificial Sequence
  MKO10061615_A_Zmym4
  gRNA
tcattgtcactactaacgac

SEQ ID NO: 61616 - DNA, 20 bp, Artificial Sequence
  MKO10061616_A_Zmym4
  gRNA
tttactggcaaatgggtagc

SEQ ID NO: 61617 - DNA, 20 bp, Artificial Sequence
  MKO10061617_A_Zmym4
  gRNA
attccccagttccgaaccaa

SEQ ID NO: 61618 - DNA, 20 bp, Artificial Sequence
  MKO10061618_A_Zmym5
  gRNA
gtgtctttcgagtacgctta

SEQ ID NO: 61619 - DNA, 20 bp, Artificial Sequence
  MKO10061619_A_Zmym5
  gRNA
ataagcgtactcgaaagaca

SEQ ID NO: 61620 - DNA, 20 bp, Artificial Sequence
  MKO10061620_A_Zmym5
  gRNA
ttgtgctgacgaatataaag

SEQ ID NO: 61621 - DNA, 20 bp, Artificial Sequence
  MKO10061621_A_Zmym6
  gRNA
caacctacctaccggaaggc

SEQ ID NO: 61622 - DNA, 20 bp, Artificial Sequence
  MKO10061622_A_Zmym6
  gRNA
cagcctcgatgaattcccca

SEQ ID NO: 61623 - DNA, 20 bp, Artificial Sequence
  MKO10061623_A_Zmym6
  gRNA
gcagtaaagctgggcaaatc

SEQ ID NO: 61624 - DNA, 20 bp, Artificial Sequence
  MKO10061624_A_Zmynd10
  gRNA
tcctccgcagatcccaacgc

SEQ ID NO: 61625 - DNA, 20 bp, Artificial Sequence
  MKO10061625_A_Zmynd10
  gRNA
ccttgatgcaactatcagcc

SEQ ID NO: 61626 - DNA, 20 bp, Artificial Sequence
  MKO10061626_A_Zmynd10
  gRNA
ccgcaagctgatactgctag

SEQ ID NO: 61627 - DNA, 20 bp, Artificial Sequence
  MKO10061627_A_Zmynd11
  gRNA
gttcatcgtctcccgaatga

SEQ ID NO: 61628 - DNA, 20 bp, Artificial Sequence
  MKO10061628_A_Zmynd11
  gRNA
acgtttaacaaaaagacgac

SEQ ID NO: 61629 - DNA, 20 bp, Artificial Sequence
  MKO10061629_A_Zmynd11
  gRNA
tctctttgggatgcataccg

SEQ ID NO: 61630 - DNA, 20 bp, Artificial Sequence
  MKO10061630_A_Zmynd12
  gRNA
gcacgttcatgcggaagcga

SEQ ID NO: 61631 - DNA, 20 bp, Artificial Sequence
  MKO10061631_A_Zmynd12
  gRNA
aggtctgggccggatagtgc

SEQ ID NO: 61632 - DNA, 20 bp, Artificial Sequence
  MKO10061632_A_Zmynd12
  gRNA
attcttcagcctgcactatc

SEQ ID NO: 61633 - DNA, 20 bp, Artificial Sequence
  MKO10061633_A_Zmynd15
  gRNA
aatcggtggctcacgtcatc

SEQ ID NO: 61634 - DNA, 20 bp, Artificial Sequence
  MKO10061634_A_Zmynd15
  gRNA
cgaggaccccacgtgcgcat

SEQ ID NO: 61635 - DNA, 20 bp, Artificial Sequence
  MKO10061635_A_Zmynd15
  gRNA
caaaaaccccaatgcgcacg

SEQ ID NO: 61636 - DNA, 20 bp, Artificial Sequence
  MKO10061636_A_Zmynd19
  gRNA
ctttccctagggaacgacac

SEQ ID NO: 61637 - DNA, 20 bp, Artificial Sequence
  MKO10061637_A_Zmynd19
  gRNA
cgatgagcaagacataccac

SEQ ID NO: 61638 - DNA, 20 bp, Artificial Sequence
  MKO10061638_A_Zmynd19
  gRNA
tcagggagcaaagcttatac

SEQ ID NO: 61639 - DNA, 20 bp, Artificial Sequence
  MKO10061639_A_Zmynd8
  gRNA
gacacttagcgtgataaacc

SEQ ID NO: 61640 - DNA, 20 bp, Artificial Sequence
  MKO10061640_A_Zmynd8
  gRNA
gctccaatggaacaggcttc

SEQ ID NO: 61641 - DNA, 20 bp, Artificial Sequence
  MKO10061641_A_Zmynd8
  gRNA
cgggaactaacctcacattc

SEQ ID NO: 61642 - DNA, 20 bp, Artificial Sequence
  MKO10061642_A_Znf512b
  gRNA
taccactatcagcggtgcca

SEQ ID NO: 61643 - DNA, 20 bp, Artificial Sequence
  MKO10061643_A_Znf512b
  gRNA
ccccttggcaccgctgatag

SEQ ID NO: 61644 - DNA, 20 bp, Artificial Sequence
  MKO10061644_A_Znf512b
  gRNA
aacaggtttgctcactccga

SEQ ID NO: 61645 - DNA, 20 bp, Artificial Sequence
  MKO10061645_A_Znfx1
  gRNA
cactcatataggccctccgc

SEQ ID NO: 61646 - DNA, 20 bp, Artificial Sequence
  MKO10061646_A_Znfx1
  gRNA
tttgttaggccccttcggga

SEQ ID NO: 61647 - DNA, 20 bp, Artificial Sequence
  MKO10061647_A_Znfx1
  gRNA
atctaggtgcacctcgttgt

SEQ ID NO: 61648 - DNA, 20 bp, Artificial Sequence
  MKO10061648_A_Znhit1
  gRNA
gtactgcaccgtgcgctgcc

SEQ ID NO: 61649 - DNA, 20 bp, Artificial Sequence
  MKO10061649_A_Znhit1
  gRNA
caaccgacagctggaggcat

SEQ ID NO: 61650 - DNA, 20 bp, Artificial Sequence
  MKO10061650_A_Znhit1
  gRNA
gccccatctagttcgctccc

SEQ ID NO: 61651 - DNA, 20 bp, Artificial Sequence
  MKO10061651_A_Znhit2
  gRNA
gcatagcaccccgcgtaccc

SEQ ID NO: 61652 - DNA, 20 bp, Artificial Sequence
  MKO10061652_A_Znhit2
  gRNA
aagcgcaccagcggcgatgc

SEQ ID NO: 61653 - DNA, 20 bp, Artificial Sequence
  MKO10061653_A_Znhit2
  gRNA
taacgcgcccgccagacggc

SEQ ID NO: 61654 - DNA, 20 bp, Artificial Sequence
  MKO10061654_A_Znhit3
  gRNA
gctgatgcgagcctgtatgc

SEQ ID NO: 61655 - DNA, 20 bp, Artificial Sequence
  MKO10061655_A_Znhit3
  gRNA
gttgatgattagcctcgatc

SEQ ID NO: 61656 - DNA, 20 bp, Artificial Sequence
  MKO10061656_A_Znhit3
  gRNA
ctgcagaatttaaagaatct

SEQ ID NO: 61657 - DNA, 20 bp, Artificial Sequence
  MKO10061657_A_Znhit6
  gRNA
aagaatcgtgcccgaaagca

SEQ ID NO: 61658 - DNA, 20 bp, Artificial Sequence
  MKO10061658_A_Znhit6
  gRNA
ctgctgcagcgacacataag

SEQ ID NO: 61659 - DNA, 20 bp, Artificial Sequence
  MKO10061659_A_Znhit6
  gRNA
aaagctgacctgacgtgcag

SEQ ID NO: 61660 - DNA, 20 bp, Artificial Sequence
  MKO10061660_A_Znrd1as
  gRNA
ctatgacgtcgactaagtta

SEQ ID NO: 61661 - DNA, 20 bp, Artificial Sequence
  MKO10061661_A_Znrd1as
  gRNA
ttcacttgatcacgcttctc

SEQ ID NO: 61662 - DNA, 20 bp, Artificial Sequence
  MKO10061662_A_Znrd1as
  gRNA
actacccaaaattgtgctag

SEQ ID NO: 61663 - DNA, 20 bp, Artificial Sequence
  MKO10061663_A_Znrd1
  gRNA
actgtcatatgttcgcgttg

SEQ ID NO: 61664 - DNA, 20 bp, Artificial Sequence
  MKO10061664_A_Znrd1
  gRNA
ctccttacctcgcacatcga

SEQ ID NO: 61665 - DNA, 20 bp, Artificial Sequence
  MKO10061665_A_Znrd1
  gRNA
attccctcgtgaccacatcg

SEQ ID NO: 61666 - DNA, 20 bp, Artificial Sequence
  MKO10061666_A_Znrf1
  gRNA
ttcagggggacacgatagcc

SEQ ID NO: 61667 - DNA, 20 bp, Artificial Sequence
  MKO10061667_A_Znrf1
  gRNA
agcccttaccattgtaggac

SEQ ID NO: 61668 - DNA, 20 bp, Artificial Sequence
  MKO10061668_A_Znrf1
  gRNA
ggcctggcagagacttctac

SEQ ID NO: 61669 - DNA, 20 bp, Artificial Sequence
  MKO10061669_A_Znrf2
  gRNA
agcgagccgatcaccagacg

SEQ ID NO: 61670 - DNA, 20 bp, Artificial Sequence
  MKO10061670_A_Znrf2
  gRNA
tgaaggccgactgcgccgcg

SEQ ID NO: 61671 - DNA, 20 bp, Artificial Sequence
  MKO10061671_A_Znrf2
  gRNA
ttaccattatacgttattct

SEQ ID NO: 61672 - DNA, 20 bp, Artificial Sequence
  MKO10061672_A_Znrf3
  gRNA
gctgaagcaacgtcgtagtc

SEQ ID NO: 61673 - DNA, 20 bp, Artificial Sequence
  MKO10061673_A_Znrf3
  gRNA
tttcctggccttcttcgtcg

SEQ ID NO: 61674 - DNA, 20 bp, Artificial Sequence
  MKO10061674_A_Znrf3
  gRNA
tgccactcactcgaggaggg

SEQ ID NO: 61675 - DNA, 20 bp, Artificial Sequence
  MKO10061675_A_Znrf4
  gRNA
cgacgcctgccacgccatcg

SEQ ID NO: 61676 - DNA, 20 bp, Artificial Sequence
  MKO10061676_A_Znrf4
  gRNA
ggtccacgcaaaccgcgcca

SEQ ID NO: 61677 - DNA, 20 bp, Artificial Sequence
  MKO10061677_A_Znrf4
  gRNA
actgtcgctgcatcgacccc

SEQ ID NO: 61678 - DNA, 20 bp, Artificial Sequence
  MKO10061678_A_Zp1
  gRNA
cggcttgtatgaacaccctc

SEQ ID NO: 61679 - DNA, 20 bp, Artificial Sequence
  MKO10061679_A_Zp1
  gRNA
aggctacctggcaccgctcc

SEQ ID NO: 61680 - DNA, 20 bp, Artificial Sequence
  MKO10061680_A_Zp1
  gRNA
atacaagccgtcctacccaa

SEQ ID NO: 61681 - DNA, 20 bp, Artificial Sequence
  MKO10061681_A_Zp2
  gRNA
cgagacctgcactataaaag

SEQ ID NO: 61682 - DNA, 20 bp, Artificial Sequence
  MKO10061682_A_Zp2
  gRNA
tacacaggttggtggatacc

SEQ ID NO: 61683 - DNA, 20 bp, Artificial Sequence
  MKO10061683_A_Zp2
  gRNA
cccccactctgatgttcacc

SEQ ID NO: 61684 - DNA, 20 bp, Artificial Sequence
  MKO10061684_A_Zp3r
  gRNA
ttcccattgaccaactcgcc

SEQ ID NO: 61685 - DNA, 20 bp, Artificial Sequence
  MKO10061685_A_Zp3r
  gRNA
gatgatgacctgtacacgtt

SEQ ID NO: 61686 - DNA, 20 bp, Artificial Sequence
  MKO10061686_A_Zp3r
  gRNA
ctcagcaactagtcggtgtg

SEQ ID NO: 61687 - DNA, 20 bp, Artificial Sequence
  MKO10061687_A_Zp3
  gRNA
cacgaccctcgccctgtgag

SEQ ID NO: 61688 - DNA, 20 bp, Artificial Sequence
  MKO10061688_A_Zp3
  gRNA
ctccccctatcacttcatcg

SEQ ID NO: 61689 - DNA, 20 bp, Artificial Sequence
  MKO10061689_A_Zp3
  gRNA
catcctcaggactaaccgtg

SEQ ID NO: 61690 - DNA, 20 bp, Artificial Sequence
  MKO10061690_A_Zpbp2
  gRNA
cacgaatcacaacgtcctca

SEQ ID NO: 61691 - DNA, 20 bp, Artificial Sequence
  MKO10061691_A_Zpbp2
  gRNA
tccagtgaatcctttcgcac

SEQ ID NO: 61692 - DNA, 20 bp, Artificial Sequence
  MKO10061692_A_Zpbp2
  gRNA
gacaattgtcgaccaggctt

SEQ ID NO: 61693 - DNA, 20 bp, Artificial Sequence
  MKO10061693_A_Zpbp
  gRNA
ctctagcttatcgtgaacct

SEQ ID NO: 61694 - DNA, 20 bp, Artificial Sequence
  MKO10061694_A_Zpbp
  gRNA
cgagtataaaccaactgtag

SEQ ID NO: 61695 - DNA, 20 bp, Artificial Sequence
  MKO10061695_A_Zpbp
  gRNA
gacccatcattccaatggca

SEQ ID NO: 61696 - DNA, 20 bp, Artificial Sequence
  MKO10061696_A_Zpld1
  gRNA
caattaattatcccgagtat

SEQ ID NO: 61697 - DNA, 20 bp, Artificial Sequence
  MKO10061697_A_Zpld1
  gRNA
agctgtgcaagctactaatc

SEQ ID NO: 61698 - DNA, 20 bp, Artificial Sequence
  MKO10061698_A_Zpld1
  gRNA
atttagttgtagttatccgt

SEQ ID NO: 61699 - DNA, 20 bp, Artificial Sequence
  MKO10061699_A_Zranb1
  gRNA
tttggagttggctacacgtc

SEQ ID NO: 61700 - DNA, 20 bp, Artificial Sequence
  MKO10061700_A_Zranb1
  gRNA
gtacttcatctgcagtaagc

SEQ ID NO: 61701 - DNA, 20 bp, Artificial Sequence
  MKO10061701_A_Zranb1
  gRNA
gtcctgcctctgaaagcgta

SEQ ID NO: 61702 - DNA, 20 bp, Artificial Sequence
  MKO10061702_A_Zranb2
  gRNA
gcttatttagtgccaatgat

SEQ ID NO: 61703 - DNA, 20 bp, Artificial Sequence
  MKO10061703_A_Zranb2
  gRNA
gtagttgcagtaatgtgaat

SEQ ID NO: 61704 - DNA, 20 bp, Artificial Sequence
  MKO10061704_A_Zranb2
  gRNA
gtggaaatgtaaactttgct

SEQ ID NO: 61705 - DNA, 20 bp, Artificial Sequence
  MKO10061705_A_Zranb3
  gRNA
agtaagcaattgcaatcgcc

SEQ ID NO: 61706 - DNA, 20 bp, Artificial Sequence
  MKO10061706_A_Zranb3
  gRNA
atgaagggacgactatcagc

SEQ ID NO: 61707 - DNA, 20 bp, Artificial Sequence
  MKO10061707_A_Zranb3
  gRNA
cagcaagattctcctgccca

SEQ ID NO: 61708 - DNA, 20 bp, Artificial Sequence
  MKO10061708_A_Zrsr1
  gRNA
ctatgactcagacgcaaacc

SEQ ID NO: 61709 - DNA, 20 bp, Artificial Sequence
  MKO10061709_A_Zrsr1
  gRNA
cggaaccacccaaggattta

SEQ ID NO: 61710 - DNA, 20 bp, Artificial Sequence
  MKO10061710_A_Zrsr1
  gRNA
agaacttgcagagcgattac

SEQ ID NO: 61711 - DNA, 20 bp, Artificial Sequence
  MKO10061711_A_Zrsr2
  gRNA
ttccagccgtaagaagtact

SEQ ID NO: 61712 - DNA, 20 bp, Artificial Sequence
  MKO10061712_A_Zrsr2
  gRNA
ggctacggcggacgctacgg

SEQ ID NO: 61713 - DNA, 20 bp, Artificial Sequence
  MKO10061713_A_Zrsr2
  gRNA
ggcgctcgctcggctcagag

SEQ ID NO: 61714 - DNA, 20 bp, Artificial Sequence
  MKO10061714_A_Zscan10
  gRNA
cccccgtgtggcagcgtacg

SEQ ID NO: 61715 - DNA, 20 bp, Artificial Sequence
  MKO10061715_A_Zscan10
  gRNA
taagctagagcgccgcttga

SEQ ID NO: 61716 - DNA, 20 bp, Artificial Sequence
  MKO10061716_A_Zscan10
  gRNA
cttctgagggcaactccgtc

SEQ ID NO: 61717 - DNA, 20 bp, Artificial Sequence
  MKO10061717_A_Zscan12
  gRNA
ttagcgtactctgagttcgc

SEQ ID NO: 61718 - DNA, 20 bp, Artificial Sequence
  MKO10061718_A_Zscan12
  gRNA
gacatctactagtgatacca

SEQ ID NO: 61719 - DNA, 20 bp, Artificial Sequence
  MKO10061719_A_Zscan12
  gRNA
tcctgctagcagattagcaa

SEQ ID NO: 61720 - DNA, 20 bp, Artificial Sequence
  MKO10061720_A_Zscan18
  gRNA
tacaagtatcacggcgtacc

SEQ ID NO: 61721 - DNA, 20 bp, Artificial Sequence
  MKO10061721_A_Zscan18
  gRNA
gcagcttgctgtaactcgtc

SEQ ID NO: 61722 - DNA, 20 bp, Artificial Sequence
  MKO10061722_A_Zscan18
  gRNA
gtcatcatcgtcattcagcg

SEQ ID NO: 61723 - DNA, 20 bp, Artificial Sequence
  MKO10061723_A_Zscan20
  gRNA
tgttcttaccaatacggctc

SEQ ID NO: 61724 - DNA, 20 bp, Artificial Sequence
  MKO10061724_A_Zscan20
  gRNA
tcagtcgctctgcgatagcc

SEQ ID NO: 61725 - DNA, 20 bp, Artificial Sequence
  MKO10061725_A_Zscan20
  gRNA
gaactcctgaactgcttcga

SEQ ID NO: 61726 - DNA, 20 bp, Artificial Sequence
  MKO10061726_A_Zscan21
  gRNA
ggatgcgatagtgtcgaatg

SEQ ID NO: 61727 - DNA, 20 bp, Artificial Sequence
  MKO10061727_A_Zscan21
  gRNA
ttcgcccattaaagtagaag

SEQ ID NO: 61728 - DNA, 20 bp, Artificial Sequence
  MKO10061728_A_Zscan21
  gRNA
cggccctatgactgtaagtg

SEQ ID NO: 61729 - DNA, 20 bp, Artificial Sequence
  MKO10061729_A_Zscan22
  gRNA
gccgcaagtatcacactcgt

SEQ ID NO: 61730 - DNA, 20 bp, Artificial Sequence
  MKO10061730_A_Zscan22
  gRNA
agttgggctagcgcctgatg

SEQ ID NO: 61731 - DNA, 20 bp, Artificial Sequence
  MKO10061731_A_Zscan22
  gRNA
cttcaggcacttccgctatg

SEQ ID NO: 61732 - DNA, 20 bp, Artificial Sequence
  MKO10061732_A_Zscan25
  gRNA
aagccctacacctgcgagtg

SEQ ID NO: 61733 - DNA, 20 bp, Artificial Sequence
  MKO10061733_A_Zscan25
  gRNA
agcgactggtgcgacaccag

SEQ ID NO: 61734 - DNA, 20 bp, Artificial Sequence
  MKO10061734_A_Zscan25
  gRNA
attgccacgatgctccgcca

SEQ ID NO: 61735 - DNA, 20 bp, Artificial Sequence
  MKO10061735_A_Zscan26
  gRNA
ggctcgccaaccagcaccgt

SEQ ID NO: 61736 - DNA, 20 bp, Artificial Sequence
  MKO10061736_A_Zscan26
  gRNA
ccgaccttattcgacatcat

SEQ ID NO: 61737 - DNA, 20 bp, Artificial Sequence
  MKO10061737_A_Zscan26
  gRNA
gaggaggagggcccgactaa

SEQ ID NO: 61738 - DNA, 20 bp, Artificial Sequence
  MKO10061738_A_Zscan29
  gRNA
caccgcaacagccagttata

SEQ ID NO: 61739 - DNA, 20 bp, Artificial Sequence
  MKO10061739_A_Zscan29
  gRNA
aatttggtacgacattgctc

SEQ ID NO: 61740 - DNA, 20 bp, Artificial Sequence
  MKO10061740_A_Zscan29
  gRNA
aagcgctccgaaactgtcac

SEQ ID NO: 61741 - DNA, 20 bp, Artificial Sequence
  MKO10061741_A_Zscan2
  gRNA
agggtgctcttgtccgattt

SEQ ID NO: 61742 - DNA, 20 bp, Artificial Sequence
  MKO10061742_A_Zscan2
  gRNA
ctccagcctgatcgcgcacc

SEQ ID NO: 61743 - DNA, 20 bp, Artificial Sequence
  MKO10061743_A_Zscan2
  gRNA
gcgtaatgagcgcggagctc

SEQ ID NO: 61744 - DNA, 20 bp, Artificial Sequence
  MKO10061744_A_Zscan4b
  gRNA
gatgatttctcaattggtct

SEQ ID NO: 61745 - DNA, 20 bp, Artificial Sequence
  MKO10061745_A_Zscan4b
  gRNA
caccacaatggcttcacagc

SEQ ID NO: 61746 - DNA, 20 bp, Artificial Sequence
  MKO10061746_A_Zscan4b
  gRNA
caggtccatgtttcaatgca

SEQ ID NO: 61747 - DNA, 20 bp, Artificial Sequence
  MKO10061747_A_Zscan4c
  gRNA
gaggaactcaccatgacagg

SEQ ID NO: 61748 - DNA, 20 bp, Artificial Sequence
  MKO10061748_A_Zscan4c
  gRNA
caccacaatggcttcacagc

SEQ ID NO: 61749 - DNA, 20 bp, Artificial Sequence
  MKO10061749_A_Zscan4c
  gRNA
ggccaataatctatcttgtg

SEQ ID NO: 61750 - DNA, 20 bp, Artificial Sequence
  MKO10061750_A_Zscan4d
  gRNA
tgcacaccagaactatgaga

SEQ ID NO: 61751 - DNA, 20 bp, Artificial Sequence
  MKO10061751_A_Zscan4d
  gRNA
ccagtcatcatgtagacttc

SEQ ID NO: 61752 - DNA, 20 bp, Artificial Sequence
  MKO10061752_A_Zscan4d
  gRNA
ccgcaggagtcggagcactc

SEQ ID NO: 61753 - DNA, 20 bp, Artificial Sequence
  MKO10061753_A_Zscan4e
  gRNA
gcagctactcaagtatataa

SEQ ID NO: 61754 - DNA, 20 bp, Artificial Sequence
  MKO10061754_A_Zscan4e
  gRNA
caccacaatggcttcacagc

SEQ ID NO: 61755 - DNA, 20 bp, Artificial Sequence
  MKO10061755_A_Zscan4e
  gRNA
gaggaactcaccatgacagg

SEQ ID NO: 61756 - DNA, 20 bp, Artificial Sequence
  MKO10061756_A_Zscan4f
  gRNA
gttctttctgcataataaga

SEQ ID NO: 61757 - DNA, 20 bp, Artificial Sequence
  MKO10061757_A_Zscan4f
  gRNA
gaggaactcaccatgacagg

SEQ ID NO: 61758 - DNA, 20 bp, Artificial Sequence
  MKO10061758_A_Zscan4f
  gRNA
caccacaatggcttcacagc

SEQ ID NO: 61759 - DNA, 20 bp, Artificial Sequence
  MKO10061759_A_Zscan5b
  gRNA
ccttcgtgtggactcgactg

SEQ ID NO: 61760 - DNA, 20 bp, Artificial Sequence
  MKO10061760_A_Zscan5b
  gRNA
tcccaacgctgggatgccga

SEQ ID NO: 61761 - DNA, 20 bp, Artificial Sequence
  MKO10061761_A_Zscan5b
  gRNA
taacaagactttccgacagc

SEQ ID NO: 61762 - DNA, 20 bp, Artificial Sequence
  MKO10061762_A_Zswim1
  gRNA
ggacgaccgcaagctcgcct

SEQ ID NO: 61763 - DNA, 20 bp, Artificial Sequence
  MKO10061763_A_Zswim1
  gRNA
ccgacatgctgcccgctcag

SEQ ID NO: 61764 - DNA, 20 bp, Artificial Sequence
  MKO10061764_A_Zswim1
  gRNA
gtagaccattcagcatcgtg

SEQ ID NO: 61765 - DNA, 20 bp, Artificial Sequence
  MKO10061765_A_Zswim2
  gRNA
ttgtagcacctcccctcgat

SEQ ID NO: 61766 - DNA, 20 bp, Artificial Sequence
  MKO10061766_A_Zswim2
  gRNA
ctgtaaccaactgccaatcg

SEQ ID NO: 61767 - DNA, 20 bp, Artificial Sequence
  MKO10061767_A_Zswim2
  gRNA
gctgccccacgtttctgaag

SEQ ID NO: 61768 - DNA, 20 bp, Artificial Sequence
  MKO10061768_A_Zswim3
  gRNA
gagaccgctgttcccgaaag

SEQ ID NO: 61769 - DNA, 20 bp, Artificial Sequence
  MKO10061769_A_Zswim3
  gRNA
gcccttacaggatatcctcg

SEQ ID NO: 61770 - DNA, 20 bp, Artificial Sequence
  MKO10061770_A_Zswim3
  gRNA
ggccattgagccctcgtcca

SEQ ID NO: 61771 - DNA, 20 bp, Artificial Sequence
  MKO10061771_A_Zswim4
  gRNA
ccgcatccgtcatgctcgcc

SEQ ID NO: 61772 - DNA, 20 bp, Artificial Sequence
  MKO10061772_A_Zswim4
  gRNA
acccgggtaccattcacccg

SEQ ID NO: 61773 - DNA, 20 bp, Artificial Sequence
  MKO10061773_A_Zswim4
  gRNA
ggatctcgtcagcaagacgt

SEQ ID NO: 61774 - DNA, 20 bp, Artificial Sequence
  MKO10061774_A_Zswim5
  gRNA
agacgaagtttgacctggtc

SEQ ID NO: 61775 - DNA, 20 bp, Artificial Sequence
  MKO10061775_A_Zswim5
  gRNA
acagttctcatcatcgatgc

SEQ ID NO: 61776 - DNA, 20 bp, Artificial Sequence
  MKO10061776_A_Zswim5
  gRNA
cagagccatagtaacccccc

SEQ ID NO: 61777 - DNA, 20 bp, Artificial Sequence
  MKO10061777_A_Zswim6
  gRNA
tcaatactagcacccgccgt

SEQ ID NO: 61778 - DNA, 20 bp, Artificial Sequence
  MKO10061778_A_Zswim6
  gRNA
gccagaaaccgtttgcaacg

SEQ ID NO: 61779 - DNA, 20 bp, Artificial Sequence
  MKO10061779_A_Zswim6
  gRNA
cgcccccaccgacggggtcc

SEQ ID NO: 61780 - DNA, 20 bp, Artificial Sequence
  MKO10061780_A_Zswim7
  gRNA
tgacggactctcgatcgact

SEQ ID NO: 61781 - DNA, 20 bp, Artificial Sequence
  MKO10061781_A_Zswim7
  gRNA
ttacgataagagaagctcgt

SEQ ID NO: 61782 - DNA, 20 bp, Artificial Sequence
  MKO10061782_A_Zswim7
  gRNA
ctggtaaacacgccttccac

SEQ ID NO: 61783 - DNA, 20 bp, Artificial Sequence
  MKO10061783_A_Zswim8
  gRNA
ggatcagctgttccgaatga

SEQ ID NO: 61784 - DNA, 20 bp, Artificial Sequence
  MKO10061784_A_Zswim8
  gRNA
agtgcggatgagtttcagcg

SEQ ID NO: 61785 - DNA, 20 bp, Artificial Sequence
  MKO10061785_A_Zswim8
  gRNA
caaatggtgcacccatgtcg

SEQ ID NO: 61786 - DNA, 20 bp, Artificial Sequence
  MKO10061786_A_Zufsp
  gRNA
cagtgttctgataataccta

SEQ ID NO: 61787 - DNA, 20 bp, Artificial Sequence
  MKO10061787_A_Zufsp
  gRNA
acaacagcagctacgacata

SEQ ID NO: 61788 - DNA, 20 bp, Artificial Sequence
  MKO10061788_A_Zufsp
  gRNA
gaattattgaagccctccat

SEQ ID NO: 61789 - DNA, 20 bp, Artificial Sequence
  MKO10061789_A_Zw10
  gRNA
cgttagatagagtgtccacc

SEQ ID NO: 61790 - DNA, 20 bp, Artificial Sequence
  MKO10061790_A_Zw10
  gRNA
acatcgaccagctgaaatcc

SEQ ID NO: 61791 - DNA, 20 bp, Artificial Sequence
  MKO10061791_A_Zw10
  gRNA
tcctccaggtgccgagcagc

SEQ ID NO: 61792 - DNA, 20 bp, Artificial Sequence
  MKO10061792_A_Zwilch
  gRNA
aaatgactcagtgtttctcg

SEQ ID NO: 61793 - DNA, 20 bp, Artificial Sequence
  MKO10061793_A_Zwilch
  gRNA
taaagacccattcatctatg

SEQ ID NO: 61794 - DNA, 20 bp, Artificial Sequence
  MKO10061794_A_Zwilch
  gRNA
aagctcagctcctagccaac

SEQ ID NO: 61795 - DNA, 20 bp, Artificial Sequence
  MKO10061795_A_Zwint
  gRNA
cctgcagaagcgagtccttg

SEQ ID NO: 61796 - DNA, 20 bp, Artificial Sequence
  MKO10061796_A_Zwint
  gRNA
tgagcagagccctgatgctc

SEQ ID NO: 61797 - DNA, 20 bp, Artificial Sequence
  MKO10061797_A_Zwint
  gRNA
cataaaatgtgccctgtctg

SEQ ID NO: 61798 - DNA, 20 bp, Artificial Sequence
  MKO10061798_A_Zxdb
  gRNA
gccccgcaggccgccgccgc

SEQ ID NO: 61799 - DNA, 20 bp, Artificial Sequence
  MKO10061799_A_Zxdb
  gRNA
gagtcggttcataccaaaaa

SEQ ID NO: 61800 - DNA, 20 bp, Artificial Sequence
  MKO10061800_A_Zxdb
  gRNA
acgccgagatggaaatcccg

SEQ ID NO: 61801 - DNA, 20 bp, Artificial Sequence
  MKO10061801_A_Zxdc
  gRNA
cgggacgcagcagcgctcga

SEQ ID NO: 61802 - DNA, 20 bp, Artificial Sequence
  MKO10061802_A_Zxdc
  gRNA
ctcctggtgcgcttcgaccg

SEQ ID NO: 61803 - DNA, 20 bp, Artificial Sequence
  MKO10061803_A_Zxdc
  gRNA
ccttccacagggcattcgaa

SEQ ID NO: 61804 - DNA, 20 bp, Artificial Sequence
  MKO10061804_A_Zyg11a
  gRNA
ccggcctgccatgcgatttg

SEQ ID NO: 61805 - DNA, 20 bp, Artificial Sequence
  MKO10061805_A_Zyg11a
  gRNA
aagctccgagtccaccgacg

SEQ ID NO: 61806 - DNA, 20 bp, Artificial Sequence
  MKO10061806_A_Zyg11a
  gRNA
cagaagcactgagtcgttac

SEQ ID NO: 61807 - DNA, 20 bp, Artificial Sequence
  MKO10061807_A_Zyg11b
  gRNA
cgctgaggcggtacagcgag

SEQ ID NO: 61808 - DNA, 20 bp, Artificial Sequence
  MKO10061808_A_Zyg11b
  gRNA
accgctcatatggatcctcg

SEQ ID NO: 61809 - DNA, 20 bp, Artificial Sequence
  MKO10061809_A_Zyg11b
  gRNA
agctgcacgggcaaattcat

SEQ ID NO: 61810 - DNA, 20 bp, Artificial Sequence
  MKO10061810_A_Zyx
  gRNA
tccacctcccccgatgatcg

SEQ ID NO: 61811 - DNA, 20 bp, Artificial Sequence
  MKO10061811_A_Zyx
  gRNA
cgacgactcagagggtgccc

SEQ ID NO: 61812 - DNA, 20 bp, Artificial Sequence
  MKO10061812_A_Zyx
  gRNA
tttctttaggtacgctctcc

SEQ ID NO: 61813 - DNA, 20 bp, Artificial Sequence
  MKO10061813_A_Zzef1
  gRNA
tagagatccgattgcgatgc

SEQ ID NO: 61814 - DNA, 20 bp, Artificial Sequence
  MKO10061814_A_Zzef1
  gRNA
tgcgcttcctgcatcgcaat

SEQ ID NO: 61815 - DNA, 20 bp, Artificial Sequence
  MKO10061815_A_Zzef1
  gRNA
atggcagtgcgcgctcacac

SEQ ID NO: 61816 - DNA, 20 bp, Artificial Sequence
  MKO10061816_A_Zzz3
  gRNA
tgcctacctgaggacggtta

SEQ ID NO: 61817 - DNA, 20 bp, Artificial Sequence
  MKO10061817_A_Zzz3
  gRNA
aggctcccataaccgtcctc

SEQ ID NO: 61818 - DNA, 20 bp, Artificial Sequence
  MKO10061818_A_Zzz3
  gRNA
ttcccaagcagtgcaagacc

SEQ ID NO: 61819 - DNA, 20 bp, Artificial Sequence
  MKO10061819_A_a
  gRNA
ggatgtcacccgcctactcc

SEQ ID NO: 61820 - DNA, 20 bp, Artificial Sequence
  MKO10061820_A_a
  gRNA
gttgagtactcgacaggtgc

SEQ ID NO: 61821 - DNA, 20 bp, Artificial Sequence
  MKO10061821_A_a
  gRNA
ggaggcgcacgggtcgcagc

SEQ ID NO: 61822 - DNA, 20 bp, Artificial Sequence
  MKO10061822_A_l7Rn6
  gRNA
ctccgttgactcctttacgc

SEQ ID NO: 61823 - DNA, 20 bp, Artificial Sequence
  MKO10061823_A_l7Rn6
  gRNA
gacacggcagcactgcctac

SEQ ID NO: 61824 - DNA, 20 bp, Artificial Sequence
  MKO10061824_A_l7Rn6
  gRNA
actggcaccccatttgaatc

SEQ ID NO: 61825 - DNA, 20 bp, Artificial Sequence
  MKO10061825_A_mmu-mir-6341
  gRNA
tcaacatatccaaaaattga

SEQ ID NO: 61826 - DNA, 20 bp, Artificial Sequence
  MKO10061826_A_mmu-mir-6341
  gRNA
tatggctgataggcttcctc

SEQ ID NO: 61827 - DNA, 20 bp, Artificial Sequence
  MKO10061827_A_mmu-mir-6341
  gRNA
tcaactgaattttgtgtgtc

SEQ ID NO: 61828 - DNA, 20 bp, Artificial Sequence
  MKO10061828_A_mmu-mir-6341
  gRNA
cagtgttatactatctcctg

SEQ ID NO: 61829 - DNA, 20 bp, Artificial Sequence
  MKO10061829_A_mmu-mir-206
  gRNA
tctcagcactatggaatgta

SEQ ID NO: 61830 - DNA, 20 bp, Artificial Sequence
  MKO10061830_A_mmu-mir-206
  gRNA
atggaatgtaaggaagtgtg

SEQ ID NO: 61831 - DNA, 20 bp, Artificial Sequence
  MKO10061831_A_mmu-mir-206
  gRNA
tgtaaggaagtgtgtggttt

SEQ ID NO: 61832 - DNA, 20 bp, Artificial Sequence
  MKO10061832_A_mmu-mir-206
  gRNA
ataaagaagcatgtggcctg

SEQ ID NO: 61833 - DNA, 20 bp, Artificial Sequence
  MKO10061833_A_mmu-mir-133b
  gRNA
caggctgcagtcacctccaa

SEQ ID NO: 61834 - DNA, 20 bp, Artificial Sequence
  MKO10061834_A_mmu-mir-133b
  gRNA
aagggagtggccccctgctc

SEQ ID NO: 61835 - DNA, 20 bp, Artificial Sequence
  MKO10061835_A_mmu-mir-133b
  gRNA
gtccgtcttcctgagaggtt

SEQ ID NO: 61836 - DNA, 20 bp, Artificial Sequence
  MKO10061836_A_mmu-mir-133b
  gRNA
tcaaccagctacagcagggc

SEQ ID NO: 61837 - DNA, 20 bp, Artificial Sequence
  MKO10061837_A_mmu-mir-30a
  gRNA
cgactgtaaacatcctcgac

SEQ ID NO: 61838 - DNA, 20 bp, Artificial Sequence
  MKO10061838_A_mmu-mir-30a
  gRNA
ggaagctgtgaagccacaaa

SEQ ID NO: 61839 - DNA, 20 bp, Artificial Sequence
  MKO10061839_A_mmu-mir-30a
  gRNA
gccacaaatgggctttcagt

SEQ ID NO: 61840 - DNA, 20 bp, Artificial Sequence
  MKO10061840_A_mmu-mir-30a
  gRNA
ggcttcacagcttccagtcg

SEQ ID NO: 61841 - DNA, 20 bp, Artificial Sequence
  MKO10061841_A_mmu-mir-30c-2
  gRNA
aaagtaagaaagctgggaga

SEQ ID NO: 61842 - DNA, 20 bp, Artificial Sequence
  MKO10061842_A_mmu-mir-30c-2
  gRNA
gctgtttactctctctgcct

SEQ ID NO: 61843 - DNA, 20 bp, Artificial Sequence
  MKO10061843_A_mmu-mir-30c-2
  gRNA
gctgtgaaaagtaagaaagc

SEQ ID NO: 61844 - DNA, 20 bp, Artificial Sequence
  MKO10061844_A_mmu-mir-30c-2
  gRNA
cttttcacagctgagagtgt

SEQ ID NO: 61845 - DNA, 20 bp, Artificial Sequence
  MKO10061845_A_mmu-mir-6342
  gRNA
gaggactacacagacttcga

SEQ ID NO: 61846 - DNA, 20 bp, Artificial Sequence
  MKO10061846_A_mmu-mir-6342
  gRNA
gatccgctatcatgcaactg

SEQ ID NO: 61847 - DNA, 20 bp, Artificial Sequence
  MKO10061847_A_mmu-mir-6342
  gRNA
tctttgaggattcttttaaa

SEQ ID NO: 61848 - DNA, 20 bp, Artificial Sequence
  MKO10061848_A_mmu-mir-6342
  gRNA
ctctggagatctgtccactc

SEQ ID NO: 61849 - DNA, 20 bp, Artificial Sequence
  MKO10061849_A_mmu-mir-6896
  gRNA
tcatttagcgtttcctttgt

SEQ ID NO: 61850 - DNA, 20 bp, Artificial Sequence
  MKO10061850_A_mmu-mir-6896
  gRNA
tctctctctcacctacaaac

SEQ ID NO: 61851 - DNA, 20 bp, Artificial Sequence
  MKO10061851_A_mmu-mir-6896
  gRNA
cgggttctcgtcgcctacaa

SEQ ID NO: 61852 - DNA, 20 bp, Artificial Sequence
  MKO10061852_A_mmu-mir-6896
  gRNA
aacagtgattattacacacc

SEQ ID NO: 61853 - DNA, 20 bp, Artificial Sequence
  MKO10061853_A_mmu-mir-5103
  gRNA
tcgggggtcctgggggcctc

SEQ ID NO: 61854 - DNA, 20 bp, Artificial Sequence
  MKO10061854_A_mmu-mir-5103
  gRNA
gggggtcctgggggcctcag

SEQ ID NO: 61855 - DNA, 20 bp, Artificial Sequence
  MKO10061855_A_mmu-mir-5103
  gRNA
ctgggggcctcaggggatcc

SEQ ID NO: 61856 - DNA, 20 bp, Artificial Sequence
  MKO10061856_A_mmu-mir-5103
  gRNA
aaatgttatgcccagatcct

SEQ ID NO: 61857 - DNA, 20 bp, Artificial Sequence
  MKO10061857_A_mmu-mir-6897
  gRNA
acggtctgtgttcttccccc

SEQ ID NO: 61858 - DNA, 20 bp, Artificial Sequence
  MKO10061858_A_mmu-mir-6897
  gRNA
aagctacagtgctgtgctgg

SEQ ID NO: 61859 - DNA, 20 bp, Artificial Sequence
  MKO10061859_A_mmu-mir-6897
  gRNA
gttttatgacgtaagtctca

SEQ ID NO: 61860 - DNA, 20 bp, Artificial Sequence
  MKO10061860_A_mmu-mir-6898
  gRNA
ggagagatcctgggtagaga

SEQ ID NO: 61861 - DNA, 20 bp, Artificial Sequence
  MKO10061861_A_mmu-mir-6898
  gRNA
acttgaatccaagcatcatt

SEQ ID NO: 61862 - DNA, 20 bp, Artificial Sequence
  MKO10061862_A_mmu-mir-6898
  gRNA
tctttgtaccttctctaccc

SEQ ID NO: 61863 - DNA, 20 bp, Artificial Sequence
  MKO10061863_A_mmu-mir-6898
  gRNA
tccctgtaaggggagatgca

SEQ ID NO: 61864 - DNA, 20 bp, Artificial Sequence
  MKO10061864_A_mmu-mir-6349
  gRNA
ccacattccacaggttacag

SEQ ID NO: 61865 - DNA, 20 bp, Artificial Sequence
  MKO10061865_A_mmu-mir-6349
  gRNA
cattccacaggttacagcgg

SEQ ID NO: 61866 - DNA, 20 bp, Artificial Sequence
  MKO10061866_A_mmu-mir-6349
  gRNA
gaggctgttagcttactctg

SEQ ID NO: 61867 - DNA, 20 bp, Artificial Sequence
  MKO10061867_A_mmu-mir-6349
  gRNA
ctgttagcttactctgtggg

SEQ ID NO: 61868 - DNA, 20 bp, Artificial Sequence
  MKO10061868_A_mmu-mir-6350
  gRNA
atgaaaatatgataagtata

SEQ ID NO: 61869 - DNA, 20 bp, Artificial Sequence
  MKO10061869_A_mmu-mir-6350
  gRNA
ataatgcacctgctatacat

SEQ ID NO: 61870 - DNA, 20 bp, Artificial Sequence
  MKO10061870_A_mmu-mir-6350
  gRNA
gcacctgctatacattggta

SEQ ID NO: 61871 - DNA, 20 bp, Artificial Sequence
  MKO10061871_A_mmu-mir-6350
  gRNA
cagccataccaatgtatagc

SEQ ID NO: 61872 - DNA, 20 bp, Artificial Sequence
  MKO10061872_A_mmu-mir-7681
  gRNA
cctgtccttgccctctctgt

SEQ ID NO: 61873 - DNA, 20 bp, Artificial Sequence
  MKO10061873_A_mmu-mir-7681
  gRNA
cctacacctacactacagaa

SEQ ID NO: 61874 - DNA, 20 bp, Artificial Sequence
  MKO10061874_A_mmu-mir-7681
  gRNA
ccaacagagagggcaaggac

SEQ ID NO: 61875 - DNA, 20 bp, Artificial Sequence
  MKO10061875_A_mmu-mir-7681
  gRNA
tgatgccaacagagagggca

SEQ ID NO: 61876 - DNA, 20 bp, Artificial Sequence
  MKO10061876_A_mmu-mir-6899
  gRNA
tcacctgcagaagacacaga

SEQ ID NO: 61877 - DNA, 20 bp, Artificial Sequence
  MKO10061877_A_mmu-mir-6899
  gRNA
gcccgctgcgttctgctgcc

SEQ ID NO: 61878 - DNA, 20 bp, Artificial Sequence
  MKO10061878_A_mmu-mir-6899
  gRNA
tgtccttctgtgtcttctgc

SEQ ID NO: 61879 - DNA, 20 bp, Artificial Sequence
  MKO10061879_A_mmu-mir-6899
  gRNA
accaggcagcagaacgcagc

SEQ ID NO: 61880 - DNA, 20 bp, Artificial Sequence
  MKO10061880_A_mmu-mir-6351
  gRNA
gtgctccctgagcaacgcta

SEQ ID NO: 61881 - DNA, 20 bp, Artificial Sequence
  MKO10061881_A_mmu-mir-6351
  gRNA
ttgctttgcagagatcctct

SEQ ID NO: 61882 - DNA, 20 bp, Artificial Sequence
  MKO10061882_A_mmu-mir-6351
  gRNA
aggaaagctgaaatggagga

SEQ ID NO: 61883 - DNA, 20 bp, Artificial Sequence
  MKO10061883_A_mmu-mir-6351
  gRNA
agaaaactgagcatgcccag

SEQ ID NO: 61884 - DNA, 20 bp, Artificial Sequence
  MKO10061884_A_mmu-mir-1928
  gRNA
ttacaagttggggttagagc

SEQ ID NO: 61885 - DNA, 20 bp, Artificial Sequence
  MKO10061885_A_mmu-mir-1928
  gRNA
gatagagctttgcgcattgt

SEQ ID NO: 61886 - DNA, 20 bp, Artificial Sequence
  MKO10061886_A_mmu-mir-1928
  gRNA
gagctggcaatgtagctcag

SEQ ID NO: 61887 - DNA, 20 bp, Artificial Sequence
  MKO10061887_A_mmu-mir-26b
  gRNA
ggacccagttcaagtaattc

SEQ ID NO: 61888 - DNA, 20 bp, Artificial Sequence
  MKO10061888_A_mmu-mir-26b
  gRNA
cagttcaagtaattcaggat

SEQ ID NO: 61889 - DNA, 20 bp, Artificial Sequence
  MKO10061889_A_mmu-mir-26b
  gRNA
aagtaattcaggataggttg

SEQ ID NO: 61890 - DNA, 20 bp, Artificial Sequence
  MKO10061890_A_mmu-mir-26b
  gRNA
ccagcctgttctccattact

SEQ ID NO: 61891 - DNA, 20 bp, Artificial Sequence
  MKO10061891_A_mmu-mir-375
  gRNA
gctcaggtccggtttgtgcg

SEQ ID NO: 61892 - DNA, 20 bp, Artificial Sequence
  MKO10061892_A_mmu-mir-375
  gRNA
tcaggtccggtttgtgcgag

SEQ ID NO: 61893 - DNA, 20 bp, Artificial Sequence
  MKO10061893_A_mmu-mir-375
  gRNA
tttgtgcgaggggctcgtcg

SEQ ID NO: 61894 - DNA, 20 bp, Artificial Sequence
  MKO10061894_A_mmu-mir-375
  gRNA
tgtgcgaggggctcgtcgcg

SEQ ID NO: 61895 - DNA, 20 bp, Artificial Sequence
  MKO10061895_A_mmu-mir-6343
  gRNA
ctatttattgcagaaaagtg

SEQ ID NO: 61896 - DNA, 20 bp, Artificial Sequence
  MKO10061896_A_mmu-mir-6343
  gRNA
tctccacttctatgtaaagt

SEQ ID NO: 61897 - DNA, 20 bp, Artificial Sequence
  MKO10061897_A_mmu-mir-6343
  gRNA
gctcctactttacatagaag

SEQ ID NO: 61898 - DNA, 20 bp, Artificial Sequence
  MKO10061898_A_mmu-mir-6343
  gRNA
agctatttattgcagaaaag

SEQ ID NO: 61899 - DNA, 20 bp, Artificial Sequence
  MKO10061899_A_mmu-mir-6352
  gRNA
ccatctcctcccacctcaga

SEQ ID NO: 61900 - DNA, 20 bp, Artificial Sequence
  MKO10061900_A_mmu-mir-6352
  gRNA
tgtcactaaggacaagtctc

SEQ ID NO: 61901 - DNA, 20 bp, Artificial Sequence
  MKO10061901_A_mmu-mir-6352
  gRNA
gtctcaggattcaccagagc

SEQ ID NO: 61902 - DNA, 20 bp, Artificial Sequence
  MKO10061902_A_mmu-mir-6352
  gRNA
ccttctgaggtgggaggaga

SEQ ID NO: 61903 - DNA, 20 bp, Artificial Sequence
  MKO10061903_A_mmu-mir-6344
  gRNA
tttcctactgtttccctttt

SEQ ID NO: 61904 - DNA, 20 bp, Artificial Sequence
  MKO10061904_A_mmu-mir-6344
  gRNA
tgtgttgagctcatttgtgg

SEQ ID NO: 61905 - DNA, 20 bp, Artificial Sequence
  MKO10061905_A_mmu-mir-6344
  gRNA
atttgtggtggcatccagag

SEQ ID NO: 61906 - DNA, 20 bp, Artificial Sequence
  MKO10061906_A_mmu-mir-6344
  gRNA
cagagtggagatgggagaac

SEQ ID NO: 61907 - DNA, 20 bp, Artificial Sequence
  MKO10061907_A_mmu-mir-6353
  gRNA
tgaaaatgtaatgtttaccc

SEQ ID NO: 61908 - DNA, 20 bp, Artificial Sequence
  MKO10061908_A_mmu-mir-6353
  gRNA
ttctaccagacacacactcc

SEQ ID NO: 61909 - DNA, 20 bp, Artificial Sequence
  MKO10061909_A_mmu-mir-6353
  gRNA
acacactcctggctctctcc

SEQ ID NO: 61910 - DNA, 20 bp, Artificial Sequence
  MKO10061910_A_mmu-mir-6353
  gRNA
ttctaatccctacccttaat

SEQ ID NO: 61911 - DNA, 20 bp, Artificial Sequence
  MKO10061911_A_mmu-mir-5126
  gRNA
cctgcagctgcgggagcccg

SEQ ID NO: 61912 - DNA, 20 bp, Artificial Sequence
  MKO10061912_A_mmu-mir-5126
  gRNA
cgtggttccccgggcaaccg

SEQ ID NO: 61913 - DNA, 20 bp, Artificial Sequence
  MKO10061913_A_mmu-mir-5126
  gRNA
gttccccgggcaaccgcggg

SEQ ID NO: 61914 - DNA, 20 bp, Artificial Sequence
  MKO10061914_A_mmu-mir-5126
  gRNA
tccccgggcaaccgcgggcg

SEQ ID NO: 61915 - DNA, 20 bp, Artificial Sequence
  MKO10061915_A_mmu-mir-8096
  gRNA
caggtctcagtaagaactca

SEQ ID NO: 61916 - DNA, 20 bp, Artificial Sequence
  MKO10061916_A_mmu-mir-8096
  gRNA
actcaaggccgtgacttgac

SEQ ID NO: 61917 - DNA, 20 bp, Artificial Sequence
  MKO10061917_A_mmu-mir-8096
  gRNA
ggccgtgacttgactgggca

SEQ ID NO: 61918 - DNA, 20 bp, Artificial Sequence
  MKO10061918_A_mmu-mir-8096
  gRNA
gcacggtagctgaagagtac

SEQ ID NO: 61919 - DNA, 20 bp, Artificial Sequence
  MKO10061919_A_mmu-mir-3535
  gRNA
atcagaacttgactatctag

SEQ ID NO: 61920 - DNA, 20 bp, Artificial Sequence
  MKO10061920_A_mmu-mir-3535
  gRNA
gatttcatcaattatttctc

SEQ ID NO: 61921 - DNA, 20 bp, Artificial Sequence
  MKO10061921_A_mmu-mir-3535
  gRNA
gttgctgagaaaatgacaac

SEQ ID NO: 61922 - DNA, 20 bp, Artificial Sequence
  MKO10061922_A_mmu-mir-3535
  gRNA
ctgctttgagttgacatagc

SEQ ID NO: 61923 - DNA, 20 bp, Artificial Sequence
  MKO10061923_A_mmu-mir-6900
  gRNA
atcagagtccagacggctct

SEQ ID NO: 61924 - DNA, 20 bp, Artificial Sequence
  MKO10061924_A_mmu-mir-6900
  gRNA
tagagccgtctggactctga

SEQ ID NO: 61925 - DNA, 20 bp, Artificial Sequence
  MKO10061925_A_mmu-mir-6900
  gRNA
ggtatagatcctcatgtgcc

SEQ ID NO: 61926 - DNA, 20 bp, Artificial Sequence
  MKO10061926_A_mmu-mir-6900
  gRNA
catcaccatcagagtccaga

SEQ ID NO: 61927 - DNA, 20 bp, Artificial Sequence
  MKO10061927_A_mmu-mir-149
  gRNA
actcccgtgtttgtccgagg

SEQ ID NO: 61928 - DNA, 20 bp, Artificial Sequence
  MKO10061928_A_mmu-mir-149
  gRNA
gtttgtccgaggagggaggg

SEQ ID NO: 61929 - DNA, 20 bp, Artificial Sequence
  MKO10061929_A_mmu-mir-149
  gRNA
tccgaggagggagggaggga

SEQ ID NO: 61930 - DNA, 20 bp, Artificial Sequence
  MKO10061930_A_mmu-mir-149
  gRNA
gagggagggagggacggggg

SEQ ID NO: 61931 - DNA, 20 bp, Artificial Sequence
  MKO10061931_A_mmu-mir-6901
  gRNA
agctaagtgcaggaatgcag

SEQ ID NO: 61932 - DNA, 20 bp, Artificial Sequence
  MKO10061932_A_mmu-mir-6901
  gRNA
caggaatgcagaggacctcg

SEQ ID NO: 61933 - DNA, 20 bp, Artificial Sequence
  MKO10061933_A_mmu-mir-6901
  gRNA
cagaaggtcctttcaccacg

SEQ ID NO: 61934 - DNA, 20 bp, Artificial Sequence
  MKO10061934_A_mmu-mir-6901
  gRNA
gggagctgcaagaacacaga

SEQ ID NO: 61935 - DNA, 20 bp, Artificial Sequence
  MKO10061935_A_mmu-mir-6902
  gRNA
aattgtcaccatgtgatgtg

SEQ ID NO: 61936 - DNA, 20 bp, Artificial Sequence
  MKO10061936_A_mmu-mir-6902
  gRNA
ctacttcatgtgacaatgtg

SEQ ID NO: 61937 - DNA, 20 bp, Artificial Sequence
  MKO10061937_A_mmu-mir-6902
  gRNA
aactgaacccacacatcaca

SEQ ID NO: 61938 - DNA, 20 bp, Artificial Sequence
  MKO10061938_A_mmu-mir-6902
  gRNA
gatgtgtgggttcagttgac

SEQ ID NO: 61939 - DNA, 20 bp, Artificial Sequence
  MKO10061939_A_mmu-mir-6345
  gRNA
gtgttagtctagcactgctc

SEQ ID NO: 61940 - DNA, 20 bp, Artificial Sequence
  MKO10061940_A_mmu-mir-6345
  gRNA
gtacagtgtgtggtagtact

SEQ ID NO: 61941 - DNA, 20 bp, Artificial Sequence
  MKO10061941_A_mmu-mir-6345
  gRNA
tggtagtactaggttctcca

SEQ ID NO: 61942 - DNA, 20 bp, Artificial Sequence
  MKO10061942_A_mmu-mir-6345
  gRNA
acacaggcataaatgaaact

SEQ ID NO: 61943 - DNA, 20 bp, Artificial Sequence
  MKO10061943_A_mmu-mir-3473f
  gRNA
atgtattgaaaacaacaaag

SEQ ID NO: 61944 - DNA, 20 bp, Artificial Sequence
  MKO10061944_A_mmu-mir-3473f
  gRNA
attgaaaacaacaaaggggc

SEQ ID NO: 61945 - DNA, 20 bp, Artificial Sequence
  MKO10061945_A_mmu-mir-3473f
  gRNA
caacaaaggggctggagaga

SEQ ID NO: 61946 - DNA, 20 bp, Artificial Sequence
  MKO10061946_A_mmu-mir-3473f
  gRNA
gggctggagagatggctcag

SEQ ID NO: 61947 - DNA, 20 bp, Artificial Sequence
  MKO10061947_A_mmu-mir-6346
  gRNA
ataaagccagatacgatagc

SEQ ID NO: 61948 - DNA, 20 bp, Artificial Sequence
  MKO10061948_A_mmu-mir-6346
  gRNA
caggtgtctgcaatgccaaa

SEQ ID NO: 61949 - DNA, 20 bp, Artificial Sequence
  MKO10061949_A_mmu-mir-6346
  gRNA
tatcgtatctggctttatat

SEQ ID NO: 61950 - DNA, 20 bp, Artificial Sequence
  MKO10061950_A_mmu-mir-6346
  gRNA
atgacccaagtccagatcgt

SEQ ID NO: 61951 - DNA, 20 bp, Artificial Sequence
  MKO10061951_A_mmu-mir-128-1
  gRNA
tcttcctgagctgttggatt

SEQ ID NO: 61952 - DNA, 20 bp, Artificial Sequence
  MKO10061952_A_mmu-mir-128-1
  gRNA
ttacatttctcacagtgaac

SEQ ID NO: 61953 - DNA, 20 bp, Artificial Sequence
  MKO10061953_A_mmu-mir-128-1
  gRNA
gaagcagctgaaaaagagac

SEQ ID NO: 61954 - DNA, 20 bp, Artificial Sequence
  MKO10061954_A_mmu-mir-128-1
  gRNA
ttcctgagctgttggattcg

SEQ ID NO: 61955 - DNA, 20 bp, Artificial Sequence
  MKO10061955_A_mmu-mir-135b
  gRNA
ctccgctctgctgtggccta

SEQ ID NO: 61956 - DNA, 20 bp, Artificial Sequence
  MKO10061956_A_mmu-mir-135b
  gRNA
ttgctgctccgaactcatgt

SEQ ID NO: 61957 - DNA, 20 bp, Artificial Sequence
  MKO10061957_A_mmu-mir-135b
  gRNA
tcatgtagggctaaaagcca

SEQ ID NO: 61958 - DNA, 20 bp, Artificial Sequence
  MKO10061958_A_mmu-mir-135b
  gRNA
aaaagccatgggctacagtg

SEQ ID NO: 61959 - DNA, 20 bp, Artificial Sequence
  MKO10061959_A_mmu-mir-6903
  gRNA
gcgtgccacctgaagacatg

SEQ ID NO: 61960 - DNA, 20 bp, Artificial Sequence
  MKO10061960_A_mmu-mir-6903
  gRNA
taagtactgcttttcccaaa

SEQ ID NO: 61961 - DNA, 20 bp, Artificial Sequence
  MKO10061961_A_mmu-mir-6903
  gRNA
cgtgtgtgtctgtttttccc

SEQ ID NO: 61962 - DNA, 20 bp, Artificial Sequence
  MKO10061962_A_mmu-mir-6903
  gRNA
acttaccacatgtcttcagg

SEQ ID NO: 61963 - DNA, 20 bp, Artificial Sequence
  MKO10061963_A_mmu-mir-1231
  gRNA
gtgggcagaacagacagggc

SEQ ID NO: 61964 - DNA, 20 bp, Artificial Sequence
  MKO10061964_A_mmu-mir-1231
  gRNA
agacagggcaggtggcaggg

SEQ ID NO: 61965 - DNA, 20 bp, Artificial Sequence
  MKO10061965_A_mmu-mir-1231
  gRNA
ggcagggtggcagagatgtc

SEQ ID NO: 61966 - DNA, 20 bp, Artificial Sequence
  MKO10061966_A_mmu-mir-1231
  gRNA
gcaggagagaagggcagggc

SEQ ID NO: 61967 - DNA, 20 bp, Artificial Sequence
  MKO10061967_A_mmu-mir-181a-1
  gRNA
agggtacaatcaacggtcga

SEQ ID NO: 61968 - DNA, 20 bp, Artificial Sequence
  MKO10061968_A_mmu-mir-181a-1
  gRNA
tagctatagggtacaatcaa

SEQ ID NO: 61969 - DNA, 20 bp, Artificial Sequence
  MKO10061969_A_mmu-mir-181a-1
  gRNA
cagtgaacattcaacgctgt

SEQ ID NO: 61970 - DNA, 20 bp, Artificial Sequence
  MKO10061970_A_mmu-mir-181a-1
  gRNA
ttcaacgctgtcggtgagtt

SEQ ID NO: 61971 - DNA, 20 bp, Artificial Sequence
  MKO10061971_A_mmu-mir-181b-1
  gRNA
tcaacattcattgctgtcgg

SEQ ID NO: 61972 - DNA, 20 bp, Artificial Sequence
  MKO10061972_A_mmu-mir-181b-1
  gRNA
caatcaacattcattgctgt

SEQ ID NO: 61973 - DNA, 20 bp, Artificial Sequence
  MKO10061973_A_mmu-mir-181b-1
  gRNA
ctgaacaatgaatgcaactg

SEQ ID NO: 61974 - DNA, 20 bp, Artificial Sequence
  MKO10061974_A_mmu-mir-7682
  gRNA
agtgcatttgtcctgtgggt

SEQ ID NO: 61975 - DNA, 20 bp, Artificial Sequence
  MKO10061975_A_mmu-mir-7682
  gRNA
atttgtcctgtgggttgggt

SEQ ID NO: 61976 - DNA, 20 bp, Artificial Sequence
  MKO10061976_A_mmu-mir-7682
  gRNA
acaaatgcactcagtttctg

SEQ ID NO: 61977 - DNA, 20 bp, Artificial Sequence
  MKO10061977_A_mmu-mir-7682
  gRNA
ccaaagccaacccaacccac

SEQ ID NO: 61978 - DNA, 20 bp, Artificial Sequence
  MKO10061978_A_mmu-mir-8114
  gRNA
cagccagcgaccctgcagag

SEQ ID NO: 61979 - DNA, 20 bp, Artificial Sequence
  MKO10061979_A_mmu-mir-8114
  gRNA
ctgcagggtcgctggctgct

SEQ ID NO: 61980 - DNA, 20 bp, Artificial Sequence
  MKO10061980_A_mmu-mir-8114
  gRNA
tctccgctctgcagggtcgc

SEQ ID NO: 61981 - DNA, 20 bp, Artificial Sequence
  MKO10061981_A_mmu-mir-8114
  gRNA
ctcccattctccgctctgca

SEQ ID NO: 61982 - DNA, 20 bp, Artificial Sequence
  MKO10061982_A_mmu-mir-488
  gRNA
aagtttccatgttgtttgaa

SEQ ID NO: 61983 - DNA, 20 bp, Artificial Sequence
  MKO10061983_A_mmu-mir-488
  gRNA
ttgtttgaaaggctgtttct

SEQ ID NO: 61984 - DNA, 20 bp, Artificial Sequence
  MKO10061984_A_mmu-mir-488
  gRNA
agaagactctcaatttcttc

SEQ ID NO: 61985 - DNA, 20 bp, Artificial Sequence
  MKO10061985_A_mmu-mir-488
  gRNA
aaacagcctttcaaacaaca

SEQ ID NO: 61986 - DNA, 20 bp, Artificial Sequence
  MKO10061986_A_mmu-mir-1843b
  gRNA
gcaatcctacatcaacatgg

SEQ ID NO: 61987 - DNA, 20 bp, Artificial Sequence
  MKO10061987_A_mmu-mir-1843b
  gRNA
tggaggtctctgtctgactt

SEQ ID NO: 61988 - DNA, 20 bp, Artificial Sequence
  MKO10061988_A_mmu-mir-1843b
  gRNA
attcaaaaggttgtatggag

SEQ ID NO: 61989 - DNA, 20 bp, Artificial Sequence
  MKO10061989_A_mmu-mir-1843b
  gRNA
aaattcaaaaggttgtatgg

SEQ ID NO: 61990 - DNA, 20 bp, Artificial Sequence
  MKO10061990_A_mmu-mir-1927
  gRNA
gatctgaacctacatgcaca

SEQ ID NO: 61991 - DNA, 20 bp, Artificial Sequence
  MKO10061991_A_mmu-mir-1927
  gRNA
tatgtttaccatgtgcatgt

SEQ ID NO: 61992 - DNA, 20 bp, Artificial Sequence
  MKO10061992_A_mmu-mir-1927
  gRNA
ctggctgttcttgtagagag

SEQ ID NO: 61993 - DNA, 20 bp, Artificial Sequence
  MKO10061993_A_mmu-mir-1927
  gRNA
gttcagtccctaacatccag

SEQ ID NO: 61994 - DNA, 20 bp, Artificial Sequence
  MKO10061994_A_mmu-mir-199a-2
  gRNA
cacacaccgatggaagcttc

SEQ ID NO: 61995 - DNA, 20 bp, Artificial Sequence
  MKO10061995_A_mmu-mir-199a-2
  gRNA
ttgtacagtagtctgcacat

SEQ ID NO: 61996 - DNA, 20 bp, Artificial Sequence
  MKO10061996_A_mmu-mir-199a-2
  gRNA
cacattggttagactgggca

SEQ ID NO: 61997 - DNA, 20 bp, Artificial Sequence
  MKO10061997_A_mmu-mir-199a-2
  gRNA
gaacactggggcgacggagc

SEQ ID NO: 61998 - DNA, 20 bp, Artificial Sequence
  MKO10061998_A_mmu-mir-214
  gRNA
catccgctcacctgtacagc

SEQ ID NO: 61999 - DNA, 20 bp, Artificial Sequence
  MKO10061999_A_mmu-mir-214
  gRNA
cctgtacagcaggcacagac

SEQ ID NO: 62000 - DNA, 20 bp, Artificial Sequence
  MKO10062000_A_mmu-mir-214
  gRNA
catgacaactctgtccagcc

SEQ ID NO: 62001 - DNA, 20 bp, Artificial Sequence
  MKO10062001_A_mmu-mir-214
  gRNA
tctgcacagcaagtgtagac

SEQ ID NO: 62002 - DNA, 20 bp, Artificial Sequence
  MKO10062002_A_mmu-mir-6347
  gRNA
tggctggagatgcttgggct

SEQ ID NO: 62003 - DNA, 20 bp, Artificial Sequence
  MKO10062003_A_mmu-mir-6347
  gRNA
gttctgaatcaggaattcag

SEQ ID NO: 62004 - DNA, 20 bp, Artificial Sequence
  MKO10062004_A_mmu-mir-6347
  gRNA
ttcctgattcagaacttctg

SEQ ID NO: 62005 - DNA, 20 bp, Artificial Sequence
  MKO10062005_A_mmu-mir-6347
  gRNA
aattcctgattcagaacttc

SEQ ID NO: 62006 - DNA, 20 bp, Artificial Sequence
  MKO10062006_A_mmu-mir-6348
  gRNA
ctgattggctgaggcacaaa

SEQ ID NO: 62007 - DNA, 20 bp, Artificial Sequence
  MKO10062007_A_mmu-mir-6348
  gRNA
tacattctagtcctgggctt

SEQ ID NO: 62008 - DNA, 20 bp, Artificial Sequence
  MKO10062008_A_mmu-mir-6348
  gRNA
agtcctgggctttgggtaga

SEQ ID NO: 62009 - DNA, 20 bp, Artificial Sequence
  MKO10062009_A_mmu-mir-6348
  gRNA
gggctttgggtagaaggaac

SEQ ID NO: 62010 - DNA, 20 bp, Artificial Sequence
  MKO10062010_A_mmu-mir-6354
  gRNA
ccccaacaagtaagacttcc

SEQ ID NO: 62011 - DNA, 20 bp, Artificial Sequence
  MKO10062011_A_mmu-mir-6354
  gRNA
aaccaggaagtcttacttgt

SEQ ID NO: 62012 - DNA, 20 bp, Artificial Sequence
  MKO10062012_A_mmu-mir-6354
  gRNA
agggttgagagactgcaacc

SEQ ID NO: 62013 - DNA, 20 bp, Artificial Sequence
  MKO10062013_A_mmu-mir-6354
  gRNA
tctctgtctttggagctcca

SEQ ID NO: 62014 - DNA, 20 bp, Artificial Sequence
  MKO10062014_A_mmu-mir-6546
  gRNA
aagtaaaaaggtctggcgct

SEQ ID NO: 62015 - DNA, 20 bp, Artificial Sequence
  MKO10062015_A_mmu-mir-6546
  gRNA
cttcgctcgctagcgcagcc

SEQ ID NO: 62016 - DNA, 20 bp, Artificial Sequence
  MKO10062016_A_mmu-mir-6546
  gRNA
agcacaagctcagaggcgcc

SEQ ID NO: 62017 - DNA, 20 bp, Artificial Sequence
  MKO10062017_A_mmu-mir-6546
  gRNA
ctgagcttgtgcttgtcgcc

SEQ ID NO: 62018 - DNA, 20 bp, Artificial Sequence
  MKO10062018_A_mmu-mir-7683
  gRNA
ctcactggaaaggtggaaca

SEQ ID NO: 62019 - DNA, 20 bp, Artificial Sequence
  MKO10062019_A_mmu-mir-7683
  gRNA
ctcataactcactggaaagg

SEQ ID NO: 62020 - DNA, 20 bp, Artificial Sequence
  MKO10062020_A_mmu-mir-7683
  gRNA
attctcataactcactggaa

SEQ ID NO: 62021 - DNA, 20 bp, Artificial Sequence
  MKO10062021_A_mmu-mir-7683
  gRNA
ctgggattctcataactcac

SEQ ID NO: 62022 - DNA, 20 bp, Artificial Sequence
  MKO10062022_A_mmu-mir-350
  gRNA
gcaagctgcaactctcctaa

SEQ ID NO: 62023 - DNA, 20 bp, Artificial Sequence
  MKO10062023_A_mmu-mir-350
  gRNA
tcctaaagggtgaaagtgta

SEQ ID NO: 62024 - DNA, 20 bp, Artificial Sequence
  MKO10062024_A_mmu-mir-350
  gRNA
cgcatgcactttactcttgt

SEQ ID NO: 62025 - DNA, 20 bp, Artificial Sequence
  MKO10062025_A_mmu-mir-350
  gRNA
actttactcttgtaggagca

SEQ ID NO: 62026 - DNA, 20 bp, Artificial Sequence
  MKO10062026_A_mmu-mir-6904
  gRNA
tgcctccattcatcctttcc

SEQ ID NO: 62027 - DNA, 20 bp, Artificial Sequence
  MKO10062027_A_mmu-mir-6904
  gRNA
ttcctggggttagagttgag

SEQ ID NO: 62028 - DNA, 20 bp, Artificial Sequence
  MKO10062028_A_mmu-mir-6904
  gRNA
gaccactcaactctaacccc

SEQ ID NO: 62029 - DNA, 20 bp, Artificial Sequence
  MKO10062029_A_mmu-mir-6904
  gRNA
gttagacaggggcttgtctg

SEQ ID NO: 62030 - DNA, 20 bp, Artificial Sequence
  MKO10062030_A_mmu-mir-1981
  gRNA
gaacgcacctgtcaaaggcc

SEQ ID NO: 62031 - DNA, 20 bp, Artificial Sequence
  MKO10062031_A_mmu-mir-1981
  gRNA
tgtcaaaggccagggttaga

SEQ ID NO: 62032 - DNA, 20 bp, Artificial Sequence
  MKO10062032_A_mmu-mir-1981
  gRNA
caaaggccagggttagatgg

SEQ ID NO: 62033 - DNA, 20 bp, Artificial Sequence
  MKO10062033_A_mmu-mir-1981
  gRNA
gtctaagcccagcctttacc

SEQ ID NO: 62034 - DNA, 20 bp, Artificial Sequence
  MKO10062034_A_mmu-mir-664
  gRNA
tggaacattgaagctggctg

SEQ ID NO: 62035 - DNA, 20 bp, Artificial Sequence
  MKO10062035_A_mmu-mir-664
  gRNA
agctggctggggaaaatgac

SEQ ID NO: 62036 - DNA, 20 bp, Artificial Sequence
  MKO10062036_A_mmu-mir-664
  gRNA
ttgctttcatgtgtaggctg

SEQ ID NO: 62037 - DNA, 20 bp, Artificial Sequence
  MKO10062037_A_mmu-mir-664
  gRNA
tattgctttcatgtgtaggc

SEQ ID NO: 62038 - DNA, 20 bp, Artificial Sequence
  MKO10062038_A_mmu-mir-194-1
  gRNA
ggtgtaacagcaactccatg

SEQ ID NO: 62039 - DNA, 20 bp, Artificial Sequence
  MKO10062039_A_mmu-mir-194-1
  gRNA
ggactgtgctcggattccag

SEQ ID NO: 62040 - DNA, 20 bp, Artificial Sequence
  MKO10062040_A_mmu-mir-194-1
  gRNA
ggagctgctgttacttctga

SEQ ID NO: 62041 - DNA, 20 bp, Artificial Sequence
  MKO10062041_A_mmu-mir-194-1
  gRNA
agaagtaacagcagctccac

SEQ ID NO: 62042 - DNA, 20 bp, Artificial Sequence
  MKO10062042_A_mmu-mir-215
  gRNA
gacagacatacacagctgca

SEQ ID NO: 62043 - DNA, 20 bp, Artificial Sequence
  MKO10062043_A_mmu-mir-215
  gRNA
cacggagctctcagcatcaa

SEQ ID NO: 62044 - DNA, 20 bp, Artificial Sequence
  MKO10062044_A_mmu-mir-215
  gRNA
tctcagcatcaacggtgtac

SEQ ID NO: 62045 - DNA, 20 bp, Artificial Sequence
  MKO10062045_A_mmu-mir-215
  gRNA
gtgtatgtctgtcattctgt

SEQ ID NO: 62046 - DNA, 20 bp, Artificial Sequence
  MKO10062046_A_mmu-mir-3473c
  gRNA
tacatttaaaagacttatta

SEQ ID NO: 62047 - DNA, 20 bp, Artificial Sequence
  MKO10062047_A_mmu-mir-3473c
  gRNA
catttaaaagacttattatg

SEQ ID NO: 62048 - DNA, 20 bp, Artificial Sequence
  MKO10062048_A_mmu-mir-3473c
  gRNA
aaaagacttattatgggggc

SEQ ID NO: 62049 - DNA, 20 bp, Artificial Sequence
  MKO10062049_A_mmu-mir-3473c
  gRNA
tattatgggggctggagaga

SEQ ID NO: 62050 - DNA, 20 bp, Artificial Sequence
  MKO10062050_A_mmu-mir-205
  gRNA
tcactccactgaaatctggt

SEQ ID NO: 62051 - DNA, 20 bp, Artificial Sequence
  MKO10062051_A_mmu-mir-205
  gRNA
ggttggcataagacagactc

SEQ ID NO: 62052 - DNA, 20 bp, Artificial Sequence
  MKO10062052_A_mmu-mir-205
  gRNA
ccggtggaatgaaggacaag

SEQ ID NO: 62053 - DNA, 20 bp, Artificial Sequence
  MKO10062053_A_mmu-mir-205
  gRNA
tcagtggagtgaagctcagg

SEQ ID NO: 62054 - DNA, 20 bp, Artificial Sequence
  MKO10062054_A_mmu-mir-3962
  gRNA
agaaatgtactctgccacgt

SEQ ID NO: 62055 - DNA, 20 bp, Artificial Sequence
  MKO10062055_A_mmu-mir-3962
  gRNA
actactacctagctcctacg

SEQ ID NO: 62056 - DNA, 20 bp, Artificial Sequence
  MKO10062056_A_mmu-mir-3962
  gRNA
tactctgccacgtaggagct

SEQ ID NO: 62057 - DNA, 20 bp, Artificial Sequence
  MKO10062057_A_mmu-mir-3962
  gRNA
tacatttcttactccctctg

SEQ ID NO: 62058 - DNA, 20 bp, Artificial Sequence
  MKO10062058_A_mmu-mir-29b-2
  gRNA
ttctggaagctggtttcaca

SEQ ID NO: 62059 - DNA, 20 bp, Artificial Sequence
  MKO10062059_A_mmu-mir-29b-2
  gRNA
tggaagctggtttcacatgg

SEQ ID NO: 62060 - DNA, 20 bp, Artificial Sequence
  MKO10062060_A_mmu-mir-29b-2
  gRNA
cctaaaacactgatttcaaa

SEQ ID NO: 62061 - DNA, 20 bp, Artificial Sequence
  MKO10062061_A_mmu-mir-29b-2
  gRNA
gatcctcttcttctggaagc

SEQ ID NO: 62062 - DNA, 20 bp, Artificial Sequence
  MKO10062062_A_mmu-mir-29c
  gRNA
agtcggtccatctcttacac

SEQ ID NO: 62063 - DNA, 20 bp, Artificial Sequence
  MKO10062063_A_mmu-mir-29c
  gRNA
acaggctgaccgatttctcc

SEQ ID NO: 62064 - DNA, 20 bp, Artificial Sequence
  MKO10062064_A_mmu-mir-29c
  gRNA
tgtctagcaccatttgaaat

SEQ ID NO: 62065 - DNA, 20 bp, Artificial Sequence
  MKO10062065_A_mmu-mir-29c
  gRNA
tgaaatcggttatgatgtag

SEQ ID NO: 62066 - DNA, 20 bp, Artificial Sequence
  MKO10062066_A_mmu-mir-5104
  gRNA
ctcagagctcttaaatgttg

SEQ ID NO: 62067 - DNA, 20 bp, Artificial Sequence
  MKO10062067_A_mmu-mir-5104
  gRNA
ccaattgttctgtgctagtg

SEQ ID NO: 62068 - DNA, 20 bp, Artificial Sequence
  MKO10062068_A_mmu-mir-5104
  gRNA
attgttctgtgctagtgagg

SEQ ID NO: 62069 - DNA, 20 bp, Artificial Sequence
  MKO10062069_A_mmu-mir-5104
  gRNA
gctagtgaggtggctcagca

SEQ ID NO: 62070 - DNA, 20 bp, Artificial Sequence
  MKO10062070_A_mmu-mir-6413
  gRNA
taatgagagaaacttaggca

SEQ ID NO: 62071 - DNA, 20 bp, Artificial Sequence
  MKO10062071_A_mmu-mir-6413
  gRNA
agagaaacttaggcaaggac

SEQ ID NO: 62072 - DNA, 20 bp, Artificial Sequence
  MKO10062072_A_mmu-mir-6413
  gRNA
aacttaggcaaggacaggca

SEQ ID NO: 62073 - DNA, 20 bp, Artificial Sequence
  MKO10062073_A_mmu-mir-6413
  gRNA
caggcaagggcttcacttgg

SEQ ID NO: 62074 - DNA, 20 bp, Artificial Sequence
  MKO10062074_A_mmu-mir-7663
  gRNA
gtgaagaagtcccacgacag

SEQ ID NO: 62075 - DNA, 20 bp, Artificial Sequence
  MKO10062075_A_mmu-mir-7663
  gRNA
tcttcacagtgtggatcata

SEQ ID NO: 62076 - DNA, 20 bp, Artificial Sequence
  MKO10062076_A_mmu-mir-7663
  gRNA
cgtgggacttcttcacagtg

SEQ ID NO: 62077 - DNA, 20 bp, Artificial Sequence
  MKO10062077_A_mmu-mir-7663
  gRNA
tggtgatcatccactgtcgt

SEQ ID NO: 62078 - DNA, 20 bp, Artificial Sequence
  MKO10062078_A_mmu-mir-6905
  gRNA
gtcagtgtgggagactgggc

SEQ ID NO: 62079 - DNA, 20 bp, Artificial Sequence
  MKO10062079_A_mmu-mir-6905
  gRNA
gtgtgggagactgggcaggt

SEQ ID NO: 62080 - DNA, 20 bp, Artificial Sequence
  MKO10062080_A_mmu-mir-6905
  gRNA
gccaatctatcgggcagata

SEQ ID NO: 62081 - DNA, 20 bp, Artificial Sequence
  MKO10062081_A_mmu-mir-6905
  gRNA
cccgtgtcagtgtgggagac

SEQ ID NO: 62082 - DNA, 20 bp, Artificial Sequence
  MKO10062082_A_mmu-mir-3473b
  gRNA
caagattaggttttaagggc

SEQ ID NO: 62083 - DNA, 20 bp, Artificial Sequence
  MKO10062083_A_mmu-mir-3473b
  gRNA
ggttttaagggctggagaga

SEQ ID NO: 62084 - DNA, 20 bp, Artificial Sequence
  MKO10062084_A_mmu-mir-3473b
  gRNA
gggctggagagatggctcag

SEQ ID NO: 62085 - DNA, 20 bp, Artificial Sequence
  MKO10062085_A_mmu-mir-3473b
  gRNA
ctaatcttgggctggagaga

SEQ ID NO: 62086 - DNA, 20 bp, Artificial Sequence
  MKO10062086_A_mmu-mir-1929
  gRNA
agtgggatcctgattagaac

SEQ ID NO: 62087 - DNA, 20 bp, Artificial Sequence
  MKO10062087_A_mmu-mir-1929
  gRNA
ggatcctgattagaactggg

SEQ ID NO: 62088 - DNA, 20 bp, Artificial Sequence
  MKO10062088_A_mmu-mir-1929
  gRNA
tctaggactttatagagcag

SEQ ID NO: 62089 - DNA, 20 bp, Artificial Sequence
  MKO10062089_A_mmu-mir-1929
  gRNA
agcctgtgacactcagctca

SEQ ID NO: 62090 - DNA, 20 bp, Artificial Sequence
  MKO10062090_A_mmu-mir-6906
  gRNA
gaaatacatagagagatgga

SEQ ID NO: 62091 - DNA, 20 bp, Artificial Sequence
  MKO10062091_A_mmu-mir-6906
  gRNA
gaggagaccggaattcaggt

SEQ ID NO: 62092 - DNA, 20 bp, Artificial Sequence
  MKO10062092_A_mmu-mir-6906
  gRNA
gctcttgtccaaccctggag

SEQ ID NO: 62093 - DNA, 20 bp, Artificial Sequence
  MKO10062093_A_mmu-mir-6906
  gRNA
tagagagatggatgggcaga

SEQ ID NO: 62094 - DNA, 20 bp, Artificial Sequence
  MKO10062094_A_mmu-mir-6408
  gRNA
aaagggactggccaaggcac

SEQ ID NO: 62095 - DNA, 20 bp, Artificial Sequence
  MKO10062095_A_mmu-mir-6408
  gRNA
ggactggccaaggcacaggg

SEQ ID NO: 62096 - DNA, 20 bp, Artificial Sequence
  MKO10062096_A_mmu-mir-6408
  gRNA
cagctacagcagggatgcta

SEQ ID NO: 62097 - DNA, 20 bp, Artificial Sequence
  MKO10062097_A_mmu-mir-6408
  gRNA
tatggccacatgggcttgca

SEQ ID NO: 62098 - DNA, 20 bp, Artificial Sequence
  MKO10062098_A_mmu-mir-5108
  gRNA
tgttcttaccattccctctg

SEQ ID NO: 62099 - DNA, 20 bp, Artificial Sequence
  MKO10062099_A_mmu-mir-5108
  gRNA
ggcctcgggggacccaatgg

SEQ ID NO: 62100 - DNA, 20 bp, Artificial Sequence
  MKO10062100_A_mmu-mir-5108
  gRNA
acccaatggtggtagagcac

SEQ ID NO: 62101 - DNA, 20 bp, Artificial Sequence
  MKO10062101_A_mmu-mir-5108
  gRNA
aatggtggtagagcactgga

SEQ ID NO: 62102 - DNA, 20 bp, Artificial Sequence
  MKO10062102_A_mmu-mir-7662
  gRNA
tgaagcagtatgctggatcc

SEQ ID NO: 62103 - DNA, 20 bp, Artificial Sequence
  MKO10062103_A_mmu-mir-7662
  gRNA
gcttcagagctggagccagg

SEQ ID NO: 62104 - DNA, 20 bp, Artificial Sequence
  MKO10062104_A_mmu-mir-7662
  gRNA
gatctgggagggctgaggcc

SEQ ID NO: 62105 - DNA, 20 bp, Artificial Sequence
  MKO10062105_A_mmu-mir-7662
  gRNA
gccaggatctgggagggctg

SEQ ID NO: 62106 - DNA, 20 bp, Artificial Sequence
  MKO10062106_A_mmu-mir-7215
  gRNA
tgctctgagaggcagaaaag

SEQ ID NO: 62107 - DNA, 20 bp, Artificial Sequence
  MKO10062107_A_mmu-mir-7215
  gRNA
ctctgagaggcagaaaagcg

SEQ ID NO: 62108 - DNA, 20 bp, Artificial Sequence
  MKO10062108_A_mmu-mir-7215
  gRNA
agagcatttgtagctcagct

SEQ ID NO: 62109 - DNA, 20 bp, Artificial Sequence
  MKO10062109_A_mmu-mir-7215
  gRNA
tgagctacaaatgctctgag

SEQ ID NO: 62110 - DNA, 20 bp, Artificial Sequence
  MKO10062110_A_mmu-mir-6409
  gRNA
taacagctagcgcgcatgcg

SEQ ID NO: 62111 - DNA, 20 bp, Artificial Sequence
  MKO10062111_A_mmu-mir-6409
  gRNA
ccgcacagtttgtaaacacg

SEQ ID NO: 62112 - DNA, 20 bp, Artificial Sequence
  MKO10062112_A_mmu-mir-6409
  gRNA
acccgcacagtttgtaaaca

SEQ ID NO: 62113 - DNA, 20 bp, Artificial Sequence
  MKO10062113_A_mmu-mir-6409
  gRNA
ccccgtgtttacaaactgtg

SEQ ID NO: 62114 - DNA, 20 bp, Artificial Sequence
  MKO10062114_A_mmu-mir-678
  gRNA
tgcaccgagacacgggtgca

SEQ ID NO: 62115 - DNA, 20 bp, Artificial Sequence
  MKO10062115_A_mmu-mir-678
  gRNA
ccgtgtctcggtgcaaggac

SEQ ID NO: 62116 - DNA, 20 bp, Artificial Sequence
  MKO10062116_A_mmu-mir-678
  gRNA
tgcacccgtgtctcggtgca

SEQ ID NO: 62117 - DNA, 20 bp, Artificial Sequence
  MKO10062117_A_mmu-mir-678
  gRNA
ccagtccttgcaccgagaca

SEQ ID NO: 62118 - DNA, 20 bp, Artificial Sequence
  MKO10062118_A_mmu-mir-1930
  gRNA
tctctatggtgcagttactg

SEQ ID NO: 62119 - DNA, 20 bp, Artificial Sequence
  MKO10062119_A_mmu-mir-1930
  gRNA
tggtgcagttactgtggctg

SEQ ID NO: 62120 - DNA, 20 bp, Artificial Sequence
  MKO10062120_A_mmu-mir-1930
  gRNA
ggtactatggaggtgaccgt

SEQ ID NO: 62121 - DNA, 20 bp, Artificial Sequence
  MKO10062121_A_mmu-mir-1930
  gRNA
gcacgctgcaggtactatgg

SEQ ID NO: 62122 - DNA, 20 bp, Artificial Sequence
  MKO10062122_A_mmu-mir-7659
  gRNA
tgaaccgacaagctgactcc

SEQ ID NO: 62123 - DNA, 20 bp, Artificial Sequence
  MKO10062123_A_mmu-mir-7659
  gRNA
gctacacaggaatctggagc

SEQ ID NO: 62124 - DNA, 20 bp, Artificial Sequence
  MKO10062124_A_mmu-mir-7659
  gRNA
attcctgtgtagctgcctcc

SEQ ID NO: 62125 - DNA, 20 bp, Artificial Sequence
  MKO10062125_A_mmu-mir-7659
  gRNA
aggtctctgtaggcaggagc

SEQ ID NO: 62126 - DNA, 20 bp, Artificial Sequence
  MKO10062126_A_mmu-mir-6907
  gRNA
gggacacagggaggctcgat

SEQ ID NO: 62127 - DNA, 20 bp, Artificial Sequence
  MKO10062127_A_mmu-mir-6907
  gRNA
caggaggcttctgggacaca

SEQ ID NO: 62128 - DNA, 20 bp, Artificial Sequence
  MKO10062128_A_mmu-mir-6907
  gRNA
gtgtcccagaagcctcctga

SEQ ID NO: 62129 - DNA, 20 bp, Artificial Sequence
  MKO10062129_A_mmu-mir-6907
  gRNA
ccagaagcctcctgaaggta

SEQ ID NO: 62130 - DNA, 20 bp, Artificial Sequence
  MKO10062130_A_mmu-mir-6410
  gRNA
ccggtcccttgtcttggctc

SEQ ID NO: 62131 - DNA, 20 bp, Artificial Sequence
  MKO10062131_A_mmu-mir-6410
  gRNA
cagggactactctgtgctcc

SEQ ID NO: 62132 - DNA, 20 bp, Artificial Sequence
  MKO10062132_A_mmu-mir-6410
  gRNA
gggactactctgtgctcctg

SEQ ID NO: 62133 - DNA, 20 bp, Artificial Sequence
  MKO10062133_A_mmu-mir-6410
  gRNA
gtgctcctggggaccttgtt

SEQ ID NO: 62134 - DNA, 20 bp, Artificial Sequence
  MKO10062134_A_mmu-mir-6908
  gRNA
acactggggctctccctgac

SEQ ID NO: 62135 - DNA, 20 bp, Artificial Sequence
  MKO10062135_A_mmu-mir-6908
  gRNA
acactctcccttgtgctggc

SEQ ID NO: 62136 - DNA, 20 bp, Artificial Sequence
  MKO10062136_A_mmu-mir-6908
  gRNA
gtccatcacctgccagcaca

SEQ ID NO: 62137 - DNA, 20 bp, Artificial Sequence
  MKO10062137_A_mmu-mir-6908
  gRNA
gagtgtcagcatccacacac

SEQ ID NO: 62138 - DNA, 20 bp, Artificial Sequence
  MKO10062138_A_mmu-mir-6909
  gRNA
agagaggctgtgggaggccg

SEQ ID NO: 62139 - DNA, 20 bp, Artificial Sequence
  MKO10062139_A_mmu-mir-6909
  gRNA
aggctgtgggaggccgggga

SEQ ID NO: 62140 - DNA, 20 bp, Artificial Sequence
  MKO10062140_A_mmu-mir-6909
  gRNA
gggaggccggggaaggcaca

SEQ ID NO: 62141 - DNA, 20 bp, Artificial Sequence
  MKO10062141_A_mmu-mir-6909
  gRNA
ggagaaccatgtgccttccc

SEQ ID NO: 62142 - DNA, 20 bp, Artificial Sequence
  MKO10062142_A_mmu-mir-6910
  gRNA
ctttggttgcacctgggggt

SEQ ID NO: 62143 - DNA, 20 bp, Artificial Sequence
  MKO10062143_A_mmu-mir-6910
  gRNA
gcagagtgtcctgctgctca

SEQ ID NO: 62144 - DNA, 20 bp, Artificial Sequence
  MKO10062144_A_mmu-mir-6910
  gRNA
cccactggtgccctaccccc

SEQ ID NO: 62145 - DNA, 20 bp, Artificial Sequence
  MKO10062145_A_mmu-mir-6910
  gRNA
cagcaggacactctgcccac

SEQ ID NO: 62146 - DNA, 20 bp, Artificial Sequence
  MKO10062146_A_mmu-mir-6911
  gRNA
ctcaatcacactctgtccac

SEQ ID NO: 62147 - DNA, 20 bp, Artificial Sequence
  MKO10062147_A_mmu-mir-6911
  gRNA
ggacagagtgtgattgaggc

SEQ ID NO: 62148 - DNA, 20 bp, Artificial Sequence
  MKO10062148_A_mmu-mir-6911
  gRNA
accttatggagtgggctgag

SEQ ID NO: 62149 - DNA, 20 bp, Artificial Sequence
  MKO10062149_A_mmu-mir-6911
  gRNA
gagtgggctgagtgggtctg

SEQ ID NO: 62150 - DNA, 20 bp, Artificial Sequence
  MKO10062150_A_mmu-mir-6912
  gRNA
ctatagcctgaagtacaggg

SEQ ID NO: 62151 - DNA, 20 bp, Artificial Sequence
  MKO10062151_A_mmu-mir-6912
  gRNA
gaagtacagggagggtgctc

SEQ ID NO: 62152 - DNA, 20 bp, Artificial Sequence
  MKO10062152_A_mmu-mir-6912
  gRNA
agggtgctcaggcaggcatc

SEQ ID NO: 62153 - DNA, 20 bp, Artificial Sequence
  MKO10062153_A_mmu-mir-6912
  gRNA
ggcaggcatctggctgtagc

SEQ ID NO: 62154 - DNA, 20 bp, Artificial Sequence
  MKO10062154_A_mmu-mir-1982
  gRNA
agaggttggtattgcttggg

SEQ ID NO: 62155 - DNA, 20 bp, Artificial Sequence
  MKO10062155_A_mmu-mir-1982
  gRNA
ggtattgcttgggagggtcc

SEQ ID NO: 62156 - DNA, 20 bp, Artificial Sequence
  MKO10062156_A_mmu-mir-1982
  gRNA
tgcttgggagggtcctgggg

SEQ ID NO: 62157 - DNA, 20 bp, Artificial Sequence
  MKO10062157_A_mmu-mir-1982
  gRNA
cttgggagggtcctggggag

SEQ ID NO: 62158 - DNA, 20 bp, Artificial Sequence
  MKO10062158_A_mmu-mir-5615-1
  gRNA
tctgtctcagaaaacaacca

SEQ ID NO: 62159 - DNA, 20 bp, Artificial Sequence
  MKO10062159_A_mmu-mir-5615-1
  gRNA
tctgtctcagaaaacaacca

SEQ ID NO: 62160 - DNA, 20 bp, Artificial Sequence
  MKO10062160_A_mmu-mir-5615-1
  gRNA
cagaaaacaaccaaggactg

SEQ ID NO: 62161 - DNA, 20 bp, Artificial Sequence
  MKO10062161_A_mmu-mir-5615-1
  gRNA
ctcagaaaacaaccaaggac

SEQ ID NO: 62162 - DNA, 20 bp, Artificial Sequence
  MKO10062162_A_mmu-mir-5615-2
  gRNA
tctgtctcagaaaacaacca

SEQ ID NO: 62163 - DNA, 20 bp, Artificial Sequence
  MKO10062163_A_mmu-mir-5615-2
  gRNA
tctgtctcagaaaacaacca

SEQ ID NO: 62164 - DNA, 20 bp, Artificial Sequence
  MKO10062164_A_mmu-mir-5615-2
  gRNA
accaaggactgctcttccag

SEQ ID NO: 62165 - DNA, 20 bp, Artificial Sequence
  MKO10062165_A_mmu-mir-5615-2
  gRNA
cagaaaacaaccaaggactg

SEQ ID NO: 62166 - DNA, 20 bp, Artificial Sequence
  MKO10062166_A_mmu-mir-3057
  gRNA
tgtcctgaaggtgtgtgcat

SEQ ID NO: 62167 - DNA, 20 bp, Artificial Sequence
  MKO10062167_A_mmu-mir-3057
  gRNA
ggagctgagattctgcggga

SEQ ID NO: 62168 - DNA, 20 bp, Artificial Sequence
  MKO10062168_A_mmu-mir-3057
  gRNA
gagattctgcgggatggatt

SEQ ID NO: 62169 - DNA, 20 bp, Artificial Sequence
  MKO10062169_A_mmu-mir-3057
  gRNA
ggagtatattgtcctcccac

SEQ ID NO: 62170 - DNA, 20 bp, Artificial Sequence
  MKO10062170_A_mmu-mir-6913
  gRNA
tgtgacctgggagaccagtc

SEQ ID NO: 62171 - DNA, 20 bp, Artificial Sequence
  MKO10062171_A_mmu-mir-6913
  gRNA
ctctactgatttgtctcctc

SEQ ID NO: 62172 - DNA, 20 bp, Artificial Sequence
  MKO10062172_A_mmu-mir-6913
  gRNA
ctactgatttgtctcctcag

SEQ ID NO: 62173 - DNA, 20 bp, Artificial Sequence
  MKO10062173_A_mmu-mir-6913
  gRNA
caacacctgactggtctccc

SEQ ID NO: 62174 - DNA, 20 bp, Artificial Sequence
  MKO10062174_A_mmu-mir-1191b
  gRNA
cttgggctacatagtgagtc

SEQ ID NO: 62175 - DNA, 20 bp, Artificial Sequence
  MKO10062175_A_mmu-mir-1191b
  gRNA
actcactatgtagcccaagc

SEQ ID NO: 62176 - DNA, 20 bp, Artificial Sequence
  MKO10062176_A_mmu-mir-1191b
  gRNA
gagtctggtgtttttgaagc

SEQ ID NO: 62177 - DNA, 20 bp, Artificial Sequence
  MKO10062177_A_mmu-mir-135a-2
  gRNA
aattttcacaatgtatttca

SEQ ID NO: 62178 - DNA, 20 bp, Artificial Sequence
  MKO10062178_A_mmu-mir-135a-2
  gRNA
agactttattacgatcacat

SEQ ID NO: 62179 - DNA, 20 bp, Artificial Sequence
  MKO10062179_A_mmu-mir-135a-2
  gRNA
aataaagtctcatgtaggga

SEQ ID NO: 62180 - DNA, 20 bp, Artificial Sequence
  MKO10062180_A_mmu-mir-135a-2
  gRNA
gcactagagtgaatttatct

SEQ ID NO: 62181 - DNA, 20 bp, Artificial Sequence
  MKO10062181_A_mmu-mir-1251
  gRNA
ttatcaggccatgtctacac

SEQ ID NO: 62182 - DNA, 20 bp, Artificial Sequence
  MKO10062182_A_mmu-mir-1251
  gRNA
agcaaagcgctctgttcaga

SEQ ID NO: 62183 - DNA, 20 bp, Artificial Sequence
  MKO10062183_A_mmu-mir-1251
  gRNA
ttcagaaggagaagcgcctt

SEQ ID NO: 62184 - DNA, 20 bp, Artificial Sequence
  MKO10062184_A_mmu-mir-1251
  gRNA
ttgctcagccagtgtagaca

SEQ ID NO: 62185 - DNA, 20 bp, Artificial Sequence
  MKO10062185_A_mmu-mir-1931
  gRNA
tgctttaaaattccaatgca

SEQ ID NO: 62186 - DNA, 20 bp, Artificial Sequence
  MKO10062186_A_mmu-mir-1931
  gRNA
caatgcaagggctggtgcga

SEQ ID NO: 62187 - DNA, 20 bp, Artificial Sequence
  MKO10062187_A_mmu-mir-1931
  gRNA
agagttaatgcttctggcct

SEQ ID NO: 62188 - DNA, 20 bp, Artificial Sequence
  MKO10062188_A_mmu-mir-1931
  gRNA
ttaaagcagcttcaattcaa

SEQ ID NO: 62189 - DNA, 20 bp, Artificial Sequence
  MKO10062189_A_mmu-mir-7688
  gRNA
atgagctcacagccaggctc

SEQ ID NO: 62190 - DNA, 20 bp, Artificial Sequence
  MKO10062190_A_mmu-mir-7688
  gRNA
gctaggcataagccagagcc

SEQ ID NO: 62191 - DNA, 20 bp, Artificial Sequence
  MKO10062191_A_mmu-mir-7688
  gRNA
tatttttgtaacagaaagct

SEQ ID NO: 62192 - DNA, 20 bp, Artificial Sequence
  MKO10062192_A_mmu-mir-7688
  gRNA
gatctgatgagctcacagcc

SEQ ID NO: 62193 - DNA, 20 bp, Artificial Sequence
  MKO10062193_A_mmu-mir-331
  gRNA
caggaatgatgcacgggttt

SEQ ID NO: 62194 - DNA, 20 bp, Artificial Sequence
  MKO10062194_A_mmu-mir-331
  gRNA
cacgggtttaggttggttct

SEQ ID NO: 62195 - DNA, 20 bp, Artificial Sequence
  MKO10062195_A_mmu-mir-331
  gRNA
gtttaggttggttctaggat

SEQ ID NO: 62196 - DNA, 20 bp, Artificial Sequence
  MKO10062196_A_mmu-mir-331
  gRNA
tggttctaggataggcccag

SEQ ID NO: 62197 - DNA, 20 bp, Artificial Sequence
  MKO10062197_A_mmu-mir-7211
  gRNA
cagacacaagctcccagcgg

SEQ ID NO: 62198 - DNA, 20 bp, Artificial Sequence
  MKO10062198_A_mmu-mir-7211
  gRNA
acaagctcccagcggtggag

SEQ ID NO: 62199 - DNA, 20 bp, Artificial Sequence
  MKO10062199_A_mmu-mir-7211
  gRNA
tcccagcggtggagtggcag

SEQ ID NO: 62200 - DNA, 20 bp, Artificial Sequence
  MKO10062200_A_mmu-mir-7211
  gRNA
tctgtggagtgactgtaggg

SEQ ID NO: 62201 - DNA, 20 bp, Artificial Sequence
  MKO10062201_A_mmu-mir-3058
  gRNA
aagaggcacccacggctgac

SEQ ID NO: 62202 - DNA, 20 bp, Artificial Sequence
  MKO10062202_A_mmu-mir-3058
  gRNA
aagtagacattcaatcttcc

SEQ ID NO: 62203 - DNA, 20 bp, Artificial Sequence
  MKO10062203_A_mmu-mir-3058
  gRNA
tcaatcttccaggtaagccg

SEQ ID NO: 62204 - DNA, 20 bp, Artificial Sequence
  MKO10062204_A_mmu-mir-3058
  gRNA
gctttcttcctgtcagccgt

SEQ ID NO: 62205 - DNA, 20 bp, Artificial Sequence
  MKO10062205_A_mmu-mir-3966
  gRNA
attaaaaacagttctacagc

SEQ ID NO: 62206 - DNA, 20 bp, Artificial Sequence
  MKO10062206_A_mmu-mir-3059
  gRNA
ccctttcctctctgccccat

SEQ ID NO: 62207 - DNA, 20 bp, Artificial Sequence
  MKO10062207_A_mmu-mir-3059
  gRNA
tgtagctctaactaccctct

SEQ ID NO: 62208 - DNA, 20 bp, Artificial Sequence
  MKO10062208_A_mmu-mir-3059
  gRNA
actaccctctagggaagaga

SEQ ID NO: 62209 - DNA, 20 bp, Artificial Sequence
  MKO10062209_A_mmu-mir-3059
  gRNA
cctatggggcagagaggaaa

SEQ ID NO: 62210 - DNA, 20 bp, Artificial Sequence
  MKO10062210_A_mmu-mir-6411
  gRNA
ctgtatccttgtgaagattc

SEQ ID NO: 62211 - DNA, 20 bp, Artificial Sequence
  MKO10062211_A_mmu-mir-6411
  gRNA
ttcttctcttcaaactagcc

SEQ ID NO: 62212 - DNA, 20 bp, Artificial Sequence
  MKO10062212_A_mmu-mir-6411
  gRNA
gctacagtccacatgcaacc

SEQ ID NO: 62213 - DNA, 20 bp, Artificial Sequence
  MKO10062213_A_mmu-mir-6411
  gRNA
aacattttgcttgattttcc

SEQ ID NO: 62214 - DNA, 20 bp, Artificial Sequence
  MKO10062214_A_mmu-mir-763
  gRNA
ctcagcaaaagacatttcct

SEQ ID NO: 62215 - DNA, 20 bp, Artificial Sequence
  MKO10062215_A_mmu-mir-763
  gRNA
agacatttccttggagttaa

SEQ ID NO: 62216 - DNA, 20 bp, Artificial Sequence
  MKO10062216_A_mmu-mir-763
  gRNA
atttccttggagttaatggc

SEQ ID NO: 62217 - DNA, 20 bp, Artificial Sequence
  MKO10062217_A_mmu-mir-763
  gRNA
ccttggagttaatggctggc

SEQ ID NO: 62218 - DNA, 20 bp, Artificial Sequence
  MKO10062218_A_mmu-mir-6412
  gRNA
actgcctagttagcttgatg

SEQ ID NO: 62219 - DNA, 20 bp, Artificial Sequence
  MKO10062219_A_mmu-mir-6412
  gRNA
tactgcactcctataatccc

SEQ ID NO: 62220 - DNA, 20 bp, Artificial Sequence
  MKO10062220_A_mmu-mir-6412
  gRNA
ctcctataatcccagggtct

SEQ ID NO: 62221 - DNA, 20 bp, Artificial Sequence
  MKO10062221_A_mmu-mir-6412
  gRNA
ctataatcccagggtcttgg

SEQ ID NO: 62222 - DNA, 20 bp, Artificial Sequence
  MKO10062222_A_mmu-mir-8104
  gRNA
ggagttcctcgggctgtctc

SEQ ID NO: 62223 - DNA, 20 bp, Artificial Sequence
  MKO10062223_A_mmu-mir-8104
  gRNA
cctcgggctgtctcaggatg

SEQ ID NO: 62224 - DNA, 20 bp, Artificial Sequence
  MKO10062224_A_mmu-mir-8104
  gRNA
cgggctgtctcaggatgagg

SEQ ID NO: 62225 - DNA, 20 bp, Artificial Sequence
  MKO10062225_A_mmu-mir-8104
  gRNA
aggagacccggcggctgccc

SEQ ID NO: 62226 - DNA, 20 bp, Artificial Sequence
  MKO10062226_A_mmu-let-7i
  gRNA
ggttgtgacattgcccgctg

SEQ ID NO: 62227 - DNA, 20 bp, Artificial Sequence
  MKO10062227_A_mmu-let-7i
  gRNA
ccacaccatggccctggctg

SEQ ID NO: 62228 - DNA, 20 bp, Artificial Sequence
  MKO10062228_A_mmu-let-7i
  gRNA
gagcatcaccagcactagca

SEQ ID NO: 62229 - DNA, 20 bp, Artificial Sequence
  MKO10062229_A_mmu-let-7i
  gRNA
ttgcgcagttatctccacag

SEQ ID NO: 62230 - DNA, 20 bp, Artificial Sequence
  MKO10062230_A_mmu-mir-378d
  gRNA
atgaggatagcggtgcttaa

SEQ ID NO: 62231 - DNA, 20 bp, Artificial Sequence
  MKO10062231_A_mmu-mir-378d
  gRNA
cctaaaaatcacagggatat

SEQ ID NO: 62232 - DNA, 20 bp, Artificial Sequence
  MKO10062232_A_mmu-mir-378d
  gRNA
aaaatcacagggatattgga

SEQ ID NO: 62233 - DNA, 20 bp, Artificial Sequence
  MKO10062233_A_mmu-mir-378d
  gRNA
tcagaaggtttgtgatttgg

SEQ ID NO: 62234 - DNA, 20 bp, Artificial Sequence
  MKO10062234_A_mmu-mir-26a-2
  gRNA
gctactgtggaggctgcggc

SEQ ID NO: 62235 - DNA, 20 bp, Artificial Sequence
  MKO10062235_A_mmu-mir-26a-2
  gRNA
cggctggattcaagtaatcc

SEQ ID NO: 62236 - DNA, 20 bp, Artificial Sequence
  MKO10062236_A_mmu-mir-26a-2
  gRNA
ggattcaagtaatccaggat

SEQ ID NO: 62237 - DNA, 20 bp, Artificial Sequence
  MKO10062237_A_mmu-mir-26a-2
  gRNA
tcttgattacttgtttctgg

SEQ ID NO: 62238 - DNA, 20 bp, Artificial Sequence
  MKO10062238_A_mmu-mir-546
  gRNA
aaactaaacaggatctatca

SEQ ID NO: 62239 - DNA, 20 bp, Artificial Sequence
  MKO10062239_A_mmu-mir-546
  gRNA
ctaaacaggatctatcatgg

SEQ ID NO: 62240 - DNA, 20 bp, Artificial Sequence
  MKO10062240_A_mmu-mir-546
  gRNA
caggatctatcatggtggca

SEQ ID NO: 62241 - DNA, 20 bp, Artificial Sequence
  MKO10062241_A_mmu-mir-546
  gRNA
ttagaagcaaagtgatactg

SEQ ID NO: 62242 - DNA, 20 bp, Artificial Sequence
  MKO10062242_A_mmu-mir-677
  gRNA
gccagatgccgttcctgaga

SEQ ID NO: 62243 - DNA, 20 bp, Artificial Sequence
  MKO10062243_A_mmu-mir-677
  gRNA
cagatgccgttcctgagaag

SEQ ID NO: 62244 - DNA, 20 bp, Artificial Sequence
  MKO10062244_A_mmu-mir-677
  gRNA
cgttcctgagaaggggaaaa

SEQ ID NO: 62245 - DNA, 20 bp, Artificial Sequence
  MKO10062245_A_mmu-mir-677
  gRNA
cagaagctaatcatcactga

SEQ ID NO: 62246 - DNA, 20 bp, Artificial Sequence
  MKO10062246_A_mmu-mir-6914
  gRNA
cctcttaaccctgactcctg

SEQ ID NO: 62247 - DNA, 20 bp, Artificial Sequence
  MKO10062247_A_mmu-mir-6914
  gRNA
cttaaccctgactcctgggg

SEQ ID NO: 62248 - DNA, 20 bp, Artificial Sequence
  MKO10062248_A_mmu-mir-6914
  gRNA
aaccctgactcctggggtgg

SEQ ID NO: 62249 - DNA, 20 bp, Artificial Sequence
  MKO10062249_A_mmu-mir-6914
  gRNA
cctgactcctggggtggtgg

SEQ ID NO: 62250 - DNA, 20 bp, Artificial Sequence
  MKO10062250_A_mmu-mir-6915
  gRNA
tcagagcagatggaggttcg

SEQ ID NO: 62251 - DNA, 20 bp, Artificial Sequence
  MKO10062251_A_mmu-mir-6915
  gRNA
caacttccttcctcgtgccc

SEQ ID NO: 62252 - DNA, 20 bp, Artificial Sequence
  MKO10062252_A_mmu-mir-6915
  gRNA
acgaggaaggaagttggtga

SEQ ID NO: 62253 - DNA, 20 bp, Artificial Sequence
  MKO10062253_A_mmu-mir-6915
  gRNA
ctgggcacgaggaaggaagt

SEQ ID NO: 62254 - DNA, 20 bp, Artificial Sequence
  MKO10062254_A_mmu-mir-8105
  gRNA
actcctaaagcggaggcgac

SEQ ID NO: 62255 - DNA, 20 bp, Artificial Sequence
  MKO10062255_A_mmu-mir-8105
  gRNA
tggcgagacccgaagatcag

SEQ ID NO: 62256 - DNA, 20 bp, Artificial Sequence
  MKO10062256_A_mmu-mir-8105
  gRNA
gagacccgaagatcagaggg

SEQ ID NO: 62257 - DNA, 20 bp, Artificial Sequence
  MKO10062257_A_mmu-mir-8105
  gRNA
gagccccgattcttcgaccc

SEQ ID NO: 62258 - DNA, 20 bp, Artificial Sequence
  MKO10062258_A_mmu-mir-6916
  gRNA
ctcagagggactgtaggaag

SEQ ID NO: 62259 - DNA, 20 bp, Artificial Sequence
  MKO10062259_A_mmu-mir-6916
  gRNA
tcacggggttcttagatgct

SEQ ID NO: 62260 - DNA, 20 bp, Artificial Sequence
  MKO10062260_A_mmu-mir-6916
  gRNA
gaggatggagatgagtcacg

SEQ ID NO: 62261 - DNA, 20 bp, Artificial Sequence
  MKO10062261_A_mmu-mir-6916
  gRNA
ggaggtaatgtgcaggcagg

SEQ ID NO: 62262 - DNA, 20 bp, Artificial Sequence
  MKO10062262_A_mmu-mir-6917
  gRNA
ccctaacagaatctctgtgg

SEQ ID NO: 62263 - DNA, 20 bp, Artificial Sequence
  MKO10062263_A_mmu-mir-6917
  gRNA
gtggtgggaagagaagtgac

SEQ ID NO: 62264 - DNA, 20 bp, Artificial Sequence
  MKO10062264_A_mmu-mir-6917
  gRNA
gattggtaggaaggtgtgga

SEQ ID NO: 62265 - DNA, 20 bp, Artificial Sequence
  MKO10062265_A_mmu-mir-6917
  gRNA
aagtgacaggctgaagactg

SEQ ID NO: 62266 - DNA, 20 bp, Artificial Sequence
  MKO10062266_A_mmu-mir-3060
  gRNA
ctggtgatgtcctgggcgtg

SEQ ID NO: 62267 - DNA, 20 bp, Artificial Sequence
  MKO10062267_A_mmu-mir-3060
  gRNA
atgtcctgggcgtgggggtg

SEQ ID NO: 62268 - DNA, 20 bp, Artificial Sequence
  MKO10062268_A_mmu-mir-3060
  gRNA
tggggagtgcttcgtgcttc

SEQ ID NO: 62269 - DNA, 20 bp, Artificial Sequence
  MKO10062269_A_mmu-mir-3060
  gRNA
cactccccacccccacgccc

SEQ ID NO: 62270 - DNA, 20 bp, Artificial Sequence
  MKO10062270_A_mmu-mir-6918
  gRNA
aatgcaggattcttgtgctg

SEQ ID NO: 62271 - DNA, 20 bp, Artificial Sequence
  MKO10062271_A_mmu-mir-6918
  gRNA
caggattcttgtgctgagga

SEQ ID NO: 62272 - DNA, 20 bp, Artificial Sequence
  MKO10062272_A_mmu-mir-6918
  gRNA
cttgtgctgaggacgggatt

SEQ ID NO: 62273 - DNA, 20 bp, Artificial Sequence
  MKO10062273_A_mmu-mir-6918
  gRNA
gtaggctgtgagaagggcac

SEQ ID NO: 62274 - DNA, 20 bp, Artificial Sequence
  MKO10062274_A_mmu-mir-7651
  gRNA
tgtgataatctgtctcagtt

SEQ ID NO: 62275 - DNA, 20 bp, Artificial Sequence
  MKO10062275_A_mmu-mir-7651
  gRNA
tatcacaatgcatctcaggc

SEQ ID NO: 62276 - DNA, 20 bp, Artificial Sequence
  MKO10062276_A_mmu-mir-7651
  gRNA
agattatcacaatgcatctc

SEQ ID NO: 62277 - DNA, 20 bp, Artificial Sequence
  MKO10062277_A_mmu-mir-7651
  gRNA
ggtttttttccccttgagat

SEQ ID NO: 62278 - DNA, 20 bp, Artificial Sequence
  MKO10062278_A_mmu-mir-1933
  gRNA
aatagtcacactgatggtcc

SEQ ID NO: 62279 - DNA, 20 bp, Artificial Sequence
  MKO10062279_A_mmu-mir-1933
  gRNA
tggtcctggttaaactaaac

SEQ ID NO: 62280 - DNA, 20 bp, Artificial Sequence
  MKO10062280_A_mmu-mir-1933
  gRNA
aagaccgaacaccatgactg

SEQ ID NO: 62281 - DNA, 20 bp, Artificial Sequence
  MKO10062281_A_mmu-mir-1933
  gRNA
aacaccatgactgtgggatc

SEQ ID NO: 62282 - DNA, 20 bp, Artificial Sequence
  MKO10062282_A_mmu-mir-6372
  gRNA
actacctctttgaaaagaac

SEQ ID NO: 62283 - DNA, 20 bp, Artificial Sequence
  MKO10062283_A_mmu-mir-6372
  gRNA
tacctctttgaaaagaactg

SEQ ID NO: 62284 - DNA, 20 bp, Artificial Sequence
  MKO10062284_A_mmu-mir-6372
  gRNA
aaacttccagccttctatcc

SEQ ID NO: 62285 - DNA, 20 bp, Artificial Sequence
  MKO10062285_A_mmu-mir-6372
  gRNA
aaactgcctggatagaaggc

SEQ ID NO: 62286 - DNA, 20 bp, Artificial Sequence
  MKO10062286_A_mmu-mir-216b
  gRNA
gtaattgcacattggcagac

SEQ ID NO: 62287 - DNA, 20 bp, Artificial Sequence
  MKO10062287_A_mmu-mir-216b
  gRNA
gcagactgggaaatctctgc

SEQ ID NO: 62288 - DNA, 20 bp, Artificial Sequence
  MKO10062288_A_mmu-mir-216b
  gRNA
aatctctacaggtaagtgtg

SEQ ID NO: 62289 - DNA, 20 bp, Artificial Sequence
  MKO10062289_A_mmu-mir-216b
  gRNA
tcagactgaagaatctctac

SEQ ID NO: 62290 - DNA, 20 bp, Artificial Sequence
  MKO10062290_A_mmu-mir-216c
  gRNA
gcagactgggaaatctctgc

SEQ ID NO: 62291 - DNA, 20 bp, Artificial Sequence
  MKO10062291_A_mmu-mir-216c
  gRNA
aatctctacaggtaagtgtg

SEQ ID NO: 62292 - DNA, 20 bp, Artificial Sequence
  MKO10062292_A_mmu-mir-216c
  gRNA
tcagactgaagaatctctac

SEQ ID NO: 62293 - DNA, 20 bp, Artificial Sequence
  MKO10062293_A_mmu-mir-216a
  gRNA
tgagttggtttaatctcagc

SEQ ID NO: 62294 - DNA, 20 bp, Artificial Sequence
  MKO10062294_A_mmu-mir-216a
  gRNA
gtccctatcattcctcacag

SEQ ID NO: 62295 - DNA, 20 bp, Artificial Sequence
  MKO10062295_A_mmu-mir-216a
  gRNA
tcattcctcacagtggtctc

SEQ ID NO: 62296 - DNA, 20 bp, Artificial Sequence
  MKO10062296_A_mmu-mir-216a
  gRNA
taatcccagagaccactgtg

SEQ ID NO: 62297 - DNA, 20 bp, Artificial Sequence
  MKO10062297_A_mmu-mir-217
  gRNA
gatgttgcagatactgcatc

SEQ ID NO: 62298 - DNA, 20 bp, Artificial Sequence
  MKO10062298_A_mmu-mir-217
  gRNA
atactgcatcaggaactgac

SEQ ID NO: 62299 - DNA, 20 bp, Artificial Sequence
  MKO10062299_A_mmu-mir-217
  gRNA
caatgcattaggaactgatg

SEQ ID NO: 62300 - DNA, 20 bp, Artificial Sequence
  MKO10062300_A_mmu-mir-217
  gRNA
ggcaatgcattaggaactga

SEQ ID NO: 62301 - DNA, 20 bp, Artificial Sequence
  MKO10062301_A_mmu-mir-218-2
  gRNA
ttgactctgaccagttgccg

SEQ ID NO: 62302 - DNA, 20 bp, Artificial Sequence
  MKO10062302_A_mmu-mir-218-2
  gRNA
ttgtgcttgatctaaccatg

SEQ ID NO: 62303 - DNA, 20 bp, Artificial Sequence
  MKO10062303_A_mmu-mir-218-2
  gRNA
tgcttgatctaaccatgtgg

SEQ ID NO: 62304 - DNA, 20 bp, Artificial Sequence
  MKO10062304_A_mmu-mir-218-2
  gRNA
catggttctgtcaagcaccg

SEQ ID NO: 62305 - DNA, 20 bp, Artificial Sequence
  MKO10062305_A_mmu-mir-103-1
  gRNA
ggaagttttcttactgccct

SEQ ID NO: 62306 - DNA, 20 bp, Artificial Sequence
  MKO10062306_A_mmu-mir-103-1
  gRNA
tggatcaagcagcattgtac

SEQ ID NO: 62307 - DNA, 20 bp, Artificial Sequence
  MKO10062307_A_mmu-mir-103-1
  gRNA
cagcactgtaaagaagccga

SEQ ID NO: 62308 - DNA, 20 bp, Artificial Sequence
  MKO10062308_A_mmu-mir-103-1
  gRNA
tgcttgatccatatgcaaca

SEQ ID NO: 62309 - DNA, 20 bp, Artificial Sequence
  MKO10062309_A_mmu-mir-146a
  gRNA
gctgaagaactgaatttcac

SEQ ID NO: 62310 - DNA, 20 bp, Artificial Sequence
  MKO10062310_A_mmu-mir-146a
  gRNA
tctgacattgatataaccca

SEQ ID NO: 62311 - DNA, 20 bp, Artificial Sequence
  MKO10062311_A_mmu-mir-146a
  gRNA
gaattcagttctcagagctg

SEQ ID NO: 62312 - DNA, 20 bp, Artificial Sequence
  MKO10062312_A_mmu-mir-146a
  gRNA
tgaaattcagttcttcagct

SEQ ID NO: 62313 - DNA, 20 bp, Artificial Sequence
  MKO10062313_A_mmu-mir-8100
  gRNA
aagtaaacaatgactgtccc

SEQ ID NO: 62314 - DNA, 20 bp, Artificial Sequence
  MKO10062314_A_mmu-mir-8100
  gRNA
aaacaatgactgtcccagga

SEQ ID NO: 62315 - DNA, 20 bp, Artificial Sequence
  MKO10062315_A_mmu-mir-8100
  gRNA
actgtcccaggaaggaggaa

SEQ ID NO: 62316 - DNA, 20 bp, Artificial Sequence
  MKO10062316_A_mmu-mir-8100
  gRNA
gccccttcctttcccccctc

SEQ ID NO: 62317 - DNA, 20 bp, Artificial Sequence
  MKO10062317_A_mmu-mir-7239
  gRNA
caagccacaatggctctgtc

SEQ ID NO: 62318 - DNA, 20 bp, Artificial Sequence
  MKO10062318_A_mmu-mir-7239
  gRNA
ccacaatggctctgtcaggc

SEQ ID NO: 62319 - DNA, 20 bp, Artificial Sequence
  MKO10062319_A_mmu-mir-7239
  gRNA
agaaaagggctttgtcagga

SEQ ID NO: 62320 - DNA, 20 bp, Artificial Sequence
  MKO10062320_A_mmu-mir-7239
  gRNA
gagcagaaaagggctttgtc

SEQ ID NO: 62321 - DNA, 20 bp, Artificial Sequence
  MKO10062321_A_mmu-mir-340
  gRNA
tttctaaaaccaattgtact

SEQ ID NO: 62322 - DNA, 20 bp, Artificial Sequence
  MKO10062322_A_mmu-mir-340
  gRNA
agttactttatagccatacc

SEQ ID NO: 62323 - DNA, 20 bp, Artificial Sequence
  MKO10062323_A_mmu-mir-340
  gRNA
tggctataaagtaactgaga

SEQ ID NO: 62324 - DNA, 20 bp, Artificial Sequence
  MKO10062324_A_mmu-mir-340
  gRNA
tggtgttaagataccaggta

SEQ ID NO: 62325 - DNA, 20 bp, Artificial Sequence
  MKO10062325_A_mmu-mir-6919
  gRNA
gcctctctgcggtaggccac

SEQ ID NO: 62326 - DNA, 20 bp, Artificial Sequence
  MKO10062326_A_mmu-mir-6919
  gRNA
ctgcggtaggccactggagg

SEQ ID NO: 62327 - DNA, 20 bp, Artificial Sequence
  MKO10062327_A_mmu-mir-6919
  gRNA
gcctctgaggctcctcctcc

SEQ ID NO: 62328 - DNA, 20 bp, Artificial Sequence
  MKO10062328_A_mmu-mir-6919
  gRNA
ggctcctcctcctggcccac

SEQ ID NO: 62329 - DNA, 20 bp, Artificial Sequence
  MKO10062329_A_mmu-mir-804
  gRNA
gcaccgccaccacatcttcc

SEQ ID NO: 62330 - DNA, 20 bp, Artificial Sequence
  MKO10062330_A_mmu-mir-804
  gRNA
caggtgaggaacaactcaca

SEQ ID NO: 62331 - DNA, 20 bp, Artificial Sequence
  MKO10062331_A_mmu-mir-804
  gRNA
aatgtcaggaaacagtctac

SEQ ID NO: 62332 - DNA, 20 bp, Artificial Sequence
  MKO10062332_A_mmu-mir-804
  gRNA
aacctcaaagatggatgtgt

SEQ ID NO: 62333 - DNA, 20 bp, Artificial Sequence
  MKO10062333_A_mmu-mir-3061
  gRNA
ccttgatatattgtgtactg

SEQ ID NO: 62334 - DNA, 20 bp, Artificial Sequence
  MKO10062334_A_mmu-mir-3061
  gRNA
ttgatatattgtgtactgtg

SEQ ID NO: 62335 - DNA, 20 bp, Artificial Sequence
  MKO10062335_A_mmu-mir-3061
  gRNA
tattgtgtactgtggggcag

SEQ ID NO: 62336 - DNA, 20 bp, Artificial Sequence
  MKO10062336_A_mmu-mir-3061
  gRNA
gtggggcagtgggccgtgaa

SEQ ID NO: 62337 - DNA, 20 bp, Artificial Sequence
  MKO10062337_A_mmu-mir-6920
  gRNA
atggaaagactgcttgtaga

SEQ ID NO: 62338 - DNA, 20 bp, Artificial Sequence
  MKO10062338_A_mmu-mir-6920
  gRNA
aagggcagtgtatatagaca

SEQ ID NO: 62339 - DNA, 20 bp, Artificial Sequence
  MKO10062339_A_mmu-mir-6920
  gRNA
tcaggctaggcaatggaaaa

SEQ ID NO: 62340 - DNA, 20 bp, Artificial Sequence
  MKO10062340_A_mmu-mir-6920
  gRNA
tggcatctcaggctaggcaa

SEQ ID NO: 62341 - DNA, 20 bp, Artificial Sequence
  MKO10062341_A_mmu-mir-7671
  gRNA
tcctggaaagggagggaagc

SEQ ID NO: 62342 - DNA, 20 bp, Artificial Sequence
  MKO10062342_A_mmu-mir-7671
  gRNA
ctccgctctggctagcttcc

SEQ ID NO: 62343 - DNA, 20 bp, Artificial Sequence
  MKO10062343_A_mmu-mir-7671
  gRNA
gtgagttgcaggctccgctc

SEQ ID NO: 62344 - DNA, 20 bp, Artificial Sequence
  MKO10062344_A_mmu-mir-7671
  gRNA
gcccgcttccctccctttcc

SEQ ID NO: 62345 - DNA, 20 bp, Artificial Sequence
  MKO10062345_A_mmu-mir-7652
  gRNA
caggcatgtgccaccatgtc

SEQ ID NO: 62346 - DNA, 20 bp, Artificial Sequence
  MKO10062346_A_mmu-mir-7652
  gRNA
caccatgtctggctttcctg

SEQ ID NO: 62347 - DNA, 20 bp, Artificial Sequence
  MKO10062347_A_mmu-mir-7652
  gRNA
tctggctttcctgtggcttc

SEQ ID NO: 62348 - DNA, 20 bp, Artificial Sequence
  MKO10062348_A_mmu-mir-7652
  gRNA
cacaggaaagccagacatgg

SEQ ID NO: 62349 - DNA, 20 bp, Artificial Sequence
  MKO10062349_A_mmu-mir-6921
  gRNA
gtaggaatacctgagaggca

SEQ ID NO: 62350 - DNA, 20 bp, Artificial Sequence
  MKO10062350_A_mmu-mir-6921
  gRNA
gtgactactccttgcctctc

SEQ ID NO: 62351 - DNA, 20 bp, Artificial Sequence
  MKO10062351_A_mmu-mir-6921
  gRNA
ttctcacactgaggggcatg

SEQ ID NO: 62352 - DNA, 20 bp, Artificial Sequence
  MKO10062352_A_mmu-mir-6921
  gRNA
cccactgttctcacactgag

SEQ ID NO: 62353 - DNA, 20 bp, Artificial Sequence
  MKO10062353_A_mmu-mir-6922
  gRNA
ccagcggatccactgtgaga

SEQ ID NO: 62354 - DNA, 20 bp, Artificial Sequence
  MKO10062354_A_mmu-mir-6922
  gRNA
gggtgagcagaacagaggtt

SEQ ID NO: 62355 - DNA, 20 bp, Artificial Sequence
  MKO10062355_A_mmu-mir-6922
  gRNA
tctgctcacccttctcacag

SEQ ID NO: 62356 - DNA, 20 bp, Artificial Sequence
  MKO10062356_A_mmu-mir-6922
  gRNA
tgtgggaggggactgtagag

SEQ ID NO: 62357 - DNA, 20 bp, Artificial Sequence
  MKO10062357_A_mmu-mir-5100
  gRNA
cggtcactgcggtgggaggg

SEQ ID NO: 62358 - DNA, 20 bp, Artificial Sequence
  MKO10062358_A_mmu-mir-5100
  gRNA
gagcagagttcgaatcccag

SEQ ID NO: 62359 - DNA, 20 bp, Artificial Sequence
  MKO10062359_A_mmu-mir-5100
  gRNA
agcggtgcctcttcccgact

SEQ ID NO: 62360 - DNA, 20 bp, Artificial Sequence
  MKO10062360_A_mmu-mir-5100
  gRNA
gcaatacccaagtcgggaag

SEQ ID NO: 62361 - DNA, 20 bp, Artificial Sequence
  MKO10062361_A_mmu-mir-744
  gRNA
gtcaggaccgagtaaggttg

SEQ ID NO: 62362 - DNA, 20 bp, Artificial Sequence
  MKO10062362_A_mmu-mir-744
  gRNA
ccgagtaaggttgaggttag

SEQ ID NO: 62363 - DNA, 20 bp, Artificial Sequence
  MKO10062363_A_mmu-mir-744
  gRNA
acagcatgtgtgtggtttcc

SEQ ID NO: 62364 - DNA, 20 bp, Artificial Sequence
  MKO10062364_A_mmu-mir-744
  gRNA
ccactaacctcaaccttact

SEQ ID NO: 62365 - DNA, 20 bp, Artificial Sequence
  MKO10062365_A_mmu-mir-6923
  gRNA
ctgcacacccaggtgagggc

SEQ ID NO: 62366 - DNA, 20 bp, Artificial Sequence
  MKO10062366_A_mmu-mir-6923
  gRNA
ccaggtgagggcaggaggat

SEQ ID NO: 62367 - DNA, 20 bp, Artificial Sequence
  MKO10062367_A_mmu-mir-6923
  gRNA
aggtgagggcaggaggattg

SEQ ID NO: 62368 - DNA, 20 bp, Artificial Sequence
  MKO10062368_A_mmu-mir-6923
  gRNA
ggcaggaggattggggtgtg

SEQ ID NO: 62369 - DNA, 20 bp, Artificial Sequence
  MKO10062369_A_mmu-mir-6406
  gRNA
ctggcctttcccgcccaacc

SEQ ID NO: 62370 - DNA, 20 bp, Artificial Sequence
  MKO10062370_A_mmu-mir-6406
  gRNA
gcctttcccgcccaacctgg

SEQ ID NO: 62371 - DNA, 20 bp, Artificial Sequence
  MKO10062371_A_mmu-mir-6406
  gRNA
cacccacattccgcgacctc

SEQ ID NO: 62372 - DNA, 20 bp, Artificial Sequence
  MKO10062372_A_mmu-mir-6406
  gRNA
tgtagatccagctccacatc

SEQ ID NO: 62373 - DNA, 20 bp, Artificial Sequence
  MKO10062373_A_mmu-mir-3062
  gRNA
actgatattcgggcctgcag

SEQ ID NO: 62374 - DNA, 20 bp, Artificial Sequence
  MKO10062374_A_mmu-mir-3062
  gRNA
tgcagtggggagacccatga

SEQ ID NO: 62375 - DNA, 20 bp, Artificial Sequence
  MKO10062375_A_mmu-mir-3062
  gRNA
agaaagtgtgtccccgtgag

SEQ ID NO: 62376 - DNA, 20 bp, Artificial Sequence
  MKO10062376_A_mmu-mir-3062
  gRNA
ggtatttgctgacaggctca

SEQ ID NO: 62377 - DNA, 20 bp, Artificial Sequence
  MKO10062377_A_mmu-mir-467f
  gRNA
attccaaaaaagctgtgtgt

SEQ ID NO: 62378 - DNA, 20 bp, Artificial Sequence
  MKO10062378_A_mmu-mir-467f
  gRNA
cccgttcgatttctgggtac

SEQ ID NO: 62379 - DNA, 20 bp, Artificial Sequence
  MKO10062379_A_mmu-mir-467f
  gRNA
acgggggtgggtgtgtgtgt

SEQ ID NO: 62380 - DNA, 20 bp, Artificial Sequence
  MKO10062380_A_mmu-mir-467f
  gRNA
acccacccccgttcgatttc

SEQ ID NO: 62381 - DNA, 20 bp, Artificial Sequence
  MKO10062381_A_mmu-mir-1934
  gRNA
tccgagctgggccttctttc

SEQ ID NO: 62382 - DNA, 20 bp, Artificial Sequence
  MKO10062382_A_mmu-mir-1934
  gRNA
tccagatgttaagaggatga

SEQ ID NO: 62383 - DNA, 20 bp, Artificial Sequence
  MKO10062383_A_mmu-mir-1934
  gRNA
agatgttaagaggatgacgg

SEQ ID NO: 62384 - DNA, 20 bp, Artificial Sequence
  MKO10062384_A_mmu-mir-1934
  gRNA
atgttaagaggatgacggtg

SEQ ID NO: 62385 - DNA, 20 bp, Artificial Sequence
  MKO10062385_A_mmu-mir-6924
  gRNA
gccaatcgtagcctgaaggg

SEQ ID NO: 62386 - DNA, 20 bp, Artificial Sequence
  MKO10062386_A_mmu-mir-6924
  gRNA
caatcgtagcctgaagggtg

SEQ ID NO: 62387 - DNA, 20 bp, Artificial Sequence
  MKO10062387_A_mmu-mir-6924
  gRNA
agcctgaagggtggggatta

SEQ ID NO: 62388 - DNA, 20 bp, Artificial Sequence
  MKO10062388_A_mmu-mir-6924
  gRNA
ctccttaatccccacccttc

SEQ ID NO: 62389 - DNA, 20 bp, Artificial Sequence
  MKO10062389_A_mmu-mir-324
  gRNA
cctcgcatcccctagggcat

SEQ ID NO: 62390 - DNA, 20 bp, Artificial Sequence
  MKO10062390_A_mmu-mir-324
  gRNA
agctggagacccactgcccc

SEQ ID NO: 62391 - DNA, 20 bp, Artificial Sequence
  MKO10062391_A_mmu-mir-324
  gRNA
cactgccccaggtgctgctg

SEQ ID NO: 62392 - DNA, 20 bp, Artificial Sequence
  MKO10062392_A_mmu-mir-324
  gRNA
atgccctaggggatgcgagg

SEQ ID NO: 62393 - DNA, 20 bp, Artificial Sequence
  MKO10062393_A_mmu-mir-497b
  gRNA
cccgccccagcagcacactg

SEQ ID NO: 62394 - DNA, 20 bp, Artificial Sequence
  MKO10062394_A_mmu-mir-497b
  gRNA
gcagcacactgtggtttgta

SEQ ID NO: 62395 - DNA, 20 bp, Artificial Sequence
  MKO10062395_A_mmu-mir-497b
  gRNA
gccacgtccaaaccacactg

SEQ ID NO: 62396 - DNA, 20 bp, Artificial Sequence
  MKO10062396_A_mmu-mir-497b
  gRNA
gtggtgttagagcgagggta

SEQ ID NO: 62397 - DNA, 20 bp, Artificial Sequence
  MKO10062397_A_mmu-mir-497
  gRNA
cccgccccagcagcacactg

SEQ ID NO: 62398 - DNA, 20 bp, Artificial Sequence
  MKO10062398_A_mmu-mir-497
  gRNA
gcagcacactgtggtttgta

SEQ ID NO: 62399 - DNA, 20 bp, Artificial Sequence
  MKO10062399_A_mmu-mir-497
  gRNA
gccacgtccaaaccacactg

SEQ ID NO: 62400 - DNA, 20 bp, Artificial Sequence
  MKO10062400_A_mmu-mir-497
  gRNA
gtggtgttagagcgagggta

SEQ ID NO: 62401 - DNA, 20 bp, Artificial Sequence
  MKO10062401_A_mmu-mir-195a
  gRNA
ctctagcagcacagaaatat

SEQ ID NO: 62402 - DNA, 20 bp, Artificial Sequence
  MKO10062402_A_mmu-mir-195a
  gRNA
gcagcacagaaatattggca

SEQ ID NO: 62403 - DNA, 20 bp, Artificial Sequence
  MKO10062403_A_mmu-mir-195a
  gRNA
agcacagaaatattggcatg

SEQ ID NO: 62404 - DNA, 20 bp, Artificial Sequence
  MKO10062404_A_mmu-mir-195a
  gRNA
ggaagtgagtctgccaatat

SEQ ID NO: 62405 - DNA, 20 bp, Artificial Sequence
  MKO10062405_A_mmu-mir-7115
  gRNA
caccatgtggtcgggggttg

SEQ ID NO: 62406 - DNA, 20 bp, Artificial Sequence
  MKO10062406_A_mmu-mir-7115
  gRNA
ctgtgtcacccaaagccact

SEQ ID NO: 62407 - DNA, 20 bp, Artificial Sequence
  MKO10062407_A_mmu-mir-7115
  gRNA
gcaggggaccaagtggcttt

SEQ ID NO: 62408 - DNA, 20 bp, Artificial Sequence
  MKO10062408_A_mmu-mir-7115
  gRNA
tgtgggggcaggggaccaag

SEQ ID NO: 62409 - DNA, 20 bp, Artificial Sequence
  MKO10062409_A_mmu-mir-6925
  gRNA
agcctgaggaagagaaggct

SEQ ID NO: 62410 - DNA, 20 bp, Artificial Sequence
  MKO10062410_A_mmu-mir-6925
  gRNA
gtccaagccttctcttcctc

SEQ ID NO: 62411 - DNA, 20 bp, Artificial Sequence
  MKO10062411_A_mmu-mir-6925
  gRNA
gataaaaggggacggtaatc

SEQ ID NO: 62412 - DNA, 20 bp, Artificial Sequence
  MKO10062412_A_mmu-mir-6925
  gRNA
tgattgctgagggataaaag

SEQ ID NO: 62413 - DNA, 20 bp, Artificial Sequence
  MKO10062413_A_mmu-mir-6338
  gRNA
gatgcctggctccagtatcc

SEQ ID NO: 62414 - DNA, 20 bp, Artificial Sequence
  MKO10062414_A_mmu-mir-6338
  gRNA
acatgttaaatgaaagtaga

SEQ ID NO: 62415 - DNA, 20 bp, Artificial Sequence
  MKO10062415_A_mmu-mir-6338
  gRNA
gaagggagaatgtatgatgc

SEQ ID NO: 62416 - DNA, 20 bp, Artificial Sequence
  MKO10062416_A_mmu-mir-6338
  gRNA
agggagaatgtatgatgcag

SEQ ID NO: 62417 - DNA, 20 bp, Artificial Sequence
  MKO10062417_A_mmu-mir-6926
  gRNA
tcccactatggagacaggga

SEQ ID NO: 62418 - DNA, 20 bp, Artificial Sequence
  MKO10062418_A_mmu-mir-6926
  gRNA
agggatggtgaatttagctg

SEQ ID NO: 62419 - DNA, 20 bp, Artificial Sequence
  MKO10062419_A_mmu-mir-6926
  gRNA
cgggtcagtggggtgaggga

SEQ ID NO: 62420 - DNA, 20 bp, Artificial Sequence
  MKO10062420_A_mmu-mir-6926
  gRNA
cagggtcccactatggagac

SEQ ID NO: 62421 - DNA, 20 bp, Artificial Sequence
  MKO10062421_A_mmu-mir-212
  gRNA
tccccgcccgggcagcgcgc

SEQ ID NO: 62422 - DNA, 20 bp, Artificial Sequence
  MKO10062422_A_mmu-mir-212
  gRNA
gctctagactgcttactgcc

SEQ ID NO: 62423 - DNA, 20 bp, Artificial Sequence
  MKO10062423_A_mmu-mir-212
  gRNA
tcagtaacagtctccagtca

SEQ ID NO: 62424 - DNA, 20 bp, Artificial Sequence
  MKO10062424_A_mmu-mir-212
  gRNA
cagtcacggccaccgacgcc

SEQ ID NO: 62425 - DNA, 20 bp, Artificial Sequence
  MKO10062425_A_mmu-mir-132
  gRNA
ccgcgtctccagggcaaccg

SEQ ID NO: 62426 - DNA, 20 bp, Artificial Sequence
  MKO10062426_A_mmu-mir-132
  gRNA
gtggctttcgattgttactg

SEQ ID NO: 62427 - DNA, 20 bp, Artificial Sequence
  MKO10062427_A_mmu-mir-132
  gRNA
attgttactgtgggaaccgg

SEQ ID NO: 62428 - DNA, 20 bp, Artificial Sequence
  MKO10062428_A_mmu-mir-132
  gRNA
gaggtaacagtctacagcca

SEQ ID NO: 62429 - DNA, 20 bp, Artificial Sequence
  MKO10062429_A_mmu-mir-22
  gRNA
gagccgcagtagttcttcag

SEQ ID NO: 62430 - DNA, 20 bp, Artificial Sequence
  MKO10062430_A_mmu-mir-22
  gRNA
gaactgttgccctctgcccc

SEQ ID NO: 62431 - DNA, 20 bp, Artificial Sequence
  MKO10062431_A_mmu-mir-22
  gRNA
agaactactgcggctcagcc

SEQ ID NO: 62432 - DNA, 20 bp, Artificial Sequence
  MKO10062432_A_mmu-mir-22
  gRNA
ttgccactgaagaactactg

SEQ ID NO: 62433 - DNA, 20 bp, Artificial Sequence
  MKO10062433_A_mmu-mir-3971
  gRNA
gccagggatctgggcttggc

SEQ ID NO: 62434 - DNA, 20 bp, Artificial Sequence
  MKO10062434_A_mmu-mir-3971
  gRNA
agggatctgggcttggcagg

SEQ ID NO: 62435 - DNA, 20 bp, Artificial Sequence
  MKO10062435_A_mmu-mir-3971
  gRNA
tctgggcttggcaggtggaa

SEQ ID NO: 62436 - DNA, 20 bp, Artificial Sequence
  MKO10062436_A_mmu-mir-3971
  gRNA
ttggcaggtggaatgggagg

SEQ ID NO: 62437 - DNA, 20 bp, Artificial Sequence
  MKO10062437_A_mmu-mir-423
  gRNA
gagaaactcaagcgcggggt

SEQ ID NO: 62438 - DNA, 20 bp, Artificial Sequence
  MKO10062438_A_mmu-mir-423
  gRNA
gggtaggaagcaagactgag

SEQ ID NO: 62439 - DNA, 20 bp, Artificial Sequence
  MKO10062439_A_mmu-mir-423
  gRNA
ttttccaaaagctcggtctg

SEQ ID NO: 62440 - DNA, 20 bp, Artificial Sequence
  MKO10062440_A_mmu-mir-423
  gRNA
ataaaggaagttaggctgag

SEQ ID NO: 62441 - DNA, 20 bp, Artificial Sequence
  MKO10062441_A_mmu-mir-144
  gRNA
gtatagatgatgtactagtc

SEQ ID NO: 62442 - DNA, 20 bp, Artificial Sequence
  MKO10062442_A_mmu-mir-144
  gRNA
atatgatgatatcccagcca

SEQ ID NO: 62443 - DNA, 20 bp, Artificial Sequence
  MKO10062443_A_mmu-mir-144
  gRNA
tatcccagccaaggtcctgg

SEQ ID NO: 62444 - DNA, 20 bp, Artificial Sequence
  MKO10062444_A_mmu-mir-144
  gRNA
tgatatcccagccaaggtcc

SEQ ID NO: 62445 - DNA, 20 bp, Artificial Sequence
  MKO10062445_A_mmu-mir-451b
  gRNA
acagctgtggcacttgggaa

SEQ ID NO: 62446 - DNA, 20 bp, Artificial Sequence
  MKO10062446_A_mmu-mir-451b
  gRNA
tgtggcacttgggaatggcg

SEQ ID NO: 62447 - DNA, 20 bp, Artificial Sequence
  MKO10062447_A_mmu-mir-451b
  gRNA
accattactgagtttagtaa

SEQ ID NO: 62448 - DNA, 20 bp, Artificial Sequence
  MKO10062448_A_mmu-mir-451b
  gRNA
actgagtttagtaatggtaa

SEQ ID NO: 62449 - DNA, 20 bp, Artificial Sequence
  MKO10062449_A_mmu-mir-451a
  gRNA
acagctgtggcacttgggaa

SEQ ID NO: 62450 - DNA, 20 bp, Artificial Sequence
  MKO10062450_A_mmu-mir-451a
  gRNA
tgtggcacttgggaatggcg

SEQ ID NO: 62451 - DNA, 20 bp, Artificial Sequence
  MKO10062451_A_mmu-mir-451a
  gRNA
accattactgagtttagtaa

SEQ ID NO: 62452 - DNA, 20 bp, Artificial Sequence
  MKO10062452_A_mmu-mir-451a
  gRNA
actgagtttagtaatggtaa

SEQ ID NO: 62453 - DNA, 20 bp, Artificial Sequence
  MKO10062453_A_mmu-mir-7653
  gRNA
ggaggagacggcttaagggg

SEQ ID NO: 62454 - DNA, 20 bp, Artificial Sequence
  MKO10062454_A_mmu-mir-7653
  gRNA
cggacagacagacggcagga

SEQ ID NO: 62455 - DNA, 20 bp, Artificial Sequence
  MKO10062455_A_mmu-mir-7653
  gRNA
ccctactgttccaccccgcc

SEQ ID NO: 62456 - DNA, 20 bp, Artificial Sequence
  MKO10062456_A_mmu-mir-7653
  gRNA
gccaggcggggtggaacagt

SEQ ID NO: 62457 - DNA, 20 bp, Artificial Sequence
  MKO10062457_A_mmu-mir-193a
  gRNA
gacggacgggagctgagagc

SEQ ID NO: 62458 - DNA, 20 bp, Artificial Sequence
  MKO10062458_A_mmu-mir-193a
  gRNA
agctgagagctgggtctttg

SEQ ID NO: 62459 - DNA, 20 bp, Artificial Sequence
  MKO10062459_A_mmu-mir-193a
  gRNA
gatgagagtgtcagttcaac

SEQ ID NO: 62460 - DNA, 20 bp, Artificial Sequence
  MKO10062460_A_mmu-mir-193a
  gRNA
gcctacaaagtcccagtcct

SEQ ID NO: 62461 - DNA, 20 bp, Artificial Sequence
  MKO10062461_A_mmu-mir-365-2
  gRNA
ccttacttggagagtgatca

SEQ ID NO: 62462 - DNA, 20 bp, Artificial Sequence
  MKO10062462_A_mmu-mir-365-2
  gRNA
caaggacagcaagaaaaatg

SEQ ID NO: 62463 - DNA, 20 bp, Artificial Sequence
  MKO10062463_A_mmu-mir-365-2
  gRNA
aagaaaaatgagggactttc

SEQ ID NO: 62464 - DNA, 20 bp, Artificial Sequence
  MKO10062464_A_mmu-mir-365-2
  gRNA
aggggcattatgactgagtc

SEQ ID NO: 62465 - DNA, 20 bp, Artificial Sequence
  MKO10062465_A_mmu-mir-7679
  gRNA
tactaagctggttggtaccc

SEQ ID NO: 62466 - DNA, 20 bp, Artificial Sequence
  MKO10062466_A_mmu-mir-7679
  gRNA
gaatctcaaatcagggatcc

SEQ ID NO: 62467 - DNA, 20 bp, Artificial Sequence
  MKO10062467_A_mmu-mir-7679
  gRNA
ttcttactgtcaggatccca

SEQ ID NO: 62468 - DNA, 20 bp, Artificial Sequence
  MKO10062468_A_mmu-mir-7679
  gRNA
aactgtagcaggctggcacc

SEQ ID NO: 62469 - DNA, 20 bp, Artificial Sequence
  MKO10062469_A_mmu-mir-5110
  gRNA
tgaggcccactcagggcaag

SEQ ID NO: 62470 - DNA, 20 bp, Artificial Sequence
  MKO10062470_A_mmu-mir-5110
  gRNA
atctctgccactactggaca

SEQ ID NO: 62471 - DNA, 20 bp, Artificial Sequence
  MKO10062471_A_mmu-mir-5110
  gRNA
gatgtcatctctgccactac

SEQ ID NO: 62472 - DNA, 20 bp, Artificial Sequence
  MKO10062472_A_mmu-mir-5110
  gRNA
caggcttagtacaaaagcgg

SEQ ID NO: 62473 - DNA, 20 bp, Artificial Sequence
  MKO10062473_A_mmu-mir-21a
  gRNA
gtctgataagctatccgaca

SEQ ID NO: 62474 - DNA, 20 bp, Artificial Sequence
  MKO10062474_A_mmu-mir-21a
  gRNA
tgataagctatccgacaagg

SEQ ID NO: 62475 - DNA, 20 bp, Artificial Sequence
  MKO10062475_A_mmu-mir-21a
  gRNA
gcatggctgtaccaccttgt

SEQ ID NO: 62476 - DNA, 20 bp, Artificial Sequence
  MKO10062476_A_mmu-mir-21a
  gRNA
cgatgggctgtctgacattt

SEQ ID NO: 62477 - DNA, 20 bp, Artificial Sequence
  MKO10062477_A_mmu-mir-301a
  gRNA
ttcctgctcactcctgctaa

SEQ ID NO: 62478 - DNA, 20 bp, Artificial Sequence
  MKO10062478_A_mmu-mir-301a
  gRNA
aagtcagagcagccgttagc

SEQ ID NO: 62479 - DNA, 20 bp, Artificial Sequence
  MKO10062479_A_mmu-mir-301a
  gRNA
aaaggtgtgcaacctgctcg

SEQ ID NO: 62480 - DNA, 20 bp, Artificial Sequence
  MKO10062480_A_mmu-mir-301a
  gRNA
ttgtcaaagcatccgcgagc

SEQ ID NO: 62481 - DNA, 20 bp, Artificial Sequence
  MKO10062481_A_mmu-mir-142b
  gRNA
gtgtagtgtttcctacttta

SEQ ID NO: 62482 - DNA, 20 bp, Artificial Sequence
  MKO10062482_A_mmu-mir-142b
  gRNA
ctttatggatgagtgcactg

SEQ ID NO: 62483 - DNA, 20 bp, Artificial Sequence
  MKO10062483_A_mmu-mir-142b
  gRNA
agtagtgctttctactttat

SEQ ID NO: 62484 - DNA, 20 bp, Artificial Sequence
  MKO10062484_A_mmu-mir-142b
  gRNA
agtgcactcatccataaagt

SEQ ID NO: 62485 - DNA, 20 bp, Artificial Sequence
  MKO10062485_A_mmu-mir-142
  gRNA
gtgtagtgtttcctacttta

SEQ ID NO: 62486 - DNA, 20 bp, Artificial Sequence
  MKO10062486_A_mmu-mir-142
  gRNA
agtagtgctttctactttat

SEQ ID NO: 62487 - DNA, 20 bp, Artificial Sequence
  MKO10062487_A_mmu-mir-142
  gRNA
agtgcactcatccataaagt

SEQ ID NO: 62488 - DNA, 20 bp, Artificial Sequence
  MKO10062488_A_mmu-mir-142
  gRNA
gaaagcactactaacagcac

SEQ ID NO: 62489 - DNA, 20 bp, Artificial Sequence
  MKO10062489_A_mmu-mir-378b
  gRNA
gtcctgggctatcccagtcc

SEQ ID NO: 62490 - DNA, 20 bp, Artificial Sequence
  MKO10062490_A_mmu-mir-378b
  gRNA
ccagtccaggcagtaccctc

SEQ ID NO: 62491 - DNA, 20 bp, Artificial Sequence
  MKO10062491_A_mmu-mir-378b
  gRNA
gtccaggcagtaccctcagg

SEQ ID NO: 62492 - DNA, 20 bp, Artificial Sequence
  MKO10062492_A_mmu-mir-378b
  gRNA
aggcagtaccctcaggaggc

SEQ ID NO: 62493 - DNA, 20 bp, Artificial Sequence
  MKO10062493_A_mmu-mir-3063
  gRNA
ctgtggccagctggctcaat

SEQ ID NO: 62494 - DNA, 20 bp, Artificial Sequence
  MKO10062494_A_mmu-mir-3063
  gRNA
tcaattgggggcgagagatc

SEQ ID NO: 62495 - DNA, 20 bp, Artificial Sequence
  MKO10062495_A_mmu-mir-3063
  gRNA
tttgggcctggctggagatc

SEQ ID NO: 62496 - DNA, 20 bp, Artificial Sequence
  MKO10062496_A_mmu-mir-3063
  gRNA
tcagggcatttgggcctggc

SEQ ID NO: 62497 - DNA, 20 bp, Artificial Sequence
  MKO10062497_A_mmu-mir-196a-1
  gRNA
ccgggactgttgagtgaagt

SEQ ID NO: 62498 - DNA, 20 bp, Artificial Sequence
  MKO10062498_A_mmu-mir-196a-1
  gRNA
agtaggtagtttcatgttgt

SEQ ID NO: 62499 - DNA, 20 bp, Artificial Sequence
  MKO10062499_A_mmu-mir-196a-1
  gRNA
acatcaaaccacctgattca

SEQ ID NO: 62500 - DNA, 20 bp, Artificial Sequence
  MKO10062500_A_mmu-mir-196a-1
  gRNA
cctacttcactcaacagtcc

SEQ ID NO: 62501 - DNA, 20 bp, Artificial Sequence
  MKO10062501_A_mmu-mir-10a
  gRNA
tgtagatccgaatttgtgta

SEQ ID NO: 62502 - DNA, 20 bp, Artificial Sequence
  MKO10062502_A_mmu-mir-10a
  gRNA
gtggtcacaaattcgtatct

SEQ ID NO: 62503 - DNA, 20 bp, Artificial Sequence
  MKO10062503_A_mmu-mir-10a
  gRNA
ggtcacaaattcgtatctag

SEQ ID NO: 62504 - DNA, 20 bp, Artificial Sequence
  MKO10062504_A_mmu-mir-10a
  gRNA
tacacaaattcggatctaca

SEQ ID NO: 62505 - DNA, 20 bp, Artificial Sequence
  MKO10062505_A_mmu-mir-152
  gRNA
cgccgctgttccccgggcct

SEQ ID NO: 62506 - DNA, 20 bp, Artificial Sequence
  MKO10062506_A_mmu-mir-152
  gRNA
ttctgtgatacactccgact

SEQ ID NO: 62507 - DNA, 20 bp, Artificial Sequence
  MKO10062507_A_mmu-mir-152
  gRNA
atacactccgactcgggctc

SEQ ID NO: 62508 - DNA, 20 bp, Artificial Sequence
  MKO10062508_A_mmu-mir-152
  gRNA
agtcagtgcatgacagaact

SEQ ID NO: 62509 - DNA, 20 bp, Artificial Sequence
  MKO10062509_A_mmu-mir-8103
  gRNA
gccagtctgcagacaagaag

SEQ ID NO: 62510 - DNA, 20 bp, Artificial Sequence
  MKO10062510_A_mmu-mir-8103
  gRNA
ctgcagacaagaaggggagc

SEQ ID NO: 62511 - DNA, 20 bp, Artificial Sequence
  MKO10062511_A_mmu-mir-8103
  gRNA
caagaaggggagcagggagc

SEQ ID NO: 62512 - DNA, 20 bp, Artificial Sequence
  MKO10062512_A_mmu-mir-8103
  gRNA
gaaggggagcagggagcagg

SEQ ID NO: 62513 - DNA, 20 bp, Artificial Sequence
  MKO10062513_A_mmu-mir-7235
  gRNA
gacttcttgcttctctcctc

SEQ ID NO: 62514 - DNA, 20 bp, Artificial Sequence
  MKO10062514_A_mmu-mir-7235
  gRNA
ggtctgggcagaagtgaagc

SEQ ID NO: 62515 - DNA, 20 bp, Artificial Sequence
  MKO10062515_A_mmu-mir-7235
  gRNA
agccgaggagggaggggtct

SEQ ID NO: 62516 - DNA, 20 bp, Artificial Sequence
  MKO10062516_A_mmu-mir-7235
  gRNA
cagagtagccgaggagggag

SEQ ID NO: 62517 - DNA, 20 bp, Artificial Sequence
  MKO10062517_A_mmu-mir-6927
  gRNA
aaggtgaggggatccagccc

SEQ ID NO: 62518 - DNA, 20 bp, Artificial Sequence
  MKO10062518_A_mmu-mir-6927
  gRNA
gaggggatccagcccaggct

SEQ ID NO: 62519 - DNA, 20 bp, Artificial Sequence
  MKO10062519_A_mmu-mir-6927
  gRNA
ggggatccagcccaggctag

SEQ ID NO: 62520 - DNA, 20 bp, Artificial Sequence
  MKO10062520_A_mmu-mir-6927
  gRNA
gggggaagaatccctgcccg

SEQ ID NO: 62521 - DNA, 20 bp, Artificial Sequence
  MKO10062521_A_mmu-mir-8102
  gRNA
ggaatggtaccgcccgtccc

SEQ ID NO: 62522 - DNA, 20 bp, Artificial Sequence
  MKO10062522_A_mmu-mir-8102
  gRNA
cccgcccactcctcctctcc

SEQ ID NO: 62523 - DNA, 20 bp, Artificial Sequence
  MKO10062523_A_mmu-mir-8102
  gRNA
ctcctcctctcccggcctga

SEQ ID NO: 62524 - DNA, 20 bp, Artificial Sequence
  MKO10062524_A_mmu-mir-8102
  gRNA
cggcctgaagggaacccagc

SEQ ID NO: 62525 - DNA, 20 bp, Artificial Sequence
  MKO10062525_A_mmu-mir-5119
  gRNA
aaaaataagcttatcagggc

SEQ ID NO: 62526 - DNA, 20 bp, Artificial Sequence
  MKO10062526_A_mmu-mir-5119
  gRNA
agcttatcagggctggccta

SEQ ID NO: 62527 - DNA, 20 bp, Artificial Sequence
  MKO10062527_A_mmu-mir-5119
  gRNA
ctataagtcatctcatcctg

SEQ ID NO: 62528 - DNA, 20 bp, Artificial Sequence
  MKO10062528_A_mmu-mir-5119
  gRNA
aagtcatctcatcctggggc

SEQ ID NO: 62529 - DNA, 20 bp, Artificial Sequence
  MKO10062529_A_mmu-mir-7116
  gRNA
tttggcttctgagaaggcaa

SEQ ID NO: 62530 - DNA, 20 bp, Artificial Sequence
  MKO10062530_A_mmu-mir-7116
  gRNA
aaggcaaaggaaaaaaaaaa

SEQ ID NO: 62531 - DNA, 20 bp, Artificial Sequence
  MKO10062531_A_mmu-mir-7116
  gRNA
tgactaacagtgaagacatc

SEQ ID NO: 62532 - DNA, 20 bp, Artificial Sequence
  MKO10062532_A_mmu-mir-7116
  gRNA
ataagatttggcttctgaga

SEQ ID NO: 62533 - DNA, 20 bp, Artificial Sequence
  MKO10062533_A_mmu-mir-6928
  gRNA
agtttccaaggggatttgca

SEQ ID NO: 62534 - DNA, 20 bp, Artificial Sequence
  MKO10062534_A_mmu-mir-6928
  gRNA
aagctgttcctgtactctcc

SEQ ID NO: 62535 - DNA, 20 bp, Artificial Sequence
  MKO10062535_A_mmu-mir-6928
  gRNA
gcagtccatgcaaatcccct

SEQ ID NO: 62536 - DNA, 20 bp, Artificial Sequence
  MKO10062536_A_mmu-mir-6928
  gRNA
gctcggaacctggagagtac

SEQ ID NO: 62537 - DNA, 20 bp, Artificial Sequence
  MKO10062537_A_mmu-mir-6929
  gRNA
aaggctgccatagaaaccac

SEQ ID NO: 62538 - DNA, 20 bp, Artificial Sequence
  MKO10062538_A_mmu-mir-6929
  gRNA
gggaggagcagcatctgtga

SEQ ID NO: 62539 - DNA, 20 bp, Artificial Sequence
  MKO10062539_A_mmu-mir-6929
  gRNA
agcagctgggggagggaggg

SEQ ID NO: 62540 - DNA, 20 bp, Artificial Sequence
  MKO10062540_A_mmu-mir-6929
  gRNA
gagagcagctgggggaggga

SEQ ID NO: 62541 - DNA, 20 bp, Artificial Sequence
  MKO10062541_A_mmu-mir-8101
  gRNA
gcgggcggcggcggcagcag

SEQ ID NO: 62542 - DNA, 20 bp, Artificial Sequence
  MKO10062542_A_mmu-mir-8101
  gRNA
ggcggcggcggcagcagcgg

SEQ ID NO: 62543 - DNA, 20 bp, Artificial Sequence
  MKO10062543_A_mmu-mir-8101
  gRNA
agcagcggcggcaacagcag

SEQ ID NO: 62544 - DNA, 20 bp, Artificial Sequence
  MKO10062544_A_mmu-mir-8101
  gRNA
cggctcctccatctttgcgg

SEQ ID NO: 62545 - DNA, 20 bp, Artificial Sequence
  MKO10062545_A_mmu-mir-6930
  gRNA
cctgggagtatggagaggcc

SEQ ID NO: 62546 - DNA, 20 bp, Artificial Sequence
  MKO10062546_A_mmu-mir-6930
  gRNA
ctggcctctccatactccca

SEQ ID NO: 62547 - DNA, 20 bp, Artificial Sequence
  MKO10062547_A_mmu-mir-6930
  gRNA
gagcccttaagtgattttcc

SEQ ID NO: 62548 - DNA, 20 bp, Artificial Sequence
  MKO10062548_A_mmu-mir-6930
  gRNA
tagggaagggggtgcttgag

SEQ ID NO: 62549 - DNA, 20 bp, Artificial Sequence
  MKO10062549_A_mmu-mir-6931
  gRNA
tggacaactggggtatgaag

SEQ ID NO: 62550 - DNA, 20 bp, Artificial Sequence
  MKO10062550_A_mmu-mir-6931
  gRNA
caactggggtatgaagaggt

SEQ ID NO: 62551 - DNA, 20 bp, Artificial Sequence
  MKO10062551_A_mmu-mir-6931
  gRNA
ttctgaatcactagaggctc

SEQ ID NO: 62552 - DNA, 20 bp, Artificial Sequence
  MKO10062552_A_mmu-mir-6931
  gRNA
ggggacttctgaatcactag

SEQ ID NO: 62553 - DNA, 20 bp, Artificial Sequence
  MKO10062553_A_mmu-mir-3064
  gRNA
ctaactttttatttttggtc

SEQ ID NO: 62554 - DNA, 20 bp, Artificial Sequence
  MKO10062554_A_mmu-mir-3064
  gRNA
tcacatcttccacatctgta

SEQ ID NO: 62555 - DNA, 20 bp, Artificial Sequence
  MKO10062555_A_mmu-mir-3064
  gRNA
atctgtaaggtgttgcagtg

SEQ ID NO: 62556 - DNA, 20 bp, Artificial Sequence
  MKO10062556_A_mmu-mir-3064
  gRNA
tgtggcaaaatagcaatgta

SEQ ID NO: 62557 - DNA, 20 bp, Artificial Sequence
  MKO10062557_A_mmu-mir-6932
  gRNA
ctttgtaggtgaagtagact

SEQ ID NO: 62558 - DNA, 20 bp, Artificial Sequence
  MKO10062558_A_mmu-mir-6932
  gRNA
gctcagaggtgtagctgcag

SEQ ID NO: 62559 - DNA, 20 bp, Artificial Sequence
  MKO10062559_A_mmu-mir-6932
  gRNA
gaattggatggagtctttgt

SEQ ID NO: 62560 - DNA, 20 bp, Artificial Sequence
  MKO10062560_A_mmu-mir-7223
  gRNA
ttccctgtctcgaacaagct

SEQ ID NO: 62561 - DNA, 20 bp, Artificial Sequence
  MKO10062561_A_mmu-mir-7223
  gRNA
actgcactctagctttgctg

SEQ ID NO: 62562 - DNA, 20 bp, Artificial Sequence
  MKO10062562_A_mmu-mir-7223
  gRNA
ctctagctttgctgaggtgt

SEQ ID NO: 62563 - DNA, 20 bp, Artificial Sequence
  MKO10062563_A_mmu-mir-7223
  gRNA
ctagctttgctgaggtgtcg

SEQ ID NO: 62564 - DNA, 20 bp, Artificial Sequence
  MKO10062564_A_mmu-mir-3968
  gRNA
tgggccgcaacccctactca

SEQ ID NO: 62565 - DNA, 20 bp, Artificial Sequence
  MKO10062565_A_mmu-mir-3968
  gRNA
caacccctactcatggtgtc

SEQ ID NO: 62566 - DNA, 20 bp, Artificial Sequence
  MKO10062566_A_mmu-mir-3968
  gRNA
cctactcatggtgtctggag

SEQ ID NO: 62567 - DNA, 20 bp, Artificial Sequence
  MKO10062567_A_mmu-mir-3968
  gRNA
attcgctcaagttctctgtg

SEQ ID NO: 62568 - DNA, 20 bp, Artificial Sequence
  MKO10062568_A_mmu-mir-5621
  gRNA
aggtggggctcaggaggtcc

SEQ ID NO: 62569 - DNA, 20 bp, Artificial Sequence
  MKO10062569_A_mmu-mir-5621
  gRNA
gtggggctcaggaggtcctg

SEQ ID NO: 62570 - DNA, 20 bp, Artificial Sequence
  MKO10062570_A_mmu-mir-5621
  gRNA
tctgccttcagggcggcccc

SEQ ID NO: 62571 - DNA, 20 bp, Artificial Sequence
  MKO10062571_A_mmu-mir-5621
  gRNA
caggcaggaagcatgaggtc

SEQ ID NO: 62572 - DNA, 20 bp, Artificial Sequence
  MKO10062572_A_mmu-mir-6516
  gRNA
aggaggaggaacctcttccc

SEQ ID NO: 62573 - DNA, 20 bp, Artificial Sequence
  MKO10062573_A_mmu-mir-6516
  gRNA
gaggaggaacctcttccctg

SEQ ID NO: 62574 - DNA, 20 bp, Artificial Sequence
  MKO10062574_A_mmu-mir-6516
  gRNA
gggttagaatttgcagtaac

SEQ ID NO: 62575 - DNA, 20 bp, Artificial Sequence
  MKO10062575_A_mmu-mir-6516
  gRNA
acatcctagcagcagtttgg

SEQ ID NO: 62576 - DNA, 20 bp, Artificial Sequence
  MKO10062576_A_mmu-mir-6933
  gRNA
tggtctgtctggcggcagtc

SEQ ID NO: 62577 - DNA, 20 bp, Artificial Sequence
  MKO10062577_A_mmu-mir-6933
  gRNA
gtcaggatacctgtctttcc

SEQ ID NO: 62578 - DNA, 20 bp, Artificial Sequence
  MKO10062578_A_mmu-mir-6933
  gRNA
ggatacctgtctttcctggt

SEQ ID NO: 62579 - DNA, 20 bp, Artificial Sequence
  MKO10062579_A_mmu-mir-6933
  gRNA
tttcctctgccgtcacactc

SEQ ID NO: 62580 - DNA, 20 bp, Artificial Sequence
  MKO10062580_A_mmu-mir-6934
  gRNA
tcaacaggatcctcctggtg

SEQ ID NO: 62581 - DNA, 20 bp, Artificial Sequence
  MKO10062581_A_mmu-mir-6934
  gRNA
caggatcctcctggtggggc

SEQ ID NO: 62582 - DNA, 20 bp, Artificial Sequence
  MKO10062582_A_mmu-mir-6934
  gRNA
tcctggtggggcaggagcag

SEQ ID NO: 62583 - DNA, 20 bp, Artificial Sequence
  MKO10062583_A_mmu-mir-6934
  gRNA
tggtggggcaggagcagagg

SEQ ID NO: 62584 - DNA, 20 bp, Artificial Sequence
  MKO10062584_A_mmu-mir-1932
  gRNA
ccccattaactctcgggttg

SEQ ID NO: 62585 - DNA, 20 bp, Artificial Sequence
  MKO10062585_A_mmu-mir-1932
  gRNA
ggttgcggacagcgctaggt

SEQ ID NO: 62586 - DNA, 20 bp, Artificial Sequence
  MKO10062586_A_mmu-mir-1932
  gRNA
gactcagggccaggctggac

SEQ ID NO: 62587 - DNA, 20 bp, Artificial Sequence
  MKO10062587_A_mmu-mir-1932
  gRNA
tcggagactcagggccaggc

SEQ ID NO: 62588 - DNA, 20 bp, Artificial Sequence
  MKO10062588_A_mmu-mir-338
  gRNA
ctgtgcacccactcagcacc

SEQ ID NO: 62589 - DNA, 20 bp, Artificial Sequence
  MKO10062589_A_mmu-mir-338
  gRNA
actcagcaccaggatattgt

SEQ ID NO: 62590 - DNA, 20 bp, Artificial Sequence
  MKO10062590_A_mmu-mir-338
  gRNA
tcagcaccaggatattgttg

SEQ ID NO: 62591 - DNA, 20 bp, Artificial Sequence
  MKO10062591_A_mmu-mir-338
  gRNA
gcaccaggatattgttgggg

SEQ ID NO: 62592 - DNA, 20 bp, Artificial Sequence
  MKO10062592_A_mmu-mir-3065
  gRNA
ctgtgcacccactcagcacc

SEQ ID NO: 62593 - DNA, 20 bp, Artificial Sequence
  MKO10062593_A_mmu-mir-3065
  gRNA
actcagcaccaggatattgt

SEQ ID NO: 62594 - DNA, 20 bp, Artificial Sequence
  MKO10062594_A_mmu-mir-3065
  gRNA
tcagcaccaggatattgttg

SEQ ID NO: 62595 - DNA, 20 bp, Artificial Sequence
  MKO10062595_A_mmu-mir-3065
  gRNA
gcaccaggatattgttgggg

SEQ ID NO: 62596 - DNA, 20 bp, Artificial Sequence
  MKO10062596_A_mmu-mir-6935
  gRNA
cccctgctactcactcactc

SEQ ID NO: 62597 - DNA, 20 bp, Artificial Sequence
  MKO10062597_A_mmu-mir-6935
  gRNA
atgcagagtgtgggtgtggg

SEQ ID NO: 62598 - DNA, 20 bp, Artificial Sequence
  MKO10062598_A_mmu-mir-6935
  gRNA
agcatgcagagtgtgggtgt

SEQ ID NO: 62599 - DNA, 20 bp, Artificial Sequence
  MKO10062599_A_mmu-mir-6935
  gRNA
cacctgagtgagtgagtagc

SEQ ID NO: 62600 - DNA, 20 bp, Artificial Sequence
  MKO10062600_A_mmu-mir-6936
  gRNA
cgccggcgcgagcgcgggca

SEQ ID NO: 62601 - DNA, 20 bp, Artificial Sequence
  MKO10062601_A_mmu-mir-6936
  gRNA
gggcacggcagtggctcacc

SEQ ID NO: 62602 - DNA, 20 bp, Artificial Sequence
  MKO10062602_A_mmu-mir-6936
  gRNA
cgcgctcgcgccggcgcgcg

SEQ ID NO: 62603 - DNA, 20 bp, Artificial Sequence
  MKO10062603_A_mmu-mir-6936
  gRNA
tgccgtgcccgcgctcgcgc

SEQ ID NO: 62604 - DNA, 20 bp, Artificial Sequence
  MKO10062604_A_mmu-mir-7236
  gRNA
aggaaaggtctaaatctgtg

SEQ ID NO: 62605 - DNA, 20 bp, Artificial Sequence
  MKO10062605_A_mmu-mir-7236
  gRNA
taaatctgtgcggtccaacc

SEQ ID NO: 62606 - DNA, 20 bp, Artificial Sequence
  MKO10062606_A_mmu-mir-7236
  gRNA
tccaatgccatttaactacc

SEQ ID NO: 62607 - DNA, 20 bp, Artificial Sequence
  MKO10062607_A_mmu-mir-7236
  gRNA
ggcaaggccctaaaactgtg

SEQ ID NO: 62608 - DNA, 20 bp, Artificial Sequence
  MKO10062608_A_mmu-mir-7675
  gRNA
atgaagagcaagctgtgttc

SEQ ID NO: 62609 - DNA, 20 bp, Artificial Sequence
  MKO10062609_A_mmu-mir-7675
  gRNA
gtgactctgctttgtatatg

SEQ ID NO: 62610 - DNA, 20 bp, Artificial Sequence
  MKO10062610_A_mmu-mir-6387
  gRNA
gagtaacacacccactgcaa

SEQ ID NO: 62611 - DNA, 20 bp, Artificial Sequence
  MKO10062611_A_mmu-mir-6387
  gRNA
acccactgcaatggagcctc

SEQ ID NO: 62612 - DNA, 20 bp, Artificial Sequence
  MKO10062612_A_mmu-mir-6387
  gRNA
ggcacacctctgactcactg

SEQ ID NO: 62613 - DNA, 20 bp, Artificial Sequence
  MKO10062613_A_mmu-mir-6387
  gRNA
ctctgactcactgaggccac

SEQ ID NO: 62614 - DNA, 20 bp, Artificial Sequence
  MKO10062614_A_mmu-mir-3066
  gRNA
gtgagtagtgtggtatgttt

SEQ ID NO: 62615 - DNA, 20 bp, Artificial Sequence
  MKO10062615_A_mmu-mir-3066
  gRNA
agcatggccagtgcaggttg

SEQ ID NO: 62616 - DNA, 20 bp, Artificial Sequence
  MKO10062616_A_mmu-mir-3066
  gRNA
gcccagagcatggccagtgc

SEQ ID NO: 62617 - DNA, 20 bp, Artificial Sequence
  MKO10062617_A_mmu-mir-3066
  gRNA
taatagaccgcaacctgcac

SEQ ID NO: 62618 - DNA, 20 bp, Artificial Sequence
  MKO10062618_A_mmu-mir-6538
  gRNA
gcgcgatccccaagtgcaag

SEQ ID NO: 62619 - DNA, 20 bp, Artificial Sequence
  MKO10062619_A_mmu-mir-6538
  gRNA
atccccaagtgcaagcggcc

SEQ ID NO: 62620 - DNA, 20 bp, Artificial Sequence
  MKO10062620_A_mmu-mir-6538
  gRNA
cccaagtgcaagcggccagg

SEQ ID NO: 62621 - DNA, 20 bp, Artificial Sequence
  MKO10062621_A_mmu-mir-6538
  gRNA
tgcaagcggccaggaggacg

SEQ ID NO: 62622 - DNA, 20 bp, Artificial Sequence
  MKO10062622_A_mmu-mir-6937
  gRNA
ttcactgtagtctagctgta

SEQ ID NO: 62623 - DNA, 20 bp, Artificial Sequence
  MKO10062623_A_mmu-mir-6937
  gRNA
tgtagtctagctgtaagggc

SEQ ID NO: 62624 - DNA, 20 bp, Artificial Sequence
  MKO10062624_A_mmu-mir-6937
  gRNA
tcggtctccaggaaactcac

SEQ ID NO: 62625 - DNA, 20 bp, Artificial Sequence
  MKO10062625_A_mmu-mir-6937
  gRNA
catcttgatctagtgcaagg

SEQ ID NO: 62626 - DNA, 20 bp, Artificial Sequence
  MKO10062626_A_mmu-mir-680-3
  gRNA
gaagtcaggctctaggcagc

SEQ ID NO: 62627 - DNA, 20 bp, Artificial Sequence
  MKO10062627_A_mmu-mir-680-3
  gRNA
ctgacatgggggcagaagtc

SEQ ID NO: 62628 - DNA, 20 bp, Artificial Sequence
  MKO10062628_A_mmu-mir-680-3
  gRNA
aggtgggcatctgctgacat

SEQ ID NO: 62629 - DNA, 20 bp, Artificial Sequence
  MKO10062629_A_mmu-mir-680-3
  gRNA
taacaaagaacaaaaaaggt

SEQ ID NO: 62630 - DNA, 20 bp, Artificial Sequence
  MKO10062630_A_mmu-mir-5099
  gRNA
aattacattgatttaagaag

SEQ ID NO: 62631 - DNA, 20 bp, Artificial Sequence
  MKO10062631_A_mmu-mir-5099
  gRNA
gtaatgggcttagatcgatg

SEQ ID NO: 62632 - DNA, 20 bp, Artificial Sequence
  MKO10062632_A_mmu-mir-5099
  gRNA
ccctggcctgaagagaactc

SEQ ID NO: 62633 - DNA, 20 bp, Artificial Sequence
  MKO10062633_A_mmu-mir-5099
  gRNA
attgatttaagaagtggtaa

SEQ ID NO: 62634 - DNA, 20 bp, Artificial Sequence
  MKO10062634_A_mmu-mir-1938
  gRNA
tacaagtcccaccgcgcccc

SEQ ID NO: 62635 - DNA, 20 bp, Artificial Sequence
  MKO10062635_A_mmu-mir-1938
  gRNA
tgcagttcccatcatgccct

SEQ ID NO: 62636 - DNA, 20 bp, Artificial Sequence
  MKO10062636_A_mmu-mir-1938
  gRNA
gcccaagtctgcatagcgcg

SEQ ID NO: 62637 - DNA, 20 bp, Artificial Sequence
  MKO10062637_A_mmu-mir-1938
  gRNA
ttgtagttcggtcttcgctt

SEQ ID NO: 62638 - DNA, 20 bp, Artificial Sequence
  MKO10062638_A_mmu-mir-5627
  gRNA
gcgtccccgccctagaggac

SEQ ID NO: 62639 - DNA, 20 bp, Artificial Sequence
  MKO10062639_A_mmu-mir-5627
  gRNA
gggctctccggcgcccctcg

SEQ ID NO: 62640 - DNA, 20 bp, Artificial Sequence
  MKO10062640_A_mmu-mir-5627
  gRNA
ccggagagccctgtcctcta

SEQ ID NO: 62641 - DNA, 20 bp, Artificial Sequence
  MKO10062641_A_mmu-mir-5627
  gRNA
aggctgaaaaggcccacgag

SEQ ID NO: 62642 - DNA, 20 bp, Artificial Sequence
  MKO10062642_A_mmu-mir-1892
  gRNA
agaatttggggacgggaggg

SEQ ID NO: 62643 - DNA, 20 bp, Artificial Sequence
  MKO10062643_A_mmu-mir-1892
  gRNA
aagaaacaatacagaatttg

SEQ ID NO: 62644 - DNA, 20 bp, Artificial Sequence
  MKO10062644_A_mmu-mir-1892
  gRNA
tattgtttcttacaaaactt

SEQ ID NO: 62645 - DNA, 20 bp, Artificial Sequence
  MKO10062645_A_mmu-mir-1892
  gRNA
tcaagagtagaaatatatcc

SEQ ID NO: 62646 - DNA, 20 bp, Artificial Sequence
  MKO10062646_A_mmu-mir-681
  gRNA
agctacaactgtcccgctgg

SEQ ID NO: 62647 - DNA, 20 bp, Artificial Sequence
  MKO10062647_A_mmu-mir-681
  gRNA
aactgtcccgctggaggccc

SEQ ID NO: 62648 - DNA, 20 bp, Artificial Sequence
  MKO10062648_A_mmu-mir-681
  gRNA
tgaaacccatctacctgctt

SEQ ID NO: 62649 - DNA, 20 bp, Artificial Sequence
  MKO10062649_A_mmu-mir-681
  gRNA
cctgcttagggagagtgatg

SEQ ID NO: 62650 - DNA, 20 bp, Artificial Sequence
  MKO10062650_A_mmu-mir-5101
  gRNA
aaacaacaagtcttacaaaa

SEQ ID NO: 62651 - DNA, 20 bp, Artificial Sequence
  MKO10062651_A_mmu-mir-5101
  gRNA
tctaatactctcacattctc

SEQ ID NO: 62652 - DNA, 20 bp, Artificial Sequence
  MKO10062652_A_mmu-mir-5135
  gRNA
tgacctgctccagtaggacc

SEQ ID NO: 62653 - DNA, 20 bp, Artificial Sequence
  MKO10062653_A_mmu-mir-5135
  gRNA
cgcttctcctgggaaagtct

SEQ ID NO: 62654 - DNA, 20 bp, Artificial Sequence
  MKO10062654_A_mmu-mir-5135
  gRNA
ttctcctgggaaagtctagg

SEQ ID NO: 62655 - DNA, 20 bp, Artificial Sequence
  MKO10062655_A_mmu-mir-5135
  gRNA
cctgggaaagtctaggtggc

SEQ ID NO: 62656 - DNA, 20 bp, Artificial Sequence
  MKO10062656_A_mmu-mir-1843a
  gRNA
gagagtctaaggttgtatgg

SEQ ID NO: 62657 - DNA, 20 bp, Artificial Sequence
  MKO10062657_A_mmu-mir-1843a
  gRNA
gcggtcctacatgaatatgg

SEQ ID NO: 62658 - DNA, 20 bp, Artificial Sequence
  MKO10062658_A_mmu-mir-1843a
  gRNA
gcagcggtcctacatgaata

SEQ ID NO: 62659 - DNA, 20 bp, Artificial Sequence
  MKO10062659_A_mmu-mir-1843a
  gRNA
agtgagagtctaaggttgta

SEQ ID NO: 62660 - DNA, 20 bp, Artificial Sequence
  MKO10062660_A_mmu-mir-3067
  gRNA
ccccagcttccccagttctc

SEQ ID NO: 62661 - DNA, 20 bp, Artificial Sequence
  MKO10062661_A_mmu-mir-3067
  gRNA
cccagttctcaggcccgctg

SEQ ID NO: 62662 - DNA, 20 bp, Artificial Sequence
  MKO10062662_A_mmu-mir-3067
  gRNA
gcccgctgtggtgtgaagtt

SEQ ID NO: 62663 - DNA, 20 bp, Artificial Sequence
  MKO10062663_A_mmu-mir-3067
  gRNA
ggttcaccaagcggctgccc

SEQ ID NO: 62664 - DNA, 20 bp, Artificial Sequence
  MKO10062664_A_mmu-mir-6938
  gRNA
tcatctggggctgtctcctt

SEQ ID NO: 62665 - DNA, 20 bp, Artificial Sequence
  MKO10062665_A_mmu-mir-6938
  gRNA
gaagtcatgcttgtcatctg

SEQ ID NO: 62666 - DNA, 20 bp, Artificial Sequence
  MKO10062666_A_mmu-mir-6938
  gRNA
aagcatgacttcactctctc

SEQ ID NO: 62667 - DNA, 20 bp, Artificial Sequence
  MKO10062667_A_mmu-mir-6938
  gRNA
gtgaagtcatgcttgtcatc

SEQ ID NO: 62668 - DNA, 20 bp, Artificial Sequence
  MKO10062668_A_mmu-mir-3068
  gRNA
aaccagcttactcagtagct

SEQ ID NO: 62669 - DNA, 20 bp, Artificial Sequence
  MKO10062669_A_mmu-mir-3068
  gRNA
agcagatggaagcagaatgt

SEQ ID NO: 62670 - DNA, 20 bp, Artificial Sequence
  MKO10062670_A_mmu-mir-3068
  gRNA
cacccagctactgagtaagc

SEQ ID NO: 62671 - DNA, 20 bp, Artificial Sequence
  MKO10062671_A_mmu-mir-3068
  gRNA
acagagtatgcgagagtaat

SEQ ID NO: 62672 - DNA, 20 bp, Artificial Sequence
  MKO10062672_A_mmu-mir-8099-1
  gRNA
gctgccttctctcagagcca

SEQ ID NO: 62673 - DNA, 20 bp, Artificial Sequence
  MKO10062673_A_mmu-mir-8099-1
  gRNA
tcagagccaaggcgtgggaa

SEQ ID NO: 62674 - DNA, 20 bp, Artificial Sequence
  MKO10062674_A_mmu-mir-8099-1
  gRNA
caaggcgtgggaaaggttgt

SEQ ID NO: 62675 - DNA, 20 bp, Artificial Sequence
  MKO10062675_A_mmu-mir-8099-1
  gRNA
cccaccctttaccttgggag

SEQ ID NO: 62676 - DNA, 20 bp, Artificial Sequence
  MKO10062676_A_mmu-mir-1190
  gRNA
gtagtctctcagctgactca

SEQ ID NO: 62677 - DNA, 20 bp, Artificial Sequence
  MKO10062677_A_mmu-mir-1190
  gRNA
cagaggggaacctcagctga

SEQ ID NO: 62678 - DNA, 20 bp, Artificial Sequence
  MKO10062678_A_mmu-mir-1190
  gRNA
gaggggaacctcagctgacg

SEQ ID NO: 62679 - DNA, 20 bp, Artificial Sequence
  MKO10062679_A_mmu-mir-1190
  gRNA
agaccttcccacgtctgcaa

SEQ ID NO: 62680 - DNA, 20 bp, Artificial Sequence
  MKO10062680_A_mmu-mir-1936
  gRNA
ctaactgacctgctgtgaac

SEQ ID NO: 62681 - DNA, 20 bp, Artificial Sequence
  MKO10062681_A_mmu-mir-1936
  gRNA
aggggaggccagtcacacag

SEQ ID NO: 62682 - DNA, 20 bp, Artificial Sequence
  MKO10062682_A_mmu-mir-1936
  gRNA
tctcttagtatagggggtga

SEQ ID NO: 62683 - DNA, 20 bp, Artificial Sequence
  MKO10062683_A_mmu-mir-1936
  gRNA
gtgcagctcagggggtcatg

SEQ ID NO: 62684 - DNA, 20 bp, Artificial Sequence
  MKO10062684_A_mmu-mir-3069
  gRNA
gcagacggagcggtttctgt

SEQ ID NO: 62685 - DNA, 20 bp, Artificial Sequence
  MKO10062685_A_mmu-mir-3069
  gRNA
tcaagatattgtttagcaga

SEQ ID NO: 62686 - DNA, 20 bp, Artificial Sequence
  MKO10062686_A_mmu-mir-3069
  gRNA
tgccaagcttctctgactgt

SEQ ID NO: 62687 - DNA, 20 bp, Artificial Sequence
  MKO10062687_A_mmu-mir-3069
  gRNA
atattgtttagcagacggag

SEQ ID NO: 62688 - DNA, 20 bp, Artificial Sequence
  MKO10062688_A_mmu-mir-342
  gRNA
catctgtgaaaatgggctca

SEQ ID NO: 62689 - DNA, 20 bp, Artificial Sequence
  MKO10062689_A_mmu-mir-342
  gRNA
gtgaaaatgggctcaaggtg

SEQ ID NO: 62690 - DNA, 20 bp, Artificial Sequence
  MKO10062690_A_mmu-mir-342
  gRNA
gaaaatgggctcaaggtgag

SEQ ID NO: 62691 - DNA, 20 bp, Artificial Sequence
  MKO10062691_A_mmu-mir-342
  gRNA
ctatctgtgattgagggaca

SEQ ID NO: 62692 - DNA, 20 bp, Artificial Sequence
  MKO10062692_A_mmu-mir-345
  gRNA
tgaagccgacacccaagtcc

SEQ ID NO: 62693 - DNA, 20 bp, Artificial Sequence
  MKO10062693_A_mmu-mir-345
  gRNA
gacccctagtccagtgcttg

SEQ ID NO: 62694 - DNA, 20 bp, Artificial Sequence
  MKO10062694_A_mmu-mir-345
  gRNA
ccagtgcttgtggtggctac

SEQ ID NO: 62695 - DNA, 20 bp, Artificial Sequence
  MKO10062695_A_mmu-mir-345
  gRNA
gctactgggccctgaactag

SEQ ID NO: 62696 - DNA, 20 bp, Artificial Sequence
  MKO10062696_A_mmu-mir-1906-1
  gRNA
tttggggtagtggggacatt

SEQ ID NO: 62697 - DNA, 20 bp, Artificial Sequence
  MKO10062697_A_mmu-mir-1906-1
  gRNA
gacattaggagcaacctcct

SEQ ID NO: 62698 - DNA, 20 bp, Artificial Sequence
  MKO10062698_A_mmu-mir-1906-1
  gRNA
aaatgaactgcagcagcctg

SEQ ID NO: 62699 - DNA, 20 bp, Artificial Sequence
  MKO10062699_A_mmu-mir-1906-1
  gRNA
gcagcagcctgaggcagggc

SEQ ID NO: 62700 - DNA, 20 bp, Artificial Sequence
  MKO10062700_A_mmu-mir-770
  gRNA
tgcccccagcaccacgtgtc

SEQ ID NO: 62701 - DNA, 20 bp, Artificial Sequence
  MKO10062701_A_mmu-mir-770
  gRNA
gccacgtgagcaacgccacg

SEQ ID NO: 62702 - DNA, 20 bp, Artificial Sequence
  MKO10062702_A_mmu-mir-770
  gRNA
acgtgggcctgacgtggagc

SEQ ID NO: 62703 - DNA, 20 bp, Artificial Sequence
  MKO10062703_A_mmu-mir-770
  gRNA
gtgggcctgacgtggagctg

SEQ ID NO: 62704 - DNA, 20 bp, Artificial Sequence
  MKO10062704_A_mmu-mir-673
  gRNA
gtctggctttggagcctgag

SEQ ID NO: 62705 - DNA, 20 bp, Artificial Sequence
  MKO10062705_A_mmu-mir-673
  gRNA
gcctgaggggctcacagctc

SEQ ID NO: 62706 - DNA, 20 bp, Artificial Sequence
  MKO10062706_A_mmu-mir-673
  gRNA
ctccagagaaaatgttgctc

SEQ ID NO: 62707 - DNA, 20 bp, Artificial Sequence
  MKO10062707_A_mmu-mir-673
  gRNA
ccagagaaaatgttgctccg

SEQ ID NO: 62708 - DNA, 20 bp, Artificial Sequence
  MKO10062708_A_mmu-mir-493
  gRNA
ggccgccagggccttgtaca

SEQ ID NO: 62709 - DNA, 20 bp, Artificial Sequence
  MKO10062709_A_mmu-mir-493
  gRNA
gccagggccttgtacatggt

SEQ ID NO: 62710 - DNA, 20 bp, Artificial Sequence
  MKO10062710_A_mmu-mir-493
  gRNA
attttttgcacattcggtga

SEQ ID NO: 62711 - DNA, 20 bp, Artificial Sequence
  MKO10062711_A_mmu-mir-493
  gRNA
tgaaggtcctactgtgtgcc

SEQ ID NO: 62712 - DNA, 20 bp, Artificial Sequence
  MKO10062712_A_mmu-mir-337
  gRNA
tgtagtgagaagttgggggg

SEQ ID NO: 62713 - DNA, 20 bp, Artificial Sequence
  MKO10062713_A_mmu-mir-337
  gRNA
gagaagttggggggtgggaa

SEQ ID NO: 62714 - DNA, 20 bp, Artificial Sequence
  MKO10062714_A_mmu-mir-337
  gRNA
aggcctcacgcggttgaagg

SEQ ID NO: 62715 - DNA, 20 bp, Artificial Sequence
  MKO10062715_A_mmu-mir-337
  gRNA
gtcccagtgtagtgagaagt

SEQ ID NO: 62716 - DNA, 20 bp, Artificial Sequence
  MKO10062716_A_mmu-mir-3544
  gRNA
gggtgggaacggcgtcatgc

SEQ ID NO: 62717 - DNA, 20 bp, Artificial Sequence
  MKO10062717_A_mmu-mir-3544
  gRNA
ggcatcatataggagctgaa

SEQ ID NO: 62718 - DNA, 20 bp, Artificial Sequence
  MKO10062718_A_mmu-mir-3544
  gRNA
ggtgaagaaaggcatcatat

SEQ ID NO: 62719 - DNA, 20 bp, Artificial Sequence
  MKO10062719_A_mmu-mir-3544
  gRNA
cggttgaagggggtgaagaa

SEQ ID NO: 62720 - DNA, 20 bp, Artificial Sequence
  MKO10062720_A_mmu-mir-540
  gRNA
cattccctggggctgggcca

SEQ ID NO: 62721 - DNA, 20 bp, Artificial Sequence
  MKO10062721_A_mmu-mir-540
  gRNA
agggtcaccctctgactctg

SEQ ID NO: 62722 - DNA, 20 bp, Artificial Sequence
  MKO10062722_A_mmu-mir-540
  gRNA
accctctgactctgtggcca

SEQ ID NO: 62723 - DNA, 20 bp, Artificial Sequence
  MKO10062723_A_mmu-mir-540
  gRNA
gccaagggtagacaggtcag

SEQ ID NO: 62724 - DNA, 20 bp, Artificial Sequence
  MKO10062724_A_mmu-mir-665
  gRNA
cccagaacagggtctccttg

SEQ ID NO: 62725 - DNA, 20 bp, Artificial Sequence
  MKO10062725_A_mmu-mir-665
  gRNA
aggattatgtttttatgacc

SEQ ID NO: 62726 - DNA, 20 bp, Artificial Sequence
  MKO10062726_A_mmu-mir-665
  gRNA
attatgtttttatgaccagg

SEQ ID NO: 62727 - DNA, 20 bp, Artificial Sequence
  MKO10062727_A_mmu-mir-665
  gRNA
tttttatgaccaggaggctg

SEQ ID NO: 62728 - DNA, 20 bp, Artificial Sequence
  MKO10062728_A_mmu-mir-3070a
  gRNA
ggatcctatccatgatctcc

SEQ ID NO: 62729 - DNA, 20 bp, Artificial Sequence
  MKO10062729_A_mmu-mir-3070a
  gRNA
tctcctggtgctaccgtcag

SEQ ID NO: 62730 - DNA, 20 bp, Artificial Sequence
  MKO10062730_A_mmu-mir-3070a
  gRNA
gatcccaggttcaaggtcag

SEQ ID NO: 62731 - DNA, 20 bp, Artificial Sequence
  MKO10062731_A_mmu-mir-3070a
  gRNA
aggatcccaggttcaaggtc

SEQ ID NO: 62732 - DNA, 20 bp, Artificial Sequence
  MKO10062732_A_mmu-mir-3070b
  gRNA
ggatcctccccatgatcttc

SEQ ID NO: 62733 - DNA, 20 bp, Artificial Sequence
  MKO10062733_A_mmu-mir-3070b
  gRNA
gatcttctggtgctatggtc

SEQ ID NO: 62734 - DNA, 20 bp, Artificial Sequence
  MKO10062734_A_mmu-mir-3070b
  gRNA
tcttctggtgctatggtcag

SEQ ID NO: 62735 - DNA, 20 bp, Artificial Sequence
  MKO10062735_A_mmu-mir-3070b
  gRNA
gatcccaggttcaaggtcag

SEQ ID NO: 62736 - DNA, 20 bp, Artificial Sequence
  MKO10062736_A_mmu-mir-431
  gRNA
gttgtcctgcgcgtcctgcg

SEQ ID NO: 62737 - DNA, 20 bp, Artificial Sequence
  MKO10062737_A_mmu-mir-431
  gRNA
cgtcctgcgaggtgtcttgc

SEQ ID NO: 62738 - DNA, 20 bp, Artificial Sequence
  MKO10062738_A_mmu-mir-431
  gRNA
cacactgacggtaacgttgc

SEQ ID NO: 62739 - DNA, 20 bp, Artificial Sequence
  MKO10062739_A_mmu-mir-431
  gRNA
aacgttgcaggtcgtcttgc

SEQ ID NO: 62740 - DNA, 20 bp, Artificial Sequence
  MKO10062740_A_mmu-mir-433
  gRNA
agaagaagacccaatgcccg

SEQ ID NO: 62741 - DNA, 20 bp, Artificial Sequence
  MKO10062741_A_mmu-mir-433
  gRNA
ccaatgcccggggagaagta

SEQ ID NO: 62742 - DNA, 20 bp, Artificial Sequence
  MKO10062742_A_mmu-mir-433
  gRNA
gagcctgtcattattcagag

SEQ ID NO: 62743 - DNA, 20 bp, Artificial Sequence
  MKO10062743_A_mmu-mir-433
  gRNA
ctagatcctctgtgttgaga

SEQ ID NO: 62744 - DNA, 20 bp, Artificial Sequence
  MKO10062744_A_mmu-mir-127
  gRNA
ctctgattcagaaagatcat

SEQ ID NO: 62745 - DNA, 20 bp, Artificial Sequence
  MKO10062745_A_mmu-mir-127
  gRNA
tcatcggatccgtctgagct

SEQ ID NO: 62746 - DNA, 20 bp, Artificial Sequence
  MKO10062746_A_mmu-mir-127
  gRNA
cggatccgtctgagcttggc

SEQ ID NO: 62747 - DNA, 20 bp, Artificial Sequence
  MKO10062747_A_mmu-mir-127
  gRNA
tccgtctgagcttggctggt

SEQ ID NO: 62748 - DNA, 20 bp, Artificial Sequence
  MKO10062748_A_mmu-mir-434
  gRNA
tcgaaccaggagtcgagtga

SEQ ID NO: 62749 - DNA, 20 bp, Artificial Sequence
  MKO10062749_A_mmu-mir-434
  gRNA
aagtgatgatggttcgaacc

SEQ ID NO: 62750 - DNA, 20 bp, Artificial Sequence
  MKO10062750_A_mmu-mir-434
  gRNA
ttggaaacatcgctcgactc

SEQ ID NO: 62751 - DNA, 20 bp, Artificial Sequence
  MKO10062751_A_mmu-mir-434
  gRNA
ttgaaccaaagctcgactca

SEQ ID NO: 62752 - DNA, 20 bp, Artificial Sequence
  MKO10062752_A_mmu-mir-432
  gRNA
catttcctggtgggggccac

SEQ ID NO: 62753 - DNA, 20 bp, Artificial Sequence
  MKO10062753_A_mmu-mir-432
  gRNA
tcctggtgggggccactgga

SEQ ID NO: 62754 - DNA, 20 bp, Artificial Sequence
  MKO10062754_A_mmu-mir-432
  gRNA
cacttcttggagtagatcag

SEQ ID NO: 62755 - DNA, 20 bp, Artificial Sequence
  MKO10062755_A_mmu-mir-432
  gRNA
gccatccagtggcccccacc

SEQ ID NO: 62756 - DNA, 20 bp, Artificial Sequence
  MKO10062756_A_mmu-mir-3071
  gRNA
aacggtgttggatgagccct

SEQ ID NO: 62757 - DNA, 20 bp, Artificial Sequence
  MKO10062757_A_mmu-mir-3071
  gRNA
ggtgttggatgagccctcgg

SEQ ID NO: 62758 - DNA, 20 bp, Artificial Sequence
  MKO10062758_A_mmu-mir-3071
  gRNA
gactccatttgttttgatga

SEQ ID NO: 62759 - DNA, 20 bp, Artificial Sequence
  MKO10062759_A_mmu-mir-3071
  gRNA
cgtctcaaatgagtcttcag

SEQ ID NO: 62760 - DNA, 20 bp, Artificial Sequence
  MKO10062760_A_mmu-mir-136
  gRNA
gactccatttgttttgatga

SEQ ID NO: 62761 - DNA, 20 bp, Artificial Sequence
  MKO10062761_A_mmu-mir-136
  gRNA
cgtctcaaatgagtcttcag

SEQ ID NO: 62762 - DNA, 20 bp, Artificial Sequence
  MKO10062762_A_mmu-mir-136
  gRNA
agactcatttgagacgatga

SEQ ID NO: 62763 - DNA, 20 bp, Artificial Sequence
  MKO10062763_A_mmu-mir-136
  gRNA
aaacaaatggagtcctccga

SEQ ID NO: 62764 - DNA, 20 bp, Artificial Sequence
  MKO10062764_A_mmu-mir-341
  gRNA
gttaaaatgatgatgtcagt

SEQ ID NO: 62765 - DNA, 20 bp, Artificial Sequence
  MKO10062765_A_mmu-mir-341
  gRNA
gatgatgtcagttggccggt

SEQ ID NO: 62766 - DNA, 20 bp, Artificial Sequence
  MKO10062766_A_mmu-mir-341
  gRNA
tggccggtcggccgatcgct

SEQ ID NO: 62767 - DNA, 20 bp, Artificial Sequence
  MKO10062767_A_mmu-mir-341
  gRNA
cgctcggtctgtcagtcagt

SEQ ID NO: 62768 - DNA, 20 bp, Artificial Sequence
  MKO10062768_A_mmu-mir-1188
  gRNA
aatactcacagtctcccagc

SEQ ID NO: 62769 - DNA, 20 bp, Artificial Sequence
  MKO10062769_A_mmu-mir-1188
  gRNA
acagtctcccagctggtgtg

SEQ ID NO: 62770 - DNA, 20 bp, Artificial Sequence
  MKO10062770_A_mmu-mir-1188
  gRNA
agctggtgtgaggttgggcc

SEQ ID NO: 62771 - DNA, 20 bp, Artificial Sequence
  MKO10062771_A_mmu-mir-1188
  gRNA
cctagcaaggctgtgccgag

SEQ ID NO: 62772 - DNA, 20 bp, Artificial Sequence
  MKO10062772_A_mmu-mir-370
  gRNA
gggcctaagacggagagacc

SEQ ID NO: 62773 - DNA, 20 bp, Artificial Sequence
  MKO10062773_A_mmu-mir-370
  gRNA
cacagctcatgagtgcctgc

SEQ ID NO: 62774 - DNA, 20 bp, Artificial Sequence
  MKO10062774_A_mmu-mir-370
  gRNA
cagctcatgagtgcctgctg

SEQ ID NO: 62775 - DNA, 20 bp, Artificial Sequence
  MKO10062775_A_mmu-mir-370
  gRNA
ctcatgagtgcctgctgggg

SEQ ID NO: 62776 - DNA, 20 bp, Artificial Sequence
  MKO10062776_A_mmu-mir-882
  gRNA
gtcttccttacagcagtacc

SEQ ID NO: 62777 - DNA, 20 bp, Artificial Sequence
  MKO10062777_A_mmu-mir-882
  gRNA
tgatttctgggtttttctaa

SEQ ID NO: 62778 - DNA, 20 bp, Artificial Sequence
  MKO10062778_A_mmu-mir-882
  gRNA
ctaatgcgctaactctctcc

SEQ ID NO: 62779 - DNA, 20 bp, Artificial Sequence
  MKO10062779_A_mmu-mir-882
  gRNA
caatagttagtcctgatttc

SEQ ID NO: 62780 - DNA, 20 bp, Artificial Sequence
  MKO10062780_A_mmu-mir-379
  gRNA
cctgaagagatggtagacta

SEQ ID NO: 62781 - DNA, 20 bp, Artificial Sequence
  MKO10062781_A_mmu-mir-379
  gRNA
gatggtagactatggaacgt

SEQ ID NO: 62782 - DNA, 20 bp, Artificial Sequence
  MKO10062782_A_mmu-mir-379
  gRNA
gttagtggaccatgttacat

SEQ ID NO: 62783 - DNA, 20 bp, Artificial Sequence
  MKO10062783_A_mmu-mir-379
  gRNA
tgtttttgacctatgtaaca

SEQ ID NO: 62784 - DNA, 20 bp, Artificial Sequence
  MKO10062784_A_mmu-mir-411
  gRNA
cggcgtctctgtgtggtact

SEQ ID NO: 62785 - DNA, 20 bp, Artificial Sequence
  MKO10062785_A_mmu-mir-411
  gRNA
gatttgatactgagggttag

SEQ ID NO: 62786 - DNA, 20 bp, Artificial Sequence
  MKO10062786_A_mmu-mir-411
  gRNA
tatctgtgacgtatgtaaca

SEQ ID NO: 62787 - DNA, 20 bp, Artificial Sequence
  MKO10062787_A_mmu-mir-411
  gRNA
cagtatcaaatccatccccg

SEQ ID NO: 62788 - DNA, 20 bp, Artificial Sequence
  MKO10062788_A_mmu-mir-299a
  gRNA
tcacgcggtacttgaagaaa

SEQ ID NO: 62789 - DNA, 20 bp, Artificial Sequence
  MKO10062789_A_mmu-mir-299a
  gRNA
atacattttgagtatgtatg

SEQ ID NO: 62790 - DNA, 20 bp, Artificial Sequence
  MKO10062790_A_mmu-mir-299a
  gRNA
ttttgagtatgtatgtggga

SEQ ID NO: 62791 - DNA, 20 bp, Artificial Sequence
  MKO10062791_A_mmu-mir-299a
  gRNA
tgggacggtaaaccgcttct

SEQ ID NO: 62792 - DNA, 20 bp, Artificial Sequence
  MKO10062792_A_mmu-mir-299b
  gRNA
atacattttgagtatgtatg

SEQ ID NO: 62793 - DNA, 20 bp, Artificial Sequence
  MKO10062793_A_mmu-mir-299b
  gRNA
ttttgagtatgtatgtggga

SEQ ID NO: 62794 - DNA, 20 bp, Artificial Sequence
  MKO10062794_A_mmu-mir-299b
  gRNA
tactcaaaatgtatgtggga

SEQ ID NO: 62795 - DNA, 20 bp, Artificial Sequence
  MKO10062795_A_mmu-mir-299b
  gRNA
tacatactcaaaatgtatgt

SEQ ID NO: 62796 - DNA, 20 bp, Artificial Sequence
  MKO10062796_A_mmu-mir-380
  gRNA
actttgataacgagaagatg

SEQ ID NO: 62797 - DNA, 20 bp, Artificial Sequence
  MKO10062797_A_mmu-mir-380
  gRNA
cttctgtgtcgtatgtagta

SEQ ID NO: 62798 - DNA, 20 bp, Artificial Sequence
  MKO10062798_A_mmu-mir-380
  gRNA
aaccatcttttcaggtacca

SEQ ID NO: 62799 - DNA, 20 bp, Artificial Sequence
  MKO10062799_A_mmu-mir-380
  gRNA
ctatggtcaaccatcttttc

SEQ ID NO: 62800 - DNA, 20 bp, Artificial Sequence
  MKO10062800_A_mmu-mir-1197
  gRNA
ccaaattaagtaaagtgagc

SEQ ID NO: 62801 - DNA, 20 bp, Artificial Sequence
  MKO10062801_A_mmu-mir-1197
  gRNA
cctcaaggtatttgaagatg

SEQ ID NO: 62802 - DNA, 20 bp, Artificial Sequence
  MKO10062802_A_mmu-mir-1197
  gRNA
tttgaagatgcggttgacca

SEQ ID NO: 62803 - DNA, 20 bp, Artificial Sequence
  MKO10062803_A_mmu-mir-1197
  gRNA
ctcaatatcacatctcgcct

SEQ ID NO: 62804 - DNA, 20 bp, Artificial Sequence
  MKO10062804_A_mmu-mir-323
  gRNA
tactgctgctgcttggtact

SEQ ID NO: 62805 - DNA, 20 bp, Artificial Sequence
  MKO10062805_A_mmu-mir-323
  gRNA
gctgcttggtacttggagag

SEQ ID NO: 62806 - DNA, 20 bp, Artificial Sequence
  MKO10062806_A_mmu-mir-323
  gRNA
gcttggtacttggagagagg

SEQ ID NO: 62807 - DNA, 20 bp, Artificial Sequence
  MKO10062807_A_mmu-mir-323
  gRNA
ttacacggtcgacctctttg

SEQ ID NO: 62808 - DNA, 20 bp, Artificial Sequence
  MKO10062808_A_mmu-mir-758
  gRNA
gatacacgtgtgggtgcgtg

SEQ ID NO: 62809 - DNA, 20 bp, Artificial Sequence
  MKO10062809_A_mmu-mir-758
  gRNA
acacgtgtgggtgcgtgagg

SEQ ID NO: 62810 - DNA, 20 bp, Artificial Sequence
  MKO10062810_A_mmu-mir-758
  gRNA
ttagtggaccaggtcacaaa

SEQ ID NO: 62811 - DNA, 20 bp, Artificial Sequence
  MKO10062811_A_mmu-mir-758
  gRNA
atactgagggttagtggacc

SEQ ID NO: 62812 - DNA, 20 bp, Artificial Sequence
  MKO10062812_A_mmu-mir-329
  gRNA
tcagtgttcgcttctggtac

SEQ ID NO: 62813 - DNA, 20 bp, Artificial Sequence
  MKO10062813_A_mmu-mir-329
  gRNA
cgcttctggtaccggaagag

SEQ ID NO: 62814 - DNA, 20 bp, Artificial Sequence
  MKO10062814_A_mmu-mir-329
  gRNA
gtaccggaagagaggttttc

SEQ ID NO: 62815 - DNA, 20 bp, Artificial Sequence
  MKO10062815_A_mmu-mir-329
  gRNA
gacccagaaaacctctcttc

SEQ ID NO: 62816 - DNA, 20 bp, Artificial Sequence
  MKO10062816_A_mmu-mir-494
  gRNA
cagtgctaattgatacttga

SEQ ID NO: 62817 - DNA, 20 bp, Artificial Sequence
  MKO10062817_A_mmu-mir-494
  gRNA
tatttatgatgaaacataca

SEQ ID NO: 62818 - DNA, 20 bp, Artificial Sequence
  MKO10062818_A_mmu-mir-494
  gRNA
taaataaagagaagacaaca

SEQ ID NO: 62819 - DNA, 20 bp, Artificial Sequence
  MKO10062819_A_mmu-mir-494
  gRNA
ctaattgatacttgaaggag

SEQ ID NO: 62820 - DNA, 20 bp, Artificial Sequence
  MKO10062820_A_mmu-mir-679
  gRNA
gaggctactccctatggctt

SEQ ID NO: 62821 - DNA, 20 bp, Artificial Sequence
  MKO10062821_A_mmu-mir-679
  gRNA
ttggactgtgaggtgactct

SEQ ID NO: 62822 - DNA, 20 bp, Artificial Sequence
  MKO10062822_A_mmu-mir-679
  gRNA
aggtgactcttggtgtgtga

SEQ ID NO: 62823 - DNA, 20 bp, Artificial Sequence
  MKO10062823_A_mmu-mir-679
  gRNA
tcctcctcacagtagctata

SEQ ID NO: 62824 - DNA, 20 bp, Artificial Sequence
  MKO10062824_A_mmu-mir-1193
  gRNA
ctgttctcggggtagctgtg

SEQ ID NO: 62825 - DNA, 20 bp, Artificial Sequence
  MKO10062825_A_mmu-mir-1193
  gRNA
tctcggggtagctgtgtgga

SEQ ID NO: 62826 - DNA, 20 bp, Artificial Sequence
  MKO10062826_A_mmu-mir-1193
  gRNA
tagctgtgtggatggtagac

SEQ ID NO: 62827 - DNA, 20 bp, Artificial Sequence
  MKO10062827_A_mmu-mir-1193
  gRNA
ataaatgaagtgtacgtcac

SEQ ID NO: 62828 - DNA, 20 bp, Artificial Sequence
  MKO10062828_A_mmu-mir-666
  gRNA
agatcctgattctgcctgcg

SEQ ID NO: 62829 - DNA, 20 bp, Artificial Sequence
  MKO10062829_A_mmu-mir-666
  gRNA
cacagctgtgagagccccct

SEQ ID NO: 62830 - DNA, 20 bp, Artificial Sequence
  MKO10062830_A_mmu-mir-666
  gRNA
gtgatcgcctgctcacgcac

SEQ ID NO: 62831 - DNA, 20 bp, Artificial Sequence
  MKO10062831_A_mmu-mir-666
  gRNA
cgctccacgcaggcagaatc

SEQ ID NO: 62832 - DNA, 20 bp, Artificial Sequence
  MKO10062832_A_mmu-mir-543
  gRNA
atataaagcgaaaaacacgc

SEQ ID NO: 62833 - DNA, 20 bp, Artificial Sequence
  MKO10062833_A_mmu-mir-543
  gRNA
tatatgtgacgaaacattcg

SEQ ID NO: 62834 - DNA, 20 bp, Artificial Sequence
  MKO10062834_A_mmu-mir-495
  gRNA
tatttgtgacgaaacaaaca

SEQ ID NO: 62835 - DNA, 20 bp, Artificial Sequence
  MKO10062835_A_mmu-mir-495
  gRNA
ataaaagcgaaaaataacat

SEQ ID NO: 62836 - DNA, 20 bp, Artificial Sequence
  MKO10062836_A_mmu-mir-495
  gRNA
caacttcttttcaggtacca

SEQ ID NO: 62837 - DNA, 20 bp, Artificial Sequence
  MKO10062837_A_mmu-mir-495
  gRNA
aacatgggcaacttcttttc

SEQ ID NO: 62838 - DNA, 20 bp, Artificial Sequence
  MKO10062838_A_mmu-mir-667
  gRNA
cctttccatctagtgggtac

SEQ ID NO: 62839 - DNA, 20 bp, Artificial Sequence
  MKO10062839_A_mmu-mir-667
  gRNA
catctagtgggtactggcct

SEQ ID NO: 62840 - DNA, 20 bp, Artificial Sequence
  MKO10062840_A_mmu-mir-667
  gRNA
gtgggtactggcctcggtgc

SEQ ID NO: 62841 - DNA, 20 bp, Artificial Sequence
  MKO10062841_A_mmu-mir-667
  gRNA
gacacctgccacccagccca

SEQ ID NO: 62842 - DNA, 20 bp, Artificial Sequence
  MKO10062842_A_mmu-mir-376c
  gRNA
atcttttggtatttaaaagg

SEQ ID NO: 62843 - DNA, 20 bp, Artificial Sequence
  MKO10062843_A_mmu-mir-376c
  gRNA
ctttttgtgattaaacatag

SEQ ID NO: 62844 - DNA, 20 bp, Artificial Sequence
  MKO10062844_A_mmu-mir-376c
  gRNA
acaaaaagcataaacataga

SEQ ID NO: 62845 - DNA, 20 bp, Artificial Sequence
  MKO10062845_A_mmu-mir-376c
  gRNA
taaatcttttggtatttaaa

SEQ ID NO: 62846 - DNA, 20 bp, Artificial Sequence
  MKO10062846_A_mmu-mir-654
  gRNA
ctcctcggtaagtgggaaga

SEQ ID NO: 62847 - DNA, 20 bp, Artificial Sequence
  MKO10062847_A_mmu-mir-654
  gRNA
tgtctgctgaccatcacctt

SEQ ID NO: 62848 - DNA, 20 bp, Artificial Sequence
  MKO10062848_A_mmu-mir-654
  gRNA
gcagtgccctcctcggtaag

SEQ ID NO: 62849 - DNA, 20 bp, Artificial Sequence
  MKO10062849_A_mmu-mir-654
  gRNA
cacctttgggtctctgcctg

SEQ ID NO: 62850 - DNA, 20 bp, Artificial Sequence
  MKO10062850_A_mmu-mir-376b
  gRNA
cttctttggtatttaaaagg

SEQ ID NO: 62851 - DNA, 20 bp, Artificial Sequence
  MKO10062851_A_mmu-mir-376b
  gRNA
gacatttgatactgaaaaag

SEQ ID NO: 62852 - DNA, 20 bp, Artificial Sequence
  MKO10062852_A_mmu-mir-376b
  gRNA
gtccttctttggtatttaaa

SEQ ID NO: 62853 - DNA, 20 bp, Artificial Sequence
  MKO10062853_A_mmu-mir-376b
  gRNA
aaaggtggatattccttcta

SEQ ID NO: 62854 - DNA, 20 bp, Artificial Sequence
  MKO10062854_A_mmu-mir-376a
  gRNA
atattaatgactaatcgtag

SEQ ID NO: 62855 - DNA, 20 bp, Artificial Sequence
  MKO10062855_A_mmu-mir-376a
  gRNA
attaatattgtactcataga

SEQ ID NO: 62856 - DNA, 20 bp, Artificial Sequence
  MKO10062856_A_mmu-mir-376a
  gRNA
agcatttgatactgaaaacg

SEQ ID NO: 62857 - DNA, 20 bp, Artificial Sequence
  MKO10062857_A_mmu-mir-300
  gRNA
atcgtttgctacttgaagag

SEQ ID NO: 62858 - DNA, 20 bp, Artificial Sequence
  MKO10062858_A_mmu-mir-300
  gRNA
ttacgcgaaatgaatatgca

SEQ ID NO: 62859 - DNA, 20 bp, Artificial Sequence
  MKO10062859_A_mmu-mir-300
  gRNA
gcaagggcaagctctcttcg

SEQ ID NO: 62860 - DNA, 20 bp, Artificial Sequence
  MKO10062860_A_mmu-mir-300
  gRNA
cgcgtaaagcaaacacacaa

SEQ ID NO: 62861 - DNA, 20 bp, Artificial Sequence
  MKO10062861_A_mmu-mir-381
  gRNA
attgtttggtacttaaagcg

SEQ ID NO: 62862 - DNA, 20 bp, Artificial Sequence
  MKO10062862_A_mmu-mir-381
  gRNA
gaggttgccctttgtatatt

SEQ ID NO: 62863 - DNA, 20 bp, Artificial Sequence
  MKO10062863_A_mmu-mir-381
  gRNA
gtatattcggtttattgaca

SEQ ID NO: 62864 - DNA, 20 bp, Artificial Sequence
  MKO10062864_A_mmu-mir-381
  gRNA
ttattgacatggaatataca

SEQ ID NO: 62865 - DNA, 20 bp, Artificial Sequence
  MKO10062865_A_mmu-mir-487b
  gRNA
ccaggccgagctttggtact

SEQ ID NO: 62866 - DNA, 20 bp, Artificial Sequence
  MKO10062866_A_mmu-mir-487b
  gRNA
gagctttggtacttggagag

SEQ ID NO: 62867 - DNA, 20 bp, Artificial Sequence
  MKO10062867_A_mmu-mir-487b
  gRNA
tcactcatgccgaatcgtac

SEQ ID NO: 62868 - DNA, 20 bp, Artificial Sequence
  MKO10062868_A_mmu-mir-487b
  gRNA
tgagtgaagcgaagaggaca

SEQ ID NO: 62869 - DNA, 20 bp, Artificial Sequence
  MKO10062869_A_mmu-mir-539
  gRNA
gtgctactgtttcatacttg

SEQ ID NO: 62870 - DNA, 20 bp, Artificial Sequence
  MKO10062870_A_mmu-mir-539
  gRNA
acttgaggagaaattatcct

SEQ ID NO: 62871 - DNA, 20 bp, Artificial Sequence
  MKO10062871_A_mmu-mir-539
  gRNA
ccttggtgtgttggctcttt

SEQ ID NO: 62872 - DNA, 20 bp, Artificial Sequence
  MKO10062872_A_mmu-mir-539
  gRNA
agaaattatccttggtgtgt

SEQ ID NO: 62873 - DNA, 20 bp, Artificial Sequence
  MKO10062873_A_mmu-mir-544
  gRNA
tgctttttaacaagatccct

SEQ ID NO: 62874 - DNA, 20 bp, Artificial Sequence
  MKO10062874_A_mmu-mir-544
  gRNA
ttgctaaaaatgcagaatct

SEQ ID NO: 62875 - DNA, 20 bp, Artificial Sequence
  MKO10062875_A_mmu-mir-544
  gRNA
taaaaagcagagtctgattg

SEQ ID NO: 62876 - DNA, 20 bp, Artificial Sequence
  MKO10062876_A_mmu-mir-544
  gRNA
aaaagcagagtctgattgag

SEQ ID NO: 62877 - DNA, 20 bp, Artificial Sequence
  MKO10062877_A_mmu-mir-382
  gRNA
acttgaagagaagttgttcg

SEQ ID NO: 62878 - DNA, 20 bp, Artificial Sequence
  MKO10062878_A_mmu-mir-382
  gRNA
tgaagagaagttgttcgtgg

SEQ ID NO: 62879 - DNA, 20 bp, Artificial Sequence
  MKO10062879_A_mmu-mir-382
  gRNA
tacttgtgacgaatcattca

SEQ ID NO: 62880 - DNA, 20 bp, Artificial Sequence
  MKO10062880_A_mmu-mir-134
  gRNA
caccattcagggtgtgtgac

SEQ ID NO: 62881 - DNA, 20 bp, Artificial Sequence
  MKO10062881_A_mmu-mir-134
  gRNA
gtgtgtgactggttgaccag

SEQ ID NO: 62882 - DNA, 20 bp, Artificial Sequence
  MKO10062882_A_mmu-mir-134
  gRNA
gtgtgactggttgaccagag

SEQ ID NO: 62883 - DNA, 20 bp, Artificial Sequence
  MKO10062883_A_mmu-mir-134
  gRNA
cgtgcactctgttcaccctg

SEQ ID NO: 62884 - DNA, 20 bp, Artificial Sequence
  MKO10062884_A_mmu-mir-668
  gRNA
cccttcaggtaagtgtgcct

SEQ ID NO: 62885 - DNA, 20 bp, Artificial Sequence
  MKO10062885_A_mmu-mir-668
  gRNA
taatgtaggtgtatgtcact

SEQ ID NO: 62886 - DNA, 20 bp, Artificial Sequence
  MKO10062886_A_mmu-mir-668
  gRNA
taggtgtatgtcactcggct

SEQ ID NO: 62887 - DNA, 20 bp, Artificial Sequence
  MKO10062887_A_mmu-mir-668
  gRNA
attaagtgcatgctcacccg

SEQ ID NO: 62888 - DNA, 20 bp, Artificial Sequence
  MKO10062888_A_mmu-mir-485
  gRNA
catgtgtgatacttggagag

SEQ ID NO: 62889 - DNA, 20 bp, Artificial Sequence
  MKO10062889_A_mmu-mir-485
  gRNA
tgtgatacttggagagaggc

SEQ ID NO: 62890 - DNA, 20 bp, Artificial Sequence
  MKO10062890_A_mmu-mir-485
  gRNA
agagtttgacactagaagag

SEQ ID NO: 62891 - DNA, 20 bp, Artificial Sequence
  MKO10062891_A_mmu-mir-485
  gRNA
tcatctaaacgagtcataca

SEQ ID NO: 62892 - DNA, 20 bp, Artificial Sequence
  MKO10062892_A_mmu-mir-453
  gRNA
tccccctgtgaagaagatgc

SEQ ID NO: 62893 - DNA, 20 bp, Artificial Sequence
  MKO10062893_A_mmu-mir-453
  gRNA
aagtgccatcccctggtact

SEQ ID NO: 62894 - DNA, 20 bp, Artificial Sequence
  MKO10062894_A_mmu-mir-453
  gRNA
tgccatcccctggtacttgg

SEQ ID NO: 62895 - DNA, 20 bp, Artificial Sequence
  MKO10062895_A_mmu-mir-453
  gRNA
aacctccctccaagtaccag

SEQ ID NO: 62896 - DNA, 20 bp, Artificial Sequence
  MKO10062896_A_mmu-mir-154
  gRNA
cacgtgcggtgcttgaagat

SEQ ID NO: 62897 - DNA, 20 bp, Artificial Sequence
  MKO10062897_A_mmu-mir-154
  gRNA
cgaataaagcgaaggcaaca

SEQ ID NO: 62898 - DNA, 20 bp, Artificial Sequence
  MKO10062898_A_mmu-mir-154
  gRNA
attcgtcacgaataaagcga

SEQ ID NO: 62899 - DNA, 20 bp, Artificial Sequence
  MKO10062899_A_mmu-mir-154
  gRNA
gggatttggtactgaaaaat

SEQ ID NO: 62900 - DNA, 20 bp, Artificial Sequence
  MKO10062900_A_mmu-mir-496a
  gRNA
ctcgaaatcaagtgttcgaa

SEQ ID NO: 62901 - DNA, 20 bp, Artificial Sequence
  MKO10062901_A_mmu-mir-496a
  gRNA
gaaatcaagtgttcgaatgg

SEQ ID NO: 62902 - DNA, 20 bp, Artificial Sequence
  MKO10062902_A_mmu-mir-496a
  gRNA
ttacatggccaatctccttt

SEQ ID NO: 62903 - DNA, 20 bp, Artificial Sequence
  MKO10062903_A_mmu-mir-496a
  gRNA
aaataaaatgaacacaccat

SEQ ID NO: 62904 - DNA, 20 bp, Artificial Sequence
  MKO10062904_A_mmu-mir-377
  gRNA
gacgtttgattcttgagcag

SEQ ID NO: 62905 - DNA, 20 bp, Artificial Sequence
  MKO10062905_A_mmu-mir-377
  gRNA
tcttgagcagaggttgccct

SEQ ID NO: 62906 - DNA, 20 bp, Artificial Sequence
  MKO10062906_A_mmu-mir-377
  gRNA
caataaagcgaattcaccaa

SEQ ID NO: 62907 - DNA, 20 bp, Artificial Sequence
  MKO10062907_A_mmu-mir-377
  gRNA
attgatgttgaatcacacaa

SEQ ID NO: 62908 - DNA, 20 bp, Artificial Sequence
  MKO10062908_A_mmu-mir-541
  gRNA
actcttgccaaaatcagaga

SEQ ID NO: 62909 - DNA, 20 bp, Artificial Sequence
  MKO10062909_A_mmu-mir-541
  gRNA
cagaatcccttctctgattt

SEQ ID NO: 62910 - DNA, 20 bp, Artificial Sequence
  MKO10062910_A_mmu-mir-541
  gRNA
gccactcattttaaaactct

SEQ ID NO: 62911 - DNA, 20 bp, Artificial Sequence
  MKO10062911_A_mmu-mir-541
  gRNA
cttaggccataagcagagta

SEQ ID NO: 62912 - DNA, 20 bp, Artificial Sequence
  MKO10062912_A_mmu-mir-409
  gRNA
ccgagcctctccgtggtact

SEQ ID NO: 62913 - DNA, 20 bp, Artificial Sequence
  MKO10062913_A_mmu-mir-409
  gRNA
tacccgagcaactttgcatc

SEQ ID NO: 62914 - DNA, 20 bp, Artificial Sequence
  MKO10062914_A_mmu-mir-409
  gRNA
ccgagcaactttgcatctgg

SEQ ID NO: 62915 - DNA, 20 bp, Artificial Sequence
  MKO10062915_A_mmu-mir-409
  gRNA
tctggaggacgaatgttgct

SEQ ID NO: 62916 - DNA, 20 bp, Artificial Sequence
  MKO10062916_A_mmu-mir-412
  gRNA
gctctggggtatgggacgga

SEQ ID NO: 62917 - DNA, 20 bp, Artificial Sequence
  MKO10062917_A_mmu-mir-412
  gRNA
gggacggatggtcgaccagc

SEQ ID NO: 62918 - DNA, 20 bp, Artificial Sequence
  MKO10062918_A_mmu-mir-412
  gRNA
tgtttctaatgtacttcacc

SEQ ID NO: 62919 - DNA, 20 bp, Artificial Sequence
  MKO10062919_A_mmu-mir-412
  gRNA
tcacctggtccactagccgt

SEQ ID NO: 62920 - DNA, 20 bp, Artificial Sequence
  MKO10062920_A_mmu-mir-369
  gRNA
acacctctgctggtacttga

SEQ ID NO: 62921 - DNA, 20 bp, Artificial Sequence
  MKO10062921_A_mmu-mir-369
  gRNA
tcgaccgtgttatattcgct

SEQ ID NO: 62922 - DNA, 20 bp, Artificial Sequence
  MKO10062922_A_mmu-mir-369
  gRNA
tcagccaagcgaatataaca

SEQ ID NO: 62923 - DNA, 20 bp, Artificial Sequence
  MKO10062923_A_mmu-mir-369
  gRNA
ggctgacttcgaataataca

SEQ ID NO: 62924 - DNA, 20 bp, Artificial Sequence
  MKO10062924_A_mmu-mir-410
  gRNA
aacactgggtacttgaggag

SEQ ID NO: 62925 - DNA, 20 bp, Artificial Sequence
  MKO10062925_A_mmu-mir-410
  gRNA
aatgacgaatataacacaga

SEQ ID NO: 62926 - DNA, 20 bp, Artificial Sequence
  MKO10062926_A_mmu-mir-410
  gRNA
tggcaggtggtattgaaaac

SEQ ID NO: 62927 - DNA, 20 bp, Artificial Sequence
  MKO10062927_A_mmu-mir-410
  gRNA
cggtcaacactgggtacttg

SEQ ID NO: 62928 - DNA, 20 bp, Artificial Sequence
  MKO10062928_A_mmu-mir-3072
  gRNA
agtgcgagggaccccgaggg

SEQ ID NO: 62929 - DNA, 20 bp, Artificial Sequence
  MKO10062929_A_mmu-mir-3072
  gRNA
gagggaccccgagggagggc

SEQ ID NO: 62930 - DNA, 20 bp, Artificial Sequence
  MKO10062930_A_mmu-mir-3072
  gRNA
gagggagggcaggctgcccc

SEQ ID NO: 62931 - DNA, 20 bp, Artificial Sequence
  MKO10062931_A_mmu-mir-3072
  gRNA
ccccaggccctgccccctcc

SEQ ID NO: 62932 - DNA, 20 bp, Artificial Sequence
  MKO10062932_A_mmu-mir-1247
  gRNA
cgctccagtctcgacgttcc

SEQ ID NO: 62933 - DNA, 20 bp, Artificial Sequence
  MKO10062933_A_mmu-mir-1247
  gRNA
ctccagtctcgacgttcccg

SEQ ID NO: 62934 - DNA, 20 bp, Artificial Sequence
  MKO10062934_A_mmu-mir-1247
  gRNA
ggggcagagagcaacgtccg

SEQ ID NO: 62935 - DNA, 20 bp, Artificial Sequence
  MKO10062935_A_mmu-mir-1247
  gRNA
gagcaacgtccggggacgaa

SEQ ID NO: 62936 - DNA, 20 bp, Artificial Sequence
  MKO10062936_A_mmu-mir-3073a
  gRNA
tcctgcccagtggtcacagt

SEQ ID NO: 62937 - DNA, 20 bp, Artificial Sequence
  MKO10062937_A_mmu-mir-3073a
  gRNA
gtccactgtgaccatagtgc

SEQ ID NO: 62938 - DNA, 20 bp, Artificial Sequence
  MKO10062938_A_mmu-mir-3073a
  gRNA
tgaccatagtgcaggccagc

SEQ ID NO: 62939 - DNA, 20 bp, Artificial Sequence
  MKO10062939_A_mmu-mir-3073a
  gRNA
tggcgccaactgtgaccact

SEQ ID NO: 62940 - DNA, 20 bp, Artificial Sequence
  MKO10062940_A_mmu-mir-3073b
  gRNA
tcctgcccagtggtcacagt

SEQ ID NO: 62941 - DNA, 20 bp, Artificial Sequence
  MKO10062941_A_mmu-mir-3073b
  gRNA
tggcgccaactgtgaccact

SEQ ID NO: 62942 - DNA, 20 bp, Artificial Sequence
  MKO10062942_A_mmu-mir-3073b
  gRNA
acccatctagactctagggc

SEQ ID NO: 62943 - DNA, 20 bp, Artificial Sequence
  MKO10062943_A_mmu-mir-3073b
  gRNA
ggcctgcactatggtcacag

SEQ ID NO: 62944 - DNA, 20 bp, Artificial Sequence
  MKO10062944_A_mmu-mir-203
  gRNA
tgcaggcgcgcctggtccag

SEQ ID NO: 62945 - DNA, 20 bp, Artificial Sequence
  MKO10062945_A_mmu-mir-203
  gRNA
agcacaattgtgaaatgttt

SEQ ID NO: 62946 - DNA, 20 bp, Artificial Sequence
  MKO10062946_A_mmu-mir-203
  gRNA
atgtttaggaccactagacc

SEQ ID NO: 62947 - DNA, 20 bp, Artificial Sequence
  MKO10062947_A_mmu-mir-203
  gRNA
ctgtcaagaaccactggacc

SEQ ID NO: 62948 - DNA, 20 bp, Artificial Sequence
  MKO10062948_A_mmu-mir-6939
  gRNA
tggcccattcttccctgcag

SEQ ID NO: 62949 - DNA, 20 bp, Artificial Sequence
  MKO10062949_A_mmu-mir-6939
  gRNA
agcgggtcaagtgaggcctc

SEQ ID NO: 62950 - DNA, 20 bp, Artificial Sequence
  MKO10062950_A_mmu-mir-6939
  gRNA
gcttccaccaaccagctgcc

SEQ ID NO: 62951 - DNA, 20 bp, Artificial Sequence
  MKO10062951_A_mmu-mir-6939
  gRNA
gcctcacttgacccgctgca

SEQ ID NO: 62952 - DNA, 20 bp, Artificial Sequence
  MKO10062952_A_mmu-mir-6940
  gRNA
ttgtggaggagaggcagggc

SEQ ID NO: 62953 - DNA, 20 bp, Artificial Sequence
  MKO10062953_A_mmu-mir-6940
  gRNA
gcgggcaagcacggaaggta

SEQ ID NO: 62954 - DNA, 20 bp, Artificial Sequence
  MKO10062954_A_mmu-mir-6940
  gRNA
gtgctgcgggcaagcacgga

SEQ ID NO: 62955 - DNA, 20 bp, Artificial Sequence
  MKO10062955_A_mmu-mir-6940
  gRNA
tctcgtgctgcgggcaagca

SEQ ID NO: 62956 - DNA, 20 bp, Artificial Sequence
  MKO10062956_A_mmu-mir-6941
  gRNA
ggagcagccgagttagctgg

SEQ ID NO: 62957 - DNA, 20 bp, Artificial Sequence
  MKO10062957_A_mmu-mir-6941
  gRNA
cagctacccgtcagtccccc

SEQ ID NO: 62958 - DNA, 20 bp, Artificial Sequence
  MKO10062958_A_mmu-mir-6941
  gRNA
taactcggctgctcccaaag

SEQ ID NO: 62959 - DNA, 20 bp, Artificial Sequence
  MKO10062959_A_mmu-mir-6941
  gRNA
ggcacccctgggggactgac

SEQ ID NO: 62960 - DNA, 20 bp, Artificial Sequence
  MKO10062960_A_mmu-mir-7094-1
  gRNA
tactctgctgttctctccac

SEQ ID NO: 62961 - DNA, 20 bp, Artificial Sequence
  MKO10062961_A_mmu-mir-7094-1
  gRNA
ctgaatctgaagaggataca

SEQ ID NO: 62962 - DNA, 20 bp, Artificial Sequence
  MKO10062962_A_mmu-mir-7094-1
  gRNA
caccagttctgaatctgaag

SEQ ID NO: 62963 - DNA, 20 bp, Artificial Sequence
  MKO10062963_A_mmu-mir-7094-1
  gRNA
atcctcttcagattcagaac

SEQ ID NO: 62964 - DNA, 20 bp, Artificial Sequence
  MKO10062964_A_mmu-mir-7094-2
  gRNA
tactctgctgttctctccac

SEQ ID NO: 62965 - DNA, 20 bp, Artificial Sequence
  MKO10062965_A_mmu-mir-7094-2
  gRNA
ccaaatctggagaggataca

SEQ ID NO: 62966 - DNA, 20 bp, Artificial Sequence
  MKO10062966_A_mmu-mir-7094-2
  gRNA
caccagttccaaatctggag

SEQ ID NO: 62967 - DNA, 20 bp, Artificial Sequence
  MKO10062967_A_mmu-mir-7094-2
  gRNA
ccctgtatcctctccagatt

SEQ ID NO: 62968 - DNA, 20 bp, Artificial Sequence
  MKO10062968_A_mmu-mir-6388
  gRNA
ggcctcactgtgccatctgc

SEQ ID NO: 62969 - DNA, 20 bp, Artificial Sequence
  MKO10062969_A_mmu-mir-6388
  gRNA
atccccatagagagatgaga

SEQ ID NO: 62970 - DNA, 20 bp, Artificial Sequence
  MKO10062970_A_mmu-mir-6388
  gRNA
gacctgcagatggcacagtg

SEQ ID NO: 62971 - DNA, 20 bp, Artificial Sequence
  MKO10062971_A_mmu-mir-6388
  gRNA
agcagcacatgacctgcaga

SEQ ID NO: 62972 - DNA, 20 bp, Artificial Sequence
  MKO10062972_A_mmu-mir-153
  gRNA
atagtcacaaaagtgatcat

SEQ ID NO: 62973 - DNA, 20 bp, Artificial Sequence
  MKO10062973_A_mmu-mir-153
  gRNA
caacgtcacaaaaatgacac

SEQ ID NO: 62974 - DNA, 20 bp, Artificial Sequence
  MKO10062974_A_mmu-mir-153
  gRNA
acttttgtgactatgcaact

SEQ ID NO: 62975 - DNA, 20 bp, Artificial Sequence
  MKO10062975_A_mmu-mir-466i
  gRNA
tgacatgatctctgttgtgg

SEQ ID NO: 62976 - DNA, 20 bp, Artificial Sequence
  MKO10062976_A_mmu-mir-466i
  gRNA
cactgacatgatctctgttg

SEQ ID NO: 62977 - DNA, 20 bp, Artificial Sequence
  MKO10062977_A_mmu-mir-466i
  gRNA
cataatatatatcaaaaatg

SEQ ID NO: 62978 - DNA, 20 bp, Artificial Sequence
  MKO10062978_A_mmu-mir-6942
  gRNA
agtcctgggcctaggaggag

SEQ ID NO: 62979 - DNA, 20 bp, Artificial Sequence
  MKO10062979_A_mmu-mir-6942
  gRNA
cttggagtcctgggcctagg

SEQ ID NO: 62980 - DNA, 20 bp, Artificial Sequence
  MKO10062980_A_mmu-mir-6942
  gRNA
tgtaaaagactactgagagg

SEQ ID NO: 62981 - DNA, 20 bp, Artificial Sequence
  MKO10062981_A_mmu-mir-6942
  gRNA
gcaaatgttcccctcctcct

SEQ ID NO: 62982 - DNA, 20 bp, Artificial Sequence
  MKO10062982_A_mmu-mir-1896
  gRNA
ctcattacagtgatgtcttt

SEQ ID NO: 62983 - DNA, 20 bp, Artificial Sequence
  MKO10062983_A_mmu-mir-1896
  gRNA
aacgaccatggactctctga

SEQ ID NO: 62984 - DNA, 20 bp, Artificial Sequence
  MKO10062984_A_mmu-mir-1896
  gRNA
ggactctctgatggtgggtg

SEQ ID NO: 62985 - DNA, 20 bp, Artificial Sequence
  MKO10062985_A_mmu-mir-1896
  gRNA
ctctctgatggtgggtgagg

SEQ ID NO: 62986 - DNA, 20 bp, Artificial Sequence
  MKO10062986_A_mmu-mir-1983
  gRNA
ctagcgtgtttgaggcggaa

SEQ ID NO: 62987 - DNA, 20 bp, Artificial Sequence
  MKO10062987_A_mmu-mir-1983
  gRNA
aagggaagaaaacatgctcc

SEQ ID NO: 62988 - DNA, 20 bp, Artificial Sequence
  MKO10062988_A_mmu-mir-1983
  gRNA
aagaaaacatgctccaggtg

SEQ ID NO: 62989 - DNA, 20 bp, Artificial Sequence
  MKO10062989_A_mmu-mir-1983
  gRNA
gcgctaaccgattgcgccac

SEQ ID NO: 62990 - DNA, 20 bp, Artificial Sequence
  MKO10062990_A_mmu-mir-6368
  gRNA
cctccactgcttcccagagg

SEQ ID NO: 62991 - DNA, 20 bp, Artificial Sequence
  MKO10062991_A_mmu-mir-6368
  gRNA
aggaggttcatgccctgtct

SEQ ID NO: 62992 - DNA, 20 bp, Artificial Sequence
  MKO10062992_A_mmu-mir-6368
  gRNA
ggggagcagctggcagctcc

SEQ ID NO: 62993 - DNA, 20 bp, Artificial Sequence
  MKO10062993_A_mmu-mir-6368
  gRNA
tcctctgggaagcagtggag

SEQ ID NO: 62994 - DNA, 20 bp, Artificial Sequence
  MKO10062994_A_mmu-mir-5124a
  gRNA
attgatggggactagaaagg

SEQ ID NO: 62995 - DNA, 20 bp, Artificial Sequence
  MKO10062995_A_mmu-mir-5124a
  gRNA
gctcaaatgctcttagtcac

SEQ ID NO: 62996 - DNA, 20 bp, Artificial Sequence
  MKO10062996_A_mmu-mir-5124a
  gRNA
ttgagcacttgttcttgcag

SEQ ID NO: 62997 - DNA, 20 bp, Artificial Sequence
  MKO10062997_A_mmu-mir-5124a
  gRNA
ttcaatttctagcacctata

SEQ ID NO: 62998 - DNA, 20 bp, Artificial Sequence
  MKO10062998_A_mmu-let-7d
  gRNA
gcaacctactacctcttcct

SEQ ID NO: 62999 - DNA, 20 bp, Artificial Sequence
  MKO10062999_A_mmu-let-7d
  gRNA
gggcagagattttgcccaca

SEQ ID NO: 63000 - DNA, 20 bp, Artificial Sequence
  MKO10063000_A_mmu-let-7d
  gRNA
ggttcctaggaagaggtagt

SEQ ID NO: 63001 - DNA, 20 bp, Artificial Sequence
  MKO10063001_A_mmu-let-7d
  gRNA
taaaatgggttcctaggaag

SEQ ID NO: 63002 - DNA, 20 bp, Artificial Sequence
  MKO10063002_A_mmu-let-7f-1
  gRNA
gcaagtctactcctcaggga

SEQ ID NO: 63003 - DNA, 20 bp, Artificial Sequence
  MKO10063003_A_mmu-let-7f-1
  gRNA
acaatctattgccttccctg

SEQ ID NO: 63004 - DNA, 20 bp, Artificial Sequence
  MKO10063004_A_mmu-let-7f-1
  gRNA
ggtagtagattgtatagttg

SEQ ID NO: 63005 - DNA, 20 bp, Artificial Sequence
  MKO10063005_A_mmu-let-7f-1
  gRNA
aaacttgctctatcagagtg

SEQ ID NO: 63006 - DNA, 20 bp, Artificial Sequence
  MKO10063006_A_mmu-let-7a-1
  gRNA
gcagacttttccatcacctt

SEQ ID NO: 63007 - DNA, 20 bp, Artificial Sequence
  MKO10063007_A_mmu-let-7a-1
  gRNA
tactgtctttcctaaggtga

SEQ ID NO: 63008 - DNA, 20 bp, Artificial Sequence
  MKO10063008_A_mmu-let-7a-1
  gRNA
acaatctactgtctttccta

SEQ ID NO: 63009 - DNA, 20 bp, Artificial Sequence
  MKO10063009_A_mmu-let-7a-1
  gRNA
tcactgtgggatgaggtagt

SEQ ID NO: 63010 - DNA, 20 bp, Artificial Sequence
  MKO10063010_A_mmu-mir-683-1
  gRNA
agtagggctccatgcagccc

SEQ ID NO: 63011 - DNA, 20 bp, Artificial Sequence
  MKO10063011_A_mmu-mir-683-1
  gRNA
cactgcagtgcagaaaagct

SEQ ID NO: 63012 - DNA, 20 bp, Artificial Sequence
  MKO10063012_A_mmu-mir-683-1
  gRNA
gaaaagcttggcttttagcc

SEQ ID NO: 63013 - DNA, 20 bp, Artificial Sequence
  MKO10063013_A_mmu-mir-683-1
  gRNA
gctgtaagctgtgtcctcct

SEQ ID NO: 63014 - DNA, 20 bp, Artificial Sequence
  MKO10063014_A_mmu-mir-683-2
  gRNA
agtagggctccatgcagccc

SEQ ID NO: 63015 - DNA, 20 bp, Artificial Sequence
  MKO10063015_A_mmu-mir-683-2
  gRNA
cactgcagtgcagaaaagct

SEQ ID NO: 63016 - DNA, 20 bp, Artificial Sequence
  MKO10063016_A_mmu-mir-683-2
  gRNA
gaaaagcttggcttttagcc

SEQ ID NO: 63017 - DNA, 20 bp, Artificial Sequence
  MKO10063017_A_mmu-mir-683-2
  gRNA
gctgtaagctgtgtcctcct

SEQ ID NO: 63018 - DNA, 20 bp, Artificial Sequence
  MKO10063018_A_mmu-mir-6943
  gRNA
cccaagtgggagatggggtg

SEQ ID NO: 63019 - DNA, 20 bp, Artificial Sequence
  MKO10063019_A_mmu-mir-6943
  gRNA
atggggtgaggttggaagct

SEQ ID NO: 63020 - DNA, 20 bp, Artificial Sequence
  MKO10063020_A_mmu-mir-6943
  gRNA
ctgcttccatacccctaccc

SEQ ID NO: 63021 - DNA, 20 bp, Artificial Sequence
  MKO10063021_A_mmu-mir-6943
  gRNA
ctgggtaggggtatggaagc

SEQ ID NO: 63022 - DNA, 20 bp, Artificial Sequence
  MKO10063022_A_mmu-mir-6944
  gRNA
agccgcctcctgagggcaca

SEQ ID NO: 63023 - DNA, 20 bp, Artificial Sequence
  MKO10063023_A_mmu-mir-6944
  gRNA
ggaagagttagagagctggg

SEQ ID NO: 63024 - DNA, 20 bp, Artificial Sequence
  MKO10063024_A_mmu-mir-6944
  gRNA
aagagttagagagctgggcg

SEQ ID NO: 63025 - DNA, 20 bp, Artificial Sequence
  MKO10063025_A_mmu-mir-6944
  gRNA
tcttcccttgtgccctcagg

SEQ ID NO: 63026 - DNA, 20 bp, Artificial Sequence
  MKO10063026_A_mmu-mir-6945
  gRNA
ctgagcaactgtctatggga

SEQ ID NO: 63027 - DNA, 20 bp, Artificial Sequence
  MKO10063027_A_mmu-mir-6945
  gRNA
agggcagagctcagaacctc

SEQ ID NO: 63028 - DNA, 20 bp, Artificial Sequence
  MKO10063028_A_mmu-mir-6945
  gRNA
gctcagaacctctggttctg

SEQ ID NO: 63029 - DNA, 20 bp, Artificial Sequence
  MKO10063029_A_mmu-mir-6945
  gRNA
cctctggttctgtgggcacc

SEQ ID NO: 63030 - DNA, 20 bp, Artificial Sequence
  MKO10063030_A_mmu-mir-874
  gRNA
agaaagcaggcccagccagt

SEQ ID NO: 63031 - DNA, 20 bp, Artificial Sequence
  MKO10063031_A_mmu-mir-874
  gRNA
ggcccagccagtcggtccct

SEQ ID NO: 63032 - DNA, 20 bp, Artificial Sequence
  MKO10063032_A_mmu-mir-874
  gRNA
tcggtccctcgggccagggc

SEQ ID NO: 63033 - DNA, 20 bp, Artificial Sequence
  MKO10063033_A_mmu-mir-874
  gRNA
gtctctcttaccctggtgcg

SEQ ID NO: 63034 - DNA, 20 bp, Artificial Sequence
  MKO10063034_A_mmu-mir-6369
  gRNA
cctcccattgatggccaact

SEQ ID NO: 63035 - DNA, 20 bp, Artificial Sequence
  MKO10063035_A_mmu-mir-6369
  gRNA
ctgaactgagccaactgacc

SEQ ID NO: 63036 - DNA, 20 bp, Artificial Sequence
  MKO10063036_A_mmu-mir-6369
  gRNA
tctagttgcatatgtagcag

SEQ ID NO: 63037 - DNA, 20 bp, Artificial Sequence
  MKO10063037_A_mmu-mir-6369
  gRNA
gttggtgagtgtctagacac

SEQ ID NO: 63038 - DNA, 20 bp, Artificial Sequence
  MKO10063038_A_mmu-mir-7a-1
  gRNA
cattatctgtcctgtagagg

SEQ ID NO: 63039 - DNA, 20 bp, Artificial Sequence
  MKO10063039_A_mmu-mir-7a-1
  gRNA
tagaggtggcctgtgccata

SEQ ID NO: 63040 - DNA, 20 bp, Artificial Sequence
  MKO10063040_A_mmu-mir-7a-1
  gRNA
cacagtctgccatatggcac

SEQ ID NO: 63041 - DNA, 20 bp, Artificial Sequence
  MKO10063041_A_mmu-mir-7a-1
  gRNA
gatgttggcctagttctgtg

SEQ ID NO: 63042 - DNA, 20 bp, Artificial Sequence
  MKO10063042_A_mmu-mir-713
  gRNA
ctattggcgggcctatccgg

SEQ ID NO: 63043 - DNA, 20 bp, Artificial Sequence
  MKO10063043_A_mmu-mir-713
  gRNA
gcctatccggaggccctgat

SEQ ID NO: 63044 - DNA, 20 bp, Artificial Sequence
  MKO10063044_A_mmu-mir-713
  gRNA
gcactgaaggcacacagcat

SEQ ID NO: 63045 - DNA, 20 bp, Artificial Sequence
  MKO10063045_A_mmu-mir-713
  gRNA
accaatcagggcctccggat

SEQ ID NO: 63046 - DNA, 20 bp, Artificial Sequence
  MKO10063046_A_mmu-mir-23b
  gRNA
cctcacctgctctggctgct

SEQ ID NO: 63047 - DNA, 20 bp, Artificial Sequence
  MKO10063047_A_mmu-mir-23b
  gRNA
gctctggctgcttgggttcc

SEQ ID NO: 63048 - DNA, 20 bp, Artificial Sequence
  MKO10063048_A_mmu-mir-23b
  gRNA
gagattaaaatcacattgcc

SEQ ID NO: 63049 - DNA, 20 bp, Artificial Sequence
  MKO10063049_A_mmu-mir-23b
  gRNA
aagtcacaaatcagcatgcc

SEQ ID NO: 63050 - DNA, 20 bp, Artificial Sequence
  MKO10063050_A_mmu-mir-27b
  gRNA
aggtgcagagcttagctgat

SEQ ID NO: 63051 - DNA, 20 bp, Artificial Sequence
  MKO10063051_A_mmu-mir-27b
  gRNA
ggtttccgctttgttcacag

SEQ ID NO: 63052 - DNA, 20 bp, Artificial Sequence
  MKO10063052_A_mmu-mir-27b
  gRNA
cttagccactgtgaacaaag

SEQ ID NO: 63053 - DNA, 20 bp, Artificial Sequence
  MKO10063053_A_mmu-mir-27b
  gRNA
gctgattggtgaacagtgat

SEQ ID NO: 63054 - DNA, 20 bp, Artificial Sequence
  MKO10063054_A_mmu-mir-3074-1
  gRNA
acacactggctcagttcagc

SEQ ID NO: 63055 - DNA, 20 bp, Artificial Sequence
  MKO10063055_A_mmu-mir-3074-1
  gRNA
tggctcagttcagcaggaac

SEQ ID NO: 63056 - DNA, 20 bp, Artificial Sequence
  MKO10063056_A_mmu-mir-3074-1
  gRNA
tcagctcagtaggcaccgga

SEQ ID NO: 63057 - DNA, 20 bp, Artificial Sequence
  MKO10063057_A_mmu-mir-3074-1
  gRNA
agaactgatatcagctcagt

SEQ ID NO: 63058 - DNA, 20 bp, Artificial Sequence
  MKO10063058_A_mmu-mir-24-1
  gRNA
acacactggctcagttcagc

SEQ ID NO: 63059 - DNA, 20 bp, Artificial Sequence
  MKO10063059_A_mmu-mir-24-1
  gRNA
tggctcagttcagcaggaac

SEQ ID NO: 63060 - DNA, 20 bp, Artificial Sequence
  MKO10063060_A_mmu-mir-24-1
  gRNA
tcagctcagtaggcaccgga

SEQ ID NO: 63061 - DNA, 20 bp, Artificial Sequence
  MKO10063061_A_mmu-mir-24-1
  gRNA
agaactgatatcagctcagt

SEQ ID NO: 63062 - DNA, 20 bp, Artificial Sequence
  MKO10063062_A_mmu-mir-692-2
  gRNA
accaacctccgcagggtggc

SEQ ID NO: 63063 - DNA, 20 bp, Artificial Sequence
  MKO10063063_A_mmu-mir-692-2
  gRNA
gggccacaaccagcgcagac

SEQ ID NO: 63064 - DNA, 20 bp, Artificial Sequence
  MKO10063064_A_mmu-mir-692-2
  gRNA
agcgcagactggcgcgcccc

SEQ ID NO: 63065 - DNA, 20 bp, Artificial Sequence
  MKO10063065_A_mmu-mir-692-2
  gRNA
cactctcaagcacgactagg

SEQ ID NO: 63066 - DNA, 20 bp, Artificial Sequence
  MKO10063066_A_mmu-mir-682
  gRNA
agagacgagccgtcggcatc

SEQ ID NO: 63067 - DNA, 20 bp, Artificial Sequence
  MKO10063067_A_mmu-mir-682
  gRNA
gccgtcggcatctggcactg

SEQ ID NO: 63068 - DNA, 20 bp, Artificial Sequence
  MKO10063068_A_mmu-mir-682
  gRNA
tgcatgaaaacagtggccgg

SEQ ID NO: 63069 - DNA, 20 bp, Artificial Sequence
  MKO10063069_A_mmu-mir-682
  gRNA
aaacagtggccggcggggcc

SEQ ID NO: 63070 - DNA, 20 bp, Artificial Sequence
  MKO10063070_A_mmu-mir-3961
  gRNA
gttgttgtccaactgagctg

SEQ ID NO: 63071 - DNA, 20 bp, Artificial Sequence
  MKO10063071_A_mmu-mir-3961
  gRNA
tcaactgctctgagtgcatt

SEQ ID NO: 63072 - DNA, 20 bp, Artificial Sequence
  MKO10063072_A_mmu-mir-3961
  gRNA
tcagctgccctcagctcagt

SEQ ID NO: 63073 - DNA, 20 bp, Artificial Sequence
  MKO10063073_A_mmu-mir-3961
  gRNA
ctgagtgcatttggtcctct

SEQ ID NO: 63074 - DNA, 20 bp, Artificial Sequence
  MKO10063074_A_mmu-mir-9-2
  gRNA
gggaagcgagttgttatctt

SEQ ID NO: 63075 - DNA, 20 bp, Artificial Sequence
  MKO10063075_A_mmu-mir-9-2
  gRNA
atctagctgtatgagtgtat

SEQ ID NO: 63076 - DNA, 20 bp, Artificial Sequence
  MKO10063076_A_mmu-mir-9-2
  gRNA
cgaaagtaaaaactccttca

SEQ ID NO: 63077 - DNA, 20 bp, Artificial Sequence
  MKO10063077_A_mmu-mir-9-2
  gRNA
cttgaaggagtttttacttt

SEQ ID NO: 63078 - DNA, 20 bp, Artificial Sequence
  MKO10063078_A_mmu-mir-5624
  gRNA
tagttaggttattctaatta

SEQ ID NO: 63079 - DNA, 20 bp, Artificial Sequence
  MKO10063079_A_mmu-mir-5624
  gRNA
attaaggcagagtttacaat

SEQ ID NO: 63080 - DNA, 20 bp, Artificial Sequence
  MKO10063080_A_mmu-mir-5624
  gRNA
attaaggcagagtttacaat

SEQ ID NO: 63081 - DNA, 20 bp, Artificial Sequence
  MKO10063081_A_mmu-mir-5624
  gRNA
agaataacctaactaaatta

SEQ ID NO: 63082 - DNA, 20 bp, Artificial Sequence
  MKO10063082_A_mmu-mir-1940
  gRNA
tgtaccgtgctgccttccat

SEQ ID NO: 63083 - DNA, 20 bp, Artificial Sequence
  MKO10063083_A_mmu-mir-1940
  gRNA
gttaagacctccaacagtaa

SEQ ID NO: 63084 - DNA, 20 bp, Artificial Sequence
  MKO10063084_A_mmu-mir-1940
  gRNA
gacctccaacagtaaagggc

SEQ ID NO: 63085 - DNA, 20 bp, Artificial Sequence
  MKO10063085_A_mmu-mir-1940
  gRNA
tccaacagtaaagggctggc

SEQ ID NO: 63086 - DNA, 20 bp, Artificial Sequence
  MKO10063086_A_mmu-mir-582
  gRNA
ccctcgtaatctgtactctt

SEQ ID NO: 63087 - DNA, 20 bp, Artificial Sequence
  MKO10063087_A_mmu-mir-582
  gRNA
tgttgaacaactgaacccaa

SEQ ID NO: 63088 - DNA, 20 bp, Artificial Sequence
  MKO10063088_A_mmu-mir-582
  gRNA
caattagttagattagtaac

SEQ ID NO: 63089 - DNA, 20 bp, Artificial Sequence
  MKO10063089_A_mmu-mir-582
  gRNA
tttgggttcagttgttcaac

SEQ ID NO: 63090 - DNA, 20 bp, Artificial Sequence
  MKO10063090_A_mmu-mir-1904
  gRNA
tagctgttctgctcctctgg

SEQ ID NO: 63091 - DNA, 20 bp, Artificial Sequence
  MKO10063091_A_mmu-mir-1904
  gRNA
tgttctgctcctctggaggg

SEQ ID NO: 63092 - DNA, 20 bp, Artificial Sequence
  MKO10063092_A_mmu-mir-1904
  gRNA
ctgtttgcacacctctcttc

SEQ ID NO: 63093 - DNA, 20 bp, Artificial Sequence
  MKO10063093_A_mmu-mir-1904
  gRNA
aaacaggaacctccctccag

SEQ ID NO: 63094 - DNA, 20 bp, Artificial Sequence
  MKO10063094_A_mmu-mir-449c
  gRNA
ggatgaagtgtgggtgtgtc

SEQ ID NO: 63095 - DNA, 20 bp, Artificial Sequence
  MKO10063095_A_mmu-mir-449c
  gRNA
gaagtgtgggtgtgtcaggc

SEQ ID NO: 63096 - DNA, 20 bp, Artificial Sequence
  MKO10063096_A_mmu-mir-449c
  gRNA
gcaggcagtgcattgctagc

SEQ ID NO: 63097 - DNA, 20 bp, Artificial Sequence
  MKO10063097_A_mmu-mir-449c
  gRNA
tagtgcagctagcaactgtt

SEQ ID NO: 63098 - DNA, 20 bp, Artificial Sequence
  MKO10063098_A_mmu-mir-449b
  gRNA
cgaacttgccagactcgggt

SEQ ID NO: 63099 - DNA, 20 bp, Artificial Sequence
  MKO10063099_A_mmu-mir-449b
  gRNA
gggtaggcagtgttgttagc

SEQ ID NO: 63100 - DNA, 20 bp, Artificial Sequence
  MKO10063100_A_mmu-mir-449b
  gRNA
gtgttgttagctggctgcgt

SEQ ID NO: 63101 - DNA, 20 bp, Artificial Sequence
  MKO10063101_A_mmu-mir-449b
  gRNA
ttagctggctgcgttgggtc

SEQ ID NO: 63102 - DNA, 20 bp, Artificial Sequence
  MKO10063102_A_mmu-mir-449a
  gRNA
gctgtcttgcctgtgtgtga

SEQ ID NO: 63103 - DNA, 20 bp, Artificial Sequence
  MKO10063103_A_mmu-mir-449a
  gRNA
cttgcctgtgtgtgatggct

SEQ ID NO: 63104 - DNA, 20 bp, Artificial Sequence
  MKO10063104_A_mmu-mir-449a
  gRNA
cttggcagtgtattgttagc

SEQ ID NO: 63105 - DNA, 20 bp, Artificial Sequence
  MKO10063105_A_mmu-mir-449a
  gRNA
actgccaagccatcacacac

SEQ ID NO: 63106 - DNA, 20 bp, Artificial Sequence
  MKO10063106_A_mmu-mir-5124b
  gRNA
tcagttgtcagcatactcat

SEQ ID NO: 63107 - DNA, 20 bp, Artificial Sequence
  MKO10063107_A_mmu-mir-5124b
  gRNA
actgatcttgcagaagactc

SEQ ID NO: 63108 - DNA, 20 bp, Artificial Sequence
  MKO10063108_A_mmu-mir-6946
  gRNA
agaaaagaaaagaaaagaaa

SEQ ID NO: 63109 - DNA, 20 bp, Artificial Sequence
  MKO10063109_A_mmu-mir-6946
  gRNA
ggctgaaacagagtctgaaa

SEQ ID NO: 63110 - DNA, 20 bp, Artificial Sequence
  MKO10063110_A_mmu-mir-6946
  gRNA
aagggagagaaagaaatgca

SEQ ID NO: 63111 - DNA, 20 bp, Artificial Sequence
  MKO10063111_A_mmu-mir-6946
  gRNA
ggagagaaagaaatgcaagg

SEQ ID NO: 63112 - DNA, 20 bp, Artificial Sequence
  MKO10063112_A_mmu-mir-7210
  gRNA
tttatatgtaagtaacaatg

SEQ ID NO: 63113 - DNA, 20 bp, Artificial Sequence
  MKO10063113_A_mmu-mir-7210
  gRNA
attgttacttacatataaag

SEQ ID NO: 63114 - DNA, 20 bp, Artificial Sequence
  MKO10063114_A_mmu-mir-7210
  gRNA
cccccaataacattgtagac

SEQ ID NO: 63115 - DNA, 20 bp, Artificial Sequence
  MKO10063115_A_mmu-mir-7210
  gRNA
cctgtctacaatgttattgg

SEQ ID NO: 63116 - DNA, 20 bp, Artificial Sequence
  MKO10063116_A_mmu-mir-3075
  gRNA
gtactgtctgggagcagcca

SEQ ID NO: 63117 - DNA, 20 bp, Artificial Sequence
  MKO10063117_A_mmu-mir-3075
  gRNA
tacctcttgtcttctatcct

SEQ ID NO: 63118 - DNA, 20 bp, Artificial Sequence
  MKO10063118_A_mmu-mir-3075
  gRNA
cttctatccttggccttcct

SEQ ID NO: 63119 - DNA, 20 bp, Artificial Sequence
  MKO10063119_A_mmu-mir-3075
  gRNA
gacaagaggtaacttgtcct

SEQ ID NO: 63120 - DNA, 20 bp, Artificial Sequence
  MKO10063120_A_mmu-mir-7672
  gRNA
cgtcggctgccaggttcatg

SEQ ID NO: 63121 - DNA, 20 bp, Artificial Sequence
  MKO10063121_A_mmu-mir-7672
  gRNA
ctctgatctcgtcggctgcc

SEQ ID NO: 63122 - DNA, 20 bp, Artificial Sequence
  MKO10063122_A_mmu-mir-7672
  gRNA
gacttgacagcgggcgactc

SEQ ID NO: 63123 - DNA, 20 bp, Artificial Sequence
  MKO10063123_A_mmu-mir-7672
  gRNA
ctcccggtggacttgacagc

SEQ ID NO: 63124 - DNA, 20 bp, Artificial Sequence
  MKO10063124_A_mmu-mir-6947
  gRNA
ttctgtgtgggctcatccag

SEQ ID NO: 63125 - DNA, 20 bp, Artificial Sequence
  MKO10063125_A_mmu-mir-6947
  gRNA
tgtgggctcatccagtggag

SEQ ID NO: 63126 - DNA, 20 bp, Artificial Sequence
  MKO10063126_A_mmu-mir-6947
  gRNA
ctgacagcagcctctttccc

SEQ ID NO: 63127 - DNA, 20 bp, Artificial Sequence
  MKO10063127_A_mmu-mir-6947
  gRNA
gcgtgcacgagcctctccac

SEQ ID NO: 63128 - DNA, 20 bp, Artificial Sequence
  MKO10063128_A_mmu-mir-3076
  gRNA
gatgctgatcttatctgcaa

SEQ ID NO: 63129 - DNA, 20 bp, Artificial Sequence
  MKO10063129_A_mmu-mir-3076
  gRNA
ggagttctgttctaacacag

SEQ ID NO: 63130 - DNA, 20 bp, Artificial Sequence
  MKO10063130_A_mmu-mir-3076
  gRNA
cctttctcttagccgcactc

SEQ ID NO: 63131 - DNA, 20 bp, Artificial Sequence
  MKO10063131_A_mmu-mir-3076
  gRNA
ttgcagataagatcagcatc

SEQ ID NO: 63132 - DNA, 20 bp, Artificial Sequence
  MKO10063132_A_mmu-mir-346
  gRNA
cctctctgttgctctgaagg

SEQ ID NO: 63133 - DNA, 20 bp, Artificial Sequence
  MKO10063133_A_mmu-mir-346
  gRNA
gggctgggcctgcagctgcc

SEQ ID NO: 63134 - DNA, 20 bp, Artificial Sequence
  MKO10063134_A_mmu-mir-346
  gRNA
agctctgcccaggcagctgc

SEQ ID NO: 63135 - DNA, 20 bp, Artificial Sequence
  MKO10063135_A_mmu-mir-346
  gRNA
tcgaaggagcagctctgccc

SEQ ID NO: 63136 - DNA, 20 bp, Artificial Sequence
  MKO10063136_A_mmu-mir-327
  gRNA
cttataacttgaggggcatg

SEQ ID NO: 63137 - DNA, 20 bp, Artificial Sequence
  MKO10063137_A_mmu-mir-327
  gRNA
atgtgcaatgtgccatcaag

SEQ ID NO: 63138 - DNA, 20 bp, Artificial Sequence
  MKO10063138_A_mmu-mir-327
  gRNA
tgtgccatcaagagggatgt

SEQ ID NO: 63139 - DNA, 20 bp, Artificial Sequence
  MKO10063139_A_mmu-mir-327
  gRNA
ctcatgcccctcaagttata

SEQ ID NO: 63140 - DNA, 20 bp, Artificial Sequence
  MKO10063140_A_mmu-mir-5131
  gRNA
gccgccgcggccgttacgct

SEQ ID NO: 63141 - DNA, 20 bp, Artificial Sequence
  MKO10063141_A_mmu-mir-5131
  gRNA
cgccgcggccgttacgctcg

SEQ ID NO: 63142 - DNA, 20 bp, Artificial Sequence
  MKO10063142_A_mmu-mir-5131
  gRNA
gttacgctcggggctccgtg

SEQ ID NO: 63143 - DNA, 20 bp, Artificial Sequence
  MKO10063143_A_mmu-mir-5131
  gRNA
cggggctccgtggggcgccg

SEQ ID NO: 63144 - DNA, 20 bp, Artificial Sequence
  MKO10063144_A_mmu-mir-378c
  gRNA
gggctagcctctcattagtt

SEQ ID NO: 63145 - DNA, 20 bp, Artificial Sequence
  MKO10063145_A_mmu-mir-378c
  gRNA
gacttggagtcagaagcctt

SEQ ID NO: 63146 - DNA, 20 bp, Artificial Sequence
  MKO10063146_A_mmu-mir-378c
  gRNA
aaacaaaactatactggact

SEQ ID NO: 63147 - DNA, 20 bp, Artificial Sequence
  MKO10063147_A_mmu-mir-378c
  gRNA
agatcagatagactacatgt

SEQ ID NO: 63148 - DNA, 20 bp, Artificial Sequence
  MKO10063148_A_mmu-mir-686
  gRNA
atccgctgcacccccagcca

SEQ ID NO: 63149 - DNA, 20 bp, Artificial Sequence
  MKO10063149_A_mmu-mir-686
  gRNA
ccccagccatggtgcccaga

SEQ ID NO: 63150 - DNA, 20 bp, Artificial Sequence
  MKO10063150_A_mmu-mir-686
  gRNA
gccatggtgcccagaaggta

SEQ ID NO: 63151 - DNA, 20 bp, Artificial Sequence
  MKO10063151_A_mmu-mir-686
  gRNA
ctattactttcttcaccgtc

SEQ ID NO: 63152 - DNA, 20 bp, Artificial Sequence
  MKO10063152_A_mmu-mir-6948
  gRNA
tgaacaatctgtggtcagac

SEQ ID NO: 63153 - DNA, 20 bp, Artificial Sequence
  MKO10063153_A_mmu-mir-6948
  gRNA
caatctgtggtcagacagga

SEQ ID NO: 63154 - DNA, 20 bp, Artificial Sequence
  MKO10063154_A_mmu-mir-6948
  gRNA
tggtcagacaggaaggacag

SEQ ID NO: 63155 - DNA, 20 bp, Artificial Sequence
  MKO10063155_A_mmu-mir-6948
  gRNA
agcctgggatcagttcagac

SEQ ID NO: 63156 - DNA, 20 bp, Artificial Sequence
  MKO10063156_A_mmu-mir-208a
  gRNA
cgtgagtgtcaggtataacc

SEQ ID NO: 63157 - DNA, 20 bp, Artificial Sequence
  MKO10063157_A_mmu-mir-208a
  gRNA
gccaaaagctcacccgtcaa

SEQ ID NO: 63158 - DNA, 20 bp, Artificial Sequence
  MKO10063158_A_mmu-mir-208a
  gRNA
gcaaaaagcttgttggtcag

SEQ ID NO: 63159 - DNA, 20 bp, Artificial Sequence
  MKO10063159_A_mmu-mir-208a
  gRNA
gacgggtgagcttttggccc

SEQ ID NO: 63160 - DNA, 20 bp, Artificial Sequence
  MKO10063160_A_mmu-mir-208b
  gRNA
ccttttgttcgtcttatatt

SEQ ID NO: 63161 - DNA, 20 bp, Artificial Sequence
  MKO10063161_A_mmu-mir-208b
  gRNA
gagcaaaaagcttccctgag

SEQ ID NO: 63162 - DNA, 20 bp, Artificial Sequence
  MKO10063162_A_mmu-mir-208b
  gRNA
cgaacaaaaggtttgtctga

SEQ ID NO: 63163 - DNA, 20 bp, Artificial Sequence
  MKO10063163_A_mmu-mir-208b
  gRNA
ccgaatataagacgaacaaa

SEQ ID NO: 63164 - DNA, 20 bp, Artificial Sequence
  MKO10063164_A_mmu-mir-6949
  gRNA
gtcaccctgtggatagaaaa

SEQ ID NO: 63165 - DNA, 20 bp, Artificial Sequence
  MKO10063165_A_mmu-mir-6949
  gRNA
caccctgtggatagaaaaag

SEQ ID NO: 63166 - DNA, 20 bp, Artificial Sequence
  MKO10063166_A_mmu-mir-6949
  gRNA
ttcccctttttctatccaca

SEQ ID NO: 63167 - DNA, 20 bp, Artificial Sequence
  MKO10063167_A_mmu-mir-6949
  gRNA
gagaaagtgggtctagaaag

SEQ ID NO: 63168 - DNA, 20 bp, Artificial Sequence
  MKO10063168_A_mmu-mir-3077
  gRNA
gggcgggcgcggcctgcgga

SEQ ID NO: 63169 - DNA, 20 bp, Artificial Sequence
  MKO10063169_A_mmu-mir-3077
  gRNA
gcggcctgcggacgggtggg

SEQ ID NO: 63170 - DNA, 20 bp, Artificial Sequence
  MKO10063170_A_mmu-mir-3077
  gRNA
ctgcggacgggtgggcgggc

SEQ ID NO: 63171 - DNA, 20 bp, Artificial Sequence
  MKO10063171_A_mmu-mir-3077
  gRNA
gggtgggcgggcaggccaaa

SEQ ID NO: 63172 - DNA, 20 bp, Artificial Sequence
  MKO10063172_A_mmu-mir-719
  gRNA
ggagaacagaagccaagaag

SEQ ID NO: 63173 - DNA, 20 bp, Artificial Sequence
  MKO10063173_A_mmu-mir-719
  gRNA
aatgtttttgggtgatgctg

SEQ ID NO: 63174 - DNA, 20 bp, Artificial Sequence
  MKO10063174_A_mmu-mir-719
  gRNA
gtgcttaaagaacagtatct

SEQ ID NO: 63175 - DNA, 20 bp, Artificial Sequence
  MKO10063175_A_mmu-mir-719
  gRNA
gggtgcattctgccacttct

SEQ ID NO: 63176 - DNA, 20 bp, Artificial Sequence
  MKO10063176_A_mmu-mir-16-1
  gRNA
ttcagcagcacagtcaatac

SEQ ID NO: 63177 - DNA, 20 bp, Artificial Sequence
  MKO10063177_A_mmu-mir-16-1
  gRNA
ccaatatttacgtgctgcta

SEQ ID NO: 63178 - DNA, 20 bp, Artificial Sequence
  MKO10063178_A_mmu-mir-16-1
  gRNA
ttgactgtgctgctgaagta

SEQ ID NO: 63179 - DNA, 20 bp, Artificial Sequence
  MKO10063179_A_mmu-mir-16-1
  gRNA
ccttagcagcacgtaaatat

SEQ ID NO: 63180 - DNA, 20 bp, Artificial Sequence
  MKO10063180_A_mmu-mir-15a
  gRNA
tattttgaggcagcacagta

SEQ ID NO: 63181 - DNA, 20 bp, Artificial Sequence
  MKO10063181_A_mmu-mir-15a
  gRNA
tgctactttactccaagggt

SEQ ID NO: 63182 - DNA, 20 bp, Artificial Sequence
  MKO10063182_A_mmu-mir-15a
  gRNA
gagttttcaaaaccaaccct

SEQ ID NO: 63183 - DNA, 20 bp, Artificial Sequence
  MKO10063183_A_mmu-mir-15a
  gRNA
gatcaggtccttgtattttg

SEQ ID NO: 63184 - DNA, 20 bp, Artificial Sequence
  MKO10063184_A_mmu-mir-8098
  gRNA
tcttaggtggcgccggcttg

SEQ ID NO: 63185 - DNA, 20 bp, Artificial Sequence
  MKO10063185_A_mmu-mir-8098
  gRNA
gcgccggcttgcggctagtg

SEQ ID NO: 63186 - DNA, 20 bp, Artificial Sequence
  MKO10063186_A_mmu-mir-8098
  gRNA
gcttgcggctagtgtggcgg

SEQ ID NO: 63187 - DNA, 20 bp, Artificial Sequence
  MKO10063187_A_mmu-mir-8098
  gRNA
ggctagtgtggcggcggtgt

SEQ ID NO: 63188 - DNA, 20 bp, Artificial Sequence
  MKO10063188_A_mmu-mir-6541
  gRNA
ttctcaagaaacccatgaga

SEQ ID NO: 63189 - DNA, 20 bp, Artificial Sequence
  MKO10063189_A_mmu-mir-6541
  gRNA
actgccctcagccatctcat

SEQ ID NO: 63190 - DNA, 20 bp, Artificial Sequence
  MKO10063190_A_mmu-mir-6541
  gRNA
acaagcccttccttttgcac

SEQ ID NO: 63191 - DNA, 20 bp, Artificial Sequence
  MKO10063191_A_mmu-mir-6541
  gRNA
cccttccttttgcacaggca

SEQ ID NO: 63192 - DNA, 20 bp, Artificial Sequence
  MKO10063192_A_mmu-mir-598
  gRNA
ctccatgatgctgctgatgc

SEQ ID NO: 63193 - DNA, 20 bp, Artificial Sequence
  MKO10063193_A_mmu-mir-598
  gRNA
ccattttcagctcgcaccat

SEQ ID NO: 63194 - DNA, 20 bp, Artificial Sequence
  MKO10063194_A_mmu-mir-598
  gRNA
catgatgctgctgatgctgg

SEQ ID NO: 63195 - DNA, 20 bp, Artificial Sequence
  MKO10063195_A_mmu-mir-598
  gRNA
gatgctggcggtgatgccga

SEQ ID NO: 63196 - DNA, 20 bp, Artificial Sequence
  MKO10063196_A_mmu-mir-124-1
  gRNA
ctctctctccgtgttcacag

SEQ ID NO: 63197 - DNA, 20 bp, Artificial Sequence
  MKO10063197_A_mmu-mir-124-1
  gRNA
tttaaatgtccatacaatta

SEQ ID NO: 63198 - DNA, 20 bp, Artificial Sequence
  MKO10063198_A_mmu-mir-124-1
  gRNA
cacgcggtgaatgccaagaa

SEQ ID NO: 63199 - DNA, 20 bp, Artificial Sequence
  MKO10063199_A_mmu-mir-124-1
  gRNA
cgcggtgaatgccaagaatg

SEQ ID NO: 63200 - DNA, 20 bp, Artificial Sequence
  MKO10063200_A_mmu-mir-3078
  gRNA
cagctaccttgtattgtgct

SEQ ID NO: 63201 - DNA, 20 bp, Artificial Sequence
  MKO10063201_A_mmu-mir-3078
  gRNA
gctaccttgtattgtgcttg

SEQ ID NO: 63202 - DNA, 20 bp, Artificial Sequence
  MKO10063202_A_mmu-mir-3078
  gRNA
tgtattgtgcttggggttgc

SEQ ID NO: 63203 - DNA, 20 bp, Artificial Sequence
  MKO10063203_A_mmu-mir-3078
  gRNA
gggttgctggggtagtcttt

SEQ ID NO: 63204 - DNA, 20 bp, Artificial Sequence
  MKO10063204_A_mmu-mir-6539
  gRNA
ctcctccccagatgcccaca

SEQ ID NO: 63205 - DNA, 20 bp, Artificial Sequence
  MKO10063205_A_mmu-mir-6539
  gRNA
gagcaaccagcaactccgag

SEQ ID NO: 63206 - DNA, 20 bp, Artificial Sequence
  MKO10063206_A_mmu-mir-6539
  gRNA
atcactgtgctttactgtcc

SEQ ID NO: 63207 - DNA, 20 bp, Artificial Sequence
  MKO10063207_A_mmu-mir-6539
  gRNA
gtgctttactgtcctggggg

SEQ ID NO: 63208 - DNA, 20 bp, Artificial Sequence
  MKO10063208_A_mmu-mir-6950
  gRNA
acccaggctctgtcctggag

SEQ ID NO: 63209 - DNA, 20 bp, Artificial Sequence
  MKO10063209_A_mmu-mir-6950
  gRNA
caggctctgtcctggagtgg

SEQ ID NO: 63210 - DNA, 20 bp, Artificial Sequence
  MKO10063210_A_mmu-mir-6950
  gRNA
tctctgtcttgatcctctcc

SEQ ID NO: 63211 - DNA, 20 bp, Artificial Sequence
  MKO10063211_A_mmu-mir-6950
  gRNA
ttctgactgtcctccactcc

SEQ ID NO: 63212 - DNA, 20 bp, Artificial Sequence
  MKO10063212_A_mmu-mir-320
  gRNA
cttctcttcccggttcttcc

SEQ ID NO: 63213 - DNA, 20 bp, Artificial Sequence
  MKO10063213_A_mmu-mir-320
  gRNA
tgagagggcgaaaaaggatg

SEQ ID NO: 63214 - DNA, 20 bp, Artificial Sequence
  MKO10063214_A_mmu-mir-320
  gRNA
agggcgaaaaaggatgtggg

SEQ ID NO: 63215 - DNA, 20 bp, Artificial Sequence
  MKO10063215_A_mmu-mir-320
  gRNA
gcgaaaaaggatgtgggagg

SEQ ID NO: 63216 - DNA, 20 bp, Artificial Sequence
  MKO10063216_A_mmu-mir-687
  gRNA
aggattcattgctgcattcc

SEQ ID NO: 63217 - DNA, 20 bp, Artificial Sequence
  MKO10063217_A_mmu-mir-687
  gRNA
ggaatgcagcaatgaatcct

SEQ ID NO: 63218 - DNA, 20 bp, Artificial Sequence
  MKO10063218_A_mmu-mir-687
  gRNA
acagactgaaacaataaccc

SEQ ID NO: 63219 - DNA, 20 bp, Artificial Sequence
  MKO10063219_A_mmu-mir-687
  gRNA
tcagtctgtcattgtattct

SEQ ID NO: 63220 - DNA, 20 bp, Artificial Sequence
  MKO10063220_A_mmu-mir-1971
  gRNA
aaaaacagacaagttgttcc

SEQ ID NO: 63221 - DNA, 20 bp, Artificial Sequence
  MKO10063221_A_mmu-mir-1971
  gRNA
agcagaagctgcctatctac

SEQ ID NO: 63222 - DNA, 20 bp, Artificial Sequence
  MKO10063222_A_mmu-mir-1971
  gRNA
ctgcctatctactgggtcca

SEQ ID NO: 63223 - DNA, 20 bp, Artificial Sequence
  MKO10063223_A_mmu-mir-1971
  gRNA
gttccatggacccagtagat

SEQ ID NO: 63224 - DNA, 20 bp, Artificial Sequence
  MKO10063224_A_mmu-mir-759
  gRNA
aataaattaaatgcctaaac

SEQ ID NO: 63225 - DNA, 20 bp, Artificial Sequence
  MKO10063225_A_mmu-mir-759
  gRNA
tgtttgcactctgccagttt

SEQ ID NO: 63226 - DNA, 20 bp, Artificial Sequence
  MKO10063226_A_mmu-mir-759
  gRNA
tcagatctaaatgtttgcac

SEQ ID NO: 63227 - DNA, 20 bp, Artificial Sequence
  MKO10063227_A_mmu-mir-759
  gRNA
aaacatttaatttgttccaa

SEQ ID NO: 63228 - DNA, 20 bp, Artificial Sequence
  MKO10063228_A_mmu-mir-5130
  gRNA
gccggccactgagagccgcg

SEQ ID NO: 63229 - DNA, 20 bp, Artificial Sequence
  MKO10063229_A_mmu-mir-5130
  gRNA
cagtgcgcccacgagagccc

SEQ ID NO: 63230 - DNA, 20 bp, Artificial Sequence
  MKO10063230_A_mmu-mir-5130
  gRNA
ctgcctcgcccgcgcgctcc

SEQ ID NO: 63231 - DNA, 20 bp, Artificial Sequence
  MKO10063231_A_mmu-mir-5130
  gRNA
tcgcaccgcgcggctctcag

SEQ ID NO: 63232 - DNA, 20 bp, Artificial Sequence
  MKO10063232_A_mmu-mir-6390
  gRNA
tcaaacctctcaactttgaa

SEQ ID NO: 63233 - DNA, 20 bp, Artificial Sequence
  MKO10063233_A_mmu-mir-6390
  gRNA
tgttgctgtagccaactacc

SEQ ID NO: 63234 - DNA, 20 bp, Artificial Sequence
  MKO10063234_A_mmu-mir-6390
  gRNA
tgtaaccattcaaagttgag

SEQ ID NO: 63235 - DNA, 20 bp, Artificial Sequence
  MKO10063235_A_mmu-mir-6390
  gRNA
tgtcactcccaccaggtagt

SEQ ID NO: 63236 - DNA, 20 bp, Artificial Sequence
  MKO10063236_A_mmu-mir-17
  gRNA
tgtgtgcatctactgcagtg

SEQ ID NO: 63237 - DNA, 20 bp, Artificial Sequence
  MKO10063237_A_mmu-mir-17
  gRNA
cactttgacattattctgac

SEQ ID NO: 63238 - DNA, 20 bp, Artificial Sequence
  MKO10063238_A_mmu-mir-17
  gRNA
tgtcaaagtgcttacagtgc

SEQ ID NO: 63239 - DNA, 20 bp, Artificial Sequence
  MKO10063239_A_mmu-mir-17
  gRNA
cattatgctgacagctgcct

SEQ ID NO: 63240 - DNA, 20 bp, Artificial Sequence
  MKO10063240_A_mmu-mir-18a
  gRNA
gctgcgtgctttttgttcta

SEQ ID NO: 63241 - DNA, 20 bp, Artificial Sequence
  MKO10063241_A_mmu-mir-18a
  gRNA
actgccctaagtgctccttc

SEQ ID NO: 63242 - DNA, 20 bp, Artificial Sequence
  MKO10063242_A_mmu-mir-18a
  gRNA
aaaaagcacgcagcaccagc

SEQ ID NO: 63243 - DNA, 20 bp, Artificial Sequence
  MKO10063243_A_mmu-mir-18a
  gRNA
tatgccagaaggagcactta

SEQ ID NO: 63244 - DNA, 20 bp, Artificial Sequence
  MKO10063244_A_mmu-mir-19a
  gRNA
gcaaatctatgcaaaactga

SEQ ID NO: 63245 - DNA, 20 bp, Artificial Sequence
  MKO10063245_A_mmu-mir-19a
  gRNA
aatctatgcaaaactgatgg

SEQ ID NO: 63246 - DNA, 20 bp, Artificial Sequence
  MKO10063246_A_mmu-mir-19a
  gRNA
aactatgcaaaactaacaga

SEQ ID NO: 63247 - DNA, 20 bp, Artificial Sequence
  MKO10063247_A_mmu-mir-19a
  gRNA
gagggctgcaaacacaacta

SEQ ID NO: 63248 - DNA, 20 bp, Artificial Sequence
  MKO10063248_A_mmu-mir-20a
  gRNA
cactaaagtgcttatagtgc

SEQ ID NO: 63249 - DNA, 20 bp, Artificial Sequence
  MKO10063249_A_mmu-mir-20a
  gRNA
cgaggctggagttctacagc

SEQ ID NO: 63250 - DNA, 20 bp, Artificial Sequence
  MKO10063250_A_mmu-mir-20a
  gRNA
tgtagaactccagcctcgcc

SEQ ID NO: 63251 - DNA, 20 bp, Artificial Sequence
  MKO10063251_A_mmu-mir-20a
  gRNA
tcacatcacacacaccacgc

SEQ ID NO: 63252 - DNA, 20 bp, Artificial Sequence
  MKO10063252_A_mmu-mir-19b-1
  gRNA
tggtctatggttagttttgc

SEQ ID NO: 63253 - DNA, 20 bp, Artificial Sequence
  MKO10063253_A_mmu-mir-19b-1
  gRNA
aatccatgcaaaactgactg

SEQ ID NO: 63254 - DNA, 20 bp, Artificial Sequence
  MKO10063254_A_mmu-mir-19b-1
  gRNA
ccatgcaaaactgactgtgg

SEQ ID NO: 63255 - DNA, 20 bp, Artificial Sequence
  MKO10063255_A_mmu-mir-19b-1
  gRNA
ccaccacagtcagttttgca

SEQ ID NO: 63256 - DNA, 20 bp, Artificial Sequence
  MKO10063256_A_mmu-mir-92a-1
  gRNA
aaacccctttctacacaggt

SEQ ID NO: 63257 - DNA, 20 bp, Artificial Sequence
  MKO10063257_A_mmu-mir-92a-1
  gRNA
gtatggtattgcacttgtcc

SEQ ID NO: 63258 - DNA, 20 bp, Artificial Sequence
  MKO10063258_A_mmu-mir-92a-1
  gRNA
ttgtcccggcctgttgagtt

SEQ ID NO: 63259 - DNA, 20 bp, Artificial Sequence
  MKO10063259_A_mmu-mir-92a-1
  gRNA
aaatcccaacctgtgtagaa

SEQ ID NO: 63260 - DNA, 20 bp, Artificial Sequence
  MKO10063260_A_mmu-mir-6239
  gRNA
tggcttccatggttccgaac

SEQ ID NO: 63261 - DNA, 20 bp, Artificial Sequence
  MKO10063261_A_mmu-mir-6239
  gRNA
actcggtgctgtggcttcca

SEQ ID NO: 63262 - DNA, 20 bp, Artificial Sequence
  MKO10063262_A_mmu-mir-6239
  gRNA
ggtgctagcgttggatcact

SEQ ID NO: 63263 - DNA, 20 bp, Artificial Sequence
  MKO10063263_A_mmu-mir-6239
  gRNA
agtgttgtgggtgctagcgt

SEQ ID NO: 63264 - DNA, 20 bp, Artificial Sequence
  MKO10063264_A_mmu-mir-6241
  gRNA
agtcattataacactcacgg

SEQ ID NO: 63265 - DNA, 20 bp, Artificial Sequence
  MKO10063265_A_mmu-mir-6241
  gRNA
attataacactcacggcggc

SEQ ID NO: 63266 - DNA, 20 bp, Artificial Sequence
  MKO10063266_A_mmu-mir-6241
  gRNA
ttcccatcaagtgatctgtg

SEQ ID NO: 63267 - DNA, 20 bp, Artificial Sequence
  MKO10063267_A_mmu-mir-6241
  gRNA
tgatctgtgagggaatttcc

SEQ ID NO: 63268 - DNA, 20 bp, Artificial Sequence
  MKO10063268_A_mmu-mir-6391
  gRNA
acttgctggacactggatgc

SEQ ID NO: 63269 - DNA, 20 bp, Artificial Sequence
  MKO10063269_A_mmu-mir-6391
  gRNA
ccctcacattatctagactc

SEQ ID NO: 63270 - DNA, 20 bp, Artificial Sequence
  MKO10063270_A_mmu-mir-6391
  gRNA
cacattatctagactctggg

SEQ ID NO: 63271 - DNA, 20 bp, Artificial Sequence
  MKO10063271_A_mmu-mir-6391
  gRNA
gtgtccagcaagtgaggcac

SEQ ID NO: 63272 - DNA, 20 bp, Artificial Sequence
  MKO10063272_A_mmu-mir-1898
  gRNA
ttttgtatgaacataggtca

SEQ ID NO: 63273 - DNA, 20 bp, Artificial Sequence
  MKO10063273_A_mmu-mir-1898
  gRNA
acataggtcaaggttcacag

SEQ ID NO: 63274 - DNA, 20 bp, Artificial Sequence
  MKO10063274_A_mmu-mir-1898
  gRNA
ttactgttttgtatgaacat

SEQ ID NO: 63275 - DNA, 20 bp, Artificial Sequence
  MKO10063275_A_mmu-mir-1898
  gRNA
gaacataggtcaaggttcac

SEQ ID NO: 63276 - DNA, 20 bp, Artificial Sequence
  MKO10063276_A_mmu-mir-7212
  gRNA
atgtcatctgggggcttgtg

SEQ ID NO: 63277 - DNA, 20 bp, Artificial Sequence
  MKO10063277_A_mmu-mir-7212
  gRNA
catctgggggcttgtgtggt

SEQ ID NO: 63278 - DNA, 20 bp, Artificial Sequence
  MKO10063278_A_mmu-mir-7212
  gRNA
accctaacacacacgtctcc

SEQ ID NO: 63279 - DNA, 20 bp, Artificial Sequence
  MKO10063279_A_mmu-mir-7212
  gRNA
tctgggggcttgtgtggtag

SEQ ID NO: 63280 - DNA, 20 bp, Artificial Sequence
  MKO10063280_A_mmu-mir-7117
  gRNA
gtgatctgggggctcagctg

SEQ ID NO: 63281 - DNA, 20 bp, Artificial Sequence
  MKO10063281_A_mmu-mir-7117
  gRNA
tgggggaaagagaaggacag

SEQ ID NO: 63282 - DNA, 20 bp, Artificial Sequence
  MKO10063282_A_mmu-mir-7117
  gRNA
tattgctggggttattctgg

SEQ ID NO: 63283 - DNA, 20 bp, Artificial Sequence
  MKO10063283_A_mmu-mir-7117
  gRNA
acaaggtgttctttgtgatc

SEQ ID NO: 63284 - DNA, 20 bp, Artificial Sequence
  MKO10063284_A_mmu-mir-3964
  gRNA
tccttgctagctacataact

SEQ ID NO: 63285 - DNA, 20 bp, Artificial Sequence
  MKO10063285_A_mmu-mir-3964
  gRNA
ggagaactcacagcttcata

SEQ ID NO: 63286 - DNA, 20 bp, Artificial Sequence
  MKO10063286_A_mmu-mir-3964
  gRNA
agctacataacttggaaagc

SEQ ID NO: 63287 - DNA, 20 bp, Artificial Sequence
  MKO10063287_A_mmu-mir-3964
  gRNA
caggccctgcacttcaccca

SEQ ID NO: 63288 - DNA, 20 bp, Artificial Sequence
  MKO10063288_A_mmu-mir-599
  gRNA
ggtttgataaactgacacaa

SEQ ID NO: 63289 - DNA, 20 bp, Artificial Sequence
  MKO10063289_A_mmu-mir-599
  gRNA
tcatcttatcaaatacactg

SEQ ID NO: 63290 - DNA, 20 bp, Artificial Sequence
  MKO10063290_A_mmu-mir-599
  gRNA
ttgataagatgacataggag

SEQ ID NO: 63291 - DNA, 20 bp, Artificial Sequence
  MKO10063291_A_mmu-mir-599
  gRNA
tgtatttgataagatgacat

SEQ ID NO: 63292 - DNA, 20 bp, Artificial Sequence
  MKO10063292_A_mmu-mir-875
  gRNA
aacatagcctcagtattttc

SEQ ID NO: 63293 - DNA, 20 bp, Artificial Sequence
  MKO10063293_A_mmu-mir-875
  gRNA
atgaacacctgataaaactg

SEQ ID NO: 63294 - DNA, 20 bp, Artificial Sequence
  MKO10063294_A_mmu-mir-875
  gRNA
aaaatcacctgaaaatactg

SEQ ID NO: 63295 - DNA, 20 bp, Artificial Sequence
  MKO10063295_A_mmu-mir-875
  gRNA
gaggtatagtaccacagaac

SEQ ID NO: 63296 - DNA, 20 bp, Artificial Sequence
  MKO10063296_A_mmu-mir-8097
  gRNA
gtgttctctaagcagattaa

SEQ ID NO: 63297 - DNA, 20 bp, Artificial Sequence
  MKO10063297_A_mmu-mir-8097
  gRNA
gcagattaatggatgcagcg

SEQ ID NO: 63298 - DNA, 20 bp, Artificial Sequence
  MKO10063298_A_mmu-mir-8097
  gRNA
ggatgcagcgaggaaaacga

SEQ ID NO: 63299 - DNA, 20 bp, Artificial Sequence
  MKO10063299_A_mmu-mir-8097
  gRNA
gcagcgaggaaaacgacgga

SEQ ID NO: 63300 - DNA, 20 bp, Artificial Sequence
  MKO10063300_A_mmu-mir-6951
  gRNA
gcttttttcttcacaaatac

SEQ ID NO: 63301 - DNA, 20 bp, Artificial Sequence
  MKO10063301_A_mmu-mir-6951
  gRNA
tcacacaaatacaatgaaac

SEQ ID NO: 63302 - DNA, 20 bp, Artificial Sequence
  MKO10063302_A_mmu-mir-1907
  gRNA
tccagatcctctgctgctcc

SEQ ID NO: 63303 - DNA, 20 bp, Artificial Sequence
  MKO10063303_A_mmu-mir-1907
  gRNA
agccagcaagagacagcgag

SEQ ID NO: 63304 - DNA, 20 bp, Artificial Sequence
  MKO10063304_A_mmu-mir-1907
  gRNA
caagagacagcgagggggag

SEQ ID NO: 63305 - DNA, 20 bp, Artificial Sequence
  MKO10063305_A_mmu-mir-1907
  gRNA
agagacagcgagggggagtg

SEQ ID NO: 63306 - DNA, 20 bp, Artificial Sequence
  MKO10063306_A_mmu-mir-28c
  gRNA
aatagactgtgagctcctca

SEQ ID NO: 63307 - DNA, 20 bp, Artificial Sequence
  MKO10063307_A_mmu-mir-28c
  gRNA
actgtgagctcctcaagggt

SEQ ID NO: 63308 - DNA, 20 bp, Artificial Sequence
  MKO10063308_A_mmu-mir-28c
  gRNA
acaagcagcaaattaaatac

SEQ ID NO: 63309 - DNA, 20 bp, Artificial Sequence
  MKO10063309_A_mmu-mir-28c
  gRNA
agatatgatccctacccttg

SEQ ID NO: 63310 - DNA, 20 bp, Artificial Sequence
  MKO10063310_A_mmu-mir-30b
  gRNA
catgtatgacagctgagtgt

SEQ ID NO: 63311 - DNA, 20 bp, Artificial Sequence
  MKO10063311_A_mmu-mir-30b
  gRNA
ctgtcatacatgcgttggct

SEQ ID NO: 63312 - DNA, 20 bp, Artificial Sequence
  MKO10063312_A_mmu-mir-30b
  gRNA
tgtttacatgaactgaaact

SEQ ID NO: 63313 - DNA, 20 bp, Artificial Sequence
  MKO10063313_A_mmu-mir-30b
  gRNA
gatgtttacgtcagctgtct

SEQ ID NO: 63314 - DNA, 20 bp, Artificial Sequence
  MKO10063314_A_mmu-mir-30d
  gRNA
caaacatctgactgaaagct

SEQ ID NO: 63315 - DNA, 20 bp, Artificial Sequence
  MKO10063315_A_mmu-mir-30d
  gRNA
tctgactgaaagcttggctg

SEQ ID NO: 63316 - DNA, 20 bp, Artificial Sequence
  MKO10063316_A_mmu-mir-30d
  gRNA
tgtggcttacagcttccagt

SEQ ID NO: 63317 - DNA, 20 bp, Artificial Sequence
  MKO10063317_A_mmu-mir-30d
  gRNA
tggcttacagcttccagtcg

SEQ ID NO: 63318 - DNA, 20 bp, Artificial Sequence
  MKO10063318_A_mmu-mir-151
  gRNA
tatgacgatccctgtcctca

SEQ ID NO: 63319 - DNA, 20 bp, Artificial Sequence
  MKO10063319_A_mmu-mir-151
  gRNA
tcaaggagcctcagtctagt

SEQ ID NO: 63320 - DNA, 20 bp, Artificial Sequence
  MKO10063320_A_mmu-mir-151
  gRNA
ggagcctcagtctagtaggg

SEQ ID NO: 63321 - DNA, 20 bp, Artificial Sequence
  MKO10063321_A_mmu-mir-151
  gRNA
actagactgtgagctcctcg

SEQ ID NO: 63322 - DNA, 20 bp, Artificial Sequence
  MKO10063322_A_mmu-mir-6952
  gRNA
tgtccagcgtcttctgtggg

SEQ ID NO: 63323 - DNA, 20 bp, Artificial Sequence
  MKO10063323_A_mmu-mir-6952
  gRNA
gctgggccctgaatggtggg

SEQ ID NO: 63324 - DNA, 20 bp, Artificial Sequence
  MKO10063324_A_mmu-mir-6952
  gRNA
tgtttcaccgcccaccattc

SEQ ID NO: 63325 - DNA, 20 bp, Artificial Sequence
  MKO10063325_A_mmu-mir-6952
  gRNA
ctgcctcccacagaagacgc

SEQ ID NO: 63326 - DNA, 20 bp, Artificial Sequence
  MKO10063326_A_mmu-mir-1942
  gRNA
caaccagatgaagacatctg

SEQ ID NO: 63327 - DNA, 20 bp, Artificial Sequence
  MKO10063327_A_mmu-mir-1942
  gRNA
ctcagatgtcttcatctggt

SEQ ID NO: 63328 - DNA, 20 bp, Artificial Sequence
  MKO10063328_A_mmu-mir-1942
  gRNA
taacctcagatgtcttcatc

SEQ ID NO: 63329 - DNA, 20 bp, Artificial Sequence
  MKO10063329_A_mmu-mir-1942
  gRNA
gatatttgaataaagagaag

SEQ ID NO: 63330 - DNA, 20 bp, Artificial Sequence
  MKO10063330_A_mmu-mir-6953
  gRNA
tgtagggaagggtaaggggc

SEQ ID NO: 63331 - DNA, 20 bp, Artificial Sequence
  MKO10063331_A_mmu-mir-6953
  gRNA
tagggaagggtaaggggcag

SEQ ID NO: 63332 - DNA, 20 bp, Artificial Sequence
  MKO10063332_A_mmu-mir-6953
  gRNA
gaagggtaaggggcaggggc

SEQ ID NO: 63333 - DNA, 20 bp, Artificial Sequence
  MKO10063333_A_mmu-mir-6953
  gRNA
gcagggattcaagtgccctc

SEQ ID NO: 63334 - DNA, 20 bp, Artificial Sequence
  MKO10063334_A_mmu-mir-3079
  gRNA
caaaggccacacctaagcta

SEQ ID NO: 63335 - DNA, 20 bp, Artificial Sequence
  MKO10063335_A_mmu-mir-3079
  gRNA
ggactttcatctgatgagcc

SEQ ID NO: 63336 - DNA, 20 bp, Artificial Sequence
  MKO10063336_A_mmu-mir-3079
  gRNA
tgagcctggagccaggtgaa

SEQ ID NO: 63337 - DNA, 20 bp, Artificial Sequence
  MKO10063337_A_mmu-mir-3079
  gRNA
tcagatcaaagtccttagct

SEQ ID NO: 63338 - DNA, 20 bp, Artificial Sequence
  MKO10063338_A_mmu-mir-6954
  gRNA
tggctactctggggcagttc

SEQ ID NO: 63339 - DNA, 20 bp, Artificial Sequence
  MKO10063339_A_mmu-mir-6954
  gRNA
ctgcagccagctcttcccct

SEQ ID NO: 63340 - DNA, 20 bp, Artificial Sequence
  MKO10063340_A_mmu-mir-6954
  gRNA
ggggaagagctggctgcagg

SEQ ID NO: 63341 - DNA, 20 bp, Artificial Sequence
  MKO10063341_A_mmu-mir-6954
  gRNA
tctgctctgtggctactctg

SEQ ID NO: 63342 - DNA, 20 bp, Artificial Sequence
  MKO10063342_A_mmu-mir-7676-1
  gRNA
tccaggagtgacataatcag

SEQ ID NO: 63343 - DNA, 20 bp, Artificial Sequence
  MKO10063343_A_mmu-mir-7676-1
  gRNA
gaggccatcatactgccctc

SEQ ID NO: 63344 - DNA, 20 bp, Artificial Sequence
  MKO10063344_A_mmu-mir-7676-1
  gRNA
gggccctgagggcagtatga

SEQ ID NO: 63345 - DNA, 20 bp, Artificial Sequence
  MKO10063345_A_mmu-mir-7676-1
  gRNA
cctgtgggcagagtgagcac

SEQ ID NO: 63346 - DNA, 20 bp, Artificial Sequence
  MKO10063346_A_mmu-mir-7676-2
  gRNA
ccggtgctcactctgcccac

SEQ ID NO: 63347 - DNA, 20 bp, Artificial Sequence
  MKO10063347_A_mmu-mir-7676-2
  gRNA
tccaggagtgacataatcag

SEQ ID NO: 63348 - DNA, 20 bp, Artificial Sequence
  MKO10063348_A_mmu-mir-7676-2
  gRNA
gggccctgagggcagtatga

SEQ ID NO: 63349 - DNA, 20 bp, Artificial Sequence
  MKO10063349_A_mmu-mir-7676-2
  gRNA
gcctctgattatgtcactcc

SEQ ID NO: 63350 - DNA, 20 bp, Artificial Sequence
  MKO10063350_A_mmu-mir-6955
  gRNA
tgcagggaagggagggcctc

SEQ ID NO: 63351 - DNA, 20 bp, Artificial Sequence
  MKO10063351_A_mmu-mir-6955
  gRNA
aagggagggcctcaggactc

SEQ ID NO: 63352 - DNA, 20 bp, Artificial Sequence
  MKO10063352_A_mmu-mir-6955
  gRNA
ggagggcctcaggactcagg

SEQ ID NO: 63353 - DNA, 20 bp, Artificial Sequence
  MKO10063353_A_mmu-mir-6955
  gRNA
gggtcacctcctgagtcctg

SEQ ID NO: 63354 - DNA, 20 bp, Artificial Sequence
  MKO10063354_A_mmu-mir-6956
  gRNA
gggccctggcaggcagtgag

SEQ ID NO: 63355 - DNA, 20 bp, Artificial Sequence
  MKO10063355_A_mmu-mir-6956
  gRNA
aggcagtgagtgggtgggac

SEQ ID NO: 63356 - DNA, 20 bp, Artificial Sequence
  MKO10063356_A_mmu-mir-6956
  gRNA
gtgagtgggtgggactggcc

SEQ ID NO: 63357 - DNA, 20 bp, Artificial Sequence
  MKO10063357_A_mmu-mir-6956
  gRNA
cagctcctgagaggataggc

SEQ ID NO: 63358 - DNA, 20 bp, Artificial Sequence
  MKO10063358_A_mmu-mir-1943
  gRNA
gctggtcctggtgactggga

SEQ ID NO: 63359 - DNA, 20 bp, Artificial Sequence
  MKO10063359_A_mmu-mir-1943
  gRNA
gtcctggtgactgggaaggg

SEQ ID NO: 63360 - DNA, 20 bp, Artificial Sequence
  MKO10063360_A_mmu-mir-1943
  gRNA
gtgactgggaagggaggagc

SEQ ID NO: 63361 - DNA, 20 bp, Artificial Sequence
  MKO10063361_A_mmu-mir-1943
  gRNA
agggaggagctggcacctgc

SEQ ID NO: 63362 - DNA, 20 bp, Artificial Sequence
  MKO10063362_A_mmu-mir-7213
  gRNA
atctcagactggctctcttg

SEQ ID NO: 63363 - DNA, 20 bp, Artificial Sequence
  MKO10063363_A_mmu-mir-7213
  gRNA
atctcagactgggtctcttg

SEQ ID NO: 63364 - DNA, 20 bp, Artificial Sequence
  MKO10063364_A_mmu-mir-7213
  gRNA
aggtagccccccttcctttc

SEQ ID NO: 63365 - DNA, 20 bp, Artificial Sequence
  MKO10063365_A_mmu-mir-7213
  gRNA
aggtagcctgaaaggaaggg

SEQ ID NO: 63366 - DNA, 20 bp, Artificial Sequence
  MKO10063366_A_mmu-mir-6957
  gRNA
gttactgccagaagagagac

SEQ ID NO: 63367 - DNA, 20 bp, Artificial Sequence
  MKO10063367_A_mmu-mir-6957
  gRNA
ccagaagagagacaggatct

SEQ ID NO: 63368 - DNA, 20 bp, Artificial Sequence
  MKO10063368_A_mmu-mir-6957
  gRNA
gagagacaggatctagggaa

SEQ ID NO: 63369 - DNA, 20 bp, Artificial Sequence
  MKO10063369_A_mmu-mir-6957
  gRNA
gatctcttgttttctcttcc

SEQ ID NO: 63370 - DNA, 20 bp, Artificial Sequence
  MKO10063370_A_mmu-mir-5113
  gRNA
gaggtttaaagacctaggga

SEQ ID NO: 63371 - DNA, 20 bp, Artificial Sequence
  MKO10063371_A_mmu-mir-5113
  gRNA
aagacctagggatgggacag

SEQ ID NO: 63372 - DNA, 20 bp, Artificial Sequence
  MKO10063372_A_mmu-mir-5113
  gRNA
acctagggatgggacagagg

SEQ ID NO: 63373 - DNA, 20 bp, Artificial Sequence
  MKO10063373_A_mmu-mir-5113
  gRNA
tccctcctctctgctctccc

SEQ ID NO: 63374 - DNA, 20 bp, Artificial Sequence
  MKO10063374_A_mmu-mir-33
  gRNA
aatgtttccacagtgcatca

SEQ ID NO: 63375 - DNA, 20 bp, Artificial Sequence
  MKO10063375_A_mmu-mir-33
  gRNA
gtttccacagtgcatcacgg

SEQ ID NO: 63376 - DNA, 20 bp, Artificial Sequence
  MKO10063376_A_mmu-mir-33
  gRNA
gcactgtggaaacattgcac

SEQ ID NO: 63377 - DNA, 20 bp, Artificial Sequence
  MKO10063377_A_mmu-mir-33
  gRNA
caggcctccgtgatgcactg

SEQ ID NO: 63378 - DNA, 20 bp, Artificial Sequence
  MKO10063378_A_mmu-mir-7684
  gRNA
agccccagtcagcagctcca

SEQ ID NO: 63379 - DNA, 20 bp, Artificial Sequence
  MKO10063379_A_mmu-mir-7684
  gRNA
tggttgccccactgctgccc

SEQ ID NO: 63380 - DNA, 20 bp, Artificial Sequence
  MKO10063380_A_mmu-mir-7684
  gRNA
tgctgactggggctggcctg

SEQ ID NO: 63381 - DNA, 20 bp, Artificial Sequence
  MKO10063381_A_mmu-mir-7684
  gRNA
aaccatggagctgctgactg

SEQ ID NO: 63382 - DNA, 20 bp, Artificial Sequence
  MKO10063382_A_mmu-mir-3080
  gRNA
gatgtcaagcgctttgcccg

SEQ ID NO: 63383 - DNA, 20 bp, Artificial Sequence
  MKO10063383_A_mmu-mir-3080
  gRNA
ctttgcccgaggatgactac

SEQ ID NO: 63384 - DNA, 20 bp, Artificial Sequence
  MKO10063384_A_mmu-mir-3080
  gRNA
cagggccacgatccaagaac

SEQ ID NO: 63385 - DNA, 20 bp, Artificial Sequence
  MKO10063385_A_mmu-mir-3080
  gRNA
gtggccctgtagtcatcctc

SEQ ID NO: 63386 - DNA, 20 bp, Artificial Sequence
  MKO10063386_A_mmu-mir-6392
  gRNA
atcttcttcctgacccgctc

SEQ ID NO: 63387 - DNA, 20 bp, Artificial Sequence
  MKO10063387_A_mmu-mir-6392
  gRNA
cctgacccgctctggcgccc

SEQ ID NO: 63388 - DNA, 20 bp, Artificial Sequence
  MKO10063388_A_mmu-mir-6392
  gRNA
ggcgccctggtcctgtcagc

SEQ ID NO: 63389 - DNA, 20 bp, Artificial Sequence
  MKO10063389_A_mmu-mir-6392
  gRNA
tgagcagcagggaacgacgc

SEQ ID NO: 63390 - DNA, 20 bp, Artificial Sequence
  MKO10063390_A_mmu-mir-1249
  gRNA
aggagttcgccaggtgaaga

SEQ ID NO: 63391 - DNA, 20 bp, Artificial Sequence
  MKO10063391_A_mmu-mir-1249
  gRNA
gagttcgccaggtgaagaag

SEQ ID NO: 63392 - DNA, 20 bp, Artificial Sequence
  MKO10063392_A_mmu-mir-1249
  gRNA
ccaggtgaagaaggggggga

SEQ ID NO: 63393 - DNA, 20 bp, Artificial Sequence
  MKO10063393_A_mmu-mir-1249
  gRNA
aagggggggaagggcgttcc

SEQ ID NO: 63394 - DNA, 20 bp, Artificial Sequence
  MKO10063394_A_mmu-let-7c-2
  gRNA
caagactgactgacggcctt

SEQ ID NO: 63395 - DNA, 20 bp, Artificial Sequence
  MKO10063395_A_mmu-let-7c-2
  gRNA
gactgacggcctttggggtg

SEQ ID NO: 63396 - DNA, 20 bp, Artificial Sequence
  MKO10063396_A_mmu-let-7c-2
  gRNA
ggcctttggggtgaggtagt

SEQ ID NO: 63397 - DNA, 20 bp, Artificial Sequence
  MKO10063397_A_mmu-let-7c-2
  gRNA
gggtgaggtagtaggttgta

SEQ ID NO: 63398 - DNA, 20 bp, Artificial Sequence
  MKO10063398_A_mmu-let-7b
  gRNA
aacacggacaccgcagggtg

SEQ ID NO: 63399 - DNA, 20 bp, Artificial Sequence
  MKO10063399_A_mmu-let-7b
  gRNA
gggtgaggtagtaggttgtg

SEQ ID NO: 63400 - DNA, 20 bp, Artificial Sequence
  MKO10063400_A_mmu-let-7b
  gRNA
gtagtaggttgtgtggtttc

SEQ ID NO: 63401 - DNA, 20 bp, Artificial Sequence
  MKO10063401_A_mmu-let-7b
  gRNA
acaacctactgccttccctg

SEQ ID NO: 63402 - DNA, 20 bp, Artificial Sequence
  MKO10063402_A_mmu-mir-6393
  gRNA
gccaggccaacagtgacact

SEQ ID NO: 63403 - DNA, 20 bp, Artificial Sequence
  MKO10063403_A_mmu-mir-6393
  gRNA
actcagtgtgcttcgtgggc

SEQ ID NO: 63404 - DNA, 20 bp, Artificial Sequence
  MKO10063404_A_mmu-mir-6393
  gRNA
tgcttcgtgggcagggcaga

SEQ ID NO: 63405 - DNA, 20 bp, Artificial Sequence
  MKO10063405_A_mmu-mir-6393
  gRNA
tccaagtgtcactgttggcc

SEQ ID NO: 63406 - DNA, 20 bp, Artificial Sequence
  MKO10063406_A_mmu-mir-7118
  gRNA
gtagagagtcactgtggagg

SEQ ID NO: 63407 - DNA, 20 bp, Artificial Sequence
  MKO10063407_A_mmu-mir-7118
  gRNA
ggtctggggaaggcgggaga

SEQ ID NO: 63408 - DNA, 20 bp, Artificial Sequence
  MKO10063408_A_mmu-mir-7118
  gRNA
gggtggggtctggggaaggc

SEQ ID NO: 63409 - DNA, 20 bp, Artificial Sequence
  MKO10063409_A_mmu-mir-7118
  gRNA
gttgtagagagtcactgtgg

SEQ ID NO: 63410 - DNA, 20 bp, Artificial Sequence
  MKO10063410_A_mmu-mir-6958
  gRNA
gtgatggcaagaggcagctg

SEQ ID NO: 63411 - DNA, 20 bp, Artificial Sequence
  MKO10063411_A_mmu-mir-6958
  gRNA
gagctgagctagcggacttg

SEQ ID NO: 63412 - DNA, 20 bp, Artificial Sequence
  MKO10063412_A_mmu-mir-6958
  gRNA
gtgggagaagaggctgctgt

SEQ ID NO: 63413 - DNA, 20 bp, Artificial Sequence
  MKO10063413_A_mmu-mir-6958
  gRNA
gcctctacaggtgggagaag

SEQ ID NO: 63414 - DNA, 20 bp, Artificial Sequence
  MKO10063414_A_mmu-mir-6959
  gRNA
gctccttgtcctgggagagc

SEQ ID NO: 63415 - DNA, 20 bp, Artificial Sequence
  MKO10063415_A_mmu-mir-6959
  gRNA
aggtcggtgcagtgagtatc

SEQ ID NO: 63416 - DNA, 20 bp, Artificial Sequence
  MKO10063416_A_mmu-mir-6959
  gRNA
aaacactcacagcccgacac

SEQ ID NO: 63417 - DNA, 20 bp, Artificial Sequence
  MKO10063417_A_mmu-mir-6959
  gRNA
cagcccgacacaggtttccc

SEQ ID NO: 63418 - DNA, 20 bp, Artificial Sequence
  MKO10063418_A_mmu-mir-7648
  gRNA
gggcctctgagcccgcgttc

SEQ ID NO: 63419 - DNA, 20 bp, Artificial Sequence
  MKO10063419_A_mmu-mir-7648
  gRNA
ctgagcccgcgttccgggct

SEQ ID NO: 63420 - DNA, 20 bp, Artificial Sequence
  MKO10063420_A_mmu-mir-7648
  gRNA
cgctccgggctgcccagggc

SEQ ID NO: 63421 - DNA, 20 bp, Artificial Sequence
  MKO10063421_A_mmu-mir-7648
  gRNA
gggctgcccagggctgggcc

SEQ ID NO: 63422 - DNA, 20 bp, Artificial Sequence
  MKO10063422_A_mmu-mir-1291
  gRNA
ctagtcttcagtaagagcca

SEQ ID NO: 63423 - DNA, 20 bp, Artificial Sequence
  MKO10063423_A_mmu-mir-1291
  gRNA
cctagagaactgtcttccag

SEQ ID NO: 63424 - DNA, 20 bp, Artificial Sequence
  MKO10063424_A_mmu-mir-1291
  gRNA
cagttatacactgtagctgt

SEQ ID NO: 63425 - DNA, 20 bp, Artificial Sequence
  MKO10063425_A_mmu-mir-1291
  gRNA
aagggatgggaggttaccca

SEQ ID NO: 63426 - DNA, 20 bp, Artificial Sequence
  MKO10063426_A_mmu-mir-6960
  gRNA
tgggcaggatgagaagagtt

SEQ ID NO: 63427 - DNA, 20 bp, Artificial Sequence
  MKO10063427_A_mmu-mir-6960
  gRNA
caggatgagaagagtttggc

SEQ ID NO: 63428 - DNA, 20 bp, Artificial Sequence
  MKO10063428_A_mmu-mir-6960
  gRNA
gagaggtggttggctgagca

SEQ ID NO: 63429 - DNA, 20 bp, Artificial Sequence
  MKO10063429_A_mmu-mir-6960
  gRNA
gctctgaggagagaggtggt

SEQ ID NO: 63430 - DNA, 20 bp, Artificial Sequence
  MKO10063430_A_mmu-mir-6961
  gRNA
attgtggttcaactagagcc

SEQ ID NO: 63431 - DNA, 20 bp, Artificial Sequence
  MKO10063431_A_mmu-mir-6961
  gRNA
gagccaggaagaaagaggac

SEQ ID NO: 63432 - DNA, 20 bp, Artificial Sequence
  MKO10063432_A_mmu-mir-6961
  gRNA
taacctgtcctctttcttcc

SEQ ID NO: 63433 - DNA, 20 bp, Artificial Sequence
  MKO10063433_A_mmu-mir-6961
  gRNA
aaagctgactgggaaggaaa

SEQ ID NO: 63434 - DNA, 20 bp, Artificial Sequence
  MKO10063434_A_mmu-mir-6962
  gRNA
tctgactccggaaaaggacc

SEQ ID NO: 63435 - DNA, 20 bp, Artificial Sequence
  MKO10063435_A_mmu-mir-6962
  gRNA
cagagctataggacagggaa

SEQ ID NO: 63436 - DNA, 20 bp, Artificial Sequence
  MKO10063436_A_mmu-mir-6962
  gRNA
cacagcagagctataggaca

SEQ ID NO: 63437 - DNA, 20 bp, Artificial Sequence
  MKO10063437_A_mmu-mir-6962
  gRNA
catgcctctgactccggaaa

SEQ ID NO: 63438 - DNA, 20 bp, Artificial Sequence
  MKO10063438_A_mmu-mir-1941
  gRNA
gggaaagccagcagggtggg

SEQ ID NO: 63439 - DNA, 20 bp, Artificial Sequence
  MKO10063439_A_mmu-mir-1941
  gRNA
gcagggtgggagggagatgc

SEQ ID NO: 63440 - DNA, 20 bp, Artificial Sequence
  MKO10063440_A_mmu-mir-1941
  gRNA
gatgctggtacagaggcttg

SEQ ID NO: 63441 - DNA, 20 bp, Artificial Sequence
  MKO10063441_A_mmu-mir-1941
  gRNA
gtatctcccatccacccacc

SEQ ID NO: 63442 - DNA, 20 bp, Artificial Sequence
  MKO10063442_A_mmu-mir-688
  gRNA
ggacttgctggggggcgagc

SEQ ID NO: 63443 - DNA, 20 bp, Artificial Sequence
  MKO10063443_A_mmu-mir-688
  gRNA
ggaataagtagtcgcctgcg

SEQ ID NO: 63444 - DNA, 20 bp, Artificial Sequence
  MKO10063444_A_mmu-mir-688
  gRNA
aagaaaagtaggggcttgct

SEQ ID NO: 63445 - DNA, 20 bp, Artificial Sequence
  MKO10063445_A_mmu-mir-688
  gRNA
agggcagtgaagaaaagtag

SEQ ID NO: 63446 - DNA, 20 bp, Artificial Sequence
  MKO10063446_A_mmu-mir-196a-2
  gRNA
cttaggtagtttcatgttgt

SEQ ID NO: 63447 - DNA, 20 bp, Artificial Sequence
  MKO10063447_A_mmu-mir-196a-2
  gRNA
ttgggattgagttttgaact

SEQ ID NO: 63448 - DNA, 20 bp, Artificial Sequence
  MKO10063448_A_mmu-mir-196a-2
  gRNA
actgcctgagttacatcagt

SEQ ID NO: 63449 - DNA, 20 bp, Artificial Sequence
  MKO10063449_A_mmu-mir-196a-2
  gRNA
aaaaccgactgatgtaactc

SEQ ID NO: 63450 - DNA, 20 bp, Artificial Sequence
  MKO10063450_A_mmu-mir-615
  gRNA
ggattccagcgactcgggag

SEQ ID NO: 63451 - DNA, 20 bp, Artificial Sequence
  MKO10063451_A_mmu-mir-615
  gRNA
cgactcgggaggggcgggag

SEQ ID NO: 63452 - DNA, 20 bp, Artificial Sequence
  MKO10063452_A_mmu-mir-615
  gRNA
actcgggaggggcgggaggg

SEQ ID NO: 63453 - DNA, 20 bp, Artificial Sequence
  MKO10063453_A_mmu-mir-615
  gRNA
tctcgagggtgcttattgtt

SEQ ID NO: 63454 - DNA, 20 bp, Artificial Sequence
  MKO10063454_A_mmu-mir-148b
  gRNA
acaggcacccttagcatttg

SEQ ID NO: 63455 - DNA, 20 bp, Artificial Sequence
  MKO10063455_A_mmu-mir-148b
  gRNA
tgaagttctgttatacactc

SEQ ID NO: 63456 - DNA, 20 bp, Artificial Sequence
  MKO10063456_A_mmu-mir-148b
  gRNA
aacttcacctcaaatgctaa

SEQ ID NO: 63457 - DNA, 20 bp, Artificial Sequence
  MKO10063457_A_mmu-mir-148b
  gRNA
tctgttatacactcaggctg

SEQ ID NO: 63458 - DNA, 20 bp, Artificial Sequence
  MKO10063458_A_mmu-mir-6963
  gRNA
ttcaggttcttgctgtggga

SEQ ID NO: 63459 - DNA, 20 bp, Artificial Sequence
  MKO10063459_A_mmu-mir-6963
  gRNA
aggttcttgctgtgggatgg

SEQ ID NO: 63460 - DNA, 20 bp, Artificial Sequence
  MKO10063460_A_mmu-mir-6963
  gRNA
tgctgtgggatggaggcaag

SEQ ID NO: 63461 - DNA, 20 bp, Artificial Sequence
  MKO10063461_A_mmu-mir-6963
  gRNA
gcagtttgacaagaatctcc

SEQ ID NO: 63462 - DNA, 20 bp, Artificial Sequence
  MKO10063462_A_mmu-mir-6364
  gRNA
tggccttttcacaggagtgc

SEQ ID NO: 63463 - DNA, 20 bp, Artificial Sequence
  MKO10063463_A_mmu-mir-6364
  gRNA
gccttttcacaggagtgctg

SEQ ID NO: 63464 - DNA, 20 bp, Artificial Sequence
  MKO10063464_A_mmu-mir-6364
  gRNA
acacagaagctatagggctg

SEQ ID NO: 63465 - DNA, 20 bp, Artificial Sequence
  MKO10063465_A_mmu-mir-6364
  gRNA
ctcctgtgaaaaggccacgt

SEQ ID NO: 63466 - DNA, 20 bp, Artificial Sequence
  MKO10063466_A_mmu-mir-1945
  gRNA
cgacagtacccgcgaagacc

SEQ ID NO: 63467 - DNA, 20 bp, Artificial Sequence
  MKO10063467_A_mmu-mir-1945
  gRNA
aagacccggtgcggttttct

SEQ ID NO: 63468 - DNA, 20 bp, Artificial Sequence
  MKO10063468_A_mmu-mir-1945
  gRNA
gacccggtgcggttttctcg

SEQ ID NO: 63469 - DNA, 20 bp, Artificial Sequence
  MKO10063469_A_mmu-mir-1945
  gRNA
gcggttttctcgggggctga

SEQ ID NO: 63470 - DNA, 20 bp, Artificial Sequence
  MKO10063470_A_mmu-mir-193b
  gRNA
ggaggcggtgggcccagaat

SEQ ID NO: 63471 - DNA, 20 bp, Artificial Sequence
  MKO10063471_A_mmu-mir-193b
  gRNA
aggcggtgggcccagaatcg

SEQ ID NO: 63472 - DNA, 20 bp, Artificial Sequence
  MKO10063472_A_mmu-mir-193b
  gRNA
ggcccagaatcggggttttg

SEQ ID NO: 63473 - DNA, 20 bp, Artificial Sequence
  MKO10063473_A_mmu-mir-193b
  gRNA
gagtttgtgttttatccaac

SEQ ID NO: 63474 - DNA, 20 bp, Artificial Sequence
  MKO10063474_A_mmu-mir-365-1
  gRNA
tggttaccgcagggaaaatg

SEQ ID NO: 63475 - DNA, 20 bp, Artificial Sequence
  MKO10063475_A_mmu-mir-365-1
  gRNA
gggaaaatgagggacttttg

SEQ ID NO: 63476 - DNA, 20 bp, Artificial Sequence
  MKO10063476_A_mmu-mir-365-1
  gRNA
aaagtccctcattttccctg

SEQ ID NO: 63477 - DNA, 20 bp, Artificial Sequence
  MKO10063477_A_mmu-mir-365-1
  gRNA
ttttaggggcattatgatag

SEQ ID NO: 63478 - DNA, 20 bp, Artificial Sequence
  MKO10063478_A_mmu-mir-6365
  gRNA
ctaagccagatttctaaccc

SEQ ID NO: 63479 - DNA, 20 bp, Artificial Sequence
  MKO10063479_A_mmu-mir-6365
  gRNA
aggtcttctactattagaat

SEQ ID NO: 63480 - DNA, 20 bp, Artificial Sequence
  MKO10063480_A_mmu-mir-6365
  gRNA
gaagacctgggttagaaatc

SEQ ID NO: 63481 - DNA, 20 bp, Artificial Sequence
  MKO10063481_A_mmu-mir-6365
  gRNA
attctaatagtagaagacct

SEQ ID NO: 63482 - DNA, 20 bp, Artificial Sequence
  MKO10063482_A_mmu-mir-484
  gRNA
cgcggccctgcagcctcgtc

SEQ ID NO: 63483 - DNA, 20 bp, Artificial Sequence
  MKO10063483_A_mmu-mir-484
  gRNA
caaaatagggtcttacctag

SEQ ID NO: 63484 - DNA, 20 bp, Artificial Sequence
  MKO10063484_A_mmu-mir-484
  gRNA
tagggtcttacctagggggc

SEQ ID NO: 63485 - DNA, 20 bp, Artificial Sequence
  MKO10063485_A_mmu-mir-484
  gRNA
ggtcttacctagggggctgg

SEQ ID NO: 63486 - DNA, 20 bp, Artificial Sequence
  MKO10063486_A_mmu-mir-130b
  gRNA
atcattgcactgcttcccag

SEQ ID NO: 63487 - DNA, 20 bp, Artificial Sequence
  MKO10063487_A_mmu-mir-130b
  gRNA
gaggcccacagtagtgcaac

SEQ ID NO: 63488 - DNA, 20 bp, Artificial Sequence
  MKO10063488_A_mmu-mir-130b
  gRNA
gaagcagtgcaatgatgaaa

SEQ ID NO: 63489 - DNA, 20 bp, Artificial Sequence
  MKO10063489_A_mmu-mir-130b
  gRNA
tttccctgttgcactactgt

SEQ ID NO: 63490 - DNA, 20 bp, Artificial Sequence
  MKO10063490_A_mmu-mir-301b
  gRNA
tcagagcacccgcagccagc

SEQ ID NO: 63491 - DNA, 20 bp, Artificial Sequence
  MKO10063491_A_mmu-mir-301b
  gRNA
tgctgtgagaagcagtgcaa

SEQ ID NO: 63492 - DNA, 20 bp, Artificial Sequence
  MKO10063492_A_mmu-mir-301b
  gRNA
tggctgcgggtgctctgact

SEQ ID NO: 63493 - DNA, 20 bp, Artificial Sequence
  MKO10063493_A_mmu-mir-301b
  gRNA
ggtgaggtggtcttcgaggc

SEQ ID NO: 63494 - DNA, 20 bp, Artificial Sequence
  MKO10063494_A_mmu-mir-6366
  gRNA
taaggggcccggggagccag

SEQ ID NO: 63495 - DNA, 20 bp, Artificial Sequence
  MKO10063495_A_mmu-mir-6366
  gRNA
attctcagctaaggggcccg

SEQ ID NO: 63496 - DNA, 20 bp, Artificial Sequence
  MKO10063496_A_mmu-mir-6366
  gRNA
ctatcagtcattctcagcta

SEQ ID NO: 63497 - DNA, 20 bp, Artificial Sequence
  MKO10063497_A_mmu-mir-6366
  gRNA
tctggcaagtgggtctcctg

SEQ ID NO: 63498 - DNA, 20 bp, Artificial Sequence
  MKO10063498_A_mmu-mir-1306
  gRNA
ctgcatcactggacgtttgc

SEQ ID NO: 63499 - DNA, 20 bp, Artificial Sequence
  MKO10063499_A_mmu-mir-1306
  gRNA
gcatcactggacgtttgcag

SEQ ID NO: 63500 - DNA, 20 bp, Artificial Sequence
  MKO10063500_A_mmu-mir-1306
  gRNA
ctggacgtttgcaggggagg

SEQ ID NO: 63501 - DNA, 20 bp, Artificial Sequence
  MKO10063501_A_mmu-mir-1306
  gRNA
gacgtttgcaggggaggtgg

SEQ ID NO: 63502 - DNA, 20 bp, Artificial Sequence
  MKO10063502_A_mmu-mir-185
  gRNA
gaggaaagccagcccctggg

SEQ ID NO: 63503 - DNA, 20 bp, Artificial Sequence
  MKO10063503_A_mmu-mir-185
  gRNA
ggaaagccagcccctgggag

SEQ ID NO: 63504 - DNA, 20 bp, Artificial Sequence
  MKO10063504_A_mmu-mir-185
  gRNA
cccaggggctggctttcctc

SEQ ID NO: 63505 - DNA, 20 bp, Artificial Sequence
  MKO10063505_A_mmu-mir-185
  gRNA
tcctgatggtcccctcccag

SEQ ID NO: 63506 - DNA, 20 bp, Artificial Sequence
  MKO10063506_A_mmu-mir-1224
  gRNA
tacctgcctctggtgaggac

SEQ ID NO: 63507 - DNA, 20 bp, Artificial Sequence
  MKO10063507_A_mmu-mir-1224
  gRNA
cctgcctctggtgaggactg

SEQ ID NO: 63508 - DNA, 20 bp, Artificial Sequence
  MKO10063508_A_mmu-mir-1224
  gRNA
gcctctggtgaggactgggg

SEQ ID NO: 63509 - DNA, 20 bp, Artificial Sequence
  MKO10063509_A_mmu-mir-1224
  gRNA
tctggtgaggactggggagg

SEQ ID NO: 63510 - DNA, 20 bp, Artificial Sequence
  MKO10063510_A_mmu-mir-7680
  gRNA
ataccgaactgcttgttcac

SEQ ID NO: 63511 - DNA, 20 bp, Artificial Sequence
  MKO10063511_A_mmu-mir-7680
  gRNA
aactgcttgttcactggaat

SEQ ID NO: 63512 - DNA, 20 bp, Artificial Sequence
  MKO10063512_A_mmu-mir-7680
  gRNA
tgcacgaactgcttgttcac

SEQ ID NO: 63513 - DNA, 20 bp, Artificial Sequence
  MKO10063513_A_mmu-mir-7680
  gRNA
attccagtgaacaagcagtt

SEQ ID NO: 63514 - DNA, 20 bp, Artificial Sequence
  MKO10063514_A_mmu-mir-8095
  gRNA
ggctacaaagtagaactgtc

SEQ ID NO: 63515 - DNA, 20 bp, Artificial Sequence
  MKO10063515_A_mmu-mir-8095
  gRNA
ctacaaagtagaactgtctg

SEQ ID NO: 63516 - DNA, 20 bp, Artificial Sequence
  MKO10063516_A_mmu-mir-8095
  gRNA
ttctactttgtagccctggt

SEQ ID NO: 63517 - DNA, 20 bp, Artificial Sequence
  MKO10063517_A_mmu-mir-8095
  gRNA
acagttctactttgtagccc

SEQ ID NO: 63518 - DNA, 20 bp, Artificial Sequence
  MKO10063518_A_mmu-mir-6362
  gRNA
attattcattcttttgctgg

SEQ ID NO: 63519 - DNA, 20 bp, Artificial Sequence
  MKO10063519_A_mmu-mir-6362
  gRNA
atctaggctagttctgttct

SEQ ID NO: 63520 - DNA, 20 bp, Artificial Sequence
  MKO10063520_A_mmu-mir-6362
  gRNA
gttctgttcttgggctgtga

SEQ ID NO: 63521 - DNA, 20 bp, Artificial Sequence
  MKO10063521_A_mmu-mir-6362
  gRNA
tggacaggacaacaacaagc

SEQ ID NO: 63522 - DNA, 20 bp, Artificial Sequence
  MKO10063522_A_mmu-mir-28a
  gRNA
agaggtggtccctaccttca

SEQ ID NO: 63523 - DNA, 20 bp, Artificial Sequence
  MKO10063523_A_mmu-mir-28a
  gRNA
cccactagattgtgagctgc

SEQ ID NO: 63524 - DNA, 20 bp, Artificial Sequence
  MKO10063524_A_mmu-mir-28a
  gRNA
actagattgtgagctgctgg

SEQ ID NO: 63525 - DNA, 20 bp, Artificial Sequence
  MKO10063525_A_mmu-mir-28a
  gRNA
attgtgagctgctggagggc

SEQ ID NO: 63526 - DNA, 20 bp, Artificial Sequence
  MKO10063526_A_mmu-mir-690
  gRNA
tgagccatctctccagctgg

SEQ ID NO: 63527 - DNA, 20 bp, Artificial Sequence
  MKO10063527_A_mmu-mir-690
  gRNA
tggctcagctgttaaaggct

SEQ ID NO: 63528 - DNA, 20 bp, Artificial Sequence
  MKO10063528_A_mmu-mir-690
  gRNA
aagaaacattctcctccagc

SEQ ID NO: 63529 - DNA, 20 bp, Artificial Sequence
  MKO10063529_A_mmu-mir-690
  gRNA
gaagagtggttcttatattt

SEQ ID NO: 63530 - DNA, 20 bp, Artificial Sequence
  MKO10063530_A_mmu-mir-1946a
  gRNA
tgagattaacaaaaaaggag

SEQ ID NO: 63531 - DNA, 20 bp, Artificial Sequence
  MKO10063531_A_mmu-mir-1946a
  gRNA
gaggagaaagccgagagtgg

SEQ ID NO: 63532 - DNA, 20 bp, Artificial Sequence
  MKO10063532_A_mmu-mir-1946a
  gRNA
tgcctgtgcctcacaagtgt

SEQ ID NO: 63533 - DNA, 20 bp, Artificial Sequence
  MKO10063533_A_mmu-mir-1946a
  gRNA
aagtgtgtgccaccactgcc

SEQ ID NO: 63534 - DNA, 20 bp, Artificial Sequence
  MKO10063534_A_mmu-mir-1947
  gRNA
ctgaaagatgaacaaggtgg

SEQ ID NO: 63535 - DNA, 20 bp, Artificial Sequence
  MKO10063535_A_mmu-mir-1947
  gRNA
aaagatgaacaaggtggtgg

SEQ ID NO: 63536 - DNA, 20 bp, Artificial Sequence
  MKO10063536_A_mmu-mir-1947
  gRNA
acgattgagcagggcatgga

SEQ ID NO: 63537 - DNA, 20 bp, Artificial Sequence
  MKO10063537_A_mmu-mir-1947
  gRNA
catctgaaagatgaacaagg

SEQ ID NO: 63538 - DNA, 20 bp, Artificial Sequence
  MKO10063538_A_mmu-mir-6540
  gRNA
cgggacaaggtacagggcta

SEQ ID NO: 63539 - DNA, 20 bp, Artificial Sequence
  MKO10063539_A_mmu-mir-6540
  gRNA
aaggtacagggctatggcaa

SEQ ID NO: 63540 - DNA, 20 bp, Artificial Sequence
  MKO10063540_A_mmu-mir-6540
  gRNA
ctatggcaaaggccctttgg

SEQ ID NO: 63541 - DNA, 20 bp, Artificial Sequence
  MKO10063541_A_mmu-mir-6540
  gRNA
cactgaagtctgcctgcctt

SEQ ID NO: 63542 - DNA, 20 bp, Artificial Sequence
  MKO10063542_A_mmu-mir-568
  gRNA
tatatatgtccacatatatg

SEQ ID NO: 63543 - DNA, 20 bp, Artificial Sequence
  MKO10063543_A_mmu-mir-568
  gRNA
atgcggtgtgtgtattatac

SEQ ID NO: 63544 - DNA, 20 bp, Artificial Sequence
  MKO10063544_A_mmu-mir-568
  gRNA
atacacacaccgcatatatg

SEQ ID NO: 63545 - DNA, 20 bp, Artificial Sequence
  MKO10063545_A_mmu-mir-568
  gRNA
tgtgtgtattatacaggtat

SEQ ID NO: 63546 - DNA, 20 bp, Artificial Sequence
  MKO10063546_A_mmu-mir-3470b
  gRNA
agggattctctgtgtagcct

SEQ ID NO: 63547 - DNA, 20 bp, Artificial Sequence
  MKO10063547_A_mmu-mir-3470b
  gRNA
ctgtgtagccttggctgtcc

SEQ ID NO: 63548 - DNA, 20 bp, Artificial Sequence
  MKO10063548_A_mmu-mir-3470b
  gRNA
tggcactcactctgtagacc

SEQ ID NO: 63549 - DNA, 20 bp, Artificial Sequence
  MKO10063549_A_mmu-mir-3470b
  gRNA
actcactctgtagaccaggc

SEQ ID NO: 63550 - DNA, 20 bp, Artificial Sequence
  MKO10063550_A_mmu-mir-3081
  gRNA
caagagcccagctcagagat

SEQ ID NO: 63551 - DNA, 20 bp, Artificial Sequence
  MKO10063551_A_mmu-mir-3081
  gRNA
ctctgagctgggctcttgcc

SEQ ID NO: 63552 - DNA, 20 bp, Artificial Sequence
  MKO10063552_A_mmu-mir-3081
  gRNA
tgcgctccgatctctgagct

SEQ ID NO: 63553 - DNA, 20 bp, Artificial Sequence
  MKO10063553_A_mmu-mir-3081
  gRNA
tggagcggtgagctggactc

SEQ ID NO: 63554 - DNA, 20 bp, Artificial Sequence
  MKO10063554_A_mmu-mir-6363
  gRNA
gtgcgtcagaggacaatcac

SEQ ID NO: 63555 - DNA, 20 bp, Artificial Sequence
  MKO10063555_A_mmu-mir-6363
  gRNA
cagtctacagagtgcgtcag

SEQ ID NO: 63556 - DNA, 20 bp, Artificial Sequence
  MKO10063556_A_mmu-mir-6363
  gRNA
agcacttgggagatggaggc

SEQ ID NO: 63557 - DNA, 20 bp, Artificial Sequence
  MKO10063557_A_mmu-mir-6363
  gRNA
cgagataaaattcctctacg

SEQ ID NO: 63558 - DNA, 20 bp, Artificial Sequence
  MKO10063558_A_mmu-mir-5118
  gRNA
tcctagtacttaggaggcag

SEQ ID NO: 63559 - DNA, 20 bp, Artificial Sequence
  MKO10063559_A_mmu-mir-5118
  gRNA
agtacttaggaggcagaggt

SEQ ID NO: 63560 - DNA, 20 bp, Artificial Sequence
  MKO10063560_A_mmu-mir-5118
  gRNA
gttcgaaggttaggccagcc

SEQ ID NO: 63561 - DNA, 20 bp, Artificial Sequence
  MKO10063561_A_mmu-mir-5118
  gRNA
actctctttggagaccaggc

SEQ ID NO: 63562 - DNA, 20 bp, Artificial Sequence
  MKO10063562_A_mmu-mir-691
  gRNA
aacattttctgcctctcttc

SEQ ID NO: 63563 - DNA, 20 bp, Artificial Sequence
  MKO10063563_A_mmu-mir-691
  gRNA
ctttgaatattcctgaagag

SEQ ID NO: 63564 - DNA, 20 bp, Artificial Sequence
  MKO10063564_A_mmu-mir-691
  gRNA
gaatattcaaagcagaccca

SEQ ID NO: 63565 - DNA, 20 bp, Artificial Sequence
  MKO10063565_A_mmu-mir-691
  gRNA
gttatatttaatatccatat

SEQ ID NO: 63566 - DNA, 20 bp, Artificial Sequence
  MKO10063566_A_mmu-mir-99a
  gRNA
accgcgcaagctcgtttcta

SEQ ID NO: 63567 - DNA, 20 bp, Artificial Sequence
  MKO10063567_A_mmu-mir-99a
  gRNA
agctcgtttctatgggtctg

SEQ ID NO: 63568 - DNA, 20 bp, Artificial Sequence
  MKO10063568_A_mmu-mir-99a
  gRNA
caccacaagatcggatctac

SEQ ID NO: 63569 - DNA, 20 bp, Artificial Sequence
  MKO10063569_A_mmu-mir-99a
  gRNA
aacccgtagatccgatcttg

SEQ ID NO: 63570 - DNA, 20 bp, Artificial Sequence
  MKO10063570_A_mmu-let-7c-1
  gRNA
cattggaagctgtgtgcatc

SEQ ID NO: 63571 - DNA, 20 bp, Artificial Sequence
  MKO10063571_A_mmu-let-7c-1
  gRNA
tgcatccgggttgaggtagt

SEQ ID NO: 63572 - DNA, 20 bp, Artificial Sequence
  MKO10063572_A_mmu-let-7c-1
  gRNA
ggttgaggtagtaggttgta

SEQ ID NO: 63573 - DNA, 20 bp, Artificial Sequence
  MKO10063573_A_mmu-let-7c-1
  gRNA
ggttgtacagttaactccca

SEQ ID NO: 63574 - DNA, 20 bp, Artificial Sequence
  MKO10063574_A_mmu-mir-125b-2
  gRNA
ccctgagaccctaacttgtg

SEQ ID NO: 63575 - DNA, 20 bp, Artificial Sequence
  MKO10063575_A_mmu-mir-125b-2
  gRNA
ttttagtaacatcacaagtc

SEQ ID NO: 63576 - DNA, 20 bp, Artificial Sequence
  MKO10063576_A_mmu-mir-125b-2
  gRNA
tcaggttcttgggacctagg

SEQ ID NO: 63577 - DNA, 20 bp, Artificial Sequence
  MKO10063577_A_mmu-mir-125b-2
  gRNA
ggttcttgggacctaggcgg

SEQ ID NO: 63578 - DNA, 20 bp, Artificial Sequence
  MKO10063578_A_mmu-mir-155
  gRNA
gctaattgtgataggggttt

SEQ ID NO: 63579 - DNA, 20 bp, Artificial Sequence
  MKO10063579_A_mmu-mir-155
  gRNA
tcctacctgttagcattaac

SEQ ID NO: 63580 - DNA, 20 bp, Artificial Sequence
  MKO10063580_A_mmu-mir-155
  gRNA
tcctgttaatgctaacaggt

SEQ ID NO: 63581 - DNA, 20 bp, Artificial Sequence
  MKO10063581_A_mmu-mir-155
  gRNA
tgtgtcctgttaatgctaac

SEQ ID NO: 63582 - DNA, 20 bp, Artificial Sequence
  MKO10063582_A_mmu-mir-6367
  gRNA
ccgagcacacttccccccag

SEQ ID NO: 63583 - DNA, 20 bp, Artificial Sequence
  MKO10063583_A_mmu-mir-6367
  gRNA
tcttgcttctacttcccaca

SEQ ID NO: 63584 - DNA, 20 bp, Artificial Sequence
  MKO10063584_A_mmu-mir-6367
  gRNA
gcttctacttcccacacggc

SEQ ID NO: 63585 - DNA, 20 bp, Artificial Sequence
  MKO10063585_A_mmu-mir-6367
  gRNA
atttataacggtccactggg

SEQ ID NO: 63586 - DNA, 20 bp, Artificial Sequence
  MKO10063586_A_mmu-mir-802
  gRNA
cttgtgtcaatcatacaaca

SEQ ID NO: 63587 - DNA, 20 bp, Artificial Sequence
  MKO10063587_A_mmu-mir-802
  gRNA
tgttactgattgcaaataat

SEQ ID NO: 63588 - DNA, 20 bp, Artificial Sequence
  MKO10063588_A_mmu-mir-802
  gRNA
cgtgttgtatgattgacaca

SEQ ID NO: 63589 - DNA, 20 bp, Artificial Sequence
  MKO10063589_A_mmu-mir-802
  gRNA
ttaatagccttcacctcgaa

SEQ ID NO: 63590 - DNA, 20 bp, Artificial Sequence
  MKO10063590_A_mmu-mir-6964
  gRNA
tatccccaacagacctagag

SEQ ID NO: 63591 - DNA, 20 bp, Artificial Sequence
  MKO10063591_A_mmu-mir-6964
  gRNA
gtttccagtctcacacccca

SEQ ID NO: 63592 - DNA, 20 bp, Artificial Sequence
  MKO10063592_A_mmu-mir-6964
  gRNA
tctttcttgtcttccactct

SEQ ID NO: 63593 - DNA, 20 bp, Artificial Sequence
  MKO10063593_A_mmu-mir-6964
  gRNA
ccccccttggggtgtgagac

SEQ ID NO: 63594 - DNA, 20 bp, Artificial Sequence
  MKO10063594_A_mmu-mir-692-1
  gRNA
gggagccccttggaaggcag

SEQ ID NO: 63595 - DNA, 20 bp, Artificial Sequence
  MKO10063595_A_mmu-mir-692-1
  gRNA
gcgccagtctgcgctggttg

SEQ ID NO: 63596 - DNA, 20 bp, Artificial Sequence
  MKO10063596_A_mmu-mir-692-1
  gRNA
gcgcagactggcgcgcccca

SEQ ID NO: 63597 - DNA, 20 bp, Artificial Sequence
  MKO10063597_A_mmu-mir-692-1
  gRNA
ccaacctccgcagggtggca

SEQ ID NO: 63598 - DNA, 20 bp, Artificial Sequence
  MKO10063598_A_mmu-mir-99b
  gRNA
cacccgtagaaccgaccttg

SEQ ID NO: 63599 - DNA, 20 bp, Artificial Sequence
  MKO10063599_A_mmu-mir-99b
  gRNA
cccgtagaaccgaccttgcg

SEQ ID NO: 63600 - DNA, 20 bp, Artificial Sequence
  MKO10063600_A_mmu-mir-99b
  gRNA
cgcacacaagctcgtgtctg

SEQ ID NO: 63601 - DNA, 20 bp, Artificial Sequence
  MKO10063601_A_mmu-mir-99b
  gRNA
tcgtgtctgtgggtccgtgt

SEQ ID NO: 63602 - DNA, 20 bp, Artificial Sequence
  MKO10063602_A_mmu-let-7e
  gRNA
ctgccgcgccccccgggctg

SEQ ID NO: 63603 - DNA, 20 bp, Artificial Sequence
  MKO10063603_A_mmu-let-7e
  gRNA
cgcgccccccgggctgaggt

SEQ ID NO: 63604 - DNA, 20 bp, Artificial Sequence
  MKO10063604_A_mmu-let-7e
  gRNA
gccccccgggctgaggtagg

SEQ ID NO: 63605 - DNA, 20 bp, Artificial Sequence
  MKO10063605_A_mmu-let-7e
  gRNA
ggtaggaggttgtatagttg

SEQ ID NO: 63606 - DNA, 20 bp, Artificial Sequence
  MKO10063606_A_mmu-mir-125a
  gRNA
ctgagaccctttaacctgtg

SEQ ID NO: 63607 - DNA, 20 bp, Artificial Sequence
  MKO10063607_A_mmu-mir-125a
  gRNA
gtgaggacgtccagggtcac

SEQ ID NO: 63608 - DNA, 20 bp, Artificial Sequence
  MKO10063608_A_mmu-mir-125a
  gRNA
gacgtccagggtcacaggtg

SEQ ID NO: 63609 - DNA, 20 bp, Artificial Sequence
  MKO10063609_A_mmu-mir-125a
  gRNA
aaagggtctcagggacccag

SEQ ID NO: 63610 - DNA, 20 bp, Artificial Sequence
  MKO10063610_A_mmu-mir-5125
  gRNA
taaggagagccccatgcctt

SEQ ID NO: 63611 - DNA, 20 bp, Artificial Sequence
  MKO10063611_A_mmu-mir-5125
  gRNA
ctgggatttccttgtctgcc

SEQ ID NO: 63612 - DNA, 20 bp, Artificial Sequence
  MKO10063612_A_mmu-mir-5125
  gRNA
ggggctctccttagactgca

SEQ ID NO: 63613 - DNA, 20 bp, Artificial Sequence
  MKO10063613_A_mmu-mir-5125
  gRNA
gaacagcatgtccaaaggca

SEQ ID NO: 63614 - DNA, 20 bp, Artificial Sequence
  MKO10063614_A_mmu-mir-5134
  gRNA
tagaatgtacctgcagaaag

SEQ ID NO: 63615 - DNA, 20 bp, Artificial Sequence
  MKO10063615_A_mmu-mir-5134
  gRNA
acgggtggccctctttctgc

SEQ ID NO: 63616 - DNA, 20 bp, Artificial Sequence
  MKO10063616_A_mmu-mir-5134
  gRNA
cttgtcctagttttcacggg

SEQ ID NO: 63617 - DNA, 20 bp, Artificial Sequence
  MKO10063617_A_mmu-mir-5134
  gRNA
ctgaacagacttggcagaaa

SEQ ID NO: 63618 - DNA, 20 bp, Artificial Sequence
  MKO10063618_A_mmu-mir-6965
  gRNA
tctgtgctcggtctcgctcc

SEQ ID NO: 63619 - DNA, 20 bp, Artificial Sequence
  MKO10063619_A_mmu-mir-6965
  gRNA
aggctattgggcaggagatg

SEQ ID NO: 63620 - DNA, 20 bp, Artificial Sequence
  MKO10063620_A_mmu-mir-6965
  gRNA
ggagcgagaccgagcacaga

SEQ ID NO: 63621 - DNA, 20 bp, Artificial Sequence
  MKO10063621_A_mmu-mir-6965
  gRNA
gaggaagaaccttctgtgct

SEQ ID NO: 63622 - DNA, 20 bp, Artificial Sequence
  MKO10063622_A_mmu-mir-3547
  gRNA
tcggccaccatctgagagag

SEQ ID NO: 63623 - DNA, 20 bp, Artificial Sequence
  MKO10063623_A_mmu-mir-3547
  gRNA
gccaccatctgagagagggg

SEQ ID NO: 63624 - DNA, 20 bp, Artificial Sequence
  MKO10063624_A_mmu-mir-3547
  gRNA
tgggaagaggggtggggccc

SEQ ID NO: 63625 - DNA, 20 bp, Artificial Sequence
  MKO10063625_A_mmu-mir-3547
  gRNA
ccaaggtgggaagaggggtg

SEQ ID NO: 63626 - DNA, 20 bp, Artificial Sequence
  MKO10063626_A_mmu-mir-6966
  gRNA
gtaagtgtccctcggggatg

SEQ ID NO: 63627 - DNA, 20 bp, Artificial Sequence
  MKO10063627_A_mmu-mir-6966
  gRNA
gtgctgtgtgcttcctctgc

SEQ ID NO: 63628 - DNA, 20 bp, Artificial Sequence
  MKO10063628_A_mmu-mir-6966
  gRNA
tgtgctgtccacatccccga

SEQ ID NO: 63629 - DNA, 20 bp, Artificial Sequence
  MKO10063629_A_mmu-mir-6966
  gRNA
atgctctcattgatctgaga

SEQ ID NO: 63630 - DNA, 20 bp, Artificial Sequence
  MKO10063630_A_mmu-mir-3082
  gRNA
gcagagttgagtgccatgtg

SEQ ID NO: 63631 - DNA, 20 bp, Artificial Sequence
  MKO10063631_A_mmu-mir-3082
  gRNA
cacatggcactcaactctgc

SEQ ID NO: 63632 - DNA, 20 bp, Artificial Sequence
  MKO10063632_A_mmu-mir-3082
  gRNA
agacaggagttgcccacaca

SEQ ID NO: 63633 - DNA, 20 bp, Artificial Sequence
  MKO10063633_A_mmu-mir-3082
  gRNA
acagagtgtgtgtgtctgtg

SEQ ID NO: 63634 - DNA, 20 bp, Artificial Sequence
  MKO10063634_A_mmu-mir-6967
  gRNA
atgcagagagtaagaaaggc

SEQ ID NO: 63635 - DNA, 20 bp, Artificial Sequence
  MKO10063635_A_mmu-mir-6967
  gRNA
agagagtaagaaaggcaggg

SEQ ID NO: 63636 - DNA, 20 bp, Artificial Sequence
  MKO10063636_A_mmu-mir-6967
  gRNA
gggataaagaccagtcacta

SEQ ID NO: 63637 - DNA, 20 bp, Artificial Sequence
  MKO10063637_A_mmu-mir-6967
  gRNA
tctttatctctccccagaaa

SEQ ID NO: 63638 - DNA, 20 bp, Artificial Sequence
  MKO10063638_A_mmu-mir-6968
  gRNA
aaatgggtgaacagggggcg

SEQ ID NO: 63639 - DNA, 20 bp, Artificial Sequence
  MKO10063639_A_mmu-mir-6968
  gRNA
ggtttcaagaaggctgtctg

SEQ ID NO: 63640 - DNA, 20 bp, Artificial Sequence
  MKO10063640_A_mmu-mir-6968
  gRNA
acaagcgctgtctcccctcc

SEQ ID NO: 63641 - DNA, 20 bp, Artificial Sequence
  MKO10063641_A_mmu-mir-6968
  gRNA
agcgctgtctcccctccagg

SEQ ID NO: 63642 - DNA, 20 bp, Artificial Sequence
  MKO10063642_A_mmu-mir-3083
  gRNA
tattggggcttagtaaaggc

SEQ ID NO: 63643 - DNA, 20 bp, Artificial Sequence
  MKO10063643_A_mmu-mir-3083
  gRNA
agtaaaggctgggaatgttt

SEQ ID NO: 63644 - DNA, 20 bp, Artificial Sequence
  MKO10063644_A_mmu-mir-3083
  gRNA
atatatataaagtaaaggct

SEQ ID NO: 63645 - DNA, 20 bp, Artificial Sequence
  MKO10063645_A_mmu-mir-3083
  gRNA
tatatatatatataaagtaa

SEQ ID NO: 63646 - DNA, 20 bp, Artificial Sequence
  MKO10063646_A_mmu-mir-7677
  gRNA
tggtgagcagaaagcagccg

SEQ ID NO: 63647 - DNA, 20 bp, Artificial Sequence
  MKO10063647_A_mmu-mir-7677
  gRNA
cagaaagcagccgcggtgtg

SEQ ID NO: 63648 - DNA, 20 bp, Artificial Sequence
  MKO10063648_A_mmu-mir-7677
  gRNA
ccggctgtgtcctctcacct

SEQ ID NO: 63649 - DNA, 20 bp, Artificial Sequence
  MKO10063649_A_mmu-mir-7677
  gRNA
agcgacggtgccacacaccg

SEQ ID NO: 63650 - DNA, 20 bp, Artificial Sequence
  MKO10063650_A_mmu-mir-7214
  gRNA
tttagtgcgctcaaggggtc

SEQ ID NO: 63651 - DNA, 20 bp, Artificial Sequence
  MKO10063651_A_mmu-mir-7214
  gRNA
cgctcaaggggtcaggactg

SEQ ID NO: 63652 - DNA, 20 bp, Artificial Sequence
  MKO10063652_A_mmu-mir-7214
  gRNA
caaggggtcaggactgaggg

SEQ ID NO: 63653 - DNA, 20 bp, Artificial Sequence
  MKO10063653_A_mmu-mir-7214
  gRNA
aggggtcaggactgagggtg

SEQ ID NO: 63654 - DNA, 20 bp, Artificial Sequence
  MKO10063654_A_mmu-mir-7216
  gRNA
tgaggttggagagctggcag

SEQ ID NO: 63655 - DNA, 20 bp, Artificial Sequence
  MKO10063655_A_mmu-mir-7216
  gRNA
agccacctgcgaaagcaatt

SEQ ID NO: 63656 - DNA, 20 bp, Artificial Sequence
  MKO10063656_A_mmu-mir-7216
  gRNA
cgaaagcaatttggcttctt

SEQ ID NO: 63657 - DNA, 20 bp, Artificial Sequence
  MKO10063657_A_mmu-mir-7216
  gRNA
ctttggaatttggtcttttc

SEQ ID NO: 63658 - DNA, 20 bp, Artificial Sequence
  MKO10063658_A_mmu-mir-7217
  gRNA
tctgctctcttcttgcttgt

SEQ ID NO: 63659 - DNA, 20 bp, Artificial Sequence
  MKO10063659_A_mmu-mir-7217
  gRNA
cttgtatcttgtgagacaga

SEQ ID NO: 63660 - DNA, 20 bp, Artificial Sequence
  MKO10063660_A_mmu-mir-7217
  gRNA
gagacagaagggcacgccta

SEQ ID NO: 63661 - DNA, 20 bp, Artificial Sequence
  MKO10063661_A_mmu-mir-7217
  gRNA
ttgtgggttctcagggccgt

SEQ ID NO: 63662 - DNA, 20 bp, Artificial Sequence
  MKO10063662_A_mmu-mir-7218
  gRNA
gcctgcagggtttagtgtag

SEQ ID NO: 63663 - DNA, 20 bp, Artificial Sequence
  MKO10063663_A_mmu-mir-7218
  gRNA
tctaacctgtcattctagcc

SEQ ID NO: 63664 - DNA, 20 bp, Artificial Sequence
  MKO10063664_A_mmu-mir-7218
  gRNA
taacctgtcattctagcctg

SEQ ID NO: 63665 - DNA, 20 bp, Artificial Sequence
  MKO10063665_A_mmu-mir-7218
  gRNA
ccctctacactaaaccctgc

SEQ ID NO: 63666 - DNA, 20 bp, Artificial Sequence
  MKO10063666_A_mmu-mir-6969
  gRNA
ccatagagggtctgcagaga

SEQ ID NO: 63667 - DNA, 20 bp, Artificial Sequence
  MKO10063667_A_mmu-mir-6969
  gRNA
atgggaacaacagagtcact

SEQ ID NO: 63668 - DNA, 20 bp, Artificial Sequence
  MKO10063668_A_mmu-mir-6969
  gRNA
tcttttgctccctactctgc

SEQ ID NO: 63669 - DNA, 20 bp, Artificial Sequence
  MKO10063669_A_mmu-mir-6969
  gRNA
agccagttcccagcagagta

SEQ ID NO: 63670 - DNA, 20 bp, Artificial Sequence
  MKO10063670_A_mmu-mir-7667
  gRNA
tgcttcagggactgcagaga

SEQ ID NO: 63671 - DNA, 20 bp, Artificial Sequence
  MKO10063671_A_mmu-mir-7667
  gRNA
agggactgcagagatggcac

SEQ ID NO: 63672 - DNA, 20 bp, Artificial Sequence
  MKO10063672_A_mmu-mir-7667
  gRNA
tatatcaggggctagagaga

SEQ ID NO: 63673 - DNA, 20 bp, Artificial Sequence
  MKO10063673_A_mmu-mir-7667
  gRNA
gcatattaaaagtatatcag

SEQ ID NO: 63674 - DNA, 20 bp, Artificial Sequence
  MKO10063674_A_mmu-mir-6967
  gRNA
gagagtaagaaaggcaggga

SEQ ID NO: 63675 - DNA, 20 bp, Artificial Sequence
  MKO10063675_A_mmu-mir-6967
  gRNA
agatgagtttccatagtgac

SEQ ID NO: 63676 - DNA, 20 bp, Artificial Sequence
  MKO10063676_A_mmu-mir-6967
  gRNA
tctttatctctccccagaaa

SEQ ID NO: 63677 - DNA, 20 bp, Artificial Sequence
  MKO10063677_A_mmu-mir-6967
  gRNA
gggataaagaccagtcacta

SEQ ID NO: 63678 - DNA, 20 bp, Artificial Sequence
  MKO10063678_A_mmu-mir-219a-1
  gRNA
cgcccggcctctccccctcg

SEQ ID NO: 63679 - DNA, 20 bp, Artificial Sequence
  MKO10063679_A_mmu-mir-219a-1
  gRNA
tccccctcgaggtttggggg

SEQ ID NO: 63680 - DNA, 20 bp, Artificial Sequence
  MKO10063680_A_mmu-mir-219a-1
  gRNA
ccctcgaggtttgggggcgg

SEQ ID NO: 63681 - DNA, 20 bp, Artificial Sequence
  MKO10063681_A_mmu-mir-219a-1
  gRNA
gaggtttgggggcggcggct

SEQ ID NO: 63682 - DNA, 20 bp, Artificial Sequence
  MKO10063682_A_mmu-mir-219c
  gRNA
gtccagacgcaactctcggc

SEQ ID NO: 63683 - DNA, 20 bp, Artificial Sequence
  MKO10063683_A_mmu-mir-219c
  gRNA
agagactcgagaattgcgtt

SEQ ID NO: 63684 - DNA, 20 bp, Artificial Sequence
  MKO10063684_A_mmu-mir-219c
  gRNA
ctccggccgagagttgcgtc

SEQ ID NO: 63685 - DNA, 20 bp, Artificial Sequence
  MKO10063685_A_mmu-mir-219c
  gRNA
aattctcgagtctctggctc

SEQ ID NO: 63686 - DNA, 20 bp, Artificial Sequence
  MKO10063686_A_mmu-mir-6971
  gRNA
tgggggagggtgtagaggct

SEQ ID NO: 63687 - DNA, 20 bp, Artificial Sequence
  MKO10063687_A_mmu-mir-6971
  gRNA
atgggcctgagaagaagcag

SEQ ID NO: 63688 - DNA, 20 bp, Artificial Sequence
  MKO10063688_A_mmu-mir-6971
  gRNA
ttcttctcaggcccatgagc

SEQ ID NO: 63689 - DNA, 20 bp, Artificial Sequence
  MKO10063689_A_mmu-mir-6971
  gRNA
cacagcctctgcttcttctc

SEQ ID NO: 63690 - DNA, 20 bp, Artificial Sequence
  MKO10063690_A_mmu-mir-6970
  gRNA
gcagcatagtacctgagcac

SEQ ID NO: 63691 - DNA, 20 bp, Artificial Sequence
  MKO10063691_A_mmu-mir-6970
  gRNA
catagtacctgagcacaggg

SEQ ID NO: 63692 - DNA, 20 bp, Artificial Sequence
  MKO10063692_A_mmu-mir-6970
  gRNA
gtacctgagcacagggtggg

SEQ ID NO: 63693 - DNA, 20 bp, Artificial Sequence
  MKO10063693_A_mmu-mir-6970
  gRNA
ggtggcgtgagacctcgcac

SEQ ID NO: 63694 - DNA, 20 bp, Artificial Sequence
  MKO10063694_A_mmu-mir-6972
  gRNA
ctatggagacaggtacagta

SEQ ID NO: 63695 - DNA, 20 bp, Artificial Sequence
  MKO10063695_A_mmu-mir-6972
  gRNA
cttactgtacctgtctccat

SEQ ID NO: 63696 - DNA, 20 bp, Artificial Sequence
  MKO10063696_A_mmu-mir-6972
  gRNA
ctggaggcacagggcagaac

SEQ ID NO: 63697 - DNA, 20 bp, Artificial Sequence
  MKO10063697_A_mmu-mir-6972
  gRNA
aaggttgggctggaggcaca

SEQ ID NO: 63698 - DNA, 20 bp, Artificial Sequence
  MKO10063698_A_mmu-mir-6973a
  gRNA
gggctgggctctacggtggg

SEQ ID NO: 63699 - DNA, 20 bp, Artificial Sequence
  MKO10063699_A_mmu-mir-6973a
  gRNA
gctgggctctacggtgggag

SEQ ID NO: 63700 - DNA, 20 bp, Artificial Sequence
  MKO10063700_A_mmu-mir-6973a
  gRNA
gggctctacggtgggagggg

SEQ ID NO: 63701 - DNA, 20 bp, Artificial Sequence
  MKO10063701_A_mmu-mir-6973a
  gRNA
cattagccaaatctgacctc

SEQ ID NO: 63702 - DNA, 20 bp, Artificial Sequence
  MKO10063702_A_mmu-mir-6974
  gRNA
gtccctgggacagaagagag

SEQ ID NO: 63703 - DNA, 20 bp, Artificial Sequence
  MKO10063703_A_mmu-mir-6974
  gRNA
tgggacagaagagagtggag

SEQ ID NO: 63704 - DNA, 20 bp, Artificial Sequence
  MKO10063704_A_mmu-mir-6974
  gRNA
aagagagtggagaggactct

SEQ ID NO: 63705 - DNA, 20 bp, Artificial Sequence
  MKO10063705_A_mmu-mir-6974
  gRNA
caatctcttgctgcctcacc

SEQ ID NO: 63706 - DNA, 20 bp, Artificial Sequence
  MKO10063706_A_mmu-mir-6975
  gRNA
gatgagtcggctggggagaa

SEQ ID NO: 63707 - DNA, 20 bp, Artificial Sequence
  MKO10063707_A_mmu-mir-6975
  gRNA
tgagtcggctggggagaaag

SEQ ID NO: 63708 - DNA, 20 bp, Artificial Sequence
  MKO10063708_A_mmu-mir-6975
  gRNA
cggctggggagaaaggggtt

SEQ ID NO: 63709 - DNA, 20 bp, Artificial Sequence
  MKO10063709_A_mmu-mir-6975
  gRNA
ggggagaaaggggtttggca

SEQ ID NO: 63710 - DNA, 20 bp, Artificial Sequence
  MKO10063710_A_mmu-mir-8094
  gRNA
gcagtactacgtgaaactga

SEQ ID NO: 63711 - DNA, 20 bp, Artificial Sequence
  MKO10063711_A_mmu-mir-8094
  gRNA
tgaaggacaacgagaagaac

SEQ ID NO: 63712 - DNA, 20 bp, Artificial Sequence
  MKO10063712_A_mmu-mir-8094
  gRNA
tcagtatcgagggtctgtgt

SEQ ID NO: 63713 - DNA, 20 bp, Artificial Sequence
  MKO10063713_A_mmu-mir-8094
  gRNA
tactgacctggttgaactcg

SEQ ID NO: 63714 - DNA, 20 bp, Artificial Sequence
  MKO10063714_A_mmu-mir-1894
  gRNA
cacctgcctcttccctgctg

SEQ ID NO: 63715 - DNA, 20 bp, Artificial Sequence
  MKO10063715_A_mmu-mir-1894
  gRNA
tccctgctgtggagcaggca

SEQ ID NO: 63716 - DNA, 20 bp, Artificial Sequence
  MKO10063716_A_mmu-mir-1894
  gRNA
ctgtggagcaggcaagggag

SEQ ID NO: 63717 - DNA, 20 bp, Artificial Sequence
  MKO10063717_A_mmu-mir-1894
  gRNA
gcaggcaagggagagggtga

SEQ ID NO: 63718 - DNA, 20 bp, Artificial Sequence
  MKO10063718_A_mmu-mir-877
  gRNA
ttcctcatacacctgggagg

SEQ ID NO: 63719 - DNA, 20 bp, Artificial Sequence
  MKO10063719_A_mmu-mir-877
  gRNA
cacctgggaggagggagaag

SEQ ID NO: 63720 - DNA, 20 bp, Artificial Sequence
  MKO10063720_A_mmu-mir-877
  gRNA
caagggtccacagacccgca

SEQ ID NO: 63721 - DNA, 20 bp, Artificial Sequence
  MKO10063721_A_mmu-mir-877
  gRNA
gtcctcttctccctcctccc

SEQ ID NO: 63722 - DNA, 20 bp, Artificial Sequence
  MKO10063722_A_mmu-mir-693
  gRNA
gggtagaaatcctgagttgt

SEQ ID NO: 63723 - DNA, 20 bp, Artificial Sequence
  MKO10063723_A_mmu-mir-693
  gRNA
gctagggcagctttcagatg

SEQ ID NO: 63724 - DNA, 20 bp, Artificial Sequence
  MKO10063724_A_mmu-mir-693
  gRNA
aatgagcatgctcccagcaa

SEQ ID NO: 63725 - DNA, 20 bp, Artificial Sequence
  MKO10063725_A_mmu-mir-693
  gRNA
aatgagcatgcctacaactc

SEQ ID NO: 63726 - DNA, 20 bp, Artificial Sequence
  MKO10063726_A_mmu-mir-6976
  gRNA
agctcataggcctggggagt

SEQ ID NO: 63727 - DNA, 20 bp, Artificial Sequence
  MKO10063727_A_mmu-mir-6976
  gRNA
cataggcctggggagttggg

SEQ ID NO: 63728 - DNA, 20 bp, Artificial Sequence
  MKO10063728_A_mmu-mir-6976
  gRNA
ctggggagttgggagggaga

SEQ ID NO: 63729 - DNA, 20 bp, Artificial Sequence
  MKO10063729_A_mmu-mir-6976
  gRNA
aattttcctctcaacttccc

SEQ ID NO: 63730 - DNA, 20 bp, Artificial Sequence
  MKO10063730_A_mmu-mir-7b
  gRNA
gtacgtgagccagtgctatg

SEQ ID NO: 63731 - DNA, 20 bp, Artificial Sequence
  MKO10063731_A_mmu-mir-7b
  gRNA
tcacagccagcctcatagcg

SEQ ID NO: 63732 - DNA, 20 bp, Artificial Sequence
  MKO10063732_A_mmu-mir-7b
  gRNA
acaagtcttccacatagcac

SEQ ID NO: 63733 - DNA, 20 bp, Artificial Sequence
  MKO10063733_A_mmu-mir-7b
  gRNA
aggagtccacgctatgaggc

SEQ ID NO: 63734 - DNA, 20 bp, Artificial Sequence
  MKO10063734_A_mmu-mir-6977
  gRNA
ccagacagggagatgaggtc

SEQ ID NO: 63735 - DNA, 20 bp, Artificial Sequence
  MKO10063735_A_mmu-mir-6977
  gRNA
agggagatgaggtcagggtc

SEQ ID NO: 63736 - DNA, 20 bp, Artificial Sequence
  MKO10063736_A_mmu-mir-6977
  gRNA
gtcagggtcaggcaacgcct

SEQ ID NO: 63737 - DNA, 20 bp, Artificial Sequence
  MKO10063737_A_mmu-mir-6977
  gRNA
gcttggccccgaggcttcca

SEQ ID NO: 63738 - DNA, 20 bp, Artificial Sequence
  MKO10063738_A_mmu-mir-6978
  gRNA
gcagggtgagagtgaagccg

SEQ ID NO: 63739 - DNA, 20 bp, Artificial Sequence
  MKO10063739_A_mmu-mir-6978
  gRNA
ggtgagagtgaagccgtgga

SEQ ID NO: 63740 - DNA, 20 bp, Artificial Sequence
  MKO10063740_A_mmu-mir-6978
  gRNA
ggaaggggtgagagagaagc

SEQ ID NO: 63741 - DNA, 20 bp, Artificial Sequence
  MKO10063741_A_mmu-mir-6978
  gRNA
cttcactctcaccctgcagg

SEQ ID NO: 63742 - DNA, 20 bp, Artificial Sequence
  MKO10063742_A_mmu-mir-6420
  gRNA
gaaagttgggggtgggatgg

SEQ ID NO: 63743 - DNA, 20 bp, Artificial Sequence
  MKO10063743_A_mmu-mir-6420
  gRNA
gatggagggaaagttggggg

SEQ ID NO: 63744 - DNA, 20 bp, Artificial Sequence
  MKO10063744_A_mmu-mir-6420
  gRNA
aagtattaataagagatgag

SEQ ID NO: 63745 - DNA, 20 bp, Artificial Sequence
  MKO10063745_A_mmu-mir-6420
  gRNA
gggtgggatggagggaaagt

SEQ ID NO: 63746 - DNA, 20 bp, Artificial Sequence
  MKO10063746_A_mmu-mir-5709
  gRNA
taaaagcttctggcattgct

SEQ ID NO: 63747 - DNA, 20 bp, Artificial Sequence
  MKO10063747_A_mmu-mir-5709
  gRNA
gtcttaagtgtgcgtattgc

SEQ ID NO: 63748 - DNA, 20 bp, Artificial Sequence
  MKO10063748_A_mmu-mir-5709
  gRNA
gtcttaagggtgtgtattgc

SEQ ID NO: 63749 - DNA, 20 bp, Artificial Sequence
  MKO10063749_A_mmu-mir-5709
  gRNA
ctctcagactaaagtcttaa

SEQ ID NO: 63750 - DNA, 20 bp, Artificial Sequence
  MKO10063750_A_mmu-mir-1195
  gRNA
actttttaccttcttgagac

SEQ ID NO: 63751 - DNA, 20 bp, Artificial Sequence
  MKO10063751_A_mmu-mir-1195
  gRNA
agggtttctctgtgtgttcc

SEQ ID NO: 63752 - DNA, 20 bp, Artificial Sequence
  MKO10063752_A_mmu-mir-1195
  gRNA
tagaactcattctgttgagc

SEQ ID NO: 63753 - DNA, 20 bp, Artificial Sequence
  MKO10063753_A_mmu-mir-1195
  gRNA
actcattctgttgagcaggc

SEQ ID NO: 63754 - DNA, 20 bp, Artificial Sequence
  MKO10063754_A_mmu-mir-1893
  gRNA
gaagaccggcagcggcttcg

SEQ ID NO: 63755 - DNA, 20 bp, Artificial Sequence
  MKO10063755_A_mmu-mir-1893
  gRNA
cagcagatacctctccgctc

SEQ ID NO: 63756 - DNA, 20 bp, Artificial Sequence
  MKO10063756_A_mmu-mir-1893
  gRNA
gcagatacctctccgctctg

SEQ ID NO: 63757 - DNA, 20 bp, Artificial Sequence
  MKO10063757_A_mmu-mir-1893
  gRNA
ggacgcctcgaagccgctgc

SEQ ID NO: 63758 - DNA, 20 bp, Artificial Sequence
  MKO10063758_A_mmu-mir-133a-1
  gRNA
gcatagctacagctggttga

SEQ ID NO: 63759 - DNA, 20 bp, Artificial Sequence
  MKO10063759_A_mmu-mir-133a-1
  gRNA
aatccattgaagaggcgatt

SEQ ID NO: 63760 - DNA, 20 bp, Artificial Sequence
  MKO10063760_A_mmu-mir-133a-1
  gRNA
aatcgcctcttcaatggatt

SEQ ID NO: 63761 - DNA, 20 bp, Artificial Sequence
  MKO10063761_A_mmu-mir-133a-1
  gRNA
cggcaatgctttgctaaagc

SEQ ID NO: 63762 - DNA, 20 bp, Artificial Sequence
  MKO10063762_A_mmu-mir-1b
  gRNA
aagaagtatgtgctctgagt

SEQ ID NO: 63763 - DNA, 20 bp, Artificial Sequence
  MKO10063763_A_mmu-mir-1b
  gRNA
tgtaaagaagtatgtatttt

SEQ ID NO: 63764 - DNA, 20 bp, Artificial Sequence
  MKO10063764_A_mmu-mir-1b
  gRNA
agtttcctttagcttcttct

SEQ ID NO: 63765 - DNA, 20 bp, Artificial Sequence
  MKO10063765_A_mmu-mir-1b
  gRNA
ttcctttagcttcttcttgg

SEQ ID NO: 63766 - DNA, 20 bp, Artificial Sequence
  MKO10063766_A_mmu-mir-1a-2
  gRNA
catagcactgaatgttcata

SEQ ID NO: 63767 - DNA, 20 bp, Artificial Sequence
  MKO10063767_A_mmu-mir-1a-2
  gRNA
aagaagtatgtgctctgagt

SEQ ID NO: 63768 - DNA, 20 bp, Artificial Sequence
  MKO10063768_A_mmu-mir-1a-2
  gRNA
aagaagtatgtattttgggt

SEQ ID NO: 63769 - DNA, 20 bp, Artificial Sequence
  MKO10063769_A_mmu-mir-1a-2
  gRNA
tgtaaagaagtatgtatttt

SEQ ID NO: 63770 - DNA, 20 bp, Artificial Sequence
  MKO10063770_A_mmu-mir-1901
  gRNA
tcggccagctttttgggctc

SEQ ID NO: 63771 - DNA, 20 bp, Artificial Sequence
  MKO10063771_A_mmu-mir-1901
  gRNA
gggacccccgggagtacgag

SEQ ID NO: 63772 - DNA, 20 bp, Artificial Sequence
  MKO10063772_A_mmu-mir-1901
  gRNA
ccgggagtacgagcggcagt

SEQ ID NO: 63773 - DNA, 20 bp, Artificial Sequence
  MKO10063773_A_mmu-mir-1901
  gRNA
gggagtacgagcggcagtcg

SEQ ID NO: 63774 - DNA, 20 bp, Artificial Sequence
  MKO10063774_A_mmu-mir-1948
  gRNA
atgagtattctgcctaaatg

SEQ ID NO: 63775 - DNA, 20 bp, Artificial Sequence
  MKO10063775_A_mmu-mir-1948
  gRNA
tgtggtgtacggatacattt

SEQ ID NO: 63776 - DNA, 20 bp, Artificial Sequence
  MKO10063776_A_mmu-mir-1948
  gRNA
ggcagagcactcgtacagta

SEQ ID NO: 63777 - DNA, 20 bp, Artificial Sequence
  MKO10063777_A_mmu-mir-1948
  gRNA
cgtacagtaaggtgagaatc

SEQ ID NO: 63778 - DNA, 20 bp, Artificial Sequence
  MKO10063778_A_mmu-mir-6360
  gRNA
cagaagatggacagcttctg

SEQ ID NO: 63779 - DNA, 20 bp, Artificial Sequence
  MKO10063779_A_mmu-mir-6360
  gRNA
atgaccaccctcccagatgc

SEQ ID NO: 63780 - DNA, 20 bp, Artificial Sequence
  MKO10063780_A_mmu-mir-6360
  gRNA
ggcctgcatctgggggtcat

SEQ ID NO: 63781 - DNA, 20 bp, Artificial Sequence
  MKO10063781_A_mmu-mir-6360
  gRNA
agtgtgcatgtgtgcagggt

SEQ ID NO: 63782 - DNA, 20 bp, Artificial Sequence
  MKO10063782_A_mmu-mir-187
  gRNA
cggctgcaacacaagacacg

SEQ ID NO: 63783 - DNA, 20 bp, Artificial Sequence
  MKO10063783_A_mmu-mir-187
  gRNA
gggtcctgtgttgtagcctg

SEQ ID NO: 63784 - DNA, 20 bp, Artificial Sequence
  MKO10063784_A_mmu-mir-187
  gRNA
ctcgtgtcttgtgttgcagc

SEQ ID NO: 63785 - DNA, 20 bp, Artificial Sequence
  MKO10063785_A_mmu-mir-187
  gRNA
caggctacaacacaggaccc

SEQ ID NO: 63786 - DNA, 20 bp, Artificial Sequence
  MKO10063786_A_mmu-mir-6361
  gRNA
ggaagtacagcccttgtcag

SEQ ID NO: 63787 - DNA, 20 bp, Artificial Sequence
  MKO10063787_A_mmu-mir-6361
  gRNA
ccacttcctggagagctgcc

SEQ ID NO: 63788 - DNA, 20 bp, Artificial Sequence
  MKO10063788_A_mmu-mir-6361
  gRNA
gtgaggagctcctctgacaa

SEQ ID NO: 63789 - DNA, 20 bp, Artificial Sequence
  MKO10063789_A_mmu-mir-6361
  gRNA
acatggggctgaatactgtt

SEQ ID NO: 63790 - DNA, 20 bp, Artificial Sequence
  MKO10063790_A_mmu-mir-1949
  gRNA
ccaatagctggttggcattc

SEQ ID NO: 63791 - DNA, 20 bp, Artificial Sequence
  MKO10063791_A_mmu-mir-1949
  gRNA
gctggttggcattctgggcc

SEQ ID NO: 63792 - DNA, 20 bp, Artificial Sequence
  MKO10063792_A_mmu-mir-1949
  gRNA
caacagaggtggcatgaacc

SEQ ID NO: 63793 - DNA, 20 bp, Artificial Sequence
  MKO10063793_A_mmu-mir-1949
  gRNA
cctggtatagttaacaacag

SEQ ID NO: 63794 - DNA, 20 bp, Artificial Sequence
  MKO10063794_A_mmu-mir-6979
  gRNA
taagcagggcggctgggggg

SEQ ID NO: 63795 - DNA, 20 bp, Artificial Sequence
  MKO10063795_A_mmu-mir-6979
  gRNA
agtgcgcgcttgtgtctgtc

SEQ ID NO: 63796 - DNA, 20 bp, Artificial Sequence
  MKO10063796_A_mmu-mir-6981
  gRNA
ctgaggagacagtaggctgt

SEQ ID NO: 63797 - DNA, 20 bp, Artificial Sequence
  MKO10063797_A_mmu-mir-6981
  gRNA
agacagtaggctgttggcac

SEQ ID NO: 63798 - DNA, 20 bp, Artificial Sequence
  MKO10063798_A_mmu-mir-6981
  gRNA
agtaggctgttggcactggt

SEQ ID NO: 63799 - DNA, 20 bp, Artificial Sequence
  MKO10063799_A_mmu-mir-6981
  gRNA
ctggtcggcctgggtggcac

SEQ ID NO: 63800 - DNA, 20 bp, Artificial Sequence
  MKO10063800_A_mmu-mir-6980
  gRNA
taggtcacgctgagctgggg

SEQ ID NO: 63801 - DNA, 20 bp, Artificial Sequence
  MKO10063801_A_mmu-mir-6980
  gRNA
tcacgctgagctggggtgga

SEQ ID NO: 63802 - DNA, 20 bp, Artificial Sequence
  MKO10063802_A_mmu-mir-6980
  gRNA
tggaaggcaagtcagctggg

SEQ ID NO: 63803 - DNA, 20 bp, Artificial Sequence
  MKO10063803_A_mmu-mir-6980
  gRNA
ttagggtggggggggaggct

SEQ ID NO: 63804 - DNA, 20 bp, Artificial Sequence
  MKO10063804_A_mmu-mir-1258
  gRNA
tgctatgtggagctgcagtt

SEQ ID NO: 63805 - DNA, 20 bp, Artificial Sequence
  MKO10063805_A_mmu-mir-1258
  gRNA
gcagctccacatagcagtta

SEQ ID NO: 63806 - DNA, 20 bp, Artificial Sequence
  MKO10063806_A_mmu-mir-1258
  gRNA
ctaattccctaactgctatg

SEQ ID NO: 63807 - DNA, 20 bp, Artificial Sequence
  MKO10063807_A_mmu-mir-1258
  gRNA
ggaattagctcagcagtata

SEQ ID NO: 63808 - DNA, 20 bp, Artificial Sequence
  MKO10063808_A_mmu-mir-6355
  gRNA
atggagttgtgatatcacat

SEQ ID NO: 63809 - DNA, 20 bp, Artificial Sequence
  MKO10063809_A_mmu-mir-6355
  gRNA
agcactgtgttggcacaata

SEQ ID NO: 63810 - DNA, 20 bp, Artificial Sequence
  MKO10063810_A_mmu-mir-6355
  gRNA
aaaacagtacagcactgtgt

SEQ ID NO: 63811 - DNA, 20 bp, Artificial Sequence
  MKO10063811_A_mmu-mir-6355
  gRNA
atcataatcgagcactatgc

SEQ ID NO: 63812 - DNA, 20 bp, Artificial Sequence
  MKO10063812_A_mmu-mir-5107
  gRNA
agttccaagatgttgggcag

SEQ ID NO: 63813 - DNA, 20 bp, Artificial Sequence
  MKO10063813_A_mmu-mir-5107
  gRNA
tccaagatgttgggcagagg

SEQ ID NO: 63814 - DNA, 20 bp, Artificial Sequence
  MKO10063814_A_mmu-mir-5107
  gRNA
agatgttgggcagaggaggc

SEQ ID NO: 63815 - DNA, 20 bp, Artificial Sequence
  MKO10063815_A_mmu-mir-5107
  gRNA
aggaggcagggacaacaaac

SEQ ID NO: 63816 - DNA, 20 bp, Artificial Sequence
  MKO10063816_A_mmu-mir-7220
  gRNA
ggcgacaagaaggtgagccc

SEQ ID NO: 63817 - DNA, 20 bp, Artificial Sequence
  MKO10063817_A_mmu-mir-7220
  gRNA
ggctcaccttcttgtcgcca

SEQ ID NO: 63818 - DNA, 20 bp, Artificial Sequence
  MKO10063818_A_mmu-mir-7220
  gRNA
cggactgagaccttgttcct

SEQ ID NO: 63819 - DNA, 20 bp, Artificial Sequence
  MKO10063819_A_mmu-mir-7220
  gRNA
ctgtgccctaggtgagctct

SEQ ID NO: 63820 - DNA, 20 bp, Artificial Sequence
  MKO10063820_A_mmu-mir-6982
  gRNA
ccctgccagtcaggggctgg

SEQ ID NO: 63821 - DNA, 20 bp, Artificial Sequence
  MKO10063821_A_mmu-mir-6982
  gRNA
caggggctggaggatcgcag

SEQ ID NO: 63822 - DNA, 20 bp, Artificial Sequence
  MKO10063822_A_mmu-mir-6982
  gRNA
gggctggaggatcgcagggg

SEQ ID NO: 63823 - DNA, 20 bp, Artificial Sequence
  MKO10063823_A_mmu-mir-6982
  gRNA
aggatcgcaggggtggcctg

SEQ ID NO: 63824 - DNA, 20 bp, Artificial Sequence
  MKO10063824_A_mmu-mir-6983
  gRNA
ttgcgtacccatgacttgga

SEQ ID NO: 63825 - DNA, 20 bp, Artificial Sequence
  MKO10063825_A_mmu-mir-6983
  gRNA
cttggaagggcatactgatt

SEQ ID NO: 63826 - DNA, 20 bp, Artificial Sequence
  MKO10063826_A_mmu-mir-6983
  gRNA
gaatcaaagtctgttgttcc

SEQ ID NO: 63827 - DNA, 20 bp, Artificial Sequence
  MKO10063827_A_mmu-mir-6983
  gRNA
ggaacaacagactttgattc

SEQ ID NO: 63828 - DNA, 20 bp, Artificial Sequence
  MKO10063828_A_mmu-mir-378a
  gRNA
ccaagtccagtgctatttcg

SEQ ID NO: 63829 - DNA, 20 bp, Artificial Sequence
  MKO10063829_A_mmu-mir-378a
  gRNA
gctatttcgaggtaacacac

SEQ ID NO: 63830 - DNA, 20 bp, Artificial Sequence
  MKO10063830_A_mmu-mir-378a
  gRNA
tcgaggtaacacacaggacc

SEQ ID NO: 63831 - DNA, 20 bp, Artificial Sequence
  MKO10063831_A_mmu-mir-378a
  gRNA
aacacacaggacctggagtc

SEQ ID NO: 63832 - DNA, 20 bp, Artificial Sequence
  MKO10063832_A_mmu-mir-145a
  gRNA
acctcaagaacagtatttcc

SEQ ID NO: 63833 - DNA, 20 bp, Artificial Sequence
  MKO10063833_A_mmu-mir-145a
  gRNA
cttagcatccaagggattcc

SEQ ID NO: 63834 - DNA, 20 bp, Artificial Sequence
  MKO10063834_A_mmu-mir-145a
  gRNA
gatgctaagatggggattcc

SEQ ID NO: 63835 - DNA, 20 bp, Artificial Sequence
  MKO10063835_A_mmu-mir-145a
  gRNA
cagttttcccaggaatccct

SEQ ID NO: 63836 - DNA, 20 bp, Artificial Sequence
  MKO10063836_A_mmu-mir-143
  gRNA
tgcagcactgcacctcaggc

SEQ ID NO: 63837 - DNA, 20 bp, Artificial Sequence
  MKO10063837_A_mmu-mir-143
  gRNA
gagatgaagcactgtagctc

SEQ ID NO: 63838 - DNA, 20 bp, Artificial Sequence
  MKO10063838_A_mmu-mir-143
  gRNA
gaggtgcagtgctgcatctc

SEQ ID NO: 63839 - DNA, 20 bp, Artificial Sequence
  MKO10063839_A_mmu-mir-143
  gRNA
agcgcctgtctcccagcctg

SEQ ID NO: 63840 - DNA, 20 bp, Artificial Sequence
  MKO10063840_A_mmu-mir-122
  gRNA
agagctgtggagtgtgacaa

SEQ ID NO: 63841 - DNA, 20 bp, Artificial Sequence
  MKO10063841_A_mmu-mir-122
  gRNA
gataatggcgtttgatggtt

SEQ ID NO: 63842 - DNA, 20 bp, Artificial Sequence
  MKO10063842_A_mmu-mir-122
  gRNA
agtgtgataatggcgtttga

SEQ ID NO: 63843 - DNA, 20 bp, Artificial Sequence
  MKO10063843_A_mmu-mir-122
  gRNA
cacactaaatagctactgct

SEQ ID NO: 63844 - DNA, 20 bp, Artificial Sequence
  MKO10063844_A_mmu-mir-694
  gRNA
ttcaggcaacattttcagcc

SEQ ID NO: 63845 - DNA, 20 bp, Artificial Sequence
  MKO10063845_A_mmu-mir-694
  gRNA
gttgaaagcgatgcctgagc

SEQ ID NO: 63846 - DNA, 20 bp, Artificial Sequence
  MKO10063846_A_mmu-mir-694
  gRNA
tgggagtcaaaggccagctc

SEQ ID NO: 63847 - DNA, 20 bp, Artificial Sequence
  MKO10063847_A_mmu-mir-694
  gRNA
cagaaggcagagactgcttc

SEQ ID NO: 63848 - DNA, 20 bp, Artificial Sequence
  MKO10063848_A_mmu-mir-7219
  gRNA
tcaaccctgagctctaacac

SEQ ID NO: 63849 - DNA, 20 bp, Artificial Sequence
  MKO10063849_A_mmu-mir-7219
  gRNA
tttctagtgtgttagaaacc

SEQ ID NO: 63850 - DNA, 20 bp, Artificial Sequence
  MKO10063850_A_mmu-mir-7219
  gRNA
taacacaggacattcagaac

SEQ ID NO: 63851 - DNA, 20 bp, Artificial Sequence
  MKO10063851_A_mmu-mir-7219
  gRNA
tgagatcatgtgatctatcc

SEQ ID NO: 63852 - DNA, 20 bp, Artificial Sequence
  MKO10063852_A_mmu-mir-6356
  gRNA
ggcagcctgtgtgtgacagc

SEQ ID NO: 63853 - DNA, 20 bp, Artificial Sequence
  MKO10063853_A_mmu-mir-6356
  gRNA
aagtcattgttaggactctg

SEQ ID NO: 63854 - DNA, 20 bp, Artificial Sequence
  MKO10063854_A_mmu-mir-6356
  gRNA
ataagtcattgttaggactc

SEQ ID NO: 63855 - DNA, 20 bp, Artificial Sequence
  MKO10063855_A_mmu-mir-6356
  gRNA
agtgccctgctgtcacacac

SEQ ID NO: 63856 - DNA, 20 bp, Artificial Sequence
  MKO10063856_A_mmu-mir-145b
  gRNA
accaatttctcaagccagac

SEQ ID NO: 63857 - DNA, 20 bp, Artificial Sequence
  MKO10063857_A_mmu-mir-145b
  gRNA
caagccagactggagtctcc

SEQ ID NO: 63858 - DNA, 20 bp, Artificial Sequence
  MKO10063858_A_mmu-mir-145b
  gRNA
ctggagtctcctgggaaaac

SEQ ID NO: 63859 - DNA, 20 bp, Artificial Sequence
  MKO10063859_A_mmu-mir-145b
  gRNA
aaaactggactgacttcaac

SEQ ID NO: 63860 - DNA, 20 bp, Artificial Sequence
  MKO10063860_A_mmu-mir-6357
  gRNA
caggggttgagagggacgtt

SEQ ID NO: 63861 - DNA, 20 bp, Artificial Sequence
  MKO10063861_A_mmu-mir-6357
  gRNA
gacgttaggtagcagtccat

SEQ ID NO: 63862 - DNA, 20 bp, Artificial Sequence
  MKO10063862_A_mmu-mir-6357
  gRNA
tagcactgctcagggctttc

SEQ ID NO: 63863 - DNA, 20 bp, Artificial Sequence
  MKO10063863_A_mmu-mir-6357
  gRNA
ccctgagcagtgctaagaaa

SEQ ID NO: 63864 - DNA, 20 bp, Artificial Sequence
  MKO10063864_A_mmu-mir-6358
  gRNA
cacccataatcccagtgtgg

SEQ ID NO: 63865 - DNA, 20 bp, Artificial Sequence
  MKO10063865_A_mmu-mir-6358
  gRNA
ggtggcatgtccctatgtga

SEQ ID NO: 63866 - DNA, 20 bp, Artificial Sequence
  MKO10063866_A_mmu-mir-6358
  gRNA
ggtttgtatatccttggacc

SEQ ID NO: 63867 - DNA, 20 bp, Artificial Sequence
  MKO10063867_A_mmu-mir-6358
  gRNA
tagctgtatactgccacact

SEQ ID NO: 63868 - DNA, 20 bp, Artificial Sequence
  MKO10063868_A_mmu-mir-5127
  gRNA
ggacaaagatccctctctcc

SEQ ID NO: 63869 - DNA, 20 bp, Artificial Sequence
  MKO10063869_A_mmu-mir-5127
  gRNA
ctctctcctgggaaaagggt

SEQ ID NO: 63870 - DNA, 20 bp, Artificial Sequence
  MKO10063870_A_mmu-mir-5127
  gRNA
aacccttttcccaggagaga

SEQ ID NO: 63871 - DNA, 20 bp, Artificial Sequence
  MKO10063871_A_mmu-mir-5127
  gRNA
tttctctacttggtgaaatg

SEQ ID NO: 63872 - DNA, 20 bp, Artificial Sequence
  MKO10063872_A_mmu-mir-5112
  gRNA
aatgtagctggggatgaagc

SEQ ID NO: 63873 - DNA, 20 bp, Artificial Sequence
  MKO10063873_A_mmu-mir-5112
  gRNA
tggcactggaaatgtagctg

SEQ ID NO: 63874 - DNA, 20 bp, Artificial Sequence
  MKO10063874_A_mmu-mir-5112
  gRNA
ggtggcactggaaatgtagc

SEQ ID NO: 63875 - DNA, 20 bp, Artificial Sequence
  MKO10063875_A_mmu-mir-5112
  gRNA
agggctggggtgtagctcag

SEQ ID NO: 63876 - DNA, 20 bp, Artificial Sequence
  MKO10063876_A_mmu-mir-6359
  gRNA
tctccggcggcgactgattg

SEQ ID NO: 63877 - DNA, 20 bp, Artificial Sequence
  MKO10063877_A_mmu-mir-6359
  gRNA
ttgtggcggagagatggttc

SEQ ID NO: 63878 - DNA, 20 bp, Artificial Sequence
  MKO10063878_A_mmu-mir-6359
  gRNA
gcggggctcatcaggaagct

SEQ ID NO: 63879 - DNA, 20 bp, Artificial Sequence
  MKO10063879_A_mmu-mir-6359
  gRNA
ggtaactgtcgatgttgccc

SEQ ID NO: 63880 - DNA, 20 bp, Artificial Sequence
  MKO10063880_A_mmu-mir-6984
  gRNA
aaactgaaaggcaatgaagg

SEQ ID NO: 63881 - DNA, 20 bp, Artificial Sequence
  MKO10063881_A_mmu-mir-6984
  gRNA
aagctcctttctagaaagac

SEQ ID NO: 63882 - DNA, 20 bp, Artificial Sequence
  MKO10063882_A_mmu-mir-6984
  gRNA
aagttgtgcgtgaaactgaa

SEQ ID NO: 63883 - DNA, 20 bp, Artificial Sequence
  MKO10063883_A_mmu-mir-6984
  gRNA
gtgaaactgaaaggcaatga

SEQ ID NO: 63884 - DNA, 20 bp, Artificial Sequence
  MKO10063884_A_mmu-mir-6985
  gRNA
tggctctgccggctgtgagg

SEQ ID NO: 63885 - DNA, 20 bp, Artificial Sequence
  MKO10063885_A_mmu-mir-6985
  gRNA
ctctgccggctgtgaggagg

SEQ ID NO: 63886 - DNA, 20 bp, Artificial Sequence
  MKO10063886_A_mmu-mir-6985
  gRNA
gtgttgtgtatactgagggg

SEQ ID NO: 63887 - DNA, 20 bp, Artificial Sequence
  MKO10063887_A_mmu-mir-6985
  gRNA
gcggtgttgtgtatactgag

SEQ ID NO: 63888 - DNA, 20 bp, Artificial Sequence
  MKO10063888_A_mmu-mir-6986
  gRNA
gtgaaaatgggctgggagga

SEQ ID NO: 63889 - DNA, 20 bp, Artificial Sequence
  MKO10063889_A_mmu-mir-6986
  gRNA
ggagctaggtagaaagccag

SEQ ID NO: 63890 - DNA, 20 bp, Artificial Sequence
  MKO10063890_A_mmu-mir-6986
  gRNA
ggctttgggtgaggggagct

SEQ ID NO: 63891 - DNA, 20 bp, Artificial Sequence
  MKO10063891_A_mmu-mir-6986
  gRNA
gtgaaaaccacatatgcctc

SEQ ID NO: 63892 - DNA, 20 bp, Artificial Sequence
  MKO10063892_A_mmu-mir-6987
  gRNA
cagctggaagcagggagaaa

SEQ ID NO: 63893 - DNA, 20 bp, Artificial Sequence
  MKO10063893_A_mmu-mir-6987
  gRNA
aacagtgggacagggtgaca

SEQ ID NO: 63894 - DNA, 20 bp, Artificial Sequence
  MKO10063894_A_mmu-mir-6987
  gRNA
aatggaggaacagtgggaca

SEQ ID NO: 63895 - DNA, 20 bp, Artificial Sequence
  MKO10063895_A_mmu-mir-6987
  gRNA
ggctggtggcagctggaagc

SEQ ID NO: 63896 - DNA, 20 bp, Artificial Sequence
  MKO10063896_A_mmu-mir-6988
  gRNA
actctctgggatatctgggg

SEQ ID NO: 63897 - DNA, 20 bp, Artificial Sequence
  MKO10063897_A_mmu-mir-6988
  gRNA
ggggtggagagctgaggccc

SEQ ID NO: 63898 - DNA, 20 bp, Artificial Sequence
  MKO10063898_A_mmu-mir-6988
  gRNA
gaggtcaggctgagctacct

SEQ ID NO: 63899 - DNA, 20 bp, Artificial Sequence
  MKO10063899_A_mmu-mir-6988
  gRNA
tggcaggagatacagaggtc

SEQ ID NO: 63900 - DNA, 20 bp, Artificial Sequence
  MKO10063900_A_mmu-mir-194-2
  gRNA
tctgtaacagcaactccatg

SEQ ID NO: 63901 - DNA, 20 bp, Artificial Sequence
  MKO10063901_A_mmu-mir-194-2
  gRNA
ctccatgtggaagtgcccac

SEQ ID NO: 63902 - DNA, 20 bp, Artificial Sequence
  MKO10063902_A_mmu-mir-194-2
  gRNA
agtgcccactggttccagtg

SEQ ID NO: 63903 - DNA, 20 bp, Artificial Sequence
  MKO10063903_A_mmu-mir-194-2
  gRNA
ccagtggggctgctgttatc

SEQ ID NO: 63904 - DNA, 20 bp, Artificial Sequence
  MKO10063904_A_mmu-mir-192
  gRNA
gctgccaagatggcgtgcac

SEQ ID NO: 63905 - DNA, 20 bp, Artificial Sequence
  MKO10063905_A_mmu-mir-192
  gRNA
ctgccaattccataggtcac

SEQ ID NO: 63906 - DNA, 20 bp, Artificial Sequence
  MKO10063906_A_mmu-mir-192
  gRNA
agtactggctgtcaattcat

SEQ ID NO: 63907 - DNA, 20 bp, Artificial Sequence
  MKO10063907_A_mmu-mir-192
  gRNA
cctatggaattggcagccag

SEQ ID NO: 63908 - DNA, 20 bp, Artificial Sequence
  MKO10063908_A_mmu-mir-6989
  gRNA
gctgttggggacagaggcac

SEQ ID NO: 63909 - DNA, 20 bp, Artificial Sequence
  MKO10063909_A_mmu-mir-6989
  gRNA
gggacagaggcacaggatgc

SEQ ID NO: 63910 - DNA, 20 bp, Artificial Sequence
  MKO10063910_A_mmu-mir-6989
  gRNA
gaccacctgtccactgtctc

SEQ ID NO: 63911 - DNA, 20 bp, Artificial Sequence
  MKO10063911_A_mmu-mir-6989
  gRNA
tgggaccagagacagtggac

SEQ ID NO: 63912 - DNA, 20 bp, Artificial Sequence
  MKO10063912_A_mmu-mir-5046
  gRNA
tggtggcagcaccaggctcc

SEQ ID NO: 63913 - DNA, 20 bp, Artificial Sequence
  MKO10063913_A_mmu-mir-5046
  gRNA
gcagcaccaggctcccggat

SEQ ID NO: 63914 - DNA, 20 bp, Artificial Sequence
  MKO10063914_A_mmu-mir-5046
  gRNA
tcccggatcggagctcctaa

SEQ ID NO: 63915 - DNA, 20 bp, Artificial Sequence
  MKO10063915_A_mmu-mir-5046
  gRNA
aggtaagggggtcacagtgg

SEQ ID NO: 63916 - DNA, 20 bp, Artificial Sequence
  MKO10063916_A_mmu-mir-6990
  gRNA
cgatgctccctgccaggaag

SEQ ID NO: 63917 - DNA, 20 bp, Artificial Sequence
  MKO10063917_A_mmu-mir-6990
  gRNA
gctccctgccaggaagaggc

SEQ ID NO: 63918 - DNA, 20 bp, Artificial Sequence
  MKO10063918_A_mmu-mir-6990
  gRNA
aggaagaggcagggctccag

SEQ ID NO: 63919 - DNA, 20 bp, Artificial Sequence
  MKO10063919_A_mmu-mir-6990
  gRNA
cggcctcccagagcccggag

SEQ ID NO: 63920 - DNA, 20 bp, Artificial Sequence
  MKO10063920_A_mmu-mir-6991
  gRNA
cctgaagagcagtggagaac

SEQ ID NO: 63921 - DNA, 20 bp, Artificial Sequence
  MKO10063921_A_mmu-mir-6991
  gRNA
gagcagtggagaacagggac

SEQ ID NO: 63922 - DNA, 20 bp, Artificial Sequence
  MKO10063922_A_mmu-mir-6991
  gRNA
cagggactgggcctgattga

SEQ ID NO: 63923 - DNA, 20 bp, Artificial Sequence
  MKO10063923_A_mmu-mir-6991
  gRNA
gattgatggcactcgctcca

SEQ ID NO: 63924 - DNA, 20 bp, Artificial Sequence
  MKO10063924_A_mmu-mir-6992
  gRNA
ttaagtatatctgcctgtga

SEQ ID NO: 63925 - DNA, 20 bp, Artificial Sequence
  MKO10063925_A_mmu-mir-6992
  gRNA
cctgtgatggtttggctgag

SEQ ID NO: 63926 - DNA, 20 bp, Artificial Sequence
  MKO10063926_A_mmu-mir-6992
  gRNA
ctgagtggaattggttgtgt

SEQ ID NO: 63927 - DNA, 20 bp, Artificial Sequence
  MKO10063927_A_mmu-mir-6992
  gRNA
attggttgtgttggaggtta

SEQ ID NO: 63928 - DNA, 20 bp, Artificial Sequence
  MKO10063928_A_mmu-mir-5136
  gRNA
actcacgtgaaaaccaccct

SEQ ID NO: 63929 - DNA, 20 bp, Artificial Sequence
  MKO10063929_A_mmu-mir-5136
  gRNA
cgtgaaaaccacccttggaa

SEQ ID NO: 63930 - DNA, 20 bp, Artificial Sequence
  MKO10063930_A_mmu-mir-5136
  gRNA
cgagggaactactgggaact

SEQ ID NO: 63931 - DNA, 20 bp, Artificial Sequence
  MKO10063931_A_mmu-mir-5136
  gRNA
gattttgtctttatatgcga

SEQ ID NO: 63932 - DNA, 20 bp, Artificial Sequence
  MKO10063932_A_mmu-mir-6993
  gRNA
agggaaagttggtggctcag

SEQ ID NO: 63933 - DNA, 20 bp, Artificial Sequence
  MKO10063933_A_mmu-mir-6993
  gRNA
tggtggctcagtgggagaaa

SEQ ID NO: 63934 - DNA, 20 bp, Artificial Sequence
  MKO10063934_A_mmu-mir-6993
  gRNA
gggagaaacgggtgtctgtc

SEQ ID NO: 63935 - DNA, 20 bp, Artificial Sequence
  MKO10063935_A_mmu-mir-6993
  gRNA
gcgtttgtttcctcacagct

SEQ ID NO: 63936 - DNA, 20 bp, Artificial Sequence
  MKO10063936_A_mmu-mir-6994
  gRNA
ataaagagaccctgtcacaa

SEQ ID NO: 63937 - DNA, 20 bp, Artificial Sequence
  MKO10063937_A_mmu-mir-6994
  gRNA
gtcacaaaggtgggtgaagc

SEQ ID NO: 63938 - DNA, 20 bp, Artificial Sequence
  MKO10063938_A_mmu-mir-6994
  gRNA
cttcacccacctttgtgaca

SEQ ID NO: 63939 - DNA, 20 bp, Artificial Sequence
  MKO10063939_A_mmu-mir-6994
  gRNA
gaagaactagcaatcgtcac

SEQ ID NO: 63940 - DNA, 20 bp, Artificial Sequence
  MKO10063940_A_mmu-mir-496b
  gRNA
taatacgagatgaaaggaat

SEQ ID NO: 63941 - DNA, 20 bp, Artificial Sequence
  MKO10063941_A_mmu-mir-496b
  gRNA
ttctcaacgaggttagttaa

SEQ ID NO: 63942 - DNA, 20 bp, Artificial Sequence
  MKO10063942_A_mmu-mir-496b
  gRNA
gtacaaaaaaattctcaacg

SEQ ID NO: 63943 - DNA, 20 bp, Artificial Sequence
  MKO10063943_A_mmu-mir-496b
  gRNA
tatgcttaatacgagatgaa

SEQ ID NO: 63944 - DNA, 20 bp, Artificial Sequence
  MKO10063944_A_mmu-mir-204
  gRNA
tgagaatatatgaaggaggc

SEQ ID NO: 63945 - DNA, 20 bp, Artificial Sequence
  MKO10063945_A_mmu-mir-204
  gRNA
gaaggaggctgggaaggcaa

SEQ ID NO: 63946 - DNA, 20 bp, Artificial Sequence
  MKO10063946_A_mmu-mir-204
  gRNA
ctcaggcataggatgacaaa

SEQ ID NO: 63947 - DNA, 20 bp, Artificial Sequence
  MKO10063947_A_mmu-mir-204
  gRNA
cttcatatattctcaggcat

SEQ ID NO: 63948 - DNA, 20 bp, Artificial Sequence
  MKO10063948_A_mmu-mir-1192
  gRNA
ttgtgttttgagacagggtc

SEQ ID NO: 63949 - DNA, 20 bp, Artificial Sequence
  MKO10063949_A_mmu-mir-1192
  gRNA
gtttgtttttactgtttgga

SEQ ID NO: 63950 - DNA, 20 bp, Artificial Sequence
  MKO10063950_A_mmu-mir-1192
  gRNA
cgaaacaacaatgacaaatt

SEQ ID NO: 63951 - DNA, 20 bp, Artificial Sequence
  MKO10063951_A_mmu-mir-1192
  gRNA
ttgcttttgtgttttgagac

SEQ ID NO: 63952 - DNA, 20 bp, Artificial Sequence
  MKO10063952_A_mmu-mir-3084-1
  gRNA
tgtgctatacaaatagttga

SEQ ID NO: 63953 - DNA, 20 bp, Artificial Sequence
  MKO10063953_A_mmu-mir-3084-1
  gRNA
ttctaattctttttgtctga

SEQ ID NO: 63954 - DNA, 20 bp, Artificial Sequence
  MKO10063954_A_mmu-mir-3084-1
  gRNA
tctttttgtctgaaggagac

SEQ ID NO: 63955 - DNA, 20 bp, Artificial Sequence
  MKO10063955_A_mmu-mir-101b
  gRNA
gagactgaactgcccttttt

SEQ ID NO: 63956 - DNA, 20 bp, Artificial Sequence
  MKO10063956_A_mmu-mir-101b
  gRNA
ctgccctttttcggttatca

SEQ ID NO: 63957 - DNA, 20 bp, Artificial Sequence
  MKO10063957_A_mmu-mir-101b
  gRNA
gtactgtgatagctgaagaa

SEQ ID NO: 63958 - DNA, 20 bp, Artificial Sequence
  MKO10063958_A_mmu-mir-101b
  gRNA
ctgtgatagctgaagaatgg

SEQ ID NO: 63959 - DNA, 20 bp, Artificial Sequence
  MKO10063959_A_mmu-mir-3970
  gRNA
tgcaattttctaggaatttg

SEQ ID NO: 63960 - DNA, 20 bp, Artificial Sequence
  MKO10063960_A_mmu-mir-3970
  gRNA
cagcatcacccttttgttta

SEQ ID NO: 63961 - DNA, 20 bp, Artificial Sequence
  MKO10063961_A_mmu-mir-3970
  gRNA
cataaacaaaagggtgatgc

SEQ ID NO: 63962 - DNA, 20 bp, Artificial Sequence
  MKO10063962_A_mmu-mir-3970
  gRNA
catcacccttttgtttatgg

SEQ ID NO: 63963 - DNA, 20 bp, Artificial Sequence
  MKO10063963_A_mmu-mir-107
  gRNA
ttctttacagtgttgccttg

SEQ ID NO: 63964 - DNA, 20 bp, Artificial Sequence
  MKO10063964_A_mmu-mir-107
  gRNA
tgcttgaactccatgccaca

SEQ ID NO: 63965 - DNA, 20 bp, Artificial Sequence
  MKO10063965_A_mmu-mir-107
  gRNA
agttcaagcagcattgtaca

SEQ ID NO: 63966 - DNA, 20 bp, Artificial Sequence
  MKO10063966_A_mmu-mir-107
  gRNA
tacagtgttgccttgtggca

SEQ ID NO: 63967 - DNA, 20 bp, Artificial Sequence
  MKO10063967_A_mmu-mir-1950
  gRNA
aaatgctttttctgcatcta

SEQ ID NO: 63968 - DNA, 20 bp, Artificial Sequence
  MKO10063968_A_mmu-mir-1950
  gRNA
tttttctgcatctaaggata

SEQ ID NO: 63969 - DNA, 20 bp, Artificial Sequence
  MKO10063969_A_mmu-mir-1950
  gRNA
tgcatttaaggagatgatca

SEQ ID NO: 63970 - DNA, 20 bp, Artificial Sequence
  MKO10063970_A_mmu-mir-1950
  gRNA
tgcagaaaaagcatttggcc

SEQ ID NO: 63971 - DNA, 20 bp, Artificial Sequence
  MKO10063971_A_mmu-mir-8092
  gRNA
gctgccggcagcgcggcgct

SEQ ID NO: 63972 - DNA, 20 bp, Artificial Sequence
  MKO10063972_A_mmu-mir-8092
  gRNA
ctcggctttccggcagtacc

SEQ ID NO: 63973 - DNA, 20 bp, Artificial Sequence
  MKO10063973_A_mmu-mir-8092
  gRNA
gctttccggcagtacccgga

SEQ ID NO: 63974 - DNA, 20 bp, Artificial Sequence
  MKO10063974_A_mmu-mir-8092
  gRNA
ttccggcagtacccggatgg

SEQ ID NO: 63975 - DNA, 20 bp, Artificial Sequence
  MKO10063975_A_mmu-mir-8091
  gRNA
ctacctggagatttccttgt

SEQ ID NO: 63976 - DNA, 20 bp, Artificial Sequence
  MKO10063976_A_mmu-mir-8091
  gRNA
tagggtgcttggattaggtt

SEQ ID NO: 63977 - DNA, 20 bp, Artificial Sequence
  MKO10063977_A_mmu-mir-8091
  gRNA
aggttagggggaggagtgag

SEQ ID NO: 63978 - DNA, 20 bp, Artificial Sequence
  MKO10063978_A_mmu-mir-8091
  gRNA
gggaggagtgagtggtaagc

SEQ ID NO: 63979 - DNA, 20 bp, Artificial Sequence
  MKO10063979_A_mmu-mir-3085
  gRNA
tgtgatgcccaagccctggg

SEQ ID NO: 63980 - DNA, 20 bp, Artificial Sequence
  MKO10063980_A_mmu-mir-3085
  gRNA
tgatgcccaagccctgggag

SEQ ID NO: 63981 - DNA, 20 bp, Artificial Sequence
  MKO10063981_A_mmu-mir-3085
  gRNA
atattcagactcttggccct

SEQ ID NO: 63982 - DNA, 20 bp, Artificial Sequence
  MKO10063982_A_mmu-mir-3085
  gRNA
cagactcttggccctcggaa

SEQ ID NO: 63983 - DNA, 20 bp, Artificial Sequence
  MKO10063983_A_mmu-mir-5114
  gRNA
aggattaagagaactggaga

SEQ ID NO: 63984 - DNA, 20 bp, Artificial Sequence
  MKO10063984_A_mmu-mir-5114
  gRNA
gccaagctggcttctggaac

SEQ ID NO: 63985 - DNA, 20 bp, Artificial Sequence
  MKO10063985_A_mmu-mir-5114
  gRNA
ggagacggaagctgcaagag

SEQ ID NO: 63986 - DNA, 20 bp, Artificial Sequence
  MKO10063986_A_mmu-mir-5114
  gRNA
gctgcaagagcggctgagtg

SEQ ID NO: 63987 - DNA, 20 bp, Artificial Sequence
  MKO10063987_A_mmu-mir-6405
  gRNA
tcaccccatccagctttcca

SEQ ID NO: 63988 - DNA, 20 bp, Artificial Sequence
  MKO10063988_A_mmu-mir-6405
  gRNA
catggtgagaccagacccca

SEQ ID NO: 63989 - DNA, 20 bp, Artificial Sequence
  MKO10063989_A_mmu-mir-6405
  gRNA
gagtttgaagtgggaagcag

SEQ ID NO: 63990 - DNA, 20 bp, Artificial Sequence
  MKO10063990_A_mmu-mir-6405
  gRNA
tgggaagcagtgggaagcag

SEQ ID NO: 63991 - DNA, 20 bp, Artificial Sequence
  MKO10063991_A_mmu-mir-146b
  gRNA
ctctgagaactgaattccat

SEQ ID NO: 63992 - DNA, 20 bp, Artificial Sequence
  MKO10063992_A_mmu-mir-146b
  gRNA
acgccctagggactcagttc

SEQ ID NO: 63993 - DNA, 20 bp, Artificial Sequence
  MKO10063993_A_mmu-mir-146b
  gRNA
ggaattcagttctcagagcc

SEQ ID NO: 63994 - DNA, 20 bp, Artificial Sequence
  MKO10063994_A_mmu-mir-146b
  gRNA
ctgctagagctcacagccta

SEQ ID NO: 63995 - DNA, 20 bp, Artificial Sequence
  MKO10063995_A_mmu-mir-6995
  gRNA
gaggtacctgtgagaggaag

SEQ ID NO: 63996 - DNA, 20 bp, Artificial Sequence
  MKO10063996_A_mmu-mir-6995
  gRNA
ggtttcccccttctactccc

SEQ ID NO: 63997 - DNA, 20 bp, Artificial Sequence
  MKO10063997_A_mmu-mir-6995
  gRNA
gtgtgtccccttcctctcac

SEQ ID NO: 63998 - DNA, 20 bp, Artificial Sequence
  MKO10063998_A_mmu-mir-6995
  gRNA
acagacctgggagtagaagg

SEQ ID NO: 63999 - DNA, 20 bp, Artificial Sequence
  MKO10063999_A_mmu-mir-8090
  gRNA
tataaaagcaggaagagacg

SEQ ID NO: 64000 - DNA, 20 bp, Artificial Sequence
  MKO10064000_A_mmu-mir-8090
  gRNA
tgcacatcaggagcccagtg

SEQ ID NO: 64001 - DNA, 20 bp, Artificial Sequence
  MKO10064001_A_mmu-mir-8090
  gRNA
aggagcccagtgcggaggcc

SEQ ID NO: 64002 - DNA, 20 bp, Artificial Sequence
  MKO10064002_A_mmu-mir-8090
  gRNA
atgtgcagtcagaagcgcag

SEQ ID NO: 64003 - DNA, 20 bp, Artificial Sequence
  MKO10064003_A_mmu-mir-6407
  gRNA
caaatgacacttgccctgtc

SEQ ID NO: 64004 - DNA, 20 bp, Artificial Sequence
  MKO10064004_A_mmu-mir-6407
  gRNA
tgccctgtcagggacagcca

SEQ ID NO: 64005 - DNA, 20 bp, Artificial Sequence
  MKO10064005_A_mmu-mir-6407
  gRNA
agaatgcaatgtggcacccg

SEQ ID NO: 64006 - DNA, 20 bp, Artificial Sequence
  MKO10064006_A_mmu-mir-6407
  gRNA
cgaggaagtcacctcaccac

SEQ ID NO: 64007 - DNA, 20 bp, Artificial Sequence
  MKO10064007_A_mmu-mir-6715
  gRNA
gctgtgtccacaggcaccac

SEQ ID NO: 64008 - DNA, 20 bp, Artificial Sequence
  MKO10064008_A_mmu-mir-6715
  gRNA
tttgattgaattgccaaacc

SEQ ID NO: 64009 - DNA, 20 bp, Artificial Sequence
  MKO10064009_A_mmu-mir-6715
  gRNA
tgccaaaccaggcgtgcctg

SEQ ID NO: 64010 - DNA, 20 bp, Artificial Sequence
  MKO10064010_A_mmu-mir-6715
  gRNA
gctcaaacctgtggtgcctg

SEQ ID NO: 64011 - DNA, 20 bp, Artificial Sequence
  MKO10064011_A_mmu-mir-5623
  gRNA
caggtctcagatgtggcagc

SEQ ID NO: 64012 - DNA, 20 bp, Artificial Sequence
  MKO10064012_A_mmu-mir-5623
  gRNA
aatgcaggtgtgaatggaca

SEQ ID NO: 64013 - DNA, 20 bp, Artificial Sequence
  MKO10064013_A_mmu-mir-5623
  gRNA
tgcaggtgtgaatggacatg

SEQ ID NO: 64014 - DNA, 20 bp, Artificial Sequence
  MKO10064014_A_mmu-mir-5623
  gRNA
cagctggcaagtcagaatgc

SEQ ID NO: 64015 - DNA, 20 bp, Artificial Sequence
  MKO10064015_A_mmu-mir-3086
  gRNA
cacttagactgtaggctcat

SEQ ID NO: 64016 - DNA, 20 bp, Artificial Sequence
  MKO10064016_A_mmu-mir-3086
  gRNA
cttagactgtaggctcattg

SEQ ID NO: 64017 - DNA, 20 bp, Artificial Sequence
  MKO10064017_A_mmu-mir-3086
  gRNA
caagacgctaacccttccaa

SEQ ID NO: 64018 - DNA, 20 bp, Artificial Sequence
  MKO10064018_A_mmu-mir-3086
  gRNA
tgggcctacaatctaagtgt

SEQ ID NO: 64019 - DNA, 20 bp, Artificial Sequence
  MKO10064019_A_mmu-mir-3084-2
  gRNA
tgtgctatacaaatagttga

SEQ ID NO: 64020 - DNA, 20 bp, Artificial Sequence
  MKO10064020_A_mmu-mir-3084-2
  gRNA
ttctaattctttttgtctga

SEQ ID NO: 64021 - DNA, 20 bp, Artificial Sequence
  MKO10064021_A_mmu-mir-3084-2
  gRNA
tctttttgtctgaaggagac

SEQ ID NO: 64022 - DNA, 20 bp, Artificial Sequence
  MKO10064022_A_mmu-mir-466m
  gRNA
gcacacacaagaacacacac

SEQ ID NO: 64023 - DNA, 20 bp, Artificial Sequence
  MKO10064023_A_mmu-mir-466m
  gRNA
acacacacaggcacatacat

SEQ ID NO: 64024 - DNA, 20 bp, Artificial Sequence
  MKO10064024_A_mmu-mir-669f
  gRNA
gcaagcacaaacacacacag

SEQ ID NO: 64025 - DNA, 20 bp, Artificial Sequence
  MKO10064025_A_mmu-mir-669f
  gRNA
cacaaacacacacagaggaa

SEQ ID NO: 64026 - DNA, 20 bp, Artificial Sequence
  MKO10064026_A_mmu-mir-669f
  gRNA
tatacacacaggcacataca

SEQ ID NO: 64027 - DNA, 20 bp, Artificial Sequence
  MKO10064027_A_mmu-mir-669f
  gRNA
gcacacacaactatacacac

SEQ ID NO: 64028 - DNA, 20 bp, Artificial Sequence
  MKO10064028_A_mmu-mir-669e
  gRNA
aaagatcagcctgggattca

SEQ ID NO: 64029 - DNA, 20 bp, Artificial Sequence
  MKO10064029_A_mmu-mir-669e
  gRNA
catgggctgtaccctatata

SEQ ID NO: 64030 - DNA, 20 bp, Artificial Sequence
  MKO10064030_A_mmu-mir-669e
  gRNA
cacacacctgcccatatata

SEQ ID NO: 64031 - DNA, 20 bp, Artificial Sequence
  MKO10064031_A_mmu-mir-669e
  gRNA
gctgtaccctatatatgggc

SEQ ID NO: 64032 - DNA, 20 bp, Artificial Sequence
  MKO10064032_A_mmu-mir-669b
  gRNA
acatgcacatacattcatgg

SEQ ID NO: 64033 - DNA, 20 bp, Artificial Sequence
  MKO10064033_A_mmu-mir-669b
  gRNA
acacatgcacatacattcat

SEQ ID NO: 64034 - DNA, 20 bp, Artificial Sequence
  MKO10064034_A_mmu-mir-669d
  gRNA
gcatgcatgcgtgtgtatat

SEQ ID NO: 64035 - DNA, 20 bp, Artificial Sequence
  MKO10064035_A_mmu-mir-669d
  gRNA
gcaagcaacacacaaatccc

SEQ ID NO: 64036 - DNA, 20 bp, Artificial Sequence
  MKO10064036_A_mmu-mir-466f-2
  gRNA
cacacacacacacacacgaa

SEQ ID NO: 64037 - DNA, 20 bp, Artificial Sequence
  MKO10064037_A_mmu-mir-466f-2
  gRNA
aaacacacattcacatacat

SEQ ID NO: 64038 - DNA, 20 bp, Artificial Sequence
  MKO10064038_A_mmu-mir-669l
  gRNA
cgcacatgcacaaacatggg

SEQ ID NO: 64039 - DNA, 20 bp, Artificial Sequence
  MKO10064039_A_mmu-mir-669l
  gRNA
tacgcacatgcacaaacatg

SEQ ID NO: 64040 - DNA, 20 bp, Artificial Sequence
  MKO10064040_A_mmu-mir-669l
  gRNA
tatacgcacatgcacaaaca

SEQ ID NO: 64041 - DNA, 20 bp, Artificial Sequence
  MKO10064041_A_mmu-mir-669l
  gRNA
atatgaatgcgtgtatatat

SEQ ID NO: 64042 - DNA, 20 bp, Artificial Sequence
  MKO10064042_A_mmu-mir-669d-2
  gRNA
cccatatacacacgcatgca

SEQ ID NO: 64043 - DNA, 20 bp, Artificial Sequence
  MKO10064043_A_mmu-mir-669d-2
  gRNA
cacacatgcacatatatagg

SEQ ID NO: 64044 - DNA, 20 bp, Artificial Sequence
  MKO10064044_A_mmu-mir-669d-2
  gRNA
tacacacatgcacatatata

SEQ ID NO: 64045 - DNA, 20 bp, Artificial Sequence
  MKO10064045_A_mmu-mir-669d-2
  gRNA
ccgtgcatgcgtgtgtatat

SEQ ID NO: 64046 - DNA, 20 bp, Artificial Sequence
  MKO10064046_A_mmu-mir-466f-3
  gRNA
acacacatgcacatacatga

SEQ ID NO: 64047 - DNA, 20 bp, Artificial Sequence
  MKO10064047_A_mmu-mir-297a-2
  gRNA
gcacacatacatatacacac

SEQ ID NO: 64048 - DNA, 20 bp, Artificial Sequence
  MKO10064048_A_mmu-mir-297a-2
  gRNA
gtttgtgtgcatgcttgtat

SEQ ID NO: 64049 - DNA, 20 bp, Artificial Sequence
  MKO10064049_A_mmu-mir-297a-2
  gRNA
tacacacaggcacatacact

SEQ ID NO: 64050 - DNA, 20 bp, Artificial Sequence
  MKO10064050_A_mmu-mir-466o
  gRNA
atatgagcacatagacacac

SEQ ID NO: 64051 - DNA, 20 bp, Artificial Sequence
  MKO10064051_A_mmu-mir-466o
  gRNA
acacatacacacatacatag

SEQ ID NO: 64052 - DNA, 20 bp, Artificial Sequence
  MKO10064052_A_mmu-mir-466o
  gRNA
caacacatacacacatacat

SEQ ID NO: 64053 - DNA, 20 bp, Artificial Sequence
  MKO10064053_A_mmu-mir-467c
  gRNA
atgcacgcacttatgcacaa

SEQ ID NO: 64054 - DNA, 20 bp, Artificial Sequence
  MKO10064054_A_mmu-mir-467c
  gRNA
tgcacacagacatgcgagaa

SEQ ID NO: 64055 - DNA, 20 bp, Artificial Sequence
  MKO10064055_A_mmu-mir-467c
  gRNA
acatgcgagaatggccctca

SEQ ID NO: 64056 - DNA, 20 bp, Artificial Sequence
  MKO10064056_A_mmu-mir-467c
  gRNA
gcacaaaggcacatgcatag

SEQ ID NO: 64057 - DNA, 20 bp, Artificial Sequence
  MKO10064057_A_mmu-mir-466b-1
  gRNA
catatgagcacacagacaca

SEQ ID NO: 64058 - DNA, 20 bp, Artificial Sequence
  MKO10064058_A_mmu-mir-466b-1
  gRNA
acacatacacacattcatag

SEQ ID NO: 64059 - DNA, 20 bp, Artificial Sequence
  MKO10064059_A_mmu-mir-466b-1
  gRNA
caacacatacacacattcat

SEQ ID NO: 64060 - DNA, 20 bp, Artificial Sequence
  MKO10064060_A_mmu-mir-669a-3
  gRNA
aagcacacatacacagacac

SEQ ID NO: 64061 - DNA, 20 bp, Artificial Sequence
  MKO10064061_A_mmu-mir-669a-3
  gRNA
cacatacacagacacaggaa

SEQ ID NO: 64062 - DNA, 20 bp, Artificial Sequence
  MKO10064062_A_mmu-mir-669a-3
  gRNA
cacatacatggaggaatcac

SEQ ID NO: 64063 - DNA, 20 bp, Artificial Sequence
  MKO10064063_A_mmu-mir-669a-3
  gRNA
acacacatgcacatacatgg

SEQ ID NO: 64064 - DNA, 20 bp, Artificial Sequence
  MKO10064064_A_mmu-mir-669k
  gRNA
acgcatgcaaacacattcat

SEQ ID NO: 64065 - DNA, 20 bp, Artificial Sequence
  MKO10064065_A_mmu-mir-669k
  gRNA
tcctaactgagatatagctc

SEQ ID NO: 64066 - DNA, 20 bp, Artificial Sequence
  MKO10064066_A_mmu-mir-669k
  gRNA
tgcaaacacattcataggaa

SEQ ID NO: 64067 - DNA, 20 bp, Artificial Sequence
  MKO10064067_A_mmu-mir-669k
  gRNA
gccagagctatatctcagtt

SEQ ID NO: 64068 - DNA, 20 bp, Artificial Sequence
  MKO10064068_A_mmu-mir-467a-1
  gRNA
atgcaggcacttacgcacac

SEQ ID NO: 64069 - DNA, 20 bp, Artificial Sequence
  MKO10064069_A_mmu-mir-467a-1
  gRNA
atatacacgcatatacatgc

SEQ ID NO: 64070 - DNA, 20 bp, Artificial Sequence
  MKO10064070_A_mmu-mir-467a-1
  gRNA
cacacatgcacacagacatg

SEQ ID NO: 64071 - DNA, 20 bp, Artificial Sequence
  MKO10064071_A_mmu-mir-467a-1
  gRNA
cgcacacaggcacgtacata

SEQ ID NO: 64072 - DNA, 20 bp, Artificial Sequence
  MKO10064072_A_mmu-mir-466b-8
  gRNA
catatgagcacacagacaca

SEQ ID NO: 64073 - DNA, 20 bp, Artificial Sequence
  MKO10064073_A_mmu-mir-466b-8
  gRNA
acacatacacacatacatag

SEQ ID NO: 64074 - DNA, 20 bp, Artificial Sequence
  MKO10064074_A_mmu-mir-466b-8
  gRNA
caacacatacacacatacat

SEQ ID NO: 64075 - DNA, 20 bp, Artificial Sequence
  MKO10064075_A_mmu-mir-669a-1
  gRNA
aagcacacatacacagacac

SEQ ID NO: 64076 - DNA, 20 bp, Artificial Sequence
  MKO10064076_A_mmu-mir-669a-1
  gRNA
cacatacacagacacaggaa

SEQ ID NO: 64077 - DNA, 20 bp, Artificial Sequence
  MKO10064077_A_mmu-mir-669a-1
  gRNA
acacacatgcacatacatgg

SEQ ID NO: 64078 - DNA, 20 bp, Artificial Sequence
  MKO10064078_A_mmu-mir-669a-1
  gRNA
tatacacacatgcacataca

SEQ ID NO: 64079 - DNA, 20 bp, Artificial Sequence
  MKO10064079_A_mmu-mir-669g
  gRNA
atctgcaagcacacacacac

SEQ ID NO: 64080 - DNA, 20 bp, Artificial Sequence
  MKO10064080_A_mmu-mir-669g
  gRNA
aagcacacatgcacataaat

SEQ ID NO: 64081 - DNA, 20 bp, Artificial Sequence
  MKO10064081_A_mmu-mir-669j
  gRNA
tcatagctcgggccattcgt

SEQ ID NO: 64082 - DNA, 20 bp, Artificial Sequence
  MKO10064082_A_mmu-mir-669j
  gRNA
tgcaaacatactcccacgaa

SEQ ID NO: 64083 - DNA, 20 bp, Artificial Sequence
  MKO10064083_A_mmu-mir-669j
  gRNA
acacacatgcacattcttgg

SEQ ID NO: 64084 - DNA, 20 bp, Artificial Sequence
  MKO10064084_A_mmu-mir-669j
  gRNA
tatacacacatgcacattct

SEQ ID NO: 64085 - DNA, 20 bp, Artificial Sequence
  MKO10064085_A_mmu-mir-467a-2
  gRNA
atgcaggcacttacgcacac

SEQ ID NO: 64086 - DNA, 20 bp, Artificial Sequence
  MKO10064086_A_mmu-mir-467a-2
  gRNA
atatacacgcatatacatgc

SEQ ID NO: 64087 - DNA, 20 bp, Artificial Sequence
  MKO10064087_A_mmu-mir-467a-2
  gRNA
cacacatgcacacagacatg

SEQ ID NO: 64088 - DNA, 20 bp, Artificial Sequence
  MKO10064088_A_mmu-mir-467a-2
  gRNA
gcacacaggcacatacatag

SEQ ID NO: 64089 - DNA, 20 bp, Artificial Sequence
  MKO10064089_A_mmu-mir-466e
  gRNA
catatgagcacacagacaca

SEQ ID NO: 64090 - DNA, 20 bp, Artificial Sequence
  MKO10064090_A_mmu-mir-466e
  gRNA
acacatacacacatacatag

SEQ ID NO: 64091 - DNA, 20 bp, Artificial Sequence
  MKO10064091_A_mmu-mir-466e
  gRNA
caacacatacacacatacat

SEQ ID NO: 64092 - DNA, 20 bp, Artificial Sequence
  MKO10064092_A_mmu-mir-669a-4
  gRNA
aagcacacatacacagacac

SEQ ID NO: 64093 - DNA, 20 bp, Artificial Sequence
  MKO10064093_A_mmu-mir-669a-4
  gRNA
acacacatgcacatacatgg

SEQ ID NO: 64094 - DNA, 20 bp, Artificial Sequence
  MKO10064094_A_mmu-mir-669a-4
  gRNA
tatacacacatgcacataca

SEQ ID NO: 64095 - DNA, 20 bp, Artificial Sequence
  MKO10064095_A_mmu-mir-467b
  gRNA
atgcaggcacttacgcacac

SEQ ID NO: 64096 - DNA, 20 bp, Artificial Sequence
  MKO10064096_A_mmu-mir-467b
  gRNA
atatacacgcatatacatgc

SEQ ID NO: 64097 - DNA, 20 bp, Artificial Sequence
  MKO10064097_A_mmu-mir-467b
  gRNA
cacacatgcacacagacatg

SEQ ID NO: 64098 - DNA, 20 bp, Artificial Sequence
  MKO10064098_A_mmu-mir-467b
  gRNA
cgcacacgggcacatacaaa

SEQ ID NO: 64099 - DNA, 20 bp, Artificial Sequence
  MKO10064099_A_mmu-mir-466c-1
  gRNA
acatatgagcacacagacac

SEQ ID NO: 64100 - DNA, 20 bp, Artificial Sequence
  MKO10064100_A_mmu-mir-466c-1
  gRNA
atatgagcacacagacacag

SEQ ID NO: 64101 - DNA, 20 bp, Artificial Sequence
  MKO10064101_A_mmu-mir-466c-1
  gRNA
acacatatacacatacatag

SEQ ID NO: 64102 - DNA, 20 bp, Artificial Sequence
  MKO10064102_A_mmu-mir-466c-1
  gRNA
caacacatatacacatacat

SEQ ID NO: 64103 - DNA, 20 bp, Artificial Sequence
  MKO10064103_A_mmu-mir-669a-5
  gRNA
aagcacacatacacagacac

SEQ ID NO: 64104 - DNA, 20 bp, Artificial Sequence
  MKO10064104_A_mmu-mir-669a-5
  gRNA
acacacatgcacatacatgg

SEQ ID NO: 64105 - DNA, 20 bp, Artificial Sequence
  MKO10064105_A_mmu-mir-669a-5
  gRNA
tatacacacatgcacataca

SEQ ID NO: 64106 - DNA, 20 bp, Artificial Sequence
  MKO10064106_A_mmu-mir-467a-3
  gRNA
atgcaggcacttacgcacac

SEQ ID NO: 64107 - DNA, 20 bp, Artificial Sequence
  MKO10064107_A_mmu-mir-467a-3
  gRNA
atatacacgcatatacatgc

SEQ ID NO: 64108 - DNA, 20 bp, Artificial Sequence
  MKO10064108_A_mmu-mir-467a-3
  gRNA
cacacatgcacacagacatg

SEQ ID NO: 64109 - DNA, 20 bp, Artificial Sequence
  MKO10064109_A_mmu-mir-467a-3
  gRNA
gcacacgggcacatacatag

SEQ ID NO: 64110 - DNA, 20 bp, Artificial Sequence
  MKO10064110_A_mmu-mir-466c-2
  gRNA
acatatgagcacacagacac

SEQ ID NO: 64111 - DNA, 20 bp, Artificial Sequence
  MKO10064111_A_mmu-mir-466c-2
  gRNA
atatgagcacacagacacag

SEQ ID NO: 64112 - DNA, 20 bp, Artificial Sequence
  MKO10064112_A_mmu-mir-466c-2
  gRNA
acacatatacacatacgtag

SEQ ID NO: 64113 - DNA, 20 bp, Artificial Sequence
  MKO10064113_A_mmu-mir-466c-2
  gRNA
caacacatatacacatacgt

SEQ ID NO: 64114 - DNA, 20 bp, Artificial Sequence
  MKO10064114_A_mmu-mir-669a-6
  gRNA
aagcacacatacacagacac

SEQ ID NO: 64115 - DNA, 20 bp, Artificial Sequence
  MKO10064115_A_mmu-mir-669a-6
  gRNA
acacacatgcacatacatgg

SEQ ID NO: 64116 - DNA, 20 bp, Artificial Sequence
  MKO10064116_A_mmu-mir-669a-6
  gRNA
tatacacacatgcacataca

SEQ ID NO: 64117 - DNA, 20 bp, Artificial Sequence
  MKO10064117_A_mmu-mir-467a-4
  gRNA
atgcaggcacttacgcacac

SEQ ID NO: 64118 - DNA, 20 bp, Artificial Sequence
  MKO10064118_A_mmu-mir-467a-4
  gRNA
atatacacgcatatacatgc

SEQ ID NO: 64119 - DNA, 20 bp, Artificial Sequence
  MKO10064119_A_mmu-mir-467a-4
  gRNA
cacacatgcacacagacatg

SEQ ID NO: 64120 - DNA, 20 bp, Artificial Sequence
  MKO10064120_A_mmu-mir-467a-4
  gRNA
gcacacaggcacatacatag

SEQ ID NO: 64121 - DNA, 20 bp, Artificial Sequence
  MKO10064121_A_mmu-mir-466b-4
  gRNA
catatgagcacacagacaca

SEQ ID NO: 64122 - DNA, 20 bp, Artificial Sequence
  MKO10064122_A_mmu-mir-466b-4
  gRNA
acacatacacacatacatag

SEQ ID NO: 64123 - DNA, 20 bp, Artificial Sequence
  MKO10064123_A_mmu-mir-466b-4
  gRNA
caacacatacacacatacat

SEQ ID NO: 64124 - DNA, 20 bp, Artificial Sequence
  MKO10064124_A_mmu-mir-669a-7
  gRNA
aagcacacatacacagacac

SEQ ID NO: 64125 - DNA, 20 bp, Artificial Sequence
  MKO10064125_A_mmu-mir-669a-7
  gRNA
acacacatgcacatacatgg

SEQ ID NO: 64126 - DNA, 20 bp, Artificial Sequence
  MKO10064126_A_mmu-mir-669a-7
  gRNA
tatacacacatgcacataca

SEQ ID NO: 64127 - DNA, 20 bp, Artificial Sequence
  MKO10064127_A_mmu-mir-467a-5
  gRNA
atgcaggcacttacgcacac

SEQ ID NO: 64128 - DNA, 20 bp, Artificial Sequence
  MKO10064128_A_mmu-mir-467a-5
  gRNA
atatacacgcatatacatgc

SEQ ID NO: 64129 - DNA, 20 bp, Artificial Sequence
  MKO10064129_A_mmu-mir-467a-5
  gRNA
cacacatgcacacagacatg

SEQ ID NO: 64130 - DNA, 20 bp, Artificial Sequence
  MKO10064130_A_mmu-mir-467a-5
  gRNA
gcacacaggcacatacatag

SEQ ID NO: 64131 - DNA, 20 bp, Artificial Sequence
  MKO10064131_A_mmu-mir-466b-5
  gRNA
catatgagcacacagacaca

SEQ ID NO: 64132 - DNA, 20 bp, Artificial Sequence
  MKO10064132_A_mmu-mir-466b-5
  gRNA
acacatacacatattcatag

SEQ ID NO: 64133 - DNA, 20 bp, Artificial Sequence
  MKO10064133_A_mmu-mir-466b-5
  gRNA
caacacatacacatattcat

SEQ ID NO: 64134 - DNA, 20 bp, Artificial Sequence
  MKO10064134_A_mmu-mir-669p-1
  gRNA
acacacatgcacatacatgg

SEQ ID NO: 64135 - DNA, 20 bp, Artificial Sequence
  MKO10064135_A_mmu-mir-669p-1
  gRNA
tatacacacatgcacataca

SEQ ID NO: 64136 - DNA, 20 bp, Artificial Sequence
  MKO10064136_A_mmu-mir-467a-6
  gRNA
atgcaggcacttacgcacac

SEQ ID NO: 64137 - DNA, 20 bp, Artificial Sequence
  MKO10064137_A_mmu-mir-467a-6
  gRNA
atatacacgcatatacatgc

SEQ ID NO: 64138 - DNA, 20 bp, Artificial Sequence
  MKO10064138_A_mmu-mir-467a-6
  gRNA
cacacatgcacacagacatg

SEQ ID NO: 64139 - DNA, 20 bp, Artificial Sequence
  MKO10064139_A_mmu-mir-467a-6
  gRNA
gcacacgggcacatacatag

SEQ ID NO: 64140 - DNA, 20 bp, Artificial Sequence
  MKO10064140_A_mmu-mir-669a-8
  gRNA
aagcacacatacacagacac

SEQ ID NO: 64141 - DNA, 20 bp, Artificial Sequence
  MKO10064141_A_mmu-mir-669a-8
  gRNA
acacacatgcacatacatgg

SEQ ID NO: 64142 - DNA, 20 bp, Artificial Sequence
  MKO10064142_A_mmu-mir-669a-8
  gRNA
tatacacacatgcacataca

SEQ ID NO: 64143 - DNA, 20 bp, Artificial Sequence
  MKO10064143_A_mmu-mir-467a-7
  gRNA
atgcaggcacttacgcacac

SEQ ID NO: 64144 - DNA, 20 bp, Artificial Sequence
  MKO10064144_A_mmu-mir-467a-7
  gRNA
atatacacgcatatacatgc

SEQ ID NO: 64145 - DNA, 20 bp, Artificial Sequence
  MKO10064145_A_mmu-mir-467a-7
  gRNA
cacacatgcacacagacatg

SEQ ID NO: 64146 - DNA, 20 bp, Artificial Sequence
  MKO10064146_A_mmu-mir-467a-7
  gRNA
gcacacaggcacatacatag

SEQ ID NO: 64147 - DNA, 20 bp, Artificial Sequence
  MKO10064147_A_mmu-mir-466b-6
  gRNA
catatgagcacacagacaca

SEQ ID NO: 64148 - DNA, 20 bp, Artificial Sequence
  MKO10064148_A_mmu-mir-466b-6
  gRNA
acacatacacacatacatag

SEQ ID NO: 64149 - DNA, 20 bp, Artificial Sequence
  MKO10064149_A_mmu-mir-466b-6
  gRNA
caacacatacacacatacat

SEQ ID NO: 64150 - DNA, 20 bp, Artificial Sequence
  MKO10064150_A_mmu-mir-669a-9
  gRNA
aagcacacatacacagacac

SEQ ID NO: 64151 - DNA, 20 bp, Artificial Sequence
  MKO10064151_A_mmu-mir-669a-9
  gRNA
acacacatgcacatacatgg

SEQ ID NO: 64152 - DNA, 20 bp, Artificial Sequence
  MKO10064152_A_mmu-mir-669a-9
  gRNA
tatacacacatgcacataca

SEQ ID NO: 64153 - DNA, 20 bp, Artificial Sequence
  MKO10064153_A_mmu-mir-467a-8
  gRNA
atgcaggcacttacgcacac

SEQ ID NO: 64154 - DNA, 20 bp, Artificial Sequence
  MKO10064154_A_mmu-mir-467a-8
  gRNA
atatacacgcatatacatgc

SEQ ID NO: 64155 - DNA, 20 bp, Artificial Sequence
  MKO10064155_A_mmu-mir-467a-8
  gRNA
cacacatgcacacagacatg

SEQ ID NO: 64156 - DNA, 20 bp, Artificial Sequence
  MKO10064156_A_mmu-mir-467a-8
  gRNA
gcacacaggcacatacatag

SEQ ID NO: 64157 - DNA, 20 bp, Artificial Sequence
  MKO10064157_A_mmu-mir-466b-7
  gRNA
catatgagcacacagacaca

SEQ ID NO: 64158 - DNA, 20 bp, Artificial Sequence
  MKO10064158_A_mmu-mir-466b-7
  gRNA
acacatacacatattcatag

SEQ ID NO: 64159 - DNA, 20 bp, Artificial Sequence
  MKO10064159_A_mmu-mir-466b-7
  gRNA
caacacatacacatattcat

SEQ ID NO: 64160 - DNA, 20 bp, Artificial Sequence
  MKO10064160_A_mmu-mir-669p-2
  gRNA
acacacatgcacatacatgg

SEQ ID NO: 64161 - DNA, 20 bp, Artificial Sequence
  MKO10064161_A_mmu-mir-669p-2
  gRNA
tatacacacatgcacataca

SEQ ID NO: 64162 - DNA, 20 bp, Artificial Sequence
  MKO10064162_A_mmu-mir-467a-9
  gRNA
atgcaggcacttacgcacac

SEQ ID NO: 64163 - DNA, 20 bp, Artificial Sequence
  MKO10064163_A_mmu-mir-467a-9
  gRNA
atatacacgcatatacatgc

SEQ ID NO: 64164 - DNA, 20 bp, Artificial Sequence
  MKO10064164_A_mmu-mir-467a-9
  gRNA
cacacatgcacacagacatg

SEQ ID NO: 64165 - DNA, 20 bp, Artificial Sequence
  MKO10064165_A_mmu-mir-467a-9
  gRNA
gcacacaggcacatacatag

SEQ ID NO: 64166 - DNA, 20 bp, Artificial Sequence
  MKO10064166_A_mmu-mir-466b-2
  gRNA
catatgagcacacagacaca

SEQ ID NO: 64167 - DNA, 20 bp, Artificial Sequence
  MKO10064167_A_mmu-mir-466b-2
  gRNA
acacatacacacatacatag

SEQ ID NO: 64168 - DNA, 20 bp, Artificial Sequence
  MKO10064168_A_mmu-mir-466b-2
  gRNA
caacacatacacacatacat

SEQ ID NO: 64169 - DNA, 20 bp, Artificial Sequence
  MKO10064169_A_mmu-mir-669a-10
  gRNA
aagcacacatacacagacac

SEQ ID NO: 64170 - DNA, 20 bp, Artificial Sequence
  MKO10064170_A_mmu-mir-669a-10
  gRNA
acacacatgcacatacatgg

SEQ ID NO: 64171 - DNA, 20 bp, Artificial Sequence
  MKO10064171_A_mmu-mir-669a-10
  gRNA
tatacacacatgcacataca

SEQ ID NO: 64172 - DNA, 20 bp, Artificial Sequence
  MKO10064172_A_mmu-mir-669a-11
  gRNA
aagcacacatacacagacac

SEQ ID NO: 64173 - DNA, 20 bp, Artificial Sequence
  MKO10064173_A_mmu-mir-669a-11
  gRNA
acacacatgcacatacatgg

SEQ ID NO: 64174 - DNA, 20 bp, Artificial Sequence
  MKO10064174_A_mmu-mir-669a-11
  gRNA
tatacacacatgcacataca

SEQ ID NO: 64175 - DNA, 20 bp, Artificial Sequence
  MKO10064175_A_mmu-mir-467a-10
  gRNA
atgcaggcacttacgcacac

SEQ ID NO: 64176 - DNA, 20 bp, Artificial Sequence
  MKO10064176_A_mmu-mir-467a-10
  gRNA
atatacacgcatatacatgc

SEQ ID NO: 64177 - DNA, 20 bp, Artificial Sequence
  MKO10064177_A_mmu-mir-467a-10
  gRNA
cacacatgcacacagacatg

SEQ ID NO: 64178 - DNA, 20 bp, Artificial Sequence
  MKO10064178_A_mmu-mir-467a-10
  gRNA
gcacacgggcacatacatag

SEQ ID NO: 64179 - DNA, 20 bp, Artificial Sequence
  MKO10064179_A_mmu-mir-466b-3
  gRNA
catatgagcacacagacaca

SEQ ID NO: 64180 - DNA, 20 bp, Artificial Sequence
  MKO10064180_A_mmu-mir-466b-3
  gRNA
acacatatacacatacacag

SEQ ID NO: 64181 - DNA, 20 bp, Artificial Sequence
  MKO10064181_A_mmu-mir-466b-3
  gRNA
caacacatatacacatacac

SEQ ID NO: 64182 - DNA, 20 bp, Artificial Sequence
  MKO10064182_A_mmu-mir-669a-12
  gRNA
aagcacacatacacagatac

SEQ ID NO: 64183 - DNA, 20 bp, Artificial Sequence
  MKO10064183_A_mmu-mir-669a-12
  gRNA
acacacatgcacatacatgg

SEQ ID NO: 64184 - DNA, 20 bp, Artificial Sequence
  MKO10064184_A_mmu-mir-669a-12
  gRNA
tatacacacatgcacataca

SEQ ID NO: 64185 - DNA, 20 bp, Artificial Sequence
  MKO10064185_A_mmu-mir-467e
  gRNA
atgctcacacttatgcacac

SEQ ID NO: 64186 - DNA, 20 bp, Artificial Sequence
  MKO10064186_A_mmu-mir-467e
  gRNA
gtctgtgtgcatgtgtatat

SEQ ID NO: 64187 - DNA, 20 bp, Artificial Sequence
  MKO10064187_A_mmu-mir-467e
  gRNA
tacacatgcacacagacatg

SEQ ID NO: 64188 - DNA, 20 bp, Artificial Sequence
  MKO10064188_A_mmu-mir-467e
  gRNA
tgcacacagacatgcgggaa

SEQ ID NO: 64189 - DNA, 20 bp, Artificial Sequence
  MKO10064189_A_mmu-mir-466p
  gRNA
atatgagcacacagacacac

SEQ ID NO: 64190 - DNA, 20 bp, Artificial Sequence
  MKO10064190_A_mmu-mir-466p
  gRNA
acacatatacacatacatag

SEQ ID NO: 64191 - DNA, 20 bp, Artificial Sequence
  MKO10064191_A_mmu-mir-466p
  gRNA
aaacacatatacacatacat

SEQ ID NO: 64192 - DNA, 20 bp, Artificial Sequence
  MKO10064192_A_mmu-mir-467d
  gRNA
atgcgcgcacttatgcacac

SEQ ID NO: 64193 - DNA, 20 bp, Artificial Sequence
  MKO10064193_A_mmu-mir-467d
  gRNA
cacacatgcacacagacatg

SEQ ID NO: 64194 - DNA, 20 bp, Artificial Sequence
  MKO10064194_A_mmu-mir-467d
  gRNA
tgcacacagacatgcgggaa

SEQ ID NO: 64195 - DNA, 20 bp, Artificial Sequence
  MKO10064195_A_mmu-mir-467d
  gRNA
gcacacaggcacatacatag

SEQ ID NO: 64196 - DNA, 20 bp, Artificial Sequence
  MKO10064196_A_mmu-mir-466a
  gRNA
tatgtgtgcgtgtatgtata

SEQ ID NO: 64197 - DNA, 20 bp, Artificial Sequence
  MKO10064197_A_mmu-mir-466a
  gRNA
acacatatacacatacatag

SEQ ID NO: 64198 - DNA, 20 bp, Artificial Sequence
  MKO10064198_A_mmu-mir-466a
  gRNA
aaacacatatacacatacat

SEQ ID NO: 64199 - DNA, 20 bp, Artificial Sequence
  MKO10064199_A_mmu-mir-297c
  gRNA
gcacacatacatatacacac

SEQ ID NO: 64200 - DNA, 20 bp, Artificial Sequence
  MKO10064200_A_mmu-mir-297c
  gRNA
gtttgtatgcatgtttgtat

SEQ ID NO: 64201 - DNA, 20 bp, Artificial Sequence
  MKO10064201_A_mmu-mir-297c
  gRNA
gcatacaaacacacaaaaat

SEQ ID NO: 64202 - DNA, 20 bp, Artificial Sequence
  MKO10064202_A_mmu-mir-297c
  gRNA
tacacacaggcatatatact

SEQ ID NO: 64203 - DNA, 20 bp, Artificial Sequence
  MKO10064203_A_mmu-mir-669c
  gRNA
catgtgtgtatagttgtgtg

SEQ ID NO: 64204 - DNA, 20 bp, Artificial Sequence
  MKO10064204_A_mmu-mir-669c
  gRNA
tatacacacatgcacataca

SEQ ID NO: 64205 - DNA, 20 bp, Artificial Sequence
  MKO10064205_A_mmu-mir-669c
  gRNA
acaagtgcacaaacagacac

SEQ ID NO: 64206 - DNA, 20 bp, Artificial Sequence
  MKO10064206_A_mmu-mir-669c
  gRNA
acacacatgcacatacatgg

SEQ ID NO: 64207 - DNA, 20 bp, Artificial Sequence
  MKO10064207_A_mmu-mir-669a-2
  gRNA
tatacacacatgcacataca

SEQ ID NO: 64208 - DNA, 20 bp, Artificial Sequence
  MKO10064208_A_mmu-mir-669a-2
  gRNA
gcaagcacacacacagacac

SEQ ID NO: 64209 - DNA, 20 bp, Artificial Sequence
  MKO10064209_A_mmu-mir-669a-2
  gRNA
cacacacacagacacaggaa

SEQ ID NO: 64210 - DNA, 20 bp, Artificial Sequence
  MKO10064210_A_mmu-mir-669a-2
  gRNA
cacatacatggaggaatctc

SEQ ID NO: 64211 - DNA, 20 bp, Artificial Sequence
  MKO10064211_A_mmu-mir-297b
  gRNA
gcatacaaacacacagaaaa

SEQ ID NO: 64212 - DNA, 20 bp, Artificial Sequence
  MKO10064212_A_mmu-mir-297b
  gRNA
cacacaagcaaatagattgg

SEQ ID NO: 64213 - DNA, 20 bp, Artificial Sequence
  MKO10064213_A_mmu-mir-297b
  gRNA
tacacacaagcaaatagatt

SEQ ID NO: 64214 - DNA, 20 bp, Artificial Sequence
  MKO10064214_A_mmu-mir-297b
  gRNA
gtttgtatgcatgtttgtat

SEQ ID NO: 64215 - DNA, 20 bp, Artificial Sequence
  MKO10064215_A_mmu-mir-466d
  gRNA
acgcacgcacacacacacac

SEQ ID NO: 64216 - DNA, 20 bp, Artificial Sequence
  MKO10064216_A_mmu-mir-466d
  gRNA
cgcacacacacacacaggga

SEQ ID NO: 64217 - DNA, 20 bp, Artificial Sequence
  MKO10064217_A_mmu-mir-466d
  gRNA
acacacatgcacatacacag

SEQ ID NO: 64218 - DNA, 20 bp, Artificial Sequence
  MKO10064218_A_mmu-mir-466d
  gRNA
aaacacacatgcacatacac

SEQ ID NO: 64219 - DNA, 20 bp, Artificial Sequence
  MKO10064219_A_mmu-mir-669m-1
  gRNA
cttgcttgtatatgtttgtg

SEQ ID NO: 64220 - DNA, 20 bp, Artificial Sequence
  MKO10064220_A_mmu-mir-669m-1
  gRNA
gcaagcacagatacacacac

SEQ ID NO: 64221 - DNA, 20 bp, Artificial Sequence
  MKO10064221_A_mmu-mir-669m-1
  gRNA
cacagatacacacacaggaa

SEQ ID NO: 64222 - DNA, 20 bp, Artificial Sequence
  MKO10064222_A_mmu-mir-669m-1
  gRNA
cacatgcacatacattgggg

SEQ ID NO: 64223 - DNA, 20 bp, Artificial Sequence
  MKO10064223_A_mmu-mir-669m-2
  gRNA
catgcttgtatatgtttgtg

SEQ ID NO: 64224 - DNA, 20 bp, Artificial Sequence
  MKO10064224_A_mmu-mir-669m-2
  gRNA
gatatacacacacacagaaa

SEQ ID NO: 64225 - DNA, 20 bp, Artificial Sequence
  MKO10064225_A_mmu-mir-669m-2
  gRNA
acacatgcaaatatattgtg

SEQ ID NO: 64226 - DNA, 20 bp, Artificial Sequence
  MKO10064226_A_mmu-mir-669m-2
  gRNA
acacacatgcaaatatattg

SEQ ID NO: 64227 - DNA, 20 bp, Artificial Sequence
  MKO10064227_A_mmu-mir-466n
  gRNA
aaacacacatgcacatacac

SEQ ID NO: 64228 - DNA, 20 bp, Artificial Sequence
  MKO10064228_A_mmu-mir-669o
  gRNA
acacacatgcacatgcatgg

SEQ ID NO: 64229 - DNA, 20 bp, Artificial Sequence
  MKO10064229_A_mmu-mir-669o
  gRNA
tatacacacatgcacatgca

SEQ ID NO: 64230 - DNA, 20 bp, Artificial Sequence
  MKO10064230_A_mmu-mir-466g
  gRNA
tgttttcgtgtgtgtgcatg

SEQ ID NO: 64231 - DNA, 20 bp, Artificial Sequence
  MKO10064231_A_mmu-mir-466g
  gRNA
cagacacatgcacacacatg

SEQ ID NO: 64232 - DNA, 20 bp, Artificial Sequence
  MKO10064232_A_mmu-mir-466h
  gRNA
cacacacaaatatacacaca

SEQ ID NO: 64233 - DNA, 20 bp, Artificial Sequence
  MKO10064233_A_mmu-mir-297a-3
  gRNA
gcacacatacatatacacac

SEQ ID NO: 64234 - DNA, 20 bp, Artificial Sequence
  MKO10064234_A_mmu-mir-297a-3
  gRNA
gtttgtgtgcatgtttgtat

SEQ ID NO: 64235 - DNA, 20 bp, Artificial Sequence
  MKO10064235_A_mmu-mir-297a-3
  gRNA
tacacacaggcacatacact

SEQ ID NO: 64236 - DNA, 20 bp, Artificial Sequence
  MKO10064236_A_mmu-mir-466l
  gRNA
aaacacacatgcacatacat

SEQ ID NO: 64237 - DNA, 20 bp, Artificial Sequence
  MKO10064237_A_mmu-mir-466l
  gRNA
catgcacacgcacacattaa

SEQ ID NO: 64238 - DNA, 20 bp, Artificial Sequence
  MKO10064238_A_mmu-mir-466l
  gRNA
acacacatgcacatacatag

SEQ ID NO: 64239 - DNA, 20 bp, Artificial Sequence
  MKO10064239_A_mmu-mir-297a-4
  gRNA
gcacacatacatatacacac

SEQ ID NO: 64240 - DNA, 20 bp, Artificial Sequence
  MKO10064240_A_mmu-mir-297a-4
  gRNA
acacgcaaaatcgccactca

SEQ ID NO: 64241 - DNA, 20 bp, Artificial Sequence
  MKO10064241_A_mmu-mir-297a-4
  gRNA
tacacacaggcacatacact

SEQ ID NO: 64242 - DNA, 20 bp, Artificial Sequence
  MKO10064242_A_mmu-mir-297a-4
  gRNA
atttgtgtgcatgcttgtat

SEQ ID NO: 64243 - DNA, 20 bp, Artificial Sequence
  MKO10064243_A_mmu-mir-669i
  gRNA
atgcatacaaactcacatac

SEQ ID NO: 64244 - DNA, 20 bp, Artificial Sequence
  MKO10064244_A_mmu-mir-669i
  gRNA
cacacatgcacattattggt

SEQ ID NO: 64245 - DNA, 20 bp, Artificial Sequence
  MKO10064245_A_mmu-mir-669i
  gRNA
gtgggcatcacatgaatgcc

SEQ ID NO: 64246 - DNA, 20 bp, Artificial Sequence
  MKO10064246_A_mmu-mir-669i
  gRNA
tatacacacatgcacattat

SEQ ID NO: 64247 - DNA, 20 bp, Artificial Sequence
  MKO10064247_A_mmu-mir-669h
  gRNA
atgcccaccaaaaatatgca

SEQ ID NO: 64248 - DNA, 20 bp, Artificial Sequence
  MKO10064248_A_mmu-mir-669h
  gRNA
cacccatgcatatttttggt

SEQ ID NO: 64249 - DNA, 20 bp, Artificial Sequence
  MKO10064249_A_mmu-mir-669h
  gRNA
acacacacacactcacacac

SEQ ID NO: 64250 - DNA, 20 bp, Artificial Sequence
  MKO10064250_A_mmu-mir-669h
  gRNA
cactcgtttatccttttgaa

SEQ ID NO: 64251 - DNA, 20 bp, Artificial Sequence
  MKO10064251_A_mmu-mir-511
  gRNA
gtgaatgtgtagcaaaagac

SEQ ID NO: 64252 - DNA, 20 bp, Artificial Sequence
  MKO10064252_A_mmu-mir-511
  gRNA
atgtgtagcaaaagacagga

SEQ ID NO: 64253 - DNA, 20 bp, Artificial Sequence
  MKO10064253_A_mmu-mir-511
  gRNA
gtgtagcaaaagacaggatg

SEQ ID NO: 64254 - DNA, 20 bp, Artificial Sequence
  MKO10064254_A_mmu-mir-511
  gRNA
tgcagagcaaaaggcatggt

SEQ ID NO: 64255 - DNA, 20 bp, Artificial Sequence
  MKO10064255_A_mmu-mir-6419
  gRNA
agcagcagcaatctgacaca

SEQ ID NO: 64256 - DNA, 20 bp, Artificial Sequence
  MKO10064256_A_mmu-mir-6419
  gRNA
aagtgaacagtagatgagat

SEQ ID NO: 64257 - DNA, 20 bp, Artificial Sequence
  MKO10064257_A_mmu-mir-6419
  gRNA
attttgaagcagtgtgagtg

SEQ ID NO: 64258 - DNA, 20 bp, Artificial Sequence
  MKO10064258_A_mmu-mir-6419
  gRNA
agtagatgagataggaaaca

SEQ ID NO: 64259 - DNA, 20 bp, Artificial Sequence
  MKO10064259_A_mmu-mir-7655
  gRNA
ccacttccgcctgcggccca

SEQ ID NO: 64260 - DNA, 20 bp, Artificial Sequence
  MKO10064260_A_mmu-mir-7655
  gRNA
gccgggtttatgacgctccg

SEQ ID NO: 64261 - DNA, 20 bp, Artificial Sequence
  MKO10064261_A_mmu-mir-7655
  gRNA
ttaggagctccgtgggccgc

SEQ ID NO: 64262 - DNA, 20 bp, Artificial Sequence
  MKO10064262_A_mmu-mir-7655
  gRNA
cgagtctttaggagctccgt

SEQ ID NO: 64263 - DNA, 20 bp, Artificial Sequence
  MKO10064263_A_mmu-mir-3967
  gRNA
tgagcttgtctgactgatgt

SEQ ID NO: 64264 - DNA, 20 bp, Artificial Sequence
  MKO10064264_A_mmu-mir-3967
  gRNA
tcactggctgcacctgactc

SEQ ID NO: 64265 - DNA, 20 bp, Artificial Sequence
  MKO10064265_A_mmu-mir-3967
  gRNA
gaattcttgctgcctgagtc

SEQ ID NO: 64266 - DNA, 20 bp, Artificial Sequence
  MKO10064266_A_mmu-mir-7664
  gRNA
cagtttacctgtctatgaga

SEQ ID NO: 64267 - DNA, 20 bp, Artificial Sequence
  MKO10064267_A_mmu-mir-7664
  gRNA
gtctatgagatggaagtact

SEQ ID NO: 64268 - DNA, 20 bp, Artificial Sequence
  MKO10064268_A_mmu-mir-7664
  gRNA
tacttggtatcctatctctt

SEQ ID NO: 64269 - DNA, 20 bp, Artificial Sequence
  MKO10064269_A_mmu-mir-7664
  gRNA
tggtatcctatctcttaggc

SEQ ID NO: 64270 - DNA, 20 bp, Artificial Sequence
  MKO10064270_A_mmu-mir-3087
  gRNA
ctggggctgtagcacagggc

SEQ ID NO: 64271 - DNA, 20 bp, Artificial Sequence
  MKO10064271_A_mmu-mir-3087
  gRNA
tgaggacatgacagtgagtt

SEQ ID NO: 64272 - DNA, 20 bp, Artificial Sequence
  MKO10064272_A_mmu-mir-3087
  gRNA
agggcaagagttgagactta

SEQ ID NO: 64273 - DNA, 20 bp, Artificial Sequence
  MKO10064273_A_mmu-mir-3087
  gRNA
actgtcatgtcctcagatta

SEQ ID NO: 64274 - DNA, 20 bp, Artificial Sequence
  MKO10064274_A_mmu-mir-6996
  gRNA
agagtgaccagagacaccgt

SEQ ID NO: 64275 - DNA, 20 bp, Artificial Sequence
  MKO10064275_A_mmu-mir-6996
  gRNA
ggtgtctctggtcactctgc

SEQ ID NO: 64276 - DNA, 20 bp, Artificial Sequence
  MKO10064276_A_mmu-mir-6996
  gRNA
gcatcatccgacggtgtctc

SEQ ID NO: 64277 - DNA, 20 bp, Artificial Sequence
  MKO10064277_A_mmu-mir-6996
  gRNA
gcacagtcagcatcatccga

SEQ ID NO: 64278 - DNA, 20 bp, Artificial Sequence
  MKO10064278_A_mmu-mir-126a
  gRNA
tgacagcacattattacttt

SEQ ID NO: 64279 - DNA, 20 bp, Artificial Sequence
  MKO10064279_A_mmu-mir-126a
  gRNA
gtaccgtgagtaataatgcg

SEQ ID NO: 64280 - DNA, 20 bp, Artificial Sequence
  MKO10064280_A_mmu-mir-126a
  gRNA
aagtaataatgtgctgtcac

SEQ ID NO: 64281 - DNA, 20 bp, Artificial Sequence
  MKO10064281_A_mmu-mir-126a
  gRNA
tgaccgcgcattattactca

SEQ ID NO: 64282 - DNA, 20 bp, Artificial Sequence
  MKO10064282_A_mmu-mir-126b
  gRNA
tgacagcacattattacttt

SEQ ID NO: 64283 - DNA, 20 bp, Artificial Sequence
  MKO10064283_A_mmu-mir-126b
  gRNA
gtaccgtgagtaataatgcg

SEQ ID NO: 64284 - DNA, 20 bp, Artificial Sequence
  MKO10064284_A_mmu-mir-126b
  gRNA
tgaccgcgcattattactca

SEQ ID NO: 64285 - DNA, 20 bp, Artificial Sequence
  MKO10064285_A_mmu-mir-126b
  gRNA
aagtaataatgtgctgtcac

SEQ ID NO: 64286 - DNA, 20 bp, Artificial Sequence
  MKO10064286_A_mmu-mir-7578
  gRNA
aggcagaagacagagccatg

SEQ ID NO: 64287 - DNA, 20 bp, Artificial Sequence
  MKO10064287_A_mmu-mir-7578
  gRNA
tgaaggagaaaggggctagg

SEQ ID NO: 64288 - DNA, 20 bp, Artificial Sequence
  MKO10064288_A_mmu-mir-7578
  gRNA
tagtgaaggagaaaggggct

SEQ ID NO: 64289 - DNA, 20 bp, Artificial Sequence
  MKO10064289_A_mmu-mir-7578
  gRNA
gtctttagtgaaggagaaag

SEQ ID NO: 64290 - DNA, 20 bp, Artificial Sequence
  MKO10064290_A_mmu-mir-3088
  gRNA
atgcagttgttcatgagctc

SEQ ID NO: 64291 - DNA, 20 bp, Artificial Sequence
  MKO10064291_A_mmu-mir-3088
  gRNA
aggttcatgagcagctgcaa

SEQ ID NO: 64292 - DNA, 20 bp, Artificial Sequence
  MKO10064292_A_mmu-mir-3088
  gRNA
tgcagctgctcatgaacctt

SEQ ID NO: 64293 - DNA, 20 bp, Artificial Sequence
  MKO10064293_A_mmu-mir-3088
  gRNA
ttcatgagctctggctccga

SEQ ID NO: 64294 - DNA, 20 bp, Artificial Sequence
  MKO10064294_A_mmu-mir-133c
  gRNA
aaccagccagccgactgctg

SEQ ID NO: 64295 - DNA, 20 bp, Artificial Sequence
  MKO10064295_A_mmu-mir-133c
  gRNA
actgctggggatgtctcctt

SEQ ID NO: 64296 - DNA, 20 bp, Artificial Sequence
  MKO10064296_A_mmu-mir-133c
  gRNA
tggtccccttcaaggagtca

SEQ ID NO: 64297 - DNA, 20 bp, Artificial Sequence
  MKO10064297_A_mmu-mir-133c
  gRNA
tttcagtttggtccccttca

SEQ ID NO: 64298 - DNA, 20 bp, Artificial Sequence
  MKO10064298_A_mmu-mir-219a-2
  gRNA
actcgtacaagaattgcgtt

SEQ ID NO: 64299 - DNA, 20 bp, Artificial Sequence
  MKO10064299_A_mmu-mir-219a-2
  gRNA
aattgcgtttggacaatcag

SEQ ID NO: 64300 - DNA, 20 bp, Artificial Sequence
  MKO10064300_A_mmu-mir-219a-2
  gRNA
gaattgtggctggacatctg

SEQ ID NO: 64301 - DNA, 20 bp, Artificial Sequence
  MKO10064301_A_mmu-mir-219a-2
  gRNA
gcaattcttgtacgagtctg

SEQ ID NO: 64302 - DNA, 20 bp, Artificial Sequence
  MKO10064302_A_mmu-mir-219b
  gRNA
agatgtccagccacaattct

SEQ ID NO: 64303 - DNA, 20 bp, Artificial Sequence
  MKO10064303_A_mmu-mir-219b
  gRNA
ggccaaccgagaattgtggc

SEQ ID NO: 64304 - DNA, 20 bp, Artificial Sequence
  MKO10064304_A_mmu-mir-219b
  gRNA
ctgcggccaaccgagaattg

SEQ ID NO: 64305 - DNA, 20 bp, Artificial Sequence
  MKO10064305_A_mmu-mir-219b
  gRNA
gtccagccacaattctcggt

SEQ ID NO: 64306 - DNA, 20 bp, Artificial Sequence
  MKO10064306_A_mmu-mir-6997
  gRNA
ctcatccccaagtaacaggc

SEQ ID NO: 64307 - DNA, 20 bp, Artificial Sequence
  MKO10064307_A_mmu-mir-6997
  gRNA
ccccaagtaacaggctggag

SEQ ID NO: 64308 - DNA, 20 bp, Artificial Sequence
  MKO10064308_A_mmu-mir-6997
  gRNA
gaggtgcagaacagagtctc

SEQ ID NO: 64309 - DNA, 20 bp, Artificial Sequence
  MKO10064309_A_mmu-mir-6997
  gRNA
aaccttaccctcctgtttcc

SEQ ID NO: 64310 - DNA, 20 bp, Artificial Sequence
  MKO10064310_A_mmu-mir-3089
  gRNA
ggtggcttgcaactgagttc

SEQ ID NO: 64311 - DNA, 20 bp, Artificial Sequence
  MKO10064311_A_mmu-mir-3089
  gRNA
tgcagctaaaaacacagctc

SEQ ID NO: 64312 - DNA, 20 bp, Artificial Sequence
  MKO10064312_A_mmu-mir-3089
  gRNA
gtttttagctgcagaaaccc

SEQ ID NO: 64313 - DNA, 20 bp, Artificial Sequence
  MKO10064313_A_mmu-mir-6998
  gRNA
ccctgggtgggcctgggcag

SEQ ID NO: 64314 - DNA, 20 bp, Artificial Sequence
  MKO10064314_A_mmu-mir-6998
  gRNA
gagctgctctgtgcccacac

SEQ ID NO: 64315 - DNA, 20 bp, Artificial Sequence
  MKO10064315_A_mmu-mir-6998
  gRNA
agtcactttgccctctgccc

SEQ ID NO: 64316 - DNA, 20 bp, Artificial Sequence
  MKO10064316_A_mmu-mir-6998
  gRNA
gtggcttccctgggtgggcc

SEQ ID NO: 64317 - DNA, 20 bp, Artificial Sequence
  MKO10064317_A_mmu-mir-7674
  gRNA
aggtgacagtgagtgaggtg

SEQ ID NO: 64318 - DNA, 20 bp, Artificial Sequence
  MKO10064318_A_mmu-mir-7674
  gRNA
gtgtgggcagcatgaggact

SEQ ID NO: 64319 - DNA, 20 bp, Artificial Sequence
  MKO10064319_A_mmu-mir-7674
  gRNA
gtcccattctcaccgcaccc

SEQ ID NO: 64320 - DNA, 20 bp, Artificial Sequence
  MKO10064320_A_mmu-mir-7674
  gRNA
gctgctcccgaacctgggtg

SEQ ID NO: 64321 - DNA, 20 bp, Artificial Sequence
  MKO10064321_A_mmu-mir-199b
  gRNA
agtgtttagactacctgttc

SEQ ID NO: 64322 - DNA, 20 bp, Artificial Sequence
  MKO10064322_A_mmu-mir-199b
  gRNA
ttgtacagtagtctgcacat

SEQ ID NO: 64323 - DNA, 20 bp, Artificial Sequence
  MKO10064323_A_mmu-mir-199b
  gRNA
cagtagtctgcacattggtt

SEQ ID NO: 64324 - DNA, 20 bp, Artificial Sequence
  MKO10064324_A_mmu-mir-199b
  gRNA
agtctgcacattggttaggc

SEQ ID NO: 64325 - DNA, 20 bp, Artificial Sequence
  MKO10064325_A_mmu-mir-1954
  gRNA
ttgtttgtttgtttgagacg

SEQ ID NO: 64326 - DNA, 20 bp, Artificial Sequence
  MKO10064326_A_mmu-mir-1954
  gRNA
ggggtttctctgtgtagccc

SEQ ID NO: 64327 - DNA, 20 bp, Artificial Sequence
  MKO10064327_A_mmu-mir-1954
  gRNA
aaacaaacaaacaaacaaca

SEQ ID NO: 64328 - DNA, 20 bp, Artificial Sequence
  MKO10064328_A_mmu-mir-1954
  gRNA
agtgagttctaggatagcca

SEQ ID NO: 64329 - DNA, 20 bp, Artificial Sequence
  MKO10064329_A_mmu-mir-8093
  gRNA
ccactgccaggtccacctgt

SEQ ID NO: 64330 - DNA, 20 bp, Artificial Sequence
  MKO10064330_A_mmu-mir-8093
  gRNA
gcagaaagcacacagggagc

SEQ ID NO: 64331 - DNA, 20 bp, Artificial Sequence
  MKO10064331_A_mmu-mir-8093
  gRNA
cactcatgctctgctcccca

SEQ ID NO: 64332 - DNA, 20 bp, Artificial Sequence
  MKO10064332_A_mmu-mir-8093
  gRNA
aaggactcagacacagggct

SEQ ID NO: 64333 - DNA, 20 bp, Artificial Sequence
  MKO10064333_A_mmu-mir-2861
  gRNA
ggtgccgagcccgcctcttc

SEQ ID NO: 64334 - DNA, 20 bp, Artificial Sequence
  MKO10064334_A_mmu-mir-2861
  gRNA
tccggtctccgcccgccgcc

SEQ ID NO: 64335 - DNA, 20 bp, Artificial Sequence
  MKO10064335_A_mmu-mir-2861
  gRNA
ccgcccgccgccaggccccc

SEQ ID NO: 64336 - DNA, 20 bp, Artificial Sequence
  MKO10064336_A_mmu-mir-2861
  gRNA
tgggacttgtagttcccggg

SEQ ID NO: 64337 - DNA, 20 bp, Artificial Sequence
  MKO10064337_A_mmu-mir-3960
  gRNA
gccgccgccagcgctgttgg

SEQ ID NO: 64338 - DNA, 20 bp, Artificial Sequence
  MKO10064338_A_mmu-mir-3960
  gRNA
gcgctgttggcggccccgat

SEQ ID NO: 64339 - DNA, 20 bp, Artificial Sequence
  MKO10064339_A_mmu-mir-3960
  gRNA
gcggccccgatcgggggcgc

SEQ ID NO: 64340 - DNA, 20 bp, Artificial Sequence
  MKO10064340_A_mmu-mir-3960
  gRNA
atcgggggcgcaggaagccg

SEQ ID NO: 64341 - DNA, 20 bp, Artificial Sequence
  MKO10064341_A_mmu-mir-5128
  gRNA
tgcaattggggctggcgaga

SEQ ID NO: 64342 - DNA, 20 bp, Artificial Sequence
  MKO10064342_A_mmu-mir-5128
  gRNA
actaatttaaaaagtgcaat

SEQ ID NO: 64343 - DNA, 20 bp, Artificial Sequence
  MKO10064343_A_mmu-mir-5128
  gRNA
gtaaacattcttaattactg

SEQ ID NO: 64344 - DNA, 20 bp, Artificial Sequence
  MKO10064344_A_mmu-mir-5128
  gRNA
actttttaaattagtaaaac

SEQ ID NO: 64345 - DNA, 20 bp, Artificial Sequence
  MKO10064345_A_mmu-mir-181a-2
  gRNA
cgacagcgttgaatgttcca

SEQ ID NO: 64346 - DNA, 20 bp, Artificial Sequence
  MKO10064346_A_mmu-mir-181a-2
  gRNA
aaggtacagtcaacggtcgg

SEQ ID NO: 64347 - DNA, 20 bp, Artificial Sequence
  MKO10064347_A_mmu-mir-181a-2
  gRNA
gaatcccaaggtacagtcaa

SEQ ID NO: 64348 - DNA, 20 bp, Artificial Sequence
  MKO10064348_A_mmu-mir-181a-2
  gRNA
catggaacattcaacgctgt

SEQ ID NO: 64349 - DNA, 20 bp, Artificial Sequence
  MKO10064349_A_mmu-mir-181b-2
  gRNA
tcaacattcattgctgtcgg

SEQ ID NO: 64350 - DNA, 20 bp, Artificial Sequence
  MKO10064350_A_mmu-mir-181b-2
  gRNA
gcattcattgatcagtgagt

SEQ ID NO: 64351 - DNA, 20 bp, Artificial Sequence
  MKO10064351_A_mmu-mir-181b-2
  gRNA
cactcaacattcattgctgt

SEQ ID NO: 64352 - DNA, 20 bp, Artificial Sequence
  MKO10064352_A_mmu-mir-181b-2
  gRNA
tgatcaatgaatgcaaactg

SEQ ID NO: 64353 - DNA, 20 bp, Artificial Sequence
  MKO10064353_A_mmu-mir-6336
  gRNA
cacaagtgtctttcatgaga

SEQ ID NO: 64354 - DNA, 20 bp, Artificial Sequence
  MKO10064354_A_mmu-mir-6336
  gRNA
gcttacatggattaaggatg

SEQ ID NO: 64355 - DNA, 20 bp, Artificial Sequence
  MKO10064355_A_mmu-mir-6336
  gRNA
gggcttacatggattaagga

SEQ ID NO: 64356 - DNA, 20 bp, Artificial Sequence
  MKO10064356_A_mmu-mir-6336
  gRNA
tgtaaaattgagggcttaca

SEQ ID NO: 64357 - DNA, 20 bp, Artificial Sequence
  MKO10064357_A_mmu-mir-5129
  gRNA
cactgtgggaagagatgcac

SEQ ID NO: 64358 - DNA, 20 bp, Artificial Sequence
  MKO10064358_A_mmu-mir-5129
  gRNA
ctgtgcatctcttcccacag

SEQ ID NO: 64359 - DNA, 20 bp, Artificial Sequence
  MKO10064359_A_mmu-mir-5129
  gRNA
acctgaatatgtgggggcat

SEQ ID NO: 64360 - DNA, 20 bp, Artificial Sequence
  MKO10064360_A_mmu-mir-5129
  gRNA
ctattcacctgaatatgtgg

SEQ ID NO: 64361 - DNA, 20 bp, Artificial Sequence
  MKO10064361_A_mmu-mir-195b
  gRNA
aaaacacagcccaacagctt

SEQ ID NO: 64362 - DNA, 20 bp, Artificial Sequence
  MKO10064362_A_mmu-mir-195b
  gRNA
agtcctttctgtcccctttc

SEQ ID NO: 64363 - DNA, 20 bp, Artificial Sequence
  MKO10064363_A_mmu-mir-195b
  gRNA
taattcaagccaaagctgtt

SEQ ID NO: 64364 - DNA, 20 bp, Artificial Sequence
  MKO10064364_A_mmu-mir-195b
  gRNA
aaaaagactatatcagttac

SEQ ID NO: 64365 - DNA, 20 bp, Artificial Sequence
  MKO10064365_A_mmu-mir-6337
  gRNA
cacagagtgacattgtttac

SEQ ID NO: 64366 - DNA, 20 bp, Artificial Sequence
  MKO10064366_A_mmu-mir-6337
  gRNA
cacctcttcttggatagaaa

SEQ ID NO: 64367 - DNA, 20 bp, Artificial Sequence
  MKO10064367_A_mmu-mir-6337
  gRNA
atgagggctgctgggttgct

SEQ ID NO: 64368 - DNA, 20 bp, Artificial Sequence
  MKO10064368_A_mmu-mir-6337
  gRNA
ctgtggagatgagggctgct

SEQ ID NO: 64369 - DNA, 20 bp, Artificial Sequence
  MKO10064369_A_mmu-mir-7224
  gRNA
ggcccctcagtgaagatttc

SEQ ID NO: 64370 - DNA, 20 bp, Artificial Sequence
  MKO10064370_A_mmu-mir-7224
  gRNA
acacttagatctccactgag

SEQ ID NO: 64371 - DNA, 20 bp, Artificial Sequence
  MKO10064371_A_mmu-mir-7224
  gRNA
gtcctgaaatcttcactgag

SEQ ID NO: 64372 - DNA, 20 bp, Artificial Sequence
  MKO10064372_A_mmu-mir-7224
  gRNA
gtgtcctgaaatcttcactg

SEQ ID NO: 64373 - DNA, 20 bp, Artificial Sequence
  MKO10064373_A_mmu-mir-6335
  gRNA
atacacagtgatattctgca

SEQ ID NO: 64374 - DNA, 20 bp, Artificial Sequence
  MKO10064374_A_mmu-mir-6335
  gRNA
atattctgcatggacagtgt

SEQ ID NO: 64375 - DNA, 20 bp, Artificial Sequence
  MKO10064375_A_mmu-mir-6335
  gRNA
agtgtagaatgagttacatg

SEQ ID NO: 64376 - DNA, 20 bp, Artificial Sequence
  MKO10064376_A_mmu-mir-6335
  gRNA
gaatgagttacatgaggaca

SEQ ID NO: 64377 - DNA, 20 bp, Artificial Sequence
  MKO10064377_A_mmu-mir-10b
  gRNA
cctgtagaaccgaatttgtg

SEQ ID NO: 64378 - DNA, 20 bp, Artificial Sequence
  MKO10064378_A_mmu-mir-10b
  gRNA
atagtcacagattcgattct

SEQ ID NO: 64379 - DNA, 20 bp, Artificial Sequence
  MKO10064379_A_mmu-mir-10b
  gRNA
agtcacagattcgattctag

SEQ ID NO: 64380 - DNA, 20 bp, Artificial Sequence
  MKO10064380_A_mmu-mir-10b
  gRNA
cacacaaattcggttctaca

SEQ ID NO: 64381 - DNA, 20 bp, Artificial Sequence
  MKO10064381_A_mmu-mir-684-1
  gRNA
cagcaagacgcttgacttga

SEQ ID NO: 64382 - DNA, 20 bp, Artificial Sequence
  MKO10064382_A_mmu-mir-684-1
  gRNA
gggcaatctgtctttaagta

SEQ ID NO: 64383 - DNA, 20 bp, Artificial Sequence
  MKO10064383_A_mmu-mir-684-1
  gRNA
acttgaagggaaaactatct

SEQ ID NO: 64384 - DNA, 20 bp, Artificial Sequence
  MKO10064384_A_mmu-mir-130a
  gRNA
ccttttaacattgcactgct

SEQ ID NO: 64385 - DNA, 20 bp, Artificial Sequence
  MKO10064385_A_mmu-mir-130a
  gRNA
gcacaatgtgaaaagagctc

SEQ ID NO: 64386 - DNA, 20 bp, Artificial Sequence
  MKO10064386_A_mmu-mir-130a
  gRNA
gtgcaatgttaaaagggcat

SEQ ID NO: 64387 - DNA, 20 bp, Artificial Sequence
  MKO10064387_A_mmu-mir-130a
  gRNA
cgagcagtgcaatgttaaaa

SEQ ID NO: 64388 - DNA, 20 bp, Artificial Sequence
  MKO10064388_A_mmu-mir-6999
  gRNA
gtgatggctttcctacagaa

SEQ ID NO: 64389 - DNA, 20 bp, Artificial Sequence
  MKO10064389_A_mmu-mir-6999
  gRNA
atggctttcctacagaaagg

SEQ ID NO: 64390 - DNA, 20 bp, Artificial Sequence
  MKO10064390_A_mmu-mir-6999
  gRNA
tcagctgtcctcctttctgt

SEQ ID NO: 64391 - DNA, 20 bp, Artificial Sequence
  MKO10064391_A_mmu-mir-6999
  gRNA
agagtcagcaagcacctggc

SEQ ID NO: 64392 - DNA, 20 bp, Artificial Sequence
  MKO10064392_A_mmu-mir-1955
  gRNA
gtttacttactacaagtccc

SEQ ID NO: 64393 - DNA, 20 bp, Artificial Sequence
  MKO10064393_A_mmu-mir-1955
  gRNA
cagataagagcattgcatgc

SEQ ID NO: 64394 - DNA, 20 bp, Artificial Sequence
  MKO10064394_A_mmu-mir-1955
  gRNA
tgcatgctgggacatgtagt

SEQ ID NO: 64395 - DNA, 20 bp, Artificial Sequence
  MKO10064395_A_mmu-mir-1955
  gRNA
tgtagttggtttaaatagca

SEQ ID NO: 64396 - DNA, 20 bp, Artificial Sequence
  MKO10064396_A_mmu-mir-7000
  gRNA
cgtctgttctcctggaggac

SEQ ID NO: 64397 - DNA, 20 bp, Artificial Sequence
  MKO10064397_A_mmu-mir-7000
  gRNA
tctcctggaggacaggcagg

SEQ ID NO: 64398 - DNA, 20 bp, Artificial Sequence
  MKO10064398_A_mmu-mir-7000
  gRNA
ggacaggcaggtgggtgctg

SEQ ID NO: 64399 - DNA, 20 bp, Artificial Sequence
  MKO10064399_A_mmu-mir-7000
  gRNA
cacccacctgcctgtcctcc

SEQ ID NO: 64400 - DNA, 20 bp, Artificial Sequence
  MKO10064400_A_mmu-mir-7221
  gRNA
tttaacctgggtccgtctct

SEQ ID NO: 64401 - DNA, 20 bp, Artificial Sequence
  MKO10064401_A_mmu-mir-7221
  gRNA
tgggtccgtctcttggtcac

SEQ ID NO: 64402 - DNA, 20 bp, Artificial Sequence
  MKO10064402_A_mmu-mir-7221
  gRNA
gtccgtctcttggtcacagg

SEQ ID NO: 64403 - DNA, 20 bp, Artificial Sequence
  MKO10064403_A_mmu-mir-7221
  gRNA
ggtcagccctgactgtgggc

SEQ ID NO: 64404 - DNA, 20 bp, Artificial Sequence
  MKO10064404_A_mmu-mir-7222
  gRNA
tcctctctctggcacttgcc

SEQ ID NO: 64405 - DNA, 20 bp, Artificial Sequence
  MKO10064405_A_mmu-mir-7222
  gRNA
aagtgtctcatccaggacag

SEQ ID NO: 64406 - DNA, 20 bp, Artificial Sequence
  MKO10064406_A_mmu-mir-7222
  gRNA
tctcatccaggacagtgggc

SEQ ID NO: 64407 - DNA, 20 bp, Artificial Sequence
  MKO10064407_A_mmu-mir-7222
  gRNA
aggacagtgggcaggagcag

SEQ ID NO: 64408 - DNA, 20 bp, Artificial Sequence
  MKO10064408_A_mmu-mir-7001
  gRNA
atctccttcttcagctgcag

SEQ ID NO: 64409 - DNA, 20 bp, Artificial Sequence
  MKO10064409_A_mmu-mir-7001
  gRNA
gcagagggagtgtgagcgtc

SEQ ID NO: 64410 - DNA, 20 bp, Artificial Sequence
  MKO10064410_A_mmu-mir-7001
  gRNA
gggagtgtgagcgtcagggc

SEQ ID NO: 64411 - DNA, 20 bp, Artificial Sequence
  MKO10064411_A_mmu-mir-7001
  gRNA
tggacttgaacctgggcctc

SEQ ID NO: 64412 - DNA, 20 bp, Artificial Sequence
  MKO10064412_A_mmu-mir-129-2
  gRNA
cgccctccgcgaatgctttt

SEQ ID NO: 64413 - DNA, 20 bp, Artificial Sequence
  MKO10064413_A_mmu-mir-129-2
  gRNA
ccctccgcgaatgctttttg

SEQ ID NO: 64414 - DNA, 20 bp, Artificial Sequence
  MKO10064414_A_mmu-mir-129-2
  gRNA
cgcgaatgctttttggggta

SEQ ID NO: 64415 - DNA, 20 bp, Artificial Sequence
  MKO10064415_A_mmu-mir-129-2
  gRNA
ctttttggggtaagggcttc

SEQ ID NO: 64416 - DNA, 20 bp, Artificial Sequence
  MKO10064416_A_mmu-mir-129b
  gRNA
cgccctccgcgaatgctttt

SEQ ID NO: 64417 - DNA, 20 bp, Artificial Sequence
  MKO10064417_A_mmu-mir-129b
  gRNA
ccctccgcgaatgctttttg

SEQ ID NO: 64418 - DNA, 20 bp, Artificial Sequence
  MKO10064418_A_mmu-mir-129b
  gRNA
cgcgaatgctttttggggta

SEQ ID NO: 64419 - DNA, 20 bp, Artificial Sequence
  MKO10064419_A_mmu-mir-129b
  gRNA
ctttttggggtaagggcttc

SEQ ID NO: 64420 - DNA, 20 bp, Artificial Sequence
  MKO10064420_A_mmu-mir-670
  gRNA
aggcagctgacactcctgaa

SEQ ID NO: 64421 - DNA, 20 bp, Artificial Sequence
  MKO10064421_A_mmu-mir-670
  gRNA
gaatggatatgaggaaaccc

SEQ ID NO: 64422 - DNA, 20 bp, Artificial Sequence
  MKO10064422_A_mmu-mir-670
  gRNA
caggttcaccacatacactc

SEQ ID NO: 64423 - DNA, 20 bp, Artificial Sequence
  MKO10064423_A_mmu-mir-670
  gRNA
cacatacactcagggatgtc

SEQ ID NO: 64424 - DNA, 20 bp, Artificial Sequence
  MKO10064424_A_mmu-mir-1902
  gRNA
aacactcccaaaataaactt

SEQ ID NO: 64425 - DNA, 20 bp, Artificial Sequence
  MKO10064425_A_mmu-mir-1902
  gRNA
tgacttgagtagataatgag

SEQ ID NO: 64426 - DNA, 20 bp, Artificial Sequence
  MKO10064426_A_mmu-mir-1902
  gRNA
aaaatgtttagaggtgcagt

SEQ ID NO: 64427 - DNA, 20 bp, Artificial Sequence
  MKO10064427_A_mmu-mir-1902
  gRNA
ggacttgataaaatgtttag

SEQ ID NO: 64428 - DNA, 20 bp, Artificial Sequence
  MKO10064428_A_mmu-mir-7002
  gRNA
gtggggagtagagcctggca

SEQ ID NO: 64429 - DNA, 20 bp, Artificial Sequence
  MKO10064429_A_mmu-mir-7002
  gRNA
ggggagtagagcctggcaag

SEQ ID NO: 64430 - DNA, 20 bp, Artificial Sequence
  MKO10064430_A_mmu-mir-7002
  gRNA
gctttgtgcttccccttgcc

SEQ ID NO: 64431 - DNA, 20 bp, Artificial Sequence
  MKO10064431_A_mmu-mir-7002
  gRNA
ctttggcttcggggagtacg

SEQ ID NO: 64432 - DNA, 20 bp, Artificial Sequence
  MKO10064432_A_mmu-mir-1951
  gRNA
tgtatagagtgctgtgggtg

SEQ ID NO: 64433 - DNA, 20 bp, Artificial Sequence
  MKO10064433_A_mmu-mir-1951
  gRNA
acttacttctgaaagttaaa

SEQ ID NO: 64434 - DNA, 20 bp, Artificial Sequence
  MKO10064434_A_mmu-mir-1951
  gRNA
agttaaaaggtagtggagac

SEQ ID NO: 64435 - DNA, 20 bp, Artificial Sequence
  MKO10064435_A_mmu-mir-1951
  gRNA
aaaggtagtggagactggtg

SEQ ID NO: 64436 - DNA, 20 bp, Artificial Sequence
  MKO10064436_A_mmu-mir-674
  gRNA
ccctgagccttgcactgaga

SEQ ID NO: 64437 - DNA, 20 bp, Artificial Sequence
  MKO10064437_A_mmu-mir-674
  gRNA
gccttgcactgagatgggag

SEQ ID NO: 64438 - DNA, 20 bp, Artificial Sequence
  MKO10064438_A_mmu-mir-674
  gRNA
actgagatgggagtggtgta

SEQ ID NO: 64439 - DNA, 20 bp, Artificial Sequence
  MKO10064439_A_mmu-mir-674
  gRNA
atgggagtggtgtaaggctc

SEQ ID NO: 64440 - DNA, 20 bp, Artificial Sequence
  MKO10064440_A_mmu-mir-7665
  gRNA
ccattggggaaaataaggga

SEQ ID NO: 64441 - DNA, 20 bp, Artificial Sequence
  MKO10064441_A_mmu-mir-7665
  gRNA
aataagggaaggcaggagaa

SEQ ID NO: 64442 - DNA, 20 bp, Artificial Sequence
  MKO10064442_A_mmu-mir-7665
  gRNA
ggagaaaggctgccttcata

SEQ ID NO: 64443 - DNA, 20 bp, Artificial Sequence
  MKO10064443_A_mmu-mir-7665
  gRNA
ttcatatggtggaagcagcc

SEQ ID NO: 64444 - DNA, 20 bp, Artificial Sequence
  MKO10064444_A_mmu-mir-147
  gRNA
tagatgttgatgccagtgtg

SEQ ID NO: 64445 - DNA, 20 bp, Artificial Sequence
  MKO10064445_A_mmu-mir-147
  gRNA
aatgcttctgctacatttgt

SEQ ID NO: 64446 - DNA, 20 bp, Artificial Sequence
  MKO10064446_A_mmu-mir-147
  gRNA
gcagaagcatttccgcacac

SEQ ID NO: 64447 - DNA, 20 bp, Artificial Sequence
  MKO10064447_A_mmu-mir-147
  gRNA
agaacactctatgaatctag

SEQ ID NO: 64448 - DNA, 20 bp, Artificial Sequence
  MKO10064448_A_mmu-mir-3473g
  gRNA
acaaatacaaatatgaaggt

SEQ ID NO: 64449 - DNA, 20 bp, Artificial Sequence
  MKO10064449_A_mmu-mir-3473g
  gRNA
aaatatgaaggttggagaga

SEQ ID NO: 64450 - DNA, 20 bp, Artificial Sequence
  MKO10064450_A_mmu-mir-3473g
  gRNA
tgaaggttggagagatggct

SEQ ID NO: 64451 - DNA, 20 bp, Artificial Sequence
  MKO10064451_A_mmu-mir-3473g
  gRNA
agcacttgctccacttgcag

SEQ ID NO: 64452 - DNA, 20 bp, Artificial Sequence
  MKO10064452_A_mmu-mir-6339
  gRNA
agaccagcttcccaagcttt

SEQ ID NO: 64453 - DNA, 20 bp, Artificial Sequence
  MKO10064453_A_mmu-mir-6339
  gRNA
cagcctaacactgaggacaa

SEQ ID NO: 64454 - DNA, 20 bp, Artificial Sequence
  MKO10064454_A_mmu-mir-6339
  gRNA
aggcctaaagcttgggaagc

SEQ ID NO: 64455 - DNA, 20 bp, Artificial Sequence
  MKO10064455_A_mmu-mir-6339
  gRNA
tcactgcaggcctaaagctt

SEQ ID NO: 64456 - DNA, 20 bp, Artificial Sequence
  MKO10064456_A_mmu-mir-6973b
  gRNA
aggccactcgtgccttgcct

SEQ ID NO: 64457 - DNA, 20 bp, Artificial Sequence
  MKO10064457_A_mmu-mir-6973b
  gRNA
gtaagagagcacagatggga

SEQ ID NO: 64458 - DNA, 20 bp, Artificial Sequence
  MKO10064458_A_mmu-mir-6973b
  gRNA
gagcacagatgggaaggatt

SEQ ID NO: 64459 - DNA, 20 bp, Artificial Sequence
  MKO10064459_A_mmu-mir-6973b
  gRNA
tctcttacccttcctaggca

SEQ ID NO: 64460 - DNA, 20 bp, Artificial Sequence
  MKO10064460_A_mmu-mir-103-2
  gRNA
caggtcaagcagcattgtac

SEQ ID NO: 64461 - DNA, 20 bp, Artificial Sequence
  MKO10064461_A_mmu-mir-103-2
  gRNA
ggctatgaaagaaccaagaa

SEQ ID NO: 64462 - DNA, 20 bp, Artificial Sequence
  MKO10064462_A_mmu-mir-103-2
  gRNA
ccctaagggcagcccattct

SEQ ID NO: 64463 - DNA, 20 bp, Artificial Sequence
  MKO10064463_A_mmu-mir-103-2
  gRNA
agtgctgccttgtagcattc

SEQ ID NO: 64464 - DNA, 20 bp, Artificial Sequence
  MKO10064464_A_mmu-mir-3090
  gRNA
tgattcctgtcccagtggtc

SEQ ID NO: 64465 - DNA, 20 bp, Artificial Sequence
  MKO10064465_A_mmu-mir-3090
  gRNA
cccacccagaccactgggac

SEQ ID NO: 64466 - DNA, 20 bp, Artificial Sequence
  MKO10064466_A_mmu-mir-3090
  gRNA
caggccccacccagaccact

SEQ ID NO: 64467 - DNA, 20 bp, Artificial Sequence
  MKO10064467_A_mmu-mir-3090
  gRNA
cattagaaattcaggatctc

SEQ ID NO: 64468 - DNA, 20 bp, Artificial Sequence
  MKO10064468_A_mmu-mir-1952
  gRNA
tctccaccctccttctgtgc

SEQ ID NO: 64469 - DNA, 20 bp, Artificial Sequence
  MKO10064469_A_mmu-mir-1952
  gRNA
ttatttcctgctccaaggtg

SEQ ID NO: 64470 - DNA, 20 bp, Artificial Sequence
  MKO10064470_A_mmu-mir-1952
  gRNA
ggtgtggatgacaaaagaga

SEQ ID NO: 64471 - DNA, 20 bp, Artificial Sequence
  MKO10064471_A_mmu-mir-1952
  gRNA
gggtggagatcaataagaga

SEQ ID NO: 64472 - DNA, 20 bp, Artificial Sequence
  MKO10064472_A_mmu-mir-1953
  gRNA
ccccagatcttagggctgcc

SEQ ID NO: 64473 - DNA, 20 bp, Artificial Sequence
  MKO10064473_A_mmu-mir-1953
  gRNA
atcttagggctgccaggaag

SEQ ID NO: 64474 - DNA, 20 bp, Artificial Sequence
  MKO10064474_A_mmu-mir-1953
  gRNA
ctgagaactttcccaagacc

SEQ ID NO: 64475 - DNA, 20 bp, Artificial Sequence
  MKO10064475_A_mmu-mir-1953
  gRNA
tcccaagaccaggcagcacc

SEQ ID NO: 64476 - DNA, 20 bp, Artificial Sequence
  MKO10064476_A_mmu-mir-5622
  gRNA
aaatattcttagctgggtag

SEQ ID NO: 64477 - DNA, 20 bp, Artificial Sequence
  MKO10064477_A_mmu-mir-5622
  gRNA
tattcttagctgggtagtgg

SEQ ID NO: 64478 - DNA, 20 bp, Artificial Sequence
  MKO10064478_A_mmu-mir-5622
  gRNA
aactttctttaagctgggtg

SEQ ID NO: 64479 - DNA, 20 bp, Artificial Sequence
  MKO10064479_A_mmu-mir-5622
  gRNA
ttttaaactttctttaagct

SEQ ID NO: 64480 - DNA, 20 bp, Artificial Sequence
  MKO10064480_A_mmu-mir-695
  gRNA
cttcacgaggaatcctagat

SEQ ID NO: 64481 - DNA, 20 bp, Artificial Sequence
  MKO10064481_A_mmu-mir-695
  gRNA
aggaatcctagattgggcat

SEQ ID NO: 64482 - DNA, 20 bp, Artificial Sequence
  MKO10064482_A_mmu-mir-695
  gRNA
tgcctttcttacaaaggcac

SEQ ID NO: 64483 - DNA, 20 bp, Artificial Sequence
  MKO10064483_A_mmu-mir-695
  gRNA
tacaaaggcactggttacct

SEQ ID NO: 64484 - DNA, 20 bp, Artificial Sequence
  MKO10064484_A_mmu-mir-499
  gRNA
gctgtgatgttcacatgcag

SEQ ID NO: 64485 - DNA, 20 bp, Artificial Sequence
  MKO10064485_A_mmu-mir-499
  gRNA
agctgcccacccaagacaca

SEQ ID NO: 64486 - DNA, 20 bp, Artificial Sequence
  MKO10064486_A_mmu-mir-7685
  gRNA
cagcaagggcttgctccagc

SEQ ID NO: 64487 - DNA, 20 bp, Artificial Sequence
  MKO10064487_A_mmu-mir-7685
  gRNA
cagccggaagccaagtctcc

SEQ ID NO: 64488 - DNA, 20 bp, Artificial Sequence
  MKO10064488_A_mmu-mir-7685
  gRNA
ggagacttgaagaaaccgga

SEQ ID NO: 64489 - DNA, 20 bp, Artificial Sequence
  MKO10064489_A_mmu-mir-7685
  gRNA
tcctgcaatgccaggagact

SEQ ID NO: 64490 - DNA, 20 bp, Artificial Sequence
  MKO10064490_A_mmu-mir-3474
  gRNA
actgggccgggagccctggg

SEQ ID NO: 64491 - DNA, 20 bp, Artificial Sequence
  MKO10064491_A_mmu-mir-3474
  gRNA
gggagccctgggaggagacg

SEQ ID NO: 64492 - DNA, 20 bp, Artificial Sequence
  MKO10064492_A_mmu-mir-3474
  gRNA
gtgcatctgcgtcttgttcc

SEQ ID NO: 64493 - DNA, 20 bp, Artificial Sequence
  MKO10064493_A_mmu-mir-3474
  gRNA
agaatccacgtctcctccca

SEQ ID NO: 64494 - DNA, 20 bp, Artificial Sequence
  MKO10064494_A_mmu-mir-7003
  gRNA
gcccttcacgttcaggtgtg

SEQ ID NO: 64495 - DNA, 20 bp, Artificial Sequence
  MKO10064495_A_mmu-mir-7003
  gRNA
agccgagagctgcgtgtcag

SEQ ID NO: 64496 - DNA, 20 bp, Artificial Sequence
  MKO10064496_A_mmu-mir-7003
  gRNA
gagctgcgtgtcagaggccc

SEQ ID NO: 64497 - DNA, 20 bp, Artificial Sequence
  MKO10064497_A_mmu-mir-7003
  gRNA
aggccccgggttttccccac

SEQ ID NO: 64498 - DNA, 20 bp, Artificial Sequence
  MKO10064498_A_mmu-mir-7678
  gRNA
attcctatccagcccttgta

SEQ ID NO: 64499 - DNA, 20 bp, Artificial Sequence
  MKO10064499_A_mmu-mir-7678
  gRNA
ctcagcatgctcccttacaa

SEQ ID NO: 64500 - DNA, 20 bp, Artificial Sequence
  MKO10064500_A_mmu-mir-7678
  gRNA
tcaggctacaagagaaagta

SEQ ID NO: 64501 - DNA, 20 bp, Artificial Sequence
  MKO10064501_A_mmu-mir-7678
  gRNA
taaggaaagaccttcaacat

SEQ ID NO: 64502 - DNA, 20 bp, Artificial Sequence
  MKO10064502_A_mmu-mir-7004
  gRNA
cgagaagacagcctgcgtga

SEQ ID NO: 64503 - DNA, 20 bp, Artificial Sequence
  MKO10064503_A_mmu-mir-7004
  gRNA
agcctgcgtgaaggagggag

SEQ ID NO: 64504 - DNA, 20 bp, Artificial Sequence
  MKO10064504_A_mmu-mir-7004
  gRNA
gtcactgagagtcacggcac

SEQ ID NO: 64505 - DNA, 20 bp, Artificial Sequence
  MKO10064505_A_mmu-mir-7004
  gRNA
gcacaggcctcatccacgga

SEQ ID NO: 64506 - DNA, 20 bp, Artificial Sequence
  MKO10064506_A_mmu-mir-6340
  gRNA
actgatgccaacccagcgtc

SEQ ID NO: 64507 - DNA, 20 bp, Artificial Sequence
  MKO10064507_A_mmu-mir-6340
  gRNA
gatgccaacccagcgtctgg

SEQ ID NO: 64508 - DNA, 20 bp, Artificial Sequence
  MKO10064508_A_mmu-mir-6340
  gRNA
caacccagcgtctggcggca

SEQ ID NO: 64509 - DNA, 20 bp, Artificial Sequence
  MKO10064509_A_mmu-mir-6340
  gRNA
cgacccagggcctgaccttg

SEQ ID NO: 64510 - DNA, 20 bp, Artificial Sequence
  MKO10064510_A_mmu-mir-296
  gRNA
gacgctctgcggacaccttc

SEQ ID NO: 64511 - DNA, 20 bp, Artificial Sequence
  MKO10064511_A_mmu-mir-296
  gRNA
gcgagcacaacaggattgag

SEQ ID NO: 64512 - DNA, 20 bp, Artificial Sequence
  MKO10064512_A_mmu-mir-296
  gRNA
gctcgcttcagagggttggg

SEQ ID NO: 64513 - DNA, 20 bp, Artificial Sequence
  MKO10064513_A_mmu-mir-296
  gRNA
gacaagagggcctttctgga

SEQ ID NO: 64514 - DNA, 20 bp, Artificial Sequence
  MKO10064514_A_mmu-mir-298
  gRNA
cccactcctaagctgagaga

SEQ ID NO: 64515 - DNA, 20 bp, Artificial Sequence
  MKO10064515_A_mmu-mir-298
  gRNA
gccctcctctgccaaaggcc

SEQ ID NO: 64516 - DNA, 20 bp, Artificial Sequence
  MKO10064516_A_mmu-mir-298
  gRNA
aactagccttctctcagctt

SEQ ID NO: 64517 - DNA, 20 bp, Artificial Sequence
  MKO10064517_A_mmu-mir-298
  gRNA
ccttgagttttatgactggg

SEQ ID NO: 64518 - DNA, 20 bp, Artificial Sequence
  MKO10064518_A_mmu-mir-7005
  gRNA
acacttggatctgcaaggga

SEQ ID NO: 64519 - DNA, 20 bp, Artificial Sequence
  MKO10064519_A_mmu-mir-7005
  gRNA
aagggatgggtagcaggcac

SEQ ID NO: 64520 - DNA, 20 bp, Artificial Sequence
  MKO10064520_A_mmu-mir-7005
  gRNA
ctgctggtcctcccatcccc

SEQ ID NO: 64521 - DNA, 20 bp, Artificial Sequence
  MKO10064521_A_mmu-mir-7005
  gRNA
ggaggaccagcagagaaatt

SEQ ID NO: 64522 - DNA, 20 bp, Artificial Sequence
  MKO10064522_A_mmu-mir-3091
  gRNA
ccgagagtgcttgcgggcca

SEQ ID NO: 64523 - DNA, 20 bp, Artificial Sequence
  MKO10064523_A_mmu-mir-3091
  gRNA
gtgcttgcgggccatgggtc

SEQ ID NO: 64524 - DNA, 20 bp, Artificial Sequence
  MKO10064524_A_mmu-mir-3091
  gRNA
ttgcgggccatgggtctggt

SEQ ID NO: 64525 - DNA, 20 bp, Artificial Sequence
  MKO10064525_A_mmu-mir-3091
  gRNA
gaccagtctcaagacctgcg

SEQ ID NO: 64526 - DNA, 20 bp, Artificial Sequence
  MKO10064526_A_mmu-mir-1a-1
  gRNA
agaagtatgtatttcaggct

SEQ ID NO: 64527 - DNA, 20 bp, Artificial Sequence
  MKO10064527_A_mmu-mir-1a-1
  gRNA
aagaagtatgtgtcccaagc

SEQ ID NO: 64528 - DNA, 20 bp, Artificial Sequence
  MKO10064528_A_mmu-mir-1a-1
  gRNA
atagcttagcaggttcatat

SEQ ID NO: 64529 - DNA, 20 bp, Artificial Sequence
  MKO10064529_A_mmu-mir-1a-1
  gRNA
catatgaacctgctaagcta

SEQ ID NO: 64530 - DNA, 20 bp, Artificial Sequence
  MKO10064530_A_mmu-mir-133a-2
  gRNA
aatggaaccaaatcagctgt

SEQ ID NO: 64531 - DNA, 20 bp, Artificial Sequence
  MKO10064531_A_mmu-mir-133a-2
  gRNA
aatcagctgttggatggatt

SEQ ID NO: 64532 - DNA, 20 bp, Artificial Sequence
  MKO10064532_A_mmu-mir-133a-2
  gRNA
accagcttcagcaaagcatt

SEQ ID NO: 64533 - DNA, 20 bp, Artificial Sequence
  MKO10064533_A_mmu-mir-133a-2
  gRNA
aatccatccaacagctgatt

SEQ ID NO: 64534 - DNA, 20 bp, Artificial Sequence
  MKO10064534_A_mmu-mir-124-3
  gRNA
gcccctctgcgtgttcacag

SEQ ID NO: 64535 - DNA, 20 bp, Artificial Sequence
  MKO10064535_A_mmu-mir-124-3
  gRNA
atttaatgtctatacaatta

SEQ ID NO: 64536 - DNA, 20 bp, Artificial Sequence
  MKO10064536_A_mmu-mir-124-3
  gRNA
cacgcggtgaatgccaagag

SEQ ID NO: 64537 - DNA, 20 bp, Artificial Sequence
  MKO10064537_A_mmu-mir-124-3
  gRNA
tccgctgtgaacacgcagag

SEQ ID NO: 64538 - DNA, 20 bp, Artificial Sequence
  MKO10064538_A_mmu-mir-7006
  gRNA
ccccacagccctggggatcc

SEQ ID NO: 64539 - DNA, 20 bp, Artificial Sequence
  MKO10064539_A_mmu-mir-7006
  gRNA
gtttctgacctggatcccca

SEQ ID NO: 64540 - DNA, 20 bp, Artificial Sequence
  MKO10064540_A_mmu-mir-7006
  gRNA
ttcttacctggtttctgacc

SEQ ID NO: 64541 - DNA, 20 bp, Artificial Sequence
  MKO10064541_A_mmu-mir-7006
  gRNA
aacctggctgatttcttacc

SEQ ID NO: 64542 - DNA, 20 bp, Artificial Sequence
  MKO10064542_A_mmu-mir-124-2
  gRNA
tctgctctccgtgttcacag

SEQ ID NO: 64543 - DNA, 20 bp, Artificial Sequence
  MKO10064543_A_mmu-mir-124-2
  gRNA
gatttaatgtcatacaatta

SEQ ID NO: 64544 - DNA, 20 bp, Artificial Sequence
  MKO10064544_A_mmu-mir-124-2
  gRNA
cacgcggtgaatgccaagag

SEQ ID NO: 64545 - DNA, 20 bp, Artificial Sequence
  MKO10064545_A_mmu-mir-124-2
  gRNA
gagcctacggctgcacttga

SEQ ID NO: 64546 - DNA, 20 bp, Artificial Sequence
  MKO10064546_A_mmu-mir-7007
  gRNA
agctacagaagaaacgtgga

SEQ ID NO: 64547 - DNA, 20 bp, Artificial Sequence
  MKO10064547_A_mmu-mir-7007
  gRNA
ctccactgcctcttctgatg

SEQ ID NO: 64548 - DNA, 20 bp, Artificial Sequence
  MKO10064548_A_mmu-mir-7007
  gRNA
agaagaggcagtggaggaga

SEQ ID NO: 64549 - DNA, 20 bp, Artificial Sequence
  MKO10064549_A_mmu-mir-7007
  gRNA
cacatcagaagaggcagtgg

SEQ ID NO: 64550 - DNA, 20 bp, Artificial Sequence
  MKO10064550_A_mmu-mir-3092
  gRNA
ctggaataagattgcaggac

SEQ ID NO: 64551 - DNA, 20 bp, Artificial Sequence
  MKO10064551_A_mmu-mir-3092
  gRNA
gaataagattgcaggacagg

SEQ ID NO: 64552 - DNA, 20 bp, Artificial Sequence
  MKO10064552_A_mmu-mir-3092
  gRNA
agatcaggaaactgggagaa

SEQ ID NO: 64553 - DNA, 20 bp, Artificial Sequence
  MKO10064553_A_mmu-mir-3092
  gRNA
gagaaaggcattttcccctc

SEQ ID NO: 64554 - DNA, 20 bp, Artificial Sequence
  MKO10064554_A_mmu-mir-466q
  gRNA
agatgagatatggcatgcat

SEQ ID NO: 64555 - DNA, 20 bp, Artificial Sequence
  MKO10064555_A_mmu-mir-551b
  gRNA
tattcccagatgtgctcttg

SEQ ID NO: 64556 - DNA, 20 bp, Artificial Sequence
  MKO10064556_A_mmu-mir-551b
  gRNA
gtggcccatgaaatcaagct

SEQ ID NO: 64557 - DNA, 20 bp, Artificial Sequence
  MKO10064557_A_mmu-mir-551b
  gRNA
aatcaagcttgggtgagacc

SEQ ID NO: 64558 - DNA, 20 bp, Artificial Sequence
  MKO10064558_A_mmu-mir-551b
  gRNA
agacctggtgcagaacagga

SEQ ID NO: 64559 - DNA, 20 bp, Artificial Sequence
  MKO10064559_A_mmu-mir-21b
  gRNA
tttgaggatactcttgcata

SEQ ID NO: 64560 - DNA, 20 bp, Artificial Sequence
  MKO10064560_A_mmu-mir-21b
  gRNA
atccttctgtactatctttc

SEQ ID NO: 64561 - DNA, 20 bp, Artificial Sequence
  MKO10064561_A_mmu-mir-21b
  gRNA
agccagaaagatagtacaga

SEQ ID NO: 64562 - DNA, 20 bp, Artificial Sequence
  MKO10064562_A_mmu-mir-21b
  gRNA
attttctcatacttgtctta

SEQ ID NO: 64563 - DNA, 20 bp, Artificial Sequence
  MKO10064563_A_mmu-mir-7008
  gRNA
tgtgcttcttgcctcttctc

SEQ ID NO: 64564 - DNA, 20 bp, Artificial Sequence
  MKO10064564_A_mmu-mir-7008
  gRNA
tcagttagtcgtacggctcc

SEQ ID NO: 64565 - DNA, 20 bp, Artificial Sequence
  MKO10064565_A_mmu-mir-7008
  gRNA
gcacacgtcagttagtcgta

SEQ ID NO: 64566 - DNA, 20 bp, Artificial Sequence
  MKO10064566_A_mmu-mir-7008
  gRNA
acaaaaaacaacctgagaag

SEQ ID NO: 64567 - DNA, 20 bp, Artificial Sequence
  MKO10064567_A_mmu-mir-1897
  gRNA
tggattctccgtgctttgga

SEQ ID NO: 64568 - DNA, 20 bp, Artificial Sequence
  MKO10064568_A_mmu-mir-1897
  gRNA
tgctttggatggagaaagag

SEQ ID NO: 64569 - DNA, 20 bp, Artificial Sequence
  MKO10064569_A_mmu-mir-1897
  gRNA
ctccttcaactcgttctgtc

SEQ ID NO: 64570 - DNA, 20 bp, Artificial Sequence
  MKO10064570_A_mmu-mir-1897
  gRNA
tcaactcgttctgtccggtg

SEQ ID NO: 64571 - DNA, 20 bp, Artificial Sequence
  MKO10064571_A_mmu-mir-6378
  gRNA
tccttacaatgtgggaacaa

SEQ ID NO: 64572 - DNA, 20 bp, Artificial Sequence
  MKO10064572_A_mmu-mir-6378
  gRNA
gcctgattttctctgaaata

SEQ ID NO: 64573 - DNA, 20 bp, Artificial Sequence
  MKO10064573_A_mmu-mir-6378
  gRNA
cacgcgtttctgttggtgat

SEQ ID NO: 64574 - DNA, 20 bp, Artificial Sequence
  MKO10064574_A_mmu-mir-6378
  gRNA
gtggctctcgcatggttcac

SEQ ID NO: 64575 - DNA, 20 bp, Artificial Sequence
  MKO10064575_A_mmu-mir-7009
  gRNA
tggactggagctgcagggag

SEQ ID NO: 64576 - DNA, 20 bp, Artificial Sequence
  MKO10064576_A_mmu-mir-7009
  gRNA
ctcagggcccttttggggtc

SEQ ID NO: 64577 - DNA, 20 bp, Artificial Sequence
  MKO10064577_A_mmu-mir-7009
  gRNA
gactggagctgcagggagag

SEQ ID NO: 64578 - DNA, 20 bp, Artificial Sequence
  MKO10064578_A_mmu-mir-7009
  gRNA
ggagaggggaaaagagagac

SEQ ID NO: 64579 - DNA, 20 bp, Artificial Sequence
  MKO10064579_A_mmu-mir-6379
  gRNA
tgactcaaccaactgtttgc

SEQ ID NO: 64580 - DNA, 20 bp, Artificial Sequence
  MKO10064580_A_mmu-mir-6379
  gRNA
gttttacagctagataagtc

SEQ ID NO: 64581 - DNA, 20 bp, Artificial Sequence
  MKO10064581_A_mmu-mir-6379
  gRNA
ctttgggaaaatgtcttccc

SEQ ID NO: 64582 - DNA, 20 bp, Artificial Sequence
  MKO10064582_A_mmu-mir-6379
  gRNA
agcaaacagttggttgagtc

SEQ ID NO: 64583 - DNA, 20 bp, Artificial Sequence
  MKO10064583_A_mmu-mir-6377
  gRNA
agtacttgtctttgtgagtc

SEQ ID NO: 64584 - DNA, 20 bp, Artificial Sequence
  MKO10064584_A_mmu-mir-6377
  gRNA
cttaacataataatattcag

SEQ ID NO: 64585 - DNA, 20 bp, Artificial Sequence
  MKO10064585_A_mmu-mir-6377
  gRNA
ctcacaaagacaagtacttc

SEQ ID NO: 64586 - DNA, 20 bp, Artificial Sequence
  MKO10064586_A_mmu-mir-8120
  gRNA
ggaaacttcctggccggcta

SEQ ID NO: 64587 - DNA, 20 bp, Artificial Sequence
  MKO10064587_A_mmu-mir-8120
  gRNA
gcaccccctccggctagaga

SEQ ID NO: 64588 - DNA, 20 bp, Artificial Sequence
  MKO10064588_A_mmu-mir-8120
  gRNA
ctccggctagagaaggcgtc

SEQ ID NO: 64589 - DNA, 20 bp, Artificial Sequence
  MKO10064589_A_mmu-mir-8120
  gRNA
ctagagaaggcgtccggaat

SEQ ID NO: 64590 - DNA, 20 bp, Artificial Sequence
  MKO10064590_A_mmu-mir-15b
  gRNA
agtactgtagcagcacatca

SEQ ID NO: 64591 - DNA, 20 bp, Artificial Sequence
  MKO10064591_A_mmu-mir-15b
  gRNA
tttgctgctctagaaattta

SEQ ID NO: 64592 - DNA, 20 bp, Artificial Sequence
  MKO10064592_A_mmu-mir-15b
  gRNA
tgtgctgctacagtacttta

SEQ ID NO: 64593 - DNA, 20 bp, Artificial Sequence
  MKO10064593_A_mmu-mir-16-2
  gRNA
ctctagcagcacgtaaatat

SEQ ID NO: 64594 - DNA, 20 bp, Artificial Sequence
  MKO10064594_A_mmu-mir-16-2
  gRNA
ctaaagcagcacaataatat

SEQ ID NO: 64595 - DNA, 20 bp, Artificial Sequence
  MKO10064595_A_mmu-mir-16-2
  gRNA
ttgtgctgctttagtgtgac

SEQ ID NO: 64596 - DNA, 20 bp, Artificial Sequence
  MKO10064596_A_mmu-mir-16-2
  gRNA
atatttacgtgctgctagag

SEQ ID NO: 64597 - DNA, 20 bp, Artificial Sequence
  MKO10064597_A_mmu-mir-7010
  gRNA
atccataacctgcaaaggaa

SEQ ID NO: 64598 - DNA, 20 bp, Artificial Sequence
  MKO10064598_A_mmu-mir-7010
  gRNA
tgggaaacttgactaatgca

SEQ ID NO: 64599 - DNA, 20 bp, Artificial Sequence
  MKO10064599_A_mmu-mir-7010
  gRNA
ctctggtttcggaaaggatt

SEQ ID NO: 64600 - DNA, 20 bp, Artificial Sequence
  MKO10064600_A_mmu-mir-7010
  gRNA
tttcctctctggtttcggaa

SEQ ID NO: 64601 - DNA, 20 bp, Artificial Sequence
  MKO10064601_A_mmu-mir-466k
  gRNA
tgcatgtgcatgtgtgtgta

SEQ ID NO: 64602 - DNA, 20 bp, Artificial Sequence
  MKO10064602_A_mmu-mir-466k
  gRNA
catgtgtgtgtatggtgagt

SEQ ID NO: 64603 - DNA, 20 bp, Artificial Sequence
  MKO10064603_A_mmu-mir-3093
  gRNA
tcggagcagctctgcgagct

SEQ ID NO: 64604 - DNA, 20 bp, Artificial Sequence
  MKO10064604_A_mmu-mir-3093
  gRNA
ctcggctctgccgcaccccg

SEQ ID NO: 64605 - DNA, 20 bp, Artificial Sequence
  MKO10064605_A_mmu-mir-3093
  gRNA
cacactcgaccttccagaga

SEQ ID NO: 64606 - DNA, 20 bp, Artificial Sequence
  MKO10064606_A_mmu-mir-3093
  gRNA
cgaccttccagagaagggtg

SEQ ID NO: 64607 - DNA, 20 bp, Artificial Sequence
  MKO10064607_A_mmu-mir-9-1
  gRNA
aggcggccaggaggcggggt

SEQ ID NO: 64608 - DNA, 20 bp, Artificial Sequence
  MKO10064608_A_mmu-mir-9-1
  gRNA
gcggggttggttgttatctt

SEQ ID NO: 64609 - DNA, 20 bp, Artificial Sequence
  MKO10064609_A_mmu-mir-9-1
  gRNA
tggttatctagctgtatgag

SEQ ID NO: 64610 - DNA, 20 bp, Artificial Sequence
  MKO10064610_A_mmu-mir-9-1
  gRNA
atctagctgtatgagtggtg

SEQ ID NO: 64611 - DNA, 20 bp, Artificial Sequence
  MKO10064611_A_mmu-mir-7011
  gRNA
ggcccatggagcactagagg

SEQ ID NO: 64612 - DNA, 20 bp, Artificial Sequence
  MKO10064612_A_mmu-mir-7011
  gRNA
ccatggagcactagaggagg

SEQ ID NO: 64613 - DNA, 20 bp, Artificial Sequence
  MKO10064613_A_mmu-mir-7011
  gRNA
agggaggtgtgcacccactc

SEQ ID NO: 64614 - DNA, 20 bp, Artificial Sequence
  MKO10064614_A_mmu-mir-7011
  gRNA
cagaggaggatgggagaggg

SEQ ID NO: 64615 - DNA, 20 bp, Artificial Sequence
  MKO10064615_A_mmu-mir-1905
  gRNA
tgtacgagtaccctaccgcg

SEQ ID NO: 64616 - DNA, 20 bp, Artificial Sequence
  MKO10064616_A_mmu-mir-1905
  gRNA
accctaccgcgtggtgggac

SEQ ID NO: 64617 - DNA, 20 bp, Artificial Sequence
  MKO10064617_A_mmu-mir-1905
  gRNA
ctaccgcgtggtgggactgg

SEQ ID NO: 64618 - DNA, 20 bp, Artificial Sequence
  MKO10064618_A_mmu-mir-1905
  gRNA
gggactggtggtgggcccca

SEQ ID NO: 64619 - DNA, 20 bp, Artificial Sequence
  MKO10064619_A_mmu-mir-92b
  gRNA
gccgggggggccgagggggc

SEQ ID NO: 64620 - DNA, 20 bp, Artificial Sequence
  MKO10064620_A_mmu-mir-92b
  gRNA
gggggggccgagggggccgg

SEQ ID NO: 64621 - DNA, 20 bp, Artificial Sequence
  MKO10064621_A_mmu-mir-92b
  gRNA
gggccgagggggccggaggc

SEQ ID NO: 64622 - DNA, 20 bp, Artificial Sequence
  MKO10064622_A_mmu-mir-92b
  gRNA
gggacgagtgcaatattggc

SEQ ID NO: 64623 - DNA, 20 bp, Artificial Sequence
  MKO10064623_A_mmu-mir-7669
  gRNA
gtaagacgagctgggtgtgg

SEQ ID NO: 64624 - DNA, 20 bp, Artificial Sequence
  MKO10064624_A_mmu-mir-7669
  gRNA
gttgtaagacgagctgggtg

SEQ ID NO: 64625 - DNA, 20 bp, Artificial Sequence
  MKO10064625_A_mmu-mir-7669
  gRNA
ttgttgttgtaagacgagct

SEQ ID NO: 64626 - DNA, 20 bp, Artificial Sequence
  MKO10064626_A_mmu-mir-7669
  gRNA
acaacaacaaaagctgtgta

SEQ ID NO: 64627 - DNA, 20 bp, Artificial Sequence
  MKO10064627_A_mmu-mir-190b
  gRNA
ctgtgtgatatgtttgatat

SEQ ID NO: 64628 - DNA, 20 bp, Artificial Sequence
  MKO10064628_A_mmu-mir-190b
  gRNA
agcatactctcacagcagta

SEQ ID NO: 64629 - DNA, 20 bp, Artificial Sequence
  MKO10064629_A_mmu-mir-190b
  gRNA
caaacatatcacacagaagc

SEQ ID NO: 64630 - DNA, 20 bp, Artificial Sequence
  MKO10064630_A_mmu-mir-190b
  gRNA
gagtatgcttgacattcagt

SEQ ID NO: 64631 - DNA, 20 bp, Artificial Sequence
  MKO10064631_A_mmu-mir-7012
  gRNA
gctgggctggacggaaggag

SEQ ID NO: 64632 - DNA, 20 bp, Artificial Sequence
  MKO10064632_A_mmu-mir-7012
  gRNA
ctggacggaaggagaggagt

SEQ ID NO: 64633 - DNA, 20 bp, Artificial Sequence
  MKO10064633_A_mmu-mir-7012
  gRNA
gctatgagcatcctgacctg

SEQ ID NO: 64634 - DNA, 20 bp, Artificial Sequence
  MKO10064634_A_mmu-mir-7012
  gRNA
tgggagaggagccacaggtc

SEQ ID NO: 64635 - DNA, 20 bp, Artificial Sequence
  MKO10064635_A_mmu-mir-7013
  gRNA
ctcccctgttcggtatgaag

SEQ ID NO: 64636 - DNA, 20 bp, Artificial Sequence
  MKO10064636_A_mmu-mir-7013
  gRNA
cttactgttgcctcttcctc

SEQ ID NO: 64637 - DNA, 20 bp, Artificial Sequence
  MKO10064637_A_mmu-mir-7013
  gRNA
tggatctcaagctacaacac

SEQ ID NO: 64638 - DNA, 20 bp, Artificial Sequence
  MKO10064638_A_mmu-mir-7013
  gRNA
ggcaacagtaagtgtggctt

SEQ ID NO: 64639 - DNA, 20 bp, Artificial Sequence
  MKO10064639_A_mmu-mir-8099-2
  gRNA
tttccccactcccaaggtaa

SEQ ID NO: 64640 - DNA, 20 bp, Artificial Sequence
  MKO10064640_A_mmu-mir-8099-2
  gRNA
cacgccttggctctgagaga

SEQ ID NO: 64641 - DNA, 20 bp, Artificial Sequence
  MKO10064641_A_mmu-mir-8099-2
  gRNA
ggctctgagagaaggcagcg

SEQ ID NO: 64642 - DNA, 20 bp, Artificial Sequence
  MKO10064642_A_mmu-mir-8099-2
  gRNA
tctgagagaaggcagcgtgg

SEQ ID NO: 64643 - DNA, 20 bp, Artificial Sequence
  MKO10064643_A_mmu-mir-7014
  gRNA
ccacagcacccaaagcctgc

SEQ ID NO: 64644 - DNA, 20 bp, Artificial Sequence
  MKO10064644_A_mmu-mir-7014
  gRNA
ccagcaggctttgggtgctg

SEQ ID NO: 64645 - DNA, 20 bp, Artificial Sequence
  MKO10064645_A_mmu-mir-7014
  gRNA
caccgaccccagcaggcttt

SEQ ID NO: 64646 - DNA, 20 bp, Artificial Sequence
  MKO10064646_A_mmu-mir-7014
  gRNA
cggaatctgtttactgtggt

SEQ ID NO: 64647 - DNA, 20 bp, Artificial Sequence
  MKO10064647_A_mmu-mir-7225
  gRNA
aggtgggcaccgtgctgcag

SEQ ID NO: 64648 - DNA, 20 bp, Artificial Sequence
  MKO10064648_A_mmu-mir-7225
  gRNA
tgtctagaagcagtgccaag

SEQ ID NO: 64649 - DNA, 20 bp, Artificial Sequence
  MKO10064649_A_mmu-mir-7225
  gRNA
tctagacagcctctgcagca

SEQ ID NO: 64650 - DNA, 20 bp, Artificial Sequence
  MKO10064650_A_mmu-mir-7225
  gRNA
agactgtgtagaagccctct

SEQ ID NO: 64651 - DNA, 20 bp, Artificial Sequence
  MKO10064651_A_mmu-mir-6481
  gRNA
ggagcaagcctttattttta

SEQ ID NO: 64652 - DNA, 20 bp, Artificial Sequence
  MKO10064652_A_mmu-mir-6481
  gRNA
cattacctgagtttgttaat

SEQ ID NO: 64653 - DNA, 20 bp, Artificial Sequence
  MKO10064653_A_mmu-mir-6481
  gRNA
taaatcctattagtttagtt

SEQ ID NO: 64654 - DNA, 20 bp, Artificial Sequence
  MKO10064654_A_mmu-mir-6481
  gRNA
cacttatcccataaaaataa

SEQ ID NO: 64655 - DNA, 20 bp, Artificial Sequence
  MKO10064655_A_mmu-mir-669n
  gRNA
cagatctttacatttgtgtg

SEQ ID NO: 64656 - DNA, 20 bp, Artificial Sequence
  MKO10064656_A_mmu-mir-669n
  gRNA
atcccacagcacatgtgcag

SEQ ID NO: 64657 - DNA, 20 bp, Artificial Sequence
  MKO10064657_A_mmu-mir-669n
  gRNA
agcacatgtgcagagggcat

SEQ ID NO: 64658 - DNA, 20 bp, Artificial Sequence
  MKO10064658_A_mmu-mir-669n
  gRNA
gccctctgcacatgtgctgt

SEQ ID NO: 64659 - DNA, 20 bp, Artificial Sequence
  MKO10064659_A_mmu-mir-137
  gRNA
cctctgactctcttcggtga

SEQ ID NO: 64660 - DNA, 20 bp, Artificial Sequence
  MKO10064660_A_mmu-mir-137
  gRNA
tcttcggtgacgggtattct

SEQ ID NO: 64661 - DNA, 20 bp, Artificial Sequence
  MKO10064661_A_mmu-mir-137
  gRNA
cggtgacgggtattcttggg

SEQ ID NO: 64662 - DNA, 20 bp, Artificial Sequence
  MKO10064662_A_mmu-mir-137
  gRNA
gtattcttgggtggataata

SEQ ID NO: 64663 - DNA, 20 bp, Artificial Sequence
  MKO10064663_A_mmu-mir-760
  gRNA
ggcttcggggaaacggggtt

SEQ ID NO: 64664 - DNA, 20 bp, Artificial Sequence
  MKO10064664_A_mmu-mir-760
  gRNA
gacccagagccgaatttctg

SEQ ID NO: 64665 - DNA, 20 bp, Artificial Sequence
  MKO10064665_A_mmu-mir-760
  gRNA
tttctgaggtatccgggctc

SEQ ID NO: 64666 - DNA, 20 bp, Artificial Sequence
  MKO10064666_A_mmu-mir-760
  gRNA
ctgaggtatccgggctctgg

SEQ ID NO: 64667 - DNA, 20 bp, Artificial Sequence
  MKO10064667_A_mmu-mir-7657
  gRNA
aaaccaagttgggaatagca

SEQ ID NO: 64668 - DNA, 20 bp, Artificial Sequence
  MKO10064668_A_mmu-mir-7657
  gRNA
tttccttgctattcccaact

SEQ ID NO: 64669 - DNA, 20 bp, Artificial Sequence
  MKO10064669_A_mmu-mir-7657
  gRNA
gaagtaatagttggatagtt

SEQ ID NO: 64670 - DNA, 20 bp, Artificial Sequence
  MKO10064670_A_mmu-mir-7657
  gRNA
ctagggcgagaagtaatagt

SEQ ID NO: 64671 - DNA, 20 bp, Artificial Sequence
  MKO10064671_A_mmu-mir-302b
  gRNA
ggttcccttcaactttaaca

SEQ ID NO: 64672 - DNA, 20 bp, Artificial Sequence
  MKO10064672_A_mmu-mir-302b
  gRNA
attcccatgttaaagttgaa

SEQ ID NO: 64673 - DNA, 20 bp, Artificial Sequence
  MKO10064673_A_mmu-mir-302b
  gRNA
aattcacttctactaaaaca

SEQ ID NO: 64674 - DNA, 20 bp, Artificial Sequence
  MKO10064674_A_mmu-mir-302b
  gRNA
ttgaagggaacccacccaca

SEQ ID NO: 64675 - DNA, 20 bp, Artificial Sequence
  MKO10064675_A_mmu-mir-302c
  gRNA
gagtcccctctgctttaaca

SEQ ID NO: 64676 - DNA, 20 bp, Artificial Sequence
  MKO10064676_A_mmu-mir-302c
  gRNA
gtcccctctgctttaacatg

SEQ ID NO: 64677 - DNA, 20 bp, Artificial Sequence
  MKO10064677_A_mmu-mir-302c
  gRNA
agtgcttccatgtttcagtg

SEQ ID NO: 64678 - DNA, 20 bp, Artificial Sequence
  MKO10064678_A_mmu-mir-302c
  gRNA
aaccccatgttaaagcagag

SEQ ID NO: 64679 - DNA, 20 bp, Artificial Sequence
  MKO10064679_A_mmu-mir-302a
  gRNA
ggcttcccaccacttaaacg

SEQ ID NO: 64680 - DNA, 20 bp, Artificial Sequence
  MKO10064680_A_mmu-mir-302a
  gRNA
aagtaagtgcttccatgttt

SEQ ID NO: 64681 - DNA, 20 bp, Artificial Sequence
  MKO10064681_A_mmu-mir-302a
  gRNA
gtgcttccatgttttggtga

SEQ ID NO: 64682 - DNA, 20 bp, Artificial Sequence
  MKO10064682_A_mmu-mir-302a
  gRNA
tacaaccacgtttaagtggt

SEQ ID NO: 64683 - DNA, 20 bp, Artificial Sequence
  MKO10064683_A_mmu-mir-302d
  gRNA
cctcctttactttaacatgg

SEQ ID NO: 64684 - DNA, 20 bp, Artificial Sequence
  MKO10064684_A_mmu-mir-302d
  gRNA
agtgcttccatgtttgagtg

SEQ ID NO: 64685 - DNA, 20 bp, Artificial Sequence
  MKO10064685_A_mmu-mir-302d
  gRNA
cctccatgttaaagtaaagg

SEQ ID NO: 64686 - DNA, 20 bp, Artificial Sequence
  MKO10064686_A_mmu-mir-302d
  gRNA
gtgcctccatgttaaagtaa

SEQ ID NO: 64687 - DNA, 20 bp, Artificial Sequence
  MKO10064687_A_mmu-mir-367
  gRNA
ttggaattgcactttagcaa

SEQ ID NO: 64688 - DNA, 20 bp, Artificial Sequence
  MKO10064688_A_mmu-mir-367
  gRNA
ttgcactttagcaatggtga

SEQ ID NO: 64689 - DNA, 20 bp, Artificial Sequence
  MKO10064689_A_mmu-mir-367
  gRNA
ttgcatgttagcaacagtga

SEQ ID NO: 64690 - DNA, 20 bp, Artificial Sequence
  MKO10064690_A_mmu-mir-367
  gRNA
caactctgttgaatagaaat

SEQ ID NO: 64691 - DNA, 20 bp, Artificial Sequence
  MKO10064691_A_mmu-mir-1895
  gRNA
ctcctcctcctcgtcctcct

SEQ ID NO: 64692 - DNA, 20 bp, Artificial Sequence
  MKO10064692_A_mmu-mir-1895
  gRNA
cctcctcctcgtcctcctcg

SEQ ID NO: 64693 - DNA, 20 bp, Artificial Sequence
  MKO10064693_A_mmu-mir-1895
  gRNA
tcgtcctcctcggggggagc

SEQ ID NO: 64694 - DNA, 20 bp, Artificial Sequence
  MKO10064694_A_mmu-mir-1895
  gRNA
ccaacccggccaagaagaag

SEQ ID NO: 64695 - DNA, 20 bp, Artificial Sequence
  MKO10064695_A_mmu-mir-6380
  gRNA
gcagttaaaagcacttacag

SEQ ID NO: 64696 - DNA, 20 bp, Artificial Sequence
  MKO10064696_A_mmu-mir-6380
  gRNA
aaagcacttacagaggaccc

SEQ ID NO: 64697 - DNA, 20 bp, Artificial Sequence
  MKO10064697_A_mmu-mir-6380
  gRNA
ggatactgggaatcagacct

SEQ ID NO: 64698 - DNA, 20 bp, Artificial Sequence
  MKO10064698_A_mmu-mir-6380
  gRNA
ggtggttgtaagcaactatg

SEQ ID NO: 64699 - DNA, 20 bp, Artificial Sequence
  MKO10064699_A_mmu-mir-1956
  gRNA
cgactcctgaccttcagtcc

SEQ ID NO: 64700 - DNA, 20 bp, Artificial Sequence
  MKO10064700_A_mmu-mir-1956
  gRNA
tcagtccagggctgagtcag

SEQ ID NO: 64701 - DNA, 20 bp, Artificial Sequence
  MKO10064701_A_mmu-mir-1956
  gRNA
ggagccccgagtggcttccc

SEQ ID NO: 64702 - DNA, 20 bp, Artificial Sequence
  MKO10064702_A_mmu-mir-1956
  gRNA
ccccgagtggcttccctggc

SEQ ID NO: 64703 - DNA, 20 bp, Artificial Sequence
  MKO10064703_A_mmu-let-7j
  gRNA
ctgatcatgataatttcctg

SEQ ID NO: 64704 - DNA, 20 bp, Artificial Sequence
  MKO10064704_A_mmu-let-7j
  gRNA
acagcacaaactaatacctc

SEQ ID NO: 64705 - DNA, 20 bp, Artificial Sequence
  MKO10064705_A_mmu-let-7j
  gRNA
caggcttttaatctgagcaa

SEQ ID NO: 64706 - DNA, 20 bp, Artificial Sequence
  MKO10064706_A_mmu-let-7j
  gRNA
cacttgatttttttaactcc

SEQ ID NO: 64707 - DNA, 20 bp, Artificial Sequence
  MKO10064707_A_mmu-mir-6381
  gRNA
aagctagctgggaagaggac

SEQ ID NO: 64708 - DNA, 20 bp, Artificial Sequence
  MKO10064708_A_mmu-mir-6381
  gRNA
gccaccaacaaatctgtgct

SEQ ID NO: 64709 - DNA, 20 bp, Artificial Sequence
  MKO10064709_A_mmu-mir-6381
  gRNA
ggaaccaagcacagatttgt

SEQ ID NO: 64710 - DNA, 20 bp, Artificial Sequence
  MKO10064710_A_mmu-mir-6381
  gRNA
tggtgacatgagtgaacaga

SEQ ID NO: 64711 - DNA, 20 bp, Artificial Sequence
  MKO10064711_A_mmu-mir-3963
  gRNA
aatatcaccagtgtcagaag

SEQ ID NO: 64712 - DNA, 20 bp, Artificial Sequence
  MKO10064712_A_mmu-mir-3963
  gRNA
gatacatcccacagagttgt

SEQ ID NO: 64713 - DNA, 20 bp, Artificial Sequence
  MKO10064713_A_mmu-mir-3963
  gRNA
aatatcttacaggttttagg

SEQ ID NO: 64714 - DNA, 20 bp, Artificial Sequence
  MKO10064714_A_mmu-mir-3963
  gRNA
tttaatatcttacaggtttt

SEQ ID NO: 64715 - DNA, 20 bp, Artificial Sequence
  MKO10064715_A_mmu-mir-186
  gRNA
tttccaaagaattctccttt

SEQ ID NO: 64716 - DNA, 20 bp, Artificial Sequence
  MKO10064716_A_mmu-mir-186
  gRNA
tcattttattttaagcccta

SEQ ID NO: 64717 - DNA, 20 bp, Artificial Sequence
  MKO10064717_A_mmu-mir-186
  gRNA
aagccctaaggtgaattttt

SEQ ID NO: 64718 - DNA, 20 bp, Artificial Sequence
  MKO10064718_A_mmu-mir-186
  gRNA
agcccaaaaggagaattctt

SEQ ID NO: 64719 - DNA, 20 bp, Artificial Sequence
  MKO10064719_A_mmu-mir-3471-2
  gRNA
tttcccaattagtgataaag

SEQ ID NO: 64720 - DNA, 20 bp, Artificial Sequence
  MKO10064720_A_mmu-mir-3471-2
  gRNA
aattagtgataaaggggaaa

SEQ ID NO: 64721 - DNA, 20 bp, Artificial Sequence
  MKO10064721_A_mmu-mir-3471-2
  gRNA
aaaggggaaaaggccccttg

SEQ ID NO: 64722 - DNA, 20 bp, Artificial Sequence
  MKO10064722_A_mmu-mir-3471-2
  gRNA
cttgtgggtgggacaatctc

SEQ ID NO: 64723 - DNA, 20 bp, Artificial Sequence
  MKO10064723_A_mmu-mir-3471-1
  gRNA
ttgaggaaatgccttacagt

SEQ ID NO: 64724 - DNA, 20 bp, Artificial Sequence
  MKO10064724_A_mmu-mir-3471-1
  gRNA
tgccttacagttggatctca

SEQ ID NO: 64725 - DNA, 20 bp, Artificial Sequence
  MKO10064725_A_mmu-mir-3471-1
  gRNA
tctgtccagtttctttttgg

SEQ ID NO: 64726 - DNA, 20 bp, Artificial Sequence
  MKO10064726_A_mmu-mir-3471-1
  gRNA
ctccatgagatccaactgta

SEQ ID NO: 64727 - DNA, 20 bp, Artificial Sequence
  MKO10064727_A_mmu-mir-684-2
  gRNA
acttgaagggaaaactatct

SEQ ID NO: 64728 - DNA, 20 bp, Artificial Sequence
  MKO10064728_A_mmu-mir-684-2
  gRNA
agggcaatctgtctttaagt

SEQ ID NO: 64729 - DNA, 20 bp, Artificial Sequence
  MKO10064729_A_mmu-mir-684-2
  gRNA
aacaagacacttgacttgaa

SEQ ID NO: 64730 - DNA, 20 bp, Artificial Sequence
  MKO10064730_A_mmu-mir-6400
  gRNA
caagcagcaagaatctccca

SEQ ID NO: 64731 - DNA, 20 bp, Artificial Sequence
  MKO10064731_A_mmu-mir-6400
  gRNA
aggtgagcacatgctcacta

SEQ ID NO: 64732 - DNA, 20 bp, Artificial Sequence
  MKO10064732_A_mmu-mir-6400
  gRNA
cttgggagattcttgctgct

SEQ ID NO: 64733 - DNA, 20 bp, Artificial Sequence
  MKO10064733_A_mmu-mir-6400
  gRNA
agtgagcatgtgctcacctt

SEQ ID NO: 64734 - DNA, 20 bp, Artificial Sequence
  MKO10064734_A_mmu-mir-8118
  gRNA
acaagtccccattcctgtgt

SEQ ID NO: 64735 - DNA, 20 bp, Artificial Sequence
  MKO10064735_A_mmu-mir-8118
  gRNA
agaatgcttgcagggaccag

SEQ ID NO: 64736 - DNA, 20 bp, Artificial Sequence
  MKO10064736_A_mmu-mir-8118
  gRNA
actatgccgacacaggaatg

SEQ ID NO: 64737 - DNA, 20 bp, Artificial Sequence
  MKO10064737_A_mmu-mir-8118
  gRNA
tgactatgccgacacaggaa

SEQ ID NO: 64738 - DNA, 20 bp, Artificial Sequence
  MKO10064738_A_mmu-mir-876
  gRNA
tatcaaatctagtgtggtag

SEQ ID NO: 64739 - DNA, 20 bp, Artificial Sequence
  MKO10064739_A_mmu-mir-876
  gRNA
acataaactgtcacgtgcta

SEQ ID NO: 64740 - DNA, 20 bp, Artificial Sequence
  MKO10064740_A_mmu-mir-876
  gRNA
agtaattcatagtgcttcac

SEQ ID NO: 64741 - DNA, 20 bp, Artificial Sequence
  MKO10064741_A_mmu-mir-876
  gRNA
tcactatatcaaatctagtg

SEQ ID NO: 64742 - DNA, 20 bp, Artificial Sequence
  MKO10064742_A_mmu-mir-873b
  gRNA
ggaagatttgtgggtgttcc

SEQ ID NO: 64743 - DNA, 20 bp, Artificial Sequence
  MKO10064743_A_mmu-mir-873b
  gRNA
caggagactgacaagttccc

SEQ ID NO: 64744 - DNA, 20 bp, Artificial Sequence
  MKO10064744_A_mmu-mir-873b
  gRNA
gtctcctgtctattttcaat

SEQ ID NO: 64745 - DNA, 20 bp, Artificial Sequence
  MKO10064745_A_mmu-mir-873b
  gRNA
acacccacaaatcttcctac

SEQ ID NO: 64746 - DNA, 20 bp, Artificial Sequence
  MKO10064746_A_mmu-mir-873a
  gRNA
ggaagatttgtgggtgttcc

SEQ ID NO: 64747 - DNA, 20 bp, Artificial Sequence
  MKO10064747_A_mmu-mir-873a
  gRNA
caggagactgacaagttccc

SEQ ID NO: 64748 - DNA, 20 bp, Artificial Sequence
  MKO10064748_A_mmu-mir-873a
  gRNA
gtctcctgtctattttcaat

SEQ ID NO: 64749 - DNA, 20 bp, Artificial Sequence
  MKO10064749_A_mmu-mir-873a
  gRNA
acacccacaaatcttcctac

SEQ ID NO: 64750 - DNA, 20 bp, Artificial Sequence
  MKO10064750_A_mmu-mir-207
  gRNA
gcacgcgcggagcaaggcag

SEQ ID NO: 64751 - DNA, 20 bp, Artificial Sequence
  MKO10064751_A_mmu-mir-207
  gRNA
cgcggagcaaggcaggggtg

SEQ ID NO: 64752 - DNA, 20 bp, Artificial Sequence
  MKO10064752_A_mmu-mir-207
  gRNA
caggggtgaggggctgcggg

SEQ ID NO: 64753 - DNA, 20 bp, Artificial Sequence
  MKO10064753_A_mmu-mir-207
  gRNA
tgaggggctgcgggaggagc

SEQ ID NO: 64754 - DNA, 20 bp, Artificial Sequence
  MKO10064754_A_mmu-mir-5123
  gRNA
gtgtgtagatccatatgcca

SEQ ID NO: 64755 - DNA, 20 bp, Artificial Sequence
  MKO10064755_A_mmu-mir-5123
  gRNA
gtgtgtagacccatatgcca

SEQ ID NO: 64756 - DNA, 20 bp, Artificial Sequence
  MKO10064756_A_mmu-mir-5123
  gRNA
gtgtgtagatccatatgcca

SEQ ID NO: 64757 - DNA, 20 bp, Artificial Sequence
  MKO10064757_A_mmu-mir-5123
  gRNA
gtgtgtagacccatatgcca

SEQ ID NO: 64758 - DNA, 20 bp, Artificial Sequence
  MKO10064758_A_mmu-mir-3094
  gRNA
ttggggacatttttaaagca

SEQ ID NO: 64759 - DNA, 20 bp, Artificial Sequence
  MKO10064759_A_mmu-mir-3094
  gRNA
gacatttttaaagcatggat

SEQ ID NO: 64760 - DNA, 20 bp, Artificial Sequence
  MKO10064760_A_mmu-mir-3094
  gRNA
cacttgaggacacaatttaa

SEQ ID NO: 64761 - DNA, 20 bp, Artificial Sequence
  MKO10064761_A_mmu-mir-3094
  gRNA
ctgccacagtagcacacttg

SEQ ID NO: 64762 - DNA, 20 bp, Artificial Sequence
  MKO10064762_A_mmu-mir-5106
  gRNA
tacagacctaggccctagat

SEQ ID NO: 64763 - DNA, 20 bp, Artificial Sequence
  MKO10064763_A_mmu-mir-5106
  gRNA
cgagagcctatctagggcct

SEQ ID NO: 64764 - DNA, 20 bp, Artificial Sequence
  MKO10064764_A_mmu-mir-5106
  gRNA
acaacccgagagcctatcta

SEQ ID NO: 64765 - DNA, 20 bp, Artificial Sequence
  MKO10064765_A_mmu-mir-5106
  gRNA
gccaactgagctacagacct

SEQ ID NO: 64766 - DNA, 20 bp, Artificial Sequence
  MKO10064766_A_mmu-mir-5120
  gRNA
gaccatggaagcctgtctga

SEQ ID NO: 64767 - DNA, 20 bp, Artificial Sequence
  MKO10064767_A_mmu-mir-5120
  gRNA
ctccactctgtcacagctgg

SEQ ID NO: 64768 - DNA, 20 bp, Artificial Sequence
  MKO10064768_A_mmu-mir-5120
  gRNA
tggtggcaccacagccccaa

SEQ ID NO: 64769 - DNA, 20 bp, Artificial Sequence
  MKO10064769_A_mmu-mir-5120
  gRNA
tggcagcagccccttcagac

SEQ ID NO: 64770 - DNA, 20 bp, Artificial Sequence
  MKO10064770_A_mmu-mir-1958
  gRNA
gcagttagaaattaaactat

SEQ ID NO: 64771 - DNA, 20 bp, Artificial Sequence
  MKO10064771_A_mmu-mir-1958
  gRNA
gaaattaaactataggaaag

SEQ ID NO: 64772 - DNA, 20 bp, Artificial Sequence
  MKO10064772_A_mmu-mir-1958
  gRNA
gaagcagtaagttctcttct

SEQ ID NO: 64773 - DNA, 20 bp, Artificial Sequence
  MKO10064773_A_mmu-mir-1958
  gRNA
gaagcagtaagttctcttct

SEQ ID NO: 64774 - DNA, 20 bp, Artificial Sequence
  MKO10064774_A_mmu-mir-32
  gRNA
acacacactaaattgcattg

SEQ ID NO: 64775 - DNA, 20 bp, Artificial Sequence
  MKO10064775_A_mmu-mir-32
  gRNA
tactaagttgcatgttgtca

SEQ ID NO: 64776 - DNA, 20 bp, Artificial Sequence
  MKO10064776_A_mmu-mir-3095
  gRNA
agatgagaaagcttgtgcac

SEQ ID NO: 64777 - DNA, 20 bp, Artificial Sequence
  MKO10064777_A_mmu-mir-3095
  gRNA
aaagcttgtgcacagggctc

SEQ ID NO: 64778 - DNA, 20 bp, Artificial Sequence
  MKO10064778_A_mmu-mir-3095
  gRNA
tggtttcagggagtggacac

SEQ ID NO: 64779 - DNA, 20 bp, Artificial Sequence
  MKO10064779_A_mmu-mir-3095
  gRNA
ctcgagatggtttcagggag

SEQ ID NO: 64780 - DNA, 20 bp, Artificial Sequence
  MKO10064780_A_mmu-mir-455
  gRNA
ggtgtgagcgtatgtgcctt

SEQ ID NO: 64781 - DNA, 20 bp, Artificial Sequence
  MKO10064781_A_mmu-mir-455
  gRNA
acgcagcaccatgcagtcca

SEQ ID NO: 64782 - DNA, 20 bp, Artificial Sequence
  MKO10064782_A_mmu-mir-455
  gRNA
gcgttcacgatgtagtccaa

SEQ ID NO: 64783 - DNA, 20 bp, Artificial Sequence
  MKO10064783_A_mmu-mir-455
  gRNA
gaggcaagtgtatatgcccg

SEQ ID NO: 64784 - DNA, 20 bp, Artificial Sequence
  MKO10064784_A_mmu-mir-491
  gRNA
gctgtgggaattgacttagc

SEQ ID NO: 64785 - DNA, 20 bp, Artificial Sequence
  MKO10064785_A_mmu-mir-491
  gRNA
gaattgacttagctgggaag

SEQ ID NO: 64786 - DNA, 20 bp, Artificial Sequence
  MKO10064786_A_mmu-mir-491
  gRNA
attgacttagctgggaagtg

SEQ ID NO: 64787 - DNA, 20 bp, Artificial Sequence
  MKO10064787_A_mmu-mir-491
  gRNA
aagtggggaacccttccatg

SEQ ID NO: 64788 - DNA, 20 bp, Artificial Sequence
  MKO10064788_A_mmu-mir-31
  gRNA
caggaaagatggcaatatgt

SEQ ID NO: 64789 - DNA, 20 bp, Artificial Sequence
  MKO10064789_A_mmu-mir-31
  gRNA
tggcaatatgttggcatagc

SEQ ID NO: 64790 - DNA, 20 bp, Artificial Sequence
  MKO10064790_A_mmu-mir-31
  gRNA
tttcctgtctgacagcagct

SEQ ID NO: 64791 - DNA, 20 bp, Artificial Sequence
  MKO10064791_A_mmu-mir-31
  gRNA
ctggagaggaggcaagatgc

SEQ ID NO: 64792 - DNA, 20 bp, Artificial Sequence
  MKO10064792_A_mmu-mir-6402
  gRNA
gctctctgagcagttttccc

SEQ ID NO: 64793 - DNA, 20 bp, Artificial Sequence
  MKO10064793_A_mmu-mir-6402
  gRNA
caataatgcatgcctgggat

SEQ ID NO: 64794 - DNA, 20 bp, Artificial Sequence
  MKO10064794_A_mmu-mir-6402
  gRNA
actgactttgtgcgggttcc

SEQ ID NO: 64795 - DNA, 20 bp, Artificial Sequence
  MKO10064795_A_mmu-mir-6402
  gRNA
agttataatattcccatccc

SEQ ID NO: 64796 - DNA, 20 bp, Artificial Sequence
  MKO10064796_A_mmu-mir-872
  gRNA
gtagatggtaacttgttaga

SEQ ID NO: 64797 - DNA, 20 bp, Artificial Sequence
  MKO10064797_A_mmu-mir-872
  gRNA
agaaggttacttgttagttc

SEQ ID NO: 64798 - DNA, 20 bp, Artificial Sequence
  MKO10064798_A_mmu-mir-872
  gRNA
tattgcagtagcctcctaac

SEQ ID NO: 64799 - DNA, 20 bp, Artificial Sequence
  MKO10064799_A_mmu-mir-872
  gRNA
ggaggctactgcaatagttc

SEQ ID NO: 64800 - DNA, 20 bp, Artificial Sequence
  MKO10064800_A_mmu-mir-101a
  gRNA
agcactgtgataactgagcc

SEQ ID NO: 64801 - DNA, 20 bp, Artificial Sequence
  MKO10064801_A_mmu-mir-101a
  gRNA
tacagtactgtgataactga

SEQ ID NO: 64802 - DNA, 20 bp, Artificial Sequence
  MKO10064802_A_mmu-mir-101a
  gRNA
cggtgactgacaggctgccc

SEQ ID NO: 64803 - DNA, 20 bp, Artificial Sequence
  MKO10064803_A_mmu-mir-101a
  gRNA
acagtactgtacctttagaa

SEQ ID NO: 64804 - DNA, 20 bp, Artificial Sequence
  MKO10064804_A_mmu-mir-6397
  gRNA
aagaatcctggatatgcatg

SEQ ID NO: 64805 - DNA, 20 bp, Artificial Sequence
  MKO10064805_A_mmu-mir-6397
  gRNA
cgatttctggagactttcag

SEQ ID NO: 64806 - DNA, 20 bp, Artificial Sequence
  MKO10064806_A_mmu-mir-6397
  gRNA
ttctttcagtgagaatttga

SEQ ID NO: 64807 - DNA, 20 bp, Artificial Sequence
  MKO10064807_A_mmu-mir-6397
  gRNA
aaatcgcctcatgcatatcc

SEQ ID NO: 64808 - DNA, 20 bp, Artificial Sequence
  MKO10064808_A_mmu-mir-761
  gRNA
atggcaagtggaggagcagc

SEQ ID NO: 64809 - DNA, 20 bp, Artificial Sequence
  MKO10064809_A_mmu-mir-761
  gRNA
gcatttggcaggatggcaag

SEQ ID NO: 64810 - DNA, 20 bp, Artificial Sequence
  MKO10064810_A_mmu-mir-761
  gRNA
tttggcaggatggcaagtgg

SEQ ID NO: 64811 - DNA, 20 bp, Artificial Sequence
  MKO10064811_A_mmu-mir-761
  gRNA
gggtgaaactgacacagtgc

SEQ ID NO: 64812 - DNA, 20 bp, Artificial Sequence
  MKO10064812_A_mmu-mir-7226
  gRNA
caccagcactgctcagagaa

SEQ ID NO: 64813 - DNA, 20 bp, Artificial Sequence
  MKO10064813_A_mmu-mir-7226
  gRNA
gctcagagaatggctgtgtc

SEQ ID NO: 64814 - DNA, 20 bp, Artificial Sequence
  MKO10064814_A_mmu-mir-7226
  gRNA
cttcacacaatcaacttccc

SEQ ID NO: 64815 - DNA, 20 bp, Artificial Sequence
  MKO10064815_A_mmu-mir-7226
  gRNA
caatcaacttccctggcctt

SEQ ID NO: 64816 - DNA, 20 bp, Artificial Sequence
  MKO10064816_A_mmu-mir-1957a
  gRNA
acagctggaaagtagctcag

SEQ ID NO: 64817 - DNA, 20 bp, Artificial Sequence
  MKO10064817_A_mmu-mir-1957a
  gRNA
gcatatgaccagcatgtgca

SEQ ID NO: 64818 - DNA, 20 bp, Artificial Sequence
  MKO10064818_A_mmu-mir-1957a
  gRNA
actcagggccttgcacatgc

SEQ ID NO: 64819 - DNA, 20 bp, Artificial Sequence
  MKO10064819_A_mmu-mir-1957a
  gRNA
cagtgctggggataaactca

SEQ ID NO: 64820 - DNA, 20 bp, Artificial Sequence
  MKO10064820_A_mmu-mir-30c-1
  gRNA
gagctcacagctgagagtgt

SEQ ID NO: 64821 - DNA, 20 bp, Artificial Sequence
  MKO10064821_A_mmu-mir-30c-1
  gRNA
agctcaaggtggctgggaga

SEQ ID NO: 64822 - DNA, 20 bp, Artificial Sequence
  MKO10064822_A_mmu-mir-30c-1
  gRNA
gctgtgagctcaaggtggct

SEQ ID NO: 64823 - DNA, 20 bp, Artificial Sequence
  MKO10064823_A_mmu-mir-30c-1
  gRNA
ctgacgttttccatggcaga

SEQ ID NO: 64824 - DNA, 20 bp, Artificial Sequence
  MKO10064824_A_mmu-mir-30e
  gRNA
caccttacagcttccagtca

SEQ ID NO: 64825 - DNA, 20 bp, Artificial Sequence
  MKO10064825_A_mmu-mir-30e
  gRNA
tttcagtcggatgtttacag

SEQ ID NO: 64826 - DNA, 20 bp, Artificial Sequence
  MKO10064826_A_mmu-mir-30e
  gRNA
tgttgagaggagctttcagt

SEQ ID NO: 64827 - DNA, 20 bp, Artificial Sequence
  MKO10064827_A_mmu-mir-30e
  gRNA
caggctgccacagtcgtccc

SEQ ID NO: 64828 - DNA, 20 bp, Artificial Sequence
  MKO10064828_A_mmu-mir-30f
  gRNA
caccttacagcttccagtca

SEQ ID NO: 64829 - DNA, 20 bp, Artificial Sequence
  MKO10064829_A_mmu-mir-30f
  gRNA
tttcagtcggatgtttacag

SEQ ID NO: 64830 - DNA, 20 bp, Artificial Sequence
  MKO10064830_A_mmu-mir-30f
  gRNA
tgttgagaggagctttcagt

SEQ ID NO: 64831 - DNA, 20 bp, Artificial Sequence
  MKO10064831_A_mmu-mir-30f
  gRNA
caggctgccacagtcgtccc

SEQ ID NO: 64832 - DNA, 20 bp, Artificial Sequence
  MKO10064832_A_mmu-mir-7015
  gRNA
gaacctacagcctagtgcag

SEQ ID NO: 64833 - DNA, 20 bp, Artificial Sequence
  MKO10064833_A_mmu-mir-7015
  gRNA
cctactgcacagagggcaac

SEQ ID NO: 64834 - DNA, 20 bp, Artificial Sequence
  MKO10064834_A_mmu-mir-7015
  gRNA
ttctcactgtcctctgcact

SEQ ID NO: 64835 - DNA, 20 bp, Artificial Sequence
  MKO10064835_A_mmu-mir-7015
  gRNA
cctgttgccctctgtgcagt

SEQ ID NO: 64836 - DNA, 20 bp, Artificial Sequence
  MKO10064836_A_mmu-mir-6398
  gRNA
aaggatagtctttttttttg

SEQ ID NO: 64837 - DNA, 20 bp, Artificial Sequence
  MKO10064837_A_mmu-mir-6398
  gRNA
ggatagtctttttttttggg

SEQ ID NO: 64838 - DNA, 20 bp, Artificial Sequence
  MKO10064838_A_mmu-mir-6398
  gRNA
atagtctttttttttggggg

SEQ ID NO: 64839 - DNA, 20 bp, Artificial Sequence
  MKO10064839_A_mmu-mir-6398
  gRNA
atttttgtttatgagtggag

SEQ ID NO: 64840 - DNA, 20 bp, Artificial Sequence
  MKO10064840_A_mmu-mir-697
  gRNA
tggggatgtgtcctggatgt

SEQ ID NO: 64841 - DNA, 20 bp, Artificial Sequence
  MKO10064841_A_mmu-mir-697
  gRNA
tcctggatgttggtcttgac

SEQ ID NO: 64842 - DNA, 20 bp, Artificial Sequence
  MKO10064842_A_mmu-mir-697
  gRNA
ttggtcttgacaggtctcag

SEQ ID NO: 64843 - DNA, 20 bp, Artificial Sequence
  MKO10064843_A_mmu-mir-697
  gRNA
actaccacacattgaagggg

SEQ ID NO: 64844 - DNA, 20 bp, Artificial Sequence
  MKO10064844_A_mmu-mir-698
  gRNA
tcatctctgccctcactgta

SEQ ID NO: 64845 - DNA, 20 bp, Artificial Sequence
  MKO10064845_A_mmu-mir-698
  gRNA
ctctgccctcactgtaaggg

SEQ ID NO: 64846 - DNA, 20 bp, Artificial Sequence
  MKO10064846_A_mmu-mir-698
  gRNA
gccctcactgtaagggaggg

SEQ ID NO: 64847 - DNA, 20 bp, Artificial Sequence
  MKO10064847_A_mmu-mir-698
  gRNA
ctcactgtaagggagggtgg

SEQ ID NO: 64848 - DNA, 20 bp, Artificial Sequence
  MKO10064848_A_mmu-mir-692-3
  gRNA
accaacctccgcagggtggc

SEQ ID NO: 64849 - DNA, 20 bp, Artificial Sequence
  MKO10064849_A_mmu-mir-692-3
  gRNA
gggccacaaccagcgcagac

SEQ ID NO: 64850 - DNA, 20 bp, Artificial Sequence
  MKO10064850_A_mmu-mir-692-3
  gRNA
agcgcagactggcgcgcccc

SEQ ID NO: 64851 - DNA, 20 bp, Artificial Sequence
  MKO10064851_A_mmu-mir-692-3
  gRNA
cactctcaagcacgactagg

SEQ ID NO: 64852 - DNA, 20 bp, Artificial Sequence
  MKO10064852_A_mmu-mir-7119
  gRNA
aggacaaaggactgggggat

SEQ ID NO: 64853 - DNA, 20 bp, Artificial Sequence
  MKO10064853_A_mmu-mir-7119
  gRNA
tttttctttttttaaaaaga

SEQ ID NO: 64854 - DNA, 20 bp, Artificial Sequence
  MKO10064854_A_mmu-mir-7119
  gRNA
tcatcagaatctggaggaaa

SEQ ID NO: 64855 - DNA, 20 bp, Artificial Sequence
  MKO10064855_A_mmu-mir-7119
  gRNA
atctcttcatcagaatctgg

SEQ ID NO: 64856 - DNA, 20 bp, Artificial Sequence
  MKO10064856_A_mmu-mir-8119
  gRNA
cggatgggcagctgcggggt

SEQ ID NO: 64857 - DNA, 20 bp, Artificial Sequence
  MKO10064857_A_mmu-mir-8119
  gRNA
cggggtaggaaatgaggctg

SEQ ID NO: 64858 - DNA, 20 bp, Artificial Sequence
  MKO10064858_A_mmu-mir-8119
  gRNA
ttctttccgtttctccagcc

SEQ ID NO: 64859 - DNA, 20 bp, Artificial Sequence
  MKO10064859_A_mmu-mir-8119
  gRNA
gaggagaggagagggagcta

SEQ ID NO: 64860 - DNA, 20 bp, Artificial Sequence
  MKO10064860_A_mmu-mir-7016
  gRNA
atgtgtattctggggagagc

SEQ ID NO: 64861 - DNA, 20 bp, Artificial Sequence
  MKO10064861_A_mmu-mir-7016
  gRNA
ttctggggagagcaggaggc

SEQ ID NO: 64862 - DNA, 20 bp, Artificial Sequence
  MKO10064862_A_mmu-mir-7016
  gRNA
gggagagcaggaggcaggtc

SEQ ID NO: 64863 - DNA, 20 bp, Artificial Sequence
  MKO10064863_A_mmu-mir-7016
  gRNA
ggagcgagagtaggccacta

SEQ ID NO: 64864 - DNA, 20 bp, Artificial Sequence
  MKO10064864_A_mmu-mir-7017
  gRNA
tcccagagggttgtgagact

SEQ ID NO: 64865 - DNA, 20 bp, Artificial Sequence
  MKO10064865_A_mmu-mir-7017
  gRNA
aaccctgctcctctccctcc

SEQ ID NO: 64866 - DNA, 20 bp, Artificial Sequence
  MKO10064866_A_mmu-mir-7017
  gRNA
ccctagtctcacaaccctct

SEQ ID NO: 64867 - DNA, 20 bp, Artificial Sequence
  MKO10064867_A_mmu-mir-7017
  gRNA
ggagggagaggagcagggtt

SEQ ID NO: 64868 - DNA, 20 bp, Artificial Sequence
  MKO10064868_A_mmu-mir-5122
  gRNA
gaggcatcagtccgctaccg

SEQ ID NO: 64869 - DNA, 20 bp, Artificial Sequence
  MKO10064869_A_mmu-mir-5122
  gRNA
gtccgctaccgcgggacccg

SEQ ID NO: 64870 - DNA, 20 bp, Artificial Sequence
  MKO10064870_A_mmu-mir-5122
  gRNA
gcgggacccggggctgtgtc

SEQ ID NO: 64871 - DNA, 20 bp, Artificial Sequence
  MKO10064871_A_mmu-mir-5122
  gRNA
acccggggctgtgtcaggtc

SEQ ID NO: 64872 - DNA, 20 bp, Artificial Sequence
  MKO10064872_A_mmu-mir-7227
  gRNA
atttctctgaaaagggtcat

SEQ ID NO: 64873 - DNA, 20 bp, Artificial Sequence
  MKO10064873_A_mmu-mir-7227
  gRNA
acttgctatttctctgaaaa

SEQ ID NO: 64874 - DNA, 20 bp, Artificial Sequence
  MKO10064874_A_mmu-mir-7227
  gRNA
atgaaaaagtcatcagagta

SEQ ID NO: 64875 - DNA, 20 bp, Artificial Sequence
  MKO10064875_A_mmu-mir-6403
  gRNA
gccccgcccccagatggctc

SEQ ID NO: 64876 - DNA, 20 bp, Artificial Sequence
  MKO10064876_A_mmu-mir-6403
  gRNA
cccgcccccagatggctcag

SEQ ID NO: 64877 - DNA, 20 bp, Artificial Sequence
  MKO10064877_A_mmu-mir-6403
  gRNA
tggctcaggggctctgccac

SEQ ID NO: 64878 - DNA, 20 bp, Artificial Sequence
  MKO10064878_A_mmu-mir-6403
  gRNA
cgcctttgccaagttgctaa

SEQ ID NO: 64879 - DNA, 20 bp, Artificial Sequence
  MKO10064879_A_mmu-mir-700
  gRNA
gtgcaccaccacactggggg

SEQ ID NO: 64880 - DNA, 20 bp, Artificial Sequence
  MKO10064880_A_mmu-mir-700
  gRNA
tctcccctgcaagcacagga

SEQ ID NO: 64881 - DNA, 20 bp, Artificial Sequence
  MKO10064881_A_mmu-mir-700
  gRNA
aggagccttactcccagtga

SEQ ID NO: 64882 - DNA, 20 bp, Artificial Sequence
  MKO10064882_A_mmu-mir-700
  gRNA
aaccgagtccacccccagtg

SEQ ID NO: 64883 - DNA, 20 bp, Artificial Sequence
  MKO10064883_A_mmu-mir-7018
  gRNA
caaagtgagcagacagggag

SEQ ID NO: 64884 - DNA, 20 bp, Artificial Sequence
  MKO10064884_A_mmu-mir-7018
  gRNA
agtgagcagacagggagtgg

SEQ ID NO: 64885 - DNA, 20 bp, Artificial Sequence
  MKO10064885_A_mmu-mir-7018
  gRNA
tgagcagacagggagtggtg

SEQ ID NO: 64886 - DNA, 20 bp, Artificial Sequence
  MKO10064886_A_mmu-mir-7018
  gRNA
tggtgggggaagtcttctcc

SEQ ID NO: 64887 - DNA, 20 bp, Artificial Sequence
  MKO10064887_A_mmu-mir-6399
  gRNA
gttgcaatgatggtattctg

SEQ ID NO: 64888 - DNA, 20 bp, Artificial Sequence
  MKO10064888_A_mmu-mir-6399
  gRNA
ttgatccttgaaccttttag

SEQ ID NO: 64889 - DNA, 20 bp, Artificial Sequence
  MKO10064889_A_mmu-mir-6399
  gRNA
aggtaaagctgttgcaatga

SEQ ID NO: 64890 - DNA, 20 bp, Artificial Sequence
  MKO10064890_A_mmu-mir-6399
  gRNA
ataaactaccactgcaaccc

SEQ ID NO: 64891 - DNA, 20 bp, Artificial Sequence
  MKO10064891_A_mmu-mir-7019
  gRNA
gacagccatctgcagagagg

SEQ ID NO: 64892 - DNA, 20 bp, Artificial Sequence
  MKO10064892_A_mmu-mir-7019
  gRNA
agagaggcggccaaggtgag

SEQ ID NO: 64893 - DNA, 20 bp, Artificial Sequence
  MKO10064893_A_mmu-mir-7019
  gRNA
gccaaggtgagcggtgcagt

SEQ ID NO: 64894 - DNA, 20 bp, Artificial Sequence
  MKO10064894_A_mmu-mir-7019
  gRNA
gccgactgcaccgctcacct

SEQ ID NO: 64895 - DNA, 20 bp, Artificial Sequence
  MKO10064895_A_mmu-mir-7020
  gRNA
gtgtgggctgaggtctggga

SEQ ID NO: 64896 - DNA, 20 bp, Artificial Sequence
  MKO10064896_A_mmu-mir-7020
  gRNA
tgggctgaggtctgggatgg

SEQ ID NO: 64897 - DNA, 20 bp, Artificial Sequence
  MKO10064897_A_mmu-mir-7020
  gRNA
tgaggtctgggatggtggag

SEQ ID NO: 64898 - DNA, 20 bp, Artificial Sequence
  MKO10064898_A_mmu-mir-7020
  gRNA
tggtggagagggtgaccaga

SEQ ID NO: 64899 - DNA, 20 bp, Artificial Sequence
  MKO10064899_A_mmu-mir-2139
  gRNA
taccaggagcagcgcagctg

SEQ ID NO: 64900 - DNA, 20 bp, Artificial Sequence
  MKO10064900_A_mmu-mir-2139
  gRNA
gtccgcagctgcgctgctcc

SEQ ID NO: 64901 - DNA, 20 bp, Artificial Sequence
  MKO10064901_A_mmu-mir-2139
  gRNA
ggacatgcagctgcccagca

SEQ ID NO: 64902 - DNA, 20 bp, Artificial Sequence
  MKO10064902_A_mmu-mir-2139
  gRNA
tggagaaggagcagagggcc

SEQ ID NO: 64903 - DNA, 20 bp, Artificial Sequence
  MKO10064903_A_mmu-mir-7021
  gRNA
tctctgtgcttctgctcctt

SEQ ID NO: 64904 - DNA, 20 bp, Artificial Sequence
  MKO10064904_A_mmu-mir-7021
  gRNA
gcttctagcaatcgagtcat

SEQ ID NO: 64905 - DNA, 20 bp, Artificial Sequence
  MKO10064905_A_mmu-mir-7022
  gRNA
gaggcacatcctgggggcag

SEQ ID NO: 64906 - DNA, 20 bp, Artificial Sequence
  MKO10064906_A_mmu-mir-7022
  gRNA
agagcccttccttgccaggt

SEQ ID NO: 64907 - DNA, 20 bp, Artificial Sequence
  MKO10064907_A_mmu-mir-7022
  gRNA
caagcctgacctctgccccc

SEQ ID NO: 64908 - DNA, 20 bp, Artificial Sequence
  MKO10064908_A_mmu-mir-7022
  gRNA
aagggctctgtttagcatgc

SEQ ID NO: 64909 - DNA, 20 bp, Artificial Sequence
  MKO10064909_A_mmu-mir-5616
  gRNA
agacagatcaacttgtgatg

SEQ ID NO: 64910 - DNA, 20 bp, Artificial Sequence
  MKO10064910_A_mmu-mir-5616
  gRNA
tattctcaacttgtgatgag

SEQ ID NO: 64911 - DNA, 20 bp, Artificial Sequence
  MKO10064911_A_mmu-mir-7023
  gRNA
tgaggggcgcagacagggtg

SEQ ID NO: 64912 - DNA, 20 bp, Artificial Sequence
  MKO10064912_A_mmu-mir-7023
  gRNA
ctgggattgggcgtggagct

SEQ ID NO: 64913 - DNA, 20 bp, Artificial Sequence
  MKO10064913_A_mmu-mir-7023
  gRNA
gggggagctgggattgggcg

SEQ ID NO: 64914 - DNA, 20 bp, Artificial Sequence
  MKO10064914_A_mmu-mir-7023
  gRNA
ggaatgggggagctgggatt

SEQ ID NO: 64915 - DNA, 20 bp, Artificial Sequence
  MKO10064915_A_mmu-mir-34a
  gRNA
gccagctgtgagtaattctt

SEQ ID NO: 64916 - DNA, 20 bp, Artificial Sequence
  MKO10064916_A_mmu-mir-34a
  gRNA
ttctttggcagtgtcttagc

SEQ ID NO: 64917 - DNA, 20 bp, Artificial Sequence
  MKO10064917_A_mmu-mir-34a
  gRNA
gttgttgtgagtattagcta

SEQ ID NO: 64918 - DNA, 20 bp, Artificial Sequence
  MKO10064918_A_mmu-mir-34a
  gRNA
aacaatgtgcagcacttcta

SEQ ID NO: 64919 - DNA, 20 bp, Artificial Sequence
  MKO10064919_A_mmu-mir-429
  gRNA
agcggtgataaggccgtgga

SEQ ID NO: 64920 - DNA, 20 bp, Artificial Sequence
  MKO10064920_A_mmu-mir-429
  gRNA
gtgataaggccgtggatgga

SEQ ID NO: 64921 - DNA, 20 bp, Artificial Sequence
  MKO10064921_A_mmu-mir-429
  gRNA
catccagatctaaccatgtc

SEQ ID NO: 64922 - DNA, 20 bp, Artificial Sequence
  MKO10064922_A_mmu-mir-429
  gRNA
ctggtaagacatccatcagc

SEQ ID NO: 64923 - DNA, 20 bp, Artificial Sequence
  MKO10064923_A_mmu-mir-200a
  gRNA
ccaagaaatccagcactgtc

SEQ ID NO: 64924 - DNA, 20 bp, Artificial Sequence
  MKO10064924_A_mmu-mir-200a
  gRNA
gtccggtaagatgcccacag

SEQ ID NO: 64925 - DNA, 20 bp, Artificial Sequence
  MKO10064925_A_mmu-mir-200a
  gRNA
taagatgcccacagaggccc

SEQ ID NO: 64926 - DNA, 20 bp, Artificial Sequence
  MKO10064926_A_mmu-mir-200a
  gRNA
tgtctggtaacgatgttcaa

SEQ ID NO: 64927 - DNA, 20 bp, Artificial Sequence
  MKO10064927_A_mmu-mir-200b
  gRNA
gctccgccgtcatcattacc

SEQ ID NO: 64928 - DNA, 20 bp, Artificial Sequence
  MKO10064928_A_mmu-mir-200b
  gRNA
tccaatgctgcccagtaaga

SEQ ID NO: 64929 - DNA, 20 bp, Artificial Sequence
  MKO10064929_A_mmu-mir-200b
  gRNA
gctgcccagtaagatggcca

SEQ ID NO: 64930 - DNA, 20 bp, Artificial Sequence
  MKO10064930_A_mmu-mir-200b
  gRNA
ctgcctggtaatgatgacgg

SEQ ID NO: 64931 - DNA, 20 bp, Artificial Sequence
  MKO10064931_A_mmu-mir-7658
  gRNA
ggacacagacagcgtgggtg

SEQ ID NO: 64932 - DNA, 20 bp, Artificial Sequence
  MKO10064932_A_mmu-mir-7658
  gRNA
agcgtgggtgaggaaggtgg

SEQ ID NO: 64933 - DNA, 20 bp, Artificial Sequence
  MKO10064933_A_mmu-mir-7658
  gRNA
cagtgtgggcgtggcggtgc

SEQ ID NO: 64934 - DNA, 20 bp, Artificial Sequence
  MKO10064934_A_mmu-mir-7658
  gRNA
aagacgcagcagtgtgggcg

SEQ ID NO: 64935 - DNA, 20 bp, Artificial Sequence
  MKO10064935_A_mmu-mir-879
  gRNA
agacaagtttctaggtccag

SEQ ID NO: 64936 - DNA, 20 bp, Artificial Sequence
  MKO10064936_A_mmu-mir-879
  gRNA
aggcttatagctctaagcct

SEQ ID NO: 64937 - DNA, 20 bp, Artificial Sequence
  MKO10064937_A_mmu-mir-879
  gRNA
ccttggatgaaagaggctta

SEQ ID NO: 64938 - DNA, 20 bp, Artificial Sequence
  MKO10064938_A_mmu-mir-879
  gRNA
ggcttatggcttcaagcttt

SEQ ID NO: 64939 - DNA, 20 bp, Artificial Sequence
  MKO10064939_A_mmu-mir-671
  gRNA
ggctggcgaactggcaggcc

SEQ ID NO: 64940 - DNA, 20 bp, Artificial Sequence
  MKO10064940_A_mmu-mir-671
  gRNA
cgaactggcaggccaggaag

SEQ ID NO: 64941 - DNA, 20 bp, Artificial Sequence
  MKO10064941_A_mmu-mir-671
  gRNA
actggcaggccaggaagagg

SEQ ID NO: 64942 - DNA, 20 bp, Artificial Sequence
  MKO10064942_A_mmu-mir-671
  gRNA
ccaggaagaggaggaagccc

SEQ ID NO: 64943 - DNA, 20 bp, Artificial Sequence
  MKO10064943_A_mmu-mir-1960
  gRNA
cagccctcttctaacagcac

SEQ ID NO: 64944 - DNA, 20 bp, Artificial Sequence
  MKO10064944_A_mmu-mir-1960
  gRNA
gcagccagtgctgttagaag

SEQ ID NO: 64945 - DNA, 20 bp, Artificial Sequence
  MKO10064945_A_mmu-mir-1960
  gRNA
gttagaagagggctgagagc

SEQ ID NO: 64946 - DNA, 20 bp, Artificial Sequence
  MKO10064946_A_mmu-mir-1960
  gRNA
cactgacttttcctctgcat

SEQ ID NO: 64947 - DNA, 20 bp, Artificial Sequence
  MKO10064947_A_mmu-mir-5625
  gRNA
cggcccggaagttcttgagt

SEQ ID NO: 64948 - DNA, 20 bp, Artificial Sequence
  MKO10064948_A_mmu-mir-5625
  gRNA
acatcccgggtgacccgggt

SEQ ID NO: 64949 - DNA, 20 bp, Artificial Sequence
  MKO10064949_A_mmu-mir-5625
  gRNA
gttggagctgctgattcaag

SEQ ID NO: 64950 - DNA, 20 bp, Artificial Sequence
  MKO10064950_A_mmu-mir-5625
  gRNA
agctccaacccgggtcaccc

SEQ ID NO: 64951 - DNA, 20 bp, Artificial Sequence
  MKO10064951_A_mmu-mir-3473e
  gRNA
gcaaatggttgtctgccttg

SEQ ID NO: 64952 - DNA, 20 bp, Artificial Sequence
  MKO10064952_A_mmu-mir-3473e
  gRNA
tgggtactggaaattgacct

SEQ ID NO: 64953 - DNA, 20 bp, Artificial Sequence
  MKO10064953_A_mmu-mir-3473e
  gRNA
gcccagtgtcagtctcttga

SEQ ID NO: 64954 - DNA, 20 bp, Artificial Sequence
  MKO10064954_A_mmu-mir-3473e
  gRNA
gtcaatttccagtacccaca

SEQ ID NO: 64955 - DNA, 20 bp, Artificial Sequence
  MKO10064955_A_mmu-mir-7024
  gRNA
atgggttctctgtagggagc

SEQ ID NO: 64956 - DNA, 20 bp, Artificial Sequence
  MKO10064956_A_mmu-mir-7024
  gRNA
gggagcagggactgctgggc

SEQ ID NO: 64957 - DNA, 20 bp, Artificial Sequence
  MKO10064957_A_mmu-mir-7024
  gRNA
ggactgctgggcaggtgcct

SEQ ID NO: 64958 - DNA, 20 bp, Artificial Sequence
  MKO10064958_A_mmu-mir-7024
  gRNA
aacccatcccccaacccatg

SEQ ID NO: 64959 - DNA, 20 bp, Artificial Sequence
  MKO10064959_A_mmu-mir-7036b
  gRNA
cgcggggttctctgtggaag

SEQ ID NO: 64960 - DNA, 20 bp, Artificial Sequence
  MKO10064960_A_mmu-mir-7036b
  gRNA
ttgctcggctctgagcttcc

SEQ ID NO: 64961 - DNA, 20 bp, Artificial Sequence
  MKO10064961_A_mmu-mir-7036b
  gRNA
ctcggctctgagcttcctgg

SEQ ID NO: 64962 - DNA, 20 bp, Artificial Sequence
  MKO10064962_A_mmu-mir-7036b
  gRNA
ctgagcttcctggtgggcct

SEQ ID NO: 64963 - DNA, 20 bp, Artificial Sequence
  MKO10064963_A_mmu-mir-467g
  gRNA
atatatgcatgcacaagacc

SEQ ID NO: 64964 - DNA, 20 bp, Artificial Sequence
  MKO10064964_A_mmu-mir-3097
  gRNA
gaatgtttgagtgacacagg

SEQ ID NO: 64965 - DNA, 20 bp, Artificial Sequence
  MKO10064965_A_mmu-mir-3097
  gRNA
agatctgtagacacacccac

SEQ ID NO: 64966 - DNA, 20 bp, Artificial Sequence
  MKO10064966_A_mmu-mir-3097
  gRNA
aagagagctgacaggtagaa

SEQ ID NO: 64967 - DNA, 20 bp, Artificial Sequence
  MKO10064967_A_mmu-mir-3097
  gRNA
ggtgggaagtgtgtgtccag

SEQ ID NO: 64968 - DNA, 20 bp, Artificial Sequence
  MKO10064968_A_mmu-mir-7689
  gRNA
gggactacaccgaggcagcc

SEQ ID NO: 64969 - DNA, 20 bp, Artificial Sequence
  MKO10064969_A_mmu-mir-7689
  gRNA
accgaggcagcctggcttag

SEQ ID NO: 64970 - DNA, 20 bp, Artificial Sequence
  MKO10064970_A_mmu-mir-7689
  gRNA
gcagcctggcttagtggaaa

SEQ ID NO: 64971 - DNA, 20 bp, Artificial Sequence
  MKO10064971_A_mmu-mir-7689
  gRNA
ggctttagagccagactgcc

SEQ ID NO: 64972 - DNA, 20 bp, Artificial Sequence
  MKO10064972_A_mmu-mir-6414
  gRNA
ttttcagaccctgctctttg

SEQ ID NO: 64973 - DNA, 20 bp, Artificial Sequence
  MKO10064973_A_mmu-mir-6414
  gRNA
tttgggggcttgtagctccc

SEQ ID NO: 64974 - DNA, 20 bp, Artificial Sequence
  MKO10064974_A_mmu-mir-6414
  gRNA
acttagactggggaaaacct

SEQ ID NO: 64975 - DNA, 20 bp, Artificial Sequence
  MKO10064975_A_mmu-mir-6414
  gRNA
tcagctcagaacttagactg

SEQ ID NO: 64976 - DNA, 20 bp, Artificial Sequence
  MKO10064976_A_mmu-mir-218-1
  gRNA
gatctaaccatgtgcttgcg

SEQ ID NO: 64977 - DNA, 20 bp, Artificial Sequence
  MKO10064977_A_mmu-mir-218-1
  gRNA
catggttccgtcaagcacca

SEQ ID NO: 64978 - DNA, 20 bp, Artificial Sequence
  MKO10064978_A_mmu-mir-218-1
  gRNA
tctcatacctcgcaagcaca

SEQ ID NO: 64979 - DNA, 20 bp, Artificial Sequence
  MKO10064979_A_mmu-mir-218-1
  gRNA
tgacgttccatggtgcttga

SEQ ID NO: 64980 - DNA, 20 bp, Artificial Sequence
  MKO10064980_A_mmu-mir-8117
  gRNA
atccagtggggattcctgtg

SEQ ID NO: 64981 - DNA, 20 bp, Artificial Sequence
  MKO10064981_A_mmu-mir-8117
  gRNA
gtgtgggcccttgcaggtgt

SEQ ID NO: 64982 - DNA, 20 bp, Artificial Sequence
  MKO10064982_A_mmu-mir-8117
  gRNA
ggtgttgggcgagactccgc

SEQ ID NO: 64983 - DNA, 20 bp, Artificial Sequence
  MKO10064983_A_mmu-mir-8117
  gRNA
tgggcgagactccgctggca

SEQ ID NO: 64984 - DNA, 20 bp, Artificial Sequence
  MKO10064984_A_mmu-mir-6417
  gRNA
gctagctgtcgtttgctact

SEQ ID NO: 64985 - DNA, 20 bp, Artificial Sequence
  MKO10064985_A_mmu-mir-6417
  gRNA
atagctgtgtctgtgagaca

SEQ ID NO: 64986 - DNA, 20 bp, Artificial Sequence
  MKO10064986_A_mmu-mir-6417
  gRNA
tgcaagctcacactcagcgg

SEQ ID NO: 64987 - DNA, 20 bp, Artificial Sequence
  MKO10064987_A_mmu-mir-6417
  gRNA
ggaggaactagtacacacag

SEQ ID NO: 64988 - DNA, 20 bp, Artificial Sequence
  MKO10064988_A_mmu-mir-574
  gRNA
tgtgtgcatgagcgtggact

SEQ ID NO: 64989 - DNA, 20 bp, Artificial Sequence
  MKO10064989_A_mmu-mir-574
  gRNA
tgtgggtgtgtgcatgagcg

SEQ ID NO: 64990 - DNA, 20 bp, Artificial Sequence
  MKO10064990_A_mmu-mir-574
  gRNA
gaccgggcgtgcgggcgtgt

SEQ ID NO: 64991 - DNA, 20 bp, Artificial Sequence
  MKO10064991_A_mmu-mir-574
  gRNA
cacccacacgcccgcacgcc

SEQ ID NO: 64992 - DNA, 20 bp, Artificial Sequence
  MKO10064992_A_mmu-mir-7025
  gRNA
ctcccagtgagtttctcagt

SEQ ID NO: 64993 - DNA, 20 bp, Artificial Sequence
  MKO10064993_A_mmu-mir-7025
  gRNA
agccaccagcttcagctcac

SEQ ID NO: 64994 - DNA, 20 bp, Artificial Sequence
  MKO10064994_A_mmu-mir-7025
  gRNA
tgcctactgagaaactcact

SEQ ID NO: 64995 - DNA, 20 bp, Artificial Sequence
  MKO10064995_A_mmu-mir-7025
  gRNA
acagggcgtggctggtgagc

SEQ ID NO: 64996 - DNA, 20 bp, Artificial Sequence
  MKO10064996_A_mmu-mir-5098
  gRNA
taggattagccagagttaca

SEQ ID NO: 64997 - DNA, 20 bp, Artificial Sequence
  MKO10064997_A_mmu-mir-5098
  gRNA
ttttgttttgtttttgagac

SEQ ID NO: 64998 - DNA, 20 bp, Artificial Sequence
  MKO10064998_A_mmu-mir-5098
  gRNA
agggtttctctgtgtagccc

SEQ ID NO: 64999 - DNA, 20 bp, Artificial Sequence
  MKO10064999_A_mmu-mir-5098
  gRNA
ctgtgtagccctggctgtcc

SEQ ID NO: 65000 - DNA, 20 bp, Artificial Sequence
  MKO10065000_A_mmu-mir-1187
  gRNA
aaaaataaattgtgtctata

SEQ ID NO: 65001 - DNA, 20 bp, Artificial Sequence
  MKO10065001_A_mmu-mir-1187
  gRNA
tgtctataaggaaaacagtt

SEQ ID NO: 65002 - DNA, 20 bp, Artificial Sequence
  MKO10065002_A_mmu-mir-3969
  gRNA
tctatagtgatttctacttt

SEQ ID NO: 65003 - DNA, 20 bp, Artificial Sequence
  MKO10065003_A_mmu-mir-3969
  gRNA
tatagtgatttctactttag

SEQ ID NO: 65004 - DNA, 20 bp, Artificial Sequence
  MKO10065004_A_mmu-mir-3969
  gRNA
atagagttgcatggttacag

SEQ ID NO: 65005 - DNA, 20 bp, Artificial Sequence
  MKO10065005_A_mmu-mir-3969
  gRNA
atttagattagctacttaca

SEQ ID NO: 65006 - DNA, 20 bp, Artificial Sequence
  MKO10065006_A_mmu-mir-6415
  gRNA
gacaataatcggagcttttg

SEQ ID NO: 65007 - DNA, 20 bp, Artificial Sequence
  MKO10065007_A_mmu-mir-6415
  gRNA
ttttgagggccccatgcata

SEQ ID NO: 65008 - DNA, 20 bp, Artificial Sequence
  MKO10065008_A_mmu-mir-6415
  gRNA
gacccagcaggccatatgca

SEQ ID NO: 65009 - DNA, 20 bp, Artificial Sequence
  MKO10065009_A_mmu-mir-6415
  gRNA
gccccatgcatatggcctgc

SEQ ID NO: 65010 - DNA, 20 bp, Artificial Sequence
  MKO10065010_A_mmu-mir-1961
  gRNA
aactactacctcatctctca

SEQ ID NO: 65011 - DNA, 20 bp, Artificial Sequence
  MKO10065011_A_mmu-mir-1961
  gRNA
acctcatctctcaaggtata

SEQ ID NO: 65012 - DNA, 20 bp, Artificial Sequence
  MKO10065012_A_mmu-mir-1961
  gRNA
tcatctctcaaggtatatgg

SEQ ID NO: 65013 - DNA, 20 bp, Artificial Sequence
  MKO10065013_A_mmu-mir-1961
  gRNA
ctccatagacgtataggaag

SEQ ID NO: 65014 - DNA, 20 bp, Artificial Sequence
  MKO10065014_A_mmu-mir-703
  gRNA
ctgccacacacaaaaaaaaa

SEQ ID NO: 65015 - DNA, 20 bp, Artificial Sequence
  MKO10065015_A_mmu-mir-703
  gRNA
gtttaataaaagtaaaagac

SEQ ID NO: 65016 - DNA, 20 bp, Artificial Sequence
  MKO10065016_A_mmu-mir-703
  gRNA
acaacattctttccttctga

SEQ ID NO: 65017 - DNA, 20 bp, Artificial Sequence
  MKO10065017_A_mmu-mir-703
  gRNA
tcaaaatcagtactttttaa

SEQ ID NO: 65018 - DNA, 20 bp, Artificial Sequence
  MKO10065018_A_mmu-mir-5619
  gRNA
tgctctctggaagtcactaa

SEQ ID NO: 65019 - DNA, 20 bp, Artificial Sequence
  MKO10065019_A_mmu-mir-5619
  gRNA
gtcactaatggcatttttgt

SEQ ID NO: 65020 - DNA, 20 bp, Artificial Sequence
  MKO10065020_A_mmu-mir-5619
  gRNA
cagaacaacgaaaagctcat

SEQ ID NO: 65021 - DNA, 20 bp, Artificial Sequence
  MKO10065021_A_mmu-mir-5619
  gRNA
ttggtgatttctagcacgac

SEQ ID NO: 65022 - DNA, 20 bp, Artificial Sequence
  MKO10065022_A_mmu-mir-7026
  gRNA
taacatgtgctttctggtct

SEQ ID NO: 65023 - DNA, 20 bp, Artificial Sequence
  MKO10065023_A_mmu-mir-7026
  gRNA
agaccatggggtatatgcag

SEQ ID NO: 65024 - DNA, 20 bp, Artificial Sequence
  MKO10065024_A_mmu-mir-7026
  gRNA
gctgcgtttctgagaccatg

SEQ ID NO: 65025 - DNA, 20 bp, Artificial Sequence
  MKO10065025_A_mmu-mir-7026
  gRNA
tcgctgcgtttctgagacca

SEQ ID NO: 65026 - DNA, 20 bp, Artificial Sequence
  MKO10065026_A_mmu-mir-701
  gRNA
taattagccgctgaaataga

SEQ ID NO: 65027 - DNA, 20 bp, Artificial Sequence
  MKO10065027_A_mmu-mir-701
  gRNA
agcggctaattacttgctca

SEQ ID NO: 65028 - DNA, 20 bp, Artificial Sequence
  MKO10065028_A_mmu-mir-701
  gRNA
ggctgttagcacttgataag

SEQ ID NO: 65029 - DNA, 20 bp, Artificial Sequence
  MKO10065029_A_mmu-mir-701
  gRNA
atagatggattgtatagatg

SEQ ID NO: 65030 - DNA, 20 bp, Artificial Sequence
  MKO10065030_A_mmu-mir-7229
  gRNA
gaaagcgtgcagaaagtcac

SEQ ID NO: 65031 - DNA, 20 bp, Artificial Sequence
  MKO10065031_A_mmu-mir-7229
  gRNA
cactggtctgtgtagccttg

SEQ ID NO: 65032 - DNA, 20 bp, Artificial Sequence
  MKO10065032_A_mmu-mir-7229
  gRNA
gtgtagccttgaggctatcc

SEQ ID NO: 65033 - DNA, 20 bp, Artificial Sequence
  MKO10065033_A_mmu-mir-7229
  gRNA
gcctcagtagtagacatccc

SEQ ID NO: 65034 - DNA, 20 bp, Artificial Sequence
  MKO10065034_A_mmu-mir-7230
  gRNA
cttgagttgagactgtcagt

SEQ ID NO: 65035 - DNA, 20 bp, Artificial Sequence
  MKO10065035_A_mmu-mir-7230
  gRNA
tgtcagtaggtgttgcccga

SEQ ID NO: 65036 - DNA, 20 bp, Artificial Sequence
  MKO10065036_A_mmu-mir-7230
  gRNA
tttctctgagtggcttctgg

SEQ ID NO: 65037 - DNA, 20 bp, Artificial Sequence
  MKO10065037_A_mmu-mir-7230
  gRNA
tgtttctctgagtggcttct

SEQ ID NO: 65038 - DNA, 20 bp, Artificial Sequence
  MKO10065038_A_mmu-mir-7027
  gRNA
aagaaacagcagagcagctg

SEQ ID NO: 65039 - DNA, 20 bp, Artificial Sequence
  MKO10065039_A_mmu-mir-7027
  gRNA
tcgggtttctctcctcttcc

SEQ ID NO: 65040 - DNA, 20 bp, Artificial Sequence
  MKO10065040_A_mmu-mir-7027
  gRNA
aggtacgtaagacctggaag

SEQ ID NO: 65041 - DNA, 20 bp, Artificial Sequence
  MKO10065041_A_mmu-mir-7027
  gRNA
ggtgtgcttttcccctggaa

SEQ ID NO: 65042 - DNA, 20 bp, Artificial Sequence
  MKO10065042_A_mmu-mir-7028
  gRNA
atgcggctgtagctgggctg

SEQ ID NO: 65043 - DNA, 20 bp, Artificial Sequence
  MKO10065043_A_mmu-mir-7028
  gRNA
gctgtagctgggctgaggct

SEQ ID NO: 65044 - DNA, 20 bp, Artificial Sequence
  MKO10065044_A_mmu-mir-7028
  gRNA
gctgggctgaggcttgggtc

SEQ ID NO: 65045 - DNA, 20 bp, Artificial Sequence
  MKO10065045_A_mmu-mir-7028
  gRNA
ccttctcttccccctcggcc

SEQ ID NO: 65046 - DNA, 20 bp, Artificial Sequence
  MKO10065046_A_mmu-mir-6240
  gRNA
aaaaccccaaagcatcgcga

SEQ ID NO: 65047 - DNA, 20 bp, Artificial Sequence
  MKO10065047_A_mmu-mir-6240
  gRNA
caaagcatcgcgaaggccca

SEQ ID NO: 65048 - DNA, 20 bp, Artificial Sequence
  MKO10065048_A_mmu-mir-6240
  gRNA
atttctgcccagtgctctga

SEQ ID NO: 65049 - DNA, 20 bp, Artificial Sequence
  MKO10065049_A_mmu-mir-6240
  gRNA
gaagaaatgtgactctctta

SEQ ID NO: 65050 - DNA, 20 bp, Artificial Sequence
  MKO10065050_A_mmu-mir-7029
  gRNA
gagaggtaagtctggacgct

SEQ ID NO: 65051 - DNA, 20 bp, Artificial Sequence
  MKO10065051_A_mmu-mir-7029
  gRNA
gctgccagcgccctgagctg

SEQ ID NO: 65052 - DNA, 20 bp, Artificial Sequence
  MKO10065052_A_mmu-mir-7029
  gRNA
agagccacagctcagggcgc

SEQ ID NO: 65053 - DNA, 20 bp, Artificial Sequence
  MKO10065053_A_mmu-mir-7029
  gRNA
ctgttggacttcagctgatc

SEQ ID NO: 65054 - DNA, 20 bp, Artificial Sequence
  MKO10065054_A_mmu-mir-7030
  gRNA
gaaatagaaatatcctgggg

SEQ ID NO: 65055 - DNA, 20 bp, Artificial Sequence
  MKO10065055_A_mmu-mir-7030
  gRNA
atagaaatatcctggggagg

SEQ ID NO: 65056 - DNA, 20 bp, Artificial Sequence
  MKO10065056_A_mmu-mir-7030
  gRNA
actagcacagccacctcccc

SEQ ID NO: 65057 - DNA, 20 bp, Artificial Sequence
  MKO10065057_A_mmu-mir-7030
  gRNA
acagagcaaggctgaccccg

SEQ ID NO: 65058 - DNA, 20 bp, Artificial Sequence
  MKO10065058_A_mmu-mir-7031
  gRNA
gagctctaggagagggcaag

SEQ ID NO: 65059 - DNA, 20 bp, Artificial Sequence
  MKO10065059_A_mmu-mir-7031
  gRNA
ctaggagagggcaagagggt

SEQ ID NO: 65060 - DNA, 20 bp, Artificial Sequence
  MKO10065060_A_mmu-mir-7031
  gRNA
caaggctgctcccacccttc

SEQ ID NO: 65061 - DNA, 20 bp, Artificial Sequence
  MKO10065061_A_mmu-mir-7031
  gRNA
tcccacccttcaggcctctc

SEQ ID NO: 65062 - DNA, 20 bp, Artificial Sequence
  MKO10065062_A_mmu-mir-8115
  gRNA
gaactggaactgcaggtggt

SEQ ID NO: 65063 - DNA, 20 bp, Artificial Sequence
  MKO10065063_A_mmu-mir-8115
  gRNA
caggtggttgggagccacca

SEQ ID NO: 65064 - DNA, 20 bp, Artificial Sequence
  MKO10065064_A_mmu-mir-8115
  gRNA
gggagccaccatggtggtgt

SEQ ID NO: 65065 - DNA, 20 bp, Artificial Sequence
  MKO10065065_A_mmu-mir-8115
  gRNA
ttcacttcccaacaccacca

SEQ ID NO: 65066 - DNA, 20 bp, Artificial Sequence
  MKO10065066_A_mmu-mir-7647
  gRNA
aagtgtgtactaccacctcc

SEQ ID NO: 65067 - DNA, 20 bp, Artificial Sequence
  MKO10065067_A_mmu-mir-7647
  gRNA
actaccacctcctggacttt

SEQ ID NO: 65068 - DNA, 20 bp, Artificial Sequence
  MKO10065068_A_mmu-mir-7647
  gRNA
tgctttttaaaaaaaaggcc

SEQ ID NO: 65069 - DNA, 20 bp, Artificial Sequence
  MKO10065069_A_mmu-mir-7647
  gRNA
tttttaaaaaaaaggccagg

SEQ ID NO: 65070 - DNA, 20 bp, Artificial Sequence
  MKO10065070_A_mmu-mir-7032
  gRNA
gtgaggggcgtggcccaggg

SEQ ID NO: 65071 - DNA, 20 bp, Artificial Sequence
  MKO10065071_A_mmu-mir-7032
  gRNA
ggcccagggtggtccccgag

SEQ ID NO: 65072 - DNA, 20 bp, Artificial Sequence
  MKO10065072_A_mmu-mir-7032
  gRNA
cagggtggtccccgagaggg

SEQ ID NO: 65073 - DNA, 20 bp, Artificial Sequence
  MKO10065073_A_mmu-mir-7032
  gRNA
ccgagagggtggtccccaca

SEQ ID NO: 65074 - DNA, 20 bp, Artificial Sequence
  MKO10065074_A_mmu-mir-3965
  gRNA
gctgcagctgagtgcacaga

SEQ ID NO: 65075 - DNA, 20 bp, Artificial Sequence
  MKO10065075_A_mmu-mir-3965
  gRNA
gcttatcagcctgatgttca

SEQ ID NO: 65076 - DNA, 20 bp, Artificial Sequence
  MKO10065076_A_mmu-mir-3965
  gRNA
ctgatgttcaaggcttgctc

SEQ ID NO: 65077 - DNA, 20 bp, Artificial Sequence
  MKO10065077_A_mmu-mir-3965
  gRNA
atgttcaaggcttgctcagg

SEQ ID NO: 65078 - DNA, 20 bp, Artificial Sequence
  MKO10065078_A_mmu-mir-7228
  gRNA
tgaacagatgtcgcagtgtt

SEQ ID NO: 65079 - DNA, 20 bp, Artificial Sequence
  MKO10065079_A_mmu-mir-7228
  gRNA
agtgttcggtctccagtgtt

SEQ ID NO: 65080 - DNA, 20 bp, Artificial Sequence
  MKO10065080_A_mmu-mir-7228
  gRNA
gtctccagtgtttggagctc

SEQ ID NO: 65081 - DNA, 20 bp, Artificial Sequence
  MKO10065081_A_mmu-mir-7228
  gRNA
gaacactgcgacatctgttc

SEQ ID NO: 65082 - DNA, 20 bp, Artificial Sequence
  MKO10065082_A_mmu-mir-7033
  gRNA
gtggaggctgcccaagagaa

SEQ ID NO: 65083 - DNA, 20 bp, Artificial Sequence
  MKO10065083_A_mmu-mir-7033
  gRNA
caagagaatggaggcaggtt

SEQ ID NO: 65084 - DNA, 20 bp, Artificial Sequence
  MKO10065084_A_mmu-mir-7033
  gRNA
gaccctgcccctcagactcc

SEQ ID NO: 65085 - DNA, 20 bp, Artificial Sequence
  MKO10065085_A_mmu-mir-7033
  gRNA
taacctgcctccattctctt

SEQ ID NO: 65086 - DNA, 20 bp, Artificial Sequence
  MKO10065086_A_mmu-mir-7034
  gRNA
cacatgagcacctgtagggt

SEQ ID NO: 65087 - DNA, 20 bp, Artificial Sequence
  MKO10065087_A_mmu-mir-7034
  gRNA
gagcacctgtagggtaggga

SEQ ID NO: 65088 - DNA, 20 bp, Artificial Sequence
  MKO10065088_A_mmu-mir-7034
  gRNA
agggtagggaaggaaggcca

SEQ ID NO: 65089 - DNA, 20 bp, Artificial Sequence
  MKO10065089_A_mmu-mir-7034
  gRNA
ggccaaggtcaggacagtca

SEQ ID NO: 65090 - DNA, 20 bp, Artificial Sequence
  MKO10065090_A_mmu-mir-7035
  gRNA
tctgtgaggggctgggagag

SEQ ID NO: 65091 - DNA, 20 bp, Artificial Sequence
  MKO10065091_A_mmu-mir-7035
  gRNA
gtggctcagaagagagtacc

SEQ ID NO: 65092 - DNA, 20 bp, Artificial Sequence
  MKO10065092_A_mmu-mir-7035
  gRNA
gaagagagtacctggctctg

SEQ ID NO: 65093 - DNA, 20 bp, Artificial Sequence
  MKO10065093_A_mmu-mir-7035
  gRNA
gtacctggctctggggagga

SEQ ID NO: 65094 - DNA, 20 bp, Artificial Sequence
  MKO10065094_A_mmu-mir-721
  gRNA
atagttcttccaagcaggag

SEQ ID NO: 65095 - DNA, 20 bp, Artificial Sequence
  MKO10065095_A_mmu-mir-721
  gRNA
tgaaattctcagaacatccc

SEQ ID NO: 65096 - DNA, 20 bp, Artificial Sequence
  MKO10065096_A_mmu-mir-721
  gRNA
ttgttattgccactcctgct

SEQ ID NO: 65097 - DNA, 20 bp, Artificial Sequence
  MKO10065097_A_mmu-mir-721
  gRNA
aaagggggaaaaaagtacct

SEQ ID NO: 65098 - DNA, 20 bp, Artificial Sequence
  MKO10065098_A_mmu-mir-702
  gRNA
cgtccgggacaaggtgagtg

SEQ ID NO: 65099 - DNA, 20 bp, Artificial Sequence
  MKO10065099_A_mmu-mir-702
  gRNA
ccgggacaaggtgagtgggg

SEQ ID NO: 65100 - DNA, 20 bp, Artificial Sequence
  MKO10065100_A_mmu-mir-702
  gRNA
ggtgagtggggtggttggca

SEQ ID NO: 65101 - DNA, 20 bp, Artificial Sequence
  MKO10065101_A_mmu-mir-702
  gRNA
gttggcatgggttgcccatg

SEQ ID NO: 65102 - DNA, 20 bp, Artificial Sequence
  MKO10065102_A_mmu-mir-8116
  gRNA
agcctggtgttgaggggaga

SEQ ID NO: 65103 - DNA, 20 bp, Artificial Sequence
  MKO10065103_A_mmu-mir-8116
  gRNA
gtgttgaggggagaaggatc

SEQ ID NO: 65104 - DNA, 20 bp, Artificial Sequence
  MKO10065104_A_mmu-mir-8116
  gRNA
gagaaggatccggggctagt

SEQ ID NO: 65105 - DNA, 20 bp, Artificial Sequence
  MKO10065105_A_mmu-mir-8116
  gRNA
ggctagttggcgtcagccaa

SEQ ID NO: 65106 - DNA, 20 bp, Artificial Sequence
  MKO10065106_A_mmu-mir-7036
  gRNA
ggccctgggaggagcggatg

SEQ ID NO: 65107 - DNA, 20 bp, Artificial Sequence
  MKO10065107_A_mmu-mir-7036
  gRNA
tcttccccaccgaaccccgc

SEQ ID NO: 65108 - DNA, 20 bp, Artificial Sequence
  MKO10065108_A_mmu-mir-7036
  gRNA
gtcctcatccgctcctccca

SEQ ID NO: 65109 - DNA, 20 bp, Artificial Sequence
  MKO10065109_A_mmu-mir-7036
  gRNA
ccttccagcggggttcggtg

SEQ ID NO: 65110 - DNA, 20 bp, Artificial Sequence
  MKO10065110_A_mmu-mir-6418
  gRNA
tttggttgtcgtccaggaag

SEQ ID NO: 65111 - DNA, 20 bp, Artificial Sequence
  MKO10065111_A_mmu-mir-6418
  gRNA
atgacaggtaccctggagaa

SEQ ID NO: 65112 - DNA, 20 bp, Artificial Sequence
  MKO10065112_A_mmu-mir-6418
  gRNA
actgcaacctcctttctcca

SEQ ID NO: 65113 - DNA, 20 bp, Artificial Sequence
  MKO10065113_A_mmu-mir-6418
  gRNA
agaggcaagaacacggtcag

SEQ ID NO: 65114 - DNA, 20 bp, Artificial Sequence
  MKO10065114_A_mmu-mir-25
  gRNA
ccgagacaagtgcaatgccc

SEQ ID NO: 65115 - DNA, 20 bp, Artificial Sequence
  MKO10065115_A_mmu-mir-25
  gRNA
cctgggcattgcacttgtct

SEQ ID NO: 65116 - DNA, 20 bp, Artificial Sequence
  MKO10065116_A_mmu-mir-25
  gRNA
caattgctggacgctgccct

SEQ ID NO: 65117 - DNA, 20 bp, Artificial Sequence
  MKO10065117_A_mmu-mir-25
  gRNA
gtgttgagaggcggagactt

SEQ ID NO: 65118 - DNA, 20 bp, Artificial Sequence
  MKO10065118_A_mmu-mir-93
  gRNA
ctatcagaggttgtgtcctg

SEQ ID NO: 65119 - DNA, 20 bp, Artificial Sequence
  MKO10065119_A_mmu-mir-93
  gRNA
gaggttgtgtcctgggggct

SEQ ID NO: 65120 - DNA, 20 bp, Artificial Sequence
  MKO10065120_A_mmu-mir-93
  gRNA
ggaagtgctagctcagcagt

SEQ ID NO: 65121 - DNA, 20 bp, Artificial Sequence
  MKO10065121_A_mmu-mir-93
  gRNA
tgctagctcagcagtaggtc

SEQ ID NO: 65122 - DNA, 20 bp, Artificial Sequence
  MKO10065122_A_mmu-mir-106b
  gRNA
agcagcaagtacccacagtg

SEQ ID NO: 65123 - DNA, 20 bp, Artificial Sequence
  MKO10065123_A_mmu-mir-106b
  gRNA
gtcagcactttagtcccagc

SEQ ID NO: 65124 - DNA, 20 bp, Artificial Sequence
  MKO10065124_A_mmu-mir-106b
  gRNA
cactttagtcccagcagggc

SEQ ID NO: 65125 - DNA, 20 bp, Artificial Sequence
  MKO10065125_A_mmu-mir-106b
  gRNA
gggtacttgctgctccagca

SEQ ID NO: 65126 - DNA, 20 bp, Artificial Sequence
  MKO10065126_A_mmu-mir-339
  gRNA
gtctgtggacagtgcagggg

SEQ ID NO: 65127 - DNA, 20 bp, Artificial Sequence
  MKO10065127_A_mmu-mir-339
  gRNA
tctgtcgccgaggcgctcac

SEQ ID NO: 65128 - DNA, 20 bp, Artificial Sequence
  MKO10065128_A_mmu-mir-339
  gRNA
ggcaggcatacgtgagctcc

SEQ ID NO: 65129 - DNA, 20 bp, Artificial Sequence
  MKO10065129_A_mmu-mir-339
  gRNA
aggcatacgtgagctcctgg

SEQ ID NO: 65130 - DNA, 20 bp, Artificial Sequence
  MKO10065130_A_mmu-mir-7037
  gRNA
aagaaactgcaggtgacatt

SEQ ID NO: 65131 - DNA, 20 bp, Artificial Sequence
  MKO10065131_A_mmu-mir-7037
  gRNA
tgcaggtgacattaggagac

SEQ ID NO: 65132 - DNA, 20 bp, Artificial Sequence
  MKO10065132_A_mmu-mir-7037
  gRNA
acattaggagacaggtggta

SEQ ID NO: 65133 - DNA, 20 bp, Artificial Sequence
  MKO10065133_A_mmu-mir-7037
  gRNA
ggagccaccatgatctcctg

SEQ ID NO: 65134 - DNA, 20 bp, Artificial Sequence
  MKO10065134_A_mmu-mir-7038
  gRNA
atgagaagatgcggtgtaga

SEQ ID NO: 65135 - DNA, 20 bp, Artificial Sequence
  MKO10065135_A_mmu-mir-7038
  gRNA
ctctgtccatctctgtaaga

SEQ ID NO: 65136 - DNA, 20 bp, Artificial Sequence
  MKO10065136_A_mmu-mir-7038
  gRNA
gaagatgcggtgtagaagga

SEQ ID NO: 65137 - DNA, 20 bp, Artificial Sequence
  MKO10065137_A_mmu-mir-7038
  gRNA
ctcctgccttcttacagaga

SEQ ID NO: 65138 - DNA, 20 bp, Artificial Sequence
  MKO10065138_A_mmu-mir-7039
  gRNA
acagtcactcgttagaggga

SEQ ID NO: 65139 - DNA, 20 bp, Artificial Sequence
  MKO10065139_A_mmu-mir-7039
  gRNA
catacactgttctggaaggg

SEQ ID NO: 65140 - DNA, 20 bp, Artificial Sequence
  MKO10065140_A_mmu-mir-7039
  gRNA
tctggaagggagggcagaac

SEQ ID NO: 65141 - DNA, 20 bp, Artificial Sequence
  MKO10065141_A_mmu-mir-7039
  gRNA
aagggagggcagaacaggcg

SEQ ID NO: 65142 - DNA, 20 bp, Artificial Sequence
  MKO10065142_A_mmu-let-7k
  gRNA
tattgttttgtgttgtgttg

SEQ ID NO: 65143 - DNA, 20 bp, Artificial Sequence
  MKO10065143_A_mmu-let-7k
  gRNA
aaaggctctctgtgtactat

SEQ ID NO: 65144 - DNA, 20 bp, Artificial Sequence
  MKO10065144_A_mmu-let-7k
  gRNA
ctctgtgtactataggttag

SEQ ID NO: 65145 - DNA, 20 bp, Artificial Sequence
  MKO10065145_A_mmu-let-7k
  gRNA
tgcacacaacctcctacctc

SEQ ID NO: 65146 - DNA, 20 bp, Artificial Sequence
  MKO10065146_A_mmu-mir-653
  gRNA
aaactccagtgaactcgctt

SEQ ID NO: 65147 - DNA, 20 bp, Artificial Sequence
  MKO10065147_A_mmu-mir-653
  gRNA
agtgaactcgctttggagct

SEQ ID NO: 65148 - DNA, 20 bp, Artificial Sequence
  MKO10065148_A_mmu-mir-653
  gRNA
aagctccaaagcgagttcac

SEQ ID NO: 65149 - DNA, 20 bp, Artificial Sequence
  MKO10065149_A_mmu-mir-653
  gRNA
ggagtttgtttcagtattgc

SEQ ID NO: 65150 - DNA, 20 bp, Artificial Sequence
  MKO10065150_A_mmu-mir-489
  gRNA
cagtttagctgccatatatg

SEQ ID NO: 65151 - DNA, 20 bp, Artificial Sequence
  MKO10065151_A_mmu-mir-489
  gRNA
ccatatatgtggtgtcattc

SEQ ID NO: 65152 - DNA, 20 bp, Artificial Sequence
  MKO10065152_A_mmu-mir-489
  gRNA
atggcagctaaactgttaca

SEQ ID NO: 65153 - DNA, 20 bp, Artificial Sequence
  MKO10065153_A_mmu-mir-489
  gRNA
ccagaatgacaccacatata

SEQ ID NO: 65154 - DNA, 20 bp, Artificial Sequence
  MKO10065154_A_mmu-mir-6370
  gRNA
ttggctgctgatgtcttgta

SEQ ID NO: 65155 - DNA, 20 bp, Artificial Sequence
  MKO10065155_A_mmu-mir-6370
  gRNA
cttgggagcaatgtagcaga

SEQ ID NO: 65156 - DNA, 20 bp, Artificial Sequence
  MKO10065156_A_mmu-mir-6370
  gRNA
catagagatgcaaccaaggc

SEQ ID NO: 65157 - DNA, 20 bp, Artificial Sequence
  MKO10065157_A_mmu-mir-6370
  gRNA
aaccaaggcaggaacagcaa

SEQ ID NO: 65158 - DNA, 20 bp, Artificial Sequence
  MKO10065158_A_mmu-mir-592
  gRNA
cgcatattgacacaatgtca

SEQ ID NO: 65159 - DNA, 20 bp, Artificial Sequence
  MKO10065159_A_mmu-mir-592
  gRNA
aatgtcatggcataatatca

SEQ ID NO: 65160 - DNA, 20 bp, Artificial Sequence
  MKO10065160_A_mmu-mir-592
  gRNA
gatggcacagcgtcatcacg

SEQ ID NO: 65161 - DNA, 20 bp, Artificial Sequence
  MKO10065161_A_mmu-mir-592
  gRNA
tatgcgatgatgtgttgtga

SEQ ID NO: 65162 - DNA, 20 bp, Artificial Sequence
  MKO10065162_A_mmu-mir-129-1
  gRNA
gtctcctttggatctttttg

SEQ ID NO: 65163 - DNA, 20 bp, Artificial Sequence
  MKO10065163_A_mmu-mir-129-1
  gRNA
ctttggatctttttgcggtc

SEQ ID NO: 65164 - DNA, 20 bp, Artificial Sequence
  MKO10065164_A_mmu-mir-129-1
  gRNA
cttaccccaaaaagtatcta

SEQ ID NO: 65165 - DNA, 20 bp, Artificial Sequence
  MKO10065165_A_mmu-mir-129-1
  gRNA
cagaccgcaaaaagatccaa

SEQ ID NO: 65166 - DNA, 20 bp, Artificial Sequence
  MKO10065166_A_mmu-mir-182
  gRNA
ctcagcacttacaccatagt

SEQ ID NO: 65167 - DNA, 20 bp, Artificial Sequence
  MKO10065167_A_mmu-mir-182
  gRNA
gttggcaagtctagaaccac

SEQ ID NO: 65168 - DNA, 20 bp, Artificial Sequence
  MKO10065168_A_mmu-mir-182
  gRNA
agttctaccattgccaaaaa

SEQ ID NO: 65169 - DNA, 20 bp, Artificial Sequence
  MKO10065169_A_mmu-mir-182
  gRNA
tctaccattgccaaaaatgg

SEQ ID NO: 65170 - DNA, 20 bp, Artificial Sequence
  MKO10065170_A_mmu-mir-96
  gRNA
gcagcccgcttttcccatat

SEQ ID NO: 65171 - DNA, 20 bp, Artificial Sequence
  MKO10065171_A_mmu-mir-96
  gRNA
gccaaaatcggccaagcaga

SEQ ID NO: 65172 - DNA, 20 bp, Artificial Sequence
  MKO10065172_A_mmu-mir-96
  gRNA
atcggccaagcagatggtac

SEQ ID NO: 65173 - DNA, 20 bp, Artificial Sequence
  MKO10065173_A_mmu-mir-96
  gRNA
atgggaaaagcgggctgctg

SEQ ID NO: 65174 - DNA, 20 bp, Artificial Sequence
  MKO10065174_A_mmu-mir-183
  gRNA
atctgtctctgctctgttta

SEQ ID NO: 65175 - DNA, 20 bp, Artificial Sequence
  MKO10065175_A_mmu-mir-183
  gRNA
tcctgtcctgtgtatggcac

SEQ ID NO: 65176 - DNA, 20 bp, Artificial Sequence
  MKO10065176_A_mmu-mir-183
  gRNA
ctgctctgtttatggccctt

SEQ ID NO: 65177 - DNA, 20 bp, Artificial Sequence
  MKO10065177_A_mmu-mir-183
  gRNA
attctaccagtgccatacac

SEQ ID NO: 65178 - DNA, 20 bp, Artificial Sequence
  MKO10065178_A_mmu-mir-335
  gRNA
tggaaaagatttcttttggg

SEQ ID NO: 65179 - DNA, 20 bp, Artificial Sequence
  MKO10065179_A_mmu-mir-335
  gRNA
gaaaagatttcttttgggcg

SEQ ID NO: 65180 - DNA, 20 bp, Artificial Sequence
  MKO10065180_A_mmu-mir-335
  gRNA
ttgctcctgaccccctctca

SEQ ID NO: 65181 - DNA, 20 bp, Artificial Sequence
  MKO10065181_A_mmu-mir-335
  gRNA
tcaggagcaataatgaaaaa

SEQ ID NO: 65182 - DNA, 20 bp, Artificial Sequence
  MKO10065182_A_mmu-mir-29a
  gRNA
tcattataaccgatttcaga

SEQ ID NO: 65183 - DNA, 20 bp, Artificial Sequence
  MKO10065183_A_mmu-mir-29a
  gRNA
tttctagcaccatctgaaat

SEQ ID NO: 65184 - DNA, 20 bp, Artificial Sequence
  MKO10065184_A_mmu-mir-29a
  gRNA
aagaaatcagtcatcctcta

SEQ ID NO: 65185 - DNA, 20 bp, Artificial Sequence
  MKO10065185_A_mmu-mir-29a
  gRNA
gaaatcagtcatcctctaag

SEQ ID NO: 65186 - DNA, 20 bp, Artificial Sequence
  MKO10065186_A_mmu-mir-29b-1
  gRNA
ccaagaacactgatttcaaa

SEQ ID NO: 65187 - DNA, 20 bp, Artificial Sequence
  MKO10065187_A_mmu-mir-29b-1
  gRNA
ccatttgaaatcagtgttct

SEQ ID NO: 65188 - DNA, 20 bp, Artificial Sequence
  MKO10065188_A_mmu-mir-29b-1
  gRNA
aggaagctggtttcatatgg

SEQ ID NO: 65189 - DNA, 20 bp, Artificial Sequence
  MKO10065189_A_mmu-mir-29b-1
  gRNA
ttcaggaagctggtttcata

SEQ ID NO: 65190 - DNA, 20 bp, Artificial Sequence
  MKO10065190_A_mmu-mir-490
  gRNA
aagttcattgttcgacacca

SEQ ID NO: 65191 - DNA, 20 bp, Artificial Sequence
  MKO10065191_A_mmu-mir-490
  gRNA
gttcgacaccatggatctcc

SEQ ID NO: 65192 - DNA, 20 bp, Artificial Sequence
  MKO10065192_A_mmu-mir-490
  gRNA
cgacaccatggatctccagg

SEQ ID NO: 65193 - DNA, 20 bp, Artificial Sequence
  MKO10065193_A_mmu-mir-490
  gRNA
ttagatatacaccaacctgg

SEQ ID NO: 65194 - DNA, 20 bp, Artificial Sequence
  MKO10065194_A_mmu-mir-7670
  gRNA
ttgctttgagttgattcaga

SEQ ID NO: 65195 - DNA, 20 bp, Artificial Sequence
  MKO10065195_A_mmu-mir-7670
  gRNA
gttgattcagatgggcagat

SEQ ID NO: 65196 - DNA, 20 bp, Artificial Sequence
  MKO10065196_A_mmu-mir-7670
  gRNA
gtagtctttgcacatgatgc

SEQ ID NO: 65197 - DNA, 20 bp, Artificial Sequence
  MKO10065197_A_mmu-mir-7670
  gRNA
cttctacagatattcagaaa

SEQ ID NO: 65198 - DNA, 20 bp, Artificial Sequence
  MKO10065198_A_mmu-mir-704
  gRNA
aggagcagagcacatgtctg

SEQ ID NO: 65199 - DNA, 20 bp, Artificial Sequence
  MKO10065199_A_mmu-mir-704
  gRNA
agacatgtgctctgctccta

SEQ ID NO: 65200 - DNA, 20 bp, Artificial Sequence
  MKO10065200_A_mmu-mir-704
  gRNA
tcatgtagtcaacaatccct

SEQ ID NO: 65201 - DNA, 20 bp, Artificial Sequence
  MKO10065201_A_mmu-mir-704
  gRNA
ctctagctcccagctgtgca

SEQ ID NO: 65202 - DNA, 20 bp, Artificial Sequence
  MKO10065202_A_mmu-mir-6371
  gRNA
gaagtagtttgtcatgctgg

SEQ ID NO: 65203 - DNA, 20 bp, Artificial Sequence
  MKO10065203_A_mmu-mir-6371
  gRNA
gttcatttaggcagttcaag

SEQ ID NO: 65204 - DNA, 20 bp, Artificial Sequence
  MKO10065204_A_mmu-mir-6371
  gRNA
caagtggcttgaagctcttc

SEQ ID NO: 65205 - DNA, 20 bp, Artificial Sequence
  MKO10065205_A_mmu-mir-6371
  gRNA
gatcagcccagctacatgat

SEQ ID NO: 65206 - DNA, 20 bp, Artificial Sequence
  MKO10065206_A_mmu-mir-148a
  gRNA
acttctatcatactcagagt

SEQ ID NO: 65207 - DNA, 20 bp, Artificial Sequence
  MKO10065207_A_mmu-mir-148a
  gRNA
aactttgtctctagaggctg

SEQ ID NO: 65208 - DNA, 20 bp, Artificial Sequence
  MKO10065208_A_mmu-mir-148a
  gRNA
ccagaggaagacagccagtt

SEQ ID NO: 65209 - DNA, 20 bp, Artificial Sequence
  MKO10065209_A_mmu-mir-148a
  gRNA
tttgtctcaaaagaccaaac

SEQ ID NO: 65210 - DNA, 20 bp, Artificial Sequence
  MKO10065210_A_mmu-mir-196b
  gRNA
gtgtcgtgctgtcgagagaa

SEQ ID NO: 65211 - DNA, 20 bp, Artificial Sequence
  MKO10065211_A_mmu-mir-196b
  gRNA
cccgcagcatcagaactggt

SEQ ID NO: 65212 - DNA, 20 bp, Artificial Sequence
  MKO10065212_A_mmu-mir-196b
  gRNA
gctttcaactgaagtaatga

SEQ ID NO: 65213 - DNA, 20 bp, Artificial Sequence
  MKO10065213_A_mmu-mir-196b
  gRNA
tcgtgctgtcgagagaaagg

SEQ ID NO: 65214 - DNA, 20 bp, Artificial Sequence
  MKO10065214_A_mmu-mir-8112
  gRNA
ctcccaccccgcctgctctg

SEQ ID NO: 65215 - DNA, 20 bp, Artificial Sequence
  MKO10065215_A_mmu-mir-8112
  gRNA
ccaccccgcctgctctgcgg

SEQ ID NO: 65216 - DNA, 20 bp, Artificial Sequence
  MKO10065216_A_mmu-mir-8112
  gRNA
ccccgcctgctctgcggcgg

SEQ ID NO: 65217 - DNA, 20 bp, Artificial Sequence
  MKO10065217_A_mmu-mir-8112
  gRNA
cgcctgctctgcggcggagg

SEQ ID NO: 65218 - DNA, 20 bp, Artificial Sequence
  MKO10065218_A_mmu-mir-7232
  gRNA
tgtgcttgctacgaaagcct

SEQ ID NO: 65219 - DNA, 20 bp, Artificial Sequence
  MKO10065219_A_mmu-mir-7232
  gRNA
catggatgattgtttttcca

SEQ ID NO: 65220 - DNA, 20 bp, Artificial Sequence
  MKO10065220_A_mmu-mir-7232
  gRNA
cttggttgaattcgactttg

SEQ ID NO: 65221 - DNA, 20 bp, Artificial Sequence
  MKO10065221_A_mmu-mir-7232
  gRNA
gtcttggttgaattcgactt

SEQ ID NO: 65222 - DNA, 20 bp, Artificial Sequence
  MKO10065222_A_mmu-mir-468
  gRNA
tgatgtgcgtgtgtctgtct

SEQ ID NO: 65223 - DNA, 20 bp, Artificial Sequence
  MKO10065223_A_mmu-mir-468
  gRNA
agaaagactgataagaaact

SEQ ID NO: 65224 - DNA, 20 bp, Artificial Sequence
  MKO10065224_A_mmu-mir-468
  gRNA
gtttcttatcagtctttctc

SEQ ID NO: 65225 - DNA, 20 bp, Artificial Sequence
  MKO10065225_A_mmu-mir-468
  gRNA
tgtgcgtgtgtctgtctggg

SEQ ID NO: 65226 - DNA, 20 bp, Artificial Sequence
  MKO10065226_A_mmu-mir-7040
  gRNA
gtctcccatacggagggaga

SEQ ID NO: 65227 - DNA, 20 bp, Artificial Sequence
  MKO10065227_A_mmu-mir-7040
  gRNA
tcccatacggagggagatgg

SEQ ID NO: 65228 - DNA, 20 bp, Artificial Sequence
  MKO10065228_A_mmu-mir-7040
  gRNA
aagcagctacgtgagagaga

SEQ ID NO: 65229 - DNA, 20 bp, Artificial Sequence
  MKO10065229_A_mmu-mir-7040
  gRNA
agagaagccagtctcccata

SEQ ID NO: 65230 - DNA, 20 bp, Artificial Sequence
  MKO10065230_A_mmu-mir-3470a
  gRNA
tgcctttaatcccagcactc

SEQ ID NO: 65231 - DNA, 20 bp, Artificial Sequence
  MKO10065231_A_mmu-mir-3470a
  gRNA
ctttaatcccagcactcagg

SEQ ID NO: 65232 - DNA, 20 bp, Artificial Sequence
  MKO10065232_A_mmu-mir-3470a
  gRNA
tcccagcactcaggaggcag

SEQ ID NO: 65233 - DNA, 20 bp, Artificial Sequence
  MKO10065233_A_mmu-mir-3470a
  gRNA
agcactcaggaggcagaggc

SEQ ID NO: 65234 - DNA, 20 bp, Artificial Sequence
  MKO10065234_A_mmu-mir-6374
  gRNA
acttcttacgtagcctgggt

SEQ ID NO: 65235 - DNA, 20 bp, Artificial Sequence
  MKO10065235_A_mmu-mir-6374
  gRNA
ttttcttaggtgtttgaatg

SEQ ID NO: 65236 - DNA, 20 bp, Artificial Sequence
  MKO10065236_A_mmu-mir-6374
  gRNA
ggttttcttaggtgtttgaa

SEQ ID NO: 65237 - DNA, 20 bp, Artificial Sequence
  MKO10065237_A_mmu-mir-6374
  gRNA
aaaactattatggttttctt

SEQ ID NO: 65238 - DNA, 20 bp, Artificial Sequence
  MKO10065238_A_mmu-mir-705
  gRNA
gggtttcatgttagggaggt

SEQ ID NO: 65239 - DNA, 20 bp, Artificial Sequence
  MKO10065239_A_mmu-mir-705
  gRNA
ctcccaccactactgggaca

SEQ ID NO: 65240 - DNA, 20 bp, Artificial Sequence
  MKO10065240_A_mmu-mir-705
  gRNA
ggaggtggggtgggcacaga

SEQ ID NO: 65241 - DNA, 20 bp, Artificial Sequence
  MKO10065241_A_mmu-mir-705
  gRNA
gtagtggtgggaggtggggt

SEQ ID NO: 65242 - DNA, 20 bp, Artificial Sequence
  MKO10065242_A_mmu-mir-6375
  gRNA
gctgactgtattccaaagtg

SEQ ID NO: 65243 - DNA, 20 bp, Artificial Sequence
  MKO10065243_A_mmu-mir-6375
  gRNA
tggctgactgtattccaaag

SEQ ID NO: 65244 - DNA, 20 bp, Artificial Sequence
  MKO10065244_A_mmu-mir-6375
  gRNA
aactccaggcatgtgtgaat

SEQ ID NO: 65245 - DNA, 20 bp, Artificial Sequence
  MKO10065245_A_mmu-mir-6375
  gRNA
ccaacagaaagtttacactg

SEQ ID NO: 65246 - DNA, 20 bp, Artificial Sequence
  MKO10065246_A_mmu-mir-6376
  gRNA
ctgagcattagaaactgtga

SEQ ID NO: 65247 - DNA, 20 bp, Artificial Sequence
  MKO10065247_A_mmu-mir-6376
  gRNA
ctgtgatgggcgagcagtca

SEQ ID NO: 65248 - DNA, 20 bp, Artificial Sequence
  MKO10065248_A_mmu-mir-6376
  gRNA
ctccaattggccacactgtg

SEQ ID NO: 65249 - DNA, 20 bp, Artificial Sequence
  MKO10065249_A_mmu-mir-6376
  gRNA
gccacactgtgaggaagtca

SEQ ID NO: 65250 - DNA, 20 bp, Artificial Sequence
  MKO10065250_A_mmu-mir-7041
  gRNA
atagtgcctctgagagggaa

SEQ ID NO: 65251 - DNA, 20 bp, Artificial Sequence
  MKO10065251_A_mmu-mir-7041
  gRNA
tgagggaagaagagaaccag

SEQ ID NO: 65252 - DNA, 20 bp, Artificial Sequence
  MKO10065252_A_mmu-mir-7041
  gRNA
gagtctccattccctctcag

SEQ ID NO: 65253 - DNA, 20 bp, Artificial Sequence
  MKO10065253_A_mmu-mir-7041
  gRNA
ttccctctcagaggcactat

SEQ ID NO: 65254 - DNA, 20 bp, Artificial Sequence
  MKO10065254_A_mmu-mir-6373
  gRNA
atttttcattcattttcctg

SEQ ID NO: 65255 - DNA, 20 bp, Artificial Sequence
  MKO10065255_A_mmu-mir-6373
  gRNA
gctttatgggaatatctagg

SEQ ID NO: 65256 - DNA, 20 bp, Artificial Sequence
  MKO10065256_A_mmu-mir-6373
  gRNA
tatctaggaggtgaagattg

SEQ ID NO: 65257 - DNA, 20 bp, Artificial Sequence
  MKO10065257_A_mmu-mir-6373
  gRNA
agatattcccataaagccac

SEQ ID NO: 65258 - DNA, 20 bp, Artificial Sequence
  MKO10065258_A_mmu-mir-7661
  gRNA
acatgagaaagaaagaaacc

SEQ ID NO: 65259 - DNA, 20 bp, Artificial Sequence
  MKO10065259_A_mmu-mir-7661
  gRNA
caagagctactttaaactcc

SEQ ID NO: 65260 - DNA, 20 bp, Artificial Sequence
  MKO10065260_A_mmu-mir-7661
  gRNA
cagagagaaactgggagtca

SEQ ID NO: 65261 - DNA, 20 bp, Artificial Sequence
  MKO10065261_A_mmu-mir-7661
  gRNA
accacaagcagagagaaact

SEQ ID NO: 65262 - DNA, 20 bp, Artificial Sequence
  MKO10065262_A_mmu-mir-7042
  gRNA
aaagaattagagacagcaga

SEQ ID NO: 65263 - DNA, 20 bp, Artificial Sequence
  MKO10065263_A_mmu-mir-7042
  gRNA
ttgtccctttgttttctctc

SEQ ID NO: 65264 - DNA, 20 bp, Artificial Sequence
  MKO10065264_A_mmu-mir-7042
  gRNA
aacacctgagagaaaacaaa

SEQ ID NO: 65265 - DNA, 20 bp, Artificial Sequence
  MKO10065265_A_mmu-mir-7042
  gRNA
ttttctctcaggtgtttgag

SEQ ID NO: 65266 - DNA, 20 bp, Artificial Sequence
  MKO10065266_A_mmu-mir-7660
  gRNA
gggcttgggatcctttgccc

SEQ ID NO: 65267 - DNA, 20 bp, Artificial Sequence
  MKO10065267_A_mmu-mir-7660
  gRNA
ctaactagatctgtaagtga

SEQ ID NO: 65268 - DNA, 20 bp, Artificial Sequence
  MKO10065268_A_mmu-mir-7660
  gRNA
gagatctgaagccagggcaa

SEQ ID NO: 65269 - DNA, 20 bp, Artificial Sequence
  MKO10065269_A_mmu-mir-7660
  gRNA
cttacagatctagttagtga

SEQ ID NO: 65270 - DNA, 20 bp, Artificial Sequence
  MKO10065270_A_mmu-mir-7043
  gRNA
cttcctttctgaaaacagag

SEQ ID NO: 65271 - DNA, 20 bp, Artificial Sequence
  MKO10065271_A_mmu-mir-7043
  gRNA
aaatgcctctctgctttcac

SEQ ID NO: 65272 - DNA, 20 bp, Artificial Sequence
  MKO10065272_A_mmu-mir-7043
  gRNA
tcctgcctgtgaaagcagag

SEQ ID NO: 65273 - DNA, 20 bp, Artificial Sequence
  MKO10065273_A_mmu-mir-7043
  gRNA
gcctctctgctttcacaggc

SEQ ID NO: 65274 - DNA, 20 bp, Artificial Sequence
  MKO10065274_A_mmu-mir-7044
  gRNA
cgtgagatggggctcttgtg

SEQ ID NO: 65275 - DNA, 20 bp, Artificial Sequence
  MKO10065275_A_mmu-mir-7044
  gRNA
gagatggggctcttgtgtgg

SEQ ID NO: 65276 - DNA, 20 bp, Artificial Sequence
  MKO10065276_A_mmu-mir-7044
  gRNA
atggggctcttgtgtggtgg

SEQ ID NO: 65277 - DNA, 20 bp, Artificial Sequence
  MKO10065277_A_mmu-mir-7044
  gRNA
gggctcttgtgtggtggtgg

SEQ ID NO: 65278 - DNA, 20 bp, Artificial Sequence
  MKO10065278_A_mmu-mir-706
  gRNA
gtttttttgttttttgagac

SEQ ID NO: 65279 - DNA, 20 bp, Artificial Sequence
  MKO10065279_A_mmu-mir-706
  gRNA
gtttattttgttttttgaga

SEQ ID NO: 65280 - DNA, 20 bp, Artificial Sequence
  MKO10065280_A_mmu-mir-706
  gRNA
caaacaaaattacttttagt

SEQ ID NO: 65281 - DNA, 20 bp, Artificial Sequence
  MKO10065281_A_mmu-mir-706
  gRNA
agggtttctctgtatagccc

SEQ ID NO: 65282 - DNA, 20 bp, Artificial Sequence
  MKO10065282_A_mmu-mir-7231
  gRNA
atgccccagtgttccccaaa

SEQ ID NO: 65283 - DNA, 20 bp, Artificial Sequence
  MKO10065283_A_mmu-mir-7231
  gRNA
gcaagttaggtctgagcatt

SEQ ID NO: 65284 - DNA, 20 bp, Artificial Sequence
  MKO10065284_A_mmu-mir-7231
  gRNA
tgtgtccctttggggaacac

SEQ ID NO: 65285 - DNA, 20 bp, Artificial Sequence
  MKO10065285_A_mmu-mir-7231
  gRNA
tgtccctttggggaacactg

SEQ ID NO: 65286 - DNA, 20 bp, Artificial Sequence
  MKO10065286_A_mmu-mir-141
  gRNA
catctttaccagacagtgtt

SEQ ID NO: 65287 - DNA, 20 bp, Artificial Sequence
  MKO10065287_A_mmu-mir-141
  gRNA
tcaaccatccaacactgcac

SEQ ID NO: 65288 - DNA, 20 bp, Artificial Sequence
  MKO10065288_A_mmu-mir-141
  gRNA
ctaacactgtctggtaaaga

SEQ ID NO: 65289 - DNA, 20 bp, Artificial Sequence
  MKO10065289_A_mmu-mir-141
  gRNA
atgaagctcctaacactgtc

SEQ ID NO: 65290 - DNA, 20 bp, Artificial Sequence
  MKO10065290_A_mmu-mir-200c
  gRNA
caggggcctccatcattacc

SEQ ID NO: 65291 - DNA, 20 bp, Artificial Sequence
  MKO10065291_A_mmu-mir-200c
  gRNA
aaccagcacccaaacactgc

SEQ ID NO: 65292 - DNA, 20 bp, Artificial Sequence
  MKO10065292_A_mmu-mir-200c
  gRNA
tgggagtctctaatactgcc

SEQ ID NO: 65293 - DNA, 20 bp, Artificial Sequence
  MKO10065293_A_mmu-mir-200c
  gRNA
aaacactgctgggtaagacg

SEQ ID NO: 65294 - DNA, 20 bp, Artificial Sequence
  MKO10065294_A_mmu-mir-7045
  gRNA
gcggaaagagcgggtggggg

SEQ ID NO: 65295 - DNA, 20 bp, Artificial Sequence
  MKO10065295_A_mmu-mir-7045
  gRNA
ggaaagagcgggtgggggag

SEQ ID NO: 65296 - DNA, 20 bp, Artificial Sequence
  MKO10065296_A_mmu-mir-7045
  gRNA
agtcactgtgcgggggaggg

SEQ ID NO: 65297 - DNA, 20 bp, Artificial Sequence
  MKO10065297_A_mmu-mir-7045
  gRNA
cgagtcactgtgcgggggag

SEQ ID NO: 65298 - DNA, 20 bp, Artificial Sequence
  MKO10065298_A_mmu-mir-3098
  gRNA
ggccctccacacattgtggt

SEQ ID NO: 65299 - DNA, 20 bp, Artificial Sequence
  MKO10065299_A_mmu-mir-3098
  gRNA
ggagtcctaacagcaggagt

SEQ ID NO: 65300 - DNA, 20 bp, Artificial Sequence
  MKO10065300_A_mmu-mir-3098
  gRNA
taggaccctttccccacaac

SEQ ID NO: 65301 - DNA, 20 bp, Artificial Sequence
  MKO10065301_A_mmu-mir-3098
  gRNA
aaggcaggcagcagaagcag

SEQ ID NO: 65302 - DNA, 20 bp, Artificial Sequence
  MKO10065302_A_mmu-mir-8113
  gRNA
agttgcggataagaaaacct

SEQ ID NO: 65303 - DNA, 20 bp, Artificial Sequence
  MKO10065303_A_mmu-mir-8113
  gRNA
ataagaaaaccttgggagag

SEQ ID NO: 65304 - DNA, 20 bp, Artificial Sequence
  MKO10065304_A_mmu-mir-8113
  gRNA
ccttgggagagaggagagcc

SEQ ID NO: 65305 - DNA, 20 bp, Artificial Sequence
  MKO10065305_A_mmu-mir-8113
  gRNA
accacagatctttagagacc

SEQ ID NO: 65306 - DNA, 20 bp, Artificial Sequence
  MKO10065306_A_mmu-mir-7233
  gRNA
ttgcaaggcagtagacctaa

SEQ ID NO: 65307 - DNA, 20 bp, Artificial Sequence
  MKO10065307_A_mmu-mir-7233
  gRNA
agaagttagggacagataga

SEQ ID NO: 65308 - DNA, 20 bp, Artificial Sequence
  MKO10065308_A_mmu-mir-7233
  gRNA
tttaggtctactgccttgca

SEQ ID NO: 65309 - DNA, 20 bp, Artificial Sequence
  MKO10065309_A_mmu-mir-7233
  gRNA
gatctatattgtctgccttt

SEQ ID NO: 65310 - DNA, 20 bp, Artificial Sequence
  MKO10065310_A_mmu-mir-7649
  gRNA
atgtcagaaacaagcagtgc

SEQ ID NO: 65311 - DNA, 20 bp, Artificial Sequence
  MKO10065311_A_mmu-mir-7649
  gRNA
tgacagcagtgctgtagaca

SEQ ID NO: 65312 - DNA, 20 bp, Artificial Sequence
  MKO10065312_A_mmu-mir-680-1
  gRNA
gaagtgggcatctgctgaca

SEQ ID NO: 65313 - DNA, 20 bp, Artificial Sequence
  MKO10065313_A_mmu-mir-680-1
  gRNA
agtgggcatctgctgacatg

SEQ ID NO: 65314 - DNA, 20 bp, Artificial Sequence
  MKO10065314_A_mmu-mir-680-1
  gRNA
cgaagtcaggcgccaggaag

SEQ ID NO: 65315 - DNA, 20 bp, Artificial Sequence
  MKO10065315_A_mmu-mir-680-1
  gRNA
atcgatcctcttgacagcct

SEQ ID NO: 65316 - DNA, 20 bp, Artificial Sequence
  MKO10065316_A_mmu-mir-290a
  gRNA
gtctggaccgcctcatcttg

SEQ ID NO: 65317 - DNA, 20 bp, Artificial Sequence
  MKO10065317_A_mmu-mir-290a
  gRNA
atcttgcggtactcaaacta

SEQ ID NO: 65318 - DNA, 20 bp, Artificial Sequence
  MKO10065318_A_mmu-mir-290a
  gRNA
cttgcggtactcaaactatg

SEQ ID NO: 65319 - DNA, 20 bp, Artificial Sequence
  MKO10065319_A_mmu-mir-290a
  gRNA
cgcctagttttaagccccgc

SEQ ID NO: 65320 - DNA, 20 bp, Artificial Sequence
  MKO10065320_A_mmu-mir-290b
  gRNA
atcttgcggtactcaaacta

SEQ ID NO: 65321 - DNA, 20 bp, Artificial Sequence
  MKO10065321_A_mmu-mir-290b
  gRNA
aaccggcggggcttaaaact

SEQ ID NO: 65322 - DNA, 20 bp, Artificial Sequence
  MKO10065322_A_mmu-mir-290b
  gRNA
cttgcggtactcaaactatg

SEQ ID NO: 65323 - DNA, 20 bp, Artificial Sequence
  MKO10065323_A_mmu-mir-290b
  gRNA
cgcctagttttaagccccgc

SEQ ID NO: 65324 - DNA, 20 bp, Artificial Sequence
  MKO10065324_A_mmu-mir-291a
  gRNA
gagctgttacacctatgtag

SEQ ID NO: 65325 - DNA, 20 bp, Artificial Sequence
  MKO10065325_A_mmu-mir-291a
  gRNA
ctatgtagcggccatcaaag

SEQ ID NO: 65326 - DNA, 20 bp, Artificial Sequence
  MKO10065326_A_mmu-mir-291a
  gRNA
tgtagcggccatcaaagtgg

SEQ ID NO: 65327 - DNA, 20 bp, Artificial Sequence
  MKO10065327_A_mmu-mir-291a
  gRNA
ccactttgtgtgccactgca

SEQ ID NO: 65328 - DNA, 20 bp, Artificial Sequence
  MKO10065328_A_mmu-mir-292
  gRNA
ccagcctgtgatactcaaac

SEQ ID NO: 65329 - DNA, 20 bp, Artificial Sequence
  MKO10065329_A_mmu-mir-292
  gRNA
actcaaactgggggctcttt

SEQ ID NO: 65330 - DNA, 20 bp, Artificial Sequence
  MKO10065330_A_mmu-mir-292
  gRNA
gggctcttttggattttcat

SEQ ID NO: 65331 - DNA, 20 bp, Artificial Sequence
  MKO10065331_A_mmu-mir-292
  gRNA
atcggaagaaaagtgccgcc

SEQ ID NO: 65332 - DNA, 20 bp, Artificial Sequence
  MKO10065332_A_mmu-mir-292b
  gRNA
ccagcctgtgatactcaaac

SEQ ID NO: 65333 - DNA, 20 bp, Artificial Sequence
  MKO10065333_A_mmu-mir-292b
  gRNA
actcaaactgggggctcttt

SEQ ID NO: 65334 - DNA, 20 bp, Artificial Sequence
  MKO10065334_A_mmu-mir-292b
  gRNA
gggctcttttggattttcat

SEQ ID NO: 65335 - DNA, 20 bp, Artificial Sequence
  MKO10065335_A_mmu-mir-292b
  gRNA
atcggaagaaaagtgccgcc

SEQ ID NO: 65336 - DNA, 20 bp, Artificial Sequence
  MKO10065336_A_mmu-mir-291b
  gRNA
acatacagtgtcgatcaaag

SEQ ID NO: 65337 - DNA, 20 bp, Artificial Sequence
  MKO10065337_A_mmu-mir-291b
  gRNA
tacagtgtcgatcaaagtgg

SEQ ID NO: 65338 - DNA, 20 bp, Artificial Sequence
  MKO10065338_A_mmu-mir-291b
  gRNA
caaagtggaggccctctccg

SEQ ID NO: 65339 - DNA, 20 bp, Artificial Sequence
  MKO10065339_A_mmu-mir-291b
  gRNA
ttcccgccaagccgcggaga

SEQ ID NO: 65340 - DNA, 20 bp, Artificial Sequence
  MKO10065340_A_mmu-mir-293
  gRNA
tgtggaaatgcttcaatctg

SEQ ID NO: 65341 - DNA, 20 bp, Artificial Sequence
  MKO10065341_A_mmu-mir-293
  gRNA
gccaactgcagtttctcaat

SEQ ID NO: 65342 - DNA, 20 bp, Artificial Sequence
  MKO10065342_A_mmu-mir-293
  gRNA
gccgattgagaaactgcagt

SEQ ID NO: 65343 - DNA, 20 bp, Artificial Sequence
  MKO10065343_A_mmu-mir-293
  gRNA
cagattgaagcatttccaca

SEQ ID NO: 65344 - DNA, 20 bp, Artificial Sequence
  MKO10065344_A_mmu-mir-294
  gRNA
ccatatagccatactcaaaa

SEQ ID NO: 65345 - DNA, 20 bp, Artificial Sequence
  MKO10065345_A_mmu-mir-294
  gRNA
tatagccatactcaaaatgg

SEQ ID NO: 65346 - DNA, 20 bp, Artificial Sequence
  MKO10065346_A_mmu-mir-294
  gRNA
ccattttgagtatggctata

SEQ ID NO: 65347 - DNA, 20 bp, Artificial Sequence
  MKO10065347_A_mmu-mir-294
  gRNA
tagggcctccattttgagta

SEQ ID NO: 65348 - DNA, 20 bp, Artificial Sequence
  MKO10065348_A_mmu-mir-295
  gRNA
atcttggtgagactcaaatg

SEQ ID NO: 65349 - DNA, 20 bp, Artificial Sequence
  MKO10065349_A_mmu-mir-295
  gRNA
cttggtgagactcaaatgtg

SEQ ID NO: 65350 - DNA, 20 bp, Artificial Sequence
  MKO10065350_A_mmu-mir-295
  gRNA
tcaaatgtggggcacacttc

SEQ ID NO: 65351 - DNA, 20 bp, Artificial Sequence
  MKO10065351_A_mmu-mir-295
  gRNA
ctacttttgagtctctcctg

SEQ ID NO: 65352 - DNA, 20 bp, Artificial Sequence
  MKO10065352_A_mmu-mir-3572
  gRNA
caagtaagtggagaccagtt

SEQ ID NO: 65353 - DNA, 20 bp, Artificial Sequence
  MKO10065353_A_mmu-mir-3572
  gRNA
agtaagtggagaccagtttg

SEQ ID NO: 65354 - DNA, 20 bp, Artificial Sequence
  MKO10065354_A_mmu-mir-3572
  gRNA
tggagaccagtttggggaac

SEQ ID NO: 65355 - DNA, 20 bp, Artificial Sequence
  MKO10065355_A_mmu-mir-3572
  gRNA
ccagtttggggaacagggca

SEQ ID NO: 65356 - DNA, 20 bp, Artificial Sequence
  MKO10065356_A_mmu-mir-3099
  gRNA
tacgcacataggctagagag

SEQ ID NO: 65357 - DNA, 20 bp, Artificial Sequence
  MKO10065357_A_mmu-mir-3099
  gRNA
cacataggctagagagaggt

SEQ ID NO: 65358 - DNA, 20 bp, Artificial Sequence
  MKO10065358_A_mmu-mir-3099
  gRNA
cataggctagagagaggttg

SEQ ID NO: 65359 - DNA, 20 bp, Artificial Sequence
  MKO10065359_A_mmu-mir-3099
  gRNA
ctagagagaggttggggatg

SEQ ID NO: 65360 - DNA, 20 bp, Artificial Sequence
  MKO10065360_A_mmu-mir-5620
  gRNA
tgggaaagctgtcacgaggc

SEQ ID NO: 65361 - DNA, 20 bp, Artificial Sequence
  MKO10065361_A_mmu-mir-5620
  gRNA
ggaaagctgtcacgaggcag

SEQ ID NO: 65362 - DNA, 20 bp, Artificial Sequence
  MKO10065362_A_mmu-mir-5620
  gRNA
gagtgactgtgtgaggcagg

SEQ ID NO: 65363 - DNA, 20 bp, Artificial Sequence
  MKO10065363_A_mmu-mir-5620
  gRNA
gcgagtgactgtgtgaggca

SEQ ID NO: 65364 - DNA, 20 bp, Artificial Sequence
  MKO10065364_A_mmu-mir-3100
  gRNA
gggtcctctgtgcttgggaa

SEQ ID NO: 65365 - DNA, 20 bp, Artificial Sequence
  MKO10065365_A_mmu-mir-3100
  gRNA
gtcctctgtgcttgggaacg

SEQ ID NO: 65366 - DNA, 20 bp, Artificial Sequence
  MKO10065366_A_mmu-mir-3100
  gRNA
gcttgggaacggggtgtctt

SEQ ID NO: 65367 - DNA, 20 bp, Artificial Sequence
  MKO10065367_A_mmu-mir-3100
  gRNA
cggggtgtctttgggagtct

SEQ ID NO: 65368 - DNA, 20 bp, Artificial Sequence
  MKO10065368_A_mmu-mir-330
  gRNA
tttggcgatctctgcctctc

SEQ ID NO: 65369 - DNA, 20 bp, Artificial Sequence
  MKO10065369_A_mmu-mir-330
  gRNA
cctctctgggcctgtgtctt

SEQ ID NO: 65370 - DNA, 20 bp, Artificial Sequence
  MKO10065370_A_mmu-mir-330
  gRNA
agatccaacgagcaaagcac

SEQ ID NO: 65371 - DNA, 20 bp, Artificial Sequence
  MKO10065371_A_mmu-mir-330
  gRNA
cctaagacacaggcccagag

SEQ ID NO: 65372 - DNA, 20 bp, Artificial Sequence
  MKO10065372_A_mmu-mir-343
  gRNA
tacctgggatagagtgggtg

SEQ ID NO: 65373 - DNA, 20 bp, Artificial Sequence
  MKO10065373_A_mmu-mir-343
  gRNA
gggatagagtgggtgtggcg

SEQ ID NO: 65374 - DNA, 20 bp, Artificial Sequence
  MKO10065374_A_mmu-mir-343
  gRNA
tggcgggggtagcagagccc

SEQ ID NO: 65375 - DNA, 20 bp, Artificial Sequence
  MKO10065375_A_mmu-mir-343
  gRNA
cgccacacccactctatccc

SEQ ID NO: 65376 - DNA, 20 bp, Artificial Sequence
  MKO10065376_A_mmu-mir-7046
  gRNA
taccagcgtggctcctgtag

SEQ ID NO: 65377 - DNA, 20 bp, Artificial Sequence
  MKO10065377_A_mmu-mir-7046
  gRNA
gcgtggctcctgtaggggga

SEQ ID NO: 65378 - DNA, 20 bp, Artificial Sequence
  MKO10065378_A_mmu-mir-7046
  gRNA
tgtagggggatgggtggttc

SEQ ID NO: 65379 - DNA, 20 bp, Artificial Sequence
  MKO10065379_A_mmu-mir-7046
  gRNA
tgaaccacccatccccctac

SEQ ID NO: 65380 - DNA, 20 bp, Artificial Sequence
  MKO10065380_A_mmu-mir-7047
  gRNA
cacaattgctccctggaagg

SEQ ID NO: 65381 - DNA, 20 bp, Artificial Sequence
  MKO10065381_A_mmu-mir-7047
  gRNA
attgctccctggaaggagga

SEQ ID NO: 65382 - DNA, 20 bp, Artificial Sequence
  MKO10065382_A_mmu-mir-7047
  gRNA
cctcacccttcctccttcca

SEQ ID NO: 65383 - DNA, 20 bp, Artificial Sequence
  MKO10065383_A_mmu-mir-7047
  gRNA
gagggctgggtctgaagagt

SEQ ID NO: 65384 - DNA, 20 bp, Artificial Sequence
  MKO10065384_A_mmu-mir-6537
  gRNA
ttctggttctacaggcagag

SEQ ID NO: 65385 - DNA, 20 bp, Artificial Sequence
  MKO10065385_A_mmu-mir-6537
  gRNA
gttctacaggcagagagggt

SEQ ID NO: 65386 - DNA, 20 bp, Artificial Sequence
  MKO10065386_A_mmu-mir-6537
  gRNA
agtgggagaaactcaccgct

SEQ ID NO: 65387 - DNA, 20 bp, Artificial Sequence
  MKO10065387_A_mmu-mir-6537
  gRNA
cgctaggaaactcttctcta

SEQ ID NO: 65388 - DNA, 20 bp, Artificial Sequence
  MKO10065388_A_mmu-mir-7048
  gRNA
gggacactggggaaagagaa

SEQ ID NO: 65389 - DNA, 20 bp, Artificial Sequence
  MKO10065389_A_mmu-mir-7048
  gRNA
tcctaggatgcggggctgag

SEQ ID NO: 65390 - DNA, 20 bp, Artificial Sequence
  MKO10065390_A_mmu-mir-7048
  gRNA
gagaatggaagaagctatct

SEQ ID NO: 65391 - DNA, 20 bp, Artificial Sequence
  MKO10065391_A_mmu-mir-7048
  gRNA
acctctcagccccgcatcct

SEQ ID NO: 65392 - DNA, 20 bp, Artificial Sequence
  MKO10065392_A_mmu-mir-3101
  gRNA
agaccatccaccaaagctag

SEQ ID NO: 65393 - DNA, 20 bp, Artificial Sequence
  MKO10065393_A_mmu-mir-3101
  gRNA
atagtactagctttagtcaa

SEQ ID NO: 65394 - DNA, 20 bp, Artificial Sequence
  MKO10065394_A_mmu-mir-3101
  gRNA
aggcttgcctctagctttgg

SEQ ID NO: 65395 - DNA, 20 bp, Artificial Sequence
  MKO10065395_A_mmu-mir-3101
  gRNA
tataggcttgcctctagctt

SEQ ID NO: 65396 - DNA, 20 bp, Artificial Sequence
  MKO10065396_A_mmu-mir-1191
  gRNA
ctgtgagtttggaaccagcc

SEQ ID NO: 65397 - DNA, 20 bp, Artificial Sequence
  MKO10065397_A_mmu-mir-1191
  gRNA
tagcaacatctaagccagcc

SEQ ID NO: 65398 - DNA, 20 bp, Artificial Sequence
  MKO10065398_A_mmu-mir-1191
  gRNA
tcttactatgtagccctaga

SEQ ID NO: 65399 - DNA, 20 bp, Artificial Sequence
  MKO10065399_A_mmu-mir-1191
  gRNA
tagatgttgctatgtagacc

SEQ ID NO: 65400 - DNA, 20 bp, Artificial Sequence
  MKO10065400_A_mmu-mir-7049
  gRNA
cagcttcacctgaggcagac

SEQ ID NO: 65401 - DNA, 20 bp, Artificial Sequence
  MKO10065401_A_mmu-mir-7049
  gRNA
agacaggggctgcaggtcag

SEQ ID NO: 65402 - DNA, 20 bp, Artificial Sequence
  MKO10065402_A_mmu-mir-7049
  gRNA
gtgtctgaaggcagtcaggt

SEQ ID NO: 65403 - DNA, 20 bp, Artificial Sequence
  MKO10065403_A_mmu-mir-7049
  gRNA
ccgtgtgtctgaaggcagtc

SEQ ID NO: 65404 - DNA, 20 bp, Artificial Sequence
  MKO10065404_A_mmu-mir-1963
  gRNA
cacccatcacctgcgggaca

SEQ ID NO: 65405 - DNA, 20 bp, Artificial Sequence
  MKO10065405_A_mmu-mir-1963
  gRNA
aagggccgagtccttcccag

SEQ ID NO: 65406 - DNA, 20 bp, Artificial Sequence
  MKO10065406_A_mmu-mir-1963
  gRNA
ccgagtccttcccagtggcc

SEQ ID NO: 65407 - DNA, 20 bp, Artificial Sequence
  MKO10065407_A_mmu-mir-1963
  gRNA
gtccttcccagtggccagga

SEQ ID NO: 65408 - DNA, 20 bp, Artificial Sequence
  MKO10065408_A_mmu-mir-1964
  gRNA
cttaacctttcttgcgaagc

SEQ ID NO: 65409 - DNA, 20 bp, Artificial Sequence
  MKO10065409_A_mmu-mir-1964
  gRNA
cgaagctggagcacaaaagc

SEQ ID NO: 65410 - DNA, 20 bp, Artificial Sequence
  MKO10065410_A_mmu-mir-1964
  gRNA
tggagcacaaaagccggtgc

SEQ ID NO: 65411 - DNA, 20 bp, Artificial Sequence
  MKO10065411_A_mmu-mir-1964
  gRNA
gtgatgcctacaccgacttc

SEQ ID NO: 65412 - DNA, 20 bp, Artificial Sequence
  MKO10065412_A_mmu-mir-7668
  gRNA
tctgaataacctgctctctg

SEQ ID NO: 65413 - DNA, 20 bp, Artificial Sequence
  MKO10065413_A_mmu-mir-7668
  gRNA
tctctgtggaagaaaccatg

SEQ ID NO: 65414 - DNA, 20 bp, Artificial Sequence
  MKO10065414_A_mmu-mir-7668
  gRNA
tggaagaaaccatgcggtgc

SEQ ID NO: 65415 - DNA, 20 bp, Artificial Sequence
  MKO10065415_A_mmu-mir-7668
  gRNA
gaagaaaccatgcggtgcag

SEQ ID NO: 65416 - DNA, 20 bp, Artificial Sequence
  MKO10065416_A_mmu-mir-3569
  gRNA
ttactcggaggagagcagac

SEQ ID NO: 65417 - DNA, 20 bp, Artificial Sequence
  MKO10065417_A_mmu-mir-3569
  gRNA
ctcggaggagagcagaccgg

SEQ ID NO: 65418 - DNA, 20 bp, Artificial Sequence
  MKO10065418_A_mmu-mir-3569
  gRNA
gaggtccggatttcgaccac

SEQ ID NO: 65419 - DNA, 20 bp, Artificial Sequence
  MKO10065419_A_mmu-mir-3569
  gRNA
gaggagcgcagactgaggtc

SEQ ID NO: 65420 - DNA, 20 bp, Artificial Sequence
  MKO10065420_A_mmu-mir-7050
  gRNA
tgtctgccctggggagataa

SEQ ID NO: 65421 - DNA, 20 bp, Artificial Sequence
  MKO10065421_A_mmu-mir-7050
  gRNA
ataaaggctgagagttcagg

SEQ ID NO: 65422 - DNA, 20 bp, Artificial Sequence
  MKO10065422_A_mmu-mir-7050
  gRNA
tctcagcctttatctcccca

SEQ ID NO: 65423 - DNA, 20 bp, Artificial Sequence
  MKO10065423_A_mmu-mir-7050
  gRNA
tgggacagaagacaggagaa

SEQ ID NO: 65424 - DNA, 20 bp, Artificial Sequence
  MKO10065424_A_mmu-mir-7051
  gRNA
aacatgcactactcaccagg

SEQ ID NO: 65425 - DNA, 20 bp, Artificial Sequence
  MKO10065425_A_mmu-mir-7051
  gRNA
caccaggaggaagttgggtc

SEQ ID NO: 65426 - DNA, 20 bp, Artificial Sequence
  MKO10065426_A_mmu-mir-7051
  gRNA
ggaggaagttgggtcaggta

SEQ ID NO: 65427 - DNA, 20 bp, Artificial Sequence
  MKO10065427_A_mmu-mir-7051
  gRNA
tacctgacccaacttcctcc

SEQ ID NO: 65428 - DNA, 20 bp, Artificial Sequence
  MKO10065428_A_mmu-mir-7052
  gRNA
gcctctcctatcatgtggga

SEQ ID NO: 65429 - DNA, 20 bp, Artificial Sequence
  MKO10065429_A_mmu-mir-7052
  gRNA
tctcctatcatgtgggaagg

SEQ ID NO: 65430 - DNA, 20 bp, Artificial Sequence
  MKO10065430_A_mmu-mir-7052
  gRNA
cctatcatgtgggaaggtgg

SEQ ID NO: 65431 - DNA, 20 bp, Artificial Sequence
  MKO10065431_A_mmu-mir-7052
  gRNA
ggctctgccccctccttccc

SEQ ID NO: 65432 - DNA, 20 bp, Artificial Sequence
  MKO10065432_A_mmu-mir-7053
  gRNA
atctggtttaaggctgggga

SEQ ID NO: 65433 - DNA, 20 bp, Artificial Sequence
  MKO10065433_A_mmu-mir-7053
  gRNA
aggcaggctactggggagct

SEQ ID NO: 65434 - DNA, 20 bp, Artificial Sequence
  MKO10065434_A_mmu-mir-7053
  gRNA
tggggaaaggcaggctactg

SEQ ID NO: 65435 - DNA, 20 bp, Artificial Sequence
  MKO10065435_A_mmu-mir-7053
  gRNA
tgggggagctggggaaaggc

SEQ ID NO: 65436 - DNA, 20 bp, Artificial Sequence
  MKO10065436_A_mmu-mir-707
  gRNA
tgcctacgcttgtgtgagca

SEQ ID NO: 65437 - DNA, 20 bp, Artificial Sequence
  MKO10065437_A_mmu-mir-707
  gRNA
cttgtgtgagcatgggcatg

SEQ ID NO: 65438 - DNA, 20 bp, Artificial Sequence
  MKO10065438_A_mmu-mir-707
  gRNA
ctcacacaagcgtaggcaag

SEQ ID NO: 65439 - DNA, 20 bp, Artificial Sequence
  MKO10065439_A_mmu-mir-707
  gRNA
gcccatgctcacacaagcgt

SEQ ID NO: 65440 - DNA, 20 bp, Artificial Sequence
  MKO10065440_A_mmu-mir-7054
  gRNA
ctgtgtccaatacctggaag

SEQ ID NO: 65441 - DNA, 20 bp, Artificial Sequence
  MKO10065441_A_mmu-mir-7054
  gRNA
agtccaacttggccccttcc

SEQ ID NO: 65442 - DNA, 20 bp, Artificial Sequence
  MKO10065442_A_mmu-mir-7054
  gRNA
tcacagaacagagtccaact

SEQ ID NO: 65443 - DNA, 20 bp, Artificial Sequence
  MKO10065443_A_mmu-mir-7054
  gRNA
ctggaactaggaaggtggtt

SEQ ID NO: 65444 - DNA, 20 bp, Artificial Sequence
  MKO10065444_A_mmu-mir-150
  gRNA
tgtgcctcagaccctggtac

SEQ ID NO: 65445 - DNA, 20 bp, Artificial Sequence
  MKO10065445_A_mmu-mir-150
  gRNA
ctcagaccctggtacaggcc

SEQ ID NO: 65446 - DNA, 20 bp, Artificial Sequence
  MKO10065446_A_mmu-mir-150
  gRNA
ctggtacaggcctgggggat

SEQ ID NO: 65447 - DNA, 20 bp, Artificial Sequence
  MKO10065447_A_mmu-mir-150
  gRNA
ggtacaagggttgggagaca

SEQ ID NO: 65448 - DNA, 20 bp, Artificial Sequence
  MKO10065448_A_mmu-mir-5121
  gRNA
atgtaggacagggtaggctc

SEQ ID NO: 65449 - DNA, 20 bp, Artificial Sequence
  MKO10065449_A_mmu-mir-5121
  gRNA
atgtggtgacatgtaggaca

SEQ ID NO: 65450 - DNA, 20 bp, Artificial Sequence
  MKO10065450_A_mmu-mir-5121
  gRNA
ttggtgatgtggtgacatgt

SEQ ID NO: 65451 - DNA, 20 bp, Artificial Sequence
  MKO10065451_A_mmu-mir-5121
  gRNA
tgcgaggtgagttggtgatg

SEQ ID NO: 65452 - DNA, 20 bp, Artificial Sequence
  MKO10065452_A_mmu-mir-7055
  gRNA
cttcagtgggttatctgagt

SEQ ID NO: 65453 - DNA, 20 bp, Artificial Sequence
  MKO10065453_A_mmu-mir-7055
  gRNA
tgctactttgataccccacc

SEQ ID NO: 65454 - DNA, 20 bp, Artificial Sequence
  MKO10065454_A_mmu-mir-7055
  gRNA
gttcacgttaaaccctggtg

SEQ ID NO: 65455 - DNA, 20 bp, Artificial Sequence
  MKO10065455_A_mmu-mir-7055
  gRNA
tggttcacgttaaaccctgg

SEQ ID NO: 65456 - DNA, 20 bp, Artificial Sequence
  MKO10065456_A_mmu-mir-7056
  gRNA
cctgctgtgaggatctgtgg

SEQ ID NO: 65457 - DNA, 20 bp, Artificial Sequence
  MKO10065457_A_mmu-mir-7056
  gRNA
tctgtggtgggagacaggtg

SEQ ID NO: 65458 - DNA, 20 bp, Artificial Sequence
  MKO10065458_A_mmu-mir-7056
  gRNA
tggaggaggacagagaggtt

SEQ ID NO: 65459 - DNA, 20 bp, Artificial Sequence
  MKO10065459_A_mmu-mir-7056
  gRNA
aggaaatgtgggtgctgtgg

SEQ ID NO: 65460 - DNA, 20 bp, Artificial Sequence
  MKO10065460_A_mmu-mir-6238
  gRNA
gaatattttcacacctggct

SEQ ID NO: 65461 - DNA, 20 bp, Artificial Sequence
  MKO10065461_A_mmu-mir-6238
  gRNA
ctagttcactcaggtcagat

SEQ ID NO: 65462 - DNA, 20 bp, Artificial Sequence
  MKO10065462_A_mmu-mir-6238
  gRNA
ggcaataacttgagtgctta

SEQ ID NO: 65463 - DNA, 20 bp, Artificial Sequence
  MKO10065463_A_mmu-mir-6238
  gRNA
taaagacctttattagtcag

SEQ ID NO: 65464 - DNA, 20 bp, Artificial Sequence
  MKO10065464_A_mmu-mir-6389
  gRNA
aagctagttttgcctagctt

SEQ ID NO: 65465 - DNA, 20 bp, Artificial Sequence
  MKO10065465_A_mmu-mir-6389
  gRNA
agtttaacattgcactgctt

SEQ ID NO: 65466 - DNA, 20 bp, Artificial Sequence
  MKO10065466_A_mmu-mir-6389
  gRNA
agctaggcaaaactagcttg

SEQ ID NO: 65467 - DNA, 20 bp, Artificial Sequence
  MKO10065467_A_mmu-mir-6389
  gRNA
aaagctaggcaaaactagct

SEQ ID NO: 65468 - DNA, 20 bp, Artificial Sequence
  MKO10065468_A_mmu-mir-344d-1
  gRNA
ctctttagcacctttcagtc

SEQ ID NO: 65469 - DNA, 20 bp, Artificial Sequence
  MKO10065469_A_mmu-mir-344d-1
  gRNA
agcacctttcagtctggcag

SEQ ID NO: 65470 - DNA, 20 bp, Artificial Sequence
  MKO10065470_A_mmu-mir-344d-1
  gRNA
atccaggaccagataagtcc

SEQ ID NO: 65471 - DNA, 20 bp, Artificial Sequence
  MKO10065471_A_mmu-mir-344d-1
  gRNA
ataaccactgccagactgaa

SEQ ID NO: 65472 - DNA, 20 bp, Artificial Sequence
  MKO10065472_A_mmu-mir-344d-2
  gRNA
ctctttagcaccattcagtc

SEQ ID NO: 65473 - DNA, 20 bp, Artificial Sequence
  MKO10065473_A_mmu-mir-344d-2
  gRNA
agcaccattcagtctggcag

SEQ ID NO: 65474 - DNA, 20 bp, Artificial Sequence
  MKO10065474_A_mmu-mir-344d-2
  gRNA
atccaggaccagataagtcc

SEQ ID NO: 65475 - DNA, 20 bp, Artificial Sequence
  MKO10065475_A_mmu-mir-344d-2
  gRNA
ttccaggacttatctggtcc

SEQ ID NO: 65476 - DNA, 20 bp, Artificial Sequence
  MKO10065476_A_mmu-mir-344d-3
  gRNA
ctctttagcaccattcagtc

SEQ ID NO: 65477 - DNA, 20 bp, Artificial Sequence
  MKO10065477_A_mmu-mir-344d-3
  gRNA
agcaccattcagtctggcag

SEQ ID NO: 65478 - DNA, 20 bp, Artificial Sequence
  MKO10065478_A_mmu-mir-344d-3
  gRNA
atccaggaccagataagtcc

SEQ ID NO: 65479 - DNA, 20 bp, Artificial Sequence
  MKO10065479_A_mmu-mir-344d-3
  gRNA
ataaccactgccagactgaa

SEQ ID NO: 65480 - DNA, 20 bp, Artificial Sequence
  MKO10065480_A_mmu-mir-344e
  gRNA
gtctttagcaccatatagtc

SEQ ID NO: 65481 - DNA, 20 bp, Artificial Sequence
  MKO10065481_A_mmu-mir-344e
  gRNA
agcaccatatagtcaggctt

SEQ ID NO: 65482 - DNA, 20 bp, Artificial Sequence
  MKO10065482_A_mmu-mir-344e
  gRNA
ctttggttatatccaggacc

SEQ ID NO: 65483 - DNA, 20 bp, Artificial Sequence
  MKO10065483_A_mmu-mir-344e
  gRNA
atccaggaccaggtaagtcc

SEQ ID NO: 65484 - DNA, 20 bp, Artificial Sequence
  MKO10065484_A_mmu-mir-344h-1
  gRNA
agtaccatacagtcgggctt

SEQ ID NO: 65485 - DNA, 20 bp, Artificial Sequence
  MKO10065485_A_mmu-mir-344h-1
  gRNA
gtcgggctttggttataccc

SEQ ID NO: 65486 - DNA, 20 bp, Artificial Sequence
  MKO10065486_A_mmu-mir-344h-1
  gRNA
ctttggttatacccaggacc

SEQ ID NO: 65487 - DNA, 20 bp, Artificial Sequence
  MKO10065487_A_mmu-mir-344h-1
  gRNA
acccaggaccaggtatgtcc

SEQ ID NO: 65488 - DNA, 20 bp, Artificial Sequence
  MKO10065488_A_mmu-mir-344h-2
  gRNA
agtaccatacagtcgggctt

SEQ ID NO: 65489 - DNA, 20 bp, Artificial Sequence
  MKO10065489_A_mmu-mir-344h-2
  gRNA
gtcgggctttggttataccc

SEQ ID NO: 65490 - DNA, 20 bp, Artificial Sequence
  MKO10065490_A_mmu-mir-344h-2
  gRNA
ctttggttatacccaggacc

SEQ ID NO: 65491 - DNA, 20 bp, Artificial Sequence
  MKO10065491_A_mmu-mir-344h-2
  gRNA
acccaggaccaggtatgtcc

SEQ ID NO: 65492 - DNA, 20 bp, Artificial Sequence
  MKO10065492_A_mmu-mir-344b
  gRNA
gtctggagcagcttacagtc

SEQ ID NO: 65493 - DNA, 20 bp, Artificial Sequence
  MKO10065493_A_mmu-mir-344b
  gRNA
agcagcttacagtcaggctt

SEQ ID NO: 65494 - DNA, 20 bp, Artificial Sequence
  MKO10065494_A_mmu-mir-344b
  gRNA
ctgaaagctgaactttagcc

SEQ ID NO: 65495 - DNA, 20 bp, Artificial Sequence
  MKO10065495_A_mmu-mir-344b
  gRNA
attttcatcagtcaggctcc

SEQ ID NO: 65496 - DNA, 20 bp, Artificial Sequence
  MKO10065496_A_mmu-mir-344c
  gRNA
gctagagtacagctatcagc

SEQ ID NO: 65497 - DNA, 20 bp, Artificial Sequence
  MKO10065497_A_mmu-mir-344c
  gRNA
gtttttttcagtcaggctgc

SEQ ID NO: 65498 - DNA, 20 bp, Artificial Sequence
  MKO10065498_A_mmu-mir-344c
  gRNA
tgcaagggtttttttcagtc

SEQ ID NO: 65499 - DNA, 20 bp, Artificial Sequence
  MKO10065499_A_mmu-mir-344c
  gRNA
ctctggagcagtttactgtc

SEQ ID NO: 65500 - DNA, 20 bp, Artificial Sequence
  MKO10065500_A_mmu-mir-344-1
  gRNA
tgtgttcagggcttacagtc

SEQ ID NO: 65501 - DNA, 20 bp, Artificial Sequence
  MKO10065501_A_mmu-mir-344-1
  gRNA
cagggcttacagtcaggctt

SEQ ID NO: 65502 - DNA, 20 bp, Artificial Sequence
  MKO10065502_A_mmu-mir-344-1
  gRNA
atcaggtaccagctggtacc

SEQ ID NO: 65503 - DNA, 20 bp, Artificial Sequence
  MKO10065503_A_mmu-mir-344-1
  gRNA
ctggtacctggaatctagcc

SEQ ID NO: 65504 - DNA, 20 bp, Artificial Sequence
  MKO10065504_A_mmu-mir-344-2
  gRNA
ttcttttgcagcttacagtc

SEQ ID NO: 65505 - DNA, 20 bp, Artificial Sequence
  MKO10065505_A_mmu-mir-344-2
  gRNA
tgcagcttacagtcaggctt

SEQ ID NO: 65506 - DNA, 20 bp, Artificial Sequence
  MKO10065506_A_mmu-mir-344-2
  gRNA
ttggtacctggaatctagcc

SEQ ID NO: 65507 - DNA, 20 bp, Artificial Sequence
  MKO10065507_A_mmu-mir-344-2
  gRNA
aatctagccaggagcctgac

SEQ ID NO: 65508 - DNA, 20 bp, Artificial Sequence
  MKO10065508_A_mmu-mir-344g
  gRNA
gcagcttgcagtcaagcccc

SEQ ID NO: 65509 - DNA, 20 bp, Artificial Sequence
  MKO10065509_A_mmu-mir-344g
  gRNA
tcaagcccctggctagagcc

SEQ ID NO: 65510 - DNA, 20 bp, Artificial Sequence
  MKO10065510_A_mmu-mir-344g
  gRNA
tggttccaggctctagccag

SEQ ID NO: 65511 - DNA, 20 bp, Artificial Sequence
  MKO10065511_A_mmu-mir-344g
  gRNA
gctggttccaggctctagcc

SEQ ID NO: 65512 - DNA, 20 bp, Artificial Sequence
  MKO10065512_A_mmu-mir-344f
  gRNA
ctgctaagtaggttgtagtc

SEQ ID NO: 65513 - DNA, 20 bp, Artificial Sequence
  MKO10065513_A_mmu-mir-344f
  gRNA
gtcaggtcctggctagagcc

SEQ ID NO: 65514 - DNA, 20 bp, Artificial Sequence
  MKO10065514_A_mmu-mir-344f
  gRNA
cttagagctggactccagcc

SEQ ID NO: 65515 - DNA, 20 bp, Artificial Sequence
  MKO10065515_A_mmu-mir-344f
  gRNA
actccagccaggagactgac

SEQ ID NO: 65516 - DNA, 20 bp, Artificial Sequence
  MKO10065516_A_mmu-mir-344i
  gRNA
ctgagagctggactccagcc

SEQ ID NO: 65517 - DNA, 20 bp, Artificial Sequence
  MKO10065517_A_mmu-mir-344i
  gRNA
tccagctctcagctgggtcc

SEQ ID NO: 65518 - DNA, 20 bp, Artificial Sequence
  MKO10065518_A_mmu-mir-344i
  gRNA
ctggagtccagctctcagct

SEQ ID NO: 65519 - DNA, 20 bp, Artificial Sequence
  MKO10065519_A_mmu-mir-344i
  gRNA
ttgcaagtcaggctcctggc

SEQ ID NO: 65520 - DNA, 20 bp, Artificial Sequence
  MKO10065520_A_mmu-mir-211
  gRNA
ctgcttggacctgtgacctg

SEQ ID NO: 65521 - DNA, 20 bp, Artificial Sequence
  MKO10065521_A_mmu-mir-211
  gRNA
ctaggcctctgagtgaggca

SEQ ID NO: 65522 - DNA, 20 bp, Artificial Sequence
  MKO10065522_A_mmu-mir-211
  gRNA
gagtgaggcaaggacagcaa

SEQ ID NO: 65523 - DNA, 20 bp, Artificial Sequence
  MKO10065523_A_mmu-mir-211
  gRNA
gtgaggcaaggacagcaaag

SEQ ID NO: 65524 - DNA, 20 bp, Artificial Sequence
  MKO10065524_A_mmu-mir-6416
  gRNA
ccttttgctgctctttgcca

SEQ ID NO: 65525 - DNA, 20 bp, Artificial Sequence
  MKO10065525_A_mmu-mir-6416
  gRNA
gactcacaggtgaacgctct

SEQ ID NO: 65526 - DNA, 20 bp, Artificial Sequence
  MKO10065526_A_mmu-mir-6416
  gRNA
aggtgaacgctctaggggag

SEQ ID NO: 65527 - DNA, 20 bp, Artificial Sequence
  MKO10065527_A_mmu-mir-6416
  gRNA
tgaacgctctaggggagagg

SEQ ID NO: 65528 - DNA, 20 bp, Artificial Sequence
  MKO10065528_A_mmu-mir-7057
  gRNA
caacttgagtcctctcctgc

SEQ ID NO: 65529 - DNA, 20 bp, Artificial Sequence
  MKO10065529_A_mmu-mir-7057
  gRNA
ctgcaggagaggactcaagt

SEQ ID NO: 65530 - DNA, 20 bp, Artificial Sequence
  MKO10065530_A_mmu-mir-7057
  gRNA
tcttaaagggcctgcaggag

SEQ ID NO: 65531 - DNA, 20 bp, Artificial Sequence
  MKO10065531_A_mmu-mir-7057
  gRNA
gaatatcttaaagggcctgc

SEQ ID NO: 65532 - DNA, 20 bp, Artificial Sequence
  MKO10065532_A_mmu-mir-7234
  gRNA
ttttctccaaagacgtttct

SEQ ID NO: 65533 - DNA, 20 bp, Artificial Sequence
  MKO10065533_A_mmu-mir-7234
  gRNA
ctaggtagaaacgtctttct

SEQ ID NO: 65534 - DNA, 20 bp, Artificial Sequence
  MKO10065534_A_mmu-mir-7234
  gRNA
tttctacctagaaacgtctt

SEQ ID NO: 65535 - DNA, 20 bp, Artificial Sequence
  MKO10065535_A_mmu-mir-7234
  gRNA
aaacgtctttctagggtaga

SEQ ID NO: 65536 - DNA, 20 bp, Artificial Sequence
  MKO10065536_A_mmu-mir-7a-2
  gRNA
acggtcgggccagccccgtt

SEQ ID NO: 65537 - DNA, 20 bp, Artificial Sequence
  MKO10065537_A_mmu-mir-7a-2
  gRNA
acaagtcccagtctgccaca

SEQ ID NO: 65538 - DNA, 20 bp, Artificial Sequence
  MKO10065538_A_mmu-mir-7a-2
  gRNA
cccagtctgccacatggtgc

SEQ ID NO: 65539 - DNA, 20 bp, Artificial Sequence
  MKO10065539_A_mmu-mir-7a-2
  gRNA
aaaatcactagtcttccaaa

SEQ ID NO: 65540 - DNA, 20 bp, Artificial Sequence
  MKO10065540_A_mmu-mir-9-3
  gRNA
gggaggcccgtttctctctt

SEQ ID NO: 65541 - DNA, 20 bp, Artificial Sequence
  MKO10065541_A_mmu-mir-9-3
  gRNA
agataaccaaagagagaaac

SEQ ID NO: 65542 - DNA, 20 bp, Artificial Sequence
  MKO10065542_A_mmu-mir-9-3
  gRNA
tcggttatctagctttatga

SEQ ID NO: 65543 - DNA, 20 bp, Artificial Sequence
  MKO10065543_A_mmu-mir-9-3
  gRNA
gaaacgggcctcccattcgc

SEQ ID NO: 65544 - DNA, 20 bp, Artificial Sequence
  MKO10065544_A_mmu-mir-1839
  gRNA
catgaaaaggtagatagaac

SEQ ID NO: 65545 - DNA, 20 bp, Artificial Sequence
  MKO10065545_A_mmu-mir-1839
  gRNA
atggctgttggtagataagt

SEQ ID NO: 65546 - DNA, 20 bp, Artificial Sequence
  MKO10065546_A_mmu-mir-1839
  gRNA
tatctaccttttcatgtagg

SEQ ID NO: 65547 - DNA, 20 bp, Artificial Sequence
  MKO10065547_A_mmu-mir-1839
  gRNA
ttctatctaccttttcatgt

SEQ ID NO: 65548 - DNA, 20 bp, Artificial Sequence
  MKO10065548_A_mmu-mir-708
  gRNA
tgaaatggggactgccctca

SEQ ID NO: 65549 - DNA, 20 bp, Artificial Sequence
  MKO10065549_A_mmu-mir-708
  gRNA
caaggagcttacaatctagc

SEQ ID NO: 65550 - DNA, 20 bp, Artificial Sequence
  MKO10065550_A_mmu-mir-708
  gRNA
aggagcttacaatctagctg

SEQ ID NO: 65551 - DNA, 20 bp, Artificial Sequence
  MKO10065551_A_mmu-mir-708
  gRNA
actagactgtgagcttctag

SEQ ID NO: 65552 - DNA, 20 bp, Artificial Sequence
  MKO10065552_A_mmu-mir-6394
  gRNA
tcagctgttgcctttcccag

SEQ ID NO: 65553 - DNA, 20 bp, Artificial Sequence
  MKO10065553_A_mmu-mir-6394
  gRNA
gttgcctttcccaggggccg

SEQ ID NO: 65554 - DNA, 20 bp, Artificial Sequence
  MKO10065554_A_mmu-mir-6394
  gRNA
ctccttgctgtgtccctgag

SEQ ID NO: 65555 - DNA, 20 bp, Artificial Sequence
  MKO10065555_A_mmu-mir-6394
  gRNA
ctgtgtccctgagtggggcc

SEQ ID NO: 65556 - DNA, 20 bp, Artificial Sequence
  MKO10065556_A_mmu-mir-326
  gRNA
tccgagcctcatctgtctgt

SEQ ID NO: 65557 - DNA, 20 bp, Artificial Sequence
  MKO10065557_A_mmu-mir-326
  gRNA
gcctcatctgtctgttgggc

SEQ ID NO: 65558 - DNA, 20 bp, Artificial Sequence
  MKO10065558_A_mmu-mir-326
  gRNA
ctcatctgtctgttgggctg

SEQ ID NO: 65559 - DNA, 20 bp, Artificial Sequence
  MKO10065559_A_mmu-mir-326
  gRNA
ctgtctgttgggctgggggc

SEQ ID NO: 65560 - DNA, 20 bp, Artificial Sequence
  MKO10065560_A_mmu-mir-3102
  gRNA
gtgtacctgtgggtagccaa

SEQ ID NO: 65561 - DNA, 20 bp, Artificial Sequence
  MKO10065561_A_mmu-mir-3102
  gRNA
gtacctgtgggtagccaatg

SEQ ID NO: 65562 - DNA, 20 bp, Artificial Sequence
  MKO10065562_A_mmu-mir-3102
  gRNA
tggggtgctctggctggggc

SEQ ID NO: 65563 - DNA, 20 bp, Artificial Sequence
  MKO10065563_A_mmu-mir-3102
  gRNA
gccccaccctggccactcac

SEQ ID NO: 65564 - DNA, 20 bp, Artificial Sequence
  MKO10065564_A_mmu-mir-139
  gRNA
cagtgcacgtgtctccagtg

SEQ ID NO: 65565 - DNA, 20 bp, Artificial Sequence
  MKO10065565_A_mmu-mir-139
  gRNA
ctccagtgtggctcggaggc

SEQ ID NO: 65566 - DNA, 20 bp, Artificial Sequence
  MKO10065566_A_mmu-mir-139
  gRNA
tggctcggaggctggagacg

SEQ ID NO: 65567 - DNA, 20 bp, Artificial Sequence
  MKO10065567_A_mmu-mir-139
  gRNA
ggctggagacgcggccctgt

SEQ ID NO: 65568 - DNA, 20 bp, Artificial Sequence
  MKO10065568_A_mmu-mir-7058
  gRNA
gcagcaccactctggaagaa

SEQ ID NO: 65569 - DNA, 20 bp, Artificial Sequence
  MKO10065569_A_mmu-mir-7058
  gRNA
taaagggcacacaacttcca

SEQ ID NO: 65570 - DNA, 20 bp, Artificial Sequence
  MKO10065570_A_mmu-mir-7058
  gRNA
ctacctgtgagtgggtagag

SEQ ID NO: 65571 - DNA, 20 bp, Artificial Sequence
  MKO10065571_A_mmu-mir-7058
  gRNA
caccactctggaagaaagga

SEQ ID NO: 65572 - DNA, 20 bp, Artificial Sequence
  MKO10065572_A_mmu-mir-7059
  gRNA
aggctgtaaacaaaccaccg

SEQ ID NO: 65573 - DNA, 20 bp, Artificial Sequence
  MKO10065573_A_mmu-mir-7059
  gRNA
tgaggctgtaaacaaaccac

SEQ ID NO: 65574 - DNA, 20 bp, Artificial Sequence
  MKO10065574_A_mmu-mir-7059
  gRNA
taactgaaagccgcagtccc

SEQ ID NO: 65575 - DNA, 20 bp, Artificial Sequence
  MKO10065575_A_mmu-mir-7059
  gRNA
ctgaaagccgcagtccccgg

SEQ ID NO: 65576 - DNA, 20 bp, Artificial Sequence
  MKO10065576_A_mmu-mir-7060
  gRNA
gccccacattcagtgagtgc

SEQ ID NO: 65577 - DNA, 20 bp, Artificial Sequence
  MKO10065577_A_mmu-mir-7060
  gRNA
tcagtgagtgctgggtagaa

SEQ ID NO: 65578 - DNA, 20 bp, Artificial Sequence
  MKO10065578_A_mmu-mir-7060
  gRNA
gctgggtagaatgggaaatg

SEQ ID NO: 65579 - DNA, 20 bp, Artificial Sequence
  MKO10065579_A_mmu-mir-7060
  gRNA
ggatggaagctgcaaccgag

SEQ ID NO: 65580 - DNA, 20 bp, Artificial Sequence
  MKO10065580_A_mmu-mir-762
  gRNA
tgtcatctttggcccggctc

SEQ ID NO: 65581 - DNA, 20 bp, Artificial Sequence
  MKO10065581_A_mmu-mir-762
  gRNA
tttggcccggctccgggtct

SEQ ID NO: 65582 - DNA, 20 bp, Artificial Sequence
  MKO10065582_A_mmu-mir-762
  gRNA
gctccgggtctcggcccgca

SEQ ID NO: 65583 - DNA, 20 bp, Artificial Sequence
  MKO10065583_A_mmu-mir-762
  gRNA
gggtctcggcccgcacggtc

SEQ ID NO: 65584 - DNA, 20 bp, Artificial Sequence
  MKO10065584_A_mmu-mir-3103
  gRNA
tcggcaaagagcctgtggga

SEQ ID NO: 65585 - DNA, 20 bp, Artificial Sequence
  MKO10065585_A_mmu-mir-3103
  gRNA
gagcctgtgggaaggatcag

SEQ ID NO: 65586 - DNA, 20 bp, Artificial Sequence
  MKO10065586_A_mmu-mir-3103
  gRNA
tgggaaggatcagaggttag

SEQ ID NO: 65587 - DNA, 20 bp, Artificial Sequence
  MKO10065587_A_mmu-mir-3103
  gRNA
taacctctgatccttcccac

SEQ ID NO: 65588 - DNA, 20 bp, Artificial Sequence
  MKO10065588_A_mmu-mir-7061
  gRNA
ggtacagaatttatggaaat

SEQ ID NO: 65589 - DNA, 20 bp, Artificial Sequence
  MKO10065589_A_mmu-mir-7061
  gRNA
acagaatttatggaaatagg

SEQ ID NO: 65590 - DNA, 20 bp, Artificial Sequence
  MKO10065590_A_mmu-mir-7061
  gRNA
cagcctaaaaggaaataaaa

SEQ ID NO: 65591 - DNA, 20 bp, Artificial Sequence
  MKO10065591_A_mmu-mir-7061
  gRNA
ttgccaaggtacagaattta

SEQ ID NO: 65592 - DNA, 20 bp, Artificial Sequence
  MKO10065592_A_mmu-mir-1962
  gRNA
ctcgttcagtttccatggag

SEQ ID NO: 65593 - DNA, 20 bp, Artificial Sequence
  MKO10065593_A_mmu-mir-1962
  gRNA
ttcagtttccatggagaggc

SEQ ID NO: 65594 - DNA, 20 bp, Artificial Sequence
  MKO10065594_A_mmu-mir-1962
  gRNA
ttccatggagaggctggcac

SEQ ID NO: 65595 - DNA, 20 bp, Artificial Sequence
  MKO10065595_A_mmu-mir-1962
  gRNA
atagtttgcaaatgccacag

SEQ ID NO: 65596 - DNA, 20 bp, Artificial Sequence
  MKO10065596_A_mmu-mir-6401
  gRNA
atgataccataactgggcac

SEQ ID NO: 65597 - DNA, 20 bp, Artificial Sequence
  MKO10065597_A_mmu-mir-6401
  gRNA
ctgttacactccagtggtgt

SEQ ID NO: 65598 - DNA, 20 bp, Artificial Sequence
  MKO10065598_A_mmu-mir-6401
  gRNA
actccagtggtgtcgggtac

SEQ ID NO: 65599 - DNA, 20 bp, Artificial Sequence
  MKO10065599_A_mmu-mir-6401
  gRNA
atttcagatggaaatgtttg

SEQ ID NO: 65600 - DNA, 20 bp, Artificial Sequence
  MKO10065600_A_mmu-mir-7686
  gRNA
ttacagtgccccgagcagac

SEQ ID NO: 65601 - DNA, 20 bp, Artificial Sequence
  MKO10065601_A_mmu-mir-7686
  gRNA
acaggaaagcgcccagcccc

SEQ ID NO: 65602 - DNA, 20 bp, Artificial Sequence
  MKO10065602_A_mmu-mir-7686
  gRNA
gcgcccagccccaggtccag

SEQ ID NO: 65603 - DNA, 20 bp, Artificial Sequence
  MKO10065603_A_mmu-mir-7686
  gRNA
ccagccccaggtccagtgga

SEQ ID NO: 65604 - DNA, 20 bp, Artificial Sequence
  MKO10065604_A_mmu-mir-202
  gRNA
ccacaaagaagtatatgcat

SEQ ID NO: 65605 - DNA, 20 bp, Artificial Sequence
  MKO10065605_A_mmu-mir-202
  gRNA
gaagtatatgcataggaaaa

SEQ ID NO: 65606 - DNA, 20 bp, Artificial Sequence
  MKO10065606_A_mmu-mir-202
  gRNA
tctaaagaggtatagcgcat

SEQ ID NO: 65607 - DNA, 20 bp, Artificial Sequence
  MKO10065607_A_mmu-mir-202
  gRNA
tttgtggatctggtctaaag

SEQ ID NO: 65608 - DNA, 20 bp, Artificial Sequence
  MKO10065608_A_mmu-mir-7062
  gRNA
aggagaagttagtctggttt

SEQ ID NO: 65609 - DNA, 20 bp, Artificial Sequence
  MKO10065609_A_mmu-mir-7062
  gRNA
ctaacttctcctggccccac

SEQ ID NO: 65610 - DNA, 20 bp, Artificial Sequence
  MKO10065610_A_mmu-mir-7062
  gRNA
cagacatgagcataggatgg

SEQ ID NO: 65611 - DNA, 20 bp, Artificial Sequence
  MKO10065611_A_mmu-mir-7062
  gRNA
acccgagcacctgtggggcc

SEQ ID NO: 65612 - DNA, 20 bp, Artificial Sequence
  MKO10065612_A_mmu-mir-210
  gRNA
agccgctgtcacacgcacag

SEQ ID NO: 65613 - DNA, 20 bp, Artificial Sequence
  MKO10065613_A_mmu-mir-210
  gRNA
gtccggagcaacgcagtgtg

SEQ ID NO: 65614 - DNA, 20 bp, Artificial Sequence
  MKO10065614_A_mmu-mir-210
  gRNA
cggagcaacgcagtgtgcgg

SEQ ID NO: 65615 - DNA, 20 bp, Artificial Sequence
  MKO10065615_A_mmu-mir-210
  gRNA
acgcagtgtgcggtgggcag

SEQ ID NO: 65616 - DNA, 20 bp, Artificial Sequence
  MKO10065616_A_mmu-mir-7063
  gRNA
aaggaggtggtccccatgag

SEQ ID NO: 65617 - DNA, 20 bp, Artificial Sequence
  MKO10065617_A_mmu-mir-7063
  gRNA
gtggtccccatgagaggtgc

SEQ ID NO: 65618 - DNA, 20 bp, Artificial Sequence
  MKO10065618_A_mmu-mir-7063
  gRNA
agaggtgcaggctgagcaca

SEQ ID NO: 65619 - DNA, 20 bp, Artificial Sequence
  MKO10065619_A_mmu-mir-7063
  gRNA
ctcagcctgcacctctcatg

SEQ ID NO: 65620 - DNA, 20 bp, Artificial Sequence
  MKO10065620_A_mmu-mir-3104
  gRNA
ggaaaggccaactagggggc

SEQ ID NO: 65621 - DNA, 20 bp, Artificial Sequence
  MKO10065621_A_mmu-mir-3104
  gRNA
gccaactagggggcaggagc

SEQ ID NO: 65622 - DNA, 20 bp, Artificial Sequence
  MKO10065622_A_mmu-mir-3104
  gRNA
gtcagttcagcagagggctc

SEQ ID NO: 65623 - DNA, 20 bp, Artificial Sequence
  MKO10065623_A_mmu-mir-3104
  gRNA
gcgtctgtcagttcagcaga

SEQ ID NO: 65624 - DNA, 20 bp, Artificial Sequence
  MKO10065624_A_mmu-mir-675
  gRNA
tgccagacccagggactgag

SEQ ID NO: 65625 - DNA, 20 bp, Artificial Sequence
  MKO10065625_A_mmu-mir-675
  gRNA
gacccagggactgagcggtt

SEQ ID NO: 65626 - DNA, 20 bp, Artificial Sequence
  MKO10065626_A_mmu-mir-675
  gRNA
acagtgtaccaagtccactg

SEQ ID NO: 65627 - DNA, 20 bp, Artificial Sequence
  MKO10065627_A_mmu-mir-675
  gRNA
gccctttccgcaccagtccc

SEQ ID NO: 65628 - DNA, 20 bp, Artificial Sequence
  MKO10065628_A_mmu-mir-483
  gRNA
tagggcaggagagaacaaga

SEQ ID NO: 65629 - DNA, 20 bp, Artificial Sequence
  MKO10065629_A_mmu-mir-483
  gRNA
gcaggagagaacaagacggg

SEQ ID NO: 65630 - DNA, 20 bp, Artificial Sequence
  MKO10065630_A_mmu-mir-483
  gRNA
aggagagaacaagacgggag

SEQ ID NO: 65631 - DNA, 20 bp, Artificial Sequence
  MKO10065631_A_mmu-mir-483
  gRNA
agagaacaagacgggagggg

SEQ ID NO: 65632 - DNA, 20 bp, Artificial Sequence
  MKO10065632_A_mmu-mir-7064
  gRNA
acgaccctagagagacataa

SEQ ID NO: 65633 - DNA, 20 bp, Artificial Sequence
  MKO10065633_A_mmu-mir-7064
  gRNA
caggtttggaatggtcagca

SEQ ID NO: 65634 - DNA, 20 bp, Artificial Sequence
  MKO10065634_A_mmu-mir-7064
  gRNA
agtaaaggcctgggcaggtt

SEQ ID NO: 65635 - DNA, 20 bp, Artificial Sequence
  MKO10065635_A_mmu-mir-7064
  gRNA
tgcttcagtagtaaaggcct

SEQ ID NO: 65636 - DNA, 20 bp, Artificial Sequence
  MKO10065636_A_mmu-mir-6404
  gRNA
agaggacagtgaagtctctg

SEQ ID NO: 65637 - DNA, 20 bp, Artificial Sequence
  MKO10065637_A_mmu-mir-6404
  gRNA
agtctctgtgggaagtgaca

SEQ ID NO: 65638 - DNA, 20 bp, Artificial Sequence
  MKO10065638_A_mmu-mir-6404
  gRNA
tgggaagtgacaaggggtag

SEQ ID NO: 65639 - DNA, 20 bp, Artificial Sequence
  MKO10065639_A_mmu-mir-6404
  gRNA
agtgacaaggggtagggggc

SEQ ID NO: 65640 - DNA, 20 bp, Artificial Sequence
  MKO10065640_A_mmu-mir-3105
  gRNA
taagaaagctgagcaggctc

SEQ ID NO: 65641 - DNA, 20 bp, Artificial Sequence
  MKO10065641_A_mmu-mir-3105
  gRNA
cagtaacttacgctgcttac

SEQ ID NO: 65642 - DNA, 20 bp, Artificial Sequence
  MKO10065642_A_mmu-mir-3105
  gRNA
aggagtggaagcagaggcta

SEQ ID NO: 65643 - DNA, 20 bp, Artificial Sequence
  MKO10065643_A_mmu-mir-3105
  gRNA
agaggcaggagtggaagcag

SEQ ID NO: 65644 - DNA, 20 bp, Artificial Sequence
  MKO10065644_A_mmu-mir-7654
  gRNA
aggcgcgctcccgctcgcgc

SEQ ID NO: 65645 - DNA, 20 bp, Artificial Sequence
  MKO10065645_A_mmu-mir-7654
  gRNA
gcgccgggatgccgccgcgt

SEQ ID NO: 65646 - DNA, 20 bp, Artificial Sequence
  MKO10065646_A_mmu-mir-7654
  gRNA
ccgcgttggtggagcgcgag

SEQ ID NO: 65647 - DNA, 20 bp, Artificial Sequence
  MKO10065647_A_mmu-mir-7654
  gRNA
ggcggcatcccggcgcgagc

SEQ ID NO: 65648 - DNA, 20 bp, Artificial Sequence
  MKO10065648_A_mmu-mir-7238
  gRNA
gccactcgaacacaaaggac

SEQ ID NO: 65649 - DNA, 20 bp, Artificial Sequence
  MKO10065649_A_mmu-mir-7238
  gRNA
gctcggatgcggatgggacg

SEQ ID NO: 65650 - DNA, 20 bp, Artificial Sequence
  MKO10065650_A_mmu-mir-7238
  gRNA
ctgccgccactcgaacacaa

SEQ ID NO: 65651 - DNA, 20 bp, Artificial Sequence
  MKO10065651_A_mmu-mir-7238
  gRNA
tgtcctttgtgttcgagtgg

SEQ ID NO: 65652 - DNA, 20 bp, Artificial Sequence
  MKO10065652_A_mmu-mir-7065
  gRNA
ttttgtccatggagtgtagc

SEQ ID NO: 65653 - DNA, 20 bp, Artificial Sequence
  MKO10065653_A_mmu-mir-7065
  gRNA
gtaaaccaggaatctctctc

SEQ ID NO: 65654 - DNA, 20 bp, Artificial Sequence
  MKO10065654_A_mmu-mir-7065
  gRNA
caggaatctctctcaggtct

SEQ ID NO: 65655 - DNA, 20 bp, Artificial Sequence
  MKO10065655_A_mmu-mir-7065
  gRNA
cttggttttcctgtttgcac

SEQ ID NO: 65656 - DNA, 20 bp, Artificial Sequence
  MKO10065656_A_mmu-mir-1968
  gRNA
accctccttaacagctgcag

SEQ ID NO: 65657 - DNA, 20 bp, Artificial Sequence
  MKO10065657_A_mmu-mir-1968
  gRNA
ctccttaacagctgcagagg

SEQ ID NO: 65658 - DNA, 20 bp, Artificial Sequence
  MKO10065658_A_mmu-mir-1968
  gRNA
cttaacagctgcagaggtgg

SEQ ID NO: 65659 - DNA, 20 bp, Artificial Sequence
  MKO10065659_A_mmu-mir-1968
  gRNA
accatccttaacagctgcag

SEQ ID NO: 65660 - DNA, 20 bp, Artificial Sequence
  MKO10065660_A_mmu-mir-3106
  gRNA
tggcaacaggagaggagcac

SEQ ID NO: 65661 - DNA, 20 bp, Artificial Sequence
  MKO10065661_A_mmu-mir-3106
  gRNA
atgagccacctgtgcttccc

SEQ ID NO: 65662 - DNA, 20 bp, Artificial Sequence
  MKO10065662_A_mmu-mir-3106
  gRNA
gcagccatacactcagagag

SEQ ID NO: 65663 - DNA, 20 bp, Artificial Sequence
  MKO10065663_A_mmu-mir-3106
  gRNA
tgtccccagggaagcacagg

SEQ ID NO: 65664 - DNA, 20 bp, Artificial Sequence
  MKO10065664_A_mmu-mir-486
  gRNA
ctctgatctcgccctccctg

SEQ ID NO: 65665 - DNA, 20 bp, Artificial Sequence
  MKO10065665_A_mmu-mir-486
  gRNA
ctgatctcgccctccctgag

SEQ ID NO: 65666 - DNA, 20 bp, Artificial Sequence
  MKO10065666_A_mmu-mir-486
  gRNA
tcctgtactgagctgccccg

SEQ ID NO: 65667 - DNA, 20 bp, Artificial Sequence
  MKO10065667_A_mmu-mir-486
  gRNA
gtccttcactgtgctcagct

SEQ ID NO: 65668 - DNA, 20 bp, Artificial Sequence
  MKO10065668_A_mmu-mir-3107
  gRNA
ctctgatctcgccctccctg

SEQ ID NO: 65669 - DNA, 20 bp, Artificial Sequence
  MKO10065669_A_mmu-mir-3107
  gRNA
ctgatctcgccctccctgag

SEQ ID NO: 65670 - DNA, 20 bp, Artificial Sequence
  MKO10065670_A_mmu-mir-3107
  gRNA
tcctgtactgagctgccccg

SEQ ID NO: 65671 - DNA, 20 bp, Artificial Sequence
  MKO10065671_A_mmu-mir-3107
  gRNA
gtccttcactgtgctcagct

SEQ ID NO: 65672 - DNA, 20 bp, Artificial Sequence
  MKO10065672_A_mmu-mir-8108
  gRNA
gtaactacgctcctccccag

SEQ ID NO: 65673 - DNA, 20 bp, Artificial Sequence
  MKO10065673_A_mmu-mir-8108
  gRNA
gtcttatctggatatgcctc

SEQ ID NO: 65674 - DNA, 20 bp, Artificial Sequence
  MKO10065674_A_mmu-mir-8108
  gRNA
cttatctggatatgcctcag

SEQ ID NO: 65675 - DNA, 20 bp, Artificial Sequence
  MKO10065675_A_mmu-mir-8108
  gRNA
gtagttacagaaagaaatgt

SEQ ID NO: 65676 - DNA, 20 bp, Artificial Sequence
  MKO10065676_A_mmu-mir-6395
  gRNA
gctgacagaagactcatgtc

SEQ ID NO: 65677 - DNA, 20 bp, Artificial Sequence
  MKO10065677_A_mmu-mir-6395
  gRNA
actctttaaacagggcagag

SEQ ID NO: 65678 - DNA, 20 bp, Artificial Sequence
  MKO10065678_A_mmu-mir-6395
  gRNA
aaaagacaaactctttaaac

SEQ ID NO: 65679 - DNA, 20 bp, Artificial Sequence
  MKO10065679_A_mmu-mir-6395
  gRNA
ggcagagagggccagctaaa

SEQ ID NO: 65680 - DNA, 20 bp, Artificial Sequence
  MKO10065680_A_mmu-mir-383
  gRNA
gacacttgctctttctgacc

SEQ ID NO: 65681 - DNA, 20 bp, Artificial Sequence
  MKO10065681_A_mmu-mir-383
  gRNA
tttctgaccaggcagtgctg

SEQ ID NO: 65682 - DNA, 20 bp, Artificial Sequence
  MKO10065682_A_mmu-mir-383
  gRNA
cacagtcaccttctgatctg

SEQ ID NO: 65683 - DNA, 20 bp, Artificial Sequence
  MKO10065683_A_mmu-mir-383
  gRNA
ctcagatcagaaggtgactg

SEQ ID NO: 65684 - DNA, 20 bp, Artificial Sequence
  MKO10065684_A_mmu-mir-7666
  gRNA
cgcccgtgcgctgcatccca

SEQ ID NO: 65685 - DNA, 20 bp, Artificial Sequence
  MKO10065685_A_mmu-mir-7666
  gRNA
gcatcccacggcgactctcg

SEQ ID NO: 65686 - DNA, 20 bp, Artificial Sequence
  MKO10065686_A_mmu-mir-7666
  gRNA
actctcggggaagcaccgcc

SEQ ID NO: 65687 - DNA, 20 bp, Artificial Sequence
  MKO10065687_A_mmu-mir-7666
  gRNA
gggaagcaccgcccgggcta

SEQ ID NO: 65688 - DNA, 20 bp, Artificial Sequence
  MKO10065688_A_mmu-mir-710
  gRNA
cctaagttctaaagagttga

SEQ ID NO: 65689 - DNA, 20 bp, Artificial Sequence
  MKO10065689_A_mmu-mir-710
  gRNA
taagttctaaagagttgaag

SEQ ID NO: 65690 - DNA, 20 bp, Artificial Sequence
  MKO10065690_A_mmu-mir-710
  gRNA
gctcaactctccccaagact

SEQ ID NO: 65691 - DNA, 20 bp, Artificial Sequence
  MKO10065691_A_mmu-mir-710
  gRNA
cttaggtatctgaagtggag

SEQ ID NO: 65692 - DNA, 20 bp, Artificial Sequence
  MKO10065692_A_mmu-mir-7066
  gRNA
aatgtctgggaggcaggcaa

SEQ ID NO: 65693 - DNA, 20 bp, Artificial Sequence
  MKO10065693_A_mmu-mir-7066
  gRNA
gggaggcaggcaatgggtag

SEQ ID NO: 65694 - DNA, 20 bp, Artificial Sequence
  MKO10065694_A_mmu-mir-7066
  gRNA
aggcaatgggtagaggtcag

SEQ ID NO: 65695 - DNA, 20 bp, Artificial Sequence
  MKO10065695_A_mmu-mir-7066
  gRNA
ctactcatttcccaacccac

SEQ ID NO: 65696 - DNA, 20 bp, Artificial Sequence
  MKO10065696_A_mmu-mir-7240
  gRNA
acacattgaccgtgttggag

SEQ ID NO: 65697 - DNA, 20 bp, Artificial Sequence
  MKO10065697_A_mmu-mir-7240
  gRNA
gggcaggaggagtccgacgg

SEQ ID NO: 65698 - DNA, 20 bp, Artificial Sequence
  MKO10065698_A_mmu-mir-7240
  gRNA
gcagggcaggaggagtccga

SEQ ID NO: 65699 - DNA, 20 bp, Artificial Sequence
  MKO10065699_A_mmu-mir-7240
  gRNA
tgttggagaggaccaacggc

SEQ ID NO: 65700 - DNA, 20 bp, Artificial Sequence
  MKO10065700_A_mmu-mir-7067
  gRNA
gatcttggagtcctgtgggg

SEQ ID NO: 65701 - DNA, 20 bp, Artificial Sequence
  MKO10065701_A_mmu-mir-7067
  gRNA
ctgattgcttccctccccac

SEQ ID NO: 65702 - DNA, 20 bp, Artificial Sequence
  MKO10065702_A_mmu-mir-7067
  gRNA
ctgcagggggtggttgcaca

SEQ ID NO: 65703 - DNA, 20 bp, Artificial Sequence
  MKO10065703_A_mmu-mir-7067
  gRNA
tgacgcagggctgcaggggg

SEQ ID NO: 65704 - DNA, 20 bp, Artificial Sequence
  MKO10065704_A_mmu-mir-1969
  gRNA
catctccctgatagtgctag

SEQ ID NO: 65705 - DNA, 20 bp, Artificial Sequence
  MKO10065705_A_mmu-mir-1969
  gRNA
atccatgctgcctccatttc

SEQ ID NO: 65706 - DNA, 20 bp, Artificial Sequence
  MKO10065706_A_mmu-mir-1969
  gRNA
tgtctacagaccagaaatgg

SEQ ID NO: 65707 - DNA, 20 bp, Artificial Sequence
  MKO10065707_A_mmu-mir-1969
  gRNA
tgatgtctacagaccagaaa

SEQ ID NO: 65708 - DNA, 20 bp, Artificial Sequence
  MKO10065708_A_mmu-mir-6769b
  gRNA
caccagagcctgggtgggac

SEQ ID NO: 65709 - DNA, 20 bp, Artificial Sequence
  MKO10065709_A_mmu-mir-6769b
  gRNA
taggctcttccccacccacc

SEQ ID NO: 65710 - DNA, 20 bp, Artificial Sequence
  MKO10065710_A_mmu-mir-6769b
  gRNA
gcatcttccctgtcccaccc

SEQ ID NO: 65711 - DNA, 20 bp, Artificial Sequence
  MKO10065711_A_mmu-mir-6769b
  gRNA
gagggtgctcctggtgggtg

SEQ ID NO: 65712 - DNA, 20 bp, Artificial Sequence
  MKO10065712_A_mmu-mir-7068
  gRNA
cccagcctgagagtcagtcc

SEQ ID NO: 65713 - DNA, 20 bp, Artificial Sequence
  MKO10065713_A_mmu-mir-7068
  gRNA
gagagtcagtccagggtgag

SEQ ID NO: 65714 - DNA, 20 bp, Artificial Sequence
  MKO10065714_A_mmu-mir-7068
  gRNA
gagtgggtggtcagtcgggc

SEQ ID NO: 65715 - DNA, 20 bp, Artificial Sequence
  MKO10065715_A_mmu-mir-7068
  gRNA
ctcaccctggactgactctc

SEQ ID NO: 65716 - DNA, 20 bp, Artificial Sequence
  MKO10065716_A_mmu-mir-28b
  gRNA
ctcacaatctatttagtggc

SEQ ID NO: 65717 - DNA, 20 bp, Artificial Sequence
  MKO10065717_A_mmu-mir-28b
  gRNA
gcacactgccagaatgtgtg

SEQ ID NO: 65718 - DNA, 20 bp, Artificial Sequence
  MKO10065718_A_mmu-mir-28b
  gRNA
ttaagatgcctcacacattc

SEQ ID NO: 65719 - DNA, 20 bp, Artificial Sequence
  MKO10065719_A_mmu-mir-28b
  gRNA
ggtcacatggactatagaaa

SEQ ID NO: 65720 - DNA, 20 bp, Artificial Sequence
  MKO10065720_A_mmu-mir-1668
  gRNA
ccttcacatccctgattctg

SEQ ID NO: 65721 - DNA, 20 bp, Artificial Sequence
  MKO10065721_A_mmu-mir-1668
  gRNA
gacctgagagcctgcagaga

SEQ ID NO: 65722 - DNA, 20 bp, Artificial Sequence
  MKO10065722_A_mmu-mir-1668
  gRNA
tgcagagaaggaggcctttg

SEQ ID NO: 65723 - DNA, 20 bp, Artificial Sequence
  MKO10065723_A_mmu-mir-1668
  gRNA
ctttgaggctgagctcacct

SEQ ID NO: 65724 - DNA, 20 bp, Artificial Sequence
  MKO10065724_A_mmu-mir-8111
  gRNA
tacctctgcctcatgagtgc

SEQ ID NO: 65725 - DNA, 20 bp, Artificial Sequence
  MKO10065725_A_mmu-mir-8111
  gRNA
ctcatgagtgctgggattaa

SEQ ID NO: 65726 - DNA, 20 bp, Artificial Sequence
  MKO10065726_A_mmu-mir-8111
  gRNA
taatttttatacaccgggca

SEQ ID NO: 65727 - DNA, 20 bp, Artificial Sequence
  MKO10065727_A_mmu-mir-8111
  gRNA
gcactcagagaaactgaggc

SEQ ID NO: 65728 - DNA, 20 bp, Artificial Sequence
  MKO10065728_A_mmu-mir-1199
  gRNA
cgagcgcgctccagggcgcg

SEQ ID NO: 65729 - DNA, 20 bp, Artificial Sequence
  MKO10065729_A_mmu-mir-1199
  gRNA
cggcagcggagtaccggagc

SEQ ID NO: 65730 - DNA, 20 bp, Artificial Sequence
  MKO10065730_A_mmu-mir-1199
  gRNA
gagccgggccgactgagcac

SEQ ID NO: 65731 - DNA, 20 bp, Artificial Sequence
  MKO10065731_A_mmu-mir-1199
  gRNA
gagttcctcgcccgcgcgac

SEQ ID NO: 65732 - DNA, 20 bp, Artificial Sequence
  MKO10065732_A_mmu-mir-709
  gRNA
ctgtcctgtttgagcagcac

SEQ ID NO: 65733 - DNA, 20 bp, Artificial Sequence
  MKO10065733_A_mmu-mir-709
  gRNA
ctgtttgagcagcactgggg

SEQ ID NO: 65734 - DNA, 20 bp, Artificial Sequence
  MKO10065734_A_mmu-mir-709
  gRNA
gagcagcactggggaggcag

SEQ ID NO: 65735 - DNA, 20 bp, Artificial Sequence
  MKO10065735_A_mmu-mir-709
  gRNA
agcactggggaggcagaggc

SEQ ID NO: 65736 - DNA, 20 bp, Artificial Sequence
  MKO10065736_A_mmu-mir-181d
  gRNA
cattcatcccccggtgggtc

SEQ ID NO: 65737 - DNA, 20 bp, Artificial Sequence
  MKO10065737_A_mmu-mir-181d
  gRNA
ccgggggatgaatgtcactg

SEQ ID NO: 65738 - DNA, 20 bp, Artificial Sequence
  MKO10065738_A_mmu-mir-181d
  gRNA
gaggcagccagacccaccgg

SEQ ID NO: 65739 - DNA, 20 bp, Artificial Sequence
  MKO10065739_A_mmu-mir-181d
  gRNA
aggaggcagccagacccacc

SEQ ID NO: 65740 - DNA, 20 bp, Artificial Sequence
  MKO10065740_A_mmu-mir-181c
  gRNA
cgggtggcagttccaggcct

SEQ ID NO: 65741 - DNA, 20 bp, Artificial Sequence
  MKO10065741_A_mmu-mir-181c
  gRNA
aggcctcggggtccactcaa

SEQ ID NO: 65742 - DNA, 20 bp, Artificial Sequence
  MKO10065742_A_mmu-mir-181c
  gRNA
ggggtccactcaacggtcga

SEQ ID NO: 65743 - DNA, 20 bp, Artificial Sequence
  MKO10065743_A_mmu-mir-181c
  gRNA
agctgcccaaactcaccgac

SEQ ID NO: 65744 - DNA, 20 bp, Artificial Sequence
  MKO10065744_A_mmu-mir-23a
  gRNA
ctcactgtgcctcggacggc

SEQ ID NO: 65745 - DNA, 20 bp, Artificial Sequence
  MKO10065745_A_mmu-mir-23a
  gRNA
cactgtgcctcggacggctg

SEQ ID NO: 65746 - DNA, 20 bp, Artificial Sequence
  MKO10065746_A_mmu-mir-23a
  gRNA
ccaggaaccccagccgtccg

SEQ ID NO: 65747 - DNA, 20 bp, Artificial Sequence
  MKO10065747_A_mmu-mir-23a
  gRNA
cagggtcagttggaaatccc

SEQ ID NO: 65748 - DNA, 20 bp, Artificial Sequence
  MKO10065748_A_mmu-mir-27a
  gRNA
tgacaactggcctgaggagc

SEQ ID NO: 65749 - DNA, 20 bp, Artificial Sequence
  MKO10065749_A_mmu-mir-27a
  gRNA
ggcttagctgcttgtgagca

SEQ ID NO: 65750 - DNA, 20 bp, Artificial Sequence
  MKO10065750_A_mmu-mir-27a
  gRNA
cagcaaagtcgtgttcacag

SEQ ID NO: 65751 - DNA, 20 bp, Artificial Sequence
  MKO10065751_A_mmu-mir-27a
  gRNA
gcagctaagccctgctcctc

SEQ ID NO: 65752 - DNA, 20 bp, Artificial Sequence
  MKO10065752_A_mmu-mir-24-2
  gRNA
ggcagggctctgcctctctc

SEQ ID NO: 65753 - DNA, 20 bp, Artificial Sequence
  MKO10065753_A_mmu-mir-24-2
  gRNA
gtgcactggctcagttcagc

SEQ ID NO: 65754 - DNA, 20 bp, Artificial Sequence
  MKO10065754_A_mmu-mir-24-2
  gRNA
tggctcagttcagcaggaac

SEQ ID NO: 65755 - DNA, 20 bp, Artificial Sequence
  MKO10065755_A_mmu-mir-24-2
  gRNA
gaacaggagtccagccccct

SEQ ID NO: 65756 - DNA, 20 bp, Artificial Sequence
  MKO10065756_A_mmu-mir-3074-2
  gRNA
gtgcactggctcagttcagc

SEQ ID NO: 65757 - DNA, 20 bp, Artificial Sequence
  MKO10065757_A_mmu-mir-3074-2
  gRNA
tggctcagttcagcaggaac

SEQ ID NO: 65758 - DNA, 20 bp, Artificial Sequence
  MKO10065758_A_mmu-mir-3074-2
  gRNA
taggcacgggaggcggagcc

SEQ ID NO: 65759 - DNA, 20 bp, Artificial Sequence
  MKO10065759_A_mmu-mir-3074-2
  gRNA
agctcagtaggcacgggagg

SEQ ID NO: 65760 - DNA, 20 bp, Artificial Sequence
  MKO10065760_A_mmu-mir-7069
  gRNA
gcaggcagtgtttgggggcc

SEQ ID NO: 65761 - DNA, 20 bp, Artificial Sequence
  MKO10065761_A_mmu-mir-7069
  gRNA
gcagtgtttgggggcctggg

SEQ ID NO: 65762 - DNA, 20 bp, Artificial Sequence
  MKO10065762_A_mmu-mir-7069
  gRNA
cctgccctgccaacccctac

SEQ ID NO: 65763 - DNA, 20 bp, Artificial Sequence
  MKO10065763_A_mmu-mir-7069
  gRNA
cctgtaggggttggcagggc

SEQ ID NO: 65764 - DNA, 20 bp, Artificial Sequence
  MKO10065764_A_mmu-mir-7070
  gRNA
gctccaggtgaggggagctg

SEQ ID NO: 65765 - DNA, 20 bp, Artificial Sequence
  MKO10065765_A_mmu-mir-7070
  gRNA
caggtgaggggagctgaggc

SEQ ID NO: 65766 - DNA, 20 bp, Artificial Sequence
  MKO10065766_A_mmu-mir-7070
  gRNA
gtgaggggagctgaggcagg

SEQ ID NO: 65767 - DNA, 20 bp, Artificial Sequence
  MKO10065767_A_mmu-mir-7070
  gRNA
ggcaggaggccaagcaggct

SEQ ID NO: 65768 - DNA, 20 bp, Artificial Sequence
  MKO10065768_A_mmu-mir-8109
  gRNA
gtggcgcgcgccgggagccc

SEQ ID NO: 65769 - DNA, 20 bp, Artificial Sequence
  MKO10065769_A_mmu-mir-8109
  gRNA
gcgagcgcagcgccgcgtgc

SEQ ID NO: 65770 - DNA, 20 bp, Artificial Sequence
  MKO10065770_A_mmu-mir-8109
  gRNA
gcagcgccgcgtgccggccg

SEQ ID NO: 65771 - DNA, 20 bp, Artificial Sequence
  MKO10065771_A_mmu-mir-8109
  gRNA
cccgcccgccactcgcttcc

SEQ ID NO: 65772 - DNA, 20 bp, Artificial Sequence
  MKO10065772_A_mmu-mir-7071
  gRNA
cggccgggggcccgggggcc

SEQ ID NO: 65773 - DNA, 20 bp, Artificial Sequence
  MKO10065773_A_mmu-mir-7071
  gRNA
ggcccgggggcccgggagcg

SEQ ID NO: 65774 - DNA, 20 bp, Artificial Sequence
  MKO10065774_A_mmu-mir-7071
  gRNA
cacctcgctcccgggccccc

SEQ ID NO: 65775 - DNA, 20 bp, Artificial Sequence
  MKO10065775_A_mmu-mir-7071
  gRNA
cgctgcagcacctcgctccc

SEQ ID NO: 65776 - DNA, 20 bp, Artificial Sequence
  MKO10065776_A_mmu-mir-8110
  gRNA
tgccctaacagccgtttgtt

SEQ ID NO: 65777 - DNA, 20 bp, Artificial Sequence
  MKO10065777_A_mmu-mir-8110
  gRNA
ttaatctgaattgagaagcg

SEQ ID NO: 65778 - DNA, 20 bp, Artificial Sequence
  MKO10065778_A_mmu-mir-8110
  gRNA
ctgaattgagaagcgtggat

SEQ ID NO: 65779 - DNA, 20 bp, Artificial Sequence
  MKO10065779_A_mmu-mir-8110
  gRNA
gaattgagaagcgtggattg

SEQ ID NO: 65780 - DNA, 20 bp, Artificial Sequence
  MKO10065780_A_mmu-mir-138-2
  gRNA
tgcagctggtgttgtgaatc

SEQ ID NO: 65781 - DNA, 20 bp, Artificial Sequence
  MKO10065781_A_mmu-mir-138-2
  gRNA
cccggctatttcacgacacc

SEQ ID NO: 65782 - DNA, 20 bp, Artificial Sequence
  MKO10065782_A_mmu-mir-138-2
  gRNA
taagaggatgcgctgctcgt

SEQ ID NO: 65783 - DNA, 20 bp, Artificial Sequence
  MKO10065783_A_mmu-mir-138-2
  gRNA
cctggtgtcgtgaaatagcc

SEQ ID NO: 65784 - DNA, 20 bp, Artificial Sequence
  MKO10065784_A_mmu-mir-7072
  gRNA
gggaggggagacaagaggca

SEQ ID NO: 65785 - DNA, 20 bp, Artificial Sequence
  MKO10065785_A_mmu-mir-7072
  gRNA
gctggggaagaagagaagct

SEQ ID NO: 65786 - DNA, 20 bp, Artificial Sequence
  MKO10065786_A_mmu-mir-7072
  gRNA
ttcttggacattgaaatggg

SEQ ID NO: 65787 - DNA, 20 bp, Artificial Sequence
  MKO10065787_A_mmu-mir-7072
  gRNA
cttggacattgaaatgggag

SEQ ID NO: 65788 - DNA, 20 bp, Artificial Sequence
  MKO10065788_A_mmu-mir-7073
  gRNA
agacaagtcggctgttgggg

SEQ ID NO: 65789 - DNA, 20 bp, Artificial Sequence
  MKO10065789_A_mmu-mir-7073
  gRNA
ctgagacaagtcggctgttg

SEQ ID NO: 65790 - DNA, 20 bp, Artificial Sequence
  MKO10065790_A_mmu-mir-7073
  gRNA
gtcggctgttggggaggaaa

SEQ ID NO: 65791 - DNA, 20 bp, Artificial Sequence
  MKO10065791_A_mmu-mir-7073
  gRNA
tagtctttctagctttctgg

SEQ ID NO: 65792 - DNA, 20 bp, Artificial Sequence
  MKO10065792_A_mmu-mir-328
  gRNA
ggtccagtgtacttggggac

SEQ ID NO: 65793 - DNA, 20 bp, Artificial Sequence
  MKO10065793_A_mmu-mir-328
  gRNA
gtgtacttggggacagggga

SEQ ID NO: 65794 - DNA, 20 bp, Artificial Sequence
  MKO10065794_A_mmu-mir-328
  gRNA
caggggacggaagggcagag

SEQ ID NO: 65795 - DNA, 20 bp, Artificial Sequence
  MKO10065795_A_mmu-mir-328
  gRNA
acggaagggcagagagggcc

SEQ ID NO: 65796 - DNA, 20 bp, Artificial Sequence
  MKO10065796_A_mmu-mir-1966
  gRNA
gtatgcatgtagaatagtgt

SEQ ID NO: 65797 - DNA, 20 bp, Artificial Sequence
  MKO10065797_A_mmu-mir-1966
  gRNA
gcatgtagaatagtgttgga

SEQ ID NO: 65798 - DNA, 20 bp, Artificial Sequence
  MKO10065798_A_mmu-mir-1966
  gRNA
gaatagtgttggaagggagc

SEQ ID NO: 65799 - DNA, 20 bp, Artificial Sequence
  MKO10065799_A_mmu-mir-1966
  gRNA
tcagaaagagcctaaatctc

SEQ ID NO: 65800 - DNA, 20 bp, Artificial Sequence
  MKO10065800_A_mmu-mir-7074
  gRNA
catacacaccctgcagggag

SEQ ID NO: 65801 - DNA, 20 bp, Artificial Sequence
  MKO10065801_A_mmu-mir-7074
  gRNA
caccctgcagggagaggaga

SEQ ID NO: 65802 - DNA, 20 bp, Artificial Sequence
  MKO10065802_A_mmu-mir-7074
  gRNA
ctccagtccagcaggtaact

SEQ ID NO: 65803 - DNA, 20 bp, Artificial Sequence
  MKO10065803_A_mmu-mir-7074
  gRNA
ctgattgcttgggtgggaag

SEQ ID NO: 65804 - DNA, 20 bp, Artificial Sequence
  MKO10065804_A_mmu-mir-7075
  gRNA
caacgctgggaaagaagaca

SEQ ID NO: 65805 - DNA, 20 bp, Artificial Sequence
  MKO10065805_A_mmu-mir-7075
  gRNA
gctgggaaagaagacatggt

SEQ ID NO: 65806 - DNA, 20 bp, Artificial Sequence
  MKO10065806_A_mmu-mir-7075
  gRNA
atggttggctccgcgagccc

SEQ ID NO: 65807 - DNA, 20 bp, Artificial Sequence
  MKO10065807_A_mmu-mir-7075
  gRNA
aaaccatgtcctcctccccg

SEQ ID NO: 65808 - DNA, 20 bp, Artificial Sequence
  MKO10065808_A_mmu-mir-140
  gRNA
ctgccagtggttttacccta

SEQ ID NO: 65809 - DNA, 20 bp, Artificial Sequence
  MKO10065809_A_mmu-mir-140
  gRNA
cagtggttttaccctatggt

SEQ ID NO: 65810 - DNA, 20 bp, Artificial Sequence
  MKO10065810_A_mmu-mir-140
  gRNA
acgtcatgctgttctaccac

SEQ ID NO: 65811 - DNA, 20 bp, Artificial Sequence
  MKO10065811_A_mmu-mir-140
  gRNA
tctaccacagggtagaacca

SEQ ID NO: 65812 - DNA, 20 bp, Artificial Sequence
  MKO10065812_A_mmu-mir-3108
  gRNA
gtctctaaagctagacgttc

SEQ ID NO: 65813 - DNA, 20 bp, Artificial Sequence
  MKO10065813_A_mmu-mir-3108
  gRNA
atttttttatttcggcgtct

SEQ ID NO: 65814 - DNA, 20 bp, Artificial Sequence
  MKO10065814_A_mmu-mir-3108
  gRNA
cgtctaggtctagagtctca

SEQ ID NO: 65815 - DNA, 20 bp, Artificial Sequence
  MKO10065815_A_mmu-mir-3108
  gRNA
ggtctagagtctcaaggaag

SEQ ID NO: 65816 - DNA, 20 bp, Artificial Sequence
  MKO10065816_A_mmu-mir-3473d
  gRNA
caaataagttttcaaagggc

SEQ ID NO: 65817 - DNA, 20 bp, Artificial Sequence
  MKO10065817_A_mmu-mir-3473d
  gRNA
gttttcaaagggctggaaag

SEQ ID NO: 65818 - DNA, 20 bp, Artificial Sequence
  MKO10065818_A_mmu-mir-3473d
  gRNA
agggctggaaagtggctcag

SEQ ID NO: 65819 - DNA, 20 bp, Artificial Sequence
  MKO10065819_A_mmu-mir-3473d
  gRNA
gggctggagaggtggctcag

SEQ ID NO: 65820 - DNA, 20 bp, Artificial Sequence
  MKO10065820_A_mmu-mir-1957b
  gRNA
tacatcttaagtttcttatg

SEQ ID NO: 65821 - DNA, 20 bp, Artificial Sequence
  MKO10065821_A_mmu-mir-1957b
  gRNA
tcttaagtttcttatggggc

SEQ ID NO: 65822 - DNA, 20 bp, Artificial Sequence
  MKO10065822_A_mmu-mir-1957b
  gRNA
tctttttcttggtacagggc

SEQ ID NO: 65823 - DNA, 20 bp, Artificial Sequence
  MKO10065823_A_mmu-mir-1957b
  gRNA
gcattctttttcttggtaca

SEQ ID NO: 65824 - DNA, 20 bp, Artificial Sequence
  MKO10065824_A_mmu-mir-7076
  gRNA
tcatgttgtcacagccaacc

SEQ ID NO: 65825 - DNA, 20 bp, Artificial Sequence
  MKO10065825_A_mmu-mir-7076
  gRNA
tgagaccataccacctcccc

SEQ ID NO: 65826 - DNA, 20 bp, Artificial Sequence
  MKO10065826_A_mmu-mir-7076
  gRNA
atgactaccactgtctcccc

SEQ ID NO: 65827 - DNA, 20 bp, Artificial Sequence
  MKO10065827_A_mmu-mir-7076
  gRNA
gtatggtctcagcggggtcc

SEQ ID NO: 65828 - DNA, 20 bp, Artificial Sequence
  MKO10065828_A_mmu-mir-7077
  gRNA
ttcggaaacggcataggcca

SEQ ID NO: 65829 - DNA, 20 bp, Artificial Sequence
  MKO10065829_A_mmu-mir-7077
  gRNA
ataggccaaggtcccatggc

SEQ ID NO: 65830 - DNA, 20 bp, Artificial Sequence
  MKO10065830_A_mmu-mir-7077
  gRNA
aatagcctgccatgggacct

SEQ ID NO: 65831 - DNA, 20 bp, Artificial Sequence
  MKO10065831_A_mmu-mir-7077
  gRNA
gtcagggaatagcctgccat

SEQ ID NO: 65832 - DNA, 20 bp, Artificial Sequence
  MKO10065832_A_mmu-mir-7078
  gRNA
catagtggacagggtgtggg

SEQ ID NO: 65833 - DNA, 20 bp, Artificial Sequence
  MKO10065833_A_mmu-mir-7078
  gRNA
gtggacagggtgtgggtggt

SEQ ID NO: 65834 - DNA, 20 bp, Artificial Sequence
  MKO10065834_A_mmu-mir-7078
  gRNA
gtgtgggtggtaggagacgc

SEQ ID NO: 65835 - DNA, 20 bp, Artificial Sequence
  MKO10065835_A_mmu-mir-7078
  gRNA
gggtggtaggagacgctggc

SEQ ID NO: 65836 - DNA, 20 bp, Artificial Sequence
  MKO10065836_A_mmu-mir-7687
  gRNA
ccactcagtcgccccgccac

SEQ ID NO: 65837 - DNA, 20 bp, Artificial Sequence
  MKO10065837_A_mmu-mir-7687
  gRNA
tcagacacagcctgcgcctc

SEQ ID NO: 65838 - DNA, 20 bp, Artificial Sequence
  MKO10065838_A_mmu-mir-7687
  gRNA
cctgtggcggggcgactgag

SEQ ID NO: 65839 - DNA, 20 bp, Artificial Sequence
  MKO10065839_A_mmu-mir-7687
  gRNA
ggcccccctcacctgtggcg

SEQ ID NO: 65840 - DNA, 20 bp, Artificial Sequence
  MKO10065840_A_mmu-mir-7237
  gRNA
tgtacatggtagcttgtgac

SEQ ID NO: 65841 - DNA, 20 bp, Artificial Sequence
  MKO10065841_A_mmu-mir-7237
  gRNA
atggtagcttgtgacaggac

SEQ ID NO: 65842 - DNA, 20 bp, Artificial Sequence
  MKO10065842_A_mmu-mir-7237
  gRNA
cttgtgacaggactggccct

SEQ ID NO: 65843 - DNA, 20 bp, Artificial Sequence
  MKO10065843_A_mmu-mir-7237
  gRNA
ggatggctttgctctcccaa

SEQ ID NO: 65844 - DNA, 20 bp, Artificial Sequence
  MKO10065844_A_mmu-mir-6396
  gRNA
tgtagccatagtccaggact

SEQ ID NO: 65845 - DNA, 20 bp, Artificial Sequence
  MKO10065845_A_mmu-mir-6396
  gRNA
tagtccaggactaggagcta

SEQ ID NO: 65846 - DNA, 20 bp, Artificial Sequence
  MKO10065846_A_mmu-mir-6396
  gRNA
ggactaggagctaaggcccc

SEQ ID NO: 65847 - DNA, 20 bp, Artificial Sequence
  MKO10065847_A_mmu-mir-6396
  gRNA
cctagtcagagaggcctctg

SEQ ID NO: 65848 - DNA, 20 bp, Artificial Sequence
  MKO10065848_A_mmu-mir-7079
  gRNA
gttctgcgcccggagggctg

SEQ ID NO: 65849 - DNA, 20 bp, Artificial Sequence
  MKO10065849_A_mmu-mir-7079
  gRNA
gtcctgtgcacaggtcctgt

SEQ ID NO: 65850 - DNA, 20 bp, Artificial Sequence
  MKO10065850_A_mmu-mir-7079
  gRNA
actcactgcctcagccctcc

SEQ ID NO: 65851 - DNA, 20 bp, Artificial Sequence
  MKO10065851_A_mmu-mir-7079
  gRNA
ctggaaagagaacagaagtc

SEQ ID NO: 65852 - DNA, 20 bp, Artificial Sequence
  MKO10065852_A_mmu-mir-7080
  gRNA
atgagtgtgaaggtaggagc

SEQ ID NO: 65853 - DNA, 20 bp, Artificial Sequence
  MKO10065853_A_mmu-mir-7080
  gRNA
agtgtgaaggtaggagctgg

SEQ ID NO: 65854 - DNA, 20 bp, Artificial Sequence
  MKO10065854_A_mmu-mir-7080
  gRNA
gtgaaggtaggagctggagg

SEQ ID NO: 65855 - DNA, 20 bp, Artificial Sequence
  MKO10065855_A_mmu-mir-7080
  gRNA
gtaggagctggaggtgggtt

SEQ ID NO: 65856 - DNA, 20 bp, Artificial Sequence
  MKO10065856_A_mmu-mir-1967
  gRNA
ccttttgtctgacattcatg

SEQ ID NO: 65857 - DNA, 20 bp, Artificial Sequence
  MKO10065857_A_mmu-mir-1967
  gRNA
tctgacattcatgaggatcc

SEQ ID NO: 65858 - DNA, 20 bp, Artificial Sequence
  MKO10065858_A_mmu-mir-1967
  gRNA
tgacattcatgaggatcctg

SEQ ID NO: 65859 - DNA, 20 bp, Artificial Sequence
  MKO10065859_A_mmu-mir-1967
  gRNA
ggagaagatgcagaattccc

SEQ ID NO: 65860 - DNA, 20 bp, Artificial Sequence
  MKO10065860_A_mmu-mir-21c
  gRNA
tctgttcagctattctcagg

SEQ ID NO: 65861 - DNA, 20 bp, Artificial Sequence
  MKO10065861_A_mmu-mir-21c
  gRNA
tgtagcttagcttatcagac

SEQ ID NO: 65862 - DNA, 20 bp, Artificial Sequence
  MKO10065862_A_mmu-mir-21c
  gRNA
gctctgttcagctattctca

SEQ ID NO: 65863 - DNA, 20 bp, Artificial Sequence
  MKO10065863_A_mmu-mir-1903
  gRNA
ttcttcttcttcctgagaca

SEQ ID NO: 65864 - DNA, 20 bp, Artificial Sequence
  MKO10065864_A_mmu-mir-1903
  gRNA
ctgagacatggcccgggcag

SEQ ID NO: 65865 - DNA, 20 bp, Artificial Sequence
  MKO10065865_A_mmu-mir-1903
  gRNA
atggcccgggcagtggctcc

SEQ ID NO: 65866 - DNA, 20 bp, Artificial Sequence
  MKO10065866_A_mmu-mir-1903
  gRNA
cgggcagtggctcctggaag

SEQ ID NO: 65867 - DNA, 20 bp, Artificial Sequence
  MKO10065867_A_mmu-mir-101c
  gRNA
gttgagcagtcagtcatcac

SEQ ID NO: 65868 - DNA, 20 bp, Artificial Sequence
  MKO10065868_A_mmu-mir-101c
  gRNA
tcatcacaggactgtgcagt

SEQ ID NO: 65869 - DNA, 20 bp, Artificial Sequence
  MKO10065869_A_mmu-mir-101c
  gRNA
agtagggcatcagtcatcac

SEQ ID NO: 65870 - DNA, 20 bp, Artificial Sequence
  MKO10065870_A_mmu-mir-5618
  gRNA
aaacacactataccatgtaa

SEQ ID NO: 65871 - DNA, 20 bp, Artificial Sequence
  MKO10065871_A_mmu-mir-5618
  gRNA
aggtcactacacggtgtaaa

SEQ ID NO: 65872 - DNA, 20 bp, Artificial Sequence
  MKO10065872_A_mmu-mir-5618
  gRNA
gtgtgtttcaggtcactaca

SEQ ID NO: 65873 - DNA, 20 bp, Artificial Sequence
  MKO10065873_A_mmu-mir-5618
  gRNA
gtctgaaactaccctttaca

SEQ ID NO: 65874 - DNA, 20 bp, Artificial Sequence
  MKO10065874_A_mmu-mir-1899
  gRNA
ggataaatcttagtcagcga

SEQ ID NO: 65875 - DNA, 20 bp, Artificial Sequence
  MKO10065875_A_mmu-mir-1899
  gRNA
tggccgaatctgcttcctcc

SEQ ID NO: 65876 - DNA, 20 bp, Artificial Sequence
  MKO10065876_A_mmu-mir-1899
  gRNA
gttagaatgaatgtgctaag

SEQ ID NO: 65877 - DNA, 20 bp, Artificial Sequence
  MKO10065877_A_mmu-mir-1899
  gRNA
taaccaggaggaagcagatt

SEQ ID NO: 65878 - DNA, 20 bp, Artificial Sequence
  MKO10065878_A_mmu-mir-6237
  gRNA
cagtgtcttcaatgtgggac

SEQ ID NO: 65879 - DNA, 20 bp, Artificial Sequence
  MKO10065879_A_mmu-mir-6237
  gRNA
tcaagttaccctttaactta

SEQ ID NO: 65880 - DNA, 20 bp, Artificial Sequence
  MKO10065880_A_mmu-mir-6237
  gRNA
ttaccctttaacttaaggat

SEQ ID NO: 65881 - DNA, 20 bp, Artificial Sequence
  MKO10065881_A_mmu-mir-6237
  gRNA
ttaacttaaggattgggtct

SEQ ID NO: 65882 - DNA, 20 bp, Artificial Sequence
  MKO10065882_A_mmu-mir-7650
  gRNA
gagttttgatatatacaaga

SEQ ID NO: 65883 - DNA, 20 bp, Artificial Sequence
  MKO10065883_A_mmu-mir-7650
  gRNA
aatgagttctgggttgcaag

SEQ ID NO: 65884 - DNA, 20 bp, Artificial Sequence
  MKO10065884_A_mmu-mir-7650
  gRNA
catactgagcaatgagttct

SEQ ID NO: 65885 - DNA, 20 bp, Artificial Sequence
  MKO10065885_A_mmu-mir-7650
  gRNA
aagaaggaatataagcacaa

SEQ ID NO: 65886 - DNA, 20 bp, Artificial Sequence
  MKO10065886_A_mmu-mir-7081
  gRNA
gtattctcaggcctgtgagg

SEQ ID NO: 65887 - DNA, 20 bp, Artificial Sequence
  MKO10065887_A_mmu-mir-7081
  gRNA
taccacagatttataatccc

SEQ ID NO: 65888 - DNA, 20 bp, Artificial Sequence
  MKO10065888_A_mmu-mir-7081
  gRNA
tcccctggtatcctcctcac

SEQ ID NO: 65889 - DNA, 20 bp, Artificial Sequence
  MKO10065889_A_mmu-mir-7081
  gRNA
gtggtaaagtagtattcccc

SEQ ID NO: 65890 - DNA, 20 bp, Artificial Sequence
  MKO10065890_A_mmu-mir-1900
  gRNA
aattgaaggaccagagaggg

SEQ ID NO: 65891 - DNA, 20 bp, Artificial Sequence
  MKO10065891_A_mmu-mir-1900
  gRNA
aaggaccagagagggcggcc

SEQ ID NO: 65892 - DNA, 20 bp, Artificial Sequence
  MKO10065892_A_mmu-mir-1900
  gRNA
gacacccgggccgccctctc

SEQ ID NO: 65893 - DNA, 20 bp, Artificial Sequence
  MKO10065893_A_mmu-mir-1900
  gRNA
ggagcctggaggggacaccc

SEQ ID NO: 65894 - DNA, 20 bp, Artificial Sequence
  MKO10065894_A_mmu-mir-7082
  gRNA
gtctggagacagacagcaag

SEQ ID NO: 65895 - DNA, 20 bp, Artificial Sequence
  MKO10065895_A_mmu-mir-7082
  gRNA
gacagacagcaaggggggcc

SEQ ID NO: 65896 - DNA, 20 bp, Artificial Sequence
  MKO10065896_A_mmu-mir-7082
  gRNA
gtcagtggcctcccagagcc

SEQ ID NO: 65897 - DNA, 20 bp, Artificial Sequence
  MKO10065897_A_mmu-mir-7082
  gRNA
tgggcaaccctggctctggg

SEQ ID NO: 65898 - DNA, 20 bp, Artificial Sequence
  MKO10065898_A_mmu-mir-199a-1
  gRNA
tgaacaggtagtctgaacac

SEQ ID NO: 65899 - DNA, 20 bp, Artificial Sequence
  MKO10065899_A_mmu-mir-199a-1
  gRNA
aggtagtctgaacactggga

SEQ ID NO: 65900 - DNA, 20 bp, Artificial Sequence
  MKO10065900_A_mmu-mir-199a-1
  gRNA
tagtctgaacactgggatgg

SEQ ID NO: 65901 - DNA, 20 bp, Artificial Sequence
  MKO10065901_A_mmu-mir-199a-1
  gRNA
gtctgaacactgggatggcg

SEQ ID NO: 65902 - DNA, 20 bp, Artificial Sequence
  MKO10065902_A_mmu-mir-1946b
  gRNA
aagcatgtgccaccactgcc

SEQ ID NO: 65903 - DNA, 20 bp, Artificial Sequence
  MKO10065903_A_mmu-mir-1946b
  gRNA
ctcaaattcactctgaaagc

SEQ ID NO: 65904 - DNA, 20 bp, Artificial Sequence
  MKO10065904_A_mmu-mir-1946b
  gRNA
tcactctgaaagctgggcag

SEQ ID NO: 65905 - DNA, 20 bp, Artificial Sequence
  MKO10065905_A_mmu-mir-1946b
  gRNA
ctctgaaagctgggcagtgg

SEQ ID NO: 65906 - DNA, 20 bp, Artificial Sequence
  MKO10065906_A_mmu-mir-7083
  gRNA
cccgagcaattctggggtcc

SEQ ID NO: 65907 - DNA, 20 bp, Artificial Sequence
  MKO10065907_A_mmu-mir-7083
  gRNA
tctggggtccaggagagcag

SEQ ID NO: 65908 - DNA, 20 bp, Artificial Sequence
  MKO10065908_A_mmu-mir-7083
  gRNA
gtgcaggggagggtcggggc

SEQ ID NO: 65909 - DNA, 20 bp, Artificial Sequence
  MKO10065909_A_mmu-mir-7083
  gRNA
atgggtgcaggggagggtcg

SEQ ID NO: 65910 - DNA, 20 bp, Artificial Sequence
  MKO10065910_A_mmu-mir-7084
  gRNA
aaacctgtggtgcagaggac

SEQ ID NO: 65911 - DNA, 20 bp, Artificial Sequence
  MKO10065911_A_mmu-mir-7084
  gRNA
acctgtggtgcagaggacag

SEQ ID NO: 65912 - DNA, 20 bp, Artificial Sequence
  MKO10065912_A_mmu-mir-7084
  gRNA
gtgcagaggacaggggtcag

SEQ ID NO: 65913 - DNA, 20 bp, Artificial Sequence
  MKO10065913_A_mmu-mir-7084
  gRNA
gaataaaacctgtggtgcag

SEQ ID NO: 65914 - DNA, 20 bp, Artificial Sequence
  MKO10065914_A_mmu-mir-100
  gRNA
gcacacaagcttgtgtctat

SEQ ID NO: 65915 - DNA, 20 bp, Artificial Sequence
  MKO10065915_A_mmu-mir-100
  gRNA
cagcacaagttcggatctac

SEQ ID NO: 65916 - DNA, 20 bp, Artificial Sequence
  MKO10065916_A_mmu-mir-100
  gRNA
gtgcagaatcagcacaagtt

SEQ ID NO: 65917 - DNA, 20 bp, Artificial Sequence
  MKO10065917_A_mmu-mir-100
  gRNA
tctataggtatgtgtctgtt

SEQ ID NO: 65918 - DNA, 20 bp, Artificial Sequence
  MKO10065918_A_mmu-let-7a-2
  gRNA
cattgtgactgcatgttccc

SEQ ID NO: 65919 - DNA, 20 bp, Artificial Sequence
  MKO10065919_A_mmu-let-7a-2
  gRNA
gactgcatgttcccaggttg

SEQ ID NO: 65920 - DNA, 20 bp, Artificial Sequence
  MKO10065920_A_mmu-let-7a-2
  gRNA
tgttcccaggttgaggtagt

SEQ ID NO: 65921 - DNA, 20 bp, Artificial Sequence
  MKO10065921_A_mmu-let-7a-2
  gRNA
tatagtttagagttacatca

SEQ ID NO: 65922 - DNA, 20 bp, Artificial Sequence
  MKO10065922_A_mmu-mir-125b-1
  gRNA
atgtttaccgtttaaatcca

SEQ ID NO: 65923 - DNA, 20 bp, Artificial Sequence
  MKO10065923_A_mmu-mir-125b-1
  gRNA
accgtttaaatccacgggtt

SEQ ID NO: 65924 - DNA, 20 bp, Artificial Sequence
  MKO10065924_A_mmu-mir-125b-1
  gRNA
ggttaggctcttgggagctg

SEQ ID NO: 65925 - DNA, 20 bp, Artificial Sequence
  MKO10065925_A_mmu-mir-125b-1
  gRNA
ttagggtctcagggactgag

SEQ ID NO: 65926 - DNA, 20 bp, Artificial Sequence
  MKO10065926_A_mmu-mir-7085
  gRNA
ggtggtggtgcagtgggggc

SEQ ID NO: 65927 - DNA, 20 bp, Artificial Sequence
  MKO10065927_A_mmu-mir-7085
  gRNA
tgcagtgggggcaggccagc

SEQ ID NO: 65928 - DNA, 20 bp, Artificial Sequence
  MKO10065928_A_mmu-mir-7085
  gRNA
agcagagcccaagtcctagc

SEQ ID NO: 65929 - DNA, 20 bp, Artificial Sequence
  MKO10065929_A_mmu-mir-7085
  gRNA
ggagaggccagctaggactt

SEQ ID NO: 65930 - DNA, 20 bp, Artificial Sequence
  MKO10065930_A_mmu-mir-7086
  gRNA
tacctgaggagatatcagaa

SEQ ID NO: 65931 - DNA, 20 bp, Artificial Sequence
  MKO10065931_A_mmu-mir-7086
  gRNA
gtccgttctgatatctcctc

SEQ ID NO: 65932 - DNA, 20 bp, Artificial Sequence
  MKO10065932_A_mmu-mir-7086
  gRNA
ctcccctcttaagaggagaa

SEQ ID NO: 65933 - DNA, 20 bp, Artificial Sequence
  MKO10065933_A_mmu-mir-7086
  gRNA
agatatcagaacggacactg

SEQ ID NO: 65934 - DNA, 20 bp, Artificial Sequence
  MKO10065934_A_mmu-mir-7087
  gRNA
ctgcgggggttttctggcag

SEQ ID NO: 65935 - DNA, 20 bp, Artificial Sequence
  MKO10065935_A_mmu-mir-7087
  gRNA
gagcagactcagtaggctgc

SEQ ID NO: 65936 - DNA, 20 bp, Artificial Sequence
  MKO10065936_A_mmu-mir-7087
  gRNA
ctctgcagagcagactcagt

SEQ ID NO: 65937 - DNA, 20 bp, Artificial Sequence
  MKO10065937_A_mmu-mir-7087
  gRNA
gttggaggcaggtgtggagc

SEQ ID NO: 65938 - DNA, 20 bp, Artificial Sequence
  MKO10065938_A_mmu-mir-34c
  gRNA
ggaatttcagtctttttacc

SEQ ID NO: 65939 - DNA, 20 bp, Artificial Sequence
  MKO10065939_A_mmu-mir-34c
  gRNA
ctggctgtgtggttagtgat

SEQ ID NO: 65940 - DNA, 20 bp, Artificial Sequence
  MKO10065940_A_mmu-mir-34c
  gRNA
caatcactaaccacacagcc

SEQ ID NO: 65941 - DNA, 20 bp, Artificial Sequence
  MKO10065941_A_mmu-mir-34c
  gRNA
tttttctgagtctagttact

SEQ ID NO: 65942 - DNA, 20 bp, Artificial Sequence
  MKO10065942_A_mmu-mir-34b
  gRNA
gatgctgtgccttgttttga

SEQ ID NO: 65943 - DNA, 20 bp, Artificial Sequence
  MKO10065943_A_mmu-mir-34b
  gRNA
gtgccttgttttgatggcag

SEQ ID NO: 65944 - DNA, 20 bp, Artificial Sequence
  MKO10065944_A_mmu-mir-34b
  gRNA
actgcctacaaaccgagcac

SEQ ID NO: 65945 - DNA, 20 bp, Artificial Sequence
  MKO10065945_A_mmu-mir-34b
  gRNA
gcgcccggtgctcggtttgt

SEQ ID NO: 65946 - DNA, 20 bp, Artificial Sequence
  MKO10065946_A_mmu-mir-6244
  gRNA
cctgctgctcaggcaggctc

SEQ ID NO: 65947 - DNA, 20 bp, Artificial Sequence
  MKO10065947_A_mmu-mir-6244
  gRNA
cgactcatagcatgggggcg

SEQ ID NO: 65948 - DNA, 20 bp, Artificial Sequence
  MKO10065948_A_mmu-mir-6244
  gRNA
gcatgggggcgtggaattat

SEQ ID NO: 65949 - DNA, 20 bp, Artificial Sequence
  MKO10065949_A_mmu-mir-6244
  gRNA
gggcgtggaattatcgggta

SEQ ID NO: 65950 - DNA, 20 bp, Artificial Sequence
  MKO10065950_A_mmu-mir-130c
  gRNA
cacaccttggaacattgcac

SEQ ID NO: 65951 - DNA, 20 bp, Artificial Sequence
  MKO10065951_A_mmu-mir-130c
  gRNA
tttgacacacaaacctgcag

SEQ ID NO: 65952 - DNA, 20 bp, Artificial Sequence
  MKO10065952_A_mmu-mir-130c
  gRNA
gtgtccagtgcaatgttcca

SEQ ID NO: 65953 - DNA, 20 bp, Artificial Sequence
  MKO10065953_A_mmu-mir-130c
  gRNA
ggatgtaaaatgtcccctgc

SEQ ID NO: 65954 - DNA, 20 bp, Artificial Sequence
  MKO10065954_A_mmu-mir-5710
  gRNA
tccggcctccagaagagtct

SEQ ID NO: 65955 - DNA, 20 bp, Artificial Sequence
  MKO10065955_A_mmu-mir-5710
  gRNA
catagtgtaaggcagtggtc

SEQ ID NO: 65956 - DNA, 20 bp, Artificial Sequence
  MKO10065956_A_mmu-mir-5710
  gRNA
gtctggctagtcccactaac

SEQ ID NO: 65957 - DNA, 20 bp, Artificial Sequence
  MKO10065957_A_mmu-mir-5710
  gRNA
ctaactggctctttgtccct

SEQ ID NO: 65958 - DNA, 20 bp, Artificial Sequence
  MKO10065958_A_mmu-mir-6385
  gRNA
agagctgaggaaccagggca

SEQ ID NO: 65959 - DNA, 20 bp, Artificial Sequence
  MKO10065959_A_mmu-mir-6385
  gRNA
ggatgacagagaggaagact

SEQ ID NO: 65960 - DNA, 20 bp, Artificial Sequence
  MKO10065960_A_mmu-mir-6385
  gRNA
atgacagagaggaagactag

SEQ ID NO: 65961 - DNA, 20 bp, Artificial Sequence
  MKO10065961_A_mmu-mir-6385
  gRNA
gactaggggcttccaggaca

SEQ ID NO: 65962 - DNA, 20 bp, Artificial Sequence
  MKO10065962_A_mmu-mir-5133
  gRNA
ctgaggaaaactgaagcgag

SEQ ID NO: 65963 - DNA, 20 bp, Artificial Sequence
  MKO10065963_A_mmu-mir-5133
  gRNA
tgaagcgagcggcagagaca

SEQ ID NO: 65964 - DNA, 20 bp, Artificial Sequence
  MKO10065964_A_mmu-mir-5133
  gRNA
gcagctccagcctctcggcg

SEQ ID NO: 65965 - DNA, 20 bp, Artificial Sequence
  MKO10065965_A_mmu-mir-5133
  gRNA
gctcgcttcagttttcctca

SEQ ID NO: 65966 - DNA, 20 bp, Artificial Sequence
  MKO10065966_A_mmu-mir-190a
  gRNA
gaatatgcttgatatatagt

SEQ ID NO: 65967 - DNA, 20 bp, Artificial Sequence
  MKO10065967_A_mmu-mir-190a
  gRNA
tgtgatatgtttgatatatt

SEQ ID NO: 65968 - DNA, 20 bp, Artificial Sequence
  MKO10065968_A_mmu-mir-190a
  gRNA
atatcaaacatatcacacag

SEQ ID NO: 65969 - DNA, 20 bp, Artificial Sequence
  MKO10065969_A_mmu-mir-190a
  gRNA
cacacagaggcctgcagaaa

SEQ ID NO: 65970 - DNA, 20 bp, Artificial Sequence
  MKO10065970_A_mmu-mir-7241
  gRNA
cccatgagtatctactacgc

SEQ ID NO: 65971 - DNA, 20 bp, Artificial Sequence
  MKO10065971_A_mmu-mir-7241
  gRNA
tacgcaggctggagatagcc

SEQ ID NO: 65972 - DNA, 20 bp, Artificial Sequence
  MKO10065972_A_mmu-mir-7241
  gRNA
gcaggctggagatagccagg

SEQ ID NO: 65973 - DNA, 20 bp, Artificial Sequence
  MKO10065973_A_mmu-mir-7241
  gRNA
cctgcgtagtagatactcat

SEQ ID NO: 65974 - DNA, 20 bp, Artificial Sequence
  MKO10065974_A_mmu-mir-7242
  gRNA
tgccaaggtgagccccttca

SEQ ID NO: 65975 - DNA, 20 bp, Artificial Sequence
  MKO10065975_A_mmu-mir-7242
  gRNA
gagccccttcatggagaagg

SEQ ID NO: 65976 - DNA, 20 bp, Artificial Sequence
  MKO10065976_A_mmu-mir-7242
  gRNA
ttggcagctcggctctactc

SEQ ID NO: 65977 - DNA, 20 bp, Artificial Sequence
  MKO10065977_A_mmu-mir-7242
  gRNA
ctccatgaaggggctcacct

SEQ ID NO: 65978 - DNA, 20 bp, Artificial Sequence
  MKO10065978_A_mmu-mir-3109
  gRNA
tctctgcctgctcctgtaaa

SEQ ID NO: 65979 - DNA, 20 bp, Artificial Sequence
  MKO10065979_A_mmu-mir-3109
  gRNA
gctcctgtaaatggatgcga

SEQ ID NO: 65980 - DNA, 20 bp, Artificial Sequence
  MKO10065980_A_mmu-mir-3109
  gRNA
gccatctcatccagatactg

SEQ ID NO: 65981 - DNA, 20 bp, Artificial Sequence
  MKO10065981_A_mmu-mir-3109
  gRNA
tcatccagatactgtggaga

SEQ ID NO: 65982 - DNA, 20 bp, Artificial Sequence
  MKO10065982_A_mmu-mir-5626
  gRNA
tcacatcactcaactgctgc

SEQ ID NO: 65983 - DNA, 20 bp, Artificial Sequence
  MKO10065983_A_mmu-mir-5626
  gRNA
tgctgccgggtcatgagaac

SEQ ID NO: 65984 - DNA, 20 bp, Artificial Sequence
  MKO10065984_A_mmu-mir-5626
  gRNA
caggaagcagttaatcgatg

SEQ ID NO: 65985 - DNA, 20 bp, Artificial Sequence
  MKO10065985_A_mmu-mir-5626
  gRNA
tgcttcctgttctcatgacc

SEQ ID NO: 65986 - DNA, 20 bp, Artificial Sequence
  MKO10065986_A_mmu-mir-184
  gRNA
cttagagtcacaaagctggc

SEQ ID NO: 65987 - DNA, 20 bp, Artificial Sequence
  MKO10065987_A_mmu-mir-184
  gRNA
agctggctggaaaagtgata

SEQ ID NO: 65988 - DNA, 20 bp, Artificial Sequence
  MKO10065988_A_mmu-mir-184
  gRNA
gctggaaaagtgataaggaa

SEQ ID NO: 65989 - DNA, 20 bp, Artificial Sequence
  MKO10065989_A_mmu-mir-184
  gRNA
gacggagaactgataagggt

SEQ ID NO: 65990 - DNA, 20 bp, Artificial Sequence
  MKO10065990_A_mmu-mir-6386
  gRNA
tctcacttgctgatgcagca

SEQ ID NO: 65991 - DNA, 20 bp, Artificial Sequence
  MKO10065991_A_mmu-mir-6386
  gRNA
aaggccttatttttgagaca

SEQ ID NO: 65992 - DNA, 20 bp, Artificial Sequence
  MKO10065992_A_mmu-mir-6386
  gRNA
acaagagtggtttagggcta

SEQ ID NO: 65993 - DNA, 20 bp, Artificial Sequence
  MKO10065993_A_mmu-mir-6386
  gRNA
gtgcttatcagcatgcctta

SEQ ID NO: 65994 - DNA, 20 bp, Artificial Sequence
  MKO10065994_A_mmu-mir-7656
  gRNA
ctgttagtgttatcctacac

SEQ ID NO: 65995 - DNA, 20 bp, Artificial Sequence
  MKO10065995_A_mmu-mir-7656
  gRNA
gtacaggctgtctgatccca

SEQ ID NO: 65996 - DNA, 20 bp, Artificial Sequence
  MKO10065996_A_mmu-mir-7656
  gRNA
cagacagcctgtaccagtgt

SEQ ID NO: 65997 - DNA, 20 bp, Artificial Sequence
  MKO10065997_A_mmu-mir-7656
  gRNA
gtgttatcctacactggtac

SEQ ID NO: 65998 - DNA, 20 bp, Artificial Sequence
  MKO10065998_A_mmu-mir-7243
  gRNA
gaacagctgacagcagaatc

SEQ ID NO: 65999 - DNA, 20 bp, Artificial Sequence
  MKO10065999_A_mmu-mir-7243
  gRNA
ctgacagcagaatcaggcct

SEQ ID NO: 66000 - DNA, 20 bp, Artificial Sequence
  MKO10066000_A_mmu-mir-2136
  gRNA
gcatatccgcgtatccagtc

SEQ ID NO: 66001 - DNA, 20 bp, Artificial Sequence
  MKO10066001_A_mmu-mir-2136
  gRNA
tatccagtcaggagtcagtt

SEQ ID NO: 66002 - DNA, 20 bp, Artificial Sequence
  MKO10066002_A_mmu-mir-2136
  gRNA
gggtgttgactgagatgtgg

SEQ ID NO: 66003 - DNA, 20 bp, Artificial Sequence
  MKO10066003_A_mmu-mir-2136
  gRNA
gtgttgactgagatgtggtg

SEQ ID NO: 66004 - DNA, 20 bp, Artificial Sequence
  MKO10066004_A_mmu-mir-135a-1
  gRNA
attctattgctcgctcatat

SEQ ID NO: 66005 - DNA, 20 bp, Artificial Sequence
  MKO10066005_A_mmu-mir-135a-1
  gRNA
ttgctcgctcatatagggat

SEQ ID NO: 66006 - DNA, 20 bp, Artificial Sequence
  MKO10066006_A_mmu-mir-135a-1
  gRNA
tcatatagggattggagccg

SEQ ID NO: 66007 - DNA, 20 bp, Artificial Sequence
  MKO10066007_A_mmu-mir-135a-1
  gRNA
tggagccgtggcgtacggtg

SEQ ID NO: 66008 - DNA, 20 bp, Artificial Sequence
  MKO10066008_A_mmu-let-7g
  gRNA
ttttgcctgattccaggctg

SEQ ID NO: 66009 - DNA, 20 bp, Artificial Sequence
  MKO10066009_A_mmu-let-7g
  gRNA
gtagtagtttgtacagtttg

SEQ ID NO: 66010 - DNA, 20 bp, Artificial Sequence
  MKO10066010_A_mmu-let-7g
  gRNA
tgagggtctatgataccacc

SEQ ID NO: 66011 - DNA, 20 bp, Artificial Sequence
  MKO10066011_A_mmu-let-7g
  gRNA
tctatgataccacccggtac

SEQ ID NO: 66012 - DNA, 20 bp, Artificial Sequence
  MKO10066012_A_mmu-mir-7088
  gRNA
tccagaagaaaggcaagtgg

SEQ ID NO: 66013 - DNA, 20 bp, Artificial Sequence
  MKO10066013_A_mmu-mir-7088
  gRNA
aagaaaggcaagtggtggtg

SEQ ID NO: 66014 - DNA, 20 bp, Artificial Sequence
  MKO10066014_A_mmu-mir-7088
  gRNA
aggcaagtggtggtgaggag

SEQ ID NO: 66015 - DNA, 20 bp, Artificial Sequence
  MKO10066015_A_mmu-mir-7088
  gRNA
gctgagtaacaggggccacg

SEQ ID NO: 66016 - DNA, 20 bp, Artificial Sequence
  MKO10066016_A_mmu-mir-191
  gRNA
aatggctggacagcgggcaa

SEQ ID NO: 66017 - DNA, 20 bp, Artificial Sequence
  MKO10066017_A_mmu-mir-191
  gRNA
cagagcattccagctgcact

SEQ ID NO: 66018 - DNA, 20 bp, Artificial Sequence
  MKO10066018_A_mmu-mir-191
  gRNA
caagtgcagctggaatgctc

SEQ ID NO: 66019 - DNA, 20 bp, Artificial Sequence
  MKO10066019_A_mmu-mir-191
  gRNA
gaacgaaatccaagtgcagc

SEQ ID NO: 66020 - DNA, 20 bp, Artificial Sequence
  MKO10066020_A_mmu-mir-425
  gRNA
ccacagcatggaaagtgctt

SEQ ID NO: 66021 - DNA, 20 bp, Artificial Sequence
  MKO10066021_A_mmu-mir-425
  gRNA
acacgatcactcccgttgag

SEQ ID NO: 66022 - DNA, 20 bp, Artificial Sequence
  MKO10066022_A_mmu-mir-425
  gRNA
gtgtccgcccagtgctcttt

SEQ ID NO: 66023 - DNA, 20 bp, Artificial Sequence
  MKO10066023_A_mmu-mir-425
  gRNA
ttcttgggtgcccactcaac

SEQ ID NO: 66024 - DNA, 20 bp, Artificial Sequence
  MKO10066024_A_mmu-mir-711
  gRNA
ctaactttgaatctcttctt

SEQ ID NO: 66025 - DNA, 20 bp, Artificial Sequence
  MKO10066025_A_mmu-mir-711
  gRNA
atctcttcttagggtgcttc

SEQ ID NO: 66026 - DNA, 20 bp, Artificial Sequence
  MKO10066026_A_mmu-mir-711
  gRNA
ttcaggcaaagctggggacc

SEQ ID NO: 66027 - DNA, 20 bp, Artificial Sequence
  MKO10066027_A_mmu-mir-711
  gRNA
caggcaaagctggggacccg

SEQ ID NO: 66028 - DNA, 20 bp, Artificial Sequence
  MKO10066028_A_mmu-mir-7089
  gRNA
ccgtgggacctacagactcc

SEQ ID NO: 66029 - DNA, 20 bp, Artificial Sequence
  MKO10066029_A_mmu-mir-7089
  gRNA
gacctacagactcctgggtg

SEQ ID NO: 66030 - DNA, 20 bp, Artificial Sequence
  MKO10066030_A_mmu-mir-7089
  gRNA
tcagtgtctgctgtctccac

SEQ ID NO: 66031 - DNA, 20 bp, Artificial Sequence
  MKO10066031_A_mmu-mir-7089
  gRNA
ccaggagtctgtaggtccca

SEQ ID NO: 66032 - DNA, 20 bp, Artificial Sequence
  MKO10066032_A_mmu-mir-6236
  gRNA
gaatcaactagccctgaaaa

SEQ ID NO: 66033 - DNA, 20 bp, Artificial Sequence
  MKO10066033_A_mmu-mir-6236
  gRNA
caactagccctgaaaatgga

SEQ ID NO: 66034 - DNA, 20 bp, Artificial Sequence
  MKO10066034_A_mmu-mir-6236
  gRNA
gccctgaaaatggatggcgc

SEQ ID NO: 66035 - DNA, 20 bp, Artificial Sequence
  MKO10066035_A_mmu-mir-6236
  gRNA
cccagccgtcgccggcagtc

SEQ ID NO: 66036 - DNA, 20 bp, Artificial Sequence
  MKO10066036_A_mmu-mir-8107
  gRNA
attcatatccatggccgaac

SEQ ID NO: 66037 - DNA, 20 bp, Artificial Sequence
  MKO10066037_A_mmu-mir-8107
  gRNA
tggggacctgagggaaacag

SEQ ID NO: 66038 - DNA, 20 bp, Artificial Sequence
  MKO10066038_A_mmu-mir-8107
  gRNA
aaacagagggctgagatgtc

SEQ ID NO: 66039 - DNA, 20 bp, Artificial Sequence
  MKO10066039_A_mmu-mir-8107
  gRNA
ctagtttccagttttcccag

SEQ ID NO: 66040 - DNA, 20 bp, Artificial Sequence
  MKO10066040_A_mmu-mir-128-2
  gRNA
ctcactctcttacagtgcat

SEQ ID NO: 66041 - DNA, 20 bp, Artificial Sequence
  MKO10066041_A_mmu-mir-128-2
  gRNA
agccactgtgcagtgggaag

SEQ ID NO: 66042 - DNA, 20 bp, Artificial Sequence
  MKO10066042_A_mmu-mir-128-2
  gRNA
gcagccactgtgcagtggga

SEQ ID NO: 66043 - DNA, 20 bp, Artificial Sequence
  MKO10066043_A_mmu-mir-128-2
  gRNA
gacacagtagggaaagagac

SEQ ID NO: 66044 - DNA, 20 bp, Artificial Sequence
  MKO10066044_A_mmu-mir-467h
  gRNA
catgtatatgtgtatgtgtg

SEQ ID NO: 66045 - DNA, 20 bp, Artificial Sequence
  MKO10066045_A_mmu-mir-467h
  gRNA
tatctatgtgtgcatgtatg

SEQ ID NO: 66046 - DNA, 20 bp, Artificial Sequence
  MKO10066046_A_mmu-mir-467h
  gRNA
tgcatgtatatgtgtgtgtg

SEQ ID NO: 66047 - DNA, 20 bp, Artificial Sequence
  MKO10066047_A_mmu-mir-26a-1
  gRNA
cgaggccctggcgaaggccg

SEQ ID NO: 66048 - DNA, 20 bp, Artificial Sequence
  MKO10066048_A_mmu-mir-26a-1
  gRNA
taatccaggataggctgtgc

SEQ ID NO: 66049 - DNA, 20 bp, Artificial Sequence
  MKO10066049_A_mmu-mir-26a-1
  gRNA
taggctgtgcaggtcccaag

SEQ ID NO: 66050 - DNA, 20 bp, Artificial Sequence
  MKO10066050_A_mmu-mir-26a-1
  gRNA
ggtcccaaggggcctattct

SEQ ID NO: 66051 - DNA, 20 bp, Artificial Sequence
  MKO10066051_A_mmu-mir-7090
  gRNA
ggaaataaagttctcagagt

SEQ ID NO: 66052 - DNA, 20 bp, Artificial Sequence
  MKO10066052_A_mmu-mir-7090
  gRNA
cctttgatgtctgactttgc

SEQ ID NO: 66053 - DNA, 20 bp, Artificial Sequence
  MKO10066053_A_mmu-mir-7090
  gRNA
caaagtcagacatcaaaggc

SEQ ID NO: 66054 - DNA, 20 bp, Artificial Sequence
  MKO10066054_A_mmu-mir-7090
  gRNA
cctgcaaagtcagacatcaa

SEQ ID NO: 66055 - DNA, 20 bp, Artificial Sequence
  MKO10066055_A_mmu-mir-8106
  gRNA
gatttctcatcgagcagctg

SEQ ID NO: 66056 - DNA, 20 bp, Artificial Sequence
  MKO10066056_A_mmu-mir-8106
  gRNA
agctgaggtgactctgtaca

SEQ ID NO: 66057 - DNA, 20 bp, Artificial Sequence
  MKO10066057_A_mmu-mir-8106
  gRNA
gtgttggaagacagtcttgt

SEQ ID NO: 66058 - DNA, 20 bp, Artificial Sequence
  MKO10066058_A_mmu-mir-8106
  gRNA
ctactcagtgactctgcaca

SEQ ID NO: 66059 - DNA, 20 bp, Artificial Sequence
  MKO10066059_A_mmu-mir-138-1
  gRNA
gacagctggtgttgtgaatc

SEQ ID NO: 66060 - DNA, 20 bp, Artificial Sequence
  MKO10066060_A_mmu-mir-138-1
  gRNA
aacggctacttcacaacacc

SEQ ID NO: 66061 - DNA, 20 bp, Artificial Sequence
  MKO10066061_A_mmu-mir-138-1
  gRNA
tacttcagagacctctagca

SEQ ID NO: 66062 - DNA, 20 bp, Artificial Sequence
  MKO10066062_A_mmu-mir-138-1
  gRNA
agacctctagcatggtgttg

SEQ ID NO: 66063 - DNA, 20 bp, Artificial Sequence
  MKO10066063_A_mmu-mir-500
  gRNA
ccttctctgaacccttgccc

SEQ ID NO: 66064 - DNA, 20 bp, Artificial Sequence
  MKO10066064_A_mmu-mir-500
  gRNA
ccagatagcaaggattagag

SEQ ID NO: 66065 - DNA, 20 bp, Artificial Sequence
  MKO10066065_A_mmu-mir-500
  gRNA
agatagcaaggattagagag

SEQ ID NO: 66066 - DNA, 20 bp, Artificial Sequence
  MKO10066066_A_mmu-mir-500
  gRNA
ggattagagagggggagcag

SEQ ID NO: 66067 - DNA, 20 bp, Artificial Sequence
  MKO10066067_A_mmu-mir-501
  gRNA
accttccccaaatccttgcc

SEQ ID NO: 66068 - DNA, 20 bp, Artificial Sequence
  MKO10066068_A_mmu-mir-501
  gRNA
tacaaatagcattttcaccc

SEQ ID NO: 66069 - DNA, 20 bp, Artificial Sequence
  MKO10066069_A_mmu-mir-501
  gRNA
gagaggatgagcagagcaga

SEQ ID NO: 66070 - DNA, 20 bp, Artificial Sequence
  MKO10066070_A_mmu-mir-501
  gRNA
gaaggtgagcctgatctgca

SEQ ID NO: 66071 - DNA, 20 bp, Artificial Sequence
  MKO10066071_A_mmu-mir-362
  gRNA
gcctctttgaatccttgaac

SEQ ID NO: 66072 - DNA, 20 bp, Artificial Sequence
  MKO10066072_A_mmu-mir-362
  gRNA
ctgaagcagcattcacacct

SEQ ID NO: 66073 - DNA, 20 bp, Artificial Sequence
  MKO10066073_A_mmu-mir-362
  gRNA
ctaggttccaaggattcgag

SEQ ID NO: 66074 - DNA, 20 bp, Artificial Sequence
  MKO10066074_A_mmu-mir-362
  gRNA
aggttccaaggattcgagag

SEQ ID NO: 66075 - DNA, 20 bp, Artificial Sequence
  MKO10066075_A_mmu-mir-188
  gRNA
catcctgcaaaccctgcatg

SEQ ID NO: 66076 - DNA, 20 bp, Artificial Sequence
  MKO10066076_A_mmu-mir-188
  gRNA
gcaaaccctgcatgtgggag

SEQ ID NO: 66077 - DNA, 20 bp, Artificial Sequence
  MKO10066077_A_mmu-mir-188
  gRNA
agctcaccctccaccatgca

SEQ ID NO: 66078 - DNA, 20 bp, Artificial Sequence
  MKO10066078_A_mmu-mir-188
  gRNA
ctcccacatgcagggtttgc

SEQ ID NO: 66079 - DNA, 20 bp, Artificial Sequence
  MKO10066079_A_mmu-mir-532
  gRNA
gcttgctctcctgcaagcct

SEQ ID NO: 66080 - DNA, 20 bp, Artificial Sequence
  MKO10066080_A_mmu-mir-532
  gRNA
tctcctgcaagccttgggtg

SEQ ID NO: 66081 - DNA, 20 bp, Artificial Sequence
  MKO10066081_A_mmu-mir-532
  gRNA
ctgcaagccttgggtgtggg

SEQ ID NO: 66082 - DNA, 20 bp, Artificial Sequence
  MKO10066082_A_mmu-mir-532
  gRNA
tgtcaacggtcctacactca

SEQ ID NO: 66083 - DNA, 20 bp, Artificial Sequence
  MKO10066083_A_mmu-mir-1198
  gRNA
agttgtctgttatgtgttcc

SEQ ID NO: 66084 - DNA, 20 bp, Artificial Sequence
  MKO10066084_A_mmu-mir-1198
  gRNA
ttatgtgttcctggctggct

SEQ ID NO: 66085 - DNA, 20 bp, Artificial Sequence
  MKO10066085_A_mmu-mir-1198
  gRNA
ccaagctagcctctaactca

SEQ ID NO: 66086 - DNA, 20 bp, Artificial Sequence
  MKO10066086_A_mmu-mir-1198
  gRNA
acatgagtaccaagccagcc

SEQ ID NO: 66087 - DNA, 20 bp, Artificial Sequence
  MKO10066087_A_mmu-mir-221
  gRNA
agaaatctacattgtatgcc

SEQ ID NO: 66088 - DNA, 20 bp, Artificial Sequence
  MKO10066088_A_mmu-mir-221
  gRNA
ctgctgggtttcaggctacc

SEQ ID NO: 66089 - DNA, 20 bp, Artificial Sequence
  MKO10066089_A_mmu-mir-221
  gRNA
tacattgtctgctgggtttc

SEQ ID NO: 66090 - DNA, 20 bp, Artificial Sequence
  MKO10066090_A_mmu-mir-221
  gRNA
caacagctacattgtctgct

SEQ ID NO: 66091 - DNA, 20 bp, Artificial Sequence
  MKO10066091_A_mmu-mir-222
  gRNA
accaaagacaggatctacac

SEQ ID NO: 66092 - DNA, 20 bp, Artificial Sequence
  MKO10066092_A_mmu-mir-222
  gRNA
tctggctactgggtctctgg

SEQ ID NO: 66093 - DNA, 20 bp, Artificial Sequence
  MKO10066093_A_mmu-mir-222
  gRNA
acatctggctactgggtctc

SEQ ID NO: 66094 - DNA, 20 bp, Artificial Sequence
  MKO10066094_A_mmu-mir-222
  gRNA
agcagctacatctggctact

SEQ ID NO: 66095 - DNA, 20 bp, Artificial Sequence
  MKO10066095_A_mmu-mir-5617
  gRNA
gtgagagtgagtgagagctg

SEQ ID NO: 66096 - DNA, 20 bp, Artificial Sequence
  MKO10066096_A_mmu-mir-5617
  gRNA
gagtgagagctgaggccgcc

SEQ ID NO: 66097 - DNA, 20 bp, Artificial Sequence
  MKO10066097_A_mmu-mir-5617
  gRNA
agagctgaggccgcctggga

SEQ ID NO: 66098 - DNA, 20 bp, Artificial Sequence
  MKO10066098_A_mmu-mir-5617
  gRNA
tgggatggtaggaacccaga

SEQ ID NO: 66099 - DNA, 20 bp, Artificial Sequence
  MKO10066099_A_mmu-mir-3110
  gRNA
tgtcactctgggcactccat

SEQ ID NO: 66100 - DNA, 20 bp, Artificial Sequence
  MKO10066100_A_mmu-mir-3110
  gRNA
ggttgagtgtctgcctccga

SEQ ID NO: 66101 - DNA, 20 bp, Artificial Sequence
  MKO10066101_A_mmu-mir-3110
  gRNA
atggaagatggcaaagtgtg

SEQ ID NO: 66102 - DNA, 20 bp, Artificial Sequence
  MKO10066102_A_mmu-mir-3110
  gRNA
ctgtgttctgcctcccctga

SEQ ID NO: 66103 - DNA, 20 bp, Artificial Sequence
  MKO10066103_A_mmu-mir-6384
  gRNA
taaagttccatctccccacg

SEQ ID NO: 66104 - DNA, 20 bp, Artificial Sequence
  MKO10066104_A_mmu-mir-6384
  gRNA
acgtggctcactgagattac

SEQ ID NO: 66105 - DNA, 20 bp, Artificial Sequence
  MKO10066105_A_mmu-mir-6384
  gRNA
cagtgagccacgtggggaga

SEQ ID NO: 66106 - DNA, 20 bp, Artificial Sequence
  MKO10066106_A_mmu-mir-6384
  gRNA
tgagattacagggaaacagt

SEQ ID NO: 66107 - DNA, 20 bp, Artificial Sequence
  MKO10066107_A_mmu-mir-717
  gRNA
acttctgaatcccttcggaa

SEQ ID NO: 66108 - DNA, 20 bp, Artificial Sequence
  MKO10066108_A_mmu-mir-717
  gRNA
aaatgacggtacagtgatag

SEQ ID NO: 66109 - DNA, 20 bp, Artificial Sequence
  MKO10066109_A_mmu-mir-717
  gRNA
aagctgctctccgttccgaa

SEQ ID NO: 66110 - DNA, 20 bp, Artificial Sequence
  MKO10066110_A_mmu-mir-717
  gRNA
ttatcacttctgaatccctt

SEQ ID NO: 66111 - DNA, 20 bp, Artificial Sequence
  MKO10066111_A_mmu-mir-363
  gRNA
taggtcctgcggtttacaga

SEQ ID NO: 66112 - DNA, 20 bp, Artificial Sequence
  MKO10066112_A_mmu-mir-363
  gRNA
gtaataggaggaaaattgca

SEQ ID NO: 66113 - DNA, 20 bp, Artificial Sequence
  MKO10066113_A_mmu-mir-363
  gRNA
ggtggaacacgatgcaattt

SEQ ID NO: 66114 - DNA, 20 bp, Artificial Sequence
  MKO10066114_A_mmu-mir-363
  gRNA
actgttttgctgttatcagg

SEQ ID NO: 66115 - DNA, 20 bp, Artificial Sequence
  MKO10066115_A_mmu-mir-92a-2
  gRNA
aaaaaccctctttcttcctc

SEQ ID NO: 66116 - DNA, 20 bp, Artificial Sequence
  MKO10066116_A_mmu-mir-92a-2
  gRNA
accctctttcttcctcaggc

SEQ ID NO: 66117 - DNA, 20 bp, Artificial Sequence
  MKO10066117_A_mmu-mir-92a-2
  gRNA
atgccaccaatccccacctg

SEQ ID NO: 66118 - DNA, 20 bp, Artificial Sequence
  MKO10066118_A_mmu-mir-92a-2
  gRNA
cacctgtggatgaatgggca

SEQ ID NO: 66119 - DNA, 20 bp, Artificial Sequence
  MKO10066119_A_mmu-mir-19b-2
  gRNA
ttcccacaatcagttttgca

SEQ ID NO: 66120 - DNA, 20 bp, Artificial Sequence
  MKO10066120_A_mmu-mir-19b-2
  gRNA
tcagcgtatatgtgaatata

SEQ ID NO: 66121 - DNA, 20 bp, Artificial Sequence
  MKO10066121_A_mmu-mir-19b-2
  gRNA
atccatgcaaaactgattgt

SEQ ID NO: 66122 - DNA, 20 bp, Artificial Sequence
  MKO10066122_A_mmu-mir-20b
  gRNA
tacctgcactatgagcactt

SEQ ID NO: 66123 - DNA, 20 bp, Artificial Sequence
  MKO10066123_A_mmu-mir-20b
  gRNA
atgagcactttggcactact

SEQ ID NO: 66124 - DNA, 20 bp, Artificial Sequence
  MKO10066124_A_mmu-mir-20b
  gRNA
gtgagcacttctagtactcc

SEQ ID NO: 66125 - DNA, 20 bp, Artificial Sequence
  MKO10066125_A_mmu-mir-20b
  gRNA
tgccaaagtgctcatagtgc

SEQ ID NO: 66126 - DNA, 20 bp, Artificial Sequence
  MKO10066126_A_mmu-mir-18b
  gRNA
ctgtgcgagaaggggcattt

SEQ ID NO: 66127 - DNA, 20 bp, Artificial Sequence
  MKO10066127_A_mmu-mir-18b
  gRNA
ctaaatgccccttctcgcac

SEQ ID NO: 66128 - DNA, 20 bp, Artificial Sequence
  MKO10066128_A_mmu-mir-18b
  gRNA
aagaagtagcctgtgcgaga

SEQ ID NO: 66129 - DNA, 20 bp, Artificial Sequence
  MKO10066129_A_mmu-mir-18b
  gRNA
gaagtagcctgtgcgagaag

SEQ ID NO: 66130 - DNA, 20 bp, Artificial Sequence
  MKO10066130_A_mmu-mir-106a
  gRNA
catggtaatgtaagaagtgc

SEQ ID NO: 66131 - DNA, 20 bp, Artificial Sequence
  MKO10066131_A_mmu-mir-106a
  gRNA
tgtcaaagtgctaacagtgc

SEQ ID NO: 66132 - DNA, 20 bp, Artificial Sequence
  MKO10066132_A_mmu-mir-106a
  gRNA
gcactgttagcactttgaca

SEQ ID NO: 66133 - DNA, 20 bp, Artificial Sequence
  MKO10066133_A_mmu-mir-106a
  gRNA
ttagcactttgacatggcca

SEQ ID NO: 66134 - DNA, 20 bp, Artificial Sequence
  MKO10066134_A_mmu-mir-450b
  gRNA
tacgcttatgttatgtattc

SEQ ID NO: 66135 - DNA, 20 bp, Artificial Sequence
  MKO10066135_A_mmu-mir-450b
  gRNA
atacataacataagcgtatt

SEQ ID NO: 66136 - DNA, 20 bp, Artificial Sequence
  MKO10066136_A_mmu-mir-450b
  gRNA
attttgtatcaatatatggg

SEQ ID NO: 66137 - DNA, 20 bp, Artificial Sequence
  MKO10066137_A_mmu-mir-450b
  gRNA
taattttgtatcaatatatg

SEQ ID NO: 66138 - DNA, 20 bp, Artificial Sequence
  MKO10066138_A_mmu-mir-450a-1
  gRNA
atataattatagcacatatt

SEQ ID NO: 66139 - DNA, 20 bp, Artificial Sequence
  MKO10066139_A_mmu-mir-450a-1
  gRNA
atatgtgctataattatatt

SEQ ID NO: 66140 - DNA, 20 bp, Artificial Sequence
  MKO10066140_A_mmu-mir-450a-1
  gRNA
aacagctcagtatctctctt

SEQ ID NO: 66141 - DNA, 20 bp, Artificial Sequence
  MKO10066141_A_mmu-mir-450a-1
  gRNA
cagtatctctctttggtcac

SEQ ID NO: 66142 - DNA, 20 bp, Artificial Sequence
  MKO10066142_A_mmu-mir-450a-2
  gRNA
atatactcatagtacatatt

SEQ ID NO: 66143 - DNA, 20 bp, Artificial Sequence
  MKO10066143_A_mmu-mir-450a-2
  gRNA
tatgtactatgagtatattg

SEQ ID NO: 66144 - DNA, 20 bp, Artificial Sequence
  MKO10066144_A_mmu-mir-450a-2
  gRNA
gcaaaaatagttcagcatct

SEQ ID NO: 66145 - DNA, 20 bp, Artificial Sequence
  MKO10066145_A_mmu-mir-450a-2
  gRNA
ttggggatgctttgcattca

SEQ ID NO: 66146 - DNA, 20 bp, Artificial Sequence
  MKO10066146_A_mmu-mir-542
  gRNA
tcagttatcaatctgtcaca

SEQ ID NO: 66147 - DNA, 20 bp, Artificial Sequence
  MKO10066147_A_mmu-mir-542
  gRNA
aatctgtcacaagggcacag

SEQ ID NO: 66148 - DNA, 20 bp, Artificial Sequence
  MKO10066148_A_mmu-mir-542
  gRNA
gattgataactgaaaggtct

SEQ ID NO: 66149 - DNA, 20 bp, Artificial Sequence
  MKO10066149_A_mmu-mir-542
  gRNA
gtgacagattgataactgaa

SEQ ID NO: 66150 - DNA, 20 bp, Artificial Sequence
  MKO10066150_A_mmu-mir-351
  gRNA
aacactcttctccagttccc

SEQ ID NO: 66151 - DNA, 20 bp, Artificial Sequence
  MKO10066151_A_mmu-mir-351
  gRNA
ccaggctcaaagggctcctc

SEQ ID NO: 66152 - DNA, 20 bp, Artificial Sequence
  MKO10066152_A_mmu-mir-351
  gRNA
caaagggctcctcagggaaa

SEQ ID NO: 66153 - DNA, 20 bp, Artificial Sequence
  MKO10066153_A_mmu-mir-351
  gRNA
gtcaagaggcgcctgggaac

SEQ ID NO: 66154 - DNA, 20 bp, Artificial Sequence
  MKO10066154_A_mmu-mir-503
  gRNA
acccagacttacccaggcag

SEQ ID NO: 66155 - DNA, 20 bp, Artificial Sequence
  MKO10066155_A_mmu-mir-503
  gRNA
ggcagtggaaacaatactcc

SEQ ID NO: 66156 - DNA, 20 bp, Artificial Sequence
  MKO10066156_A_mmu-mir-503
  gRNA
gcagtactgttcccgctgct

SEQ ID NO: 66157 - DNA, 20 bp, Artificial Sequence
  MKO10066157_A_mmu-mir-503
  gRNA
gagtattgtttccactgcct

SEQ ID NO: 66158 - DNA, 20 bp, Artificial Sequence
  MKO10066158_A_mmu-mir-322
  gRNA
cttctacattccccacgaag

SEQ ID NO: 66159 - DNA, 20 bp, Artificial Sequence
  MKO10066159_A_mmu-mir-322
  gRNA
gaattgctgctgcagccctt

SEQ ID NO: 66160 - DNA, 20 bp, Artificial Sequence
  MKO10066160_A_mmu-mir-322
  gRNA
cgctgcaacaccccttcgtg

SEQ ID NO: 66161 - DNA, 20 bp, Artificial Sequence
  MKO10066161_A_mmu-mir-322
  gRNA
agcgctgcaacaccccttcg

SEQ ID NO: 66162 - DNA, 20 bp, Artificial Sequence
  MKO10066162_A_mmu-mir-5116
  gRNA
acaaaccaaaaagcatcagg

SEQ ID NO: 66163 - DNA, 20 bp, Artificial Sequence
  MKO10066163_A_mmu-mir-5116
  gRNA
aaaccaaaaagcatcaggcg

SEQ ID NO: 66164 - DNA, 20 bp, Artificial Sequence
  MKO10066164_A_mmu-mir-5116
  gRNA
tttttggtttgtttcaggca

SEQ ID NO: 66165 - DNA, 20 bp, Artificial Sequence
  MKO10066165_A_mmu-mir-5116
  gRNA
gaaacaaaccaaaaagcatc

SEQ ID NO: 66166 - DNA, 20 bp, Artificial Sequence
  MKO10066166_A_mmu-mir-504
  gRNA
agtagcctgtgccctctgta

SEQ ID NO: 66167 - DNA, 20 bp, Artificial Sequence
  MKO10066167_A_mmu-mir-504
  gRNA
ttacagatagagtgcagacc

SEQ ID NO: 66168 - DNA, 20 bp, Artificial Sequence
  MKO10066168_A_mmu-mir-504
  gRNA
gcagaccagggtctcccaac

SEQ ID NO: 66169 - DNA, 20 bp, Artificial Sequence
  MKO10066169_A_mmu-mir-504
  gRNA
ggcagggtttcccatacaga

SEQ ID NO: 66170 - DNA, 20 bp, Artificial Sequence
  MKO10066170_A_mmu-mir-505
  gRNA
agcaagtgttgacgctaacc

SEQ ID NO: 66171 - DNA, 20 bp, Artificial Sequence
  MKO10066171_A_mmu-mir-505
  gRNA
gcagaaacatcaatacttcc

SEQ ID NO: 66172 - DNA, 20 bp, Artificial Sequence
  MKO10066172_A_mmu-mir-505
  gRNA
acacttgctggttttctctc

SEQ ID NO: 66173 - DNA, 20 bp, Artificial Sequence
  MKO10066173_A_mmu-mir-505
  gRNA
aggttagcgtcaacacttgc

SEQ ID NO: 66174 - DNA, 20 bp, Artificial Sequence
  MKO10066174_A_mmu-mir-743a
  gRNA
aagccctactctactcagct

SEQ ID NO: 66175 - DNA, 20 bp, Artificial Sequence
  MKO10066175_A_mmu-mir-743a
  gRNA
ttcattcttataaacatgac

SEQ ID NO: 66176 - DNA, 20 bp, Artificial Sequence
  MKO10066176_A_mmu-mir-743a
  gRNA
acaccaagctgagtagagta

SEQ ID NO: 66177 - DNA, 20 bp, Artificial Sequence
  MKO10066177_A_mmu-mir-743a
  gRNA
atgcagtgctgtattcagat

SEQ ID NO: 66178 - DNA, 20 bp, Artificial Sequence
  MKO10066178_A_mmu-mir-743b
  gRNA
acatcatgctgaatagagta

SEQ ID NO: 66179 - DNA, 20 bp, Artificial Sequence
  MKO10066179_A_mmu-mir-743b
  gRNA
gtgcagtgctgtgttcagac

SEQ ID NO: 66180 - DNA, 20 bp, Artificial Sequence
  MKO10066180_A_mmu-mir-743b
  gRNA
ttcacaaatatttcacatga

SEQ ID NO: 66181 - DNA, 20 bp, Artificial Sequence
  MKO10066181_A_mmu-mir-742
  gRNA
ctttactttacccagcatgg

SEQ ID NO: 66182 - DNA, 20 bp, Artificial Sequence
  MKO10066182_A_mmu-mir-742
  gRNA
taggtgaaagccaccatgct

SEQ ID NO: 66183 - DNA, 20 bp, Artificial Sequence
  MKO10066183_A_mmu-mir-742
  gRNA
tgggcagtgctctactcaca

SEQ ID NO: 66184 - DNA, 20 bp, Artificial Sequence
  MKO10066184_A_mmu-mir-742
  gRNA
gagctttactttacccagca

SEQ ID NO: 66185 - DNA, 20 bp, Artificial Sequence
  MKO10066185_A_mmu-mir-883a
  gRNA
tgtaaggctcaacaaacgca

SEQ ID NO: 66186 - DNA, 20 bp, Artificial Sequence
  MKO10066186_A_mmu-mir-883a
  gRNA
caacagctctcagtattgta

SEQ ID NO: 66187 - DNA, 20 bp, Artificial Sequence
  MKO10066187_A_mmu-mir-883b
  gRNA
caacatctctcagtattgta

SEQ ID NO: 66188 - DNA, 20 bp, Artificial Sequence
  MKO10066188_A_mmu-mir-883b
  gRNA
tgcaatgcattactgagaat

SEQ ID NO: 66189 - DNA, 20 bp, Artificial Sequence
  MKO10066189_A_mmu-mir-883b
  gRNA
gtaaggttcaacaaatacaa

SEQ ID NO: 66190 - DNA, 20 bp, Artificial Sequence
  MKO10066190_A_mmu-mir-471
  gRNA
aagccttcctatacatagta

SEQ ID NO: 66191 - DNA, 20 bp, Artificial Sequence
  MKO10066191_A_mmu-mir-471
  gRNA
gtgccatactatgtatagga

SEQ ID NO: 66192 - DNA, 20 bp, Artificial Sequence
  MKO10066192_A_mmu-mir-471
  gRNA
aaaggtgccatactatgtat

SEQ ID NO: 66193 - DNA, 20 bp, Artificial Sequence
  MKO10066193_A_mmu-mir-471
  gRNA
cacattaaacaaaaagtgaa

SEQ ID NO: 66194 - DNA, 20 bp, Artificial Sequence
  MKO10066194_A_mmu-mir-741
  gRNA
gagccttaatctacatagaa

SEQ ID NO: 66195 - DNA, 20 bp, Artificial Sequence
  MKO10066195_A_mmu-mir-741
  gRNA
gcttacatgatttacatgat

SEQ ID NO: 66196 - DNA, 20 bp, Artificial Sequence
  MKO10066196_A_mmu-mir-741
  gRNA
atgccattctatgtagatta

SEQ ID NO: 66197 - DNA, 20 bp, Artificial Sequence
  MKO10066197_A_mmu-mir-741
  gRNA
gtgcattgatctacgtagat

SEQ ID NO: 66198 - DNA, 20 bp, Artificial Sequence
  MKO10066198_A_mmu-mir-463
  gRNA
atcatttatgttttacatga

SEQ ID NO: 66199 - DNA, 20 bp, Artificial Sequence
  MKO10066199_A_mmu-mir-463
  gRNA
acaccatataaggtagagga

SEQ ID NO: 66200 - DNA, 20 bp, Artificial Sequence
  MKO10066200_A_mmu-mir-463
  gRNA
atagacaccatataaggtag

SEQ ID NO: 66201 - DNA, 20 bp, Artificial Sequence
  MKO10066201_A_mmu-mir-463
  gRNA
atgatgatagacaccatata

SEQ ID NO: 66202 - DNA, 20 bp, Artificial Sequence
  MKO10066202_A_mmu-mir-880
  gRNA
gtgccttactctactcagag

SEQ ID NO: 66203 - DNA, 20 bp, Artificial Sequence
  MKO10066203_A_mmu-mir-880
  gRNA
aggatggagtaacatgcaat

SEQ ID NO: 66204 - DNA, 20 bp, Artificial Sequence
  MKO10066204_A_mmu-mir-880
  gRNA
catcctctctgagtagagta

SEQ ID NO: 66205 - DNA, 20 bp, Artificial Sequence
  MKO10066205_A_mmu-mir-880
  gRNA
cttactctactcagagagga

SEQ ID NO: 66206 - DNA, 20 bp, Artificial Sequence
  MKO10066206_A_mmu-mir-878
  gRNA
gagccctcctctacccagtg

SEQ ID NO: 66207 - DNA, 20 bp, Artificial Sequence
  MKO10066207_A_mmu-mir-878
  gRNA
acaccacactgggtagagga

SEQ ID NO: 66208 - DNA, 20 bp, Artificial Sequence
  MKO10066208_A_mmu-mir-878
  gRNA
catgacaccacactgggtag

SEQ ID NO: 66209 - DNA, 20 bp, Artificial Sequence
  MKO10066209_A_mmu-mir-878
  gRNA
taagtgcatgacaccacact

SEQ ID NO: 66210 - DNA, 20 bp, Artificial Sequence
  MKO10066210_A_mmu-mir-871
  gRNA
gagcattacattatccagaa

SEQ ID NO: 66211 - DNA, 20 bp, Artificial Sequence
  MKO10066211_A_mmu-mir-871
  gRNA
tcatatgtatttcacatgac

SEQ ID NO: 66212 - DNA, 20 bp, Artificial Sequence
  MKO10066212_A_mmu-mir-871
  gRNA
tcatgtgaaatacatatgac

SEQ ID NO: 66213 - DNA, 20 bp, Artificial Sequence
  MKO10066213_A_mmu-mir-871
  gRNA
acatatgactggcaccattc

SEQ ID NO: 66214 - DNA, 20 bp, Artificial Sequence
  MKO10066214_A_mmu-mir-470
  gRNA
tactcttctcagaaaggtac

SEQ ID NO: 66215 - DNA, 20 bp, Artificial Sequence
  MKO10066215_A_mmu-mir-470
  gRNA
tgctcttcttggactggcac

SEQ ID NO: 66216 - DNA, 20 bp, Artificial Sequence
  MKO10066216_A_mmu-mir-470
  gRNA
gtgcagtgctcttcttggac

SEQ ID NO: 66217 - DNA, 20 bp, Artificial Sequence
  MKO10066217_A_mmu-mir-470
  gRNA
gtggtgtgcagtgctcttct

SEQ ID NO: 66218 - DNA, 20 bp, Artificial Sequence
  MKO10066218_A_mmu-mir-465d
  gRNA
gtggtaagccttactcagaa

SEQ ID NO: 66219 - DNA, 20 bp, Artificial Sequence
  MKO10066219_A_mmu-mir-465d
  gRNA
atgaaataaaaaattgatca

SEQ ID NO: 66220 - DNA, 20 bp, Artificial Sequence
  MKO10066220_A_mmu-mir-465d
  gRNA
atgcagtgccctatttagaa

SEQ ID NO: 66221 - DNA, 20 bp, Artificial Sequence
  MKO10066221_A_mmu-mir-465d
  gRNA
acatcagtaccattctaaat

SEQ ID NO: 66222 - DNA, 20 bp, Artificial Sequence
  MKO10066222_A_mmu-mir-465c-1
  gRNA
aagccttactctacttagaa

SEQ ID NO: 66223 - DNA, 20 bp, Artificial Sequence
  MKO10066223_A_mmu-mir-465c-1
  gRNA
agatcagcgccattctaaat

SEQ ID NO: 66224 - DNA, 20 bp, Artificial Sequence
  MKO10066224_A_mmu-mir-465c-1
  gRNA
gggcctttctaagtagagta

SEQ ID NO: 66225 - DNA, 20 bp, Artificial Sequence
  MKO10066225_A_mmu-mir-465c-1
  gRNA
gaataaaaaaaaaatgatca

SEQ ID NO: 66226 - DNA, 20 bp, Artificial Sequence
  MKO10066226_A_mmu-mir-465b-1
  gRNA
aagccttactctacttagaa

SEQ ID NO: 66227 - DNA, 20 bp, Artificial Sequence
  MKO10066227_A_mmu-mir-465b-1
  gRNA
agatcagcaccattctaaat

SEQ ID NO: 66228 - DNA, 20 bp, Artificial Sequence
  MKO10066228_A_mmu-mir-465b-1
  gRNA
gggcctttctaagtagagta

SEQ ID NO: 66229 - DNA, 20 bp, Artificial Sequence
  MKO10066229_A_mmu-mir-465b-1
  gRNA
atgaaataaaaaattgatca

SEQ ID NO: 66230 - DNA, 20 bp, Artificial Sequence
  MKO10066230_A_mmu-mir-465c-2
  gRNA
aagccttactctacttagaa

SEQ ID NO: 66231 - DNA, 20 bp, Artificial Sequence
  MKO10066231_A_mmu-mir-465c-2
  gRNA
agatcagcgccattctaaat

SEQ ID NO: 66232 - DNA, 20 bp, Artificial Sequence
  MKO10066232_A_mmu-mir-465c-2
  gRNA
gggcctttctaagtagagta

SEQ ID NO: 66233 - DNA, 20 bp, Artificial Sequence
  MKO10066233_A_mmu-mir-465c-2
  gRNA
gaataaaaaaaaaatgatca

SEQ ID NO: 66234 - DNA, 20 bp, Artificial Sequence
  MKO10066234_A_mmu-mir-465b-2
  gRNA
aagccttactctacttagaa

SEQ ID NO: 66235 - DNA, 20 bp, Artificial Sequence
  MKO10066235_A_mmu-mir-465b-2
  gRNA
agatcagcaccattctaaat

SEQ ID NO: 66236 - DNA, 20 bp, Artificial Sequence
  MKO10066236_A_mmu-mir-465b-2
  gRNA
gggcctttctaagtagagta

SEQ ID NO: 66237 - DNA, 20 bp, Artificial Sequence
  MKO10066237_A_mmu-mir-465b-2
  gRNA
atgaaataaaaaattgatca

SEQ ID NO: 66238 - DNA, 20 bp, Artificial Sequence
  MKO10066238_A_mmu-mir-465a
  gRNA
aagccttactctacttagaa

SEQ ID NO: 66239 - DNA, 20 bp, Artificial Sequence
  MKO10066239_A_mmu-mir-465a
  gRNA
acatcagtgccattctaaat

SEQ ID NO: 66240 - DNA, 20 bp, Artificial Sequence
  MKO10066240_A_mmu-mir-465a
  gRNA
gggcctttctaagtagagta

SEQ ID NO: 66241 - DNA, 20 bp, Artificial Sequence
  MKO10066241_A_mmu-mir-465a
  gRNA
ataaaataaaaaattgatca

SEQ ID NO: 66242 - DNA, 20 bp, Artificial Sequence
  MKO10066242_A_mmu-mir-201
  gRNA
gcacattaccctacacagaa

SEQ ID NO: 66243 - DNA, 20 bp, Artificial Sequence
  MKO10066243_A_mmu-mir-201
  gRNA
gaacagtgcctttctgtgta

SEQ ID NO: 66244 - DNA, 20 bp, Artificial Sequence
  MKO10066244_A_mmu-mir-201
  gRNA
gtacagtaccttactcagta

SEQ ID NO: 66245 - DNA, 20 bp, Artificial Sequence
  MKO10066245_A_mmu-mir-201
  gRNA
gaacaatgccttactgagta

SEQ ID NO: 66246 - DNA, 20 bp, Artificial Sequence
  MKO10066246_A_mmu-mir-547
  gRNA
catgtttcctgttaaatggg

SEQ ID NO: 66247 - DNA, 20 bp, Artificial Sequence
  MKO10066247_A_mmu-mir-547
  gRNA
catttaacaggaaacatgct

SEQ ID NO: 66248 - DNA, 20 bp, Artificial Sequence
  MKO10066248_A_mmu-mir-547
  gRNA
agtgtgtgatgtatcacttg

SEQ ID NO: 66249 - DNA, 20 bp, Artificial Sequence
  MKO10066249_A_mmu-mir-547
  gRNA
caagcatgtttcctgttaaa

SEQ ID NO: 66250 - DNA, 20 bp, Artificial Sequence
  MKO10066250_A_mmu-mir-509
  gRNA
tatgcatgattgccacattc

SEQ ID NO: 66251 - DNA, 20 bp, Artificial Sequence
  MKO10066251_A_mmu-mir-509
  gRNA
ggagtaacacatgtgatata

SEQ ID NO: 66252 - DNA, 20 bp, Artificial Sequence
  MKO10066252_A_mmu-mir-509
  gRNA
tgtgattgacatttctgtaa

SEQ ID NO: 66253 - DNA, 20 bp, Artificial Sequence
  MKO10066253_A_mmu-mir-509
  gRNA
tggttctttactccagaatg

SEQ ID NO: 66254 - DNA, 20 bp, Artificial Sequence
  MKO10066254_A_mmu-mir-224
  gRNA
tctggggctttgtagtcact

SEQ ID NO: 66255 - DNA, 20 bp, Artificial Sequence
  MKO10066255_A_mmu-mir-224
  gRNA
actagtgacttaaaagcccc

SEQ ID NO: 66256 - DNA, 20 bp, Artificial Sequence
  MKO10066256_A_mmu-mir-224
  gRNA
gggggcttttaagtcactag

SEQ ID NO: 66257 - DNA, 20 bp, Artificial Sequence
  MKO10066257_A_mmu-mir-224
  gRNA
tgcacaaaccatctactaaa

SEQ ID NO: 66258 - DNA, 20 bp, Artificial Sequence
  MKO10066258_A_mmu-mir-452
  gRNA
tctcagtctcatctgcaaag

SEQ ID NO: 66259 - DNA, 20 bp, Artificial Sequence
  MKO10066259_A_mmu-mir-452
  gRNA
gcagttacaactgtttgcag

SEQ ID NO: 66260 - DNA, 20 bp, Artificial Sequence
  MKO10066260_A_mmu-mir-452
  gRNA
ctgcttagcatatataagag

SEQ ID NO: 66261 - DNA, 20 bp, Artificial Sequence
  MKO10066261_A_mmu-mir-767
  gRNA
gattcctcttcaggaaccat

SEQ ID NO: 66262 - DNA, 20 bp, Artificial Sequence
  MKO10066262_A_mmu-mir-767
  gRNA
gttatgtgctcagacaacca

SEQ ID NO: 66263 - DNA, 20 bp, Artificial Sequence
  MKO10066263_A_mmu-mir-767
  gRNA
tgcatgagtaaaaacctata

SEQ ID NO: 66264 - DNA, 20 bp, Artificial Sequence
  MKO10066264_A_mmu-mir-767
  gRNA
ataccctatggttcctgaag

SEQ ID NO: 66265 - DNA, 20 bp, Artificial Sequence
  MKO10066265_A_mmu-mir-105
  gRNA
agcacatgctcaagcattcg

SEQ ID NO: 66266 - DNA, 20 bp, Artificial Sequence
  MKO10066266_A_mmu-mir-105
  gRNA
accacaagcatctgagcact

SEQ ID NO: 66267 - DNA, 20 bp, Artificial Sequence
  MKO10066267_A_mmu-mir-105
  gRNA
gaatgcttgagcatgtgcta

SEQ ID NO: 66268 - DNA, 20 bp, Artificial Sequence
  MKO10066268_A_mmu-mir-105
  gRNA
aagtgctcagatgcttgtgg

SEQ ID NO: 66269 - DNA, 20 bp, Artificial Sequence
  MKO10066269_A_mmu-mir-2137
  gRNA
ggcttgccggcgggagcccc

SEQ ID NO: 66270 - DNA, 20 bp, Artificial Sequence
  MKO10066270_A_mmu-mir-2137
  gRNA
ccaacaaggcagcaggaagg

SEQ ID NO: 66271 - DNA, 20 bp, Artificial Sequence
  MKO10066271_A_mmu-mir-2137
  gRNA
aagccaacaaggcagcagga

SEQ ID NO: 66272 - DNA, 20 bp, Artificial Sequence
  MKO10066272_A_mmu-mir-2137
  gRNA
ctgcaatgctctactccctg

SEQ ID NO: 66273 - DNA, 20 bp, Artificial Sequence
  MKO10066273_A_mmu-mir-5132
  gRNA
gcgcacgatcaaggccgctg

SEQ ID NO: 66274 - DNA, 20 bp, Artificial Sequence
  MKO10066274_A_mmu-mir-5132
  gRNA
cgatcaaggccgctgcggga

SEQ ID NO: 66275 - DNA, 20 bp, Artificial Sequence
  MKO10066275_A_mmu-mir-5132
  gRNA
atcaaggccgctgcgggatg

SEQ ID NO: 66276 - DNA, 20 bp, Artificial Sequence
  MKO10066276_A_mmu-mir-5132
  gRNA
tgatgttccccatcccgcag

SEQ ID NO: 66277 - DNA, 20 bp, Artificial Sequence
  MKO10066277_A_mmu-mir-718
  gRNA
ggcctcgtgcgacacccggc

SEQ ID NO: 66278 - DNA, 20 bp, Artificial Sequence
  MKO10066278_A_mmu-mir-718
  gRNA
gacacccggccgggcggaag

SEQ ID NO: 66279 - DNA, 20 bp, Artificial Sequence
  MKO10066279_A_mmu-mir-718
  gRNA
acccggccgggcggaagagg

SEQ ID NO: 66280 - DNA, 20 bp, Artificial Sequence
  MKO10066280_A_mmu-mir-718
  gRNA
ctccgcggccttccgccaca

SEQ ID NO: 66281 - DNA, 20 bp, Artificial Sequence
  MKO10066281_A_mmu-mir-7091
  gRNA
agccactgcgtcttgctaaa

SEQ ID NO: 66282 - DNA, 20 bp, Artificial Sequence
  MKO10066282_A_mmu-mir-7091
  gRNA
ttgcaccatcccctctgcca

SEQ ID NO: 66283 - DNA, 20 bp, Artificial Sequence
  MKO10066283_A_mmu-mir-7091
  gRNA
tgccttttagcaagacgcag

SEQ ID NO: 66284 - DNA, 20 bp, Artificial Sequence
  MKO10066284_A_mmu-mir-7091
  gRNA
ggtgatagattccatggcag

SEQ ID NO: 66285 - DNA, 20 bp, Artificial Sequence
  MKO10066285_A_mmu-mir-7092
  gRNA
ataaacgtgattatgtctaa

SEQ ID NO: 66286 - DNA, 20 bp, Artificial Sequence
  MKO10066286_A_mmu-mir-1906-2
  gRNA
attctcacaacaaccctagg

SEQ ID NO: 66287 - DNA, 20 bp, Artificial Sequence
  MKO10066287_A_mmu-mir-1906-2
  gRNA
cagcagcctgaggcagggct

SEQ ID NO: 66288 - DNA, 20 bp, Artificial Sequence
  MKO10066288_A_mmu-mir-1906-2
  gRNA
aaatgaactgcagcagcctg

SEQ ID NO: 66289 - DNA, 20 bp, Artificial Sequence
  MKO10066289_A_mmu-mir-1906-2
  gRNA
acattaggagcaacctccta

SEQ ID NO: 66290 - DNA, 20 bp, Artificial Sequence
  MKO10066290_A_mmu-mir-7673
  gRNA
tcagctttgactgagaggta

SEQ ID NO: 66291 - DNA, 20 bp, Artificial Sequence
  MKO10066291_A_mmu-mir-7673
  gRNA
attccttacctcaccgtcaa

SEQ ID NO: 66292 - DNA, 20 bp, Artificial Sequence
  MKO10066292_A_mmu-mir-7673
  gRNA
gttcctttgacggtgaggta

SEQ ID NO: 66293 - DNA, 20 bp, Artificial Sequence
  MKO10066293_A_mmu-mir-7673
  gRNA
agtcagttcctttgacggtg

SEQ ID NO: 66294 - DNA, 20 bp, Artificial Sequence
  MKO10066294_A_mmu-mir-223
  gRNA
gctgagttggacactctgtg

SEQ ID NO: 66295 - DNA, 20 bp, Artificial Sequence
  MKO10066295_A_mmu-mir-223
  gRNA
tttgtcaaataccccaagtg

SEQ ID NO: 66296 - DNA, 20 bp, Artificial Sequence
  MKO10066296_A_mmu-mir-223
  gRNA
aactcagcttgtcaaataca

SEQ ID NO: 66297 - DNA, 20 bp, Artificial Sequence
  MKO10066297_A_mmu-mir-223
  gRNA
ataggcatgagccacacttg

SEQ ID NO: 66298 - DNA, 20 bp, Artificial Sequence
  MKO10066298_A_mmu-mir-676
  gRNA
atgcatgactctacaacctt

SEQ ID NO: 66299 - DNA, 20 bp, Artificial Sequence
  MKO10066299_A_mmu-mir-676
  gRNA
attaaaggaatgccgtcctg

SEQ ID NO: 66300 - DNA, 20 bp, Artificial Sequence
  MKO10066300_A_mmu-mir-676
  gRNA
gttgttgagctgtgcgtttc

SEQ ID NO: 66301 - DNA, 20 bp, Artificial Sequence
  MKO10066301_A_mmu-mir-676
  gRNA
ggttgtagagtcatgcattc

SEQ ID NO: 66302 - DNA, 20 bp, Artificial Sequence
  MKO10066302_A_mmu-mir-421
  gRNA
cattcaacaaacatttaatg

SEQ ID NO: 66303 - DNA, 20 bp, Artificial Sequence
  MKO10066303_A_mmu-mir-421
  gRNA
atcatcaacagacattaatt

SEQ ID NO: 66304 - DNA, 20 bp, Artificial Sequence
  MKO10066304_A_mmu-mir-421
  gRNA
gcccatggagatcacagagc

SEQ ID NO: 66305 - DNA, 20 bp, Artificial Sequence
  MKO10066305_A_mmu-mir-421
  gRNA
atgaggcctacaatgtgcac

SEQ ID NO: 66306 - DNA, 20 bp, Artificial Sequence
  MKO10066306_A_mmu-mir-374b
  gRNA
taagtgctagaacacttagc

SEQ ID NO: 66307 - DNA, 20 bp, Artificial Sequence
  MKO10066307_A_mmu-mir-374b
  gRNA
tgtattatatccacccgagt

SEQ ID NO: 66308 - DNA, 20 bp, Artificial Sequence
  MKO10066308_A_mmu-mir-374b
  gRNA
ggttgtattatcattgtccg

SEQ ID NO: 66309 - DNA, 20 bp, Artificial Sequence
  MKO10066309_A_mmu-mir-374b
  gRNA
taagtgttctagcacttagc

SEQ ID NO: 66310 - DNA, 20 bp, Artificial Sequence
  MKO10066310_A_mmu-mir-374c
  gRNA
taagtgctagaacacttagc

SEQ ID NO: 66311 - DNA, 20 bp, Artificial Sequence
  MKO10066311_A_mmu-mir-374c
  gRNA
taagtgttctagcacttagc

SEQ ID NO: 66312 - DNA, 20 bp, Artificial Sequence
  MKO10066312_A_mmu-mir-374c
  gRNA
tgtattatatccacccgagt

SEQ ID NO: 66313 - DNA, 20 bp, Artificial Sequence
  MKO10066313_A_mmu-mir-374c
  gRNA
ggttgtattatcattgtccg

SEQ ID NO: 66314 - DNA, 20 bp, Artificial Sequence
  MKO10066314_A_mmu-mir-672
  gRNA
gtcactatcttcgaaagtga

SEQ ID NO: 66315 - DNA, 20 bp, Artificial Sequence
  MKO10066315_A_mmu-mir-672
  gRNA
tacaccaacctcaaaactaa

SEQ ID NO: 66316 - DNA, 20 bp, Artificial Sequence
  MKO10066316_A_mmu-mir-672
  gRNA
tagccctttagttttgaggt

SEQ ID NO: 66317 - DNA, 20 bp, Artificial Sequence
  MKO10066317_A_mmu-mir-672
  gRNA
gatctagccctttagttttg

SEQ ID NO: 66318 - DNA, 20 bp, Artificial Sequence
  MKO10066318_A_mmu-mir-384
  gRNA
aggcattgtgaacaatttct

SEQ ID NO: 66319 - DNA, 20 bp, Artificial Sequence
  MKO10066319_A_mmu-mir-384
  gRNA
aggaattgtaaacaattcct

SEQ ID NO: 66320 - DNA, 20 bp, Artificial Sequence
  MKO10066320_A_mmu-mir-384
  gRNA
gctagctgaatatatgttac

SEQ ID NO: 66321 - DNA, 20 bp, Artificial Sequence
  MKO10066321_A_mmu-mir-384
  gRNA
caacattatacacattgcct

SEQ ID NO: 66322 - DNA, 20 bp, Artificial Sequence
  MKO10066322_A_mmu-mir-325
  gRNA
tagcacagtgcttgattgat

SEQ ID NO: 66323 - DNA, 20 bp, Artificial Sequence
  MKO10066323_A_mmu-mir-325
  gRNA
cacagtgcttgattgatagg

SEQ ID NO: 66324 - DNA, 20 bp, Artificial Sequence
  MKO10066324_A_mmu-mir-325
  gRNA
acacttactgagcacctact

SEQ ID NO: 66325 - DNA, 20 bp, Artificial Sequence
  MKO10066325_A_mmu-mir-325
  gRNA
tatagtgcttggttcctagt

SEQ ID NO: 66326 - DNA, 20 bp, Artificial Sequence
  MKO10066326_A_mmu-mir-6382
  gRNA
aaagacatagtctaaccact

SEQ ID NO: 66327 - DNA, 20 bp, Artificial Sequence
  MKO10066327_A_mmu-mir-6382
  gRNA
tgtcacatattctaatcata

SEQ ID NO: 66328 - DNA, 20 bp, Artificial Sequence
  MKO10066328_A_mmu-mir-6382
  gRNA
gacttgcaagctgcattttt

SEQ ID NO: 66329 - DNA, 20 bp, Artificial Sequence
  MKO10066329_A_mmu-mir-6382
  gRNA
gaatgtaaagagagcacaca

SEQ ID NO: 66330 - DNA, 20 bp, Artificial Sequence
  MKO10066330_A_mmu-mir-361
  gRNA
acaaatcagaatcacacctg

SEQ ID NO: 66331 - DNA, 20 bp, Artificial Sequence
  MKO10066331_A_mmu-mir-361
  gRNA
tttcaaatactaagtacccc

SEQ ID NO: 66332 - DNA, 20 bp, Artificial Sequence
  MKO10066332_A_mmu-mir-361
  gRNA
tagtatttgaaaagtccccc

SEQ ID NO: 66333 - DNA, 20 bp, Artificial Sequence
  MKO10066333_A_mmu-mir-361
  gRNA
aagcttatcagaatctccag

SEQ ID NO: 66334 - DNA, 20 bp, Artificial Sequence
  MKO10066334_A_mmu-mir-3112
  gRNA
aatgaacagtgacatagaaa

SEQ ID NO: 66335 - DNA, 20 bp, Artificial Sequence
  MKO10066335_A_mmu-mir-3112
  gRNA
aaggcagtctgcatttattc

SEQ ID NO: 66336 - DNA, 20 bp, Artificial Sequence
  MKO10066336_A_mmu-mir-3112
  gRNA
tcttctttgtctctgtcagt

SEQ ID NO: 66337 - DNA, 20 bp, Artificial Sequence
  MKO10066337_A_mmu-mir-7093
  gRNA
gcggtgggcaggatgacaga

SEQ ID NO: 66338 - DNA, 20 bp, Artificial Sequence
  MKO10066338_A_mmu-mir-7093
  gRNA
ttttccatctgtcatcctgc

SEQ ID NO: 66339 - DNA, 20 bp, Artificial Sequence
  MKO10066339_A_mmu-mir-7093
  gRNA
aggatgacagatggaaaaca

SEQ ID NO: 66340 - DNA, 20 bp, Artificial Sequence
  MKO10066340_A_mmu-mir-7093
  gRNA
cagacctgcaggatgacaga

SEQ ID NO: 66341 - DNA, 20 bp, Artificial Sequence
  MKO10066341_A_mmu-mir-7646
  gRNA
gtgaaagagagcgaccagtg

SEQ ID NO: 66342 - DNA, 20 bp, Artificial Sequence
  MKO10066342_A_mmu-mir-7646
  gRNA
tgctgaagtaatgtcctcac

SEQ ID NO: 66343 - DNA, 20 bp, Artificial Sequence
  MKO10066343_A_mmu-mir-1970
  gRNA
caggaagagtgagtgccact

SEQ ID NO: 66344 - DNA, 20 bp, Artificial Sequence
  MKO10066344_A_mmu-mir-1970
  gRNA
gtcactggggataggctttg

SEQ ID NO: 66345 - DNA, 20 bp, Artificial Sequence
  MKO10066345_A_mmu-mir-1970
  gRNA
ttggaggaaatgtgtcactg

SEQ ID NO: 66346 - DNA, 20 bp, Artificial Sequence
  MKO10066346_A_mmu-mir-1970
  gRNA
tgttggaggaaatgtgtcac

SEQ ID NO: 66347 - DNA, 20 bp, Artificial Sequence
  MKO10066347_A_mmu-mir-6383
  gRNA
acttccagttatccagcatg

SEQ ID NO: 66348 - DNA, 20 bp, Artificial Sequence
  MKO10066348_A_mmu-mir-6383
  gRNA
cactgtaaagtgctgtgtca

SEQ ID NO: 66349 - DNA, 20 bp, Artificial Sequence
  MKO10066349_A_mmu-mir-6383
  gRNA
cagtaagtcagtctgcttag

SEQ ID NO: 66350 - DNA, 20 bp, Artificial Sequence
  MKO10066350_A_mmu-mir-6383
  gRNA
tcagtctgcttagaggtcag

SEQ ID NO: 66351 - DNA, 20 bp, Artificial Sequence
  MKO10066351_A_mmu-mir-3475
  gRNA
acccccacagagggtccaga

SEQ ID NO: 66352 - DNA, 20 bp, Artificial Sequence
  MKO10066352_A_mmu-mir-3475
  gRNA
cagatggttcttagttcttc

SEQ ID NO: 66353 - DNA, 20 bp, Artificial Sequence
  MKO10066353_A_mmu-mir-3475
  gRNA
atggttcttagttcttctgg

SEQ ID NO: 66354 - DNA, 20 bp, Artificial Sequence
  MKO10066354_A_mmu-mir-3475
  gRNA
ctgtgggggtacatgatttg

SEQ ID NO: 66355 - DNA, 20 bp, Artificial Sequence
  MKO10066355_A_mmu-mir-652
  gRNA
gctatgtactgcacaaccct

SEQ ID NO: 66356 - DNA, 20 bp, Artificial Sequence
  MKO10066356_A_mmu-mir-652
  gRNA
atgtactgcacaaccctagg

SEQ ID NO: 66357 - DNA, 20 bp, Artificial Sequence
  MKO10066357_A_mmu-mir-652
  gRNA
gtactgcacaaccctaggag

SEQ ID NO: 66358 - DNA, 20 bp, Artificial Sequence
  MKO10066358_A_mmu-mir-652
  gRNA
tcacatagagtataattgaa

SEQ ID NO: 66359 - DNA, 20 bp, Artificial Sequence
  MKO10066359_A_mmu-mir-680-2
  gRNA
gaagtgggcatctgctgaca

SEQ ID NO: 66360 - DNA, 20 bp, Artificial Sequence
  MKO10066360_A_mmu-mir-680-2
  gRNA
agtgggcatctgctgacatg

SEQ ID NO: 66361 - DNA, 20 bp, Artificial Sequence
  MKO10066361_A_mmu-mir-680-2
  gRNA
ggcactctggatcttatctc

SEQ ID NO: 66362 - DNA, 20 bp, Artificial Sequence
  MKO10066362_A_mmu-mir-680-2
  gRNA
ttgatcctccttgacagcct

SEQ ID NO: 66363 - DNA, 20 bp, Artificial Sequence
  MKO10066363_A_mmu-mir-3472
  gRNA
tttgggttctttccagcttc

SEQ ID NO: 66364 - DNA, 20 bp, Artificial Sequence
  MKO10066364_A_mmu-mir-3472
  gRNA
gcttctggctattataaata

SEQ ID NO: 66365 - DNA, 20 bp, Artificial Sequence
  MKO10066365_A_mmu-mir-3472
  gRNA
tatttataatagccagaagc

SEQ ID NO: 66366 - DNA, 20 bp, Artificial Sequence
  MKO10066366_A_mmu-mir-3472
  gRNA
tataatagccagaagctgga

SEQ ID NO: 66367 - DNA, 20 bp, Artificial Sequence
  MKO10066367_A_mmu-mir-764
  gRNA
tatcaacacaatctgaatct

SEQ ID NO: 66368 - DNA, 20 bp, Artificial Sequence
  MKO10066368_A_mmu-mir-764
  gRNA
ccatgcttataaatacatgg

SEQ ID NO: 66369 - DNA, 20 bp, Artificial Sequence
  MKO10066369_A_mmu-mir-764
  gRNA
tgcttataaatacatggagg

SEQ ID NO: 66370 - DNA, 20 bp, Artificial Sequence
  MKO10066370_A_mmu-mir-764
  gRNA
atacatggaggaggccatag

SEQ ID NO: 66371 - DNA, 20 bp, Artificial Sequence
  MKO10066371_A_mmu-mir-1912
  gRNA
tcacaagcatattagtctct

SEQ ID NO: 66372 - DNA, 20 bp, Artificial Sequence
  MKO10066372_A_mmu-mir-1912
  gRNA
tctaggatgtgctcattgca

SEQ ID NO: 66373 - DNA, 20 bp, Artificial Sequence
  MKO10066373_A_mmu-mir-1912
  gRNA
agtgagaacttgatagagat

SEQ ID NO: 66374 - DNA, 20 bp, Artificial Sequence
  MKO10066374_A_mmu-mir-1264
  gRNA
cttcatgcctggcatatagc

SEQ ID NO: 66375 - DNA, 20 bp, Artificial Sequence
  MKO10066375_A_mmu-mir-1264
  gRNA
ttatttgagcacctgttatg

SEQ ID NO: 66376 - DNA, 20 bp, Artificial Sequence
  MKO10066376_A_mmu-mir-1264
  gRNA
tttgagcacctgttatgtgg

SEQ ID NO: 66377 - DNA, 20 bp, Artificial Sequence
  MKO10066377_A_mmu-mir-1264
  gRNA
ttgaggacctgctatatgcc

SEQ ID NO: 66378 - DNA, 20 bp, Artificial Sequence
  MKO10066378_A_mmu-mir-1298
  gRNA
tgaggggttaagagttcatt

SEQ ID NO: 66379 - DNA, 20 bp, Artificial Sequence
  MKO10066379_A_mmu-mir-1298
  gRNA
tacccaagtaccctgttatt

SEQ ID NO: 66380 - DNA, 20 bp, Artificial Sequence
  MKO10066380_A_mmu-mir-1298
  gRNA
tatttggcaatacatacatc

SEQ ID NO: 66381 - DNA, 20 bp, Artificial Sequence
  MKO10066381_A_mmu-mir-1298
  gRNA
acagggtacttgggtacatc

SEQ ID NO: 66382 - DNA, 20 bp, Artificial Sequence
  MKO10066382_A_mmu-mir-448
  gRNA
aatccctacttcatactaag

SEQ ID NO: 66383 - DNA, 20 bp, Artificial Sequence
  MKO10066383_A_mmu-mir-448
  gRNA
catactaagagggggctggc

SEQ ID NO: 66384 - DNA, 20 bp, Artificial Sequence
  MKO10066384_A_mmu-mir-448
  gRNA
ggctggctggttgcatatgt

SEQ ID NO: 66385 - DNA, 20 bp, Artificial Sequence
  MKO10066385_A_mmu-mir-448
  gRNA
atgtaggatgtcccatctcc

SEQ ID NO: 66386 - DNA, 20 bp, Artificial Sequence
  MKO10066386_A_mmu-mir-3620
  gRNA
agggggtggggtggggtggg

SEQ ID NO: 66387 - DNA, 20 bp, Artificial Sequence
  MKO10066387_A_mmu-mir-3620
  gRNA
ggggtggggtggggtgggcg

SEQ ID NO: 66388 - DNA, 20 bp, Artificial Sequence
  MKO10066388_A_mmu-mir-3620
  gRNA
tggggtgggcggggctgagc

SEQ ID NO: 66389 - DNA, 20 bp, Artificial Sequence
  MKO10066389_A_mmu-mir-3620
  gRNA
tgagtgctgtgggctgggct

SEQ ID NO: 66390 - DNA, 20 bp, Artificial Sequence
  MKO10066390_A_mmu-mir-3113
  gRNA
tagcatctctggccctggcc

SEQ ID NO: 66391 - DNA, 20 bp, Artificial Sequence
  MKO10066391_A_mmu-mir-3113
  gRNA
tctggccctggcccgggtcc

SEQ ID NO: 66392 - DNA, 20 bp, Artificial Sequence
  MKO10066392_A_mmu-mir-3113
  gRNA
cctggcccgggtcctggccc

SEQ ID NO: 66393 - DNA, 20 bp, Artificial Sequence
  MKO10066393_A_mmu-mir-3113
  gRNA
cccgggtcctggccctggtc

SEQ ID NO: 66394 - DNA, 20 bp, Artificial Sequence
  MKO10066394_A_mmu-let-7f-2
  gRNA
cactggtgctctgtgggatg

SEQ ID NO: 66395 - DNA, 20 bp, Artificial Sequence
  MKO10066395_A_mmu-let-7f-2
  gRNA
gtagtagattgtatagtttt

SEQ ID NO: 66396 - DNA, 20 bp, Artificial Sequence
  MKO10066396_A_mmu-let-7f-2
  gRNA
tttagggtcataccccatct

SEQ ID NO: 66397 - DNA, 20 bp, Artificial Sequence
  MKO10066397_A_mmu-let-7f-2
  gRNA
acagtctactgtctttccca

SEQ ID NO: 66398 - DNA, 20 bp, Artificial Sequence
  MKO10066398_A_mmu-mir-98
  gRNA
agacacatctgcacatgctg

SEQ ID NO: 66399 - DNA, 20 bp, Artificial Sequence
  MKO10066399_A_mmu-mir-98
  gRNA
catctgcacatgctggggtg

SEQ ID NO: 66400 - DNA, 20 bp, Artificial Sequence
  MKO10066400_A_mmu-mir-98
  gRNA
ggtagtaagttgtattgttg

SEQ ID NO: 66401 - DNA, 20 bp, Artificial Sequence
  MKO10066401_A_mmu-mir-98
  gRNA
tagtaagttgtattgttgtg

SEQ ID NO: 66402 - DNA, 20 bp, Artificial Sequence
  MKO10066402_A_mmu-mir-3473a
  gRNA
tttaaaaatattttctgggc

SEQ ID NO: 66403 - DNA, 20 bp, Artificial Sequence
  MKO10066403_A_mmu-mir-3473a
  gRNA
tattttctgggctggtgaga

SEQ ID NO: 66404 - DNA, 20 bp, Artificial Sequence
  MKO10066404_A_mmu-mir-3473a
  gRNA
ggctggtgagatggctcaac

SEQ ID NO: 66405 - DNA, 20 bp, Artificial Sequence
  MKO10066405_A_mmu-mir-3473a
  gRNA
attgtcttaagctggagaga

SEQ ID NO: 66406 - DNA, 20 bp, Artificial Sequence
  MKO10066406_A_NTCmmu_0001
  gRNA
gcgaggtattcggctccgcg

SEQ ID NO: 66407 - DNA, 20 bp, Artificial Sequence
  MKO10066407_A_NTCmmu_0002
  gRNA
gctttcacggaggttcgacg

SEQ ID NO: 66408 - DNA, 20 bp, Artificial Sequence
  MKO10066408_A_NTCmmu_0003
  gRNA
atgttgcagttcggctcgat

SEQ ID NO: 66409 - DNA, 20 bp, Artificial Sequence
  MKO10066409_A_NTCmmu_0004
  gRNA
acgtgtaaggcgaacgcctt

SEQ ID NO: 66410 - DNA, 20 bp, Artificial Sequence
  MKO10066410_A_NTCmmu_0005
  gRNA
gactccgggtactaaatgtc

SEQ ID NO: 66411 - DNA, 20 bp, Artificial Sequence
  MKO10066411_A_NTCmmu_0006
  gRNA
ccgcgccgttagggaacgag

SEQ ID NO: 66412 - DNA, 20 bp, Artificial Sequence
  MKO10066412_A_NTCmmu_0007
  gRNA
attgttcgaccgtctacggg

SEQ ID NO: 66413 - DNA, 20 bp, Artificial Sequence
  MKO10066413_A_NTCmmu_0008
  gRNA
acccatcgggtgcgatatgg

SEQ ID NO: 66414 - DNA, 20 bp, Artificial Sequence
  MKO10066414_A_NTCmmu_0009
  gRNA
cgggcgtcacctgctagtaa

SEQ ID NO: 66415 - DNA, 20 bp, Artificial Sequence
  MKO10066415_A_NTCmmu_0010
  gRNA
gcttctactcgcaacgtatt

SEQ ID NO: 66416 - DNA, 20 bp, Artificial Sequence
  MKO10066416_A_NTCmmu_0011
  gRNA
tacagttatacgtcgcggtg

SEQ ID NO: 66417 - DNA, 20 bp, Artificial Sequence
  MKO10066417_A_NTCmmu_0012
  gRNA
aagcacaagaacggtccgcc

SEQ ID NO: 66418 - DNA, 20 bp, Artificial Sequence
  MKO10066418_A_NTCmmu_0013
  gRNA
cagccaccgcaccggcgtaa

SEQ ID NO: 66419 - DNA, 20 bp, Artificial Sequence
  MKO10066419_A_NTCmmu_0014
  gRNA
gtcaagccgaacgctgccgg

SEQ ID NO: 66420 - DNA, 20 bp, Artificial Sequence
  MKO10066420_A_NTCmmu_0015
  gRNA
ccttagaccgggtgtacctc

SEQ ID NO: 66421 - DNA, 20 bp, Artificial Sequence
  MKO10066421_A_NTCmmu_0016
  gRNA
aagtctatgcggggctcgta

SEQ ID NO: 66422 - DNA, 20 bp, Artificial Sequence
  MKO10066422_A_NTCmmu_0017
  gRNA
ttgtcaacttcggccaacgc

SEQ ID NO: 66423 - DNA, 20 bp, Artificial Sequence
  MKO10066423_A_NTCmmu_0018
  gRNA
atagatgtctacgcgccgtt

SEQ ID NO: 66424 - DNA, 20 bp, Artificial Sequence
  MKO10066424_A_NTCmmu_0019
  gRNA
ctcgggctattcagcgatag

SEQ ID NO: 66425 - DNA, 20 bp, Artificial Sequence
  MKO10066425_A_NTCmmu_0020
  gRNA
gcggttaccgcgaaaaccat

SEQ ID NO: 66426 - DNA, 20 bp, Artificial Sequence
  MKO10066426_A_NTCmmu_0021
  gRNA
accaacgctacgatcccgga

SEQ ID NO: 66427 - DNA, 20 bp, Artificial Sequence
  MKO10066427_A_NTCmmu_0022
  gRNA
ccctatatgcgagatccata

SEQ ID NO: 66428 - DNA, 20 bp, Artificial Sequence
  MKO10066428_A_NTCmmu_0023
  gRNA
agaaaggcacgtgcgacgtc

SEQ ID NO: 66429 - DNA, 20 bp, Artificial Sequence
  MKO10066429_A_NTCmmu_0024
  gRNA
gaccaaccttacggtaactc

SEQ ID NO: 66430 - DNA, 20 bp, Artificial Sequence
  MKO10066430_A_NTCmmu_0025
  gRNA
attattcctccggatgacga

SEQ ID NO: 66431 - DNA, 20 bp, Artificial Sequence
  MKO10066431_A_NTCmmu_0026
  gRNA
tctcagttcgtagcgaacga

SEQ ID NO: 66432 - DNA, 20 bp, Artificial Sequence
  MKO10066432_A_NTCmmu_0027
  gRNA
tcccgggaggtacggtgtac

SEQ ID NO: 66433 - DNA, 20 bp, Artificial Sequence
  MKO10066433_A_NTCmmu_0028
  gRNA
ggggatggccttacgtcgcg

SEQ ID NO: 66434 - DNA, 20 bp, Artificial Sequence
  MKO10066434_A_NTCmmu_0029
  gRNA
gtatcctccttacggcccgt

SEQ ID NO: 66435 - DNA, 20 bp, Artificial Sequence
  MKO10066435_A_NTCmmu_0030
  gRNA
gctcggaccttttagacgtc

SEQ ID NO: 66436 - DNA, 20 bp, Artificial Sequence
  MKO10066436_A_NTCmmu_0031
  gRNA
gtggttacgttaacgactac

SEQ ID NO: 66437 - DNA, 20 bp, Artificial Sequence
  MKO10066437_A_NTCmmu_0032
  gRNA
tgcaacgatggttacggtac

SEQ ID NO: 66438 - DNA, 20 bp, Artificial Sequence
  MKO10066438_A_NTCmmu_0033
  gRNA
aacgggcgcaataccctttt

SEQ ID NO: 66439 - DNA, 20 bp, Artificial Sequence
  MKO10066439_A_NTCmmu_0034
  gRNA
tcgtgtctagctatcgagtg

SEQ ID NO: 66440 - DNA, 20 bp, Artificial Sequence
  MKO10066440_A_NTCmmu_0035
  gRNA
gacgtctaatttctggccgt

SEQ ID NO: 66441 - DNA, 20 bp, Artificial Sequence
  MKO10066441_A_NTCmmu_0036
  gRNA
tagtcctagttagattcgcg

SEQ ID NO: 66442 - DNA, 20 bp, Artificial Sequence
  MKO10066442_A_NTCmmu_0037
  gRNA
aaggccttaacacgtcgacc

SEQ ID NO: 66443 - DNA, 20 bp, Artificial Sequence
  MKO10066443_A_NTCmmu_0038
  gRNA
attcgtgcatcgcggggttt

SEQ ID NO: 66444 - DNA, 20 bp, Artificial Sequence
  MKO10066444_A_NTCmmu_0039
  gRNA
cacctcgcgtcatatcacta

SEQ ID NO: 66445 - DNA, 20 bp, Artificial Sequence
  MKO10066445_A_NTCmmu_0040
  gRNA
gacctcgcaattgagcgctc

SEQ ID NO: 66446 - DNA, 20 bp, Artificial Sequence
  MKO10066446_A_NTCmmu_0041
  gRNA
tgtatccaccgtgacccggt

SEQ ID NO: 66447 - DNA, 20 bp, Artificial Sequence
  MKO10066447_A_NTCmmu_0042
  gRNA
gatcttaccactcgtcgtag

SEQ ID NO: 66448 - DNA, 20 bp, Artificial Sequence
  MKO10066448_A_NTCmmu_0043
  gRNA
ttcgccggcgacgaagtgca

SEQ ID NO: 66449 - DNA, 20 bp, Artificial Sequence
  MKO10066449_A_NTCmmu_0044
  gRNA
agcactaggatcgcggcctt

SEQ ID NO: 66450 - DNA, 20 bp, Artificial Sequence
  MKO10066450_A_NTCmmu_0045
  gRNA
gcgtatctaccctaccgccg

SEQ ID NO: 66451 - DNA, 20 bp, Artificial Sequence
  MKO10066451_A_NTCmmu_0046
  gRNA
gcgcgagggcaccgacaagt

SEQ ID NO: 66452 - DNA, 20 bp, Artificial Sequence
  MKO10066452_A_NTCmmu_0047
  gRNA
cgcgtatatgtcacacggca

SEQ ID NO: 66453 - DNA, 20 bp, Artificial Sequence
  MKO10066453_A_NTCmmu_0048
  gRNA
taaaaccgatcacgatacga

SEQ ID NO: 66454 - DNA, 20 bp, Artificial Sequence
  MKO10066454_A_NTCmmu_0049
  gRNA
tcctgcgcgatgaccgtcgg

SEQ ID NO: 66455 - DNA, 20 bp, Artificial Sequence
  MKO10066455_A_NTCmmu_0050
  gRNA
tggcccacaaggtgcgatat

SEQ ID NO: 66456 - DNA, 20 bp, Artificial Sequence
  MKO10066456_A_NTCmmu_0051
  gRNA
ggggtaggcctaattacgga

SEQ ID NO: 66457 - DNA, 20 bp, Artificial Sequence
  MKO10066457_A_NTCmmu_0052
  gRNA
cgcttcgtctctcgcaaaca

SEQ ID NO: 66458 - DNA, 20 bp, Artificial Sequence
  MKO10066458_A_NTCmmu_0053
  gRNA
ttatgtgcctctcggcgcat

SEQ ID NO: 66459 - DNA, 20 bp, Artificial Sequence
  MKO10066459_A_NTCmmu_0054
  gRNA
ccgttctgacgacgctaaag

SEQ ID NO: 66460 - DNA, 20 bp, Artificial Sequence
  MKO10066460_A_NTCmmu_0055
  gRNA
aaactcccgtgtcaaccgat

SEQ ID NO: 66461 - DNA, 20 bp, Artificial Sequence
  MKO10066461_A_NTCmmu_0056
  gRNA
gtttgcgagtcaaagtacgc

SEQ ID NO: 66462 - DNA, 20 bp, Artificial Sequence
  MKO10066462_A_NTCmmu_0057
  gRNA
gggtgcacacgccggcctat

SEQ ID NO: 66463 - DNA, 20 bp, Artificial Sequence
  MKO10066463_A_NTCmmu_0058
  gRNA
ctttataccgcgcgtcggca

SEQ ID NO: 66464 - DNA, 20 bp, Artificial Sequence
  MKO10066464_A_NTCmmu_0059
  gRNA
tcaaacgcccgggcgcccca

SEQ ID NO: 66465 - DNA, 20 bp, Artificial Sequence
  MKO10066465_A_NTCmmu_0060
  gRNA
gaccggtgtgtttacgcgtg

SEQ ID NO: 66466 - DNA, 20 bp, Artificial Sequence
  MKO10066466_A_NTCmmu_0061
  gRNA
cggtgaggatccctcttgcg

SEQ ID NO: 66467 - DNA, 20 bp, Artificial Sequence
  MKO10066467_A_NTCmmu_0062
  gRNA
acggtcccaacgagcgccgg

SEQ ID NO: 66468 - DNA, 20 bp, Artificial Sequence
  MKO10066468_A_NTCmmu_0063
  gRNA
cgcttcattgcccgaacgct

SEQ ID NO: 66469 - DNA, 20 bp, Artificial Sequence
  MKO10066469_A_NTCmmu_0064
  gRNA
ttataccgtcacgagtgccc

SEQ ID NO: 66470 - DNA, 20 bp, Artificial Sequence
  MKO10066470_A_NTCmmu_0065
  gRNA
tgcaccggtacgggcgactc

SEQ ID NO: 66471 - DNA, 20 bp, Artificial Sequence
  MKO10066471_A_NTCmmu_0066
  gRNA
gaggcgtacttcggctctaa

SEQ ID NO: 66472 - DNA, 20 bp, Artificial Sequence
  MKO10066472_A_NTCmmu_0067
  gRNA
ttcgagacggatacgtctgc

SEQ ID NO: 66473 - DNA, 20 bp, Artificial Sequence
  MKO10066473_A_NTCmmu_0068
  gRNA
tagcccgtcgagtactcccc

SEQ ID NO: 66474 - DNA, 20 bp, Artificial Sequence
  MKO10066474_A_NTCmmu_0069
  gRNA
agcttagatcgtgcgtcgta

SEQ ID NO: 66475 - DNA, 20 bp, Artificial Sequence
  MKO10066475_A_NTCmmu_0070
  gRNA
cgccggatgactggtggata

SEQ ID NO: 66476 - DNA, 20 bp, Artificial Sequence
  MKO10066476_A_NTCmmu_0071
  gRNA
ccgtttcgcctattggtgcg

SEQ ID NO: 66477 - DNA, 20 bp, Artificial Sequence
  MKO10066477_A_NTCmmu_0072
  gRNA
ttcgacgtgcggcgtattgg

SEQ ID NO: 66478 - DNA, 20 bp, Artificial Sequence
  MKO10066478_A_NTCmmu_0073
  gRNA
ttcaattgttcgcccgaaca

SEQ ID NO: 66479 - DNA, 20 bp, Artificial Sequence
  MKO10066479_A_NTCmmu_0074
  gRNA
gcggatctgacggttactta

SEQ ID NO: 66480 - DNA, 20 bp, Artificial Sequence
  MKO10066480_A_NTCmmu_0075
  gRNA
aatgaagcaccgattgcgga

SEQ ID NO: 66481 - DNA, 20 bp, Artificial Sequence
  MKO10066481_A_NTCmmu_0076
  gRNA
tcctataattgagcgaacgg

SEQ ID NO: 66482 - DNA, 20 bp, Artificial Sequence
  MKO10066482_A_NTCmmu_0077
  gRNA
gctacagatttgcgttcgag

SEQ ID NO: 66483 - DNA, 20 bp, Artificial Sequence
  MKO10066483_A_NTCmmu_0078
  gRNA
ggactgaaaccgatagtatc

SEQ ID NO: 66484 - DNA, 20 bp, Artificial Sequence
  MKO10066484_A_NTCmmu_0079
  gRNA
gcaattctgcaacgcacgtc

SEQ ID NO: 66485 - DNA, 20 bp, Artificial Sequence
  MKO10066485_A_NTCmmu_0080
  gRNA
cacccgactcggccgtaaag

SEQ ID NO: 66486 - DNA, 20 bp, Artificial Sequence
  MKO10066486_A_NTCmmu_0081
  gRNA
caaccgtgcgatgcgcgcta

SEQ ID NO: 66487 - DNA, 20 bp, Artificial Sequence
  MKO10066487_A_NTCmmu_0082
  gRNA
tgatggacgcgatacgttta

SEQ ID NO: 66488 - DNA, 20 bp, Artificial Sequence
  MKO10066488_A_NTCmmu_0083
  gRNA
taccccttgaggggcgcata

SEQ ID NO: 66489 - DNA, 20 bp, Artificial Sequence
  MKO10066489_A_NTCmmu_0084
  gRNA
ccgtatacgtatctatgccg

SEQ ID NO: 66490 - DNA, 20 bp, Artificial Sequence
  MKO10066490_A_NTCmmu_0085
  gRNA
acagcggcctaatacttcgc

SEQ ID NO: 66491 - DNA, 20 bp, Artificial Sequence
  MKO10066491_A_NTCmmu_0086
  gRNA
tatcgaactgcacacgcaac

SEQ ID NO: 66492 - DNA, 20 bp, Artificial Sequence
  MKO10066492_A_NTCmmu_0087
  gRNA
tgtcggacccattgtcgaac

SEQ ID NO: 66493 - DNA, 20 bp, Artificial Sequence
  MKO10066493_A_NTCmmu_0088
  gRNA
aaacctagcgtagattcggc

SEQ ID NO: 66494 - DNA, 20 bp, Artificial Sequence
  MKO10066494_A_NTCmmu_0089
  gRNA
tagatggtgcttctgtcgcg

SEQ ID NO: 66495 - DNA, 20 bp, Artificial Sequence
  MKO10066495_A_NTCmmu_0090
  gRNA
catcgtaacacacgtacgag

SEQ ID NO: 66496 - DNA, 20 bp, Artificial Sequence
  MKO10066496_A_NTCmmu_0091
  gRNA
caacgatcaggcgtgttatc

SEQ ID NO: 66497 - DNA, 20 bp, Artificial Sequence
  MKO10066497_A_NTCmmu_0092
  gRNA
acagcaggggccgcgaataa

SEQ ID NO: 66498 - DNA, 20 bp, Artificial Sequence
  MKO10066498_A_NTCmmu_0093
  gRNA
agccgggctttccgtcaagc

SEQ ID NO: 66499 - DNA, 20 bp, Artificial Sequence
  MKO10066499_A_NTCmmu_0094
  gRNA
acggtccctctcgggtcaat

SEQ ID NO: 66500 - DNA, 20 bp, Artificial Sequence
  MKO10066500_A_NTCmmu_0095
  gRNA
tcaatagttctgcgcgaatt

SEQ ID NO: 66501 - DNA, 20 bp, Artificial Sequence
  MKO10066501_A_NTCmmu_0096
  gRNA
tcgttacataccccgcggaa

SEQ ID NO: 66502 - DNA, 20 bp, Artificial Sequence
  MKO10066502_A_NTCmmu_0097
  gRNA
cattcggtccgttcatctcg

SEQ ID NO: 66503 - DNA, 20 bp, Artificial Sequence
  MKO10066503_A_NTCmmu_0098
  gRNA
ttcggctcaatggcgcgagc

SEQ ID NO: 66504 - DNA, 20 bp, Artificial Sequence
  MKO10066504_A_NTCmmu_0099
  gRNA
catacccgcgccgtgactcc

SEQ ID NO: 66505 - DNA, 20 bp, Artificial Sequence
  MKO10066505_A_NTCmmu_0100
  gRNA
ggacggatgggacgactagt

SEQ ID NO: 66506 - DNA, 20 bp, Artificial Sequence
  MKO10066506_A_NTCmmu_0101
  gRNA
gtgcaacgactgacccgcgg

SEQ ID NO: 66507 - DNA, 20 bp, Artificial Sequence
  MKO10066507_A_NTCmmu_0102
  gRNA
cgacacttgggctgacgcgc

SEQ ID NO: 66508 - DNA, 20 bp, Artificial Sequence
  MKO10066508_A_NTCmmu_0103
  gRNA
tgtgtaattacgtttcgcgg

SEQ ID NO: 66509 - DNA, 20 bp, Artificial Sequence
  MKO10066509_A_NTCmmu_0104
  gRNA
aaccgtactgcgaggagcat

SEQ ID NO: 66510 - DNA, 20 bp, Artificial Sequence
  MKO10066510_A_NTCmmu_0105
  gRNA
gatatttaccggcgataaga

SEQ ID NO: 66511 - DNA, 20 bp, Artificial Sequence
  MKO10066511_A_NTCmmu_0106
  gRNA
gcgacgtgtatcgatcactc

SEQ ID NO: 66512 - DNA, 20 bp, Artificial Sequence
  MKO10066512_A_NTCmmu_0107
  gRNA
taatggaagatgcgcgatac

SEQ ID NO: 66513 - DNA, 20 bp, Artificial Sequence
  MKO10066513_A_NTCmmu_0108
  gRNA
tgtcctaccgaatgaaccgt

SEQ ID NO: 66514 - DNA, 20 bp, Artificial Sequence
  MKO10066514_A_NTCmmu_0109
  gRNA
acgcgaagtgtcgcagagtg

SEQ ID NO: 66515 - DNA, 20 bp, Artificial Sequence
  MKO10066515_A_NTCmmu_0110
  gRNA
gcagagcgtaatcggcatcg

SEQ ID NO: 66516 - DNA, 20 bp, Artificial Sequence
  MKO10066516_A_NTCmmu_0111
  gRNA
gccgcgccataatatgccat

SEQ ID NO: 66517 - DNA, 20 bp, Artificial Sequence
  MKO10066517_A_NTCmmu_0112
  gRNA
cgaatgcgccggagaatatt

SEQ ID NO: 66518 - DNA, 20 bp, Artificial Sequence
  MKO10066518_A_NTCmmu_0113
  gRNA
cccgcctggcgattcacggg

SEQ ID NO: 66519 - DNA, 20 bp, Artificial Sequence
  MKO10066519_A_NTCmmu_0114
  gRNA
agcctagtcgcgctaatatt

SEQ ID NO: 66520 - DNA, 20 bp, Artificial Sequence
  MKO10066520_A_NTCmmu_0115
  gRNA
gtgtgcctcgacagcgtaag

SEQ ID NO: 66521 - DNA, 20 bp, Artificial Sequence
  MKO10066521_A_NTCmmu_0116
  gRNA
tcatgcgcctcgtaatacct

SEQ ID NO: 66522 - DNA, 20 bp, Artificial Sequence
  MKO10066522_A_NTCmmu_0117
  gRNA
tgtgccacgccgctgcaacg

SEQ ID NO: 66523 - DNA, 20 bp, Artificial Sequence
  MKO10066523_A_NTCmmu_0118
  gRNA
gcaaataggtcggagcgtgt

SEQ ID NO: 66524 - DNA, 20 bp, Artificial Sequence
  MKO10066524_A_NTCmmu_0119
  gRNA
ggatagcccggttggtgcgt

SEQ ID NO: 66525 - DNA, 20 bp, Artificial Sequence
  MKO10066525_A_NTCmmu_0120
  gRNA
tcgcaaaatgcggattccgt

SEQ ID NO: 66526 - DNA, 20 bp, Artificial Sequence
  MKO10066526_A_NTCmmu_0121
  gRNA
ggtgcagtccgtttagtcgg

SEQ ID NO: 66527 - DNA, 20 bp, Artificial Sequence
  MKO10066527_A_NTCmmu_0122
  gRNA
tgggttccggccccatgtac

SEQ ID NO: 66528 - DNA, 20 bp, Artificial Sequence
  MKO10066528_A_NTCmmu_0123
  gRNA
ccttcggattcgtaggctgg

SEQ ID NO: 66529 - DNA, 20 bp, Artificial Sequence
  MKO10066529_A_NTCmmu_0124
  gRNA
tcccccgtacgtgtatgtcg

SEQ ID NO: 66530 - DNA, 20 bp, Artificial Sequence
  MKO10066530_A_NTCmmu_0125
  gRNA
aggtgcgtgtcaaccggtag

SEQ ID NO: 66531 - DNA, 20 bp, Artificial Sequence
  MKO10066531_A_NTCmmu_0126
  gRNA
aaaaagtccgcgattacgtc

SEQ ID NO: 66532 - DNA, 20 bp, Artificial Sequence
  MKO10066532_A_NTCmmu_0127
  gRNA
ttatcgcacaaccccgaaag

SEQ ID NO: 66533 - DNA, 20 bp, Artificial Sequence
  MKO10066533_A_NTCmmu_0128
  gRNA
caccccgtagcaacgataaa

SEQ ID NO: 66534 - DNA, 20 bp, Artificial Sequence
  MKO10066534_A_NTCmmu_0129
  gRNA
taacagcttccgcgtaatat

SEQ ID NO: 66535 - DNA, 20 bp, Artificial Sequence
  MKO10066535_A_NTCmmu_0130
  gRNA
gccatagccaatcgctagtt

SEQ ID NO: 66536 - DNA, 20 bp, Artificial Sequence
  MKO10066536_A_NTCmmu_0131
  gRNA
catctatgagacgtgcgtac

SEQ ID NO: 66537 - DNA, 20 bp, Artificial Sequence
  MKO10066537_A_NTCmmu_0132
  gRNA
ttgataaaccgcggccgaaa

SEQ ID NO: 66538 - DNA, 20 bp, Artificial Sequence
  MKO10066538_A_NTCmmu_0133
  gRNA
gtatcctcgcaatcgttagg

SEQ ID NO: 66539 - DNA, 20 bp, Artificial Sequence
  MKO10066539_A_NTCmmu_0134
  gRNA
tggcgctcctgcgcacacga

SEQ ID NO: 66540 - DNA, 20 bp, Artificial Sequence
  MKO10066540_A_NTCmmu_0135
  gRNA
ttcgaagtctaacccgcggg

SEQ ID NO: 66541 - DNA, 20 bp, Artificial Sequence
  MKO10066541_A_NTCmmu_0136
  gRNA
gtttcccgggactgtcgcgt

SEQ ID NO: 66542 - DNA, 20 bp, Artificial Sequence
  MKO10066542_A_NTCmmu_0137
  gRNA
aacgccccggatttcgttga

SEQ ID NO: 66543 - DNA, 20 bp, Artificial Sequence
  MKO10066543_A_NTCmmu_0138
  gRNA
acaacacgccgacacgtcta

SEQ ID NO: 66544 - DNA, 20 bp, Artificial Sequence
  MKO10066544_A_NTCmmu_0139
  gRNA
taagcggcgtcatgtcgccc

SEQ ID NO: 66545 - DNA, 20 bp, Artificial Sequence
  MKO10066545_A_NTCmmu_0140
  gRNA
ccgcccctgcgaactgcgtt

SEQ ID NO: 66546 - DNA, 20 bp, Artificial Sequence
  MKO10066546_A_NTCmmu_0141
  gRNA
tatctaatcgcggagtcgta

SEQ ID NO: 66547 - DNA, 20 bp, Artificial Sequence
  MKO10066547_A_NTCmmu_0142
  gRNA
acgctatagtgtacgtctaa

SEQ ID NO: 66548 - DNA, 20 bp, Artificial Sequence
  MKO10066548_A_NTCmmu_0143
  gRNA
gtagacatattgcgtaatcg

SEQ ID NO: 66549 - DNA, 20 bp, Artificial Sequence
  MKO10066549_A_NTCmmu_0144
  gRNA
cgtaaaccataacgttggtc

SEQ ID NO: 66550 - DNA, 20 bp, Artificial Sequence
  MKO10066550_A_NTCmmu_0145
  gRNA
ggacgtagattagggcgtaa

SEQ ID NO: 66551 - DNA, 20 bp, Artificial Sequence
  MKO10066551_A_NTCmmu_0146
  gRNA
cgggcaatatgatcgtaggc

SEQ ID NO: 66552 - DNA, 20 bp, Artificial Sequence
  MKO10066552_A_NTCmmu_0147
  gRNA
ggaccaatgttaccgtaggt

SEQ ID NO: 66553 - DNA, 20 bp, Artificial Sequence
  MKO10066553_A_NTCmmu_0148
  gRNA
cagggacgtagccgccgtta

SEQ ID NO: 66554 - DNA, 20 bp, Artificial Sequence
  MKO10066554_A_NTCmmu_0149
  gRNA
aaccccggctgtcatcgccg

SEQ ID NO: 66555 - DNA, 20 bp, Artificial Sequence
  MKO10066555_A_NTCmmu_0150
  gRNA
gattcattatcggcatacgg

SEQ ID NO: 66556 - DNA, 20 bp, Artificial Sequence
  MKO10066556_A_NTCmmu_0151
  gRNA
agtcatcctctatgcgcgta

SEQ ID NO: 66557 - DNA, 20 bp, Artificial Sequence
  MKO10066557_A_NTCmmu_0152
  gRNA
cgtacgggcgcgccgtccat

SEQ ID NO: 66558 - DNA, 20 bp, Artificial Sequence
  MKO10066558_A_NTCmmu_0153
  gRNA
ttgcgtgtgcgttgttaacg

SEQ ID NO: 66559 - DNA, 20 bp, Artificial Sequence
  MKO10066559_A_NTCmmu_0154
  gRNA
gaccatacgcctcgtatgcc

SEQ ID NO: 66560 - DNA, 20 bp, Artificial Sequence
  MKO10066560_A_NTCmmu_0155
  gRNA
cggcaatgtgtggcgaccgc

SEQ ID NO: 66561 - DNA, 20 bp, Artificial Sequence
  MKO10066561_A_NTCmmu_0156
  gRNA
tcgctaagccgggtaatact

SEQ ID NO: 66562 - DNA, 20 bp, Artificial Sequence
  MKO10066562_A_NTCmmu_0157
  gRNA
tttctaattacccgatacgt

SEQ ID NO: 66563 - DNA, 20 bp, Artificial Sequence
  MKO10066563_A_NTCmmu_0158
  gRNA
accaggactgccgcgtgagg

SEQ ID NO: 66564 - DNA, 20 bp, Artificial Sequence
  MKO10066564_A_NTCmmu_0159
  gRNA
gcgcgtacatataaataggt

SEQ ID NO: 66565 - DNA, 20 bp, Artificial Sequence
  MKO10066565_A_NTCmmu_0160
  gRNA
cttatccataataggcggcg

SEQ ID NO: 66566 - DNA, 20 bp, Artificial Sequence
  MKO10066566_A_NTCmmu_0161
  gRNA
gttattgcgccttggccgta

SEQ ID NO: 66567 - DNA, 20 bp, Artificial Sequence
  MKO10066567_A_NTCmmu_0162
  gRNA
taaaagtggtgcgtcgtcgt

SEQ ID NO: 66568 - DNA, 20 bp, Artificial Sequence
  MKO10066568_A_NTCmmu_0163
  gRNA
ctcgtgaaacaagatccgac

SEQ ID NO: 66569 - DNA, 20 bp, Artificial Sequence
  MKO10066569_A_NTCmmu_0164
  gRNA
taaacgattcaccgataaca

SEQ ID NO: 66570 - DNA, 20 bp, Artificial Sequence
  MKO10066570_A_NTCmmu_0165
  gRNA
cggccgtagtgacgaatgga

SEQ ID NO: 66571 - DNA, 20 bp, Artificial Sequence
  MKO10066571_A_NTCmmu_0166
  gRNA
accggtcgaagtctgggatt

SEQ ID NO: 66572 - DNA, 20 bp, Artificial Sequence
  MKO10066572_A_NTCmmu_0167
  gRNA
tccgtacatcgacctattac

SEQ ID NO: 66573 - DNA, 20 bp, Artificial Sequence
  MKO10066573_A_NTCmmu_0168
  gRNA
cgacacgatggtcatactac

SEQ ID NO: 66574 - DNA, 20 bp, Artificial Sequence
  MKO10066574_A_NTCmmu_0169
  gRNA
actcgacctaacgtcgatgt

SEQ ID NO: 66575 - DNA, 20 bp, Artificial Sequence
  MKO10066575_A_NTCmmu_0170
  gRNA
tgcagatcgcgaagcgacta

SEQ ID NO: 66576 - DNA, 20 bp, Artificial Sequence
  MKO10066576_A_NTCmmu_0171
  gRNA
tctaggatactcttaacggg

SEQ ID NO: 66577 - DNA, 20 bp, Artificial Sequence
  MKO10066577_A_NTCmmu_0172
  gRNA
ggtctgtccgttgcgaccac

SEQ ID NO: 66578 - DNA, 20 bp, Artificial Sequence
  MKO10066578_A_NTCmmu_0173
  gRNA
accggactgcgatatgccgt

SEQ ID NO: 66579 - DNA, 20 bp, Artificial Sequence
  MKO10066579_A_NTCmmu_0174
  gRNA
ctcgtatagtattgcgtggt

SEQ ID NO: 66580 - DNA, 20 bp, Artificial Sequence
  MKO10066580_A_NTCmmu_0175
  gRNA
ctttagtcacgatatacgtc

SEQ ID NO: 66581 - DNA, 20 bp, Artificial Sequence
  MKO10066581_A_NTCmmu_0176
  gRNA
gcggcccgtgaccgttcaat

SEQ ID NO: 66582 - DNA, 20 bp, Artificial Sequence
  MKO10066582_A_NTCmmu_0177
  gRNA
ccggtttataaattacgtgg

SEQ ID NO: 66583 - DNA, 20 bp, Artificial Sequence
  MKO10066583_A_NTCmmu_0178
  gRNA
cagctcaccctgcgtacggt

SEQ ID NO: 66584 - DNA, 20 bp, Artificial Sequence
  MKO10066584_A_NTCmmu_0179
  gRNA
ctcggctttacgatcgatca

SEQ ID NO: 66585 - DNA, 20 bp, Artificial Sequence
  MKO10066585_A_NTCmmu_0180
  gRNA
tctgcaccgcgacttagctt

SEQ ID NO: 66586 - DNA, 20 bp, Artificial Sequence
  MKO10066586_A_NTCmmu_0181
  gRNA
ggcttatagacgagactcga

SEQ ID NO: 66587 - DNA, 20 bp, Artificial Sequence
  MKO10066587_A_NTCmmu_0182
  gRNA
accggatgtgggcgcctctc

SEQ ID NO: 66588 - DNA, 20 bp, Artificial Sequence
  MKO10066588_A_NTCmmu_0183
  gRNA
cattacgtgtcgagctccgg

SEQ ID NO: 66589 - DNA, 20 bp, Artificial Sequence
  MKO10066589_A_NTCmmu_0184
  gRNA
gatgcgggtggaaaacgtta

SEQ ID NO: 66590 - DNA, 20 bp, Artificial Sequence
  MKO10066590_A_NTCmmu_0185
  gRNA
gcaaaaagcggacacgcgac

SEQ ID NO: 66591 - DNA, 20 bp, Artificial Sequence
  MKO10066591_A_NTCmmu_0186
  gRNA
cgaggatgtacatacgtaaa

SEQ ID NO: 66592 - DNA, 20 bp, Artificial Sequence
  MKO10066592_A_NTCmmu_0187
  gRNA
acacgtcttcggctatacgc

SEQ ID NO: 66593 - DNA, 20 bp, Artificial Sequence
  MKO10066593_A_NTCmmu_0188
  gRNA
tcgtgcctagctcggttgag

SEQ ID NO: 66594 - DNA, 20 bp, Artificial Sequence
  MKO10066594_A_NTCmmu_0189
  gRNA
tcacacgggatctcgccggt

SEQ ID NO: 66595 - DNA, 20 bp, Artificial Sequence
  MKO10066595_A_NTCmmu_0190
  gRNA
cgtgcgttcgtaataaaagg

SEQ ID NO: 66596 - DNA, 20 bp, Artificial Sequence
  MKO10066596_A_NTCmmu_0191
  gRNA
ccccttcgatatccgatgac

SEQ ID NO: 66597 - DNA, 20 bp, Artificial Sequence
  MKO10066597_A_NTCmmu_0192
  gRNA
cgtgattcctaagcccccgc

SEQ ID NO: 66598 - DNA, 20 bp, Artificial Sequence
  MKO10066598_A_NTCmmu_0193
  gRNA
gcgtgccatgggaggccgtt

SEQ ID NO: 66599 - DNA, 20 bp, Artificial Sequence
  MKO10066599_A_NTCmmu_0194
  gRNA
ggctttacgtaaggagcgta

SEQ ID NO: 66600 - DNA, 20 bp, Artificial Sequence
  MKO10066600_A_NTCmmu_0195
  gRNA
accctagcctcatcgcgacc

SEQ ID NO: 66601 - DNA, 20 bp, Artificial Sequence
  MKO10066601_A_NTCmmu_0196
  gRNA
gctgattagacccggcgtaa

SEQ ID NO: 66602 - DNA, 20 bp, Artificial Sequence
  MKO10066602_A_NTCmmu_0197
  gRNA
gttacccctttggccggaag

SEQ ID NO: 66603 - DNA, 20 bp, Artificial Sequence
  MKO10066603_A_NTCmmu_0198
  gRNA
taacgttatgtcaaacgctc

SEQ ID NO: 66604 - DNA, 20 bp, Artificial Sequence
  MKO10066604_A_NTCmmu_0199
  gRNA
ggatcgatccgaggaacgtg

SEQ ID NO: 66605 - DNA, 20 bp, Artificial Sequence
  MKO10066605_A_NTCmmu_0200
  gRNA
ctgcacggcacgacatccaa

SEQ ID NO: 66606 - DNA, 20 bp, Artificial Sequence
  MKO10066606_A_NTCmmu_0201
  gRNA
ggtcaaagcgatgttagccg

SEQ ID NO: 66607 - DNA, 20 bp, Artificial Sequence
  MKO10066607_A_NTCmmu_0202
  gRNA
gcttgtaatctaaagacgcg

SEQ ID NO: 66608 - DNA, 20 bp, Artificial Sequence
  MKO10066608_A_NTCmmu_0203
  gRNA
gagattaaattaacgccggc

SEQ ID NO: 66609 - DNA, 20 bp, Artificial Sequence
  MKO10066609_A_NTCmmu_0204
  gRNA
cgaatcgggaaggcgcgtgt

SEQ ID NO: 66610 - DNA, 20 bp, Artificial Sequence
  MKO10066610_A_NTCmmu_0205
  gRNA
gggacgctcatcgagtgacg

SEQ ID NO: 66611 - DNA, 20 bp, Artificial Sequence
  MKO10066611_A_NTCmmu_0206
  gRNA
agcgcgtaaggcgtagttac

SEQ ID NO: 66612 - DNA, 20 bp, Artificial Sequence
  MKO10066612_A_NTCmmu_0207
  gRNA
gtttcagcgcgagttgcgcg

SEQ ID NO: 66613 - DNA, 20 bp, Artificial Sequence
  MKO10066613_A_NTCmmu_0208
  gRNA
tcctgcgttccactcgtact

SEQ ID NO: 66614 - DNA, 20 bp, Artificial Sequence
  MKO10066614_A_NTCmmu_0209
  gRNA
gttatttgtctgtcgaaacg

SEQ ID NO: 66615 - DNA, 20 bp, Artificial Sequence
  MKO10066615_A_NTCmmu_0210
  gRNA
aataagcctacccggcgaga

SEQ ID NO: 66616 - DNA, 20 bp, Artificial Sequence
  MKO10066616_A_NTCmmu_0211
  gRNA
gtacatgcggcaagtcgact

SEQ ID NO: 66617 - DNA, 20 bp, Artificial Sequence
  MKO10066617_A_NTCmmu_0212
  gRNA
agcagttcgggtaacgccca

SEQ ID NO: 66618 - DNA, 20 bp, Artificial Sequence
  MKO10066618_A_NTCmmu_0213
  gRNA
tgtactcgcatagcgggggc

SEQ ID NO: 66619 - DNA, 20 bp, Artificial Sequence
  MKO10066619_A_NTCmmu_0214
  gRNA
aactcgcgtgggaagtccgg

SEQ ID NO: 66620 - DNA, 20 bp, Artificial Sequence
  MKO10066620_A_NTCmmu_0215
  gRNA
ccttgtggcgtgccaaacga

SEQ ID NO: 66621 - DNA, 20 bp, Artificial Sequence
  MKO10066621_A_NTCmmu_0216
  gRNA
tgccgacgcgacgcagcgta

SEQ ID NO: 66622 - DNA, 20 bp, Artificial Sequence
  MKO10066622_A_NTCmmu_0217
  gRNA
tgcggcaatgttaaccctta

SEQ ID NO: 66623 - DNA, 20 bp, Artificial Sequence
  MKO10066623_A_NTCmmu_0218
  gRNA
tgtatagtcatcgccgtaat

SEQ ID NO: 66624 - DNA, 20 bp, Artificial Sequence
  MKO10066624_A_NTCmmu_0219
  gRNA
taggcggacggttacatata

SEQ ID NO: 66625 - DNA, 20 bp, Artificial Sequence
  MKO10066625_A_NTCmmu_0220
  gRNA
gataagactccgcgagcttc

SEQ ID NO: 66626 - DNA, 20 bp, Artificial Sequence
  MKO10066626_A_NTCmmu_0221
  gRNA
tcgtgccggaataaccacta

SEQ ID NO: 66627 - DNA, 20 bp, Artificial Sequence
  MKO10066627_A_NTCmmu_0222
  gRNA
cgagtaattatttgcggtcg

SEQ ID NO: 66628 - DNA, 20 bp, Artificial Sequence
  MKO10066628_A_NTCmmu_0223
  gRNA
tacttaccgaccgacaaacg

SEQ ID NO: 66629 - DNA, 20 bp, Artificial Sequence
  MKO10066629_A_NTCmmu_0224
  gRNA
atggtggctgtactcgtaac

SEQ ID NO: 66630 - DNA, 20 bp, Artificial Sequence
  MKO10066630_A_NTCmmu_0225
  gRNA
tcgtaagttcgctatatgcc

SEQ ID NO: 66631 - DNA, 20 bp, Artificial Sequence
  MKO10066631_A_NTCmmu_0226
  gRNA
ccggcttgaataccgtgcgg

SEQ ID NO: 66632 - DNA, 20 bp, Artificial Sequence
  MKO10066632_A_NTCmmu_0227
  gRNA
ggcccaacgaaactagcgtg

SEQ ID NO: 66633 - DNA, 20 bp, Artificial Sequence
  MKO10066633_A_NTCmmu_0228
  gRNA
agccgcgccgcaaagctttt

SEQ ID NO: 66634 - DNA, 20 bp, Artificial Sequence
  MKO10066634_A_NTCmmu_0229
  gRNA
acacgaccgaccggtggaat

SEQ ID NO: 66635 - DNA, 20 bp, Artificial Sequence
  MKO10066635_A_NTCmmu_0230
  gRNA
aaactcatacgtagcgaatc

SEQ ID NO: 66636 - DNA, 20 bp, Artificial Sequence
  MKO10066636_A_NTCmmu_0231
  gRNA
cgattgacgttgggctctca

SEQ ID NO: 66637 - DNA, 20 bp, Artificial Sequence
  MKO10066637_A_NTCmmu_0232
  gRNA
aaccagcatttgaccgcgct

SEQ ID NO: 66638 - DNA, 20 bp, Artificial Sequence
  MKO10066638_A_NTCmmu_0233
  gRNA
acgtcggtctagagttaagt

SEQ ID NO: 66639 - DNA, 20 bp, Artificial Sequence
  MKO10066639_A_NTCmmu_0234
  gRNA
ctccggacgtgcatccgaga

SEQ ID NO: 66640 - DNA, 20 bp, Artificial Sequence
  MKO10066640_A_NTCmmu_0235
  gRNA
ataaagtcccaggtgcgcgc

SEQ ID NO: 66641 - DNA, 20 bp, Artificial Sequence
  MKO10066641_A_NTCmmu_0236
  gRNA
gccgctcttgataacgacgc

SEQ ID NO: 66642 - DNA, 20 bp, Artificial Sequence
  MKO10066642_A_NTCmmu_0237
  gRNA
cgaaaccatacctccttcga

SEQ ID NO: 66643 - DNA, 20 bp, Artificial Sequence
  MKO10066643_A_NTCmmu_0238
  gRNA
cgcgcctacccttttaccgc

SEQ ID NO: 66644 - DNA, 20 bp, Artificial Sequence
  MKO10066644_A_NTCmmu_0239
  gRNA
tacccctctgcgatgccggt

SEQ ID NO: 66645 - DNA, 20 bp, Artificial Sequence
  MKO10066645_A_NTCmmu_0240
  gRNA
atattgtcccatacgatcgg

SEQ ID NO: 66646 - DNA, 20 bp, Artificial Sequence
  MKO10066646_A_NTCmmu_0241
  gRNA
ggattgacgagacgatatcg

SEQ ID NO: 66647 - DNA, 20 bp, Artificial Sequence
  MKO10066647_A_NTCmmu_0242
  gRNA
cacgtaagacgctccactta

SEQ ID NO: 66648 - DNA, 20 bp, Artificial Sequence
  MKO10066648_A_NTCmmu_0243
  gRNA
ggagtctcacgcaattagcg

SEQ ID NO: 66649 - DNA, 20 bp, Artificial Sequence
  MKO10066649_A_NTCmmu_0244
  gRNA
atcgcaggtctacgcagagt

SEQ ID NO: 66650 - DNA, 20 bp, Artificial Sequence
  MKO10066650_A_NTCmmu_0245
  gRNA
cggtcgtgacagacctggtg

SEQ ID NO: 66651 - DNA, 20 bp, Artificial Sequence
  MKO10066651_A_NTCmmu_0246
  gRNA
gccactccgctcgttctaga

SEQ ID NO: 66652 - DNA, 20 bp, Artificial Sequence
  MKO10066652_A_NTCmmu_0247
  gRNA
ccgtcgagcaatcccgccaa

SEQ ID NO: 66653 - DNA, 20 bp, Artificial Sequence
  MKO10066653_A_NTCmmu_0248
  gRNA
gagtcgagttaataacgctc

SEQ ID NO: 66654 - DNA, 20 bp, Artificial Sequence
  MKO10066654_A_NTCmmu_0249
  gRNA
caatatctaagcgctaacga

SEQ ID NO: 66655 - DNA, 20 bp, Artificial Sequence
  MKO10066655_A_NTCmmu_0250
  gRNA
acccatccccgcgtccgaga

SEQ ID NO: 66656 - DNA, 20 bp, Artificial Sequence
  MKO10066656_A_NTCmmu_0251
  gRNA
taatgagtaacgctcatcgg

SEQ ID NO: 66657 - DNA, 20 bp, Artificial Sequence
  MKO10066657_A_NTCmmu_0252
  gRNA
aacggtagcgtacccgtgaa

SEQ ID NO: 66658 - DNA, 20 bp, Artificial Sequence
  MKO10066658_A_NTCmmu_0253
  gRNA
catcgagggtaaacgccatt

SEQ ID NO: 66659 - DNA, 20 bp, Artificial Sequence
  MKO10066659_A_NTCmmu_0254
  gRNA
cgtcaccgctagtaatgatg

SEQ ID NO: 66660 - DNA, 20 bp, Artificial Sequence
  MKO10066660_A_NTCmmu_0255
  gRNA
aatcaccgacaacgtaagac

SEQ ID NO: 66661 - DNA, 20 bp, Artificial Sequence
  MKO10066661_A_NTCmmu_0256
  gRNA
cactcagcggttggacgccc

SEQ ID NO: 66662 - DNA, 20 bp, Artificial Sequence
  MKO10066662_A_NTCmmu_0257
  gRNA
tccgtaggacgtatatattc

SEQ ID NO: 66663 - DNA, 20 bp, Artificial Sequence
  MKO10066663_A_NTCmmu_0258
  gRNA
aaaacgtaattataccgagc

SEQ ID NO: 66664 - DNA, 20 bp, Artificial Sequence
  MKO10066664_A_NTCmmu_0259
  gRNA
taggccgctcaggccgcact

SEQ ID NO: 66665 - DNA, 20 bp, Artificial Sequence
  MKO10066665_A_NTCmmu_0260
  gRNA
cccacttaataacgccgctt

SEQ ID NO: 66666 - DNA, 20 bp, Artificial Sequence
  MKO10066666_A_NTCmmu_0261
  gRNA
accatacggggtcttgtcga

SEQ ID NO: 66667 - DNA, 20 bp, Artificial Sequence
  MKO10066667_A_NTCmmu_0262
  gRNA
acggaacccgatcggaacgg

SEQ ID NO: 66668 - DNA, 20 bp, Artificial Sequence
  MKO10066668_A_NTCmmu_0263
  gRNA
gttgcgtccattccgtcgcc

SEQ ID NO: 66669 - DNA, 20 bp, Artificial Sequence
  MKO10066669_A_NTCmmu_0264
  gRNA
attccgtttgcagcgagacc

SEQ ID NO: 66670 - DNA, 20 bp, Artificial Sequence
  MKO10066670_A_NTCmmu_0265
  gRNA
ccatcggttcgacttaccgc

SEQ ID NO: 66671 - DNA, 20 bp, Artificial Sequence
  MKO10066671_A_NTCmmu_0266
  gRNA
catcggctatgtcggggaca

SEQ ID NO: 66672 - DNA, 20 bp, Artificial Sequence
  MKO10066672_A_NTCmmu_0267
  gRNA
aatgagcgtctctcgatcgc

SEQ ID NO: 66673 - DNA, 20 bp, Artificial Sequence
  MKO10066673_A_NTCmmu_0268
  gRNA
ttactgatcagtcggacgca

SEQ ID NO: 66674 - DNA, 20 bp, Artificial Sequence
  MKO10066674_A_NTCmmu_0269
  gRNA
gattgagaagccgcggtatc

SEQ ID NO: 66675 - DNA, 20 bp, Artificial Sequence
  MKO10066675_A_NTCmmu_0270
  gRNA
gtgatggccacgtccgaacc

SEQ ID NO: 66676 - DNA, 20 bp, Artificial Sequence
  MKO10066676_A_NTCmmu_0271
  gRNA
ttggacgtacactttcgttc

SEQ ID NO: 66677 - DNA, 20 bp, Artificial Sequence
  MKO10066677_A_NTCmmu_0272
  gRNA
actgcgcgtataggacgcaa

SEQ ID NO: 66678 - DNA, 20 bp, Artificial Sequence
  MKO10066678_A_NTCmmu_0273
  gRNA
tagctgtttacgccgacctg

SEQ ID NO: 66679 - DNA, 20 bp, Artificial Sequence
  MKO10066679_A_NTCmmu_0274
  gRNA
catgcccgtctgcgccgcat

SEQ ID NO: 66680 - DNA, 20 bp, Artificial Sequence
  MKO10066680_A_NTCmmu_0275
  gRNA
tcaactatgaaccgccgtgc

SEQ ID NO: 66681 - DNA, 20 bp, Artificial Sequence
  MKO10066681_A_NTCmmu_0276
  gRNA
cgttacgtttcttgccagga

SEQ ID NO: 66682 - DNA, 20 bp, Artificial Sequence
  MKO10066682_A_NTCmmu_0277
  gRNA
tctatatctagtctcggcgc

SEQ ID NO: 66683 - DNA, 20 bp, Artificial Sequence
  MKO10066683_A_NTCmmu_0278
  gRNA
ctcctcgaggctggctacgt

SEQ ID NO: 66684 - DNA, 20 bp, Artificial Sequence
  MKO10066684_A_NTCmmu_0279
  gRNA
tcgtaccgcacgtgtaagcc

SEQ ID NO: 66685 - DNA, 20 bp, Artificial Sequence
  MKO10066685_A_NTCmmu_0280
  gRNA
cgggcactaacccgatacac

SEQ ID NO: 66686 - DNA, 20 bp, Artificial Sequence
  MKO10066686_A_NTCmmu_0281
  gRNA
gaacgtaacggcatgcatca

SEQ ID NO: 66687 - DNA, 20 bp, Artificial Sequence
  MKO10066687_A_NTCmmu_0282
  gRNA
gcccgatagaattacccatt

SEQ ID NO: 66688 - DNA, 20 bp, Artificial Sequence
  MKO10066688_A_NTCmmu_0283
  gRNA
gccctcgagctcacgatgag

SEQ ID NO: 66689 - DNA, 20 bp, Artificial Sequence
  MKO10066689_A_NTCmmu_0284
  gRNA
ttaggacgtgcttccgaggg

SEQ ID NO: 66690 - DNA, 20 bp, Artificial Sequence
  MKO10066690_A_NTCmmu_0285
  gRNA
tagttaaccgtaaagtgggc

SEQ ID NO: 66691 - DNA, 20 bp, Artificial Sequence
  MKO10066691_A_NTCmmu_0286
  gRNA
gtgggctgaccgttctcgac

SEQ ID NO: 66692 - DNA, 20 bp, Artificial Sequence
  MKO10066692_A_NTCmmu_0287
  gRNA
caagagttaacctcgaccgg

SEQ ID NO: 66693 - DNA, 20 bp, Artificial Sequence
  MKO10066693_A_NTCmmu_0288
  gRNA
tatgactgcacgactcgcta

SEQ ID NO: 66694 - DNA, 20 bp, Artificial Sequence
  MKO10066694_A_NTCmmu_0289
  gRNA
gaaccggcgtgcgttagcgg

SEQ ID NO: 66695 - DNA, 20 bp, Artificial Sequence
  MKO10066695_A_NTCmmu_0290
  gRNA
ttcgatataggggacggcgg

SEQ ID NO: 66696 - DNA, 20 bp, Artificial Sequence
  MKO10066696_A_NTCmmu_0291
  gRNA
gccgtaagcgggccggttga

SEQ ID NO: 66697 - DNA, 20 bp, Artificial Sequence
  MKO10066697_A_NTCmmu_0292
  gRNA
cgtaaccggagataatatta

SEQ ID NO: 66698 - DNA, 20 bp, Artificial Sequence
  MKO10066698_A_NTCmmu_0293
  gRNA
cggcgataacagcgacatcg

SEQ ID NO: 66699 - DNA, 20 bp, Artificial Sequence
  MKO10066699_A_NTCmmu_0294
  gRNA
tcacttcgggcattacgagc

SEQ ID NO: 66700 - DNA, 20 bp, Artificial Sequence
  MKO10066700_A_NTCmmu_0295
  gRNA
taataaactatgtcccgccg

SEQ ID NO: 66701 - DNA, 20 bp, Artificial Sequence
  MKO10066701_A_NTCmmu_0296
  gRNA
tggcacggagttgcatacgc

SEQ ID NO: 66702 - DNA, 20 bp, Artificial Sequence
  MKO10066702_A_NTCmmu_0297
  gRNA
gctagttctcccgggcgaaa

SEQ ID NO: 66703 - DNA, 20 bp, Artificial Sequence
  MKO10066703_A_NTCmmu_0298
  gRNA
gttcggttgcagcttacacg

SEQ ID NO: 66704 - DNA, 20 bp, Artificial Sequence
  MKO10066704_A_NTCmmu_0299
  gRNA
gcacctctagcgcgctcggc

SEQ ID NO: 66705 - DNA, 20 bp, Artificial Sequence
  MKO10066705_A_NTCmmu_0300
  gRNA
cattgtagactcgtacggat

SEQ ID NO: 66706 - DNA, 20 bp, Artificial Sequence
  MKO10066706_A_NTCmmu_0301
  gRNA
tcggaattccgcaggccgag

SEQ ID NO: 66707 - DNA, 20 bp, Artificial Sequence
  MKO10066707_A_NTCmmu_0302
  gRNA
gattacggggttccgtaact

SEQ ID NO: 66708 - DNA, 20 bp, Artificial Sequence
  MKO10066708_A_NTCmmu_0303
  gRNA
gcctatgtgaatcgcgaatt

SEQ ID NO: 66709 - DNA, 20 bp, Artificial Sequence
  MKO10066709_A_NTCmmu_0304
  gRNA
ctcggacggcatacgacaat

SEQ ID NO: 66710 - DNA, 20 bp, Artificial Sequence
  MKO10066710_A_NTCmmu_0305
  gRNA
catatgctcgacggtataaa

SEQ ID NO: 66711 - DNA, 20 bp, Artificial Sequence
  MKO10066711_A_NTCmmu_0306
  gRNA
ctcatgtacgccttcgctac

SEQ ID NO: 66712 - DNA, 20 bp, Artificial Sequence
  MKO10066712_A_NTCmmu_0307
  gRNA
ttacagttcataccgtcgcc

SEQ ID NO: 66713 - DNA, 20 bp, Artificial Sequence
  MKO10066713_A_NTCmmu_0308
  gRNA
gatggccagtaacggcgtca

SEQ ID NO: 66714 - DNA, 20 bp, Artificial Sequence
  MKO10066714_A_NTCmmu_0309
  gRNA
atttgaatgctcccgtcgac

SEQ ID NO: 66715 - DNA, 20 bp, Artificial Sequence
  MKO10066715_A_NTCmmu_0310
  gRNA
caacggtcacgctagaataa

SEQ ID NO: 66716 - DNA, 20 bp, Artificial Sequence
  MKO10066716_A_NTCmmu_0311
  gRNA
cttaagttcgcgacggaatg

SEQ ID NO: 66717 - DNA, 20 bp, Artificial Sequence
  MKO10066717_A_NTCmmu_0312
  gRNA
tacttaggtccgcgtaaagc

SEQ ID NO: 66718 - DNA, 20 bp, Artificial Sequence
  MKO10066718_A_NTCmmu_0313
  gRNA
ggttaaaaattaagcggtcc

SEQ ID NO: 66719 - DNA, 20 bp, Artificial Sequence
  MKO10066719_A_NTCmmu_0314
  gRNA
aaaacggctcgatcggtgat

SEQ ID NO: 66720 - DNA, 20 bp, Artificial Sequence
  MKO10066720_A_NTCmmu_0315
  gRNA
atgttacgtacgtgatctcc

SEQ ID NO: 66721 - DNA, 20 bp, Artificial Sequence
  MKO10066721_A_NTCmmu_0316
  gRNA
agtagacgctatgttcgcgc

SEQ ID NO: 66722 - DNA, 20 bp, Artificial Sequence
  MKO10066722_A_NTCmmu_0317
  gRNA
tactgcgtaccgcagtaagc

SEQ ID NO: 66723 - DNA, 20 bp, Artificial Sequence
  MKO10066723_A_NTCmmu_0318
  gRNA
cccatcattcgcgctgacgt

SEQ ID NO: 66724 - DNA, 20 bp, Artificial Sequence
  MKO10066724_A_NTCmmu_0319
  gRNA
cgactattgccgtccatctc

SEQ ID NO: 66725 - DNA, 20 bp, Artificial Sequence
  MKO10066725_A_NTCmmu_0320
  gRNA
atccgtaccaaacacgctac

SEQ ID NO: 66726 - DNA, 20 bp, Artificial Sequence
  MKO10066726_A_NTCmmu_0321
  gRNA
tgcgtaaaacttgcgctcga

SEQ ID NO: 66727 - DNA, 20 bp, Artificial Sequence
  MKO10066727_A_NTCmmu_0322
  gRNA
catatgcctataaccggcgg

SEQ ID NO: 66728 - DNA, 20 bp, Artificial Sequence
  MKO10066728_A_NTCmmu_0323
  gRNA
gttccggatatatacggtta

SEQ ID NO: 66729 - DNA, 20 bp, Artificial Sequence
  MKO10066729_A_NTCmmu_0324
  gRNA
ctaatacacccggacggtac

SEQ ID NO: 66730 - DNA, 20 bp, Artificial Sequence
  MKO10066730_A_NTCmmu_0325
  gRNA
gggcgggacgtaatattatg

SEQ ID NO: 66731 - DNA, 20 bp, Artificial Sequence
  MKO10066731_A_NTCmmu_0326
  gRNA
actttacatcatgtcgtcgt

SEQ ID NO: 66732 - DNA, 20 bp, Artificial Sequence
  MKO10066732_A_NTCmmu_0327
  gRNA
ctgatcggtgcatatctcgg

SEQ ID NO: 66733 - DNA, 20 bp, Artificial Sequence
  MKO10066733_A_NTCmmu_0328
  gRNA
gagccccaacgcgcgaagca

SEQ ID NO: 66734 - DNA, 20 bp, Artificial Sequence
  MKO10066734_A_NTCmmu_0329
  gRNA
gctaagattcatccgaacac

SEQ ID NO: 66735 - DNA, 20 bp, Artificial Sequence
  MKO10066735_A_NTCmmu_0330
  gRNA
gttaccgtgacgataagaat

SEQ ID NO: 66736 - DNA, 20 bp, Artificial Sequence
  MKO10066736_A_NTCmmu_0331
  gRNA
gctaaacgtattttacgggc

SEQ ID NO: 66737 - DNA, 20 bp, Artificial Sequence
  MKO10066737_A_NTCmmu_0332
  gRNA
ccgagccgaattgggcgtgt

SEQ ID NO: 66738 - DNA, 20 bp, Artificial Sequence
  MKO10066738_A_NTCmmu_0333
  gRNA
gttgcgtgtgtccgtacaaa

SEQ ID NO: 66739 - DNA, 20 bp, Artificial Sequence
  MKO10066739_A_NTCmmu_0334
  gRNA
ctttattccgttgcatgtcg

SEQ ID NO: 66740 - DNA, 20 bp, Artificial Sequence
  MKO10066740_A_NTCmmu_0335
  gRNA
aagcgtaccccactcgttaa

SEQ ID NO: 66741 - DNA, 20 bp, Artificial Sequence
  MKO10066741_A_NTCmmu_0336
  gRNA
atccgagatctgcgaattat

SEQ ID NO: 66742 - DNA, 20 bp, Artificial Sequence
  MKO10066742_A_NTCmmu_0337
  gRNA
tcttgactccgacttcgggc

SEQ ID NO: 66743 - DNA, 20 bp, Artificial Sequence
  MKO10066743_A_NTCmmu_0338
  gRNA
accatgatgtcaccgccgca

SEQ ID NO: 66744 - DNA, 20 bp, Artificial Sequence
  MKO10066744_A_NTCmmu_0339
  gRNA
tcaacttaacctcgagtccg

SEQ ID NO: 66745 - DNA, 20 bp, Artificial Sequence
  MKO10066745_A_NTCmmu_0340
  gRNA
ctacgagggccgcgagcggt

SEQ ID NO: 66746 - DNA, 20 bp, Artificial Sequence
  MKO10066746_A_NTCmmu_0341
  gRNA
atgtgtcatagcggcgtagg

SEQ ID NO: 66747 - DNA, 20 bp, Artificial Sequence
  MKO10066747_A_NTCmmu_0342
  gRNA
tgtaacgatctgggcggtct

SEQ ID NO: 66748 - DNA, 20 bp, Artificial Sequence
  MKO10066748_A_NTCmmu_0343
  gRNA
ccggatcggctacgctacgg

SEQ ID NO: 66749 - DNA, 20 bp, Artificial Sequence
  MKO10066749_A_NTCmmu_0344
  gRNA
caatattcgacctacgctcc

SEQ ID NO: 66750 - DNA, 20 bp, Artificial Sequence
  MKO10066750_A_NTCmmu_0345
  gRNA
tgataaacgatgcgaactcg

SEQ ID NO: 66751 - DNA, 20 bp, Artificial Sequence
  MKO10066751_A_NTCmmu_0346
  gRNA
tgattgggggtcgttcgcca

SEQ ID NO: 66752 - DNA, 20 bp, Artificial Sequence
  MKO10066752_A_NTCmmu_0347
  gRNA
tagtcagtcggcctccgtgc

SEQ ID NO: 66753 - DNA, 20 bp, Artificial Sequence
  MKO10066753_A_NTCmmu_0348
  gRNA
aaccggctgcgcgtttgcaa

SEQ ID NO: 66754 - DNA, 20 bp, Artificial Sequence
  MKO10066754_A_NTCmmu_0349
  gRNA
gtgcctgatagtgtgaagcg

SEQ ID NO: 66755 - DNA, 20 bp, Artificial Sequence
  MKO10066755_A_NTCmmu_0350
  gRNA
cgacgacccatttcggttat

SEQ ID NO: 66756 - DNA, 20 bp, Artificial Sequence
  MKO10066756_A_NTCmmu_0351
  gRNA
ggggggtctaataccgattg

SEQ ID NO: 66757 - DNA, 20 bp, Artificial Sequence
  MKO10066757_A_NTCmmu_0352
  gRNA
tttttagacctaattcgcgc

SEQ ID NO: 66758 - DNA, 20 bp, Artificial Sequence
  MKO10066758_A_NTCmmu_0353
  gRNA
tctacacgcgcgttcaaccg

SEQ ID NO: 66759 - DNA, 20 bp, Artificial Sequence
  MKO10066759_A_NTCmmu_0354
  gRNA
cggggcgtacatgtgtggcc

SEQ ID NO: 66760 - DNA, 20 bp, Artificial Sequence
  MKO10066760_A_NTCmmu_0355
  gRNA
cgactcgcttaaccgtgcag

SEQ ID NO: 66761 - DNA, 20 bp, Artificial Sequence
  MKO10066761_A_NTCmmu_0356
  gRNA
gcgtacctatcgataaacca

SEQ ID NO: 66762 - DNA, 20 bp, Artificial Sequence
  MKO10066762_A_NTCmmu_0357
  gRNA
atatgagcccgacctctcga

SEQ ID NO: 66763 - DNA, 20 bp, Artificial Sequence
  MKO10066763_A_NTCmmu_0358
  gRNA
cgcgccgagggcctcgttac

SEQ ID NO: 66764 - DNA, 20 bp, Artificial Sequence
  MKO10066764_A_NTCmmu_0359
  gRNA
ctccgacgactacgcaagga

SEQ ID NO: 66765 - DNA, 20 bp, Artificial Sequence
  MKO10066765_A_NTCmmu_0360
  gRNA
tatctctggatgccgtcggt

SEQ ID NO: 66766 - DNA, 20 bp, Artificial Sequence
  MKO10066766_A_NTCmmu_0361
  gRNA
tttcagttgtcgcgcgactc

SEQ ID NO: 66767 - DNA, 20 bp, Artificial Sequence
  MKO10066767_A_NTCmmu_0362
  gRNA
agtttacgtggtccgatgtc

SEQ ID NO: 66768 - DNA, 20 bp, Artificial Sequence
  MKO10066768_A_NTCmmu_0363
  gRNA
gcgtgacgcgatcaaacggt

SEQ ID NO: 66769 - DNA, 20 bp, Artificial Sequence
  MKO10066769_A_NTCmmu_0364
  gRNA
actagctccataacgtgtac

SEQ ID NO: 66770 - DNA, 20 bp, Artificial Sequence
  MKO10066770_A_NTCmmu_0365
  gRNA
cgcatagtgtaccgttgcgc

SEQ ID NO: 66771 - DNA, 20 bp, Artificial Sequence
  MKO10066771_A_NTCmmu_0366
  gRNA
ccgcttgggcgctattaatt

SEQ ID NO: 66772 - DNA, 20 bp, Artificial Sequence
  MKO10066772_A_NTCmmu_0367
  gRNA
gcttcattattaaccggcgt

SEQ ID NO: 66773 - DNA, 20 bp, Artificial Sequence
  MKO10066773_A_NTCmmu_0368
  gRNA
tatactcgcctgtcacagcg

SEQ ID NO: 66774 - DNA, 20 bp, Artificial Sequence
  MKO10066774_A_NTCmmu_0369
  gRNA
acgctgttcgtaaccgcggg

SEQ ID NO: 66775 - DNA, 20 bp, Artificial Sequence
  MKO10066775_A_NTCmmu_0370
  gRNA
agacgttgatttaccggcca

SEQ ID NO: 66776 - DNA, 20 bp, Artificial Sequence
  MKO10066776_A_NTCmmu_0371
  gRNA
aacggtcaaatccgtgaggg

SEQ ID NO: 66777 - DNA, 20 bp, Artificial Sequence
  MKO10066777_A_NTCmmu_0372
  gRNA
catagcaacgcccaaactcg

SEQ ID NO: 66778 - DNA, 20 bp, Artificial Sequence
  MKO10066778_A_NTCmmu_0373
  gRNA
cgtcaatgtgtccggacggt

SEQ ID NO: 66779 - DNA, 20 bp, Artificial Sequence
  MKO10066779_A_NTCmmu_0374
  gRNA
actgtcccattgtacgacgg

SEQ ID NO: 66780 - DNA, 20 bp, Artificial Sequence
  MKO10066780_A_NTCmmu_0375
  gRNA
ctatcggcccgcagtgatgg

SEQ ID NO: 66781 - DNA, 20 bp, Artificial Sequence
  MKO10066781_A_NTCmmu_0376
  gRNA
gatcgagtgacacccacccg

SEQ ID NO: 66782 - DNA, 20 bp, Artificial Sequence
  MKO10066782_A_NTCmmu_0377
  gRNA
tccgcggcaacgtttgggtc

SEQ ID NO: 66783 - DNA, 20 bp, Artificial Sequence
  MKO10066783_A_NTCmmu_0378
  gRNA
acttgtatacgacggctaga

SEQ ID NO: 66784 - DNA, 20 bp, Artificial Sequence
  MKO10066784_A_NTCmmu_0379
  gRNA
ttcgactgcgcacgccatga

SEQ ID NO: 66785 - DNA, 20 bp, Artificial Sequence
  MKO10066785_A_NTCmmu_0380
  gRNA
agcatggagtcaacgtccgc

SEQ ID NO: 66786 - DNA, 20 bp, Artificial Sequence
  MKO10066786_A_NTCmmu_0381
  gRNA
tgacttgacacgttcgatat

SEQ ID NO: 66787 - DNA, 20 bp, Artificial Sequence
  MKO10066787_A_NTCmmu_0382
  gRNA
ccggacttgttatacttgat

SEQ ID NO: 66788 - DNA, 20 bp, Artificial Sequence
  MKO10066788_A_NTCmmu_0383
  gRNA
gtaccatgataaccgtacta

SEQ ID NO: 66789 - DNA, 20 bp, Artificial Sequence
  MKO10066789_A_NTCmmu_0384
  gRNA
caccgctgccctagtaccgg

SEQ ID NO: 66790 - DNA, 20 bp, Artificial Sequence
  MKO10066790_A_NTCmmu_0385
  gRNA
ggatattcgcgcggtcttca

SEQ ID NO: 66791 - DNA, 20 bp, Artificial Sequence
  MKO10066791_A_NTCmmu_0386
  gRNA
aggcagcccgcgttagagat

SEQ ID NO: 66792 - DNA, 20 bp, Artificial Sequence
  MKO10066792_A_NTCmmu_0387
  gRNA
ttctccataccgtaactccg

SEQ ID NO: 66793 - DNA, 20 bp, Artificial Sequence
  MKO10066793_A_NTCmmu_0388
  gRNA
acccgcatatgccgcctaag

SEQ ID NO: 66794 - DNA, 20 bp, Artificial Sequence
  MKO10066794_A_NTCmmu_0389
  gRNA
cgaagtacacggttctctcg

SEQ ID NO: 66795 - DNA, 20 bp, Artificial Sequence
  MKO10066795_A_NTCmmu_0390
  gRNA
cacaatacgcggcagaggtc

SEQ ID NO: 66796 - DNA, 20 bp, Artificial Sequence
  MKO10066796_A_NTCmmu_0391
  gRNA
tgagaccaatgccgcggaat

SEQ ID NO: 66797 - DNA, 20 bp, Artificial Sequence
  MKO10066797_A_NTCmmu_0392
  gRNA
ctcgacccagtagtagacgg

SEQ ID NO: 66798 - DNA, 20 bp, Artificial Sequence
  MKO10066798_A_NTCmmu_0393
  gRNA
cgtaccgacagtagtccaag

SEQ ID NO: 66799 - DNA, 20 bp, Artificial Sequence
  MKO10066799_A_NTCmmu_0394
  gRNA
aattgtctgatcgcgccata

SEQ ID NO: 66800 - DNA, 20 bp, Artificial Sequence
  MKO10066800_A_NTCmmu_0395
  gRNA
tttagtcagacgagccggat

SEQ ID NO: 66801 - DNA, 20 bp, Artificial Sequence
  MKO10066801_A_NTCmmu_0396
  gRNA
tgcgcgtcctgttatgaccg

SEQ ID NO: 66802 - DNA, 20 bp, Artificial Sequence
  MKO10066802_A_NTCmmu_0397
  gRNA
cttatcgatttgggttcaac

SEQ ID NO: 66803 - DNA, 20 bp, Artificial Sequence
  MKO10066803_A_NTCmmu_0398
  gRNA
aacatgttaagtcgcgttat

SEQ ID NO: 66804 - DNA, 20 bp, Artificial Sequence
  MKO10066804_A_NTCmmu_0399
  gRNA
tacgacatcgcatggtaacg

SEQ ID NO: 66805 - DNA, 20 bp, Artificial Sequence
  MKO10066805_A_NTCmmu_0400
  gRNA
cagctgaccgttaatcgata

SEQ ID NO: 66806 - DNA, 20 bp, Artificial Sequence
  MKO10066806_A_NTCmmu_0401
  gRNA
tacacgccctaagctagtaa

SEQ ID NO: 66807 - DNA, 20 bp, Artificial Sequence
  MKO10066807_A_NTCmmu_0402
  gRNA
ccgactgccgagctaggcgt

SEQ ID NO: 66808 - DNA, 20 bp, Artificial Sequence
  MKO10066808_A_NTCmmu_0403
  gRNA
gttgcggcgacctagatatc

SEQ ID NO: 66809 - DNA, 20 bp, Artificial Sequence
  MKO10066809_A_NTCmmu_0404
  gRNA
tagacgtccaccgactctga

SEQ ID NO: 66810 - DNA, 20 bp, Artificial Sequence
  MKO10066810_A_NTCmmu_0405
  gRNA
tcacgcacgactaagggaat

SEQ ID NO: 66811 - DNA, 20 bp, Artificial Sequence
  MKO10066811_A_NTCmmu_0406
  gRNA
gcttatcgttccgctacgat

SEQ ID NO: 66812 - DNA, 20 bp, Artificial Sequence
  MKO10066812_A_NTCmmu_0407
  gRNA
accggttcagccgccggaac

SEQ ID NO: 66813 - DNA, 20 bp, Artificial Sequence
  MKO10066813_A_NTCmmu_0408
  gRNA
ctacccgtctattacgatct

SEQ ID NO: 66814 - DNA, 20 bp, Artificial Sequence
  MKO10066814_A_NTCmmu_0409
  gRNA
tgtcgccgatggtcagtcgc

SEQ ID NO: 66815 - DNA, 20 bp, Artificial Sequence
  MKO10066815_A_NTCmmu_0410
  gRNA
cgggcggtaagagctctacg

SEQ ID NO: 66816 - DNA, 20 bp, Artificial Sequence
  MKO10066816_A_NTCmmu_0411
  gRNA
ggcaccgttcggaaaccgac

SEQ ID NO: 66817 - DNA, 20 bp, Artificial Sequence
  MKO10066817_A_NTCmmu_0412
  gRNA
tctcgaataaattttctcgc

SEQ ID NO: 66818 - DNA, 20 bp, Artificial Sequence
  MKO10066818_A_NTCmmu_0413
  gRNA
gcattcttgagctccgcgcc

SEQ ID NO: 66819 - DNA, 20 bp, Artificial Sequence
  MKO10066819_A_NTCmmu_0414
  gRNA
attcggaccgttatctcacc

SEQ ID NO: 66820 - DNA, 20 bp, Artificial Sequence
  MKO10066820_A_NTCmmu_0415
  gRNA
gttcttcaaagacgggcggc

SEQ ID NO: 66821 - DNA, 20 bp, Artificial Sequence
  MKO10066821_A_NTCmmu_0416
  gRNA
ttccccgcccgtgcggtcat

SEQ ID NO: 66822 - DNA, 20 bp, Artificial Sequence
  MKO10066822_A_NTCmmu_0417
  gRNA
tagtaggttgatcgcgtcgc

SEQ ID NO: 66823 - DNA, 20 bp, Artificial Sequence
  MKO10066823_A_NTCmmu_0418
  gRNA
cgctcggtgacgtatacacg

SEQ ID NO: 66824 - DNA, 20 bp, Artificial Sequence
  MKO10066824_A_NTCmmu_0419
  gRNA
attatagcagccccccgaat

SEQ ID NO: 66825 - DNA, 20 bp, Artificial Sequence
  MKO10066825_A_NTCmmu_0420
  gRNA
cggtcagtcgtcttcccgga

SEQ ID NO: 66826 - DNA, 20 bp, Artificial Sequence
  MKO10066826_A_NTCmmu_0421
  gRNA
tggatccgcttcgcacggcg

SEQ ID NO: 66827 - DNA, 20 bp, Artificial Sequence
  MKO10066827_A_NTCmmu_0422
  gRNA
aaacccccgcgcggagcgtc

SEQ ID NO: 66828 - DNA, 20 bp, Artificial Sequence
  MKO10066828_A_NTCmmu_0423
  gRNA
catagatccgcgattgtacg

SEQ ID NO: 66829 - DNA, 20 bp, Artificial Sequence
  MKO10066829_A_NTCmmu_0424
  gRNA
gtttcaggaacgacggcgag

SEQ ID NO: 66830 - DNA, 20 bp, Artificial Sequence
  MKO10066830_A_NTCmmu_0425
  gRNA
accgtctctattatacggca

SEQ ID NO: 66831 - DNA, 20 bp, Artificial Sequence
  MKO10066831_A_NTCmmu_0426
  gRNA
tgttcgccctctcacgattg

SEQ ID NO: 66832 - DNA, 20 bp, Artificial Sequence
  MKO10066832_A_NTCmmu_0427
  gRNA
aactaactcactacgcacga

SEQ ID NO: 66833 - DNA, 20 bp, Artificial Sequence
  MKO10066833_A_NTCmmu_0428
  gRNA
tcgctccgctagtagtgggt

SEQ ID NO: 66834 - DNA, 20 bp, Artificial Sequence
  MKO10066834_A_NTCmmu_0429
  gRNA
tcggcgcagcctaatgtata

SEQ ID NO: 66835 - DNA, 20 bp, Artificial Sequence
  MKO10066835_A_NTCmmu_0430
  gRNA
caacctgcctagcgacccgc

SEQ ID NO: 66836 - DNA, 20 bp, Artificial Sequence
  MKO10066836_A_NTCmmu_0431
  gRNA
gtcggctcatcggaaaatat

SEQ ID NO: 66837 - DNA, 20 bp, Artificial Sequence
  MKO10066837_A_NTCmmu_0432
  gRNA
gacagttgacgcgacggaga

SEQ ID NO: 66838 - DNA, 20 bp, Artificial Sequence
  MKO10066838_A_NTCmmu_0433
  gRNA
ccctgatgtgctatacgcgc

SEQ ID NO: 66839 - DNA, 20 bp, Artificial Sequence
  MKO10066839_A_NTCmmu_0434
  gRNA
taacccttgatcaaccgata

SEQ ID NO: 66840 - DNA, 20 bp, Artificial Sequence
  MKO10066840_A_NTCmmu_0435
  gRNA
ctattgggagcggcctctcg

SEQ ID NO: 66841 - DNA, 20 bp, Artificial Sequence
  MKO10066841_A_NTCmmu_0436
  gRNA
gcttatcgtcatgcgggtga

SEQ ID NO: 66842 - DNA, 20 bp, Artificial Sequence
  MKO10066842_A_NTCmmu_0437
  gRNA
tgatgccggtacccgtaact

SEQ ID NO: 66843 - DNA, 20 bp, Artificial Sequence
  MKO10066843_A_NTCmmu_0438
  gRNA
ggcgctactgtaatgacggt

SEQ ID NO: 66844 - DNA, 20 bp, Artificial Sequence
  MKO10066844_A_NTCmmu_0439
  gRNA
acggattgctgacgctatca

SEQ ID NO: 66845 - DNA, 20 bp, Artificial Sequence
  MKO10066845_A_NTCmmu_0440
  gRNA
taatgcgaatgcgacctctc

SEQ ID NO: 66846 - DNA, 20 bp, Artificial Sequence
  MKO10066846_A_NTCmmu_0441
  gRNA
ttaactggggggaccggacg

SEQ ID NO: 66847 - DNA, 20 bp, Artificial Sequence
  MKO10066847_A_NTCmmu_0442
  gRNA
cgcagagttcaaatccgcgc

SEQ ID NO: 66848 - DNA, 20 bp, Artificial Sequence
  MKO10066848_A_NTCmmu_0443
  gRNA
tgtttatgcggaacttccgc

SEQ ID NO: 66849 - DNA, 20 bp, Artificial Sequence
  MKO10066849_A_NTCmmu_0444
  gRNA
acagaccgaataaccgacga

SEQ ID NO: 66850 - DNA, 20 bp, Artificial Sequence
  MKO10066850_A_NTCmmu_0445
  gRNA
tgacgctaaggcccgctaac

SEQ ID NO: 66851 - DNA, 20 bp, Artificial Sequence
  MKO10066851_A_NTCmmu_0446
  gRNA
actcgcgaaaccgtacatga

SEQ ID NO: 66852 - DNA, 20 bp, Artificial Sequence
  MKO10066852_A_NTCmmu_0447
  gRNA
ataggcgcacgggctactcc

SEQ ID NO: 66853 - DNA, 20 bp, Artificial Sequence
  MKO10066853_A_NTCmmu_0448
  gRNA
agattctcgcgtaaccagag

SEQ ID NO: 66854 - DNA, 20 bp, Artificial Sequence
  MKO10066854_A_NTCmmu_0449
  gRNA
acaattcggtttatgcgcgt

SEQ ID NO: 66855 - DNA, 20 bp, Artificial Sequence
  MKO10066855_A_NTCmmu_0450
  gRNA
cgggttatagatagtcgtcg

SEQ ID NO: 66856 - DNA, 20 bp, Artificial Sequence
  MKO10066856_A_NTCmmu_0451
  gRNA
agggttaggctgacccgcga

SEQ ID NO: 66857 - DNA, 20 bp, Artificial Sequence
  MKO10066857_A_NTCmmu_0452
  gRNA
agctatccccacgttcgcgg

SEQ ID NO: 66858 - DNA, 20 bp, Artificial Sequence
  MKO10066858_A_NTCmmu_0453
  gRNA
atcatgccttcgcattaacc

SEQ ID NO: 66859 - DNA, 20 bp, Artificial Sequence
  MKO10066859_A_NTCmmu_0454
  gRNA
tgggtcctaaacgcggttca

SEQ ID NO: 66860 - DNA, 20 bp, Artificial Sequence
  MKO10066860_A_NTCmmu_0455
  gRNA
catactgttatcgacccgca

SEQ ID NO: 66861 - DNA, 20 bp, Artificial Sequence
  MKO10066861_A_NTCmmu_0456
  gRNA
tgagcgctttcccgatccgg

SEQ ID NO: 66862 - DNA, 20 bp, Artificial Sequence
  MKO10066862_A_NTCmmu_0457
  gRNA
gccttcctcgcagacccgac

SEQ ID NO: 66863 - DNA, 20 bp, Artificial Sequence
  MKO10066863_A_NTCmmu_0458
  gRNA
cccttaaagtgacggacgaa

SEQ ID NO: 66864 - DNA, 20 bp, Artificial Sequence
  MKO10066864_A_NTCmmu_0459
  gRNA
tggttcgaccaacatggttc

SEQ ID NO: 66865 - DNA, 20 bp, Artificial Sequence
  MKO10066865_A_NTCmmu_0460
  gRNA
tgggccatagtggcgcgtga

SEQ ID NO: 66866 - DNA, 20 bp, Artificial Sequence
  MKO10066866_A_NTCmmu_0461
  gRNA
tcatattagacaatctccgc

SEQ ID NO: 66867 - DNA, 20 bp, Artificial Sequence
  MKO10066867_A_NTCmmu_0462
  gRNA
tagccgagttcacgccagta

SEQ ID NO: 66868 - DNA, 20 bp, Artificial Sequence
  MKO10066868_A_NTCmmu_0463
  gRNA
accaggcgcggaccgcacat

SEQ ID NO: 66869 - DNA, 20 bp, Artificial Sequence
  MKO10066869_A_NTCmmu_0464
  gRNA
gcgcgagtgccaaacgagtg

SEQ ID NO: 66870 - DNA, 20 bp, Artificial Sequence
  MKO10066870_A_NTCmmu_0465
  gRNA
aacggctgcgcccgcggcaa

SEQ ID NO: 66871 - DNA, 20 bp, Artificial Sequence
  MKO10066871_A_NTCmmu_0466
  gRNA
acggtcgagcacggttatga

SEQ ID NO: 66872 - DNA, 20 bp, Artificial Sequence
  MKO10066872_A_NTCmmu_0467
  gRNA
tcatgttgcgtcgtccgtta

SEQ ID NO: 66873 - DNA, 20 bp, Artificial Sequence
  MKO10066873_A_NTCmmu_0468
  gRNA
cgctccgtatcctctcataa

SEQ ID NO: 66874 - DNA, 20 bp, Artificial Sequence
  MKO10066874_A_NTCmmu_0469
  gRNA
aaacgaggctgttcgtacac

SEQ ID NO: 66875 - DNA, 20 bp, Artificial Sequence
  MKO10066875_A_NTCmmu_0470
  gRNA
cacgtatacttaggtcagcg

SEQ ID NO: 66876 - DNA, 20 bp, Artificial Sequence
  MKO10066876_A_NTCmmu_0471
  gRNA
atcgagcaccgagttgtgat

SEQ ID NO: 66877 - DNA, 20 bp, Artificial Sequence
  MKO10066877_A_NTCmmu_0472
  gRNA
tcactttaagcaccccgcgc

SEQ ID NO: 66878 - DNA, 20 bp, Artificial Sequence
  MKO10066878_A_NTCmmu_0473
  gRNA
ctacttgtgacgacctcgcg

SEQ ID NO: 66879 - DNA, 20 bp, Artificial Sequence
  MKO10066879_A_NTCmmu_0474
  gRNA
ctacggataggcgcgggtga

SEQ ID NO: 66880 - DNA, 20 bp, Artificial Sequence
  MKO10066880_A_NTCmmu_0475
  gRNA
gcttacctactccgccccgc

SEQ ID NO: 66881 - DNA, 20 bp, Artificial Sequence
  MKO10066881_A_NTCmmu_0476
  gRNA
taacacgcactcacgtccgg

SEQ ID NO: 66882 - DNA, 20 bp, Artificial Sequence
  MKO10066882_A_NTCmmu_0477
  gRNA
actcacctcgcacgatcgta

SEQ ID NO: 66883 - DNA, 20 bp, Artificial Sequence
  MKO10066883_A_NTCmmu_0478
  gRNA
acacccgtgtatgcaccggg

SEQ ID NO: 66884 - DNA, 20 bp, Artificial Sequence
  MKO10066884_A_NTCmmu_0479
  gRNA
gcataacggccgagcaccac

SEQ ID NO: 66885 - DNA, 20 bp, Artificial Sequence
  MKO10066885_A_NTCmmu_0480
  gRNA
ccagcggacggcgaactcca

SEQ ID NO: 66886 - DNA, 20 bp, Artificial Sequence
  MKO10066886_A_NTCmmu_0481
  gRNA
tgaccctcttaatctccggt

SEQ ID NO: 66887 - DNA, 20 bp, Artificial Sequence
  MKO10066887_A_NTCmmu_0482
  gRNA
ccctaaaccatagtttcgcc

SEQ ID NO: 66888 - DNA, 20 bp, Artificial Sequence
  MKO10066888_A_NTCmmu_0483
  gRNA
ccctagctcggttagagaat

SEQ ID NO: 66889 - DNA, 20 bp, Artificial Sequence
  MKO10066889_A_NTCmmu_0484
  gRNA
gaattgagccgcaactcggc

SEQ ID NO: 66890 - DNA, 20 bp, Artificial Sequence
  MKO10066890_A_NTCmmu_0485
  gRNA
tgcttagggcccttcggcgg

SEQ ID NO: 66891 - DNA, 20 bp, Artificial Sequence
  MKO10066891_A_NTCmmu_0486
  gRNA
tctccgggccgtgttagacc

SEQ ID NO: 66892 - DNA, 20 bp, Artificial Sequence
  MKO10066892_A_NTCmmu_0487
  gRNA
atcacacgttaaacggggcg

SEQ ID NO: 66893 - DNA, 20 bp, Artificial Sequence
  MKO10066893_A_NTCmmu_0488
  gRNA
gatcccctacgcttcaacct

SEQ ID NO: 66894 - DNA, 20 bp, Artificial Sequence
  MKO10066894_A_NTCmmu_0489
  gRNA
ttatttacgcgctgaacttg

SEQ ID NO: 66895 - DNA, 20 bp, Artificial Sequence
  MKO10066895_A_NTCmmu_0490
  gRNA
accgttgtttccgtcgaaac

SEQ ID NO: 66896 - DNA, 20 bp, Artificial Sequence
  MKO10066896_A_NTCmmu_0491
  gRNA
cgagacgaatccatcatgcg

SEQ ID NO: 66897 - DNA, 20 bp, Artificial Sequence
  MKO10066897_A_NTCmmu_0492
  gRNA
atatgctcgacccatcgtcc

SEQ ID NO: 66898 - DNA, 20 bp, Artificial Sequence
  MKO10066898_A_NTCmmu_0493
  gRNA
aacctcgtctcatgtacgaa

SEQ ID NO: 66899 - DNA, 20 bp, Artificial Sequence
  MKO10066899_A_NTCmmu_0494
  gRNA
aattttttcggaatctagcg

SEQ ID NO: 66900 - DNA, 20 bp, Artificial Sequence
  MKO10066900_A_NTCmmu_0495
  gRNA
agcgagtgtccgtgacgttc

SEQ ID NO: 66901 - DNA, 20 bp, Artificial Sequence
  MKO10066901_A_NTCmmu_0496
  gRNA
aacgtcaccaacctcgatcc

SEQ ID NO: 66902 - DNA, 20 bp, Artificial Sequence
  MKO10066902_A_NTCmmu_0497
  gRNA
gtcctagatcctatcgggag

SEQ ID NO: 66903 - DNA, 20 bp, Artificial Sequence
  MKO10066903_A_NTCmmu_0498
  gRNA
catatactcttgcgctagac

SEQ ID NO: 66904 - DNA, 20 bp, Artificial Sequence
  MKO10066904_A_NTCmmu_0499
  gRNA
acgtcgatgcttatccgtct

SEQ ID NO: 66905 - DNA, 20 bp, Artificial Sequence
  MKO10066905_A_NTCmmu_0500
  gRNA
ccgcgcattaacgatcagta

SEQ ID NO: 66906 - DNA, 20 bp, Artificial Sequence
  MKO10066906_A_NTCmmu_0501
  gRNA
cctattagtccggtttagtc

SEQ ID NO: 66907 - DNA, 20 bp, Artificial Sequence
  MKO10066907_A_NTCmmu_0502
  gRNA
acctcgtgcaaatcggtggc

SEQ ID NO: 66908 - DNA, 20 bp, Artificial Sequence
  MKO10066908_A_NTCmmu_0503
  gRNA
cacgcaggagcggcgacact

SEQ ID NO: 66909 - DNA, 20 bp, Artificial Sequence
  MKO10066909_A_NTCmmu_0504
  gRNA
gtcggccgcttaaccctttc

SEQ ID NO: 66910 - DNA, 20 bp, Artificial Sequence
  MKO10066910_A_NTCmmu_0505
  gRNA
tgatcaacgtcggtggacgg

SEQ ID NO: 66911 - DNA, 20 bp, Artificial Sequence
  MKO10066911_A_NTCmmu_0506
  gRNA
gaaccacgagcgagcgtata

SEQ ID NO: 66912 - DNA, 20 bp, Artificial Sequence
  MKO10066912_A_NTCmmu_0507
  gRNA
gaacccgggaaacacgtccg

SEQ ID NO: 66913 - DNA, 20 bp, Artificial Sequence
  MKO10066913_A_NTCmmu_0508
  gRNA
ggaaacgttacattcgacgc

SEQ ID NO: 66914 - DNA, 20 bp, Artificial Sequence
  MKO10066914_A_NTCmmu_0509
  gRNA
aataggaactccgcacccga

SEQ ID NO: 66915 - DNA, 20 bp, Artificial Sequence
  MKO10066915_A_NTCmmu_0510
  gRNA
gtagtgcgtgtgatgtcggg

SEQ ID NO: 66916 - DNA, 20 bp, Artificial Sequence
  MKO10066916_A_NTCmmu_0511
  gRNA
tttgacattttcgtctcgcg

SEQ ID NO: 66917 - DNA, 20 bp, Artificial Sequence
  MKO10066917_A_NTCmmu_0512
  gRNA
aggtccgctggcgcaatggg

SEQ ID NO: 66918 - DNA, 20 bp, Artificial Sequence
  MKO10066918_A_NTCmmu_0513
  gRNA
ccgcccgggtgtgagttgag

SEQ ID NO: 66919 - DNA, 20 bp, Artificial Sequence
  MKO10066919_A_NTCmmu_0514
  gRNA
gccgagaggcgtaagcgcga

SEQ ID NO: 66920 - DNA, 20 bp, Artificial Sequence
  MKO10066920_A_NTCmmu_0515
  gRNA
taattcgcaactcggatcat

SEQ ID NO: 66921 - DNA, 20 bp, Artificial Sequence
  MKO10066921_A_NTCmmu_0516
  gRNA
taagactgggtgtcccgcgt

SEQ ID NO: 66922 - DNA, 20 bp, Artificial Sequence
  MKO10066922_A_NTCmmu_0517
  gRNA
ttacgcaaagctgcgatgag

SEQ ID NO: 66923 - DNA, 20 bp, Artificial Sequence
  MKO10066923_A_NTCmmu_0518
  gRNA
ggacactcgccgaccccact

SEQ ID NO: 66924 - DNA, 20 bp, Artificial Sequence
  MKO10066924_A_NTCmmu_0519
  gRNA
tacgtctgcgcaaatagaat

SEQ ID NO: 66925 - DNA, 20 bp, Artificial Sequence
  MKO10066925_A_NTCmmu_0520
  gRNA
atacgcgtgatgaccttatg

SEQ ID NO: 66926 - DNA, 20 bp, Artificial Sequence
  MKO10066926_A_NTCmmu_0521
  gRNA
cgcgcgactgcagctaatct

SEQ ID NO: 66927 - DNA, 20 bp, Artificial Sequence
  MKO10066927_A_NTCmmu_0522
  gRNA
acttcccgcggttccgttga

SEQ ID NO: 66928 - DNA, 20 bp, Artificial Sequence
  MKO10066928_A_NTCmmu_0523
  gRNA
ttatgacctcgatgcgacat

SEQ ID NO: 66929 - DNA, 20 bp, Artificial Sequence
  MKO10066929_A_NTCmmu_0524
  gRNA
tgacgcgcctcggaccaacc

SEQ ID NO: 66930 - DNA, 20 bp, Artificial Sequence
  MKO10066930_A_NTCmmu_0525
  gRNA
tatcccgatccggaaactag

SEQ ID NO: 66931 - DNA, 20 bp, Artificial Sequence
  MKO10066931_A_NTCmmu_0526
  gRNA
agtacactacatcgacttcg

SEQ ID NO: 66932 - DNA, 20 bp, Artificial Sequence
  MKO10066932_A_NTCmmu_0527
  gRNA
ttccagtataccgaattcgc

SEQ ID NO: 66933 - DNA, 20 bp, Artificial Sequence
  MKO10066933_A_NTCmmu_0528
  gRNA
cccggcagactaactagcgc

SEQ ID NO: 66934 - DNA, 20 bp, Artificial Sequence
  MKO10066934_A_NTCmmu_0529
  gRNA
gcaacggacagtcatcgaac

SEQ ID NO: 66935 - DNA, 20 bp, Artificial Sequence
  MKO10066935_A_NTCmmu_0530
  gRNA
gctagcgttcagcccgatgt

SEQ ID NO: 66936 - DNA, 20 bp, Artificial Sequence
  MKO10066936_A_NTCmmu_0531
  gRNA
tatgaactaggcgtaaacgg

SEQ ID NO: 66937 - DNA, 20 bp, Artificial Sequence
  MKO10066937_A_NTCmmu_0532
  gRNA
cgcgcggatatttaaacttc

SEQ ID NO: 66938 - DNA, 20 bp, Artificial Sequence
  MKO10066938_A_NTCmmu_0533
  gRNA
aagcagcgactactcgacgc

SEQ ID NO: 66939 - DNA, 20 bp, Artificial Sequence
  MKO10066939_A_NTCmmu_0534
  gRNA
cccctataggcgcgctaagg

SEQ ID NO: 66940 - DNA, 20 bp, Artificial Sequence
  MKO10066940_A_NTCmmu_0535
  gRNA
ccgagatggctcggatagac

SEQ ID NO: 66941 - DNA, 20 bp, Artificial Sequence
  MKO10066941_A_NTCmmu_0536
  gRNA
agcacgcgcacaagagccgc

SEQ ID NO: 66942 - DNA, 20 bp, Artificial Sequence
  MKO10066942_A_NTCmmu_0537
  gRNA
tcgtaaagtcgcagcgacgt

SEQ ID NO: 66943 - DNA, 20 bp, Artificial Sequence
  MKO10066943_A_NTCmmu_0538
  gRNA
gtctaacatcggcgcacgtg

SEQ ID NO: 66944 - DNA, 20 bp, Artificial Sequence
  MKO10066944_A_NTCmmu_0539
  gRNA
ttcaacgacggaagacgcgc

SEQ ID NO: 66945 - DNA, 20 bp, Artificial Sequence
  MKO10066945_A_NTCmmu_0540
  gRNA
cgctcggtaaggtcgattgg

SEQ ID NO: 66946 - DNA, 20 bp, Artificial Sequence
  MKO10066946_A_NTCmmu_0541
  gRNA
taggggtgcgcattagacta

SEQ ID NO: 66947 - DNA, 20 bp, Artificial Sequence
  MKO10066947_A_NTCmmu_0542
  gRNA
gcccgacctccacgtaaatc

SEQ ID NO: 66948 - DNA, 20 bp, Artificial Sequence
  MKO10066948_A_NTCmmu_0543
  gRNA
tatgaaacatctcggcgacg

SEQ ID NO: 66949 - DNA, 20 bp, Artificial Sequence
  MKO10066949_A_NTCmmu_0544
  gRNA
ctgcttgaacgcctagacgg

SEQ ID NO: 66950 - DNA, 20 bp, Artificial Sequence
  MKO10066950_A_NTCmmu_0545
  gRNA
gggccggcactctgtcggac

SEQ ID NO: 66951 - DNA, 20 bp, Artificial Sequence
  MKO10066951_A_NTCmmu_0546
  gRNA
gccgaccaacgatgaccacg

SEQ ID NO: 66952 - DNA, 20 bp, Artificial Sequence
  MKO10066952_A_NTCmmu_0547
  gRNA
atcgcggcgcgttaaggcag

SEQ ID NO: 66953 - DNA, 20 bp, Artificial Sequence
  MKO10066953_A_NTCmmu_0548
  gRNA
cgacggttgtgctgaggctt

SEQ ID NO: 66954 - DNA, 20 bp, Artificial Sequence
  MKO10066954_A_NTCmmu_0549
  gRNA
cggatcctcccgtactatcc

SEQ ID NO: 66955 - DNA, 20 bp, Artificial Sequence
  MKO10066955_A_NTCmmu_0550
  gRNA
ccattagtacgaacattgcg

SEQ ID NO: 66956 - DNA, 20 bp, Artificial Sequence
  MKO10066956_A_NTCmmu_0551
  gRNA
gctcatactgatgaacgtcc

SEQ ID NO: 66957 - DNA, 20 bp, Artificial Sequence
  MKO10066957_A_NTCmmu_0552
  gRNA
gccgaatcgcgttattccaa

SEQ ID NO: 66958 - DNA, 20 bp, Artificial Sequence
  MKO10066958_A_NTCmmu_0553
  gRNA
caaggatcgtgccgtgattt

SEQ ID NO: 66959 - DNA, 20 bp, Artificial Sequence
  MKO10066959_A_NTCmmu_0554
  gRNA
gttaatattgtggcccgcac

SEQ ID NO: 66960 - DNA, 20 bp, Artificial Sequence
  MKO10066960_A_NTCmmu_0555
  gRNA
ccaacccggcatcgtccgct

SEQ ID NO: 66961 - DNA, 20 bp, Artificial Sequence
  MKO10066961_A_NTCmmu_0556
  gRNA
gcgagcgctatcccggtgga

SEQ ID NO: 66962 - DNA, 20 bp, Artificial Sequence
  MKO10066962_A_NTCmmu_0557
  gRNA
gtgtatgacgagaagcgaag

SEQ ID NO: 66963 - DNA, 20 bp, Artificial Sequence
  MKO10066963_A_NTCmmu_0558
  gRNA
ggtgtggaccgcttttacgc

SEQ ID NO: 66964 - DNA, 20 bp, Artificial Sequence
  MKO10066964_A_NTCmmu_0559
  gRNA
gttataccacctactatgac

SEQ ID NO: 66965 - DNA, 20 bp, Artificial Sequence
  MKO10066965_A_NTCmmu_0560
  gRNA
gatacgtgaggttgccggtg

SEQ ID NO: 66966 - DNA, 20 bp, Artificial Sequence
  MKO10066966_A_NTCmmu_0561
  gRNA
tatgccatatgcccgttttt

SEQ ID NO: 66967 - DNA, 20 bp, Artificial Sequence
  MKO10066967_A_NTCmmu_0562
  gRNA
tcatctacggtatcgaaagg

SEQ ID NO: 66968 - DNA, 20 bp, Artificial Sequence
  MKO10066968_A_NTCmmu_0563
  gRNA
agtgtcacggcaaagtcgag

SEQ ID NO: 66969 - DNA, 20 bp, Artificial Sequence
  MKO10066969_A_NTCmmu_0564
  gRNA
caatggcgtctgccgttcag

SEQ ID NO: 66970 - DNA, 20 bp, Artificial Sequence
  MKO10066970_A_NTCmmu_0565
  gRNA
gctcgctgatgtgtaatccg

SEQ ID NO: 66971 - DNA, 20 bp, Artificial Sequence
  MKO10066971_A_NTCmmu_0566
  gRNA
ggatacatcggcgcgctagt

SEQ ID NO: 66972 - DNA, 20 bp, Artificial Sequence
  MKO10066972_A_NTCmmu_0567
  gRNA
cagcaccacgcgtcgtgcgg

SEQ ID NO: 66973 - DNA, 20 bp, Artificial Sequence
  MKO10066973_A_NTCmmu_0568
  gRNA
cgatgtcgaaagtcggtcaa

SEQ ID NO: 66974 - DNA, 20 bp, Artificial Sequence
  MKO10066974_A_NTCmmu_0569
  gRNA
cgatacgctatagaatagtc

SEQ ID NO: 66975 - DNA, 20 bp, Artificial Sequence
  MKO10066975_A_NTCmmu_0570
  gRNA
gcgtggagttcgtcgctctt

SEQ ID NO: 66976 - DNA, 20 bp, Artificial Sequence
  MKO10066976_A_NTCmmu_0571
  gRNA
cacaacgcctaccagcggac

SEQ ID NO: 66977 - DNA, 20 bp, Artificial Sequence
  MKO10066977_A_NTCmmu_0572
  gRNA
atttgcccgtccatacgcgg

SEQ ID NO: 66978 - DNA, 20 bp, Artificial Sequence
  MKO10066978_A_NTCmmu_0573
  gRNA
cggtaagatggttataccgt

SEQ ID NO: 66979 - DNA, 20 bp, Artificial Sequence
  MKO10066979_A_NTCmmu_0574
  gRNA
gttcgcgggggcttctatca

SEQ ID NO: 66980 - DNA, 20 bp, Artificial Sequence
  MKO10066980_A_NTCmmu_0575
  gRNA
ggcaccgcgtttattgcact

SEQ ID NO: 66981 - DNA, 20 bp, Artificial Sequence
  MKO10066981_A_NTCmmu_0576
  gRNA
tgacaaccgcggtacctcta

SEQ ID NO: 66982 - DNA, 20 bp, Artificial Sequence
  MKO10066982_A_NTCmmu_0577
  gRNA
ggtcgctcgatttcatttaa

SEQ ID NO: 66983 - DNA, 20 bp, Artificial Sequence
  MKO10066983_A_NTCmmu_0578
  gRNA
gacgaaaggtcctacgaagt

SEQ ID NO: 66984 - DNA, 20 bp, Artificial Sequence
  MKO10066984_A_NTCmmu_0579
  gRNA
gtaccacttatcgaccttgc

SEQ ID NO: 66985 - DNA, 20 bp, Artificial Sequence
  MKO10066985_A_NTCmmu_0580
  gRNA
ttcaagtgttatggacgcgc

SEQ ID NO: 66986 - DNA, 20 bp, Artificial Sequence
  MKO10066986_A_NTCmmu_0581
  gRNA
tgagagcaaggcgcatacgc

SEQ ID NO: 66987 - DNA, 20 bp, Artificial Sequence
  MKO10066987_A_NTCmmu_0582
  gRNA
cattctctgacgaatgcgcc

SEQ ID NO: 66988 - DNA, 20 bp, Artificial Sequence
  MKO10066988_A_NTCmmu_0583
  gRNA
atccccccgacttagggatt

SEQ ID NO: 66989 - DNA, 20 bp, Artificial Sequence
  MKO10066989_A_NTCmmu_0584
  gRNA
cagtgccggtagcggcacgg

SEQ ID NO: 66990 - DNA, 20 bp, Artificial Sequence
  MKO10066990_A_NTCmmu_0585
  gRNA
acgacgtccgctgtgtgtat

SEQ ID NO: 66991 - DNA, 20 bp, Artificial Sequence
  MKO10066991_A_NTCmmu_0586
  gRNA
gcgctcgaacaaacatggtc

SEQ ID NO: 66992 - DNA, 20 bp, Artificial Sequence
  MKO10066992_A_NTCmmu_0587
  gRNA
ggcaacgcacgctgggttgt

SEQ ID NO: 66993 - DNA, 20 bp, Artificial Sequence
  MKO10066993_A_NTCmmu_0588
  gRNA
gctattccgctcgtcaattt

SEQ ID NO: 66994 - DNA, 20 bp, Artificial Sequence
  MKO10066994_A_NTCmmu_0589
  gRNA
ttcatcgcagatcgatttcg

SEQ ID NO: 66995 - DNA, 20 bp, Artificial Sequence
  MKO10066995_A_NTCmmu_0590
  gRNA
ttcatccttcgtagcgcagc

SEQ ID NO: 66996 - DNA, 20 bp, Artificial Sequence
  MKO10066996_A_NTCmmu_0591
  gRNA
tggttcaccactcgagatcg

SEQ ID NO: 66997 - DNA, 20 bp, Artificial Sequence
  MKO10066997_A_NTCmmu_0592
  gRNA
ttgagcggacccccctacaa

SEQ ID NO: 66998 - DNA, 20 bp, Artificial Sequence
  MKO10066998_A_NTCmmu_0593
  gRNA
atgtgtatgaagcccgtcat

SEQ ID NO: 66999 - DNA, 20 bp, Artificial Sequence
  MKO10066999_A_NTCmmu_0594
  gRNA
taggtggcgcccaatcggac

SEQ ID NO: 67000 - DNA, 20 bp, Artificial Sequence
  MKO10067000_A_NTCmmu_0595
  gRNA
ctcgtgtcactcctcggttc

SEQ ID NO: 67001 - DNA, 20 bp, Artificial Sequence
  MKO10067001_A_NTCmmu_0596
  gRNA
atgccaatgccgttgttagc

SEQ ID NO: 67002 - DNA, 20 bp, Artificial Sequence
  MKO10067002_A_NTCmmu_0597
  gRNA
ccttacggcggagaacgagt

SEQ ID NO: 67003 - DNA, 20 bp, Artificial Sequence
  MKO10067003_A_NTCmmu_0598
  gRNA
cgcgcggatcttccgtacaa

SEQ ID NO: 67004 - DNA, 20 bp, Artificial Sequence
  MKO10067004_A_NTCmmu_0599
  gRNA
cggcaagcgcattcctatgg

SEQ ID NO: 67005 - DNA, 20 bp, Artificial Sequence
  MKO10067005_A_NTCmmu_0600
  gRNA
tatgatcgtatggcccttcc

SEQ ID NO: 67006 - DNA, 20 bp, Artificial Sequence
  MKO10067006_A_NTCmmu_0601
  gRNA
atcgcctagcccaagcgacg

SEQ ID NO: 67007 - DNA, 20 bp, Artificial Sequence
  MKO10067007_A_NTCmmu_0602
  gRNA
gcgatcgccggtatagcttt

SEQ ID NO: 67008 - DNA, 20 bp, Artificial Sequence
  MKO10067008_A_NTCmmu_0603
  gRNA
ccgttcaattatgctggcgt

SEQ ID NO: 67009 - DNA, 20 bp, Artificial Sequence
  MKO10067009_A_NTCmmu_0604
  gRNA
ccagctaacgttttagtacg

SEQ ID NO: 67010 - DNA, 20 bp, Artificial Sequence
  MKO10067010_A_NTCmmu_0605
  gRNA
tccccttcgtcggcgccagg

SEQ ID NO: 67011 - DNA, 20 bp, Artificial Sequence
  MKO10067011_A_NTCmmu_0606
  gRNA
ttctgattagatacgtacga

SEQ ID NO: 67012 - DNA, 20 bp, Artificial Sequence
  MKO10067012_A_NTCmmu_0607
  gRNA
ttttcgtcgactaagtcaag

SEQ ID NO: 67013 - DNA, 20 bp, Artificial Sequence
  MKO10067013_A_NTCmmu_0608
  gRNA
tcaattagtggccgccaagc

SEQ ID NO: 67014 - DNA, 20 bp, Artificial Sequence
  MKO10067014_A_NTCmmu_0609
  gRNA
tcagctacgatcggacccaa

SEQ ID NO: 67015 - DNA, 20 bp, Artificial Sequence
  MKO10067015_A_NTCmmu_0610
  gRNA
gcacgaacccgttcgtatgg

SEQ ID NO: 67016 - DNA, 20 bp, Artificial Sequence
  MKO10067016_A_NTCmmu_0611
  gRNA
caatatgcacgtagcctcgt

SEQ ID NO: 67017 - DNA, 20 bp, Artificial Sequence
  MKO10067017_A_NTCmmu_0612
  gRNA
gaccgacggtataccctact

SEQ ID NO: 67018 - DNA, 20 bp, Artificial Sequence
  MKO10067018_A_NTCmmu_0613
  gRNA
ttgaagtagggtcggattga

SEQ ID NO: 67019 - DNA, 20 bp, Artificial Sequence
  MKO10067019_A_NTCmmu_0614
  gRNA
aaggcgtaaacgagtacacg

SEQ ID NO: 67020 - DNA, 20 bp, Artificial Sequence
  MKO10067020_A_NTCmmu_0615
  gRNA
aatgagcttcgagttcgtct

SEQ ID NO: 67021 - DNA, 20 bp, Artificial Sequence
  MKO10067021_A_NTCmmu_0616
  gRNA
acgtgttctcgtacttagct

SEQ ID NO: 67022 - DNA, 20 bp, Artificial Sequence
  MKO10067022_A_NTCmmu_0617
  gRNA
ttagccttgccccgtcatac

SEQ ID NO: 67023 - DNA, 20 bp, Artificial Sequence
  MKO10067023_A_NTCmmu_0618
  gRNA
gccttttccgcccgttcaag

SEQ ID NO: 67024 - DNA, 20 bp, Artificial Sequence
  MKO10067024_A_NTCmmu_0619
  gRNA
cagaaactcttaccgagcgc

SEQ ID NO: 67025 - DNA, 20 bp, Artificial Sequence
  MKO10067025_A_NTCmmu_0620
  gRNA
cttgaaaaaggggcgactat

SEQ ID NO: 67026 - DNA, 20 bp, Artificial Sequence
  MKO10067026_A_NTCmmu_0621
  gRNA
cctactaacgacgagtcaaa

SEQ ID NO: 67027 - DNA, 20 bp, Artificial Sequence
  MKO10067027_A_NTCmmu_0622
  gRNA
catttccggggtccgatgca

SEQ ID NO: 67028 - DNA, 20 bp, Artificial Sequence
  MKO10067028_A_NTCmmu_0623
  gRNA
ccgggcgccgtatcccctac

SEQ ID NO: 67029 - DNA, 20 bp, Artificial Sequence
  MKO10067029_A_NTCmmu_0624
  gRNA
gagacccattatgatcctag

SEQ ID NO: 67030 - DNA, 20 bp, Artificial Sequence
  MKO10067030_A_NTCmmu_0625
  gRNA
cgaacttctaccgttgtgcg

SEQ ID NO: 67031 - DNA, 20 bp, Artificial Sequence
  MKO10067031_A_NTCmmu_0626
  gRNA
tggcttaatggacagcgcga

SEQ ID NO: 67032 - DNA, 20 bp, Artificial Sequence
  MKO10067032_A_NTCmmu_0627
  gRNA
ccggcgctgcggtcggcttg

SEQ ID NO: 67033 - DNA, 20 bp, Artificial Sequence
  MKO10067033_A_NTCmmu_0628
  gRNA
gttacttacctgaccggcaa

SEQ ID NO: 67034 - DNA, 20 bp, Artificial Sequence
  MKO10067034_A_NTCmmu_0629
  gRNA
cgttattgtacaccacgctc

SEQ ID NO: 67035 - DNA, 20 bp, Artificial Sequence
  MKO10067035_A_NTCmmu_0630
  gRNA
cgagctcggcaaatttgatt

SEQ ID NO: 67036 - DNA, 20 bp, Artificial Sequence
  MKO10067036_A_NTCmmu_0631
  gRNA
tggtaccactcgccgaatct

SEQ ID NO: 67037 - DNA, 20 bp, Artificial Sequence
  MKO10067037_A_NTCmmu_0632
  gRNA
cgtgttttacctcgcttcga

SEQ ID NO: 67038 - DNA, 20 bp, Artificial Sequence
  MKO10067038_A_NTCmmu_0633
  gRNA
cgtcctcgcagcgtagactg

SEQ ID NO: 67039 - DNA, 20 bp, Artificial Sequence
  MKO10067039_A_NTCmmu_0634
  gRNA
gtacgcagggtgtagcgacc

SEQ ID NO: 67040 - DNA, 20 bp, Artificial Sequence
  MKO10067040_A_NTCmmu_0635
  gRNA
cctttgatgggcgcgtactc

SEQ ID NO: 67041 - DNA, 20 bp, Artificial Sequence
  MKO10067041_A_NTCmmu_0636
  gRNA
ccctcggttgagcagcgcga

SEQ ID NO: 67042 - DNA, 20 bp, Artificial Sequence
  MKO10067042_A_NTCmmu_0637
  gRNA
aagcgtgagattcaccgccg

SEQ ID NO: 67043 - DNA, 20 bp, Artificial Sequence
  MKO10067043_A_NTCmmu_0638
  gRNA
gcgggacccccggtatagtc

SEQ ID NO: 67044 - DNA, 20 bp, Artificial Sequence
  MKO10067044_A_NTCmmu_0639
  gRNA
gacagccggttgaccgggtc

SEQ ID NO: 67045 - DNA, 20 bp, Artificial Sequence
  MKO10067045_A_NTCmmu_0640
  gRNA
ggaaactcttgctcgacacg

SEQ ID NO: 67046 - DNA, 20 bp, Artificial Sequence
  MKO10067046_A_NTCmmu_0641
  gRNA
ttgaacacgacacccgtgcc

SEQ ID NO: 67047 - DNA, 20 bp, Artificial Sequence
  MKO10067047_A_NTCmmu_0642
  gRNA
gtcgctcgaactcacgtagc

SEQ ID NO: 67048 - DNA, 20 bp, Artificial Sequence
  MKO10067048_A_NTCmmu_0643
  gRNA
gggcgcgtcatagacacacg

SEQ ID NO: 67049 - DNA, 20 bp, Artificial Sequence
  MKO10067049_A_NTCmmu_0644
  gRNA
cgtcgaagatacgcaggctg

SEQ ID NO: 67050 - DNA, 20 bp, Artificial Sequence
  MKO10067050_A_NTCmmu_0645
  gRNA
taatggcacttaccgggtct

SEQ ID NO: 67051 - DNA, 20 bp, Artificial Sequence
  MKO10067051_A_NTCmmu_0646
  gRNA
ctaacagcgccgttatctac

SEQ ID NO: 67052 - DNA, 20 bp, Artificial Sequence
  MKO10067052_A_NTCmmu_0647
  gRNA
ttagttcgaccactcctgat

SEQ ID NO: 67053 - DNA, 20 bp, Artificial Sequence
  MKO10067053_A_NTCmmu_0648
  gRNA
aatgctgcgtacgataaccg

SEQ ID NO: 67054 - DNA, 20 bp, Artificial Sequence
  MKO10067054_A_NTCmmu_0649
  gRNA
tatgacacacaatctgcgac

SEQ ID NO: 67055 - DNA, 20 bp, Artificial Sequence
  MKO10067055_A_NTCmmu_0650
  gRNA
ttggcggctcgctcctgcgt

SEQ ID NO: 67056 - DNA, 20 bp, Artificial Sequence
  MKO10067056_A_NTCmmu_0651
  gRNA
agtcagctccggggtatacg

SEQ ID NO: 67057 - DNA, 20 bp, Artificial Sequence
  MKO10067057_A_NTCmmu_0652
  gRNA
gcgagttatttcgctatagg

SEQ ID NO: 67058 - DNA, 20 bp, Artificial Sequence
  MKO10067058_A_NTCmmu_0653
  gRNA
acgttgcagctcgcgtttcg

SEQ ID NO: 67059 - DNA, 20 bp, Artificial Sequence
  MKO10067059_A_NTCmmu_0654
  gRNA
catcggtagtcactacgccc

SEQ ID NO: 67060 - DNA, 20 bp, Artificial Sequence
  MKO10067060_A_NTCmmu_0655
  gRNA
gaccactatgtacttatcgc

SEQ ID NO: 67061 - DNA, 20 bp, Artificial Sequence
  MKO10067061_A_NTCmmu_0656
  gRNA
accgcgcatcattgacggtg

SEQ ID NO: 67062 - DNA, 20 bp, Artificial Sequence
  MKO10067062_A_NTCmmu_0657
  gRNA
caaacgaggccacgtacgtg

SEQ ID NO: 67063 - DNA, 20 bp, Artificial Sequence
  MKO10067063_A_NTCmmu_0658
  gRNA
tcactcaaagtgcgtagtcg

SEQ ID NO: 67064 - DNA, 20 bp, Artificial Sequence
  MKO10067064_A_NTCmmu_0659
  gRNA
gtgtctttcggtcttacgag

SEQ ID NO: 67065 - DNA, 20 bp, Artificial Sequence
  MKO10067065_A_NTCmmu_0660
  gRNA
ccgtgatttcggtagcgtac

SEQ ID NO: 67066 - DNA, 20 bp, Artificial Sequence
  MKO10067066_A_NTCmmu_0661
  gRNA
ctttggcgtcgagaagcgca

SEQ ID NO: 67067 - DNA, 20 bp, Artificial Sequence
  MKO10067067_A_NTCmmu_0662
  gRNA
agatagcgcaatcccgcatg

SEQ ID NO: 67068 - DNA, 20 bp, Artificial Sequence
  MKO10067068_A_NTCmmu_0663
  gRNA
catcagcccattatgactcg

SEQ ID NO: 67069 - DNA, 20 bp, Artificial Sequence
  MKO10067069_A_NTCmmu_0664
  gRNA
ccggagcgcgttgcagttct

SEQ ID NO: 67070 - DNA, 20 bp, Artificial Sequence
  MKO10067070_A_NTCmmu_0665
  gRNA
ttttagtaggtcaacgctgt

SEQ ID NO: 67071 - DNA, 20 bp, Artificial Sequence
  MKO10067071_A_NTCmmu_0666
  gRNA
ctaattccaatatccgtctg

SEQ ID NO: 67072 - DNA, 20 bp, Artificial Sequence
  MKO10067072_A_NTCmmu_0667
  gRNA
agttaagcgcgtatctacgt

SEQ ID NO: 67073 - DNA, 20 bp, Artificial Sequence
  MKO10067073_A_NTCmmu_0668
  gRNA
agtccggtcgaaatctgtat

SEQ ID NO: 67074 - DNA, 20 bp, Artificial Sequence
  MKO10067074_A_NTCmmu_0669
  gRNA
acgcacccatacaggcgctt

SEQ ID NO: 67075 - DNA, 20 bp, Artificial Sequence
  MKO10067075_A_NTCmmu_0670
  gRNA
aggccccgagacgcgccaca

SEQ ID NO: 67076 - DNA, 20 bp, Artificial Sequence
  MKO10067076_A_NTCmmu_0671
  gRNA
tgacccgtctcttcgcgcac

SEQ ID NO: 67077 - DNA, 20 bp, Artificial Sequence
  MKO10067077_A_NTCmmu_0672
  gRNA
tcctccgatcgaccagggta

SEQ ID NO: 67078 - DNA, 20 bp, Artificial Sequence
  MKO10067078_A_NTCmmu_0673
  gRNA
cgttaatccaccgtatgggc

SEQ ID NO: 67079 - DNA, 20 bp, Artificial Sequence
  MKO10067079_A_NTCmmu_0674
  gRNA
attaggtgactggaacacgt

SEQ ID NO: 67080 - DNA, 20 bp, Artificial Sequence
  MKO10067080_A_NTCmmu_0675
  gRNA
tcttctcgagcgtgcgggcc

SEQ ID NO: 67081 - DNA, 20 bp, Artificial Sequence
  MKO10067081_A_NTCmmu_0676
  gRNA
cgtgtgtttacagcccttac

SEQ ID NO: 67082 - DNA, 20 bp, Artificial Sequence
  MKO10067082_A_NTCmmu_0677
  gRNA
ctaccggtcacgttgtgacc

SEQ ID NO: 67083 - DNA, 20 bp, Artificial Sequence
  MKO10067083_A_NTCmmu_0678
  gRNA
tgctggccgatacgtgcttg

SEQ ID NO: 67084 - DNA, 20 bp, Artificial Sequence
  MKO10067084_A_NTCmmu_0679
  gRNA
atacctccgctacaccgtct

SEQ ID NO: 67085 - DNA, 20 bp, Artificial Sequence
  MKO10067085_A_NTCmmu_0680
  gRNA
ctcgtcggctttcgtgctgc

SEQ ID NO: 67086 - DNA, 20 bp, Artificial Sequence
  MKO10067086_A_NTCmmu_0681
  gRNA
gtaggccgctgatcgaataa

SEQ ID NO: 67087 - DNA, 20 bp, Artificial Sequence
  MKO10067087_A_NTCmmu_0682
  gRNA
tttctagggccgccgcccgc

SEQ ID NO: 67088 - DNA, 20 bp, Artificial Sequence
  MKO10067088_A_NTCmmu_0683
  gRNA
cacggcaggcatctcgtcta

SEQ ID NO: 67089 - DNA, 20 bp, Artificial Sequence
  MKO10067089_A_NTCmmu_0684
  gRNA
gagcgccaagcgtgcgttga

SEQ ID NO: 67090 - DNA, 20 bp, Artificial Sequence
  MKO10067090_A_NTCmmu_0685
  gRNA
ctcgatgccacggaaggcgg

SEQ ID NO: 67091 - DNA, 20 bp, Artificial Sequence
  MKO10067091_A_NTCmmu_0686
  gRNA
cacgccttcgtcaaccctat

SEQ ID NO: 67092 - DNA, 20 bp, Artificial Sequence
  MKO10067092_A_NTCmmu_0687
  gRNA
gcccgttgtgagcggcatgc

SEQ ID NO: 67093 - DNA, 20 bp, Artificial Sequence
  MKO10067093_A_NTCmmu_0688
  gRNA
gagcgcgggccagcgaacgt

SEQ ID NO: 67094 - DNA, 20 bp, Artificial Sequence
  MKO10067094_A_NTCmmu_0689
  gRNA
tcggatcggtacataaagtt

SEQ ID NO: 67095 - DNA, 20 bp, Artificial Sequence
  MKO10067095_A_NTCmmu_0690
  gRNA
tgtctgccgcatacgctata

SEQ ID NO: 67096 - DNA, 20 bp, Artificial Sequence
  MKO10067096_A_NTCmmu_0691
  gRNA
tcacccgcgtatacgacctg

SEQ ID NO: 67097 - DNA, 20 bp, Artificial Sequence
  MKO10067097_A_NTCmmu_0692
  gRNA
tgtgcctacgccattcggct

SEQ ID NO: 67098 - DNA, 20 bp, Artificial Sequence
  MKO10067098_A_NTCmmu_0693
  gRNA
accatccgatattacgagca

SEQ ID NO: 67099 - DNA, 20 bp, Artificial Sequence
  MKO10067099_A_NTCmmu_0694
  gRNA
gcttcggaggctacgtagta

SEQ ID NO: 67100 - DNA, 20 bp, Artificial Sequence
  MKO10067100_A_NTCmmu_0695
  gRNA
tgagccggtgcgctctcggt

SEQ ID NO: 67101 - DNA, 20 bp, Artificial Sequence
  MKO10067101_A_NTCmmu_0696
  gRNA
tttacgtatgctgtgcgcga

SEQ ID NO: 67102 - DNA, 20 bp, Artificial Sequence
  MKO10067102_A_NTCmmu_0697
  gRNA
taactctaatgcgttccaag

SEQ ID NO: 67103 - DNA, 20 bp, Artificial Sequence
  MKO10067103_A_NTCmmu_0698
  gRNA
tatgaacctccggatcggtg

SEQ ID NO: 67104 - DNA, 20 bp, Artificial Sequence
  MKO10067104_A_NTCmmu_0699
  gRNA
cgttaataaacgcggtttca

SEQ ID NO: 67105 - DNA, 20 bp, Artificial Sequence
  MKO10067105_A_NTCmmu_0700
  gRNA
cgcccctagttgtcccgccc

SEQ ID NO: 67106 - DNA, 20 bp, Artificial Sequence
  MKO10067106_A_NTCmmu_0701
  gRNA
ttgtttcagccttgagcgcg

SEQ ID NO: 67107 - DNA, 20 bp, Artificial Sequence
  MKO10067107_A_NTCmmu_0702
  gRNA
ctctctgcgagtcgatgatt

SEQ ID NO: 67108 - DNA, 20 bp, Artificial Sequence
  MKO10067108_A_NTCmmu_0703
  gRNA
cgagtatcagcatgtcgacg

SEQ ID NO: 67109 - DNA, 20 bp, Artificial Sequence
  MKO10067109_A_NTCmmu_0704
  gRNA
agtgccgggggtgtataccg

SEQ ID NO: 67110 - DNA, 20 bp, Artificial Sequence
  MKO10067110_A_NTCmmu_0705
  gRNA
cggtaccacgccccacctcg

SEQ ID NO: 67111 - DNA, 20 bp, Artificial Sequence
  MKO10067111_A_NTCmmu_0706
  gRNA
gtactgacgttacgttcata

SEQ ID NO: 67112 - DNA, 20 bp, Artificial Sequence
  MKO10067112_A_NTCmmu_0707
  gRNA
acgcaagcggaacgcgtcta

SEQ ID NO: 67113 - DNA, 20 bp, Artificial Sequence
  MKO10067113_A_NTCmmu_0708
  gRNA
gagcgtcccgtgatttaaag

SEQ ID NO: 67114 - DNA, 20 bp, Artificial Sequence
  MKO10067114_A_NTCmmu_0709
  gRNA
ggtaaaaagcgtaacgagta

SEQ ID NO: 67115 - DNA, 20 bp, Artificial Sequence
  MKO10067115_A_NTCmmu_0710
  gRNA
cgtgaatcgaccctcaataa

SEQ ID NO: 67116 - DNA, 20 bp, Artificial Sequence
  MKO10067116_A_NTCmmu_0711
  gRNA
agaggcggagcaatactcgc

SEQ ID NO: 67117 - DNA, 20 bp, Artificial Sequence
  MKO10067117_A_NTCmmu_0712
  gRNA
tagagcagatcccctcaacg

SEQ ID NO: 67118 - DNA, 20 bp, Artificial Sequence
  MKO10067118_A_NTCmmu_0713
  gRNA
agacctcgttagccgtagct

SEQ ID NO: 67119 - DNA, 20 bp, Artificial Sequence
  MKO10067119_A_NTCmmu_0714
  gRNA
tagttatctgcaacgcatag

SEQ ID NO: 67120 - DNA, 20 bp, Artificial Sequence
  MKO10067120_A_NTCmmu_0715
  gRNA
cctcaaatagcgaacgtcaa

SEQ ID NO: 67121 - DNA, 20 bp, Artificial Sequence
  MKO10067121_A_NTCmmu_0716
  gRNA
aagcgagccgcagaccgttt

SEQ ID NO: 67122 - DNA, 20 bp, Artificial Sequence
  MKO10067122_A_NTCmmu_0717
  gRNA
caatacaccgttaaccctct

SEQ ID NO: 67123 - DNA, 20 bp, Artificial Sequence
  MKO10067123_A_NTCmmu_0718
  gRNA
tacgctcacttctgcgaagg

SEQ ID NO: 67124 - DNA, 20 bp, Artificial Sequence
  MKO10067124_A_NTCmmu_0719
  gRNA
tgggcggttcaaagcgaatt

SEQ ID NO: 67125 - DNA, 20 bp, Artificial Sequence
  MKO10067125_A_NTCmmu_0720
  gRNA
cgttagaccgaatctccggg

SEQ ID NO: 67126 - DNA, 20 bp, Artificial Sequence
  MKO10067126_A_NTCmmu_0721
  gRNA
tgcgtctcagcttcggctat

SEQ ID NO: 67127 - DNA, 20 bp, Artificial Sequence
  MKO10067127_A_NTCmmu_0722
  gRNA
aagcctaacggagctcgcgg

SEQ ID NO: 67128 - DNA, 20 bp, Artificial Sequence
  MKO10067128_A_NTCmmu_0723
  gRNA
accaataacgggtacaagtc

SEQ ID NO: 67129 - DNA, 20 bp, Artificial Sequence
  MKO10067129_A_NTCmmu_0724
  gRNA
cacacgccgcgggccgtgag

SEQ ID NO: 67130 - DNA, 20 bp, Artificial Sequence
  MKO10067130_A_NTCmmu_0725
  gRNA
tccgaacaggcgcgtttctc

SEQ ID NO: 67131 - DNA, 20 bp, Artificial Sequence
  MKO10067131_A_NTCmmu_0726
  gRNA
catcccccgactacgactac

SEQ ID NO: 67132 - DNA, 20 bp, Artificial Sequence
  MKO10067132_A_NTCmmu_0727
  gRNA
ccgagcaccctatttatcta

SEQ ID NO: 67133 - DNA, 20 bp, Artificial Sequence
  MKO10067133_A_NTCmmu_0728
  gRNA
ttttggcgacgcatcgctgg

SEQ ID NO: 67134 - DNA, 20 bp, Artificial Sequence
  MKO10067134_A_NTCmmu_0729
  gRNA
ttcgtggccgaaggcgccgc

SEQ ID NO: 67135 - DNA, 20 bp, Artificial Sequence
  MKO10067135_A_NTCmmu_0730
  gRNA
gacgtattggattcgcaacc

SEQ ID NO: 67136 - DNA, 20 bp, Artificial Sequence
  MKO10067136_A_NTCmmu_0731
  gRNA
cgactccgggaatatccgtt

SEQ ID NO: 67137 - DNA, 20 bp, Artificial Sequence
  MKO10067137_A_NTCmmu_0732
  gRNA
ttgaatccgaggcgccgatg

SEQ ID NO: 67138 - DNA, 20 bp, Artificial Sequence
  MKO10067138_A_NTCmmu_0733
  gRNA
ctgtcttcaacgtctggccg

SEQ ID NO: 67139 - DNA, 20 bp, Artificial Sequence
  MKO10067139_A_NTCmmu_0734
  gRNA
agttaagctccaatcgtctg

SEQ ID NO: 67140 - DNA, 20 bp, Artificial Sequence
  MKO10067140_A_NTCmmu_0735
  gRNA
gctaatcggtactactccgg

SEQ ID NO: 67141 - DNA, 20 bp, Artificial Sequence
  MKO10067141_A_NTCmmu_0736
  gRNA
ccgcaccgcagtcatggtaa

SEQ ID NO: 67142 - DNA, 20 bp, Artificial Sequence
  MKO10067142_A_NTCmmu_0737
  gRNA
gcttgaggcaacgcgactga

SEQ ID NO: 67143 - DNA, 20 bp, Artificial Sequence
  MKO10067143_A_NTCmmu_0738
  gRNA
gaaccagtatctaacccgac

SEQ ID NO: 67144 - DNA, 20 bp, Artificial Sequence
  MKO10067144_A_NTCmmu_0739
  gRNA
acgaggagaagtcgagtatt

SEQ ID NO: 67145 - DNA, 20 bp, Artificial Sequence
  MKO10067145_A_NTCmmu_0740
  gRNA
gcttcgaccacgggtactgc

SEQ ID NO: 67146 - DNA, 20 bp, Artificial Sequence
  MKO10067146_A_NTCmmu_0741
  gRNA
ccgcgtgacgcaatcccttg

SEQ ID NO: 67147 - DNA, 20 bp, Artificial Sequence
  MKO10067147_A_NTCmmu_0742
  gRNA
gacttcgacgagaaaacgtt

SEQ ID NO: 67148 - DNA, 20 bp, Artificial Sequence
  MKO10067148_A_NTCmmu_0743
  gRNA
cggaatacgccaaaacctat

SEQ ID NO: 67149 - DNA, 20 bp, Artificial Sequence
  MKO10067149_A_NTCmmu_0744
  gRNA
tacatgcggttgacacgttc

SEQ ID NO: 67150 - DNA, 20 bp, Artificial Sequence
  MKO10067150_A_NTCmmu_0745
  gRNA
cgcgacgtacggctggagca

SEQ ID NO: 67151 - DNA, 20 bp, Artificial Sequence
  MKO10067151_A_NTCmmu_0746
  gRNA
tagtaggccggagcgcatcc

SEQ ID NO: 67152 - DNA, 20 bp, Artificial Sequence
  MKO10067152_A_NTCmmu_0747
  gRNA
tcgcgaattgctgccgaact

SEQ ID NO: 67153 - DNA, 20 bp, Artificial Sequence
  MKO10067153_A_NTCmmu_0748
  gRNA
gtcgattagatgatgcccgg

SEQ ID NO: 67154 - DNA, 20 bp, Artificial Sequence
  MKO10067154_A_NTCmmu_0749
  gRNA
aacttatacgtaatctgatc

SEQ ID NO: 67155 - DNA, 20 bp, Artificial Sequence
  MKO10067155_A_NTCmmu_0750
  gRNA
gtgccagcgtcgattgacgc

SEQ ID NO: 67156 - DNA, 20 bp, Artificial Sequence
  MKO10067156_A_NTCmmu_0751
  gRNA
agaaatccagtcccgcctaa

SEQ ID NO: 67157 - DNA, 20 bp, Artificial Sequence
  MKO10067157_A_NTCmmu_0752
  gRNA
tacgacgaggacgcatcgag

SEQ ID NO: 67158 - DNA, 20 bp, Artificial Sequence
  MKO10067158_A_NTCmmu_0753
  gRNA
gtgtggtatatccccgtttt

SEQ ID NO: 67159 - DNA, 20 bp, Artificial Sequence
  MKO10067159_A_NTCmmu_0754
  gRNA
cctaactcgaagtctcgtca

SEQ ID NO: 67160 - DNA, 20 bp, Artificial Sequence
  MKO10067160_A_NTCmmu_0755
  gRNA
gcccatgacgcgtgttagta

SEQ ID NO: 67161 - DNA, 20 bp, Artificial Sequence
  MKO10067161_A_NTCmmu_0756
  gRNA
acgacgagagatacttaggc

SEQ ID NO: 67162 - DNA, 20 bp, Artificial Sequence
  MKO10067162_A_NTCmmu_0757
  gRNA
ctgcgtgtaacgtgttggga

SEQ ID NO: 67163 - DNA, 20 bp, Artificial Sequence
  MKO10067163_A_NTCmmu_0758
  gRNA
gcattcccgcttacgtaatt

SEQ ID NO: 67164 - DNA, 20 bp, Artificial Sequence
  MKO10067164_A_NTCmmu_0759
  gRNA
cgccaatggtggccgactcg

SEQ ID NO: 67165 - DNA, 20 bp, Artificial Sequence
  MKO10067165_A_NTCmmu_0760
  gRNA
gatcactcccgaaagtagtg

SEQ ID NO: 67166 - DNA, 20 bp, Artificial Sequence
  MKO10067166_A_NTCmmu_0761
  gRNA
gcaacccacggacggcaccg

SEQ ID NO: 67167 - DNA, 20 bp, Artificial Sequence
  MKO10067167_A_NTCmmu_0762
  gRNA
gtgttgtccgagaacccgac

SEQ ID NO: 67168 - DNA, 20 bp, Artificial Sequence
  MKO10067168_A_NTCmmu_0763
  gRNA
gccacgacctgcgaataatt

SEQ ID NO: 67169 - DNA, 20 bp, Artificial Sequence
  MKO10067169_A_NTCmmu_0764
  gRNA
aggactatccgcgggattag

SEQ ID NO: 67170 - DNA, 20 bp, Artificial Sequence
  MKO10067170_A_NTCmmu_0765
  gRNA
gactagcacgaactgcggtt

SEQ ID NO: 67171 - DNA, 20 bp, Artificial Sequence
  MKO10067171_A_NTCmmu_0766
  gRNA
gtagctgaccgcttaactaa

SEQ ID NO: 67172 - DNA, 20 bp, Artificial Sequence
  MKO10067172_A_NTCmmu_0767
  gRNA
cgtgtttggcggccaacttt

SEQ ID NO: 67173 - DNA, 20 bp, Artificial Sequence
  MKO10067173_A_NTCmmu_0768
  gRNA
ttacttggtgcaacaaccgg

SEQ ID NO: 67174 - DNA, 20 bp, Artificial Sequence
  MKO10067174_A_NTCmmu_0769
  gRNA
cagcgactctgatcggcgta

SEQ ID NO: 67175 - DNA, 20 bp, Artificial Sequence
  MKO10067175_A_NTCmmu_0770
  gRNA
tgagcctttgtggaccgcgg

SEQ ID NO: 67176 - DNA, 20 bp, Artificial Sequence
  MKO10067176_A_NTCmmu_0771
  gRNA
tcgcactctaggccgttatt

SEQ ID NO: 67177 - DNA, 20 bp, Artificial Sequence
  MKO10067177_A_NTCmmu_0772
  gRNA
ctcccatccccgtagcggcc

SEQ ID NO: 67178 - DNA, 20 bp, Artificial Sequence
  MKO10067178_A_NTCmmu_0773
  gRNA
agcgtatcttatgtaccgct

SEQ ID NO: 67179 - DNA, 20 bp, Artificial Sequence
  MKO10067179_A_NTCmmu_0774
  gRNA
agtcactaggcgctctcgcg

SEQ ID NO: 67180 - DNA, 20 bp, Artificial Sequence
  MKO10067180_A_NTCmmu_0775
  gRNA
caggtttcccctagtcgaat

SEQ ID NO: 67181 - DNA, 20 bp, Artificial Sequence
  MKO10067181_A_NTCmmu_0776
  gRNA
atcgatattgataaacgcga

SEQ ID NO: 67182 - DNA, 20 bp, Artificial Sequence
  MKO10067182_A_NTCmmu_0777
  gRNA
cacctttcgaggtaacaccg

SEQ ID NO: 67183 - DNA, 20 bp, Artificial Sequence
  MKO10067183_A_NTCmmu_0778
  gRNA
tagtgcgaacagtcacggcg

SEQ ID NO: 67184 - DNA, 20 bp, Artificial Sequence
  MKO10067184_A_NTCmmu_0779
  gRNA
acacaaactggtcgtagatg

SEQ ID NO: 67185 - DNA, 20 bp, Artificial Sequence
  MKO10067185_A_NTCmmu_0780
  gRNA
cttgacacctcgtccgcatc

SEQ ID NO: 67186 - DNA, 20 bp, Artificial Sequence
  MKO10067186_A_NTCmmu_0781
  gRNA
cccgggtacaccaatagcca

SEQ ID NO: 67187 - DNA, 20 bp, Artificial Sequence
  MKO10067187_A_NTCmmu_0782
  gRNA
accatagtttcaacctgcgg

SEQ ID NO: 67188 - DNA, 20 bp, Artificial Sequence
  MKO10067188_A_NTCmmu_0783
  gRNA
gcattggtgctcgcgcgttc

SEQ ID NO: 67189 - DNA, 20 bp, Artificial Sequence
  MKO10067189_A_NTCmmu_0784
  gRNA
ataatgcgcgcgaatactta

SEQ ID NO: 67190 - DNA, 20 bp, Artificial Sequence
  MKO10067190_A_NTCmmu_0785
  gRNA
agcgatgttcacgcacagcg

SEQ ID NO: 67191 - DNA, 20 bp, Artificial Sequence
  MKO10067191_A_NTCmmu_0786
  gRNA
cgtcgatccctctatactgg

SEQ ID NO: 67192 - DNA, 20 bp, Artificial Sequence
  MKO10067192_A_NTCmmu_0787
  gRNA
cgaaaggcccgactgcgtgg

SEQ ID NO: 67193 - DNA, 20 bp, Artificial Sequence
  MKO10067193_A_NTCmmu_0788
  gRNA
atgttgcagcgctgtacgcc

SEQ ID NO: 67194 - DNA, 20 bp, Artificial Sequence
  MKO10067194_A_NTCmmu_0789
  gRNA
tctcttcgcgcccgctttgc

SEQ ID NO: 67195 - DNA, 20 bp, Artificial Sequence
  MKO10067195_A_NTCmmu_0790
  gRNA
cccgtaggggtcgtggtttt

SEQ ID NO: 67196 - DNA, 20 bp, Artificial Sequence
  MKO10067196_A_NTCmmu_0791
  gRNA
cgtagatgcctgctcgagca

SEQ ID NO: 67197 - DNA, 20 bp, Artificial Sequence
  MKO10067197_A_NTCmmu_0792
  gRNA
gcaggtaggctcgatacttg

SEQ ID NO: 67198 - DNA, 20 bp, Artificial Sequence
  MKO10067198_A_NTCmmu_0793
  gRNA
ggtctcgtaatgtcctatat

SEQ ID NO: 67199 - DNA, 20 bp, Artificial Sequence
  MKO10067199_A_NTCmmu_0794
  gRNA
ttattggtttcaacggttgt

SEQ ID NO: 67200 - DNA, 20 bp, Artificial Sequence
  MKO10067200_A_NTCmmu_0795
  gRNA
accgcacgttctcgcagaga

SEQ ID NO: 67201 - DNA, 20 bp, Artificial Sequence
  MKO10067201_A_NTCmmu_0796
  gRNA
tcttctagtgcgagttccgc

SEQ ID NO: 67202 - DNA, 20 bp, Artificial Sequence
  MKO10067202_A_NTCmmu_0797
  gRNA
ggagttcaagcgtaacttcg

SEQ ID NO: 67203 - DNA, 20 bp, Artificial Sequence
  MKO10067203_A_NTCmmu_0798
  gRNA
ttaacgtctgtgcgcactac

SEQ ID NO: 67204 - DNA, 20 bp, Artificial Sequence
  MKO10067204_A_NTCmmu_0799
  gRNA
gtcgttaacgacccggattc

SEQ ID NO: 67205 - DNA, 20 bp, Artificial Sequence
  MKO10067205_A_NTCmmu_0800
  gRNA
gagctaatctgtagacgtcg

SEQ ID NO: 67206 - DNA, 20 bp, Artificial Sequence
  MKO10067206_A_NTCmmu_0801
  gRNA
gcagggttattccgcttcta

SEQ ID NO: 67207 - DNA, 20 bp, Artificial Sequence
  MKO10067207_A_NTCmmu_0802
  gRNA
agggcaatcgcgtgcccaac

SEQ ID NO: 67208 - DNA, 20 bp, Artificial Sequence
  MKO10067208_A_NTCmmu_0803
  gRNA
cgtgtagtcgggtcgcatgt

SEQ ID NO: 67209 - DNA, 20 bp, Artificial Sequence
  MKO10067209_A_NTCmmu_0804
  gRNA
tgaggttaccgccggctttt

SEQ ID NO: 67210 - DNA, 20 bp, Artificial Sequence
  MKO10067210_A_NTCmmu_0805
  gRNA
acgctcttggcagataatcg

SEQ ID NO: 67211 - DNA, 20 bp, Artificial Sequence
  MKO10067211_A_NTCmmu_0806
  gRNA
aaaattgcaccttcccggcc

SEQ ID NO: 67212 - DNA, 20 bp, Artificial Sequence
  MKO10067212_A_NTCmmu_0807
  gRNA
tgcctactgtcgttcccgcg

SEQ ID NO: 67213 - DNA, 20 bp, Artificial Sequence
  MKO10067213_A_NTCmmu_0808
  gRNA
gaccggccaacggtagcggc

SEQ ID NO: 67214 - DNA, 20 bp, Artificial Sequence
  MKO10067214_A_NTCmmu_0809
  gRNA
acagagtcgtgtgccgaacg

SEQ ID NO: 67215 - DNA, 20 bp, Artificial Sequence
  MKO10067215_A_NTCmmu_0810
  gRNA
ctaagtcgactgtttcgacc

SEQ ID NO: 67216 - DNA, 20 bp, Artificial Sequence
  MKO10067216_A_NTCmmu_0811
  gRNA
tcggattttaatccttacgc

SEQ ID NO: 67217 - DNA, 20 bp, Artificial Sequence
  MKO10067217_A_NTCmmu_0812
  gRNA
tcgatcgtcggcggagcgga

SEQ ID NO: 67218 - DNA, 20 bp, Artificial Sequence
  MKO10067218_A_NTCmmu_0813
  gRNA
tctccgtccgaaacggcgac

SEQ ID NO: 67219 - DNA, 20 bp, Artificial Sequence
  MKO10067219_A_NTCmmu_0814
  gRNA
aggtcgtggacccgcatgta

SEQ ID NO: 67220 - DNA, 20 bp, Artificial Sequence
  MKO10067220_A_NTCmmu_0815
  gRNA
gattggacggtcgcaggata

SEQ ID NO: 67221 - DNA, 20 bp, Artificial Sequence
  MKO10067221_A_NTCmmu_0816
  gRNA
tagtgttgtgagcgtcgtac

SEQ ID NO: 67222 - DNA, 20 bp, Artificial Sequence
  MKO10067222_A_NTCmmu_0817
  gRNA
agtagagtcgcgaacgctac

SEQ ID NO: 67223 - DNA, 20 bp, Artificial Sequence
  MKO10067223_A_NTCmmu_0818
  gRNA
gatgcggacccacgttaagc

SEQ ID NO: 67224 - DNA, 20 bp, Artificial Sequence
  MKO10067224_A_NTCmmu_0819
  gRNA
ttatcgtactagtacgtaca

SEQ ID NO: 67225 - DNA, 20 bp, Artificial Sequence
  MKO10067225_A_NTCmmu_0820
  gRNA
cggatccggtacggtcagtt

SEQ ID NO: 67226 - DNA, 20 bp, Artificial Sequence
  MKO10067226_A_NTCmmu_0821
  gRNA
gacaatcgacacgccgcttc

SEQ ID NO: 67227 - DNA, 20 bp, Artificial Sequence
  MKO10067227_A_NTCmmu_0822
  gRNA
atgggaaagcccacgacaat

SEQ ID NO: 67228 - DNA, 20 bp, Artificial Sequence
  MKO10067228_A_NTCmmu_0823
  gRNA
gcattaagacgcccacatat

SEQ ID NO: 67229 - DNA, 20 bp, Artificial Sequence
  MKO10067229_A_NTCmmu_0824
  gRNA
atccgggcatagcgtttaaa

SEQ ID NO: 67230 - DNA, 20 bp, Artificial Sequence
  MKO10067230_A_NTCmmu_0825
  gRNA
gcgcgcgtggatcacccgca

SEQ ID NO: 67231 - DNA, 20 bp, Artificial Sequence
  MKO10067231_A_NTCmmu_0826
  gRNA
ctaacgtggtagcactacaa

SEQ ID NO: 67232 - DNA, 20 bp, Artificial Sequence
  MKO10067232_A_NTCmmu_0827
  gRNA
ggattcgtgcgggagatacg

SEQ ID NO: 67233 - DNA, 20 bp, Artificial Sequence
  MKO10067233_A_NTCmmu_0828
  gRNA
caaggggtggtcattgcgac

SEQ ID NO: 67234 - DNA, 20 bp, Artificial Sequence
  MKO10067234_A_NTCmmu_0829
  gRNA
agcgtccacgcgtctatgga

SEQ ID NO: 67235 - DNA, 20 bp, Artificial Sequence
  MKO10067235_A_NTCmmu_0830
  gRNA
ccgagaggtactccaattcg

SEQ ID NO: 67236 - DNA, 20 bp, Artificial Sequence
  MKO10067236_A_NTCmmu_0831
  gRNA
acaacaattactggccgcga

SEQ ID NO: 67237 - DNA, 20 bp, Artificial Sequence
  MKO10067237_A_NTCmmu_0832
  gRNA
ttgcagcaacggcgacggct

SEQ ID NO: 67238 - DNA, 20 bp, Artificial Sequence
  MKO10067238_A_NTCmmu_0833
  gRNA
gaaccttcgcgcaacttaac

SEQ ID NO: 67239 - DNA, 20 bp, Artificial Sequence
  MKO10067239_A_NTCmmu_0834
  gRNA
ttcgcgagtaaggtaggcat

SEQ ID NO: 67240 - DNA, 20 bp, Artificial Sequence
  MKO10067240_A_NTCmmu_0835
  gRNA
tcctaggcctgatttacccg

SEQ ID NO: 67241 - DNA, 20 bp, Artificial Sequence
  MKO10067241_A_NTCmmu_0836
  gRNA
gcccgagcggattcaccgcg

SEQ ID NO: 67242 - DNA, 20 bp, Artificial Sequence
  MKO10067242_A_NTCmmu_0837
  gRNA
accttgtgttcgacggtagg

SEQ ID NO: 67243 - DNA, 20 bp, Artificial Sequence
  MKO10067243_A_NTCmmu_0838
  gRNA
acgggtcaacttcttgccgc

SEQ ID NO: 67244 - DNA, 20 bp, Artificial Sequence
  MKO10067244_A_NTCmmu_0839
  gRNA
attcagtgtaccggtcaaat

SEQ ID NO: 67245 - DNA, 20 bp, Artificial Sequence
  MKO10067245_A_NTCmmu_0840
  gRNA
atcgtaaattacacgtacag

SEQ ID NO: 67246 - DNA, 20 bp, Artificial Sequence
  MKO10067246_A_NTCmmu_0841
  gRNA
caacacgtgcgagcgaactg

SEQ ID NO: 67247 - DNA, 20 bp, Artificial Sequence
  MKO10067247_A_NTCmmu_0842
  gRNA
cggacttaccgcagattata

SEQ ID NO: 67248 - DNA, 20 bp, Artificial Sequence
  MKO10067248_A_NTCmmu_0843
  gRNA
ctcaaacctccgttaccccg

SEQ ID NO: 67249 - DNA, 20 bp, Artificial Sequence
  MKO10067249_A_NTCmmu_0844
  gRNA
cgaatgcacaggctcgcggt

SEQ ID NO: 67250 - DNA, 20 bp, Artificial Sequence
  MKO10067250_A_NTCmmu_0845
  gRNA
agcgtgtcgagaacggcttg

SEQ ID NO: 67251 - DNA, 20 bp, Artificial Sequence
  MKO10067251_A_NTCmmu_0846
  gRNA
cgttatatctacactttgcg

SEQ ID NO: 67252 - DNA, 20 bp, Artificial Sequence
  MKO10067252_A_NTCmmu_0847
  gRNA
gctcgaaagtacgcttcctt

SEQ ID NO: 67253 - DNA, 20 bp, Artificial Sequence
  MKO10067253_A_NTCmmu_0848
  gRNA
tgtcccgacgatgtgtaaat

SEQ ID NO: 67254 - DNA, 20 bp, Artificial Sequence
  MKO10067254_A_NTCmmu_0849
  gRNA
aacccgccggaacaatcagc

SEQ ID NO: 67255 - DNA, 20 bp, Artificial Sequence
  MKO10067255_A_NTCmmu_0850
  gRNA
aacgttatagcttcgtctct

SEQ ID NO: 67256 - DNA, 20 bp, Artificial Sequence
  MKO10067256_A_NTCmmu_0851
  gRNA
catcgccgacgatcctctgg

SEQ ID NO: 67257 - DNA, 20 bp, Artificial Sequence
  MKO10067257_A_NTCmmu_0852
  gRNA
cccattcaacaccgtttgta

SEQ ID NO: 67258 - DNA, 20 bp, Artificial Sequence
  MKO10067258_A_NTCmmu_0853
  gRNA
atagcccggtttgcccgtct

SEQ ID NO: 67259 - DNA, 20 bp, Artificial Sequence
  MKO10067259_A_NTCmmu_0854
  gRNA
taagtgacacttcgtatcgt

SEQ ID NO: 67260 - DNA, 20 bp, Artificial Sequence
  MKO10067260_A_NTCmmu_0855
  gRNA
cggtcgattgtggagtaatg

SEQ ID NO: 67261 - DNA, 20 bp, Artificial Sequence
  MKO10067261_A_NTCmmu_0856
  gRNA
ctcggatggtgtgttgaacc

SEQ ID NO: 67262 - DNA, 20 bp, Artificial Sequence
  MKO10067262_A_NTCmmu_0857
  gRNA
ataacttactcgttacgact

SEQ ID NO: 67263 - DNA, 20 bp, Artificial Sequence
  MKO10067263_A_NTCmmu_0858
  gRNA
ggggttggatacgcgattta

SEQ ID NO: 67264 - DNA, 20 bp, Artificial Sequence
  MKO10067264_A_NTCmmu_0859
  gRNA
gggcaacgtcatctggcgac

SEQ ID NO: 67265 - DNA, 20 bp, Artificial Sequence
  MKO10067265_A_NTCmmu_0860
  gRNA
cgagcctcgtctttcatggg

SEQ ID NO: 67266 - DNA, 20 bp, Artificial Sequence
  MKO10067266_A_NTCmmu_0861
  gRNA
gacggtcccccctatgaaat

SEQ ID NO: 67267 - DNA, 20 bp, Artificial Sequence
  MKO10067267_A_NTCmmu_0862
  gRNA
catacccggtgtttcctagc

SEQ ID NO: 67268 - DNA, 20 bp, Artificial Sequence
  MKO10067268_A_NTCmmu_0863
  gRNA
accaccgtgccggggacgcg

SEQ ID NO: 67269 - DNA, 20 bp, Artificial Sequence
  MKO10067269_A_NTCmmu_0864
  gRNA
cgccagtataccacattcgt

SEQ ID NO: 67270 - DNA, 20 bp, Artificial Sequence
  MKO10067270_A_NTCmmu_0865
  gRNA
tcagtcagtcggccccctgc

SEQ ID NO: 67271 - DNA, 20 bp, Artificial Sequence
  MKO10067271_A_NTCmmu_0866
  gRNA
agtacagccgacgagtgcga

SEQ ID NO: 67272 - DNA, 20 bp, Artificial Sequence
  MKO10067272_A_NTCmmu_0867
  gRNA
tctggacgcgagatgacggg

SEQ ID NO: 67273 - DNA, 20 bp, Artificial Sequence
  MKO10067273_A_NTCmmu_0868
  gRNA
atgacacttacggtactcgt

SEQ ID NO: 67274 - DNA, 20 bp, Artificial Sequence
  MKO10067274_A_NTCmmu_0869
  gRNA
tcctacaccaccccggccgt

SEQ ID NO: 67275 - DNA, 20 bp, Artificial Sequence
  MKO10067275_A_NTCmmu_0870
  gRNA
aataccgtaccgactcagtg

SEQ ID NO: 67276 - DNA, 20 bp, Artificial Sequence
  MKO10067276_A_NTCmmu_0871
  gRNA
gatttctcgtatcggataac

SEQ ID NO: 67277 - DNA, 20 bp, Artificial Sequence
  MKO10067277_A_NTCmmu_0872
  gRNA
gaccgtcgggatccttaatt

SEQ ID NO: 67278 - DNA, 20 bp, Artificial Sequence
  MKO10067278_A_NTCmmu_0873
  gRNA
cgctacagtaatcgcaacga

SEQ ID NO: 67279 - DNA, 20 bp, Artificial Sequence
  MKO10067279_A_NTCmmu_0874
  gRNA
cgttgtttggagcccgtcca

SEQ ID NO: 67280 - DNA, 20 bp, Artificial Sequence
  MKO10067280_A_NTCmmu_0875
  gRNA
aaagacgtgcattcagcgag

SEQ ID NO: 67281 - DNA, 20 bp, Artificial Sequence
  MKO10067281_A_NTCmmu_0876
  gRNA
taattctttagtacgtgcaa

SEQ ID NO: 67282 - DNA, 20 bp, Artificial Sequence
  MKO10067282_A_NTCmmu_0877
  gRNA
agtcccacgtttgccgtcaa

SEQ ID NO: 67283 - DNA, 20 bp, Artificial Sequence
  MKO10067283_A_NTCmmu_0878
  gRNA
gccgttggaaaactccggcc

SEQ ID NO: 67284 - DNA, 20 bp, Artificial Sequence
  MKO10067284_A_NTCmmu_0879
  gRNA
atcgctaatttacgaaggcg

SEQ ID NO: 67285 - DNA, 20 bp, Artificial Sequence
  MKO10067285_A_NTCmmu_0880
  gRNA
ttaccgtggtacgtcaggtt

SEQ ID NO: 67286 - DNA, 20 bp, Artificial Sequence
  MKO10067286_A_NTCmmu_0881
  gRNA
atatcgaatgatgtccgcat

SEQ ID NO: 67287 - DNA, 20 bp, Artificial Sequence
  MKO10067287_A_NTCmmu_0882
  gRNA
tgttaatgccaacgggacat

SEQ ID NO: 67288 - DNA, 20 bp, Artificial Sequence
  MKO10067288_A_NTCmmu_0883
  gRNA
cacgggcagcgatctagttg

SEQ ID NO: 67289 - DNA, 20 bp, Artificial Sequence
  MKO10067289_A_NTCmmu_0884
  gRNA
atgatgtgatccttcgccga

SEQ ID NO: 67290 - DNA, 20 bp, Artificial Sequence
  MKO10067290_A_NTCmmu_0885
  gRNA
caaagtaactatctcgtcga

SEQ ID NO: 67291 - DNA, 20 bp, Artificial Sequence
  MKO10067291_A_NTCmmu_0886
  gRNA
ccaaggcgcacgctacgtgg

SEQ ID NO: 67292 - DNA, 20 bp, Artificial Sequence
  MKO10067292_A_NTCmmu_0887
  gRNA
tgtctatgtttggccacgca

SEQ ID NO: 67293 - DNA, 20 bp, Artificial Sequence
  MKO10067293_A_NTCmmu_0888
  gRNA
gctaaaaacaaccggcgcgg

SEQ ID NO: 67294 - DNA, 20 bp, Artificial Sequence
  MKO10067294_A_NTCmmu_0889
  gRNA
tagtaaaaaattcgccctcc

SEQ ID NO: 67295 - DNA, 20 bp, Artificial Sequence
  MKO10067295_A_NTCmmu_0890
  gRNA
ccaacctaaggcaatacggt

SEQ ID NO: 67296 - DNA, 20 bp, Artificial Sequence
  MKO10067296_A_NTCmmu_0891
  gRNA
ggcgggttaggccccgtttt

SEQ ID NO: 67297 - DNA, 20 bp, Artificial Sequence
  MKO10067297_A_NTCmmu_0892
  gRNA
aatcaaccgtgatagtctcg

SEQ ID NO: 67298 - DNA, 20 bp, Artificial Sequence
  MKO10067298_A_NTCmmu_0893
  gRNA
cgttgcgaatccaccctatt

SEQ ID NO: 67299 - DNA, 20 bp, Artificial Sequence
  MKO10067299_A_NTCmmu_0894
  gRNA
tcacaacccccgactatcgc

SEQ ID NO: 67300 - DNA, 20 bp, Artificial Sequence
  MKO10067300_A_NTCmmu_0895
  gRNA
gtcacaaaaaacgagcgtta

SEQ ID NO: 67301 - DNA, 20 bp, Artificial Sequence
  MKO10067301_A_NTCmmu_0896
  gRNA
gcaatagtcgcacgggtgat

SEQ ID NO: 67302 - DNA, 20 bp, Artificial Sequence
  MKO10067302_A_NTCmmu_0897
  gRNA
ggcagcctaatcagtcgagg

SEQ ID NO: 67303 - DNA, 20 bp, Artificial Sequence
  MKO10067303_A_NTCmmu_0898
  gRNA
tcaatctgcggtgactcgtt

SEQ ID NO: 67304 - DNA, 20 bp, Artificial Sequence
  MKO10067304_A_NTCmmu_0899
  gRNA
gcgtgacgtcccaccctgag

SEQ ID NO: 67305 - DNA, 20 bp, Artificial Sequence
  MKO10067305_A_NTCmmu_0900
  gRNA
gtcgcgtatcctgacgacac

SEQ ID NO: 67306 - DNA, 20 bp, Artificial Sequence
  MKO10067306_A_NTCmmu_0901
  gRNA
gcatgcgctcgcgtggactg

SEQ ID NO: 67307 - DNA, 20 bp, Artificial Sequence
  MKO10067307_A_NTCmmu_0902
  gRNA
gccgcaacgttagatgtata

SEQ ID NO: 67308 - DNA, 20 bp, Artificial Sequence
  MKO10067308_A_NTCmmu_0903
  gRNA
cccggtcggggatactaact

SEQ ID NO: 67309 - DNA, 20 bp, Artificial Sequence
  MKO10067309_A_NTCmmu_0904
  gRNA
tcagcagaattgggcccgta

SEQ ID NO: 67310 - DNA, 20 bp, Artificial Sequence
  MKO10067310_A_NTCmmu_0905
  gRNA
tgccttcagtcgaccgttac

SEQ ID NO: 67311 - DNA, 20 bp, Artificial Sequence
  MKO10067311_A_NTCmmu_0906
  gRNA
gacagttggataaccgtgtc

SEQ ID NO: 67312 - DNA, 20 bp, Artificial Sequence
  MKO10067312_A_NTCmmu_0907
  gRNA
atggacccttcagtgcggta

SEQ ID NO: 67313 - DNA, 20 bp, Artificial Sequence
  MKO10067313_A_NTCmmu_0908
  gRNA
cgagagaatcgtccgtcata

SEQ ID NO: 67314 - DNA, 20 bp, Artificial Sequence
  MKO10067314_A_NTCmmu_0909
  gRNA
accgtacaagactcgctcca

SEQ ID NO: 67315 - DNA, 20 bp, Artificial Sequence
  MKO10067315_A_NTCmmu_0910
  gRNA
ccgaccgtgtgagagtacgt

SEQ ID NO: 67316 - DNA, 20 bp, Artificial Sequence
  MKO10067316_A_NTCmmu_0911
  gRNA
ggtaacataggcggcgatct

SEQ ID NO: 67317 - DNA, 20 bp, Artificial Sequence
  MKO10067317_A_NTCmmu_0912
  gRNA
ctctaataaaccgcacaagc

SEQ ID NO: 67318 - DNA, 20 bp, Artificial Sequence
  MKO10067318_A_NTCmmu_0913
  gRNA
atacgcatagatcggtaagc

SEQ ID NO: 67319 - DNA, 20 bp, Artificial Sequence
  MKO10067319_A_NTCmmu_0914
  gRNA
gcgattatcagtagtccacg

SEQ ID NO: 67320 - DNA, 20 bp, Artificial Sequence
  MKO10067320_A_NTCmmu_0915
  gRNA
tggttggcatgtcgccagcg

SEQ ID NO: 67321 - DNA, 20 bp, Artificial Sequence
  MKO10067321_A_NTCmmu_0916
  gRNA
gggctagtgcgttgttacga

SEQ ID NO: 67322 - DNA, 20 bp, Artificial Sequence
  MKO10067322_A_NTCmmu_0917
  gRNA
aagcctacttcaccggtcgg

SEQ ID NO: 67323 - DNA, 20 bp, Artificial Sequence
  MKO10067323_A_NTCmmu_0918
  gRNA
cgacgaccttggattggcag

SEQ ID NO: 67324 - DNA, 20 bp, Artificial Sequence
  MKO10067324_A_NTCmmu_0919
  gRNA
tcgctgagcaacgaagcaac

SEQ ID NO: 67325 - DNA, 20 bp, Artificial Sequence
  MKO10067325_A_NTCmmu_0920
  gRNA
ccaacatcggggcgcataat

SEQ ID NO: 67326 - DNA, 20 bp, Artificial Sequence
  MKO10067326_A_NTCmmu_0921
  gRNA
agcgttcgcagctggtcaac

SEQ ID NO: 67327 - DNA, 20 bp, Artificial Sequence
  MKO10067327_A_NTCmmu_0922
  gRNA
aagtccccttcgggaactcc

SEQ ID NO: 67328 - DNA, 20 bp, Artificial Sequence
  MKO10067328_A_NTCmmu_0923
  gRNA
catgggaccccccctcacgt

SEQ ID NO: 67329 - DNA, 20 bp, Artificial Sequence
  MKO10067329_A_NTCmmu_0924
  gRNA
cgtcgcatgttgttgctcat

SEQ ID NO: 67330 - DNA, 20 bp, Artificial Sequence
  MKO10067330_A_NTCmmu_0925
  gRNA
gctccaggtgcgagataggc

SEQ ID NO: 67331 - DNA, 20 bp, Artificial Sequence
  MKO10067331_A_NTCmmu_0926
  gRNA
tcggactatagcgtgaacgt

SEQ ID NO: 67332 - DNA, 20 bp, Artificial Sequence
  MKO10067332_A_NTCmmu_0927
  gRNA
gggtcgcaccccaatagctg

SEQ ID NO: 67333 - DNA, 20 bp, Artificial Sequence
  MKO10067333_A_NTCmmu_0928
  gRNA
aagactcctacgtatcgagc

SEQ ID NO: 67334 - DNA, 20 bp, Artificial Sequence
  MKO10067334_A_NTCmmu_0929
  gRNA
gccagcctcggtataactcg

SEQ ID NO: 67335 - DNA, 20 bp, Artificial Sequence
  MKO10067335_A_NTCmmu_0930
  gRNA
cgtcatggcaagatcgataa

SEQ ID NO: 67336 - DNA, 20 bp, Artificial Sequence
  MKO10067336_A_NTCmmu_0931
  gRNA
ctaatacactccttctccgc

SEQ ID NO: 67337 - DNA, 20 bp, Artificial Sequence
  MKO10067337_A_NTCmmu_0932
  gRNA
gtcgtggggcacgatgcgta

SEQ ID NO: 67338 - DNA, 20 bp, Artificial Sequence
  MKO10067338_A_NTCmmu_0933
  gRNA
tcgagtcttgactcaacgct

SEQ ID NO: 67339 - DNA, 20 bp, Artificial Sequence
  MKO10067339_A_NTCmmu_0934
  gRNA
ctcggagattcgttagaaga

SEQ ID NO: 67340 - DNA, 20 bp, Artificial Sequence
  MKO10067340_A_NTCmmu_0935
  gRNA
ttgtcgctaactcagaatag

SEQ ID NO: 67341 - DNA, 20 bp, Artificial Sequence
  MKO10067341_A_NTCmmu_0936
  gRNA
aattctgagattccgcggct

SEQ ID NO: 67342 - DNA, 20 bp, Artificial Sequence
  MKO10067342_A_NTCmmu_0937
  gRNA
gattccgtatagtaatcgag

SEQ ID NO: 67343 - DNA, 20 bp, Artificial Sequence
  MKO10067343_A_NTCmmu_0938
  gRNA
gatagaacaacagcggtgca

SEQ ID NO: 67344 - DNA, 20 bp, Artificial Sequence
  MKO10067344_A_NTCmmu_0939
  gRNA
cggtaaggtcggtctccatc

SEQ ID NO: 67345 - DNA, 20 bp, Artificial Sequence
  MKO10067345_A_NTCmmu_0940
  gRNA
atgacctcttcgttcgagag

SEQ ID NO: 67346 - DNA, 20 bp, Artificial Sequence
  MKO10067346_A_NTCmmu_0941
  gRNA
tgatccccgtcccgaagtta

SEQ ID NO: 67347 - DNA, 20 bp, Artificial Sequence
  MKO10067347_A_NTCmmu_0942
  gRNA
tgctttaccgcgttgggtaa

SEQ ID NO: 67348 - DNA, 20 bp, Artificial Sequence
  MKO10067348_A_NTCmmu_0943
  gRNA
atcttaaccagcgcatcccg

SEQ ID NO: 67349 - DNA, 20 bp, Artificial Sequence
  MKO10067349_A_NTCmmu_0944
  gRNA
gcgctactcccaccgatgtt

SEQ ID NO: 67350 - DNA, 20 bp, Artificial Sequence
  MKO10067350_A_NTCmmu_0945
  gRNA
cctgctattctcgcatgcga

SEQ ID NO: 67351 - DNA, 20 bp, Artificial Sequence
  MKO10067351_A_NTCmmu_0946
  gRNA
gagattcgatactgcggtca

SEQ ID NO: 67352 - DNA, 20 bp, Artificial Sequence
  MKO10067352_A_NTCmmu_0947
  gRNA
tcgctcattaggagcgctat

SEQ ID NO: 67353 - DNA, 20 bp, Artificial Sequence
  MKO10067353_A_NTCmmu_0948
  gRNA
cctccttcagttcgatctgg

SEQ ID NO: 67354 - DNA, 20 bp, Artificial Sequence
  MKO10067354_A_NTCmmu_0949
  gRNA
gcgctcgttcgagacgatct

SEQ ID NO: 67355 - DNA, 20 bp, Artificial Sequence
  MKO10067355_A_NTCmmu_0950
  gRNA
atccacgctccgcggtactt

SEQ ID NO: 67356 - DNA, 20 bp, Artificial Sequence
  MKO10067356_A_NTCmmu_0951
  gRNA
gggtagcaccccgccgacac

SEQ ID NO: 67357 - DNA, 20 bp, Artificial Sequence
  MKO10067357_A_NTCmmu_0952
  gRNA
tcacatgacactcgttacga

SEQ ID NO: 67358 - DNA, 20 bp, Artificial Sequence
  MKO10067358_A_NTCmmu_0953
  gRNA
gcgcctagggttccgactca

SEQ ID NO: 67359 - DNA, 20 bp, Artificial Sequence
  MKO10067359_A_NTCmmu_0954
  gRNA
ctacgagattcggctaagct

SEQ ID NO: 67360 - DNA, 20 bp, Artificial Sequence
  MKO10067360_A_NTCmmu_0955
  gRNA
tacggacgtcgaattgagca

SEQ ID NO: 67361 - DNA, 20 bp, Artificial Sequence
  MKO10067361_A_NTCmmu_0956
  gRNA
actaaggagtcccggtccga

SEQ ID NO: 67362 - DNA, 20 bp, Artificial Sequence
  MKO10067362_A_NTCmmu_0957
  gRNA
tgccctgcgtccgctacgtc

SEQ ID NO: 67363 - DNA, 20 bp, Artificial Sequence
  MKO10067363_A_NTCmmu_0958
  gRNA
ctggggccgctgaaccgccg

SEQ ID NO: 67364 - DNA, 20 bp, Artificial Sequence
  MKO10067364_A_NTCmmu_0959
  gRNA
agactcgtgtgccacgagga

SEQ ID NO: 67365 - DNA, 20 bp, Artificial Sequence
  MKO10067365_A_NTCmmu_0960
  gRNA
tcgcttctgattgatccacg

SEQ ID NO: 67366 - DNA, 20 bp, Artificial Sequence
  MKO10067366_A_NTCmmu_0961
  gRNA
ttcggctggtgtgcgttcac

SEQ ID NO: 67367 - DNA, 20 bp, Artificial Sequence
  MKO10067367_A_NTCmmu_0962
  gRNA
ctacccccgctgtgcaacgt

SEQ ID NO: 67368 - DNA, 20 bp, Artificial Sequence
  MKO10067368_A_NTCmmu_0963
  gRNA
cacctattcccctccgcaac

SEQ ID NO: 67369 - DNA, 20 bp, Artificial Sequence
  MKO10067369_A_NTCmmu_0964
  gRNA
ggtctagataatcttaccga

SEQ ID NO: 67370 - DNA, 20 bp, Artificial Sequence
  MKO10067370_A_NTCmmu_0965
  gRNA
agcgccataggacgccaaac

SEQ ID NO: 67371 - DNA, 20 bp, Artificial Sequence
  MKO10067371_A_NTCmmu_0966
  gRNA
tcgttgtgtcgacatccgca

SEQ ID NO: 67372 - DNA, 20 bp, Artificial Sequence
  MKO10067372_A_NTCmmu_0967
  gRNA
tacatcgaacaaccaaccga

SEQ ID NO: 67373 - DNA, 20 bp, Artificial Sequence
  MKO10067373_A_NTCmmu_0968
  gRNA
ttgcacccccagttcgttgc

SEQ ID NO: 67374 - DNA, 20 bp, Artificial Sequence
  MKO10067374_A_NTCmmu_0969
  gRNA
ctcgtatcttttcccacggc

SEQ ID NO: 67375 - DNA, 20 bp, Artificial Sequence
  MKO10067375_A_NTCmmu_0970
  gRNA
acccagattcgcattcggat

SEQ ID NO: 67376 - DNA, 20 bp, Artificial Sequence
  MKO10067376_A_NTCmmu_0971
  gRNA
cgcctagtatcttcggggat

SEQ ID NO: 67377 - DNA, 20 bp, Artificial Sequence
  MKO10067377_A_NTCmmu_0972
  gRNA
aagggtaagtacagtatcgt

SEQ ID NO: 67378 - DNA, 20 bp, Artificial Sequence
  MKO10067378_A_NTCmmu_0973
  gRNA
tgcagtagtcgcggataggc

SEQ ID NO: 67379 - DNA, 20 bp, Artificial Sequence
  MKO10067379_A_NTCmmu_0974
  gRNA
cgcacttctagtagctgtcg

SEQ ID NO: 67380 - DNA, 20 bp, Artificial Sequence
  MKO10067380_A_NTCmmu_0975
  gRNA
gtgcgcgcgtatagaaaaaa

SEQ ID NO: 67381 - DNA, 20 bp, Artificial Sequence
  MKO10067381_A_NTCmmu_0976
  gRNA
gcgtggtactcacatcgcga

SEQ ID NO: 67382 - DNA, 20 bp, Artificial Sequence
  MKO10067382_A_NTCmmu_0977
  gRNA
ggcccgaagggtcacaagcg

SEQ ID NO: 67383 - DNA, 20 bp, Artificial Sequence
  MKO10067383_A_NTCmmu_0978
  gRNA
ccgataccattgtcaccaat

SEQ ID NO: 67384 - DNA, 20 bp, Artificial Sequence
  MKO10067384_A_NTCmmu_0979
  gRNA
cctccagtagcgtcattaac

SEQ ID NO: 67385 - DNA, 20 bp, Artificial Sequence
  MKO10067385_A_NTCmmu_0980
  gRNA
gcgtgagattcgttgctcga

SEQ ID NO: 67386 - DNA, 20 bp, Artificial Sequence
  MKO10067386_A_NTCmmu_0981
  gRNA
gaggcgggctcttctatcgt

SEQ ID NO: 67387 - DNA, 20 bp, Artificial Sequence
  MKO10067387_A_NTCmmu_0982
  gRNA
ttcgagattttaatagcgca

SEQ ID NO: 67388 - DNA, 20 bp, Artificial Sequence
  MKO10067388_A_NTCmmu_0983
  gRNA
accgtctgatgttcccggct

SEQ ID NO: 67389 - DNA, 20 bp, Artificial Sequence
  MKO10067389_A_NTCmmu_0984
  gRNA
ctcgtgaacctgttcgcgca

SEQ ID NO: 67390 - DNA, 20 bp, Artificial Sequence
  MKO10067390_A_NTCmmu_0985
  gRNA
tgagggctcaatacttccgc

SEQ ID NO: 67391 - DNA, 20 bp, Artificial Sequence
  MKO10067391_A_NTCmmu_0986
  gRNA
gcgacaagcgttgagttcgc

SEQ ID NO: 67392 - DNA, 20 bp, Artificial Sequence
  MKO10067392_A_NTCmmu_0987
  gRNA
aactcctcatcgtacgctaa

SEQ ID NO: 67393 - DNA, 20 bp, Artificial Sequence
  MKO10067393_A_NTCmmu_0988
  gRNA
cacgaataactacaggttgc

SEQ ID NO: 67394 - DNA, 20 bp, Artificial Sequence
  MKO10067394_A_NTCmmu_0989
  gRNA
gaggacctaggttcccggat

SEQ ID NO: 67395 - DNA, 20 bp, Artificial Sequence
  MKO10067395_A_NTCmmu_0990
  gRNA
taaaaacgctggcggcctag

SEQ ID NO: 67396 - DNA, 20 bp, Artificial Sequence
  MKO10067396_A_NTCmmu_0991
  gRNA
gttaagtagatcggtgacat

SEQ ID NO: 67397 - DNA, 20 bp, Artificial Sequence
  MKO10067397_A_NTCmmu_0992
  gRNA
ggcgtcgtaacaagaacttg

SEQ ID NO: 67398 - DNA, 20 bp, Artificial Sequence
  MKO10067398_A_NTCmmu_0993
  gRNA
gtgcgaattaaccgttagga

SEQ ID NO: 67399 - DNA, 20 bp, Artificial Sequence
  MKO10067399_A_NTCmmu_0994
  gRNA
gtagcttcatgtccggtcgg

SEQ ID NO: 67400 - DNA, 20 bp, Artificial Sequence
  MKO10067400_A_NTCmmu_0995
  gRNA
ggccagtgtggccgttacgc

SEQ ID NO: 67401 - DNA, 20 bp, Artificial Sequence
  MKO10067401_A_NTCmmu_0996
  gRNA
cttcacgccttggaccgata

SEQ ID NO: 67402 - DNA, 20 bp, Artificial Sequence
  MKO10067402_A_NTCmmu_0997
  gRNA
ataacttatgcgcttcgggg

SEQ ID NO: 67403 - DNA, 20 bp, Artificial Sequence
  MKO10067403_A_NTCmmu_0998
  gRNA
acccacgtatgtactcggga

SEQ ID NO: 67404 - DNA, 20 bp, Artificial Sequence
  MKO10067404_A_NTCmmu_0999
  gRNA
gaactcgttaggccgtgaag

SEQ ID NO: 67405 - DNA, 20 bp, Artificial Sequence
  MKO10067405_A_NTCmmu_1000
  gRNA
cgaggcttaacgccagattc

SEQ ID NO: 67406 - DNA, 20 bp, Artificial Sequence
  MKO10067406_B_0610007P14Rik
  gRNA
tgtctaaggtttctcaatcc

SEQ ID NO: 67407 - DNA, 20 bp, Artificial Sequence
  MKO10067407_B_0610007P14Rik
  gRNA
cagtgaatggcctccaagcc

SEQ ID NO: 67408 - DNA, 20 bp, Artificial Sequence
  MKO10067408_B_0610007P14Rik
  gRNA
ggtgcttacttgctaccatc

SEQ ID NO: 67409 - DNA, 20 bp, Artificial Sequence
  MKO10067409_B_0610009B22Rik
  gRNA
acctcgtcgacgaaaacatg

SEQ ID NO: 67410 - DNA, 20 bp, Artificial Sequence
  MKO10067410_B_0610009B22Rik
  gRNA
gttcatagctcatgctgctc

SEQ ID NO: 67411 - DNA, 20 bp, Artificial Sequence
  MKO10067411_B_0610009B22Rik
  gRNA
gagcagcatgagctatgaac

SEQ ID NO: 67412 - DNA, 20 bp, Artificial Sequence
  MKO10067412_B_0610009D07Rik
  gRNA
cgtttgtaacagataccttg

SEQ ID NO: 67413 - DNA, 20 bp, Artificial Sequence
  MKO10067413_B_0610009D07Rik
  gRNA
cgccaagatggcgatgcaag

SEQ ID NO: 67414 - DNA, 20 bp, Artificial Sequence
  MKO10067414_B_0610009D07Rik
  gRNA
gtggctgtcattcacttggg

SEQ ID NO: 67415 - DNA, 20 bp, Artificial Sequence
  MKO10067415_B_0610009O20Rik
  gRNA
cacagctcttccccgcctgc

SEQ ID NO: 67416 - DNA, 20 bp, Artificial Sequence
  MKO10067416_B_0610009O20Rik
  gRNA
gatccacttccacgcccctc

SEQ ID NO: 67417 - DNA, 20 bp, Artificial Sequence
  MKO10067417_B_0610009O20Rik
  gRNA
ttcggaggcatgttcttccc

SEQ ID NO: 67418 - DNA, 20 bp, Artificial Sequence
  MKO10067418_B_0610010B08Rik
  gRNA
actgggtttaggttacattt

SEQ ID NO: 67419 - DNA, 20 bp, Artificial Sequence
  MKO10067419_B_0610010B08Rik
  gRNA
ctcctgtatatgttcgctta

SEQ ID NO: 67420 - DNA, 20 bp, Artificial Sequence
  MKO10067420_B_0610010B08Rik
  gRNA
ccctctgagtttattcaatg

SEQ ID NO: 67421 - DNA, 20 bp, Artificial Sequence
  MKO10067421_B_0610010F05Rik
  gRNA
atatgttaaacggaacacta

SEQ ID NO: 67422 - DNA, 20 bp, Artificial Sequence
  MKO10067422_B_0610010F05Rik
  gRNA
caaccagtataaccctttaa

SEQ ID NO: 67423 - DNA, 20 bp, Artificial Sequence
  MKO10067423_B_0610010F05Rik
  gRNA
gacatagtatagctaccaca

SEQ ID NO: 67424 - DNA, 20 bp, Artificial Sequence
  MKO10067424_B_0610010K14Rik
  gRNA
catgacgtcagcgtccacca

SEQ ID NO: 67425 - DNA, 20 bp, Artificial Sequence
  MKO10067425_B_0610010K14Rik
  gRNA
gacaccggacgtcatcttct

SEQ ID NO: 67426 - DNA, 20 bp, Artificial Sequence
  MKO10067426_B_0610010K14Rik
  gRNA
ctgctgggtggaggggcgtt

SEQ ID NO: 67427 - DNA, 20 bp, Artificial Sequence
  MKO10067427_B_0610011F06Rik
  gRNA
ggtcaaagtccacgttgctc

SEQ ID NO: 67428 - DNA, 20 bp, Artificial Sequence
  MKO10067428_B_0610011F06Rik
  gRNA
gtgtcacgaagcccccactc

SEQ ID NO: 67429 - DNA, 20 bp, Artificial Sequence
  MKO10067429_B_0610011F06Rik
  gRNA
gcttcgtgacacagtccttc

SEQ ID NO: 67430 - DNA, 20 bp, Artificial Sequence
  MKO10067430_B_0610012H03Rik
  gRNA
attagcacagtttgacactc

SEQ ID NO: 67431 - DNA, 20 bp, Artificial Sequence
  MKO10067431_B_0610012H03Rik
  gRNA
atttctcagcagccgcctca

SEQ ID NO: 67432 - DNA, 20 bp, Artificial Sequence
  MKO10067432_B_0610012H03Rik
  gRNA
ctgctcaaaagatggccatg

SEQ ID NO: 67433 - DNA, 20 bp, Artificial Sequence
  MKO10067433_B_0610030E20Rik
  gRNA
cagggacgactacgacaaga

SEQ ID NO: 67434 - DNA, 20 bp, Artificial Sequence
  MKO10067434_B_0610030E20Rik
  gRNA
ggccctcagatcgcgaatcc

SEQ ID NO: 67435 - DNA, 20 bp, Artificial Sequence
  MKO10067435_B_0610030E20Rik
  gRNA
gtgtacctgccgcgccaccg

SEQ ID NO: 67436 - DNA, 20 bp, Artificial Sequence
  MKO10067436_B_0610031J06Rik
  gRNA
cgtgttccaggtatctatgg

SEQ ID NO: 67437 - DNA, 20 bp, Artificial Sequence
  MKO10067437_B_0610031J06Rik
  gRNA
cttgaacaattggtgaatga

SEQ ID NO: 67438 - DNA, 20 bp, Artificial Sequence
  MKO10067438_B_0610031J06Rik
  gRNA
atatgcacctgccgtcttcc

SEQ ID NO: 67439 - DNA, 20 bp, Artificial Sequence
  MKO10067439_B_0610037L13Rik
  gRNA
cagagaagtggcaatacatc

SEQ ID NO: 67440 - DNA, 20 bp, Artificial Sequence
  MKO10067440_B_0610037L13Rik
  gRNA
accagttgacttccagcccc

SEQ ID NO: 67441 - DNA, 20 bp, Artificial Sequence
  MKO10067441_B_0610037L13Rik
  gRNA
acttacgttgtaagccttga

SEQ ID NO: 67442 - DNA, 20 bp, Artificial Sequence
  MKO10067442_B_0610040J01Rik
  gRNA
tcccactcaccctacgccag

SEQ ID NO: 67443 - DNA, 20 bp, Artificial Sequence
  MKO10067443_B_0610040J01Rik
  gRNA
gcattagaagctgctaccgc

SEQ ID NO: 67444 - DNA, 20 bp, Artificial Sequence
  MKO10067444_B_0610040J01Rik
  gRNA
tcacttccagaatcagccgc

SEQ ID NO: 67445 - DNA, 20 bp, Artificial Sequence
  MKO10067445_B_mmuMarch1
  gRNA
cccaggatctgtcactgcga

SEQ ID NO: 67446 - DNA, 20 bp, Artificial Sequence
  MKO10067446_B_mmuMarch1
  gRNA
caccagcgtggaggtttgag

SEQ ID NO: 67447 - DNA, 20 bp, Artificial Sequence
  MKO10067447_B_mmuMarch1
  gRNA
tgcctctcaaacctccacgc

SEQ ID NO: 67448 - DNA, 20 bp, Artificial Sequence
  MKO10067448_B_mmuSep1
  gRNA
tgacagacttgcgatgcagc

SEQ ID NO: 67449 - DNA, 20 bp, Artificial Sequence
  MKO10067449_B_mmuSep1
  gRNA
gcatcgcaagtctgtcaaga

SEQ ID NO: 67450 - DNA, 20 bp, Artificial Sequence
  MKO10067450_B_mmuSep1
  gRNA
aaactctgaccattgagcgc

SEQ ID NO: 67451 - DNA, 20 bp, Artificial Sequence
  MKO10067451_B_mmuMarch10
  gRNA
tcagcgatgttcagtatcta

SEQ ID NO: 67452 - DNA, 20 bp, Artificial Sequence
  MKO10067452_B_mmuMarch10
  gRNA
taaggtggactcagaatatc

SEQ ID NO: 67453 - DNA, 20 bp, Artificial Sequence
  MKO10067453_B_mmuMarch10
  gRNA
aagccccctgagccccttgc

SEQ ID NO: 67454 - DNA, 20 bp, Artificial Sequence
  MKO10067454_B_mmuSep10
  gRNA
gttcattgctccattgatct

SEQ ID NO: 67455 - DNA, 20 bp, Artificial Sequence
  MKO10067455_B_mmuSep10
  gRNA
tcaagcgaacattgctttcc

SEQ ID NO: 67456 - DNA, 20 bp, Artificial Sequence
  MKO10067456_B_mmuSep10
  gRNA
ccacacatagacaaggagcg

SEQ ID NO: 67457 - DNA, 20 bp, Artificial Sequence
  MKO10067457_B_mmuMarch11
  gRNA
ttaaatccttgccgatgtga

SEQ ID NO: 67458 - DNA, 20 bp, Artificial Sequence
  MKO10067458_B_mmuMarch11
  gRNA
atcgaacagacccatcacat

SEQ ID NO: 67459 - DNA, 20 bp, Artificial Sequence
  MKO10067459_B_mmuMarch11
  gRNA
tatcttccgatacatcttca

SEQ ID NO: 67460 - DNA, 20 bp, Artificial Sequence
  MKO10067460_B_mmuSep11
  gRNA
cctttactttatcgccccca

SEQ ID NO: 67461 - DNA, 20 bp, Artificial Sequence
  MKO10067461_B_mmuSep11
  gRNA
gcgtcaatgtattccactat

SEQ ID NO: 67462 - DNA, 20 bp, Artificial Sequence
  MKO10067462_B_mmuSep11
  gRNA
tgacagtctgcccgaccagc

SEQ ID NO: 67463 - DNA, 20 bp, Artificial Sequence
  MKO10067463_B_1100001G20Rik
  gRNA
gctaggagccttccttctgt

SEQ ID NO: 67464 - DNA, 20 bp, Artificial Sequence
  MKO10067464_B_1100001G20Rik
  gRNA
accacggcagagctcagcac

SEQ ID NO: 67465 - DNA, 20 bp, Artificial Sequence
  MKO10067465_B_1100001G20Rik
  gRNA
tgatgagggacaccaacaga

SEQ ID NO: 67466 - DNA, 20 bp, Artificial Sequence
  MKO10067466_B_1110001A16Rik
  gRNA
caagaaatttccattcattt

SEQ ID NO: 67467 - DNA, 20 bp, Artificial Sequence
  MKO10067467_B_1110001A16Rik
  gRNA
tggagttagagagaaagatg

SEQ ID NO: 67468 - DNA, 20 bp, Artificial Sequence
  MKO10067468_B_1110001A16Rik
  gRNA
atacattccagactgttcaa

SEQ ID NO: 67469 - DNA, 20 bp, Artificial Sequence
  MKO10067469_B_1110001J03Rik
  gRNA
ctccagttgccccgtcagcc

SEQ ID NO: 67470 - DNA, 20 bp, Artificial Sequence
  MKO10067470_B_1110001J03Rik
  gRNA
gatgccgtacccgatgtgct

SEQ ID NO: 67471 - DNA, 20 bp, Artificial Sequence
  MKO10067471_B_1110001J03Rik
  gRNA
agccttaacgaggtaccggt

SEQ ID NO: 67472 - DNA, 20 bp, Artificial Sequence
  MKO10067472_B_1110004E09Rik
  gRNA
gaccttagacactatcgcct

SEQ ID NO: 67473 - DNA, 20 bp, Artificial Sequence
  MKO10067473_B_1110004E09Rik
  gRNA
cgtaaaaacagaccctccac

SEQ ID NO: 67474 - DNA, 20 bp, Artificial Sequence
  MKO10067474_B_1110004E09Rik
  gRNA
tttctgccccctaatatgca

SEQ ID NO: 67475 - DNA, 20 bp, Artificial Sequence
  MKO10067475_B_1110004F10Rik
  gRNA
gtctcacctcactgaagccg

SEQ ID NO: 67476 - DNA, 20 bp, Artificial Sequence
  MKO10067476_B_1110004F10Rik
  gRNA
ttcttacagaaagaacacac

SEQ ID NO: 67477 - DNA, 20 bp, Artificial Sequence
  MKO10067477_B_1110004F10Rik
  gRNA
acaaaagttcttgagactca

SEQ ID NO: 67478 - DNA, 20 bp, Artificial Sequence
  MKO10067478_B_1110007C09Rik
  gRNA
cgaccctgtcccgtcaggaa

SEQ ID NO: 67479 - DNA, 20 bp, Artificial Sequence
  MKO10067479_B_1110007C09Rik
  gRNA
agagccgtgagctgagtgac

SEQ ID NO: 67480 - DNA, 20 bp, Artificial Sequence
  MKO10067480_B_1110007C09Rik
  gRNA
ggagggccaggcccgctgcc

SEQ ID NO: 67481 - DNA, 20 bp, Artificial Sequence
  MKO10067481_B_1110008F13Rik
  gRNA
agggccccgttggccagctg

SEQ ID NO: 67482 - DNA, 20 bp, Artificial Sequence
  MKO10067482_B_1110008F13Rik
  gRNA
tattcccaagaagcctcgca

SEQ ID NO: 67483 - DNA, 20 bp, Artificial Sequence
  MKO10067483_B_1110008F13Rik
  gRNA
aaaccagagcgatgatctgt

SEQ ID NO: 67484 - DNA, 20 bp, Artificial Sequence
  MKO10067484_B_1110008J03Rik
  gRNA
agagagcccttcggtggtcc

SEQ ID NO: 67485 - DNA, 20 bp, Artificial Sequence
  MKO10067485_B_1110008J03Rik
  gRNA
accgcagtcccaccagctac

SEQ ID NO: 67486 - DNA, 20 bp, Artificial Sequence
  MKO10067486_B_1110008J03Rik
  gRNA
agtccccggcctaacacatc

SEQ ID NO: 67487 - DNA, 20 bp, Artificial Sequence
  MKO10067487_B_1110008L16Rik
  gRNA
ccagcaactgtagattctgc

SEQ ID NO: 67488 - DNA, 20 bp, Artificial Sequence
  MKO10067488_B_1110008L16Rik
  gRNA
gtagtatccctggaagacaa

SEQ ID NO: 67489 - DNA, 20 bp, Artificial Sequence
  MKO10067489_B_1110008L16Rik
  gRNA
ccagcagaatctacagttgc

SEQ ID NO: 67490 - DNA, 20 bp, Artificial Sequence
  MKO10067490_B_1110008P14Rik
  gRNA
cctaggcatgccggtggatg

SEQ ID NO: 67491 - DNA, 20 bp, Artificial Sequence
  MKO10067491_B_1110008P14Rik
  gRNA
ccttccgtgcccgcatccac

SEQ ID NO: 67492 - DNA, 20 bp, Artificial Sequence
  MKO10067492_B_1110008P14Rik
  gRNA
agagttgatctgatccaaca

SEQ ID NO: 67493 - DNA, 20 bp, Artificial Sequence
  MKO10067493_B_1110012L19Rik
  gRNA
tgccatccacattgctcaca

SEQ ID NO: 67494 - DNA, 20 bp, Artificial Sequence
  MKO10067494_B_1110012L19Rik
  gRNA
tcaagactcttgagacacgt

SEQ ID NO: 67495 - DNA, 20 bp, Artificial Sequence
  MKO10067495_B_1110012L19Rik
  gRNA
agtttccctgcctatccttc

SEQ ID NO: 67496 - DNA, 20 bp, Artificial Sequence
  MKO10067496_B_1110017D15Rik
  gRNA
gtcagttcgaggaatgccgt

SEQ ID NO: 67497 - DNA, 20 bp, Artificial Sequence
  MKO10067497_B_1110017D15Rik
  gRNA
gatgaccaaatgtgccgcac

SEQ ID NO: 67498 - DNA, 20 bp, Artificial Sequence
  MKO10067498_B_1110017D15Rik
  gRNA
tcagactatgcaccgccacg

SEQ ID NO: 67499 - DNA, 20 bp, Artificial Sequence
  MKO10067499_B_1110025L11Rik
  gRNA
tactatggcggcagaggcta

SEQ ID NO: 67500 - DNA, 20 bp, Artificial Sequence
  MKO10067500_B_1110025L11Rik
  gRNA
aggagccatagccacagccc

SEQ ID NO: 67501 - DNA, 20 bp, Artificial Sequence
  MKO10067501_B_1110025L11Rik
  gRNA
ctgctgtggctatggaggcc

SEQ ID NO: 67502 - DNA, 20 bp, Artificial Sequence
  MKO10067502_B_1110032A03Rik
  gRNA
cacctactatgtgttgattg

SEQ ID NO: 67503 - DNA, 20 bp, Artificial Sequence
  MKO10067503_B_1110032A03Rik
  gRNA
gatttaaacgagagcctcac

SEQ ID NO: 67504 - DNA, 20 bp, Artificial Sequence
  MKO10067504_B_1110032A03Rik
  gRNA
tccaagcgtgagccagtctt

SEQ ID NO: 67505 - DNA, 20 bp, Artificial Sequence
  MKO10067505_B_1110032F04Rik
  gRNA
tggcgttggtggcgccctcg

SEQ ID NO: 67506 - DNA, 20 bp, Artificial Sequence
  MKO10067506_B_1110032F04Rik
  gRNA
tggccacgcgggtacctgcg

SEQ ID NO: 67507 - DNA, 20 bp, Artificial Sequence
  MKO10067507_B_1110032F04Rik
  gRNA
gggtgcgggaccgccgggga

SEQ ID NO: 67508 - DNA, 20 bp, Artificial Sequence
  MKO10067508_B_1110034G24Rik
  gRNA
tccttcttcgaaaggccagt

SEQ ID NO: 67509 - DNA, 20 bp, Artificial Sequence
  MKO10067509_B_1110034G24Rik
  gRNA
caggtcatcttcagccggga

SEQ ID NO: 67510 - DNA, 20 bp, Artificial Sequence
  MKO10067510_B_1110034G24Rik
  gRNA
tcttcttcgactactgatcc

SEQ ID NO: 67511 - DNA, 20 bp, Artificial Sequence
  MKO10067511_B_1110037F02Rik
  gRNA
ccactatgggctcgtactcc

SEQ ID NO: 67512 - DNA, 20 bp, Artificial Sequence
  MKO10067512_B_1110037F02Rik
  gRNA
cttcccaacctatcaaaaac

SEQ ID NO: 67513 - DNA, 20 bp, Artificial Sequence
  MKO10067513_B_1110037F02Rik
  gRNA
agccacagccgactttgaaa

SEQ ID NO: 67514 - DNA, 20 bp, Artificial Sequence
  MKO10067514_B_1110038F14Rik
  gRNA
caccagcctttagagcccgt

SEQ ID NO: 67515 - DNA, 20 bp, Artificial Sequence
  MKO10067515_B_1110038F14Rik
  gRNA
ccaggtacagctcgtcagtg

SEQ ID NO: 67516 - DNA, 20 bp, Artificial Sequence
  MKO10067516_B_1110038F14Rik
  gRNA
ccttcctacagccacccatt

SEQ ID NO: 67517 - DNA, 20 bp, Artificial Sequence
  MKO10067517_B_1110051M20Rik
  gRNA
ctgcatcctccatgtacgtg

SEQ ID NO: 67518 - DNA, 20 bp, Artificial Sequence
  MKO10067518_B_1110051M20Rik
  gRNA
agcatctccagaaggcccga

SEQ ID NO: 67519 - DNA, 20 bp, Artificial Sequence
  MKO10067519_B_1110051M20Rik
  gRNA
ctcccccaggattgtgctca

SEQ ID NO: 67520 - DNA, 20 bp, Artificial Sequence
  MKO10067520_B_1110057K04Rik
  gRNA
tcatataggtgcctacggaa

SEQ ID NO: 67521 - DNA, 20 bp, Artificial Sequence
  MKO10067521_B_1110057K04Rik
  gRNA
tgcaaatggcacgtagaatg

SEQ ID NO: 67522 - DNA, 20 bp, Artificial Sequence
  MKO10067522_B_1110057K04Rik
  gRNA
agaaagaactcctcacgcac

SEQ ID NO: 67523 - DNA, 20 bp, Artificial Sequence
  MKO10067523_B_1110058L19Rik
  gRNA
tcccagtctccatatcgtgt

SEQ ID NO: 67524 - DNA, 20 bp, Artificial Sequence
  MKO10067524_B_1110058L19Rik
  gRNA
ccacgaccctttccgtttca

SEQ ID NO: 67525 - DNA, 20 bp, Artificial Sequence
  MKO10067525_B_1110058L19Rik
  gRNA
aagaagtcaaagctgccact

SEQ ID NO: 67526 - DNA, 20 bp, Artificial Sequence
  MKO10067526_B_1110059E24Rik
  gRNA
cactgtcaaagcctaagaag

SEQ ID NO: 67527 - DNA, 20 bp, Artificial Sequence
  MKO10067527_B_1110059E24Rik
  gRNA
cttgaagtttgtgccaaatg

SEQ ID NO: 67528 - DNA, 20 bp, Artificial Sequence
  MKO10067528_B_1110059E24Rik
  gRNA
accgagtcacgttgcctttc

SEQ ID NO: 67529 - DNA, 20 bp, Artificial Sequence
  MKO10067529_B_1110059G10Rik
  gRNA
taaactattcttccatcagc

SEQ ID NO: 67530 - DNA, 20 bp, Artificial Sequence
  MKO10067530_B_1110059G10Rik
  gRNA
tcatgacctcttcagctgtt

SEQ ID NO: 67531 - DNA, 20 bp, Artificial Sequence
  MKO10067531_B_1110059G10Rik
  gRNA
tcctcagatgaaaagtgttc

SEQ ID NO: 67532 - DNA, 20 bp, Artificial Sequence
  MKO10067532_B_1110059M19Rik
  gRNA
tatatccctacgcttagatc

SEQ ID NO: 67533 - DNA, 20 bp, Artificial Sequence
  MKO10067533_B_1110059M19Rik
  gRNA
aggggaggaccaaatcgcag

SEQ ID NO: 67534 - DNA, 20 bp, Artificial Sequence
  MKO10067534_B_1110059M19Rik
  gRNA
caaggcaccctatggataat

SEQ ID NO: 67535 - DNA, 20 bp, Artificial Sequence
  MKO10067535_B_1110065P20Rik
  gRNA
gcactgaccccgccaccagc

SEQ ID NO: 67536 - DNA, 20 bp, Artificial Sequence
  MKO10067536_B_1110065P20Rik
  gRNA
ctggggcggcgctccagact

SEQ ID NO: 67537 - DNA, 20 bp, Artificial Sequence
  MKO10067537_B_1110065P20Rik
  gRNA
gccgccccagccatctgtat

SEQ ID NO: 67538 - DNA, 20 bp, Artificial Sequence
  MKO10067538_B_1190002N15Rik
  gRNA
tcctccagaagtgccgcgcc

SEQ ID NO: 67539 - DNA, 20 bp, Artificial Sequence
  MKO10067539_B_1190002N15Rik
  gRNA
agttgtcaaagctgacgtcc

SEQ ID NO: 67540 - DNA, 20 bp, Artificial Sequence
  MKO10067540_B_1190002N15Rik
  gRNA
agctttgacaactttgcagt

SEQ ID NO: 67541 - DNA, 20 bp, Artificial Sequence
  MKO10067541_B_1190003K10Rik
  gRNA
tcctgatgacaaggaaaagc

SEQ ID NO: 67542 - DNA, 20 bp, Artificial Sequence
  MKO10067542_B_1190003K10Rik
  gRNA
tgaacagccagtacatgcgc

SEQ ID NO: 67543 - DNA, 20 bp, Artificial Sequence
  MKO10067543_B_1190003K10Rik
  gRNA
ttctcagagcgcttctcccc

SEQ ID NO: 67544 - DNA, 20 bp, Artificial Sequence
  MKO10067544_B_1190005I06Rik
  gRNA
agccccatgcccgtcggggt

SEQ ID NO: 67545 - DNA, 20 bp, Artificial Sequence
  MKO10067545_B_1190005I06Rik
  gRNA
gccccatggcgtcgcctctg

SEQ ID NO: 67546 - DNA, 20 bp, Artificial Sequence
  MKO10067546_B_1190005I06Rik
  gRNA
ggcccgcagaggcgacgcca

SEQ ID NO: 67547 - DNA, 20 bp, Artificial Sequence
  MKO10067547_B_1190007I07Rik
  gRNA
cctgaaattccaccaaagcc

SEQ ID NO: 67548 - DNA, 20 bp, Artificial Sequence
  MKO10067548_B_1190007I07Rik
  gRNA
ccatgcccgggggcgtaccc

SEQ ID NO: 67549 - DNA, 20 bp, Artificial Sequence
  MKO10067549_B_1190007I07Rik
  gRNA
gatagtaccaatgcaccacc

SEQ ID NO: 67550 - DNA, 20 bp, Artificial Sequence
  MKO10067550_B_42625
  gRNA
gagtgcagctccaatgtttg

SEQ ID NO: 67551 - DNA, 20 bp, Artificial Sequence
  MKO10067551_B_42625
  gRNA
ttcagttgactgccatactt

SEQ ID NO: 67552 - DNA, 20 bp, Artificial Sequence
  MKO10067552_B_42625
  gRNA
tgtcggggatgtggcgctgg

SEQ ID NO: 67553 - DNA, 20 bp, Artificial Sequence
  MKO10067553_B_1200014J11Rik
  gRNA
ctatcgtaggcaatgtggtt

SEQ ID NO: 67554 - DNA, 20 bp, Artificial Sequence
  MKO10067554_B_1200014J11Rik
  gRNA
ctggagacaatctacatttg

SEQ ID NO: 67555 - DNA, 20 bp, Artificial Sequence
  MKO10067555_B_1200014J11Rik
  gRNA
tccaaccactcaatgtgagc

SEQ ID NO: 67556 - DNA, 20 bp, Artificial Sequence
  MKO10067556_B_1300002K09Rik
  gRNA
ctacaggcctctggacttcg

SEQ ID NO: 67557 - DNA, 20 bp, Artificial Sequence
  MKO10067557_B_1300002K09Rik
  gRNA
acaggtgatatttatctgcc

SEQ ID NO: 67558 - DNA, 20 bp, Artificial Sequence
  MKO10067558_B_1300002K09Rik
  gRNA
tcctccaaagacgagagcat

SEQ ID NO: 67559 - DNA, 20 bp, Artificial Sequence
  MKO10067559_B_1300017J02Rik
  gRNA
ccacagcctgaaacctatca

SEQ ID NO: 67560 - DNA, 20 bp, Artificial Sequence
  MKO10067560_B_1300017J02Rik
  gRNA
ttcctgagaagaccatacga

SEQ ID NO: 67561 - DNA, 20 bp, Artificial Sequence
  MKO10067561_B_1300017J02Rik
  gRNA
gcttccaactgaaccagctc

SEQ ID NO: 67562 - DNA, 20 bp, Artificial Sequence
  MKO10067562_B_42627
  gRNA
ctttgaaagcgagtcagctt

SEQ ID NO: 67563 - DNA, 20 bp, Artificial Sequence
  MKO10067563_B_42627
  gRNA
ttgactgtcgtgaagacagt

SEQ ID NO: 67564 - DNA, 20 bp, Artificial Sequence
  MKO10067564_B_42627
  gRNA
ctttatttcatcacccctac

SEQ ID NO: 67565 - DNA, 20 bp, Artificial Sequence
  MKO10067565_B_42628
  gRNA
tgcgttccaacttctcgctc

SEQ ID NO: 67566 - DNA, 20 bp, Artificial Sequence
  MKO10067566_B_42628
  gRNA
gataaacccaaactcttcag

SEQ ID NO: 67567 - DNA, 20 bp, Artificial Sequence
  MKO10067567_B_42628
  gRNA
tgctacataccttggacttg

SEQ ID NO: 67568 - DNA, 20 bp, Artificial Sequence
  MKO10067568_B_1500009L16Rik
  gRNA
cgccatgttgacagcttcag

SEQ ID NO: 67569 - DNA, 20 bp, Artificial Sequence
  MKO10067569_B_1500009L16Rik
  gRNA
gccctctgaagctgtcaaca

SEQ ID NO: 67570 - DNA, 20 bp, Artificial Sequence
  MKO10067570_B_1500012F01Rik
  gRNA
gaatggagcgtgaactcctg

SEQ ID NO: 67571 - DNA, 20 bp, Artificial Sequence
  MKO10067571_B_1500012F01Rik
  gRNA
gttggtctgatcttgatttc

SEQ ID NO: 67572 - DNA, 20 bp, Artificial Sequence
  MKO10067572_B_1500012F01Rik
  gRNA
ttgcattctgcatagccttg

SEQ ID NO: 67573 - DNA, 20 bp, Artificial Sequence
  MKO10067573_B_1500015O10Rik
  gRNA
cagacctaccttctcgtttc

SEQ ID NO: 67574 - DNA, 20 bp, Artificial Sequence
  MKO10067574_B_1500015O10Rik
  gRNA
catcttcatcataatgacgc

SEQ ID NO: 67575 - DNA, 20 bp, Artificial Sequence
  MKO10067575_B_1500015O10Rik
  gRNA
acggtcccacagctgtcgtt

SEQ ID NO: 67576 - DNA, 20 bp, Artificial Sequence
  MKO10067576_B_1600002H07Rik
  gRNA
ctccaactgccgctgccgat

SEQ ID NO: 67577 - DNA, 20 bp, Artificial Sequence
  MKO10067577_B_1600002H07Rik
  gRNA
gtctttgcagggaaccagcc

SEQ ID NO: 67578 - DNA, 20 bp, Artificial Sequence
  MKO10067578_B_1600002H07Rik
  gRNA
actgccttcctgaagtcctc

SEQ ID NO: 67579 - DNA, 20 bp, Artificial Sequence
  MKO10067579_B_1600002K03Rik
  gRNA
ctcttcatgctcctccgtgt

SEQ ID NO: 67580 - DNA, 20 bp, Artificial Sequence
  MKO10067580_B_1600002K03Rik
  gRNA
cagtgattacgtagaacaag

SEQ ID NO: 67581 - DNA, 20 bp, Artificial Sequence
  MKO10067581_B_1600002K03Rik
  gRNA
ctcccgtttgtgtggttata

SEQ ID NO: 67582 - DNA, 20 bp, Artificial Sequence
  MKO10067582_B_1600012H06Rik
  gRNA
agctcatagtcgtcgaagct

SEQ ID NO: 67583 - DNA, 20 bp, Artificial Sequence
  MKO10067583_B_1600012H06Rik
  gRNA
tcatctcaaagtcgctctca

SEQ ID NO: 67584 - DNA, 20 bp, Artificial Sequence
  MKO10067584_B_1600012H06Rik
  gRNA
ccaggatgtggtctctatac

SEQ ID NO: 67585 - DNA, 20 bp, Artificial Sequence
  MKO10067585_B_1600014C10Rik
  gRNA
aaggcggccgtcaagcactc

SEQ ID NO: 67586 - DNA, 20 bp, Artificial Sequence
  MKO10067586_B_1600014C10Rik
  gRNA
accaaccaagccaccgacga

SEQ ID NO: 67587 - DNA, 20 bp, Artificial Sequence
  MKO10067587_B_1600014C10Rik
  gRNA
cccagactccagctcggtaa

SEQ ID NO: 67588 - DNA, 20 bp, Artificial Sequence
  MKO10067588_B_1600014C23Rik
  gRNA
tgaattcccactgtctggcc

SEQ ID NO: 67589 - DNA, 20 bp, Artificial Sequence
  MKO10067589_B_1600014C23Rik
  gRNA
gactcccagtgggtagactg

SEQ ID NO: 67590 - DNA, 20 bp, Artificial Sequence
  MKO10067590_B_1600014C23Rik
  gRNA
ctgccaaccgcccccctttc

SEQ ID NO: 67591 - DNA, 20 bp, Artificial Sequence
  MKO10067591_B_1600014K23Rik
  gRNA
ctccctgctgaccgagcgcc

SEQ ID NO: 67592 - DNA, 20 bp, Artificial Sequence
  MKO10067592_B_1600014K23Rik
  gRNA
catgaccaacctgcgccggt

SEQ ID NO: 67593 - DNA, 20 bp, Artificial Sequence
  MKO10067593_B_1600014K23Rik
  gRNA
gctcttcgaccagctcacca

SEQ ID NO: 67594 - DNA, 20 bp, Artificial Sequence
  MKO10067594_B_1600015I10Rik
  gRNA
agcaacctccatacgaccca

SEQ ID NO: 67595 - DNA, 20 bp, Artificial Sequence
  MKO10067595_B_1600015I10Rik
  gRNA
ccacaacatgccccgttctg

SEQ ID NO: 67596 - DNA, 20 bp, Artificial Sequence
  MKO10067596_B_1600015I10Rik
  gRNA
ataaaatcctcgaagaccac

SEQ ID NO: 67597 - DNA, 20 bp, Artificial Sequence
  MKO10067597_B_1600016N20Rik
  gRNA
cagcacgcgtcccacccaag

SEQ ID NO: 67598 - DNA, 20 bp, Artificial Sequence
  MKO10067598_B_1600016N20Rik
  gRNA
cacgtaccctgaggctctta

SEQ ID NO: 67599 - DNA, 20 bp, Artificial Sequence
  MKO10067599_B_1600016N20Rik
  gRNA
ccaggtccagaagctaaccc

SEQ ID NO: 67600 - DNA, 20 bp, Artificial Sequence
  MKO10067600_B_1700001C02Rik
  gRNA
gcccgttgtcctggttggat

SEQ ID NO: 67601 - DNA, 20 bp, Artificial Sequence
  MKO10067601_B_1700001C02Rik
  gRNA
caccatggccttccgtagcg

SEQ ID NO: 67602 - DNA, 20 bp, Artificial Sequence
  MKO10067602_B_1700001C02Rik
  gRNA
ccgcctttggcgctcttgag

SEQ ID NO: 67603 - DNA, 20 bp, Artificial Sequence
  MKO10067603_B_1700001C19Rik
  gRNA
cctaggtgcgccacaagatc

SEQ ID NO: 67604 - DNA, 20 bp, Artificial Sequence
  MKO10067604_B_1700001C19Rik
  gRNA
aagagaagagccatgccctc

SEQ ID NO: 67605 - DNA, 20 bp, Artificial Sequence
  MKO10067605_B_1700001C19Rik
  gRNA
gaagtctcgttcagcttcag

SEQ ID NO: 67606 - DNA, 20 bp, Artificial Sequence
  MKO10067606_B_1700001F09Rik
  gRNA
tgacctgaagagaatgtccc

SEQ ID NO: 67607 - DNA, 20 bp, Artificial Sequence
  MKO10067607_B_1700001F09Rik
  gRNA
ctaaagaaaatcaattatac

SEQ ID NO: 67608 - DNA, 20 bp, Artificial Sequence
  MKO10067608_B_1700001F09Rik
  gRNA
acctcatccagcacaaagtc

SEQ ID NO: 67609 - DNA, 20 bp, Artificial Sequence
  MKO10067609_B_1700001J03Rik
  gRNA
ttctacacagtcaggccgga

SEQ ID NO: 67610 - DNA, 20 bp, Artificial Sequence
  MKO10067610_B_1700001J03Rik
  gRNA
actgcatctttgagacaaac

SEQ ID NO: 67611 - DNA, 20 bp, Artificial Sequence
  MKO10067611_B_1700001J03Rik
  gRNA
tgtctcaaagatgcagtcca

SEQ ID NO: 67612 - DNA, 20 bp, Artificial Sequence
  MKO10067612_B_1700001K19Rik
  gRNA
ccagccgacccacctgcatc

SEQ ID NO: 67613 - DNA, 20 bp, Artificial Sequence
  MKO10067613_B_1700001K19Rik
  gRNA
aacctcatggaccttgctga

SEQ ID NO: 67614 - DNA, 20 bp, Artificial Sequence
  MKO10067614_B_1700001K19Rik
  gRNA
ccccacaggtcagctccaga

SEQ ID NO: 67615 - DNA, 20 bp, Artificial Sequence
  MKO10067615_B_1700001L19Rik
  gRNA
gagcccctaaacagagacta

SEQ ID NO: 67616 - DNA, 20 bp, Artificial Sequence
  MKO10067616_B_1700001L19Rik
  gRNA
atcttacctcctcattaata

SEQ ID NO: 67617 - DNA, 20 bp, Artificial Sequence
  MKO10067617_B_1700001L19Rik
  gRNA
tcttaaaaacacagtcatag

SEQ ID NO: 67618 - DNA, 20 bp, Artificial Sequence
  MKO10067618_B_1700001O22Rik
  gRNA
cctcagcgccacataaccct

SEQ ID NO: 67619 - DNA, 20 bp, Artificial Sequence
  MKO10067619_B_1700001O22Rik
  gRNA
ctgtggccggctcctcattc

SEQ ID NO: 67620 - DNA, 20 bp, Artificial Sequence
  MKO10067620_B_1700001O22Rik
  gRNA
tgagggacaaaccattgcac

SEQ ID NO: 67621 - DNA, 20 bp, Artificial Sequence
  MKO10067621_B_1700001P01Rik
  gRNA
acgggcttaaatggccgatt

SEQ ID NO: 67622 - DNA, 20 bp, Artificial Sequence
  MKO10067622_B_1700001P01Rik
  gRNA
aaggacagcgatatctcaat

SEQ ID NO: 67623 - DNA, 20 bp, Artificial Sequence
  MKO10067623_B_1700001P01Rik
  gRNA
gctgtccttgaccaaaaatg

SEQ ID NO: 67624 - DNA, 20 bp, Artificial Sequence
  MKO10067624_B_1700003E16Rik
  gRNA
gtcacgaaaatgagtcacga

SEQ ID NO: 67625 - DNA, 20 bp, Artificial Sequence
  MKO10067625_B_1700003E16Rik
  gRNA
cgttccattcaccattagcc

SEQ ID NO: 67626 - DNA, 20 bp, Artificial Sequence
  MKO10067626_B_1700003E16Rik
  gRNA
aggaatccgtagtgcatgcc

SEQ ID NO: 67627 - DNA, 20 bp, Artificial Sequence
  MKO10067627_B_1700003F12Rik
  gRNA
gggttctcacccacacgggc

SEQ ID NO: 67628 - DNA, 20 bp, Artificial Sequence
  MKO10067628_B_1700003F12Rik
  gRNA
gagaacccccgcatcaaggc

SEQ ID NO: 67629 - DNA, 20 bp, Artificial Sequence
  MKO10067629_B_1700003F12Rik
  gRNA
agcacccaatcaggccaaca

SEQ ID NO: 67630 - DNA, 20 bp, Artificial Sequence
  MKO10067630_B_1700003M02Rik
  gRNA
agctacgtgctcctgcgctc

SEQ ID NO: 67631 - DNA, 20 bp, Artificial Sequence
  MKO10067631_B_1700003M02Rik
  gRNA
tctgctaacaatgcctaacc

SEQ ID NO: 67632 - DNA, 20 bp, Artificial Sequence
  MKO10067632_B_1700003M02Rik
  gRNA
aaagtagacctgcatcttaa

SEQ ID NO: 67633 - DNA, 20 bp, Artificial Sequence
  MKO10067633_B_1700006A11Rik
  gRNA
tccctgccagttactaagag

SEQ ID NO: 67634 - DNA, 20 bp, Artificial Sequence
  MKO10067634_B_1700006A11Rik
  gRNA
cgctgtggcatctgtcttaa

SEQ ID NO: 67635 - DNA, 20 bp, Artificial Sequence
  MKO10067635_B_1700006A11Rik
  gRNA
cttctagactgtatgatata

SEQ ID NO: 67636 - DNA, 20 bp, Artificial Sequence
  MKO10067636_B_1700006E09Rik
  gRNA
cgtcgataccaaacctccaa

SEQ ID NO: 67637 - DNA, 20 bp, Artificial Sequence
  MKO10067637_B_1700006E09Rik
  gRNA
ctcattccagcagtccacct

SEQ ID NO: 67638 - DNA, 20 bp, Artificial Sequence
  MKO10067638_B_1700006E09Rik
  gRNA
tttaaaattgagcaaaatcc

SEQ ID NO: 67639 - DNA, 20 bp, Artificial Sequence
  MKO10067639_B_1700007B14Rik
  gRNA
catttaatctcttgtgatgt

SEQ ID NO: 67640 - DNA, 20 bp, Artificial Sequence
  MKO10067640_B_1700007B14Rik
  gRNA
ttaatgtagttcaagaacat

SEQ ID NO: 67641 - DNA, 20 bp, Artificial Sequence
  MKO10067641_B_1700007B14Rik
  gRNA
tatgcaaaggcaagctcatg

SEQ ID NO: 67642 - DNA, 20 bp, Artificial Sequence
  MKO10067642_B_1700007G11Rik
  gRNA
tatcctcttccctcatcgcc

SEQ ID NO: 67643 - DNA, 20 bp, Artificial Sequence
  MKO10067643_B_1700007G11Rik
  gRNA
tcagcaatcacttgataatt

SEQ ID NO: 67644 - DNA, 20 bp, Artificial Sequence
  MKO10067644_B_1700007G11Rik
  gRNA
aattctcaatgtggacccaa

SEQ ID NO: 67645 - DNA, 20 bp, Artificial Sequence
  MKO10067645_B_1700007K09Rik
  gRNA
acagccatgtttctactgat

SEQ ID NO: 67646 - DNA, 20 bp, Artificial Sequence
  MKO10067646_B_1700007K09Rik
  gRNA
tttcttaagaatcgcaaagg

SEQ ID NO: 67647 - DNA, 20 bp, Artificial Sequence
  MKO10067647_B_1700007K09Rik
  gRNA
ctccagtgttgtaatgtatg

SEQ ID NO: 67648 - DNA, 20 bp, Artificial Sequence
  MKO10067648_B_1700007K13Rik
  gRNA
gggctctgcttccgtaggtt

SEQ ID NO: 67649 - DNA, 20 bp, Artificial Sequence
  MKO10067649_B_1700007K13Rik
  gRNA
gaaagttcaaacggtcatag

SEQ ID NO: 67650 - DNA, 20 bp, Artificial Sequence
  MKO10067650_B_1700007K13Rik
  gRNA
tccaaaagctgcgtgttgtc

SEQ ID NO: 67651 - DNA, 20 bp, Artificial Sequence
  MKO10067651_B_1700008A04Rik
  gRNA
aatgttacctggggtgtcac

SEQ ID NO: 67652 - DNA, 20 bp, Artificial Sequence
  MKO10067652_B_1700008A04Rik
  gRNA
aacctgctgaagagccatta

SEQ ID NO: 67653 - DNA, 20 bp, Artificial Sequence
  MKO10067653_B_1700008A04Rik
  gRNA
gctgttggcactgctcatct

SEQ ID NO: 67654 - DNA, 20 bp, Artificial Sequence
  MKO10067654_B_1700008F21Rik
  gRNA
ttgaagaaaaacctgctaga

SEQ ID NO: 67655 - DNA, 20 bp, Artificial Sequence
  MKO10067655_B_1700008F21Rik
  gRNA
tttgtatttcaccttctagc

SEQ ID NO: 67656 - DNA, 20 bp, Artificial Sequence
  MKO10067656_B_1700008F21Rik
  gRNA
acaaaggctgagagatcccg

SEQ ID NO: 67657 - DNA, 20 bp, Artificial Sequence
  MKO10067657_B_1700008I05Rik
  gRNA
gcttgcctcagtaactgtac

SEQ ID NO: 67658 - DNA, 20 bp, Artificial Sequence
  MKO10067658_B_1700008I05Rik
  gRNA
cattagaaattgctgcaagc

SEQ ID NO: 67659 - DNA, 20 bp, Artificial Sequence
  MKO10067659_B_1700008I05Rik
  gRNA
aagatccagtacagttactg

SEQ ID NO: 67660 - DNA, 20 bp, Artificial Sequence
  MKO10067660_B_1700008O03Rik
  gRNA
attccgagatgacctgccgc

SEQ ID NO: 67661 - DNA, 20 bp, Artificial Sequence
  MKO10067661_B_1700008O03Rik
  gRNA
cgctgtgcgtcaatcttcgt

SEQ ID NO: 67662 - DNA, 20 bp, Artificial Sequence
  MKO10067662_B_1700008O03Rik
  gRNA
ccttgttgacctcgagtcta

SEQ ID NO: 67663 - DNA, 20 bp, Artificial Sequence
  MKO10067663_B_1700008P02Rik
  gRNA
caagaaaatggactgattac

SEQ ID NO: 67664 - DNA, 20 bp, Artificial Sequence
  MKO10067664_B_1700008P02Rik
  gRNA
taaacaagaattctgacgaa

SEQ ID NO: 67665 - DNA, 20 bp, Artificial Sequence
  MKO10067665_B_1700008P02Rik
  gRNA
gaagaagagatgcaagcctt

SEQ ID NO: 67666 - DNA, 20 bp, Artificial Sequence
  MKO10067666_B_1700009N14Rik
  gRNA
cggctattacatccaagccc

SEQ ID NO: 67667 - DNA, 20 bp, Artificial Sequence
  MKO10067667_B_1700009N14Rik
  gRNA
atgctcgtatttctttgcta

SEQ ID NO: 67668 - DNA, 20 bp, Artificial Sequence
  MKO10067668_B_1700009N14Rik
  gRNA
acaagcttgaattggactgg

SEQ ID NO: 67669 - DNA, 20 bp, Artificial Sequence
  MKO10067669_B_1700009P17Rik
  gRNA
gctcagaatacctctttcgt

SEQ ID NO: 67670 - DNA, 20 bp, Artificial Sequence
  MKO10067670_B_1700009P17Rik
  gRNA
caagagatgccctcgatcgt

SEQ ID NO: 67671 - DNA, 20 bp, Artificial Sequence
  MKO10067671_B_1700009P17Rik
  gRNA
ctgccgacaacctcaccaaa

SEQ ID NO: 67672 - DNA, 20 bp, Artificial Sequence
  MKO10067672_B_1700010B08Rik
  gRNA
aagatggcccagaatcatac

SEQ ID NO: 67673 - DNA, 20 bp, Artificial Sequence
  MKO10067673_B_1700010B08Rik
  gRNA
cgggaaacatgatggcatgc

SEQ ID NO: 67674 - DNA, 20 bp, Artificial Sequence
  MKO10067674_B_1700010B08Rik
  gRNA
gtttcccgccatgatgaaaa

SEQ ID NO: 67675 - DNA, 20 bp, Artificial Sequence
  MKO10067675_B_1700010D01Rik
  gRNA
tggtgaaagcaactaagaag

SEQ ID NO: 67676 - DNA, 20 bp, Artificial Sequence
  MKO10067676_B_1700010D01Rik
  gRNA
tctaatcttcttgctacatt

SEQ ID NO: 67677 - DNA, 20 bp, Artificial Sequence
  MKO10067677_B_1700010D01Rik
  gRNA
cagatgctgtgccatcaacc

SEQ ID NO: 67678 - DNA, 20 bp, Artificial Sequence
  MKO10067678_B_1700010I14Rik
  gRNA
acagcccacagcgcagtatc

SEQ ID NO: 67679 - DNA, 20 bp, Artificial Sequence
  MKO10067679_B_1700010I14Rik
  gRNA
gcaaccctcagcagttcaac

SEQ ID NO: 67680 - DNA, 20 bp, Artificial Sequence
  MKO10067680_B_1700010I14Rik
  gRNA
ttacttgtcgttgtgctcca

SEQ ID NO: 67681 - DNA, 20 bp, Artificial Sequence
  MKO10067681_B_1700011A15Rik
  gRNA
ggcgctcatgttcaggccac

SEQ ID NO: 67682 - DNA, 20 bp, Artificial Sequence
  MKO10067682_B_1700011A15Rik
  gRNA
tagcctggttgagcctattc

SEQ ID NO: 67683 - DNA, 20 bp, Artificial Sequence
  MKO10067683_B_1700011A15Rik
  gRNA
acagcaaggaggccctgaat

SEQ ID NO: 67684 - DNA, 20 bp, Artificial Sequence
  MKO10067684_B_1700011E24Rik
  gRNA
ggaagtacctcgtactgtcc

SEQ ID NO: 67685 - DNA, 20 bp, Artificial Sequence
  MKO10067685_B_1700011E24Rik
  gRNA
aaacaagtcaagaagacgcc

SEQ ID NO: 67686 - DNA, 20 bp, Artificial Sequence
  MKO10067686_B_1700011E24Rik
  gRNA
cttacaggagtgaaataatt

SEQ ID NO: 67687 - DNA, 20 bp, Artificial Sequence
  MKO10067687_B_1700011H14Rik
  gRNA
ctttcagaggtaattgcttg

SEQ ID NO: 67688 - DNA, 20 bp, Artificial Sequence
  MKO10067688_B_1700011H14Rik
  gRNA
caacttcctatgtacacttc

SEQ ID NO: 67689 - DNA, 20 bp, Artificial Sequence
  MKO10067689_B_1700011H14Rik
  gRNA
gatgtcaagatacatggccc

SEQ ID NO: 67690 - DNA, 20 bp, Artificial Sequence
  MKO10067690_B_1700011I03Rik
  gRNA
aatactgtctgtccactgtc

SEQ ID NO: 67691 - DNA, 20 bp, Artificial Sequence
  MKO10067691_B_1700011I03Rik
  gRNA
catggatgttaagtttctcc

SEQ ID NO: 67692 - DNA, 20 bp, Artificial Sequence
  MKO10067692_B_1700011I03Rik
  gRNA
ggctagagctctgttggaac

SEQ ID NO: 67693 - DNA, 20 bp, Artificial Sequence
  MKO10067693_B_1700011L22Rik
  gRNA
gtggccgggtagagtgttgt

SEQ ID NO: 67694 - DNA, 20 bp, Artificial Sequence
  MKO10067694_B_1700011L22Rik
  gRNA
ggtatgcagcccaaaaagcc

SEQ ID NO: 67695 - DNA, 20 bp, Artificial Sequence
  MKO10067695_B_1700011L22Rik
  gRNA
tctgcctacaacactctacc

SEQ ID NO: 67696 - DNA, 20 bp, Artificial Sequence
  MKO10067696_B_1700012A03Rik
  gRNA
cgcacccttgccaggaggca

SEQ ID NO: 67697 - DNA, 20 bp, Artificial Sequence
  MKO10067697_B_1700012A03Rik
  gRNA
tctgcgccctcttctgcagc

SEQ ID NO: 67698 - DNA, 20 bp, Artificial Sequence
  MKO10067698_B_1700012A03Rik
  gRNA
ttctcctctagttcaagatc

SEQ ID NO: 67699 - DNA, 20 bp, Artificial Sequence
  MKO10067699_B_1700012B07Rik
  gRNA
ccggcaccttatggacatga

SEQ ID NO: 67700 - DNA, 20 bp, Artificial Sequence
  MKO10067700_B_1700012B07Rik
  gRNA
gcatgtgacagcaaagtcgt

SEQ ID NO: 67701 - DNA, 20 bp, Artificial Sequence
  MKO10067701_B_1700012B07Rik
  gRNA
tgtcctgtgacgtcaagctc

SEQ ID NO: 67702 - DNA, 20 bp, Artificial Sequence
  MKO10067702_B_1700012B09Rik
  gRNA
tccgtgcctcgagtagtact

SEQ ID NO: 67703 - DNA, 20 bp, Artificial Sequence
  MKO10067703_B_1700012B09Rik
  gRNA
tgaaccgcataagagaatca

SEQ ID NO: 67704 - DNA, 20 bp, Artificial Sequence
  MKO10067704_B_1700012B09Rik
  gRNA
catgtgaaaagcccacctac

SEQ ID NO: 67705 - DNA, 20 bp, Artificial Sequence
  MKO10067705_B_1700012L04Rik
  gRNA
tcatggccaagaaaatgcaa

SEQ ID NO: 67706 - DNA, 20 bp, Artificial Sequence
  MKO10067706_B_1700012L04Rik
  gRNA
accaccagacgtacatcctc

SEQ ID NO: 67707 - DNA, 20 bp, Artificial Sequence
  MKO10067707_B_1700012L04Rik
  gRNA
aaaagaacccgctcccagag

SEQ ID NO: 67708 - DNA, 20 bp, Artificial Sequence
  MKO10067708_B_1700012P22Rik
  gRNA
tgccggtgtgcgctatgtcc

SEQ ID NO: 67709 - DNA, 20 bp, Artificial Sequence
  MKO10067709_B_1700012P22Rik
  gRNA
taccacctagaaacgaagtc

SEQ ID NO: 67710 - DNA, 20 bp, Artificial Sequence
  MKO10067710_B_1700012P22Rik
  gRNA
acactccccagtgcatttac

SEQ ID NO: 67711 - DNA, 20 bp, Artificial Sequence
  MKO10067711_B_1700013D24Rik
  gRNA
acttacttgcccctcccaga

SEQ ID NO: 67712 - DNA, 20 bp, Artificial Sequence
  MKO10067712_B_1700013D24Rik
  gRNA
tcgcctcaaactgctgtcac

SEQ ID NO: 67713 - DNA, 20 bp, Artificial Sequence
  MKO10067713_B_1700013D24Rik
  gRNA
tgcccagtgacagcagtttg

SEQ ID NO: 67714 - DNA, 20 bp, Artificial Sequence
  MKO10067714_B_1700013F07Rik
  gRNA
agaccattgaggatatccag

SEQ ID NO: 67715 - DNA, 20 bp, Artificial Sequence
  MKO10067715_B_1700013F07Rik
  gRNA
ccattggtggccgcagtgtg

SEQ ID NO: 67716 - DNA, 20 bp, Artificial Sequence
  MKO10067716_B_1700013F07Rik
  gRNA
ccaccaatggaggttactcc

SEQ ID NO: 67717 - DNA, 20 bp, Artificial Sequence
  MKO10067717_B_1700013G24Rik
  gRNA
tccgagttaagcacctccag

SEQ ID NO: 67718 - DNA, 20 bp, Artificial Sequence
  MKO10067718_B_1700013G24Rik
  gRNA
taggtcgtctgcccaagttc

SEQ ID NO: 67719 - DNA, 20 bp, Artificial Sequence
  MKO10067719_B_1700013G24Rik
  gRNA
gagacgagtcacctgacgag

SEQ ID NO: 67720 - DNA, 20 bp, Artificial Sequence
  MKO10067720_B_1700013H16Rik
  gRNA
gttcaacatctgattcatgt

SEQ ID NO: 67721 - DNA, 20 bp, Artificial Sequence
  MKO10067721_B_1700013H16Rik
  gRNA
gtctcttagcactaagagca

SEQ ID NO: 67722 - DNA, 20 bp, Artificial Sequence
  MKO10067722_B_1700013H16Rik
  gRNA
ttgcaaatctgtttgagcaa

SEQ ID NO: 67723 - DNA, 20 bp, Artificial Sequence
  MKO10067723_B_1700015E13Rik
  gRNA
gcaagtgaggacattatgtc

SEQ ID NO: 67724 - DNA, 20 bp, Artificial Sequence
  MKO10067724_B_1700015E13Rik
  gRNA
ccttgaaaccccccttgatg

SEQ ID NO: 67725 - DNA, 20 bp, Artificial Sequence
  MKO10067725_B_1700015E13Rik
  gRNA
tttcagccacgtcctcaaga

SEQ ID NO: 67726 - DNA, 20 bp, Artificial Sequence
  MKO10067726_B_1700015F17Rik
  gRNA
tcagcatcacgattccaaac

SEQ ID NO: 67727 - DNA, 20 bp, Artificial Sequence
  MKO10067727_B_1700015F17Rik
  gRNA
ctgttgcatgtagaagtaat

SEQ ID NO: 67728 - DNA, 20 bp, Artificial Sequence
  MKO10067728_B_1700015F17Rik
  gRNA
tatttggtgccgagaagaaa

SEQ ID NO: 67729 - DNA, 20 bp, Artificial Sequence
  MKO10067729_B_1700015G11Rik
  gRNA
ctcactgggtagacttgtgc

SEQ ID NO: 67730 - DNA, 20 bp, Artificial Sequence
  MKO10067730_B_1700015G11Rik
  gRNA
cttaccaagatgcctgtatc

SEQ ID NO: 67731 - DNA, 20 bp, Artificial Sequence
  MKO10067731_B_1700015G11Rik
  gRNA
atccttcagatgtttctacc

SEQ ID NO: 67732 - DNA, 20 bp, Artificial Sequence
  MKO10067732_B_1700016C15Rik
  gRNA
gctctacaaattctcgtagt

SEQ ID NO: 67733 - DNA, 20 bp, Artificial Sequence
  MKO10067733_B_1700016C15Rik
  gRNA
tacggagttgtgctcttgag

SEQ ID NO: 67734 - DNA, 20 bp, Artificial Sequence
  MKO10067734_B_1700016C15Rik
  gRNA
aggctatatatcactcacca

SEQ ID NO: 67735 - DNA, 20 bp, Artificial Sequence
  MKO10067735_B_1700016D06Rik
  gRNA
caggttcaagtggtaagcaa

SEQ ID NO: 67736 - DNA, 20 bp, Artificial Sequence
  MKO10067736_B_1700016D06Rik
  gRNA
gatgacatagctacagtgtt

SEQ ID NO: 67737 - DNA, 20 bp, Artificial Sequence
  MKO10067737_B_1700016D06Rik
  gRNA
tgcttctgatatgtcttaga

SEQ ID NO: 67738 - DNA, 20 bp, Artificial Sequence
  MKO10067738_B_1700016H13Rik
  gRNA
ttgggtcacttgggctgaag

SEQ ID NO: 67739 - DNA, 20 bp, Artificial Sequence
  MKO10067739_B_1700016H13Rik
  gRNA
cctaacaaaactgaagtgtc

SEQ ID NO: 67740 - DNA, 20 bp, Artificial Sequence
  MKO10067740_B_1700016H13Rik
  gRNA
ataacagctgcccttcaaaa

SEQ ID NO: 67741 - DNA, 20 bp, Artificial Sequence
  MKO10067741_B_1700016K19Rik
  gRNA
gggaccggtgcggcggagta

SEQ ID NO: 67742 - DNA, 20 bp, Artificial Sequence
  MKO10067742_B_1700016K19Rik
  gRNA
ccacgcgcatagctactttg

SEQ ID NO: 67743 - DNA, 20 bp, Artificial Sequence
  MKO10067743_B_1700016K19Rik
  gRNA
gcatctacaagctcaaccga

SEQ ID NO: 67744 - DNA, 20 bp, Artificial Sequence
  MKO10067744_B_1700017B05Rik
  gRNA
tttctaacaggttgcggaag

SEQ ID NO: 67745 - DNA, 20 bp, Artificial Sequence
  MKO10067745_B_1700017B05Rik
  gRNA
tgggccgtagttccactcgg

SEQ ID NO: 67746 - DNA, 20 bp, Artificial Sequence
  MKO10067746_B_1700017B05Rik
  gRNA
ctctaccgtcccccgacaga

SEQ ID NO: 67747 - DNA, 20 bp, Artificial Sequence
  MKO10067747_B_1700017D01Rik
  gRNA
aataccctgagttatactgc

SEQ ID NO: 67748 - DNA, 20 bp, Artificial Sequence
  MKO10067748_B_1700017D01Rik
  gRNA
tactagctaacataagttta

SEQ ID NO: 67749 - DNA, 20 bp, Artificial Sequence
  MKO10067749_B_1700017D01Rik
  gRNA
gttcctattgattcaaaaat

SEQ ID NO: 67750 - DNA, 20 bp, Artificial Sequence
  MKO10067750_B_1700017N19Rik
  gRNA
actggcagtgaattacaaga

SEQ ID NO: 67751 - DNA, 20 bp, Artificial Sequence
  MKO10067751_B_1700017N19Rik
  gRNA
agcaaaccccgaaatatcaa

SEQ ID NO: 67752 - DNA, 20 bp, Artificial Sequence
  MKO10067752_B_1700017N19Rik
  gRNA
gtttcagagattcctgactc

SEQ ID NO: 67753 - DNA, 20 bp, Artificial Sequence
  MKO10067753_B_1700018B08Rik
  gRNA
aagggttcgtttcagacctt

SEQ ID NO: 67754 - DNA, 20 bp, Artificial Sequence
  MKO10067754_B_1700018B08Rik
  gRNA
tgccaatgctacaccaagtt

SEQ ID NO: 67755 - DNA, 20 bp, Artificial Sequence
  MKO10067755_B_1700018B08Rik
  gRNA
gagaatgtggaagacactcc

SEQ ID NO: 67756 - DNA, 20 bp, Artificial Sequence
  MKO10067756_B_1700018C11Rik
  gRNA
accttggcgctctcaataac

SEQ ID NO: 67757 - DNA, 20 bp, Artificial Sequence
  MKO10067757_B_1700018C11Rik
  gRNA
gaatctaaaccgctactacc

SEQ ID NO: 67758 - DNA, 20 bp, Artificial Sequence
  MKO10067758_B_1700018C11Rik
  gRNA
ctcaccttcataatcactgc

SEQ ID NO: 67759 - DNA, 20 bp, Artificial Sequence
  MKO10067759_B_1700018F24Rik
  gRNA
gtgggccagaaagctgaata

SEQ ID NO: 67760 - DNA, 20 bp, Artificial Sequence
  MKO10067760_B_1700018F24Rik
  gRNA
ttgcagtcaggctggaaaga

SEQ ID NO: 67761 - DNA, 20 bp, Artificial Sequence
  MKO10067761_B_1700018F24Rik
  gRNA
actatccatcagcctattcc

SEQ ID NO: 67762 - DNA, 20 bp, Artificial Sequence
  MKO10067762_B_1700019A02Rik
  gRNA
ggtttatacctcaaacatgt

SEQ ID NO: 67763 - DNA, 20 bp, Artificial Sequence
  MKO10067763_B_1700019A02Rik
  gRNA
tgacttattgtgtgcttctt

SEQ ID NO: 67764 - DNA, 20 bp, Artificial Sequence
  MKO10067764_B_1700019A02Rik
  gRNA
tgaatgacaagttaagaaac

SEQ ID NO: 67765 - DNA, 20 bp, Artificial Sequence
  MKO10067765_B_1700019B03Rik
  gRNA
ggggtcctaacaccctgaag

SEQ ID NO: 67766 - DNA, 20 bp, Artificial Sequence
  MKO10067766_B_1700019B03Rik
  gRNA
tcttcaccatgataagactc

SEQ ID NO: 67767 - DNA, 20 bp, Artificial Sequence
  MKO10067767_B_1700019B03Rik
  gRNA
caccagccttgatgtgtaag

SEQ ID NO: 67768 - DNA, 20 bp, Artificial Sequence
  MKO10067768_B_1700019D03Rik
  gRNA
cagcttgtcaatgtccaatg

SEQ ID NO: 67769 - DNA, 20 bp, Artificial Sequence
  MKO10067769_B_1700019D03Rik
  gRNA
tgagtatcatcaattaatgg

SEQ ID NO: 67770 - DNA, 20 bp, Artificial Sequence
  MKO10067770_B_1700019D03Rik
  gRNA
tgacaagctgcatgagagtg

SEQ ID NO: 67771 - DNA, 20 bp, Artificial Sequence
  MKO10067771_B_1700019G17Rik
  gRNA
gttcctctctgatgtcaccc

SEQ ID NO: 67772 - DNA, 20 bp, Artificial Sequence
  MKO10067772_B_1700019G17Rik
  gRNA
tacaagtttgcaagctgacc

SEQ ID NO: 67773 - DNA, 20 bp, Artificial Sequence
  MKO10067773_B_1700019G17Rik
  gRNA
gtgaccatagtcctagtgtc

SEQ ID NO: 67774 - DNA, 20 bp, Artificial Sequence
  MKO10067774_B_1700019L03Rik
  gRNA
ggccatctttcggaactctg

SEQ ID NO: 67775 - DNA, 20 bp, Artificial Sequence
  MKO10067775_B_1700019L03Rik
  gRNA
ggcacttctcggtcagcatg

SEQ ID NO: 67776 - DNA, 20 bp, Artificial Sequence
  MKO10067776_B_1700019L03Rik
  gRNA
cacggagaagtacttggcac

SEQ ID NO: 67777 - DNA, 20 bp, Artificial Sequence
  MKO10067777_B_1700019N19Rik
  gRNA
aaacgagaagaaaccgctgc

SEQ ID NO: 67778 - DNA, 20 bp, Artificial Sequence
  MKO10067778_B_1700019N19Rik
  gRNA
agagctagggtcactgaatt

SEQ ID NO: 67779 - DNA, 20 bp, Artificial Sequence
  MKO10067779_B_1700019N19Rik
  gRNA
cccgcatttccagaattctc

SEQ ID NO: 67780 - DNA, 20 bp, Artificial Sequence
  MKO10067780_B_1700019O17Rik
  gRNA
agcacttcgtcgatgtctcc

SEQ ID NO: 67781 - DNA, 20 bp, Artificial Sequence
  MKO10067781_B_1700019O17Rik
  gRNA
tcgtcttgtagccggtcagc

SEQ ID NO: 67782 - DNA, 20 bp, Artificial Sequence
  MKO10067782_B_1700019O17Rik
  gRNA
agtcactcggggaaaccgtc

SEQ ID NO: 67783 - DNA, 20 bp, Artificial Sequence
  MKO10067783_B_1700020A23Rik
  gRNA
agtcccgaggccatctttgt

SEQ ID NO: 67784 - DNA, 20 bp, Artificial Sequence
  MKO10067784_B_1700020A23Rik
  gRNA
caaggaagctggtcagcaac

SEQ ID NO: 67785 - DNA, 20 bp, Artificial Sequence
  MKO10067785_B_1700020A23Rik
  gRNA
aattcgaaccatcttctcaa

SEQ ID NO: 67786 - DNA, 20 bp, Artificial Sequence
  MKO10067786_B_1700020D05Rik
  gRNA
gaacggctccactacgtgtt

SEQ ID NO: 67787 - DNA, 20 bp, Artificial Sequence
  MKO10067787_B_1700020D05Rik
  gRNA
cttcgtgaaacagcgttacc

SEQ ID NO: 67788 - DNA, 20 bp, Artificial Sequence
  MKO10067788_B_1700020D05Rik
  gRNA
gtggggtccgcgagcaaatc

SEQ ID NO: 67789 - DNA, 20 bp, Artificial Sequence
  MKO10067789_B_1700020L24Rik
  gRNA
aaccgtgcgtgttggagacg

SEQ ID NO: 67790 - DNA, 20 bp, Artificial Sequence
  MKO10067790_B_1700020L24Rik
  gRNA
ttgggaagaatggataaaca

SEQ ID NO: 67791 - DNA, 20 bp, Artificial Sequence
  MKO10067791_B_1700020L24Rik
  gRNA
cctcgcgctcttccgcgtct

SEQ ID NO: 67792 - DNA, 20 bp, Artificial Sequence
  MKO10067792_B_1700020N15Rik
  gRNA
cccaagagctcagactccct

SEQ ID NO: 67793 - DNA, 20 bp, Artificial Sequence
  MKO10067793_B_1700020N15Rik
  gRNA
aaagttacaagaatttcaca

SEQ ID NO: 67794 - DNA, 20 bp, Artificial Sequence
  MKO10067794_B_1700020N15Rik
  gRNA
caagatcatactgtacatcc

SEQ ID NO: 67795 - DNA, 20 bp, Artificial Sequence
  MKO10067795_B_1700021F05Rik
  gRNA
agactgagaacgacaagcac

SEQ ID NO: 67796 - DNA, 20 bp, Artificial Sequence
  MKO10067796_B_1700021F05Rik
  gRNA
gtagaagatgcattctacaa

SEQ ID NO: 67797 - DNA, 20 bp, Artificial Sequence
  MKO10067797_B_1700021F05Rik
  gRNA
gactgaatggggagaagttg

SEQ ID NO: 67798 - DNA, 20 bp, Artificial Sequence
  MKO10067798_B_1700021F07Rik
  gRNA
cgttgttaaatatccccact

SEQ ID NO: 67799 - DNA, 20 bp, Artificial Sequence
  MKO10067799_B_1700021F07Rik
  gRNA
aaagtgaagcccggcaaaac

SEQ ID NO: 67800 - DNA, 20 bp, Artificial Sequence
  MKO10067800_B_1700021F07Rik
  gRNA
tcactggacggacatagaag

SEQ ID NO: 67801 - DNA, 20 bp, Artificial Sequence
  MKO10067801_B_1700021K19Rik
  gRNA
gcgggaatggatcttggcgg

SEQ ID NO: 67802 - DNA, 20 bp, Artificial Sequence
  MKO10067802_B_1700021K19Rik
  gRNA
cccgcactcagcccttcacg

SEQ ID NO: 67803 - DNA, 20 bp, Artificial Sequence
  MKO10067803_B_1700021K19Rik
  gRNA
tcacgctgtcagtgtcgctc

SEQ ID NO: 67804 - DNA, 20 bp, Artificial Sequence
  MKO10067804_B_1700022I11Rik
  gRNA
tttggcagatccgaagatgg

SEQ ID NO: 67805 - DNA, 20 bp, Artificial Sequence
  MKO10067805_B_1700022I11Rik
  gRNA
ggttgcggaggattcactgc

SEQ ID NO: 67806 - DNA, 20 bp, Artificial Sequence
  MKO10067806_B_1700022I11Rik
  gRNA
ccccaggatcggccaaggac

SEQ ID NO: 67807 - DNA, 20 bp, Artificial Sequence
  MKO10067807_B_1700022P22Rik
  gRNA
ctttcagataatgccatatt

SEQ ID NO: 67808 - DNA, 20 bp, Artificial Sequence
  MKO10067808_B_1700022P22Rik
  gRNA
ctcttcgttgcccttgttca

SEQ ID NO: 67809 - DNA, 20 bp, Artificial Sequence
  MKO10067809_B_1700022P22Rik
  gRNA
cttcgttgcttctttccacc

SEQ ID NO: 67810 - DNA, 20 bp, Artificial Sequence
  MKO10067810_B_1700023E05Rik
  gRNA
ggagatctctcctcctgcgc

SEQ ID NO: 67811 - DNA, 20 bp, Artificial Sequence
  MKO10067811_B_1700023E05Rik
  gRNA
cccgtgaccttgtaaagaaa

SEQ ID NO: 67812 - DNA, 20 bp, Artificial Sequence
  MKO10067812_B_1700023E05Rik
  gRNA
attcttaccatttctttaca

SEQ ID NO: 67813 - DNA, 20 bp, Artificial Sequence
  MKO10067813_B_1700023F06Rik
  gRNA
gctggatacccgcgttgcgc

SEQ ID NO: 67814 - DNA, 20 bp, Artificial Sequence
  MKO10067814_B_1700023F06Rik
  gRNA
gatccccatcgacactgaga

SEQ ID NO: 67815 - DNA, 20 bp, Artificial Sequence
  MKO10067815_B_1700023F06Rik
  gRNA
ctgtaccttctcagtgtcga

SEQ ID NO: 67816 - DNA, 20 bp, Artificial Sequence
  MKO10067816_B_1700024G13Rik
  gRNA
ccagctgtgttggccaaaga

SEQ ID NO: 67817 - DNA, 20 bp, Artificial Sequence
  MKO10067817_B_1700024G13Rik
  gRNA
ggtggagcttgtggtaaatg

SEQ ID NO: 67818 - DNA, 20 bp, Artificial Sequence
  MKO10067818_B_1700024G13Rik
  gRNA
actagacccactgtgtgaag

SEQ ID NO: 67819 - DNA, 20 bp, Artificial Sequence
  MKO10067819_B_1700024P04Rik
  gRNA
tgagggtacagcgctttctg

SEQ ID NO: 67820 - DNA, 20 bp, Artificial Sequence
  MKO10067820_B_1700024P04Rik
  gRNA
tgttagggacaacttccttc

SEQ ID NO: 67821 - DNA, 20 bp, Artificial Sequence
  MKO10067821_B_1700024P04Rik
  gRNA
gttcgaagatgtcattgatg

SEQ ID NO: 67822 - DNA, 20 bp, Artificial Sequence
  MKO10067822_B_1700024P16Rik
  gRNA
aaggcatagaggttcacgaa

SEQ ID NO: 67823 - DNA, 20 bp, Artificial Sequence
  MKO10067823_B_1700024P16Rik
  gRNA
ggaccgagggtctcaatgga

SEQ ID NO: 67824 - DNA, 20 bp, Artificial Sequence
  MKO10067824_B_1700024P16Rik
  gRNA
tccctcagcacacaagttaa

SEQ ID NO: 67825 - DNA, 20 bp, Artificial Sequence
  MKO10067825_B_1700025F22Rik
  gRNA
tttatccacaaacgattctg

SEQ ID NO: 67826 - DNA, 20 bp, Artificial Sequence
  MKO10067826_B_1700025F22Rik
  gRNA
atatgccacagaatcgtttg

SEQ ID NO: 67827 - DNA, 20 bp, Artificial Sequence
  MKO10067827_B_1700025F22Rik
  gRNA
tgacttaccgtatgatttga

SEQ ID NO: 67828 - DNA, 20 bp, Artificial Sequence
  MKO10067828_B_1700025G04Rik
  gRNA
acaagaattcttcagaatgc

SEQ ID NO: 67829 - DNA, 20 bp, Artificial Sequence
  MKO10067829_B_1700025G04Rik
  gRNA
ggattactgttctgaagaag

SEQ ID NO: 67830 - DNA, 20 bp, Artificial Sequence
  MKO10067830_B_1700025G04Rik
  gRNA
gcattctgaagaattcttgt

SEQ ID NO: 67831 - DNA, 20 bp, Artificial Sequence
  MKO10067831_B_1700026D08Rik
  gRNA
tgtatctaacaagtgaccac

SEQ ID NO: 67832 - DNA, 20 bp, Artificial Sequence
  MKO10067832_B_1700026D08Rik
  gRNA
cctcgatccccagctgcgcc

SEQ ID NO: 67833 - DNA, 20 bp, Artificial Sequence
  MKO10067833_B_1700026D08Rik
  gRNA
tctgcccatagacaaccact

SEQ ID NO: 67834 - DNA, 20 bp, Artificial Sequence
  MKO10067834_B_1700026L06Rik
  gRNA
tgaacatgatcagaatccgc

SEQ ID NO: 67835 - DNA, 20 bp, Artificial Sequence
  MKO10067835_B_1700026L06Rik
  gRNA
agaatgcccacgacaaaatc

SEQ ID NO: 67836 - DNA, 20 bp, Artificial Sequence
  MKO10067836_B_1700026L06Rik
  gRNA
actgcaataactccacccac

SEQ ID NO: 67837 - DNA, 20 bp, Artificial Sequence
  MKO10067837_B_1700028K03Rik
  gRNA
gcgtttactgtgttgtgtac

SEQ ID NO: 67838 - DNA, 20 bp, Artificial Sequence
  MKO10067838_B_1700028K03Rik
  gRNA
tgctaaggagtgtatgacat

SEQ ID NO: 67839 - DNA, 20 bp, Artificial Sequence
  MKO10067839_B_1700028K03Rik
  gRNA
ttctatttgctccactccat

SEQ ID NO: 67840 - DNA, 20 bp, Artificial Sequence
  MKO10067840_B_1700028P14Rik
  gRNA
tgaatacctttccaaaatcc

SEQ ID NO: 67841 - DNA, 20 bp, Artificial Sequence
  MKO10067841_B_1700028P14Rik
  gRNA
aggaacatcccgaaagcctg

SEQ ID NO: 67842 - DNA, 20 bp, Artificial Sequence
  MKO10067842_B_1700028P14Rik
  gRNA
gaagaagaaaacgggcttgc

SEQ ID NO: 67843 - DNA, 20 bp, Artificial Sequence
  MKO10067843_B_1700029F12Rik
  gRNA
tgacgacgccccaagacagc

SEQ ID NO: 67844 - DNA, 20 bp, Artificial Sequence
  MKO10067844_B_1700029F12Rik
  gRNA
atgacaaggaaatgagctcc

SEQ ID NO: 67845 - DNA, 20 bp, Artificial Sequence
  MKO10067845_B_1700029F12Rik
  gRNA
ctgagcttacatcccagtca

SEQ ID NO: 67846 - DNA, 20 bp, Artificial Sequence
  MKO10067846_B_1700029H14Rik
  gRNA
gtgacggggcggaactccag

SEQ ID NO: 67847 - DNA, 20 bp, Artificial Sequence
  MKO10067847_B_1700029H14Rik
  gRNA
gcattctgagtccacgaagc

SEQ ID NO: 67848 - DNA, 20 bp, Artificial Sequence
  MKO10067848_B_1700029H14Rik
  gRNA
ccgtcatccgtgtcacttct

SEQ ID NO: 67849 - DNA, 20 bp, Artificial Sequence
  MKO10067849_B_1700029I15Rik
  gRNA
gcccgtcccgcttgcgctgc

SEQ ID NO: 67850 - DNA, 20 bp, Artificial Sequence
  MKO10067850_B_1700029I15Rik
  gRNA
agcggggctgaaaattcctc

SEQ ID NO: 67851 - DNA, 20 bp, Artificial Sequence
  MKO10067851_B_1700029I15Rik
  gRNA
taggtctcagcaatctgttc

SEQ ID NO: 67852 - DNA, 20 bp, Artificial Sequence
  MKO10067852_B_1700029J07Rik
  gRNA
caagctgcatcttcacccga

SEQ ID NO: 67853 - DNA, 20 bp, Artificial Sequence
  MKO10067853_B_1700029J07Rik
  gRNA
agctatgccaatgttaccat

SEQ ID NO: 67854 - DNA, 20 bp, Artificial Sequence
  MKO10067854_B_1700029J07Rik
  gRNA
acgtgaatttgaatcaagtg

SEQ ID NO: 67855 - DNA, 20 bp, Artificial Sequence
  MKO10067855_B_1700029P11Rik
  gRNA
atgcacgccgtcttcttctt

SEQ ID NO: 67856 - DNA, 20 bp, Artificial Sequence
  MKO10067856_B_1700029P11Rik
  gRNA
ggaccgggcgaccacagccc

SEQ ID NO: 67857 - DNA, 20 bp, Artificial Sequence
  MKO10067857_B_1700029P11Rik
  gRNA
ttgaagaacccacacttcca

SEQ ID NO: 67858 - DNA, 20 bp, Artificial Sequence
  MKO10067858_B_1700030F18Rik
  gRNA
ctttactcactgtgaccgga

SEQ ID NO: 67859 - DNA, 20 bp, Artificial Sequence
  MKO10067859_B_1700030F18Rik
  gRNA
ttcttaaagctggggatcga

SEQ ID NO: 67860 - DNA, 20 bp, Artificial Sequence
  MKO10067860_B_1700030F18Rik
  gRNA
atcggtgccttctctattat

SEQ ID NO: 67861 - DNA, 20 bp, Artificial Sequence
  MKO10067861_B_1700030J22Rik
  gRNA
cagcgacctcacactggaag

SEQ ID NO: 67862 - DNA, 20 bp, Artificial Sequence
  MKO10067862_B_1700030J22Rik
  gRNA
cccagcggaagccccgagca

SEQ ID NO: 67863 - DNA, 20 bp, Artificial Sequence
  MKO10067863_B_1700030J22Rik
  gRNA
ctgctaactgtctcgggcat

SEQ ID NO: 67864 - DNA, 20 bp, Artificial Sequence
  MKO10067864_B_1700030K09Rik
  gRNA
acccacatcacctactcgac

SEQ ID NO: 67865 - DNA, 20 bp, Artificial Sequence
  MKO10067865_B_1700030K09Rik
  gRNA
gtcagcgcagacgccataga

SEQ ID NO: 67866 - DNA, 20 bp, Artificial Sequence
  MKO10067866_B_1700030K09Rik
  gRNA
ggtccacataagcacctcca

SEQ ID NO: 67867 - DNA, 20 bp, Artificial Sequence
  MKO10067867_B_1700031F05Rik
  gRNA
aggacctgtgccagcttgac

SEQ ID NO: 67868 - DNA, 20 bp, Artificial Sequence
  MKO10067868_B_1700031F05Rik
  gRNA
atacaggacatattgatgac

SEQ ID NO: 67869 - DNA, 20 bp, Artificial Sequence
  MKO10067869_B_1700031F05Rik
  gRNA
caggctggtcaaggggatac

SEQ ID NO: 67870 - DNA, 20 bp, Artificial Sequence
  MKO10067870_B_1700034E13Rik
  gRNA
ccagtaatggttctgacttc

SEQ ID NO: 67871 - DNA, 20 bp, Artificial Sequence
  MKO10067871_B_1700034E13Rik
  gRNA
ttggttccctgtaacgtttg

SEQ ID NO: 67872 - DNA, 20 bp, Artificial Sequence
  MKO10067872_B_1700034E13Rik
  gRNA
gtcaagatcgtagaaccctt

SEQ ID NO: 67873 - DNA, 20 bp, Artificial Sequence
  MKO10067873_B_1700034F02Rik
  gRNA
attgagtgcttccagattaa

SEQ ID NO: 67874 - DNA, 20 bp, Artificial Sequence
  MKO10067874_B_1700034F02Rik
  gRNA
cggaaaaccaaagctatcta

SEQ ID NO: 67875 - DNA, 20 bp, Artificial Sequence
  MKO10067875_B_1700034F02Rik
  gRNA
tggtgatacaccaatgctgt

SEQ ID NO: 67876 - DNA, 20 bp, Artificial Sequence
  MKO10067876_B_1700034J05Rik
  gRNA
agatttgtgtccgcagccat

SEQ ID NO: 67877 - DNA, 20 bp, Artificial Sequence
  MKO10067877_B_1700034J05Rik
  gRNA
tgacaaacatcacgttcttt

SEQ ID NO: 67878 - DNA, 20 bp, Artificial Sequence
  MKO10067878_B_1700034J05Rik
  gRNA
tgcagactctcttgctaatc

SEQ ID NO: 67879 - DNA, 20 bp, Artificial Sequence
  MKO10067879_B_1700034O15Rik
  gRNA
tctgatagtgagtgcaagct

SEQ ID NO: 67880 - DNA, 20 bp, Artificial Sequence
  MKO10067880_B_1700034O15Rik
  gRNA
gagtcttcacccccttcact

SEQ ID NO: 67881 - DNA, 20 bp, Artificial Sequence
  MKO10067881_B_1700034O15Rik
  gRNA
ttatgttgtagaccagggtg

SEQ ID NO: 67882 - DNA, 20 bp, Artificial Sequence
  MKO10067882_B_1700037C18Rik
  gRNA
agagcgggttctcttgcaca

SEQ ID NO: 67883 - DNA, 20 bp, Artificial Sequence
  MKO10067883_B_1700037C18Rik
  gRNA
ccactggctaggccggctca

SEQ ID NO: 67884 - DNA, 20 bp, Artificial Sequence
  MKO10067884_B_1700037C18Rik
  gRNA
ccatgagccggcctagccag

SEQ ID NO: 67885 - DNA, 20 bp, Artificial Sequence
  MKO10067885_B_1700037H04Rik
  gRNA
taccttgcagaccggcacca

SEQ ID NO: 67886 - DNA, 20 bp, Artificial Sequence
  MKO10067886_B_1700037H04Rik
  gRNA
tccttgctcagtctgcgcac

SEQ ID NO: 67887 - DNA, 20 bp, Artificial Sequence
  MKO10067887_B_1700037H04Rik
  gRNA
agcgtcacacccacctctga

SEQ ID NO: 67888 - DNA, 20 bp, Artificial Sequence
  MKO10067888_B_1700039E15Rik
  gRNA
tgcccagacccatgatagcc

SEQ ID NO: 67889 - DNA, 20 bp, Artificial Sequence
  MKO10067889_B_1700039E15Rik
  gRNA
ggctatcaggttgatcagat

SEQ ID NO: 67890 - DNA, 20 bp, Artificial Sequence
  MKO10067890_B_1700039E15Rik
  gRNA
gggcaccatgctaactctcc

SEQ ID NO: 67891 - DNA, 20 bp, Artificial Sequence
  MKO10067891_B_1700040L02Rik
  gRNA
taagtggctcggggaagtga

SEQ ID NO: 67892 - DNA, 20 bp, Artificial Sequence
  MKO10067892_B_1700040L02Rik
  gRNA
tggtcagaggagagtatatc

SEQ ID NO: 67893 - DNA, 20 bp, Artificial Sequence
  MKO10067893_B_1700040L02Rik
  gRNA
aatcttcactcttctgcgag

SEQ ID NO: 67894 - DNA, 20 bp, Artificial Sequence
  MKO10067894_B_1700042B14Rik
  gRNA
tgcaatcctttcagactttc

SEQ ID NO: 67895 - DNA, 20 bp, Artificial Sequence
  MKO10067895_B_1700042B14Rik
  gRNA
tagaaaccagcagcaagtgc

SEQ ID NO: 67896 - DNA, 20 bp, Artificial Sequence
  MKO10067896_B_1700042B14Rik
  gRNA
acatagccatcatgagcaaa

SEQ ID NO: 67897 - DNA, 20 bp, Artificial Sequence
  MKO10067897_B_1700042G07Rik
  gRNA
tagaggaccagaaagccccc

SEQ ID NO: 67898 - DNA, 20 bp, Artificial Sequence
  MKO10067898_B_1700042G07Rik
  gRNA
gtattgattctgtcacctcg

SEQ ID NO: 67899 - DNA, 20 bp, Artificial Sequence
  MKO10067899_B_1700042G07Rik
  gRNA
gcttgacttctccctaccga

SEQ ID NO: 67900 - DNA, 20 bp, Artificial Sequence
  MKO10067900_B_1700047I17Rik2
  gRNA
tgttgcagacaaaacttacc

SEQ ID NO: 67901 - DNA, 20 bp, Artificial Sequence
  MKO10067901_B_1700047I17Rik2
  gRNA
gacacacctccttcttcatc

SEQ ID NO: 67902 - DNA, 20 bp, Artificial Sequence
  MKO10067902_B_1700047I17Rik2
  gRNA
tctctagtgtgtgactttct

SEQ ID NO: 67903 - DNA, 20 bp, Artificial Sequence
  MKO10067903_B_1700049G17Rik
  gRNA
gaaacagacaggccgagccc

SEQ ID NO: 67904 - DNA, 20 bp, Artificial Sequence
  MKO10067904_B_1700049G17Rik
  gRNA
agagaagtcattcgagtgca

SEQ ID NO: 67905 - DNA, 20 bp, Artificial Sequence
  MKO10067905_B_1700049G17Rik
  gRNA
gaggtatgccagaacaacaa

SEQ ID NO: 67906 - DNA, 20 bp, Artificial Sequence
  MKO10067906_B_1700052N19Rik
  gRNA
ccatgacttcgacgtgttta

SEQ ID NO: 67907 - DNA, 20 bp, Artificial Sequence
  MKO10067907_B_1700052N19Rik
  gRNA
tccatattgtgtgatgcccc

SEQ ID NO: 67908 - DNA, 20 bp, Artificial Sequence
  MKO10067908_B_1700052N19Rik
  gRNA
aacaccgcagatcttaacca

SEQ ID NO: 67909 - DNA, 20 bp, Artificial Sequence
  MKO10067909_B_1700054O13Rik
  gRNA
ttatgtgtaccgtatactgc

SEQ ID NO: 67910 - DNA, 20 bp, Artificial Sequence
  MKO10067910_B_1700054O13Rik
  gRNA
gtcggtgaggtaatcaagca

SEQ ID NO: 67911 - DNA, 20 bp, Artificial Sequence
  MKO10067911_B_1700054O13Rik
  gRNA
gagcaatataccccctgcat

SEQ ID NO: 67912 - DNA, 20 bp, Artificial Sequence
  MKO10067912_B_1700055N04Rik
  gRNA
gatcattctgtgcgagaatg

SEQ ID NO: 67913 - DNA, 20 bp, Artificial Sequence
  MKO10067913_B_1700055N04Rik
  gRNA
agagctgctaccccagtatc

SEQ ID NO: 67914 - DNA, 20 bp, Artificial Sequence
  MKO10067914_B_1700055N04Rik
  gRNA
tgagcctgtgtccaccaact

SEQ ID NO: 67915 - DNA, 20 bp, Artificial Sequence
  MKO10067915_B_1700056E22Rik
  gRNA
cactccggagagctactcgg

SEQ ID NO: 67916 - DNA, 20 bp, Artificial Sequence
  MKO10067916_B_1700056E22Rik
  gRNA
cccgcagtccatccgccccc

SEQ ID NO: 67917 - DNA, 20 bp, Artificial Sequence
  MKO10067917_B_1700056E22Rik
  gRNA
cgggctccaaaacatcgcac

SEQ ID NO: 67918 - DNA, 20 bp, Artificial Sequence
  MKO10067918_B_1700057G04Rik
  gRNA
atctcttgatgaagaattcg

SEQ ID NO: 67919 - DNA, 20 bp, Artificial Sequence
  MKO10067919_B_1700057G04Rik
  gRNA
ccaatgttgcacacgcagat

SEQ ID NO: 67920 - DNA, 20 bp, Artificial Sequence
  MKO10067920_B_1700057G04Rik
  gRNA
ccattagacctttcaccatg

SEQ ID NO: 67921 - DNA, 20 bp, Artificial Sequence
  MKO10067921_B_1700061G19Rik
  gRNA
ggacataccgagtatagatt

SEQ ID NO: 67922 - DNA, 20 bp, Artificial Sequence
  MKO10067922_B_1700061G19Rik
  gRNA
gggctacttgaagcatctca

SEQ ID NO: 67923 - DNA, 20 bp, Artificial Sequence
  MKO10067923_B_1700061G19Rik
  gRNA
tgccatgatagctccaatgc

SEQ ID NO: 67924 - DNA, 20 bp, Artificial Sequence
  MKO10067924_B_1700065D16Rik
  gRNA
cttagagattaacagtttat

SEQ ID NO: 67925 - DNA, 20 bp, Artificial Sequence
  MKO10067925_B_1700065D16Rik
  gRNA
gagacccggcgactcgaagc

SEQ ID NO: 67926 - DNA, 20 bp, Artificial Sequence
  MKO10067926_B_1700065D16Rik
  gRNA
cgacgacgcgcggccctacc

SEQ ID NO: 67927 - DNA, 20 bp, Artificial Sequence
  MKO10067927_B_1700065I17Rik
  gRNA
atgtcggtaatctttatctc

SEQ ID NO: 67928 - DNA, 20 bp, Artificial Sequence
  MKO10067928_B_1700065I17Rik
  gRNA
cctatcagatcagtcgcctc

SEQ ID NO: 67929 - DNA, 20 bp, Artificial Sequence
  MKO10067929_B_1700065I17Rik
  gRNA
aagagcagcctcaacagctc

SEQ ID NO: 67930 - DNA, 20 bp, Artificial Sequence
  MKO10067930_B_1700066B19Rik
  gRNA
gcacaatgcagatcgccagc

SEQ ID NO: 67931 - DNA, 20 bp, Artificial Sequence
  MKO10067931_B_1700066B19Rik
  gRNA
gctggcgatctgcattgtgc

SEQ ID NO: 67932 - DNA, 20 bp, Artificial Sequence
  MKO10067932_B_1700066B19Rik
  gRNA
atgaggtaaacgccgttctc

SEQ ID NO: 67933 - DNA, 20 bp, Artificial Sequence
  MKO10067933_B_1700066M21Rik
  gRNA
tggccaccattactagtaga

SEQ ID NO: 67934 - DNA, 20 bp, Artificial Sequence
  MKO10067934_B_1700066M21Rik
  gRNA
agcagttcgttgctgcgctg

SEQ ID NO: 67935 - DNA, 20 bp, Artificial Sequence
  MKO10067935_B_1700066M21Rik
  gRNA
tcgagcccatgctggggtcg

SEQ ID NO: 67936 - DNA, 20 bp, Artificial Sequence
  MKO10067936_B_1700067K01Rik
  gRNA
gaacctcccgcagaaaaagc

SEQ ID NO: 67937 - DNA, 20 bp, Artificial Sequence
  MKO10067937_B_1700067K01Rik
  gRNA
tggtgtgcagtatcggaaga

SEQ ID NO: 67938 - DNA, 20 bp, Artificial Sequence
  MKO10067938_B_1700067K01Rik
  gRNA
ccagcagctaacactgcgct

SEQ ID NO: 67939 - DNA, 20 bp, Artificial Sequence
  MKO10067939_B_1700067P10Rik
  gRNA
ctcattctccatctttccca

SEQ ID NO: 67940 - DNA, 20 bp, Artificial Sequence
  MKO10067940_B_1700067P10Rik
  gRNA
gctctcccaccactctccga

SEQ ID NO: 67941 - DNA, 20 bp, Artificial Sequence
  MKO10067941_B_1700067P10Rik
  gRNA
tccggtacctctgcgccagc

SEQ ID NO: 67942 - DNA, 20 bp, Artificial Sequence
  MKO10067942_B_1700071K01Rik
  gRNA
tgcatgttaagaagccctta

SEQ ID NO: 67943 - DNA, 20 bp, Artificial Sequence
  MKO10067943_B_1700071K01Rik
  gRNA
agccaagccgaactttccga

SEQ ID NO: 67944 - DNA, 20 bp, Artificial Sequence
  MKO10067944_B_1700071K01Rik
  gRNA
cccctcaagcttccctagtg

SEQ ID NO: 67945 - DNA, 20 bp, Artificial Sequence
  MKO10067945_B_1700074P13Rik
  gRNA
agagtgtccaaacagtcact

SEQ ID NO: 67946 - DNA, 20 bp, Artificial Sequence
  MKO10067946_B_1700074P13Rik
  gRNA
gggaaagcaagtgtagccaa

SEQ ID NO: 67947 - DNA, 20 bp, Artificial Sequence
  MKO10067947_B_1700074P13Rik
  gRNA
gactgcagatagaccatata

SEQ ID NO: 67948 - DNA, 20 bp, Artificial Sequence
  MKO10067948_B_1700080E11Rik
  gRNA
gtgacaaagatgccgccagc

SEQ ID NO: 67949 - DNA, 20 bp, Artificial Sequence
  MKO10067949_B_1700080E11Rik
  gRNA
attccttcattggtgtcgcc

SEQ ID NO: 67950 - DNA, 20 bp, Artificial Sequence
  MKO10067950_B_1700080E11Rik
  gRNA
gttgaactgttcgttccttg

SEQ ID NO: 67951 - DNA, 20 bp, Artificial Sequence
  MKO10067951_B_1700080O16Rik
  gRNA
cggcccccacagatactctc

SEQ ID NO: 67952 - DNA, 20 bp, Artificial Sequence
  MKO10067952_B_1700080O16Rik
  gRNA
tggatcctcccgacaacagc

SEQ ID NO: 67953 - DNA, 20 bp, Artificial Sequence
  MKO10067953_B_1700080O16Rik
  gRNA
ttgacattccggctgttgtc

SEQ ID NO: 67954 - DNA, 20 bp, Artificial Sequence
  MKO10067954_B_1700084C01Rik
  gRNA
gggtcatgtaaagagggcac

SEQ ID NO: 67955 - DNA, 20 bp, Artificial Sequence
  MKO10067955_B_1700084C01Rik
  gRNA
atgctcactatgtccgccac

SEQ ID NO: 67956 - DNA, 20 bp, Artificial Sequence
  MKO10067956_B_1700084C01Rik
  gRNA
gtcacattcttgccaccaac

SEQ ID NO: 67957 - DNA, 20 bp, Artificial Sequence
  MKO10067957_B_1700088E04Rik
  gRNA
tcgtgaacaattcaagcctc

SEQ ID NO: 67958 - DNA, 20 bp, Artificial Sequence
  MKO10067958_B_1700088E04Rik
  gRNA
gtggctcacgttcatcaaac

SEQ ID NO: 67959 - DNA, 20 bp, Artificial Sequence
  MKO10067959_B_1700088E04Rik
  gRNA
cttccagcaacgccacatca

SEQ ID NO: 67960 - DNA, 20 bp, Artificial Sequence
  MKO10067960_B_1700092M07Rik
  gRNA
atcccttgcttgctcatccg

SEQ ID NO: 67961 - DNA, 20 bp, Artificial Sequence
  MKO10067961_B_1700092M07Rik
  gRNA
ggtgcttgtaggcaacgaag

SEQ ID NO: 67962 - DNA, 20 bp, Artificial Sequence
  MKO10067962_B_1700092M07Rik
  gRNA
gtcctcgcggtcaggcaagc

SEQ ID NO: 67963 - DNA, 20 bp, Artificial Sequence
  MKO10067963_B_1700093K21Rik
  gRNA
ccactgaagaccctctgtac

SEQ ID NO: 67964 - DNA, 20 bp, Artificial Sequence
  MKO10067964_B_1700093K21Rik
  gRNA
gaagaagaatgtgatcgctg

SEQ ID NO: 67965 - DNA, 20 bp, Artificial Sequence
  MKO10067965_B_1700093K21Rik
  gRNA
atgtttacgcaaagtgacac

SEQ ID NO: 67966 - DNA, 20 bp, Artificial Sequence
  MKO10067966_B_1700094D03Rik
  gRNA
ccagcaggaactcaatcaga

SEQ ID NO: 67967 - DNA, 20 bp, Artificial Sequence
  MKO10067967_B_1700094D03Rik
  gRNA
ccatctgattgagttcctgc

SEQ ID NO: 67968 - DNA, 20 bp, Artificial Sequence
  MKO10067968_B_1700094D03Rik
  gRNA
gcagaatttgcaaagagctg

SEQ ID NO: 67969 - DNA, 20 bp, Artificial Sequence
  MKO10067969_B_1700101E01Rik
  gRNA
tcgtctcgtacagcttcccc

SEQ ID NO: 67970 - DNA, 20 bp, Artificial Sequence
  MKO10067970_B_1700101E01Rik
  gRNA
tctttgacctgttacaacat

SEQ ID NO: 67971 - DNA, 20 bp, Artificial Sequence
  MKO10067971_B_1700101E01Rik
  gRNA
aattatggactctacatccg

SEQ ID NO: 67972 - DNA, 20 bp, Artificial Sequence
  MKO10067972_B_1700102P08Rik
  gRNA
aatgaattgaaccgtgtgtg

SEQ ID NO: 67973 - DNA, 20 bp, Artificial Sequence
  MKO10067973_B_1700102P08Rik
  gRNA
gaactgctgagcagtacatt

SEQ ID NO: 67974 - DNA, 20 bp, Artificial Sequence
  MKO10067974_B_1700102P08Rik
  gRNA
gctcagcagttctagccaag

SEQ ID NO: 67975 - DNA, 20 bp, Artificial Sequence
  MKO10067975_B_1700106J16Rik
  gRNA
acaacccgctgcgagccatc

SEQ ID NO: 67976 - DNA, 20 bp, Artificial Sequence
  MKO10067976_B_1700106J16Rik
  gRNA
cgcgggccgctcagtccgcc

SEQ ID NO: 67977 - DNA, 20 bp, Artificial Sequence
  MKO10067977_B_1700106J16Rik
  gRNA
ctgctgtaggatctccaagt

SEQ ID NO: 67978 - DNA, 20 bp, Artificial Sequence
  MKO10067978_B_1700109H08Rik
  gRNA
ctctaggattatgacaatga

SEQ ID NO: 67979 - DNA, 20 bp, Artificial Sequence
  MKO10067979_B_1700109H08Rik
  gRNA
ggcttggcagtgtttctccg

SEQ ID NO: 67980 - DNA, 20 bp, Artificial Sequence
  MKO10067980_B_1700109H08Rik
  gRNA
gctatgtaaatttagaagag

SEQ ID NO: 67981 - DNA, 20 bp, Artificial Sequence
  MKO10067981_B_1700110M21Rik
  gRNA
ggccgggtgtgccgagccac

SEQ ID NO: 67982 - DNA, 20 bp, Artificial Sequence
  MKO10067982_B_1700110M21Rik
  gRNA
gtgattgaaggtctatagac

SEQ ID NO: 67983 - DNA, 20 bp, Artificial Sequence
  MKO10067983_B_1700110M21Rik
  gRNA
ggggatgcagcgacctgtct

SEQ ID NO: 67984 - DNA, 20 bp, Artificial Sequence
  MKO10067984_B_1700112E06Rik
  gRNA
ctccaagttgaccagctcat

SEQ ID NO: 67985 - DNA, 20 bp, Artificial Sequence
  MKO10067985_B_1700112E06Rik
  gRNA
tgcctcctcccgttcttgtc

SEQ ID NO: 67986 - DNA, 20 bp, Artificial Sequence
  MKO10067986_B_1700112E06Rik
  gRNA
acctgagcttcaacctcttg

SEQ ID NO: 67987 - DNA, 20 bp, Artificial Sequence
  MKO10067987_B_1700113H08Rik
  gRNA
gacgactacccaatcagacc

SEQ ID NO: 67988 - DNA, 20 bp, Artificial Sequence
  MKO10067988_B_1700113H08Rik
  gRNA
tgcttactcacacttgtatt

SEQ ID NO: 67989 - DNA, 20 bp, Artificial Sequence
  MKO10067989_B_1700113H08Rik
  gRNA
ctccagattccttactcaca

SEQ ID NO: 67990 - DNA, 20 bp, Artificial Sequence
  MKO10067990_B_1700122O11Rik
  gRNA
tcccgtggcctgtcagccac

SEQ ID NO: 67991 - DNA, 20 bp, Artificial Sequence
  MKO10067991_B_1700122O11Rik
  gRNA
tatgtccaagatctcatcat

SEQ ID NO: 67992 - DNA, 20 bp, Artificial Sequence
  MKO10067992_B_1700122O11Rik
  gRNA
gacagacctccaaagtcact

SEQ ID NO: 67993 - DNA, 20 bp, Artificial Sequence
  MKO10067993_B_1700123I01Rik
  gRNA
gcaaaacttaccaactcaag

SEQ ID NO: 67994 - DNA, 20 bp, Artificial Sequence
  MKO10067994_B_1700123I01Rik
  gRNA
agatgatattcctcttgagt

SEQ ID NO: 67995 - DNA, 20 bp, Artificial Sequence
  MKO10067995_B_1700123I01Rik
  gRNA
ggattctatccgtgcagtct

SEQ ID NO: 67996 - DNA, 20 bp, Artificial Sequence
  MKO10067996_B_1700123K08Rik
  gRNA
accaaacgtatgctaccacc

SEQ ID NO: 67997 - DNA, 20 bp, Artificial Sequence
  MKO10067997_B_1700123K08Rik
  gRNA
tcatctattgccacatctac

SEQ ID NO: 67998 - DNA, 20 bp, Artificial Sequence
  MKO10067998_B_1700123K08Rik
  gRNA
ttccacgaagtctggctgga

SEQ ID NO: 67999 - DNA, 20 bp, Artificial Sequence
  MKO10067999_B_1700123O20Rik
  gRNA
ttgagtgtcagctacgtctt

SEQ ID NO: 68000 - DNA, 20 bp, Artificial Sequence
  MKO10068000_B_1700123O20Rik
  gRNA
tctacaggacctggtcgcta

SEQ ID NO: 68001 - DNA, 20 bp, Artificial Sequence
  MKO10068001_B_1700123O20Rik
  gRNA
ggtcagtgagccagatttcg

SEQ ID NO: 68002 - DNA, 20 bp, Artificial Sequence
  MKO10068002_B_1700125H20Rik
  gRNA
ggagcgttccctgtttagag

SEQ ID NO: 68003 - DNA, 20 bp, Artificial Sequence
  MKO10068003_B_1700125H20Rik
  gRNA
atcactgcttgccaaccaag

SEQ ID NO: 68004 - DNA, 20 bp, Artificial Sequence
  MKO10068004_B_1700125H20Rik
  gRNA
gtacaccaagacgaaccaga

SEQ ID NO: 68005 - DNA, 20 bp, Artificial Sequence
  MKO10068005_B_1700129C05Rik
  gRNA
gtaccagggaatctgcagcc

SEQ ID NO: 68006 - DNA, 20 bp, Artificial Sequence
  MKO10068006_B_1700129C05Rik
  gRNA
aggacagaatgaattgtcat

SEQ ID NO: 68007 - DNA, 20 bp, Artificial Sequence
  MKO10068007_B_1700129C05Rik
  gRNA
tgatttccagtctctgtccc

SEQ ID NO: 68008 - DNA, 20 bp, Artificial Sequence
  MKO10068008_B_1810009A15Rik
  gRNA
gatcctccatagctacgtcc

SEQ ID NO: 68009 - DNA, 20 bp, Artificial Sequence
  MKO10068009_B_1810009A15Rik
  gRNA
ggacgattgatctttcctcc

SEQ ID NO: 68010 - DNA, 20 bp, Artificial Sequence
  MKO10068010_B_1810009A15Rik
  gRNA
cgtgccaacatcacgctgtc

SEQ ID NO: 68011 - DNA, 20 bp, Artificial Sequence
  MKO10068011_B_1810009J06Rik
  gRNA
cgtctgcaatggagagatcc

SEQ ID NO: 68012 - DNA, 20 bp, Artificial Sequence
  MKO10068012_B_1810009J06Rik
  gRNA
tatttccccagccagaaaca

SEQ ID NO: 68013 - DNA, 20 bp, Artificial Sequence
  MKO10068013_B_1810009J06Rik
  gRNA
agaagactccaggttcgcct

SEQ ID NO: 68014 - DNA, 20 bp, Artificial Sequence
  MKO10068014_B_1810010H24Rik
  gRNA
ccgcgtgcatatactagccc

SEQ ID NO: 68015 - DNA, 20 bp, Artificial Sequence
  MKO10068015_B_1810010H24Rik
  gRNA
tgtgaaaccgggctacctta

SEQ ID NO: 68016 - DNA, 20 bp, Artificial Sequence
  MKO10068016_B_1810010H24Rik
  gRNA
tcgataccgggtttaaattc

SEQ ID NO: 68017 - DNA, 20 bp, Artificial Sequence
  MKO10068017_B_1810011H11Rik
  gRNA
cattggaggagctcaagtgt

SEQ ID NO: 68018 - DNA, 20 bp, Artificial Sequence
  MKO10068018_B_1810011H11Rik
  gRNA
cagctcacagctcaatctcc

SEQ ID NO: 68019 - DNA, 20 bp, Artificial Sequence
  MKO10068019_B_1810011H11Rik
  gRNA
tgctgaagaagaaaagccca

SEQ ID NO: 68020 - DNA, 20 bp, Artificial Sequence
  MKO10068020_B_1810011O10Rik
  gRNA
ggagaaaactcgagccctca

SEQ ID NO: 68021 - DNA, 20 bp, Artificial Sequence
  MKO10068021_B_1810011O10Rik
  gRNA
ctgtgtcgaagtggtagccg

SEQ ID NO: 68022 - DNA, 20 bp, Artificial Sequence
  MKO10068022_B_1810011O10Rik
  gRNA
gcccacagctttcttgcgag

SEQ ID NO: 68023 - DNA, 20 bp, Artificial Sequence
  MKO10068023_B_1810013L24Rik
  gRNA
tgacggcggtggctgcgttt

SEQ ID NO: 68024 - DNA, 20 bp, Artificial Sequence
  MKO10068024_B_1810013L24Rik
  gRNA
aagtgttcaaatcgacatca

SEQ ID NO: 68025 - DNA, 20 bp, Artificial Sequence
  MKO10068025_B_1810013L24Rik
  gRNA
agacaactgctcgtcctgct

SEQ ID NO: 68026 - DNA, 20 bp, Artificial Sequence
  MKO10068026_B_1810019J16Rik
  gRNA
ctgaggccgtatggagcccc

SEQ ID NO: 68027 - DNA, 20 bp, Artificial Sequence
  MKO10068027_B_1810019J16Rik
  gRNA
aagagtctgtgtccgtgccc

SEQ ID NO: 68028 - DNA, 20 bp, Artificial Sequence
  MKO10068028_B_1810019J16Rik
  gRNA
cagccaagactcatcattcc

SEQ ID NO: 68029 - DNA, 20 bp, Artificial Sequence
  MKO10068029_B_1810022K09Rik
  gRNA
taaatctgtgcagaaagagc

SEQ ID NO: 68030 - DNA, 20 bp, Artificial Sequence
  MKO10068030_B_1810022K09Rik
  gRNA
atggccaagaacaaattaaa

SEQ ID NO: 68031 - DNA, 20 bp, Artificial Sequence
  MKO10068031_B_1810022K09Rik
  gRNA
tctgcacagatttaagagaa

SEQ ID NO: 68032 - DNA, 20 bp, Artificial Sequence
  MKO10068032_B_1810024B03Rik
  gRNA
tgacaatagaccccacaatg

SEQ ID NO: 68033 - DNA, 20 bp, Artificial Sequence
  MKO10068033_B_1810024B03Rik
  gRNA
acatgatactatcccagagc

SEQ ID NO: 68034 - DNA, 20 bp, Artificial Sequence
  MKO10068034_B_1810024B03Rik
  gRNA
agctctggagacaggcgata

SEQ ID NO: 68035 - DNA, 20 bp, Artificial Sequence
  MKO10068035_B_1810026J23Rik
  gRNA
tcccgcttcaccgtgcccac

SEQ ID NO: 68036 - DNA, 20 bp, Artificial Sequence
  MKO10068036_B_1810026J23Rik
  gRNA
gatcatactcaccgacgatc

SEQ ID NO: 68037 - DNA, 20 bp, Artificial Sequence
  MKO10068037_B_1810026J23Rik
  gRNA
cgcctgatccacctgatcgt

SEQ ID NO: 68038 - DNA, 20 bp, Artificial Sequence
  MKO10068038_B_1810030O07Rik
  gRNA
gatctgaaaatctcgaagcc

SEQ ID NO: 68039 - DNA, 20 bp, Artificial Sequence
  MKO10068039_B_1810030O07Rik
  gRNA
caactcctgtgatcactttg

SEQ ID NO: 68040 - DNA, 20 bp, Artificial Sequence
  MKO10068040_B_1810030O07Rik
  gRNA
acagaaatggagacgtgcac

SEQ ID NO: 68041 - DNA, 20 bp, Artificial Sequence
  MKO10068041_B_1810033B17Rik
  gRNA
acccagctgagtccccgcct

SEQ ID NO: 68042 - DNA, 20 bp, Artificial Sequence
  MKO10068042_B_1810033B17Rik
  gRNA
aaatcctcgtttgctgattc

SEQ ID NO: 68043 - DNA, 20 bp, Artificial Sequence
  MKO10068043_B_1810033B17Rik
  gRNA
agccaagttcaagacatccc

SEQ ID NO: 68044 - DNA, 20 bp, Artificial Sequence
  MKO10068044_B_1810037I17Rik
  gRNA
cgtctggtaccgacggtgtc

SEQ ID NO: 68045 - DNA, 20 bp, Artificial Sequence
  MKO10068045_B_1810037I17Rik
  gRNA
cgcggagatggaggtgagcc

SEQ ID NO: 68046 - DNA, 20 bp, Artificial Sequence
  MKO10068046_B_1810037I17Rik
  gRNA
acacgaagacgaacaaggcc

SEQ ID NO: 68047 - DNA, 20 bp, Artificial Sequence
  MKO10068047_B_1810041L15Rik
  gRNA
agccggatgatgaccagttg

SEQ ID NO: 68048 - DNA, 20 bp, Artificial Sequence
  MKO10068048_B_1810041L15Rik
  gRNA
ggtttgcctgcatgaccgcc

SEQ ID NO: 68049 - DNA, 20 bp, Artificial Sequence
  MKO10068049_B_1810041L15Rik
  gRNA
gagccttacacggatcacaa

SEQ ID NO: 68050 - DNA, 20 bp, Artificial Sequence
  MKO10068050_B_1810043G02Rik
  gRNA
tgcagctgcgcaccggttcc

SEQ ID NO: 68051 - DNA, 20 bp, Artificial Sequence
  MKO10068051_B_1810043G02Rik
  gRNA
ctggccgagaacccgtgctg

SEQ ID NO: 68052 - DNA, 20 bp, Artificial Sequence
  MKO10068052_B_1810043G02Rik
  gRNA
acctgagtgtgattacctct

SEQ ID NO: 68053 - DNA, 20 bp, Artificial Sequence
  MKO10068053_B_1810043H04Rik
  gRNA
ggaccgctcatgtctgtgaa

SEQ ID NO: 68054 - DNA, 20 bp, Artificial Sequence
  MKO10068054_B_1810043H04Rik
  gRNA
ttcctaggagcctcccatca

SEQ ID NO: 68055 - DNA, 20 bp, Artificial Sequence
  MKO10068055_B_1810043H04Rik
  gRNA
ccaggccaagaagaccatga

SEQ ID NO: 68056 - DNA, 20 bp, Artificial Sequence
  MKO10068056_B_1810046K07Rik
  gRNA
gtcctactcgctgcatgcac

SEQ ID NO: 68057 - DNA, 20 bp, Artificial Sequence
  MKO10068057_B_1810046K07Rik
  gRNA
gcagagtcgaggtgctgaac

SEQ ID NO: 68058 - DNA, 20 bp, Artificial Sequence
  MKO10068058_B_1810046K07Rik
  gRNA
aagaagatggcagtatggcc

SEQ ID NO: 68059 - DNA, 20 bp, Artificial Sequence
  MKO10068059_B_1810055G02Rik
  gRNA
cagcaagatgtggacagccc

SEQ ID NO: 68060 - DNA, 20 bp, Artificial Sequence
  MKO10068060_B_1810055G02Rik
  gRNA
caggtggactacctgatcaa

SEQ ID NO: 68061 - DNA, 20 bp, Artificial Sequence
  MKO10068061_B_1810055G02Rik
  gRNA
ggggatatgacgtctacatc

SEQ ID NO: 68062 - DNA, 20 bp, Artificial Sequence
  MKO10068062_B_1810062G17Rik
  gRNA
gtgaaaccatttccgctctg

SEQ ID NO: 68063 - DNA, 20 bp, Artificial Sequence
  MKO10068063_B_1810062G17Rik
  gRNA
atcttagtcaccttgcacct

SEQ ID NO: 68064 - DNA, 20 bp, Artificial Sequence
  MKO10068064_B_1810062G17Rik
  gRNA
accatctgccatgcgtatgc

SEQ ID NO: 68065 - DNA, 20 bp, Artificial Sequence
  MKO10068065_B_1810065E05Rik
  gRNA
gacgagggggttggaagtac

SEQ ID NO: 68066 - DNA, 20 bp, Artificial Sequence
  MKO10068066_B_1810065E05Rik
  gRNA
tcgctccctgtgcacttcag

SEQ ID NO: 68067 - DNA, 20 bp, Artificial Sequence
  MKO10068067_B_1810065E05Rik
  gRNA
agaggtattgcatgtaccca

SEQ ID NO: 68068 - DNA, 20 bp, Artificial Sequence
  MKO10068068_B_42431
  gRNA
ctgtttggtctcgacatcaa

SEQ ID NO: 68069 - DNA, 20 bp, Artificial Sequence
  MKO10068069_B_42431
  gRNA
gcgtcaggtaattgttctcc

SEQ ID NO: 68070 - DNA, 20 bp, Artificial Sequence
  MKO10068070_B_42431
  gRNA
acttgggatgaactcctgat

SEQ ID NO: 68071 - DNA, 20 bp, Artificial Sequence
  MKO10068071_B_42615
  gRNA
caacagtcgaagcctctatc

SEQ ID NO: 68072 - DNA, 20 bp, Artificial Sequence
  MKO10068072_B_42615
  gRNA
gttcgagttcactctgatgg

SEQ ID NO: 68073 - DNA, 20 bp, Artificial Sequence
  MKO10068073_B_42615
  gRNA
tttctgggtagagatcagtc

SEQ ID NO: 68074 - DNA, 20 bp, Artificial Sequence
  MKO10068074_B_2010001E11Rik
  gRNA
tcaatgttaattactgcagt

SEQ ID NO: 68075 - DNA, 20 bp, Artificial Sequence
  MKO10068075_B_2010001E11Rik
  gRNA
tgcttacccaaaagtaaaaa

SEQ ID NO: 68076 - DNA, 20 bp, Artificial Sequence
  MKO10068076_B_2010001E11Rik
  gRNA
agcagatgctgttgtgcccc

SEQ ID NO: 68077 - DNA, 20 bp, Artificial Sequence
  MKO10068077_B_2010002M12Rik
  gRNA
aagcctttacctcatgttgc

SEQ ID NO: 68078 - DNA, 20 bp, Artificial Sequence
  MKO10068078_B_2010002M12Rik
  gRNA
tcctcccagaacaatatctt

SEQ ID NO: 68079 - DNA, 20 bp, Artificial Sequence
  MKO10068079_B_2010002M12Rik
  gRNA
ttgtgagccacacttccgca

SEQ ID NO: 68080 - DNA, 20 bp, Artificial Sequence
  MKO10068080_B_2010003K11Rik
  gRNA
agcctccccagagaccttgt

SEQ ID NO: 68081 - DNA, 20 bp, Artificial Sequence
  MKO10068081_B_2010003K11Rik
  gRNA
ccccgatggcacggaagggc

SEQ ID NO: 68082 - DNA, 20 bp, Artificial Sequence
  MKO10068082_B_2010003K11Rik
  gRNA
ggtactgtctcagccaccgc

SEQ ID NO: 68083 - DNA, 20 bp, Artificial Sequence
  MKO10068083_B_2010005H15Rik
  gRNA
ctcatcagaatgatgcctgg

SEQ ID NO: 68084 - DNA, 20 bp, Artificial Sequence
  MKO10068084_B_2010005H15Rik
  gRNA
gaacacttcatatttctcat

SEQ ID NO: 68085 - DNA, 20 bp, Artificial Sequence
  MKO10068085_B_2010005H15Rik
  gRNA
tataaatctcaagtcgtcgc

SEQ ID NO: 68086 - DNA, 20 bp, Artificial Sequence
  MKO10068086_B_2010012O05Rik
  gRNA
acttcagtaagtgactcaac

SEQ ID NO: 68087 - DNA, 20 bp, Artificial Sequence
  MKO10068087_B_2010012O05Rik
  gRNA
ggaacagtcgcctgacctgc

SEQ ID NO: 68088 - DNA, 20 bp, Artificial Sequence
  MKO10068088_B_2010012O05Rik
  gRNA
tgtgcagagtttaaggaaga

SEQ ID NO: 68089 - DNA, 20 bp, Artificial Sequence
  MKO10068089_B_2010015L04Rik
  gRNA
acctccattaccgtcatcca

SEQ ID NO: 68090 - DNA, 20 bp, Artificial Sequence
  MKO10068090_B_2010015L04Rik
  gRNA
caggatgacctacatgttgt

SEQ ID NO: 68091 - DNA, 20 bp, Artificial Sequence
  MKO10068091_B_2010015L04Rik
  gRNA
caaactccagatcctccaac

SEQ ID NO: 68092 - DNA, 20 bp, Artificial Sequence
  MKO10068092_B_2010106E10Rik
  gRNA
cctcaacataattctgcata

SEQ ID NO: 68093 - DNA, 20 bp, Artificial Sequence
  MKO10068093_B_2010106E10Rik
  gRNA
gcaatgtgccatcaaaaacc

SEQ ID NO: 68094 - DNA, 20 bp, Artificial Sequence
  MKO10068094_B_2010106E10Rik
  gRNA
tcctcaacctaatcaaagag

SEQ ID NO: 68095 - DNA, 20 bp, Artificial Sequence
  MKO10068095_B_2010107E04Rik
  gRNA
ctgggtatagtagggtttca

SEQ ID NO: 68096 - DNA, 20 bp, Artificial Sequence
  MKO10068096_B_2010107E04Rik
  gRNA
aaaagaagtaaagctttgaa

SEQ ID NO: 68097 - DNA, 20 bp, Artificial Sequence
  MKO10068097_B_2010107E04Rik
  gRNA
aaaccttgattcaaaaagtc

SEQ ID NO: 68098 - DNA, 20 bp, Artificial Sequence
  MKO10068098_B_2010107G12Rik
  gRNA
ccgagaaacccactagcatc

SEQ ID NO: 68099 - DNA, 20 bp, Artificial Sequence
  MKO10068099_B_2010107G12Rik
  gRNA
gcgattatcacgcctgtgct

SEQ ID NO: 68100 - DNA, 20 bp, Artificial Sequence
  MKO10068100_B_2010107G12Rik
  gRNA
acgtcctacagtgagaacgt

SEQ ID NO: 68101 - DNA, 20 bp, Artificial Sequence
  MKO10068101_B_2010107G23Rik
  gRNA
atcctgaacgatctccccat

SEQ ID NO: 68102 - DNA, 20 bp, Artificial Sequence
  MKO10068102_B_2010107G23Rik
  gRNA
gcagcaggcaggtgcccgac

SEQ ID NO: 68103 - DNA, 20 bp, Artificial Sequence
  MKO10068103_B_2010107G23Rik
  gRNA
ggcgcacctccagggggccc

SEQ ID NO: 68104 - DNA, 20 bp, Artificial Sequence
  MKO10068104_B_2010109A12Rik
  gRNA
atgttctctaccacgtctct

SEQ ID NO: 68105 - DNA, 20 bp, Artificial Sequence
  MKO10068105_B_2010109A12Rik
  gRNA
ggataaaagtctcaagagta

SEQ ID NO: 68106 - DNA, 20 bp, Artificial Sequence
  MKO10068106_B_2010109A12Rik
  gRNA
aatatccaacattatcttca

SEQ ID NO: 68107 - DNA, 20 bp, Artificial Sequence
  MKO10068107_B_2010109I03Rik
  gRNA
ggttcctggcactattgcag

SEQ ID NO: 68108 - DNA, 20 bp, Artificial Sequence
  MKO10068108_B_2010109I03Rik
  gRNA
agatgaggactcacctgctt

SEQ ID NO: 68109 - DNA, 20 bp, Artificial Sequence
  MKO10068109_B_2010109I03Rik
  gRNA
ttgttgcccctgattctgct

SEQ ID NO: 68110 - DNA, 20 bp, Artificial Sequence
  MKO10068110_B_2010111I01Rik
  gRNA
gccatgaaattgctcactcc

SEQ ID NO: 68111 - DNA, 20 bp, Artificial Sequence
  MKO10068111_B_2010111I01Rik
  gRNA
gagtgcgtccgctgcctccc

SEQ ID NO: 68112 - DNA, 20 bp, Artificial Sequence
  MKO10068112_B_2010111I01Rik
  gRNA
aagcccacaccacttcgaga

SEQ ID NO: 68113 - DNA, 20 bp, Artificial Sequence
  MKO10068113_B_2010300C02Rik
  gRNA
aggaccctgctcggcccgtg

SEQ ID NO: 68114 - DNA, 20 bp, Artificial Sequence
  MKO10068114_B_2010300C02Rik
  gRNA
gcctcagtttacttgatcgc

SEQ ID NO: 68115 - DNA, 20 bp, Artificial Sequence
  MKO10068115_B_2010300C02Rik
  gRNA
gcgatgcctccatctcgtct

SEQ ID NO: 68116 - DNA, 20 bp, Artificial Sequence
  MKO10068116_B_2010315B03Rik
  gRNA
gatctgccagtgaggtgaca

SEQ ID NO: 68117 - DNA, 20 bp, Artificial Sequence
  MKO10068117_B_2010315B03Rik
  gRNA
ccagaagagtctctacaaag

SEQ ID NO: 68118 - DNA, 20 bp, Artificial Sequence
  MKO10068118_B_2010315B03Rik
  gRNA
gaaattgttcttcaatataa

SEQ ID NO: 68119 - DNA, 20 bp, Artificial Sequence
  MKO10068119_B_2200002D01Rik
  gRNA
tagcagctccagcgactcag

SEQ ID NO: 68120 - DNA, 20 bp, Artificial Sequence
  MKO10068120_B_2200002D01Rik
  gRNA
tgcggccaagtcaaactcca

SEQ ID NO: 68121 - DNA, 20 bp, Artificial Sequence
  MKO10068121_B_2200002D01Rik
  gRNA
ttcatgcttcttgcagccag

SEQ ID NO: 68122 - DNA, 20 bp, Artificial Sequence
  MKO10068122_B_2200002J24Rik
  gRNA
actaattaatctaatagagc

SEQ ID NO: 68123 - DNA, 20 bp, Artificial Sequence
  MKO10068123_B_2200002J24Rik
  gRNA
agacagaggtaatccttcgc

SEQ ID NO: 68124 - DNA, 20 bp, Artificial Sequence
  MKO10068124_B_2200002J24Rik
  gRNA
acccgggaagccaactctgt

SEQ ID NO: 68125 - DNA, 20 bp, Artificial Sequence
  MKO10068125_B_2210010C04Rik
  gRNA
cactagcaacatgttctgtc

SEQ ID NO: 68126 - DNA, 20 bp, Artificial Sequence
  MKO10068126_B_2210010C04Rik
  gRNA
tcttgcacaagttcttaccc

SEQ ID NO: 68127 - DNA, 20 bp, Artificial Sequence
  MKO10068127_B_2210010C04Rik
  gRNA
catcaatgttgtgttctccc

SEQ ID NO: 68128 - DNA, 20 bp, Artificial Sequence
  MKO10068128_B_2210013O21Rik
  gRNA
cctttagcatcacaacttcc

SEQ ID NO: 68129 - DNA, 20 bp, Artificial Sequence
  MKO10068129_B_2210013O21Rik
  gRNA
taatgtaatacagcaaagac

SEQ ID NO: 68130 - DNA, 20 bp, Artificial Sequence
  MKO10068130_B_2210013O21Rik
  gRNA
ctctatttgactgtgccact

SEQ ID NO: 68131 - DNA, 20 bp, Artificial Sequence
  MKO10068131_B_2210016F16Rik
  gRNA
cactccacgtgtccgccacg

SEQ ID NO: 68132 - DNA, 20 bp, Artificial Sequence
  MKO10068132_B_2210016F16Rik
  gRNA
tttggtgtgtcgagctgatc

SEQ ID NO: 68133 - DNA, 20 bp, Artificial Sequence
  MKO10068133_B_2210016F16Rik
  gRNA
gggactatgcccgagagcac

SEQ ID NO: 68134 - DNA, 20 bp, Artificial Sequence
  MKO10068134_B_2210016L21Rik
  gRNA
cttcttccaaacttctgcga

SEQ ID NO: 68135 - DNA, 20 bp, Artificial Sequence
  MKO10068135_B_2210016L21Rik
  gRNA
ccattgccatcgcagaagtt

SEQ ID NO: 68136 - DNA, 20 bp, Artificial Sequence
  MKO10068136_B_2210016L21Rik
  gRNA
cgaccccgcagccaagccgc

SEQ ID NO: 68137 - DNA, 20 bp, Artificial Sequence
  MKO10068137_B_2210018M11Rik
  gRNA
ctgctctccgaacttcagca

SEQ ID NO: 68138 - DNA, 20 bp, Artificial Sequence
  MKO10068138_B_2210018M11Rik
  gRNA
agcattcgctgttacagtga

SEQ ID NO: 68139 - DNA, 20 bp, Artificial Sequence
  MKO10068139_B_2210018M11Rik
  gRNA
tggtctttcacccaaatata

SEQ ID NO: 68140 - DNA, 20 bp, Artificial Sequence
  MKO10068140_B_2210404O07Rik
  gRNA
gaagggcggacagagcaacg

SEQ ID NO: 68141 - DNA, 20 bp, Artificial Sequence
  MKO10068141_B_2210404O07Rik
  gRNA
tgaacgagaactcacagcca

SEQ ID NO: 68142 - DNA, 20 bp, Artificial Sequence
  MKO10068142_B_2210404O07Rik
  gRNA
tgtgctggccatggacacct

SEQ ID NO: 68143 - DNA, 20 bp, Artificial Sequence
  MKO10068143_B_2210404O09Rik
  gRNA
ttctctcataaatgctcctc

SEQ ID NO: 68144 - DNA, 20 bp, Artificial Sequence
  MKO10068144_B_2210404O09Rik
  gRNA
tgtggctgtggacttctcac

SEQ ID NO: 68145 - DNA, 20 bp, Artificial Sequence
  MKO10068145_B_2210404O09Rik
  gRNA
gacaaatcctttacgcaaaa

SEQ ID NO: 68146 - DNA, 20 bp, Artificial Sequence
  MKO10068146_B_2210407C18Rik
  gRNA
gcagctataagaggttagac

SEQ ID NO: 68147 - DNA, 20 bp, Artificial Sequence
  MKO10068147_B_2210407C18Rik
  gRNA
atacaagctacgtgtgaaaa

SEQ ID NO: 68148 - DNA, 20 bp, Artificial Sequence
  MKO10068148_B_2210407C18Rik
  gRNA
aacctagtacttgagcaaaa

SEQ ID NO: 68149 - DNA, 20 bp, Artificial Sequence
  MKO10068149_B_2210408I21Rik
  gRNA
cacagtacctggagaactcc

SEQ ID NO: 68150 - DNA, 20 bp, Artificial Sequence
  MKO10068150_B_2210408I21Rik
  gRNA
aatattggagaaatctaaga

SEQ ID NO: 68151 - DNA, 20 bp, Artificial Sequence
  MKO10068151_B_2210408I21Rik
  gRNA
caacaagtgactgcttcaaa

SEQ ID NO: 68152 - DNA, 20 bp, Artificial Sequence
  MKO10068152_B_2300002M23Rik
  gRNA
gagcccggctcccacctgcg

SEQ ID NO: 68153 - DNA, 20 bp, Artificial Sequence
  MKO10068153_B_2300002M23Rik
  gRNA
gggtaggaagccgctagtga

SEQ ID NO: 68154 - DNA, 20 bp, Artificial Sequence
  MKO10068154_B_2300002M23Rik
  gRNA
cgaccgcctctggaaaggta

SEQ ID NO: 68155 - DNA, 20 bp, Artificial Sequence
  MKO10068155_B_2300003K06Rik
  gRNA
gtagcaggtggattggcaac

SEQ ID NO: 68156 - DNA, 20 bp, Artificial Sequence
  MKO10068156_B_2300003K06Rik
  gRNA
tgggtttccaaatgaatgta

SEQ ID NO: 68157 - DNA, 20 bp, Artificial Sequence
  MKO10068157_B_2300003K06Rik
  gRNA
gttgcagacctaactgctgc

SEQ ID NO: 68158 - DNA, 20 bp, Artificial Sequence
  MKO10068158_B_2300005B03Rik
  gRNA
atcctccaaatcccttgcac

SEQ ID NO: 68159 - DNA, 20 bp, Artificial Sequence
  MKO10068159_B_2300005B03Rik
  gRNA
tagctccatgctcaagacca

SEQ ID NO: 68160 - DNA, 20 bp, Artificial Sequence
  MKO10068160_B_2300005B03Rik
  gRNA
agaacatgaggcttcccttc

SEQ ID NO: 68161 - DNA, 20 bp, Artificial Sequence
  MKO10068161_B_2300009A05Rik
  gRNA
ccaagtccatataataaagt

SEQ ID NO: 68162 - DNA, 20 bp, Artificial Sequence
  MKO10068162_B_2300009A05Rik
  gRNA
tcggcctgtcgcacttcaat

SEQ ID NO: 68163 - DNA, 20 bp, Artificial Sequence
  MKO10068163_B_2300009A05Rik
  gRNA
tgaagtgcgacaggccgaac

SEQ ID NO: 68164 - DNA, 20 bp, Artificial Sequence
  MKO10068164_B_2310002J15Rik
  gRNA
gggcttcagtagtttgtaag

SEQ ID NO: 68165 - DNA, 20 bp, Artificial Sequence
  MKO10068165_B_2310002J15Rik
  gRNA
tcagagcgcaggtgagcccg

SEQ ID NO: 68166 - DNA, 20 bp, Artificial Sequence
  MKO10068166_B_2310002J15Rik
  gRNA
tctgggatacatgttcctgc

SEQ ID NO: 68167 - DNA, 20 bp, Artificial Sequence
  MKO10068167_B_2310002L09Rik
  gRNA
aaggtcatacctcgaaatgc

SEQ ID NO: 68168 - DNA, 20 bp, Artificial Sequence
  MKO10068168_B_2310002L09Rik
  gRNA
tctggctatggcatagagac

SEQ ID NO: 68169 - DNA, 20 bp, Artificial Sequence
  MKO10068169_B_2310002L09Rik
  gRNA
ctctggtcaagcgttgctcc

SEQ ID NO: 68170 - DNA, 20 bp, Artificial Sequence
  MKO10068170_B_2310003H01Rik
  gRNA
tgtccagcgagtccaacgac

SEQ ID NO: 68171 - DNA, 20 bp, Artificial Sequence
  MKO10068171_B_2310003H01Rik
  gRNA
cgggaagtgacgttgcccct

SEQ ID NO: 68172 - DNA, 20 bp, Artificial Sequence
  MKO10068172_B_2310003H01Rik
  gRNA
aggcaatactcacgcagctc

SEQ ID NO: 68173 - DNA, 20 bp, Artificial Sequence
  MKO10068173_B_2310005G13Rik
  gRNA
catagctgtccaccactatc

SEQ ID NO: 68174 - DNA, 20 bp, Artificial Sequence
  MKO10068174_B_2310005G13Rik
  gRNA
gcatcaacctatgtcatcat

SEQ ID NO: 68175 - DNA, 20 bp, Artificial Sequence
  MKO10068175_B_2310005G13Rik
  gRNA
tgtactccaccagagaccta

SEQ ID NO: 68176 - DNA, 20 bp, Artificial Sequence
  MKO10068176_B_2310007B03Rik
  gRNA
ccgcttcaacgttgtgcccg

SEQ ID NO: 68177 - DNA, 20 bp, Artificial Sequence
  MKO10068177_B_2310007B03Rik
  gRNA
accgcgtaaacctagaaagt

SEQ ID NO: 68178 - DNA, 20 bp, Artificial Sequence
  MKO10068178_B_2310007B03Rik
  gRNA
ctggtaccaggtccaccccg

SEQ ID NO: 68179 - DNA, 20 bp, Artificial Sequence
  MKO10068179_B_2310007L24Rik
  gRNA
aactgttaccttccttgacc

SEQ ID NO: 68180 - DNA, 20 bp, Artificial Sequence
  MKO10068180_B_2310007L24Rik
  gRNA
cttctcagcctcagcataac

SEQ ID NO: 68181 - DNA, 20 bp, Artificial Sequence
  MKO10068181_B_2310007L24Rik
  gRNA
ctgcccctacctgaagctgg

SEQ ID NO: 68182 - DNA, 20 bp, Artificial Sequence
  MKO10068182_B_2310009B15Rik
  gRNA
ccttgtgagaaccacatagc

SEQ ID NO: 68183 - DNA, 20 bp, Artificial Sequence
  MKO10068183_B_2310009B15Rik
  gRNA
ttgaattgcttcttcttaga

SEQ ID NO: 68184 - DNA, 20 bp, Artificial Sequence
  MKO10068184_B_2310009B15Rik
  gRNA
ttgttgtcaaacataaaaat

SEQ ID NO: 68185 - DNA, 20 bp, Artificial Sequence
  MKO10068185_B_2310011J03Rik
  gRNA
cctctcattcatagccacgt

SEQ ID NO: 68186 - DNA, 20 bp, Artificial Sequence
  MKO10068186_B_2310011J03Rik
  gRNA
cacctacaagatgaactcca

SEQ ID NO: 68187 - DNA, 20 bp, Artificial Sequence
  MKO10068187_B_2310011J03Rik
  gRNA
ctgctccaccgtgggaggcg

SEQ ID NO: 68188 - DNA, 20 bp, Artificial Sequence
  MKO10068188_B_2310014L17Rik
  gRNA
cagcttgaaaatgccgtcga

SEQ ID NO: 68189 - DNA, 20 bp, Artificial Sequence
  MKO10068189_B_2310014L17Rik
  gRNA
agtggcgcgcgcgcatcgcg

SEQ ID NO: 68190 - DNA, 20 bp, Artificial Sequence
  MKO10068190_B_2310014L17Rik
  gRNA
ctctttcgcggcccgggaga

SEQ ID NO: 68191 - DNA, 20 bp, Artificial Sequence
  MKO10068191_B_2310022A10Rik
  gRNA
taaccccagccacttccgag

SEQ ID NO: 68192 - DNA, 20 bp, Artificial Sequence
  MKO10068192_B_2310022A10Rik
  gRNA
atcacagcgtaattaacagc

SEQ ID NO: 68193 - DNA, 20 bp, Artificial Sequence
  MKO10068193_B_2310022A10Rik
  gRNA
taaagaaatcatgaacgagc

SEQ ID NO: 68194 - DNA, 20 bp, Artificial Sequence
  MKO10068194_B_2310022B05Rik
  gRNA
aggcccctcccgagagcgct

SEQ ID NO: 68195 - DNA, 20 bp, Artificial Sequence
  MKO10068195_B_2310022B05Rik
  gRNA
tcaacttaccctcgtctccc

SEQ ID NO: 68196 - DNA, 20 bp, Artificial Sequence
  MKO10068196_B_2310022B05Rik
  gRNA
aacactcggccccattctcc

SEQ ID NO: 68197 - DNA, 20 bp, Artificial Sequence
  MKO10068197_B_2310030G06Rik
  gRNA
cctgggagacacaaccgcca

SEQ ID NO: 68198 - DNA, 20 bp, Artificial Sequence
  MKO10068198_B_2310030G06Rik
  gRNA
tgctcaatgtgggtcttggg

SEQ ID NO: 68199 - DNA, 20 bp, Artificial Sequence
  MKO10068199_B_2310030G06Rik
  gRNA
tcctgaagcagcaacagctg

SEQ ID NO: 68200 - DNA, 20 bp, Artificial Sequence
  MKO10068200_B_2310033P09Rik
  gRNA
gtcccctgcagtggctccgc

SEQ ID NO: 68201 - DNA, 20 bp, Artificial Sequence
  MKO10068201_B_2310033P09Rik
  gRNA
cgtggaccggctcctgggct

SEQ ID NO: 68202 - DNA, 20 bp, Artificial Sequence
  MKO10068202_B_2310033P09Rik
  gRNA
gcagtggttacaagaacgtg

SEQ ID NO: 68203 - DNA, 20 bp, Artificial Sequence
  MKO10068203_B_2310034C09Rik
  gRNA
cttaacagctgatgccgcag

SEQ ID NO: 68204 - DNA, 20 bp, Artificial Sequence
  MKO10068204_B_2310034C09Rik
  gRNA
agccatagactccacaattg

SEQ ID NO: 68205 - DNA, 20 bp, Artificial Sequence
  MKO10068205_B_2310034C09Rik
  gRNA
gcctaccatcctaccattaa

SEQ ID NO: 68206 - DNA, 20 bp, Artificial Sequence
  MKO10068206_B_2310035C23Rik
  gRNA
ttaacaaaaactcattgact

SEQ ID NO: 68207 - DNA, 20 bp, Artificial Sequence
  MKO10068207_B_2310035C23Rik
  gRNA
caatcacccacctgaatttc

SEQ ID NO: 68208 - DNA, 20 bp, Artificial Sequence
  MKO10068208_B_2310035C23Rik
  gRNA
tttgcaagatattcagatga

SEQ ID NO: 68209 - DNA, 20 bp, Artificial Sequence
  MKO10068209_B_2310036O22Rik
  gRNA
cgggagggagtcatttcacc

SEQ ID NO: 68210 - DNA, 20 bp, Artificial Sequence
  MKO10068210_B_2310036O22Rik
  gRNA
gaacaaactagccctcaaga

SEQ ID NO: 68211 - DNA, 20 bp, Artificial Sequence
  MKO10068211_B_2310036O22Rik
  gRNA
acccaggtgggcaagcgcag

SEQ ID NO: 68212 - DNA, 20 bp, Artificial Sequence
  MKO10068212_B_2310039H08Rik
  gRNA
gccccgggatcgctcctcga

SEQ ID NO: 68213 - DNA, 20 bp, Artificial Sequence
  MKO10068213_B_2310039H08Rik
  gRNA
gcaccatcgccctagacacg

SEQ ID NO: 68214 - DNA, 20 bp, Artificial Sequence
  MKO10068214_B_2310039H08Rik
  gRNA
ctccagtccgagcggtgcac

SEQ ID NO: 68215 - DNA, 20 bp, Artificial Sequence
  MKO10068215_B_2310042D19Rik
  gRNA
acagtcttgctcgccaacat

SEQ ID NO: 68216 - DNA, 20 bp, Artificial Sequence
  MKO10068216_B_2310042D19Rik
  gRNA
cagtcaaaacgacatgtgcc

SEQ ID NO: 68217 - DNA, 20 bp, Artificial Sequence
  MKO10068217_B_2310042D19Rik
  gRNA
gactgaacgtaaatgaagtg

SEQ ID NO: 68218 - DNA, 20 bp, Artificial Sequence
  MKO10068218_B_2310042E22Rik
  gRNA
tcgagtgtgcatgcacatct

SEQ ID NO: 68219 - DNA, 20 bp, Artificial Sequence
  MKO10068219_B_2310042E22Rik
  gRNA
tgctttcctgtcatggcttt

SEQ ID NO: 68220 - DNA, 20 bp, Artificial Sequence
  MKO10068220_B_2310042E22Rik
  gRNA
tattgagaacaaaagcgtct

SEQ ID NO: 68221 - DNA, 20 bp, Artificial Sequence
  MKO10068221_B_2310044G17Rik
  gRNA
cgggtctcgagctatccccg

SEQ ID NO: 68222 - DNA, 20 bp, Artificial Sequence
  MKO10068222_B_2310044G17Rik
  gRNA
tggtcatggagcggcgaccc

SEQ ID NO: 68223 - DNA, 20 bp, Artificial Sequence
  MKO10068223_B_2310044G17Rik
  gRNA
acgctcttcatgacgaccat

SEQ ID NO: 68224 - DNA, 20 bp, Artificial Sequence
  MKO10068224_B_2310045N01Rik
  gRNA
gcgccgttcactgccagagc

SEQ ID NO: 68225 - DNA, 20 bp, Artificial Sequence
  MKO10068225_B_2310045N01Rik
  gRNA
tcaaacaggccatcagtatc

SEQ ID NO: 68226 - DNA, 20 bp, Artificial Sequence
  MKO10068226_B_2310045N01Rik
  gRNA
tcacctgcaggcgtactcca

SEQ ID NO: 68227 - DNA, 20 bp, Artificial Sequence
  MKO10068227_B_2310047M10Rik
  gRNA
cggcctgccgctgaaagtcg

SEQ ID NO: 68228 - DNA, 20 bp, Artificial Sequence
  MKO10068228_B_2310047M10Rik
  gRNA
caccatccctcccatcgacc

SEQ ID NO: 68229 - DNA, 20 bp, Artificial Sequence
  MKO10068229_B_2310047M10Rik
  gRNA
gggcccctgacggcgtcgcc

SEQ ID NO: 68230 - DNA, 20 bp, Artificial Sequence
  MKO10068230_B_2310050C09Rik
  gRNA
ggcacttcacattagttgtc

SEQ ID NO: 68231 - DNA, 20 bp, Artificial Sequence
  MKO10068231_B_2310050C09Rik
  gRNA
ttgacagaggtcgtctgaca

SEQ ID NO: 68232 - DNA, 20 bp, Artificial Sequence
  MKO10068232_B_2310050C09Rik
  gRNA
gacatattatgtccagtatc

SEQ ID NO: 68233 - DNA, 20 bp, Artificial Sequence
  MKO10068233_B_2310057J18Rik
  gRNA
gtggaggcaggatcgtgatt

SEQ ID NO: 68234 - DNA, 20 bp, Artificial Sequence
  MKO10068234_B_2310057J18Rik
  gRNA
ttgaattccagtgactttga

SEQ ID NO: 68235 - DNA, 20 bp, Artificial Sequence
  MKO10068235_B_2310057J18Rik
  gRNA
catttcttacctgtctccaa

SEQ ID NO: 68236 - DNA, 20 bp, Artificial Sequence
  MKO10068236_B_2310057M21Rik
  gRNA
gcaggcagtcttgcctcgac

SEQ ID NO: 68237 - DNA, 20 bp, Artificial Sequence
  MKO10068237_B_2310057M21Rik
  gRNA
aactcagaacgccaaccgaa

SEQ ID NO: 68238 - DNA, 20 bp, Artificial Sequence
  MKO10068238_B_2310057M21Rik
  gRNA
cacacactgcttctccccga

SEQ ID NO: 68239 - DNA, 20 bp, Artificial Sequence
  MKO10068239_B_2310057N15Rik
  gRNA
tcttgttatagatcagtctg

SEQ ID NO: 68240 - DNA, 20 bp, Artificial Sequence
  MKO10068240_B_2310057N15Rik
  gRNA
cctgtagaagccacatacac

SEQ ID NO: 68241 - DNA, 20 bp, Artificial Sequence
  MKO10068241_B_2310057N15Rik
  gRNA
atccagtggcttcagatccc

SEQ ID NO: 68242 - DNA, 20 bp, Artificial Sequence
  MKO10068242_B_2310061I04Rik
  gRNA
gaccgccttgcccctatcct

SEQ ID NO: 68243 - DNA, 20 bp, Artificial Sequence
  MKO10068243_B_2310061I04Rik
  gRNA
cctcatctgtcgccatcacc

SEQ ID NO: 68244 - DNA, 20 bp, Artificial Sequence
  MKO10068244_B_2310061I04Rik
  gRNA
tgactacactatatattcaa

SEQ ID NO: 68245 - DNA, 20 bp, Artificial Sequence
  MKO10068245_B_2310061N02Rik
  gRNA
ggaacccagatggcggtttc

SEQ ID NO: 68246 - DNA, 20 bp, Artificial Sequence
  MKO10068246_B_2310061N02Rik
  gRNA
agttctgatgatagccgtga

SEQ ID NO: 68247 - DNA, 20 bp, Artificial Sequence
  MKO10068247_B_2310061N02Rik
  gRNA
gtagcacagttgacctccat

SEQ ID NO: 68248 - DNA, 20 bp, Artificial Sequence
  MKO10068248_B_2310067B10Rik
  gRNA
cctgcagggagagcccccct

SEQ ID NO: 68249 - DNA, 20 bp, Artificial Sequence
  MKO10068249_B_2310067B10Rik
  gRNA
ggccccgggccagtggaaac

SEQ ID NO: 68250 - DNA, 20 bp, Artificial Sequence
  MKO10068250_B_2310067B10Rik
  gRNA
ccactaccttgatgcccctc

SEQ ID NO: 68251 - DNA, 20 bp, Artificial Sequence
  MKO10068251_B_2310079G19Rik
  gRNA
cccttgggctatatgaccta

SEQ ID NO: 68252 - DNA, 20 bp, Artificial Sequence
  MKO10068252_B_2310079G19Rik
  gRNA
gccaatcaaccagctgcaac

SEQ ID NO: 68253 - DNA, 20 bp, Artificial Sequence
  MKO10068253_B_2310079G19Rik
  gRNA
ccagatatcccggaagtaat

SEQ ID NO: 68254 - DNA, 20 bp, Artificial Sequence
  MKO10068254_B_2410002F23Rik
  gRNA
catctttaactaccgctgca

SEQ ID NO: 68255 - DNA, 20 bp, Artificial Sequence
  MKO10068255_B_2410002F23Rik
  gRNA
ctacacatacacggagttgt

SEQ ID NO: 68256 - DNA, 20 bp, Artificial Sequence
  MKO10068256_B_2410002F23Rik
  gRNA
gccccagctccccagaattc

SEQ ID NO: 68257 - DNA, 20 bp, Artificial Sequence
  MKO10068257_B_2410004B18Rik
  gRNA
ttgatcgccatgtccagctc

SEQ ID NO: 68258 - DNA, 20 bp, Artificial Sequence
  MKO10068258_B_2410004B18Rik
  gRNA
aagattcgcagagtggagcc

SEQ ID NO: 68259 - DNA, 20 bp, Artificial Sequence
  MKO10068259_B_2410004B18Rik
  gRNA
aattctctacttcttcttct

SEQ ID NO: 68260 - DNA, 20 bp, Artificial Sequence
  MKO10068260_B_2410004P03Rik
  gRNA
ccagagggtcatagtctttc

SEQ ID NO: 68261 - DNA, 20 bp, Artificial Sequence
  MKO10068261_B_2410004P03Rik
  gRNA
cagcagggtggacacacccc

SEQ ID NO: 68262 - DNA, 20 bp, Artificial Sequence
  MKO10068262_B_2410004P03Rik
  gRNA
ccttcccctgctctaccaac

SEQ ID NO: 68263 - DNA, 20 bp, Artificial Sequence
  MKO10068263_B_2410012M07Rik
  gRNA
gaactggacatcaacatgct

SEQ ID NO: 68264 - DNA, 20 bp, Artificial Sequence
  MKO10068264_B_2410012M07Rik
  gRNA
ctccaagactccacccattt

SEQ ID NO: 68265 - DNA, 20 bp, Artificial Sequence
  MKO10068265_B_2410012M07Rik
  gRNA
gggacttggtcctgagacaa

SEQ ID NO: 68266 - DNA, 20 bp, Artificial Sequence
  MKO10068266_B_2410015M20Rik
  gRNA
taaccatggtggctcgagtg

SEQ ID NO: 68267 - DNA, 20 bp, Artificial Sequence
  MKO10068267_B_2410015M20Rik
  gRNA
caaggcccgagaatactcca

SEQ ID NO: 68268 - DNA, 20 bp, Artificial Sequence
  MKO10068268_B_2410015M20Rik
  gRNA
caatatgtgtgccagcagac

SEQ ID NO: 68269 - DNA, 20 bp, Artificial Sequence
  MKO10068269_B_2410016O06Rik
  gRNA
gcaggaccgcagctactacg

SEQ ID NO: 68270 - DNA, 20 bp, Artificial Sequence
  MKO10068270_B_2410016O06Rik
  gRNA
cgctacgaggacgtgcaatt

SEQ ID NO: 68271 - DNA, 20 bp, Artificial Sequence
  MKO10068271_B_2410016O06Rik
  gRNA
gctcgcacgcggatgagccg

SEQ ID NO: 68272 - DNA, 20 bp, Artificial Sequence
  MKO10068272_B_2410018M08Rik
  gRNA
gagggtctcacccggccaga

SEQ ID NO: 68273 - DNA, 20 bp, Artificial Sequence
  MKO10068273_B_2410018M08Rik
  gRNA
gctcacctggtaagtgatgt

SEQ ID NO: 68274 - DNA, 20 bp, Artificial Sequence
  MKO10068274_B_2410018M08Rik
  gRNA
ccagccgggcccctcagatg

SEQ ID NO: 68275 - DNA, 20 bp, Artificial Sequence
  MKO10068275_B_2410076I21Rik
  gRNA
ggagcctgacagcaccaccc

SEQ ID NO: 68276 - DNA, 20 bp, Artificial Sequence
  MKO10068276_B_2410076I21Rik
  gRNA
gttgaagattgtaagacgca

SEQ ID NO: 68277 - DNA, 20 bp, Artificial Sequence
  MKO10068277_B_2410076I21Rik
  gRNA
atgtttcgtgtccagtttag

SEQ ID NO: 68278 - DNA, 20 bp, Artificial Sequence
  MKO10068278_B_2410089E03Rik
  gRNA
tacttatacgtagctgaaaa

SEQ ID NO: 68279 - DNA, 20 bp, Artificial Sequence
  MKO10068279_B_2410089E03Rik
  gRNA
aatcctgatctttgttccac

SEQ ID NO: 68280 - DNA, 20 bp, Artificial Sequence
  MKO10068280_B_2410089E03Rik
  gRNA
gccgctttaatagcttcttt

SEQ ID NO: 68281 - DNA, 20 bp, Artificial Sequence
  MKO10068281_B_2410124H12Rik
  gRNA
gaagaggatgtcgattggct

SEQ ID NO: 68282 - DNA, 20 bp, Artificial Sequence
  MKO10068282_B_2410124H12Rik
  gRNA
gtagtgccttcacgccacgc

SEQ ID NO: 68283 - DNA, 20 bp, Artificial Sequence
  MKO10068283_B_2410124H12Rik
  gRNA
gcgctacttgctccgccacg

SEQ ID NO: 68284 - DNA, 20 bp, Artificial Sequence
  MKO10068284_B_2410127L17Rik
  gRNA
atgtatgcaatcattcacaa

SEQ ID NO: 68285 - DNA, 20 bp, Artificial Sequence
  MKO10068285_B_2410127L17Rik
  gRNA
acagaacagaaagacagttt

SEQ ID NO: 68286 - DNA, 20 bp, Artificial Sequence
  MKO10068286_B_2410127L17Rik
  gRNA
gccagcatctacatttgaca

SEQ ID NO: 68287 - DNA, 20 bp, Artificial Sequence
  MKO10068287_B_2410131K14Rik
  gRNA
gcaggagacgcagtactcgt

SEQ ID NO: 68288 - DNA, 20 bp, Artificial Sequence
  MKO10068288_B_2410131K14Rik
  gRNA
tgggtcggctgctgttgcct

SEQ ID NO: 68289 - DNA, 20 bp, Artificial Sequence
  MKO10068289_B_2410131K14Rik
  gRNA
tagccaagcacagttcgaag

SEQ ID NO: 68290 - DNA, 20 bp, Artificial Sequence
  MKO10068290_B_2410137M14Rik
  gRNA
cactacctttactccatttc

SEQ ID NO: 68291 - DNA, 20 bp, Artificial Sequence
  MKO10068291_B_2410137M14Rik
  gRNA
gaacagaatgcagaacgatt

SEQ ID NO: 68292 - DNA, 20 bp, Artificial Sequence
  MKO10068292_B_2410137M14Rik
  gRNA
gcacctccagtgaccaaaac

SEQ ID NO: 68293 - DNA, 20 bp, Artificial Sequence
  MKO10068293_B_2410141K09Rik
  gRNA
tgaacttcactaaagaagag

SEQ ID NO: 68294 - DNA, 20 bp, Artificial Sequence
  MKO10068294_B_2410141K09Rik
  gRNA
cagtcttacctatagaagta

SEQ ID NO: 68295 - DNA, 20 bp, Artificial Sequence
  MKO10068295_B_2410141K09Rik
  gRNA
tgtcttcgagaactttgaca

SEQ ID NO: 68296 - DNA, 20 bp, Artificial Sequence
  MKO10068296_B_2510002D24Rik
  gRNA
ggcctggacatggcggtcgc

SEQ ID NO: 68297 - DNA, 20 bp, Artificial Sequence
  MKO10068297_B_2510002D24Rik
  gRNA
atccctctgtgagagcgagc

SEQ ID NO: 68298 - DNA, 20 bp, Artificial Sequence
  MKO10068298_B_2510002D24Rik
  gRNA
acctgactaactgccgcgag

SEQ ID NO: 68299 - DNA, 20 bp, Artificial Sequence
  MKO10068299_B_2510003E04Rik
  gRNA
agacttgagccaggtaatac

SEQ ID NO: 68300 - DNA, 20 bp, Artificial Sequence
  MKO10068300_B_2510003E04Rik
  gRNA
ccgatgactccaggtaggtc

SEQ ID NO: 68301 - DNA, 20 bp, Artificial Sequence
  MKO10068301_B_2510003E04Rik
  gRNA
aacttactgtcttctgtagc

SEQ ID NO: 68302 - DNA, 20 bp, Artificial Sequence
  MKO10068302_B_2510009E07Rik
  gRNA
cccgacttccagccgtgcga

SEQ ID NO: 68303 - DNA, 20 bp, Artificial Sequence
  MKO10068303_B_2510009E07Rik
  gRNA
gaatggtgttagtcggctct

SEQ ID NO: 68304 - DNA, 20 bp, Artificial Sequence
  MKO10068304_B_2510009E07Rik
  gRNA
ctcgctcttccagccgcgct

SEQ ID NO: 68305 - DNA, 20 bp, Artificial Sequence
  MKO10068305_B_2510039O18Rik
  gRNA
taaggtgcagcgtgtgccgc

SEQ ID NO: 68306 - DNA, 20 bp, Artificial Sequence
  MKO10068306_B_2510039O18Rik
  gRNA
tcgaggttcactcagacact

SEQ ID NO: 68307 - DNA, 20 bp, Artificial Sequence
  MKO10068307_B_2510039O18Rik
  gRNA
gcgggagcctgccgtgacgc

SEQ ID NO: 68308 - DNA, 20 bp, Artificial Sequence
  MKO10068308_B_2510049J12Rik
  gRNA
gttggaatcactaacacacg

SEQ ID NO: 68309 - DNA, 20 bp, Artificial Sequence
  MKO10068309_B_2510049J12Rik
  gRNA
tacctacctatgaggcagcc

SEQ ID NO: 68310 - DNA, 20 bp, Artificial Sequence
  MKO10068310_B_2510049J12Rik
  gRNA
tgactgaccatcccgaccca

SEQ ID NO: 68311 - DNA, 20 bp, Artificial Sequence
  MKO10068311_B_2610002J02Rik
  gRNA
acttcgggtcaaacgccttc

SEQ ID NO: 68312 - DNA, 20 bp, Artificial Sequence
  MKO10068312_B_2610002J02Rik
  gRNA
taggctgacccagctagatg

SEQ ID NO: 68313 - DNA, 20 bp, Artificial Sequence
  MKO10068313_B_2610002J02Rik
  gRNA
agtgcaccgaagatgtggtg

SEQ ID NO: 68314 - DNA, 20 bp, Artificial Sequence
  MKO10068314_B_2610002M06Rik
  gRNA
aatctatggatgctacattg

SEQ ID NO: 68315 - DNA, 20 bp, Artificial Sequence
  MKO10068315_B_2610002M06Rik
  gRNA
agttcaaactgcagtaacaa

SEQ ID NO: 68316 - DNA, 20 bp, Artificial Sequence
  MKO10068316_B_2610002M06Rik
  gRNA
ttgctgcaaaagaacttaat

SEQ ID NO: 68317 - DNA, 20 bp, Artificial Sequence
  MKO10068317_B_2610008E11Rik
  gRNA
ttgaacttcaagttatcgca

SEQ ID NO: 68318 - DNA, 20 bp, Artificial Sequence
  MKO10068318_B_2610008E11Rik
  gRNA
acctgagttgatcctcatgt

SEQ ID NO: 68319 - DNA, 20 bp, Artificial Sequence
  MKO10068319_B_2610008E11Rik
  gRNA
ttgctcagaagttgctctac

SEQ ID NO: 68320 - DNA, 20 bp, Artificial Sequence
  MKO10068320_B_2610015P09Rik
  gRNA
tcatgggcgtctggcacagg

SEQ ID NO: 68321 - DNA, 20 bp, Artificial Sequence
  MKO10068321_B_2610015P09Rik
  gRNA
atctgcatttctggtagaac

SEQ ID NO: 68322 - DNA, 20 bp, Artificial Sequence
  MKO10068322_B_2610015P09Rik
  gRNA
caaacttgtcatacttcaaa

SEQ ID NO: 68323 - DNA, 20 bp, Artificial Sequence
  MKO10068323_B_2610018G03Rik
  gRNA
ataataatggaatacctagg

SEQ ID NO: 68324 - DNA, 20 bp, Artificial Sequence
  MKO10068324_B_2610018G03Rik
  gRNA
gctgactgttgaataacttc

SEQ ID NO: 68325 - DNA, 20 bp, Artificial Sequence
  MKO10068325_B_2610018G03Rik
  gRNA
gtttacagggttcaaaacta

SEQ ID NO: 68326 - DNA, 20 bp, Artificial Sequence
  MKO10068326_B_2610020H08Rik
  gRNA
tggcccactaacacagcatc

SEQ ID NO: 68327 - DNA, 20 bp, Artificial Sequence
  MKO10068327_B_2610020H08Rik
  gRNA
caagcctgatctcaagattc

SEQ ID NO: 68328 - DNA, 20 bp, Artificial Sequence
  MKO10068328_B_2610020H08Rik
  gRNA
tcctcctgatgctgtgttag

SEQ ID NO: 68329 - DNA, 20 bp, Artificial Sequence
  MKO10068329_B_2610028H24Rik
  gRNA
cagccctccagagtgctttg

SEQ ID NO: 68330 - DNA, 20 bp, Artificial Sequence
  MKO10068330_B_2610028H24Rik
  gRNA
ctgcggtagctgctgaatga

SEQ ID NO: 68331 - DNA, 20 bp, Artificial Sequence
  MKO10068331_B_2610028H24Rik
  gRNA
ctacccagagtctctgtaga

SEQ ID NO: 68332 - DNA, 20 bp, Artificial Sequence
  MKO10068332_B_2610034B18Rik
  gRNA
cttacgcctgtggatacagc

SEQ ID NO: 68333 - DNA, 20 bp, Artificial Sequence
  MKO10068333_B_2610034B18Rik
  gRNA
acctactgtaagatgacatg

SEQ ID NO: 68334 - DNA, 20 bp, Artificial Sequence
  MKO10068334_B_2610034B18Rik
  gRNA
atggaaagacgggagcttcc

SEQ ID NO: 68335 - DNA, 20 bp, Artificial Sequence
  MKO10068335_B_2610034M16Rik
  gRNA
tagagagtcgaccagctatc

SEQ ID NO: 68336 - DNA, 20 bp, Artificial Sequence
  MKO10068336_B_2610034M16Rik
  gRNA
gaactgaatccgaaatcccc

SEQ ID NO: 68337 - DNA, 20 bp, Artificial Sequence
  MKO10068337_B_2610034M16Rik
  gRNA
gtttcatctagaccagaatt

SEQ ID NO: 68338 - DNA, 20 bp, Artificial Sequence
  MKO10068338_B_2610044O15Rik8
  gRNA
tacctatatcagtgagattc

SEQ ID NO: 68339 - DNA, 20 bp, Artificial Sequence
  MKO10068339_B_2610044O15Rik8
  gRNA
gacaatgttcttcaatatga

SEQ ID NO: 68340 - DNA, 20 bp, Artificial Sequence
  MKO10068340_B_2610044O15Rik8
  gRNA
aaagttctagaagacatgaa

SEQ ID NO: 68341 - DNA, 20 bp, Artificial Sequence
  MKO10068341_B_2610301B20Rik
  gRNA
tgtgtcagagctcccatgca

SEQ ID NO: 68342 - DNA, 20 bp, Artificial Sequence
  MKO10068342_B_2610301B20Rik
  gRNA
agcgccattccatgtgggat

SEQ ID NO: 68343 - DNA, 20 bp, Artificial Sequence
  MKO10068343_B_2610301B20Rik
  gRNA
tcttattaatgaaatattcg

SEQ ID NO: 68344 - DNA, 20 bp, Artificial Sequence
  MKO10068344_B_2610305D13Rik
  gRNA
tttgctcctcaccaagaatc

SEQ ID NO: 68345 - DNA, 20 bp, Artificial Sequence
  MKO10068345_B_2610305D13Rik
  gRNA
ttgttcttctcccagattct

SEQ ID NO: 68346 - DNA, 20 bp, Artificial Sequence
  MKO10068346_B_2610305D13Rik
  gRNA
acagtgtctattaaccttca

SEQ ID NO: 68347 - DNA, 20 bp, Artificial Sequence
  MKO10068347_B_2610318N02Rik
  gRNA
catagagatgcatcggcgcc

SEQ ID NO: 68348 - DNA, 20 bp, Artificial Sequence
  MKO10068348_B_2610318N02Rik
  gRNA
tttcttgtagatggagaaac

SEQ ID NO: 68349 - DNA, 20 bp, Artificial Sequence
  MKO10068349_B_2610318N02Rik
  gRNA
tggcctcctcctcctcttct

SEQ ID NO: 68350 - DNA, 20 bp, Artificial Sequence
  MKO10068350_B_2610507B11Rik
  gRNA
gaaatctgcttctactgatc

SEQ ID NO: 68351 - DNA, 20 bp, Artificial Sequence
  MKO10068351_B_2610507B11Rik
  gRNA
aactatgtggcattgtgctt

SEQ ID NO: 68352 - DNA, 20 bp, Artificial Sequence
  MKO10068352_B_2610507B11Rik
  gRNA
cttaagaaccatgatgttta

SEQ ID NO: 68353 - DNA, 20 bp, Artificial Sequence
  MKO10068353_B_2610524H06Rik
  gRNA
gaagcttaatcgaaccagag

SEQ ID NO: 68354 - DNA, 20 bp, Artificial Sequence
  MKO10068354_B_2610524H06Rik
  gRNA
ctgcctccgcagcacctcgt

SEQ ID NO: 68355 - DNA, 20 bp, Artificial Sequence
  MKO10068355_B_2610524H06Rik
  gRNA
gtttcagtgatgctgcgctt

SEQ ID NO: 68356 - DNA, 20 bp, Artificial Sequence
  MKO10068356_B_2610528A11Rik
  gRNA
atgagacttctagccctttc

SEQ ID NO: 68357 - DNA, 20 bp, Artificial Sequence
  MKO10068357_B_2610528A11Rik
  gRNA
gcatgcagagcagaccggaa

SEQ ID NO: 68358 - DNA, 20 bp, Artificial Sequence
  MKO10068358_B_2610528A11Rik
  gRNA
acctttccaggttgtcagct

SEQ ID NO: 68359 - DNA, 20 bp, Artificial Sequence
  MKO10068359_B_2610528J11Rik
  gRNA
gggtgggaaccgcccaccgg

SEQ ID NO: 68360 - DNA, 20 bp, Artificial Sequence
  MKO10068360_B_2610528J11Rik
  gRNA
gccgataccatgccagttac

SEQ ID NO: 68361 - DNA, 20 bp, Artificial Sequence
  MKO10068361_B_2610528J11Rik
  gRNA
cctctccattctcatcgcgc

SEQ ID NO: 68362 - DNA, 20 bp, Artificial Sequence
  MKO10068362_B_2700029M09Rik
  gRNA
cagtgaccttcgaaaagaag

SEQ ID NO: 68363 - DNA, 20 bp, Artificial Sequence
  MKO10068363_B_2700029M09Rik
  gRNA
tgaactgtaatcttcactgg

SEQ ID NO: 68364 - DNA, 20 bp, Artificial Sequence
  MKO10068364_B_2700029M09Rik
  gRNA
cttgatcctgaaaagccagc

SEQ ID NO: 68365 - DNA, 20 bp, Artificial Sequence
  MKO10068365_B_2700049A03Rik
  gRNA
gaagagaacaacgcaccaaa

SEQ ID NO: 68366 - DNA, 20 bp, Artificial Sequence
  MKO10068366_B_2700049A03Rik
  gRNA
ctttatttctcagtacacca

SEQ ID NO: 68367 - DNA, 20 bp, Artificial Sequence
  MKO10068367_B_2700049A03Rik
  gRNA
tttctaaagatgctgtagtt

SEQ ID NO: 68368 - DNA, 20 bp, Artificial Sequence
  MKO10068368_B_2700050L05Rik
  gRNA
tgtccagctcatctagtaag

SEQ ID NO: 68369 - DNA, 20 bp, Artificial Sequence
  MKO10068369_B_2700050L05Rik
  gRNA
tcgttattcagactggtgat

SEQ ID NO: 68370 - DNA, 20 bp, Artificial Sequence
  MKO10068370_B_2700050L05Rik
  gRNA
ggcgtatgacttcattgact

SEQ ID NO: 68371 - DNA, 20 bp, Artificial Sequence
  MKO10068371_B_2700060E02Rik
  gRNA
tgccgatcctgaatcttgaa

SEQ ID NO: 68372 - DNA, 20 bp, Artificial Sequence
  MKO10068372_B_2700060E02Rik
  gRNA
cactacaagattgaagacag

SEQ ID NO: 68373 - DNA, 20 bp, Artificial Sequence
  MKO10068373_B_2700060E02Rik
  gRNA
tgcagagccactgatcaact

SEQ ID NO: 68374 - DNA, 20 bp, Artificial Sequence
  MKO10068374_B_2700062C07Rik
  gRNA
agagtccctccttgaccatc

SEQ ID NO: 68375 - DNA, 20 bp, Artificial Sequence
  MKO10068375_B_2700062C07Rik
  gRNA
taaagactctacaagtgtgc

SEQ ID NO: 68376 - DNA, 20 bp, Artificial Sequence
  MKO10068376_B_2700062C07Rik
  gRNA
cctttcagaacacctacatc

SEQ ID NO: 68377 - DNA, 20 bp, Artificial Sequence
  MKO10068377_B_2700081O15Rik
  gRNA
ggcgctattaccacgaccac

SEQ ID NO: 68378 - DNA, 20 bp, Artificial Sequence
  MKO10068378_B_2700081O15Rik
  gRNA
ggacggctgccgacgcggcc

SEQ ID NO: 68379 - DNA, 20 bp, Artificial Sequence
  MKO10068379_B_2700081O15Rik
  gRNA
cacaccagccgattcccccg

SEQ ID NO: 68380 - DNA, 20 bp, Artificial Sequence
  MKO10068380_B_2700089E24Rik
  gRNA
cggggcgtcggcgggaccca

SEQ ID NO: 68381 - DNA, 20 bp, Artificial Sequence
  MKO10068381_B_2700089E24Rik
  gRNA
ccagctcgaagaaggcgagc

SEQ ID NO: 68382 - DNA, 20 bp, Artificial Sequence
  MKO10068382_B_2700089E24Rik
  gRNA
ggctctaaatgtgtacctgc

SEQ ID NO: 68383 - DNA, 20 bp, Artificial Sequence
  MKO10068383_B_2700094K13Rik
  gRNA
aagtgaacccgtccaaaccg

SEQ ID NO: 68384 - DNA, 20 bp, Artificial Sequence
  MKO10068384_B_2700094K13Rik
  gRNA
caaatttcctgagcctcaag

SEQ ID NO: 68385 - DNA, 20 bp, Artificial Sequence
  MKO10068385_B_2700094K13Rik
  gRNA
tcaggaaatttgagctttcg

SEQ ID NO: 68386 - DNA, 20 bp, Artificial Sequence
  MKO10068386_B_2700097O09Rik
  gRNA
gttgacgttggctccagact

SEQ ID NO: 68387 - DNA, 20 bp, Artificial Sequence
  MKO10068387_B_2700097O09Rik
  gRNA
catgtactccctgatctgtc

SEQ ID NO: 68388 - DNA, 20 bp, Artificial Sequence
  MKO10068388_B_2700097O09Rik
  gRNA
gctgcactgctgagctgtaa

SEQ ID NO: 68389 - DNA, 20 bp, Artificial Sequence
  MKO10068389_B_2810004N23Rik
  gRNA
gaacacttacgtgaactaca

SEQ ID NO: 68390 - DNA, 20 bp, Artificial Sequence
  MKO10068390_B_2810004N23Rik
  gRNA
actagcttgctgccgttctt

SEQ ID NO: 68391 - DNA, 20 bp, Artificial Sequence
  MKO10068391_B_2810004N23Rik
  gRNA
ctcgtacaggagatccaggc

SEQ ID NO: 68392 - DNA, 20 bp, Artificial Sequence
  MKO10068392_B_2810006K23Rik
  gRNA
ctgatgctgatggtatacca

SEQ ID NO: 68393 - DNA, 20 bp, Artificial Sequence
  MKO10068393_B_2810006K23Rik
  gRNA
cttcgagctcactctcattc

SEQ ID NO: 68394 - DNA, 20 bp, Artificial Sequence
  MKO10068394_B_2810006K23Rik
  gRNA
tttgatccacagatcttgtt

SEQ ID NO: 68395 - DNA, 20 bp, Artificial Sequence
  MKO10068395_B_2810007J24Rik
  gRNA
gaatttggaatcaggggaac

SEQ ID NO: 68396 - DNA, 20 bp, Artificial Sequence
  MKO10068396_B_2810007J24Rik
  gRNA
ctgattccaaattctctccc

SEQ ID NO: 68397 - DNA, 20 bp, Artificial Sequence
  MKO10068397_B_2810007J24Rik
  gRNA
catgtggctggatatccctg

SEQ ID NO: 68398 - DNA, 20 bp, Artificial Sequence
  MKO10068398_B_2810021J22Rik
  gRNA
gcaaggagctgggccatgga

SEQ ID NO: 68399 - DNA, 20 bp, Artificial Sequence
  MKO10068399_B_2810021J22Rik
  gRNA
cagctccttgctccaacttc

SEQ ID NO: 68400 - DNA, 20 bp, Artificial Sequence
  MKO10068400_B_2810021J22Rik
  gRNA
ttcactcactcaaggacagc

SEQ ID NO: 68401 - DNA, 20 bp, Artificial Sequence
  MKO10068401_B_2810403A07Rik
  gRNA
ctgctgtgtcaactcgggga

SEQ ID NO: 68402 - DNA, 20 bp, Artificial Sequence
  MKO10068402_B_2810403A07Rik
  gRNA
tgcagaaacctgctgacacg

SEQ ID NO: 68403 - DNA, 20 bp, Artificial Sequence
  MKO10068403_B_2810403A07Rik
  gRNA
tccattgtatcttcatgttc

SEQ ID NO: 68404 - DNA, 20 bp, Artificial Sequence
  MKO10068404_B_2810408A11Rik
  gRNA
caggctgcaggacaccgatg

SEQ ID NO: 68405 - DNA, 20 bp, Artificial Sequence
  MKO10068405_B_2810408A11Rik
  gRNA
ccccttcaggtttgccacaa

SEQ ID NO: 68406 - DNA, 20 bp, Artificial Sequence
  MKO10068406_B_2810408A11Rik
  gRNA
cgaaagatacactacagtga

SEQ ID NO: 68407 - DNA, 20 bp, Artificial Sequence
  MKO10068407_B_2810408M09Rik
  gRNA
tgccccagtcgtcttctttg

SEQ ID NO: 68408 - DNA, 20 bp, Artificial Sequence
  MKO10068408_B_2810408M09Rik
  gRNA
gcggctccgctcgcgcgcag

SEQ ID NO: 68409 - DNA, 20 bp, Artificial Sequence
  MKO10068409_B_2810408M09Rik
  gRNA
ccggcggcggacagtgcagg

SEQ ID NO: 68410 - DNA, 20 bp, Artificial Sequence
  MKO10068410_B_2810417H13Rik
  gRNA
tctcgacgaacttgaagaat

SEQ ID NO: 68411 - DNA, 20 bp, Artificial Sequence
  MKO10068411_B_2810417H13Rik
  gRNA
acagctgaaaataagtatgc

SEQ ID NO: 68412 - DNA, 20 bp, Artificial Sequence
  MKO10068412_B_2810417H13Rik
  gRNA
ttcctgcttcttcaggagcc

SEQ ID NO: 68413 - DNA, 20 bp, Artificial Sequence
  MKO10068413_B_2810428I15Rik
  gRNA
gcttcagaatgaacgcgcac

SEQ ID NO: 68414 - DNA, 20 bp, Artificial Sequence
  MKO10068414_B_2810428I15Rik
  gRNA
ggcgatcggcgaggttctgc

SEQ ID NO: 68415 - DNA, 20 bp, Artificial Sequence
  MKO10068415_B_2810428I15Rik
  gRNA
gatgcggaatctgccgagtg

SEQ ID NO: 68416 - DNA, 20 bp, Artificial Sequence
  MKO10068416_B_2810459M11Rik
  gRNA
agtgcgggcaggtctttccc

SEQ ID NO: 68417 - DNA, 20 bp, Artificial Sequence
  MKO10068417_B_2810459M11Rik
  gRNA
gactgtgaagaccgtggaaa

SEQ ID NO: 68418 - DNA, 20 bp, Artificial Sequence
  MKO10068418_B_2810459M11Rik
  gRNA
tctttctagcagaaggtgcc

SEQ ID NO: 68419 - DNA, 20 bp, Artificial Sequence
  MKO10068419_B_2810474O19Rik
  gRNA
atgcctgaatcaagtcaaag

SEQ ID NO: 68420 - DNA, 20 bp, Artificial Sequence
  MKO10068420_B_2810474O19Rik
  gRNA
ttacctctttgacttgattc

SEQ ID NO: 68421 - DNA, 20 bp, Artificial Sequence
  MKO10068421_B_2810474O19Rik
  gRNA
aagaatcaaatatcatgttc

SEQ ID NO: 68422 - DNA, 20 bp, Artificial Sequence
  MKO10068422_B_2900011O08Rik
  gRNA
ccaggacttcacggagacgc

SEQ ID NO: 68423 - DNA, 20 bp, Artificial Sequence
  MKO10068423_B_2900011O08Rik
  gRNA
ggatgacattcagctctgca

SEQ ID NO: 68424 - DNA, 20 bp, Artificial Sequence
  MKO10068424_B_2900011O08Rik
  gRNA
gcactcactggctgaagtct

SEQ ID NO: 68425 - DNA, 20 bp, Artificial Sequence
  MKO10068425_B_2900026A02Rik
  gRNA
aatcagatgaagagccgccc

SEQ ID NO: 68426 - DNA, 20 bp, Artificial Sequence
  MKO10068426_B_2900026A02Rik
  gRNA
gtctgagagccgatcccctc

SEQ ID NO: 68427 - DNA, 20 bp, Artificial Sequence
  MKO10068427_B_2900026A02Rik
  gRNA
agtcttacctgcccccgttc

SEQ ID NO: 68428 - DNA, 20 bp, Artificial Sequence
  MKO10068428_B_2900092C05Rik
  gRNA
gaaattacatgaacaagtcc

SEQ ID NO: 68429 - DNA, 20 bp, Artificial Sequence
  MKO10068429_B_2900092C05Rik
  gRNA
aagtattgcaagtaagcctc

SEQ ID NO: 68430 - DNA, 20 bp, Artificial Sequence
  MKO10068430_B_2900092C05Rik
  gRNA
tcagaattcgatacaaataa

SEQ ID NO: 68431 - DNA, 20 bp, Artificial Sequence
  MKO10068431_B_42432
  gRNA
caccagctcagccgcgcctg

SEQ ID NO: 68432 - DNA, 20 bp, Artificial Sequence
  MKO10068432_B_42432
  gRNA
agtgctccaggcagctccga

SEQ ID NO: 68433 - DNA, 20 bp, Artificial Sequence
  MKO10068433_B_42432
  gRNA
ctgctcgactgattccaaaa

SEQ ID NO: 68434 - DNA, 20 bp, Artificial Sequence
  MKO10068434_B_42616
  gRNA
acagtacgaaaagttcctga

SEQ ID NO: 68435 - DNA, 20 bp, Artificial Sequence
  MKO10068435_B_42616
  gRNA
ctgacagtcatcgacacacc

SEQ ID NO: 68436 - DNA, 20 bp, Artificial Sequence
  MKO10068436_B_42616
  gRNA
cgctttgatctccactgtct

SEQ ID NO: 68437 - DNA, 20 bp, Artificial Sequence
  MKO10068437_B_3010026O09Rik
  gRNA
gagagaagcagtcatttgtt

SEQ ID NO: 68438 - DNA, 20 bp, Artificial Sequence
  MKO10068438_B_3010026O09Rik
  gRNA
cttgcagcagatttagcttt

SEQ ID NO: 68439 - DNA, 20 bp, Artificial Sequence
  MKO10068439_B_3010026O09Rik
  gRNA
aggtgaagaagagtctcaaa

SEQ ID NO: 68440 - DNA, 20 bp, Artificial Sequence
  MKO10068440_B_3110001I22Rik
  gRNA
acttcatcatatgatctgtt

SEQ ID NO: 68441 - DNA, 20 bp, Artificial Sequence
  MKO10068441_B_3110001I22Rik
  gRNA
gacgtcctaaagctgcaagc

SEQ ID NO: 68442 - DNA, 20 bp, Artificial Sequence
  MKO10068442_B_3110001I22Rik
  gRNA
gatgaccgggatatgaagca

SEQ ID NO: 68443 - DNA, 20 bp, Artificial Sequence
  MKO10068443_B_3110002H16Rik
  gRNA
tattccagataactctcaac

SEQ ID NO: 68444 - DNA, 20 bp, Artificial Sequence
  MKO10068444_B_3110002H16Rik
  gRNA
tactccagttgagagttatc

SEQ ID NO: 68445 - DNA, 20 bp, Artificial Sequence
  MKO10068445_B_3110002H16Rik
  gRNA
cgcaaattacctaaaagaga

SEQ ID NO: 68446 - DNA, 20 bp, Artificial Sequence
  MKO10068446_B_3110007F17Rik
  gRNA
tgagatacccggatatccaa

SEQ ID NO: 68447 - DNA, 20 bp, Artificial Sequence
  MKO10068447_B_3110007F17Rik
  gRNA
tatttcttactgtccttcaa

SEQ ID NO: 68448 - DNA, 20 bp, Artificial Sequence
  MKO10068448_B_3110007F17Rik
  gRNA
tgttatggcaggtgtagtaa

SEQ ID NO: 68449 - DNA, 20 bp, Artificial Sequence
  MKO10068449_B_3110009E18Rik
  gRNA
gaatgcaatttcagtttcac

SEQ ID NO: 68450 - DNA, 20 bp, Artificial Sequence
  MKO10068450_B_3110009E18Rik
  gRNA
ggtggcaggctggtcctcaa

SEQ ID NO: 68451 - DNA, 20 bp, Artificial Sequence
  MKO10068451_B_3110009E18Rik
  gRNA
tcatcaagctcacaaagcaa

SEQ ID NO: 68452 - DNA, 20 bp, Artificial Sequence
  MKO10068452_B_3110021N24Rik
  gRNA
attcatctaataccttgtcc

SEQ ID NO: 68453 - DNA, 20 bp, Artificial Sequence
  MKO10068453_B_3110021N24Rik
  gRNA
cactttgtatccaataaagt

SEQ ID NO: 68454 - DNA, 20 bp, Artificial Sequence
  MKO10068454_B_3110021N24Rik
  gRNA
gtcctggccagcggcacagc

SEQ ID NO: 68455 - DNA, 20 bp, Artificial Sequence
  MKO10068455_B_3110035E14Rik
  gRNA
tcgagcatatgggaagtcgt

SEQ ID NO: 68456 - DNA, 20 bp, Artificial Sequence
  MKO10068456_B_3110035E14Rik
  gRNA
atctcggtgaaagctccagc

SEQ ID NO: 68457 - DNA, 20 bp, Artificial Sequence
  MKO10068457_B_3110035E14Rik
  gRNA
caagagctctcaccacctct

SEQ ID NO: 68458 - DNA, 20 bp, Artificial Sequence
  MKO10068458_B_3110040N11Rik
  gRNA
tgctgcaatggccacaccaa

SEQ ID NO: 68459 - DNA, 20 bp, Artificial Sequence
  MKO10068459_B_3110040N11Rik
  gRNA
tccagacagaacgctgtgac

SEQ ID NO: 68460 - DNA, 20 bp, Artificial Sequence
  MKO10068460_B_3110040N11Rik
  gRNA
tggctcagggtggtaaatct

SEQ ID NO: 68461 - DNA, 20 bp, Artificial Sequence
  MKO10068461_B_3110043O21Rik
  gRNA
gtgctcaatgatgatgacat

SEQ ID NO: 68462 - DNA, 20 bp, Artificial Sequence
  MKO10068462_B_3110043O21Rik
  gRNA
agctcacacctgcagacctg

SEQ ID NO: 68463 - DNA, 20 bp, Artificial Sequence
  MKO10068463_B_3110043O21Rik
  gRNA
aaatgtccagaaaattgtct

SEQ ID NO: 68464 - DNA, 20 bp, Artificial Sequence
  MKO10068464_B_3110047P20Rik
  gRNA
tcctgttcactactggcaga

SEQ ID NO: 68465 - DNA, 20 bp, Artificial Sequence
  MKO10068465_B_3110047P20Rik
  gRNA
gtaccaatcttccagtaact

SEQ ID NO: 68466 - DNA, 20 bp, Artificial Sequence
  MKO10068466_B_3110047P20Rik
  gRNA
tttatacccacaacaaagca

SEQ ID NO: 68467 - DNA, 20 bp, Artificial Sequence
  MKO10068467_B_3110052M02Rik
  gRNA
tctatacattgatgtgatgt

SEQ ID NO: 68468 - DNA, 20 bp, Artificial Sequence
  MKO10068468_B_3110052M02Rik
  gRNA
ctgacctgggacatgtttac

SEQ ID NO: 68469 - DNA, 20 bp, Artificial Sequence
  MKO10068469_B_3110052M02Rik
  gRNA
tacaatgttcctcagaagta

SEQ ID NO: 68470 - DNA, 20 bp, Artificial Sequence
  MKO10068470_B_3110057O12Rik
  gRNA
tcagattgtaagatcctaga

SEQ ID NO: 68471 - DNA, 20 bp, Artificial Sequence
  MKO10068471_B_3110057O12Rik
  gRNA
ccagccagatgaatgcacac

SEQ ID NO: 68472 - DNA, 20 bp, Artificial Sequence
  MKO10068472_B_3110057O12Rik
  gRNA
attccagtttatcgtgccta

SEQ ID NO: 68473 - DNA, 20 bp, Artificial Sequence
  MKO10068473_B_3110062M04Rik
  gRNA
ggcactggggatcctgattg

SEQ ID NO: 68474 - DNA, 20 bp, Artificial Sequence
  MKO10068474_B_3110062M04Rik
  gRNA
taaaatccaagaccaaaacg

SEQ ID NO: 68475 - DNA, 20 bp, Artificial Sequence
  MKO10068475_B_3110062M04Rik
  gRNA
agcttcattcatgcagtaca

SEQ ID NO: 68476 - DNA, 20 bp, Artificial Sequence
  MKO10068476_B_3110079O15Rik
  gRNA
gagcctattgaattgccctc

SEQ ID NO: 68477 - DNA, 20 bp, Artificial Sequence
  MKO10068477_B_3110079O15Rik
  gRNA
ctggcccctgcggtgctcac

SEQ ID NO: 68478 - DNA, 20 bp, Artificial Sequence
  MKO10068478_B_3110079O15Rik
  gRNA
cccttacctgtgagcaccgc

SEQ ID NO: 68479 - DNA, 20 bp, Artificial Sequence
  MKO10068479_B_3110082I17Rik
  gRNA
gtactggccgtctccttgtc

SEQ ID NO: 68480 - DNA, 20 bp, Artificial Sequence
  MKO10068480_B_3110082I17Rik
  gRNA
ctggctctggagtacctcca

SEQ ID NO: 68481 - DNA, 20 bp, Artificial Sequence
  MKO10068481_B_3110082I17Rik
  gRNA
gccacgtctgtcttgtcttc

SEQ ID NO: 68482 - DNA, 20 bp, Artificial Sequence
  MKO10068482_B_3110082J24Rik
  gRNA
gagcatgggcgctttcccgc

SEQ ID NO: 68483 - DNA, 20 bp, Artificial Sequence
  MKO10068483_B_3110082J24Rik
  gRNA
acggccagtcccgcgcagct

SEQ ID NO: 68484 - DNA, 20 bp, Artificial Sequence
  MKO10068484_B_3110082J24Rik
  gRNA
ggctgatgccccgtggaagg

SEQ ID NO: 68485 - DNA, 20 bp, Artificial Sequence
  MKO10068485_B_3300002I08Rik
  gRNA
gacccgcagcacacaagtta

SEQ ID NO: 68486 - DNA, 20 bp, Artificial Sequence
  MKO10068486_B_3300002I08Rik
  gRNA
tgtgcatgtgaacttcactc

SEQ ID NO: 68487 - DNA, 20 bp, Artificial Sequence
  MKO10068487_B_3300002I08Rik
  gRNA
tatagcagcgagattcctgt

SEQ ID NO: 68488 - DNA, 20 bp, Artificial Sequence
  MKO10068488_B_3425401B19Rik
  gRNA
ccccactatcgctttactcc

SEQ ID NO: 68489 - DNA, 20 bp, Artificial Sequence
  MKO10068489_B_3425401B19Rik
  gRNA
ccagcttcttcgccctgcgc

SEQ ID NO: 68490 - DNA, 20 bp, Artificial Sequence
  MKO10068490_B_3425401B19Rik
  gRNA
tccctccgagttagccccgt

SEQ ID NO: 68491 - DNA, 20 bp, Artificial Sequence
  MKO10068491_B_3632451O06Rik
  gRNA
tctcctgtagaatcaacacc

SEQ ID NO: 68492 - DNA, 20 bp, Artificial Sequence
  MKO10068492_B_3632451O06Rik
  gRNA
ctagaacaacttgaatctga

SEQ ID NO: 68493 - DNA, 20 bp, Artificial Sequence
  MKO10068493_B_3632451O06Rik
  gRNA
gcagtcacagacgtaacaca

SEQ ID NO: 68494 - DNA, 20 bp, Artificial Sequence
  MKO10068494_B_3830403N18Rik
  gRNA
atctccagtacaaaatattc

SEQ ID NO: 68495 - DNA, 20 bp, Artificial Sequence
  MKO10068495_B_3830403N18Rik
  gRNA
tccaaagttgttctaatttc

SEQ ID NO: 68496 - DNA, 20 bp, Artificial Sequence
  MKO10068496_B_3830403N18Rik
  gRNA
cttgttcttcattgaatttc

SEQ ID NO: 68497 - DNA, 20 bp, Artificial Sequence
  MKO10068497_B_3830406C13Rik
  gRNA
tgagaattaccttcaagagt

SEQ ID NO: 68498 - DNA, 20 bp, Artificial Sequence
  MKO10068498_B_3830406C13Rik
  gRNA
acaggacatagatgctgcag

SEQ ID NO: 68499 - DNA, 20 bp, Artificial Sequence
  MKO10068499_B_3830406C13Rik
  gRNA
cagaaaatgaaaaacaaatt

SEQ ID NO: 68500 - DNA, 20 bp, Artificial Sequence
  MKO10068500_B_3830417A13Rik
  gRNA
tcctgcttgttaagtttcga

SEQ ID NO: 68501 - DNA, 20 bp, Artificial Sequence
  MKO10068501_B_3830417A13Rik
  gRNA
cggggcccctttcttcagtt

SEQ ID NO: 68502 - DNA, 20 bp, Artificial Sequence
  MKO10068502_B_3830417A13Rik
  gRNA
ctcgggcccaaactgaagaa

SEQ ID NO: 68503 - DNA, 20 bp, Artificial Sequence
  MKO10068503_B_42433
  gRNA
tatatcgcatctttaaacgc

SEQ ID NO: 68504 - DNA, 20 bp, Artificial Sequence
  MKO10068504_B_42433
  gRNA
ctggaggggcccccgagaag

SEQ ID NO: 68505 - DNA, 20 bp, Artificial Sequence
  MKO10068505_B_42433
  gRNA
tcaaattgcagccgccatct

SEQ ID NO: 68506 - DNA, 20 bp, Artificial Sequence
  MKO10068506_B_42617
  gRNA
aagcgaaccctaccactcag

SEQ ID NO: 68507 - DNA, 20 bp, Artificial Sequence
  MKO10068507_B_42617
  gRNA
cgcccagcagtttccgatcc

SEQ ID NO: 68508 - DNA, 20 bp, Artificial Sequence
  MKO10068508_B_42617
  gRNA
ccctccccaatcaagtccac

SEQ ID NO: 68509 - DNA, 20 bp, Artificial Sequence
  MKO10068509_B_4430402I18Rik
  gRNA
aaaagttctgcgacagctcc

SEQ ID NO: 68510 - DNA, 20 bp, Artificial Sequence
  MKO10068510_B_4430402I18Rik
  gRNA
cctcacaccttggcatgcag

SEQ ID NO: 68511 - DNA, 20 bp, Artificial Sequence
  MKO10068511_B_4430402I18Rik
  gRNA
ccttgtagaaaactctattt

SEQ ID NO: 68512 - DNA, 20 bp, Artificial Sequence
  MKO10068512_B_4632428N05Rik
  gRNA
ccttacaggcatcacggctg

SEQ ID NO: 68513 - DNA, 20 bp, Artificial Sequence
  MKO10068513_B_4632428N05Rik
  gRNA
cggcgacatgggtgtccccg

SEQ ID NO: 68514 - DNA, 20 bp, Artificial Sequence
  MKO10068514_B_4632428N05Rik
  gRNA
ctcattagacgccatgcatg

SEQ ID NO: 68515 - DNA, 20 bp, Artificial Sequence
  MKO10068515_B_4632434I11Rik
  gRNA
agataatccttgagtccaaa

SEQ ID NO: 68516 - DNA, 20 bp, Artificial Sequence
  MKO10068516_B_4632434I11Rik
  gRNA
aggtttacttgtcccaaatg

SEQ ID NO: 68517 - DNA, 20 bp, Artificial Sequence
  MKO10068517_B_4632434I11Rik
  gRNA
cagtacttgctgtccagaat

SEQ ID NO: 68518 - DNA, 20 bp, Artificial Sequence
  MKO10068518_B_4732456N10Rik
  gRNA
ttcgaacatgggctctagat

SEQ ID NO: 68519 - DNA, 20 bp, Artificial Sequence
  MKO10068519_B_4732456N10Rik
  gRNA
atccatcagagcttccacct

SEQ ID NO: 68520 - DNA, 20 bp, Artificial Sequence
  MKO10068520_B_4732456N10Rik
  gRNA
acaggagctggctcaacttc

SEQ ID NO: 68521 - DNA, 20 bp, Artificial Sequence
  MKO10068521_B_4833403I15Rik
  gRNA
cttacccagctggggcatat

SEQ ID NO: 68522 - DNA, 20 bp, Artificial Sequence
  MKO10068522_B_4833403I15Rik
  gRNA
gtttaacttagatacgtgtc

SEQ ID NO: 68523 - DNA, 20 bp, Artificial Sequence
  MKO10068523_B_4833403I15Rik
  gRNA
cggaaagacgacattgcaag

SEQ ID NO: 68524 - DNA, 20 bp, Artificial Sequence
  MKO10068524_B_4833420G17Rik
  gRNA
gtgtttccacgcctctggac

SEQ ID NO: 68525 - DNA, 20 bp, Artificial Sequence
  MKO10068525_B_4833420G17Rik
  gRNA
ggtataagggtgttacatac

SEQ ID NO: 68526 - DNA, 20 bp, Artificial Sequence
  MKO10068526_B_4833420G17Rik
  gRNA
ttcctatcctgagcttgtga

SEQ ID NO: 68527 - DNA, 20 bp, Artificial Sequence
  MKO10068527_B_4833423E24Rik
  gRNA
ccacttggacttcttaaaca

SEQ ID NO: 68528 - DNA, 20 bp, Artificial Sequence
  MKO10068528_B_4833423E24Rik
  gRNA
tatcttaagccactactcat

SEQ ID NO: 68529 - DNA, 20 bp, Artificial Sequence
  MKO10068529_B_4833423E24Rik
  gRNA
gaaagttctccaatgagtag

SEQ ID NO: 68530 - DNA, 20 bp, Artificial Sequence
  MKO10068530_B_4833424O15Rik
  gRNA
tagcggaatatcgaaatcat

SEQ ID NO: 68531 - DNA, 20 bp, Artificial Sequence
  MKO10068531_B_4833424O15Rik
  gRNA
ctgctatagatattccgact

SEQ ID NO: 68532 - DNA, 20 bp, Artificial Sequence
  MKO10068532_B_4833424O15Rik
  gRNA
gctttctactcgaggaatgt

SEQ ID NO: 68533 - DNA, 20 bp, Artificial Sequence
  MKO10068533_B_4833427G06Rik
  gRNA
ttatctttgctaaagcccaa

SEQ ID NO: 68534 - DNA, 20 bp, Artificial Sequence
  MKO10068534_B_4833427G06Rik
  gRNA
ccagccctttccctttgatc

SEQ ID NO: 68535 - DNA, 20 bp, Artificial Sequence
  MKO10068535_B_4833427G06Rik
  gRNA
gatttgggcactttgtcctt

SEQ ID NO: 68536 - DNA, 20 bp, Artificial Sequence
  MKO10068536_B_4833439L19Rik
  gRNA
actgacctggacttctgctt

SEQ ID NO: 68537 - DNA, 20 bp, Artificial Sequence
  MKO10068537_B_4833439L19Rik
  gRNA
gacgcgtgaggggtgctgct

SEQ ID NO: 68538 - DNA, 20 bp, Artificial Sequence
  MKO10068538_B_4833439L19Rik
  gRNA
ctgcctgttgttcaaaacgc

SEQ ID NO: 68539 - DNA, 20 bp, Artificial Sequence
  MKO10068539_B_4921501E09Rik
  gRNA
ccagtatgctagccgcttga

SEQ ID NO: 68540 - DNA, 20 bp, Artificial Sequence
  MKO10068540_B_4921501E09Rik
  gRNA
ggaaagcttacgaactatct

SEQ ID NO: 68541 - DNA, 20 bp, Artificial Sequence
  MKO10068541_B_4921501E09Rik
  gRNA
aaaagagcttgtccgaatct

SEQ ID NO: 68542 - DNA, 20 bp, Artificial Sequence
  MKO10068542_B_4921504E06Rik
  gRNA
tcagttgaaccaaatctttg

SEQ ID NO: 68543 - DNA, 20 bp, Artificial Sequence
  MKO10068543_B_4921504E06Rik
  gRNA
cattcctttgataatagcta

SEQ ID NO: 68544 - DNA, 20 bp, Artificial Sequence
  MKO10068544_B_4921504E06Rik
  gRNA
tgcagtctgtctgagtagca

SEQ ID NO: 68545 - DNA, 20 bp, Artificial Sequence
  MKO10068545_B_4921506M07Rik
  gRNA
actggatgttccgtaatact

SEQ ID NO: 68546 - DNA, 20 bp, Artificial Sequence
  MKO10068546_B_4921506M07Rik
  gRNA
tctccagccgagcatttatg

SEQ ID NO: 68547 - DNA, 20 bp, Artificial Sequence
  MKO10068547_B_4921506M07Rik
  gRNA
aatgtacctcagaccatctc

SEQ ID NO: 68548 - DNA, 20 bp, Artificial Sequence
  MKO10068548_B_4921507P07Rik
  gRNA
aacaagaagagcgacgtgta

SEQ ID NO: 68549 - DNA, 20 bp, Artificial Sequence
  MKO10068549_B_4921507P07Rik
  gRNA
tggggtgccgatagagaata

SEQ ID NO: 68550 - DNA, 20 bp, Artificial Sequence
  MKO10068550_B_4921507P07Rik
  gRNA
catatagtaatactgctcaa

SEQ ID NO: 68551 - DNA, 20 bp, Artificial Sequence
  MKO10068551_B_4921509C19Rik
  gRNA
ctcgttgaagcagttcctcg

SEQ ID NO: 68552 - DNA, 20 bp, Artificial Sequence
  MKO10068552_B_4921509C19Rik
  gRNA
gcacagtctgacgcctgcca

SEQ ID NO: 68553 - DNA, 20 bp, Artificial Sequence
  MKO10068553_B_4921509C19Rik
  gRNA
gggtgcactctcctttcgat

SEQ ID NO: 68554 - DNA, 20 bp, Artificial Sequence
  MKO10068554_B_4921511H03Rik
  gRNA
cagacccatacacgttaccc

SEQ ID NO: 68555 - DNA, 20 bp, Artificial Sequence
  MKO10068555_B_4921511H03Rik
  gRNA
taccaattacctgcaccttc

SEQ ID NO: 68556 - DNA, 20 bp, Artificial Sequence
  MKO10068556_B_4921511H03Rik
  gRNA
gtaattggtacgaggaacct

SEQ ID NO: 68557 - DNA, 20 bp, Artificial Sequence
  MKO10068557_B_4921511M17Rik
  gRNA
acacagaaaaccagaaccac

SEQ ID NO: 68558 - DNA, 20 bp, Artificial Sequence
  MKO10068558_B_4921511M17Rik
  gRNA
aacaagcaaacatttaactg

SEQ ID NO: 68559 - DNA, 20 bp, Artificial Sequence
  MKO10068559_B_4921511M17Rik
  gRNA
tcaaaatggcccatactacc

SEQ ID NO: 68560 - DNA, 20 bp, Artificial Sequence
  MKO10068560_B_4921517D22Rik
  gRNA
gctgactccccaccgatgtt

SEQ ID NO: 68561 - DNA, 20 bp, Artificial Sequence
  MKO10068561_B_4921517D22Rik
  gRNA
ctcttgtcttccgttacccc

SEQ ID NO: 68562 - DNA, 20 bp, Artificial Sequence
  MKO10068562_B_4921517D22Rik
  gRNA
tcttcgtagaacagcctgcc

SEQ ID NO: 68563 - DNA, 20 bp, Artificial Sequence
  MKO10068563_B_4921524J17Rik
  gRNA
tcacaattacctgtagacgg

SEQ ID NO: 68564 - DNA, 20 bp, Artificial Sequence
  MKO10068564_B_4921524J17Rik
  gRNA
ccatacagaaaacaagcacg

SEQ ID NO: 68565 - DNA, 20 bp, Artificial Sequence
  MKO10068565_B_4921524J17Rik
  gRNA
ttcatccgccaaaaaacacg

SEQ ID NO: 68566 - DNA, 20 bp, Artificial Sequence
  MKO10068566_B_4921524L21Rik
  gRNA
aaggagaaccgggggcgaca

SEQ ID NO: 68567 - DNA, 20 bp, Artificial Sequence
  MKO10068567_B_4921524L21Rik
  gRNA
aagcttgatgtgaccctcac

SEQ ID NO: 68568 - DNA, 20 bp, Artificial Sequence
  MKO10068568_B_4921524L21Rik
  gRNA
aatcctacagcgcatcttct

SEQ ID NO: 68569 - DNA, 20 bp, Artificial Sequence
  MKO10068569_B_4921530D09Rik
  gRNA
tcggcgacgcggacagaagt

SEQ ID NO: 68570 - DNA, 20 bp, Artificial Sequence
  MKO10068570_B_4921530D09Rik
  gRNA
ctgcgcagcaacctccgccg

SEQ ID NO: 68571 - DNA, 20 bp, Artificial Sequence
  MKO10068571_B_4921530D09Rik
  gRNA
catggacgtatcctttccgc

SEQ ID NO: 68572 - DNA, 20 bp, Artificial Sequence
  MKO10068572_B_4921530L21Rik
  gRNA
tacaacgccttgagcacaga

SEQ ID NO: 68573 - DNA, 20 bp, Artificial Sequence
  MKO10068573_B_4921530L21Rik
  gRNA
gaccaaggctctgcaacacc

SEQ ID NO: 68574 - DNA, 20 bp, Artificial Sequence
  MKO10068574_B_4921530L21Rik
  gRNA
gtagctggttctgctgccgt

SEQ ID NO: 68575 - DNA, 20 bp, Artificial Sequence
  MKO10068575_B_4921536K21Rik
  gRNA
gaacttccggcgcgagagac

SEQ ID NO: 68576 - DNA, 20 bp, Artificial Sequence
  MKO10068576_B_4921536K21Rik
  gRNA
gcgcgattcccagagcaccc

SEQ ID NO: 68577 - DNA, 20 bp, Artificial Sequence
  MKO10068577_B_4921536K21Rik
  gRNA
agcgaatcatctttctcagc

SEQ ID NO: 68578 - DNA, 20 bp, Artificial Sequence
  MKO10068578_B_4921539E11Rik
  gRNA
cagcagattctagtacaagc

SEQ ID NO: 68579 - DNA, 20 bp, Artificial Sequence
  MKO10068579_B_4921539E11Rik
  gRNA
ttaagataacgaagagatat

SEQ ID NO: 68580 - DNA, 20 bp, Artificial Sequence
  MKO10068580_B_4921539E11Rik
  gRNA
ttgtactagaatctgctgag

SEQ ID NO: 68581 - DNA, 20 bp, Artificial Sequence
  MKO10068581_B_4922501C03Rik
  gRNA
gttgacagcttagaagctaa

SEQ ID NO: 68582 - DNA, 20 bp, Artificial Sequence
  MKO10068582_B_4922501C03Rik
  gRNA
ttctcacatccatcttcagc

SEQ ID NO: 68583 - DNA, 20 bp, Artificial Sequence
  MKO10068583_B_4922501C03Rik
  gRNA
aatacagagccagctgaaga

SEQ ID NO: 68584 - DNA, 20 bp, Artificial Sequence
  MKO10068584_B_4922501L14Rik
  gRNA
tagcaatgcagttatcacaa

SEQ ID NO: 68585 - DNA, 20 bp, Artificial Sequence
  MKO10068585_B_4922501L14Rik
  gRNA
gaatgaatgcaccatcgaaa

SEQ ID NO: 68586 - DNA, 20 bp, Artificial Sequence
  MKO10068586_B_4922501L14Rik
  gRNA
gtgtggtaactgttaatgtg

SEQ ID NO: 68587 - DNA, 20 bp, Artificial Sequence
  MKO10068587_B_4922502D21Rik
  gRNA
catagacagtaccagttgtg

SEQ ID NO: 68588 - DNA, 20 bp, Artificial Sequence
  MKO10068588_B_4922502D21Rik
  gRNA
cagcaacagcacctcctagc

SEQ ID NO: 68589 - DNA, 20 bp, Artificial Sequence
  MKO10068589_B_4922502D21Rik
  gRNA
cgaagaaagtgctgaccctt

SEQ ID NO: 68590 - DNA, 20 bp, Artificial Sequence
  MKO10068590_B_4922505E12Rik
  gRNA
tggcgccgagatcgagaccg

SEQ ID NO: 68591 - DNA, 20 bp, Artificial Sequence
  MKO10068591_B_4922505E12Rik
  gRNA
gggcacctcggtctcgatct

SEQ ID NO: 68592 - DNA, 20 bp, Artificial Sequence
  MKO10068592_B_4922505E12Rik
  gRNA
ccgagctccccataggaccg

SEQ ID NO: 68593 - DNA, 20 bp, Artificial Sequence
  MKO10068593_B_4930402F06Rik
  gRNA
ttaagactgtcaaactcgct

SEQ ID NO: 68594 - DNA, 20 bp, Artificial Sequence
  MKO10068594_B_4930402F06Rik
  gRNA
tgcagatgacgtatcagtgc

SEQ ID NO: 68595 - DNA, 20 bp, Artificial Sequence
  MKO10068595_B_4930402F06Rik
  gRNA
cacttacaatgagttagtct

SEQ ID NO: 68596 - DNA, 20 bp, Artificial Sequence
  MKO10068596_B_4930402H24Rik
  gRNA
acatggttcgagactgtagt

SEQ ID NO: 68597 - DNA, 20 bp, Artificial Sequence
  MKO10068597_B_4930402H24Rik
  gRNA
cagctgcagccgactccgcc

SEQ ID NO: 68598 - DNA, 20 bp, Artificial Sequence
  MKO10068598_B_4930402H24Rik
  gRNA
gctttgcaggaattgacagc

SEQ ID NO: 68599 - DNA, 20 bp, Artificial Sequence
  MKO10068599_B_4930402K13Rik
  gRNA
gctgaagttgcccacctccg

SEQ ID NO: 68600 - DNA, 20 bp, Artificial Sequence
  MKO10068600_B_4930402K13Rik
  gRNA
ttgccccatatggttctacg

SEQ ID NO: 68601 - DNA, 20 bp, Artificial Sequence
  MKO10068601_B_4930402K13Rik
  gRNA
gcactactgccaagtctata

SEQ ID NO: 68602 - DNA, 20 bp, Artificial Sequence
  MKO10068602_B_4930404A10Rik
  gRNA
cgcagtctgttaagtgttac

SEQ ID NO: 68603 - DNA, 20 bp, Artificial Sequence
  MKO10068603_B_4930404A10Rik
  gRNA
gcggaaaattactgagaaga

SEQ ID NO: 68604 - DNA, 20 bp, Artificial Sequence
  MKO10068604_B_4930404A10Rik
  gRNA
agtgactgatacctttgaga

SEQ ID NO: 68605 - DNA, 20 bp, Artificial Sequence
  MKO10068605_B_4930404N11Rik
  gRNA
ggacaggcaaatccgtggca

SEQ ID NO: 68606 - DNA, 20 bp, Artificial Sequence
  MKO10068606_B_4930404N11Rik
  gRNA
accgcgcagtatctcaactc

SEQ ID NO: 68607 - DNA, 20 bp, Artificial Sequence
  MKO10068607_B_4930404N11Rik
  gRNA
caggaacccaccggtagaga

SEQ ID NO: 68608 - DNA, 20 bp, Artificial Sequence
  MKO10068608_B_4930407I10Rik
  gRNA
agtattggcaccagttctcc

SEQ ID NO: 68609 - DNA, 20 bp, Artificial Sequence
  MKO10068609_B_4930407I10Rik
  gRNA
tcgtctcccgtgaaacatag

SEQ ID NO: 68610 - DNA, 20 bp, Artificial Sequence
  MKO10068610_B_4930407I10Rik
  gRNA
gacttgcatagtaccgagcc

SEQ ID NO: 68611 - DNA, 20 bp, Artificial Sequence
  MKO10068611_B_4930412D23Rik
  gRNA
tgtggctggagttgtcaacg

SEQ ID NO: 68612 - DNA, 20 bp, Artificial Sequence
  MKO10068612_B_4930412D23Rik
  gRNA
gttagcgcaacatctgctcc

SEQ ID NO: 68613 - DNA, 20 bp, Artificial Sequence
  MKO10068613_B_4930412D23Rik
  gRNA
catcatggtaggagtagtgc

SEQ ID NO: 68614 - DNA, 20 bp, Artificial Sequence
  MKO10068614_B_4930415F15Rik
  gRNA
ttcatctccgaatctgctga

SEQ ID NO: 68615 - DNA, 20 bp, Artificial Sequence
  MKO10068615_B_4930415F15Rik
  gRNA
taagtgtgagtccaagtact

SEQ ID NO: 68616 - DNA, 20 bp, Artificial Sequence
  MKO10068616_B_4930415F15Rik
  gRNA
cacagacttgatatctccgt

SEQ ID NO: 68617 - DNA, 20 bp, Artificial Sequence
  MKO10068617_B_4930415L06Rik
  gRNA
ttacagacatatcgaagata

SEQ ID NO: 68618 - DNA, 20 bp, Artificial Sequence
  MKO10068618_B_4930415L06Rik
  gRNA
gataagcagtggaaaaacgt

SEQ ID NO: 68619 - DNA, 20 bp, Artificial Sequence
  MKO10068619_B_4930415L06Rik
  gRNA
aaatatgcgtaccacagcta

SEQ ID NO: 68620 - DNA, 20 bp, Artificial Sequence
  MKO10068620_B_4930415O20Rik
  gRNA
caagacctcacctggtcatt

SEQ ID NO: 68621 - DNA, 20 bp, Artificial Sequence
  MKO10068621_B_4930415O20Rik
  gRNA
ttcttcaacttatatctact

SEQ ID NO: 68622 - DNA, 20 bp, Artificial Sequence
  MKO10068622_B_4930415O20Rik
  gRNA
cgctcctcagtaaagactga

SEQ ID NO: 68623 - DNA, 20 bp, Artificial Sequence
  MKO10068623_B_4930422G04Rik
  gRNA
ggacgcttgtatcctccagc

SEQ ID NO: 68624 - DNA, 20 bp, Artificial Sequence
  MKO10068624_B_4930422G04Rik
  gRNA
cctcaaggcacttaagaaac

SEQ ID NO: 68625 - DNA, 20 bp, Artificial Sequence
  MKO10068625_B_4930422G04Rik
  gRNA
gttctgaagatcactcactt

SEQ ID NO: 68626 - DNA, 20 bp, Artificial Sequence
  MKO10068626_B_4930426D05Rik
  gRNA
aacccagcataccgatgttg

SEQ ID NO: 68627 - DNA, 20 bp, Artificial Sequence
  MKO10068627_B_4930426D05Rik
  gRNA
ctcgagcccacgaggtgtca

SEQ ID NO: 68628 - DNA, 20 bp, Artificial Sequence
  MKO10068628_B_4930426D05Rik
  gRNA
tgtgctgttgcttaacttcg

SEQ ID NO: 68629 - DNA, 20 bp, Artificial Sequence
  MKO10068629_B_4930427A07Rik
  gRNA
ccgactagtggaatggctga

SEQ ID NO: 68630 - DNA, 20 bp, Artificial Sequence
  MKO10068630_B_4930427A07Rik
  gRNA
cgcttgctgcaaacaatacc

SEQ ID NO: 68631 - DNA, 20 bp, Artificial Sequence
  MKO10068631_B_4930427A07Rik
  gRNA
cctgtattaccttgctgagg

SEQ ID NO: 68632 - DNA, 20 bp, Artificial Sequence
  MKO10068632_B_4930428D18Rik
  gRNA
ctaatttgctgtatctccat

SEQ ID NO: 68633 - DNA, 20 bp, Artificial Sequence
  MKO10068633_B_4930428D18Rik
  gRNA
aatgatccaacaattgctac

SEQ ID NO: 68634 - DNA, 20 bp, Artificial Sequence
  MKO10068634_B_4930428D18Rik
  gRNA
tcaccaccattattgccctt

SEQ ID NO: 68635 - DNA, 20 bp, Artificial Sequence
  MKO10068635_B_4930430A15Rik
  gRNA
gcttaagtacagtgcaaaca

SEQ ID NO: 68636 - DNA, 20 bp, Artificial Sequence
  MKO10068636_B_4930430A15Rik
  gRNA
tccttgagagccagtaaaag

SEQ ID NO: 68637 - DNA, 20 bp, Artificial Sequence
  MKO10068637_B_4930430A15Rik
  gRNA
gaatacttactacttccacc

SEQ ID NO: 68638 - DNA, 20 bp, Artificial Sequence
  MKO10068638_B_4930430D24Rik
  gRNA
gctatctaccatttgtgcat

SEQ ID NO: 68639 - DNA, 20 bp, Artificial Sequence
  MKO10068639_B_4930430D24Rik
  gRNA
gctgtatgaagcctcaccag

SEQ ID NO: 68640 - DNA, 20 bp, Artificial Sequence
  MKO10068640_B_4930430D24Rik
  gRNA
gcagaggaacttgcagatga

SEQ ID NO: 68641 - DNA, 20 bp, Artificial Sequence
  MKO10068641_B_4930430F08Rik
  gRNA
agatgcagacgtgtacaatg

SEQ ID NO: 68642 - DNA, 20 bp, Artificial Sequence
  MKO10068642_B_4930430F08Rik
  gRNA
tgctatgttactaactacaa

SEQ ID NO: 68643 - DNA, 20 bp, Artificial Sequence
  MKO10068643_B_4930430F08Rik
  gRNA
tcaagcctgtcccagagtgc

SEQ ID NO: 68644 - DNA, 20 bp, Artificial Sequence
  MKO10068644_B_4930432K09Rik
  gRNA
ctttacctcttcagtggacg

SEQ ID NO: 68645 - DNA, 20 bp, Artificial Sequence
  MKO10068645_B_4930432K09Rik
  gRNA
aaaagcgacacacatgatgc

SEQ ID NO: 68646 - DNA, 20 bp, Artificial Sequence
  MKO10068646_B_4930432K09Rik
  gRNA
tcaaaatgaagttacttctt

SEQ ID NO: 68647 - DNA, 20 bp, Artificial Sequence
  MKO10068647_B_4930432K21Rik
  gRNA
tacctgaaagcttcgtgtag

SEQ ID NO: 68648 - DNA, 20 bp, Artificial Sequence
  MKO10068648_B_4930432K21Rik
  gRNA
tccccgcctagctctacaga

SEQ ID NO: 68649 - DNA, 20 bp, Artificial Sequence
  MKO10068649_B_4930432K21Rik
  gRNA
ggagctgcctctgacctcgc

SEQ ID NO: 68650 - DNA, 20 bp, Artificial Sequence
  MKO10068650_B_4930432M17Rik
  gRNA
ctgcgtagagccttcaagag

SEQ ID NO: 68651 - DNA, 20 bp, Artificial Sequence
  MKO10068651_B_4930432M17Rik
  gRNA
tcaccttgtccacccaacag

SEQ ID NO: 68652 - DNA, 20 bp, Artificial Sequence
  MKO10068652_B_4930432M17Rik
  gRNA
agccccctagactgtatcaa

SEQ ID NO: 68653 - DNA, 20 bp, Artificial Sequence
  MKO10068653_B_4930433I11Rik
  gRNA
taccacttcttcccagcatc

SEQ ID NO: 68654 - DNA, 20 bp, Artificial Sequence
  MKO10068654_B_4930433I11Rik
  gRNA
cagaagcagacgtctgtctt

SEQ ID NO: 68655 - DNA, 20 bp, Artificial Sequence
  MKO10068655_B_4930433I11Rik
  gRNA
ctgatccctccagacaactg

SEQ ID NO: 68656 - DNA, 20 bp, Artificial Sequence
  MKO10068656_B_4930435E12Rik
  gRNA
gtatccggccaagccaatgc

SEQ ID NO: 68657 - DNA, 20 bp, Artificial Sequence
  MKO10068657_B_4930435E12Rik
  gRNA
actgtatttcatgctagacc

SEQ ID NO: 68658 - DNA, 20 bp, Artificial Sequence
  MKO10068658_B_4930435E12Rik
  gRNA
ctgaaaacctagtctatgaa

SEQ ID NO: 68659 - DNA, 20 bp, Artificial Sequence
  MKO10068659_B_4930444G20Rik
  gRNA
aggaacgggtgaggcctgtg

SEQ ID NO: 68660 - DNA, 20 bp, Artificial Sequence
  MKO10068660_B_4930444G20Rik
  gRNA
tattgcctttgccactatcc

SEQ ID NO: 68661 - DNA, 20 bp, Artificial Sequence
  MKO10068661_B_4930444G20Rik
  gRNA
atcatcctggatagtggcaa

SEQ ID NO: 68662 - DNA, 20 bp, Artificial Sequence
  MKO10068662_B_4930444P10Rik
  gRNA
acgctgagatccctcccatc

SEQ ID NO: 68663 - DNA, 20 bp, Artificial Sequence
  MKO10068663_B_4930444P10Rik
  gRNA
tcacaagcgcctgctgcaca

SEQ ID NO: 68664 - DNA, 20 bp, Artificial Sequence
  MKO10068664_B_4930444P10Rik
  gRNA
gtgcagtatggcagcatttc

SEQ ID NO: 68665 - DNA, 20 bp, Artificial Sequence
  MKO10068665_B_4930447A16Rik
  gRNA
aagattgtgcaagcttaagg

SEQ ID NO: 68666 - DNA, 20 bp, Artificial Sequence
  MKO10068666_B_4930447A16Rik
  gRNA
ttattcagtgatgaagatgt

SEQ ID NO: 68667 - DNA, 20 bp, Artificial Sequence
  MKO10068667_B_4930447A16Rik
  gRNA
cagatgtgtgccactccacc

SEQ ID NO: 68668 - DNA, 20 bp, Artificial Sequence
  MKO10068668_B_4930447C04Rik
  gRNA
actgtacttgtctttctcat

SEQ ID NO: 68669 - DNA, 20 bp, Artificial Sequence
  MKO10068669_B_4930447C04Rik
  gRNA
actattcttatgaaatttct

SEQ ID NO: 68670 - DNA, 20 bp, Artificial Sequence
  MKO10068670_B_4930447C04Rik
  gRNA
agaaattaaaaatagagtgt

SEQ ID NO: 68671 - DNA, 20 bp, Artificial Sequence
  MKO10068671_B_4930449I24Rik
  gRNA
ggtctgttctcaaaatgaac

SEQ ID NO: 68672 - DNA, 20 bp, Artificial Sequence
  MKO10068672_B_4930449I24Rik
  gRNA
ccactcacctcttagtttgc

SEQ ID NO: 68673 - DNA, 20 bp, Artificial Sequence
  MKO10068673_B_4930449I24Rik
  gRNA
gccacaggtatgcatccttc

SEQ ID NO: 68674 - DNA, 20 bp, Artificial Sequence
  MKO10068674_B_4930451C15Rik
  gRNA
taatccctacatcaagcgtc

SEQ ID NO: 68675 - DNA, 20 bp, Artificial Sequence
  MKO10068675_B_4930451C15Rik
  gRNA
ttcttgtcttctgcgccaag

SEQ ID NO: 68676 - DNA, 20 bp, Artificial Sequence
  MKO10068676_B_4930451C15Rik
  gRNA
ttcattcttctgaacttcgc

SEQ ID NO: 68677 - DNA, 20 bp, Artificial Sequence
  MKO10068677_B_4930451G09Rik
  gRNA
cctgttggtgtcgatgagtc

SEQ ID NO: 68678 - DNA, 20 bp, Artificial Sequence
  MKO10068678_B_4930451G09Rik
  gRNA
cgaagcgcagagccctccgc

SEQ ID NO: 68679 - DNA, 20 bp, Artificial Sequence
  MKO10068679_B_4930451G09Rik
  gRNA
tgaacgtcaaaccttggtct

SEQ ID NO: 68680 - DNA, 20 bp, Artificial Sequence
  MKO10068680_B_4930451I11Rik
  gRNA
cagttccccacctgtttcta

SEQ ID NO: 68681 - DNA, 20 bp, Artificial Sequence
  MKO10068681_B_4930451I11Rik
  gRNA
ccaccactaatgtccccacc

SEQ ID NO: 68682 - DNA, 20 bp, Artificial Sequence
  MKO10068682_B_4930451I11Rik
  gRNA
tatctcattaggcccctttc

SEQ ID NO: 68683 - DNA, 20 bp, Artificial Sequence
  MKO10068683_B_4930452B06Rik
  gRNA
ttctagttggactgatccag

SEQ ID NO: 68684 - DNA, 20 bp, Artificial Sequence
  MKO10068684_B_4930452B06Rik
  gRNA
gcttcagatttacatacccc

SEQ ID NO: 68685 - DNA, 20 bp, Artificial Sequence
  MKO10068685_B_4930452B06Rik
  gRNA
gtatttatcaacagtccata

SEQ ID NO: 68686 - DNA, 20 bp, Artificial Sequence
  MKO10068686_B_4930453H23Rik
  gRNA
tatattctcagccaatacag

SEQ ID NO: 68687 - DNA, 20 bp, Artificial Sequence
  MKO10068687_B_4930453H23Rik
  gRNA
tgaaaatgtagatgtcaact

SEQ ID NO: 68688 - DNA, 20 bp, Artificial Sequence
  MKO10068688_B_4930453H23Rik
  gRNA
attgaaaaagacccatgaag

SEQ ID NO: 68689 - DNA, 20 bp, Artificial Sequence
  MKO10068689_B_4930453N24Rik
  gRNA
tcttgaggtgggcccaaaaa

SEQ ID NO: 68690 - DNA, 20 bp, Artificial Sequence
  MKO10068690_B_4930453N24Rik
  gRNA
cgtcgtgccagaagtgctgt

SEQ ID NO: 68691 - DNA, 20 bp, Artificial Sequence
  MKO10068691_B_4930453N24Rik
  gRNA
cgacaccgtcaccaaccgcc

SEQ ID NO: 68692 - DNA, 20 bp, Artificial Sequence
  MKO10068692_B_4930467E23Rik
  gRNA
ggccacccaacgagacaatg

SEQ ID NO: 68693 - DNA, 20 bp, Artificial Sequence
  MKO10068693_B_4930467E23Rik
  gRNA
gctaaaaattctaccatttc

SEQ ID NO: 68694 - DNA, 20 bp, Artificial Sequence
  MKO10068694_B_4930467E23Rik
  gRNA
atttgaacagaaacctgaaa

SEQ ID NO: 68695 - DNA, 20 bp, Artificial Sequence
  MKO10068695_B_4930468A15Rik
  gRNA
aagaaccatactcgccattg

SEQ ID NO: 68696 - DNA, 20 bp, Artificial Sequence
  MKO10068696_B_4930468A15Rik
  gRNA
tttaaatagtatagcgcact

SEQ ID NO: 68697 - DNA, 20 bp, Artificial Sequence
  MKO10068697_B_4930468A15Rik
  gRNA
gtgttacaaatacacctacc

SEQ ID NO: 68698 - DNA, 20 bp, Artificial Sequence
  MKO10068698_B_4930469G21Rik
  gRNA
agtgcactacctgaaagtta

SEQ ID NO: 68699 - DNA, 20 bp, Artificial Sequence
  MKO10068699_B_4930469G21Rik
  gRNA
caacgtggacaaaggtcgga

SEQ ID NO: 68700 - DNA, 20 bp, Artificial Sequence
  MKO10068700_B_4930469G21Rik
  gRNA
gactggcaggactatctgaa

SEQ ID NO: 68701 - DNA, 20 bp, Artificial Sequence
  MKO10068701_B_4930474N05Rik
  gRNA
tgtctatgctcaacagaatg

SEQ ID NO: 68702 - DNA, 20 bp, Artificial Sequence
  MKO10068702_B_4930474N05Rik
  gRNA
aagctttgttacccccctac

SEQ ID NO: 68703 - DNA, 20 bp, Artificial Sequence
  MKO10068703_B_4930474N05Rik
  gRNA
ggtaacaaagcttctgtatg

SEQ ID NO: 68704 - DNA, 20 bp, Artificial Sequence
  MKO10068704_B_4930480E11Rik
  gRNA
tagatatcatgggggatcag

SEQ ID NO: 68705 - DNA, 20 bp, Artificial Sequence
  MKO10068705_B_4930480E11Rik
  gRNA
acctgggtaatcgaggaagc

SEQ ID NO: 68706 - DNA, 20 bp, Artificial Sequence
  MKO10068706_B_4930480E11Rik
  gRNA
gtgtacaatgaaatccttaa

SEQ ID NO: 68707 - DNA, 20 bp, Artificial Sequence
  MKO10068707_B_4930486L24Rik
  gRNA
ttcgaaggcagaagatcaag

SEQ ID NO: 68708 - DNA, 20 bp, Artificial Sequence
  MKO10068708_B_4930486L24Rik
  gRNA
gaattcgtgaaaatgatgac

SEQ ID NO: 68709 - DNA, 20 bp, Artificial Sequence
  MKO10068709_B_4930486L24Rik
  gRNA
acttaccactgtcatagaat

SEQ ID NO: 68710 - DNA, 20 bp, Artificial Sequence
  MKO10068710_B_4930502E18Rik
  gRNA
tctctagacattgcttgtaa

SEQ ID NO: 68711 - DNA, 20 bp, Artificial Sequence
  MKO10068711_B_4930502E18Rik
  gRNA
gcatgcaatccaactatttc

SEQ ID NO: 68712 - DNA, 20 bp, Artificial Sequence
  MKO10068712_B_4930502E18Rik
  gRNA
acagatttcaaaccttataa

SEQ ID NO: 68713 - DNA, 20 bp, Artificial Sequence
  MKO10068713_B_4930503B20Rik
  gRNA
tttcgtcacaatccttcacg

SEQ ID NO: 68714 - DNA, 20 bp, Artificial Sequence
  MKO10068714_B_4930503B20Rik
  gRNA
cgtttgtgtcccatgaatcc

SEQ ID NO: 68715 - DNA, 20 bp, Artificial Sequence
  MKO10068715_B_4930503B20Rik
  gRNA
gtcgtaatcctttcgcttct

SEQ ID NO: 68716 - DNA, 20 bp, Artificial Sequence
  MKO10068716_B_4930503E14Rik
  gRNA
tcagaaagataaatgctgag

SEQ ID NO: 68717 - DNA, 20 bp, Artificial Sequence
  MKO10068717_B_4930503E14Rik
  gRNA
gattagtgatgttgcaattt

SEQ ID NO: 68718 - DNA, 20 bp, Artificial Sequence
  MKO10068718_B_4930503E14Rik
  gRNA
acaacatgagaagacaatgt

SEQ ID NO: 68719 - DNA, 20 bp, Artificial Sequence
  MKO10068719_B_4930503L19Rik
  gRNA
cgcattcacacattgtgtcc

SEQ ID NO: 68720 - DNA, 20 bp, Artificial Sequence
  MKO10068720_B_4930503L19Rik
  gRNA
ctttagagctctactctatc

SEQ ID NO: 68721 - DNA, 20 bp, Artificial Sequence
  MKO10068721_B_4930503L19Rik
  gRNA
atttaaccttcagacagtac

SEQ ID NO: 68722 - DNA, 20 bp, Artificial Sequence
  MKO10068722_B_4930504O13Rik
  gRNA
gactctggccccgtttctga

SEQ ID NO: 68723 - DNA, 20 bp, Artificial Sequence
  MKO10068723_B_4930504O13Rik
  gRNA
gcctttatgcccttctctac

SEQ ID NO: 68724 - DNA, 20 bp, Artificial Sequence
  MKO10068724_B_4930504O13Rik
  gRNA
tgtaagtcagccatcagaaa

SEQ ID NO: 68725 - DNA, 20 bp, Artificial Sequence
  MKO10068725_B_4930505A04Rik
  gRNA
agagtgttcaataatacctc

SEQ ID NO: 68726 - DNA, 20 bp, Artificial Sequence
  MKO10068726_B_4930505A04Rik
  gRNA
ttattatcaatgtagggaac

SEQ ID NO: 68727 - DNA, 20 bp, Artificial Sequence
  MKO10068727_B_4930505A04Rik
  gRNA
actcccaatgaacccatcaa

SEQ ID NO: 68728 - DNA, 20 bp, Artificial Sequence
  MKO10068728_B_4930506M07Rik
  gRNA
tcgagagagcgctgaagcct

SEQ ID NO: 68729 - DNA, 20 bp, Artificial Sequence
  MKO10068729_B_4930506M07Rik
  gRNA
caggctcacctttgtcgcca

SEQ ID NO: 68730 - DNA, 20 bp, Artificial Sequence
  MKO10068730_B_4930506M07Rik
  gRNA
agatgaagctgttaaaaaac

SEQ ID NO: 68731 - DNA, 20 bp, Artificial Sequence
  MKO10068731_B_4930513O06Rik
  gRNA
cacaggtgtgttcatagtta

SEQ ID NO: 68732 - DNA, 20 bp, Artificial Sequence
  MKO10068732_B_4930513O06Rik
  gRNA
gcaagacctcacagtgatag

SEQ ID NO: 68733 - DNA, 20 bp, Artificial Sequence
  MKO10068733_B_4930513O06Rik
  gRNA
agaataccttgtagagtcca

SEQ ID NO: 68734 - DNA, 20 bp, Artificial Sequence
  MKO10068734_B_4930519F16Rik
  gRNA
atagtaccctggcaattatc

SEQ ID NO: 68735 - DNA, 20 bp, Artificial Sequence
  MKO10068735_B_4930519F16Rik
  gRNA
atatgaccagcctttcgtgc

SEQ ID NO: 68736 - DNA, 20 bp, Artificial Sequence
  MKO10068736_B_4930519F16Rik
  gRNA
tgccagttgagtcgaaatga

SEQ ID NO: 68737 - DNA, 20 bp, Artificial Sequence
  MKO10068737_B_4930519G04Rik
  gRNA
cctcctaccagattccaaca

SEQ ID NO: 68738 - DNA, 20 bp, Artificial Sequence
  MKO10068738_B_4930519G04Rik
  gRNA
gtgaccacaggtggaatcct

SEQ ID NO: 68739 - DNA, 20 bp, Artificial Sequence
  MKO10068739_B_4930519G04Rik
  gRNA
atatccagaagtacatgtca

SEQ ID NO: 68740 - DNA, 20 bp, Artificial Sequence
  MKO10068740_B_4930522H14Rik
  gRNA
tgctggctatttacaatcac

SEQ ID NO: 68741 - DNA, 20 bp, Artificial Sequence
  MKO10068741_B_4930522H14Rik
  gRNA
agctccagcagccataaagt

SEQ ID NO: 68742 - DNA, 20 bp, Artificial Sequence
  MKO10068742_B_4930522H14Rik
  gRNA
gtgattgtaaatagccagca

SEQ ID NO: 68743 - DNA, 20 bp, Artificial Sequence
  MKO10068743_B_4930523C07Rik
  gRNA
ccaccaccaggggcaacccc

SEQ ID NO: 68744 - DNA, 20 bp, Artificial Sequence
  MKO10068744_B_4930523C07Rik
  gRNA
tgtgctcctggggttgcccc

SEQ ID NO: 68745 - DNA, 20 bp, Artificial Sequence
  MKO10068745_B_4930523C07Rik
  gRNA
cgcctctttcgtgtctgatc

SEQ ID NO: 68746 - DNA, 20 bp, Artificial Sequence
  MKO10068746_B_4930524B15Rik
  gRNA
ttacttcactagatacacgc

SEQ ID NO: 68747 - DNA, 20 bp, Artificial Sequence
  MKO10068747_B_4930524B15Rik
  gRNA
ttatctttaaggcctctgtg

SEQ ID NO: 68748 - DNA, 20 bp, Artificial Sequence
  MKO10068748_B_4930524B15Rik
  gRNA
tttcctctccttcattagct

SEQ ID NO: 68749 - DNA, 20 bp, Artificial Sequence
  MKO10068749_B_4930524N10Rik
  gRNA
ctttgcagcctattatcttc

SEQ ID NO: 68750 - DNA, 20 bp, Artificial Sequence
  MKO10068750_B_4930524N10Rik
  gRNA
ttccaaaccctgaagataat

SEQ ID NO: 68751 - DNA, 20 bp, Artificial Sequence
  MKO10068751_B_4930524N10Rik
  gRNA
tgcccagcatgcttccaaaa

SEQ ID NO: 68752 - DNA, 20 bp, Artificial Sequence
  MKO10068752_B_4930525M21Rik
  gRNA
ctgcaagttcctctgcacca

SEQ ID NO: 68753 - DNA, 20 bp, Artificial Sequence
  MKO10068753_B_4930525M21Rik
  gRNA
gctgtatgaagcctcaccag

SEQ ID NO: 68754 - DNA, 20 bp, Artificial Sequence
  MKO10068754_B_4930525M21Rik
  gRNA
gcagcagctcctcattcctg

SEQ ID NO: 68755 - DNA, 20 bp, Artificial Sequence
  MKO10068755_B_4930526D03Rik
  gRNA
gaggcgtgttgagacaatcc

SEQ ID NO: 68756 - DNA, 20 bp, Artificial Sequence
  MKO10068756_B_4930526D03Rik
  gRNA
cgcgcgcggagctctgcttc

SEQ ID NO: 68757 - DNA, 20 bp, Artificial Sequence
  MKO10068757_B_4930526D03Rik
  gRNA
tgccatctacctcctcttcc

SEQ ID NO: 68758 - DNA, 20 bp, Artificial Sequence
  MKO10068758_B_4930529M08Rik
  gRNA
gtgccaacatatttgagcct

SEQ ID NO: 68759 - DNA, 20 bp, Artificial Sequence
  MKO10068759_B_4930529M08Rik
  gRNA
ctcaccggatgatttctttg

SEQ ID NO: 68760 - DNA, 20 bp, Artificial Sequence
  MKO10068760_B_4930529M08Rik
  gRNA
tgcataaacagcgtgttcag

SEQ ID NO: 68761 - DNA, 20 bp, Artificial Sequence
  MKO10068761_B_4930538K18Rik
  gRNA
catcgtgtgggtagcaactc

SEQ ID NO: 68762 - DNA, 20 bp, Artificial Sequence
  MKO10068762_B_4930538K18Rik
  gRNA
ttcctattgcaatgtctaac

SEQ ID NO: 68763 - DNA, 20 bp, Artificial Sequence
  MKO10068763_B_4930538K18Rik
  gRNA
gaagagccccaggatcatgt

SEQ ID NO: 68764 - DNA, 20 bp, Artificial Sequence
  MKO10068764_B_4930539E08Rik
  gRNA
gcccagaaacccggcccaag

SEQ ID NO: 68765 - DNA, 20 bp, Artificial Sequence
  MKO10068765_B_4930539E08Rik
  gRNA
accagattctgaccttcctc

SEQ ID NO: 68766 - DNA, 20 bp, Artificial Sequence
  MKO10068766_B_4930539E08Rik
  gRNA
ggactcacggtcaggcttcc

SEQ ID NO: 68767 - DNA, 20 bp, Artificial Sequence
  MKO10068767_B_4930544D05Rik
  gRNA
cgtgcaaacctcgtccacac

SEQ ID NO: 68768 - DNA, 20 bp, Artificial Sequence
  MKO10068768_B_4930544D05Rik
  gRNA
cagcagggtgtccaaattgc

SEQ ID NO: 68769 - DNA, 20 bp, Artificial Sequence
  MKO10068769_B_4930544D05Rik
  gRNA
gaaggggattcccagcaatt

SEQ ID NO: 68770 - DNA, 20 bp, Artificial Sequence
  MKO10068770_B_4930544G11Rik
  gRNA
cgtttgcagagcagcccttg

SEQ ID NO: 68771 - DNA, 20 bp, Artificial Sequence
  MKO10068771_B_4930544G11Rik
  gRNA
gcgcctgtgagacctgaaca

SEQ ID NO: 68772 - DNA, 20 bp, Artificial Sequence
  MKO10068772_B_4930544G11Rik
  gRNA
cctaggcaatggctgccatc

SEQ ID NO: 68773 - DNA, 20 bp, Artificial Sequence
  MKO10068773_B_4930547C10Rik
  gRNA
gcctgcaccgactgattccc

SEQ ID NO: 68774 - DNA, 20 bp, Artificial Sequence
  MKO10068774_B_4930547C10Rik
  gRNA
gtagtccgagtgagtctgac

SEQ ID NO: 68775 - DNA, 20 bp, Artificial Sequence
  MKO10068775_B_4930547C10Rik
  gRNA
agaagagctctgtactattc

SEQ ID NO: 68776 - DNA, 20 bp, Artificial Sequence
  MKO10068776_B_4930548H24Rik
  gRNA
gctactaacttagtcctagc

SEQ ID NO: 68777 - DNA, 20 bp, Artificial Sequence
  MKO10068777_B_4930548H24Rik
  gRNA
accttggggagattattcga

SEQ ID NO: 68778 - DNA, 20 bp, Artificial Sequence
  MKO10068778_B_4930548H24Rik
  gRNA
caggttcgccaagcaaactg

SEQ ID NO: 68779 - DNA, 20 bp, Artificial Sequence
  MKO10068779_B_4930549C01Rik
  gRNA
gggaactaatctttcttctg

SEQ ID NO: 68780 - DNA, 20 bp, Artificial Sequence
  MKO10068780_B_4930549C01Rik
  gRNA
taatgcttgcttcgccctcc

SEQ ID NO: 68781 - DNA, 20 bp, Artificial Sequence
  MKO10068781_B_4930549C01Rik
  gRNA
atgtactaccgtcaccccca

SEQ ID NO: 68782 - DNA, 20 bp, Artificial Sequence
  MKO10068782_B_4930550C14Rik
  gRNA
gaggtacattaaccctaaag

SEQ ID NO: 68783 - DNA, 20 bp, Artificial Sequence
  MKO10068783_B_4930550C14Rik
  gRNA
tatcgccgtgtagagaacaa

SEQ ID NO: 68784 - DNA, 20 bp, Artificial Sequence
  MKO10068784_B_4930550C14Rik
  gRNA
tcaccccacccaacctgaat

SEQ ID NO: 68785 - DNA, 20 bp, Artificial Sequence
  MKO10068785_B_4930550L24Rik
  gRNA
aagcaccaggaggccggtct

SEQ ID NO: 68786 - DNA, 20 bp, Artificial Sequence
  MKO10068786_B_4930550L24Rik
  gRNA
gtccttgacctcacctatga

SEQ ID NO: 68787 - DNA, 20 bp, Artificial Sequence
  MKO10068787_B_4930550L24Rik
  gRNA
cttccatgaagattatacca

SEQ ID NO: 68788 - DNA, 20 bp, Artificial Sequence
  MKO10068788_B_4930555G01Rik
  gRNA
acaacatgagaagacaatgt

SEQ ID NO: 68789 - DNA, 20 bp, Artificial Sequence
  MKO10068789_B_4930555G01Rik
  gRNA
ctgctgttcctttgcacttg

SEQ ID NO: 68790 - DNA, 20 bp, Artificial Sequence
  MKO10068790_B_4930555G01Rik
  gRNA
ctcaactcaacaaaaaagta

SEQ ID NO: 68791 - DNA, 20 bp, Artificial Sequence
  MKO10068791_B_4930557A04Rik
  gRNA
atagcgttgctccctcttca

SEQ ID NO: 68792 - DNA, 20 bp, Artificial Sequence
  MKO10068792_B_4930557A04Rik
  gRNA
atagagtcctgttatcttat

SEQ ID NO: 68793 - DNA, 20 bp, Artificial Sequence
  MKO10068793_B_4930557A04Rik
  gRNA
agcatatccgtaaacaaaac

SEQ ID NO: 68794 - DNA, 20 bp, Artificial Sequence
  MKO10068794_B_4930558K02Rik
  gRNA
cttgtacgaagtcagaacaa

SEQ ID NO: 68795 - DNA, 20 bp, Artificial Sequence
  MKO10068795_B_4930558K02Rik
  gRNA
agcgcacagttgcttgtttc

SEQ ID NO: 68796 - DNA, 20 bp, Artificial Sequence
  MKO10068796_B_4930558K02Rik
  gRNA
gagggtggtttctgatggtc

SEQ ID NO: 68797 - DNA, 20 bp, Artificial Sequence
  MKO10068797_B_4930562C15Rik
  gRNA
tccgctcaccggactgaaca

SEQ ID NO: 68798 - DNA, 20 bp, Artificial Sequence
  MKO10068798_B_4930562C15Rik
  gRNA
ggacagctcgaaccttgttc

SEQ ID NO: 68799 - DNA, 20 bp, Artificial Sequence
  MKO10068799_B_4930562C15Rik
  gRNA
caacgaccttcatgtcctca

SEQ ID NO: 68800 - DNA, 20 bp, Artificial Sequence
  MKO10068800_B_4930563D23Rik
  gRNA
acagtttgtgaagcgagcca

SEQ ID NO: 68801 - DNA, 20 bp, Artificial Sequence
  MKO10068801_B_4930563D23Rik
  gRNA
gtcagtttgacagcgccaag

SEQ ID NO: 68802 - DNA, 20 bp, Artificial Sequence
  MKO10068802_B_4930563D23Rik
  gRNA
cttgactgcccccagcgtgt

SEQ ID NO: 68803 - DNA, 20 bp, Artificial Sequence
  MKO10068803_B_4930563E22Rik
  gRNA
ggacgtttccgtgcactgcg

SEQ ID NO: 68804 - DNA, 20 bp, Artificial Sequence
  MKO10068804_B_4930563E22Rik
  gRNA
atgctgttgtattcccgcga

SEQ ID NO: 68805 - DNA, 20 bp, Artificial Sequence
  MKO10068805_B_4930563E22Rik
  gRNA
gtcagggtggtgtattacgt

SEQ ID NO: 68806 - DNA, 20 bp, Artificial Sequence
  MKO10068806_B_4930564B18Rik
  gRNA
cttcaggtcgtgtgtagagc

SEQ ID NO: 68807 - DNA, 20 bp, Artificial Sequence
  MKO10068807_B_4930564B18Rik
  gRNA
aatgctgggtgggaccgaaa

SEQ ID NO: 68808 - DNA, 20 bp, Artificial Sequence
  MKO10068808_B_4930564B18Rik
  gRNA
aggtcaagactcgagggtct

SEQ ID NO: 68809 - DNA, 20 bp, Artificial Sequence
  MKO10068809_B_4930564C03Rik
  gRNA
ggtgcaaatcaaagaccacc

SEQ ID NO: 68810 - DNA, 20 bp, Artificial Sequence
  MKO10068810_B_4930564C03Rik
  gRNA
aagagtctccattggcatac

SEQ ID NO: 68811 - DNA, 20 bp, Artificial Sequence
  MKO10068811_B_4930564C03Rik
  gRNA
ttagtgcgtagctgcagaag

SEQ ID NO: 68812 - DNA, 20 bp, Artificial Sequence
  MKO10068812_B_4930564D02Rik
  gRNA
agccatggctccctaagcag

SEQ ID NO: 68813 - DNA, 20 bp, Artificial Sequence
  MKO10068813_B_4930564D02Rik
  gRNA
tcctcaagcttgcagttcta

SEQ ID NO: 68814 - DNA, 20 bp, Artificial Sequence
  MKO10068814_B_4930564D02Rik
  gRNA
tgggaaacagcaatcagagc

SEQ ID NO: 68815 - DNA, 20 bp, Artificial Sequence
  MKO10068815_B_4930567H17Rik
  gRNA
tctcaggcagtacctctccc

SEQ ID NO: 68816 - DNA, 20 bp, Artificial Sequence
  MKO10068816_B_4930567H17Rik
  gRNA
agatgaggaggaagatgagg

SEQ ID NO: 68817 - DNA, 20 bp, Artificial Sequence
  MKO10068817_B_4930567H17Rik
  gRNA
ggagatggaggaggaagatg

SEQ ID NO: 68818 - DNA, 20 bp, Artificial Sequence
  MKO10068818_B_4930568D16Rik
  gRNA
ccagttgttgctataacatc

SEQ ID NO: 68819 - DNA, 20 bp, Artificial Sequence
  MKO10068819_B_4930568D16Rik
  gRNA
aagaacctcatctctccacc

SEQ ID NO: 68820 - DNA, 20 bp, Artificial Sequence
  MKO10068820_B_4930568D16Rik
  gRNA
tacagaagatgtatgcctgc

SEQ ID NO: 68821 - DNA, 20 bp, Artificial Sequence
  MKO10068821_B_4930571K23Rik
  gRNA
taactaagcgtctcaccacc

SEQ ID NO: 68822 - DNA, 20 bp, Artificial Sequence
  MKO10068822_B_4930571K23Rik
  gRNA
gcagtgggattggtttatcc

SEQ ID NO: 68823 - DNA, 20 bp, Artificial Sequence
  MKO10068823_B_4930571K23Rik
  gRNA
aaagactgtccgtagtacct

SEQ ID NO: 68824 - DNA, 20 bp, Artificial Sequence
  MKO10068824_B_4930578C19Rik
  gRNA
cgttgacagccagcgtgtag

SEQ ID NO: 68825 - DNA, 20 bp, Artificial Sequence
  MKO10068825_B_4930578C19Rik
  gRNA
atccgagatgccagtgcgct

SEQ ID NO: 68826 - DNA, 20 bp, Artificial Sequence
  MKO10068826_B_4930578C19Rik
  gRNA
aaggatgcgctcaatgctgc

SEQ ID NO: 68827 - DNA, 20 bp, Artificial Sequence
  MKO10068827_B_4930578I06Rik
  gRNA
cgtactgtagaagctcctgc

SEQ ID NO: 68828 - DNA, 20 bp, Artificial Sequence
  MKO10068828_B_4930578I06Rik
  gRNA
gcttctacagtacgagatcc

SEQ ID NO: 68829 - DNA, 20 bp, Artificial Sequence
  MKO10068829_B_4930578I06Rik
  gRNA
ctgtctgtgccatccgtcag

SEQ ID NO: 68830 - DNA, 20 bp, Artificial Sequence
  MKO10068830_B_4930579F01Rik
  gRNA
cagaacctccgccagagagt

SEQ ID NO: 68831 - DNA, 20 bp, Artificial Sequence
  MKO10068831_B_4930579F01Rik
  gRNA
tcctctcggaagggctaaac

SEQ ID NO: 68832 - DNA, 20 bp, Artificial Sequence
  MKO10068832_B_4930579F01Rik
  gRNA
gacttccaaagacaatccct

SEQ ID NO: 68833 - DNA, 20 bp, Artificial Sequence
  MKO10068833_B_4930579G24Rik
  gRNA
atgcacgcttccttaagacg

SEQ ID NO: 68834 - DNA, 20 bp, Artificial Sequence
  MKO10068834_B_4930579G24Rik
  gRNA
gttggaccgggactcctgct

SEQ ID NO: 68835 - DNA, 20 bp, Artificial Sequence
  MKO10068835_B_4930579G24Rik
  gRNA
acatcggcaagtcagttgtc

SEQ ID NO: 68836 - DNA, 20 bp, Artificial Sequence
  MKO10068836_B_4930590J08Rik
  gRNA
ccatctcctttgcgttgaga

SEQ ID NO: 68837 - DNA, 20 bp, Artificial Sequence
  MKO10068837_B_4930590J08Rik
  gRNA
ctccatgaacatttctgcta

SEQ ID NO: 68838 - DNA, 20 bp, Artificial Sequence
  MKO10068838_B_4930590J08Rik
  gRNA
tgctttcctttcccgtgcag

SEQ ID NO: 68839 - DNA, 20 bp, Artificial Sequence
  MKO10068839_B_4930591A17Rik
  gRNA
caggatatcccctaactgca

SEQ ID NO: 68840 - DNA, 20 bp, Artificial Sequence
  MKO10068840_B_4930591A17Rik
  gRNA
ccatgggaaatgaagccgtg

SEQ ID NO: 68841 - DNA, 20 bp, Artificial Sequence
  MKO10068841_B_4930591A17Rik
  gRNA
gaatgagctcccgcatcccc

SEQ ID NO: 68842 - DNA, 20 bp, Artificial Sequence
  MKO10068842_B_4930595M18Rik
  gRNA
ttgtcactcgtactagaaac

SEQ ID NO: 68843 - DNA, 20 bp, Artificial Sequence
  MKO10068843_B_4930595M18Rik
  gRNA
tcatatactgtcaatatttc

SEQ ID NO: 68844 - DNA, 20 bp, Artificial Sequence
  MKO10068844_B_4930595M18Rik
  gRNA
ctgacatctattcgagttgt

SEQ ID NO: 68845 - DNA, 20 bp, Artificial Sequence
  MKO10068845_B_4930596D02Rik
  gRNA
tacgcctccagacaccacca

SEQ ID NO: 68846 - DNA, 20 bp, Artificial Sequence
  MKO10068846_B_4930596D02Rik
  gRNA
tgcagacacgttgaaaaagc

SEQ ID NO: 68847 - DNA, 20 bp, Artificial Sequence
  MKO10068847_B_4930596D02Rik
  gRNA
ctactcgaggctcaggccac

SEQ ID NO: 68848 - DNA, 20 bp, Artificial Sequence
  MKO10068848_B_4931406B18Rik
  gRNA
cattaggagacttcgctgtg

SEQ ID NO: 68849 - DNA, 20 bp, Artificial Sequence
  MKO10068849_B_4931406B18Rik
  gRNA
gagatcacccatgggggcac

SEQ ID NO: 68850 - DNA, 20 bp, Artificial Sequence
  MKO10068850_B_4931406B18Rik
  gRNA
tagcttgaccactttactgc

SEQ ID NO: 68851 - DNA, 20 bp, Artificial Sequence
  MKO10068851_B_4931406C07Rik
  gRNA
ctacgcacctcttacaggaa

SEQ ID NO: 68852 - DNA, 20 bp, Artificial Sequence
  MKO10068852_B_4931406C07Rik
  gRNA
aatggctcctttgttaaatc

SEQ ID NO: 68853 - DNA, 20 bp, Artificial Sequence
  MKO10068853_B_4931406C07Rik
  gRNA
agcaggcacgctccatctgc

SEQ ID NO: 68854 - DNA, 20 bp, Artificial Sequence
  MKO10068854_B_4931406P16Rik
  gRNA
ggccattgaagcaagtttgc

SEQ ID NO: 68855 - DNA, 20 bp, Artificial Sequence
  MKO10068855_B_4931406P16Rik
  gRNA
catgggccacacacctgaac

SEQ ID NO: 68856 - DNA, 20 bp, Artificial Sequence
  MKO10068856_B_4931406P16Rik
  gRNA
aaaaatcgacagtgctttgc

SEQ ID NO: 68857 - DNA, 20 bp, Artificial Sequence
  MKO10068857_B_4931408C20Rik
  gRNA
aaagcttatgtccactacta

SEQ ID NO: 68858 - DNA, 20 bp, Artificial Sequence
  MKO10068858_B_4931408C20Rik
  gRNA
gccgtcttgtgttaataccc

SEQ ID NO: 68859 - DNA, 20 bp, Artificial Sequence
  MKO10068859_B_4931408C20Rik
  gRNA
gatgaaggacgtgattggtt

SEQ ID NO: 68860 - DNA, 20 bp, Artificial Sequence
  MKO10068860_B_4931409K22Rik
  gRNA
cctgatttctcgcatgaaag

SEQ ID NO: 68861 - DNA, 20 bp, Artificial Sequence
  MKO10068861_B_4931409K22Rik
  gRNA
ctgctccagctgaaaatatt

SEQ ID NO: 68862 - DNA, 20 bp, Artificial Sequence
  MKO10068862_B_4931409K22Rik
  gRNA
catctgctgacgtgccttca

SEQ ID NO: 68863 - DNA, 20 bp, Artificial Sequence
  MKO10068863_B_4931414P19Rik
  gRNA
gtgacagcattaagtcgtct

SEQ ID NO: 68864 - DNA, 20 bp, Artificial Sequence
  MKO10068864_B_4931414P19Rik
  gRNA
tgatgtggttatgcacattg

SEQ ID NO: 68865 - DNA, 20 bp, Artificial Sequence
  MKO10068865_B_4931414P19Rik
  gRNA
cccattgaatctcttgtcat

SEQ ID NO: 68866 - DNA, 20 bp, Artificial Sequence
  MKO10068866_B_4931417E11Rik
  gRNA
ctaatagcgcagagacttgc

SEQ ID NO: 68867 - DNA, 20 bp, Artificial Sequence
  MKO10068867_B_4931417E11Rik
  gRNA
tgcgctattagaatgcagca

SEQ ID NO: 68868 - DNA, 20 bp, Artificial Sequence
  MKO10068868_B_4931417E11Rik
  gRNA
accccccggaactttatgac

SEQ ID NO: 68869 - DNA, 20 bp, Artificial Sequence
  MKO10068869_B_4931423N10Rik
  gRNA
agatggcacaattcttagta

SEQ ID NO: 68870 - DNA, 20 bp, Artificial Sequence
  MKO10068870_B_4931423N10Rik
  gRNA
ctcttaaggctgtccaaagc

SEQ ID NO: 68871 - DNA, 20 bp, Artificial Sequence
  MKO10068871_B_4931423N10Rik
  gRNA
cgacaccttgttgaagaata

SEQ ID NO: 68872 - DNA, 20 bp, Artificial Sequence
  MKO10068872_B_4931428F04Rik
  gRNA
ggatgcgcaaaatgccatcc

SEQ ID NO: 68873 - DNA, 20 bp, Artificial Sequence
  MKO10068873_B_4931428F04Rik
  gRNA
gcatgccctccaaccagtac

SEQ ID NO: 68874 - DNA, 20 bp, Artificial Sequence
  MKO10068874_B_4931428F04Rik
  gRNA
cttctgcatgtatttgcgca

SEQ ID NO: 68875 - DNA, 20 bp, Artificial Sequence
  MKO10068875_B_4931429I11Rik
  gRNA
gactacgcacctgttcgagg

SEQ ID NO: 68876 - DNA, 20 bp, Artificial Sequence
  MKO10068876_B_4931429I11Rik
  gRNA
tactacgggccatcttcacc

SEQ ID NO: 68877 - DNA, 20 bp, Artificial Sequence
  MKO10068877_B_4931429I11Rik
  gRNA
ctgaacgctaataaaagacg

SEQ ID NO: 68878 - DNA, 20 bp, Artificial Sequence
  MKO10068878_B_4931429L15Rik
  gRNA
tagctttacctgaccactgg

SEQ ID NO: 68879 - DNA, 20 bp, Artificial Sequence
  MKO10068879_B_4931429L15Rik
  gRNA
tgactgctcttgtctagacc

SEQ ID NO: 68880 - DNA, 20 bp, Artificial Sequence
  MKO10068880_B_4931429L15Rik
  gRNA
cttgaggacagcgcctccag

SEQ ID NO: 68881 - DNA, 20 bp, Artificial Sequence
  MKO10068881_B_4931431F19Rik
  gRNA
ttccggaatgtgaacgccat

SEQ ID NO: 68882 - DNA, 20 bp, Artificial Sequence
  MKO10068882_B_4931431F19Rik
  gRNA
tcactgtaacgctgaccgat

SEQ ID NO: 68883 - DNA, 20 bp, Artificial Sequence
  MKO10068883_B_4931431F19Rik
  gRNA
agaacttcctgcgattgcgc

SEQ ID NO: 68884 - DNA, 20 bp, Artificial Sequence
  MKO10068884_B_4931440F15Rik
  gRNA
tggggactcctcaatacaag

SEQ ID NO: 68885 - DNA, 20 bp, Artificial Sequence
  MKO10068885_B_4931440F15Rik
  gRNA
agaaggtggagtgcaccccc

SEQ ID NO: 68886 - DNA, 20 bp, Artificial Sequence
  MKO10068886_B_4931440F15Rik
  gRNA
ggcgatggaactccgccacc

SEQ ID NO: 68887 - DNA, 20 bp, Artificial Sequence
  MKO10068887_B_4931440L10Rik
  gRNA
aagcaaatgcagctagttta

SEQ ID NO: 68888 - DNA, 20 bp, Artificial Sequence
  MKO10068888_B_4931440L10Rik
  gRNA
gtgaacgctaatcaggtcgg

SEQ ID NO: 68889 - DNA, 20 bp, Artificial Sequence
  MKO10068889_B_4931440L10Rik
  gRNA
gctcctcgagttctctaata

SEQ ID NO: 68890 - DNA, 20 bp, Artificial Sequence
  MKO10068890_B_4932411E22Rik
  gRNA
ggagtctatcagcttagtga

SEQ ID NO: 68891 - DNA, 20 bp, Artificial Sequence
  MKO10068891_B_4932411E22Rik
  gRNA
tggatgctctacagtatgcc

SEQ ID NO: 68892 - DNA, 20 bp, Artificial Sequence
  MKO10068892_B_4932411E22Rik
  gRNA
aggtcgcagctgccaaacaa

SEQ ID NO: 68893 - DNA, 20 bp, Artificial Sequence
  MKO10068893_B_4932411N23Rik
  gRNA
caaagcagtgtcgtgctaaa

SEQ ID NO: 68894 - DNA, 20 bp, Artificial Sequence
  MKO10068894_B_4932411N23Rik
  gRNA
gcaacagtggctcaacgagt

SEQ ID NO: 68895 - DNA, 20 bp, Artificial Sequence
  MKO10068895_B_4932411N23Rik
  gRNA
ataacaataggggccgccat

SEQ ID NO: 68896 - DNA, 20 bp, Artificial Sequence
  MKO10068896_B_4932414N04Rik
  gRNA
tgaactgcgccttagagcac

SEQ ID NO: 68897 - DNA, 20 bp, Artificial Sequence
  MKO10068897_B_4932414N04Rik
  gRNA
gttatccgaatcactctctg

SEQ ID NO: 68898 - DNA, 20 bp, Artificial Sequence
  MKO10068898_B_4932414N04Rik
  gRNA
atttcttcataccaaccatc

SEQ ID NO: 68899 - DNA, 20 bp, Artificial Sequence
  MKO10068899_B_4932416K20Rik
  gRNA
agtgataatcccgatccagc

SEQ ID NO: 68900 - DNA, 20 bp, Artificial Sequence
  MKO10068900_B_4932416K20Rik
  gRNA
ggatggcgtagagaccagtg

SEQ ID NO: 68901 - DNA, 20 bp, Artificial Sequence
  MKO10068901_B_4932416K20Rik
  gRNA
tgaaggtggattcgctgcac

SEQ ID NO: 68902 - DNA, 20 bp, Artificial Sequence
  MKO10068902_B_4932418E24Rik
  gRNA
agacctgcgccaacaaatcc

SEQ ID NO: 68903 - DNA, 20 bp, Artificial Sequence
  MKO10068903_B_4932418E24Rik
  gRNA
ttcttcgtacagctgagcat

SEQ ID NO: 68904 - DNA, 20 bp, Artificial Sequence
  MKO10068904_B_4932418E24Rik
  gRNA
atccttcgcagaactgccaa

SEQ ID NO: 68905 - DNA, 20 bp, Artificial Sequence
  MKO10068905_B_4932429P05Rik
  gRNA
caaatctcttgacaaccgtt

SEQ ID NO: 68906 - DNA, 20 bp, Artificial Sequence
  MKO10068906_B_4932429P05Rik
  gRNA
ctgattctgactgaacaatc

SEQ ID NO: 68907 - DNA, 20 bp, Artificial Sequence
  MKO10068907_B_4932429P05Rik
  gRNA
atctcaacgagattccagat

SEQ ID NO: 68908 - DNA, 20 bp, Artificial Sequence
  MKO10068908_B_4932438A13Rik
  gRNA
cttaacagattgtataaaca

SEQ ID NO: 68909 - DNA, 20 bp, Artificial Sequence
  MKO10068909_B_4932438A13Rik
  gRNA
tcttccctcaggattcagga

SEQ ID NO: 68910 - DNA, 20 bp, Artificial Sequence
  MKO10068910_B_4932438A13Rik
  gRNA
ttaccatgttgtttctgctt

SEQ ID NO: 68911 - DNA, 20 bp, Artificial Sequence
  MKO10068911_B_4932438H23Rik
  gRNA
ccacgtgctgaagttcactc

SEQ ID NO: 68912 - DNA, 20 bp, Artificial Sequence
  MKO10068912_B_4932438H23Rik
  gRNA
tgtttgccagcctttgtaca

SEQ ID NO: 68913 - DNA, 20 bp, Artificial Sequence
  MKO10068913_B_4932438H23Rik
  gRNA
gacttgaagctttccctatg

SEQ ID NO: 68914 - DNA, 20 bp, Artificial Sequence
  MKO10068914_B_4932443I19Rik
  gRNA
ggtgggtgtccactagtggt

SEQ ID NO: 68915 - DNA, 20 bp, Artificial Sequence
  MKO10068915_B_4932443I19Rik
  gRNA
ccagaatgcccaaccactag

SEQ ID NO: 68916 - DNA, 20 bp, Artificial Sequence
  MKO10068916_B_4932443I19Rik
  gRNA
agagactctccatcattgac

SEQ ID NO: 68917 - DNA, 20 bp, Artificial Sequence
  MKO10068917_B_4933402D24Rik
  gRNA
cttcaggataacatgatccc

SEQ ID NO: 68918 - DNA, 20 bp, Artificial Sequence
  MKO10068918_B_4933402D24Rik
  gRNA
ccacaacttcccgaagagca

SEQ ID NO: 68919 - DNA, 20 bp, Artificial Sequence
  MKO10068919_B_4933402D24Rik
  gRNA
ctttgctggctaatgcagta

SEQ ID NO: 68920 - DNA, 20 bp, Artificial Sequence
  MKO10068920_B_4933402E13Rik
  gRNA
agcaacacaatgtctcgcta

SEQ ID NO: 68921 - DNA, 20 bp, Artificial Sequence
  MKO10068921_B_4933402E13Rik
  gRNA
agaggaagataacgtcgaga

SEQ ID NO: 68922 - DNA, 20 bp, Artificial Sequence
  MKO10068922_B_4933402E13Rik
  gRNA
caaatacaagcccaaatgcg

SEQ ID NO: 68923 - DNA, 20 bp, Artificial Sequence
  MKO10068923_B_4933402J07Rik
  gRNA
gcatgatcactgccaacttc

SEQ ID NO: 68924 - DNA, 20 bp, Artificial Sequence
  MKO10068924_B_4933402J07Rik
  gRNA
tgtgctctccgatgttcttc

SEQ ID NO: 68925 - DNA, 20 bp, Artificial Sequence
  MKO10068925_B_4933402J07Rik
  gRNA
ccgcaaagtgaccttccaca

SEQ ID NO: 68926 - DNA, 20 bp, Artificial Sequence
  MKO10068926_B_4933402N03Rik
  gRNA
tcagatccacgcattgccct

SEQ ID NO: 68927 - DNA, 20 bp, Artificial Sequence
  MKO10068927_B_4933402N03Rik
  gRNA
cagaggtcctctttgtggtg

SEQ ID NO: 68928 - DNA, 20 bp, Artificial Sequence
  MKO10068928_B_4933402N03Rik
  gRNA
acttgaatttcttgttccat

SEQ ID NO: 68929 - DNA, 20 bp, Artificial Sequence
  MKO10068929_B_4933402N22Rik
  gRNA
ctatccacttattgagctcc

SEQ ID NO: 68930 - DNA, 20 bp, Artificial Sequence
  MKO10068930_B_4933402N22Rik
  gRNA
actgagatcaacgaagaacc

SEQ ID NO: 68931 - DNA, 20 bp, Artificial Sequence
  MKO10068931_B_4933402N22Rik
  gRNA
ttgttgggtctcatggttgc

SEQ ID NO: 68932 - DNA, 20 bp, Artificial Sequence
  MKO10068932_B_4933402P03Rik
  gRNA
ccaaaagatcatcttgtcta

SEQ ID NO: 68933 - DNA, 20 bp, Artificial Sequence
  MKO10068933_B_4933402P03Rik
  gRNA
tgatgttgaccagaatgatg

SEQ ID NO: 68934 - DNA, 20 bp, Artificial Sequence
  MKO10068934_B_4933402P03Rik
  gRNA
ccatagacaagatgatcttt

SEQ ID NO: 68935 - DNA, 20 bp, Artificial Sequence
  MKO10068935_B_4933403O08Rik
  gRNA
cttattgagctctcaaagat

SEQ ID NO: 68936 - DNA, 20 bp, Artificial Sequence
  MKO10068936_B_4933403O08Rik
  gRNA
tcctgggcgactgtattctg

SEQ ID NO: 68937 - DNA, 20 bp, Artificial Sequence
  MKO10068937_B_4933403O08Rik
  gRNA
tttcaacgcttagaagttac

SEQ ID NO: 68938 - DNA, 20 bp, Artificial Sequence
  MKO10068938_B_4933405L10Rik
  gRNA
cacgatggatgacgtaggct

SEQ ID NO: 68939 - DNA, 20 bp, Artificial Sequence
  MKO10068939_B_4933405L10Rik
  gRNA
ggcagcagtagggttagccc

SEQ ID NO: 68940 - DNA, 20 bp, Artificial Sequence
  MKO10068940_B_4933405L10Rik
  gRNA
aggcgaagacaagtgtcccg

SEQ ID NO: 68941 - DNA, 20 bp, Artificial Sequence
  MKO10068941_B_4933405O20Rik
  gRNA
ctcctcttcattagatgtcg

SEQ ID NO: 68942 - DNA, 20 bp, Artificial Sequence
  MKO10068942_B_4933405O20Rik
  gRNA
cacacggtggctatgattcc

SEQ ID NO: 68943 - DNA, 20 bp, Artificial Sequence
  MKO10068943_B_4933405O20Rik
  gRNA
atgctctcatggccatccgt

SEQ ID NO: 68944 - DNA, 20 bp, Artificial Sequence
  MKO10068944_B_4933406J08Rik
  gRNA
cattatcttctatgtactcg

SEQ ID NO: 68945 - DNA, 20 bp, Artificial Sequence
  MKO10068945_B_4933406J08Rik
  gRNA
gacagttcttgtttgtgttc

SEQ ID NO: 68946 - DNA, 20 bp, Artificial Sequence
  MKO10068946_B_4933406J08Rik
  gRNA
caatttacagcatgacagaa

SEQ ID NO: 68947 - DNA, 20 bp, Artificial Sequence
  MKO10068947_B_4933406M09Rik
  gRNA
ctcactctttggctggtaag

SEQ ID NO: 68948 - DNA, 20 bp, Artificial Sequence
  MKO10068948_B_4933406M09Rik
  gRNA
gcagcaacataacacattgc

SEQ ID NO: 68949 - DNA, 20 bp, Artificial Sequence
  MKO10068949_B_4933406M09Rik
  gRNA
aatgattcagcagatagctc

SEQ ID NO: 68950 - DNA, 20 bp, Artificial Sequence
  MKO10068950_B_4933408B17Rik
  gRNA
taagggacgcattcacacca

SEQ ID NO: 68951 - DNA, 20 bp, Artificial Sequence
  MKO10068951_B_4933408B17Rik
  gRNA
ttcaccacatccttgtatcc

SEQ ID NO: 68952 - DNA, 20 bp, Artificial Sequence
  MKO10068952_B_4933408B17Rik
  gRNA
ccaggggagcttcctgaact

SEQ ID NO: 68953 - DNA, 20 bp, Artificial Sequence
  MKO10068953_B_4933409G03Rik
  gRNA
tccaggacagtggtaactct

SEQ ID NO: 68954 - DNA, 20 bp, Artificial Sequence
  MKO10068954_B_4933409G03Rik
  gRNA
gtcatcggaagaagaacaga

SEQ ID NO: 68955 - DNA, 20 bp, Artificial Sequence
  MKO10068955_B_4933409G03Rik
  gRNA
ttatgtccagaaccaggctt

SEQ ID NO: 68956 - DNA, 20 bp, Artificial Sequence
  MKO10068956_B_4933411G11Rik
  gRNA
aactgcgcttccagttcatt

SEQ ID NO: 68957 - DNA, 20 bp, Artificial Sequence
  MKO10068957_B_4933411G11Rik
  gRNA
cacccgcagcatcttgtccc

SEQ ID NO: 68958 - DNA, 20 bp, Artificial Sequence
  MKO10068958_B_4933411G11Rik
  gRNA
acacctcttcacactcttcc

SEQ ID NO: 68959 - DNA, 20 bp, Artificial Sequence
  MKO10068959_B_4933411K16Rik
  gRNA
tcacttcagccgcctatccg

SEQ ID NO: 68960 - DNA, 20 bp, Artificial Sequence
  MKO10068960_B_4933411K16Rik
  gRNA
atagactgtgtgcgattggt

SEQ ID NO: 68961 - DNA, 20 bp, Artificial Sequence
  MKO10068961_B_4933411K16Rik
  gRNA
gtcagggaagtccccgtcca

SEQ ID NO: 68962 - DNA, 20 bp, Artificial Sequence
  MKO10068962_B_4933411K20Rik
  gRNA
gttggcccaactcaagcgac

SEQ ID NO: 68963 - DNA, 20 bp, Artificial Sequence
  MKO10068963_B_4933411K20Rik
  gRNA
caagagtagatctcactcgt

SEQ ID NO: 68964 - DNA, 20 bp, Artificial Sequence
  MKO10068964_B_4933411K20Rik
  gRNA
agcagcctgcaataatacct

SEQ ID NO: 68965 - DNA, 20 bp, Artificial Sequence
  MKO10068965_B_4933412E24Rik
  gRNA
tataaacgcccggagcctcc

SEQ ID NO: 68966 - DNA, 20 bp, Artificial Sequence
  MKO10068966_B_4933412E24Rik
  gRNA
caaggctcaagcccgtgttg

SEQ ID NO: 68967 - DNA, 20 bp, Artificial Sequence
  MKO10068967_B_4933412E24Rik
  gRNA
cccgggtagtagagaccagc

SEQ ID NO: 68968 - DNA, 20 bp, Artificial Sequence
  MKO10068968_B_4933413G19Rik
  gRNA
ttccaccagtagatatgtac

SEQ ID NO: 68969 - DNA, 20 bp, Artificial Sequence
  MKO10068969_B_4933413G19Rik
  gRNA
ccccactctaccttcaggaa

SEQ ID NO: 68970 - DNA, 20 bp, Artificial Sequence
  MKO10068970_B_4933413G19Rik
  gRNA
tgagccaagtatctcgtacc

SEQ ID NO: 68971 - DNA, 20 bp, Artificial Sequence
  MKO10068971_B_4933415F23Rik
  gRNA
acatggaaagcgacgatacc

SEQ ID NO: 68972 - DNA, 20 bp, Artificial Sequence
  MKO10068972_B_4933415F23Rik
  gRNA
caacccggataaagatgacc

SEQ ID NO: 68973 - DNA, 20 bp, Artificial Sequence
  MKO10068973_B_4933415F23Rik
  gRNA
tctctacgactgcaaggaag

SEQ ID NO: 68974 - DNA, 20 bp, Artificial Sequence
  MKO10068974_B_4933416C03Rik
  gRNA
ttcacgccgtgccgtcgttc

SEQ ID NO: 68975 - DNA, 20 bp, Artificial Sequence
  MKO10068975_B_4933416C03Rik
  gRNA
caacggaacgtgtgaagtgc

SEQ ID NO: 68976 - DNA, 20 bp, Artificial Sequence
  MKO10068976_B_4933416C03Rik
  gRNA
aactggttctcgagttcgtg

SEQ ID NO: 68977 - DNA, 20 bp, Artificial Sequence
  MKO10068977_B_4933416I08Rik
  gRNA
ttcagcactgatgctataat

SEQ ID NO: 68978 - DNA, 20 bp, Artificial Sequence
  MKO10068978_B_4933416I08Rik
  gRNA
ggtttgtgtttcctcagaag

SEQ ID NO: 68979 - DNA, 20 bp, Artificial Sequence
  MKO10068979_B_4933416I08Rik
  gRNA
aacagataaatctttgacct

SEQ ID NO: 68980 - DNA, 20 bp, Artificial Sequence
  MKO10068980_B_4933417A18Rik
  gRNA
aaaagcctacctggcaacga

SEQ ID NO: 68981 - DNA, 20 bp, Artificial Sequence
  MKO10068981_B_4933417A18Rik
  gRNA
ccactacaaaggagaaccac

SEQ ID NO: 68982 - DNA, 20 bp, Artificial Sequence
  MKO10068982_B_4933417A18Rik
  gRNA
agctagttatggagctcctg

SEQ ID NO: 68983 - DNA, 20 bp, Artificial Sequence
  MKO10068983_B_4933421I07Rik
  gRNA
ctcaatgtgcctttcggaga

SEQ ID NO: 68984 - DNA, 20 bp, Artificial Sequence
  MKO10068984_B_4933421I07Rik
  gRNA
accgaacatatgctaccacc

SEQ ID NO: 68985 - DNA, 20 bp, Artificial Sequence
  MKO10068985_B_4933421I07Rik
  gRNA
ggccagagcctctgcaagtc

SEQ ID NO: 68986 - DNA, 20 bp, Artificial Sequence
  MKO10068986_B_4933422H20Rik
  gRNA
gccccttccaggtggaagtt

SEQ ID NO: 68987 - DNA, 20 bp, Artificial Sequence
  MKO10068987_B_4933422H20Rik
  gRNA
tccacagcctgctcgccaac

SEQ ID NO: 68988 - DNA, 20 bp, Artificial Sequence
  MKO10068988_B_4933422H20Rik
  gRNA
agagaaaactcactcgtccc

SEQ ID NO: 68989 - DNA, 20 bp, Artificial Sequence
  MKO10068989_B_4933425L06Rik
  gRNA
atctgtcatggacgttactg

SEQ ID NO: 68990 - DNA, 20 bp, Artificial Sequence
  MKO10068990_B_4933425L06Rik
  gRNA
gatgtggcactccttaattc

SEQ ID NO: 68991 - DNA, 20 bp, Artificial Sequence
  MKO10068991_B_4933425L06Rik
  gRNA
ggtttacaagtacccagctc

SEQ ID NO: 68992 - DNA, 20 bp, Artificial Sequence
  MKO10068992_B_4933426M11Rik
  gRNA
cgacagaacaatctgtactc

SEQ ID NO: 68993 - DNA, 20 bp, Artificial Sequence
  MKO10068993_B_4933426M11Rik
  gRNA
cgagtggacgccagccatgg

SEQ ID NO: 68994 - DNA, 20 bp, Artificial Sequence
  MKO10068994_B_4933426M11Rik
  gRNA
ctggacaccatccaccataa

SEQ ID NO: 68995 - DNA, 20 bp, Artificial Sequence
  MKO10068995_B_4933427D06Rik
  gRNA
accttgatcgggcatctcag

SEQ ID NO: 68996 - DNA, 20 bp, Artificial Sequence
  MKO10068996_B_4933427D06Rik
  gRNA
agcatgacgtcctgcagctc

SEQ ID NO: 68997 - DNA, 20 bp, Artificial Sequence
  MKO10068997_B_4933427D06Rik
  gRNA
gcccagtacccataaactat

SEQ ID NO: 68998 - DNA, 20 bp, Artificial Sequence
  MKO10068998_B_4933427D14Rik
  gRNA
gtaccggactgccaagttgc

SEQ ID NO: 68999 - DNA, 20 bp, Artificial Sequence
  MKO10068999_B_4933427D14Rik
  gRNA
gctgaagaacgtagagcatg

SEQ ID NO: 69000 - DNA, 20 bp, Artificial Sequence
  MKO10069000_B_4933427D14Rik
  gRNA
aagagcatcgaatccgagtc

SEQ ID NO: 69001 - DNA, 20 bp, Artificial Sequence
  MKO10069001_B_4933427G17Rik
  gRNA
ataaccgtatttcttcagcc

SEQ ID NO: 69002 - DNA, 20 bp, Artificial Sequence
  MKO10069002_B_4933427G17Rik
  gRNA
cagatttaccgaagtttaac

SEQ ID NO: 69003 - DNA, 20 bp, Artificial Sequence
  MKO10069003_B_4933427G17Rik
  gRNA
cgcccttgtcatgttacttc

SEQ ID NO: 69004 - DNA, 20 bp, Artificial Sequence
  MKO10069004_B_4933428G20Rik
  gRNA
cccgccgcttcttccgtttg

SEQ ID NO: 69005 - DNA, 20 bp, Artificial Sequence
  MKO10069005_B_4933428G20Rik
  gRNA
gtctcgggttgcggtagctg

SEQ ID NO: 69006 - DNA, 20 bp, Artificial Sequence
  MKO10069006_B_4933428G20Rik
  gRNA
ctgtggactgcatccgaaac

SEQ ID NO: 69007 - DNA, 20 bp, Artificial Sequence
  MKO10069007_B_4933430I17Rik
  gRNA
gaagccgtttgtaccttgtc

SEQ ID NO: 69008 - DNA, 20 bp, Artificial Sequence
  MKO10069008_B_4933430I17Rik
  gRNA
tctttgtcacgtaaagcctt

SEQ ID NO: 69009 - DNA, 20 bp, Artificial Sequence
  MKO10069009_B_4933430I17Rik
  gRNA
tgacttactttgagaggcct

SEQ ID NO: 69010 - DNA, 20 bp, Artificial Sequence
  MKO10069010_B_4933433C11Rik
  gRNA
cgacttcaaccgagagacaa

SEQ ID NO: 69011 - DNA, 20 bp, Artificial Sequence
  MKO10069011_B_4933433C11Rik
  gRNA
ggcctctcgcagagacatat

SEQ ID NO: 69012 - DNA, 20 bp, Artificial Sequence
  MKO10069012_B_4933433C11Rik
  gRNA
gaagtcggtcttctgcatga

SEQ ID NO: 69013 - DNA, 20 bp, Artificial Sequence
  MKO10069013_B_4933434E20Rik
  gRNA
gaatgcacaggacttaaaag

SEQ ID NO: 69014 - DNA, 20 bp, Artificial Sequence
  MKO10069014_B_4933434E20Rik
  gRNA
cgatggcgtctagtagtaac

SEQ ID NO: 69015 - DNA, 20 bp, Artificial Sequence
  MKO10069015_B_4933434E20Rik
  gRNA
ttctggagtgaatgtcgtgc

SEQ ID NO: 69016 - DNA, 20 bp, Artificial Sequence
  MKO10069016_B_4933434I20Rik
  gRNA
cagaatgactcccgaagaag

SEQ ID NO: 69017 - DNA, 20 bp, Artificial Sequence
  MKO10069017_B_4933434I20Rik
  gRNA
gaatctccaccattaacaga

SEQ ID NO: 69018 - DNA, 20 bp, Artificial Sequence
  MKO10069018_B_4933434I20Rik
  gRNA
ccagctatagccactagcaa

SEQ ID NO: 69019 - DNA, 20 bp, Artificial Sequence
  MKO10069019_B_4933436I01Rik
  gRNA
catttgcataagtagtgaac

SEQ ID NO: 69020 - DNA, 20 bp, Artificial Sequence
  MKO10069020_B_4933436I01Rik
  gRNA
ttgttcgtgtagttgcagaa

SEQ ID NO: 69021 - DNA, 20 bp, Artificial Sequence
  MKO10069021_B_4933436I01Rik
  gRNA
tgaacgaaacaaaatgctgc

SEQ ID NO: 69022 - DNA, 20 bp, Artificial Sequence
  MKO10069022_B_42434
  gRNA
agatccaagacataaaccac

SEQ ID NO: 69023 - DNA, 20 bp, Artificial Sequence
  MKO10069023_B_42434
  gRNA
atcttgaacagtatatttcc

SEQ ID NO: 69024 - DNA, 20 bp, Artificial Sequence
  MKO10069024_B_42434
  gRNA
acctgtccagcatctgttga

SEQ ID NO: 69025 - DNA, 20 bp, Artificial Sequence
  MKO10069025_B_42618
  gRNA
atggccaggtgagtccggcc

SEQ ID NO: 69026 - DNA, 20 bp, Artificial Sequence
  MKO10069026_B_42618
  gRNA
gaaacacaccgtcgacattg

SEQ ID NO: 69027 - DNA, 20 bp, Artificial Sequence
  MKO10069027_B_42618
  gRNA
ccccttctcctcaatgtcga

SEQ ID NO: 69028 - DNA, 20 bp, Artificial Sequence
  MKO10069028_B_5031410I06Rik
  gRNA
tgagctcctgattgttctct

SEQ ID NO: 69029 - DNA, 20 bp, Artificial Sequence
  MKO10069029_B_5031410I06Rik
  gRNA
tttccagtaacctgcacacc

SEQ ID NO: 69030 - DNA, 20 bp, Artificial Sequence
  MKO10069030_B_5031410I06Rik
  gRNA
gaatcttataaagaagaagt

SEQ ID NO: 69031 - DNA, 20 bp, Artificial Sequence
  MKO10069031_B_5031414D18Rik
  gRNA
ttcaggttgtgctgcactcc

SEQ ID NO: 69032 - DNA, 20 bp, Artificial Sequence
  MKO10069032_B_5031414D18Rik
  gRNA
gctgcccgctgatgtagaaa

SEQ ID NO: 69033 - DNA, 20 bp, Artificial Sequence
  MKO10069033_B_5031414D18Rik
  gRNA
cttgttcaagtcatgtttgc

SEQ ID NO: 69034 - DNA, 20 bp, Artificial Sequence
  MKO10069034_B_5031439G07Rik
  gRNA
tgggagatcctgacatcgac

SEQ ID NO: 69035 - DNA, 20 bp, Artificial Sequence
  MKO10069035_B_5031439G07Rik
  gRNA
ctctcctcccagtcgatgtc

SEQ ID NO: 69036 - DNA, 20 bp, Artificial Sequence
  MKO10069036_B_5031439G07Rik
  gRNA
ggcacgcgtgcacacagcac

SEQ ID NO: 69037 - DNA, 20 bp, Artificial Sequence
  MKO10069037_B_5033411D12Rik
  gRNA
ttgacgattctcactcctct

SEQ ID NO: 69038 - DNA, 20 bp, Artificial Sequence
  MKO10069038_B_5033411D12Rik
  gRNA
aggagtgagaatcgtcaaag

SEQ ID NO: 69039 - DNA, 20 bp, Artificial Sequence
  MKO10069039_B_5033411D12Rik
  gRNA
tgagaattctggatctaaca

SEQ ID NO: 69040 - DNA, 20 bp, Artificial Sequence
  MKO10069040_B_5330417C22Rik
  gRNA
ggcggtgcattcatctgtgt

SEQ ID NO: 69041 - DNA, 20 bp, Artificial Sequence
  MKO10069041_B_5330417C22Rik
  gRNA
ggcgatgtttctaacaagca

SEQ ID NO: 69042 - DNA, 20 bp, Artificial Sequence
  MKO10069042_B_5330417C22Rik
  gRNA
tggatgaagactacggagaa

SEQ ID NO: 69043 - DNA, 20 bp, Artificial Sequence
  MKO10069043_B_5430401F13Rik
  gRNA
aaatatctcacgttgttggt

SEQ ID NO: 69044 - DNA, 20 bp, Artificial Sequence
  MKO10069044_B_5430401F13Rik
  gRNA
ttcacagatgcccttgaaat

SEQ ID NO: 69045 - DNA, 20 bp, Artificial Sequence
  MKO10069045_B_5430401F13Rik
  gRNA
taatgttcaagaagtttacc

SEQ ID NO: 69046 - DNA, 20 bp, Artificial Sequence
  MKO10069046_B_5430402E10Rik
  gRNA
gagaaaaacaagaagatggg

SEQ ID NO: 69047 - DNA, 20 bp, Artificial Sequence
  MKO10069047_B_5430402E10Rik
  gRNA
ttacttcgaagttgtaatga

SEQ ID NO: 69048 - DNA, 20 bp, Artificial Sequence
  MKO10069048_B_5430402E10Rik
  gRNA
cattaacgttgtgaaagaaa

SEQ ID NO: 69049 - DNA, 20 bp, Artificial Sequence
  MKO10069049_B_5430419D17Rik
  gRNA
tggggtcctacctgatacag

SEQ ID NO: 69050 - DNA, 20 bp, Artificial Sequence
  MKO10069050_B_5430419D17Rik
  gRNA
ctaccttgaggccttgctgc

SEQ ID NO: 69051 - DNA, 20 bp, Artificial Sequence
  MKO10069051_B_5430419D17Rik
  gRNA
aatccagccaccatattatc

SEQ ID NO: 69052 - DNA, 20 bp, Artificial Sequence
  MKO10069052_B_5430421N21Rik
  gRNA
tgctgagctcaaccatgcgc

SEQ ID NO: 69053 - DNA, 20 bp, Artificial Sequence
  MKO10069053_B_5430421N21Rik
  gRNA
tgacagatgtgtctgagatg

SEQ ID NO: 69054 - DNA, 20 bp, Artificial Sequence
  MKO10069054_B_5430421N21Rik
  gRNA
ttgggtcagagcctctgcgt

SEQ ID NO: 69055 - DNA, 20 bp, Artificial Sequence
  MKO10069055_B_5430427O19Rik
  gRNA
tattagccacctgttgcagt

SEQ ID NO: 69056 - DNA, 20 bp, Artificial Sequence
  MKO10069056_B_5430427O19Rik
  gRNA
atctcagtggacttacctac

SEQ ID NO: 69057 - DNA, 20 bp, Artificial Sequence
  MKO10069057_B_5430427O19Rik
  gRNA
tgcagtgctcaatgagtacc

SEQ ID NO: 69058 - DNA, 20 bp, Artificial Sequence
  MKO10069058_B_5430435G22Rik
  gRNA
tgcgaagaatgacatcaatg

SEQ ID NO: 69059 - DNA, 20 bp, Artificial Sequence
  MKO10069059_B_5430435G22Rik
  gRNA
gtcatccaatatgatgattt

SEQ ID NO: 69060 - DNA, 20 bp, Artificial Sequence
  MKO10069060_B_5430435G22Rik
  gRNA
gactccatcaagctctctcc

SEQ ID NO: 69061 - DNA, 20 bp, Artificial Sequence
  MKO10069061_B_5530400C23Rik
  gRNA
ctgccctctgagctgagctc

SEQ ID NO: 69062 - DNA, 20 bp, Artificial Sequence
  MKO10069062_B_5530400C23Rik
  gRNA
tagtcctgagctcagctcag

SEQ ID NO: 69063 - DNA, 20 bp, Artificial Sequence
  MKO10069063_B_5530400C23Rik
  gRNA
tgtgcttactgggtattggt

SEQ ID NO: 69064 - DNA, 20 bp, Artificial Sequence
  MKO10069064_B_5730409E04Rik
  gRNA
cggagtccgcagtcccccgg

SEQ ID NO: 69065 - DNA, 20 bp, Artificial Sequence
  MKO10069065_B_5730409E04Rik
  gRNA
ctggcaccgctcaacttctc

SEQ ID NO: 69066 - DNA, 20 bp, Artificial Sequence
  MKO10069066_B_5730409E04Rik
  gRNA
ggactgcggactccggcctc

SEQ ID NO: 69067 - DNA, 20 bp, Artificial Sequence
  MKO10069067_B_5730455P16Rik
  gRNA
taacaaccaactcggtaacc

SEQ ID NO: 69068 - DNA, 20 bp, Artificial Sequence
  MKO10069068_B_5730455P16Rik
  gRNA
tggtagattagtatccacca

SEQ ID NO: 69069 - DNA, 20 bp, Artificial Sequence
  MKO10069069_B_5730455P16Rik
  gRNA
tgcagattgacacagaatcg

SEQ ID NO: 69070 - DNA, 20 bp, Artificial Sequence
  MKO10069070_B_5730507C01Rik
  gRNA
tatcataaaagaactcataa

SEQ ID NO: 69071 - DNA, 20 bp, Artificial Sequence
  MKO10069071_B_5730507C01Rik
  gRNA
cagtcatacctataacagcg

SEQ ID NO: 69072 - DNA, 20 bp, Artificial Sequence
  MKO10069072_B_5730507C01Rik
  gRNA
gatgtgcatgtgaacttcac

SEQ ID NO: 69073 - DNA, 20 bp, Artificial Sequence
  MKO10069073_B_5730508B09Rik
  gRNA
gctgtacataaataatgaca

SEQ ID NO: 69074 - DNA, 20 bp, Artificial Sequence
  MKO10069074_B_5730508B09Rik
  gRNA
acctgctcgccctcgtcctg

SEQ ID NO: 69075 - DNA, 20 bp, Artificial Sequence
  MKO10069075_B_5730508B09Rik
  gRNA
cggagcacggggcgagcccg

SEQ ID NO: 69076 - DNA, 20 bp, Artificial Sequence
  MKO10069076_B_5730559C18Rik
  gRNA
ctgctgcttgcgtactgcat

SEQ ID NO: 69077 - DNA, 20 bp, Artificial Sequence
  MKO10069077_B_5730559C18Rik
  gRNA
aggcccccaaggtccggcgc

SEQ ID NO: 69078 - DNA, 20 bp, Artificial Sequence
  MKO10069078_B_5730559C18Rik
  gRNA
ctgcaggatgatgccgctgt

SEQ ID NO: 69079 - DNA, 20 bp, Artificial Sequence
  MKO10069079_B_5830403L16Rik
  gRNA
cggagccttcttgatgatct

SEQ ID NO: 69080 - DNA, 20 bp, Artificial Sequence
  MKO10069080_B_5830403L16Rik
  gRNA
acagatacatgctcaacgct

SEQ ID NO: 69081 - DNA, 20 bp, Artificial Sequence
  MKO10069081_B_5830403L16Rik
  gRNA
gtaggccgagatcatcaaga

SEQ ID NO: 69082 - DNA, 20 bp, Artificial Sequence
  MKO10069082_B_5830411N06Rik
  gRNA
caccattccgcaagcgtact

SEQ ID NO: 69083 - DNA, 20 bp, Artificial Sequence
  MKO10069083_B_5830411N06Rik
  gRNA
gcagaagtaccttacatgcc

SEQ ID NO: 69084 - DNA, 20 bp, Artificial Sequence
  MKO10069084_B_5830411N06Rik
  gRNA
gtgaaggccaagtacgcttg

SEQ ID NO: 69085 - DNA, 20 bp, Artificial Sequence
  MKO10069085_B_5830415F09Rik
  gRNA
taagtacttccactccgcag

SEQ ID NO: 69086 - DNA, 20 bp, Artificial Sequence
  MKO10069086_B_5830415F09Rik
  gRNA
agcgtcagccctatggcatt

SEQ ID NO: 69087 - DNA, 20 bp, Artificial Sequence
  MKO10069087_B_5830415F09Rik
  gRNA
aggcaaaagtgcagccgccc

SEQ ID NO: 69088 - DNA, 20 bp, Artificial Sequence
  MKO10069088_B_5830418K08Rik
  gRNA
aaaacagaggcgaagtcagc

SEQ ID NO: 69089 - DNA, 20 bp, Artificial Sequence
  MKO10069089_B_5830418K08Rik
  gRNA
gcctgtcccatccccctttg

SEQ ID NO: 69090 - DNA, 20 bp, Artificial Sequence
  MKO10069090_B_5830418K08Rik
  gRNA
ctcatttggctgaggagcta

SEQ ID NO: 69091 - DNA, 20 bp, Artificial Sequence
  MKO10069091_B_5830473C10Rik
  gRNA
agcagacatgctcaagatag

SEQ ID NO: 69092 - DNA, 20 bp, Artificial Sequence
  MKO10069092_B_5830473C10Rik
  gRNA
gatcacctggaggagaactt

SEQ ID NO: 69093 - DNA, 20 bp, Artificial Sequence
  MKO10069093_B_5830473C10Rik
  gRNA
tgactcctaagttctcctcc

SEQ ID NO: 69094 - DNA, 20 bp, Artificial Sequence
  MKO10069094_B_42435
  gRNA
gtaattacagcttagttcag

SEQ ID NO: 69095 - DNA, 20 bp, Artificial Sequence
  MKO10069095_B_42435
  gRNA
tatcatccttgtgtatgtac

SEQ ID NO: 69096 - DNA, 20 bp, Artificial Sequence
  MKO10069096_B_42435
  gRNA
taaacaagcacttgtagatg

SEQ ID NO: 69097 - DNA, 20 bp, Artificial Sequence
  MKO10069097_B_42619
  gRNA
gtccaatacctacgacctcc

SEQ ID NO: 69098 - DNA, 20 bp, Artificial Sequence
  MKO10069098_B_42619
  gRNA
cgctggctccccttcaaact

SEQ ID NO: 69099 - DNA, 20 bp, Artificial Sequence
  MKO10069099_B_42619
  gRNA
agattgtcgaactgtccccc

SEQ ID NO: 69100 - DNA, 20 bp, Artificial Sequence
  MKO10069100_B_6030419C18Rik
  gRNA
cgtggtgaaggatgaacatt

SEQ ID NO: 69101 - DNA, 20 bp, Artificial Sequence
  MKO10069101_B_6030419C18Rik
  gRNA
tatcagccgtcatgaagtcc

SEQ ID NO: 69102 - DNA, 20 bp, Artificial Sequence
  MKO10069102_B_6030419C18Rik
  gRNA
gggccatccaccgagtctga

SEQ ID NO: 69103 - DNA, 20 bp, Artificial Sequence
  MKO10069103_B_6030458C11Rik
  gRNA
gatgcttcgaacctatggcc

SEQ ID NO: 69104 - DNA, 20 bp, Artificial Sequence
  MKO10069104_B_6030458C11Rik
  gRNA
attatgcctgcagtttacgc

SEQ ID NO: 69105 - DNA, 20 bp, Artificial Sequence
  MKO10069105_B_6030458C11Rik
  gRNA
taatctggctccaccccacg

SEQ ID NO: 69106 - DNA, 20 bp, Artificial Sequence
  MKO10069106_B_6030468B19Rik
  gRNA
ggacgcctcaggggcatcgc

SEQ ID NO: 69107 - DNA, 20 bp, Artificial Sequence
  MKO10069107_B_6030468B19Rik
  gRNA
ttataagcaccctccggctt

SEQ ID NO: 69108 - DNA, 20 bp, Artificial Sequence
  MKO10069108_B_6030468B19Rik
  gRNA
ctgccagccagaatacaggt

SEQ ID NO: 69109 - DNA, 20 bp, Artificial Sequence
  MKO10069109_B_6030498E09Rik
  gRNA
gcagatgagatagtgaaaga

SEQ ID NO: 69110 - DNA, 20 bp, Artificial Sequence
  MKO10069110_B_6030498E09Rik
  gRNA
agccattagatgtatagaag

SEQ ID NO: 69111 - DNA, 20 bp, Artificial Sequence
  MKO10069111_B_6030498E09Rik
  gRNA
cagccctcactcttcgcctc

SEQ ID NO: 69112 - DNA, 20 bp, Artificial Sequence
  MKO10069112_B_6330403A02Rik
  gRNA
cgtgcaggttcgcgagaaga

SEQ ID NO: 69113 - DNA, 20 bp, Artificial Sequence
  MKO10069113_B_6330403A02Rik
  gRNA
ccttacagggtacaaggatc

SEQ ID NO: 69114 - DNA, 20 bp, Artificial Sequence
  MKO10069114_B_6330403A02Rik
  gRNA
ctgtaggctcacagctgttg

SEQ ID NO: 69115 - DNA, 20 bp, Artificial Sequence
  MKO10069115_B_6330403K07Rik
  gRNA
ataccagaactcgcgtttgc

SEQ ID NO: 69116 - DNA, 20 bp, Artificial Sequence
  MKO10069116_B_6330403K07Rik
  gRNA
cgactctgcgcccaccccgt

SEQ ID NO: 69117 - DNA, 20 bp, Artificial Sequence
  MKO10069117_B_6330403K07Rik
  gRNA
accccagggcttgcgcgaaa

SEQ ID NO: 69118 - DNA, 20 bp, Artificial Sequence
  MKO10069118_B_6330408A02Rik
  gRNA
accgagcgcagccgtgcaga

SEQ ID NO: 69119 - DNA, 20 bp, Artificial Sequence
  MKO10069119_B_6330408A02Rik
  gRNA
ccctttgcgagatcgactcg

SEQ ID NO: 69120 - DNA, 20 bp, Artificial Sequence
  MKO10069120_B_6330408A02Rik
  gRNA
agaagactaccagtcgctgc

SEQ ID NO: 69121 - DNA, 20 bp, Artificial Sequence
  MKO10069121_B_6330409D20Rik
  gRNA
ggactatgtgaaggtaggct

SEQ ID NO: 69122 - DNA, 20 bp, Artificial Sequence
  MKO10069122_B_6330409D20Rik
  gRNA
ggaagcagaacttcaccttc

SEQ ID NO: 69123 - DNA, 20 bp, Artificial Sequence
  MKO10069123_B_6330409D20Rik
  gRNA
aacctctggcctggaccaga

SEQ ID NO: 69124 - DNA, 20 bp, Artificial Sequence
  MKO10069124_B_6330416G13Rik
  gRNA
tgcacctatctcctttgacc

SEQ ID NO: 69125 - DNA, 20 bp, Artificial Sequence
  MKO10069125_B_6330416G13Rik
  gRNA
tctgcgacaccgtgtgctgc

SEQ ID NO: 69126 - DNA, 20 bp, Artificial Sequence
  MKO10069126_B_6330416G13Rik
  gRNA
ggtacatcatctacaactcc

SEQ ID NO: 69127 - DNA, 20 bp, Artificial Sequence
  MKO10069127_B_6430531B16Rik
  gRNA
agaatagactcgataactcc

SEQ ID NO: 69128 - DNA, 20 bp, Artificial Sequence
  MKO10069128_B_6430531B16Rik
  gRNA
gttgggggtaagatcccgcc

SEQ ID NO: 69129 - DNA, 20 bp, Artificial Sequence
  MKO10069129_B_6430531B16Rik
  gRNA
tgagcctacatgaacagtcc

SEQ ID NO: 69130 - DNA, 20 bp, Artificial Sequence
  MKO10069130_B_6430548M08Rik
  gRNA
agcagcaccgtcaacgctcc

SEQ ID NO: 69131 - DNA, 20 bp, Artificial Sequence
  MKO10069131_B_6430548M08Rik
  gRNA
ggcggaatcagcactctgat

SEQ ID NO: 69132 - DNA, 20 bp, Artificial Sequence
  MKO10069132_B_6430548M08Rik
  gRNA
gtgcttcacttactaccatc

SEQ ID NO: 69133 - DNA, 20 bp, Artificial Sequence
  MKO10069133_B_6430550D23Rik
  gRNA
atctccattaccgtgtcact

SEQ ID NO: 69134 - DNA, 20 bp, Artificial Sequence
  MKO10069134_B_6430550D23Rik
  gRNA
aactggttctgcttcaaatt

SEQ ID NO: 69135 - DNA, 20 bp, Artificial Sequence
  MKO10069135_B_6430550D23Rik
  gRNA
cctgtacctgacacatgaat

SEQ ID NO: 69136 - DNA, 20 bp, Artificial Sequence
  MKO10069136_B_6430571L13Rik
  gRNA
cagctcgtcttgttcctccg

SEQ ID NO: 69137 - DNA, 20 bp, Artificial Sequence
  MKO10069137_B_6430571L13Rik
  gRNA
gcgagacgcagcctccatgc

SEQ ID NO: 69138 - DNA, 20 bp, Artificial Sequence
  MKO10069138_B_6430571L13Rik
  gRNA
gatcatcacagtgattggcc

SEQ ID NO: 69139 - DNA, 20 bp, Artificial Sequence
  MKO10069139_B_6430573F11Rik
  gRNA
acgaacacctcatctaagtt

SEQ ID NO: 69140 - DNA, 20 bp, Artificial Sequence
  MKO10069140_B_6430573F11Rik
  gRNA
agatgatagcatcgaagccc

SEQ ID NO: 69141 - DNA, 20 bp, Artificial Sequence
  MKO10069141_B_6430573F11Rik
  gRNA
tagagattgcccggaataga

SEQ ID NO: 69142 - DNA, 20 bp, Artificial Sequence
  MKO10069142_B_6720489N17Rik
  gRNA
gaatgcagagtaggggaaca

SEQ ID NO: 69143 - DNA, 20 bp, Artificial Sequence
  MKO10069143_B_6720489N17Rik
  gRNA
ctagaatgcagtgacttatg

SEQ ID NO: 69144 - DNA, 20 bp, Artificial Sequence
  MKO10069144_B_6720489N17Rik
  gRNA
caaatgtacctaaagcactg

SEQ ID NO: 69145 - DNA, 20 bp, Artificial Sequence
  MKO10069145_B_6820408C15Rik
  gRNA
cctcccctccgacaagtcaa

SEQ ID NO: 69146 - DNA, 20 bp, Artificial Sequence
  MKO10069146_B_6820408C15Rik
  gRNA
aggccaaggtccggctgatg

SEQ ID NO: 69147 - DNA, 20 bp, Artificial Sequence
  MKO10069147_B_6820408C15Rik
  gRNA
agaagggaccaaacgcacca

SEQ ID NO: 69148 - DNA, 20 bp, Artificial Sequence
  MKO10069148_B_42436
  gRNA
atagagccgtgcaaatgcac

SEQ ID NO: 69149 - DNA, 20 bp, Artificial Sequence
  MKO10069149_B_42436
  gRNA
aagtaccattgatgaagatc

SEQ ID NO: 69150 - DNA, 20 bp, Artificial Sequence
  MKO10069150_B_42436
  gRNA
ataatccataagattgctga

SEQ ID NO: 69151 - DNA, 20 bp, Artificial Sequence
  MKO10069151_B_42620
  gRNA
atgcagtggataatagtaat

SEQ ID NO: 69152 - DNA, 20 bp, Artificial Sequence
  MKO10069152_B_42620
  gRNA
ctggagaatacaaatctgtg

SEQ ID NO: 69153 - DNA, 20 bp, Artificial Sequence
  MKO10069153_B_42620
  gRNA
tagaatcaaaaagactgtac

SEQ ID NO: 69154 - DNA, 20 bp, Artificial Sequence
  MKO10069154_B_7420426K07Rik
  gRNA
ttgctgagagttgtgctccg

SEQ ID NO: 69155 - DNA, 20 bp, Artificial Sequence
  MKO10069155_B_7420426K07Rik
  gRNA
agcagcactagcgctgacct

SEQ ID NO: 69156 - DNA, 20 bp, Artificial Sequence
  MKO10069156_B_7420426K07Rik
  gRNA
gatgaacgctccagatgacc

SEQ ID NO: 69157 - DNA, 20 bp, Artificial Sequence
  MKO10069157_B_7420461P10Rik
  gRNA
ctcgtggtccatacccatgc

SEQ ID NO: 69158 - DNA, 20 bp, Artificial Sequence
  MKO10069158_B_7420461P10Rik
  gRNA
cttatgtctgcagcatcagc

SEQ ID NO: 69159 - DNA, 20 bp, Artificial Sequence
  MKO10069159_B_7420461P10Rik
  gRNA
gtgtatctaaaaccctccat

SEQ ID NO: 69160 - DNA, 20 bp, Artificial Sequence
  MKO10069160_B_7530416G11Rik
  gRNA
ctgtcgccaagtccccttct

SEQ ID NO: 69161 - DNA, 20 bp, Artificial Sequence
  MKO10069161_B_7530416G11Rik
  gRNA
agggcggaggatgctcacaa

SEQ ID NO: 69162 - DNA, 20 bp, Artificial Sequence
  MKO10069162_B_7530416G11Rik
  gRNA
agatttactgagtctccaag

SEQ ID NO: 69163 - DNA, 20 bp, Artificial Sequence
  MKO10069163_B_42437
  gRNA
catgatcttcctgcgctcac

SEQ ID NO: 69164 - DNA, 20 bp, Artificial Sequence
  MKO10069164_B_42437
  gRNA
gctcattgaccgcacagcag

SEQ ID NO: 69165 - DNA, 20 bp, Artificial Sequence
  MKO10069165_B_42437
  gRNA
gagtagtcctccatccacga

SEQ ID NO: 69166 - DNA, 20 bp, Artificial Sequence
  MKO10069166_B_42621
  gRNA
cgccatggcggccaccgact

SEQ ID NO: 69167 - DNA, 20 bp, Artificial Sequence
  MKO10069167_B_42621
  gRNA
tcatctcaagctgaccatcg

SEQ ID NO: 69168 - DNA, 20 bp, Artificial Sequence
  MKO10069168_B_42621
  gRNA
ctttggcgatcagatcaata

SEQ ID NO: 69169 - DNA, 20 bp, Artificial Sequence
  MKO10069169_B_8030411F24Rik
  gRNA
aaggacagtcatgtcgtgga

SEQ ID NO: 69170 - DNA, 20 bp, Artificial Sequence
  MKO10069170_B_8030411F24Rik
  gRNA
cataattgcccattgctaca

SEQ ID NO: 69171 - DNA, 20 bp, Artificial Sequence
  MKO10069171_B_8030411F24Rik
  gRNA
tctcttgagccttgtagcaa

SEQ ID NO: 69172 - DNA, 20 bp, Artificial Sequence
  MKO10069172_B_8030423J24Rik
  gRNA
aggggccttgcagtgtgctt

SEQ ID NO: 69173 - DNA, 20 bp, Artificial Sequence
  MKO10069173_B_8030423J24Rik
  gRNA
ggcttacagcagcgagggac

SEQ ID NO: 69174 - DNA, 20 bp, Artificial Sequence
  MKO10069174_B_8030423J24Rik
  gRNA
aaaatacaatgactttccga

SEQ ID NO: 69175 - DNA, 20 bp, Artificial Sequence
  MKO10069175_B_8030462N17Rik
  gRNA
ctccacttcgctatctgaag

SEQ ID NO: 69176 - DNA, 20 bp, Artificial Sequence
  MKO10069176_B_8030462N17Rik
  gRNA
ggcgaagcccacgtctgctg

SEQ ID NO: 69177 - DNA, 20 bp, Artificial Sequence
  MKO10069177_B_8030462N17Rik
  gRNA
acctgcctctagaagctcgc

SEQ ID NO: 69178 - DNA, 20 bp, Artificial Sequence
  MKO10069178_B_8430408G22Rik
  gRNA
gcgcctcttctctcgagtcc

SEQ ID NO: 69179 - DNA, 20 bp, Artificial Sequence
  MKO10069179_B_8430408G22Rik
  gRNA
tctgacatttcccgaatcgt

SEQ ID NO: 69180 - DNA, 20 bp, Artificial Sequence
  MKO10069180_B_8430408G22Rik
  gRNA
tgccccatttgccaacgatt

SEQ ID NO: 69181 - DNA, 20 bp, Artificial Sequence
  MKO10069181_B_8430419L09Rik
  gRNA
tgctgccgttcatccccgaa

SEQ ID NO: 69182 - DNA, 20 bp, Artificial Sequence
  MKO10069182_B_8430419L09Rik
  gRNA
taccttggcagccccggttg

SEQ ID NO: 69183 - DNA, 20 bp, Artificial Sequence
  MKO10069183_B_8430419L09Rik
  gRNA
tattcacgtcagccaactcc

SEQ ID NO: 69184 - DNA, 20 bp, Artificial Sequence
  MKO10069184_B_8430427H17Rik
  gRNA
tgcgcttgcgggcccgctcc

SEQ ID NO: 69185 - DNA, 20 bp, Artificial Sequence
  MKO10069185_B_8430427H17Rik
  gRNA
tcatagctcccggagctgta

SEQ ID NO: 69186 - DNA, 20 bp, Artificial Sequence
  MKO10069186_B_8430427H17Rik
  gRNA
ctcagggaattgccggctgc

SEQ ID NO: 69187 - DNA, 20 bp, Artificial Sequence
  MKO10069187_B_42438
  gRNA
tcacggaccagcccccctgc

SEQ ID NO: 69188 - DNA, 20 bp, Artificial Sequence
  MKO10069188_B_42438
  gRNA
accaaccctgcctaatccgc

SEQ ID NO: 69189 - DNA, 20 bp, Artificial Sequence
  MKO10069189_B_42438
  gRNA
cgacgaggaacagcgatccc

SEQ ID NO: 69190 - DNA, 20 bp, Artificial Sequence
  MKO10069190_B_42622
  gRNA
aggtgggctgcaccgacttc

SEQ ID NO: 69191 - DNA, 20 bp, Artificial Sequence
  MKO10069191_B_42622
  gRNA
tgtcgggaatgcgcttcttc

SEQ ID NO: 69192 - DNA, 20 bp, Artificial Sequence
  MKO10069192_B_42622
  gRNA
tgggacatacgagtggccgg

SEQ ID NO: 69193 - DNA, 20 bp, Artificial Sequence
  MKO10069193_B_9030025P20Rik
  gRNA
cctcctatcagggcgaagtc

SEQ ID NO: 69194 - DNA, 20 bp, Artificial Sequence
  MKO10069194_B_9030025P20Rik
  gRNA
gccgagggctcgctccagac

SEQ ID NO: 69195 - DNA, 20 bp, Artificial Sequence
  MKO10069195_B_9030025P20Rik
  gRNA
cagcctgctgccgtctccct

SEQ ID NO: 69196 - DNA, 20 bp, Artificial Sequence
  MKO10069196_B_9030617O03Rik
  gRNA
cccattcacatcggtgaccc

SEQ ID NO: 69197 - DNA, 20 bp, Artificial Sequence
  MKO10069197_B_9030617O03Rik
  gRNA
tcaccgcctcactttgtcca

SEQ ID NO: 69198 - DNA, 20 bp, Artificial Sequence
  MKO10069198_B_9030617O03Rik
  gRNA
cggggtcctctgcccctcct

SEQ ID NO: 69199 - DNA, 20 bp, Artificial Sequence
  MKO10069199_B_9030624G23Rik
  gRNA
cacctcctcgatggccgccg

SEQ ID NO: 69200 - DNA, 20 bp, Artificial Sequence
  MKO10069200_B_9030624G23Rik
  gRNA
gatgtgcatgtgaacttcac

SEQ ID NO: 69201 - DNA, 20 bp, Artificial Sequence
  MKO10069201_B_9030624G23Rik
  gRNA
cagtcatacctataacagtg

SEQ ID NO: 69202 - DNA, 20 bp, Artificial Sequence
  MKO10069202_B_9030624J02Rik
  gRNA
aaggatttccacacgtttgt

SEQ ID NO: 69203 - DNA, 20 bp, Artificial Sequence
  MKO10069203_B_9030624J02Rik
  gRNA
gctgctcagaggatcgatca

SEQ ID NO: 69204 - DNA, 20 bp, Artificial Sequence
  MKO10069204_B_9030624J02Rik
  gRNA
aggcggagctggcgtcttgc

SEQ ID NO: 69205 - DNA, 20 bp, Artificial Sequence
  MKO10069205_B_9130008F23Rik
  gRNA
aatccacgacccgcaccaac

SEQ ID NO: 69206 - DNA, 20 bp, Artificial Sequence
  MKO10069206_B_9130008F23Rik
  gRNA
gggccgtggcaatgcgcctg

SEQ ID NO: 69207 - DNA, 20 bp, Artificial Sequence
  MKO10069207_B_9130008F23Rik
  gRNA
gctctgagtgctctccgcgc

SEQ ID NO: 69208 - DNA, 20 bp, Artificial Sequence
  MKO10069208_B_9130011E15Rik
  gRNA
cctgcaaggcgttgacaact

SEQ ID NO: 69209 - DNA, 20 bp, Artificial Sequence
  MKO10069209_B_9130011E15Rik
  gRNA
accttgtgtgcacttattcg

SEQ ID NO: 69210 - DNA, 20 bp, Artificial Sequence
  MKO10069210_B_9130011E15Rik
  gRNA
ggaggaactcttcctcatga

SEQ ID NO: 69211 - DNA, 20 bp, Artificial Sequence
  MKO10069211_B_9130019O22Rik
  gRNA
gtccgcgaagttcacagccc

SEQ ID NO: 69212 - DNA, 20 bp, Artificial Sequence
  MKO10069212_B_9130019O22Rik
  gRNA
tgcaggacagaagttcactc

SEQ ID NO: 69213 - DNA, 20 bp, Artificial Sequence
  MKO10069213_B_9130019O22Rik
  gRNA
accctgtgcccaggatccag

SEQ ID NO: 69214 - DNA, 20 bp, Artificial Sequence
  MKO10069214_B_9130023H24Rik
  gRNA
tggaccagcagtacttatgt

SEQ ID NO: 69215 - DNA, 20 bp, Artificial Sequence
  MKO10069215_B_9130023H24Rik
  gRNA
taggtctgcactgcgaccaa

SEQ ID NO: 69216 - DNA, 20 bp, Artificial Sequence
  MKO10069216_B_9130023H24Rik
  gRNA
gctacatgagcgccccctcc

SEQ ID NO: 69217 - DNA, 20 bp, Artificial Sequence
  MKO10069217_B_9130204L05Rik
  gRNA
tcatccaatagtatacttaa

SEQ ID NO: 69218 - DNA, 20 bp, Artificial Sequence
  MKO10069218_B_9130204L05Rik
  gRNA
gacagtcatactgggtgaga

SEQ ID NO: 69219 - DNA, 20 bp, Artificial Sequence
  MKO10069219_B_9130204L05Rik
  gRNA
acaaaataatgatgctctac

SEQ ID NO: 69220 - DNA, 20 bp, Artificial Sequence
  MKO10069220_B_9130401M01Rik
  gRNA
ctcgtattcctgtcgtctgt

SEQ ID NO: 69221 - DNA, 20 bp, Artificial Sequence
  MKO10069221_B_9130401M01Rik
  gRNA
ggacctggcctacagacgac

SEQ ID NO: 69222 - DNA, 20 bp, Artificial Sequence
  MKO10069222_B_9130401M01Rik
  gRNA
taatcgccagaaagccctgc

SEQ ID NO: 69223 - DNA, 20 bp, Artificial Sequence
  MKO10069223_B_9130409I23Rik
  gRNA
ggttcttctgcaccgcttac

SEQ ID NO: 69224 - DNA, 20 bp, Artificial Sequence
  MKO10069224_B_9130409I23Rik
  gRNA
cctcttcttcatccgtgaat

SEQ ID NO: 69225 - DNA, 20 bp, Artificial Sequence
  MKO10069225_B_9130409I23Rik
  gRNA
atcatacagtactttgatcc

SEQ ID NO: 69226 - DNA, 20 bp, Artificial Sequence
  MKO10069226_B_9230104L09Rik
  gRNA
aaactttcttcgtgaagctg

SEQ ID NO: 69227 - DNA, 20 bp, Artificial Sequence
  MKO10069227_B_9230104L09Rik
  gRNA
gttgaaaatgacttgttctg

SEQ ID NO: 69228 - DNA, 20 bp, Artificial Sequence
  MKO10069228_B_9230104L09Rik
  gRNA
gcctgggctgctgatgctga

SEQ ID NO: 69229 - DNA, 20 bp, Artificial Sequence
  MKO10069229_B_9230110C19Rik
  gRNA
atatgaagtctttagcccag

SEQ ID NO: 69230 - DNA, 20 bp, Artificial Sequence
  MKO10069230_B_9230110C19Rik
  gRNA
tctgagagtaactgcaaatt

SEQ ID NO: 69231 - DNA, 20 bp, Artificial Sequence
  MKO10069231_B_9230110C19Rik
  gRNA
gacattgaaagttgtgtgca

SEQ ID NO: 69232 - DNA, 20 bp, Artificial Sequence
  MKO10069232_B_9230110F15Rik
  gRNA
atggctgaaaacatgtatct

SEQ ID NO: 69233 - DNA, 20 bp, Artificial Sequence
  MKO10069233_B_9230110F15Rik
  gRNA
tgccttatcacagtccaatt

SEQ ID NO: 69234 - DNA, 20 bp, Artificial Sequence
  MKO10069234_B_9230110F15Rik
  gRNA
ccttacctgtgtgtgagaat

SEQ ID NO: 69235 - DNA, 20 bp, Artificial Sequence
  MKO10069235_B_9230112D13Rik
  gRNA
tcacccatagtcccctcgtc

SEQ ID NO: 69236 - DNA, 20 bp, Artificial Sequence
  MKO10069236_B_9230112D13Rik
  gRNA
cgtctataaaatgcagctga

SEQ ID NO: 69237 - DNA, 20 bp, Artificial Sequence
  MKO10069237_B_9230112D13Rik
  gRNA
tgtgagttcatctcttgact

SEQ ID NO: 69238 - DNA, 20 bp, Artificial Sequence
  MKO10069238_B_9330159F19Rik
  gRNA
acttacatcagaaccgcatt

SEQ ID NO: 69239 - DNA, 20 bp, Artificial Sequence
  MKO10069239_B_9330159F19Rik
  gRNA
ggaatcctttggccacagac

SEQ ID NO: 69240 - DNA, 20 bp, Artificial Sequence
  MKO10069240_B_9330159F19Rik
  gRNA
tcccccaaatcacctcaact

SEQ ID NO: 69241 - DNA, 20 bp, Artificial Sequence
  MKO10069241_B_9330182L06Rik
  gRNA
ttccaacgttgcaacattca

SEQ ID NO: 69242 - DNA, 20 bp, Artificial Sequence
  MKO10069242_B_9330182L06Rik
  gRNA
tcttacttgttacagccatc

SEQ ID NO: 69243 - DNA, 20 bp, Artificial Sequence
  MKO10069243_B_9330182L06Rik
  gRNA
gagcaatccactgcagaatt

SEQ ID NO: 69244 - DNA, 20 bp, Artificial Sequence
  MKO10069244_B_9330182O14Rik
  gRNA
ttacttcatggtaagcacac

SEQ ID NO: 69245 - DNA, 20 bp, Artificial Sequence
  MKO10069245_B_9330182O14Rik
  gRNA
atttgggaggtccaaacaac

SEQ ID NO: 69246 - DNA, 20 bp, Artificial Sequence
  MKO10069246_B_9330182O14Rik
  gRNA
aggaataatgtataatggag

SEQ ID NO: 69247 - DNA, 20 bp, Artificial Sequence
  MKO10069247_B_9430007A20Rik
  gRNA
tcttgcgaccgtgtgtctcc

SEQ ID NO: 69248 - DNA, 20 bp, Artificial Sequence
  MKO10069248_B_9430007A20Rik
  gRNA
ccctcccgggtcgtgatctg

SEQ ID NO: 69249 - DNA, 20 bp, Artificial Sequence
  MKO10069249_B_9430007A20Rik
  gRNA
tctctccacagatcacgacc

SEQ ID NO: 69250 - DNA, 20 bp, Artificial Sequence
  MKO10069250_B_9430015G10Rik
  gRNA
gacttcaatgctacctgcct

SEQ ID NO: 69251 - DNA, 20 bp, Artificial Sequence
  MKO10069251_B_9430015G10Rik
  gRNA
accacatccatgcaacactc

SEQ ID NO: 69252 - DNA, 20 bp, Artificial Sequence
  MKO10069252_B_9430015G10Rik
  gRNA
ttaccaaaatgtggctgtcc

SEQ ID NO: 69253 - DNA, 20 bp, Artificial Sequence
  MKO10069253_B_9430016H08Rik
  gRNA
gacattgtctacacatcaac

SEQ ID NO: 69254 - DNA, 20 bp, Artificial Sequence
  MKO10069254_B_9430016H08Rik
  gRNA
ctgcagcaagtgcattctta

SEQ ID NO: 69255 - DNA, 20 bp, Artificial Sequence
  MKO10069255_B_9430016H08Rik
  gRNA
caatgtgttccaggtgaagc

SEQ ID NO: 69256 - DNA, 20 bp, Artificial Sequence
  MKO10069256_B_9430020K01Rik
  gRNA
ctacagcccatacgcacagt

SEQ ID NO: 69257 - DNA, 20 bp, Artificial Sequence
  MKO10069257_B_9430020K01Rik
  gRNA
ttcctatgatccaagccgag

SEQ ID NO: 69258 - DNA, 20 bp, Artificial Sequence
  MKO10069258_B_9430020K01Rik
  gRNA
gccatcacaccctctccact

SEQ ID NO: 69259 - DNA, 20 bp, Artificial Sequence
  MKO10069259_B_9430023L20Rik
  gRNA
acgtgtttgacacgggcctg

SEQ ID NO: 69260 - DNA, 20 bp, Artificial Sequence
  MKO10069260_B_9430023L20Rik
  gRNA
ctctgaggagacgcgcacat

SEQ ID NO: 69261 - DNA, 20 bp, Artificial Sequence
  MKO10069261_B_9430023L20Rik
  gRNA
cgagaagatcattaacatcg

SEQ ID NO: 69262 - DNA, 20 bp, Artificial Sequence
  MKO10069262_B_9430038I01Rik
  gRNA
ccgctgcactcatatccacc

SEQ ID NO: 69263 - DNA, 20 bp, Artificial Sequence
  MKO10069263_B_9430038I01Rik
  gRNA
gttcggcccagccttgcctg

SEQ ID NO: 69264 - DNA, 20 bp, Artificial Sequence
  MKO10069264_B_9430038I01Rik
  gRNA
atcacaaccagactgtagcc

SEQ ID NO: 69265 - DNA, 20 bp, Artificial Sequence
  MKO10069265_B_9430069I07Rik
  gRNA
gccccatcctagagatacgc

SEQ ID NO: 69266 - DNA, 20 bp, Artificial Sequence
  MKO10069266_B_9430069I07Rik
  gRNA
atccctgcgtatctctagga

SEQ ID NO: 69267 - DNA, 20 bp, Artificial Sequence
  MKO10069267_B_9430069I07Rik
  gRNA
tgcgtggagaggaagtactt

SEQ ID NO: 69268 - DNA, 20 bp, Artificial Sequence
  MKO10069268_B_9530002B09Rik
  gRNA
gattctagctgtagatcttg

SEQ ID NO: 69269 - DNA, 20 bp, Artificial Sequence
  MKO10069269_B_9530002B09Rik
  gRNA
gctaggagaaacaataagta

SEQ ID NO: 69270 - DNA, 20 bp, Artificial Sequence
  MKO10069270_B_9530002B09Rik
  gRNA
gaatacttacacatttggga

SEQ ID NO: 69271 - DNA, 20 bp, Artificial Sequence
  MKO10069271_B_9530003J23Rik
  gRNA
cgacaaaagttccttgatcc

SEQ ID NO: 69272 - DNA, 20 bp, Artificial Sequence
  MKO10069272_B_9530003J23Rik
  gRNA
agccccgaatgtactctttg

SEQ ID NO: 69273 - DNA, 20 bp, Artificial Sequence
  MKO10069273_B_9530003J23Rik
  gRNA
gatcctctttgcacaaacta

SEQ ID NO: 69274 - DNA, 20 bp, Artificial Sequence
  MKO10069274_B_9530053A07Rik
  gRNA
tgggcatctctgtccgcgaa

SEQ ID NO: 69275 - DNA, 20 bp, Artificial Sequence
  MKO10069275_B_9530053A07Rik
  gRNA
tttatagaaaatgaacgccg

SEQ ID NO: 69276 - DNA, 20 bp, Artificial Sequence
  MKO10069276_B_9530053A07Rik
  gRNA
tggttcgtgacctccattcg

SEQ ID NO: 69277 - DNA, 20 bp, Artificial Sequence
  MKO10069277_B_9530068E07Rik
  gRNA
gagatcgcgccagagccccg

SEQ ID NO: 69278 - DNA, 20 bp, Artificial Sequence
  MKO10069278_B_9530068E07Rik
  gRNA
gcatggcctcgttcacgttc

SEQ ID NO: 69279 - DNA, 20 bp, Artificial Sequence
  MKO10069279_B_9530068E07Rik
  gRNA
tctggcgcgatctctggtgc

SEQ ID NO: 69280 - DNA, 20 bp, Artificial Sequence
  MKO10069280_B_9530077C05Rik
  gRNA
tgttgtctaaaactcgaatc

SEQ ID NO: 69281 - DNA, 20 bp, Artificial Sequence
  MKO10069281_B_9530077C05Rik
  gRNA
gcatccatgacggtagtaaa

SEQ ID NO: 69282 - DNA, 20 bp, Artificial Sequence
  MKO10069282_B_9530077C05Rik
  gRNA
tgctataaagcccatcaacc

SEQ ID NO: 69283 - DNA, 20 bp, Artificial Sequence
  MKO10069283_B_9630033F20Rik
  gRNA
acgactccaggctccgagaa

SEQ ID NO: 69284 - DNA, 20 bp, Artificial Sequence
  MKO10069284_B_9630033F20Rik
  gRNA
agttaccctttctcggagcc

SEQ ID NO: 69285 - DNA, 20 bp, Artificial Sequence
  MKO10069285_B_9630033F20Rik
  gRNA
tgccccatgttcaccccgcc

SEQ ID NO: 69286 - DNA, 20 bp, Artificial Sequence
  MKO10069286_B_9830001H06Rik
  gRNA
cctgcagtaccgactgcgta

SEQ ID NO: 69287 - DNA, 20 bp, Artificial Sequence
  MKO10069287_B_9830001H06Rik
  gRNA
gttgatggggaactcatccg

SEQ ID NO: 69288 - DNA, 20 bp, Artificial Sequence
  MKO10069288_B_9830001H06Rik
  gRNA
cagctccttgtgaagccgca

SEQ ID NO: 69289 - DNA, 20 bp, Artificial Sequence
  MKO10069289_B_9830107B12Rik
  gRNA
gccaggagcagcagcagcac

SEQ ID NO: 69290 - DNA, 20 bp, Artificial Sequence
  MKO10069290_B_9830107B12Rik
  gRNA
atccagtgttactattcccg

SEQ ID NO: 69291 - DNA, 20 bp, Artificial Sequence
  MKO10069291_B_9830107B12Rik
  gRNA
tgaataccagtgtcttgctg

SEQ ID NO: 69292 - DNA, 20 bp, Artificial Sequence
  MKO10069292_B_9830147E19Rik
  gRNA
atgtgcatatacacttcact

SEQ ID NO: 69293 - DNA, 20 bp, Artificial Sequence
  MKO10069293_B_9830147E19Rik
  gRNA
tctcaaaatgatagaagata

SEQ ID NO: 69294 - DNA, 20 bp, Artificial Sequence
  MKO10069294_B_9830147E19Rik
  gRNA
tttcatgcattcgaagatag

SEQ ID NO: 69295 - DNA, 20 bp, Artificial Sequence
  MKO10069295_B_9930012K11Rik
  gRNA
agatagcgcaagccctgacc

SEQ ID NO: 69296 - DNA, 20 bp, Artificial Sequence
  MKO10069296_B_9930012K11Rik
  gRNA
caacactcacgaatgttcac

SEQ ID NO: 69297 - DNA, 20 bp, Artificial Sequence
  MKO10069297_B_9930012K11Rik
  gRNA
tgtcccacaggttggtaata

SEQ ID NO: 69298 - DNA, 20 bp, Artificial Sequence
  MKO10069298_B_9930013L23Rik
  gRNA
aagtacatcggagtagacaa

SEQ ID NO: 69299 - DNA, 20 bp, Artificial Sequence
  MKO10069299_B_9930013L23Rik
  gRNA
gctctccaccgtcatcaatc

SEQ ID NO: 69300 - DNA, 20 bp, Artificial Sequence
  MKO10069300_B_9930013L23Rik
  gRNA
ccttccgggctgtgtcatcc

SEQ ID NO: 69301 - DNA, 20 bp, Artificial Sequence
  MKO10069301_B_9930021J03Rik
  gRNA
ttaactgccacaaagttgta

SEQ ID NO: 69302 - DNA, 20 bp, Artificial Sequence
  MKO10069302_B_9930021J03Rik
  gRNA
gcactaatcttgatgaactc

SEQ ID NO: 69303 - DNA, 20 bp, Artificial Sequence
  MKO10069303_B_9930021J03Rik
  gRNA
cgagaatgaactcaaagatc

SEQ ID NO: 69304 - DNA, 20 bp, Artificial Sequence
  MKO10069304_B_9930104L06Rik
  gRNA
cacgctgcaccatcgccccc

SEQ ID NO: 69305 - DNA, 20 bp, Artificial Sequence
  MKO10069305_B_9930104L06Rik
  gRNA
tgatggtgttacggaccttg

SEQ ID NO: 69306 - DNA, 20 bp, Artificial Sequence
  MKO10069306_B_9930104L06Rik
  gRNA
cgcacagagtctgcgctttg

SEQ ID NO: 69307 - DNA, 20 bp, Artificial Sequence
  MKO10069307_B_9930111J21Rik1
  gRNA
tgaaaagctcttctttactg

SEQ ID NO: 69308 - DNA, 20 bp, Artificial Sequence
  MKO10069308_B_9930111J21Rik1
  gRNA
tctgaagaaaatcgagtttg

SEQ ID NO: 69309 - DNA, 20 bp, Artificial Sequence
  MKO10069309_B_9930111J21Rik1
  gRNA
catgaacatgtggtgtttgt

SEQ ID NO: 69310 - DNA, 20 bp, Artificial Sequence
  MKO10069310_B_9930111J21Rik2
  gRNA
gcaacatctccatgtccttt

SEQ ID NO: 69311 - DNA, 20 bp, Artificial Sequence
  MKO10069311_B_9930111J21Rik2
  gRNA
ttcttcattattgtctcttc

SEQ ID NO: 69312 - DNA, 20 bp, Artificial Sequence
  MKO10069312_B_9930111J21Rik2
  gRNA
ggtatggtagcccatgctct

SEQ ID NO: 69313 - DNA, 20 bp, Artificial Sequence
  MKO10069313_B_A130010J15Rik
  gRNA
tggtccaccgaccggacaga

SEQ ID NO: 69314 - DNA, 20 bp, Artificial Sequence
  MKO10069314_B_A130010J15Rik
  gRNA
aggaactcagaacccgattt

SEQ ID NO: 69315 - DNA, 20 bp, Artificial Sequence
  MKO10069315_B_A130010J15Rik
  gRNA
cactgtatttgggatactcc

SEQ ID NO: 69316 - DNA, 20 bp, Artificial Sequence
  MKO10069316_B_A1bg
  gRNA
ctcatgctgatccagtcgac

SEQ ID NO: 69317 - DNA, 20 bp, Artificial Sequence
  MKO10069317_B_A1bg
  gRNA
gcaagcccgtagagttaatg

SEQ ID NO: 69318 - DNA, 20 bp, Artificial Sequence
  MKO10069318_B_A1bg
  gRNA
ccgagcattagagtatttcc

SEQ ID NO: 69319 - DNA, 20 bp, Artificial Sequence
  MKO10069319_B_A1cf
  gRNA
ccgtgaaaatcctgtacgta

SEQ ID NO: 69320 - DNA, 20 bp, Artificial Sequence
  MKO10069320_B_A1cf
  gRNA
aagtatggtggccctccacc

SEQ ID NO: 69321 - DNA, 20 bp, Artificial Sequence
  MKO10069321_B_A1cf
  gRNA
aaaatctcgcagcccctttc

SEQ ID NO: 69322 - DNA, 20 bp, Artificial Sequence
  MKO10069322_B_A230046K03Rik
  gRNA
aaacagtgatgactttgttc

SEQ ID NO: 69323 - DNA, 20 bp, Artificial Sequence
  MKO10069323_B_A230046K03Rik
  gRNA
cagtctttatgagttccaaa

SEQ ID NO: 69324 - DNA, 20 bp, Artificial Sequence
  MKO10069324_B_A230046K03Rik
  gRNA
ctatgagcagtcttcccttt

SEQ ID NO: 69325 - DNA, 20 bp, Artificial Sequence
  MKO10069325_B_A230050P20Rik
  gRNA
tctttggaacattcgaagat

SEQ ID NO: 69326 - DNA, 20 bp, Artificial Sequence
  MKO10069326_B_A230050P20Rik
  gRNA
gggaggttacctgagcgtcc

SEQ ID NO: 69327 - DNA, 20 bp, Artificial Sequence
  MKO10069327_B_A230050P20Rik
  gRNA
accaacgcacctggatatct

SEQ ID NO: 69328 - DNA, 20 bp, Artificial Sequence
  MKO10069328_B_A230065H16Rik
  gRNA
gctccttccccaagtccacc

SEQ ID NO: 69329 - DNA, 20 bp, Artificial Sequence
  MKO10069329_B_A230065H16Rik
  gRNA
gggccctcagtggggctctc

SEQ ID NO: 69330 - DNA, 20 bp, Artificial Sequence
  MKO10069330_B_A230065H16Rik
  gRNA
agcaccagagagccccactg

SEQ ID NO: 69331 - DNA, 20 bp, Artificial Sequence
  MKO10069331_B_A2m
  gRNA
gattcctctactgtacattc

SEQ ID NO: 69332 - DNA, 20 bp, Artificial Sequence
  MKO10069332_B_A2m
  gRNA
ccacgctggcacccctgaga

SEQ ID NO: 69333 - DNA, 20 bp, Artificial Sequence
  MKO10069333_B_A2m
  gRNA
gatcaagactaaagagagcc

SEQ ID NO: 69334 - DNA, 20 bp, Artificial Sequence
  MKO10069334_B_A330021E22Rik
  gRNA
tatcatcaaagtccttgaag

SEQ ID NO: 69335 - DNA, 20 bp, Artificial Sequence
  MKO10069335_B_A330021E22Rik
  gRNA
ctgatacactgctatcagaa

SEQ ID NO: 69336 - DNA, 20 bp, Artificial Sequence
  MKO10069336_B_A330021E22Rik
  gRNA
attaaagcctctaagagatt

SEQ ID NO: 69337 - DNA, 20 bp, Artificial Sequence
  MKO10069337_B_A330050F15Rik
  gRNA
aaggcagacccggtgacagc

SEQ ID NO: 69338 - DNA, 20 bp, Artificial Sequence
  MKO10069338_B_A330050F15Rik
  gRNA
atgccatcctgcaagccatg

SEQ ID NO: 69339 - DNA, 20 bp, Artificial Sequence
  MKO10069339_B_A330050F15Rik
  gRNA
tttgctttaggtgagaagtc

SEQ ID NO: 69340 - DNA, 20 bp, Artificial Sequence
  MKO10069340_B_A330070K13Rik
  gRNA
gtggagttgttagacctctg

SEQ ID NO: 69341 - DNA, 20 bp, Artificial Sequence
  MKO10069341_B_A330070K13Rik
  gRNA
aaatggggctctgtttgtgc

SEQ ID NO: 69342 - DNA, 20 bp, Artificial Sequence
  MKO10069342_B_A330070K13Rik
  gRNA
gtctcttgggatctgaggtt

SEQ ID NO: 69343 - DNA, 20 bp, Artificial Sequence
  MKO10069343_B_A3galt2
  gRNA
agcaaacacagtcagcccga

SEQ ID NO: 69344 - DNA, 20 bp, Artificial Sequence
  MKO10069344_B_A3galt2
  gRNA
tcttaggcctgtaccattac

SEQ ID NO: 69345 - DNA, 20 bp, Artificial Sequence
  MKO10069345_B_A3galt2
  gRNA
ccgccacaggagtctcttct

SEQ ID NO: 69346 - DNA, 20 bp, Artificial Sequence
  MKO10069346_B_A430005L14Rik
  gRNA
tctagcttacaggtggagtg

SEQ ID NO: 69347 - DNA, 20 bp, Artificial Sequence
  MKO10069347_B_A430005L14Rik
  gRNA
ggcgctcactcatgaggagc

SEQ ID NO: 69348 - DNA, 20 bp, Artificial Sequence
  MKO10069348_B_A430005L14Rik
  gRNA
tctgaattctcttctgctca

SEQ ID NO: 69349 - DNA, 20 bp, Artificial Sequence
  MKO10069349_B_A430033K04Rik
  gRNA
cgatggtgagaagacgccag

SEQ ID NO: 69350 - DNA, 20 bp, Artificial Sequence
  MKO10069350_B_A430033K04Rik
  gRNA
acctgagttgatctccaagt

SEQ ID NO: 69351 - DNA, 20 bp, Artificial Sequence
  MKO10069351_B_A430033K04Rik
  gRNA
gccacagagcagtgcctacc

SEQ ID NO: 69352 - DNA, 20 bp, Artificial Sequence
  MKO10069352_B_A430078G23Rik
  gRNA
tgtccaccgtggaggcatca

SEQ ID NO: 69353 - DNA, 20 bp, Artificial Sequence
  MKO10069353_B_A430078G23Rik
  gRNA
ttccatacagctgatctcac

SEQ ID NO: 69354 - DNA, 20 bp, Artificial Sequence
  MKO10069354_B_A430078G23Rik
  gRNA
gtcctgtgagatcagctgta

SEQ ID NO: 69355 - DNA, 20 bp, Artificial Sequence
  MKO10069355_B_A430089I19Rik
  gRNA
acctgaagacctgactcatg

SEQ ID NO: 69356 - DNA, 20 bp, Artificial Sequence
  MKO10069356_B_A430089I19Rik
  gRNA
taggtgcttgatgacaccct

SEQ ID NO: 69357 - DNA, 20 bp, Artificial Sequence
  MKO10069357_B_A430089I19Rik
  gRNA
agttggctgtttgctgtaaa

SEQ ID NO: 69358 - DNA, 20 bp, Artificial Sequence
  MKO10069358_B_A430105I19Rik
  gRNA
tccaggtgaaaggggcgccc

SEQ ID NO: 69359 - DNA, 20 bp, Artificial Sequence
  MKO10069359_B_A430105I19Rik
  gRNA
agaaacccacgacccaagcg

SEQ ID NO: 69360 - DNA, 20 bp, Artificial Sequence
  MKO10069360_B_A430105I19Rik
  gRNA
gccagggcgcccctttcacc

SEQ ID NO: 69361 - DNA, 20 bp, Artificial Sequence
  MKO10069361_B_A430107P09Rik
  gRNA
tcagctgcagccagaagcac

SEQ ID NO: 69362 - DNA, 20 bp, Artificial Sequence
  MKO10069362_B_A430107P09Rik
  gRNA
gtaaccctactatgatccaa

SEQ ID NO: 69363 - DNA, 20 bp, Artificial Sequence
  MKO10069363_B_A430107P09Rik
  gRNA
tcaaatgctccattcaaaca

SEQ ID NO: 69364 - DNA, 20 bp, Artificial Sequence
  MKO10069364_B_A4galt
  gRNA
cgagcgcaagcatgagttct

SEQ ID NO: 69365 - DNA, 20 bp, Artificial Sequence
  MKO10069365_B_A4galt
  gRNA
aggcaccgttgaggacatag

SEQ ID NO: 69366 - DNA, 20 bp, Artificial Sequence
  MKO10069366_B_A4galt
  gRNA
caatcccgctatgtcctcaa

SEQ ID NO: 69367 - DNA, 20 bp, Artificial Sequence
  MKO10069367_B_A4gnt
  gRNA
tgatgcttcgtccactcctc

SEQ ID NO: 69368 - DNA, 20 bp, Artificial Sequence
  MKO10069368_B_A4gnt
  gRNA
gggctgcgtcggagctgacg

SEQ ID NO: 69369 - DNA, 20 bp, Artificial Sequence
  MKO10069369_B_A4gnt
  gRNA
cagctccgacgcagcccgcc

SEQ ID NO: 69370 - DNA, 20 bp, Artificial Sequence
  MKO10069370_B_A530016L24Rik
  gRNA
acccaccctaggatggtaac

SEQ ID NO: 69371 - DNA, 20 bp, Artificial Sequence
  MKO10069371_B_A530016L24Rik
  gRNA
ctgctgtgacacgtttggcc

SEQ ID NO: 69372 - DNA, 20 bp, Artificial Sequence
  MKO10069372_B_A530016L24Rik
  gRNA
tcagaactcacccttgatgg

SEQ ID NO: 69373 - DNA, 20 bp, Artificial Sequence
  MKO10069373_B_A530032D15Rik
  gRNA
atgtacagaagaagtttagc

SEQ ID NO: 69374 - DNA, 20 bp, Artificial Sequence
  MKO10069374_B_A530032D15Rik
  gRNA
aactaatgatgaacaagcag

SEQ ID NO: 69375 - DNA, 20 bp, Artificial Sequence
  MKO10069375_B_A530032D15Rik
  gRNA
tcacctcctccattgcattg

SEQ ID NO: 69376 - DNA, 20 bp, Artificial Sequence
  MKO10069376_B_A530054K11Rik
  gRNA
gctacatacttgactgttat

SEQ ID NO: 69377 - DNA, 20 bp, Artificial Sequence
  MKO10069377_B_A530054K11Rik
  gRNA
tccagacatgtgatcagatg

SEQ ID NO: 69378 - DNA, 20 bp, Artificial Sequence
  MKO10069378_B_A530054K11Rik
  gRNA
atcattactactaatacaca

SEQ ID NO: 69379 - DNA, 20 bp, Artificial Sequence
  MKO10069379_B_A530064D06Rik
  gRNA
cctagagtcatcatcataaa

SEQ ID NO: 69380 - DNA, 20 bp, Artificial Sequence
  MKO10069380_B_A530064D06Rik
  gRNA
cccagtgctgctgctgctcc

SEQ ID NO: 69381 - DNA, 20 bp, Artificial Sequence
  MKO10069381_B_A530064D06Rik
  gRNA
gccaggagcagcagcagcac

SEQ ID NO: 69382 - DNA, 20 bp, Artificial Sequence
  MKO10069382_B_A530099J19Rik
  gRNA
caatgtccgtttgagctcac

SEQ ID NO: 69383 - DNA, 20 bp, Artificial Sequence
  MKO10069383_B_A530099J19Rik
  gRNA
aatttctccacgatcaacca

SEQ ID NO: 69384 - DNA, 20 bp, Artificial Sequence
  MKO10069384_B_A530099J19Rik
  gRNA
gaatggagtataccctaaca

SEQ ID NO: 69385 - DNA, 20 bp, Artificial Sequence
  MKO10069385_B_A630001G21Rik
  gRNA
ctcgccccagaaatgcaaac

SEQ ID NO: 69386 - DNA, 20 bp, Artificial Sequence
  MKO10069386_B_A630001G21Rik
  gRNA
cgatgtccttcaagagtggt

SEQ ID NO: 69387 - DNA, 20 bp, Artificial Sequence
  MKO10069387_B_A630001G21Rik
  gRNA
gtgcacccaagttatgagca

SEQ ID NO: 69388 - DNA, 20 bp, Artificial Sequence
  MKO10069388_B_A630007B06Rik
  gRNA
gcatatgaacacaataaagc

SEQ ID NO: 69389 - DNA, 20 bp, Artificial Sequence
  MKO10069389_B_A630007B06Rik
  gRNA
gaagtatgtgagaggcgaga

SEQ ID NO: 69390 - DNA, 20 bp, Artificial Sequence
  MKO10069390_B_A630007B06Rik
  gRNA
ctcaagtcattaaagtaaag

SEQ ID NO: 69391 - DNA, 20 bp, Artificial Sequence
  MKO10069391_B_A630023A22Rik
  gRNA
agcagaaaaagtgccgaaca

SEQ ID NO: 69392 - DNA, 20 bp, Artificial Sequence
  MKO10069392_B_A630023A22Rik
  gRNA
tgatgtcataaagggcccca

SEQ ID NO: 69393 - DNA, 20 bp, Artificial Sequence
  MKO10069393_B_A630023A22Rik
  gRNA
actgcctgatctgaagacaa

SEQ ID NO: 69394 - DNA, 20 bp, Artificial Sequence
  MKO10069394_B_A630033H20Rik
  gRNA
gaatcttcagactatctctc

SEQ ID NO: 69395 - DNA, 20 bp, Artificial Sequence
  MKO10069395_B_A630033H20Rik
  gRNA
ccttacaatgcaaacatgac

SEQ ID NO: 69396 - DNA, 20 bp, Artificial Sequence
  MKO10069396_B_A630033H20Rik
  gRNA
agctgcagttaccatgccaa

SEQ ID NO: 69397 - DNA, 20 bp, Artificial Sequence
  MKO10069397_B_A630073D07Rik
  gRNA
ccagcaagactgcaatgagt

SEQ ID NO: 69398 - DNA, 20 bp, Artificial Sequence
  MKO10069398_B_A630073D07Rik
  gRNA
acatcttcaacagtcactac

SEQ ID NO: 69399 - DNA, 20 bp, Artificial Sequence
  MKO10069399_B_A630073D07Rik
  gRNA
gccacacctgcaggtgcagc

SEQ ID NO: 69400 - DNA, 20 bp, Artificial Sequence
  MKO10069400_B_A630076J17Rik
  gRNA
catattgtcctcatctggaa

SEQ ID NO: 69401 - DNA, 20 bp, Artificial Sequence
  MKO10069401_B_A630076J17Rik
  gRNA
gcaaaggaaatgacagctgc

SEQ ID NO: 69402 - DNA, 20 bp, Artificial Sequence
  MKO10069402_B_A630076J17Rik
  gRNA
acgcttccatcttcaactat

SEQ ID NO: 69403 - DNA, 20 bp, Artificial Sequence
  MKO10069403_B_A630095E13Rik
  gRNA
gtacctcttgttgctactct

SEQ ID NO: 69404 - DNA, 20 bp, Artificial Sequence
  MKO10069404_B_A630095E13Rik
  gRNA
cctgtgaagctacaaataat

SEQ ID NO: 69405 - DNA, 20 bp, Artificial Sequence
  MKO10069405_B_A630095E13Rik
  gRNA
aaggcttgttacacaaattt

SEQ ID NO: 69406 - DNA, 20 bp, Artificial Sequence
  MKO10069406_B_A630095N17Rik
  gRNA
tctggttaggagaatttcgt

SEQ ID NO: 69407 - DNA, 20 bp, Artificial Sequence
  MKO10069407_B_A630095N17Rik
  gRNA
ctcaggagtctacctgcagg

SEQ ID NO: 69408 - DNA, 20 bp, Artificial Sequence
  MKO10069408_B_A630095N17Rik
  gRNA
tgtcatcatttgtgaagttc

SEQ ID NO: 69409 - DNA, 20 bp, Artificial Sequence
  MKO10069409_B_A730008H23Rik
  gRNA
gttaacctacgagacgcccc

SEQ ID NO: 69410 - DNA, 20 bp, Artificial Sequence
  MKO10069410_B_A730008H23Rik
  gRNA
tttcttaagggttgagagtt

SEQ ID NO: 69411 - DNA, 20 bp, Artificial Sequence
  MKO10069411_B_A730008H23Rik
  gRNA
tttcagaacgcagagaagag

SEQ ID NO: 69412 - DNA, 20 bp, Artificial Sequence
  MKO10069412_B_A730017C20Rik
  gRNA
cattgctactcagcgaatca

SEQ ID NO: 69413 - DNA, 20 bp, Artificial Sequence
  MKO10069413_B_A730017C20Rik
  gRNA
ttcagcagagtgtcgaagcc

SEQ ID NO: 69414 - DNA, 20 bp, Artificial Sequence
  MKO10069414_B_A730017C20Rik
  gRNA
atgaagaacaacccgttgta

SEQ ID NO: 69415 - DNA, 20 bp, Artificial Sequence
  MKO10069415_B_A830010M20Rik
  gRNA
gatcagcagaaaattcaagt

SEQ ID NO: 69416 - DNA, 20 bp, Artificial Sequence
  MKO10069416_B_A830010M20Rik
  gRNA
acctgagagctggtgagcac

SEQ ID NO: 69417 - DNA, 20 bp, Artificial Sequence
  MKO10069417_B_A830010M20Rik
  gRNA
actcatgaacaagactctca

SEQ ID NO: 69418 - DNA, 20 bp, Artificial Sequence
  MKO10069418_B_A830018L16Rik
  gRNA
tcgtcaacaaacccgaatcc

SEQ ID NO: 69419 - DNA, 20 bp, Artificial Sequence
  MKO10069419_B_A830018L16Rik
  gRNA
aggtgtctcagttattaact

SEQ ID NO: 69420 - DNA, 20 bp, Artificial Sequence
  MKO10069420_B_A830018L16Rik
  gRNA
aaaatcccttctcgttcctt

SEQ ID NO: 69421 - DNA, 20 bp, Artificial Sequence
  MKO10069421_B_A830080D01Rik
  gRNA
taagctctcagagagcgagc

SEQ ID NO: 69422 - DNA, 20 bp, Artificial Sequence
  MKO10069422_B_A830080D01Rik
  gRNA
cgttcatttagagtaatatc

SEQ ID NO: 69423 - DNA, 20 bp, Artificial Sequence
  MKO10069423_B_A830080D01Rik
  gRNA
tcctgagcaaattcttcagt

SEQ ID NO: 69424 - DNA, 20 bp, Artificial Sequence
  MKO10069424_B_A930009A15Rik
  gRNA
atatatagtcggaaggccag

SEQ ID NO: 69425 - DNA, 20 bp, Artificial Sequence
  MKO10069425_B_A930009A15Rik
  gRNA
cctgtgatgtcctccaccac

SEQ ID NO: 69426 - DNA, 20 bp, Artificial Sequence
  MKO10069426_B_A930009A15Rik
  gRNA
gaataacagctgctcacaca

SEQ ID NO: 69427 - DNA, 20 bp, Artificial Sequence
  MKO10069427_B_A930018P22Rik
  gRNA
ctgaagatgagcaggcaacc

SEQ ID NO: 69428 - DNA, 20 bp, Artificial Sequence
  MKO10069428_B_A930018P22Rik
  gRNA
actttccgtcgctctacgac

SEQ ID NO: 69429 - DNA, 20 bp, Artificial Sequence
  MKO10069429_B_A930018P22Rik
  gRNA
ggcgtcccgcccgccttcag

SEQ ID NO: 69430 - DNA, 20 bp, Artificial Sequence
  MKO10069430_B_AA414768
  gRNA
catttgaatggtaccgtgtc

SEQ ID NO: 69431 - DNA, 20 bp, Artificial Sequence
  MKO10069431_B_AA414768
  gRNA
ctgctgacgaagcgaactgt

SEQ ID NO: 69432 - DNA, 20 bp, Artificial Sequence
  MKO10069432_B_AA414768
  gRNA
taacacatttcacggaatca

SEQ ID NO: 69433 - DNA, 20 bp, Artificial Sequence
  MKO10069433_B_AA415398
  gRNA
cctggtcagaataggaaatg

SEQ ID NO: 69434 - DNA, 20 bp, Artificial Sequence
  MKO10069434_B_AA415398
  gRNA
atacagacccaccacccatt

SEQ ID NO: 69435 - DNA, 20 bp, Artificial Sequence
  MKO10069435_B_AA415398
  gRNA
cctcatttcctattctgacc

SEQ ID NO: 69436 - DNA, 20 bp, Artificial Sequence
  MKO10069436_B_AA467197
  gRNA
ttgaggagctgcaaaaagtc

SEQ ID NO: 69437 - DNA, 20 bp, Artificial Sequence
  MKO10069437_B_AA467197
  gRNA
ggatcctactcaaccccaaa

SEQ ID NO: 69438 - DNA, 20 bp, Artificial Sequence
  MKO10069438_B_AA467197
  gRNA
ccttattcttcatcaatatc

SEQ ID NO: 69439 - DNA, 20 bp, Artificial Sequence
  MKO10069439_B_AA792892
  gRNA
cctctttaaattaaaacatc

SEQ ID NO: 69440 - DNA, 20 bp, Artificial Sequence
  MKO10069440_B_AA792892
  gRNA
aggttaggcttctttatcaa

SEQ ID NO: 69441 - DNA, 20 bp, Artificial Sequence
  MKO10069441_B_AA792892
  gRNA
cttcccagcactattcaaag

SEQ ID NO: 69442 - DNA, 20 bp, Artificial Sequence
  MKO10069442_B_AA986860
  gRNA
tgtcgccacagctgccgatg

SEQ ID NO: 69443 - DNA, 20 bp, Artificial Sequence
  MKO10069443_B_AA986860
  gRNA
ggctggctctgactcgtctg

SEQ ID NO: 69444 - DNA, 20 bp, Artificial Sequence
  MKO10069444_B_AA986860
  gRNA
tgcttcaggcgatgcccaag

SEQ ID NO: 69445 - DNA, 20 bp, Artificial Sequence
  MKO10069445_B_AA987161
  gRNA
tgacacacctgggagcatag

SEQ ID NO: 69446 - DNA, 20 bp, Artificial Sequence
  MKO10069446_B_AA987161
  gRNA
tacttcgtctaagccatatc

SEQ ID NO: 69447 - DNA, 20 bp, Artificial Sequence
  MKO10069447_B_AA987161
  gRNA
aatgccttgatcctgctcag

SEQ ID NO: 69448 - DNA, 20 bp, Artificial Sequence
  MKO10069448_B_AB124611
  gRNA
gcagagagcgtgaatcctgc

SEQ ID NO: 69449 - DNA, 20 bp, Artificial Sequence
  MKO10069449_B_AB124611
  gRNA
actcaccagatgcaaacagc

SEQ ID NO: 69450 - DNA, 20 bp, Artificial Sequence
  MKO10069450_B_AB124611
  gRNA
ccaaaaacttacagaagcag

SEQ ID NO: 69451 - DNA, 20 bp, Artificial Sequence
  MKO10069451_B_AF067061
  gRNA
gcctttctcacttcttcttc

SEQ ID NO: 69452 - DNA, 20 bp, Artificial Sequence
  MKO10069452_B_AF067061
  gRNA
cacactctcaaatacacaaa

SEQ ID NO: 69453 - DNA, 20 bp, Artificial Sequence
  MKO10069453_B_AF067061
  gRNA
aaccctccccaagcttgctc

SEQ ID NO: 69454 - DNA, 20 bp, Artificial Sequence
  MKO10069454_B_AF067063
  gRNA
ggtggctttctcacttcttc

SEQ ID NO: 69455 - DNA, 20 bp, Artificial Sequence
  MKO10069455_B_AF067063
  gRNA
ctggaacttgagacctgtga

SEQ ID NO: 69456 - DNA, 20 bp, Artificial Sequence
  MKO10069456_B_AF067063
  gRNA
caacaatccagtcatcctca

SEQ ID NO: 69457 - DNA, 20 bp, Artificial Sequence
  MKO10069457_B_AF251705
  gRNA
ttcggagcagcctctacttc

SEQ ID NO: 69458 - DNA, 20 bp, Artificial Sequence
  MKO10069458_B_AF251705
  gRNA
gaatcccccacatcctcagt

SEQ ID NO: 69459 - DNA, 20 bp, Artificial Sequence
  MKO10069459_B_AF251705
  gRNA
ttcctgttcctgagcatgct

SEQ ID NO: 69460 - DNA, 20 bp, Artificial Sequence
  MKO10069460_B_AF366264
  gRNA
ctcctgagaagtcttcttct

SEQ ID NO: 69461 - DNA, 20 bp, Artificial Sequence
  MKO10069461_B_AF366264
  gRNA
atctccaacccaggcagttt

SEQ ID NO: 69462 - DNA, 20 bp, Artificial Sequence
  MKO10069462_B_AF366264
  gRNA
cgaaaataccacgatgaaag

SEQ ID NO: 69463 - DNA, 20 bp, Artificial Sequence
  MKO10069463_B_AF529169
  gRNA
tcagccgcatgtctgtatac

SEQ ID NO: 69464 - DNA, 20 bp, Artificial Sequence
  MKO10069464_B_AF529169
  gRNA
agcagcgatcttgcaaacct

SEQ ID NO: 69465 - DNA, 20 bp, Artificial Sequence
  MKO10069465_B_AF529169
  gRNA
caggacttcatcgtgcagat

SEQ ID NO: 69466 - DNA, 20 bp, Artificial Sequence
  MKO10069466_B_AI118078
  gRNA
gatcaccaccaatattacac

SEQ ID NO: 69467 - DNA, 20 bp, Artificial Sequence
  MKO10069467_B_AI118078
  gRNA
gaagagagcagccgtatggc

SEQ ID NO: 69468 - DNA, 20 bp, Artificial Sequence
  MKO10069468_B_AI118078
  gRNA
tgtcattcactggatcagtc

SEQ ID NO: 69469 - DNA, 20 bp, Artificial Sequence
  MKO10069469_B_AI182371
  gRNA
gtgtatactccacaacagcc

SEQ ID NO: 69470 - DNA, 20 bp, Artificial Sequence
  MKO10069470_B_AI182371
  gRNA
tgtgaatgatgacttagagc

SEQ ID NO: 69471 - DNA, 20 bp, Artificial Sequence
  MKO10069471_B_AI182371
  gRNA
aatctcgaagtcaggaaaag

SEQ ID NO: 69472 - DNA, 20 bp, Artificial Sequence
  MKO10069472_B_AI314180
  gRNA
tccatggcagtaagaagcgt

SEQ ID NO: 69473 - DNA, 20 bp, Artificial Sequence
  MKO10069473_B_AI314180
  gRNA
ctcacccgtaaggcatcaga

SEQ ID NO: 69474 - DNA, 20 bp, Artificial Sequence
  MKO10069474_B_AI314180
  gRNA
gatgtccttctgatgcctta

SEQ ID NO: 69475 - DNA, 20 bp, Artificial Sequence
  MKO10069475_B_AI317395
  gRNA
tgaagaattccgatcaccgc

SEQ ID NO: 69476 - DNA, 20 bp, Artificial Sequence
  MKO10069476_B_AI317395
  gRNA
tcctcacagtctagaactag

SEQ ID NO: 69477 - DNA, 20 bp, Artificial Sequence
  MKO10069477_B_AI317395
  gRNA
tccgttggtgttgtggatac

SEQ ID NO: 69478 - DNA, 20 bp, Artificial Sequence
  MKO10069478_B_AI413582
  gRNA
tgaccctgcagaagaactcc

SEQ ID NO: 69479 - DNA, 20 bp, Artificial Sequence
  MKO10069479_B_AI413582
  gRNA
gcaggagctgctctctgatg

SEQ ID NO: 69480 - DNA, 20 bp, Artificial Sequence
  MKO10069480_B_AI413582
  gRNA
tgtatgtgcagaagaaaaag

SEQ ID NO: 69481 - DNA, 20 bp, Artificial Sequence
  MKO10069481_B_AI429214
  gRNA
tgggcgggcatattcaaagc

SEQ ID NO: 69482 - DNA, 20 bp, Artificial Sequence
  MKO10069482_B_AI429214
  gRNA
tgaatatgcccgcccaaagc

SEQ ID NO: 69483 - DNA, 20 bp, Artificial Sequence
  MKO10069483_B_AI429214
  gRNA
agttcttctgcggattcctt

SEQ ID NO: 69484 - DNA, 20 bp, Artificial Sequence
  MKO10069484_B_AI462493
  gRNA
tgctttacgagccacctcca

SEQ ID NO: 69485 - DNA, 20 bp, Artificial Sequence
  MKO10069485_B_AI462493
  gRNA
cacgttctccttcgtggctg

SEQ ID NO: 69486 - DNA, 20 bp, Artificial Sequence
  MKO10069486_B_AI462493
  gRNA
actggtgatggctaccctga

SEQ ID NO: 69487 - DNA, 20 bp, Artificial Sequence
  MKO10069487_B_AI464131
  gRNA
gctcagctaccgcgtgtgcg

SEQ ID NO: 69488 - DNA, 20 bp, Artificial Sequence
  MKO10069488_B_AI464131
  gRNA
ctcggtatggggctacgacc

SEQ ID NO: 69489 - DNA, 20 bp, Artificial Sequence
  MKO10069489_B_AI464131
  gRNA
gacctcctttaagttcgacg

SEQ ID NO: 69490 - DNA, 20 bp, Artificial Sequence
  MKO10069490_B_AI467606
  gRNA
catcataactactgctgtac

SEQ ID NO: 69491 - DNA, 20 bp, Artificial Sequence
  MKO10069491_B_AI467606
  gRNA
tggggtctggttgcgggcgg

SEQ ID NO: 69492 - DNA, 20 bp, Artificial Sequence
  MKO10069492_B_AI467606
  gRNA
gtgtgggtagtaatcccctg

SEQ ID NO: 69493 - DNA, 20 bp, Artificial Sequence
  MKO10069493_B_AI593442
  gRNA
tttgcttcccacaacgccag

SEQ ID NO: 69494 - DNA, 20 bp, Artificial Sequence
  MKO10069494_B_AI593442
  gRNA
ctcgccaggtgtgtccaagc

SEQ ID NO: 69495 - DNA, 20 bp, Artificial Sequence
  MKO10069495_B_AI593442
  gRNA
ggagcttgaacacctgcccg

SEQ ID NO: 69496 - DNA, 20 bp, Artificial Sequence
  MKO10069496_B_AI597468
  gRNA
cttagtgatgaacccccaga

SEQ ID NO: 69497 - DNA, 20 bp, Artificial Sequence
  MKO10069497_B_AI597468
  gRNA
ccaccattggtggtgtggct

SEQ ID NO: 69498 - DNA, 20 bp, Artificial Sequence
  MKO10069498_B_AI597468
  gRNA
atgttgtctcgtgtgactgg

SEQ ID NO: 69499 - DNA, 20 bp, Artificial Sequence
  MKO10069499_B_AI597479
  gRNA
atccctctgaggcaacggta

SEQ ID NO: 69500 - DNA, 20 bp, Artificial Sequence
  MKO10069500_B_AI597479
  gRNA
aatcaccaaattcctcgtcg

SEQ ID NO: 69501 - DNA, 20 bp, Artificial Sequence
  MKO10069501_B_AI597479
  gRNA
gacaaccatggcgggggatg

SEQ ID NO: 69502 - DNA, 20 bp, Artificial Sequence
  MKO10069502_B_AI607873
  gRNA
ttgtctccagactcctctta

SEQ ID NO: 69503 - DNA, 20 bp, Artificial Sequence
  MKO10069503_B_AI607873
  gRNA
tggagagtacttagtaatta

SEQ ID NO: 69504 - DNA, 20 bp, Artificial Sequence
  MKO10069504_B_AI607873
  gRNA
tgtgaacgttaacccaacaa

SEQ ID NO: 69505 - DNA, 20 bp, Artificial Sequence
  MKO10069505_B_AI661453
  gRNA
tctcacggtgaatgtattga

SEQ ID NO: 69506 - DNA, 20 bp, Artificial Sequence
  MKO10069506_B_AI661453
  gRNA
ccatagtgggtgttgccgtg

SEQ ID NO: 69507 - DNA, 20 bp, Artificial Sequence
  MKO10069507_B_AI661453
  gRNA
gttcaacactgtgagcgaat

SEQ ID NO: 69508 - DNA, 20 bp, Artificial Sequence
  MKO10069508_B_AI747448
  gRNA
atgtcttacaggaaaactgt

SEQ ID NO: 69509 - DNA, 20 bp, Artificial Sequence
  MKO10069509_B_AI747448
  gRNA
caagttgaatatggagattc

SEQ ID NO: 69510 - DNA, 20 bp, Artificial Sequence
  MKO10069510_B_AI747448
  gRNA
aaaacagttcccagtacaga

SEQ ID NO: 69511 - DNA, 20 bp, Artificial Sequence
  MKO10069511_B_AI836003
  gRNA
tatgaccactgcgccccgcc

SEQ ID NO: 69512 - DNA, 20 bp, Artificial Sequence
  MKO10069512_B_AI836003
  gRNA
aagccgctgtcctcgatccc

SEQ ID NO: 69513 - DNA, 20 bp, Artificial Sequence
  MKO10069513_B_AI836003
  gRNA
gaaccagagacaccttcgcc

SEQ ID NO: 69514 - DNA, 20 bp, Artificial Sequence
  MKO10069514_B_AI837181
  gRNA
cgcccaccctctttggcccg

SEQ ID NO: 69515 - DNA, 20 bp, Artificial Sequence
  MKO10069515_B_AI837181
  gRNA
gttggcgcggaacggagtga

SEQ ID NO: 69516 - DNA, 20 bp, Artificial Sequence
  MKO10069516_B_AI837181
  gRNA
tggtgtgatgggtcgcccac

SEQ ID NO: 69517 - DNA, 20 bp, Artificial Sequence
  MKO10069517_B_AI846148
  gRNA
ggttgtcctcggaatccaag

SEQ ID NO: 69518 - DNA, 20 bp, Artificial Sequence
  MKO10069518_B_AI846148
  gRNA
aaaatcttggaccctgaccc

SEQ ID NO: 69519 - DNA, 20 bp, Artificial Sequence
  MKO10069519_B_AI846148
  gRNA
tccgggttggagatggggtc

SEQ ID NO: 69520 - DNA, 20 bp, Artificial Sequence
  MKO10069520_B_AI848285
  gRNA
attacgacgtgatgggccag

SEQ ID NO: 69521 - DNA, 20 bp, Artificial Sequence
  MKO10069521_B_AI848285
  gRNA
acgcctcaataatgcgcctc

SEQ ID NO: 69522 - DNA, 20 bp, Artificial Sequence
  MKO10069522_B_AI848285
  gRNA
accccagaggcgcattattg

SEQ ID NO: 69523 - DNA, 20 bp, Artificial Sequence
  MKO10069523_B_AI987944
  gRNA
cttcttcagtgaagtttaca

SEQ ID NO: 69524 - DNA, 20 bp, Artificial Sequence
  MKO10069524_B_AI987944
  gRNA
tttcaacattctagaagaca

SEQ ID NO: 69525 - DNA, 20 bp, Artificial Sequence
  MKO10069525_B_AI987944
  gRNA
taaacttcactgaagaagag

SEQ ID NO: 69526 - DNA, 20 bp, Artificial Sequence
  MKO10069526_B_AK010878
  gRNA
gcagaagatgaaaataactc

SEQ ID NO: 69527 - DNA, 20 bp, Artificial Sequence
  MKO10069527_B_AK010878
  gRNA
cgcgtctcccgacgcctcac

SEQ ID NO: 69528 - DNA, 20 bp, Artificial Sequence
  MKO10069528_B_AK010878
  gRNA
gatccggacgacgctttgga

SEQ ID NO: 69529 - DNA, 20 bp, Artificial Sequence
  MKO10069529_B_AK129341
  gRNA
aaatgtgttccagcttaaac

SEQ ID NO: 69530 - DNA, 20 bp, Artificial Sequence
  MKO10069530_B_AK129341
  gRNA
tttgttgctgtagtagcatc

SEQ ID NO: 69531 - DNA, 20 bp, Artificial Sequence
  MKO10069531_B_AK129341
  gRNA
tccagttcctccattagaag

SEQ ID NO: 69532 - DNA, 20 bp, Artificial Sequence
  MKO10069532_B_AU015228
  gRNA
aaagccgtcgtccgactcac

SEQ ID NO: 69533 - DNA, 20 bp, Artificial Sequence
  MKO10069533_B_AU015228
  gRNA
tcttcagaactgtacgcccc

SEQ ID NO: 69534 - DNA, 20 bp, Artificial Sequence
  MKO10069534_B_AU015228
  gRNA
gcagcagaaagttcctatcg

SEQ ID NO: 69535 - DNA, 20 bp, Artificial Sequence
  MKO10069535_B_AU018091
  gRNA
cagactgttcgtttgccgcc

SEQ ID NO: 69536 - DNA, 20 bp, Artificial Sequence
  MKO10069536_B_AU018091
  gRNA
tcccgcaggaatcctcgccc

SEQ ID NO: 69537 - DNA, 20 bp, Artificial Sequence
  MKO10069537_B_AU018091
  gRNA
aatacagtcgaacccaatga

SEQ ID NO: 69538 - DNA, 20 bp, Artificial Sequence
  MKO10069538_B_AU018829
  gRNA
ccacaggaggccaaaacttc

SEQ ID NO: 69539 - DNA, 20 bp, Artificial Sequence
  MKO10069539_B_AU018829
  gRNA
tatccatgtttactgcaaac

SEQ ID NO: 69540 - DNA, 20 bp, Artificial Sequence
  MKO10069540_B_AU018829
  gRNA
cctaatttcacagacagact

SEQ ID NO: 69541 - DNA, 20 bp, Artificial Sequence
  MKO10069541_B_AU019823
  gRNA
ctgaagagtttgaaacagac

SEQ ID NO: 69542 - DNA, 20 bp, Artificial Sequence
  MKO10069542_B_AU019823
  gRNA
catacttcaccttgagctgc

SEQ ID NO: 69543 - DNA, 20 bp, Artificial Sequence
  MKO10069543_B_AU019823
  gRNA
acttacagatggggtcacag

SEQ ID NO: 69544 - DNA, 20 bp, Artificial Sequence
  MKO10069544_B_AU021092
  gRNA
gtgtgcctggtgcaactact

SEQ ID NO: 69545 - DNA, 20 bp, Artificial Sequence
  MKO10069545_B_AU021092
  gRNA
ggtggggtaagcgtatccaa

SEQ ID NO: 69546 - DNA, 20 bp, Artificial Sequence
  MKO10069546_B_AU021092
  gRNA
gtggttcagttccatcatat

SEQ ID NO: 69547 - DNA, 20 bp, Artificial Sequence
  MKO10069547_B_AU022252
  gRNA
catgtcatgttgcagcttgt

SEQ ID NO: 69548 - DNA, 20 bp, Artificial Sequence
  MKO10069548_B_AU022252
  gRNA
actgctggccgctttcccgc

SEQ ID NO: 69549 - DNA, 20 bp, Artificial Sequence
  MKO10069549_B_AU022252
  gRNA
tcaccatattacaagccgca

SEQ ID NO: 69550 - DNA, 20 bp, Artificial Sequence
  MKO10069550_B_AU022751
  gRNA
ccggagcctcgaagccgaaa

SEQ ID NO: 69551 - DNA, 20 bp, Artificial Sequence
  MKO10069551_B_AU022751
  gRNA
cgttccggagttgtaccttt

SEQ ID NO: 69552 - DNA, 20 bp, Artificial Sequence
  MKO10069552_B_AU022751
  gRNA
ctcgcttgcggccggctgct

SEQ ID NO: 69553 - DNA, 20 bp, Artificial Sequence
  MKO10069553_B_AU040320
  gRNA
gaaggaaccggcaactgtaa

SEQ ID NO: 69554 - DNA, 20 bp, Artificial Sequence
  MKO10069554_B_AU040320
  gRNA
tcaagccaagtcccgcttcc

SEQ ID NO: 69555 - DNA, 20 bp, Artificial Sequence
  MKO10069555_B_AU040320
  gRNA
aaaacccaggaagcgggact

SEQ ID NO: 69556 - DNA, 20 bp, Artificial Sequence
  MKO10069556_B_AU041133
  gRNA
cgaggtccgaatccgcgcca

SEQ ID NO: 69557 - DNA, 20 bp, Artificial Sequence
  MKO10069557_B_AU041133
  gRNA
gagagtgttcctcactattc

SEQ ID NO: 69558 - DNA, 20 bp, Artificial Sequence
  MKO10069558_B_AU041133
  gRNA
tctcagcgctctagaagata

SEQ ID NO: 69559 - DNA, 20 bp, Artificial Sequence
  MKO10069559_B_AV320801
  gRNA
atgtccactatcaattccat

SEQ ID NO: 69560 - DNA, 20 bp, Artificial Sequence
  MKO10069560_B_AV320801
  gRNA
aatgccacctcccatagcaa

SEQ ID NO: 69561 - DNA, 20 bp, Artificial Sequence
  MKO10069561_B_AV320801
  gRNA
cagagtactatctgctgatt

SEQ ID NO: 69562 - DNA, 20 bp, Artificial Sequence
  MKO10069562_B_AW146154
  gRNA
gaaaatattcttcaatatta

SEQ ID NO: 69563 - DNA, 20 bp, Artificial Sequence
  MKO10069563_B_AW146154
  gRNA
tacagaaacctcactgctat

SEQ ID NO: 69564 - DNA, 20 bp, Artificial Sequence
  MKO10069564_B_AW146154
  gRNA
gatgtgcatgtaaacttcac

SEQ ID NO: 69565 - DNA, 20 bp, Artificial Sequence
  MKO10069565_B_AW209491
  gRNA
ctgaagcgctgcataacatc

SEQ ID NO: 69566 - DNA, 20 bp, Artificial Sequence
  MKO10069566_B_AW209491
  gRNA
ctgcaccggttgctgtcgac

SEQ ID NO: 69567 - DNA, 20 bp, Artificial Sequence
  MKO10069567_B_AW209491
  gRNA
tgagcgtgccttgagactag

SEQ ID NO: 69568 - DNA, 20 bp, Artificial Sequence
  MKO10069568_B_AW549877
  gRNA
tgccctgtccagttaaatga

SEQ ID NO: 69569 - DNA, 20 bp, Artificial Sequence
  MKO10069569_B_AW549877
  gRNA
acagctaaattgctgagtac

SEQ ID NO: 69570 - DNA, 20 bp, Artificial Sequence
  MKO10069570_B_AW549877
  gRNA
ttcaaatccatccaatcttt

SEQ ID NO: 69571 - DNA, 20 bp, Artificial Sequence
  MKO10069571_B_AW551984
  gRNA
gtgtagggcaattcctccaa

SEQ ID NO: 69572 - DNA, 20 bp, Artificial Sequence
  MKO10069572_B_AW551984
  gRNA
tcaccggagagatggtatct

SEQ ID NO: 69573 - DNA, 20 bp, Artificial Sequence
  MKO10069573_B_AW551984
  gRNA
ttgaatcccattgagtacac

SEQ ID NO: 69574 - DNA, 20 bp, Artificial Sequence
  MKO10069574_B_AW554918
  gRNA
tgccaacttaattaaagaac

SEQ ID NO: 69575 - DNA, 20 bp, Artificial Sequence
  MKO10069575_B_AW554918
  gRNA
ggagcggctgaaaactgagc

SEQ ID NO: 69576 - DNA, 20 bp, Artificial Sequence
  MKO10069576_B_AW554918
  gRNA
gactgatgcttccgtctcca

SEQ ID NO: 69577 - DNA, 20 bp, Artificial Sequence
  MKO10069577_B_AY074887
  gRNA
gcgggctcagtctgcccacg

SEQ ID NO: 69578 - DNA, 20 bp, Artificial Sequence
  MKO10069578_B_AY074887
  gRNA
cgcggaagttctcccagtgc

SEQ ID NO: 69579 - DNA, 20 bp, Artificial Sequence
  MKO10069579_B_AY074887
  gRNA
acagaccgcagccaaagccg

SEQ ID NO: 69580 - DNA, 20 bp, Artificial Sequence
  MKO10069580_B_AY358078
  gRNA
aagatatgaaactttatatc

SEQ ID NO: 69581 - DNA, 20 bp, Artificial Sequence
  MKO10069581_B_AY358078
  gRNA
ctcatcttgtgatttaatga

SEQ ID NO: 69582 - DNA, 20 bp, Artificial Sequence
  MKO10069582_B_AY358078
  gRNA
acaagatgagaagacaatgt

SEQ ID NO: 69583 - DNA, 20 bp, Artificial Sequence
  MKO10069583_B_AY761184
  gRNA
cctctctgcccttgccctgc

SEQ ID NO: 69584 - DNA, 20 bp, Artificial Sequence
  MKO10069584_B_AY761184
  gRNA
agagccttctgtgcctccaa

SEQ ID NO: 69585 - DNA, 20 bp, Artificial Sequence
  MKO10069585_B_AY761184
  gRNA
acagcctggtcctcttcctc

SEQ ID NO: 69586 - DNA, 20 bp, Artificial Sequence
  MKO10069586_B_AY761185
  gRNA
tgtgggcactttgagcacac

SEQ ID NO: 69587 - DNA, 20 bp, Artificial Sequence
  MKO10069587_B_AY761185
  gRNA
agaatcagcctggacataga

SEQ ID NO: 69588 - DNA, 20 bp, Artificial Sequence
  MKO10069588_B_AY761185
  gRNA
actaaaactgatgatcagcc

SEQ ID NO: 69589 - DNA, 20 bp, Artificial Sequence
  MKO10069589_B_Aaas
  gRNA
aggcgcggccacagagagcc

SEQ ID NO: 69590 - DNA, 20 bp, Artificial Sequence
  MKO10069590_B_Aaas
  gRNA
aatttgcccaagtaactaac

SEQ ID NO: 69591 - DNA, 20 bp, Artificial Sequence
  MKO10069591_B_Aaas
  gRNA
tccttggtcaggtgtaggac

SEQ ID NO: 69592 - DNA, 20 bp, Artificial Sequence
  MKO10069592_B_Aacs
  gRNA
cccaaaagtccatatacgac

SEQ ID NO: 69593 - DNA, 20 bp, Artificial Sequence
  MKO10069593_B_Aacs
  gRNA
catttggagttctacctcgc

SEQ ID NO: 69594 - DNA, 20 bp, Artificial Sequence
  MKO10069594_B_Aacs
  gRNA
actccaaatggccccaatac

SEQ ID NO: 69595 - DNA, 20 bp, Artificial Sequence
  MKO10069595_B_Aadacl2
  gRNA
aaatagatcacagctcgtct

SEQ ID NO: 69596 - DNA, 20 bp, Artificial Sequence
  MKO10069596_B_Aadacl2
  gRNA
tatctccatgataatcaatc

SEQ ID NO: 69597 - DNA, 20 bp, Artificial Sequence
  MKO10069597_B_Aadacl2
  gRNA
tgtttgcagtccatctattc

SEQ ID NO: 69598 - DNA, 20 bp, Artificial Sequence
  MKO10069598_B_Aadacl3
  gRNA
tagaggcatcatggtggttc

SEQ ID NO: 69599 - DNA, 20 bp, Artificial Sequence
  MKO10069599_B_Aadacl3
  gRNA
gactctgttgtcgtttcagt

SEQ ID NO: 69600 - DNA, 20 bp, Artificial Sequence
  MKO10069600_B_Aadacl3
  gRNA
cttactcaagctccctatga

SEQ ID NO: 69601 - DNA, 20 bp, Artificial Sequence
  MKO10069601_B_Aadac
  gRNA
cctaggagagtcggtgtgtc

SEQ ID NO: 69602 - DNA, 20 bp, Artificial Sequence
  MKO10069602_B_Aadac
  gRNA
gagctggctcaaaagtatcc

SEQ ID NO: 69603 - DNA, 20 bp, Artificial Sequence
  MKO10069603_B_Aadac
  gRNA
cctatgacactctatcgaga

SEQ ID NO: 69604 - DNA, 20 bp, Artificial Sequence
  MKO10069604_B_Aadat
  gRNA
atggatctctgcatcacatc

SEQ ID NO: 69605 - DNA, 20 bp, Artificial Sequence
  MKO10069605_B_Aadat
  gRNA
tttgaaatgctcatcaatcc

SEQ ID NO: 69606 - DNA, 20 bp, Artificial Sequence
  MKO10069606_B_Aadat
  gRNA
ctccaatactctccaagcta

SEQ ID NO: 69607 - DNA, 20 bp, Artificial Sequence
  MKO10069607_B_Aaed1
  gRNA
atcatcataccatcatattg

SEQ ID NO: 69608 - DNA, 20 bp, Artificial Sequence
  MKO10069608_B_Aaed1
  gRNA
tctgaaggcttcccgagagc

SEQ ID NO: 69609 - DNA, 20 bp, Artificial Sequence
  MKO10069609_B_Aaed1
  gRNA
tagcctttctgcaaactgac

SEQ ID NO: 69610 - DNA, 20 bp, Artificial Sequence
  MKO10069610_B_Aagab
  gRNA
tttaggaataaaccgacaac

SEQ ID NO: 69611 - DNA, 20 bp, Artificial Sequence
  MKO10069611_B_Aagab
  gRNA
accactcttcatcacgacat

SEQ ID NO: 69612 - DNA, 20 bp, Artificial Sequence
  MKO10069612_B_Aagab
  gRNA
cgctttacacctgtagattc

SEQ ID NO: 69613 - DNA, 20 bp, Artificial Sequence
  MKO10069613_B_Aak1
  gRNA
gttgacaaacatacgtttca

SEQ ID NO: 69614 - DNA, 20 bp, Artificial Sequence
  MKO10069614_B_Aak1
  gRNA
tgttcacagagagacctatc

SEQ ID NO: 69615 - DNA, 20 bp, Artificial Sequence
  MKO10069615_B_Aak1
  gRNA
atgaaccagcgtctccagac

SEQ ID NO: 69616 - DNA, 20 bp, Artificial Sequence
  MKO10069616_B_Aamdc
  gRNA
caaggcattatactccttca

SEQ ID NO: 69617 - DNA, 20 bp, Artificial Sequence
  MKO10069617_B_Aamdc
  gRNA
ggggtacagactcttgtgat

SEQ ID NO: 69618 - DNA, 20 bp, Artificial Sequence
  MKO10069618_B_Aamdc
  gRNA
tcccaagcccgactgcctcc

SEQ ID NO: 69619 - DNA, 20 bp, Artificial Sequence
  MKO10069619_B_Aamp
  gRNA
atcaccgagcctccacacga

SEQ ID NO: 69620 - DNA, 20 bp, Artificial Sequence
  MKO10069620_B_Aamp
  gRNA
aagacgacaaggccttcgtg

SEQ ID NO: 69621 - DNA, 20 bp, Artificial Sequence
  MKO10069621_B_Aamp
  gRNA
cagtcacgattccaccctag

SEQ ID NO: 69622 - DNA, 20 bp, Artificial Sequence
  MKO10069622_B_Aanat
  gRNA
ccagtgcgtttgagattgag

SEQ ID NO: 69623 - DNA, 20 bp, Artificial Sequence
  MKO10069623_B_Aanat
  gRNA
ccctctacttggatgagatc

SEQ ID NO: 69624 - DNA, 20 bp, Artificial Sequence
  MKO10069624_B_Aanat
  gRNA
ccttcatcattggctcgctg

SEQ ID NO: 69625 - DNA, 20 bp, Artificial Sequence
  MKO10069625_B_Aar2
  gRNA
acctgactaagaagttccgc

SEQ ID NO: 69626 - DNA, 20 bp, Artificial Sequence
  MKO10069626_B_Aar2
  gRNA
tagcccggctgcccgagatg

SEQ ID NO: 69627 - DNA, 20 bp, Artificial Sequence
  MKO10069627_B_Aar2
  gRNA
agtactcacctgtaaggtac

SEQ ID NO: 69628 - DNA, 20 bp, Artificial Sequence
  MKO10069628_B_Aard
  gRNA
ccactatgcgcttccacact

SEQ ID NO: 69629 - DNA, 20 bp, Artificial Sequence
  MKO10069629_B_Aard
  gRNA
gcgtgccgccgcccgctgaa

SEQ ID NO: 69630 - DNA, 20 bp, Artificial Sequence
  MKO10069630_B_Aard
  gRNA
cacttcgatgccgatgcgcc

SEQ ID NO: 69631 - DNA, 20 bp, Artificial Sequence
  MKO10069631_B_Aars2
  gRNA
tggtcttcatgcaacactac

SEQ ID NO: 69632 - DNA, 20 bp, Artificial Sequence
  MKO10069632_B_Aars2
  gRNA
gatcacgccccacatcctcc

SEQ ID NO: 69633 - DNA, 20 bp, Artificial Sequence
  MKO10069633_B_Aars2
  gRNA
tccgaaggagagcacacggc

SEQ ID NO: 69634 - DNA, 20 bp, Artificial Sequence
  MKO10069634_B_Aarsd1
  gRNA
taatacctgtcccccgccct

SEQ ID NO: 69635 - DNA, 20 bp, Artificial Sequence
  MKO10069635_B_Aarsd1
  gRNA
ttgtcttcagcccgaagaga

SEQ ID NO: 69636 - DNA, 20 bp, Artificial Sequence
  MKO10069636_B_Aarsd1
  gRNA
tccgggtggactgggagcgg

SEQ ID NO: 69637 - DNA, 20 bp, Artificial Sequence
  MKO10069637_B_Aars
  gRNA
ttctgaatggcttcgaagta

SEQ ID NO: 69638 - DNA, 20 bp, Artificial Sequence
  MKO10069638_B_Aars
  gRNA
ctgtcattcagggagtcgga

SEQ ID NO: 69639 - DNA, 20 bp, Artificial Sequence
  MKO10069639_B_Aars
  gRNA
cgttgtgcttgcccccagct

SEQ ID NO: 69640 - DNA, 20 bp, Artificial Sequence
  MKO10069640_B_Aasdhppt
  gRNA
aaatcccaatccaactccaa

SEQ ID NO: 69641 - DNA, 20 bp, Artificial Sequence
  MKO10069641_B_Aasdhppt
  gRNA
ttcatgatatgaaagaattc

SEQ ID NO: 69642 - DNA, 20 bp, Artificial Sequence
  MKO10069642_B_Aasdhppt
  gRNA
taacagccactgcaacaaaa

SEQ ID NO: 69643 - DNA, 20 bp, Artificial Sequence
  MKO10069643_B_Aasdh
  gRNA
cgctgaccatcctcaaaagc

SEQ ID NO: 69644 - DNA, 20 bp, Artificial Sequence
  MKO10069644_B_Aasdh
  gRNA
cagaagttggcacgataagc

SEQ ID NO: 69645 - DNA, 20 bp, Artificial Sequence
  MKO10069645_B_Aasdh
  gRNA
acaggacctaccggaagtgc

SEQ ID NO: 69646 - DNA, 20 bp, Artificial Sequence
  MKO10069646_B_Aass
  gRNA
cccttaacgtttgtcttcac

SEQ ID NO: 69647 - DNA, 20 bp, Artificial Sequence
  MKO10069647_B_Aass
  gRNA
tgcgtccccaggagtatgtc

SEQ ID NO: 69648 - DNA, 20 bp, Artificial Sequence
  MKO10069648_B_Aass
  gRNA
ccctgtgaagacaaacgtta

SEQ ID NO: 69649 - DNA, 20 bp, Artificial Sequence
  MKO10069649_B_Aatf
  gRNA
gatgttgacgaagacttaga

SEQ ID NO: 69650 - DNA, 20 bp, Artificial Sequence
  MKO10069650_B_Aatf
  gRNA
atctggttgaggcaactgat

SEQ ID NO: 69651 - DNA, 20 bp, Artificial Sequence
  MKO10069651_B_Aatf
  gRNA
agcattgtgggaccagctct

SEQ ID NO: 69652 - DNA, 20 bp, Artificial Sequence
  MKO10069652_B_Aatk
  gRNA
tgccgcccttcttacaacac

SEQ ID NO: 69653 - DNA, 20 bp, Artificial Sequence
  MKO10069653_B_Aatk
  gRNA
gaggtacactcgggcgtcag

SEQ ID NO: 69654 - DNA, 20 bp, Artificial Sequence
  MKO10069654_B_Aatk
  gRNA
agattggccacggctggttt

SEQ ID NO: 69655 - DNA, 20 bp, Artificial Sequence
  MKO10069655_B_Abat
  gRNA
ggttggctcaccttagatct

SEQ ID NO: 69656 - DNA, 20 bp, Artificial Sequence
  MKO10069656_B_Abat
  gRNA
agcggcttggctgatatatc

SEQ ID NO: 69657 - DNA, 20 bp, Artificial Sequence
  MKO10069657_B_Abat
  gRNA
gaaacagctgaacacaatcc

SEQ ID NO: 69658 - DNA, 20 bp, Artificial Sequence
  MKO10069658_B_Abca12
  gRNA
caattgcttacacgcatcct

SEQ ID NO: 69659 - DNA, 20 bp, Artificial Sequence
  MKO10069659_B_Abca12
  gRNA
gttccttccaaatcatagct

SEQ ID NO: 69660 - DNA, 20 bp, Artificial Sequence
  MKO10069660_B_Abca12
  gRNA
gataaattgctgtccctctt

SEQ ID NO: 69661 - DNA, 20 bp, Artificial Sequence
  MKO10069661_B_Abca13
  gRNA
acggccagaagaactcagcc

SEQ ID NO: 69662 - DNA, 20 bp, Artificial Sequence
  MKO10069662_B_Abca13
  gRNA
gtactgtcagaatcatgaac

SEQ ID NO: 69663 - DNA, 20 bp, Artificial Sequence
  MKO10069663_B_Abca13
  gRNA
tttaaacgagattcaggatc

SEQ ID NO: 69664 - DNA, 20 bp, Artificial Sequence
  MKO10069664_B_Abca14
  gRNA
gtaaaatatagtttgcgctt

SEQ ID NO: 69665 - DNA, 20 bp, Artificial Sequence
  MKO10069665_B_Abca14
  gRNA
cggaacttcttggaaaacga

SEQ ID NO: 69666 - DNA, 20 bp, Artificial Sequence
  MKO10069666_B_Abca14
  gRNA
catagttgggaccattatgc

SEQ ID NO: 69667 - DNA, 20 bp, Artificial Sequence
  MKO10069667_B_Abca15
  gRNA
ctttcattctttgcgtcttg

SEQ ID NO: 69668 - DNA, 20 bp, Artificial Sequence
  MKO10069668_B_Abca15
  gRNA
ggcacataagccaactccca

SEQ ID NO: 69669 - DNA, 20 bp, Artificial Sequence
  MKO10069669_B_Abca15
  gRNA
ttatgtgccttccaacatca

SEQ ID NO: 69670 - DNA, 20 bp, Artificial Sequence
  MKO10069670_B_Abca16
  gRNA
acaggagtaccagctcataa

SEQ ID NO: 69671 - DNA, 20 bp, Artificial Sequence
  MKO10069671_B_Abca16
  gRNA
aaatcgacactgtgatacag

SEQ ID NO: 69672 - DNA, 20 bp, Artificial Sequence
  MKO10069672_B_Abca16
  gRNA
gcgatccattgtgtttgaaa

SEQ ID NO: 69673 - DNA, 20 bp, Artificial Sequence
  MKO10069673_B_Abca17
  gRNA
ccgcataatcgctttgtcta

SEQ ID NO: 69674 - DNA, 20 bp, Artificial Sequence
  MKO10069674_B_Abca17
  gRNA
gaagtcatctaccaactacc

SEQ ID NO: 69675 - DNA, 20 bp, Artificial Sequence
  MKO10069675_B_Abca17
  gRNA
tttcttaccacaagtggcaa

SEQ ID NO: 69676 - DNA, 20 bp, Artificial Sequence
  MKO10069676_B_Abca1
  gRNA
agcctgctgcaggcgaatgt

SEQ ID NO: 69677 - DNA, 20 bp, Artificial Sequence
  MKO10069677_B_Abca1
  gRNA
gaccaacattcgcctgcagc

SEQ ID NO: 69678 - DNA, 20 bp, Artificial Sequence
  MKO10069678_B_Abca1
  gRNA
aataaagccatgccgtctgc

SEQ ID NO: 69679 - DNA, 20 bp, Artificial Sequence
  MKO10069679_B_Abca2
  gRNA
gagggcttgggccgtgctgt

SEQ ID NO: 69680 - DNA, 20 bp, Artificial Sequence
  MKO10069680_B_Abca2
  gRNA
tcacctcggaagggtccaca

SEQ ID NO: 69681 - DNA, 20 bp, Artificial Sequence
  MKO10069681_B_Abca2
  gRNA
acgtggagttggcatattgc

SEQ ID NO: 69682 - DNA, 20 bp, Artificial Sequence
  MKO10069682_B_Abca3
  gRNA
ccatcacggagacggtgaaa

SEQ ID NO: 69683 - DNA, 20 bp, Artificial Sequence
  MKO10069683_B_Abca3
  gRNA
tcactctcaccgccagcggc

SEQ ID NO: 69684 - DNA, 20 bp, Artificial Sequence
  MKO10069684_B_Abca3
  gRNA
caaccactcctccagcgtgc

SEQ ID NO: 69685 - DNA, 20 bp, Artificial Sequence
  MKO10069685_B_Abca4
  gRNA
ggtgtccatgaactgcgaca

SEQ ID NO: 69686 - DNA, 20 bp, Artificial Sequence
  MKO10069686_B_Abca4
  gRNA
tttccagattcgctttgtag

SEQ ID NO: 69687 - DNA, 20 bp, Artificial Sequence
  MKO10069687_B_Abca4
  gRNA
gatgggcaaccgagtcagac

SEQ ID NO: 69688 - DNA, 20 bp, Artificial Sequence
  MKO10069688_B_Abca5
  gRNA
gagattgacaccttcccgcg

SEQ ID NO: 69689 - DNA, 20 bp, Artificial Sequence
  MKO10069689_B_Abca5
  gRNA
tctaagtccagcaacttcgt

SEQ ID NO: 69690 - DNA, 20 bp, Artificial Sequence
  MKO10069690_B_Abca5
  gRNA
gatagatgctgccattatac

SEQ ID NO: 69691 - DNA, 20 bp, Artificial Sequence
  MKO10069691_B_Abca6
  gRNA
gaggagctgatgtccatcga

SEQ ID NO: 69692 - DNA, 20 bp, Artificial Sequence
  MKO10069692_B_Abca6
  gRNA
tggagcataccaattattat

SEQ ID NO: 69693 - DNA, 20 bp, Artificial Sequence
  MKO10069693_B_Abca6
  gRNA
agttcttctgcacaatatac

SEQ ID NO: 69694 - DNA, 20 bp, Artificial Sequence
  MKO10069694_B_Abca7
  gRNA
tcacattcgtgatgctccag

SEQ ID NO: 69695 - DNA, 20 bp, Artificial Sequence
  MKO10069695_B_Abca7
  gRNA
cctcccctcagcacgaccac

SEQ ID NO: 69696 - DNA, 20 bp, Artificial Sequence
  MKO10069696_B_Abca7
  gRNA
tccccagatccaactactag

SEQ ID NO: 69697 - DNA, 20 bp, Artificial Sequence
  MKO10069697_B_Abca8a
  gRNA
aatgcgtttcagtgatgtag

SEQ ID NO: 69698 - DNA, 20 bp, Artificial Sequence
  MKO10069698_B_Abca8a
  gRNA
aacaccagctgagatataat

SEQ ID NO: 69699 - DNA, 20 bp, Artificial Sequence
  MKO10069699_B_Abca8a
  gRNA
gtggtcctgatgctccttta

SEQ ID NO: 69700 - DNA, 20 bp, Artificial Sequence
  MKO10069700_B_Abca8b
  gRNA
accagaatgctggatctcga

SEQ ID NO: 69701 - DNA, 20 bp, Artificial Sequence
  MKO10069701_B_Abca8b
  gRNA
gtcgattctttcagacaatc

SEQ ID NO: 69702 - DNA, 20 bp, Artificial Sequence
  MKO10069702_B_Abca8b
  gRNA
actgtctgatagccatattc

SEQ ID NO: 69703 - DNA, 20 bp, Artificial Sequence
  MKO10069703_B_Abca9
  gRNA
ctcaatgataccagcattaa

SEQ ID NO: 69704 - DNA, 20 bp, Artificial Sequence
  MKO10069704_B_Abca9
  gRNA
tgacgctcctgaaatgtctg

SEQ ID NO: 69705 - DNA, 20 bp, Artificial Sequence
  MKO10069705_B_Abca9
  gRNA
atttaagtctagctcattca

SEQ ID NO: 69706 - DNA, 20 bp, Artificial Sequence
  MKO10069706_B_Abcb10
  gRNA
gctatggcgatagcttgact

SEQ ID NO: 69707 - DNA, 20 bp, Artificial Sequence
  MKO10069707_B_Abcb10
  gRNA
ataagaaccatccgagcttt

SEQ ID NO: 69708 - DNA, 20 bp, Artificial Sequence
  MKO10069708_B_Abcb10
  gRNA
atcgcccataaatcacagcg

SEQ ID NO: 69709 - DNA, 20 bp, Artificial Sequence
  MKO10069709_B_Abcb11
  gRNA
agtgtgtgcgcattgctcca

SEQ ID NO: 69710 - DNA, 20 bp, Artificial Sequence
  MKO10069710_B_Abcb11
  gRNA
tactaacttgaaagtatcct

SEQ ID NO: 69711 - DNA, 20 bp, Artificial Sequence
  MKO10069711_B_Abcb11
  gRNA
aggttacaagataagaagaa

SEQ ID NO: 69712 - DNA, 20 bp, Artificial Sequence
  MKO10069712_B_Abcb1a
  gRNA
attgtaagcacactgactgc

SEQ ID NO: 69713 - DNA, 20 bp, Artificial Sequence
  MKO10069713_B_Abcb1a
  gRNA
aagagccatgtttgccaaac

SEQ ID NO: 69714 - DNA, 20 bp, Artificial Sequence
  MKO10069714_B_Abcb1a
  gRNA
aggtacgcctactattacac

SEQ ID NO: 69715 - DNA, 20 bp, Artificial Sequence
  MKO10069715_B_Abcb1b
  gRNA
gctgatgatcagagtactgt

SEQ ID NO: 69716 - DNA, 20 bp, Artificial Sequence
  MKO10069716_B_Abcb1b
  gRNA
attacttcccctcttgatgc

SEQ ID NO: 69717 - DNA, 20 bp, Artificial Sequence
  MKO10069717_B_Abcb1b
  gRNA
agatacgcctactattacac

SEQ ID NO: 69718 - DNA, 20 bp, Artificial Sequence
  MKO10069718_B_Abcb4
  gRNA
tatcctgccagtcagagtat

SEQ ID NO: 69719 - DNA, 20 bp, Artificial Sequence
  MKO10069719_B_Abcb4
  gRNA
cacaacttaccagtgtcaac

SEQ ID NO: 69720 - DNA, 20 bp, Artificial Sequence
  MKO10069720_B_Abcb4
  gRNA
tcattgtcaatgctaaatcc

SEQ ID NO: 69721 - DNA, 20 bp, Artificial Sequence
  MKO10069721_B_Abcb5
  gRNA
gcaagaacaagtgcctaaag

SEQ ID NO: 69722 - DNA, 20 bp, Artificial Sequence
  MKO10069722_B_Abcb5
  gRNA
aggttgactctatattatat

SEQ ID NO: 69723 - DNA, 20 bp, Artificial Sequence
  MKO10069723_B_Abcb5
  gRNA
acagcttgatttcccacttt

SEQ ID NO: 69724 - DNA, 20 bp, Artificial Sequence
  MKO10069724_B_Abcb6
  gRNA
ggtctctccaggtggatcgt

SEQ ID NO: 69725 - DNA, 20 bp, Artificial Sequence
  MKO10069725_B_Abcb6
  gRNA
gaacgtgtagagtataagac

SEQ ID NO: 69726 - DNA, 20 bp, Artificial Sequence
  MKO10069726_B_Abcb6
  gRNA
tcacataacgcaggacccac

SEQ ID NO: 69727 - DNA, 20 bp, Artificial Sequence
  MKO10069727_B_Abcb7
  gRNA
agacagcctcaaccagatgt

SEQ ID NO: 69728 - DNA, 20 bp, Artificial Sequence
  MKO10069728_B_Abcb7
  gRNA
acagttactagatgctacaa

SEQ ID NO: 69729 - DNA, 20 bp, Artificial Sequence
  MKO10069729_B_Abcb7
  gRNA
tgtagcatctagtaactgtc

SEQ ID NO: 69730 - DNA, 20 bp, Artificial Sequence
  MKO10069730_B_Abcb8
  gRNA
ttccaattaaagcgcagctc

SEQ ID NO: 69731 - DNA, 20 bp, Artificial Sequence
  MKO10069731_B_Abcb8
  gRNA
cagcagcactaggtatccaa

SEQ ID NO: 69732 - DNA, 20 bp, Artificial Sequence
  MKO10069732_B_Abcb8
  gRNA
tggccatgcgctcaccaatg

SEQ ID NO: 69733 - DNA, 20 bp, Artificial Sequence
  MKO10069733_B_Abcb9
  gRNA
ccagactgaacattcgcctc

SEQ ID NO: 69734 - DNA, 20 bp, Artificial Sequence
  MKO10069734_B_Abcb9
  gRNA
acacctgctgaagcttccgc

SEQ ID NO: 69735 - DNA, 20 bp, Artificial Sequence
  MKO10069735_B_Abcb9
  gRNA
cggcctacatgtcctacgtc

SEQ ID NO: 69736 - DNA, 20 bp, Artificial Sequence
  MKO10069736_B_Abcc10
  gRNA
cacgtaggtgtttacagcgc

SEQ ID NO: 69737 - DNA, 20 bp, Artificial Sequence
  MKO10069737_B_Abcc10
  gRNA
ggtgactgatgaaggtcttc

SEQ ID NO: 69738 - DNA, 20 bp, Artificial Sequence
  MKO10069738_B_Abcc10
  gRNA
ggctctgggggaccgagtga

SEQ ID NO: 69739 - DNA, 20 bp, Artificial Sequence
  MKO10069739_B_Abcc12
  gRNA
ttgtaacttcgaatcatcac

SEQ ID NO: 69740 - DNA, 20 bp, Artificial Sequence
  MKO10069740_B_Abcc12
  gRNA
tctcatattcatcccgatcc

SEQ ID NO: 69741 - DNA, 20 bp, Artificial Sequence
  MKO10069741_B_Abcc12
  gRNA
aggctgccatgacgatgcac

SEQ ID NO: 69742 - DNA, 20 bp, Artificial Sequence
  MKO10069742_B_Abcc1
  gRNA
tgaccagtaacactggggct

SEQ ID NO: 69743 - DNA, 20 bp, Artificial Sequence
  MKO10069743_B_Abcc1
  gRNA
gtgtcatctggatgtagccc

SEQ ID NO: 69744 - DNA, 20 bp, Artificial Sequence
  MKO10069744_B_Abcc1
  gRNA
gaccgtgttctgaaagcact

SEQ ID NO: 69745 - DNA, 20 bp, Artificial Sequence
  MKO10069745_B_Abcc2
  gRNA
aaccataggagacgaagaac

SEQ ID NO: 69746 - DNA, 20 bp, Artificial Sequence
  MKO10069746_B_Abcc2
  gRNA
gttactgtacctgcttggca

SEQ ID NO: 69747 - DNA, 20 bp, Artificial Sequence
  MKO10069747_B_Abcc2
  gRNA
tgagtcgcttgattctgaaa

SEQ ID NO: 69748 - DNA, 20 bp, Artificial Sequence
  MKO10069748_B_Abcc3
  gRNA
ctttgctaatccagtacgag

SEQ ID NO: 69749 - DNA, 20 bp, Artificial Sequence
  MKO10069749_B_Abcc3
  gRNA
aggcggcttctccttgaagc

SEQ ID NO: 69750 - DNA, 20 bp, Artificial Sequence
  MKO10069750_B_Abcc3
  gRNA
gaagccgcctttgttctccc

SEQ ID NO: 69751 - DNA, 20 bp, Artificial Sequence
  MKO10069751_B_Abcc4
  gRNA
ggcactccggttaagtaact

SEQ ID NO: 69752 - DNA, 20 bp, Artificial Sequence
  MKO10069752_B_Abcc4
  gRNA
agaagaacacgcgcgagcag

SEQ ID NO: 69753 - DNA, 20 bp, Artificial Sequence
  MKO10069753_B_Abcc4
  gRNA
gaagatcgctcaaagcacct

SEQ ID NO: 69754 - DNA, 20 bp, Artificial Sequence
  MKO10069754_B_Abcc5
  gRNA
cactcaccgatcttgttctc

SEQ ID NO: 69755 - DNA, 20 bp, Artificial Sequence
  MKO10069755_B_Abcc5
  gRNA
cccccttcttgtgaaccact

SEQ ID NO: 69756 - DNA, 20 bp, Artificial Sequence
  MKO10069756_B_Abcc5
  gRNA
aatgctcctcgtccagaatt

SEQ ID NO: 69757 - DNA, 20 bp, Artificial Sequence
  MKO10069757_B_Abcc6
  gRNA
ttctaattcaccctactgtg

SEQ ID NO: 69758 - DNA, 20 bp, Artificial Sequence
  MKO10069758_B_Abcc6
  gRNA
aggaagggagtccggtcatc

SEQ ID NO: 69759 - DNA, 20 bp, Artificial Sequence
  MKO10069759_B_Abcc6
  gRNA
tgccacctttctgatccaca

SEQ ID NO: 69760 - DNA, 20 bp, Artificial Sequence
  MKO10069760_B_Abcc8
  gRNA
aagttctacgaccacgccat

SEQ ID NO: 69761 - DNA, 20 bp, Artificial Sequence
  MKO10069761_B_Abcc8
  gRNA
cctcagcgatctcacacacc

SEQ ID NO: 69762 - DNA, 20 bp, Artificial Sequence
  MKO10069762_B_Abcc8
  gRNA
gttgtgatagtagaccacag

SEQ ID NO: 69763 - DNA, 20 bp, Artificial Sequence
  MKO10069763_B_Abcc9
  gRNA
aatgttatgataatagacga

SEQ ID NO: 69764 - DNA, 20 bp, Artificial Sequence
  MKO10069764_B_Abcc9
  gRNA
ctcctgtgatgcagaagcgc

SEQ ID NO: 69765 - DNA, 20 bp, Artificial Sequence
  MKO10069765_B_Abcc9
  gRNA
gacctgcgcttctgcatcac

SEQ ID NO: 69766 - DNA, 20 bp, Artificial Sequence
  MKO10069766_B_Abcd1
  gRNA
tctctctacaggccaagttg

SEQ ID NO: 69767 - DNA, 20 bp, Artificial Sequence
  MKO10069767_B_Abcd1
  gRNA
cttgacctaccctgatgttg

SEQ ID NO: 69768 - DNA, 20 bp, Artificial Sequence
  MKO10069768_B_Abcd1
  gRNA
gaggggcccctgaagatcca

SEQ ID NO: 69769 - DNA, 20 bp, Artificial Sequence
  MKO10069769_B_Abcd2
  gRNA
cagctgtggactaattatgg

SEQ ID NO: 69770 - DNA, 20 bp, Artificial Sequence
  MKO10069770_B_Abcd2
  gRNA
catgatgtaccataaacgtt

SEQ ID NO: 69771 - DNA, 20 bp, Artificial Sequence
  MKO10069771_B_Abcd2
  gRNA
gtcttcgatgaagtgaagag

SEQ ID NO: 69772 - DNA, 20 bp, Artificial Sequence
  MKO10069772_B_Abcd3
  gRNA
accgccattacagaataatg

SEQ ID NO: 69773 - DNA, 20 bp, Artificial Sequence
  MKO10069773_B_Abcd3
  gRNA
ctcacagatcctaaaaatta

SEQ ID NO: 69774 - DNA, 20 bp, Artificial Sequence
  MKO10069774_B_Abcd3
  gRNA
ttcctttgcagtaagaaaag

SEQ ID NO: 69775 - DNA, 20 bp, Artificial Sequence
  MKO10069775_B_Abcd4
  gRNA
tctgtatcctcacgaacctc

SEQ ID NO: 69776 - DNA, 20 bp, Artificial Sequence
  MKO10069776_B_Abcd4
  gRNA
atttaaggcactgaccttgc

SEQ ID NO: 69777 - DNA, 20 bp, Artificial Sequence
  MKO10069777_B_Abcd4
  gRNA
gctcttgtgcgtgaccctcc

SEQ ID NO: 69778 - DNA, 20 bp, Artificial Sequence
  MKO10069778_B_Abce1
  gRNA
caaactgacctttgcagcct

SEQ ID NO: 69779 - DNA, 20 bp, Artificial Sequence
  MKO10069779_B_Abce1
  gRNA
atttctgaaactctctgtat

SEQ ID NO: 69780 - DNA, 20 bp, Artificial Sequence
  MKO10069780_B_Abce1
  gRNA
aatatacctgtgaagcttga

SEQ ID NO: 69781 - DNA, 20 bp, Artificial Sequence
  MKO10069781_B_Abcf1
  gRNA
gtgcctgcccccataccccg

SEQ ID NO: 69782 - DNA, 20 bp, Artificial Sequence
  MKO10069782_B_Abcf1
  gRNA
ccagacaaagtagtgaagaa

SEQ ID NO: 69783 - DNA, 20 bp, Artificial Sequence
  MKO10069783_B_Abcf1
  gRNA
ggaaaaattgcagaaggaga

SEQ ID NO: 69784 - DNA, 20 bp, Artificial Sequence
  MKO10069784_B_Abcf2
  gRNA
tcacagtttcaagcgcatcc

SEQ ID NO: 69785 - DNA, 20 bp, Artificial Sequence
  MKO10069785_B_Abcf2
  gRNA
gaggcatctcacgagtcaga

SEQ ID NO: 69786 - DNA, 20 bp, Artificial Sequence
  MKO10069786_B_Abcf2
  gRNA
gctgctgctcgagctgtcac

SEQ ID NO: 69787 - DNA, 20 bp, Artificial Sequence
  MKO10069787_B_Abcf3
  gRNA
catccagttgtcgaagataa

SEQ ID NO: 69788 - DNA, 20 bp, Artificial Sequence
  MKO10069788_B_Abcf3
  gRNA
gactgtgacaccaaacttcc

SEQ ID NO: 69789 - DNA, 20 bp, Artificial Sequence
  MKO10069789_B_Abcf3
  gRNA
ccaaactcacagagggttgc

SEQ ID NO: 69790 - DNA, 20 bp, Artificial Sequence
  MKO10069790_B_Abcg1
  gRNA
agaccttccggaagcagcgc

SEQ ID NO: 69791 - DNA, 20 bp, Artificial Sequence
  MKO10069791_B_Abcg1
  gRNA
gtccgcgcatctgaagctgc

SEQ ID NO: 69792 - DNA, 20 bp, Artificial Sequence
  MKO10069792_B_Abcg1
  gRNA
gtggccatcatgggtccttc

SEQ ID NO: 69793 - DNA, 20 bp, Artificial Sequence
  MKO10069793_B_Abcg2
  gRNA
ccttaaggatgacgttgtga

SEQ ID NO: 69794 - DNA, 20 bp, Artificial Sequence
  MKO10069794_B_Abcg2
  gRNA
cccagaatagcattaaggcc

SEQ ID NO: 69795 - DNA, 20 bp, Artificial Sequence
  MKO10069795_B_Abcg2
  gRNA
acatctccagataatccctt

SEQ ID NO: 69796 - DNA, 20 bp, Artificial Sequence
  MKO10069796_B_Abcg3
  gRNA
agcctagatccaaagaactc

SEQ ID NO: 69797 - DNA, 20 bp, Artificial Sequence
  MKO10069797_B_Abcg3
  gRNA
cccataatggcattgaggcc

SEQ ID NO: 69798 - DNA, 20 bp, Artificial Sequence
  MKO10069798_B_Abcg3
  gRNA
gaactctaaattgtctctca

SEQ ID NO: 69799 - DNA, 20 bp, Artificial Sequence
  MKO10069799_B_Abcg4
  gRNA
ttctgtcgccgagagctgat

SEQ ID NO: 69800 - DNA, 20 bp, Artificial Sequence
  MKO10069800_B_Abcg4
  gRNA
ggcagatcctggttaacggg

SEQ ID NO: 69801 - DNA, 20 bp, Artificial Sequence
  MKO10069801_B_Abcg4
  gRNA
atcatgggcccctctggggc

SEQ ID NO: 69802 - DNA, 20 bp, Artificial Sequence
  MKO10069802_B_Abcg5
  gRNA
cacgcccacctgcaggacgt

SEQ ID NO: 69803 - DNA, 20 bp, Artificial Sequence
  MKO10069803_B_Abcg5
  gRNA
cgcggacttctacaacaaga

SEQ ID NO: 69804 - DNA, 20 bp, Artificial Sequence
  MKO10069804_B_Abcg5
  gRNA
ttcctttaaagcaaccgtgt

SEQ ID NO: 69805 - DNA, 20 bp, Artificial Sequence
  MKO10069805_B_Abcg8
  gRNA
gagcgccgacgagtgagcat

SEQ ID NO: 69806 - DNA, 20 bp, Artificial Sequence
  MKO10069806_B_Abcg8
  gRNA
acaggtggacatcgcctctc

SEQ ID NO: 69807 - DNA, 20 bp, Artificial Sequence
  MKO10069807_B_Abcg8
  gRNA
cagactgttgtcactttccg

SEQ ID NO: 69808 - DNA, 20 bp, Artificial Sequence
  MKO10069808_B_Abhd10
  gRNA
atacttgatgacgtagctga

SEQ ID NO: 69809 - DNA, 20 bp, Artificial Sequence
  MKO10069809_B_Abhd10
  gRNA
ttcagctacgtcatcaagta

SEQ ID NO: 69810 - DNA, 20 bp, Artificial Sequence
  MKO10069810_B_Abhd10
  gRNA
ctatttcatccttcatgccg

SEQ ID NO: 69811 - DNA, 20 bp, Artificial Sequence
  MKO10069811_B_Abhd11
  gRNA
ctggtgccctgcgtcctcgt

SEQ ID NO: 69812 - DNA, 20 bp, Artificial Sequence
  MKO10069812_B_Abhd11
  gRNA
accaatcgttccacaacatc

SEQ ID NO: 69813 - DNA, 20 bp, Artificial Sequence
  MKO10069813_B_Abhd11
  gRNA
cccatcgcaggtgctgacgg

SEQ ID NO: 69814 - DNA, 20 bp, Artificial Sequence
  MKO10069814_B_Abhd12b
  gRNA
ccagcatcgacacttcccct

SEQ ID NO: 69815 - DNA, 20 bp, Artificial Sequence
  MKO10069815_B_Abhd12b
  gRNA
tctctttaaatccacgagaa

SEQ ID NO: 69816 - DNA, 20 bp, Artificial Sequence
  MKO10069816_B_Abhd12b
  gRNA
cttcacgagtaaatctttaa

SEQ ID NO: 69817 - DNA, 20 bp, Artificial Sequence
  MKO10069817_B_Abhd12
  gRNA
caattactacctccagccag

SEQ ID NO: 69818 - DNA, 20 bp, Artificial Sequence
  MKO10069818_B_Abhd12
  gRNA
atgatgtgactattggagtc

SEQ ID NO: 69819 - DNA, 20 bp, Artificial Sequence
  MKO10069819_B_Abhd12
  gRNA
ctcatagacgaaagagcctg

SEQ ID NO: 69820 - DNA, 20 bp, Artificial Sequence
  MKO10069820_B_Abhd13
  gRNA
ttaatattcgtatcaattgc

SEQ ID NO: 69821 - DNA, 20 bp, Artificial Sequence
  MKO10069821_B_Abhd13
  gRNA
accagcattagcagtgcgtt

SEQ ID NO: 69822 - DNA, 20 bp, Artificial Sequence
  MKO10069822_B_Abhd13
  gRNA
tctacgagctctctccatcc

SEQ ID NO: 69823 - DNA, 20 bp, Artificial Sequence
  MKO10069823_B_Abhd14a
  gRNA
tgggcacgaatccacgtagc

SEQ ID NO: 69824 - DNA, 20 bp, Artificial Sequence
  MKO10069824_B_Abhd14a
  gRNA
ttgttcctgtgcataattcc

SEQ ID NO: 69825 - DNA, 20 bp, Artificial Sequence
  MKO10069825_B_Abhd14a
  gRNA
accccaactcttatcctgta

SEQ ID NO: 69826 - DNA, 20 bp, Artificial Sequence
  MKO10069826_B_Abhd14b
  gRNA
caagcctgatgagtggcata

SEQ ID NO: 69827 - DNA, 20 bp, Artificial Sequence
  MKO10069827_B_Abhd14b
  gRNA
ccttgatggtgccctcatgc

SEQ ID NO: 69828 - DNA, 20 bp, Artificial Sequence
  MKO10069828_B_Abhd14b
  gRNA
ccagcatgagggcaccatca

SEQ ID NO: 69829 - DNA, 20 bp, Artificial Sequence
  MKO10069829_B_Abhd15
  gRNA
gggatctcaacgacccactc

SEQ ID NO: 69830 - DNA, 20 bp, Artificial Sequence
  MKO10069830_B_Abhd15
  gRNA
ccgcggatcagttcagcgac

SEQ ID NO: 69831 - DNA, 20 bp, Artificial Sequence
  MKO10069831_B_Abhd15
  gRNA
aaccctcgctcaccgcgaac

SEQ ID NO: 69832 - DNA, 20 bp, Artificial Sequence
  MKO10069832_B_Abhd16a
  gRNA
ccgacagttcatcaccatct

SEQ ID NO: 69833 - DNA, 20 bp, Artificial Sequence
  MKO10069833_B_Abhd16a
  gRNA
tcgccttcttctacttatac

SEQ ID NO: 69834 - DNA, 20 bp, Artificial Sequence
  MKO10069834_B_Abhd16a
  gRNA
acattgctgctgctacttgc

SEQ ID NO: 69835 - DNA, 20 bp, Artificial Sequence
  MKO10069835_B_Abhd16b
  gRNA
gtcaatctcattgccgtcgc

SEQ ID NO: 69836 - DNA, 20 bp, Artificial Sequence
  MKO10069836_B_Abhd16b
  gRNA
ggctggtagtacgcactgta

SEQ ID NO: 69837 - DNA, 20 bp, Artificial Sequence
  MKO10069837_B_Abhd16b
  gRNA
acagttacaacttccgcagc

SEQ ID NO: 69838 - DNA, 20 bp, Artificial Sequence
  MKO10069838_B_Abhd17a
  gRNA
acgctacgagtgtgctgcag

SEQ ID NO: 69839 - DNA, 20 bp, Artificial Sequence
  MKO10069839_B_Abhd17a
  gRNA
gcccgccatgaacggcctgt

SEQ ID NO: 69840 - DNA, 20 bp, Artificial Sequence
  MKO10069840_B_Abhd17a
  gRNA
ggtgtcgaagatcacgtcac

SEQ ID NO: 69841 - DNA, 20 bp, Artificial Sequence
  MKO10069841_B_Abhd17b
  gRNA
acctgtcagagcgagcagac

SEQ ID NO: 69842 - DNA, 20 bp, Artificial Sequence
  MKO10069842_B_Abhd17b
  gRNA
gccagtctgctcgctctgac

SEQ ID NO: 69843 - DNA, 20 bp, Artificial Sequence
  MKO10069843_B_Abhd17b
  gRNA
gaaagcaactcgcattcctg

SEQ ID NO: 69844 - DNA, 20 bp, Artificial Sequence
  MKO10069844_B_Abhd17c
  gRNA
ggctgcacactcgtaccgcg

SEQ ID NO: 69845 - DNA, 20 bp, Artificial Sequence
  MKO10069845_B_Abhd17c
  gRNA
gctcatacatcgccaagcca

SEQ ID NO: 69846 - DNA, 20 bp, Artificial Sequence
  MKO10069846_B_Abhd17c
  gRNA
tgccaatgctctgtccatag

SEQ ID NO: 69847 - DNA, 20 bp, Artificial Sequence
  MKO10069847_B_Abhd1
  gRNA
atgattatagaggcctcgtc

SEQ ID NO: 69848 - DNA, 20 bp, Artificial Sequence
  MKO10069848_B_Abhd1
  gRNA
tggctactgccgctgatgcc

SEQ ID NO: 69849 - DNA, 20 bp, Artificial Sequence
  MKO10069849_B_Abhd1
  gRNA
ctactcccaagctccactgc

SEQ ID NO: 69850 - DNA, 20 bp, Artificial Sequence
  MKO10069850_B_Abhd2
  gRNA
tgcacacgatgttaccaccc

SEQ ID NO: 69851 - DNA, 20 bp, Artificial Sequence
  MKO10069851_B_Abhd2
  gRNA
cttcgacctcttcgagcccc

SEQ ID NO: 69852 - DNA, 20 bp, Artificial Sequence
  MKO10069852_B_Abhd2
  gRNA
agttgtagaacctgcggcac

SEQ ID NO: 69853 - DNA, 20 bp, Artificial Sequence
  MKO10069853_B_Abhd3
  gRNA
caataacagtgcgtactatg

SEQ ID NO: 69854 - DNA, 20 bp, Artificial Sequence
  MKO10069854_B_Abhd3
  gRNA
acttacttcctgtattgcac

SEQ ID NO: 69855 - DNA, 20 bp, Artificial Sequence
  MKO10069855_B_Abhd3
  gRNA
cctactatcttgctcttgcc

SEQ ID NO: 69856 - DNA, 20 bp, Artificial Sequence
  MKO10069856_B_Abhd4
  gRNA
agatccgtgcacctccaacc

SEQ ID NO: 69857 - DNA, 20 bp, Artificial Sequence
  MKO10069857_B_Abhd4
  gRNA
gcaaacttgcgcttgaagtc

SEQ ID NO: 69858 - DNA, 20 bp, Artificial Sequence
  MKO10069858_B_Abhd4
  gRNA
ggtcgtaggggaaagcccca

SEQ ID NO: 69859 - DNA, 20 bp, Artificial Sequence
  MKO10069859_B_Abhd5
  gRNA
tccgcatcactgtcaaacct

SEQ ID NO: 69860 - DNA, 20 bp, Artificial Sequence
  MKO10069860_B_Abhd5
  gRNA
cgtgtcatcttcaaacatag

SEQ ID NO: 69861 - DNA, 20 bp, Artificial Sequence
  MKO10069861_B_Abhd5
  gRNA
caaaaggtcctgcaatcctg

SEQ ID NO: 69862 - DNA, 20 bp, Artificial Sequence
  MKO10069862_B_Abhd6
  gRNA
ctgctcctatgtccgcttca

SEQ ID NO: 69863 - DNA, 20 bp, Artificial Sequence
  MKO10069863_B_Abhd6
  gRNA
cagcaggacacacgagagac

SEQ ID NO: 69864 - DNA, 20 bp, Artificial Sequence
  MKO10069864_B_Abhd6
  gRNA
gcaagttaaaaggatacatc

SEQ ID NO: 69865 - DNA, 20 bp, Artificial Sequence
  MKO10069865_B_Abhd8
  gRNA
tggtagacctcgtcgccttc

SEQ ID NO: 69866 - DNA, 20 bp, Artificial Sequence
  MKO10069866_B_Abhd8
  gRNA
agggccggctttgcccgcca

SEQ ID NO: 69867 - DNA, 20 bp, Artificial Sequence
  MKO10069867_B_Abhd8
  gRNA
gtgcccgtagatcctgctgc

SEQ ID NO: 69868 - DNA, 20 bp, Artificial Sequence
  MKO10069868_B_Abi1
  gRNA
accaccaagccctcccgtgt

SEQ ID NO: 69869 - DNA, 20 bp, Artificial Sequence
  MKO10069869_B_Abi1
  gRNA
cccgacacgggagggcttgg

SEQ ID NO: 69870 - DNA, 20 bp, Artificial Sequence
  MKO10069870_B_Abi1
  gRNA
aggagatcccgtctggcaag

SEQ ID NO: 69871 - DNA, 20 bp, Artificial Sequence
  MKO10069871_B_Abi2
  gRNA
tataacgaactggccgctca

SEQ ID NO: 69872 - DNA, 20 bp, Artificial Sequence
  MKO10069872_B_Abi2
  gRNA
tggctggcgcaataatctta

SEQ ID NO: 69873 - DNA, 20 bp, Artificial Sequence
  MKO10069873_B_Abi2
  gRNA
tcctccgtaactgtgatgcc

SEQ ID NO: 69874 - DNA, 20 bp, Artificial Sequence
  MKO10069874_B_Abi3bp
  gRNA
tccagctttacgtttgcatt

SEQ ID NO: 69875 - DNA, 20 bp, Artificial Sequence
  MKO10069875_B_Abi3bp
  gRNA
tacctgaacatgacttcttc

SEQ ID NO: 69876 - DNA, 20 bp, Artificial Sequence
  MKO10069876_B_Abi3bp
  gRNA
aatgcacagaaattgccaaa

SEQ ID NO: 69877 - DNA, 20 bp, Artificial Sequence
  MKO10069877_B_Abi3
  gRNA
cctttatgctcttgcgagac

SEQ ID NO: 69878 - DNA, 20 bp, Artificial Sequence
  MKO10069878_B_Abi3
  gRNA
cactccctaggagaccaccc

SEQ ID NO: 69879 - DNA, 20 bp, Artificial Sequence
  MKO10069879_B_Abi3
  gRNA
tgacattggccacggagtca

SEQ ID NO: 69880 - DNA, 20 bp, Artificial Sequence
  MKO10069880_B_Abl1
  gRNA
cgcaacaagcccactatcta

SEQ ID NO: 69881 - DNA, 20 bp, Artificial Sequence
  MKO10069881_B_Abl1
  gRNA
tcatcaccgccgcttccttc

SEQ ID NO: 69882 - DNA, 20 bp, Artificial Sequence
  MKO10069882_B_Abl1
  gRNA
gtctcagcgaagcagctcga

SEQ ID NO: 69883 - DNA, 20 bp, Artificial Sequence
  MKO10069883_B_Abl2
  gRNA
cttcactccactcgccattc

SEQ ID NO: 69884 - DNA, 20 bp, Artificial Sequence
  MKO10069884_B_Abl2
  gRNA
aggcactgaatgaagcgatc

SEQ ID NO: 69885 - DNA, 20 bp, Artificial Sequence
  MKO10069885_B_Abl2
  gRNA
aacacactcagtatcactaa

SEQ ID NO: 69886 - DNA, 20 bp, Artificial Sequence
  MKO10069886_B_Ablim1
  gRNA
tctttccaggttctaccgtg

SEQ ID NO: 69887 - DNA, 20 bp, Artificial Sequence
  MKO10069887_B_Ablim1
  gRNA
tatgagcctttctacacatc

SEQ ID NO: 69888 - DNA, 20 bp, Artificial Sequence
  MKO10069888_B_Ablim1
  gRNA
tccagcatccctggttcacc

SEQ ID NO: 69889 - DNA, 20 bp, Artificial Sequence
  MKO10069889_B_Ablim2
  gRNA
agcgagtgccatagagccgc

SEQ ID NO: 69890 - DNA, 20 bp, Artificial Sequence
  MKO10069890_B_Ablim2
  gRNA
ccccacagtgtcgcagcccc

SEQ ID NO: 69891 - DNA, 20 bp, Artificial Sequence
  MKO10069891_B_Ablim2
  gRNA
ccacttcgccttcaatgaag

SEQ ID NO: 69892 - DNA, 20 bp, Artificial Sequence
  MKO10069892_B_Ablim3
  gRNA
agcagagtccgtacagtccc

SEQ ID NO: 69893 - DNA, 20 bp, Artificial Sequence
  MKO10069893_B_Ablim3
  gRNA
accttatctccaatagggaa

SEQ ID NO: 69894 - DNA, 20 bp, Artificial Sequence
  MKO10069894_B_Ablim3
  gRNA
cacccgctgtgatagctgcc

SEQ ID NO: 69895 - DNA, 20 bp, Artificial Sequence
  MKO10069895_B_Abo
  gRNA
aaatgcaacttccttcacct

SEQ ID NO: 69896 - DNA, 20 bp, Artificial Sequence
  MKO10069896_B_Abo
  gRNA
actcacctagtcacagctcc

SEQ ID NO: 69897 - DNA, 20 bp, Artificial Sequence
  MKO10069897_B_Abo
  gRNA
ggaatgcctatctgcagcca

SEQ ID NO: 69898 - DNA, 20 bp, Artificial Sequence
  MKO10069898_B_Abracl
  gRNA
gatgaatttcctccaccagg

SEQ ID NO: 69899 - DNA, 20 bp, Artificial Sequence
  MKO10069899_B_Abracl
  gRNA
cacatctgtcatcctggaag

SEQ ID NO: 69900 - DNA, 20 bp, Artificial Sequence
  MKO10069900_B_Abracl
  gRNA
ggaacatgaagttaacctcc

SEQ ID NO: 69901 - DNA, 20 bp, Artificial Sequence
  MKO10069901_B_Abra
  gRNA
gtgcaccagtccgtgtttcc

SEQ ID NO: 69902 - DNA, 20 bp, Artificial Sequence
  MKO10069902_B_Abra
  gRNA
atagtcaaattcgtcactga

SEQ ID NO: 69903 - DNA, 20 bp, Artificial Sequence
  MKO10069903_B_Abra
  gRNA
catagccctcgtctcccttg

SEQ ID NO: 69904 - DNA, 20 bp, Artificial Sequence
  MKO10069904_B_Abr
  gRNA
agagatctacattaaccagc

SEQ ID NO: 69905 - DNA, 20 bp, Artificial Sequence
  MKO10069905_B_Abr
  gRNA
atgctttgtacacgccaagc

SEQ ID NO: 69906 - DNA, 20 bp, Artificial Sequence
  MKO10069906_B_Abr
  gRNA
tcagcccatgaaacccctga

SEQ ID NO: 69907 - DNA, 20 bp, Artificial Sequence
  MKO10069907_B_Abt1
  gRNA
caagcgtgtagccaagcgag

SEQ ID NO: 69908 - DNA, 20 bp, Artificial Sequence
  MKO10069908_B_Abt1
  gRNA
ctactcggccaaatagctcc

SEQ ID NO: 69909 - DNA, 20 bp, Artificial Sequence
  MKO10069909_B_Abt1
  gRNA
cagtctacataacacgccca

SEQ ID NO: 69910 - DNA, 20 bp, Artificial Sequence
  MKO10069910_B_Abtb1
  gRNA
cgggcccatcgctgtatcct

SEQ ID NO: 69911 - DNA, 20 bp, Artificial Sequence
  MKO10069911_B_Abtb1
  gRNA
ctttgtaggagcccgctgtg

SEQ ID NO: 69912 - DNA, 20 bp, Artificial Sequence
  MKO10069912_B_Abtb1
  gRNA
ggagttggtgcgctacctgt

SEQ ID NO: 69913 - DNA, 20 bp, Artificial Sequence
  MKO10069913_B_Abtb2
  gRNA
ctgctcgctcatcgtggccc

SEQ ID NO: 69914 - DNA, 20 bp, Artificial Sequence
  MKO10069914_B_Abtb2
  gRNA
ggcttccgcatgctcaactg

SEQ ID NO: 69915 - DNA, 20 bp, Artificial Sequence
  MKO10069915_B_Abtb2
  gRNA
ccgaagttccagctgagcat

SEQ ID NO: 69916 - DNA, 20 bp, Artificial Sequence
  MKO10069916_B_Acaa1a
  gRNA
gaggctaaagcctgagcagc

SEQ ID NO: 69917 - DNA, 20 bp, Artificial Sequence
  MKO10069917_B_Acaa1a
  gRNA
tcaccacttaccagcaatgt

SEQ ID NO: 69918 - DNA, 20 bp, Artificial Sequence
  MKO10069918_B_Acaa1a
  gRNA
agagactgtacctttgtcta

SEQ ID NO: 69919 - DNA, 20 bp, Artificial Sequence
  MKO10069919_B_Acaa1b
  gRNA
gaagctaaagcctgagcagc

SEQ ID NO: 69920 - DNA, 20 bp, Artificial Sequence
  MKO10069920_B_Acaa1b
  gRNA
agagactgtacctttgtcta

SEQ ID NO: 69921 - DNA, 20 bp, Artificial Sequence
  MKO10069921_B_Acaa1b
  gRNA
tcaccacttaccagcaatgt

SEQ ID NO: 69922 - DNA, 20 bp, Artificial Sequence
  MKO10069922_B_Acaa2
  gRNA
gctgcgaagcgaacaccctt

SEQ ID NO: 69923 - DNA, 20 bp, Artificial Sequence
  MKO10069923_B_Acaa2
  gRNA
tgtgtcagaaatgtgcgctt

SEQ ID NO: 69924 - DNA, 20 bp, Artificial Sequence
  MKO10069924_B_Acaa2
  gRNA
cttgagatctaatccaaatt

SEQ ID NO: 69925 - DNA, 20 bp, Artificial Sequence
  MKO10069925_B_Acaca
  gRNA
aaacgagtaacaaattctgc

SEQ ID NO: 69926 - DNA, 20 bp, Artificial Sequence
  MKO10069926_B_Acaca
  gRNA
caacaacaattacgcaaatg

SEQ ID NO: 69927 - DNA, 20 bp, Artificial Sequence
  MKO10069927_B_Acaca
  gRNA
atttgcgtaattgttgttgt

SEQ ID NO: 69928 - DNA, 20 bp, Artificial Sequence
  MKO10069928_B_Acacb
  gRNA
cacctgtacagggattctct

SEQ ID NO: 69929 - DNA, 20 bp, Artificial Sequence
  MKO10069929_B_Acacb
  gRNA
gatcagtacgtccctgtccc

SEQ ID NO: 69930 - DNA, 20 bp, Artificial Sequence
  MKO10069930_B_Acacb
  gRNA
tccaaaccgagtgacaaact

SEQ ID NO: 69931 - DNA, 20 bp, Artificial Sequence
  MKO10069931_B_Acad10
  gRNA
ccttgatggtgtgaatgccc

SEQ ID NO: 69932 - DNA, 20 bp, Artificial Sequence
  MKO10069932_B_Acad10
  gRNA
gcgacagtgggccctggata

SEQ ID NO: 69933 - DNA, 20 bp, Artificial Sequence
  MKO10069933_B_Acad10
  gRNA
ttcccaacacccggcctgtg

SEQ ID NO: 69934 - DNA, 20 bp, Artificial Sequence
  MKO10069934_B_Acad11
  gRNA
ctggagtcgggtactgcaaa

SEQ ID NO: 69935 - DNA, 20 bp, Artificial Sequence
  MKO10069935_B_Acad11
  gRNA
gtgtcataccttatgtgctt

SEQ ID NO: 69936 - DNA, 20 bp, Artificial Sequence
  MKO10069936_B_Acad11
  gRNA
aagcatctctgcagtatagc

SEQ ID NO: 69937 - DNA, 20 bp, Artificial Sequence
  MKO10069937_B_Acad12
  gRNA
cttgtgaccatttatgacat

SEQ ID NO: 69938 - DNA, 20 bp, Artificial Sequence
  MKO10069938_B_Acad12
  gRNA
agctgcttccccttctcatg

SEQ ID NO: 69939 - DNA, 20 bp, Artificial Sequence
  MKO10069939_B_Acad12
  gRNA
gataactcctatgtcataaa

SEQ ID NO: 69940 - DNA, 20 bp, Artificial Sequence
  MKO10069940_B_Acad8
  gRNA
ttgcccaccgctctgtacca

SEQ ID NO: 69941 - DNA, 20 bp, Artificial Sequence
  MKO10069941_B_Acad8
  gRNA
caaacgcacctggttcagtg

SEQ ID NO: 69942 - DNA, 20 bp, Artificial Sequence
  MKO10069942_B_Acad8
  gRNA
ggtctatgtgcgaacagatg

SEQ ID NO: 69943 - DNA, 20 bp, Artificial Sequence
  MKO10069943_B_Acad9
  gRNA
tgccagggtcaccgtgatag

SEQ ID NO: 69944 - DNA, 20 bp, Artificial Sequence
  MKO10069944_B_Acad9
  gRNA
gtgttccccagacgacagtt

SEQ ID NO: 69945 - DNA, 20 bp, Artificial Sequence
  MKO10069945_B_Acad9
  gRNA
cctgtatgccaaaaagtccc

SEQ ID NO: 69946 - DNA, 20 bp, Artificial Sequence
  MKO10069946_B_Acadl
  gRNA
ccaatcactcccagatcttt

SEQ ID NO: 69947 - DNA, 20 bp, Artificial Sequence
  MKO10069947_B_Acadl
  gRNA
tgctctcaacagcagttact

SEQ ID NO: 69948 - DNA, 20 bp, Artificial Sequence
  MKO10069948_B_Acadl
  gRNA
ggcacttactctgtgtggtg

SEQ ID NO: 69949 - DNA, 20 bp, Artificial Sequence
  MKO10069949_B_Acadm
  gRNA
tcgaacacaacactcgaaag

SEQ ID NO: 69950 - DNA, 20 bp, Artificial Sequence
  MKO10069950_B_Acadm
  gRNA
cgctgtaggtggccttggcc

SEQ ID NO: 69951 - DNA, 20 bp, Artificial Sequence
  MKO10069951_B_Acadm
  gRNA
aacaagcatcgaacgttccc

SEQ ID NO: 69952 - DNA, 20 bp, Artificial Sequence
  MKO10069952_B_Acadsb
  gRNA
tctgcagacacttactgatg

SEQ ID NO: 69953 - DNA, 20 bp, Artificial Sequence
  MKO10069953_B_Acadsb
  gRNA
tgtgaggatttgaggacacg

SEQ ID NO: 69954 - DNA, 20 bp, Artificial Sequence
  MKO10069954_B_Acadsb
  gRNA
actagctaaggtggatgctt

SEQ ID NO: 69955 - DNA, 20 bp, Artificial Sequence
  MKO10069955_B_Acads
  gRNA
tgtgctggcaaataccaccg

SEQ ID NO: 69956 - DNA, 20 bp, Artificial Sequence
  MKO10069956_B_Acads
  gRNA
gtcccgtcagtctctctact

SEQ ID NO: 69957 - DNA, 20 bp, Artificial Sequence
  MKO10069957_B_Acads
  gRNA
aggcacggctgatctcctcc

SEQ ID NO: 69958 - DNA, 20 bp, Artificial Sequence
  MKO10069958_B_Acadvl
  gRNA
acacctgatcaatggtaagc

SEQ ID NO: 69959 - DNA, 20 bp, Artificial Sequence
  MKO10069959_B_Acadvl
  gRNA
gcgatctactactgtgcttc

SEQ ID NO: 69960 - DNA, 20 bp, Artificial Sequence
  MKO10069960_B_Acadvl
  gRNA
ttctctggtggaagcatcag

SEQ ID NO: 69961 - DNA, 20 bp, Artificial Sequence
  MKO10069961_B_Acan
  gRNA
agtgagaacctacggaatcc

SEQ ID NO: 69962 - DNA, 20 bp, Artificial Sequence
  MKO10069962_B_Acan
  gRNA
gatctccaaggtagcatcgc

SEQ ID NO: 69963 - DNA, 20 bp, Artificial Sequence
  MKO10069963_B_Acan
  gRNA
tcatatcgggatgagggatc

SEQ ID NO: 69964 - DNA, 20 bp, Artificial Sequence
  MKO10069964_B_Acap1
  gRNA
gtatcacataccgccatcat

SEQ ID NO: 69965 - DNA, 20 bp, Artificial Sequence
  MKO10069965_B_Acap1
  gRNA
cgtgagtctgaaccacaaac

SEQ ID NO: 69966 - DNA, 20 bp, Artificial Sequence
  MKO10069966_B_Acap1
  gRNA
cagcatggctgtccagtttg

SEQ ID NO: 69967 - DNA, 20 bp, Artificial Sequence
  MKO10069967_B_Acap2
  gRNA
tcctagggctgctttggaag

SEQ ID NO: 69968 - DNA, 20 bp, Artificial Sequence
  MKO10069968_B_Acap2
  gRNA
ccttaattgatctctgggtt

SEQ ID NO: 69969 - DNA, 20 bp, Artificial Sequence
  MKO10069969_B_Acap2
  gRNA
ctgaagactgtcagaaaact

SEQ ID NO: 69970 - DNA, 20 bp, Artificial Sequence
  MKO10069970_B_Acap3
  gRNA
accgctcacaaagagcctgt

SEQ ID NO: 69971 - DNA, 20 bp, Artificial Sequence
  MKO10069971_B_Acap3
  gRNA
aacagatgtggttgagatcg

SEQ ID NO: 69972 - DNA, 20 bp, Artificial Sequence
  MKO10069972_B_Acap3
  gRNA
atcccagatcctgtttgacc

SEQ ID NO: 69973 - DNA, 20 bp, Artificial Sequence
  MKO10069973_B_Acat1
  gRNA
tgcagcagtaccaagtttag

SEQ ID NO: 69974 - DNA, 20 bp, Artificial Sequence
  MKO10069974_B_Acat1
  gRNA
gtgaaggacaggcccctacc

SEQ ID NO: 69975 - DNA, 20 bp, Artificial Sequence
  MKO10069975_B_Acat1
  gRNA
aagtcttatgtgtggacatc

SEQ ID NO: 69976 - DNA, 20 bp, Artificial Sequence
  MKO10069976_B_Acat2
  gRNA
gacatgtccaaatatgacct

SEQ ID NO: 69977 - DNA, 20 bp, Artificial Sequence
  MKO10069977_B_Acat2
  gRNA
tcctactcgacaagccagtg

SEQ ID NO: 69978 - DNA, 20 bp, Artificial Sequence
  MKO10069978_B_Acat2
  gRNA
catgcctccagctaccacaa

SEQ ID NO: 69979 - DNA, 20 bp, Artificial Sequence
  MKO10069979_B_Acat3
  gRNA
gacatgtccaaatatgacct

SEQ ID NO: 69980 - DNA, 20 bp, Artificial Sequence
  MKO10069980_B_Acat3
  gRNA
tcctactcgacaagccagtg

SEQ ID NO: 69981 - DNA, 20 bp, Artificial Sequence
  MKO10069981_B_Acat3
  gRNA
catgcctccagctaccacaa

SEQ ID NO: 69982 - DNA, 20 bp, Artificial Sequence
  MKO10069982_B_Acbd3
  gRNA
tgctgttgttcgtagttccc

SEQ ID NO: 69983 - DNA, 20 bp, Artificial Sequence
  MKO10069983_B_Acbd3
  gRNA
ggaagagaggcggcggatag

SEQ ID NO: 69984 - DNA, 20 bp, Artificial Sequence
  MKO10069984_B_Acbd3
  gRNA
gcaacatatgccgagaggag

SEQ ID NO: 69985 - DNA, 20 bp, Artificial Sequence
  MKO10069985_B_Acbd4
  gRNA
ttgcagagtcgcttcaaagt

SEQ ID NO: 69986 - DNA, 20 bp, Artificial Sequence
  MKO10069986_B_Acbd4
  gRNA
acccatgctgcttcgagctc

SEQ ID NO: 69987 - DNA, 20 bp, Artificial Sequence
  MKO10069987_B_Acbd4
  gRNA
ctcctagggatgcctggaac

SEQ ID NO: 69988 - DNA, 20 bp, Artificial Sequence
  MKO10069988_B_Acbd5
  gRNA
atccagagtttgccgaaaaa

SEQ ID NO: 69989 - DNA, 20 bp, Artificial Sequence
  MKO10069989_B_Acbd5
  gRNA
gttctatagcttctacaaac

SEQ ID NO: 69990 - DNA, 20 bp, Artificial Sequence
  MKO10069990_B_Acbd5
  gRNA
aagagttctgacttgacctc

SEQ ID NO: 69991 - DNA, 20 bp, Artificial Sequence
  MKO10069991_B_Acbd6
  gRNA
aagccctagccaagcaatgc

SEQ ID NO: 69992 - DNA, 20 bp, Artificial Sequence
  MKO10069992_B_Acbd6
  gRNA
ccttcaaaatcaaagaaatt

SEQ ID NO: 69993 - DNA, 20 bp, Artificial Sequence
  MKO10069993_B_Acbd6
  gRNA
gaagtcaggacaggaactca

SEQ ID NO: 69994 - DNA, 20 bp, Artificial Sequence
  MKO10069994_B_Acbd7
  gRNA
cagcttcctcacgtcttgtg

SEQ ID NO: 69995 - DNA, 20 bp, Artificial Sequence
  MKO10069995_B_Acbd7
  gRNA
tctcatcattatgtccttgc

SEQ ID NO: 69996 - DNA, 20 bp, Artificial Sequence
  MKO10069996_B_Acbd7
  gRNA
ctctctcgctttagaaatat

SEQ ID NO: 69997 - DNA, 20 bp, Artificial Sequence
  MKO10069997_B_Accsl
  gRNA
tgccagccccacgcttagat

SEQ ID NO: 69998 - DNA, 20 bp, Artificial Sequence
  MKO10069998_B_Accsl
  gRNA
cccagctgcagtactccgac

SEQ ID NO: 69999 - DNA, 20 bp, Artificial Sequence
  MKO10069999_B_Accsl
  gRNA
agctagccagctcttcccga

SEQ ID NO: 70000 - DNA, 20 bp, Artificial Sequence
  MKO10070000_B_Accs
  gRNA
tctgcagggcatcattaact

SEQ ID NO: 70001 - DNA, 20 bp, Artificial Sequence
  MKO10070001_B_Accs
  gRNA
gtctttctattgtaagagcc

SEQ ID NO: 70002 - DNA, 20 bp, Artificial Sequence
  MKO10070002_B_Accs
  gRNA
aacaaatgtcctctccagtc

SEQ ID NO: 70003 - DNA, 20 bp, Artificial Sequence
  MKO10070003_B_Acd
  gRNA
gcccgcaggcctgcagtagc

SEQ ID NO: 70004 - DNA, 20 bp, Artificial Sequence
  MKO10070004_B_Acd
  gRNA
gcctgcggagttctacctcc

SEQ ID NO: 70005 - DNA, 20 bp, Artificial Sequence
  MKO10070005_B_Acd
  gRNA
ctgcgggctccgcgttcagg

SEQ ID NO: 70006 - DNA, 20 bp, Artificial Sequence
  MKO10070006_B_Ace2
  gRNA
aaaacagattataacgacta

SEQ ID NO: 70007 - DNA, 20 bp, Artificial Sequence
  MKO10070007_B_Ace2
  gRNA
gaatgcttattacttgagcc

SEQ ID NO: 70008 - DNA, 20 bp, Artificial Sequence
  MKO10070008_B_Ace2
  gRNA
tgtggtcctgaaaaacgaga

SEQ ID NO: 70009 - DNA, 20 bp, Artificial Sequence
  MKO10070009_B_Ace3
  gRNA
gcccacggaggatctcctag

SEQ ID NO: 70010 - DNA, 20 bp, Artificial Sequence
  MKO10070010_B_Ace3
  gRNA
gacagcatataaccgagctg

SEQ ID NO: 70011 - DNA, 20 bp, Artificial Sequence
  MKO10070011_B_Ace3
  gRNA
agcccacttaccattatatt

SEQ ID NO: 70012 - DNA, 20 bp, Artificial Sequence
  MKO10070012_B_Acer1
  gRNA
ggattagggatgatgatctt

SEQ ID NO: 70013 - DNA, 20 bp, Artificial Sequence
  MKO10070013_B_Acer1
  gRNA
tctactacctgcacagcatt

SEQ ID NO: 70014 - DNA, 20 bp, Artificial Sequence
  MKO10070014_B_Acer1
  gRNA
caagaaggtgctgataatag

SEQ ID NO: 70015 - DNA, 20 bp, Artificial Sequence
  MKO10070015_B_Acer2
  gRNA
ctgtcattccgaaagatctt

SEQ ID NO: 70016 - DNA, 20 bp, Artificial Sequence
  MKO10070016_B_Acer2
  gRNA
caatgtgcgtgtgtttaagc

SEQ ID NO: 70017 - DNA, 20 bp, Artificial Sequence
  MKO10070017_B_Acer2
  gRNA
ggtatttaccaaagatcttt

SEQ ID NO: 70018 - DNA, 20 bp, Artificial Sequence
  MKO10070018_B_Acer3
  gRNA
ctgttaaactgtatagaaat

SEQ ID NO: 70019 - DNA, 20 bp, Artificial Sequence
  MKO10070019_B_Acer3
  gRNA
atacagtttaacagtaacta

SEQ ID NO: 70020 - DNA, 20 bp, Artificial Sequence
  MKO10070020_B_Acer3
  gRNA
gactctgaaatatgaaatgc

SEQ ID NO: 70021 - DNA, 20 bp, Artificial Sequence
  MKO10070021_B_Ace
  gRNA
acttgtatgcccctggaacc

SEQ ID NO: 70022 - DNA, 20 bp, Artificial Sequence
  MKO10070022_B_Ace
  gRNA
tccagatctaacaaacatga

SEQ ID NO: 70023 - DNA, 20 bp, Artificial Sequence
  MKO10070023_B_Ace
  gRNA
tccaatcacaccctgaaata

SEQ ID NO: 70024 - DNA, 20 bp, Artificial Sequence
  MKO10070024_B_Ache
  gRNA
tgtagttcagcgagggatcc

SEQ ID NO: 70025 - DNA, 20 bp, Artificial Sequence
  MKO10070025_B_Ache
  gRNA
cccaaattgctcagcgccac

SEQ ID NO: 70026 - DNA, 20 bp, Artificial Sequence
  MKO10070026_B_Ache
  gRNA
atccgcctgaaggcccctgg

SEQ ID NO: 70027 - DNA, 20 bp, Artificial Sequence
  MKO10070027_B_Acin1
  gRNA
cgatgcccaagtcattcaag

SEQ ID NO: 70028 - DNA, 20 bp, Artificial Sequence
  MKO10070028_B_Acin1
  gRNA
cgatgactcccgaatctctg

SEQ ID NO: 70029 - DNA, 20 bp, Artificial Sequence
  MKO10070029_B_Acin1
  gRNA
ttgctgacttggtctgcaac

SEQ ID NO: 70030 - DNA, 20 bp, Artificial Sequence
  MKO10070030_B_Ackr2
  gRNA
tggcactgctatgcggattt

SEQ ID NO: 70031 - DNA, 20 bp, Artificial Sequence
  MKO10070031_B_Ackr2
  gRNA
gcgcttccagctgaaccttc

SEQ ID NO: 70032 - DNA, 20 bp, Artificial Sequence
  MKO10070032_B_Ackr2
  gRNA
tctgcagtcaccgcttccgc

SEQ ID NO: 70033 - DNA, 20 bp, Artificial Sequence
  MKO10070033_B_Ackr3
  gRNA
tcgtcatcaccatccccgtc

SEQ ID NO: 70034 - DNA, 20 bp, Artificial Sequence
  MKO10070034_B_Ackr3
  gRNA
gcagtgcgtgtcgtagcctg

SEQ ID NO: 70035 - DNA, 20 bp, Artificial Sequence
  MKO10070035_B_Ackr3
  gRNA
ctgacatggctctagcgagc

SEQ ID NO: 70036 - DNA, 20 bp, Artificial Sequence
  MKO10070036_B_Ackr4
  gRNA
tgtgctatgccagtaccgcc

SEQ ID NO: 70037 - DNA, 20 bp, Artificial Sequence
  MKO10070037_B_Ackr4
  gRNA
catcttgatgagcgccctgg

SEQ ID NO: 70038 - DNA, 20 bp, Artificial Sequence
  MKO10070038_B_Ackr4
  gRNA
ttatgcagatcacttcgtac

SEQ ID NO: 70039 - DNA, 20 bp, Artificial Sequence
  MKO10070039_B_Acly
  gRNA
tcacccgggcgtacttgaac

SEQ ID NO: 70040 - DNA, 20 bp, Artificial Sequence
  MKO10070040_B_Acly
  gRNA
acgtgtgcatctatgctacc

SEQ ID NO: 70041 - DNA, 20 bp, Artificial Sequence
  MKO10070041_B_Acly
  gRNA
ccttaggtcggcaaggccaa

SEQ ID NO: 70042 - DNA, 20 bp, Artificial Sequence
  MKO10070042_B_Acmsd
  gRNA
gagtgatccaacagaactgc

SEQ ID NO: 70043 - DNA, 20 bp, Artificial Sequence
  MKO10070043_B_Acmsd
  gRNA
ttcctgtcatgtttagctac

SEQ ID NO: 70044 - DNA, 20 bp, Artificial Sequence
  MKO10070044_B_Acmsd
  gRNA
tcattgcagaggtttggcta

SEQ ID NO: 70045 - DNA, 20 bp, Artificial Sequence
  MKO10070045_B_Acn9
  gRNA
agtgatactaaactgcctat

SEQ ID NO: 70046 - DNA, 20 bp, Artificial Sequence
  MKO10070046_B_Acn9
  gRNA
agattcgcctatataaagcc

SEQ ID NO: 70047 - DNA, 20 bp, Artificial Sequence
  MKO10070047_B_Acn9
  gRNA
ggcgaatcttgctgctacat

SEQ ID NO: 70048 - DNA, 20 bp, Artificial Sequence
  MKO10070048_B_Acnat1
  gRNA
cctgcctgagaaactgcaag

SEQ ID NO: 70049 - DNA, 20 bp, Artificial Sequence
  MKO10070049_B_Acnat1
  gRNA
ccttggggggtgactatgta

SEQ ID NO: 70050 - DNA, 20 bp, Artificial Sequence
  MKO10070050_B_Acnat1
  gRNA
cacaccttcaaatgcccttg

SEQ ID NO: 70051 - DNA, 20 bp, Artificial Sequence
  MKO10070051_B_Acnat2
  gRNA
tttctcaggcaggtcttcat

SEQ ID NO: 70052 - DNA, 20 bp, Artificial Sequence
  MKO10070052_B_Acnat2
  gRNA
acatagtcaccccccaaagc

SEQ ID NO: 70053 - DNA, 20 bp, Artificial Sequence
  MKO10070053_B_Acnat2
  gRNA
ctttggggggtgactatgta

SEQ ID NO: 70054 - DNA, 20 bp, Artificial Sequence
  MKO10070054_B_Aco1
  gRNA
aaactcatcacagttccgaa

SEQ ID NO: 70055 - DNA, 20 bp, Artificial Sequence
  MKO10070055_B_Aco1
  gRNA
acatcgagaatatcctgaat

SEQ ID NO: 70056 - DNA, 20 bp, Artificial Sequence
  MKO10070056_B_Aco1
  gRNA
ccttaggggtgtgcctgctg

SEQ ID NO: 70057 - DNA, 20 bp, Artificial Sequence
  MKO10070057_B_Aco2
  gRNA
tggatctgggatcattcacc

SEQ ID NO: 70058 - DNA, 20 bp, Artificial Sequence
  MKO10070058_B_Aco2
  gRNA
gtgccgatcagaagaactcc

SEQ ID NO: 70059 - DNA, 20 bp, Artificial Sequence
  MKO10070059_B_Aco2
  gRNA
actgattcgcacacccccaa

SEQ ID NO: 70060 - DNA, 20 bp, Artificial Sequence
  MKO10070060_B_Acot10
  gRNA
taccccagtaaccttaaaaa

SEQ ID NO: 70061 - DNA, 20 bp, Artificial Sequence
  MKO10070061_B_Acot10
  gRNA
tagtaggtatttccacagtc

SEQ ID NO: 70062 - DNA, 20 bp, Artificial Sequence
  MKO10070062_B_Acot10
  gRNA
acatatcaatcttgtccacc

SEQ ID NO: 70063 - DNA, 20 bp, Artificial Sequence
  MKO10070063_B_Acot11
  gRNA
tctcctcagtgtcggccaag

SEQ ID NO: 70064 - DNA, 20 bp, Artificial Sequence
  MKO10070064_B_Acot11
  gRNA
gaagtagatgtcatccatag

SEQ ID NO: 70065 - DNA, 20 bp, Artificial Sequence
  MKO10070065_B_Acot11
  gRNA
atatcaaggccaaggtgaac

SEQ ID NO: 70066 - DNA, 20 bp, Artificial Sequence
  MKO10070066_B_Acot12
  gRNA
ttctgtttgaggacacagcg

SEQ ID NO: 70067 - DNA, 20 bp, Artificial Sequence
  MKO10070067_B_Acot12
  gRNA
ccatcagagcaaaagtgact

SEQ ID NO: 70068 - DNA, 20 bp, Artificial Sequence
  MKO10070068_B_Acot12
  gRNA
ctccttcataatgttgttga

SEQ ID NO: 70069 - DNA, 20 bp, Artificial Sequence
  MKO10070069_B_Acot13
  gRNA
tacttaggtgacgcttgtct

SEQ ID NO: 70070 - DNA, 20 bp, Artificial Sequence
  MKO10070070_B_Acot13
  gRNA
agagcagcatactaataaac

SEQ ID NO: 70071 - DNA, 20 bp, Artificial Sequence
  MKO10070071_B_Acot13
  gRNA
tacatgtcacctgctaagat

SEQ ID NO: 70072 - DNA, 20 bp, Artificial Sequence
  MKO10070072_B_Acot1
  gRNA
cgatgacctccccaagaaca

SEQ ID NO: 70073 - DNA, 20 bp, Artificial Sequence
  MKO10070073_B_Acot1
  gRNA
gctgctgccatgcatccaac

SEQ ID NO: 70074 - DNA, 20 bp, Artificial Sequence
  MKO10070074_B_Acot1
  gRNA
gcagaacctggaccctttcc

SEQ ID NO: 70075 - DNA, 20 bp, Artificial Sequence
  MKO10070075_B_Acot2
  gRNA
gctgctgccatgcgtccacc

SEQ ID NO: 70076 - DNA, 20 bp, Artificial Sequence
  MKO10070076_B_Acot2
  gRNA
tgggaagggctttgccgtga

SEQ ID NO: 70077 - DNA, 20 bp, Artificial Sequence
  MKO10070077_B_Acot2
  gRNA
gagcatagaaaccatgcaca

SEQ ID NO: 70078 - DNA, 20 bp, Artificial Sequence
  MKO10070078_B_Acot3
  gRNA
ttaccacccagaacccgaac

SEQ ID NO: 70079 - DNA, 20 bp, Artificial Sequence
  MKO10070079_B_Acot3
  gRNA
gtcacaaaggcaaccacccg

SEQ ID NO: 70080 - DNA, 20 bp, Artificial Sequence
  MKO10070080_B_Acot3
  gRNA
ggacatggacattatccacc

SEQ ID NO: 70081 - DNA, 20 bp, Artificial Sequence
  MKO10070081_B_Acot4
  gRNA
ccataaacatcgatgatgcc

SEQ ID NO: 70082 - DNA, 20 bp, Artificial Sequence
  MKO10070082_B_Acot4
  gRNA
aatggcagcgacactgagcg

SEQ ID NO: 70083 - DNA, 20 bp, Artificial Sequence
  MKO10070083_B_Acot4
  gRNA
cgccagccgccgcccgccat

SEQ ID NO: 70084 - DNA, 20 bp, Artificial Sequence
  MKO10070084_B_Acot5
  gRNA
gatggtgccaacagtaagcc

SEQ ID NO: 70085 - DNA, 20 bp, Artificial Sequence
  MKO10070085_B_Acot5
  gRNA
cgccagcagccgcccgccgt

SEQ ID NO: 70086 - DNA, 20 bp, Artificial Sequence
  MKO10070086_B_Acot5
  gRNA
taaatatgatgacctcccta

SEQ ID NO: 70087 - DNA, 20 bp, Artificial Sequence
  MKO10070087_B_Acot6
  gRNA
cgatgtgcagatacccttcg

SEQ ID NO: 70088 - DNA, 20 bp, Artificial Sequence
  MKO10070088_B_Acot6
  gRNA
ggtgctggacggacacgagc

SEQ ID NO: 70089 - DNA, 20 bp, Artificial Sequence
  MKO10070089_B_Acot6
  gRNA
tttgatgctacgccatcctc

SEQ ID NO: 70090 - DNA, 20 bp, Artificial Sequence
  MKO10070090_B_Acot7
  gRNA
ggtcatcttaccacaatggg

SEQ ID NO: 70091 - DNA, 20 bp, Artificial Sequence
  MKO10070091_B_Acot7
  gRNA
ccggggccatcatcagcacg

SEQ ID NO: 70092 - DNA, 20 bp, Artificial Sequence
  MKO10070092_B_Acot7
  gRNA
ccttgaggtgcctcccattg

SEQ ID NO: 70093 - DNA, 20 bp, Artificial Sequence
  MKO10070093_B_Acot8
  gRNA
cttctcagtgcgcgccgtga

SEQ ID NO: 70094 - DNA, 20 bp, Artificial Sequence
  MKO10070094_B_Acot8
  gRNA
ccttcacaagaagtatcgag

SEQ ID NO: 70095 - DNA, 20 bp, Artificial Sequence
  MKO10070095_B_Acot8
  gRNA
gccccaccagtccaagtata

SEQ ID NO: 70096 - DNA, 20 bp, Artificial Sequence
  MKO10070096_B_Acot9
  gRNA
tgactgttcaaaatacagta

SEQ ID NO: 70097 - DNA, 20 bp, Artificial Sequence
  MKO10070097_B_Acot9
  gRNA
gaacccttacacatccatca

SEQ ID NO: 70098 - DNA, 20 bp, Artificial Sequence
  MKO10070098_B_Acot9
  gRNA
cttgccttgatggatgtgta

SEQ ID NO: 70099 - DNA, 20 bp, Artificial Sequence
  MKO10070099_B_Acox1
  gRNA
ctcacggatagggacaacaa

SEQ ID NO: 70100 - DNA, 20 bp, Artificial Sequence
  MKO10070100_B_Acox1
  gRNA
cttcgaagctctgtgcaccg

SEQ ID NO: 70101 - DNA, 20 bp, Artificial Sequence
  MKO10070101_B_Acox1
  gRNA
tgagcctttggaccttcact

SEQ ID NO: 70102 - DNA, 20 bp, Artificial Sequence
  MKO10070102_B_Acox2
  gRNA
atcccaagggacatacctgc

SEQ ID NO: 70103 - DNA, 20 bp, Artificial Sequence
  MKO10070103_B_Acox2
  gRNA
gtggtcctctaggctccgga

SEQ ID NO: 70104 - DNA, 20 bp, Artificial Sequence
  MKO10070104_B_Acox2
  gRNA
ttaagttgttatatccagca

SEQ ID NO: 70105 - DNA, 20 bp, Artificial Sequence
  MKO10070105_B_Acox3
  gRNA
gcaggtcggccccgtacgag

SEQ ID NO: 70106 - DNA, 20 bp, Artificial Sequence
  MKO10070106_B_Acox3
  gRNA
ccttgagaagatctatagcc

SEQ ID NO: 70107 - DNA, 20 bp, Artificial Sequence
  MKO10070107_B_Acox3
  gRNA
gctctcaccgaactgagtca

SEQ ID NO: 70108 - DNA, 20 bp, Artificial Sequence
  MKO10070108_B_Acoxl
  gRNA
aacgcccacaagatgtacat

SEQ ID NO: 70109 - DNA, 20 bp, Artificial Sequence
  MKO10070109_B_Acoxl
  gRNA
catcagccaaatccttatcc

SEQ ID NO: 70110 - DNA, 20 bp, Artificial Sequence
  MKO10070110_B_Acoxl
  gRNA
cttgagtggccaaaaccact

SEQ ID NO: 70111 - DNA, 20 bp, Artificial Sequence
  MKO10070111_B_Acp1
  gRNA
ccattgcagaagcagtattc

SEQ ID NO: 70112 - DNA, 20 bp, Artificial Sequence
  MKO10070112_B_Acp1
  gRNA
attcgattatatactatgta

SEQ ID NO: 70113 - DNA, 20 bp, Artificial Sequence
  MKO10070113_B_Acp1
  gRNA
acatagtatataatcgaatg

SEQ ID NO: 70114 - DNA, 20 bp, Artificial Sequence
  MKO10070114_B_Acp2
  gRNA
gttgaagtgctgaacttcat

SEQ ID NO: 70115 - DNA, 20 bp, Artificial Sequence
  MKO10070115_B_Acp2
  gRNA
ttctgaacacctcttaccac

SEQ ID NO: 70116 - DNA, 20 bp, Artificial Sequence
  MKO10070116_B_Acp2
  gRNA
ataggctgccatgaaatgtt

SEQ ID NO: 70117 - DNA, 20 bp, Artificial Sequence
  MKO10070117_B_Acp5
  gRNA
gtaggcagtgaccccgtatg

SEQ ID NO: 70118 - DNA, 20 bp, Artificial Sequence
  MKO10070118_B_Acp5
  gRNA
gcccaaaatgcctcgagacc

SEQ ID NO: 70119 - DNA, 20 bp, Artificial Sequence
  MKO10070119_B_Acp5
  gRNA
tgctgggcctacaaatcata

SEQ ID NO: 70120 - DNA, 20 bp, Artificial Sequence
  MKO10070120_B_Acp6
  gRNA
ggaatctactcggtgcttgc

SEQ ID NO: 70121 - DNA, 20 bp, Artificial Sequence
  MKO10070121_B_Acp6
  gRNA
ctttagggtggcgtgcttgc

SEQ ID NO: 70122 - DNA, 20 bp, Artificial Sequence
  MKO10070122_B_Acp6
  gRNA
ttccagattccgaaacatgt

SEQ ID NO: 70123 - DNA, 20 bp, Artificial Sequence
  MKO10070123_B_Acpl2
  gRNA
ccccacgaagcagctccgcg

SEQ ID NO: 70124 - DNA, 20 bp, Artificial Sequence
  MKO10070124_B_Acpl2
  gRNA
aatcttggccatctccccgt

SEQ ID NO: 70125 - DNA, 20 bp, Artificial Sequence
  MKO10070125_B_Acpl2
  gRNA
atgctgtgctccgctacgct

SEQ ID NO: 70126 - DNA, 20 bp, Artificial Sequence
  MKO10070126_B_Acpp
  gRNA
gggcagaggaacggctcgca

SEQ ID NO: 70127 - DNA, 20 bp, Artificial Sequence
  MKO10070127_B_Acpp
  gRNA
acttgcctgatcatgcttat

SEQ ID NO: 70128 - DNA, 20 bp, Artificial Sequence
  MKO10070128_B_Acpp
  gRNA
ttccagatgctgatcccctc

SEQ ID NO: 70129 - DNA, 20 bp, Artificial Sequence
  MKO10070129_B_Acpt
  gRNA
ggagagtgcacaagccaacc

SEQ ID NO: 70130 - DNA, 20 bp, Artificial Sequence
  MKO10070130_B_Acpt
  gRNA
agctgactaccaggaggccc

SEQ ID NO: 70131 - DNA, 20 bp, Artificial Sequence
  MKO10070131_B_Acpt
  gRNA
ccctcctcaccttagtcagt

SEQ ID NO: 70132 - DNA, 20 bp, Artificial Sequence
  MKO10070132_B_Acrbp
  gRNA
gccatgatgaatctagctgc

SEQ ID NO: 70133 - DNA, 20 bp, Artificial Sequence
  MKO10070133_B_Acrbp
  gRNA
cccattgtgtcccatgccac

SEQ ID NO: 70134 - DNA, 20 bp, Artificial Sequence
  MKO10070134_B_Acrbp
  gRNA
ctccacctccttgagagtgt

SEQ ID NO: 70135 - DNA, 20 bp, Artificial Sequence
  MKO10070135_B_Acrv1
  gRNA
cacacccttgaaccatgaac

SEQ ID NO: 70136 - DNA, 20 bp, Artificial Sequence
  MKO10070136_B_Acrv1
  gRNA
aatgaaggagttaatcttac

SEQ ID NO: 70137 - DNA, 20 bp, Artificial Sequence
  MKO10070137_B_Acrv1
  gRNA
tcttctttaacatgcactgc

SEQ ID NO: 70138 - DNA, 20 bp, Artificial Sequence
  MKO10070138_B_Acr
  gRNA
ctgcctgaatcgtaacccac

SEQ ID NO: 70139 - DNA, 20 bp, Artificial Sequence
  MKO10070139_B_Acr
  gRNA
ccccacacctgctacgtgac

SEQ ID NO: 70140 - DNA, 20 bp, Artificial Sequence
  MKO10070140_B_Acr
  gRNA
ggagcacaagaaatcgaata

SEQ ID NO: 70141 - DNA, 20 bp, Artificial Sequence
  MKO10070141_B_Acsbg1
  gRNA
cccaccagctccttaattga

SEQ ID NO: 70142 - DNA, 20 bp, Artificial Sequence
  MKO10070142_B_Acsbg1
  gRNA
agccaaggatcgccacgctg

SEQ ID NO: 70143 - DNA, 20 bp, Artificial Sequence
  MKO10070143_B_Acsbg1
  gRNA
gagagctcgagaccgtgact

SEQ ID NO: 70144 - DNA, 20 bp, Artificial Sequence
  MKO10070144_B_Acsbg2
  gRNA
cgacacactggaagcgctgc

SEQ ID NO: 70145 - DNA, 20 bp, Artificial Sequence
  MKO10070145_B_Acsbg2
  gRNA
ttcgacacatttcatagtac

SEQ ID NO: 70146 - DNA, 20 bp, Artificial Sequence
  MKO10070146_B_Acsbg2
  gRNA
tgagcgattcagtgcttatc

SEQ ID NO: 70147 - DNA, 20 bp, Artificial Sequence
  MKO10070147_B_Acsf2
  gRNA
tacccacctctcactcttca

SEQ ID NO: 70148 - DNA, 20 bp, Artificial Sequence
  MKO10070148_B_Acsf2
  gRNA
tgggtccccacatgcccagc

SEQ ID NO: 70149 - DNA, 20 bp, Artificial Sequence
  MKO10070149_B_Acsf2
  gRNA
ggggacccaactcctatgcc

SEQ ID NO: 70150 - DNA, 20 bp, Artificial Sequence
  MKO10070150_B_Acsf3
  gRNA
ctggcacgcgagcctccgtc

SEQ ID NO: 70151 - DNA, 20 bp, Artificial Sequence
  MKO10070151_B_Acsf3
  gRNA
catctcagaaaacccgcaga

SEQ ID NO: 70152 - DNA, 20 bp, Artificial Sequence
  MKO10070152_B_Acsf3
  gRNA
gccatgaatacggtaatctg

SEQ ID NO: 70153 - DNA, 20 bp, Artificial Sequence
  MKO10070153_B_Acsl1
  gRNA
tgatcttcgaataccatcag

SEQ ID NO: 70154 - DNA, 20 bp, Artificial Sequence
  MKO10070154_B_Acsl1
  gRNA
ggcttccgagaacctaaaca

SEQ ID NO: 70155 - DNA, 20 bp, Artificial Sequence
  MKO10070155_B_Acsl1
  gRNA
ccttgctccgagcagttcat

SEQ ID NO: 70156 - DNA, 20 bp, Artificial Sequence
  MKO10070156_B_Acsl3
  gRNA
gcagtaatcatgtacacaag

SEQ ID NO: 70157 - DNA, 20 bp, Artificial Sequence
  MKO10070157_B_Acsl3
  gRNA
ggcgagaaggattccaagac

SEQ ID NO: 70158 - DNA, 20 bp, Artificial Sequence
  MKO10070158_B_Acsl3
  gRNA
agcgatcatccactcagccc

SEQ ID NO: 70159 - DNA, 20 bp, Artificial Sequence
  MKO10070159_B_Acsl4
  gRNA
ttatccagagtatctgctcc

SEQ ID NO: 70160 - DNA, 20 bp, Artificial Sequence
  MKO10070160_B_Acsl4
  gRNA
gaccatgctgtagccaaatt

SEQ ID NO: 70161 - DNA, 20 bp, Artificial Sequence
  MKO10070161_B_Acsl4
  gRNA
gattactagtgttgagcttc

SEQ ID NO: 70162 - DNA, 20 bp, Artificial Sequence
  MKO10070162_B_Acsl5
  gRNA
taaaggatataagtcatcac

SEQ ID NO: 70163 - DNA, 20 bp, Artificial Sequence
  MKO10070163_B_Acsl5
  gRNA
ctgtacccagcgtgtcatac

SEQ ID NO: 70164 - DNA, 20 bp, Artificial Sequence
  MKO10070164_B_Acsl5
  gRNA
tttgtaggagatccatttgt

SEQ ID NO: 70165 - DNA, 20 bp, Artificial Sequence
  MKO10070165_B_Acsl6
  gRNA
cctgcggctgcccgagctat

SEQ ID NO: 70166 - DNA, 20 bp, Artificial Sequence
  MKO10070166_B_Acsl6
  gRNA
aacccccaatcacagatcgc

SEQ ID NO: 70167 - DNA, 20 bp, Artificial Sequence
  MKO10070167_B_Acsl6
  gRNA
tctccagcacgactgtaaag

SEQ ID NO: 70168 - DNA, 20 bp, Artificial Sequence
  MKO10070168_B_Acsm1
  gRNA
tggctcgagatatttgtatt

SEQ ID NO: 70169 - DNA, 20 bp, Artificial Sequence
  MKO10070169_B_Acsm1
  gRNA
acaaatctgctcaaagacgt

SEQ ID NO: 70170 - DNA, 20 bp, Artificial Sequence
  MKO10070170_B_Acsm1
  gRNA
ctagggatcatcttcatgcc

SEQ ID NO: 70171 - DNA, 20 bp, Artificial Sequence
  MKO10070171_B_Acsm2
  gRNA
tacttcgtccccagccacaa

SEQ ID NO: 70172 - DNA, 20 bp, Artificial Sequence
  MKO10070172_B_Acsm2
  gRNA
gcagccatctacttcactag

SEQ ID NO: 70173 - DNA, 20 bp, Artificial Sequence
  MKO10070173_B_Acsm2
  gRNA
ctctgactatgcatcatcta

SEQ ID NO: 70174 - DNA, 20 bp, Artificial Sequence
  MKO10070174_B_Acsm3
  gRNA
cacaaaacacgacgagatga

SEQ ID NO: 70175 - DNA, 20 bp, Artificial Sequence
  MKO10070175_B_Acsm3
  gRNA
cattattaccgatgatactt

SEQ ID NO: 70176 - DNA, 20 bp, Artificial Sequence
  MKO10070176_B_Acsm3
  gRNA
taggattgtctgtcaatgga

SEQ ID NO: 70177 - DNA, 20 bp, Artificial Sequence
  MKO10070177_B_Acsm4
  gRNA
tgaggaagtggcccccgcag

SEQ ID NO: 70178 - DNA, 20 bp, Artificial Sequence
  MKO10070178_B_Acsm4
  gRNA
tggatgcttgcagccggtag

SEQ ID NO: 70179 - DNA, 20 bp, Artificial Sequence
  MKO10070179_B_Acsm4
  gRNA
ttctgccccgtatccctgaa

SEQ ID NO: 70180 - DNA, 20 bp, Artificial Sequence
  MKO10070180_B_Acsm5
  gRNA
acgctgatcagccaccaatc

SEQ ID NO: 70181 - DNA, 20 bp, Artificial Sequence
  MKO10070181_B_Acsm5
  gRNA
cacaaaacccaatccatagc

SEQ ID NO: 70182 - DNA, 20 bp, Artificial Sequence
  MKO10070182_B_Acsm5
  gRNA
tgactgagtctgacatattc

SEQ ID NO: 70183 - DNA, 20 bp, Artificial Sequence
  MKO10070183_B_Acss1
  gRNA
aagagacatggagtgcaccg

SEQ ID NO: 70184 - DNA, 20 bp, Artificial Sequence
  MKO10070184_B_Acss1
  gRNA
ggctcctaccttgtgcgtca

SEQ ID NO: 70185 - DNA, 20 bp, Artificial Sequence
  MKO10070185_B_Acss1
  gRNA
ggctcacaggacggacacca

SEQ ID NO: 70186 - DNA, 20 bp, Artificial Sequence
  MKO10070186_B_Acss2
  gRNA
aaacatctgctacaacgtgc

SEQ ID NO: 70187 - DNA, 20 bp, Artificial Sequence
  MKO10070187_B_Acss2
  gRNA
tactggaaaaccgcatgccc

SEQ ID NO: 70188 - DNA, 20 bp, Artificial Sequence
  MKO10070188_B_Acss2
  gRNA
accacaagttccaagatcat

SEQ ID NO: 70189 - DNA, 20 bp, Artificial Sequence
  MKO10070189_B_Acss3
  gRNA
catttacagccgtccaaaca

SEQ ID NO: 70190 - DNA, 20 bp, Artificial Sequence
  MKO10070190_B_Acss3
  gRNA
cagaggtgccccaagcgtcc

SEQ ID NO: 70191 - DNA, 20 bp, Artificial Sequence
  MKO10070191_B_Acss3
  gRNA
gaggagccgctgtgacccga

SEQ ID NO: 70192 - DNA, 20 bp, Artificial Sequence
  MKO10070192_B_Acta1
  gRNA
gccccctgacatgacgttgt

SEQ ID NO: 70193 - DNA, 20 bp, Artificial Sequence
  MKO10070193_B_Acta1
  gRNA
cccctgcacaggcatcgtgt

SEQ ID NO: 70194 - DNA, 20 bp, Artificial Sequence
  MKO10070194_B_Acta1
  gRNA
cagtgaggtcgcgaccggcc

SEQ ID NO: 70195 - DNA, 20 bp, Artificial Sequence
  MKO10070195_B_Acta2
  gRNA
cactgaaccctaaggccaac

SEQ ID NO: 70196 - DNA, 20 bp, Artificial Sequence
  MKO10070196_B_Acta2
  gRNA
gcatccgacactgctgacag

SEQ ID NO: 70197 - DNA, 20 bp, Artificial Sequence
  MKO10070197_B_Acta2
  gRNA
tcacaacgtgcctatctatg

SEQ ID NO: 70198 - DNA, 20 bp, Artificial Sequence
  MKO10070198_B_Actbl2
  gRNA
caaaccgaatacttgcgttc

SEQ ID NO: 70199 - DNA, 20 bp, Artificial Sequence
  MKO10070199_B_Actbl2
  gRNA
tcccccagaacgcaagtatt

SEQ ID NO: 70200 - DNA, 20 bp, Artificial Sequence
  MKO10070200_B_Actbl2
  gRNA
ttggtcgtccacgacaccag

SEQ ID NO: 70201 - DNA, 20 bp, Artificial Sequence
  MKO10070201_B_Actb
  gRNA
agtgtgggtgaccccgtctc

SEQ ID NO: 70202 - DNA, 20 bp, Artificial Sequence
  MKO10070202_B_Actb
  gRNA
ttagcttaccttgatcttca

SEQ ID NO: 70203 - DNA, 20 bp, Artificial Sequence
  MKO10070203_B_Actb
  gRNA
agtccgcctagaagcacttg

SEQ ID NO: 70204 - DNA, 20 bp, Artificial Sequence
  MKO10070204_B_Actc1
  gRNA
ggtcccgaccagctagatcc

SEQ ID NO: 70205 - DNA, 20 bp, Artificial Sequence
  MKO10070205_B_Actc1
  gRNA
tcagcggggcttcagtgagc

SEQ ID NO: 70206 - DNA, 20 bp, Artificial Sequence
  MKO10070206_B_Actc1
  gRNA
accccatgccatcatgcgcc

SEQ ID NO: 70207 - DNA, 20 bp, Artificial Sequence
  MKO10070207_B_Actg1
  gRNA
ggacacctacccaggaagga

SEQ ID NO: 70208 - DNA, 20 bp, Artificial Sequence
  MKO10070208_B_Actg1
  gRNA
tccctaggcatggagtcctg

SEQ ID NO: 70209 - DNA, 20 bp, Artificial Sequence
  MKO10070209_B_Actg1
  gRNA
caataccccagccatgtacg

SEQ ID NO: 70210 - DNA, 20 bp, Artificial Sequence
  MKO10070210_B_Actg2
  gRNA
tgccatcatgcgtcttgacc

SEQ ID NO: 70211 - DNA, 20 bp, Artificial Sequence
  MKO10070211_B_Actg2
  gRNA
ctcgtcacagggtgtgatgg

SEQ ID NO: 70212 - DNA, 20 bp, Artificial Sequence
  MKO10070212_B_Actg2
  gRNA
ttaggggggcctctgtgagc

SEQ ID NO: 70213 - DNA, 20 bp, Artificial Sequence
  MKO10070213_B_Actl10
  gRNA
gccaatacggtggtgctagc

SEQ ID NO: 70214 - DNA, 20 bp, Artificial Sequence
  MKO10070214_B_Actl10
  gRNA
aatacatctcgcaccagcaa

SEQ ID NO: 70215 - DNA, 20 bp, Artificial Sequence
  MKO10070215_B_Actl10
  gRNA
tgaactcctttcagtgccgc

SEQ ID NO: 70216 - DNA, 20 bp, Artificial Sequence
  MKO10070216_B_Actl11
  gRNA
gtggcgatctggacactacc

SEQ ID NO: 70217 - DNA, 20 bp, Artificial Sequence
  MKO10070217_B_Actl11
  gRNA
ggagtcccggcatgccatga

SEQ ID NO: 70218 - DNA, 20 bp, Artificial Sequence
  MKO10070218_B_Actl11
  gRNA
tgtggtacccgaacaccaag

SEQ ID NO: 70219 - DNA, 20 bp, Artificial Sequence
  MKO10070219_B_Actl6a
  gRNA
cagcaccacaccgatagccg

SEQ ID NO: 70220 - DNA, 20 bp, Artificial Sequence
  MKO10070220_B_Actl6a
  gRNA
cagtttctctctcttcgccc

SEQ ID NO: 70221 - DNA, 20 bp, Artificial Sequence
  MKO10070221_B_Actl6a
  gRNA
acagtgagggctggctatgc

SEQ ID NO: 70222 - DNA, 20 bp, Artificial Sequence
  MKO10070222_B_Actl6b
  gRNA
ggagcctccgacatgagtac

SEQ ID NO: 70223 - DNA, 20 bp, Artificial Sequence
  MKO10070223_B_Actl6b
  gRNA
ggctctttctcagtccgagc

SEQ ID NO: 70224 - DNA, 20 bp, Artificial Sequence
  MKO10070224_B_Actl6b
  gRNA
cctccccagcgtacccagct

SEQ ID NO: 70225 - DNA, 20 bp, Artificial Sequence
  MKO10070225_B_Actl7a
  gRNA
atccattataccctgcctga

SEQ ID NO: 70226 - DNA, 20 bp, Artificial Sequence
  MKO10070226_B_Actl7a
  gRNA
attgacctggggggtgtcgt

SEQ ID NO: 70227 - DNA, 20 bp, Artificial Sequence
  MKO10070227_B_Actl7a
  gRNA
tggtaggcgatgtgcattgc

SEQ ID NO: 70228 - DNA, 20 bp, Artificial Sequence
  MKO10070228_B_Actl7b
  gRNA
tactgtaagtgcggctatgc

SEQ ID NO: 70229 - DNA, 20 bp, Artificial Sequence
  MKO10070229_B_Actl7b
  gRNA
aacttcaaggagacatacgt

SEQ ID NO: 70230 - DNA, 20 bp, Artificial Sequence
  MKO10070230_B_Actl7b
  gRNA
gctaacgtgctgctgtgcgg

SEQ ID NO: 70231 - DNA, 20 bp, Artificial Sequence
  MKO10070231_B_Actl9
  gRNA
attccaggattgtcgcccat

SEQ ID NO: 70232 - DNA, 20 bp, Artificial Sequence
  MKO10070232_B_Actl9
  gRNA
taccaaggaccagtcggagc

SEQ ID NO: 70233 - DNA, 20 bp, Artificial Sequence
  MKO10070233_B_Actl9
  gRNA
ctgccctgaagcgaccctcc

SEQ ID NO: 70234 - DNA, 20 bp, Artificial Sequence
  MKO10070234_B_Actn1
  gRNA
tctgtgtccccgctttgcgc

SEQ ID NO: 70235 - DNA, 20 bp, Artificial Sequence
  MKO10070235_B_Actn1
  gRNA
caccttccacggagatgtcc

SEQ ID NO: 70236 - DNA, 20 bp, Artificial Sequence
  MKO10070236_B_Actn1
  gRNA
cattctccgctttgccatcc

SEQ ID NO: 70237 - DNA, 20 bp, Artificial Sequence
  MKO10070237_B_Actn2
  gRNA
aaaggctgcccaaacctgac

SEQ ID NO: 70238 - DNA, 20 bp, Artificial Sequence
  MKO10070238_B_Actn2
  gRNA
tgttgacattcgcaatcttg

SEQ ID NO: 70239 - DNA, 20 bp, Artificial Sequence
  MKO10070239_B_Actn2
  gRNA
catcctccgcttcgccattc

SEQ ID NO: 70240 - DNA, 20 bp, Artificial Sequence
  MKO10070240_B_Actn3
  gRNA
ctagtgtccatcggtgctga

SEQ ID NO: 70241 - DNA, 20 bp, Artificial Sequence
  MKO10070241_B_Actn3
  gRNA
gcagatcgagaacattgaag

SEQ ID NO: 70242 - DNA, 20 bp, Artificial Sequence
  MKO10070242_B_Actn3
  gRNA
tccctggcagaaattgttga

SEQ ID NO: 70243 - DNA, 20 bp, Artificial Sequence
  MKO10070243_B_Actn4
  gRNA
agcacctgatatggaagttc

SEQ ID NO: 70244 - DNA, 20 bp, Artificial Sequence
  MKO10070244_B_Actn4
  gRNA
aactctcatcttcggaaggc

SEQ ID NO: 70245 - DNA, 20 bp, Artificial Sequence
  MKO10070245_B_Actn4
  gRNA
acgtccagaacttccatatc

SEQ ID NO: 70246 - DNA, 20 bp, Artificial Sequence
  MKO10070246_B_Actr10
  gRNA
cctagtgtgataaaaagagc

SEQ ID NO: 70247 - DNA, 20 bp, Artificial Sequence
  MKO10070247_B_Actr10
  gRNA
tggtcctggattgtggatat

SEQ ID NO: 70248 - DNA, 20 bp, Artificial Sequence
  MKO10070248_B_Actr10
  gRNA
tttccctatatccacaatcc

SEQ ID NO: 70249 - DNA, 20 bp, Artificial Sequence
  MKO10070249_B_Actr1a
  gRNA
ctttaaaccctcggaaaaac

SEQ ID NO: 70250 - DNA, 20 bp, Artificial Sequence
  MKO10070250_B_Actr1a
  gRNA
acccaaacatgttcgtgtca

SEQ ID NO: 70251 - DNA, 20 bp, Artificial Sequence
  MKO10070251_B_Actr1a
  gRNA
ggatccggtgtgattaaagc

SEQ ID NO: 70252 - DNA, 20 bp, Artificial Sequence
  MKO10070252_B_Actr1b
  gRNA
gctgaccatccgatacccca

SEQ ID NO: 70253 - DNA, 20 bp, Artificial Sequence
  MKO10070253_B_Actr1b
  gRNA
ggggcctccgttagaagaac

SEQ ID NO: 70254 - DNA, 20 bp, Artificial Sequence
  MKO10070254_B_Actr1b
  gRNA
gcagggttcaggggtgatca

SEQ ID NO: 70255 - DNA, 20 bp, Artificial Sequence
  MKO10070255_B_Actr2
  gRNA
acttaccttgataagatacc

SEQ ID NO: 70256 - DNA, 20 bp, Artificial Sequence
  MKO10070256_B_Actr2
  gRNA
gttctgactttgtatgctca

SEQ ID NO: 70257 - DNA, 20 bp, Artificial Sequence
  MKO10070257_B_Actr2
  gRNA
tccttccagtttgtgaagtg

SEQ ID NO: 70258 - DNA, 20 bp, Artificial Sequence
  MKO10070258_B_Actr3b
  gRNA
caactttaccttggtagcgt

SEQ ID NO: 70259 - DNA, 20 bp, Artificial Sequence
  MKO10070259_B_Actr3b
  gRNA
gttgcctgcgtagccaagct

SEQ ID NO: 70260 - DNA, 20 bp, Artificial Sequence
  MKO10070260_B_Actr3b
  gRNA
catgacgggataatgaactg

SEQ ID NO: 70261 - DNA, 20 bp, Artificial Sequence
  MKO10070261_B_Actr3
  gRNA
tgaagatcattactttcttt

SEQ ID NO: 70262 - DNA, 20 bp, Artificial Sequence
  MKO10070262_B_Actr3
  gRNA
catgatgggatgataaactg

SEQ ID NO: 70263 - DNA, 20 bp, Artificial Sequence
  MKO10070263_B_Actr3
  gRNA
cattaaagagtctgcaaaag

SEQ ID NO: 70264 - DNA, 20 bp, Artificial Sequence
  MKO10070264_B_Actr5
  gRNA
ggagcatagctacattgccg

SEQ ID NO: 70265 - DNA, 20 bp, Artificial Sequence
  MKO10070265_B_Actr5
  gRNA
ctactcccgtcaaatgatgt

SEQ ID NO: 70266 - DNA, 20 bp, Artificial Sequence
  MKO10070266_B_Actr5
  gRNA
ggagctccgacatcatttga

SEQ ID NO: 70267 - DNA, 20 bp, Artificial Sequence
  MKO10070267_B_Actr6
  gRNA
ccggtgctctcagcgcacac

SEQ ID NO: 70268 - DNA, 20 bp, Artificial Sequence
  MKO10070268_B_Actr6
  gRNA
aggatataaaagagtcctga

SEQ ID NO: 70269 - DNA, 20 bp, Artificial Sequence
  MKO10070269_B_Actr6
  gRNA
gatgaaataaaagacccttc

SEQ ID NO: 70270 - DNA, 20 bp, Artificial Sequence
  MKO10070270_B_Actr8
  gRNA
ggtcagctgaacatccaccc

SEQ ID NO: 70271 - DNA, 20 bp, Artificial Sequence
  MKO10070271_B_Actr8
  gRNA
cgaacctgttctggtgacac

SEQ ID NO: 70272 - DNA, 20 bp, Artificial Sequence
  MKO10070272_B_Actr8
  gRNA
aaaagatgtcaaacggtaca

SEQ ID NO: 70273 - DNA, 20 bp, Artificial Sequence
  MKO10070273_B_Actrt1
  gRNA
agccgaataacatctgtctg

SEQ ID NO: 70274 - DNA, 20 bp, Artificial Sequence
  MKO10070274_B_Actrt1
  gRNA
ttccgattagatcttgcaga

SEQ ID NO: 70275 - DNA, 20 bp, Artificial Sequence
  MKO10070275_B_Actrt1
  gRNA
acagagttgatgacatgacg

SEQ ID NO: 70276 - DNA, 20 bp, Artificial Sequence
  MKO10070276_B_Actrt2
  gRNA
ccatgggtgcccaactggtc

SEQ ID NO: 70277 - DNA, 20 bp, Artificial Sequence
  MKO10070277_B_Actrt2
  gRNA
gtagaaggcaggtacctcga

SEQ ID NO: 70278 - DNA, 20 bp, Artificial Sequence
  MKO10070278_B_Actrt2
  gRNA
tctccttgatgtcatccgcc

SEQ ID NO: 70279 - DNA, 20 bp, Artificial Sequence
  MKO10070279_B_Actrt3
  gRNA
cctgcctgctgtccgccgta

SEQ ID NO: 70280 - DNA, 20 bp, Artificial Sequence
  MKO10070280_B_Actrt3
  gRNA
ccggtccaagggccatacgg

SEQ ID NO: 70281 - DNA, 20 bp, Artificial Sequence
  MKO10070281_B_Actrt3
  gRNA
ttggaccggcccagaatatt

SEQ ID NO: 70282 - DNA, 20 bp, Artificial Sequence
  MKO10070282_B_Acvr1b
  gRNA
cacgccatacttccccgaac

SEQ ID NO: 70283 - DNA, 20 bp, Artificial Sequence
  MKO10070283_B_Acvr1b
  gRNA
catggtgctccacgccatcc

SEQ ID NO: 70284 - DNA, 20 bp, Artificial Sequence
  MKO10070284_B_Acvr1b
  gRNA
ccgctacacagtgaccattg

SEQ ID NO: 70285 - DNA, 20 bp, Artificial Sequence
  MKO10070285_B_Acvr1c
  gRNA
ctggcgctttccatagcgag

SEQ ID NO: 70286 - DNA, 20 bp, Artificial Sequence
  MKO10070286_B_Acvr1c
  gRNA
gcctccgtcatgctaaccaa

SEQ ID NO: 70287 - DNA, 20 bp, Artificial Sequence
  MKO10070287_B_Acvr1c
  gRNA
caaatcgtgtgtgtccctcc

SEQ ID NO: 70288 - DNA, 20 bp, Artificial Sequence
  MKO10070288_B_Acvr1
  gRNA
ggtaccatactccacgtctc

SEQ ID NO: 70289 - DNA, 20 bp, Artificial Sequence
  MKO10070289_B_Acvr1
  gRNA
ggctcgccagataaccctgt

SEQ ID NO: 70290 - DNA, 20 bp, Artificial Sequence
  MKO10070290_B_Acvr1
  gRNA
cctcccgagacgagaagtca

SEQ ID NO: 70291 - DNA, 20 bp, Artificial Sequence
  MKO10070291_B_Acvr2a
  gRNA
atgatatcaactgctatgac

SEQ ID NO: 70292 - DNA, 20 bp, Artificial Sequence
  MKO10070292_B_Acvr2a
  gRNA
ttcaaccctagtaatgggga

SEQ ID NO: 70293 - DNA, 20 bp, Artificial Sequence
  MKO10070293_B_Acvr2a
  gRNA
taccttacaggtgctatact

SEQ ID NO: 70294 - DNA, 20 bp, Artificial Sequence
  MKO10070294_B_Acvr2b
  gRNA
atcaaggctcggggccgctt

SEQ ID NO: 70295 - DNA, 20 bp, Artificial Sequence
  MKO10070295_B_Acvr2b
  gRNA
ccttctggatgtatcgtcat

SEQ ID NO: 70296 - DNA, 20 bp, Artificial Sequence
  MKO10070296_B_Acvr2b
  gRNA
gtggctcaccttgtcgtgga

SEQ ID NO: 70297 - DNA, 20 bp, Artificial Sequence
  MKO10070297_B_Acvrl1
  gRNA
cgcgccacacctcaccatat

SEQ ID NO: 70298 - DNA, 20 bp, Artificial Sequence
  MKO10070298_B_Acvrl1
  gRNA
cctggacagcgactgtacta

SEQ ID NO: 70299 - DNA, 20 bp, Artificial Sequence
  MKO10070299_B_Acvrl1
  gRNA
ccagcatcagagacacgttg

SEQ ID NO: 70300 - DNA, 20 bp, Artificial Sequence
  MKO10070300_B_Acy1
  gRNA
gccactcctaccaggcacaa

SEQ ID NO: 70301 - DNA, 20 bp, Artificial Sequence
  MKO10070301_B_Acy1
  gRNA
tctgagctgtcagaaaatag

SEQ ID NO: 70302 - DNA, 20 bp, Artificial Sequence
  MKO10070302_B_Acy1
  gRNA
agcacagtgatcacaaagcc

SEQ ID NO: 70303 - DNA, 20 bp, Artificial Sequence
  MKO10070303_B_Acy3
  gRNA
ctcatacagaaagaggcggc

SEQ ID NO: 70304 - DNA, 20 bp, Artificial Sequence
  MKO10070304_B_Acy3
  gRNA
ctgaaggtctccgtcccagc

SEQ ID NO: 70305 - DNA, 20 bp, Artificial Sequence
  MKO10070305_B_Acy3
  gRNA
acaacaccaacctgcagttg

SEQ ID NO: 70306 - DNA, 20 bp, Artificial Sequence
  MKO10070306_B_Acyp1
  gRNA
cacatacctgagtgtacttg

SEQ ID NO: 70307 - DNA, 20 bp, Artificial Sequence
  MKO10070307_B_Acyp1
  gRNA
caccgtgcaagggcaactgc

SEQ ID NO: 70308 - DNA, 20 bp, Artificial Sequence
  MKO10070308_B_Acyp1
  gRNA
tgagaaagtcatcgcaaact

SEQ ID NO: 70309 - DNA, 20 bp, Artificial Sequence
  MKO10070309_B_Acyp2
  gRNA
acagtgacaggtcaagttca

SEQ ID NO: 70310 - DNA, 20 bp, Artificial Sequence
  MKO10070310_B_Acyp2
  gRNA
tacaggtgtttgcttcagaa

SEQ ID NO: 70311 - DNA, 20 bp, Artificial Sequence
  MKO10070311_B_Acyp2
  gRNA
gaaggagaagctaagaaacg

SEQ ID NO: 70312 - DNA, 20 bp, Artificial Sequence
  MKO10070312_B_Adad1
  gRNA
gatggtattcagtacaagac

SEQ ID NO: 70313 - DNA, 20 bp, Artificial Sequence
  MKO10070313_B_Adad1
  gRNA
gcgtgttcagcttgacctta

SEQ ID NO: 70314 - DNA, 20 bp, Artificial Sequence
  MKO10070314_B_Adad1
  gRNA
cacgctgcatttgtgcaaac

SEQ ID NO: 70315 - DNA, 20 bp, Artificial Sequence
  MKO10070315_B_Adad2
  gRNA
ggctggagttctcaggccgt

SEQ ID NO: 70316 - DNA, 20 bp, Artificial Sequence
  MKO10070316_B_Adad2
  gRNA
atgggttggtctgtcctgcg

SEQ ID NO: 70317 - DNA, 20 bp, Artificial Sequence
  MKO10070317_B_Adad2
  gRNA
ctacctacctatgctgagag

SEQ ID NO: 70318 - DNA, 20 bp, Artificial Sequence
  MKO10070318_B_Adal
  gRNA
gagctccatgcccacttgaa

SEQ ID NO: 70319 - DNA, 20 bp, Artificial Sequence
  MKO10070319_B_Adal
  gRNA
tagtaagctgatgtataact

SEQ ID NO: 70320 - DNA, 20 bp, Artificial Sequence
  MKO10070320_B_Adal
  gRNA
aatgactaggaagacttacg

SEQ ID NO: 70321 - DNA, 20 bp, Artificial Sequence
  MKO10070321_B_Adam10
  gRNA
gatacctctcatatttacac

SEQ ID NO: 70322 - DNA, 20 bp, Artificial Sequence
  MKO10070322_B_Adam10
  gRNA
tgatctgcacagcccccctg

SEQ ID NO: 70323 - DNA, 20 bp, Artificial Sequence
  MKO10070323_B_Adam10
  gRNA
atgaggaagtaccaaatgac

SEQ ID NO: 70324 - DNA, 20 bp, Artificial Sequence
  MKO10070324_B_Adam11
  gRNA
gtggcgctccacatactgcg

SEQ ID NO: 70325 - DNA, 20 bp, Artificial Sequence
  MKO10070325_B_Adam11
  gRNA
agcgaaccatgaggcggctg

SEQ ID NO: 70326 - DNA, 20 bp, Artificial Sequence
  MKO10070326_B_Adam11
  gRNA
ccaggtgagtttcgtcatcc

SEQ ID NO: 70327 - DNA, 20 bp, Artificial Sequence
  MKO10070327_B_Adam12
  gRNA
ctctctcactcgaaatcaca

SEQ ID NO: 70328 - DNA, 20 bp, Artificial Sequence
  MKO10070328_B_Adam12
  gRNA
cacaggggactcattgccaa

SEQ ID NO: 70329 - DNA, 20 bp, Artificial Sequence
  MKO10070329_B_Adam12
  gRNA
agttgcacagtcagcacgtc

SEQ ID NO: 70330 - DNA, 20 bp, Artificial Sequence
  MKO10070330_B_Adam15
  gRNA
aactcacctatatttggcag

SEQ ID NO: 70331 - DNA, 20 bp, Artificial Sequence
  MKO10070331_B_Adam15
  gRNA
tcctggagcttctacaaaat

SEQ ID NO: 70332 - DNA, 20 bp, Artificial Sequence
  MKO10070332_B_Adam15
  gRNA
ctggtgtggtaccagcctga

SEQ ID NO: 70333 - DNA, 20 bp, Artificial Sequence
  MKO10070333_B_Adam17
  gRNA
tactaaagataaacgaatgc

SEQ ID NO: 70334 - DNA, 20 bp, Artificial Sequence
  MKO10070334_B_Adam17
  gRNA
tctctgtctatgagcccttt

SEQ ID NO: 70335 - DNA, 20 bp, Artificial Sequence
  MKO10070335_B_Adam17
  gRNA
atattcagcagcactccata

SEQ ID NO: 70336 - DNA, 20 bp, Artificial Sequence
  MKO10070336_B_Adam18
  gRNA
caggctcattgccattaccg

SEQ ID NO: 70337 - DNA, 20 bp, Artificial Sequence
  MKO10070337_B_Adam18
  gRNA
gcacttcatcaacatatcct

SEQ ID NO: 70338 - DNA, 20 bp, Artificial Sequence
  MKO10070338_B_Adam18
  gRNA
atgtgtaaaccaaaaagttc

SEQ ID NO: 70339 - DNA, 20 bp, Artificial Sequence
  MKO10070339_B_Adam19
  gRNA
ctttctgaagtccgccactg

SEQ ID NO: 70340 - DNA, 20 bp, Artificial Sequence
  MKO10070340_B_Adam19
  gRNA
atgaactcataatacctcag

SEQ ID NO: 70341 - DNA, 20 bp, Artificial Sequence
  MKO10070341_B_Adam19
  gRNA
gcgagagctgatcctagacc

SEQ ID NO: 70342 - DNA, 20 bp, Artificial Sequence
  MKO10070342_B_Adam1a
  gRNA
aagcactgtcactgcgatgc

SEQ ID NO: 70343 - DNA, 20 bp, Artificial Sequence
  MKO10070343_B_Adam1a
  gRNA
agtatatctgcactggtcgt

SEQ ID NO: 70344 - DNA, 20 bp, Artificial Sequence
  MKO10070344_B_Adam1a
  gRNA
gagactcaagtgtcgatcag

SEQ ID NO: 70345 - DNA, 20 bp, Artificial Sequence
  MKO10070345_B_Adam1b
  gRNA
tcagagaccgcttccgaagc

SEQ ID NO: 70346 - DNA, 20 bp, Artificial Sequence
  MKO10070346_B_Adam1b
  gRNA
ctgagaccgaggactggtgc

SEQ ID NO: 70347 - DNA, 20 bp, Artificial Sequence
  MKO10070347_B_Adam1b
  gRNA
accgaacaacttgctgctcc

SEQ ID NO: 70348 - DNA, 20 bp, Artificial Sequence
  MKO10070348_B_Adam20
  gRNA
gaattggagtaatcagtacc

SEQ ID NO: 70349 - DNA, 20 bp, Artificial Sequence
  MKO10070349_B_Adam20
  gRNA
taacaaatcacacgtgttag

SEQ ID NO: 70350 - DNA, 20 bp, Artificial Sequence
  MKO10070350_B_Adam20
  gRNA
gagatcaatgttgtaactcc

SEQ ID NO: 70351 - DNA, 20 bp, Artificial Sequence
  MKO10070351_B_Adam21
  gRNA
agattccatgtacaagccgc

SEQ ID NO: 70352 - DNA, 20 bp, Artificial Sequence
  MKO10070352_B_Adam21
  gRNA
agactactgtaccaaccctt

SEQ ID NO: 70353 - DNA, 20 bp, Artificial Sequence
  MKO10070353_B_Adam21
  gRNA
cgctcaacaaaacttgtcaa

SEQ ID NO: 70354 - DNA, 20 bp, Artificial Sequence
  MKO10070354_B_Adam22
  gRNA
agcttccgggtggacgcctt

SEQ ID NO: 70355 - DNA, 20 bp, Artificial Sequence
  MKO10070355_B_Adam22
  gRNA
gatgttgcagctgacgcatg

SEQ ID NO: 70356 - DNA, 20 bp, Artificial Sequence
  MKO10070356_B_Adam22
  gRNA
ctgcccgaccgcagcgcgcc

SEQ ID NO: 70357 - DNA, 20 bp, Artificial Sequence
  MKO10070357_B_Adam23
  gRNA
tttgctatcttctgactacg

SEQ ID NO: 70358 - DNA, 20 bp, Artificial Sequence
  MKO10070358_B_Adam23
  gRNA
agcttccagatcgaagcttt

SEQ ID NO: 70359 - DNA, 20 bp, Artificial Sequence
  MKO10070359_B_Adam23
  gRNA
cgggaagcagatgtactcta

SEQ ID NO: 70360 - DNA, 20 bp, Artificial Sequence
  MKO10070360_B_Adam24
  gRNA
aaaaacctaacgtcataatt

SEQ ID NO: 70361 - DNA, 20 bp, Artificial Sequence
  MKO10070361_B_Adam24
  gRNA
aataaccaaattatgacgtt

SEQ ID NO: 70362 - DNA, 20 bp, Artificial Sequence
  MKO10070362_B_Adam24
  gRNA
tcttcataaacttcgtttcc

SEQ ID NO: 70363 - DNA, 20 bp, Artificial Sequence
  MKO10070363_B_Adam25
  gRNA
gccatctttgagggtgcagc

SEQ ID NO: 70364 - DNA, 20 bp, Artificial Sequence
  MKO10070364_B_Adam25
  gRNA
taccttggtttagcctatat

SEQ ID NO: 70365 - DNA, 20 bp, Artificial Sequence
  MKO10070365_B_Adam25
  gRNA
actgtagttattcttactac

SEQ ID NO: 70366 - DNA, 20 bp, Artificial Sequence
  MKO10070366_B_Adam26a
  gRNA
atccatttggaatgagataa

SEQ ID NO: 70367 - DNA, 20 bp, Artificial Sequence
  MKO10070367_B_Adam26a
  gRNA
cacagagtacatcagcaatt

SEQ ID NO: 70368 - DNA, 20 bp, Artificial Sequence
  MKO10070368_B_Adam26a
  gRNA
ttcattccatacttcaagag

SEQ ID NO: 70369 - DNA, 20 bp, Artificial Sequence
  MKO10070369_B_Adam26b
  gRNA
ccatggtaatagcagtcatt

SEQ ID NO: 70370 - DNA, 20 bp, Artificial Sequence
  MKO10070370_B_Adam26b
  gRNA
accaagttatgccatatgca

SEQ ID NO: 70371 - DNA, 20 bp, Artificial Sequence
  MKO10070371_B_Adam26b
  gRNA
taaaaagcccaactagaatt

SEQ ID NO: 70372 - DNA, 20 bp, Artificial Sequence
  MKO10070372_B_Adam28
  gRNA
ggcatactaacctttggctc

SEQ ID NO: 70373 - DNA, 20 bp, Artificial Sequence
  MKO10070373_B_Adam28
  gRNA
aaacatttgaaactgagcta

SEQ ID NO: 70374 - DNA, 20 bp, Artificial Sequence
  MKO10070374_B_Adam28
  gRNA
ataaaccacttcatatttct

SEQ ID NO: 70375 - DNA, 20 bp, Artificial Sequence
  MKO10070375_B_Adam29
  gRNA
agtcaccctccacataacct

SEQ ID NO: 70376 - DNA, 20 bp, Artificial Sequence
  MKO10070376_B_Adam29
  gRNA
tcacatcgcctatatcagtt

SEQ ID NO: 70377 - DNA, 20 bp, Artificial Sequence
  MKO10070377_B_Adam29
  gRNA
atgaccgcaatgagcactgt

SEQ ID NO: 70378 - DNA, 20 bp, Artificial Sequence
  MKO10070378_B_Adam2
  gRNA
ttagcacatgtactggactc

SEQ ID NO: 70379 - DNA, 20 bp, Artificial Sequence
  MKO10070379_B_Adam2
  gRNA
tgaaggttatccaaattcta

SEQ ID NO: 70380 - DNA, 20 bp, Artificial Sequence
  MKO10070380_B_Adam2
  gRNA
ttcgtagccattgcttgtga

SEQ ID NO: 70381 - DNA, 20 bp, Artificial Sequence
  MKO10070381_B_Adam30
  gRNA
cctgacaagtgcaatagccg

SEQ ID NO: 70382 - DNA, 20 bp, Artificial Sequence
  MKO10070382_B_Adam30
  gRNA
tacctcctgtggtcgtaatc

SEQ ID NO: 70383 - DNA, 20 bp, Artificial Sequence
  MKO10070383_B_Adam30
  gRNA
ttgcccgtggcaatatgtct

SEQ ID NO: 70384 - DNA, 20 bp, Artificial Sequence
  MKO10070384_B_Adam32
  gRNA
gtgtactgcttcttgtttat

SEQ ID NO: 70385 - DNA, 20 bp, Artificial Sequence
  MKO10070385_B_Adam32
  gRNA
caggctcagtgctattatca

SEQ ID NO: 70386 - DNA, 20 bp, Artificial Sequence
  MKO10070386_B_Adam32
  gRNA
gccaccctcagcacatgctc

SEQ ID NO: 70387 - DNA, 20 bp, Artificial Sequence
  MKO10070387_B_Adam33
  gRNA
aacatccgagcgctccgcag

SEQ ID NO: 70388 - DNA, 20 bp, Artificial Sequence
  MKO10070388_B_Adam33
  gRNA
aaagccaccagcaccgagtc

SEQ ID NO: 70389 - DNA, 20 bp, Artificial Sequence
  MKO10070389_B_Adam33
  gRNA
ggggagtgactagctctcca

SEQ ID NO: 70390 - DNA, 20 bp, Artificial Sequence
  MKO10070390_B_Adam34
  gRNA
tatttagggttagctaatgt

SEQ ID NO: 70391 - DNA, 20 bp, Artificial Sequence
  MKO10070391_B_Adam34
  gRNA
aaccttgctgatgtactctg

SEQ ID NO: 70392 - DNA, 20 bp, Artificial Sequence
  MKO10070392_B_Adam34
  gRNA
aaatgttgacgttgtgctct

SEQ ID NO: 70393 - DNA, 20 bp, Artificial Sequence
  MKO10070393_B_Adam39
  gRNA
caggcacagtttgccgaaaa

SEQ ID NO: 70394 - DNA, 20 bp, Artificial Sequence
  MKO10070394_B_Adam39
  gRNA
cccactacatgcagcatgaa

SEQ ID NO: 70395 - DNA, 20 bp, Artificial Sequence
  MKO10070395_B_Adam39
  gRNA
tccaatcacaaaattcaact

SEQ ID NO: 70396 - DNA, 20 bp, Artificial Sequence
  MKO10070396_B_Adam3
  gRNA
ctgagtgtcactgttgatac

SEQ ID NO: 70397 - DNA, 20 bp, Artificial Sequence
  MKO10070397_B_Adam3
  gRNA
cgcaaatatgttccaaaaag

SEQ ID NO: 70398 - DNA, 20 bp, Artificial Sequence
  MKO10070398_B_Adam3
  gRNA
gtgacactcagcacttgctc

SEQ ID NO: 70399 - DNA, 20 bp, Artificial Sequence
  MKO10070399_B_Adam4
  gRNA
gtagtggatggtgcaacctg

SEQ ID NO: 70400 - DNA, 20 bp, Artificial Sequence
  MKO10070400_B_Adam4
  gRNA
tattcgcatgattcttatct

SEQ ID NO: 70401 - DNA, 20 bp, Artificial Sequence
  MKO10070401_B_Adam4
  gRNA
tatcatggcttacatctaaa

SEQ ID NO: 70402 - DNA, 20 bp, Artificial Sequence
  MKO10070402_B_Adam5
  gRNA
cggcttaccagagctgacaa

SEQ ID NO: 70403 - DNA, 20 bp, Artificial Sequence
  MKO10070403_B_Adam5
  gRNA
tcctgaaaagatctcatcac

SEQ ID NO: 70404 - DNA, 20 bp, Artificial Sequence
  MKO10070404_B_Adam5
  gRNA
tttcaggaacagttgtctgc

SEQ ID NO: 70405 - DNA, 20 bp, Artificial Sequence
  MKO10070405_B_Adam6a
  gRNA
cagaacttaccccttgaaca

SEQ ID NO: 70406 - DNA, 20 bp, Artificial Sequence
  MKO10070406_B_Adam6a
  gRNA
ccccagagataaccgattga

SEQ ID NO: 70407 - DNA, 20 bp, Artificial Sequence
  MKO10070407_B_Adam6a
  gRNA
ggctccaaccaaaatggcaa

SEQ ID NO: 70408 - DNA, 20 bp, Artificial Sequence
  MKO10070408_B_Adam6b
  gRNA
cgacttgagtttgcagttcc

SEQ ID NO: 70409 - DNA, 20 bp, Artificial Sequence
  MKO10070409_B_Adam6b
  gRNA
tccttagccctaatttgtat

SEQ ID NO: 70410 - DNA, 20 bp, Artificial Sequence
  MKO10070410_B_Adam6b
  gRNA
gacaaactttcatctactgt

SEQ ID NO: 70411 - DNA, 20 bp, Artificial Sequence
  MKO10070411_B_Adam7
  gRNA
tttcactgtaatttgaactg

SEQ ID NO: 70412 - DNA, 20 bp, Artificial Sequence
  MKO10070412_B_Adam7
  gRNA
ttgtaagataccaagatctg

SEQ ID NO: 70413 - DNA, 20 bp, Artificial Sequence
  MKO10070413_B_Adam7
  gRNA
cactttaccttgctttcaga

SEQ ID NO: 70414 - DNA, 20 bp, Artificial Sequence
  MKO10070414_B_Adam8
  gRNA
tctcctgaagcagtagcccc

SEQ ID NO: 70415 - DNA, 20 bp, Artificial Sequence
  MKO10070415_B_Adam8
  gRNA
gccagtattagcacctgtgc

SEQ ID NO: 70416 - DNA, 20 bp, Artificial Sequence
  MKO10070416_B_Adam8
  gRNA
gagacctactcagctgccaa

SEQ ID NO: 70417 - DNA, 20 bp, Artificial Sequence
  MKO10070417_B_Adam9
  gRNA
tgtagtttacacctacgaca

SEQ ID NO: 70418 - DNA, 20 bp, Artificial Sequence
  MKO10070418_B_Adam9
  gRNA
ttagatctcttacgtcatcc

SEQ ID NO: 70419 - DNA, 20 bp, Artificial Sequence
  MKO10070419_B_Adam9
  gRNA
ctttctctagttaatctcca

SEQ ID NO: 70420 - DNA, 20 bp, Artificial Sequence
  MKO10070420_B_Adamdec1
  gRNA
taagatgtttcagtgtagtc

SEQ ID NO: 70421 - DNA, 20 bp, Artificial Sequence
  MKO10070421_B_Adamdec1
  gRNA
atgatctgatattgaacttc

SEQ ID NO: 70422 - DNA, 20 bp, Artificial Sequence
  MKO10070422_B_Adamdec1
  gRNA
gaaacatcttactcacccag

SEQ ID NO: 70423 - DNA, 20 bp, Artificial Sequence
  MKO10070423_B_Adamts10
  gRNA
agtcagcagagagcgctatg

SEQ ID NO: 70424 - DNA, 20 bp, Artificial Sequence
  MKO10070424_B_Adamts10
  gRNA
aacgcttgtatactacatgg

SEQ ID NO: 70425 - DNA, 20 bp, Artificial Sequence
  MKO10070425_B_Adamts10
  gRNA
tatctgattgaacccctgca

SEQ ID NO: 70426 - DNA, 20 bp, Artificial Sequence
  MKO10070426_B_Adamts12
  gRNA
tgtctcctgtatacgacatg

SEQ ID NO: 70427 - DNA, 20 bp, Artificial Sequence
  MKO10070427_B_Adamts12
  gRNA
cttctccacgacatagccgt

SEQ ID NO: 70428 - DNA, 20 bp, Artificial Sequence
  MKO10070428_B_Adamts12
  gRNA
tcttcgtgtcggccaccacg

SEQ ID NO: 70429 - DNA, 20 bp, Artificial Sequence
  MKO10070429_B_Adamts13
  gRNA
actgttgagaaacccatccc

SEQ ID NO: 70430 - DNA, 20 bp, Artificial Sequence
  MKO10070430_B_Adamts13
  gRNA
ctgtgggccccgatgtttcc

SEQ ID NO: 70431 - DNA, 20 bp, Artificial Sequence
  MKO10070431_B_Adamts13
  gRNA
catcggggcccacagctacc

SEQ ID NO: 70432 - DNA, 20 bp, Artificial Sequence
  MKO10070432_B_Adamts14
  gRNA
aaatgctgcctcggaccgcc

SEQ ID NO: 70433 - DNA, 20 bp, Artificial Sequence
  MKO10070433_B_Adamts14
  gRNA
ggacccatgtggtataccgc

SEQ ID NO: 70434 - DNA, 20 bp, Artificial Sequence
  MKO10070434_B_Adamts14
  gRNA
acttcacgactatgttgtga

SEQ ID NO: 70435 - DNA, 20 bp, Artificial Sequence
  MKO10070435_B_Adamts15
  gRNA
catgccccatgacaacgtga

SEQ ID NO: 70436 - DNA, 20 bp, Artificial Sequence
  MKO10070436_B_Adamts15
  gRNA
ggggcgtgcagctggcccgg

SEQ ID NO: 70437 - DNA, 20 bp, Artificial Sequence
  MKO10070437_B_Adamts15
  gRNA
cccggccttacccagctcat

SEQ ID NO: 70438 - DNA, 20 bp, Artificial Sequence
  MKO10070438_B_Adamts16
  gRNA
tcttgccagatctcgcttcc

SEQ ID NO: 70439 - DNA, 20 bp, Artificial Sequence
  MKO10070439_B_Adamts16
  gRNA
ctcttctccgacgcctccgc

SEQ ID NO: 70440 - DNA, 20 bp, Artificial Sequence
  MKO10070440_B_Adamts16
  gRNA
acgctgcagctgcgagtccc

SEQ ID NO: 70441 - DNA, 20 bp, Artificial Sequence
  MKO10070441_B_Adamts17
  gRNA
cggcgaccgcgagcatctcc

SEQ ID NO: 70442 - DNA, 20 bp, Artificial Sequence
  MKO10070442_B_Adamts17
  gRNA
actactttgcagcgctgcct

SEQ ID NO: 70443 - DNA, 20 bp, Artificial Sequence
  MKO10070443_B_Adamts17
  gRNA
tgtcggcatcggccaccacc

SEQ ID NO: 70444 - DNA, 20 bp, Artificial Sequence
  MKO10070444_B_Adamts18
  gRNA
gtgactgctcaagatcgccg

SEQ ID NO: 70445 - DNA, 20 bp, Artificial Sequence
  MKO10070445_B_Adamts18
  gRNA
gggcggcccagacggtcagc

SEQ ID NO: 70446 - DNA, 20 bp, Artificial Sequence
  MKO10070446_B_Adamts18
  gRNA
cacaactatagctcgcctgc

SEQ ID NO: 70447 - DNA, 20 bp, Artificial Sequence
  MKO10070447_B_Adamts19
  gRNA
cactgtcccggtgtaaaagc

SEQ ID NO: 70448 - DNA, 20 bp, Artificial Sequence
  MKO10070448_B_Adamts19
  gRNA
gtcacccgcaccgtttatac

SEQ ID NO: 70449 - DNA, 20 bp, Artificial Sequence
  MKO10070449_B_Adamts19
  gRNA
gggctttatacagctcaatg

SEQ ID NO: 70450 - DNA, 20 bp, Artificial Sequence
  MKO10070450_B_Adamts1
  gRNA
tcccacacgtgtgacactct

SEQ ID NO: 70451 - DNA, 20 bp, Artificial Sequence
  MKO10070451_B_Adamts1
  gRNA
cgccagtgtcagtttacatt

SEQ ID NO: 70452 - DNA, 20 bp, Artificial Sequence
  MKO10070452_B_Adamts1
  gRNA
gttggcatcgtacaaggtac

SEQ ID NO: 70453 - DNA, 20 bp, Artificial Sequence
  MKO10070453_B_Adamts20
  gRNA
gctgcccgtaggcgctgatt

SEQ ID NO: 70454 - DNA, 20 bp, Artificial Sequence
  MKO10070454_B_Adamts20
  gRNA
agttcgtttccacccacgac

SEQ ID NO: 70455 - DNA, 20 bp, Artificial Sequence
  MKO10070455_B_Adamts20
  gRNA
tgataaaaaacgcttattcc

SEQ ID NO: 70456 - DNA, 20 bp, Artificial Sequence
  MKO10070456_B_Adamts2
  gRNA
tgaacaaggccgagtgcatg

SEQ ID NO: 70457 - DNA, 20 bp, Artificial Sequence
  MKO10070457_B_Adamts2
  gRNA
gcgggctcgtacccccgccc

SEQ ID NO: 70458 - DNA, 20 bp, Artificial Sequence
  MKO10070458_B_Adamts2
  gRNA
aatctaccatgatgagtcgt

SEQ ID NO: 70459 - DNA, 20 bp, Artificial Sequence
  MKO10070459_B_Adamts3
  gRNA
tatctgaagacgtctaccac

SEQ ID NO: 70460 - DNA, 20 bp, Artificial Sequence
  MKO10070460_B_Adamts3
  gRNA
ctgctatcaaccaaagtgac

SEQ ID NO: 70461 - DNA, 20 bp, Artificial Sequence
  MKO10070461_B_Adamts3
  gRNA
gacgtcttcagatacatctc

SEQ ID NO: 70462 - DNA, 20 bp, Artificial Sequence
  MKO10070462_B_Adamts4
  gRNA
gcttaccataaccattgtcc

SEQ ID NO: 70463 - DNA, 20 bp, Artificial Sequence
  MKO10070463_B_Adamts4
  gRNA
gggtggccgctgtctgcacg

SEQ ID NO: 70464 - DNA, 20 bp, Artificial Sequence
  MKO10070464_B_Adamts4
  gRNA
gggttcctctcgccatgtca

SEQ ID NO: 70465 - DNA, 20 bp, Artificial Sequence
  MKO10070465_B_Adamts5
  gRNA
gatggtggctgacgtgcatt

SEQ ID NO: 70466 - DNA, 20 bp, Artificial Sequence
  MKO10070466_B_Adamts5
  gRNA
gtggcatcgtaggtctgtcc

SEQ ID NO: 70467 - DNA, 20 bp, Artificial Sequence
  MKO10070467_B_Adamts5
  gRNA
aacactgcaggaacggtata

SEQ ID NO: 70468 - DNA, 20 bp, Artificial Sequence
  MKO10070468_B_Adamts6
  gRNA
attcacaacgtttcctagac

SEQ ID NO: 70469 - DNA, 20 bp, Artificial Sequence
  MKO10070469_B_Adamts6
  gRNA
gatgtcttattcagccacca

SEQ ID NO: 70470 - DNA, 20 bp, Artificial Sequence
  MKO10070470_B_Adamts6
  gRNA
tcaacatagtacaactaaag

SEQ ID NO: 70471 - DNA, 20 bp, Artificial Sequence
  MKO10070471_B_Adamts7
  gRNA
cccatggtactcgaccatct

SEQ ID NO: 70472 - DNA, 20 bp, Artificial Sequence
  MKO10070472_B_Adamts7
  gRNA
agcacatagctctccacttg

SEQ ID NO: 70473 - DNA, 20 bp, Artificial Sequence
  MKO10070473_B_Adamts7
  gRNA
cctcgtcttccagtatgata

SEQ ID NO: 70474 - DNA, 20 bp, Artificial Sequence
  MKO10070474_B_Adamts8
  gRNA
cagtgtcatagtgctccggg

SEQ ID NO: 70475 - DNA, 20 bp, Artificial Sequence
  MKO10070475_B_Adamts8
  gRNA
acgtgaacaagacgctgccc

SEQ ID NO: 70476 - DNA, 20 bp, Artificial Sequence
  MKO10070476_B_Adamts8
  gRNA
agggcagcgtcttgttcacg

SEQ ID NO: 70477 - DNA, 20 bp, Artificial Sequence
  MKO10070477_B_Adamts9
  gRNA
gcagaagcgagacttccgag

SEQ ID NO: 70478 - DNA, 20 bp, Artificial Sequence
  MKO10070478_B_Adamts9
  gRNA
gacttacccggcaaaggcct

SEQ ID NO: 70479 - DNA, 20 bp, Artificial Sequence
  MKO10070479_B_Adamts9
  gRNA
ttccgtcaatcactctgtct

SEQ ID NO: 70480 - DNA, 20 bp, Artificial Sequence
  MKO10070480_B_Adamtsl1
  gRNA
ttccaggactgcacgctcag

SEQ ID NO: 70481 - DNA, 20 bp, Artificial Sequence
  MKO10070481_B_Adamtsl1
  gRNA
gctgagatttatactgccct

SEQ ID NO: 70482 - DNA, 20 bp, Artificial Sequence
  MKO10070482_B_Adamtsl1
  gRNA
ttctggaacactcgctccaa

SEQ ID NO: 70483 - DNA, 20 bp, Artificial Sequence
  MKO10070483_B_Adamtsl2
  gRNA
acgcccggccgtcatacaca

SEQ ID NO: 70484 - DNA, 20 bp, Artificial Sequence
  MKO10070484_B_Adamtsl2
  gRNA
acagcatgttcccgcagttg

SEQ ID NO: 70485 - DNA, 20 bp, Artificial Sequence
  MKO10070485_B_Adamtsl2
  gRNA
ggtccactccccccaccagt

SEQ ID NO: 70486 - DNA, 20 bp, Artificial Sequence
  MKO10070486_B_Adamtsl3
  gRNA
cacataccgctatgatgacc

SEQ ID NO: 70487 - DNA, 20 bp, Artificial Sequence
  MKO10070487_B_Adamtsl3
  gRNA
cagacatctccgcaaagaat

SEQ ID NO: 70488 - DNA, 20 bp, Artificial Sequence
  MKO10070488_B_Adamtsl3
  gRNA
tcctcctttaggaactgcga

SEQ ID NO: 70489 - DNA, 20 bp, Artificial Sequence
  MKO10070489_B_Adamtsl4
  gRNA
ctcccataaccgaacatccc

SEQ ID NO: 70490 - DNA, 20 bp, Artificial Sequence
  MKO10070490_B_Adamtsl4
  gRNA
caggaagcccatcgacccca

SEQ ID NO: 70491 - DNA, 20 bp, Artificial Sequence
  MKO10070491_B_Adamtsl4
  gRNA
agagggccaccccttccccg

SEQ ID NO: 70492 - DNA, 20 bp, Artificial Sequence
  MKO10070492_B_Adamtsl5
  gRNA
ctaccggcagctggcacacc

SEQ ID NO: 70493 - DNA, 20 bp, Artificial Sequence
  MKO10070493_B_Adamtsl5
  gRNA
gacctcaactgcctagctga

SEQ ID NO: 70494 - DNA, 20 bp, Artificial Sequence
  MKO10070494_B_Adamtsl5
  gRNA
ggggcgacagccatgaatac

SEQ ID NO: 70495 - DNA, 20 bp, Artificial Sequence
  MKO10070495_B_Adap1
  gRNA
gtagtagaagggcggtactt

SEQ ID NO: 70496 - DNA, 20 bp, Artificial Sequence
  MKO10070496_B_Adap1
  gRNA
gaggcaagaattcgttcatg

SEQ ID NO: 70497 - DNA, 20 bp, Artificial Sequence
  MKO10070497_B_Adap1
  gRNA
cccgcccacgcttccagaga

SEQ ID NO: 70498 - DNA, 20 bp, Artificial Sequence
  MKO10070498_B_Adap2
  gRNA
cttctgggacgacagtatgg

SEQ ID NO: 70499 - DNA, 20 bp, Artificial Sequence
  MKO10070499_B_Adap2
  gRNA
tcgagctaagtatgaaagac

SEQ ID NO: 70500 - DNA, 20 bp, Artificial Sequence
  MKO10070500_B_Adap2
  gRNA
ttacagttcatgactcacca

SEQ ID NO: 70501 - DNA, 20 bp, Artificial Sequence
  MKO10070501_B_Adarb1
  gRNA
ttcgggagattatctctgcg

SEQ ID NO: 70502 - DNA, 20 bp, Artificial Sequence
  MKO10070502_B_Adarb1
  gRNA
agtcattgagtgcgaggcca

SEQ ID NO: 70503 - DNA, 20 bp, Artificial Sequence
  MKO10070503_B_Adarb1
  gRNA
tttcctcccctcatgcacga

SEQ ID NO: 70504 - DNA, 20 bp, Artificial Sequence
  MKO10070504_B_Adarb2
  gRNA
gtatgcccgccacaaaacac

SEQ ID NO: 70505 - DNA, 20 bp, Artificial Sequence
  MKO10070505_B_Adarb2
  gRNA
gtgctcaccgctgatacact

SEQ ID NO: 70506 - DNA, 20 bp, Artificial Sequence
  MKO10070506_B_Adarb2
  gRNA
cgactgtcatgctgagatcg

SEQ ID NO: 70507 - DNA, 20 bp, Artificial Sequence
  MKO10070507_B_Adar
  gRNA
cacctggtcatccgctgaac

SEQ ID NO: 70508 - DNA, 20 bp, Artificial Sequence
  MKO10070508_B_Adar
  gRNA
ttcccgaagcagaatcgcca

SEQ ID NO: 70509 - DNA, 20 bp, Artificial Sequence
  MKO10070509_B_Adar
  gRNA
gcgggaatttcccccagctg

SEQ ID NO: 70510 - DNA, 20 bp, Artificial Sequence
  MKO10070510_B_Adat1
  gRNA
cagtccaagatgcgagagag

SEQ ID NO: 70511 - DNA, 20 bp, Artificial Sequence
  MKO10070511_B_Adat1
  gRNA
cggctgccaaatggagctga

SEQ ID NO: 70512 - DNA, 20 bp, Artificial Sequence
  MKO10070512_B_Adat1
  gRNA
caaagatgctatcctctttc

SEQ ID NO: 70513 - DNA, 20 bp, Artificial Sequence
  MKO10070513_B_Adat2
  gRNA
tgacagccatagacgaccag

SEQ ID NO: 70514 - DNA, 20 bp, Artificial Sequence
  MKO10070514_B_Adat2
  gRNA
cttcattgttatagaccata

SEQ ID NO: 70515 - DNA, 20 bp, Artificial Sequence
  MKO10070515_B_Adat2
  gRNA
tctataacaatgaagttgtg

SEQ ID NO: 70516 - DNA, 20 bp, Artificial Sequence
  MKO10070516_B_Adat3
  gRNA
actggtcctcgagaataccg

SEQ ID NO: 70517 - DNA, 20 bp, Artificial Sequence
  MKO10070517_B_Adat3
  gRNA
atccagcttgcgcacgctac

SEQ ID NO: 70518 - DNA, 20 bp, Artificial Sequence
  MKO10070518_B_Adat3
  gRNA
cgcatccagcgagtcttcta

SEQ ID NO: 70519 - DNA, 20 bp, Artificial Sequence
  MKO10070519_B_Ada
  gRNA
gaggagctgcgcaacattat

SEQ ID NO: 70520 - DNA, 20 bp, Artificial Sequence
  MKO10070520_B_Ada
  gRNA
acaagatccacaacgtcatc

SEQ ID NO: 70521 - DNA, 20 bp, Artificial Sequence
  MKO10070521_B_Ada
  gRNA
ccaaggtggacccaatgccc

SEQ ID NO: 70522 - DNA, 20 bp, Artificial Sequence
  MKO10070522_B_Adck1
  gRNA
gcaggtcatccgagaagacc

SEQ ID NO: 70523 - DNA, 20 bp, Artificial Sequence
  MKO10070523_B_Adck1
  gRNA
gcaggtagtccagcgccccc

SEQ ID NO: 70524 - DNA, 20 bp, Artificial Sequence
  MKO10070524_B_Adck1
  gRNA
gaagaacctgcctctcgagt

SEQ ID NO: 70525 - DNA, 20 bp, Artificial Sequence
  MKO10070525_B_Adck2
  gRNA
tagcttgcctgagatcgtgg

SEQ ID NO: 70526 - DNA, 20 bp, Artificial Sequence
  MKO10070526_B_Adck2
  gRNA
gttgttggatgctggcattg

SEQ ID NO: 70527 - DNA, 20 bp, Artificial Sequence
  MKO10070527_B_Adck2
  gRNA
gattctgagcttcatagcgc

SEQ ID NO: 70528 - DNA, 20 bp, Artificial Sequence
  MKO10070528_B_Adck3
  gRNA
ccagcgaagatccttccacc

SEQ ID NO: 70529 - DNA, 20 bp, Artificial Sequence
  MKO10070529_B_Adck3
  gRNA
attgggcggttggccaactt

SEQ ID NO: 70530 - DNA, 20 bp, Artificial Sequence
  MKO10070530_B_Adck3
  gRNA
cataggaaaaaaagccgtgc

SEQ ID NO: 70531 - DNA, 20 bp, Artificial Sequence
  MKO10070531_B_Adck4
  gRNA
tgcctcccgcatcagtcgct

SEQ ID NO: 70532 - DNA, 20 bp, Artificial Sequence
  MKO10070532_B_Adck4
  gRNA
acgggaggcccggctcagga

SEQ ID NO: 70533 - DNA, 20 bp, Artificial Sequence
  MKO10070533_B_Adck4
  gRNA
tcagtgaagatgacattcgc

SEQ ID NO: 70534 - DNA, 20 bp, Artificial Sequence
  MKO10070534_B_Adck5
  gRNA
tgtgcaccaccagtagtccg

SEQ ID NO: 70535 - DNA, 20 bp, Artificial Sequence
  MKO10070535_B_Adck5
  gRNA
cgtgccctgccatattcttc

SEQ ID NO: 70536 - DNA, 20 bp, Artificial Sequence
  MKO10070536_B_Adck5
  gRNA
ggtctcattaccttgctggt

SEQ ID NO: 70537 - DNA, 20 bp, Artificial Sequence
  MKO10070537_B_Adcy10
  gRNA
tgaaacacggaactacttcc

SEQ ID NO: 70538 - DNA, 20 bp, Artificial Sequence
  MKO10070538_B_Adcy10
  gRNA
accttaactgctctctgatc

SEQ ID NO: 70539 - DNA, 20 bp, Artificial Sequence
  MKO10070539_B_Adcy10
  gRNA
tcttaaaggtgatgccttgc

SEQ ID NO: 70540 - DNA, 20 bp, Artificial Sequence
  MKO10070540_B_Adcy1
  gRNA
aacccacgatgtctgcaaac

SEQ ID NO: 70541 - DNA, 20 bp, Artificial Sequence
  MKO10070541_B_Adcy1
  gRNA
caagttcgatgagttagcca

SEQ ID NO: 70542 - DNA, 20 bp, Artificial Sequence
  MKO10070542_B_Adcy1
  gRNA
atcttgtgaaaaatcctctc

SEQ ID NO: 70543 - DNA, 20 bp, Artificial Sequence
  MKO10070543_B_Adcy2
  gRNA
cactatcgtatgagatgaag

SEQ ID NO: 70544 - DNA, 20 bp, Artificial Sequence
  MKO10070544_B_Adcy2
  gRNA
gcttctccgagtgttctcgc

SEQ ID NO: 70545 - DNA, 20 bp, Artificial Sequence
  MKO10070545_B_Adcy2
  gRNA
agatcaccagcgagaacact

SEQ ID NO: 70546 - DNA, 20 bp, Artificial Sequence
  MKO10070546_B_Adcy3
  gRNA
ggcagaccgcaagcaccgca

SEQ ID NO: 70547 - DNA, 20 bp, Artificial Sequence
  MKO10070547_B_Adcy3
  gRNA
catctcgtcagccacgtgct

SEQ ID NO: 70548 - DNA, 20 bp, Artificial Sequence
  MKO10070548_B_Adcy3
  gRNA
catacctgacattctcgtgc

SEQ ID NO: 70549 - DNA, 20 bp, Artificial Sequence
  MKO10070549_B_Adcy4
  gRNA
gcattactggctctgggcta

SEQ ID NO: 70550 - DNA, 20 bp, Artificial Sequence
  MKO10070550_B_Adcy4
  gRNA
tgcaggctggacagcgctca

SEQ ID NO: 70551 - DNA, 20 bp, Artificial Sequence
  MKO10070551_B_Adcy4
  gRNA
ctcatccctctcgcacctgc

SEQ ID NO: 70552 - DNA, 20 bp, Artificial Sequence
  MKO10070552_B_Adcy5
  gRNA
agccctcgatgtcagcaaac

SEQ ID NO: 70553 - DNA, 20 bp, Artificial Sequence
  MKO10070553_B_Adcy5
  gRNA
ggattgttactactgcgtct

SEQ ID NO: 70554 - DNA, 20 bp, Artificial Sequence
  MKO10070554_B_Adcy5
  gRNA
ccagcgggagaaccagcaac

SEQ ID NO: 70555 - DNA, 20 bp, Artificial Sequence
  MKO10070555_B_Adcy6
  gRNA
agccctcaatgtccgcaaac

SEQ ID NO: 70556 - DNA, 20 bp, Artificial Sequence
  MKO10070556_B_Adcy6
  gRNA
gcgtgatctgcccgggcctc

SEQ ID NO: 70557 - DNA, 20 bp, Artificial Sequence
  MKO10070557_B_Adcy6
  gRNA
ttgacaagctggctgcggtg

SEQ ID NO: 70558 - DNA, 20 bp, Artificial Sequence
  MKO10070558_B_Adcy7
  gRNA
gctggtgtatgtcgagtgcc

SEQ ID NO: 70559 - DNA, 20 bp, Artificial Sequence
  MKO10070559_B_Adcy7
  gRNA
tactaggctccgtgctgatg

SEQ ID NO: 70560 - DNA, 20 bp, Artificial Sequence
  MKO10070560_B_Adcy7
  gRNA
catcattgagcgcctcaaag

SEQ ID NO: 70561 - DNA, 20 bp, Artificial Sequence
  MKO10070561_B_Adcy8
  gRNA
cgctcattgctgtgttgaaa

SEQ ID NO: 70562 - DNA, 20 bp, Artificial Sequence
  MKO10070562_B_Adcy8
  gRNA
ctctacgaccttgtctgctc

SEQ ID NO: 70563 - DNA, 20 bp, Artificial Sequence
  MKO10070563_B_Adcy8
  gRNA
cacagtagtagcagtccccc

SEQ ID NO: 70564 - DNA, 20 bp, Artificial Sequence
  MKO10070564_B_Adcy9
  gRNA
cgagcctaagaccagcacca

SEQ ID NO: 70565 - DNA, 20 bp, Artificial Sequence
  MKO10070565_B_Adcy9
  gRNA
cggatgttcttgaacctgag

SEQ ID NO: 70566 - DNA, 20 bp, Artificial Sequence
  MKO10070566_B_Adcy9
  gRNA
gttcaggctgaactgattga

SEQ ID NO: 70567 - DNA, 20 bp, Artificial Sequence
  MKO10070567_B_Adcyap1r1
  gRNA
ccagagggccaacgacctga

SEQ ID NO: 70568 - DNA, 20 bp, Artificial Sequence
  MKO10070568_B_Adcyap1r1
  gRNA
gggcccttaccataggcagc

SEQ ID NO: 70569 - DNA, 20 bp, Artificial Sequence
  MKO10070569_B_Adcyap1r1
  gRNA
gtctggatgacagaaaccat

SEQ ID NO: 70570 - DNA, 20 bp, Artificial Sequence
  MKO10070570_B_Adcyap1
  gRNA
aaactcttaccccgcgcccc

SEQ ID NO: 70571 - DNA, 20 bp, Artificial Sequence
  MKO10070571_B_Adcyap1
  gRNA
gccccttaccaaacgccact

SEQ ID NO: 70572 - DNA, 20 bp, Artificial Sequence
  MKO10070572_B_Adcyap1
  gRNA
cgaagcctatcgaaaagtct

SEQ ID NO: 70573 - DNA, 20 bp, Artificial Sequence
  MKO10070573_B_Adc
  gRNA
tcagcgacgccccaaacctc

SEQ ID NO: 70574 - DNA, 20 bp, Artificial Sequence
  MKO10070574_B_Adc
  gRNA
ccgacctgggtgctgtagtg

SEQ ID NO: 70575 - DNA, 20 bp, Artificial Sequence
  MKO10070575_B_Adc
  gRNA
gttctcgagcagatgtctgc

SEQ ID NO: 70576 - DNA, 20 bp, Artificial Sequence
  MKO10070576_B_Add1
  gRNA
gaagttactgcggtgtaaac

SEQ ID NO: 70577 - DNA, 20 bp, Artificial Sequence
  MKO10070577_B_Add1
  gRNA
cacttcctcatcgtaccttt

SEQ ID NO: 70578 - DNA, 20 bp, Artificial Sequence
  MKO10070578_B_Add1
  gRNA
caatctgctgcaatgccagc

SEQ ID NO: 70579 - DNA, 20 bp, Artificial Sequence
  MKO10070579_B_Add2
  gRNA
ccatgaagtccgcgatctgt

SEQ ID NO: 70580 - DNA, 20 bp, Artificial Sequence
  MKO10070580_B_Add2
  gRNA
gcacacgcctgccaccgcag

SEQ ID NO: 70581 - DNA, 20 bp, Artificial Sequence
  MKO10070581_B_Add2
  gRNA
aaacccccttggggctgatc

SEQ ID NO: 70582 - DNA, 20 bp, Artificial Sequence
  MKO10070582_B_Add3
  gRNA
catgtctcctgatctacgac

SEQ ID NO: 70583 - DNA, 20 bp, Artificial Sequence
  MKO10070583_B_Add3
  gRNA
ttgaagtcctgtcgtagatc

SEQ ID NO: 70584 - DNA, 20 bp, Artificial Sequence
  MKO10070584_B_Add3
  gRNA
cttccaggtacgaataagta

SEQ ID NO: 70585 - DNA, 20 bp, Artificial Sequence
  MKO10070585_B_Adgb
  gRNA
agttccccatctggccagag

SEQ ID NO: 70586 - DNA, 20 bp, Artificial Sequence
  MKO10070586_B_Adgb
  gRNA
agtcattgaaagtattctcc

SEQ ID NO: 70587 - DNA, 20 bp, Artificial Sequence
  MKO10070587_B_Adgb
  gRNA
ctgctaaatataaaatcttg

SEQ ID NO: 70588 - DNA, 20 bp, Artificial Sequence
  MKO10070588_B_Adh1
  gRNA
tggtgaagctccatcgattt

SEQ ID NO: 70589 - DNA, 20 bp, Artificial Sequence
  MKO10070589_B_Adh1
  gRNA
taaccacgtgatcgtctgag

SEQ ID NO: 70590 - DNA, 20 bp, Artificial Sequence
  MKO10070590_B_Adh1
  gRNA
ctgccgctcagacgatcacg

SEQ ID NO: 70591 - DNA, 20 bp, Artificial Sequence
  MKO10070591_B_Adh4
  gRNA
gtcccctcctaaagcttgtg

SEQ ID NO: 70592 - DNA, 20 bp, Artificial Sequence
  MKO10070592_B_Adh4
  gRNA
tcggtggcattgatgtcagt

SEQ ID NO: 70593 - DNA, 20 bp, Artificial Sequence
  MKO10070593_B_Adh4
  gRNA
gtgaatacctggtttgaagt

SEQ ID NO: 70594 - DNA, 20 bp, Artificial Sequence
  MKO10070594_B_Adh5
  gRNA
accgatgcctataccctgag

SEQ ID NO: 70595 - DNA, 20 bp, Artificial Sequence
  MKO10070595_B_Adh5
  gRNA
cctcggggtcagctccgctc

SEQ ID NO: 70596 - DNA, 20 bp, Artificial Sequence
  MKO10070596_B_Adh5
  gRNA
atccgaacttcatgagcctt

SEQ ID NO: 70597 - DNA, 20 bp, Artificial Sequence
  MKO10070597_B_Adh6a
  gRNA
tctatgcagatgatctcgtc

SEQ ID NO: 70598 - DNA, 20 bp, Artificial Sequence
  MKO10070598_B_Adh6a
  gRNA
tgatgctcgacgggacctcc

SEQ ID NO: 70599 - DNA, 20 bp, Artificial Sequence
  MKO10070599_B_Adh6a
  gRNA
tctgatgatcacgtgctgaa

SEQ ID NO: 70600 - DNA, 20 bp, Artificial Sequence
  MKO10070600_B_Adh7
  gRNA
aatcgaggtggccccaccaa

SEQ ID NO: 70601 - DNA, 20 bp, Artificial Sequence
  MKO10070601_B_Adh7
  gRNA
atctgtgcgacagattcctg

SEQ ID NO: 70602 - DNA, 20 bp, Artificial Sequence
  MKO10070602_B_Adh7
  gRNA
ggggtcactacagtgagacc

SEQ ID NO: 70603 - DNA, 20 bp, Artificial Sequence
  MKO10070603_B_Adhfe1
  gRNA
gcaggggttacgaaggaagt

SEQ ID NO: 70604 - DNA, 20 bp, Artificial Sequence
  MKO10070604_B_Adhfe1
  gRNA
gctgtctcaaatattagata

SEQ ID NO: 70605 - DNA, 20 bp, Artificial Sequence
  MKO10070605_B_Adhfe1
  gRNA
cattctcatacttactccca

SEQ ID NO: 70606 - DNA, 20 bp, Artificial Sequence
  MKO10070606_B_Adi1
  gRNA
agatacacttcccaattacg

SEQ ID NO: 70607 - DNA, 20 bp, Artificial Sequence
  MKO10070607_B_Adi1
  gRNA
gctcaccttctcctcgtaat

SEQ ID NO: 70608 - DNA, 20 bp, Artificial Sequence
  MKO10070608_B_Adi1
  gRNA
catctatcaccgcttcacac

SEQ ID NO: 70609 - DNA, 20 bp, Artificial Sequence
  MKO10070609_B_Adig
  gRNA
attcagatttgtgcttcaac

SEQ ID NO: 70610 - DNA, 20 bp, Artificial Sequence
  MKO10070610_B_Adig
  gRNA
agtgtgaggtcgctcaccag

SEQ ID NO: 70611 - DNA, 20 bp, Artificial Sequence
  MKO10070611_B_Adig
  gRNA
tgaggagacatttcctggtg

SEQ ID NO: 70612 - DNA, 20 bp, Artificial Sequence
  MKO10070612_B_Adipoq
  gRNA
ccacccaagggaacttgtgc

SEQ ID NO: 70613 - DNA, 20 bp, Artificial Sequence
  MKO10070613_B_Adipoq
  gRNA
gtatcgctcagcgttcagtg

SEQ ID NO: 70614 - DNA, 20 bp, Artificial Sequence
  MKO10070614_B_Adipoq
  gRNA
gtcaacgactctacatttac

SEQ ID NO: 70615 - DNA, 20 bp, Artificial Sequence
  MKO10070615_B_Adipor1
  gRNA
gctcttgaagcaagcccgaa

SEQ ID NO: 70616 - DNA, 20 bp, Artificial Sequence
  MKO10070616_B_Adipor1
  gRNA
tgaggcagagcaccgcgccc

SEQ ID NO: 70617 - DNA, 20 bp, Artificial Sequence
  MKO10070617_B_Adipor1
  gRNA
ggtttgccactcccaagcac

SEQ ID NO: 70618 - DNA, 20 bp, Artificial Sequence
  MKO10070618_B_Adipor2
  gRNA
tcattatccttaagccaatc

SEQ ID NO: 70619 - DNA, 20 bp, Artificial Sequence
  MKO10070619_B_Adipor2
  gRNA
gggcatgtccccgctcctac

SEQ ID NO: 70620 - DNA, 20 bp, Artificial Sequence
  MKO10070620_B_Adipor2
  gRNA
ccattcgttccatagcatga

SEQ ID NO: 70621 - DNA, 20 bp, Artificial Sequence
  MKO10070621_B_Adk
  gRNA
gcttgtcttcagccaagatc

SEQ ID NO: 70622 - DNA, 20 bp, Artificial Sequence
  MKO10070622_B_Adk
  gRNA
ttcaaagttgaatatcatgc

SEQ ID NO: 70623 - DNA, 20 bp, Artificial Sequence
  MKO10070623_B_Adk
  gRNA
gaaaccaaatgaccagatct

SEQ ID NO: 70624 - DNA, 20 bp, Artificial Sequence
  MKO10070624_B_Adm2
  gRNA
cagacaacgtgccggggagc

SEQ ID NO: 70625 - DNA, 20 bp, Artificial Sequence
  MKO10070625_B_Adm2
  gRNA
tcgtcatgccccccagccac

SEQ ID NO: 70626 - DNA, 20 bp, Artificial Sequence
  MKO10070626_B_Adm2
  gRNA
ggtggtggctcacgacaccc

SEQ ID NO: 70627 - DNA, 20 bp, Artificial Sequence
  MKO10070627_B_Adm
  gRNA
cgagtgaacccaataacatc

SEQ ID NO: 70628 - DNA, 20 bp, Artificial Sequence
  MKO10070628_B_Adm
  gRNA
actccacagtccgggaccgg

SEQ ID NO: 70629 - DNA, 20 bp, Artificial Sequence
  MKO10070629_B_Adm
  gRNA
cagttgtgttctgctcgtcc

SEQ ID NO: 70630 - DNA, 20 bp, Artificial Sequence
  MKO10070630_B_Adnp2
  gRNA
tgcagaatcttgacaacatc

SEQ ID NO: 70631 - DNA, 20 bp, Artificial Sequence
  MKO10070631_B_Adnp2
  gRNA
atgttgtcaagattctgcac

SEQ ID NO: 70632 - DNA, 20 bp, Artificial Sequence
  MKO10070632_B_Adnp2
  gRNA
gatcttaaaagctttgatcc

SEQ ID NO: 70633 - DNA, 20 bp, Artificial Sequence
  MKO10070633_B_Adnp
  gRNA
caacttcctgtcaacaatct

SEQ ID NO: 70634 - DNA, 20 bp, Artificial Sequence
  MKO10070634_B_Adnp
  gRNA
aaactgccaagattgttgac

SEQ ID NO: 70635 - DNA, 20 bp, Artificial Sequence
  MKO10070635_B_Adnp
  gRNA
tttatttgaaaaacactaca

SEQ ID NO: 70636 - DNA, 20 bp, Artificial Sequence
  MKO10070636_B_Adora1
  gRNA
cttctgcttcatcgtatccc

SEQ ID NO: 70637 - DNA, 20 bp, Artificial Sequence
  MKO10070637_B_Adora1
  gRNA
tgatgtggctgttggcgccc

SEQ ID NO: 70638 - DNA, 20 bp, Artificial Sequence
  MKO10070638_B_Adora1
  gRNA
aggtagcatcgcgaagtgcc

SEQ ID NO: 70639 - DNA, 20 bp, Artificial Sequence
  MKO10070639_B_Adora2a
  gRNA
cgtggtacccatgaattaca

SEQ ID NO: 70640 - DNA, 20 bp, Artificial Sequence
  MKO10070640_B_Adora2a
  gRNA
agcacacaagcacgttaccc

SEQ ID NO: 70641 - DNA, 20 bp, Artificial Sequence
  MKO10070641_B_Adora2a
  gRNA
tgtcgatggcaatagccaag

SEQ ID NO: 70642 - DNA, 20 bp, Artificial Sequence
  MKO10070642_B_Adora2b
  gRNA
cattggattgactccgttcc

SEQ ID NO: 70643 - DNA, 20 bp, Artificial Sequence
  MKO10070643_B_Adora2b
  gRNA
tcacctgagcgggacgcgaa

SEQ ID NO: 70644 - DNA, 20 bp, Artificial Sequence
  MKO10070644_B_Adora2b
  gRNA
atccctggcgacggcagacg

SEQ ID NO: 70645 - DNA, 20 bp, Artificial Sequence
  MKO10070645_B_Adora3
  gRNA
cttaccggaaaagagagcca

SEQ ID NO: 70646 - DNA, 20 bp, Artificial Sequence
  MKO10070646_B_Adora3
  gRNA
cttggtgtggtccttgtagt

SEQ ID NO: 70647 - DNA, 20 bp, Artificial Sequence
  MKO10070647_B_Adora3
  gRNA
ctttggaagccctacagctc

SEQ ID NO: 70648 - DNA, 20 bp, Artificial Sequence
  MKO10070648_B_Ado
  gRNA
ccttgcgcggcgcgatgttg

SEQ ID NO: 70649 - DNA, 20 bp, Artificial Sequence
  MKO10070649_B_Ado
  gRNA
gcccgtcgagctgccgcgga

SEQ ID NO: 70650 - DNA, 20 bp, Artificial Sequence
  MKO10070650_B_Ado
  gRNA
acgcagcacgcccggtcgca

SEQ ID NO: 70651 - DNA, 20 bp, Artificial Sequence
  MKO10070651_B_Adpgk
  gRNA
ttctctcacgacctctccaa

SEQ ID NO: 70652 - DNA, 20 bp, Artificial Sequence
  MKO10070652_B_Adpgk
  gRNA
gtcttacagcattatgtagg

SEQ ID NO: 70653 - DNA, 20 bp, Artificial Sequence
  MKO10070653_B_Adpgk
  gRNA
atgctgctttaattggacag

SEQ ID NO: 70654 - DNA, 20 bp, Artificial Sequence
  MKO10070654_B_Adprhl1
  gRNA
gtttgcctcttacgcactac

SEQ ID NO: 70655 - DNA, 20 bp, Artificial Sequence
  MKO10070655_B_Adprhl1
  gRNA
atgagcgtctccagccgttc

SEQ ID NO: 70656 - DNA, 20 bp, Artificial Sequence
  MKO10070656_B_Adprhl1
  gRNA
ctttccctgtagtgcgtaag

SEQ ID NO: 70657 - DNA, 20 bp, Artificial Sequence
  MKO10070657_B_Adprhl2
  gRNA
ccttggcgtccaagaccgat

SEQ ID NO: 70658 - DNA, 20 bp, Artificial Sequence
  MKO10070658_B_Adprhl2
  gRNA
ggccttcgacgaggtggaca

SEQ ID NO: 70659 - DNA, 20 bp, Artificial Sequence
  MKO10070659_B_Adprhl2
  gRNA
ctataacggtgccatcttgc

SEQ ID NO: 70660 - DNA, 20 bp, Artificial Sequence
  MKO10070660_B_Adprh
  gRNA
gccaccctcgtgactgttga

SEQ ID NO: 70661 - DNA, 20 bp, Artificial Sequence
  MKO10070661_B_Adprh
  gRNA
ccctactagccaaacattac

SEQ ID NO: 70662 - DNA, 20 bp, Artificial Sequence
  MKO10070662_B_Adprh
  gRNA
ggagacgatacaccagcagt

SEQ ID NO: 70663 - DNA, 20 bp, Artificial Sequence
  MKO10070663_B_Adprm
  gRNA
catccacgtagttccaagcc

SEQ ID NO: 70664 - DNA, 20 bp, Artificial Sequence
  MKO10070664_B_Adprm
  gRNA
tacattctctgacacgaacc

SEQ ID NO: 70665 - DNA, 20 bp, Artificial Sequence
  MKO10070665_B_Adprm
  gRNA
ctccgttaaactggacatac

SEQ ID NO: 70666 - DNA, 20 bp, Artificial Sequence
  MKO10070666_B_Adra1a
  gRNA
cacaccaatgtatcggtcga

SEQ ID NO: 70667 - DNA, 20 bp, Artificial Sequence
  MKO10070667_B_Adra1a
  gRNA
tatgtactgtcgagtctacg

SEQ ID NO: 70668 - DNA, 20 bp, Artificial Sequence
  MKO10070668_B_Adra1a
  gRNA
gtacaggcggattggtcctt

SEQ ID NO: 70669 - DNA, 20 bp, Artificial Sequence
  MKO10070669_B_Adra1b
  gRNA
cgtccgcaggtgccggttgc

SEQ ID NO: 70670 - DNA, 20 bp, Artificial Sequence
  MKO10070670_B_Adra1b
  gRNA
gtggctgcgttccacgaccc

SEQ ID NO: 70671 - DNA, 20 bp, Artificial Sequence
  MKO10070671_B_Adra1b
  gRNA
agtatcgcaccccaatgtag

SEQ ID NO: 70672 - DNA, 20 bp, Artificial Sequence
  MKO10070672_B_Adra1d
  gRNA
tggacaccttcgcacgcagc

SEQ ID NO: 70673 - DNA, 20 bp, Artificial Sequence
  MKO10070673_B_Adra1d
  gRNA
actcaccactagccccccga

SEQ ID NO: 70674 - DNA, 20 bp, Artificial Sequence
  MKO10070674_B_Adra1d
  gRNA
tagtggctgcgccgcgacag

SEQ ID NO: 70675 - DNA, 20 bp, Artificial Sequence
  MKO10070675_B_Adra2a
  gRNA
cccgcgccagcgcgacgctt

SEQ ID NO: 70676 - DNA, 20 bp, Artificial Sequence
  MKO10070676_B_Adra2a
  gRNA
ggcgccgatcgcaggcccaa

SEQ ID NO: 70677 - DNA, 20 bp, Artificial Sequence
  MKO10070677_B_Adra2a
  gRNA
gccccgcgatggggatgcgc

SEQ ID NO: 70678 - DNA, 20 bp, Artificial Sequence
  MKO10070678_B_Adra2b
  gRNA
tggcaattacatagattcgc

SEQ ID NO: 70679 - DNA, 20 bp, Artificial Sequence
  MKO10070679_B_Adra2b
  gRNA
agaagagcacgtctagcgcc

SEQ ID NO: 70680 - DNA, 20 bp, Artificial Sequence
  MKO10070680_B_Adra2b
  gRNA
ccggcaaaggatccttcgaa

SEQ ID NO: 70681 - DNA, 20 bp, Artificial Sequence
  MKO10070681_B_Adra2c
  gRNA
gaccgactgggtgccaccgc

SEQ ID NO: 70682 - DNA, 20 bp, Artificial Sequence
  MKO10070682_B_Adra2c
  gRNA
tcgagttcttcctgtcgcgt

SEQ ID NO: 70683 - DNA, 20 bp, Artificial Sequence
  MKO10070683_B_Adra2c
  gRNA
ttcgcccgcgtcgctcccgt

SEQ ID NO: 70684 - DNA, 20 bp, Artificial Sequence
  MKO10070684_B_Adrb1
  gRNA
gtacctgcgggtgttccgcg

SEQ ID NO: 70685 - DNA, 20 bp, Artificial Sequence
  MKO10070685_B_Adrb1
  gRNA
tctctacaccttggactccg

SEQ ID NO: 70686 - DNA, 20 bp, Artificial Sequence
  MKO10070686_B_Adrb1
  gRNA
tctgctcgcgcagagccacg

SEQ ID NO: 70687 - DNA, 20 bp, Artificial Sequence
  MKO10070687_B_Adrb2
  gRNA
ccaggacgataaccgacatg

SEQ ID NO: 70688 - DNA, 20 bp, Artificial Sequence
  MKO10070688_B_Adrb2
  gRNA
acgggacgaagcgtgggttg

SEQ ID NO: 70689 - DNA, 20 bp, Artificial Sequence
  MKO10070689_B_Adrb2
  gRNA
tctggcgctcggcttccgtt

SEQ ID NO: 70690 - DNA, 20 bp, Artificial Sequence
  MKO10070690_B_Adrb3
  gRNA
caaaggtttgatggctatga

SEQ ID NO: 70691 - DNA, 20 bp, Artificial Sequence
  MKO10070691_B_Adrb3
  gRNA
gcgaaactggttgcgaactg

SEQ ID NO: 70692 - DNA, 20 bp, Artificial Sequence
  MKO10070692_B_Adrb3
  gRNA
caacgtgctgcgcgcactcg

SEQ ID NO: 70693 - DNA, 20 bp, Artificial Sequence
  MKO10070693_B_Adrbk1
  gRNA
ctccgtagcattctttgaaa

SEQ ID NO: 70694 - DNA, 20 bp, Artificial Sequence
  MKO10070694_B_Adrbk1
  gRNA
ctcttcgtagaactccacca

SEQ ID NO: 70695 - DNA, 20 bp, Artificial Sequence
  MKO10070695_B_Adrbk1
  gRNA
gcacctgcttcttcaccagg

SEQ ID NO: 70696 - DNA, 20 bp, Artificial Sequence
  MKO10070696_B_Adrbk2
  gRNA
gtatccggagtgtgatgcag

SEQ ID NO: 70697 - DNA, 20 bp, Artificial Sequence
  MKO10070697_B_Adrbk2
  gRNA
ctgattgaaaatcttgtcaa

SEQ ID NO: 70698 - DNA, 20 bp, Artificial Sequence
  MKO10070698_B_Adrbk2
  gRNA
tcttcataaaatttcacctg

SEQ ID NO: 70699 - DNA, 20 bp, Artificial Sequence
  MKO10070699_B_Adrm1
  gRNA
catccagaagaagagccgct

SEQ ID NO: 70700 - DNA, 20 bp, Artificial Sequence
  MKO10070700_B_Adrm1
  gRNA
ctgatgactgtgagttcaag

SEQ ID NO: 70701 - DNA, 20 bp, Artificial Sequence
  MKO10070701_B_Adrm1
  gRNA
cgcccagtgctgaaagctca

SEQ ID NO: 70702 - DNA, 20 bp, Artificial Sequence
  MKO10070702_B_Adsl
  gRNA
tccagaacttgaagcgtgtc

SEQ ID NO: 70703 - DNA, 20 bp, Artificial Sequence
  MKO10070703_B_Adsl
  gRNA
cgtattgtctccgacatagc

SEQ ID NO: 70704 - DNA, 20 bp, Artificial Sequence
  MKO10070704_B_Adsl
  gRNA
agcttgctagagtgatctcg

SEQ ID NO: 70705 - DNA, 20 bp, Artificial Sequence
  MKO10070705_B_Adssl1
  gRNA
accagtgttcgacttccacc

SEQ ID NO: 70706 - DNA, 20 bp, Artificial Sequence
  MKO10070706_B_Adssl1
  gRNA
gaagcttaccaaggtgagcc

SEQ ID NO: 70707 - DNA, 20 bp, Artificial Sequence
  MKO10070707_B_Adssl1
  gRNA
ctgtgttgcaggcaatggcg

SEQ ID NO: 70708 - DNA, 20 bp, Artificial Sequence
  MKO10070708_B_Adss
  gRNA
atatcggacagagctcatat

SEQ ID NO: 70709 - DNA, 20 bp, Artificial Sequence
  MKO10070709_B_Adss
  gRNA
tccgcttcttcaaacaatcc

SEQ ID NO: 70710 - DNA, 20 bp, Artificial Sequence
  MKO10070710_B_Adss
  gRNA
tcctggattgtttgaagaag

SEQ ID NO: 70711 - DNA, 20 bp, Artificial Sequence
  MKO10070711_B_Adtrp
  gRNA
aactatccatcgaagaagct

SEQ ID NO: 70712 - DNA, 20 bp, Artificial Sequence
  MKO10070712_B_Adtrp
  gRNA
attaaggagtgtcaagtact

SEQ ID NO: 70713 - DNA, 20 bp, Artificial Sequence
  MKO10070713_B_Adtrp
  gRNA
tgggtacttactgtggatat

SEQ ID NO: 70714 - DNA, 20 bp, Artificial Sequence
  MKO10070714_B_Aebp1
  gRNA
tccgtcgccagaagcagccc

SEQ ID NO: 70715 - DNA, 20 bp, Artificial Sequence
  MKO10070715_B_Aebp1
  gRNA
ctcacctggccggggctgct

SEQ ID NO: 70716 - DNA, 20 bp, Artificial Sequence
  MKO10070716_B_Aebp1
  gRNA
ctacaatgaccagatagaga

SEQ ID NO: 70717 - DNA, 20 bp, Artificial Sequence
  MKO10070717_B_Aebp2
  gRNA
aacaggtgttcgtttgcttg

SEQ ID NO: 70718 - DNA, 20 bp, Artificial Sequence
  MKO10070718_B_Aebp2
  gRNA
tgtgcatcgaagaaatcgtg

SEQ ID NO: 70719 - DNA, 20 bp, Artificial Sequence
  MKO10070719_B_Aebp2
  gRNA
gttctgctgactgaagtgtg

SEQ ID NO: 70720 - DNA, 20 bp, Artificial Sequence
  MKO10070720_B_Aen
  gRNA
tccgagggtggacgtacttc

SEQ ID NO: 70721 - DNA, 20 bp, Artificial Sequence
  MKO10070721_B_Aen
  gRNA
ctgttcacaggtcggtcacc

SEQ ID NO: 70722 - DNA, 20 bp, Artificial Sequence
  MKO10070722_B_Aen
  gRNA
agtacatggacgaccagtac

SEQ ID NO: 70723 - DNA, 20 bp, Artificial Sequence
  MKO10070723_B_Aes
  gRNA
ctcatctttgatgcggtcac

SEQ ID NO: 70724 - DNA, 20 bp, Artificial Sequence
  MKO10070724_B_Aes
  gRNA
gatactgcgcttgcagcagc

SEQ ID NO: 70725 - DNA, 20 bp, Artificial Sequence
  MKO10070725_B_Aes
  gRNA
gcttgtcgcactccagcttc

SEQ ID NO: 70726 - DNA, 20 bp, Artificial Sequence
  MKO10070726_B_Afap1l1
  gRNA
ggtctgcagtgttcacatac

SEQ ID NO: 70727 - DNA, 20 bp, Artificial Sequence
  MKO10070727_B_Afap1l1
  gRNA
acttgccgggccccagggga

SEQ ID NO: 70728 - DNA, 20 bp, Artificial Sequence
  MKO10070728_B_Afap1l1
  gRNA
ctgaggagtccggtgagctc

SEQ ID NO: 70729 - DNA, 20 bp, Artificial Sequence
  MKO10070729_B_Afap1l2
  gRNA
ctcctacgagtcctacgatg

SEQ ID NO: 70730 - DNA, 20 bp, Artificial Sequence
  MKO10070730_B_Afap1l2
  gRNA
agacctccctccgcccaaga

SEQ ID NO: 70731 - DNA, 20 bp, Artificial Sequence
  MKO10070731_B_Afap1l2
  gRNA
gcccacagttcccgaggagc

SEQ ID NO: 70732 - DNA, 20 bp, Artificial Sequence
  MKO10070732_B_Afap1
  gRNA
gaagccgtgccgctgagccc

SEQ ID NO: 70733 - DNA, 20 bp, Artificial Sequence
  MKO10070733_B_Afap1
  gRNA
cttcctcatagtaaccctct

SEQ ID NO: 70734 - DNA, 20 bp, Artificial Sequence
  MKO10070734_B_Afap1
  gRNA
gatctccggcagaggcatct

SEQ ID NO: 70735 - DNA, 20 bp, Artificial Sequence
  MKO10070735_B_Aff1
  gRNA
tcagaatctcttcaacgcaa

SEQ ID NO: 70736 - DNA, 20 bp, Artificial Sequence
  MKO10070736_B_Aff1
  gRNA
tctaggaaatgacccactcg

SEQ ID NO: 70737 - DNA, 20 bp, Artificial Sequence
  MKO10070737_B_Aff1
  gRNA
gaaggaggcatttcccgaga

SEQ ID NO: 70738 - DNA, 20 bp, Artificial Sequence
  MKO10070738_B_Aff2
  gRNA
ttactttgtaaggtaaatcc

SEQ ID NO: 70739 - DNA, 20 bp, Artificial Sequence
  MKO10070739_B_Aff2
  gRNA
gaatctcagcatctgactcc

SEQ ID NO: 70740 - DNA, 20 bp, Artificial Sequence
  MKO10070740_B_Aff2
  gRNA
tacatattcagctaccttgt

SEQ ID NO: 70741 - DNA, 20 bp, Artificial Sequence
  MKO10070741_B_Aff3
  gRNA
gctcttcagcgaaccctaca

SEQ ID NO: 70742 - DNA, 20 bp, Artificial Sequence
  MKO10070742_B_Aff3
  gRNA
ttcgctgaagagcgagtaac

SEQ ID NO: 70743 - DNA, 20 bp, Artificial Sequence
  MKO10070743_B_Aff3
  gRNA
agaaaccaactgcctacgtg

SEQ ID NO: 70744 - DNA, 20 bp, Artificial Sequence
  MKO10070744_B_Aff4
  gRNA
gagtcgcaacagtctaactt

SEQ ID NO: 70745 - DNA, 20 bp, Artificial Sequence
  MKO10070745_B_Aff4
  gRNA
agggcttgaggatcgagatt

SEQ ID NO: 70746 - DNA, 20 bp, Artificial Sequence
  MKO10070746_B_Aff4
  gRNA
ttcaggagatgacgcattca

SEQ ID NO: 70747 - DNA, 20 bp, Artificial Sequence
  MKO10070747_B_Afg3l1
  gRNA
tcctgtttcagggtcatctg

SEQ ID NO: 70748 - DNA, 20 bp, Artificial Sequence
  MKO10070748_B_Afg3l1
  gRNA
ctgtattcaaaacctcccag

SEQ ID NO: 70749 - DNA, 20 bp, Artificial Sequence
  MKO10070749_B_Afg3l1
  gRNA
aacagaaaaagtgcaagccc

SEQ ID NO: 70750 - DNA, 20 bp, Artificial Sequence
  MKO10070750_B_Afg3l2
  gRNA
ggtgggggagggaagcgccg

SEQ ID NO: 70751 - DNA, 20 bp, Artificial Sequence
  MKO10070751_B_Afg3l2
  gRNA
aaaaaaggccagtgagccta

SEQ ID NO: 70752 - DNA, 20 bp, Artificial Sequence
  MKO10070752_B_Afg3l2
  gRNA
ctttacagaaccacagccct

SEQ ID NO: 70753 - DNA, 20 bp, Artificial Sequence
  MKO10070753_B_Afmid
  gRNA
agtatcctccatgcaagaac

SEQ ID NO: 70754 - DNA, 20 bp, Artificial Sequence
  MKO10070754_B_Afmid
  gRNA
ggtaaacccactgactgcac

SEQ ID NO: 70755 - DNA, 20 bp, Artificial Sequence
  MKO10070755_B_Afmid
  gRNA
cgtgtggatgacccatctgc

SEQ ID NO: 70756 - DNA, 20 bp, Artificial Sequence
  MKO10070756_B_Afm
  gRNA
aagaacgggggcgaagacaa

SEQ ID NO: 70757 - DNA, 20 bp, Artificial Sequence
  MKO10070757_B_Afm
  gRNA
ctttgatgaggtggaaacgc

SEQ ID NO: 70758 - DNA, 20 bp, Artificial Sequence
  MKO10070758_B_Afm
  gRNA
ccatgtcacataacatgtcc

SEQ ID NO: 70759 - DNA, 20 bp, Artificial Sequence
  MKO10070759_B_Afp
  gRNA
agattcctcccagtgcgtga

SEQ ID NO: 70760 - DNA, 20 bp, Artificial Sequence
  MKO10070760_B_Afp
  gRNA
caaaatgactagcgatgtgt

SEQ ID NO: 70761 - DNA, 20 bp, Artificial Sequence
  MKO10070761_B_Afp
  gRNA
cttgtcgtactgagcagcca

SEQ ID NO: 70762 - DNA, 20 bp, Artificial Sequence
  MKO10070762_B_Aftph
  gRNA
atagtgcccatgtatgcagc

SEQ ID NO: 70763 - DNA, 20 bp, Artificial Sequence
  MKO10070763_B_Aftph
  gRNA
tacttacccacggtcagcta

SEQ ID NO: 70764 - DNA, 20 bp, Artificial Sequence
  MKO10070764_B_Aftph
  gRNA
accgcaaaccatgtgcatca

SEQ ID NO: 70765 - DNA, 20 bp, Artificial Sequence
  MKO10070765_B_Agap1
  gRNA
atcggctgagtgtccattcc

SEQ ID NO: 70766 - DNA, 20 bp, Artificial Sequence
  MKO10070766_B_Agap1
  gRNA
agggggccccccggaggcac

SEQ ID NO: 70767 - DNA, 20 bp, Artificial Sequence
  MKO10070767_B_Agap1
  gRNA
cgatgacgtgctcccgaatc

SEQ ID NO: 70768 - DNA, 20 bp, Artificial Sequence
  MKO10070768_B_Agap2
  gRNA
cttgggtcccaaccagagcc

SEQ ID NO: 70769 - DNA, 20 bp, Artificial Sequence
  MKO10070769_B_Agap2
  gRNA
ggcaggtgagcagtacaaga

SEQ ID NO: 70770 - DNA, 20 bp, Artificial Sequence
  MKO10070770_B_Agap2
  gRNA
cctcccggatcagcaccaga

SEQ ID NO: 70771 - DNA, 20 bp, Artificial Sequence
  MKO10070771_B_Agap3
  gRNA
cagctttcgaaatgccagcg

SEQ ID NO: 70772 - DNA, 20 bp, Artificial Sequence
  MKO10070772_B_Agap3
  gRNA
aggctgatttcccactagac

SEQ ID NO: 70773 - DNA, 20 bp, Artificial Sequence
  MKO10070773_B_Agap3
  gRNA
cttcatcccggatcagcagc

SEQ ID NO: 70774 - DNA, 20 bp, Artificial Sequence
  MKO10070774_B_Aga
  gRNA
agaagaattaaaaacgcgat

SEQ ID NO: 70775 - DNA, 20 bp, Artificial Sequence
  MKO10070775_B_Aga
  gRNA
gcgtggtggacattgctatc

SEQ ID NO: 70776 - DNA, 20 bp, Artificial Sequence
  MKO10070776_B_Aga
  gRNA
caccaagtttgctgaaagta

SEQ ID NO: 70777 - DNA, 20 bp, Artificial Sequence
  MKO10070777_B_Agbl1
  gRNA
ctggctaaagttggcctaag

SEQ ID NO: 70778 - DNA, 20 bp, Artificial Sequence
  MKO10070778_B_Agbl1
  gRNA
tccttccaggcacagaccgg

SEQ ID NO: 70779 - DNA, 20 bp, Artificial Sequence
  MKO10070779_B_Agbl1
  gRNA
cagggtggatgctttatcag

SEQ ID NO: 70780 - DNA, 20 bp, Artificial Sequence
  MKO10070780_B_Agbl2
  gRNA
cctacctgtttatcttcaac

SEQ ID NO: 70781 - DNA, 20 bp, Artificial Sequence
  MKO10070781_B_Agbl2
  gRNA
cacatagacgctgtaaacag

SEQ ID NO: 70782 - DNA, 20 bp, Artificial Sequence
  MKO10070782_B_Agbl2
  gRNA
cgctgatgagtgcctgagtt

SEQ ID NO: 70783 - DNA, 20 bp, Artificial Sequence
  MKO10070783_B_Agbl3
  gRNA
gagacaccatataaatctcg

SEQ ID NO: 70784 - DNA, 20 bp, Artificial Sequence
  MKO10070784_B_Agbl3
  gRNA
gagccagtgtatgtcccgac

SEQ ID NO: 70785 - DNA, 20 bp, Artificial Sequence
  MKO10070785_B_Agbl3
  gRNA
gcctgtttacccaaactcca

SEQ ID NO: 70786 - DNA, 20 bp, Artificial Sequence
  MKO10070786_B_Agbl4
  gRNA
ggctgtccagagtatccatt

SEQ ID NO: 70787 - DNA, 20 bp, Artificial Sequence
  MKO10070787_B_Agbl4
  gRNA
gacctgcctctggcgctgtc

SEQ ID NO: 70788 - DNA, 20 bp, Artificial Sequence
  MKO10070788_B_Agbl4
  gRNA
aatctaccagcagaccaaaa

SEQ ID NO: 70789 - DNA, 20 bp, Artificial Sequence
  MKO10070789_B_Agbl5
  gRNA
ctttgttcaccgtttcgtag

SEQ ID NO: 70790 - DNA, 20 bp, Artificial Sequence
  MKO10070790_B_Agbl5
  gRNA
cccgatcatctcgaagccca

SEQ ID NO: 70791 - DNA, 20 bp, Artificial Sequence
  MKO10070791_B_Agbl5
  gRNA
ccccgaccattccgtttcac

SEQ ID NO: 70792 - DNA, 20 bp, Artificial Sequence
  MKO10070792_B_Ager
  gRNA
gccacttgtgctaagctgta

SEQ ID NO: 70793 - DNA, 20 bp, Artificial Sequence
  MKO10070793_B_Ager
  gRNA
cccttacagcttagcacaag

SEQ ID NO: 70794 - DNA, 20 bp, Artificial Sequence
  MKO10070794_B_Ager
  gRNA
tactaccttattagggacac

SEQ ID NO: 70795 - DNA, 20 bp, Artificial Sequence
  MKO10070795_B_Agfg1
  gRNA
ccttgagagcgacctacaac

SEQ ID NO: 70796 - DNA, 20 bp, Artificial Sequence
  MKO10070796_B_Agfg1
  gRNA
gcacactttaacagtcatgc

SEQ ID NO: 70797 - DNA, 20 bp, Artificial Sequence
  MKO10070797_B_Agfg1
  gRNA
catgacaacatttacacaac

SEQ ID NO: 70798 - DNA, 20 bp, Artificial Sequence
  MKO10070798_B_Agfg2
  gRNA
tcacctcatttccacgagat

SEQ ID NO: 70799 - DNA, 20 bp, Artificial Sequence
  MKO10070799_B_Agfg2
  gRNA
agctgctgcgtgcctgcgac

SEQ ID NO: 70800 - DNA, 20 bp, Artificial Sequence
  MKO10070800_B_Agfg2
  gRNA
catcgttgataccagattcc

SEQ ID NO: 70801 - DNA, 20 bp, Artificial Sequence
  MKO10070801_B_Aggf1
  gRNA
ggtctacgcgagagtgaaac

SEQ ID NO: 70802 - DNA, 20 bp, Artificial Sequence
  MKO10070802_B_Aggf1
  gRNA
gcagtagtaataaatccccg

SEQ ID NO: 70803 - DNA, 20 bp, Artificial Sequence
  MKO10070803_B_Aggf1
  gRNA
gacgagtcacacatagacag

SEQ ID NO: 70804 - DNA, 20 bp, Artificial Sequence
  MKO10070804_B_Agk
  gRNA
catcaactccaagagcttct

SEQ ID NO: 70805 - DNA, 20 bp, Artificial Sequence
  MKO10070805_B_Agk
  gRNA
gaaataccctttgcaagctg

SEQ ID NO: 70806 - DNA, 20 bp, Artificial Sequence
  MKO10070806_B_Agk
  gRNA
agcagcctgtcaagaagctc

SEQ ID NO: 70807 - DNA, 20 bp, Artificial Sequence
  MKO10070807_B_Agl
  gRNA
tattctttgtattaccgatg

SEQ ID NO: 70808 - DNA, 20 bp, Artificial Sequence
  MKO10070808_B_Agl
  gRNA
tgataaccacgtgttaccct

SEQ ID NO: 70809 - DNA, 20 bp, Artificial Sequence
  MKO10070809_B_Agl
  gRNA
tcaactccaatgcgtaaaat

SEQ ID NO: 70810 - DNA, 20 bp, Artificial Sequence
  MKO10070810_B_Agmat
  gRNA
ggggtgagccccgcgatttc

SEQ ID NO: 70811 - DNA, 20 bp, Artificial Sequence
  MKO10070811_B_Agmat
  gRNA
cgtcaatctctacaacctcc

SEQ ID NO: 70812 - DNA, 20 bp, Artificial Sequence
  MKO10070812_B_Agmat
  gRNA
atatcccatactgcaagccg

SEQ ID NO: 70813 - DNA, 20 bp, Artificial Sequence
  MKO10070813_B_Agmo
  gRNA
gaaagtgaaataccacgtcc

SEQ ID NO: 70814 - DNA, 20 bp, Artificial Sequence
  MKO10070814_B_Agmo
  gRNA
cctctgtgtggatccaaaat

SEQ ID NO: 70815 - DNA, 20 bp, Artificial Sequence
  MKO10070815_B_Agmo
  gRNA
tgcttgaactagtcatcagc

SEQ ID NO: 70816 - DNA, 20 bp, Artificial Sequence
  MKO10070816_B_Ago1
  gRNA
catttcaaaccgcagatctt

SEQ ID NO: 70817 - DNA, 20 bp, Artificial Sequence
  MKO10070817_B_Ago1
  gRNA
ccctgccaggtacacccctg

SEQ ID NO: 70818 - DNA, 20 bp, Artificial Sequence
  MKO10070818_B_Ago1
  gRNA
tactaccacccgctgggggg

SEQ ID NO: 70819 - DNA, 20 bp, Artificial Sequence
  MKO10070819_B_Ago2
  gRNA
tgttgcaggtacacccctgt

SEQ ID NO: 70820 - DNA, 20 bp, Artificial Sequence
  MKO10070820_B_Ago2
  gRNA
agatacctgttcactctccg

SEQ ID NO: 70821 - DNA, 20 bp, Artificial Sequence
  MKO10070821_B_Ago2
  gRNA
ctcaccttgtccctgccgat

SEQ ID NO: 70822 - DNA, 20 bp, Artificial Sequence
  MKO10070822_B_Ago3
  gRNA
ctccctgacaggacccattg

SEQ ID NO: 70823 - DNA, 20 bp, Artificial Sequence
  MKO10070823_B_Ago3
  gRNA
tcttctgggcacgatgaata

SEQ ID NO: 70824 - DNA, 20 bp, Artificial Sequence
  MKO10070824_B_Ago3
  gRNA
cttaccccagtggttgccac

SEQ ID NO: 70825 - DNA, 20 bp, Artificial Sequence
  MKO10070825_B_Ago4
  gRNA
cagtcgaattggtttcccaa

SEQ ID NO: 70826 - DNA, 20 bp, Artificial Sequence
  MKO10070826_B_Ago4
  gRNA
ctcttcaggtacactccagt

SEQ ID NO: 70827 - DNA, 20 bp, Artificial Sequence
  MKO10070827_B_Ago4
  gRNA
ttattaccaccctctgggag

SEQ ID NO: 70828 - DNA, 20 bp, Artificial Sequence
  MKO10070828_B_Agpat1
  gRNA
tccatgctgcccttcaaacg

SEQ ID NO: 70829 - DNA, 20 bp, Artificial Sequence
  MKO10070829_B_Agpat1
  gRNA
gatccgagtggaggtgcgcg

SEQ ID NO: 70830 - DNA, 20 bp, Artificial Sequence
  MKO10070830_B_Agpat1
  gRNA
tcccatacaggtatttgacg

SEQ ID NO: 70831 - DNA, 20 bp, Artificial Sequence
  MKO10070831_B_Agpat2
  gRNA
aagcgtgagctaatgttcac

SEQ ID NO: 70832 - DNA, 20 bp, Artificial Sequence
  MKO10070832_B_Agpat2
  gRNA
ttgtcgttgcgtgtaccctc

SEQ ID NO: 70833 - DNA, 20 bp, Artificial Sequence
  MKO10070833_B_Agpat2
  gRNA
cggtccttcaagtacgtgta

SEQ ID NO: 70834 - DNA, 20 bp, Artificial Sequence
  MKO10070834_B_Agpat3
  gRNA
gtctcctacctgtcccccgg

SEQ ID NO: 70835 - DNA, 20 bp, Artificial Sequence
  MKO10070835_B_Agpat3
  gRNA
gtttgcagaatacgatctct

SEQ ID NO: 70836 - DNA, 20 bp, Artificial Sequence
  MKO10070836_B_Agpat3
  gRNA
agaccgggacaccgtcatag

SEQ ID NO: 70837 - DNA, 20 bp, Artificial Sequence
  MKO10070837_B_Agpat4
  gRNA
ggccttcgggtcggtgtaga

SEQ ID NO: 70838 - DNA, 20 bp, Artificial Sequence
  MKO10070838_B_Agpat4
  gRNA
gtgaagtgcttgcgagatgt

SEQ ID NO: 70839 - DNA, 20 bp, Artificial Sequence
  MKO10070839_B_Agpat4
  gRNA
ctacgtaccagatacttctc

SEQ ID NO: 70840 - DNA, 20 bp, Artificial Sequence
  MKO10070840_B_Agpat5
  gRNA
gtatgggttctactttgctc

SEQ ID NO: 70841 - DNA, 20 bp, Artificial Sequence
  MKO10070841_B_Agpat5
  gRNA
ctgagcagcaaatgcctgac

SEQ ID NO: 70842 - DNA, 20 bp, Artificial Sequence
  MKO10070842_B_Agpat5
  gRNA
ctgcagagctatgtgaacgc

SEQ ID NO: 70843 - DNA, 20 bp, Artificial Sequence
  MKO10070843_B_Agpat6
  gRNA
ccatcattacgtaccacaac

SEQ ID NO: 70844 - DNA, 20 bp, Artificial Sequence
  MKO10070844_B_Agpat6
  gRNA
caggattgcgctggcattca

SEQ ID NO: 70845 - DNA, 20 bp, Artificial Sequence
  MKO10070845_B_Agpat6
  gRNA
cctaagcttaccgttggtgt

SEQ ID NO: 70846 - DNA, 20 bp, Artificial Sequence
  MKO10070846_B_Agpat9
  gRNA
agctgatcccaatgaaagcc

SEQ ID NO: 70847 - DNA, 20 bp, Artificial Sequence
  MKO10070847_B_Agpat9
  gRNA
gatgtactgaaagttgacat

SEQ ID NO: 70848 - DNA, 20 bp, Artificial Sequence
  MKO10070848_B_Agpat9
  gRNA
gctgattataggaactacac

SEQ ID NO: 70849 - DNA, 20 bp, Artificial Sequence
  MKO10070849_B_Agps
  gRNA
agctcggatttcctactcac

SEQ ID NO: 70850 - DNA, 20 bp, Artificial Sequence
  MKO10070850_B_Agps
  gRNA
ggattcctgatatagttgta

SEQ ID NO: 70851 - DNA, 20 bp, Artificial Sequence
  MKO10070851_B_Agps
  gRNA
tggatccagtctctcaaagt

SEQ ID NO: 70852 - DNA, 20 bp, Artificial Sequence
  MKO10070852_B_Agr2
  gRNA
ggggacttacgaccaggttg

SEQ ID NO: 70853 - DNA, 20 bp, Artificial Sequence
  MKO10070853_B_Agr2
  gRNA
gcagtttgttctcctcaacc

SEQ ID NO: 70854 - DNA, 20 bp, Artificial Sequence
  MKO10070854_B_Agr2
  gRNA
gtccccagaattgtgtttgt

SEQ ID NO: 70855 - DNA, 20 bp, Artificial Sequence
  MKO10070855_B_Agr3
  gRNA
gacagtactgacagtcctcc

SEQ ID NO: 70856 - DNA, 20 bp, Artificial Sequence
  MKO10070856_B_Agr3
  gRNA
ctctttcacagcactaaaaa

SEQ ID NO: 70857 - DNA, 20 bp, Artificial Sequence
  MKO10070857_B_Agr3
  gRNA
gtttagtaacaaaccactga

SEQ ID NO: 70858 - DNA, 20 bp, Artificial Sequence
  MKO10070858_B_Agrn
  gRNA
tccatcggctgaaggtacac

SEQ ID NO: 70859 - DNA, 20 bp, Artificial Sequence
  MKO10070859_B_Agrn
  gRNA
ccccctcatctgcgacaacc

SEQ ID NO: 70860 - DNA, 20 bp, Artificial Sequence
  MKO10070860_B_Agrn
  gRNA
ggttgtaggacacagacacg

SEQ ID NO: 70861 - DNA, 20 bp, Artificial Sequence
  MKO10070861_B_Agrp
  gRNA
tcccacactgggggtccaga

SEQ ID NO: 70862 - DNA, 20 bp, Artificial Sequence
  MKO10070862_B_Agrp
  gRNA
gcccatctggacccccagtg

SEQ ID NO: 70863 - DNA, 20 bp, Artificial Sequence
  MKO10070863_B_Agrp
  gRNA
gcagcagaacttcttctgct

SEQ ID NO: 70864 - DNA, 20 bp, Artificial Sequence
  MKO10070864_B_Agtpbp1
  gRNA
ttagccttaccaatagttct

SEQ ID NO: 70865 - DNA, 20 bp, Artificial Sequence
  MKO10070865_B_Agtpbp1
  gRNA
ccagctcaatgagaatgctt

SEQ ID NO: 70866 - DNA, 20 bp, Artificial Sequence
  MKO10070866_B_Agtpbp1
  gRNA
cctaagcattctcattgagc

SEQ ID NO: 70867 - DNA, 20 bp, Artificial Sequence
  MKO10070867_B_Agtr1a
  gRNA
cttgagtgcgacttggcctt

SEQ ID NO: 70868 - DNA, 20 bp, Artificial Sequence
  MKO10070868_B_Agtr1a
  gRNA
aaaagcgcaaacagtgatat

SEQ ID NO: 70869 - DNA, 20 bp, Artificial Sequence
  MKO10070869_B_Agtr1a
  gRNA
tagcggtatagacagcccac

SEQ ID NO: 70870 - DNA, 20 bp, Artificial Sequence
  MKO10070870_B_Agtr1b
  gRNA
ataacatgagctcgtctgcc

SEQ ID NO: 70871 - DNA, 20 bp, Artificial Sequence
  MKO10070871_B_Agtr1b
  gRNA
ataccgctatggaataccag

SEQ ID NO: 70872 - DNA, 20 bp, Artificial Sequence
  MKO10070872_B_Agtr1b
  gRNA
cgtccgcaatttcacagtca

SEQ ID NO: 70873 - DNA, 20 bp, Artificial Sequence
  MKO10070873_B_Agtr2
  gRNA
gtacctatcgacactcatgc

SEQ ID NO: 70874 - DNA, 20 bp, Artificial Sequence
  MKO10070874_B_Agtr2
  gRNA
gttgcgttgagattatcaaa

SEQ ID NO: 70875 - DNA, 20 bp, Artificial Sequence
  MKO10070875_B_Agtr2
  gRNA
agttatagcagtcattgacc

SEQ ID NO: 70876 - DNA, 20 bp, Artificial Sequence
  MKO10070876_B_Agtrap
  gRNA
tggcatctatagagtcccgc

SEQ ID NO: 70877 - DNA, 20 bp, Artificial Sequence
  MKO10070877_B_Agtrap
  gRNA
agatttcttcggaccctctc

SEQ ID NO: 70878 - DNA, 20 bp, Artificial Sequence
  MKO10070878_B_Agtrap
  gRNA
agtgaagttgccccaagcat

SEQ ID NO: 70879 - DNA, 20 bp, Artificial Sequence
  MKO10070879_B_Agt
  gRNA
tccaagtcaggaggtcgttc

SEQ ID NO: 70880 - DNA, 20 bp, Artificial Sequence
  MKO10070880_B_Agt
  gRNA
ccgaggatcctacaatctgc

SEQ ID NO: 70881 - DNA, 20 bp, Artificial Sequence
  MKO10070881_B_Agt
  gRNA
cctgttcgccatctacgagc

SEQ ID NO: 70882 - DNA, 20 bp, Artificial Sequence
  MKO10070882_B_Agxt2
  gRNA
aaaaacagatagaccgcctg

SEQ ID NO: 70883 - DNA, 20 bp, Artificial Sequence
  MKO10070883_B_Agxt2
  gRNA
cctggcctacagccgtgtgc

SEQ ID NO: 70884 - DNA, 20 bp, Artificial Sequence
  MKO10070884_B_Agxt2
  gRNA
aatcttacctggtatttctc

SEQ ID NO: 70885 - DNA, 20 bp, Artificial Sequence
  MKO10070885_B_Agxt
  gRNA
gggcctggcccaacacaaac

SEQ ID NO: 70886 - DNA, 20 bp, Artificial Sequence
  MKO10070886_B_Agxt
  gRNA
caggtaccagtgcctactcc

SEQ ID NO: 70887 - DNA, 20 bp, Artificial Sequence
  MKO10070887_B_Agxt
  gRNA
cctatctacatggaccaaca

SEQ ID NO: 70888 - DNA, 20 bp, Artificial Sequence
  MKO10070888_B_Ahctf1
  gRNA
atcgagcctataattaacca

SEQ ID NO: 70889 - DNA, 20 bp, Artificial Sequence
  MKO10070889_B_Ahctf1
  gRNA
ctactctgagttacatcaac

SEQ ID NO: 70890 - DNA, 20 bp, Artificial Sequence
  MKO10070890_B_Ahctf1
  gRNA
cagataaccgctctcctgtt

SEQ ID NO: 70891 - DNA, 20 bp, Artificial Sequence
  MKO10070891_B_Ahcyl1
  gRNA
tggaacgagacaaagatctc

SEQ ID NO: 70892 - DNA, 20 bp, Artificial Sequence
  MKO10070892_B_Ahcyl1
  gRNA
aattgagaccctttgtgccc

SEQ ID NO: 70893 - DNA, 20 bp, Artificial Sequence
  MKO10070893_B_Ahcyl1
  gRNA
accaaattccctactaagac

SEQ ID NO: 70894 - DNA, 20 bp, Artificial Sequence
  MKO10070894_B_Ahcyl2
  gRNA
ctactccaccctcaatgaag

SEQ ID NO: 70895 - DNA, 20 bp, Artificial Sequence
  MKO10070895_B_Ahcyl2
  gRNA
ctctgggggcacagtgccga

SEQ ID NO: 70896 - DNA, 20 bp, Artificial Sequence
  MKO10070896_B_Ahcyl2
  gRNA
gtcagagctatctgtatatg

SEQ ID NO: 70897 - DNA, 20 bp, Artificial Sequence
  MKO10070897_B_Ahcy
  gRNA
tgggcctcacctcagcaccc

SEQ ID NO: 70898 - DNA, 20 bp, Artificial Sequence
  MKO10070898_B_Ahcy
  gRNA
ccctgcagtgtttgcctgga

SEQ ID NO: 70899 - DNA, 20 bp, Artificial Sequence
  MKO10070899_B_Ahcy
  gRNA
ctcacctggaatgccagcct

SEQ ID NO: 70900 - DNA, 20 bp, Artificial Sequence
  MKO10070900_B_Ahdc1
  gRNA
ccgcccacagtgttcgatgc

SEQ ID NO: 70901 - DNA, 20 bp, Artificial Sequence
  MKO10070901_B_Ahdc1
  gRNA
ctcgaactacacgccgcaga

SEQ ID NO: 70902 - DNA, 20 bp, Artificial Sequence
  MKO10070902_B_Ahdc1
  gRNA
ctggggctctagacgtcgac

SEQ ID NO: 70903 - DNA, 20 bp, Artificial Sequence
  MKO10070903_B_Ahi1
  gRNA
gtatcgagactcccctccga

SEQ ID NO: 70904 - DNA, 20 bp, Artificial Sequence
  MKO10070904_B_Ahi1
  gRNA
ttcacagcagtcgctcagta

SEQ ID NO: 70905 - DNA, 20 bp, Artificial Sequence
  MKO10070905_B_Ahi1
  gRNA
actcactgccccacaggctg

SEQ ID NO: 70906 - DNA, 20 bp, Artificial Sequence
  MKO10070906_B_Ahnak
  gRNA
ggcttgaagttgcaccgtaa

SEQ ID NO: 70907 - DNA, 20 bp, Artificial Sequence
  MKO10070907_B_Ahnak
  gRNA
aactcccctgcggcccgcac

SEQ ID NO: 70908 - DNA, 20 bp, Artificial Sequence
  MKO10070908_B_Ahnak
  gRNA
ggaaccactgccctgccagt

SEQ ID NO: 70909 - DNA, 20 bp, Artificial Sequence
  MKO10070909_B_Ahrr
  gRNA
ggactatctgggctttcatc

SEQ ID NO: 70910 - DNA, 20 bp, Artificial Sequence
  MKO10070910_B_Ahrr
  gRNA
gtctctcaatggcttcgctc

SEQ ID NO: 70911 - DNA, 20 bp, Artificial Sequence
  MKO10070911_B_Ahrr
  gRNA
cctctgtatgagtgttcttc

SEQ ID NO: 70912 - DNA, 20 bp, Artificial Sequence
  MKO10070912_B_Ahr
  gRNA
gaacacagagttagaccgcc

SEQ ID NO: 70913 - DNA, 20 bp, Artificial Sequence
  MKO10070913_B_Ahr
  gRNA
attccgcccggtcttctgta

SEQ ID NO: 70914 - DNA, 20 bp, Artificial Sequence
  MKO10070914_B_Ahr
  gRNA
ggcgctgaatggctttgtgc

SEQ ID NO: 70915 - DNA, 20 bp, Artificial Sequence
  MKO10070915_B_Ahsa1
  gRNA
cccatcaagcttgttcactt

SEQ ID NO: 70916 - DNA, 20 bp, Artificial Sequence
  MKO10070916_B_Ahsa1
  gRNA
acctgtccagttcagtttga

SEQ ID NO: 70917 - DNA, 20 bp, Artificial Sequence
  MKO10070917_B_Ahsa1
  gRNA
actaaagactgagacttgca

SEQ ID NO: 70918 - DNA, 20 bp, Artificial Sequence
  MKO10070918_B_Ahsa2
  gRNA
gcttcatgtaacagccgcaa

SEQ ID NO: 70919 - DNA, 20 bp, Artificial Sequence
  MKO10070919_B_Ahsa2
  gRNA
aaacgaaatcaatgacactg

SEQ ID NO: 70920 - DNA, 20 bp, Artificial Sequence
  MKO10070920_B_Ahsa2
  gRNA
aacaaaagctgtagcaaccc

SEQ ID NO: 70921 - DNA, 20 bp, Artificial Sequence
  MKO10070921_B_Ahsg
  gRNA
tgctttggaccccaccccgc

SEQ ID NO: 70922 - DNA, 20 bp, Artificial Sequence
  MKO10070922_B_Ahsg
  gRNA
acccagtgtcattccacccc

SEQ ID NO: 70923 - DNA, 20 bp, Artificial Sequence
  MKO10070923_B_Ahsg
  gRNA
tccagccaaatgcaacctgc

SEQ ID NO: 70924 - DNA, 20 bp, Artificial Sequence
  MKO10070924_B_Aicda
  gRNA
tgaaggtcatgatcccgatc

SEQ ID NO: 70925 - DNA, 20 bp, Artificial Sequence
  MKO10070925_B_Aicda
  gRNA
cttcggccaccttcgcaaca

SEQ ID NO: 70926 - DNA, 20 bp, Artificial Sequence
  MKO10070926_B_Aicda
  gRNA
acaacttcggcgcatccttt

SEQ ID NO: 70927 - DNA, 20 bp, Artificial Sequence
  MKO10070927_B_Aida
  gRNA
tgaatttacagaagaacaaa

SEQ ID NO: 70928 - DNA, 20 bp, Artificial Sequence
  MKO10070928_B_Aida
  gRNA
cagaattattgtgttgagct

SEQ ID NO: 70929 - DNA, 20 bp, Artificial Sequence
  MKO10070929_B_Aida
  gRNA
aggcaaaattgcgacatgtt

SEQ ID NO: 70930 - DNA, 20 bp, Artificial Sequence
  MKO10070930_B_Aif1l
  gRNA
gggggtccccaagacccacc

SEQ ID NO: 70931 - DNA, 20 bp, Artificial Sequence
  MKO10070931_B_Aif1l
  gRNA
gatgaagaagatgatctcgg

SEQ ID NO: 70932 - DNA, 20 bp, Artificial Sequence
  MKO10070932_B_Aif1l
  gRNA
tcaaagcccggcaggagaag

SEQ ID NO: 70933 - DNA, 20 bp, Artificial Sequence
  MKO10070933_B_Aif1
  gRNA
gtccaaacttgaagccttca

SEQ ID NO: 70934 - DNA, 20 bp, Artificial Sequence
  MKO10070934_B_Aif1
  gRNA
ttctcgtccagtgaagtaca

SEQ ID NO: 70935 - DNA, 20 bp, Artificial Sequence
  MKO10070935_B_Aif1
  gRNA
ccctcaggaggaaaagcttt

SEQ ID NO: 70936 - DNA, 20 bp, Artificial Sequence
  MKO10070936_B_Aifm1
  gRNA
ttgttgataagcccacaata

SEQ ID NO: 70937 - DNA, 20 bp, Artificial Sequence
  MKO10070937_B_Aifm1
  gRNA
atggctagctctggttcatc

SEQ ID NO: 70938 - DNA, 20 bp, Artificial Sequence
  MKO10070938_B_Aifm1
  gRNA
ggagtccttaccggaggcaa

SEQ ID NO: 70939 - DNA, 20 bp, Artificial Sequence
  MKO10070939_B_Aifm2
  gRNA
ttcgtactctgcgaccttca

SEQ ID NO: 70940 - DNA, 20 bp, Artificial Sequence
  MKO10070940_B_Aifm2
  gRNA
ccacgatgaattgtgagcgc

SEQ ID NO: 70941 - DNA, 20 bp, Artificial Sequence
  MKO10070941_B_Aifm2
  gRNA
acacctcgttaaacttgcca

SEQ ID NO: 70942 - DNA, 20 bp, Artificial Sequence
  MKO10070942_B_Aifm3
  gRNA
gcctgcttcaacattagtac

SEQ ID NO: 70943 - DNA, 20 bp, Artificial Sequence
  MKO10070943_B_Aifm3
  gRNA
ggagctgtcagccagcggaa

SEQ ID NO: 70944 - DNA, 20 bp, Artificial Sequence
  MKO10070944_B_Aifm3
  gRNA
gaccattcgggcaagcaagc

SEQ ID NO: 70945 - DNA, 20 bp, Artificial Sequence
  MKO10070945_B_Aig1
  gRNA
tgtttagtacttctccaagc

SEQ ID NO: 70946 - DNA, 20 bp, Artificial Sequence
  MKO10070946_B_Aig1
  gRNA
tctcatctcgatcaatataa

SEQ ID NO: 70947 - DNA, 20 bp, Artificial Sequence
  MKO10070947_B_Aig1
  gRNA
catgtgggtgtaccctttcc

SEQ ID NO: 70948 - DNA, 20 bp, Artificial Sequence
  MKO10070948_B_Aim1l
  gRNA
aagtctccagtcagcgtcac

SEQ ID NO: 70949 - DNA, 20 bp, Artificial Sequence
  MKO10070949_B_Aim1l
  gRNA
gagcccagcaccgaagaccc

SEQ ID NO: 70950 - DNA, 20 bp, Artificial Sequence
  MKO10070950_B_Aim1l
  gRNA
gcgtggagtctccaaggctt

SEQ ID NO: 70951 - DNA, 20 bp, Artificial Sequence
  MKO10070951_B_Aim1
  gRNA
atagtagtgaaagttgtccg

SEQ ID NO: 70952 - DNA, 20 bp, Artificial Sequence
  MKO10070952_B_Aim1
  gRNA
cagtgagcccgacgtctctg

SEQ ID NO: 70953 - DNA, 20 bp, Artificial Sequence
  MKO10070953_B_Aim1
  gRNA
tctgataaacctgtagtgat

SEQ ID NO: 70954 - DNA, 20 bp, Artificial Sequence
  MKO10070954_B_Aim2
  gRNA
gattagactcacgttctttg

SEQ ID NO: 70955 - DNA, 20 bp, Artificial Sequence
  MKO10070955_B_Aim2
  gRNA
ttcagcaccgtgacaacaag

SEQ ID NO: 70956 - DNA, 20 bp, Artificial Sequence
  MKO10070956_B_Aim2
  gRNA
cccaagcaaaacaaagtgcg

SEQ ID NO: 70957 - DNA, 20 bp, Artificial Sequence
  MKO10070957_B_Aimp1
  gRNA
ttaggtttctctgccgattc

SEQ ID NO: 70958 - DNA, 20 bp, Artificial Sequence
  MKO10070958_B_Aimp1
  gRNA
gaggcggtggttgctactga

SEQ ID NO: 70959 - DNA, 20 bp, Artificial Sequence
  MKO10070959_B_Aimp1
  gRNA
gctaaagcaagagctgattc

SEQ ID NO: 70960 - DNA, 20 bp, Artificial Sequence
  MKO10070960_B_Aimp2
  gRNA
tagggctttacctggtacat

SEQ ID NO: 70961 - DNA, 20 bp, Artificial Sequence
  MKO10070961_B_Aimp2
  gRNA
gccatgtttcagcttcgaga

SEQ ID NO: 70962 - DNA, 20 bp, Artificial Sequence
  MKO10070962_B_Aimp2
  gRNA
tcccaccatgccgatgtacc

SEQ ID NO: 70963 - DNA, 20 bp, Artificial Sequence
  MKO10070963_B_Aipl1
  gRNA
gacattctacgacaccaccc

SEQ ID NO: 70964 - DNA, 20 bp, Artificial Sequence
  MKO10070964_B_Aipl1
  gRNA
tcaggccgccaccaagtacc

SEQ ID NO: 70965 - DNA, 20 bp, Artificial Sequence
  MKO10070965_B_Aipl1
  gRNA
ctatgttgtcccgcagtctg

SEQ ID NO: 70966 - DNA, 20 bp, Artificial Sequence
  MKO10070966_B_Aip
  gRNA
ccggttgtaccgtgagggcc

SEQ ID NO: 70967 - DNA, 20 bp, Artificial Sequence
  MKO10070967_B_Aip
  gRNA
ccttgccctcggcgatgttg

SEQ ID NO: 70968 - DNA, 20 bp, Artificial Sequence
  MKO10070968_B_Aip
  gRNA
cactgtgcagcgtccgaaag

SEQ ID NO: 70969 - DNA, 20 bp, Artificial Sequence
  MKO10070969_B_Aire
  gRNA
tcttagggggcttagtcttc

SEQ ID NO: 70970 - DNA, 20 bp, Artificial Sequence
  MKO10070970_B_Aire
  gRNA
ggaagggatccttatccagc

SEQ ID NO: 70971 - DNA, 20 bp, Artificial Sequence
  MKO10070971_B_Aire
  gRNA
tgggctggagacgctctttg

SEQ ID NO: 70972 - DNA, 20 bp, Artificial Sequence
  MKO10070972_B_Ajap1
  gRNA
tcaccggtttccgttgaatg

SEQ ID NO: 70973 - DNA, 20 bp, Artificial Sequence
  MKO10070973_B_Ajap1
  gRNA
gatgagatgcctatccgcag

SEQ ID NO: 70974 - DNA, 20 bp, Artificial Sequence
  MKO10070974_B_Ajap1
  gRNA
gcgcagcgatgaccatgatg

SEQ ID NO: 70975 - DNA, 20 bp, Artificial Sequence
  MKO10070975_B_Ajuba
  gRNA
aaggctttctacagcgtcaa

SEQ ID NO: 70976 - DNA, 20 bp, Artificial Sequence
  MKO10070976_B_Ajuba
  gRNA
acctttgttgcacttgatac

SEQ ID NO: 70977 - DNA, 20 bp, Artificial Sequence
  MKO10070977_B_Ajuba
  gRNA
acctgtatcaagtgcaacaa

SEQ ID NO: 70978 - DNA, 20 bp, Artificial Sequence
  MKO10070978_B_Ak1
  gRNA
tccaatggcttcctgatcga

SEQ ID NO: 70979 - DNA, 20 bp, Artificial Sequence
  MKO10070979_B_Ak1
  gRNA
ctacccgagggaggtgaaac

SEQ ID NO: 70980 - DNA, 20 bp, Artificial Sequence
  MKO10070980_B_Ak1
  gRNA
agctgacttctgcccgaagc

SEQ ID NO: 70981 - DNA, 20 bp, Artificial Sequence
  MKO10070981_B_Ak2
  gRNA
tccaagactcgctgctgatc

SEQ ID NO: 70982 - DNA, 20 bp, Artificial Sequence
  MKO10070982_B_Ak2
  gRNA
tcagcctgcctcacagtccg

SEQ ID NO: 70983 - DNA, 20 bp, Artificial Sequence
  MKO10070983_B_Ak2
  gRNA
cttccctcggactgtgaggc

SEQ ID NO: 70984 - DNA, 20 bp, Artificial Sequence
  MKO10070984_B_Ak3
  gRNA
agaacctctgattcagcgcg

SEQ ID NO: 70985 - DNA, 20 bp, Artificial Sequence
  MKO10070985_B_Ak3
  gRNA
tcccagatgacgtcatgact

SEQ ID NO: 70986 - DNA, 20 bp, Artificial Sequence
  MKO10070986_B_Ak3
  gRNA
agccgagtcatgacgtcatc

SEQ ID NO: 70987 - DNA, 20 bp, Artificial Sequence
  MKO10070987_B_Ak4
  gRNA
caccatctaacagccagtgc

SEQ ID NO: 70988 - DNA, 20 bp, Artificial Sequence
  MKO10070988_B_Ak4
  gRNA
cacttgtacagttcgatgac

SEQ ID NO: 70989 - DNA, 20 bp, Artificial Sequence
  MKO10070989_B_Ak4
  gRNA
taggggattgatgacatcac

SEQ ID NO: 70990 - DNA, 20 bp, Artificial Sequence
  MKO10070990_B_Ak5
  gRNA
cacattaccatttcggagga

SEQ ID NO: 70991 - DNA, 20 bp, Artificial Sequence
  MKO10070991_B_Ak5
  gRNA
atcgccaagataatcaccaa

SEQ ID NO: 70992 - DNA, 20 bp, Artificial Sequence
  MKO10070992_B_Ak5
  gRNA
attctcccactgagatgtac

SEQ ID NO: 70993 - DNA, 20 bp, Artificial Sequence
  MKO10070993_B_Ak6
  gRNA
gtgggagatctagctcgaga

SEQ ID NO: 70994 - DNA, 20 bp, Artificial Sequence
  MKO10070994_B_Ak6
  gRNA
taatgaaccagaacagctcg

SEQ ID NO: 70995 - DNA, 20 bp, Artificial Sequence
  MKO10070995_B_Ak6
  gRNA
cactatatgaaaccagcgtt

SEQ ID NO: 70996 - DNA, 20 bp, Artificial Sequence
  MKO10070996_B_Ak7
  gRNA
ttcctagctaactgtgtcgc

SEQ ID NO: 70997 - DNA, 20 bp, Artificial Sequence
  MKO10070997_B_Ak7
  gRNA
actccatgagatgcgagagc

SEQ ID NO: 70998 - DNA, 20 bp, Artificial Sequence
  MKO10070998_B_Ak7
  gRNA
gttctacttacagggtccag

SEQ ID NO: 70999 - DNA, 20 bp, Artificial Sequence
  MKO10070999_B_Ak8
  gRNA
aagactgacaagaatcgaat

SEQ ID NO: 71000 - DNA, 20 bp, Artificial Sequence
  MKO10071000_B_Ak8
  gRNA
gagttactaccaggtttaca

SEQ ID NO: 71001 - DNA, 20 bp, Artificial Sequence
  MKO10071001_B_Ak8
  gRNA
gattcttgtcagtcttgtcc

SEQ ID NO: 71002 - DNA, 20 bp, Artificial Sequence
  MKO10071002_B_Akap10
  gRNA
tgctgtcctgctacttgaaa

SEQ ID NO: 71003 - DNA, 20 bp, Artificial Sequence
  MKO10071003_B_Akap10
  gRNA
ttagatgtcaagtccactaa

SEQ ID NO: 71004 - DNA, 20 bp, Artificial Sequence
  MKO10071004_B_Akap10
  gRNA
gccatgagaaacgacatcat

SEQ ID NO: 71005 - DNA, 20 bp, Artificial Sequence
  MKO10071005_B_Akap11
  gRNA
tgagcacccccagttaactg

SEQ ID NO: 71006 - DNA, 20 bp, Artificial Sequence
  MKO10071006_B_Akap11
  gRNA
tatggcaaacctcagttaac

SEQ ID NO: 71007 - DNA, 20 bp, Artificial Sequence
  MKO10071007_B_Akap11
  gRNA
ctcctaagtaaatatgctgc

SEQ ID NO: 71008 - DNA, 20 bp, Artificial Sequence
  MKO10071008_B_Akap12
  gRNA
agctggagatcccgctgacg

SEQ ID NO: 71009 - DNA, 20 bp, Artificial Sequence
  MKO10071009_B_Akap12
  gRNA
ttgttcagctacaccattga

SEQ ID NO: 71010 - DNA, 20 bp, Artificial Sequence
  MKO10071010_B_Akap12
  gRNA
agaagatgtccacgtccaag

SEQ ID NO: 71011 - DNA, 20 bp, Artificial Sequence
  MKO10071011_B_Akap13
  gRNA
ctcactgaacagtcgccata

SEQ ID NO: 71012 - DNA, 20 bp, Artificial Sequence
  MKO10071012_B_Akap13
  gRNA
tgtagatgtccagttctcga

SEQ ID NO: 71013 - DNA, 20 bp, Artificial Sequence
  MKO10071013_B_Akap13
  gRNA
gataacctcgctccagtgcc

SEQ ID NO: 71014 - DNA, 20 bp, Artificial Sequence
  MKO10071014_B_Akap14
  gRNA
ggactccaacaaaatatgct

SEQ ID NO: 71015 - DNA, 20 bp, Artificial Sequence
  MKO10071015_B_Akap14
  gRNA
cggggaattcacaccagaaa

SEQ ID NO: 71016 - DNA, 20 bp, Artificial Sequence
  MKO10071016_B_Akap14
  gRNA
accccatcaagaacatcaag

SEQ ID NO: 71017 - DNA, 20 bp, Artificial Sequence
  MKO10071017_B_Akap17b
  gRNA
ggaggcgggttgaagctctt

SEQ ID NO: 71018 - DNA, 20 bp, Artificial Sequence
  MKO10071018_B_Akap17b
  gRNA
tgtgtgtttgacaaggcttg

SEQ ID NO: 71019 - DNA, 20 bp, Artificial Sequence
  MKO10071019_B_Akap17b
  gRNA
aaggctaaaattacaggagc

SEQ ID NO: 71020 - DNA, 20 bp, Artificial Sequence
  MKO10071020_B_Akap1
  gRNA
actctgggggctatcgggct

SEQ ID NO: 71021 - DNA, 20 bp, Artificial Sequence
  MKO10071021_B_Akap1
  gRNA
cttccttgccgatgacgtct

SEQ ID NO: 71022 - DNA, 20 bp, Artificial Sequence
  MKO10071022_B_Akap1
  gRNA
cttccatgcactgcgcagtc

SEQ ID NO: 71023 - DNA, 20 bp, Artificial Sequence
  MKO10071023_B_Akap2
  gRNA
ggctaagtcaggctgtaagc

SEQ ID NO: 71024 - DNA, 20 bp, Artificial Sequence
  MKO10071024_B_Akap2
  gRNA
ctctaagttactgtcttgca

SEQ ID NO: 71025 - DNA, 20 bp, Artificial Sequence
  MKO10071025_B_Akap2
  gRNA
cttccatgagggtctgcatc

SEQ ID NO: 71026 - DNA, 20 bp, Artificial Sequence
  MKO10071026_B_Akap3
  gRNA
tttgcggcacgctccaagcc

SEQ ID NO: 71027 - DNA, 20 bp, Artificial Sequence
  MKO10071027_B_Akap3
  gRNA
gaaaggccgcagcgtcgggg

SEQ ID NO: 71028 - DNA, 20 bp, Artificial Sequence
  MKO10071028_B_Akap3
  gRNA
aaagttggtgtctattcacc

SEQ ID NO: 71029 - DNA, 20 bp, Artificial Sequence
  MKO10071029_B_Akap4
  gRNA
aaaagagattatcgtaatca

SEQ ID NO: 71030 - DNA, 20 bp, Artificial Sequence
  MKO10071030_B_Akap4
  gRNA
ctaccttgcacacgcctctg

SEQ ID NO: 71031 - DNA, 20 bp, Artificial Sequence
  MKO10071031_B_Akap4
  gRNA
atttaactcgccttctgacc

SEQ ID NO: 71032 - DNA, 20 bp, Artificial Sequence
  MKO10071032_B_Akap5
  gRNA
ccgctgtagcttctccggcc

SEQ ID NO: 71033 - DNA, 20 bp, Artificial Sequence
  MKO10071033_B_Akap5
  gRNA
actttcccggatgccattac

SEQ ID NO: 71034 - DNA, 20 bp, Artificial Sequence
  MKO10071034_B_Akap5
  gRNA
tacctgaatctcagaaacgc

SEQ ID NO: 71035 - DNA, 20 bp, Artificial Sequence
  MKO10071035_B_Akap6
  gRNA
ctccgggagcgcatcctaca

SEQ ID NO: 71036 - DNA, 20 bp, Artificial Sequence
  MKO10071036_B_Akap6
  gRNA
cagccggaggctgtcggtct

SEQ ID NO: 71037 - DNA, 20 bp, Artificial Sequence
  MKO10071037_B_Akap6
  gRNA
tcagtggctaaacgaagcca

SEQ ID NO: 71038 - DNA, 20 bp, Artificial Sequence
  MKO10071038_B_Akap7
  gRNA
gcaaaattcgatactacagc

SEQ ID NO: 71039 - DNA, 20 bp, Artificial Sequence
  MKO10071039_B_Akap7
  gRNA
aaaggagccgtcgcccacca

SEQ ID NO: 71040 - DNA, 20 bp, Artificial Sequence
  MKO10071040_B_Akap7
  gRNA
cattccgatcaccaacaaaa

SEQ ID NO: 71041 - DNA, 20 bp, Artificial Sequence
  MKO10071041_B_Akap8l
  gRNA
attcacccggaagtcggctg

SEQ ID NO: 71042 - DNA, 20 bp, Artificial Sequence
  MKO10071042_B_Akap8l
  gRNA
gccacactcaccataatcac

SEQ ID NO: 71043 - DNA, 20 bp, Artificial Sequence
  MKO10071043_B_Akap8l
  gRNA
acagtacgtagactgcaaag

SEQ ID NO: 71044 - DNA, 20 bp, Artificial Sequence
  MKO10071044_B_Akap8
  gRNA
ggcaaaagacgccacatgca

SEQ ID NO: 71045 - DNA, 20 bp, Artificial Sequence
  MKO10071045_B_Akap8
  gRNA
gaaggtcttaccttgccagc

SEQ ID NO: 71046 - DNA, 20 bp, Artificial Sequence
  MKO10071046_B_Akap8
  gRNA
tgctggacctgccaacaccc

SEQ ID NO: 71047 - DNA, 20 bp, Artificial Sequence
  MKO10071047_B_Akap9
  gRNA
gccgggaatcctgattgctc

SEQ ID NO: 71048 - DNA, 20 bp, Artificial Sequence
  MKO10071048_B_Akap9
  gRNA
tgatattgaagagttgactc

SEQ ID NO: 71049 - DNA, 20 bp, Artificial Sequence
  MKO10071049_B_Akap9
  gRNA
cgagctacattcatctgcag

SEQ ID NO: 71050 - DNA, 20 bp, Artificial Sequence
  MKO10071050_B_Akip1
  gRNA
ttctgtgataacggtagaca

SEQ ID NO: 71051 - DNA, 20 bp, Artificial Sequence
  MKO10071051_B_Akip1
  gRNA
atactacttgtctatgccag

SEQ ID NO: 71052 - DNA, 20 bp, Artificial Sequence
  MKO10071052_B_Akip1
  gRNA
gactatacttcaagtcagtg

SEQ ID NO: 71053 - DNA, 20 bp, Artificial Sequence
  MKO10071053_B_Akirin1
  gRNA
cttactgcaccaggttctcc

SEQ ID NO: 71054 - DNA, 20 bp, Artificial Sequence
  MKO10071054_B_Akirin1
  gRNA
tcacgcatgatcagatcatg

SEQ ID NO: 71055 - DNA, 20 bp, Artificial Sequence
  MKO10071055_B_Akirin1
  gRNA
ggatttgctcatactcctct

SEQ ID NO: 71056 - DNA, 20 bp, Artificial Sequence
  MKO10071056_B_Akirin2
  gRNA
atactgaatacaaaacttgc

SEQ ID NO: 71057 - DNA, 20 bp, Artificial Sequence
  MKO10071057_B_Akirin2
  gRNA
ttacgcatgatcagataatg

SEQ ID NO: 71058 - DNA, 20 bp, Artificial Sequence
  MKO10071058_B_Akirin2
  gRNA
gtgaacgtttgttgaaagaa

SEQ ID NO: 71059 - DNA, 20 bp, Artificial Sequence
  MKO10071059_B_Aknad1
  gRNA
acctgccaagaacctctcac

SEQ ID NO: 71060 - DNA, 20 bp, Artificial Sequence
  MKO10071060_B_Aknad1
  gRNA
gcctcctgtggccctcccct

SEQ ID NO: 71061 - DNA, 20 bp, Artificial Sequence
  MKO10071061_B_Aknad1
  gRNA
gccacaggaggccacctcca

SEQ ID NO: 71062 - DNA, 20 bp, Artificial Sequence
  MKO10071062_B_Akna
  gRNA
ttggtcctcaggccgagagc

SEQ ID NO: 71063 - DNA, 20 bp, Artificial Sequence
  MKO10071063_B_Akna
  gRNA
gttctcagcctccgcatact

SEQ ID NO: 71064 - DNA, 20 bp, Artificial Sequence
  MKO10071064_B_Akna
  gRNA
agggactcaggtctgttcgt

SEQ ID NO: 71065 - DNA, 20 bp, Artificial Sequence
  MKO10071065_B_Akp3
  gRNA
ctgtccccagacatacagtg

SEQ ID NO: 71066 - DNA, 20 bp, Artificial Sequence
  MKO10071066_B_Akp3
  gRNA
ctggaacaagaaggcagccg

SEQ ID NO: 71067 - DNA, 20 bp, Artificial Sequence
  MKO10071067_B_Akp3
  gRNA
accttggacagagccatata

SEQ ID NO: 71068 - DNA, 20 bp, Artificial Sequence
  MKO10071068_B_Akr1a1
  gRNA
ccaagccccgtgcgtgacag

SEQ ID NO: 71069 - DNA, 20 bp, Artificial Sequence
  MKO10071069_B_Akr1a1
  gRNA
ccctttcccaagaatgccga

SEQ ID NO: 71070 - DNA, 20 bp, Artificial Sequence
  MKO10071070_B_Akr1a1
  gRNA
ctcacaggcagtccctcgag

SEQ ID NO: 71071 - DNA, 20 bp, Artificial Sequence
  MKO10071071_B_Akr1b10
  gRNA
agtggattagatacaggtcc

SEQ ID NO: 71072 - DNA, 20 bp, Artificial Sequence
  MKO10071072_B_Akr1b10
  gRNA
aatactgcctttatcatctg

SEQ ID NO: 71073 - DNA, 20 bp, Artificial Sequence
  MKO10071073_B_Akr1b10
  gRNA
agtcaagcttcagatccgag

SEQ ID NO: 71074 - DNA, 20 bp, Artificial Sequence
  MKO10071074_B_Akr1b3
  gRNA
tttccagtcccctcctggcc

SEQ ID NO: 71075 - DNA, 20 bp, Artificial Sequence
  MKO10071075_B_Akr1b3
  gRNA
ggatctcttcattgtcagca

SEQ ID NO: 71076 - DNA, 20 bp, Artificial Sequence
  MKO10071076_B_Akr1b3
  gRNA
cacgttccatgacaagagca

SEQ ID NO: 71077 - DNA, 20 bp, Artificial Sequence
  MKO10071077_B_Akr1b7
  gRNA
cctgagtaaatccacattct

SEQ ID NO: 71078 - DNA, 20 bp, Artificial Sequence
  MKO10071078_B_Akr1b7
  gRNA
ttattacccaaagacaataa

SEQ ID NO: 71079 - DNA, 20 bp, Artificial Sequence
  MKO10071079_B_Akr1b7
  gRNA
agtccagcttcagatccgag

SEQ ID NO: 71080 - DNA, 20 bp, Artificial Sequence
  MKO10071080_B_Akr1b8
  gRNA
ttccaagaatgttgtcttac

SEQ ID NO: 71081 - DNA, 20 bp, Artificial Sequence
  MKO10071081_B_Akr1b8
  gRNA
agtccagcttcagatccgtg

SEQ ID NO: 71082 - DNA, 20 bp, Artificial Sequence
  MKO10071082_B_Akr1b8
  gRNA
tagcagtttcttctcaaagc

SEQ ID NO: 71083 - DNA, 20 bp, Artificial Sequence
  MKO10071083_B_Akr1c12
  gRNA
gaaatttctattggacactg

SEQ ID NO: 71084 - DNA, 20 bp, Artificial Sequence
  MKO10071084_B_Akr1c12
  gRNA
gagagaatcctcaacaagcc

SEQ ID NO: 71085 - DNA, 20 bp, Artificial Sequence
  MKO10071085_B_Akr1c12
  gRNA
acttcagtcctggcttgttg

SEQ ID NO: 71086 - DNA, 20 bp, Artificial Sequence
  MKO10071086_B_Akr1c13
  gRNA
gaaatctctgttggacactg

SEQ ID NO: 71087 - DNA, 20 bp, Artificial Sequence
  MKO10071087_B_Akr1c13
  gRNA
cagctgcctgtggttaaagt

SEQ ID NO: 71088 - DNA, 20 bp, Artificial Sequence
  MKO10071088_B_Akr1c13
  gRNA
gatttcccttgctcatttac

SEQ ID NO: 71089 - DNA, 20 bp, Artificial Sequence
  MKO10071089_B_Akr1c14
  gRNA
cactttccatcgaccagaat

SEQ ID NO: 71090 - DNA, 20 bp, Artificial Sequence
  MKO10071090_B_Akr1c14
  gRNA
gccttgataagttcatcctt

SEQ ID NO: 71091 - DNA, 20 bp, Artificial Sequence
  MKO10071091_B_Akr1c14
  gRNA
acaaataagcggagtcaaaa

SEQ ID NO: 71092 - DNA, 20 bp, Artificial Sequence
  MKO10071092_B_Akr1c18
  gRNA
ggcctatctcttcttcattc

SEQ ID NO: 71093 - DNA, 20 bp, Artificial Sequence
  MKO10071093_B_Akr1c18
  gRNA
agatatattctatacttcga

SEQ ID NO: 71094 - DNA, 20 bp, Artificial Sequence
  MKO10071094_B_Akr1c18
  gRNA
aagtttccatgctcatcttt

SEQ ID NO: 71095 - DNA, 20 bp, Artificial Sequence
  MKO10071095_B_Akr1c19
  gRNA
attcgaagcaagattgcagc

SEQ ID NO: 71096 - DNA, 20 bp, Artificial Sequence
  MKO10071096_B_Akr1c19
  gRNA
gttctcacctggttgcaaac

SEQ ID NO: 71097 - DNA, 20 bp, Artificial Sequence
  MKO10071097_B_Akr1c19
  gRNA
ggctatccatttagctctag

SEQ ID NO: 71098 - DNA, 20 bp, Artificial Sequence
  MKO10071098_B_Akr1c20
  gRNA
agaagatcctgagtaagccg

SEQ ID NO: 71099 - DNA, 20 bp, Artificial Sequence
  MKO10071099_B_Akr1c20
  gRNA
acacagcagcacaatcaata

SEQ ID NO: 71100 - DNA, 20 bp, Artificial Sequence
  MKO10071100_B_Akr1c20
  gRNA
gcttctgtagccttactcct

SEQ ID NO: 71101 - DNA, 20 bp, Artificial Sequence
  MKO10071101_B_Akr1c21
  gRNA
gagctccttagctttactct

SEQ ID NO: 71102 - DNA, 20 bp, Artificial Sequence
  MKO10071102_B_Akr1c21
  gRNA
gcaggactaaccaagtccat

SEQ ID NO: 71103 - DNA, 20 bp, Artificial Sequence
  MKO10071103_B_Akr1c21
  gRNA
agatgattctgaataagcct

SEQ ID NO: 71104 - DNA, 20 bp, Artificial Sequence
  MKO10071104_B_Akr1c6
  gRNA
gcttctgtagccttactctt

SEQ ID NO: 71105 - DNA, 20 bp, Artificial Sequence
  MKO10071105_B_Akr1c6
  gRNA
aaaattaatatatgatgctg

SEQ ID NO: 71106 - DNA, 20 bp, Artificial Sequence
  MKO10071106_B_Akr1c6
  gRNA
atacccacctggttgcacac

SEQ ID NO: 71107 - DNA, 20 bp, Artificial Sequence
  MKO10071107_B_Akr1cl
  gRNA
cacatgtcatagaccagagc

SEQ ID NO: 71108 - DNA, 20 bp, Artificial Sequence
  MKO10071108_B_Akr1cl
  gRNA
tcactcacctggttgcacac

SEQ ID NO: 71109 - DNA, 20 bp, Artificial Sequence
  MKO10071109_B_Akr1cl
  gRNA
tcagggttagccaagtccat

SEQ ID NO: 71110 - DNA, 20 bp, Artificial Sequence
  MKO10071110_B_Akr1d1
  gRNA
gtacaaaccagtcactaacc

SEQ ID NO: 71111 - DNA, 20 bp, Artificial Sequence
  MKO10071111_B_Akr1d1
  gRNA
caatctacctggttagtgac

SEQ ID NO: 71112 - DNA, 20 bp, Artificial Sequence
  MKO10071112_B_Akr1d1
  gRNA
ggtctatgtaatctagtttg

SEQ ID NO: 71113 - DNA, 20 bp, Artificial Sequence
  MKO10071113_B_Akr1e1
  gRNA
agtaagcacaatcgaagtgc

SEQ ID NO: 71114 - DNA, 20 bp, Artificial Sequence
  MKO10071114_B_Akr1e1
  gRNA
caactcacctggttagttat

SEQ ID NO: 71115 - DNA, 20 bp, Artificial Sequence
  MKO10071115_B_Akr1e1
  gRNA
gagtggtaccttgaaaccca

SEQ ID NO: 71116 - DNA, 20 bp, Artificial Sequence
  MKO10071116_B_Akr7a5
  gRNA
gttctacgcctacaaccctt

SEQ ID NO: 71117 - DNA, 20 bp, Artificial Sequence
  MKO10071117_B_Akr7a5
  gRNA
ccaagtgaaaatcgccacca

SEQ ID NO: 71118 - DNA, 20 bp, Artificial Sequence
  MKO10071118_B_Akr7a5
  gRNA
atttatacttgccagtcagc

SEQ ID NO: 71119 - DNA, 20 bp, Artificial Sequence
  MKO10071119_B_Akt1s1
  gRNA
cggctgggcggtagcgataa

SEQ ID NO: 71120 - DNA, 20 bp, Artificial Sequence
  MKO10071120_B_Akt1s1
  gRNA
agaagcccgatcgtcagatg

SEQ ID NO: 71121 - DNA, 20 bp, Artificial Sequence
  MKO10071121_B_Akt1s1
  gRNA
cggcgggcgtctcctcgctc

SEQ ID NO: 71122 - DNA, 20 bp, Artificial Sequence
  MKO10071122_B_Akt1
  gRNA
ccgttccttgtagccaataa

SEQ ID NO: 71123 - DNA, 20 bp, Artificial Sequence
  MKO10071123_B_Akt1
  gRNA
ggctcacccagtgacaactc

SEQ ID NO: 71124 - DNA, 20 bp, Artificial Sequence
  MKO10071124_B_Akt1
  gRNA
catggcatagtagcggcctg

SEQ ID NO: 71125 - DNA, 20 bp, Artificial Sequence
  MKO10071125_B_Akt2
  gRNA
aaccagaatgaccttgccga

SEQ ID NO: 71126 - DNA, 20 bp, Artificial Sequence
  MKO10071126_B_Akt2
  gRNA
cctacagggaagagtggatg

SEQ ID NO: 71127 - DNA, 20 bp, Artificial Sequence
  MKO10071127_B_Akt2
  gRNA
tctcatctggagagtctaca

SEQ ID NO: 71128 - DNA, 20 bp, Artificial Sequence
  MKO10071128_B_Akt3
  gRNA
atttcatgtagatacaccag

SEQ ID NO: 71129 - DNA, 20 bp, Artificial Sequence
  MKO10071129_B_Akt3
  gRNA
tcccctcaacaacttctcag

SEQ ID NO: 71130 - DNA, 20 bp, Artificial Sequence
  MKO10071130_B_Akt3
  gRNA
tttgactatttgaaactact

SEQ ID NO: 71131 - DNA, 20 bp, Artificial Sequence
  MKO10071131_B_Aktip
  gRNA
ctgcaagaagcgaatattcc

SEQ ID NO: 71132 - DNA, 20 bp, Artificial Sequence
  MKO10071132_B_Aktip
  gRNA
ccatcttaccgctctgcatt

SEQ ID NO: 71133 - DNA, 20 bp, Artificial Sequence
  MKO10071133_B_Aktip
  gRNA
gatggctgtacgtagactcc

SEQ ID NO: 71134 - DNA, 20 bp, Artificial Sequence
  MKO10071134_B_Alad
  gRNA
ttgaggctgtccgtctgctg

SEQ ID NO: 71135 - DNA, 20 bp, Artificial Sequence
  MKO10071135_B_Alad
  gRNA
caaagatcaggacacagcgc

SEQ ID NO: 71136 - DNA, 20 bp, Artificial Sequence
  MKO10071136_B_Alad
  gRNA
ctgcgctgtgtcctgatctt

SEQ ID NO: 71137 - DNA, 20 bp, Artificial Sequence
  MKO10071137_B_Alas1
  gRNA
gacggcacacagcttccgtc

SEQ ID NO: 71138 - DNA, 20 bp, Artificial Sequence
  MKO10071138_B_Alas1
  gRNA
gagagcacaaatcttcccga

SEQ ID NO: 71139 - DNA, 20 bp, Artificial Sequence
  MKO10071139_B_Alas1
  gRNA
tgtgccatctgggactcgtc

SEQ ID NO: 71140 - DNA, 20 bp, Artificial Sequence
  MKO10071140_B_Alas2
  gRNA
ctgattcagaacaatatgac

SEQ ID NO: 71141 - DNA, 20 bp, Artificial Sequence
  MKO10071141_B_Alas2
  gRNA
taccagttcctatttagtat

SEQ ID NO: 71142 - DNA, 20 bp, Artificial Sequence
  MKO10071142_B_Alas2
  gRNA
actgccccttcagtctgctc

SEQ ID NO: 71143 - DNA, 20 bp, Artificial Sequence
  MKO10071143_B_Alb
  gRNA
aggagtttaccttcggggtc

SEQ ID NO: 71144 - DNA, 20 bp, Artificial Sequence
  MKO10071144_B_Alb
  gRNA
gggtactcactgtcccataa

SEQ ID NO: 71145 - DNA, 20 bp, Artificial Sequence
  MKO10071145_B_Alb
  gRNA
tgagcatgccaaattagtgc

SEQ ID NO: 71146 - DNA, 20 bp, Artificial Sequence
  MKO10071146_B_Alcam
  gRNA
taccatgtgatgttgccatc

SEQ ID NO: 71147 - DNA, 20 bp, Artificial Sequence
  MKO10071147_B_Alcam
  gRNA
tacactgtcaactcagcata

SEQ ID NO: 71148 - DNA, 20 bp, Artificial Sequence
  MKO10071148_B_Alcam
  gRNA
cagctgatctgtttcaagaa

SEQ ID NO: 71149 - DNA, 20 bp, Artificial Sequence
  MKO10071149_B_Aldh16a1
  gRNA
actttacctacccatagcca

SEQ ID NO: 71150 - DNA, 20 bp, Artificial Sequence
  MKO10071150_B_Aldh16a1
  gRNA
gcggttgtgggtgtccagcc

SEQ ID NO: 71151 - DNA, 20 bp, Artificial Sequence
  MKO10071151_B_Aldh16a1
  gRNA
ggctgcaaagatagcattca

SEQ ID NO: 71152 - DNA, 20 bp, Artificial Sequence
  MKO10071152_B_Aldh18a1
  gRNA
gcttgccgtgggcacgactg

SEQ ID NO: 71153 - DNA, 20 bp, Artificial Sequence
  MKO10071153_B_Aldh18a1
  gRNA
tggtagaagacgttgcctga

SEQ ID NO: 71154 - DNA, 20 bp, Artificial Sequence
  MKO10071154_B_Aldh18a1
  gRNA
ctgagacacatgcaccgctc

SEQ ID NO: 71155 - DNA, 20 bp, Artificial Sequence
  MKO10071155_B_Aldh1a1
  gRNA
agttcttaaccctgcaactg

SEQ ID NO: 71156 - DNA, 20 bp, Artificial Sequence
  MKO10071156_B_Aldh1a1
  gRNA
tatacaagacgtgaacctat

SEQ ID NO: 71157 - DNA, 20 bp, Artificial Sequence
  MKO10071157_B_Aldh1a1
  gRNA
tgcgccatggagagccaatc

SEQ ID NO: 71158 - DNA, 20 bp, Artificial Sequence
  MKO10071158_B_Aldh1a2
  gRNA
aatcgatgtaaaaagcttgc

SEQ ID NO: 71159 - DNA, 20 bp, Artificial Sequence
  MKO10071159_B_Aldh1a2
  gRNA
gttggacaagcttgcagact

SEQ ID NO: 71160 - DNA, 20 bp, Artificial Sequence
  MKO10071160_B_Aldh1a2
  gRNA
agtgtgtggacagatcatcc

SEQ ID NO: 71161 - DNA, 20 bp, Artificial Sequence
  MKO10071161_B_Aldh1a3
  gRNA
acaacgttgtgtgcttcacc

SEQ ID NO: 71162 - DNA, 20 bp, Artificial Sequence
  MKO10071162_B_Aldh1a3
  gRNA
agatatttatcaacaacgac

SEQ ID NO: 71163 - DNA, 20 bp, Artificial Sequence
  MKO10071163_B_Aldh1a3
  gRNA
aggtcttaatacagccttcc

SEQ ID NO: 71164 - DNA, 20 bp, Artificial Sequence
  MKO10071164_B_Aldh1a7
  gRNA
cgtgaacctattggggtgtg

SEQ ID NO: 71165 - DNA, 20 bp, Artificial Sequence
  MKO10071165_B_Aldh1a7
  gRNA
gaaaacttacagggatgatt

SEQ ID NO: 71166 - DNA, 20 bp, Artificial Sequence
  MKO10071166_B_Aldh1a7
  gRNA
tgcgccatggggagccaatc

SEQ ID NO: 71167 - DNA, 20 bp, Artificial Sequence
  MKO10071167_B_Aldh1b1
  gRNA
ggctgtgttcacccgagacc

SEQ ID NO: 71168 - DNA, 20 bp, Artificial Sequence
  MKO10071168_B_Aldh1b1
  gRNA
agcttgttgtagcaaatctc

SEQ ID NO: 71169 - DNA, 20 bp, Artificial Sequence
  MKO10071169_B_Aldh1b1
  gRNA
gctggccccggcactcgcca

SEQ ID NO: 71170 - DNA, 20 bp, Artificial Sequence
  MKO10071170_B_Aldh1l1
  gRNA
ccattcacaactggatccgt

SEQ ID NO: 71171 - DNA, 20 bp, Artificial Sequence
  MKO10071171_B_Aldh1l1
  gRNA
acggttgtacagcgtgctca

SEQ ID NO: 71172 - DNA, 20 bp, Artificial Sequence
  MKO10071172_B_Aldh1l1
  gRNA
ggctgtgcgactgattgcag

SEQ ID NO: 71173 - DNA, 20 bp, Artificial Sequence
  MKO10071173_B_Aldh1l2
  gRNA
ttacccttgagtctccatcg

SEQ ID NO: 71174 - DNA, 20 bp, Artificial Sequence
  MKO10071174_B_Aldh1l2
  gRNA
cgtcacacgatctctgaaga

SEQ ID NO: 71175 - DNA, 20 bp, Artificial Sequence
  MKO10071175_B_Aldh1l2
  gRNA
cttattggccagagcctgtt

SEQ ID NO: 71176 - DNA, 20 bp, Artificial Sequence
  MKO10071176_B_Aldh2
  gRNA
ccggctgttgtaccgattgg

SEQ ID NO: 71177 - DNA, 20 bp, Artificial Sequence
  MKO10071177_B_Aldh2
  gRNA
accaggtacgagatgacata

SEQ ID NO: 71178 - DNA, 20 bp, Artificial Sequence
  MKO10071178_B_Aldh2
  gRNA
gggaaaaccattcccatcga

SEQ ID NO: 71179 - DNA, 20 bp, Artificial Sequence
  MKO10071179_B_Aldh3a1
  gRNA
gagcccttgttacgtagaca

SEQ ID NO: 71180 - DNA, 20 bp, Artificial Sequence
  MKO10071180_B_Aldh3a1
  gRNA
ctcggaagtgagtgatcaca

SEQ ID NO: 71181 - DNA, 20 bp, Artificial Sequence
  MKO10071181_B_Aldh3a1
  gRNA
catgtgatcactcacttccg

SEQ ID NO: 71182 - DNA, 20 bp, Artificial Sequence
  MKO10071182_B_Aldh3a2
  gRNA
gcttcgcacaggatatagtc

SEQ ID NO: 71183 - DNA, 20 bp, Artificial Sequence
  MKO10071183_B_Aldh3a2
  gRNA
ataatcagtacgactcccag

SEQ ID NO: 71184 - DNA, 20 bp, Artificial Sequence
  MKO10071184_B_Aldh3a2
  gRNA
tcttctgtacgatttgattc

SEQ ID NO: 71185 - DNA, 20 bp, Artificial Sequence
  MKO10071185_B_Aldh3b1
  gRNA
ctttctgtagtcagccttcg

SEQ ID NO: 71186 - DNA, 20 bp, Artificial Sequence
  MKO10071186_B_Aldh3b1
  gRNA
cctgccccgctatctggacc

SEQ ID NO: 71187 - DNA, 20 bp, Artificial Sequence
  MKO10071187_B_Aldh3b1
  gRNA
gctgaccgcagggaattgtg

SEQ ID NO: 71188 - DNA, 20 bp, Artificial Sequence
  MKO10071188_B_Aldh3b2
  gRNA
gatcatcctgtgcgagaatg

SEQ ID NO: 71189 - DNA, 20 bp, Artificial Sequence
  MKO10071189_B_Aldh3b2
  gRNA
agctgagctcagccttcatc

SEQ ID NO: 71190 - DNA, 20 bp, Artificial Sequence
  MKO10071190_B_Aldh3b2
  gRNA
agagctgctgccccagtatc

SEQ ID NO: 71191 - DNA, 20 bp, Artificial Sequence
  MKO10071191_B_Aldh4a1
  gRNA
atcgatggctctgttgagca

SEQ ID NO: 71192 - DNA, 20 bp, Artificial Sequence
  MKO10071192_B_Aldh4a1
  gRNA
gcccatcttagcattctctc

SEQ ID NO: 71193 - DNA, 20 bp, Artificial Sequence
  MKO10071193_B_Aldh4a1
  gRNA
cgagcgggatgcactgcaga

SEQ ID NO: 71194 - DNA, 20 bp, Artificial Sequence
  MKO10071194_B_Aldh5a1
  gRNA
gaggaagctcgccgtattta

SEQ ID NO: 71195 - DNA, 20 bp, Artificial Sequence
  MKO10071195_B_Aldh5a1
  gRNA
agacacaccctattccgccc

SEQ ID NO: 71196 - DNA, 20 bp, Artificial Sequence
  MKO10071196_B_Aldh5a1
  gRNA
acctctgccaaagataagcg

SEQ ID NO: 71197 - DNA, 20 bp, Artificial Sequence
  MKO10071197_B_Aldh6a1
  gRNA
aaccccataggtttcttcta

SEQ ID NO: 71198 - DNA, 20 bp, Artificial Sequence
  MKO10071198_B_Aldh6a1
  gRNA
actgtaaagctcttcattga

SEQ ID NO: 71199 - DNA, 20 bp, Artificial Sequence
  MKO10071199_B_Aldh6a1
  gRNA
tcaatgaagagctttacagt

SEQ ID NO: 71200 - DNA, 20 bp, Artificial Sequence
  MKO10071200_B_Aldh7a1
  gRNA
tagattcctgccccaaaacg

SEQ ID NO: 71201 - DNA, 20 bp, Artificial Sequence
  MKO10071201_B_Aldh7a1
  gRNA
gccaatagcaagagtccgac

SEQ ID NO: 71202 - DNA, 20 bp, Artificial Sequence
  MKO10071202_B_Aldh7a1
  gRNA
agggcgtgtataatggaagc

SEQ ID NO: 71203 - DNA, 20 bp, Artificial Sequence
  MKO10071203_B_Aldh8a1
  gRNA
aacgttctctcgtcctgaac

SEQ ID NO: 71204 - DNA, 20 bp, Artificial Sequence
  MKO10071204_B_Aldh8a1
  gRNA
tacccttgatctcgttcact

SEQ ID NO: 71205 - DNA, 20 bp, Artificial Sequence
  MKO10071205_B_Aldh8a1
  gRNA
cacggtattcccagcagcga

SEQ ID NO: 71206 - DNA, 20 bp, Artificial Sequence
  MKO10071206_B_Aldh9a1
  gRNA
ctctcttcgggtgtagccga

SEQ ID NO: 71207 - DNA, 20 bp, Artificial Sequence
  MKO10071207_B_Aldh9a1
  gRNA
attgccactttcgcgtgttc

SEQ ID NO: 71208 - DNA, 20 bp, Artificial Sequence
  MKO10071208_B_Aldh9a1
  gRNA
catccgtaccttcacgccag

SEQ ID NO: 71209 - DNA, 20 bp, Artificial Sequence
  MKO10071209_B_Aldoart1
  gRNA
ggtgacccatggcaacgcac

SEQ ID NO: 71210 - DNA, 20 bp, Artificial Sequence
  MKO10071210_B_Aldoart1
  gRNA
atcttgcctgtgcgttgcca

SEQ ID NO: 71211 - DNA, 20 bp, Artificial Sequence
  MKO10071211_B_Aldoart1
  gRNA
tccttgacaagcgagactgt

SEQ ID NO: 71212 - DNA, 20 bp, Artificial Sequence
  MKO10071212_B_Aldoart2
  gRNA
tggtagtagtagcgccgtcc

SEQ ID NO: 71213 - DNA, 20 bp, Artificial Sequence
  MKO10071213_B_Aldoart2
  gRNA
tttgctgatatgtagactcg

SEQ ID NO: 71214 - DNA, 20 bp, Artificial Sequence
  MKO10071214_B_Aldoart2
  gRNA
taaccacgcctactgagcag

SEQ ID NO: 71215 - DNA, 20 bp, Artificial Sequence
  MKO10071215_B_Aldoa
  gRNA
ccttgcccggagccacaatg

SEQ ID NO: 71216 - DNA, 20 bp, Artificial Sequence
  MKO10071216_B_Aldoa
  gRNA
tcccacctgctggcagatgc

SEQ ID NO: 71217 - DNA, 20 bp, Artificial Sequence
  MKO10071217_B_Aldoa
  gRNA
ttatgccagcatctgccagc

SEQ ID NO: 71218 - DNA, 20 bp, Artificial Sequence
  MKO10071218_B_Aldob
  gRNA
tcctgacggagaccatgacc

SEQ ID NO: 71219 - DNA, 20 bp, Artificial Sequence
  MKO10071219_B_Aldob
  gRNA
tatccacagttggaccaagg

SEQ ID NO: 71220 - DNA, 20 bp, Artificial Sequence
  MKO10071220_B_Aldob
  gRNA
cccgcttgcaggaacaaaca

SEQ ID NO: 71221 - DNA, 20 bp, Artificial Sequence
  MKO10071221_B_Aldoc
  gRNA
ctacgagaatgcccttatcc

SEQ ID NO: 71222 - DNA, 20 bp, Artificial Sequence
  MKO10071222_B_Aldoc
  gRNA
tccccgtcggtcccagctag

SEQ ID NO: 71223 - DNA, 20 bp, Artificial Sequence
  MKO10071223_B_Aldoc
  gRNA
gaatcgccggctgtaccgcc

SEQ ID NO: 71224 - DNA, 20 bp, Artificial Sequence
  MKO10071224_B_Alg10b
  gRNA
tacgcttccaaactaagcta

SEQ ID NO: 71225 - DNA, 20 bp, Artificial Sequence
  MKO10071225_B_Alg10b
  gRNA
tcgcagtaccgctgcgcctg

SEQ ID NO: 71226 - DNA, 20 bp, Artificial Sequence
  MKO10071226_B_Alg10b
  gRNA
ctcccgcagagcgcggctga

SEQ ID NO: 71227 - DNA, 20 bp, Artificial Sequence
  MKO10071227_B_Alg11
  gRNA
ccacatagtatgcagaccga

SEQ ID NO: 71228 - DNA, 20 bp, Artificial Sequence
  MKO10071228_B_Alg11
  gRNA
ccgccacctgcattacagta

SEQ ID NO: 71229 - DNA, 20 bp, Artificial Sequence
  MKO10071229_B_Alg11
  gRNA
actccgcatatcatcagtcc

SEQ ID NO: 71230 - DNA, 20 bp, Artificial Sequence
  MKO10071230_B_Alg12
  gRNA
tacgaccaccacgagtttcc

SEQ ID NO: 71231 - DNA, 20 bp, Artificial Sequence
  MKO10071231_B_Alg12
  gRNA
gcagaacatgacagccaccg

SEQ ID NO: 71232 - DNA, 20 bp, Artificial Sequence
  MKO10071232_B_Alg12
  gRNA
cctgaagccaatgatgacga

SEQ ID NO: 71233 - DNA, 20 bp, Artificial Sequence
  MKO10071233_B_Alg13
  gRNA
gatcttgtcattagccacgc

SEQ ID NO: 71234 - DNA, 20 bp, Artificial Sequence
  MKO10071234_B_Alg13
  gRNA
tccattgactgtaacagccc

SEQ ID NO: 71235 - DNA, 20 bp, Artificial Sequence
  MKO10071235_B_Alg13
  gRNA
gaacaatcatcaatttgaat

SEQ ID NO: 71236 - DNA, 20 bp, Artificial Sequence
  MKO10071236_B_Alg14
  gRNA
tcttgctattccagcgacta

SEQ ID NO: 71237 - DNA, 20 bp, Artificial Sequence
  MKO10071237_B_Alg14
  gRNA
cagatagggacgcatgttcc

SEQ ID NO: 71238 - DNA, 20 bp, Artificial Sequence
  MKO10071238_B_Alg14
  gRNA
gtctctcagactcttgatcg

SEQ ID NO: 71239 - DNA, 20 bp, Artificial Sequence
  MKO10071239_B_Alg1
  gRNA
ccgccaccccattgtgctgc

SEQ ID NO: 71240 - DNA, 20 bp, Artificial Sequence
  MKO10071240_B_Alg1
  gRNA
ctgcatttgtgggagcaaat

SEQ ID NO: 71241 - DNA, 20 bp, Artificial Sequence
  MKO10071241_B_Alg1
  gRNA
tgtgtgtgaccaatgctatg

SEQ ID NO: 71242 - DNA, 20 bp, Artificial Sequence
  MKO10071242_B_Alg2
  gRNA
caccacgtcgaactcctcgc

SEQ ID NO: 71243 - DNA, 20 bp, Artificial Sequence
  MKO10071243_B_Alg2
  gRNA
taggaccctcttacgccgtc

SEQ ID NO: 71244 - DNA, 20 bp, Artificial Sequence
  MKO10071244_B_Alg2
  gRNA
aactggccagacggcgtaag

SEQ ID NO: 71245 - DNA, 20 bp, Artificial Sequence
  MKO10071245_B_Alg3
  gRNA
cctcactcacacaagaggtc

SEQ ID NO: 71246 - DNA, 20 bp, Artificial Sequence
  MKO10071246_B_Alg3
  gRNA
gaagagccgcagtacaaaga

SEQ ID NO: 71247 - DNA, 20 bp, Artificial Sequence
  MKO10071247_B_Alg3
  gRNA
tcatcttcaccgagacagcc

SEQ ID NO: 71248 - DNA, 20 bp, Artificial Sequence
  MKO10071248_B_Alg5
  gRNA
acaacagatagctgtttcgt

SEQ ID NO: 71249 - DNA, 20 bp, Artificial Sequence
  MKO10071249_B_Alg5
  gRNA
agcagttataaacgccacaa

SEQ ID NO: 71250 - DNA, 20 bp, Artificial Sequence
  MKO10071250_B_Alg5
  gRNA
atacatttacctttgacgtc

SEQ ID NO: 71251 - DNA, 20 bp, Artificial Sequence
  MKO10071251_B_Alg6
  gRNA
tctcatagcctcgtgatgtg

SEQ ID NO: 71252 - DNA, 20 bp, Artificial Sequence
  MKO10071252_B_Alg6
  gRNA
gtgataacaatttactgtac

SEQ ID NO: 71253 - DNA, 20 bp, Artificial Sequence
  MKO10071253_B_Alg6
  gRNA
gctggaaaaccacctatgtt

SEQ ID NO: 71254 - DNA, 20 bp, Artificial Sequence
  MKO10071254_B_Alg8
  gRNA
gtccattgcacgtctatttc

SEQ ID NO: 71255 - DNA, 20 bp, Artificial Sequence
  MKO10071255_B_Alg8
  gRNA
gagtgattgcaagccaattt

SEQ ID NO: 71256 - DNA, 20 bp, Artificial Sequence
  MKO10071256_B_Alg8
  gRNA
tccttgaactgtaatagttc

SEQ ID NO: 71257 - DNA, 20 bp, Artificial Sequence
  MKO10071257_B_Alg9
  gRNA
cgggggaatattcccatgtc

SEQ ID NO: 71258 - DNA, 20 bp, Artificial Sequence
  MKO10071258_B_Alg9
  gRNA
agtccgagatgttgctcaga

SEQ ID NO: 71259 - DNA, 20 bp, Artificial Sequence
  MKO10071259_B_Alg9
  gRNA
gtgatgaaacattcaactac

SEQ ID NO: 71260 - DNA, 20 bp, Artificial Sequence
  MKO10071260_B_Alkbh1
  gRNA
aggatagccttcgagtccat

SEQ ID NO: 71261 - DNA, 20 bp, Artificial Sequence
  MKO10071261_B_Alkbh1
  gRNA
ccttactgtcccagttataa

SEQ ID NO: 71262 - DNA, 20 bp, Artificial Sequence
  MKO10071262_B_Alkbh1
  gRNA
gtttactagagagactgcgt

SEQ ID NO: 71263 - DNA, 20 bp, Artificial Sequence
  MKO10071263_B_Alkbh2
  gRNA
tgttcgagatcgagtctgcg

SEQ ID NO: 71264 - DNA, 20 bp, Artificial Sequence
  MKO10071264_B_Alkbh2
  gRNA
catctctgtgctcgccgatg

SEQ ID NO: 71265 - DNA, 20 bp, Artificial Sequence
  MKO10071265_B_Alkbh2
  gRNA
gaccagaaaacgtgtacgtg

SEQ ID NO: 71266 - DNA, 20 bp, Artificial Sequence
  MKO10071266_B_Alkbh3
  gRNA
gccccgcggtctgggaaaga

SEQ ID NO: 71267 - DNA, 20 bp, Artificial Sequence
  MKO10071267_B_Alkbh3
  gRNA
acttacctagacacaccagt

SEQ ID NO: 71268 - DNA, 20 bp, Artificial Sequence
  MKO10071268_B_Alkbh3
  gRNA
agctttgtaaggatgtcccc

SEQ ID NO: 71269 - DNA, 20 bp, Artificial Sequence
  MKO10071269_B_Alkbh4
  gRNA
ccctggaagctctcacagtc

SEQ ID NO: 71270 - DNA, 20 bp, Artificial Sequence
  MKO10071270_B_Alkbh4
  gRNA
gtgtgtccactggtgcctcg

SEQ ID NO: 71271 - DNA, 20 bp, Artificial Sequence
  MKO10071271_B_Alkbh4
  gRNA
ctccgccatcgacccccact

SEQ ID NO: 71272 - DNA, 20 bp, Artificial Sequence
  MKO10071272_B_Alkbh5
  gRNA
tatgcttcagatcgcctgtc

SEQ ID NO: 71273 - DNA, 20 bp, Artificial Sequence
  MKO10071273_B_Alkbh5
  gRNA
ctcaggacattaaggaacgc

SEQ ID NO: 71274 - DNA, 20 bp, Artificial Sequence
  MKO10071274_B_Alkbh5
  gRNA
gcaatcttccgaggactcat

SEQ ID NO: 71275 - DNA, 20 bp, Artificial Sequence
  MKO10071275_B_Alkbh6
  gRNA
tccacgtagcgttgaagcca

SEQ ID NO: 71276 - DNA, 20 bp, Artificial Sequence
  MKO10071276_B_Alkbh6
  gRNA
gccagacgatgatgtcccta

SEQ ID NO: 71277 - DNA, 20 bp, Artificial Sequence
  MKO10071277_B_Alkbh6
  gRNA
gaagcttcctcccagacagc

SEQ ID NO: 71278 - DNA, 20 bp, Artificial Sequence
  MKO10071278_B_Alkbh7
  gRNA
catcctgcagcgggttcggg

SEQ ID NO: 71279 - DNA, 20 bp, Artificial Sequence
  MKO10071279_B_Alkbh7
  gRNA
cagccgcccgaacccgctgc

SEQ ID NO: 71280 - DNA, 20 bp, Artificial Sequence
  MKO10071280_B_Alkbh7
  gRNA
tgcaccagcttcataacact

SEQ ID NO: 71281 - DNA, 20 bp, Artificial Sequence
  MKO10071281_B_Alkbh8
  gRNA
accgactttaggtcttcctg

SEQ ID NO: 71282 - DNA, 20 bp, Artificial Sequence
  MKO10071282_B_Alkbh8
  gRNA
accataaatcaatatgaacc

SEQ ID NO: 71283 - DNA, 20 bp, Artificial Sequence
  MKO10071283_B_Alkbh8
  gRNA
tcactatgagagcaacactg

SEQ ID NO: 71284 - DNA, 20 bp, Artificial Sequence
  MKO10071284_B_Alk
  gRNA
ctcctaccccacaacgaagc

SEQ ID NO: 71285 - DNA, 20 bp, Artificial Sequence
  MKO10071285_B_Alk
  gRNA
aatccaccgccgacaagctc

SEQ ID NO: 71286 - DNA, 20 bp, Artificial Sequence
  MKO10071286_B_Alk
  gRNA
ctcggagggcacatggcgcc

SEQ ID NO: 71287 - DNA, 20 bp, Artificial Sequence
  MKO10071287_B_Allc
  gRNA
gcagcgaacctgagtgaaga

SEQ ID NO: 71288 - DNA, 20 bp, Artificial Sequence
  MKO10071288_B_Allc
  gRNA
gggaactgcagcgacgcctg

SEQ ID NO: 71289 - DNA, 20 bp, Artificial Sequence
  MKO10071289_B_Allc
  gRNA
gtaacggcttcaaactcctc

SEQ ID NO: 71290 - DNA, 20 bp, Artificial Sequence
  MKO10071290_B_Alms1
  gRNA
aatcaggctcaacctcttct

SEQ ID NO: 71291 - DNA, 20 bp, Artificial Sequence
  MKO10071291_B_Alms1
  gRNA
atgatgactgctgccataca

SEQ ID NO: 71292 - DNA, 20 bp, Artificial Sequence
  MKO10071292_B_Alms1
  gRNA
aactagaatttgcacctttg

SEQ ID NO: 71293 - DNA, 20 bp, Artificial Sequence
  MKO10071293_B_Alox12b
  gRNA
gaaggaggctgtcttgacga

SEQ ID NO: 71294 - DNA, 20 bp, Artificial Sequence
  MKO10071294_B_Alox12b
  gRNA
gttaccatcctcctccccga

SEQ ID NO: 71295 - DNA, 20 bp, Artificial Sequence
  MKO10071295_B_Alox12b
  gRNA
cgacacactccctatccttt

SEQ ID NO: 71296 - DNA, 20 bp, Artificial Sequence
  MKO10071296_B_Alox12e
  gRNA
gagtgtcatcagttaccttc

SEQ ID NO: 71297 - DNA, 20 bp, Artificial Sequence
  MKO10071297_B_Alox12e
  gRNA
ggattaatcctgcctatagc

SEQ ID NO: 71298 - DNA, 20 bp, Artificial Sequence
  MKO10071298_B_Alox12e
  gRNA
gctctcgatacttcctaaac

SEQ ID NO: 71299 - DNA, 20 bp, Artificial Sequence
  MKO10071299_B_Alox12
  gRNA
gaccggccaaggcactcttc

SEQ ID NO: 71300 - DNA, 20 bp, Artificial Sequence
  MKO10071300_B_Alox12
  gRNA
ccgtgtttccctgctaccgc

SEQ ID NO: 71301 - DNA, 20 bp, Artificial Sequence
  MKO10071301_B_Alox12
  gRNA
cttccagaagtatcgagaaa

SEQ ID NO: 71302 - DNA, 20 bp, Artificial Sequence
  MKO10071302_B_Alox15
  gRNA
tcggcttctaggctgcaccg

SEQ ID NO: 71303 - DNA, 20 bp, Artificial Sequence
  MKO10071303_B_Alox15
  gRNA
ggtgtacttaccagccatct

SEQ ID NO: 71304 - DNA, 20 bp, Artificial Sequence
  MKO10071304_B_Alox15
  gRNA
gccttgagagtcttcaacca

SEQ ID NO: 71305 - DNA, 20 bp, Artificial Sequence
  MKO10071305_B_Alox5ap
  gRNA
ttagtccctgccgccttcgc

SEQ ID NO: 71306 - DNA, 20 bp, Artificial Sequence
  MKO10071306_B_Alox5ap
  gRNA
atggttgagtatcccggcga

SEQ ID NO: 71307 - DNA, 20 bp, Artificial Sequence
  MKO10071307_B_Alox5ap
  gRNA
cgcttgccgaagatgtagcc

SEQ ID NO: 71308 - DNA, 20 bp, Artificial Sequence
  MKO10071308_B_Alox5
  gRNA
ggaactcgatgtagtccccg

SEQ ID NO: 71309 - DNA, 20 bp, Artificial Sequence
  MKO10071309_B_Alox5
  gRNA
tatctcggggcagatccttg

SEQ ID NO: 71310 - DNA, 20 bp, Artificial Sequence
  MKO10071310_B_Alox5
  gRNA
ctttacgtctgtgctgcttg

SEQ ID NO: 71311 - DNA, 20 bp, Artificial Sequence
  MKO10071311_B_Alox8
  gRNA
ccaagtctttcacagtctcg

SEQ ID NO: 71312 - DNA, 20 bp, Artificial Sequence
  MKO10071312_B_Alox8
  gRNA
ttccgcaagactccagcagc

SEQ ID NO: 71313 - DNA, 20 bp, Artificial Sequence
  MKO10071313_B_Alox8
  gRNA
cacccgcagcaaaggtgtcc

SEQ ID NO: 71314 - DNA, 20 bp, Artificial Sequence
  MKO10071314_B_Aloxe3
  gRNA
gctctcaccgataacattct

SEQ ID NO: 71315 - DNA, 20 bp, Artificial Sequence
  MKO10071315_B_Aloxe3
  gRNA
agctggaagatcttcgcccc

SEQ ID NO: 71316 - DNA, 20 bp, Artificial Sequence
  MKO10071316_B_Aloxe3
  gRNA
ctgctgacatccaccatccg

SEQ ID NO: 71317 - DNA, 20 bp, Artificial Sequence
  MKO10071317_B_Alpi
  gRNA
ctgcatctgagtaccaatta

SEQ ID NO: 71318 - DNA, 20 bp, Artificial Sequence
  MKO10071318_B_Alpi
  gRNA
ggccttccaactgccccttt

SEQ ID NO: 71319 - DNA, 20 bp, Artificial Sequence
  MKO10071319_B_Alpi
  gRNA
caccaacctacctgctttct

SEQ ID NO: 71320 - DNA, 20 bp, Artificial Sequence
  MKO10071320_B_Alpk1
  gRNA
atcagggtccttaactcgct

SEQ ID NO: 71321 - DNA, 20 bp, Artificial Sequence
  MKO10071321_B_Alpk1
  gRNA
cttcactccccagcgagtta

SEQ ID NO: 71322 - DNA, 20 bp, Artificial Sequence
  MKO10071322_B_Alpk1
  gRNA
ttgctccgttgttgcttatc

SEQ ID NO: 71323 - DNA, 20 bp, Artificial Sequence
  MKO10071323_B_Alpk2
  gRNA
cgcagtttcttgccgagacc

SEQ ID NO: 71324 - DNA, 20 bp, Artificial Sequence
  MKO10071324_B_Alpk2
  gRNA
agattccaagtcgatagccc

SEQ ID NO: 71325 - DNA, 20 bp, Artificial Sequence
  MKO10071325_B_Alpk2
  gRNA
atgaagactctaccgtctgc

SEQ ID NO: 71326 - DNA, 20 bp, Artificial Sequence
  MKO10071326_B_Alpk3
  gRNA
tgtccgaagacagtgacgtc

SEQ ID NO: 71327 - DNA, 20 bp, Artificial Sequence
  MKO10071327_B_Alpk3
  gRNA
aaatacgagatcactcatca

SEQ ID NO: 71328 - DNA, 20 bp, Artificial Sequence
  MKO10071328_B_Alpk3
  gRNA
cacggcacgggacttgagtg

SEQ ID NO: 71329 - DNA, 20 bp, Artificial Sequence
  MKO10071329_B_Alpl
  gRNA
gctacaccacaacacgggcg

SEQ ID NO: 71330 - DNA, 20 bp, Artificial Sequence
  MKO10071330_B_Alpl
  gRNA
cgagtgtgcgtaggctgcac

SEQ ID NO: 71331 - DNA, 20 bp, Artificial Sequence
  MKO10071331_B_Alpl
  gRNA
cacgcgatgcaacaccactc

SEQ ID NO: 71332 - DNA, 20 bp, Artificial Sequence
  MKO10071332_B_Alppl2
  gRNA
aatgcctgcctcagcgctac

SEQ ID NO: 71333 - DNA, 20 bp, Artificial Sequence
  MKO10071333_B_Alppl2
  gRNA
tcaaccagtgcaacacgaca

SEQ ID NO: 71334 - DNA, 20 bp, Artificial Sequence
  MKO10071334_B_Alppl2
  gRNA
taagaacctcgttatcctca

SEQ ID NO: 71335 - DNA, 20 bp, Artificial Sequence
  MKO10071335_B_Als2cl
  gRNA
gctgcctcagcgccttgcgc

SEQ ID NO: 71336 - DNA, 20 bp, Artificial Sequence
  MKO10071336_B_Als2cl
  gRNA
tgtgggcaccacgatgtgcc

SEQ ID NO: 71337 - DNA, 20 bp, Artificial Sequence
  MKO10071337_B_Als2cl
  gRNA
ctgtcacataccacaaccgc

SEQ ID NO: 71338 - DNA, 20 bp, Artificial Sequence
  MKO10071338_B_Als2cr11
  gRNA
tctcgccaaacctaagtaca

SEQ ID NO: 71339 - DNA, 20 bp, Artificial Sequence
  MKO10071339_B_Als2cr11
  gRNA
tgaacagattaaaacgctgt

SEQ ID NO: 71340 - DNA, 20 bp, Artificial Sequence
  MKO10071340_B_Als2cr11
  gRNA
atacataccacgtctccaaa

SEQ ID NO: 71341 - DNA, 20 bp, Artificial Sequence
  MKO10071341_B_Als2cr12
  gRNA
agaacagatatcagtcacct

SEQ ID NO: 71342 - DNA, 20 bp, Artificial Sequence
  MKO10071342_B_Als2cr12
  gRNA
actcagcaatttgctcctga

SEQ ID NO: 71343 - DNA, 20 bp, Artificial Sequence
  MKO10071343_B_Als2cr12
  gRNA
tgctctctgtgtttcctgac

SEQ ID NO: 71344 - DNA, 20 bp, Artificial Sequence
  MKO10071344_B_Als2
  gRNA
cgactgagctgccgtctcgc

SEQ ID NO: 71345 - DNA, 20 bp, Artificial Sequence
  MKO10071345_B_Als2
  gRNA
cgcagccttccttaagagcc

SEQ ID NO: 71346 - DNA, 20 bp, Artificial Sequence
  MKO10071346_B_Als2
  gRNA
aaagaggcctagtccatgtc

SEQ ID NO: 71347 - DNA, 20 bp, Artificial Sequence
  MKO10071347_B_Alx1
  gRNA
taagactgatatgtcgtacg

SEQ ID NO: 71348 - DNA, 20 bp, Artificial Sequence
  MKO10071348_B_Alx1
  gRNA
atgcaggaggacgcgtcacg

SEQ ID NO: 71349 - DNA, 20 bp, Artificial Sequence
  MKO10071349_B_Alx1
  gRNA
ctcaggatgtctcccgtgaa

SEQ ID NO: 71350 - DNA, 20 bp, Artificial Sequence
  MKO10071350_B_Alx3
  gRNA
tgctcccgagcatacacgtc

SEQ ID NO: 71351 - DNA, 20 bp, Artificial Sequence
  MKO10071351_B_Alx3
  gRNA
ggggacttgtagtcaccatc

SEQ ID NO: 71352 - DNA, 20 bp, Artificial Sequence
  MKO10071352_B_Alx3
  gRNA
acgctcacgcttccgccact

SEQ ID NO: 71353 - DNA, 20 bp, Artificial Sequence
  MKO10071353_B_Alx4
  gRNA
tggcgaaagagggagcgctt

SEQ ID NO: 71354 - DNA, 20 bp, Artificial Sequence
  MKO10071354_B_Alx4
  gRNA
tatgaggaccgacctcaccg

SEQ ID NO: 71355 - DNA, 20 bp, Artificial Sequence
  MKO10071355_B_Alx4
  gRNA
gaggggcaactcataggccg

SEQ ID NO: 71356 - DNA, 20 bp, Artificial Sequence
  MKO10071356_B_Alyref2
  gRNA
ccctttggatggccgcccta

SEQ ID NO: 71357 - DNA, 20 bp, Artificial Sequence
  MKO10071357_B_Alyref2
  gRNA
tgaatcgaggcggcgggcct

SEQ ID NO: 71358 - DNA, 20 bp, Artificial Sequence
  MKO10071358_B_Alyref2
  gRNA
aacgttgaaaaaagccgctg

SEQ ID NO: 71359 - DNA, 20 bp, Artificial Sequence
  MKO10071359_B_Alyref
  gRNA
gaagaggtagaggcaccggc

SEQ ID NO: 71360 - DNA, 20 bp, Artificial Sequence
  MKO10071360_B_Alyref
  gRNA
caatctgtgatgtgacaagc

SEQ ID NO: 71361 - DNA, 20 bp, Artificial Sequence
  MKO10071361_B_Alyref
  gRNA
atgacaagaaaccgtggctc

SEQ ID NO: 71362 - DNA, 20 bp, Artificial Sequence
  MKO10071362_B_Amacr
  gRNA
ctccccgtctgccgtcttgt

SEQ ID NO: 71363 - DNA, 20 bp, Artificial Sequence
  MKO10071363_B_Amacr
  gRNA
ctttggagaaaattcccgat

SEQ ID NO: 71364 - DNA, 20 bp, Artificial Sequence
  MKO10071364_B_Amacr
  gRNA
catctgtcccgtcaaagatc

SEQ ID NO: 71365 - DNA, 20 bp, Artificial Sequence
  MKO10071365_B_Ambn
  gRNA
catggctagtttgagccttg

SEQ ID NO: 71366 - DNA, 20 bp, Artificial Sequence
  MKO10071366_B_Ambn
  gRNA
gaaaagcacttaatagttta

SEQ ID NO: 71367 - DNA, 20 bp, Artificial Sequence
  MKO10071367_B_Ambn
  gRNA
ctctgtcagtattctagact

SEQ ID NO: 71368 - DNA, 20 bp, Artificial Sequence
  MKO10071368_B_Ambp
  gRNA
ttccatcgatgtccgtcttc

SEQ ID NO: 71369 - DNA, 20 bp, Artificial Sequence
  MKO10071369_B_Ambp
  gRNA
cagtgatggtgagcccgtgg

SEQ ID NO: 71370 - DNA, 20 bp, Artificial Sequence
  MKO10071370_B_Ambp
  gRNA
catattcgtcatagttggtg

SEQ ID NO: 71371 - DNA, 20 bp, Artificial Sequence
  MKO10071371_B_Ambra1
  gRNA
agaatgctgtacgaatcctc

SEQ ID NO: 71372 - DNA, 20 bp, Artificial Sequence
  MKO10071372_B_Ambra1
  gRNA
aaggtcgagcgtggactatc

SEQ ID NO: 71373 - DNA, 20 bp, Artificial Sequence
  MKO10071373_B_Ambra1
  gRNA
ccagtgagatggagcgtgtc

SEQ ID NO: 71374 - DNA, 20 bp, Artificial Sequence
  MKO10071374_B_Amd1
  gRNA
aatccctagcaagcttcaac

SEQ ID NO: 71375 - DNA, 20 bp, Artificial Sequence
  MKO10071375_B_Amd1
  gRNA
caccctcttactgaaagcac

SEQ ID NO: 71376 - DNA, 20 bp, Artificial Sequence
  MKO10071376_B_Amd1
  gRNA
ttcatgaagccttctcacca

SEQ ID NO: 71377 - DNA, 20 bp, Artificial Sequence
  MKO10071377_B_Amd2
  gRNA
gtacccacaccggaatttcc

SEQ ID NO: 71378 - DNA, 20 bp, Artificial Sequence
  MKO10071378_B_Amd2
  gRNA
caccatctttcatgtagaac

SEQ ID NO: 71379 - DNA, 20 bp, Artificial Sequence
  MKO10071379_B_Amd2
  gRNA
agaatttccagtgtttgatc

SEQ ID NO: 71380 - DNA, 20 bp, Artificial Sequence
  MKO10071380_B_Amdhd1
  gRNA
catacctcggcagccttcat

SEQ ID NO: 71381 - DNA, 20 bp, Artificial Sequence
  MKO10071381_B_Amdhd1
  gRNA
agtccacgagtttgcaatga

SEQ ID NO: 71382 - DNA, 20 bp, Artificial Sequence
  MKO10071382_B_Amdhd1
  gRNA
ttaccttcattgcaaactcg

SEQ ID NO: 71383 - DNA, 20 bp, Artificial Sequence
  MKO10071383_B_Amdhd2
  gRNA
atctgcacatcgataaagcc

SEQ ID NO: 71384 - DNA, 20 bp, Artificial Sequence
  MKO10071384_B_Amdhd2
  gRNA
tcacaatgcagacgttgtcc

SEQ ID NO: 71385 - DNA, 20 bp, Artificial Sequence
  MKO10071385_B_Amdhd2
  gRNA
tttatcgatgtgcagatcaa

SEQ ID NO: 71386 - DNA, 20 bp, Artificial Sequence
  MKO10071386_B_Amelx
  gRNA
tggccaggaactggcatcat

SEQ ID NO: 71387 - DNA, 20 bp, Artificial Sequence
  MKO10071387_B_Amelx
  gRNA
ttatatcaacttaagctatg

SEQ ID NO: 71388 - DNA, 20 bp, Artificial Sequence
  MKO10071388_B_Amelx
  gRNA
gcatagcaaaagctgctccc

SEQ ID NO: 71389 - DNA, 20 bp, Artificial Sequence
  MKO10071389_B_Amer1
  gRNA
gaccaagcgaagttcctgct

SEQ ID NO: 71390 - DNA, 20 bp, Artificial Sequence
  MKO10071390_B_Amer1
  gRNA
gcctatctccaacgctccat

SEQ ID NO: 71391 - DNA, 20 bp, Artificial Sequence
  MKO10071391_B_Amer1
  gRNA
gaagggttcaggccgcaccc

SEQ ID NO: 71392 - DNA, 20 bp, Artificial Sequence
  MKO10071392_B_Amer2
  gRNA
tgccaccttcggagtcgaca

SEQ ID NO: 71393 - DNA, 20 bp, Artificial Sequence
  MKO10071393_B_Amer2
  gRNA
ccggagggacaagcgcggca

SEQ ID NO: 71394 - DNA, 20 bp, Artificial Sequence
  MKO10071394_B_Amer2
  gRNA
ctcgcattgtgagtgcgccg

SEQ ID NO: 71395 - DNA, 20 bp, Artificial Sequence
  MKO10071395_B_Amer3
  gRNA
ggtcatagaatagttcgtag

SEQ ID NO: 71396 - DNA, 20 bp, Artificial Sequence
  MKO10071396_B_Amer3
  gRNA
ggtcacacagcctacgagca

SEQ ID NO: 71397 - DNA, 20 bp, Artificial Sequence
  MKO10071397_B_Amer3
  gRNA
ccggccgtatccttgggaac

SEQ ID NO: 71398 - DNA, 20 bp, Artificial Sequence
  MKO10071398_B_Amfr
  gRNA
cacacatggcatgcacacct

SEQ ID NO: 71399 - DNA, 20 bp, Artificial Sequence
  MKO10071399_B_Amfr
  gRNA
agagctgaaccatcagatgc

SEQ ID NO: 71400 - DNA, 20 bp, Artificial Sequence
  MKO10071400_B_Amfr
  gRNA
cttatccagtgtattgtgtt

SEQ ID NO: 71401 - DNA, 20 bp, Artificial Sequence
  MKO10071401_B_Amhr2
  gRNA
gtagaggcagcggataccct

SEQ ID NO: 71402 - DNA, 20 bp, Artificial Sequence
  MKO10071402_B_Amhr2
  gRNA
cacctgggagaaacgcagct

SEQ ID NO: 71403 - DNA, 20 bp, Artificial Sequence
  MKO10071403_B_Amhr2
  gRNA
ggacttcagtatccccaaac

SEQ ID NO: 71404 - DNA, 20 bp, Artificial Sequence
  MKO10071404_B_Amh
  gRNA
gagtcatccgcgtgaaacag

SEQ ID NO: 71405 - DNA, 20 bp, Artificial Sequence
  MKO10071405_B_Amh
  gRNA
ccgctatttggtgctaaccg

SEQ ID NO: 71406 - DNA, 20 bp, Artificial Sequence
  MKO10071406_B_Amh
  gRNA
ctgattcccgctgtttcacg

SEQ ID NO: 71407 - DNA, 20 bp, Artificial Sequence
  MKO10071407_B_Amica1
  gRNA
tatgactccaacatgcgtag

SEQ ID NO: 71408 - DNA, 20 bp, Artificial Sequence
  MKO10071408_B_Amica1
  gRNA
cgcaaccgtgtagacctgac

SEQ ID NO: 71409 - DNA, 20 bp, Artificial Sequence
  MKO10071409_B_Amica1
  gRNA
ccagatctcagagtccgagt

SEQ ID NO: 71410 - DNA, 20 bp, Artificial Sequence
  MKO10071410_B_Amigo1
  gRNA
agccagggccggccgatctg

SEQ ID NO: 71411 - DNA, 20 bp, Artificial Sequence
  MKO10071411_B_Amigo1
  gRNA
ctgccggtgcccgaagctac

SEQ ID NO: 71412 - DNA, 20 bp, Artificial Sequence
  MKO10071412_B_Amigo1
  gRNA
aagaccgagctgaccgactc

SEQ ID NO: 71413 - DNA, 20 bp, Artificial Sequence
  MKO10071413_B_Amigo2
  gRNA
aggcgaccataatgtcgtta

SEQ ID NO: 71414 - DNA, 20 bp, Artificial Sequence
  MKO10071414_B_Amigo2
  gRNA
attcttgtatcgcaatgaac

SEQ ID NO: 71415 - DNA, 20 bp, Artificial Sequence
  MKO10071415_B_Amigo2
  gRNA
cagtgagaccgttatagccg

SEQ ID NO: 71416 - DNA, 20 bp, Artificial Sequence
  MKO10071416_B_Amigo3
  gRNA
tgaagagcagctgcacgcgc

SEQ ID NO: 71417 - DNA, 20 bp, Artificial Sequence
  MKO10071417_B_Amigo3
  gRNA
cgcactcaaacgcctgcacc

SEQ ID NO: 71418 - DNA, 20 bp, Artificial Sequence
  MKO10071418_B_Amigo3
  gRNA
gcgctaaccaccccgggtgc

SEQ ID NO: 71419 - DNA, 20 bp, Artificial Sequence
  MKO10071419_B_Ammecr1l
  gRNA
tcagggaatacacattaacc

SEQ ID NO: 71420 - DNA, 20 bp, Artificial Sequence
  MKO10071420_B_Ammecr1l
  gRNA
tttctgtaggtaggggtcca

SEQ ID NO: 71421 - DNA, 20 bp, Artificial Sequence
  MKO10071421_B_Ammecr1l
  gRNA
tgaattcaatccgaattcca

SEQ ID NO: 71422 - DNA, 20 bp, Artificial Sequence
  MKO10071422_B_Ammecr1
  gRNA
tgaagatgtttgcgactatt

SEQ ID NO: 71423 - DNA, 20 bp, Artificial Sequence
  MKO10071423_B_Ammecr1
  gRNA
acagcccactgtttgtaaca

SEQ ID NO: 71424 - DNA, 20 bp, Artificial Sequence
  MKO10071424_B_Ammecr1
  gRNA
ccagtacctggtcagcttta

SEQ ID NO: 71425 - DNA, 20 bp, Artificial Sequence
  MKO10071425_B_Amn1
  gRNA
caaaattacctctaattgtt

SEQ ID NO: 71426 - DNA, 20 bp, Artificial Sequence
  MKO10071426_B_Amn1
  gRNA
agaaatagcataacttcaga

SEQ ID NO: 71427 - DNA, 20 bp, Artificial Sequence
  MKO10071427_B_Amn1
  gRNA
tttgtttaggtatctgacaa

SEQ ID NO: 71428 - DNA, 20 bp, Artificial Sequence
  MKO10071428_B_Amn
  gRNA
gagccttaccatatccgaga

SEQ ID NO: 71429 - DNA, 20 bp, Artificial Sequence
  MKO10071429_B_Amn
  gRNA
ccagaaccggaccccgtgcg

SEQ ID NO: 71430 - DNA, 20 bp, Artificial Sequence
  MKO10071430_B_Amn
  gRNA
gctgcagatggtgtcggtcc

SEQ ID NO: 71431 - DNA, 20 bp, Artificial Sequence
  MKO10071431_B_Amotl1
  gRNA
gcaatgagaaccaagctcga

SEQ ID NO: 71432 - DNA, 20 bp, Artificial Sequence
  MKO10071432_B_Amotl1
  gRNA
ggacttgaccaggctctcgt

SEQ ID NO: 71433 - DNA, 20 bp, Artificial Sequence
  MKO10071433_B_Amotl1
  gRNA
cttatgcgcctgtccactgt

SEQ ID NO: 71434 - DNA, 20 bp, Artificial Sequence
  MKO10071434_B_Amotl2
  gRNA
cttctccagggcctcacgct

SEQ ID NO: 71435 - DNA, 20 bp, Artificial Sequence
  MKO10071435_B_Amotl2
  gRNA
ccctcagtacagtctccatc

SEQ ID NO: 71436 - DNA, 20 bp, Artificial Sequence
  MKO10071436_B_Amotl2
  gRNA
gaaggctggccgcatagaaa

SEQ ID NO: 71437 - DNA, 20 bp, Artificial Sequence
  MKO10071437_B_Amot
  gRNA
cataagcctctgagacccgt

SEQ ID NO: 71438 - DNA, 20 bp, Artificial Sequence
  MKO10071438_B_Amot
  gRNA
acacattgaaatccgagacc

SEQ ID NO: 71439 - DNA, 20 bp, Artificial Sequence
  MKO10071439_B_Amot
  gRNA
attgagcaatgcccaggcga

SEQ ID NO: 71440 - DNA, 20 bp, Artificial Sequence
  MKO10071440_B_Ampd1
  gRNA
aattaacagtcttccgtcct

SEQ ID NO: 71441 - DNA, 20 bp, Artificial Sequence
  MKO10071441_B_Ampd1
  gRNA
agaccccctccaagtacttg

SEQ ID NO: 71442 - DNA, 20 bp, Artificial Sequence
  MKO10071442_B_Ampd1
  gRNA
ggtaaccgttgaagactttg

SEQ ID NO: 71443 - DNA, 20 bp, Artificial Sequence
  MKO10071443_B_Ampd2
  gRNA
ttggctcgaagaagaatatc

SEQ ID NO: 71444 - DNA, 20 bp, Artificial Sequence
  MKO10071444_B_Ampd2
  gRNA
ccgttcttctagctgctcga

SEQ ID NO: 71445 - DNA, 20 bp, Artificial Sequence
  MKO10071445_B_Ampd2
  gRNA
tttcagcgggtcatcatctc

SEQ ID NO: 71446 - DNA, 20 bp, Artificial Sequence
  MKO10071446_B_Ampd3
  gRNA
attccagaaagttcagtcgc

SEQ ID NO: 71447 - DNA, 20 bp, Artificial Sequence
  MKO10071447_B_Ampd3
  gRNA
cactttccccctgatgagcc

SEQ ID NO: 71448 - DNA, 20 bp, Artificial Sequence
  MKO10071448_B_Ampd3
  gRNA
ctgatactcaggcatagcat

SEQ ID NO: 71449 - DNA, 20 bp, Artificial Sequence
  MKO10071449_B_Amph
  gRNA
ggatatttagcagcaatcaa

SEQ ID NO: 71450 - DNA, 20 bp, Artificial Sequence
  MKO10071450_B_Amph
  gRNA
tgattgctgctaaatatccc

SEQ ID NO: 71451 - DNA, 20 bp, Artificial Sequence
  MKO10071451_B_Amph
  gRNA
agacttccatcaaaagctag

SEQ ID NO: 71452 - DNA, 20 bp, Artificial Sequence
  MKO10071452_B_Amtn
  gRNA
gttgcaggaactcccgaagc

SEQ ID NO: 71453 - DNA, 20 bp, Artificial Sequence
  MKO10071453_B_Amtn
  gRNA
cctgcaacaaaaccgactcc

SEQ ID NO: 71454 - DNA, 20 bp, Artificial Sequence
  MKO10071454_B_Amtn
  gRNA
tcagatgttacccattattg

SEQ ID NO: 71455 - DNA, 20 bp, Artificial Sequence
  MKO10071455_B_Amt
  gRNA
ggaaaaatggtggcgtttgc

SEQ ID NO: 71456 - DNA, 20 bp, Artificial Sequence
  MKO10071456_B_Amt
  gRNA
ccacctccaggcctacatcc

SEQ ID NO: 71457 - DNA, 20 bp, Artificial Sequence
  MKO10071457_B_Amt
  gRNA
tctcaccttgcagagctaac

SEQ ID NO: 71458 - DNA, 20 bp, Artificial Sequence
  MKO10071458_B_Amy1
  gRNA
tctctactaggtgattgatc

SEQ ID NO: 71459 - DNA, 20 bp, Artificial Sequence
  MKO10071459_B_Amy1
  gRNA
tccacagcccttcaagacca

SEQ ID NO: 71460 - DNA, 20 bp, Artificial Sequence
  MKO10071460_B_Amy1
  gRNA
gaaagattatgttcgaacca

SEQ ID NO: 71461 - DNA, 20 bp, Artificial Sequence
  MKO10071461_B_Amy2a2
  gRNA
ttaaagtcccaagcagagta

SEQ ID NO: 71462 - DNA, 20 bp, Artificial Sequence
  MKO10071462_B_Amy2a2
  gRNA
gtcagaaattgtcgtctgac

SEQ ID NO: 71463 - DNA, 20 bp, Artificial Sequence
  MKO10071463_B_Amy2a2
  gRNA
tctacctcttggaaaatgaa

SEQ ID NO: 71464 - DNA, 20 bp, Artificial Sequence
  MKO10071464_B_Amy2a3
  gRNA
ttaaagtcccaagcagagta

SEQ ID NO: 71465 - DNA, 20 bp, Artificial Sequence
  MKO10071465_B_Amy2a3
  gRNA
gtcagaaattgtcgtctgac

SEQ ID NO: 71466 - DNA, 20 bp, Artificial Sequence
  MKO10071466_B_Amy2a3
  gRNA
tctacctcttggaaaatgaa

SEQ ID NO: 71467 - DNA, 20 bp, Artificial Sequence
  MKO10071467_B_Amy2a4
  gRNA
ttaaagtcccaagcagagta

SEQ ID NO: 71468 - DNA, 20 bp, Artificial Sequence
  MKO10071468_B_Amy2a4
  gRNA
gtcagaaattgtcgtctgac

SEQ ID NO: 71469 - DNA, 20 bp, Artificial Sequence
  MKO10071469_B_Amy2a4
  gRNA
tctacctcttggaaaatgaa

SEQ ID NO: 71470 - DNA, 20 bp, Artificial Sequence
  MKO10071470_B_Amy2a5
  gRNA
ttaaagtcccaagcagagta

SEQ ID NO: 71471 - DNA, 20 bp, Artificial Sequence
  MKO10071471_B_Amy2a5
  gRNA
gtcagaaattgtcgtctgac

SEQ ID NO: 71472 - DNA, 20 bp, Artificial Sequence
  MKO10071472_B_Amy2a5
  gRNA
tctacctcttggaaaatgaa

SEQ ID NO: 71473 - DNA, 20 bp, Artificial Sequence
  MKO10071473_B_Amy2b
  gRNA
tctctcctaggttattgatc

SEQ ID NO: 71474 - DNA, 20 bp, Artificial Sequence
  MKO10071474_B_Amy2b
  gRNA
gttctgctgctttccctcat

SEQ ID NO: 71475 - DNA, 20 bp, Artificial Sequence
  MKO10071475_B_Amy2b
  gRNA
tgcacccctccaaatccctt

SEQ ID NO: 71476 - DNA, 20 bp, Artificial Sequence
  MKO10071476_B_Amz1
  gRNA
tgtagcttcgctcgcttctc

SEQ ID NO: 71477 - DNA, 20 bp, Artificial Sequence
  MKO10071477_B_Amz1
  gRNA
gagacgctgcctcgtgagcg

SEQ ID NO: 71478 - DNA, 20 bp, Artificial Sequence
  MKO10071478_B_Amz1
  gRNA
ccccggaagaaatctgccga

SEQ ID NO: 71479 - DNA, 20 bp, Artificial Sequence
  MKO10071479_B_Amz2
  gRNA
caatgatcgatctctaccct

SEQ ID NO: 71480 - DNA, 20 bp, Artificial Sequence
  MKO10071480_B_Amz2
  gRNA
ctcggcagatgcaggtacta

SEQ ID NO: 71481 - DNA, 20 bp, Artificial Sequence
  MKO10071481_B_Amz2
  gRNA
acttgcctgtgtggatttgc

SEQ ID NO: 71482 - DNA, 20 bp, Artificial Sequence
  MKO10071482_B_Anapc10
  gRNA
acttagtgaacatccaattc

SEQ ID NO: 71483 - DNA, 20 bp, Artificial Sequence
  MKO10071483_B_Anapc10
  gRNA
ttcttatcagcaacttgaat

SEQ ID NO: 71484 - DNA, 20 bp, Artificial Sequence
  MKO10071484_B_Anapc10
  gRNA
ctgatcctaagcagttggag

SEQ ID NO: 71485 - DNA, 20 bp, Artificial Sequence
  MKO10071485_B_Anapc11
  gRNA
atctgcaggatggcgtttaa

SEQ ID NO: 71486 - DNA, 20 bp, Artificial Sequence
  MKO10071486_B_Anapc11
  gRNA
acatgcactgcatcctcaag

SEQ ID NO: 71487 - DNA, 20 bp, Artificial Sequence
  MKO10071487_B_Anapc11
  gRNA
gctgcgcattcagccacttg

SEQ ID NO: 71488 - DNA, 20 bp, Artificial Sequence
  MKO10071488_B_Anapc13
  gRNA
cccgccaagcatcatcaatc

SEQ ID NO: 71489 - DNA, 20 bp, Artificial Sequence
  MKO10071489_B_Anapc13
  gRNA
gttctcgtggaggccctgta

SEQ ID NO: 71490 - DNA, 20 bp, Artificial Sequence
  MKO10071490_B_Anapc13
  gRNA
ccgttgtcttgctcgggctc

SEQ ID NO: 71491 - DNA, 20 bp, Artificial Sequence
  MKO10071491_B_Anapc15
  gRNA
ctcgtgtgactgagacactg

SEQ ID NO: 71492 - DNA, 20 bp, Artificial Sequence
  MKO10071492_B_Anapc15
  gRNA
cctcttcaggtggacatgga

SEQ ID NO: 71493 - DNA, 20 bp, Artificial Sequence
  MKO10071493_B_Anapc15
  gRNA
cacagtgtctcagtcacacg

SEQ ID NO: 71494 - DNA, 20 bp, Artificial Sequence
  MKO10071494_B_Anapc16
  gRNA
agtggcatccacgcttaaac

SEQ ID NO: 71495 - DNA, 20 bp, Artificial Sequence
  MKO10071495_B_Anapc16
  gRNA
taaacccatcgagcagctgc

SEQ ID NO: 71496 - DNA, 20 bp, Artificial Sequence
  MKO10071496_B_Anapc16
  gRNA
accagctgaagacgaagacg

SEQ ID NO: 71497 - DNA, 20 bp, Artificial Sequence
  MKO10071497_B_Anapc1
  gRNA
ctacgatgaagagctctatg

SEQ ID NO: 71498 - DNA, 20 bp, Artificial Sequence
  MKO10071498_B_Anapc1
  gRNA
atgaacatgcatagcataga

SEQ ID NO: 71499 - DNA, 20 bp, Artificial Sequence
  MKO10071499_B_Anapc1
  gRNA
aaacagcaagccatatttag

SEQ ID NO: 71500 - DNA, 20 bp, Artificial Sequence
  MKO10071500_B_Anapc2
  gRNA
gcaaaagtcggtagtacctg

SEQ ID NO: 71501 - DNA, 20 bp, Artificial Sequence
  MKO10071501_B_Anapc2
  gRNA
aggatggaagaccgctgccg

SEQ ID NO: 71502 - DNA, 20 bp, Artificial Sequence
  MKO10071502_B_Anapc2
  gRNA
tcaatggctggccgggagtc

SEQ ID NO: 71503 - DNA, 20 bp, Artificial Sequence
  MKO10071503_B_Anapc4
  gRNA
gagaaggagtgtaagctttc

SEQ ID NO: 71504 - DNA, 20 bp, Artificial Sequence
  MKO10071504_B_Anapc4
  gRNA
cagcttaggcaagagaagat

SEQ ID NO: 71505 - DNA, 20 bp, Artificial Sequence
  MKO10071505_B_Anapc4
  gRNA
acagcacctcaaaaatattt

SEQ ID NO: 71506 - DNA, 20 bp, Artificial Sequence
  MKO10071506_B_Anapc5
  gRNA
tgaaggcgaactgaaggata

SEQ ID NO: 71507 - DNA, 20 bp, Artificial Sequence
  MKO10071507_B_Anapc5
  gRNA
agctttgacagtgtaatatc

SEQ ID NO: 71508 - DNA, 20 bp, Artificial Sequence
  MKO10071508_B_Anapc5
  gRNA
tgaagaatcgtgtcctcagc

SEQ ID NO: 71509 - DNA, 20 bp, Artificial Sequence
  MKO10071509_B_Anapc7
  gRNA
agcatacgctttaatccaca

SEQ ID NO: 71510 - DNA, 20 bp, Artificial Sequence
  MKO10071510_B_Anapc7
  gRNA
gatcccatcgagtacagcaa

SEQ ID NO: 71511 - DNA, 20 bp, Artificial Sequence
  MKO10071511_B_Anapc7
  gRNA
ggtcctgcggcagtgccctt

SEQ ID NO: 71512 - DNA, 20 bp, Artificial Sequence
  MKO10071512_B_Ang2
  gRNA
tgcaggtaccgagcctctaa

SEQ ID NO: 71513 - DNA, 20 bp, Artificial Sequence
  MKO10071513_B_Ang2
  gRNA
cagatactgcgaaagtatga

SEQ ID NO: 71514 - DNA, 20 bp, Artificial Sequence
  MKO10071514_B_Ang2
  gRNA
aatatatctgaaccctttag

SEQ ID NO: 71515 - DNA, 20 bp, Artificial Sequence
  MKO10071515_B_Ang3
  gRNA
agcctctagcttcacactgc

SEQ ID NO: 71516 - DNA, 20 bp, Artificial Sequence
  MKO10071516_B_Ang3
  gRNA
gctggccagctttcctccaa

SEQ ID NO: 71517 - DNA, 20 bp, Artificial Sequence
  MKO10071517_B_Ang3
  gRNA
ccccccccaccccccgttgg

SEQ ID NO: 71518 - DNA, 20 bp, Artificial Sequence
  MKO10071518_B_Ang4
  gRNA
ggttgtgattcctccaactc

SEQ ID NO: 71519 - DNA, 20 bp, Artificial Sequence
  MKO10071519_B_Ang4
  gRNA
atactgtgaaagtatgatga

SEQ ID NO: 71520 - DNA, 20 bp, Artificial Sequence
  MKO10071520_B_Ang4
  gRNA
tcggtacccgcatggaggcc

SEQ ID NO: 71521 - DNA, 20 bp, Artificial Sequence
  MKO10071521_B_Ang5
  gRNA
atcacaacttgcaagcacaa

SEQ ID NO: 71522 - DNA, 20 bp, Artificial Sequence
  MKO10071522_B_Ang5
  gRNA
tttcacagtatctgtaatcc

SEQ ID NO: 71523 - DNA, 20 bp, Artificial Sequence
  MKO10071523_B_Ang5
  gRNA
tttgtactggcatggaggct

SEQ ID NO: 71524 - DNA, 20 bp, Artificial Sequence
  MKO10071524_B_Ang6
  gRNA
aatctttaaagtctctgtac

SEQ ID NO: 71525 - DNA, 20 bp, Artificial Sequence
  MKO10071525_B_Ang6
  gRNA
gttggcttctttgcatttca

SEQ ID NO: 71526 - DNA, 20 bp, Artificial Sequence
  MKO10071526_B_Ang6
  gRNA
gtagttatccttagccagag

SEQ ID NO: 71527 - DNA, 20 bp, Artificial Sequence
  MKO10071527_B_Angel1
  gRNA
gagatgagctcttcgccaga

SEQ ID NO: 71528 - DNA, 20 bp, Artificial Sequence
  MKO10071528_B_Angel1
  gRNA
aatcctcccattctcgccac

SEQ ID NO: 71529 - DNA, 20 bp, Artificial Sequence
  MKO10071529_B_Angel1
  gRNA
agtacccatcatccgcagag

SEQ ID NO: 71530 - DNA, 20 bp, Artificial Sequence
  MKO10071530_B_Angel2
  gRNA
agcttaatgtcaccgcgccg

SEQ ID NO: 71531 - DNA, 20 bp, Artificial Sequence
  MKO10071531_B_Angel2
  gRNA
ggcgcacgggagtaatgtcc

SEQ ID NO: 71532 - DNA, 20 bp, Artificial Sequence
  MKO10071532_B_Angel2
  gRNA
cgcagtttcagtactataat

SEQ ID NO: 71533 - DNA, 20 bp, Artificial Sequence
  MKO10071533_B_Angpt1
  gRNA
tctcaagcatggtggccgtg

SEQ ID NO: 71534 - DNA, 20 bp, Artificial Sequence
  MKO10071534_B_Angpt1
  gRNA
tgtgcagatgtatatcaagc

SEQ ID NO: 71535 - DNA, 20 bp, Artificial Sequence
  MKO10071535_B_Angpt1
  gRNA
ctagcagttgtatttcaagt

SEQ ID NO: 71536 - DNA, 20 bp, Artificial Sequence
  MKO10071536_B_Angpt2
  gRNA
agctgttgacggtctccatt

SEQ ID NO: 71537 - DNA, 20 bp, Artificial Sequence
  MKO10071537_B_Angpt2
  gRNA
ctagctggagaattacattc

SEQ ID NO: 71538 - DNA, 20 bp, Artificial Sequence
  MKO10071538_B_Angpt2
  gRNA
gatttccgcacagtctctga

SEQ ID NO: 71539 - DNA, 20 bp, Artificial Sequence
  MKO10071539_B_Angpt4
  gRNA
gaaccagacaactaccatgc

SEQ ID NO: 71540 - DNA, 20 bp, Artificial Sequence
  MKO10071540_B_Angpt4
  gRNA
tagccagggtcccggtctga

SEQ ID NO: 71541 - DNA, 20 bp, Artificial Sequence
  MKO10071541_B_Angpt4
  gRNA
gagctttggtctggttcatg

SEQ ID NO: 71542 - DNA, 20 bp, Artificial Sequence
  MKO10071542_B_Angptl1
  gRNA
aagtgtactactcttcctac

SEQ ID NO: 71543 - DNA, 20 bp, Artificial Sequence
  MKO10071543_B_Angptl1
  gRNA
tcaggatgcaggcactatta

SEQ ID NO: 71544 - DNA, 20 bp, Artificial Sequence
  MKO10071544_B_Angptl1
  gRNA
ctctgtaccatactccgttg

SEQ ID NO: 71545 - DNA, 20 bp, Artificial Sequence
  MKO10071545_B_Angptl2
  gRNA
tgagtatgccagtttccgac

SEQ ID NO: 71546 - DNA, 20 bp, Artificial Sequence
  MKO10071546_B_Angptl2
  gRNA
agcttatagtactcgctttc

SEQ ID NO: 71547 - DNA, 20 bp, Artificial Sequence
  MKO10071547_B_Angptl2
  gRNA
ggtaccgtgggggccattac

SEQ ID NO: 71548 - DNA, 20 bp, Artificial Sequence
  MKO10071548_B_Angptl3
  gRNA
gtctactgtgatacccaatc

SEQ ID NO: 71549 - DNA, 20 bp, Artificial Sequence
  MKO10071549_B_Angptl3
  gRNA
tctgtttcgttcagttgaag

SEQ ID NO: 71550 - DNA, 20 bp, Artificial Sequence
  MKO10071550_B_Angptl3
  gRNA
tatactgttcttccacactc

SEQ ID NO: 71551 - DNA, 20 bp, Artificial Sequence
  MKO10071551_B_Angptl4
  gRNA
ccggtcttagatagacctct

SEQ ID NO: 71552 - DNA, 20 bp, Artificial Sequence
  MKO10071552_B_Angptl4
  gRNA
tctactttcagggccgcccc

SEQ ID NO: 71553 - DNA, 20 bp, Artificial Sequence
  MKO10071553_B_Angptl4
  gRNA
tgggagtcaagccaatgagc

SEQ ID NO: 71554 - DNA, 20 bp, Artificial Sequence
  MKO10071554_B_Angptl6
  gRNA
ctacacgacggcccagccgc

SEQ ID NO: 71555 - DNA, 20 bp, Artificial Sequence
  MKO10071555_B_Angptl6
  gRNA
acagtcacaagcgcacaagc

SEQ ID NO: 71556 - DNA, 20 bp, Artificial Sequence
  MKO10071556_B_Angptl6
  gRNA
tcagagagtacgccccacca

SEQ ID NO: 71557 - DNA, 20 bp, Artificial Sequence
  MKO10071557_B_Angptl7
  gRNA
caactattccctcaaacgtg

SEQ ID NO: 71558 - DNA, 20 bp, Artificial Sequence
  MKO10071558_B_Angptl7
  gRNA
agagtatagctactttgcgt

SEQ ID NO: 71559 - DNA, 20 bp, Artificial Sequence
  MKO10071559_B_Angptl7
  gRNA
tgctgaagacggtgttgtta

SEQ ID NO: 71560 - DNA, 20 bp, Artificial Sequence
  MKO10071560_B_Ang
  gRNA
gaagagatggcgataagccc

SEQ ID NO: 71561 - DNA, 20 bp, Artificial Sequence
  MKO10071561_B_Ang
  gRNA
gcttccattcgctccacaga

SEQ ID NO: 71562 - DNA, 20 bp, Artificial Sequence
  MKO10071562_B_Ang
  gRNA
tgaaaaacgactcatcgaag

SEQ ID NO: 71563 - DNA, 20 bp, Artificial Sequence
  MKO10071563_B_Ank1
  gRNA
ggatgaggtggtccgggagc

SEQ ID NO: 71564 - DNA, 20 bp, Artificial Sequence
  MKO10071564_B_Ank1
  gRNA
tcctctcagaacgggttgaa

SEQ ID NO: 71565 - DNA, 20 bp, Artificial Sequence
  MKO10071565_B_Ank1
  gRNA
ctccatagttgaccagctcc

SEQ ID NO: 71566 - DNA, 20 bp, Artificial Sequence
  MKO10071566_B_Ank2
  gRNA
gaactaccttcggtacagtc

SEQ ID NO: 71567 - DNA, 20 bp, Artificial Sequence
  MKO10071567_B_Ank2
  gRNA
ctccctccagactgtaccga

SEQ ID NO: 71568 - DNA, 20 bp, Artificial Sequence
  MKO10071568_B_Ank2
  gRNA
cactgagaacttagacaacg

SEQ ID NO: 71569 - DNA, 20 bp, Artificial Sequence
  MKO10071569_B_Ank3
  gRNA
cctaaaaattgtgcccccgc

SEQ ID NO: 71570 - DNA, 20 bp, Artificial Sequence
  MKO10071570_B_Ank3
  gRNA
tgacaagtatctcgggccac

SEQ ID NO: 71571 - DNA, 20 bp, Artificial Sequence
  MKO10071571_B_Ank3
  gRNA
catcatgctgtcccttgcgt

SEQ ID NO: 71572 - DNA, 20 bp, Artificial Sequence
  MKO10071572_B_Ankar
  gRNA
caatgctataaagtacaacc

SEQ ID NO: 71573 - DNA, 20 bp, Artificial Sequence
  MKO10071573_B_Ankar
  gRNA
caaaaaccttaaactcatcc

SEQ ID NO: 71574 - DNA, 20 bp, Artificial Sequence
  MKO10071574_B_Ankar
  gRNA
tcatagatcccattaaagtc

SEQ ID NO: 71575 - DNA, 20 bp, Artificial Sequence
  MKO10071575_B_Ankdd1b
  gRNA
atgctcatgctagttaaagc

SEQ ID NO: 71576 - DNA, 20 bp, Artificial Sequence
  MKO10071576_B_Ankdd1b
  gRNA
tggtttgacagtcattcacc

SEQ ID NO: 71577 - DNA, 20 bp, Artificial Sequence
  MKO10071577_B_Ankdd1b
  gRNA
cttgtcagcaacatccaccc

SEQ ID NO: 71578 - DNA, 20 bp, Artificial Sequence
  MKO10071578_B_Ankef1
  gRNA
catcaaagccgtgcgtcctg

SEQ ID NO: 71579 - DNA, 20 bp, Artificial Sequence
  MKO10071579_B_Ankef1
  gRNA
ggaaatagttcgtggcatat

SEQ ID NO: 71580 - DNA, 20 bp, Artificial Sequence
  MKO10071580_B_Ankef1
  gRNA
gcaatctgcaaaacccccca

SEQ ID NO: 71581 - DNA, 20 bp, Artificial Sequence
  MKO10071581_B_Ankfn1
  gRNA
tcaacgcagccgtagtgacc

SEQ ID NO: 71582 - DNA, 20 bp, Artificial Sequence
  MKO10071582_B_Ankfn1
  gRNA
atgctgccaagcgactgtac

SEQ ID NO: 71583 - DNA, 20 bp, Artificial Sequence
  MKO10071583_B_Ankfn1
  gRNA
cagtcactcgtcctttgatg

SEQ ID NO: 71584 - DNA, 20 bp, Artificial Sequence
  MKO10071584_B_Ankfy1
  gRNA
gtcattcatcagccgcttgc

SEQ ID NO: 71585 - DNA, 20 bp, Artificial Sequence
  MKO10071585_B_Ankfy1
  gRNA
tcgcttctatcaaacagcag

SEQ ID NO: 71586 - DNA, 20 bp, Artificial Sequence
  MKO10071586_B_Ankfy1
  gRNA
cctgactgaattgatgaaac

SEQ ID NO: 71587 - DNA, 20 bp, Artificial Sequence
  MKO10071587_B_Ankhd1
  gRNA
tccagagacccaagcgagac

SEQ ID NO: 71588 - DNA, 20 bp, Artificial Sequence
  MKO10071588_B_Ankhd1
  gRNA
gcaatgcttccagtctcgct

SEQ ID NO: 71589 - DNA, 20 bp, Artificial Sequence
  MKO10071589_B_Ankhd1
  gRNA
catccgtgtcagtgcagcag

SEQ ID NO: 71590 - DNA, 20 bp, Artificial Sequence
  MKO10071590_B_Ankib1
  gRNA
tgctgccttagacaagcgag

SEQ ID NO: 71591 - DNA, 20 bp, Artificial Sequence
  MKO10071591_B_Ankib1
  gRNA
acagaggatcttgtagtcct

SEQ ID NO: 71592 - DNA, 20 bp, Artificial Sequence
  MKO10071592_B_Ankib1
  gRNA
gcatctgcacccctgaccgc

SEQ ID NO: 71593 - DNA, 20 bp, Artificial Sequence
  MKO10071593_B_Ankk1
  gRNA
ttctcccagatttccgattt

SEQ ID NO: 71594 - DNA, 20 bp, Artificial Sequence
  MKO10071594_B_Ankk1
  gRNA
ccggagccttgttattctcc

SEQ ID NO: 71595 - DNA, 20 bp, Artificial Sequence
  MKO10071595_B_Ankk1
  gRNA
caacacatcgtgtccatcta

SEQ ID NO: 71596 - DNA, 20 bp, Artificial Sequence
  MKO10071596_B_Ankle1
  gRNA
ggggagcggatcccaatgct

SEQ ID NO: 71597 - DNA, 20 bp, Artificial Sequence
  MKO10071597_B_Ankle1
  gRNA
tggcgctgcggcggtgcacc

SEQ ID NO: 71598 - DNA, 20 bp, Artificial Sequence
  MKO10071598_B_Ankle1
  gRNA
ggggatcccaggtccgcgga

SEQ ID NO: 71599 - DNA, 20 bp, Artificial Sequence
  MKO10071599_B_Ankle2
  gRNA
taaccgcgctgggcttggga

SEQ ID NO: 71600 - DNA, 20 bp, Artificial Sequence
  MKO10071600_B_Ankle2
  gRNA
gagtttcagtcgagccatca

SEQ ID NO: 71601 - DNA, 20 bp, Artificial Sequence
  MKO10071601_B_Ankle2
  gRNA
ggagtacttaccactttgtc

SEQ ID NO: 71602 - DNA, 20 bp, Artificial Sequence
  MKO10071602_B_Ankmy1
  gRNA
aatctgctccttggggccgc

SEQ ID NO: 71603 - DNA, 20 bp, Artificial Sequence
  MKO10071603_B_Ankmy1
  gRNA
aagctccctacctcgcctgt

SEQ ID NO: 71604 - DNA, 20 bp, Artificial Sequence
  MKO10071604_B_Ankmy1
  gRNA
ggtcccggtaaaactgccca

SEQ ID NO: 71605 - DNA, 20 bp, Artificial Sequence
  MKO10071605_B_Ankmy2
  gRNA
aacgaatctccaccctgtca

SEQ ID NO: 71606 - DNA, 20 bp, Artificial Sequence
  MKO10071606_B_Ankmy2
  gRNA
tggcgtcagctccatggcgc

SEQ ID NO: 71607 - DNA, 20 bp, Artificial Sequence
  MKO10071607_B_Ankmy2
  gRNA
gaatgttcatgtcaactgct

SEQ ID NO: 71608 - DNA, 20 bp, Artificial Sequence
  MKO10071608_B_Ankra2
  gRNA
ttgacgtcaatgaatatgac

SEQ ID NO: 71609 - DNA, 20 bp, Artificial Sequence
  MKO10071609_B_Ankra2
  gRNA
acatgccttacttgaattcc

SEQ ID NO: 71610 - DNA, 20 bp, Artificial Sequence
  MKO10071610_B_Ankra2
  gRNA
catgtgccgcagcccacatc

SEQ ID NO: 71611 - DNA, 20 bp, Artificial Sequence
  MKO10071611_B_Ankrd10
  gRNA
attcacaaggcggcccgctc

SEQ ID NO: 71612 - DNA, 20 bp, Artificial Sequence
  MKO10071612_B_Ankrd10
  gRNA
tggggccaacattaacaaac

SEQ ID NO: 71613 - DNA, 20 bp, Artificial Sequence
  MKO10071613_B_Ankrd10
  gRNA
tgtgagccccgctccctacc

SEQ ID NO: 71614 - DNA, 20 bp, Artificial Sequence
  MKO10071614_B_Ankrd11
  gRNA
gagcagaaggactcggacac

SEQ ID NO: 71615 - DNA, 20 bp, Artificial Sequence
  MKO10071615_B_Ankrd11
  gRNA
gccaagcaactgttagccgc

SEQ ID NO: 71616 - DNA, 20 bp, Artificial Sequence
  MKO10071616_B_Ankrd11
  gRNA
gtccgggctgttgttcggca

SEQ ID NO: 71617 - DNA, 20 bp, Artificial Sequence
  MKO10071617_B_Ankrd12
  gRNA
atctgctttcgttcagaaag

SEQ ID NO: 71618 - DNA, 20 bp, Artificial Sequence
  MKO10071618_B_Ankrd12
  gRNA
actttctgaacgaaagcaga

SEQ ID NO: 71619 - DNA, 20 bp, Artificial Sequence
  MKO10071619_B_Ankrd12
  gRNA
aaaacttcaaaaattgaccg

SEQ ID NO: 71620 - DNA, 20 bp, Artificial Sequence
  MKO10071620_B_Ankrd13a
  gRNA
agactaccacaacacgtcca

SEQ ID NO: 71621 - DNA, 20 bp, Artificial Sequence
  MKO10071621_B_Ankrd13a
  gRNA
gctgctacacaaaatcctcg

SEQ ID NO: 71622 - DNA, 20 bp, Artificial Sequence
  MKO10071622_B_Ankrd13a
  gRNA
gatacttgcctgtccatccc

SEQ ID NO: 71623 - DNA, 20 bp, Artificial Sequence
  MKO10071623_B_Ankrd13b
  gRNA
ccagtcgcttcaccacccgc

SEQ ID NO: 71624 - DNA, 20 bp, Artificial Sequence
  MKO10071624_B_Ankrd13b
  gRNA
aatcgcagcttcgtcttcag

SEQ ID NO: 71625 - DNA, 20 bp, Artificial Sequence
  MKO10071625_B_Ankrd13b
  gRNA
tgaagtgggagttcacaagt

SEQ ID NO: 71626 - DNA, 20 bp, Artificial Sequence
  MKO10071626_B_Ankrd13c
  gRNA
aacatcacagcaagatgtaa

SEQ ID NO: 71627 - DNA, 20 bp, Artificial Sequence
  MKO10071627_B_Ankrd13c
  gRNA
gttgttaaaagccctaaaag

SEQ ID NO: 71628 - DNA, 20 bp, Artificial Sequence
  MKO10071628_B_Ankrd13c
  gRNA
cagcaatctagggagagtgt

SEQ ID NO: 71629 - DNA, 20 bp, Artificial Sequence
  MKO10071629_B_Ankrd13d
  gRNA
cacatcgctcgggcacatct

SEQ ID NO: 71630 - DNA, 20 bp, Artificial Sequence
  MKO10071630_B_Ankrd13d
  gRNA
gctccaggggggttcgccct

SEQ ID NO: 71631 - DNA, 20 bp, Artificial Sequence
  MKO10071631_B_Ankrd13d
  gRNA
actgctcaacaaactccgtc

SEQ ID NO: 71632 - DNA, 20 bp, Artificial Sequence
  MKO10071632_B_Ankrd16
  gRNA
ccacagttgtctcgacagtc

SEQ ID NO: 71633 - DNA, 20 bp, Artificial Sequence
  MKO10071633_B_Ankrd16
  gRNA
gattggcaccgtgttctaca

SEQ ID NO: 71634 - DNA, 20 bp, Artificial Sequence
  MKO10071634_B_Ankrd16
  gRNA
gcagcttggctatactaaca

SEQ ID NO: 71635 - DNA, 20 bp, Artificial Sequence
  MKO10071635_B_Ankrd17
  gRNA
tccagtcgagcctgcgtctc

SEQ ID NO: 71636 - DNA, 20 bp, Artificial Sequence
  MKO10071636_B_Ankrd17
  gRNA
tcggcaagtccggttccgct

SEQ ID NO: 71637 - DNA, 20 bp, Artificial Sequence
  MKO10071637_B_Ankrd17
  gRNA
aggaataggcaagttatcga

SEQ ID NO: 71638 - DNA, 20 bp, Artificial Sequence
  MKO10071638_B_Ankrd1
  gRNA
tctccgacagtataaacgga

SEQ ID NO: 71639 - DNA, 20 bp, Artificial Sequence
  MKO10071639_B_Ankrd1
  gRNA
gccgcaggggaattccttcc

SEQ ID NO: 71640 - DNA, 20 bp, Artificial Sequence
  MKO10071640_B_Ankrd1
  gRNA
gaaaagcgagaaactgcgag

SEQ ID NO: 71641 - DNA, 20 bp, Artificial Sequence
  MKO10071641_B_Ankrd22
  gRNA
aaatatccaattagcaagac

SEQ ID NO: 71642 - DNA, 20 bp, Artificial Sequence
  MKO10071642_B_Ankrd22
  gRNA
agcagaatgagactcttgtc

SEQ ID NO: 71643 - DNA, 20 bp, Artificial Sequence
  MKO10071643_B_Ankrd22
  gRNA
cttcacagcatagtgcaagc

SEQ ID NO: 71644 - DNA, 20 bp, Artificial Sequence
  MKO10071644_B_Ankrd23
  gRNA
agagacacaaagtccccccc

SEQ ID NO: 71645 - DNA, 20 bp, Artificial Sequence
  MKO10071645_B_Ankrd23
  gRNA
tccaccgcacagccttgcac

SEQ ID NO: 71646 - DNA, 20 bp, Artificial Sequence
  MKO10071646_B_Ankrd23
  gRNA
taacagctccagactgactc

SEQ ID NO: 71647 - DNA, 20 bp, Artificial Sequence
  MKO10071647_B_Ankrd24
  gRNA
cactcacgcagacttgccct

SEQ ID NO: 71648 - DNA, 20 bp, Artificial Sequence
  MKO10071648_B_Ankrd24
  gRNA
tccatccgtgctcatgacat

SEQ ID NO: 71649 - DNA, 20 bp, Artificial Sequence
  MKO10071649_B_Ankrd24
  gRNA
acaccccgccgcacccctca

SEQ ID NO: 71650 - DNA, 20 bp, Artificial Sequence
  MKO10071650_B_Ankrd26
  gRNA
ccgtgctgctctcgctgtca

SEQ ID NO: 71651 - DNA, 20 bp, Artificial Sequence
  MKO10071651_B_Ankrd26
  gRNA
tcctttacagcaagtaacat

SEQ ID NO: 71652 - DNA, 20 bp, Artificial Sequence
  MKO10071652_B_Ankrd26
  gRNA
ccgtgacagcgagagcagca

SEQ ID NO: 71653 - DNA, 20 bp, Artificial Sequence
  MKO10071653_B_Ankrd27
  gRNA
aagcctgcccggcagtgtgc

SEQ ID NO: 71654 - DNA, 20 bp, Artificial Sequence
  MKO10071654_B_Ankrd27
  gRNA
taggtcctagtgccttgcag

SEQ ID NO: 71655 - DNA, 20 bp, Artificial Sequence
  MKO10071655_B_Ankrd27
  gRNA
gcttctccgagactctcacc

SEQ ID NO: 71656 - DNA, 20 bp, Artificial Sequence
  MKO10071656_B_Ankrd28
  gRNA
ctggtgcaagctatatttaa

SEQ ID NO: 71657 - DNA, 20 bp, Artificial Sequence
  MKO10071657_B_Ankrd28
  gRNA
aatatagcttgcaccagtga

SEQ ID NO: 71658 - DNA, 20 bp, Artificial Sequence
  MKO10071658_B_Ankrd28
  gRNA
acgttcacattgctcagaag

SEQ ID NO: 71659 - DNA, 20 bp, Artificial Sequence
  MKO10071659_B_Ankrd29
  gRNA
cgcttgccaatgctgcattc

SEQ ID NO: 71660 - DNA, 20 bp, Artificial Sequence
  MKO10071660_B_Ankrd29
  gRNA
ctctgcagtccacgtccaca

SEQ ID NO: 71661 - DNA, 20 bp, Artificial Sequence
  MKO10071661_B_Ankrd29
  gRNA
ggatgggggcactgccctgt

SEQ ID NO: 71662 - DNA, 20 bp, Artificial Sequence
  MKO10071662_B_Ankrd2
  gRNA
gcgcgtgcgcaagacatccc

SEQ ID NO: 71663 - DNA, 20 bp, Artificial Sequence
  MKO10071663_B_Ankrd2
  gRNA
tccgtcggacagcactgcat

SEQ ID NO: 71664 - DNA, 20 bp, Artificial Sequence
  MKO10071664_B_Ankrd2
  gRNA
cccgatgcagtgctgtccga

SEQ ID NO: 71665 - DNA, 20 bp, Artificial Sequence
  MKO10071665_B_Ankrd32
  gRNA
atcacatgtgttatcccact

SEQ ID NO: 71666 - DNA, 20 bp, Artificial Sequence
  MKO10071666_B_Ankrd32
  gRNA
attcccaaatcagtcctgct

SEQ ID NO: 71667 - DNA, 20 bp, Artificial Sequence
  MKO10071667_B_Ankrd32
  gRNA
gtgggatttcctgaaatgaa

SEQ ID NO: 71668 - DNA, 20 bp, Artificial Sequence
  MKO10071668_B_Ankrd33b
  gRNA
atgtgtgcgagcccttatga

SEQ ID NO: 71669 - DNA, 20 bp, Artificial Sequence
  MKO10071669_B_Ankrd33b
  gRNA
cctgccagttgacgtcaacg

SEQ ID NO: 71670 - DNA, 20 bp, Artificial Sequence
  MKO10071670_B_Ankrd33b
  gRNA
aggagtcaccggagcccata

SEQ ID NO: 71671 - DNA, 20 bp, Artificial Sequence
  MKO10071671_B_Ankrd33
  gRNA
tcagagctgtgagtccccgc

SEQ ID NO: 71672 - DNA, 20 bp, Artificial Sequence
  MKO10071672_B_Ankrd33
  gRNA
tgttcccgtctttgtcttgc

SEQ ID NO: 71673 - DNA, 20 bp, Artificial Sequence
  MKO10071673_B_Ankrd33
  gRNA
ccaaccttacctgggactct

SEQ ID NO: 71674 - DNA, 20 bp, Artificial Sequence
  MKO10071674_B_Ankrd34a
  gRNA
cccgacattcgtccccaacc

SEQ ID NO: 71675 - DNA, 20 bp, Artificial Sequence
  MKO10071675_B_Ankrd34a
  gRNA
gttgttatcccctcgcgccc

SEQ ID NO: 71676 - DNA, 20 bp, Artificial Sequence
  MKO10071676_B_Ankrd34a
  gRNA
cccaacatcgcagaccgttt

SEQ ID NO: 71677 - DNA, 20 bp, Artificial Sequence
  MKO10071677_B_Ankrd34b
  gRNA
catgtcgatcaacagagcgt

SEQ ID NO: 71678 - DNA, 20 bp, Artificial Sequence
  MKO10071678_B_Ankrd34b
  gRNA
atcaacgaaagcaacgaccg

SEQ ID NO: 71679 - DNA, 20 bp, Artificial Sequence
  MKO10071679_B_Ankrd34b
  gRNA
acccctccaaccgtagaaga

SEQ ID NO: 71680 - DNA, 20 bp, Artificial Sequence
  MKO10071680_B_Ankrd34c
  gRNA
ttgctgctggctctaatatc

SEQ ID NO: 71681 - DNA, 20 bp, Artificial Sequence
  MKO10071681_B_Ankrd34c
  gRNA
gtcgtttcaattggggcaaa

SEQ ID NO: 71682 - DNA, 20 bp, Artificial Sequence
  MKO10071682_B_Ankrd34c
  gRNA
aggtggcctgcggcgaactg

SEQ ID NO: 71683 - DNA, 20 bp, Artificial Sequence
  MKO10071683_B_Ankrd35
  gRNA
cacacacctgcccagtgtaa

SEQ ID NO: 71684 - DNA, 20 bp, Artificial Sequence
  MKO10071684_B_Ankrd35
  gRNA
ctgtcagccacagtgtgtga

SEQ ID NO: 71685 - DNA, 20 bp, Artificial Sequence
  MKO10071685_B_Ankrd35
  gRNA
agcaagaccttcacacactg

SEQ ID NO: 71686 - DNA, 20 bp, Artificial Sequence
  MKO10071686_B_Ankrd36
  gRNA
tctagcaccgcaagtataag

SEQ ID NO: 71687 - DNA, 20 bp, Artificial Sequence
  MKO10071687_B_Ankrd36
  gRNA
catcgaagcccgagaccgag

SEQ ID NO: 71688 - DNA, 20 bp, Artificial Sequence
  MKO10071688_B_Ankrd36
  gRNA
ttctgactggccgtgagcac

SEQ ID NO: 71689 - DNA, 20 bp, Artificial Sequence
  MKO10071689_B_Ankrd37
  gRNA
tcacccaatctggacatcac

SEQ ID NO: 71690 - DNA, 20 bp, Artificial Sequence
  MKO10071690_B_Ankrd37
  gRNA
aagatcatcaggtgagcaac

SEQ ID NO: 71691 - DNA, 20 bp, Artificial Sequence
  MKO10071691_B_Ankrd37
  gRNA
gggagaaactccactccaca

SEQ ID NO: 71692 - DNA, 20 bp, Artificial Sequence
  MKO10071692_B_Ankrd39
  gRNA
gtgggcacacggaaatcgca

SEQ ID NO: 71693 - DNA, 20 bp, Artificial Sequence
  MKO10071693_B_Ankrd39
  gRNA
gctcaccagtgcggtgtagc

SEQ ID NO: 71694 - DNA, 20 bp, Artificial Sequence
  MKO10071694_B_Ankrd39
  gRNA
gcccggggtacagcagacgc

SEQ ID NO: 71695 - DNA, 20 bp, Artificial Sequence
  MKO10071695_B_Ankrd40
  gRNA
acccaacactctgttaagaa

SEQ ID NO: 71696 - DNA, 20 bp, Artificial Sequence
  MKO10071696_B_Ankrd40
  gRNA
tgccggtacaactaacatca

SEQ ID NO: 71697 - DNA, 20 bp, Artificial Sequence
  MKO10071697_B_Ankrd40
  gRNA
cacctcccgaatgtccccca

SEQ ID NO: 71698 - DNA, 20 bp, Artificial Sequence
  MKO10071698_B_Ankrd42
  gRNA
gaatgtgctgcccaatgtaa

SEQ ID NO: 71699 - DNA, 20 bp, Artificial Sequence
  MKO10071699_B_Ankrd42
  gRNA
ttctaggctcttataatcaa

SEQ ID NO: 71700 - DNA, 20 bp, Artificial Sequence
  MKO10071700_B_Ankrd42
  gRNA
ctctctcttgtcagtcacgc

SEQ ID NO: 71701 - DNA, 20 bp, Artificial Sequence
  MKO10071701_B_Ankrd44
  gRNA
agtgtcaatgtctccgacag

SEQ ID NO: 71702 - DNA, 20 bp, Artificial Sequence
  MKO10071702_B_Ankrd44
  gRNA
atgagcatgcgaatctcctc

SEQ ID NO: 71703 - DNA, 20 bp, Artificial Sequence
  MKO10071703_B_Ankrd44
  gRNA
ggtcagccacatgttgtcct

SEQ ID NO: 71704 - DNA, 20 bp, Artificial Sequence
  MKO10071704_B_Ankrd45
  gRNA
gcacgctgtgcagctgcttt

SEQ ID NO: 71705 - DNA, 20 bp, Artificial Sequence
  MKO10071705_B_Ankrd45
  gRNA
ggaactggatgttgacatag

SEQ ID NO: 71706 - DNA, 20 bp, Artificial Sequence
  MKO10071706_B_Ankrd45
  gRNA
tttctgggtcagtaatgatg

SEQ ID NO: 71707 - DNA, 20 bp, Artificial Sequence
  MKO10071707_B_Ankrd46
  gRNA
caaagatgtcatccgactgc

SEQ ID NO: 71708 - DNA, 20 bp, Artificial Sequence
  MKO10071708_B_Ankrd46
  gRNA
tgtccagcttccgaaccacg

SEQ ID NO: 71709 - DNA, 20 bp, Artificial Sequence
  MKO10071709_B_Ankrd46
  gRNA
gtccacattccctcgggccg

SEQ ID NO: 71710 - DNA, 20 bp, Artificial Sequence
  MKO10071710_B_Ankrd49
  gRNA
accagacctggaaaactctg

SEQ ID NO: 71711 - DNA, 20 bp, Artificial Sequence
  MKO10071711_B_Ankrd49
  gRNA
gacatcaacgcccaaacgaa

SEQ ID NO: 71712 - DNA, 20 bp, Artificial Sequence
  MKO10071712_B_Ankrd49
  gRNA
tactagagtcattaagacgg

SEQ ID NO: 71713 - DNA, 20 bp, Artificial Sequence
  MKO10071713_B_Ankrd50
  gRNA
cgtggacgaaggctgcaatg

SEQ ID NO: 71714 - DNA, 20 bp, Artificial Sequence
  MKO10071714_B_Ankrd50
  gRNA
ggagccgctcagctgccaga

SEQ ID NO: 71715 - DNA, 20 bp, Artificial Sequence
  MKO10071715_B_Ankrd50
  gRNA
agtctcagcagcacgccctc

SEQ ID NO: 71716 - DNA, 20 bp, Artificial Sequence
  MKO10071716_B_Ankrd52
  gRNA
ttgcatgctgctgcctacgt

SEQ ID NO: 71717 - DNA, 20 bp, Artificial Sequence
  MKO10071717_B_Ankrd52
  gRNA
ccacattgagactgctcaac

SEQ ID NO: 71718 - DNA, 20 bp, Artificial Sequence
  MKO10071718_B_Ankrd52
  gRNA
ccgggccaccaagtgtgcag

SEQ ID NO: 71719 - DNA, 20 bp, Artificial Sequence
  MKO10071719_B_Ankrd53
  gRNA
aggccagacgcccctgcact

SEQ ID NO: 71720 - DNA, 20 bp, Artificial Sequence
  MKO10071720_B_Ankrd53
  gRNA
atcctagtacctccgagttg

SEQ ID NO: 71721 - DNA, 20 bp, Artificial Sequence
  MKO10071721_B_Ankrd53
  gRNA
ccatcgactattgcagactt

SEQ ID NO: 71722 - DNA, 20 bp, Artificial Sequence
  MKO10071722_B_Ankrd54
  gRNA
gtcatcaccacactgcttcg

SEQ ID NO: 71723 - DNA, 20 bp, Artificial Sequence
  MKO10071723_B_Ankrd54
  gRNA
catacctcctcgaagcagtg

SEQ ID NO: 71724 - DNA, 20 bp, Artificial Sequence
  MKO10071724_B_Ankrd54
  gRNA
tggggctgaccccaaccaac

SEQ ID NO: 71725 - DNA, 20 bp, Artificial Sequence
  MKO10071725_B_Ankrd55
  gRNA
atgcacgcccttgatgcacg

SEQ ID NO: 71726 - DNA, 20 bp, Artificial Sequence
  MKO10071726_B_Ankrd55
  gRNA
gatcaaccatcaagacacag

SEQ ID NO: 71727 - DNA, 20 bp, Artificial Sequence
  MKO10071727_B_Ankrd55
  gRNA
gactcacctctgtgtcttga

SEQ ID NO: 71728 - DNA, 20 bp, Artificial Sequence
  MKO10071728_B_Ankrd60
  gRNA
agactgcgtccagcccttac

SEQ ID NO: 71729 - DNA, 20 bp, Artificial Sequence
  MKO10071729_B_Ankrd60
  gRNA
gggcaggacgcccctgcacg

SEQ ID NO: 71730 - DNA, 20 bp, Artificial Sequence
  MKO10071730_B_Ankrd60
  gRNA
ggatgacatcgtagaacttc

SEQ ID NO: 71731 - DNA, 20 bp, Artificial Sequence
  MKO10071731_B_Ankrd61
  gRNA
tgtactgcatcgagcaaagt

SEQ ID NO: 71732 - DNA, 20 bp, Artificial Sequence
  MKO10071732_B_Ankrd61
  gRNA
ccgttacagactactgagcc

SEQ ID NO: 71733 - DNA, 20 bp, Artificial Sequence
  MKO10071733_B_Ankrd61
  gRNA
cctcatacagtttagagtgc

SEQ ID NO: 71734 - DNA, 20 bp, Artificial Sequence
  MKO10071734_B_Ankrd63
  gRNA
ggtgcgctctttccgccgcc

SEQ ID NO: 71735 - DNA, 20 bp, Artificial Sequence
  MKO10071735_B_Ankrd63
  gRNA
ccagcgcgtccagcacgaaa

SEQ ID NO: 71736 - DNA, 20 bp, Artificial Sequence
  MKO10071736_B_Ankrd63
  gRNA
cttagacgccgtgcagctcc

SEQ ID NO: 71737 - DNA, 20 bp, Artificial Sequence
  MKO10071737_B_Ankrd66
  gRNA
agccagaccctgcttggtaa

SEQ ID NO: 71738 - DNA, 20 bp, Artificial Sequence
  MKO10071738_B_Ankrd66
  gRNA
gtctggctccatattgtatc

SEQ ID NO: 71739 - DNA, 20 bp, Artificial Sequence
  MKO10071739_B_Ankrd66
  gRNA
acgacagaactccacttcac

SEQ ID NO: 71740 - DNA, 20 bp, Artificial Sequence
  MKO10071740_B_Ankrd6
  gRNA
tgactggctgaatccgtgcc

SEQ ID NO: 71741 - DNA, 20 bp, Artificial Sequence
  MKO10071741_B_Ankrd6
  gRNA
cctcccggataagcgctgtg

SEQ ID NO: 71742 - DNA, 20 bp, Artificial Sequence
  MKO10071742_B_Ankrd6
  gRNA
cagcgaggtgcaagggggtc

SEQ ID NO: 71743 - DNA, 20 bp, Artificial Sequence
  MKO10071743_B_Ankrd7
  gRNA
ggtagatgtttatagtaata

SEQ ID NO: 71744 - DNA, 20 bp, Artificial Sequence
  MKO10071744_B_Ankrd7
  gRNA
gctacggttcttcttcttca

SEQ ID NO: 71745 - DNA, 20 bp, Artificial Sequence
  MKO10071745_B_Ankrd7
  gRNA
aaacagaaccccattgatta

SEQ ID NO: 71746 - DNA, 20 bp, Artificial Sequence
  MKO10071746_B_Ankrd9
  gRNA
cctgcggcgcatcctgcgaa

SEQ ID NO: 71747 - DNA, 20 bp, Artificial Sequence
  MKO10071747_B_Ankrd9
  gRNA
cctggacgcagcgccaacgg

SEQ ID NO: 71748 - DNA, 20 bp, Artificial Sequence
  MKO10071748_B_Ankrd9
  gRNA
cacccgcaagcgagctgcgc

SEQ ID NO: 71749 - DNA, 20 bp, Artificial Sequence
  MKO10071749_B_Anks1b
  gRNA
ggtacttaccctgagggtga

SEQ ID NO: 71750 - DNA, 20 bp, Artificial Sequence
  MKO10071750_B_Anks1b
  gRNA
cccatacctttggaaggagc

SEQ ID NO: 71751 - DNA, 20 bp, Artificial Sequence
  MKO10071751_B_Anks1b
  gRNA
accctccacagaagccccct

SEQ ID NO: 71752 - DNA, 20 bp, Artificial Sequence
  MKO10071752_B_Anks1
  gRNA
ttcaaacttgttgttgcgca

SEQ ID NO: 71753 - DNA, 20 bp, Artificial Sequence
  MKO10071753_B_Anks1
  gRNA
ctatctacacagttcacgtt

SEQ ID NO: 71754 - DNA, 20 bp, Artificial Sequence
  MKO10071754_B_Anks1
  gRNA
ctacaccacgctgctttgaa

SEQ ID NO: 71755 - DNA, 20 bp, Artificial Sequence
  MKO10071755_B_Anks3
  gRNA
aagagcctctaccgtagccc

SEQ ID NO: 71756 - DNA, 20 bp, Artificial Sequence
  MKO10071756_B_Anks3
  gRNA
ctgatgtatgcctcctacat

SEQ ID NO: 71757 - DNA, 20 bp, Artificial Sequence
  MKO10071757_B_Anks3
  gRNA
aatgctttcgttgccacagc

SEQ ID NO: 71758 - DNA, 20 bp, Artificial Sequence
  MKO10071758_B_Anks4b
  gRNA
acctatagcaaggaggactc

SEQ ID NO: 71759 - DNA, 20 bp, Artificial Sequence
  MKO10071759_B_Anks4b
  gRNA
tggcatgacacccactctcc

SEQ ID NO: 71760 - DNA, 20 bp, Artificial Sequence
  MKO10071760_B_Anks4b
  gRNA
cactcgctgcttggtgatag

SEQ ID NO: 71761 - DNA, 20 bp, Artificial Sequence
  MKO10071761_B_Anks6
  gRNA
tccccgctgcctcccgttgc

SEQ ID NO: 71762 - DNA, 20 bp, Artificial Sequence
  MKO10071762_B_Anks6
  gRNA
gtgatgctgctgaacgatcc

SEQ ID NO: 71763 - DNA, 20 bp, Artificial Sequence
  MKO10071763_B_Anks6
  gRNA
gttgctcttcgagccaaaaa

SEQ ID NO: 71764 - DNA, 20 bp, Artificial Sequence
  MKO10071764_B_Ankzf1
  gRNA
tttgaacagcaaagctccac

SEQ ID NO: 71765 - DNA, 20 bp, Artificial Sequence
  MKO10071765_B_Ankzf1
  gRNA
gttcaaagtctgaagcagac

SEQ ID NO: 71766 - DNA, 20 bp, Artificial Sequence
  MKO10071766_B_Ankzf1
  gRNA
actctctcacccttgaaaaa

SEQ ID NO: 71767 - DNA, 20 bp, Artificial Sequence
  MKO10071767_B_Ank
  gRNA
cggcaggcgtggactcatgc

SEQ ID NO: 71768 - DNA, 20 bp, Artificial Sequence
  MKO10071768_B_Ank
  gRNA
tcctgtcggggatgatgtcg

SEQ ID NO: 71769 - DNA, 20 bp, Artificial Sequence
  MKO10071769_B_Ank
  gRNA
gtagtaccctaagtcactgt

SEQ ID NO: 71770 - DNA, 20 bp, Artificial Sequence
  MKO10071770_B_Anln
  gRNA
ttgctgcaacgatttgctcc

SEQ ID NO: 71771 - DNA, 20 bp, Artificial Sequence
  MKO10071771_B_Anln
  gRNA
agctgccatcagcgagtctg

SEQ ID NO: 71772 - DNA, 20 bp, Artificial Sequence
  MKO10071772_B_Anln
  gRNA
acagaggcattgccgtccct

SEQ ID NO: 71773 - DNA, 20 bp, Artificial Sequence
  MKO10071773_B_Ano10
  gRNA
tccataggtgaaggcccgca

SEQ ID NO: 71774 - DNA, 20 bp, Artificial Sequence
  MKO10071774_B_Ano10
  gRNA
gtgaggagactgctcacgtc

SEQ ID NO: 71775 - DNA, 20 bp, Artificial Sequence
  MKO10071775_B_Ano10
  gRNA
tgtcatgcagcgggaacact

SEQ ID NO: 71776 - DNA, 20 bp, Artificial Sequence
  MKO10071776_B_Ano1
  gRNA
taccacatcagtgagacgcg

SEQ ID NO: 71777 - DNA, 20 bp, Artificial Sequence
  MKO10071777_B_Ano1
  gRNA
ttgtgaagatccatgcgccc

SEQ ID NO: 71778 - DNA, 20 bp, Artificial Sequence
  MKO10071778_B_Ano1
  gRNA
tccggtgagcctgcatccac

SEQ ID NO: 71779 - DNA, 20 bp, Artificial Sequence
  MKO10071779_B_Ano2
  gRNA
atgtacttgcataccactac

SEQ ID NO: 71780 - DNA, 20 bp, Artificial Sequence
  MKO10071780_B_Ano2
  gRNA
cagtactcacagaacggtct

SEQ ID NO: 71781 - DNA, 20 bp, Artificial Sequence
  MKO10071781_B_Ano2
  gRNA
tagatgtacgagatcaaagc

SEQ ID NO: 71782 - DNA, 20 bp, Artificial Sequence
  MKO10071782_B_Ano3
  gRNA
gtcaactgagagtgaatctc

SEQ ID NO: 71783 - DNA, 20 bp, Artificial Sequence
  MKO10071783_B_Ano3
  gRNA
aagcgtcattaaaaccatct

SEQ ID NO: 71784 - DNA, 20 bp, Artificial Sequence
  MKO10071784_B_Ano3
  gRNA
taccttagacagctttgtct

SEQ ID NO: 71785 - DNA, 20 bp, Artificial Sequence
  MKO10071785_B_Ano4
  gRNA
gatatgcaaatactgcccga

SEQ ID NO: 71786 - DNA, 20 bp, Artificial Sequence
  MKO10071786_B_Ano4
  gRNA
gaaaagtccacatcgctctt

SEQ ID NO: 71787 - DNA, 20 bp, Artificial Sequence
  MKO10071787_B_Ano4
  gRNA
cgagaacgaaacaaatccaa

SEQ ID NO: 71788 - DNA, 20 bp, Artificial Sequence
  MKO10071788_B_Ano5
  gRNA
accggtgactgtaagtcttc

SEQ ID NO: 71789 - DNA, 20 bp, Artificial Sequence
  MKO10071789_B_Ano5
  gRNA
agcgattcaatttgttcctg

SEQ ID NO: 71790 - DNA, 20 bp, Artificial Sequence
  MKO10071790_B_Ano5
  gRNA
ttaccataagacgcctcctc

SEQ ID NO: 71791 - DNA, 20 bp, Artificial Sequence
  MKO10071791_B_Ano6
  gRNA
tgctctcatcttcatacacg

SEQ ID NO: 71792 - DNA, 20 bp, Artificial Sequence
  MKO10071792_B_Ano6
  gRNA
gaatctaaccttatctgcca

SEQ ID NO: 71793 - DNA, 20 bp, Artificial Sequence
  MKO10071793_B_Ano6
  gRNA
ctgattctccagtgatccaa

SEQ ID NO: 71794 - DNA, 20 bp, Artificial Sequence
  MKO10071794_B_Ano7
  gRNA
agctctgccaaacccccaat

SEQ ID NO: 71795 - DNA, 20 bp, Artificial Sequence
  MKO10071795_B_Ano7
  gRNA
gaaccaagagaaccccacga

SEQ ID NO: 71796 - DNA, 20 bp, Artificial Sequence
  MKO10071796_B_Ano7
  gRNA
tggcttaccaattgggggtt

SEQ ID NO: 71797 - DNA, 20 bp, Artificial Sequence
  MKO10071797_B_Ano8
  gRNA
gcgaacttgcacgatcagct

SEQ ID NO: 71798 - DNA, 20 bp, Artificial Sequence
  MKO10071798_B_Ano8
  gRNA
gagcacgtcgcagtcctcag

SEQ ID NO: 71799 - DNA, 20 bp, Artificial Sequence
  MKO10071799_B_Ano8
  gRNA
ggcagagcatcattcgcttc

SEQ ID NO: 71800 - DNA, 20 bp, Artificial Sequence
  MKO10071800_B_Ano9
  gRNA
gtgaacaacaagctaaaacc

SEQ ID NO: 71801 - DNA, 20 bp, Artificial Sequence
  MKO10071801_B_Ano9
  gRNA
ctagaaaacctcgagagcaa

SEQ ID NO: 71802 - DNA, 20 bp, Artificial Sequence
  MKO10071802_B_Ano9
  gRNA
tcacgacaaagctcacaatt

SEQ ID NO: 71803 - DNA, 20 bp, Artificial Sequence
  MKO10071803_B_Anp32a
  gRNA
ttcctaagtacaatcaacgt

SEQ ID NO: 71804 - DNA, 20 bp, Artificial Sequence
  MKO10071804_B_Anp32a
  gRNA
tgatgaatatgcccagctag

SEQ ID NO: 71805 - DNA, 20 bp, Artificial Sequence
  MKO10071805_B_Anp32a
  gRNA
caattgacttacagttatcc

SEQ ID NO: 71806 - DNA, 20 bp, Artificial Sequence
  MKO10071806_B_Anp32b
  gRNA
atccacctctccatctgagt

SEQ ID NO: 71807 - DNA, 20 bp, Artificial Sequence
  MKO10071807_B_Anp32b
  gRNA
gaagctacctaagttgaaaa

SEQ ID NO: 71808 - DNA, 20 bp, Artificial Sequence
  MKO10071808_B_Anp32b
  gRNA
ctttcaggttattgccactt

SEQ ID NO: 71809 - DNA, 20 bp, Artificial Sequence
  MKO10071809_B_Anp32e
  gRNA
tcctcctcttcatagccttc

SEQ ID NO: 71810 - DNA, 20 bp, Artificial Sequence
  MKO10071810_B_Anp32e
  gRNA
gttgaagaacagagccccgg

SEQ ID NO: 71811 - DNA, 20 bp, Artificial Sequence
  MKO10071811_B_Anp32e
  gRNA
gatgatgactacgttgatga

SEQ ID NO: 71812 - DNA, 20 bp, Artificial Sequence
  MKO10071812_B_Anpep
  gRNA
cacccgctccttgttgctaa

SEQ ID NO: 71813 - DNA, 20 bp, Artificial Sequence
  MKO10071813_B_Anpep
  gRNA
ggtggctacaacgcagatgc

SEQ ID NO: 71814 - DNA, 20 bp, Artificial Sequence
  MKO10071814_B_Anpep
  gRNA
cactgtgattgctcacgagc

SEQ ID NO: 71815 - DNA, 20 bp, Artificial Sequence
  MKO10071815_B_Antxr1
  gRNA
ctcatagtaaatctgctcac

SEQ ID NO: 71816 - DNA, 20 bp, Artificial Sequence
  MKO10071816_B_Antxr1
  gRNA
caggaagtgtgctgcaccac

SEQ ID NO: 71817 - DNA, 20 bp, Artificial Sequence
  MKO10071817_B_Antxr1
  gRNA
ttcattgtcttctctactcg

SEQ ID NO: 71818 - DNA, 20 bp, Artificial Sequence
  MKO10071818_B_Antxr2
  gRNA
ctggcagtgtagcaaataac

SEQ ID NO: 71819 - DNA, 20 bp, Artificial Sequence
  MKO10071819_B_Antxr2
  gRNA
tgtttctccaactggcttaa

SEQ ID NO: 71820 - DNA, 20 bp, Artificial Sequence
  MKO10071820_B_Antxr2
  gRNA
ttacaagctttagtccttca

SEQ ID NO: 71821 - DNA, 20 bp, Artificial Sequence
  MKO10071821_B_Antxrl
  gRNA
catcattacctactcaacag

SEQ ID NO: 71822 - DNA, 20 bp, Artificial Sequence
  MKO10071822_B_Antxrl
  gRNA
cttaagaacatagtgcctca

SEQ ID NO: 71823 - DNA, 20 bp, Artificial Sequence
  MKO10071823_B_Antxrl
  gRNA
ccacatttattcatttgcag

SEQ ID NO: 71824 - DNA, 20 bp, Artificial Sequence
  MKO10071824_B_Anxa10
  gRNA
gtgcattgctgcgttgtgtt

SEQ ID NO: 71825 - DNA, 20 bp, Artificial Sequence
  MKO10071825_B_Anxa10
  gRNA
cttatgatgctcatgagctc

SEQ ID NO: 71826 - DNA, 20 bp, Artificial Sequence
  MKO10071826_B_Anxa10
  gRNA
agctcatgagcatcataaga

SEQ ID NO: 71827 - DNA, 20 bp, Artificial Sequence
  MKO10071827_B_Anxa11
  gRNA
tgaccccttgcgagatgccg

SEQ ID NO: 71828 - DNA, 20 bp, Artificial Sequence
  MKO10071828_B_Anxa11
  gRNA
ggcggatacattccataagg

SEQ ID NO: 71829 - DNA, 20 bp, Artificial Sequence
  MKO10071829_B_Anxa11
  gRNA
gttgaactgccccgcatagt

SEQ ID NO: 71830 - DNA, 20 bp, Artificial Sequence
  MKO10071830_B_Anxa13
  gRNA
ctgcatcaaagccgtggtga

SEQ ID NO: 71831 - DNA, 20 bp, Artificial Sequence
  MKO10071831_B_Anxa13
  gRNA
aagctgtacaaagcctgcaa

SEQ ID NO: 71832 - DNA, 20 bp, Artificial Sequence
  MKO10071832_B_Anxa13
  gRNA
cctctcctccgatgtcctgc

SEQ ID NO: 71833 - DNA, 20 bp, Artificial Sequence
  MKO10071833_B_Anxa1
  gRNA
cccttccttcaatgtatcct

SEQ ID NO: 71834 - DNA, 20 bp, Artificial Sequence
  MKO10071834_B_Anxa1
  gRNA
gtcttgagaaaagcccttac

SEQ ID NO: 71835 - DNA, 20 bp, Artificial Sequence
  MKO10071835_B_Anxa1
  gRNA
taggggctcactgctgaccc

SEQ ID NO: 71836 - DNA, 20 bp, Artificial Sequence
  MKO10071836_B_Anxa2
  gRNA
ttagttccgaagcatcatac

SEQ ID NO: 71837 - DNA, 20 bp, Artificial Sequence
  MKO10071837_B_Anxa2
  gRNA
ttgccttcgcctatcagaga

SEQ ID NO: 71838 - DNA, 20 bp, Artificial Sequence
  MKO10071838_B_Anxa2
  gRNA
tgttgatctcttgcagctcc

SEQ ID NO: 71839 - DNA, 20 bp, Artificial Sequence
  MKO10071839_B_Anxa3
  gRNA
gctccgtcagaatgttgatg

SEQ ID NO: 71840 - DNA, 20 bp, Artificial Sequence
  MKO10071840_B_Anxa3
  gRNA
atagcttcggcatccaccga

SEQ ID NO: 71841 - DNA, 20 bp, Artificial Sequence
  MKO10071841_B_Anxa3
  gRNA
gtacctgttcatacgctgct

SEQ ID NO: 71842 - DNA, 20 bp, Artificial Sequence
  MKO10071842_B_Anxa4
  gRNA
cagaaacaccgcccagcgcc

SEQ ID NO: 71843 - DNA, 20 bp, Artificial Sequence
  MKO10071843_B_Anxa4
  gRNA
gtacataccgaggcctttca

SEQ ID NO: 71844 - DNA, 20 bp, Artificial Sequence
  MKO10071844_B_Anxa4
  gRNA
cacagtgctgtatgacgtac

SEQ ID NO: 71845 - DNA, 20 bp, Artificial Sequence
  MKO10071845_B_Anxa5
  gRNA
aagagcatgcttcagctcgt

SEQ ID NO: 71846 - DNA, 20 bp, Artificial Sequence
  MKO10071846_B_Anxa5
  gRNA
cgagctgaagcatgctctta

SEQ ID NO: 71847 - DNA, 20 bp, Artificial Sequence
  MKO10071847_B_Anxa5
  gRNA
aacgttacccaagcctttca

SEQ ID NO: 71848 - DNA, 20 bp, Artificial Sequence
  MKO10071848_B_Anxa6
  gRNA
ggtggcttaccttgccatac

SEQ ID NO: 71849 - DNA, 20 bp, Artificial Sequence
  MKO10071849_B_Anxa6
  gRNA
gtggacagagcctcggtaca

SEQ ID NO: 71850 - DNA, 20 bp, Artificial Sequence
  MKO10071850_B_Anxa6
  gRNA
cctcccgcagcaacaagcag

SEQ ID NO: 71851 - DNA, 20 bp, Artificial Sequence
  MKO10071851_B_Anxa7
  gRNA
ccgccaccataagactgtgc

SEQ ID NO: 71852 - DNA, 20 bp, Artificial Sequence
  MKO10071852_B_Anxa7
  gRNA
gtgccctgagtcatcgaagc

SEQ ID NO: 71853 - DNA, 20 bp, Artificial Sequence
  MKO10071853_B_Anxa7
  gRNA
acaagctccctaccctagcc

SEQ ID NO: 71854 - DNA, 20 bp, Artificial Sequence
  MKO10071854_B_Anxa8
  gRNA
ttgtagagggtctctgcatc

SEQ ID NO: 71855 - DNA, 20 bp, Artificial Sequence
  MKO10071855_B_Anxa8
  gRNA
tcctacaggaaccaatgagc

SEQ ID NO: 71856 - DNA, 20 bp, Artificial Sequence
  MKO10071856_B_Anxa8
  gRNA
ctcaatgatgactccttctt

SEQ ID NO: 71857 - DNA, 20 bp, Artificial Sequence
  MKO10071857_B_Anxa9
  gRNA
cctgcagtccgggcgctgct

SEQ ID NO: 71858 - DNA, 20 bp, Artificial Sequence
  MKO10071858_B_Anxa9
  gRNA
tgcagcccaatttgatgccc

SEQ ID NO: 71859 - DNA, 20 bp, Artificial Sequence
  MKO10071859_B_Anxa9
  gRNA
tgctcttacagaccgcagcc

SEQ ID NO: 71860 - DNA, 20 bp, Artificial Sequence
  MKO10071860_B_Aoah
  gRNA
cagactcgatgaagctatga

SEQ ID NO: 71861 - DNA, 20 bp, Artificial Sequence
  MKO10071861_B_Aoah
  gRNA
ccatggtagaggacctcctg

SEQ ID NO: 71862 - DNA, 20 bp, Artificial Sequence
  MKO10071862_B_Aoah
  gRNA
gaagaccgcctgctatttct

SEQ ID NO: 71863 - DNA, 20 bp, Artificial Sequence
  MKO10071863_B_Aoc1
  gRNA
catggttgagaccgttgtcc

SEQ ID NO: 71864 - DNA, 20 bp, Artificial Sequence
  MKO10071864_B_Aoc1
  gRNA
gcaggcggtagctccgcctg

SEQ ID NO: 71865 - DNA, 20 bp, Artificial Sequence
  MKO10071865_B_Aoc1
  gRNA
caatgttctcgttgttccga

SEQ ID NO: 71866 - DNA, 20 bp, Artificial Sequence
  MKO10071866_B_Aoc2
  gRNA
ccccttcgaaggcatcataa

SEQ ID NO: 71867 - DNA, 20 bp, Artificial Sequence
  MKO10071867_B_Aoc2
  gRNA
tctattaccagaacgacatg

SEQ ID NO: 71868 - DNA, 20 bp, Artificial Sequence
  MKO10071868_B_Aoc2
  gRNA
ctctcaaagtacacgctgcc

SEQ ID NO: 71869 - DNA, 20 bp, Artificial Sequence
  MKO10071869_B_Aoc3
  gRNA
ttgtccccacgattgtacct

SEQ ID NO: 71870 - DNA, 20 bp, Artificial Sequence
  MKO10071870_B_Aoc3
  gRNA
gttccccgcagtcaccgtgt

SEQ ID NO: 71871 - DNA, 20 bp, Artificial Sequence
  MKO10071871_B_Aoc3
  gRNA
ggcaggaatttcgggggcac

SEQ ID NO: 71872 - DNA, 20 bp, Artificial Sequence
  MKO10071872_B_Aox1
  gRNA
acagcagtcaccacggtaga

SEQ ID NO: 71873 - DNA, 20 bp, Artificial Sequence
  MKO10071873_B_Aox1
  gRNA
ctgcacctacctgatcgcct

SEQ ID NO: 71874 - DNA, 20 bp, Artificial Sequence
  MKO10071874_B_Aox1
  gRNA
cctgcacagtgatgatctcg

SEQ ID NO: 71875 - DNA, 20 bp, Artificial Sequence
  MKO10071875_B_Aox2
  gRNA
actaaggatgcgtgtggaac

SEQ ID NO: 71876 - DNA, 20 bp, Artificial Sequence
  MKO10071876_B_Aox2
  gRNA
tccttcccagtatgcctcac

SEQ ID NO: 71877 - DNA, 20 bp, Artificial Sequence
  MKO10071877_B_Aox2
  gRNA
gaagggtccagttctttctc

SEQ ID NO: 71878 - DNA, 20 bp, Artificial Sequence
  MKO10071878_B_Aox3
  gRNA
acccttccagtccgactcac

SEQ ID NO: 71879 - DNA, 20 bp, Artificial Sequence
  MKO10071879_B_Aox3
  gRNA
tacctggacagggtgtatcc

SEQ ID NO: 71880 - DNA, 20 bp, Artificial Sequence
  MKO10071880_B_Aox3
  gRNA
gccctccacagaacagataa

SEQ ID NO: 71881 - DNA, 20 bp, Artificial Sequence
  MKO10071881_B_Aox4
  gRNA
actaagtacagctgtggaac

SEQ ID NO: 71882 - DNA, 20 bp, Artificial Sequence
  MKO10071882_B_Aox4
  gRNA
gccgacacctgatcagatca

SEQ ID NO: 71883 - DNA, 20 bp, Artificial Sequence
  MKO10071883_B_Aox4
  gRNA
tggagcagccattaccacag

SEQ ID NO: 71884 - DNA, 20 bp, Artificial Sequence
  MKO10071884_B_Ap1ar
  gRNA
aggagagcacttgaccatag

SEQ ID NO: 71885 - DNA, 20 bp, Artificial Sequence
  MKO10071885_B_Ap1ar
  gRNA
ctttcagtttgagaacctcg

SEQ ID NO: 71886 - DNA, 20 bp, Artificial Sequence
  MKO10071886_B_Ap1ar
  gRNA
tttgtgcagggggagagccc

SEQ ID NO: 71887 - DNA, 20 bp, Artificial Sequence
  MKO10071887_B_Ap1b1
  gRNA
ccaggtggtagcgaatgcag

SEQ ID NO: 71888 - DNA, 20 bp, Artificial Sequence
  MKO10071888_B_Ap1b1
  gRNA
tggcatagttcatcaagtac

SEQ ID NO: 71889 - DNA, 20 bp, Artificial Sequence
  MKO10071889_B_Ap1b1
  gRNA
agtgattgcatcaatgactg

SEQ ID NO: 71890 - DNA, 20 bp, Artificial Sequence
  MKO10071890_B_Ap1g1
  gRNA
tccgttcacacatctctgtg

SEQ ID NO: 71891 - DNA, 20 bp, Artificial Sequence
  MKO10071891_B_Ap1g1
  gRNA
gacttacttcttgatacagt

SEQ ID NO: 71892 - DNA, 20 bp, Artificial Sequence
  MKO10071892_B_Ap1g1
  gRNA
catgctcgcacatttcagaa

SEQ ID NO: 71893 - DNA, 20 bp, Artificial Sequence
  MKO10071893_B_Ap1g2
  gRNA
gtgccgggacctagcccctg

SEQ ID NO: 71894 - DNA, 20 bp, Artificial Sequence
  MKO10071894_B_Ap1g2
  gRNA
atgacgctcacgaagcagtt

SEQ ID NO: 71895 - DNA, 20 bp, Artificial Sequence
  MKO10071895_B_Ap1g2
  gRNA
cctctcatccaatagaagca

SEQ ID NO: 71896 - DNA, 20 bp, Artificial Sequence
  MKO10071896_B_Ap1m1
  gRNA
gggcccccgtttccagcttg

SEQ ID NO: 71897 - DNA, 20 bp, Artificial Sequence
  MKO10071897_B_Ap1m1
  gRNA
ttacctgtaccaccttgtag

SEQ ID NO: 71898 - DNA, 20 bp, Artificial Sequence
  MKO10071898_B_Ap1m1
  gRNA
ctccaactccttaaagtact

SEQ ID NO: 71899 - DNA, 20 bp, Artificial Sequence
  MKO10071899_B_Ap1m2
  gRNA
ctgattagccgaaactacaa

SEQ ID NO: 71900 - DNA, 20 bp, Artificial Sequence
  MKO10071900_B_Ap1m2
  gRNA
ggcattagcgttcttcagcg

SEQ ID NO: 71901 - DNA, 20 bp, Artificial Sequence
  MKO10071901_B_Ap1m2
  gRNA
agtcttcattctggacgtca

SEQ ID NO: 71902 - DNA, 20 bp, Artificial Sequence
  MKO10071902_B_Ap1s1
  gRNA
ccaccgatacgtagagctct

SEQ ID NO: 71903 - DNA, 20 bp, Artificial Sequence
  MKO10071903_B_Ap1s1
  gRNA
agagctcatgcaagtcgtcc

SEQ ID NO: 71904 - DNA, 20 bp, Artificial Sequence
  MKO10071904_B_Ap1s1
  gRNA
gcccaaaatgtgcagcttcc

SEQ ID NO: 71905 - DNA, 20 bp, Artificial Sequence
  MKO10071905_B_Ap1s2
  gRNA
ggacaatgaactgattaccc

SEQ ID NO: 71906 - DNA, 20 bp, Artificial Sequence
  MKO10071906_B_Ap1s2
  gRNA
tgtccttaaagcaattgagc

SEQ ID NO: 71907 - DNA, 20 bp, Artificial Sequence
  MKO10071907_B_Ap1s2
  gRNA
tatcacagcaagagtttcat

SEQ ID NO: 71908 - DNA, 20 bp, Artificial Sequence
  MKO10071908_B_Ap1s3
  gRNA
atcttcttcctctccttgtc

SEQ ID NO: 71909 - DNA, 20 bp, Artificial Sequence
  MKO10071909_B_Ap1s3
  gRNA
agagattgttcatcgttatg

SEQ ID NO: 71910 - DNA, 20 bp, Artificial Sequence
  MKO10071910_B_Ap1s3
  gRNA
agactgtacacttaaaacgt

SEQ ID NO: 71911 - DNA, 20 bp, Artificial Sequence
  MKO10071911_B_Ap2a1
  gRNA
ccgtgttcatctccgacatc

SEQ ID NO: 71912 - DNA, 20 bp, Artificial Sequence
  MKO10071912_B_Ap2a1
  gRNA
tgtacttgttagagcttagc

SEQ ID NO: 71913 - DNA, 20 bp, Artificial Sequence
  MKO10071913_B_Ap2a1
  gRNA
gctaagctctaacaagtaca

SEQ ID NO: 71914 - DNA, 20 bp, Artificial Sequence
  MKO10071914_B_Ap2a2
  gRNA
gtaggtgacaaggctcttga

SEQ ID NO: 71915 - DNA, 20 bp, Artificial Sequence
  MKO10071915_B_Ap2a2
  gRNA
tgtgcttgttacgcctgtac

SEQ ID NO: 71916 - DNA, 20 bp, Artificial Sequence
  MKO10071916_B_Ap2a2
  gRNA
tctgagctcaaacagataca

SEQ ID NO: 71917 - DNA, 20 bp, Artificial Sequence
  MKO10071917_B_Ap2b1
  gRNA
agtgattgctgctatgaccg

SEQ ID NO: 71918 - DNA, 20 bp, Artificial Sequence
  MKO10071918_B_Ap2b1
  gRNA
tggcatagttcatcagatag

SEQ ID NO: 71919 - DNA, 20 bp, Artificial Sequence
  MKO10071919_B_Ap2b1
  gRNA
gtacttcacaaccaataaga

SEQ ID NO: 71920 - DNA, 20 bp, Artificial Sequence
  MKO10071920_B_Ap2m1
  gRNA
cctgactcttgataccctgc

SEQ ID NO: 71921 - DNA, 20 bp, Artificial Sequence
  MKO10071921_B_Ap2m1
  gRNA
ttacatcacacatcttgtag

SEQ ID NO: 71922 - DNA, 20 bp, Artificial Sequence
  MKO10071922_B_Ap2m1
  gRNA
acagtcccagatcaccagcc

SEQ ID NO: 71923 - DNA, 20 bp, Artificial Sequence
  MKO10071923_B_Ap2s1
  gRNA
caacaatctggcctatctcg

SEQ ID NO: 71924 - DNA, 20 bp, Artificial Sequence
  MKO10071924_B_Ap2s1
  gRNA
gctgcttcagcaccttcgtc

SEQ ID NO: 71925 - DNA, 20 bp, Artificial Sequence
  MKO10071925_B_Ap2s1
  gRNA
ccttgcccaggtttacacgg

SEQ ID NO: 71926 - DNA, 20 bp, Artificial Sequence
  MKO10071926_B_Ap3b1
  gRNA
tatcgtgcctgtcatgatgc

SEQ ID NO: 71927 - DNA, 20 bp, Artificial Sequence
  MKO10071927_B_Ap3b1
  gRNA
cttgcacggattagttgatt

SEQ ID NO: 71928 - DNA, 20 bp, Artificial Sequence
  MKO10071928_B_Ap3b1
  gRNA
aaccctgcagatgattgcga

SEQ ID NO: 71929 - DNA, 20 bp, Artificial Sequence
  MKO10071929_B_Ap3b2
  gRNA
cttgctgctcctcggcatat

SEQ ID NO: 71930 - DNA, 20 bp, Artificial Sequence
  MKO10071930_B_Ap3b2
  gRNA
ccaacacccagatgatcgcc

SEQ ID NO: 71931 - DNA, 20 bp, Artificial Sequence
  MKO10071931_B_Ap3b2
  gRNA
ggtccgaggcattctttccc

SEQ ID NO: 71932 - DNA, 20 bp, Artificial Sequence
  MKO10071932_B_Ap3d1
  gRNA
gcttgatctcgtcaatgcac

SEQ ID NO: 71933 - DNA, 20 bp, Artificial Sequence
  MKO10071933_B_Ap3d1
  gRNA
gcagcgtgttggctaccttg

SEQ ID NO: 71934 - DNA, 20 bp, Artificial Sequence
  MKO10071934_B_Ap3d1
  gRNA
agccccagccagtacgacac

SEQ ID NO: 71935 - DNA, 20 bp, Artificial Sequence
  MKO10071935_B_Ap3m1
  gRNA
ttcactcctgctcgacgcca

SEQ ID NO: 71936 - DNA, 20 bp, Artificial Sequence
  MKO10071936_B_Ap3m1
  gRNA
caaaacttaccatgaaagag

SEQ ID NO: 71937 - DNA, 20 bp, Artificial Sequence
  MKO10071937_B_Ap3m1
  gRNA
atgttagattcagtagccag

SEQ ID NO: 71938 - DNA, 20 bp, Artificial Sequence
  MKO10071938_B_Ap3m2
  gRNA
atgtttgactccgtagccaa

SEQ ID NO: 71939 - DNA, 20 bp, Artificial Sequence
  MKO10071939_B_Ap3m2
  gRNA
catcccggtcagcttaacac

SEQ ID NO: 71940 - DNA, 20 bp, Artificial Sequence
  MKO10071940_B_Ap3m2
  gRNA
cctgtgtccgtttcaagcgc

SEQ ID NO: 71941 - DNA, 20 bp, Artificial Sequence
  MKO10071941_B_Ap3s1
  gRNA
acacgcaacagcaaatcatc

SEQ ID NO: 71942 - DNA, 20 bp, Artificial Sequence
  MKO10071942_B_Ap3s1
  gRNA
aatgccaagttcactttctg

SEQ ID NO: 71943 - DNA, 20 bp, Artificial Sequence
  MKO10071943_B_Ap3s1
  gRNA
tttaatattccatgtagaca

SEQ ID NO: 71944 - DNA, 20 bp, Artificial Sequence
  MKO10071944_B_Ap3s2
  gRNA
tgttcgagagactttccatc

SEQ ID NO: 71945 - DNA, 20 bp, Artificial Sequence
  MKO10071945_B_Ap3s2
  gRNA
aatcgaagctcaaaaccgac

SEQ ID NO: 71946 - DNA, 20 bp, Artificial Sequence
  MKO10071946_B_Ap3s2
  gRNA
cttgatcttccatatggata

SEQ ID NO: 71947 - DNA, 20 bp, Artificial Sequence
  MKO10071947_B_Ap4b1
  gRNA
atgtcatccagcgagttatt

SEQ ID NO: 71948 - DNA, 20 bp, Artificial Sequence
  MKO10071948_B_Ap4b1
  gRNA
gtctttgcagagcgtattga

SEQ ID NO: 71949 - DNA, 20 bp, Artificial Sequence
  MKO10071949_B_Ap4b1
  gRNA
gtacagtcttctgcgtgacc

SEQ ID NO: 71950 - DNA, 20 bp, Artificial Sequence
  MKO10071950_B_Ap4e1
  gRNA
gcttctccttgtgaatacag

SEQ ID NO: 71951 - DNA, 20 bp, Artificial Sequence
  MKO10071951_B_Ap4e1
  gRNA
ggacctgcagagcactaatc

SEQ ID NO: 71952 - DNA, 20 bp, Artificial Sequence
  MKO10071952_B_Ap4e1
  gRNA
cttatatactgtgagatgct

SEQ ID NO: 71953 - DNA, 20 bp, Artificial Sequence
  MKO10071953_B_Ap4m1
  gRNA
aagctgacgggactgcctgg

SEQ ID NO: 71954 - DNA, 20 bp, Artificial Sequence
  MKO10071954_B_Ap4m1
  gRNA
tgctgaccacagcttcagtt

SEQ ID NO: 71955 - DNA, 20 bp, Artificial Sequence
  MKO10071955_B_Ap4m1
  gRNA
gaagttcctcagcatttctg

SEQ ID NO: 71956 - DNA, 20 bp, Artificial Sequence
  MKO10071956_B_Ap4s1
  gRNA
atatgcagctctctttgttg

SEQ ID NO: 71957 - DNA, 20 bp, Artificial Sequence
  MKO10071957_B_Ap4s1
  gRNA
gacccagataatgtttaatt

SEQ ID NO: 71958 - DNA, 20 bp, Artificial Sequence
  MKO10071958_B_Ap4s1
  gRNA
gtgctcattcattgaataca

SEQ ID NO: 71959 - DNA, 20 bp, Artificial Sequence
  MKO10071959_B_Ap5b1
  gRNA
gcccaggcttctcgacctag

SEQ ID NO: 71960 - DNA, 20 bp, Artificial Sequence
  MKO10071960_B_Ap5b1
  gRNA
attagtgacgaggccagtgc

SEQ ID NO: 71961 - DNA, 20 bp, Artificial Sequence
  MKO10071961_B_Ap5b1
  gRNA
gccctttacagcacatccgc

SEQ ID NO: 71962 - DNA, 20 bp, Artificial Sequence
  MKO10071962_B_Ap5m1
  gRNA
accccactaatgctaattaa

SEQ ID NO: 71963 - DNA, 20 bp, Artificial Sequence
  MKO10071963_B_Ap5m1
  gRNA
cttatgccactacacttctc

SEQ ID NO: 71964 - DNA, 20 bp, Artificial Sequence
  MKO10071964_B_Ap5m1
  gRNA
ttctagtagcattgacacaa

SEQ ID NO: 71965 - DNA, 20 bp, Artificial Sequence
  MKO10071965_B_Ap5s1
  gRNA
gccccgaatttggaagatac

SEQ ID NO: 71966 - DNA, 20 bp, Artificial Sequence
  MKO10071966_B_Ap5s1
  gRNA
cacgctcaggacatacggat

SEQ ID NO: 71967 - DNA, 20 bp, Artificial Sequence
  MKO10071967_B_Ap5s1
  gRNA
cccagccatagcactgtccg

SEQ ID NO: 71968 - DNA, 20 bp, Artificial Sequence
  MKO10071968_B_Ap5z1
  gRNA
cactcacctacgggggtact

SEQ ID NO: 71969 - DNA, 20 bp, Artificial Sequence
  MKO10071969_B_Ap5z1
  gRNA
aggctaagctgccgggtgtt

SEQ ID NO: 71970 - DNA, 20 bp, Artificial Sequence
  MKO10071970_B_Ap5z1
  gRNA
tcttcaagatcctcgagaac

SEQ ID NO: 71971 - DNA, 20 bp, Artificial Sequence
  MKO10071971_B_Apaf1
  gRNA
gcagaatctgtgcatgcgct

SEQ ID NO: 71972 - DNA, 20 bp, Artificial Sequence
  MKO10071972_B_Apaf1
  gRNA
atggcgcttaccttctaaga

SEQ ID NO: 71973 - DNA, 20 bp, Artificial Sequence
  MKO10071973_B_Apaf1
  gRNA
cactctgcagaagcgcagca

SEQ ID NO: 71974 - DNA, 20 bp, Artificial Sequence
  MKO10071974_B_Apba1
  gRNA
ccgtggggtcgccgggatga

SEQ ID NO: 71975 - DNA, 20 bp, Artificial Sequence
  MKO10071975_B_Apba1
  gRNA
tcaagcataccccttcatcc

SEQ ID NO: 71976 - DNA, 20 bp, Artificial Sequence
  MKO10071976_B_Apba1
  gRNA
tcagttcttaccttcaacgt

SEQ ID NO: 71977 - DNA, 20 bp, Artificial Sequence
  MKO10071977_B_Apba2
  gRNA
cagcagcgctctgatctcaa

SEQ ID NO: 71978 - DNA, 20 bp, Artificial Sequence
  MKO10071978_B_Apba2
  gRNA
tgacaataacaacatcccag

SEQ ID NO: 71979 - DNA, 20 bp, Artificial Sequence
  MKO10071979_B_Apba2
  gRNA
tgctaagatcaagaaaaaag

SEQ ID NO: 71980 - DNA, 20 bp, Artificial Sequence
  MKO10071980_B_Apba3
  gRNA
gctcaccttgacgcggtcca

SEQ ID NO: 71981 - DNA, 20 bp, Artificial Sequence
  MKO10071981_B_Apba3
  gRNA
agccaacactttgacacgct

SEQ ID NO: 71982 - DNA, 20 bp, Artificial Sequence
  MKO10071982_B_Apba3
  gRNA
caccaagcgtgtcaaagtgt

SEQ ID NO: 71983 - DNA, 20 bp, Artificial Sequence
  MKO10071983_B_Apbb1ip
  gRNA
atatatcccgaactgcaaat

SEQ ID NO: 71984 - DNA, 20 bp, Artificial Sequence
  MKO10071984_B_Apbb1ip
  gRNA
tggatgagcggcagttggct

SEQ ID NO: 71985 - DNA, 20 bp, Artificial Sequence
  MKO10071985_B_Apbb1ip
  gRNA
tgataaaattaagttagcac

SEQ ID NO: 71986 - DNA, 20 bp, Artificial Sequence
  MKO10071986_B_Apbb1
  gRNA
ctccttcagctcacctggac

SEQ ID NO: 71987 - DNA, 20 bp, Artificial Sequence
  MKO10071987_B_Apbb1
  gRNA
cttgaacaaaccttgatccc

SEQ ID NO: 71988 - DNA, 20 bp, Artificial Sequence
  MKO10071988_B_Apbb1
  gRNA
cccaatggagttgggactga

SEQ ID NO: 71989 - DNA, 20 bp, Artificial Sequence
  MKO10071989_B_Apbb2
  gRNA
gttaggttgatgacggctgc

SEQ ID NO: 71990 - DNA, 20 bp, Artificial Sequence
  MKO10071990_B_Apbb2
  gRNA
gctatgcatccttgaaactc

SEQ ID NO: 71991 - DNA, 20 bp, Artificial Sequence
  MKO10071991_B_Apbb2
  gRNA
acctggaagtacttctgaca

SEQ ID NO: 71992 - DNA, 20 bp, Artificial Sequence
  MKO10071992_B_Apbb3
  gRNA
agaaagatccgtgatgctgc

SEQ ID NO: 71993 - DNA, 20 bp, Artificial Sequence
  MKO10071993_B_Apbb3
  gRNA
tccggttcaatgaactgtcc

SEQ ID NO: 71994 - DNA, 20 bp, Artificial Sequence
  MKO10071994_B_Apbb3
  gRNA
ctcagtggcagcgcccaacc

SEQ ID NO: 71995 - DNA, 20 bp, Artificial Sequence
  MKO10071995_B_Apc2
  gRNA
agcgctcctccatcagcgag

SEQ ID NO: 71996 - DNA, 20 bp, Artificial Sequence
  MKO10071996_B_Apc2
  gRNA
ccctctggagtccgggcggc

SEQ ID NO: 71997 - DNA, 20 bp, Artificial Sequence
  MKO10071997_B_Apc2
  gRNA
atggtccagagccgtgcact

SEQ ID NO: 71998 - DNA, 20 bp, Artificial Sequence
  MKO10071998_B_Apcdd1
  gRNA
ctgtgatccgcgcaccgttg

SEQ ID NO: 71999 - DNA, 20 bp, Artificial Sequence
  MKO10071999_B_Apcdd1
  gRNA
gagtaaccacgagtgcacca

SEQ ID NO: 72000 - DNA, 20 bp, Artificial Sequence
  MKO10072000_B_Apcdd1
  gRNA
gcagatgcccccgaccatcg

SEQ ID NO: 72001 - DNA, 20 bp, Artificial Sequence
  MKO10072001_B_Apcs
  gRNA
cttcttacctgtctgacaaa

SEQ ID NO: 72002 - DNA, 20 bp, Artificial Sequence
  MKO10072002_B_Apcs
  gRNA
aggactcccaagtggtacat

SEQ ID NO: 72003 - DNA, 20 bp, Artificial Sequence
  MKO10072003_B_Apcs
  gRNA
agccccacccagtatagtcc

SEQ ID NO: 72004 - DNA, 20 bp, Artificial Sequence
  MKO10072004_B_Apc
  gRNA
gtgcacgcttctccatgtcc

SEQ ID NO: 72005 - DNA, 20 bp, Artificial Sequence
  MKO10072005_B_Apc
  gRNA
ggacatggagaagcgtgcac

SEQ ID NO: 72006 - DNA, 20 bp, Artificial Sequence
  MKO10072006_B_Apc
  gRNA
gaagatgagactatgacttc

SEQ ID NO: 72007 - DNA, 20 bp, Artificial Sequence
  MKO10072007_B_Apeh
  gRNA
gcaacagtgtggaaacccgg

SEQ ID NO: 72008 - DNA, 20 bp, Artificial Sequence
  MKO10072008_B_Apeh
  gRNA
tggaggtgcagtctcgggag

SEQ ID NO: 72009 - DNA, 20 bp, Artificial Sequence
  MKO10072009_B_Apeh
  gRNA
gagtttcaacctgtctgcac

SEQ ID NO: 72010 - DNA, 20 bp, Artificial Sequence
  MKO10072010_B_Apex1
  gRNA
attgacctccgtaaccccaa

SEQ ID NO: 72011 - DNA, 20 bp, Artificial Sequence
  MKO10072011_B_Apex1
  gRNA
atgtggatgggcttcgagcc

SEQ ID NO: 72012 - DNA, 20 bp, Artificial Sequence
  MKO10072012_B_Apex1
  gRNA
gagtttgttctccgagcact

SEQ ID NO: 72013 - DNA, 20 bp, Artificial Sequence
  MKO10072013_B_Apex2
  gRNA
atcttgaaggtcagccgctc

SEQ ID NO: 72014 - DNA, 20 bp, Artificial Sequence
  MKO10072014_B_Apex2
  gRNA
tataaccctcaacaatagcc

SEQ ID NO: 72015 - DNA, 20 bp, Artificial Sequence
  MKO10072015_B_Apex2
  gRNA
agcttcagccgcagccgtag

SEQ ID NO: 72016 - DNA, 20 bp, Artificial Sequence
  MKO10072016_B_Aph1a
  gRNA
ccctattacttcctgacttc

SEQ ID NO: 72017 - DNA, 20 bp, Artificial Sequence
  MKO10072017_B_Aph1a
  gRNA
gtttcccaggaaggcagatg

SEQ ID NO: 72018 - DNA, 20 bp, Artificial Sequence
  MKO10072018_B_Aph1a
  gRNA
ggtctccagctacagtgatc

SEQ ID NO: 72019 - DNA, 20 bp, Artificial Sequence
  MKO10072019_B_Aph1b
  gRNA
tttgaaaagcataaaccctg

SEQ ID NO: 72020 - DNA, 20 bp, Artificial Sequence
  MKO10072020_B_Aph1b
  gRNA
ttcctctttagtttctggct

SEQ ID NO: 72021 - DNA, 20 bp, Artificial Sequence
  MKO10072021_B_Aph1b
  gRNA
cctgaattaaggaagaactg

SEQ ID NO: 72022 - DNA, 20 bp, Artificial Sequence
  MKO10072022_B_Aph1c
  gRNA
atacgccaacagtcgcatcg

SEQ ID NO: 72023 - DNA, 20 bp, Artificial Sequence
  MKO10072023_B_Aph1c
  gRNA
ttcctctttagtttctggct

SEQ ID NO: 72024 - DNA, 20 bp, Artificial Sequence
  MKO10072024_B_Aph1c
  gRNA
cctgaattaaggaagaactg

SEQ ID NO: 72025 - DNA, 20 bp, Artificial Sequence
  MKO10072025_B_Api5
  gRNA
agatgcctaccaagtgatac

SEQ ID NO: 72026 - DNA, 20 bp, Artificial Sequence
  MKO10072026_B_Api5
  gRNA
acacatcttcatcctcacag

SEQ ID NO: 72027 - DNA, 20 bp, Artificial Sequence
  MKO10072027_B_Api5
  gRNA
tgactctgcagaatttaacc

SEQ ID NO: 72028 - DNA, 20 bp, Artificial Sequence
  MKO10072028_B_Apip
  gRNA
atacctgtaatagcctcctg

SEQ ID NO: 72029 - DNA, 20 bp, Artificial Sequence
  MKO10072029_B_Apip
  gRNA
gctgggtcaccggcactgga

SEQ ID NO: 72030 - DNA, 20 bp, Artificial Sequence
  MKO10072030_B_Apip
  gRNA
ataaggaaatgtacctcagg

SEQ ID NO: 72031 - DNA, 20 bp, Artificial Sequence
  MKO10072031_B_Apitd1
  gRNA
taagagcttcacgtcttcag

SEQ ID NO: 72032 - DNA, 20 bp, Artificial Sequence
  MKO10072032_B_Apitd1
  gRNA
attgcccagcttaacctgaa

SEQ ID NO: 72033 - DNA, 20 bp, Artificial Sequence
  MKO10072033_B_Apitd1
  gRNA
cccacctggcaaacatttca

SEQ ID NO: 72034 - DNA, 20 bp, Artificial Sequence
  MKO10072034_B_Aplf
  gRNA
gtgtcccaccatagatccta

SEQ ID NO: 72035 - DNA, 20 bp, Artificial Sequence
  MKO10072035_B_Aplf
  gRNA
gattctcaccataggatcta

SEQ ID NO: 72036 - DNA, 20 bp, Artificial Sequence
  MKO10072036_B_Aplf
  gRNA
actatcaaccacttcaagaa

SEQ ID NO: 72037 - DNA, 20 bp, Artificial Sequence
  MKO10072037_B_Aplnr
  gRNA
ctgaatgcgactacgcagac

SEQ ID NO: 72038 - DNA, 20 bp, Artificial Sequence
  MKO10072038_B_Aplnr
  gRNA
tttccgaaaggagcgcattg

SEQ ID NO: 72039 - DNA, 20 bp, Artificial Sequence
  MKO10072039_B_Aplnr
  gRNA
ttcattgcccaaaccatcgc

SEQ ID NO: 72040 - DNA, 20 bp, Artificial Sequence
  MKO10072040_B_Apln
  gRNA
acctccacaaactgcagtca

SEQ ID NO: 72041 - DNA, 20 bp, Artificial Sequence
  MKO10072041_B_Apln
  gRNA
agaaggaagcatgcgctacc

SEQ ID NO: 72042 - DNA, 20 bp, Artificial Sequence
  MKO10072042_B_Apln
  gRNA
ggcccttatgggagagccgg

SEQ ID NO: 72043 - DNA, 20 bp, Artificial Sequence
  MKO10072043_B_Aplp1
  gRNA
cacactggtccatacgctcc

SEQ ID NO: 72044 - DNA, 20 bp, Artificial Sequence
  MKO10072044_B_Aplp1
  gRNA
accagtgtgagagttcaacc

SEQ ID NO: 72045 - DNA, 20 bp, Artificial Sequence
  MKO10072045_B_Aplp1
  gRNA
ctctgatcggttccgaggtg

SEQ ID NO: 72046 - DNA, 20 bp, Artificial Sequence
  MKO10072046_B_Aplp2
  gRNA
tgtgtgagaagcaccagcgc

SEQ ID NO: 72047 - DNA, 20 bp, Artificial Sequence
  MKO10072047_B_Aplp2
  gRNA
gttataccattcaagtgtct

SEQ ID NO: 72048 - DNA, 20 bp, Artificial Sequence
  MKO10072048_B_Aplp2
  gRNA
aaatgggagcctgacccaac

SEQ ID NO: 72049 - DNA, 20 bp, Artificial Sequence
  MKO10072049_B_Apmap
  gRNA
tgcatccaaatacgaagttg

SEQ ID NO: 72050 - DNA, 20 bp, Artificial Sequence
  MKO10072050_B_Apmap
  gRNA
agacccctgggcatccgggc

SEQ ID NO: 72051 - DNA, 20 bp, Artificial Sequence
  MKO10072051_B_Apmap
  gRNA
cgagatgatgaacctacctg

SEQ ID NO: 72052 - DNA, 20 bp, Artificial Sequence
  MKO10072052_B_Apoa1bp
  gRNA
cccatcccctccgttatttc

SEQ ID NO: 72053 - DNA, 20 bp, Artificial Sequence
  MKO10072053_B_Apoa1bp
  gRNA
atcaactcatggagctggcc

SEQ ID NO: 72054 - DNA, 20 bp, Artificial Sequence
  MKO10072054_B_Apoa1bp
  gRNA
gctagcatcgacattccctc

SEQ ID NO: 72055 - DNA, 20 bp, Artificial Sequence
  MKO10072055_B_Apoa1
  gRNA
ggatttcgctaatgtgtatg

SEQ ID NO: 72056 - DNA, 20 bp, Artificial Sequence
  MKO10072056_B_Apoa1
  gRNA
gtggctctggtcttcctgac

SEQ ID NO: 72057 - DNA, 20 bp, Artificial Sequence
  MKO10072057_B_Apoa1
  gRNA
acccttcaggatgaaagctg

SEQ ID NO: 72058 - DNA, 20 bp, Artificial Sequence
  MKO10072058_B_Apoa2
  gRNA
tctgaaagtattgagtgaac

SEQ ID NO: 72059 - DNA, 20 bp, Artificial Sequence
  MKO10072059_B_Apoa2
  gRNA
aggagctttggttaagagac

SEQ ID NO: 72060 - DNA, 20 bp, Artificial Sequence
  MKO10072060_B_Apoa2
  gRNA
ctcaccttccaggctacaga

SEQ ID NO: 72061 - DNA, 20 bp, Artificial Sequence
  MKO10072061_B_Apoa4
  gRNA
ttcggaccaggtggccaatg

SEQ ID NO: 72062 - DNA, 20 bp, Artificial Sequence
  MKO10072062_B_Apoa4
  gRNA
aaagtaatcccacaccacat

SEQ ID NO: 72063 - DNA, 20 bp, Artificial Sequence
  MKO10072063_B_Apoa4
  gRNA
gggtcagcaccgcagccttc

SEQ ID NO: 72064 - DNA, 20 bp, Artificial Sequence
  MKO10072064_B_Apoa5
  gRNA
agaagacccacctgcgagga

SEQ ID NO: 72065 - DNA, 20 bp, Artificial Sequence
  MKO10072065_B_Apoa5
  gRNA
gcatggctgcagtcatcact

SEQ ID NO: 72066 - DNA, 20 bp, Artificial Sequence
  MKO10072066_B_Apoa5
  gRNA
actacttcagccaaaacagt

SEQ ID NO: 72067 - DNA, 20 bp, Artificial Sequence
  MKO10072067_B_Apobec1
  gRNA
attgtgaaaaacgtgagttg

SEQ ID NO: 72068 - DNA, 20 bp, Artificial Sequence
  MKO10072068_B_Apobec1
  gRNA
ggccaataagcttcgtttga

SEQ ID NO: 72069 - DNA, 20 bp, Artificial Sequence
  MKO10072069_B_Apobec1
  gRNA
ggggtggtatcctttggtaa

SEQ ID NO: 72070 - DNA, 20 bp, Artificial Sequence
  MKO10072070_B_Apobec2
  gRNA
ccgcccttcgagattgtcac

SEQ ID NO: 72071 - DNA, 20 bp, Artificial Sequence
  MKO10072071_B_Apobec2
  gRNA
tacctggaggatgaacacgc

SEQ ID NO: 72072 - DNA, 20 bp, Artificial Sequence
  MKO10072072_B_Apobec2
  gRNA
acgtggaatacagttccggg

SEQ ID NO: 72073 - DNA, 20 bp, Artificial Sequence
  MKO10072073_B_Apobec3
  gRNA
tcggtgaatagcatttgcga

SEQ ID NO: 72074 - DNA, 20 bp, Artificial Sequence
  MKO10072074_B_Apobec3
  gRNA
aagttccactttaagaacct

SEQ ID NO: 72075 - DNA, 20 bp, Artificial Sequence
  MKO10072075_B_Apobec3
  gRNA
tccggcctttggcatagcct

SEQ ID NO: 72076 - DNA, 20 bp, Artificial Sequence
  MKO10072076_B_Apobec4
  gRNA
agatctaccgccaattcatg

SEQ ID NO: 72077 - DNA, 20 bp, Artificial Sequence
  MKO10072077_B_Apobec4
  gRNA
gtttgagggtacgttgacca

SEQ ID NO: 72078 - DNA, 20 bp, Artificial Sequence
  MKO10072078_B_Apobec4
  gRNA
gccaagaatttgccgtttac

SEQ ID NO: 72079 - DNA, 20 bp, Artificial Sequence
  MKO10072079_B_Apobr
  gRNA
gcaatcctctcttcagctag

SEQ ID NO: 72080 - DNA, 20 bp, Artificial Sequence
  MKO10072080_B_Apobr
  gRNA
tcgtctccctgggctacatc

SEQ ID NO: 72081 - DNA, 20 bp, Artificial Sequence
  MKO10072081_B_Apobr
  gRNA
aggtttggctttgctcatcc

SEQ ID NO: 72082 - DNA, 20 bp, Artificial Sequence
  MKO10072082_B_Apob
  gRNA
ccgtaccttacagttgatct

SEQ ID NO: 72083 - DNA, 20 bp, Artificial Sequence
  MKO10072083_B_Apob
  gRNA
caaccagtgtacccttaaag

SEQ ID NO: 72084 - DNA, 20 bp, Artificial Sequence
  MKO10072084_B_Apob
  gRNA
tgaagccatacacctcttta

SEQ ID NO: 72085 - DNA, 20 bp, Artificial Sequence
  MKO10072085_B_Apoc1
  gRNA
ccaaagggcctggttctcag

SEQ ID NO: 72086 - DNA, 20 bp, Artificial Sequence
  MKO10072086_B_Apoc1
  gRNA
cgctcttcctgtcctgattg

SEQ ID NO: 72087 - DNA, 20 bp, Artificial Sequence
  MKO10072087_B_Apoc1
  gRNA
tttcttaccttccaaggtca

SEQ ID NO: 72088 - DNA, 20 bp, Artificial Sequence
  MKO10072088_B_Apoc2
  gRNA
ggacatgtacagcaaaagct

SEQ ID NO: 72089 - DNA, 20 bp, Artificial Sequence
  MKO10072089_B_Apoc2
  gRNA
tcccagacagcatggggtct

SEQ ID NO: 72090 - DNA, 20 bp, Artificial Sequence
  MKO10072090_B_Apoc2
  gRNA
attcctggtcatcctgatgt

SEQ ID NO: 72091 - DNA, 20 bp, Artificial Sequence
  MKO10072091_B_Apoc3
  gRNA
ccatcttacgggcagatgcc

SEQ ID NO: 72092 - DNA, 20 bp, Artificial Sequence
  MKO10072092_B_Apoc3
  gRNA
acgtaggtgccatgcagccc

SEQ ID NO: 72093 - DNA, 20 bp, Artificial Sequence
  MKO10072093_B_Apoc3
  gRNA
acttgctccagtagcctttc

SEQ ID NO: 72094 - DNA, 20 bp, Artificial Sequence
  MKO10072094_B_Apoc4
  gRNA
gagactgatggcaggtcccg

SEQ ID NO: 72095 - DNA, 20 bp, Artificial Sequence
  MKO10072095_B_Apoc4
  gRNA
agccactggtgaccagaacc

SEQ ID NO: 72096 - DNA, 20 bp, Artificial Sequence
  MKO10072096_B_Apoc4
  gRNA
gaaagcctgagccccacgcc

SEQ ID NO: 72097 - DNA, 20 bp, Artificial Sequence
  MKO10072097_B_Apod
  gRNA
gttctccatcagcgagtagt

SEQ ID NO: 72098 - DNA, 20 bp, Artificial Sequence
  MKO10072098_B_Apod
  gRNA
aacagatcaagcgaactgcc

SEQ ID NO: 72099 - DNA, 20 bp, Artificial Sequence
  MKO10072099_B_Apod
  gRNA
gatacctacacgggaagaac

SEQ ID NO: 72100 - DNA, 20 bp, Artificial Sequence
  MKO10072100_B_Apoe
  gRNA
gcttctgggattacctgcgc

SEQ ID NO: 72101 - DNA, 20 bp, Artificial Sequence
  MKO10072101_B_Apoe
  gRNA
ctgttggtcacattgctgac

SEQ ID NO: 72102 - DNA, 20 bp, Artificial Sequence
  MKO10072102_B_Apoe
  gRNA
cagcaatgtgaccaacagca

SEQ ID NO: 72103 - DNA, 20 bp, Artificial Sequence
  MKO10072103_B_Apof
  gRNA
acccagattaccatacagtc

SEQ ID NO: 72104 - DNA, 20 bp, Artificial Sequence
  MKO10072104_B_Apof
  gRNA
atcgaacgtttggccctctt

SEQ ID NO: 72105 - DNA, 20 bp, Artificial Sequence
  MKO10072105_B_Apof
  gRNA
cagcttcagctttaccgatt

SEQ ID NO: 72106 - DNA, 20 bp, Artificial Sequence
  MKO10072106_B_Apoh
  gRNA
gccagagtatgtcctttcgc

SEQ ID NO: 72107 - DNA, 20 bp, Artificial Sequence
  MKO10072107_B_Apoh
  gRNA
ctccgtgcacttagatgagc

SEQ ID NO: 72108 - DNA, 20 bp, Artificial Sequence
  MKO10072108_B_Apoh
  gRNA
gactgtgtcatttccgatca

SEQ ID NO: 72109 - DNA, 20 bp, Artificial Sequence
  MKO10072109_B_Apol10a
  gRNA
atttcttaagaacagatctg

SEQ ID NO: 72110 - DNA, 20 bp, Artificial Sequence
  MKO10072110_B_Apol10a
  gRNA
ggattggaatgagatcttag

SEQ ID NO: 72111 - DNA, 20 bp, Artificial Sequence
  MKO10072111_B_Apol10a
  gRNA
ctcactcttagtgctgcttc

SEQ ID NO: 72112 - DNA, 20 bp, Artificial Sequence
  MKO10072112_B_Apol10b
  gRNA
aaattctaatggctagagct

SEQ ID NO: 72113 - DNA, 20 bp, Artificial Sequence
  MKO10072113_B_Apol10b
  gRNA
tgctcaacagacctcaagca

SEQ ID NO: 72114 - DNA, 20 bp, Artificial Sequence
  MKO10072114_B_Apol10b
  gRNA
aggaagcagcagaattgtca

SEQ ID NO: 72115 - DNA, 20 bp, Artificial Sequence
  MKO10072115_B_Apol11a
  gRNA
agttcttaagaacagatctg

SEQ ID NO: 72116 - DNA, 20 bp, Artificial Sequence
  MKO10072116_B_Apol11a
  gRNA
ggattggaatgagatcttag

SEQ ID NO: 72117 - DNA, 20 bp, Artificial Sequence
  MKO10072117_B_Apol11a
  gRNA
cataatacagatcctttgat

SEQ ID NO: 72118 - DNA, 20 bp, Artificial Sequence
  MKO10072118_B_Apol11b
  gRNA
atgaccttgtgaccaagcaa

SEQ ID NO: 72119 - DNA, 20 bp, Artificial Sequence
  MKO10072119_B_Apol11b
  gRNA
ggattggaatgagatctcag

SEQ ID NO: 72120 - DNA, 20 bp, Artificial Sequence
  MKO10072120_B_Apol11b
  gRNA
aaacactcctgctctaatcc

SEQ ID NO: 72121 - DNA, 20 bp, Artificial Sequence
  MKO10072121_B_Apol6
  gRNA
cgactgagagagcaagactc

SEQ ID NO: 72122 - DNA, 20 bp, Artificial Sequence
  MKO10072122_B_Apol6
  gRNA
caccttgtttcctttcaaag

SEQ ID NO: 72123 - DNA, 20 bp, Artificial Sequence
  MKO10072123_B_Apol6
  gRNA
aggctgatgctgagttgcta

SEQ ID NO: 72124 - DNA, 20 bp, Artificial Sequence
  MKO10072124_B_Apol7a
  gRNA
ctcagcaagagattcctgca

SEQ ID NO: 72125 - DNA, 20 bp, Artificial Sequence
  MKO10072125_B_Apol7a
  gRNA
ttaactacctcctggacaca

SEQ ID NO: 72126 - DNA, 20 bp, Artificial Sequence
  MKO10072126_B_Apol7a
  gRNA
cttctgtcagcaggagccgc

SEQ ID NO: 72127 - DNA, 20 bp, Artificial Sequence
  MKO10072127_B_Apol7b
  gRNA
gcagctgccatgggcactcc

SEQ ID NO: 72128 - DNA, 20 bp, Artificial Sequence
  MKO10072128_B_Apol7b
  gRNA
agaatgcttcattgagactg

SEQ ID NO: 72129 - DNA, 20 bp, Artificial Sequence
  MKO10072129_B_Apol7b
  gRNA
ttctgccacaaagtgtttcc

SEQ ID NO: 72130 - DNA, 20 bp, Artificial Sequence
  MKO10072130_B_Apol7c
  gRNA
tgaactccaaattgacctgc

SEQ ID NO: 72131 - DNA, 20 bp, Artificial Sequence
  MKO10072131_B_Apol7c
  gRNA
gcagctatcatgagcacccc

SEQ ID NO: 72132 - DNA, 20 bp, Artificial Sequence
  MKO10072132_B_Apol7c
  gRNA
aaagcgcttcattcccactg

SEQ ID NO: 72133 - DNA, 20 bp, Artificial Sequence
  MKO10072133_B_Apol7e
  gRNA
gcagctgccatgggcacccc

SEQ ID NO: 72134 - DNA, 20 bp, Artificial Sequence
  MKO10072134_B_Apol7e
  gRNA
ttctgccacaaagtgtttcc

SEQ ID NO: 72135 - DNA, 20 bp, Artificial Sequence
  MKO10072135_B_Apol7e
  gRNA
agaatgcttcattgagactg

SEQ ID NO: 72136 - DNA, 20 bp, Artificial Sequence
  MKO10072136_B_Apol8
  gRNA
caactcagcttccgccacaa

SEQ ID NO: 72137 - DNA, 20 bp, Artificial Sequence
  MKO10072137_B_Apol8
  gRNA
ccctgcccgatgtgtgctgc

SEQ ID NO: 72138 - DNA, 20 bp, Artificial Sequence
  MKO10072138_B_Apol8
  gRNA
ggggcatcctcgcagtctga

SEQ ID NO: 72139 - DNA, 20 bp, Artificial Sequence
  MKO10072139_B_Apol9a
  gRNA
agactccatcttcagccacc

SEQ ID NO: 72140 - DNA, 20 bp, Artificial Sequence
  MKO10072140_B_Apol9a
  gRNA
caggtgcgggccagtctgaa

SEQ ID NO: 72141 - DNA, 20 bp, Artificial Sequence
  MKO10072141_B_Apol9a
  gRNA
tgtggataggattgccagca

SEQ ID NO: 72142 - DNA, 20 bp, Artificial Sequence
  MKO10072142_B_Apol9b
  gRNA
tagcagtgacctggacaact

SEQ ID NO: 72143 - DNA, 20 bp, Artificial Sequence
  MKO10072143_B_Apol9b
  gRNA
gattgtcaacaagatccctc

SEQ ID NO: 72144 - DNA, 20 bp, Artificial Sequence
  MKO10072144_B_Apol9b
  gRNA
tgccgccctctggagtgacg

SEQ ID NO: 72145 - DNA, 20 bp, Artificial Sequence
  MKO10072145_B_Apold1
  gRNA
cctcatccccagacgtgccg

SEQ ID NO: 72146 - DNA, 20 bp, Artificial Sequence
  MKO10072146_B_Apold1
  gRNA
caacgctgcgtccagatcag

SEQ ID NO: 72147 - DNA, 20 bp, Artificial Sequence
  MKO10072147_B_Apold1
  gRNA
ggattgctgctggaccgccg

SEQ ID NO: 72148 - DNA, 20 bp, Artificial Sequence
  MKO10072148_B_Apom
  gRNA
ctgttctccagctcgtgccc

SEQ ID NO: 72149 - DNA, 20 bp, Artificial Sequence
  MKO10072149_B_Apom
  gRNA
cactgtagaggagaaagcgc

SEQ ID NO: 72150 - DNA, 20 bp, Artificial Sequence
  MKO10072150_B_Apom
  gRNA
ggctttgaagtccaagcaag

SEQ ID NO: 72151 - DNA, 20 bp, Artificial Sequence
  MKO10072151_B_Apon
  gRNA
cgtgcacctatgaacccggg

SEQ ID NO: 72152 - DNA, 20 bp, Artificial Sequence
  MKO10072152_B_Apon
  gRNA
aggccgtgtctatccaaaat

SEQ ID NO: 72153 - DNA, 20 bp, Artificial Sequence
  MKO10072153_B_Apon
  gRNA
catatcgtacaacacccacc

SEQ ID NO: 72154 - DNA, 20 bp, Artificial Sequence
  MKO10072154_B_Apool
  gRNA
gcaccagccaatataataca

SEQ ID NO: 72155 - DNA, 20 bp, Artificial Sequence
  MKO10072155_B_Apool
  gRNA
agctgtaatcactcccattt

SEQ ID NO: 72156 - DNA, 20 bp, Artificial Sequence
  MKO10072156_B_Apool
  gRNA
aagttgacaaccatacctgc

SEQ ID NO: 72157 - DNA, 20 bp, Artificial Sequence
  MKO10072157_B_Apoo
  gRNA
aagttacatgaagatcgatg

SEQ ID NO: 72158 - DNA, 20 bp, Artificial Sequence
  MKO10072158_B_Apoo
  gRNA
acctgacagaaacttgtata

SEQ ID NO: 72159 - DNA, 20 bp, Artificial Sequence
  MKO10072159_B_Apoo
  gRNA
ttcactctactcagttcctg

SEQ ID NO: 72160 - DNA, 20 bp, Artificial Sequence
  MKO10072160_B_Apopt1
  gRNA
ggttatagcgcatgtgcttc

SEQ ID NO: 72161 - DNA, 20 bp, Artificial Sequence
  MKO10072161_B_Apopt1
  gRNA
agaagcacatgcgctataac

SEQ ID NO: 72162 - DNA, 20 bp, Artificial Sequence
  MKO10072162_B_Apopt1
  gRNA
ccctgaaaacgagtctccct

SEQ ID NO: 72163 - DNA, 20 bp, Artificial Sequence
  MKO10072163_B_Appbp2
  gRNA
tacatgatgagatgctccac

SEQ ID NO: 72164 - DNA, 20 bp, Artificial Sequence
  MKO10072164_B_Appbp2
  gRNA
catgtagcgtacacaactga

SEQ ID NO: 72165 - DNA, 20 bp, Artificial Sequence
  MKO10072165_B_Appbp2
  gRNA
cggcagtgaattctgtgaat

SEQ ID NO: 72166 - DNA, 20 bp, Artificial Sequence
  MKO10072166_B_Appl1
  gRNA
acttcatcatcaccccccaa

SEQ ID NO: 72167 - DNA, 20 bp, Artificial Sequence
  MKO10072167_B_Appl1
  gRNA
acttacctcatctatgacct

SEQ ID NO: 72168 - DNA, 20 bp, Artificial Sequence
  MKO10072168_B_Appl1
  gRNA
tcagatctctttctttaaac

SEQ ID NO: 72169 - DNA, 20 bp, Artificial Sequence
  MKO10072169_B_Appl2
  gRNA
caagcaactggcagacacta

SEQ ID NO: 72170 - DNA, 20 bp, Artificial Sequence
  MKO10072170_B_Appl2
  gRNA
tcttacctcatccatcactt

SEQ ID NO: 72171 - DNA, 20 bp, Artificial Sequence
  MKO10072171_B_Appl2
  gRNA
cccacagaatgaaatgtgcc

SEQ ID NO: 72172 - DNA, 20 bp, Artificial Sequence
  MKO10072172_B_App
  gRNA
gattggtacctctttggcga

SEQ ID NO: 72173 - DNA, 20 bp, Artificial Sequence
  MKO10072173_B_App
  gRNA
aagtgggagtcagacccgtc

SEQ ID NO: 72174 - DNA, 20 bp, Artificial Sequence
  MKO10072174_B_App
  gRNA
ccgcttgcaccagttctgga

SEQ ID NO: 72175 - DNA, 20 bp, Artificial Sequence
  MKO10072175_B_Aprt
  gRNA
agctgacctcgctgaagggc

SEQ ID NO: 72176 - DNA, 20 bp, Artificial Sequence
  MKO10072176_B_Aprt
  gRNA
ccggcagcttcccctgtttc

SEQ ID NO: 72177 - DNA, 20 bp, Artificial Sequence
  MKO10072177_B_Aprt
  gRNA
cacactccaccacttcagcc

SEQ ID NO: 72178 - DNA, 20 bp, Artificial Sequence
  MKO10072178_B_Aptx
  gRNA
gcgaatcaaacttccccatt

SEQ ID NO: 72179 - DNA, 20 bp, Artificial Sequence
  MKO10072179_B_Aptx
  gRNA
gttgaaagcagagtgtaaca

SEQ ID NO: 72180 - DNA, 20 bp, Artificial Sequence
  MKO10072180_B_Aptx
  gRNA
tttaggaatcactgggccac

SEQ ID NO: 72181 - DNA, 20 bp, Artificial Sequence
  MKO10072181_B_Aqp11
  gRNA
tagaagagttcgtcaaagca

SEQ ID NO: 72182 - DNA, 20 bp, Artificial Sequence
  MKO10072182_B_Aqp11
  gRNA
atttgattgttatgcagcca

SEQ ID NO: 72183 - DNA, 20 bp, Artificial Sequence
  MKO10072183_B_Aqp11
  gRNA
ccaagtaccattacgacgaa

SEQ ID NO: 72184 - DNA, 20 bp, Artificial Sequence
  MKO10072184_B_Aqp12
  gRNA
gcttacctgcgacaggaccc

SEQ ID NO: 72185 - DNA, 20 bp, Artificial Sequence
  MKO10072185_B_Aqp12
  gRNA
gtatgcccacgtgtactgcc

SEQ ID NO: 72186 - DNA, 20 bp, Artificial Sequence
  MKO10072186_B_Aqp12
  gRNA
acctggggacagcttccccc

SEQ ID NO: 72187 - DNA, 20 bp, Artificial Sequence
  MKO10072187_B_Aqp1
  gRNA
cacctaagtctcggcgcctc

SEQ ID NO: 72188 - DNA, 20 bp, Artificial Sequence
  MKO10072188_B_Aqp1
  gRNA
gaccggaggcgccgagactt

SEQ ID NO: 72189 - DNA, 20 bp, Artificial Sequence
  MKO10072189_B_Aqp1
  gRNA
atcaaccctgcccggtcatt

SEQ ID NO: 72190 - DNA, 20 bp, Artificial Sequence
  MKO10072190_B_Aqp2
  gRNA
ccacgtagaaggcagctcga

SEQ ID NO: 72191 - DNA, 20 bp, Artificial Sequence
  MKO10072191_B_Aqp2
  gRNA
tgagcgccgcagtgacaacc

SEQ ID NO: 72192 - DNA, 20 bp, Artificial Sequence
  MKO10072192_B_Aqp2
  gRNA
catgaatccagcccgctccc

SEQ ID NO: 72193 - DNA, 20 bp, Artificial Sequence
  MKO10072193_B_Aqp3
  gRNA
agagacgaaaagctcattgt

SEQ ID NO: 72194 - DNA, 20 bp, Artificial Sequence
  MKO10072194_B_Aqp3
  gRNA
tgatccagggctctcgtgcc

SEQ ID NO: 72195 - DNA, 20 bp, Artificial Sequence
  MKO10072195_B_Aqp3
  gRNA
gctcaggtggtgctcagccg

SEQ ID NO: 72196 - DNA, 20 bp, Artificial Sequence
  MKO10072196_B_Aqp4
  gRNA
agatcgagctggattcatgc

SEQ ID NO: 72197 - DNA, 20 bp, Artificial Sequence
  MKO10072197_B_Aqp4
  gRNA
gctaccatggtgcagtgctt

SEQ ID NO: 72198 - DNA, 20 bp, Artificial Sequence
  MKO10072198_B_Aqp4
  gRNA
accagtaacatcagttcgtt

SEQ ID NO: 72199 - DNA, 20 bp, Artificial Sequence
  MKO10072199_B_Aqp5
  gRNA
tgcctggcgccaaccagtac

SEQ ID NO: 72200 - DNA, 20 bp, Artificial Sequence
  MKO10072200_B_Aqp5
  gRNA
aggcaatgcccggggtaacc

SEQ ID NO: 72201 - DNA, 20 bp, Artificial Sequence
  MKO10072201_B_Aqp5
  gRNA
atgaacccagcccgatcttt

SEQ ID NO: 72202 - DNA, 20 bp, Artificial Sequence
  MKO10072202_B_Aqp6
  gRNA
tgccacagaggttccaatca

SEQ ID NO: 72203 - DNA, 20 bp, Artificial Sequence
  MKO10072203_B_Aqp6
  gRNA
gcgtccccagctgccatgat

SEQ ID NO: 72204 - DNA, 20 bp, Artificial Sequence
  MKO10072204_B_Aqp6
  gRNA
cagggccgaaggagcgggct

SEQ ID NO: 72205 - DNA, 20 bp, Artificial Sequence
  MKO10072205_B_Aqp7
  gRNA
ggtgccattaaccactttgc

SEQ ID NO: 72206 - DNA, 20 bp, Artificial Sequence
  MKO10072206_B_Aqp7
  gRNA
gaagttccctgtatatgtgc

SEQ ID NO: 72207 - DNA, 20 bp, Artificial Sequence
  MKO10072207_B_Aqp7
  gRNA
cagagatgccgcctgctaca

SEQ ID NO: 72208 - DNA, 20 bp, Artificial Sequence
  MKO10072208_B_Aqp8
  gRNA
ctttgccatcgtccaggagc

SEQ ID NO: 72209 - DNA, 20 bp, Artificial Sequence
  MKO10072209_B_Aqp8
  gRNA
cttcaaccctgctgtgtcgc

SEQ ID NO: 72210 - DNA, 20 bp, Artificial Sequence
  MKO10072210_B_Aqp8
  gRNA
ccatgctgctaattccctat

SEQ ID NO: 72211 - DNA, 20 bp, Artificial Sequence
  MKO10072211_B_Aqp9
  gRNA
ggcacggatacaaatggttt

SEQ ID NO: 72212 - DNA, 20 bp, Artificial Sequence
  MKO10072212_B_Aqp9
  gRNA
gtcttctatagacggactca

SEQ ID NO: 72213 - DNA, 20 bp, Artificial Sequence
  MKO10072213_B_Aqp9
  gRNA
cacattgcaaaagacaccgc

SEQ ID NO: 72214 - DNA, 20 bp, Artificial Sequence
  MKO10072214_B_Aqr
  gRNA
aaaaagagatcgtcaaatca

SEQ ID NO: 72215 - DNA, 20 bp, Artificial Sequence
  MKO10072215_B_Aqr
  gRNA
aaataatgctgctggaattt

SEQ ID NO: 72216 - DNA, 20 bp, Artificial Sequence
  MKO10072216_B_Aqr
  gRNA
tttaatgtccatctgctgta

SEQ ID NO: 72217 - DNA, 20 bp, Artificial Sequence
  MKO10072217_B_Araf
  gRNA
acagtgccaactgcccgaga

SEQ ID NO: 72218 - DNA, 20 bp, Artificial Sequence
  MKO10072218_B_Araf
  gRNA
gaaggtgcggggtctcaacc

SEQ ID NO: 72219 - DNA, 20 bp, Artificial Sequence
  MKO10072219_B_Araf
  gRNA
acagccattgcgcctctgga

SEQ ID NO: 72220 - DNA, 20 bp, Artificial Sequence
  MKO10072220_B_Arap1
  gRNA
tgctaggcatactatctcgc

SEQ ID NO: 72221 - DNA, 20 bp, Artificial Sequence
  MKO10072221_B_Arap1
  gRNA
ggagaacggctgtacctgtt

SEQ ID NO: 72222 - DNA, 20 bp, Artificial Sequence
  MKO10072222_B_Arap1
  gRNA
tccctctgtgtacacctcaa

SEQ ID NO: 72223 - DNA, 20 bp, Artificial Sequence
  MKO10072223_B_Arap2
  gRNA
tatcctttaagctccacgag

SEQ ID NO: 72224 - DNA, 20 bp, Artificial Sequence
  MKO10072224_B_Arap2
  gRNA
aagagaaatgtctctccgta

SEQ ID NO: 72225 - DNA, 20 bp, Artificial Sequence
  MKO10072225_B_Arap2
  gRNA
tcctccaaaagattcaaatg

SEQ ID NO: 72226 - DNA, 20 bp, Artificial Sequence
  MKO10072226_B_Arap3
  gRNA
acagtcgcctgagaactatc

SEQ ID NO: 72227 - DNA, 20 bp, Artificial Sequence
  MKO10072227_B_Arap3
  gRNA
acaccgtagtacaggcaacc

SEQ ID NO: 72228 - DNA, 20 bp, Artificial Sequence
  MKO10072228_B_Arap3
  gRNA
gtactacggtgtccagcctg

SEQ ID NO: 72229 - DNA, 20 bp, Artificial Sequence
  MKO10072229_B_Arcn1
  gRNA
tgaatattgccgagccttag

SEQ ID NO: 72230 - DNA, 20 bp, Artificial Sequence
  MKO10072230_B_Arcn1
  gRNA
agtattccgagcagtcagag

SEQ ID NO: 72231 - DNA, 20 bp, Artificial Sequence
  MKO10072231_B_Arcn1
  gRNA
gcttacctttccatattaat

SEQ ID NO: 72232 - DNA, 20 bp, Artificial Sequence
  MKO10072232_B_Arc
  gRNA
ttggcggccggcccaccccg

SEQ ID NO: 72233 - DNA, 20 bp, Artificial Sequence
  MKO10072233_B_Arc
  gRNA
cacgcttgacccagcgctcc

SEQ ID NO: 72234 - DNA, 20 bp, Artificial Sequence
  MKO10072234_B_Arc
  gRNA
ccatcgccaacctggagcgc

SEQ ID NO: 72235 - DNA, 20 bp, Artificial Sequence
  MKO10072235_B_Areg
  gRNA
atgcagatacatcgagaacc

SEQ ID NO: 72236 - DNA, 20 bp, Artificial Sequence
  MKO10072236_B_Areg
  gRNA
gccatcatcctcgcagctat

SEQ ID NO: 72237 - DNA, 20 bp, Artificial Sequence
  MKO10072237_B_Areg
  gRNA
gcctttggaaacgatacttc

SEQ ID NO: 72238 - DNA, 20 bp, Artificial Sequence
  MKO10072238_B_Arel1
  gRNA
ttcccttacatgcactcgga

SEQ ID NO: 72239 - DNA, 20 bp, Artificial Sequence
  MKO10072239_B_Arel1
  gRNA
agaagtcagtgacgtccaac

SEQ ID NO: 72240 - DNA, 20 bp, Artificial Sequence
  MKO10072240_B_Arel1
  gRNA
gtcaaattcgccattattga

SEQ ID NO: 72241 - DNA, 20 bp, Artificial Sequence
  MKO10072241_B_Arf1
  gRNA
gctgcttaccttgggtgttc

SEQ ID NO: 72242 - DNA, 20 bp, Artificial Sequence
  MKO10072242_B_Arf1
  gRNA
aattctatacaaacttaagc

SEQ ID NO: 72243 - DNA, 20 bp, Artificial Sequence
  MKO10072243_B_Arf1
  gRNA
ccgaaatcacagacaagctg

SEQ ID NO: 72244 - DNA, 20 bp, Artificial Sequence
  MKO10072244_B_Arf2
  gRNA
agatgggctttacgaaggcc

SEQ ID NO: 72245 - DNA, 20 bp, Artificial Sequence
  MKO10072245_B_Arf2
  gRNA
ttcgtaaagcccatctccac

SEQ ID NO: 72246 - DNA, 20 bp, Artificial Sequence
  MKO10072246_B_Arf2
  gRNA
tgtcgtcttaggtttcaatg

SEQ ID NO: 72247 - DNA, 20 bp, Artificial Sequence
  MKO10072247_B_Arf3
  gRNA
ctctccaggcttgatatttg

SEQ ID NO: 72248 - DNA, 20 bp, Artificial Sequence
  MKO10072248_B_Arf3
  gRNA
tggcctgaatgtaccaattg

SEQ ID NO: 72249 - DNA, 20 bp, Artificial Sequence
  MKO10072249_B_Arf3
  gRNA
gtcaccaccatcccgaccat

SEQ ID NO: 72250 - DNA, 20 bp, Artificial Sequence
  MKO10072250_B_Arf4
  gRNA
gatcctgtttgtttgcaaaa

SEQ ID NO: 72251 - DNA, 20 bp, Artificial Sequence
  MKO10072251_B_Arf4
  gRNA
gcattacttccagaataccc

SEQ ID NO: 72252 - DNA, 20 bp, Artificial Sequence
  MKO10072252_B_Arf4
  gRNA
gtcaccaccattcctaccat

SEQ ID NO: 72253 - DNA, 20 bp, Artificial Sequence
  MKO10072253_B_Arf5
  gRNA
acagaggccgaatcttatcc

SEQ ID NO: 72254 - DNA, 20 bp, Artificial Sequence
  MKO10072254_B_Arf5
  gRNA
cccccaacttcagtttgtac

SEQ ID NO: 72255 - DNA, 20 bp, Artificial Sequence
  MKO10072255_B_Arf5
  gRNA
ggagttcatcagcagactcc

SEQ ID NO: 72256 - DNA, 20 bp, Artificial Sequence
  MKO10072256_B_Arf6
  gRNA
ctctggcggcattactacac

SEQ ID NO: 72257 - DNA, 20 bp, Artificial Sequence
  MKO10072257_B_Arf6
  gRNA
ttgtcttgccggctgcgtcc

SEQ ID NO: 72258 - DNA, 20 bp, Artificial Sequence
  MKO10072258_B_Arf6
  gRNA
aactgggcctgacccggatt

SEQ ID NO: 72259 - DNA, 20 bp, Artificial Sequence
  MKO10072259_B_Arfgap1
  gRNA
tcttaaggaagtccgggcac

SEQ ID NO: 72260 - DNA, 20 bp, Artificial Sequence
  MKO10072260_B_Arfgap1
  gRNA
cagtgggtcagcgtgactta

SEQ ID NO: 72261 - DNA, 20 bp, Artificial Sequence
  MKO10072261_B_Arfgap1
  gRNA
atcttgttaggtggctactt

SEQ ID NO: 72262 - DNA, 20 bp, Artificial Sequence
  MKO10072262_B_Arfgap2
  gRNA
cctacctgataaagctgaga

SEQ ID NO: 72263 - DNA, 20 bp, Artificial Sequence
  MKO10072263_B_Arfgap2
  gRNA
tgtacacaggtccacagagt

SEQ ID NO: 72264 - DNA, 20 bp, Artificial Sequence
  MKO10072264_B_Arfgap2
  gRNA
gaagtctcttaaaaatagtc

SEQ ID NO: 72265 - DNA, 20 bp, Artificial Sequence
  MKO10072265_B_Arfgap3
  gRNA
ccctgtagagctgagccgca

SEQ ID NO: 72266 - DNA, 20 bp, Artificial Sequence
  MKO10072266_B_Arfgap3
  gRNA
gtacttggcgttggtgtcct

SEQ ID NO: 72267 - DNA, 20 bp, Artificial Sequence
  MKO10072267_B_Arfgap3
  gRNA
aaacaccccatagcttatgc

SEQ ID NO: 72268 - DNA, 20 bp, Artificial Sequence
  MKO10072268_B_Arfgef1
  gRNA
ggactggcatgccaactcaa

SEQ ID NO: 72269 - DNA, 20 bp, Artificial Sequence
  MKO10072269_B_Arfgef1
  gRNA
cttgcagcacagttccttca

SEQ ID NO: 72270 - DNA, 20 bp, Artificial Sequence
  MKO10072270_B_Arfgef1
  gRNA
agttcagttgcagataataa

SEQ ID NO: 72271 - DNA, 20 bp, Artificial Sequence
  MKO10072271_B_Arfgef2
  gRNA
gtatttccttccattcgagc

SEQ ID NO: 72272 - DNA, 20 bp, Artificial Sequence
  MKO10072272_B_Arfgef2
  gRNA
tttccctaggcttggcgctg

SEQ ID NO: 72273 - DNA, 20 bp, Artificial Sequence
  MKO10072273_B_Arfgef2
  gRNA
gtgcagaaactcatcgcata

SEQ ID NO: 72274 - DNA, 20 bp, Artificial Sequence
  MKO10072274_B_Arfip1
  gRNA
cagtcagatcacctgcttgc

SEQ ID NO: 72275 - DNA, 20 bp, Artificial Sequence
  MKO10072275_B_Arfip1
  gRNA
gtttctcagatataatttgc

SEQ ID NO: 72276 - DNA, 20 bp, Artificial Sequence
  MKO10072276_B_Arfip1
  gRNA
atttcatctgctagaataac

SEQ ID NO: 72277 - DNA, 20 bp, Artificial Sequence
  MKO10072277_B_Arfip2
  gRNA
cacctcgtcaccagggccag

SEQ ID NO: 72278 - DNA, 20 bp, Artificial Sequence
  MKO10072278_B_Arfip2
  gRNA
cagctgttatcagagagatt

SEQ ID NO: 72279 - DNA, 20 bp, Artificial Sequence
  MKO10072279_B_Arfip2
  gRNA
gtgcatgctgggtctgcaac

SEQ ID NO: 72280 - DNA, 20 bp, Artificial Sequence
  MKO10072280_B_Arfrp1
  gRNA
cggtgttcccatcctggtgt

SEQ ID NO: 72281 - DNA, 20 bp, Artificial Sequence
  MKO10072281_B_Arfrp1
  gRNA
tagtactatgcagagtgcca

SEQ ID NO: 72282 - DNA, 20 bp, Artificial Sequence
  MKO10072282_B_Arfrp1
  gRNA
ttgattccactgatgaagaa

SEQ ID NO: 72283 - DNA, 20 bp, Artificial Sequence
  MKO10072283_B_Arg1
  gRNA
ctgttcttcagcctcgagga

SEQ ID NO: 72284 - DNA, 20 bp, Artificial Sequence
  MKO10072284_B_Arg1
  gRNA
tgggttcttcacaatttgaa

SEQ ID NO: 72285 - DNA, 20 bp, Artificial Sequence
  MKO10072285_B_Arg1
  gRNA
catccacccaaatgacacat

SEQ ID NO: 72286 - DNA, 20 bp, Artificial Sequence
  MKO10072286_B_Arg2
  gRNA
ttggcaaggcccactgaacg

SEQ ID NO: 72287 - DNA, 20 bp, Artificial Sequence
  MKO10072287_B_Arg2
  gRNA
ccaatgtacacaatatttgg

SEQ ID NO: 72288 - DNA, 20 bp, Artificial Sequence
  MKO10072288_B_Arg2
  gRNA
ccagctgccattcgagaagc

SEQ ID NO: 72289 - DNA, 20 bp, Artificial Sequence
  MKO10072289_B_Arglu1
  gRNA
tgaagaagccaaacgcatca

SEQ ID NO: 72290 - DNA, 20 bp, Artificial Sequence
  MKO10072290_B_Arglu1
  gRNA
gtccttctcactaaaaaccc

SEQ ID NO: 72291 - DNA, 20 bp, Artificial Sequence
  MKO10072291_B_Arglu1
  gRNA
gcctggacttccccttgccc

SEQ ID NO: 72292 - DNA, 20 bp, Artificial Sequence
  MKO10072292_B_Arhgap10
  gRNA
gacttcaagttcgagtttat

SEQ ID NO: 72293 - DNA, 20 bp, Artificial Sequence
  MKO10072293_B_Arhgap10
  gRNA
gaaggactcacacttgcagg

SEQ ID NO: 72294 - DNA, 20 bp, Artificial Sequence
  MKO10072294_B_Arhgap10
  gRNA
tgaaaccctgattaaaccct

SEQ ID NO: 72295 - DNA, 20 bp, Artificial Sequence
  MKO10072295_B_Arhgap11a
  gRNA
attgttgctgtcgtgtctta

SEQ ID NO: 72296 - DNA, 20 bp, Artificial Sequence
  MKO10072296_B_Arhgap11a
  gRNA
tcacttgtctgaagaagatt

SEQ ID NO: 72297 - DNA, 20 bp, Artificial Sequence
  MKO10072297_B_Arhgap11a
  gRNA
cattcagtcgttccagaatt

SEQ ID NO: 72298 - DNA, 20 bp, Artificial Sequence
  MKO10072298_B_Arhgap12
  gRNA
ctactataaccgcacaaccc

SEQ ID NO: 72299 - DNA, 20 bp, Artificial Sequence
  MKO10072299_B_Arhgap12
  gRNA
gtataccagtgactatacta

SEQ ID NO: 72300 - DNA, 20 bp, Artificial Sequence
  MKO10072300_B_Arhgap12
  gRNA
cagtattactacagcgcaga

SEQ ID NO: 72301 - DNA, 20 bp, Artificial Sequence
  MKO10072301_B_Arhgap15
  gRNA
tcacttactggatgttctag

SEQ ID NO: 72302 - DNA, 20 bp, Artificial Sequence
  MKO10072302_B_Arhgap15
  gRNA
aattctgcccaccaagctac

SEQ ID NO: 72303 - DNA, 20 bp, Artificial Sequence
  MKO10072303_B_Arhgap15
  gRNA
tgcagatttcccggcacaga

SEQ ID NO: 72304 - DNA, 20 bp, Artificial Sequence
  MKO10072304_B_Arhgap17
  gRNA
attcaaccgcatgaagcagc

SEQ ID NO: 72305 - DNA, 20 bp, Artificial Sequence
  MKO10072305_B_Arhgap17
  gRNA
ctgaagcctcctgcatgttc

SEQ ID NO: 72306 - DNA, 20 bp, Artificial Sequence
  MKO10072306_B_Arhgap17
  gRNA
agctcttgcccagaacatgc

SEQ ID NO: 72307 - DNA, 20 bp, Artificial Sequence
  MKO10072307_B_Arhgap18
  gRNA
tgtctctgacgtcacgaatg

SEQ ID NO: 72308 - DNA, 20 bp, Artificial Sequence
  MKO10072308_B_Arhgap18
  gRNA
ctcctagatcagccatctag

SEQ ID NO: 72309 - DNA, 20 bp, Artificial Sequence
  MKO10072309_B_Arhgap18
  gRNA
ctatcgacagccccactaga

SEQ ID NO: 72310 - DNA, 20 bp, Artificial Sequence
  MKO10072310_B_Arhgap19
  gRNA
gtgctgagcagacttgcgag

SEQ ID NO: 72311 - DNA, 20 bp, Artificial Sequence
  MKO10072311_B_Arhgap19
  gRNA
taacgggactgatattgact

SEQ ID NO: 72312 - DNA, 20 bp, Artificial Sequence
  MKO10072312_B_Arhgap19
  gRNA
tgcaatgactctccccttcg

SEQ ID NO: 72313 - DNA, 20 bp, Artificial Sequence
  MKO10072313_B_Arhgap1
  gRNA
gctgcaagatgacctgacgc

SEQ ID NO: 72314 - DNA, 20 bp, Artificial Sequence
  MKO10072314_B_Arhgap1
  gRNA
atgccagacttccccaagtc

SEQ ID NO: 72315 - DNA, 20 bp, Artificial Sequence
  MKO10072315_B_Arhgap1
  gRNA
caccagattgtggaagtagc

SEQ ID NO: 72316 - DNA, 20 bp, Artificial Sequence
  MKO10072316_B_Arhgap20
  gRNA
agtcgcactctgctgattga

SEQ ID NO: 72317 - DNA, 20 bp, Artificial Sequence
  MKO10072317_B_Arhgap20
  gRNA
ctggcccaccgtgaactttg

SEQ ID NO: 72318 - DNA, 20 bp, Artificial Sequence
  MKO10072318_B_Arhgap20
  gRNA
tgctcagaagtcctttgtcc

SEQ ID NO: 72319 - DNA, 20 bp, Artificial Sequence
  MKO10072319_B_Arhgap21
  gRNA
ctgaagatgagccattctcc

SEQ ID NO: 72320 - DNA, 20 bp, Artificial Sequence
  MKO10072320_B_Arhgap21
  gRNA
ctggcttacctcacaggcag

SEQ ID NO: 72321 - DNA, 20 bp, Artificial Sequence
  MKO10072321_B_Arhgap21
  gRNA
ctctcaccttatatgaaaac

SEQ ID NO: 72322 - DNA, 20 bp, Artificial Sequence
  MKO10072322_B_Arhgap22
  gRNA
gcactgtgtcctctagccgc

SEQ ID NO: 72323 - DNA, 20 bp, Artificial Sequence
  MKO10072323_B_Arhgap22
  gRNA
cagcgatggtttgtgctacg

SEQ ID NO: 72324 - DNA, 20 bp, Artificial Sequence
  MKO10072324_B_Arhgap22
  gRNA
ggggaccaaacttccgctca

SEQ ID NO: 72325 - DNA, 20 bp, Artificial Sequence
  MKO10072325_B_Arhgap23
  gRNA
agaggttgagtgtcgtttag

SEQ ID NO: 72326 - DNA, 20 bp, Artificial Sequence
  MKO10072326_B_Arhgap23
  gRNA
gcgaggatgggctagttccc

SEQ ID NO: 72327 - DNA, 20 bp, Artificial Sequence
  MKO10072327_B_Arhgap23
  gRNA
cctcagccgccattactccc

SEQ ID NO: 72328 - DNA, 20 bp, Artificial Sequence
  MKO10072328_B_Arhgap24
  gRNA
cgacgggctctggaagttct

SEQ ID NO: 72329 - DNA, 20 bp, Artificial Sequence
  MKO10072329_B_Arhgap24
  gRNA
agtccatccgccgagtcata

SEQ ID NO: 72330 - DNA, 20 bp, Artificial Sequence
  MKO10072330_B_Arhgap24
  gRNA
ctgcgccacgctgctcagta

SEQ ID NO: 72331 - DNA, 20 bp, Artificial Sequence
  MKO10072331_B_Arhgap25
  gRNA
gggagcggccctcctttgac

SEQ ID NO: 72332 - DNA, 20 bp, Artificial Sequence
  MKO10072332_B_Arhgap25
  gRNA
agaggtccatcgtgaaaaac

SEQ ID NO: 72333 - DNA, 20 bp, Artificial Sequence
  MKO10072333_B_Arhgap25
  gRNA
aaaggccaattaaggtgggc

SEQ ID NO: 72334 - DNA, 20 bp, Artificial Sequence
  MKO10072334_B_Arhgap26
  gRNA
acagatgatgagatgtgtat

SEQ ID NO: 72335 - DNA, 20 bp, Artificial Sequence
  MKO10072335_B_Arhgap26
  gRNA
acacatctcatcatctgttt

SEQ ID NO: 72336 - DNA, 20 bp, Artificial Sequence
  MKO10072336_B_Arhgap26
  gRNA
gctcccttacctcctgtagc

SEQ ID NO: 72337 - DNA, 20 bp, Artificial Sequence
  MKO10072337_B_Arhgap27
  gRNA
aattcggggtagtctgtttc

SEQ ID NO: 72338 - DNA, 20 bp, Artificial Sequence
  MKO10072338_B_Arhgap27
  gRNA
gtgtccacagtgggtaaggt

SEQ ID NO: 72339 - DNA, 20 bp, Artificial Sequence
  MKO10072339_B_Arhgap27
  gRNA
gggtagctcccactgaacag

SEQ ID NO: 72340 - DNA, 20 bp, Artificial Sequence
  MKO10072340_B_Arhgap28
  gRNA
ctactgagagaagcatcgtc

SEQ ID NO: 72341 - DNA, 20 bp, Artificial Sequence
  MKO10072341_B_Arhgap28
  gRNA
aaaagaataaacaacccgtc

SEQ ID NO: 72342 - DNA, 20 bp, Artificial Sequence
  MKO10072342_B_Arhgap28
  gRNA
ggattgtcaactctgatctc

SEQ ID NO: 72343 - DNA, 20 bp, Artificial Sequence
  MKO10072343_B_Arhgap29
  gRNA
acctatttctcgagaaagta

SEQ ID NO: 72344 - DNA, 20 bp, Artificial Sequence
  MKO10072344_B_Arhgap29
  gRNA
gtggacttaccccatgaaaa

SEQ ID NO: 72345 - DNA, 20 bp, Artificial Sequence
  MKO10072345_B_Arhgap29
  gRNA
aaatgccaatgtttcaatgg

SEQ ID NO: 72346 - DNA, 20 bp, Artificial Sequence
  MKO10072346_B_Arhgap30
  gRNA
gatgggatctaccgcctctc

SEQ ID NO: 72347 - DNA, 20 bp, Artificial Sequence
  MKO10072347_B_Arhgap30
  gRNA
aactccctatccaaaactac

SEQ ID NO: 72348 - DNA, 20 bp, Artificial Sequence
  MKO10072348_B_Arhgap30
  gRNA
tgtcatagagccgataagtg

SEQ ID NO: 72349 - DNA, 20 bp, Artificial Sequence
  MKO10072349_B_Arhgap31
  gRNA
tgtgggccaggtgtcgaatc

SEQ ID NO: 72350 - DNA, 20 bp, Artificial Sequence
  MKO10072350_B_Arhgap31
  gRNA
gaatttctcatagagctcgt

SEQ ID NO: 72351 - DNA, 20 bp, Artificial Sequence
  MKO10072351_B_Arhgap31
  gRNA
tgttgttccaggcaagagtt

SEQ ID NO: 72352 - DNA, 20 bp, Artificial Sequence
  MKO10072352_B_Arhgap32
  gRNA
ggggagcacctcctcaattc

SEQ ID NO: 72353 - DNA, 20 bp, Artificial Sequence
  MKO10072353_B_Arhgap32
  gRNA
atgacttacctatagtgtgg

SEQ ID NO: 72354 - DNA, 20 bp, Artificial Sequence
  MKO10072354_B_Arhgap32
  gRNA
aactccccccaccacactat

SEQ ID NO: 72355 - DNA, 20 bp, Artificial Sequence
  MKO10072355_B_Arhgap33
  gRNA
ccaggcttcccctttgtacc

SEQ ID NO: 72356 - DNA, 20 bp, Artificial Sequence
  MKO10072356_B_Arhgap33
  gRNA
tccaggctctcagctcctcg

SEQ ID NO: 72357 - DNA, 20 bp, Artificial Sequence
  MKO10072357_B_Arhgap33
  gRNA
cactatgagaatgttgactt

SEQ ID NO: 72358 - DNA, 20 bp, Artificial Sequence
  MKO10072358_B_Arhgap36
  gRNA
gactgcttaccacgaactcg

SEQ ID NO: 72359 - DNA, 20 bp, Artificial Sequence
  MKO10072359_B_Arhgap36
  gRNA
tcccagctttcatcgcctat

SEQ ID NO: 72360 - DNA, 20 bp, Artificial Sequence
  MKO10072360_B_Arhgap36
  gRNA
tgcagatagcgcagatgaac

SEQ ID NO: 72361 - DNA, 20 bp, Artificial Sequence
  MKO10072361_B_Arhgap39
  gRNA
aagccatcatgtcgatgagc

SEQ ID NO: 72362 - DNA, 20 bp, Artificial Sequence
  MKO10072362_B_Arhgap39
  gRNA
ataggacctcctcactgcga

SEQ ID NO: 72363 - DNA, 20 bp, Artificial Sequence
  MKO10072363_B_Arhgap39
  gRNA
agggagtaggtgcccccgcc

SEQ ID NO: 72364 - DNA, 20 bp, Artificial Sequence
  MKO10072364_B_Arhgap40
  gRNA
ttgctaggatcagcagaacc

SEQ ID NO: 72365 - DNA, 20 bp, Artificial Sequence
  MKO10072365_B_Arhgap40
  gRNA
ggcagaagccagctcctaga

SEQ ID NO: 72366 - DNA, 20 bp, Artificial Sequence
  MKO10072366_B_Arhgap40
  gRNA
agagtcctcagagttgatct

SEQ ID NO: 72367 - DNA, 20 bp, Artificial Sequence
  MKO10072367_B_Arhgap42
  gRNA
catagaagttctgatgttct

SEQ ID NO: 72368 - DNA, 20 bp, Artificial Sequence
  MKO10072368_B_Arhgap42
  gRNA
aaatttcgaaaagaacagat

SEQ ID NO: 72369 - DNA, 20 bp, Artificial Sequence
  MKO10072369_B_Arhgap42
  gRNA
tcttcttctcttgaacttct

SEQ ID NO: 72370 - DNA, 20 bp, Artificial Sequence
  MKO10072370_B_Arhgap44
  gRNA
ggtggagaagcgcctagagc

SEQ ID NO: 72371 - DNA, 20 bp, Artificial Sequence
  MKO10072371_B_Arhgap44
  gRNA
gatccactttgagctgcaag

SEQ ID NO: 72372 - DNA, 20 bp, Artificial Sequence
  MKO10072372_B_Arhgap44
  gRNA
gacggaggacaagctagctc

SEQ ID NO: 72373 - DNA, 20 bp, Artificial Sequence
  MKO10072373_B_Arhgap4
  gRNA
actccagttctacctccgcc

SEQ ID NO: 72374 - DNA, 20 bp, Artificial Sequence
  MKO10072374_B_Arhgap4
  gRNA
catcttcgctgatgtgactt

SEQ ID NO: 72375 - DNA, 20 bp, Artificial Sequence
  MKO10072375_B_Arhgap4
  gRNA
gggccctgtctcaacggtgg

SEQ ID NO: 72376 - DNA, 20 bp, Artificial Sequence
  MKO10072376_B_Arhgap5
  gRNA
ctgaatacatcatagtttac

SEQ ID NO: 72377 - DNA, 20 bp, Artificial Sequence
  MKO10072377_B_Arhgap5
  gRNA
ttcactccacccagagctat

SEQ ID NO: 72378 - DNA, 20 bp, Artificial Sequence
  MKO10072378_B_Arhgap5
  gRNA
atgtgataacacatctaaac

SEQ ID NO: 72379 - DNA, 20 bp, Artificial Sequence
  MKO10072379_B_Arhgap6
  gRNA
ccttgcagaattcatcccac

SEQ ID NO: 72380 - DNA, 20 bp, Artificial Sequence
  MKO10072380_B_Arhgap6
  gRNA
gcgggcacgactgcaggaag

SEQ ID NO: 72381 - DNA, 20 bp, Artificial Sequence
  MKO10072381_B_Arhgap6
  gRNA
gttgtcatccagatcagtga

SEQ ID NO: 72382 - DNA, 20 bp, Artificial Sequence
  MKO10072382_B_Arhgap8
  gRNA
cttccggtcaaactccttgt

SEQ ID NO: 72383 - DNA, 20 bp, Artificial Sequence
  MKO10072383_B_Arhgap8
  gRNA
gtacaacgtacagtgccttc

SEQ ID NO: 72384 - DNA, 20 bp, Artificial Sequence
  MKO10072384_B_Arhgap8
  gRNA
gctcaaccaccagcgcctgc

SEQ ID NO: 72385 - DNA, 20 bp, Artificial Sequence
  MKO10072385_B_Arhgap9
  gRNA
gcctcagccaaagcgtccca

SEQ ID NO: 72386 - DNA, 20 bp, Artificial Sequence
  MKO10072386_B_Arhgap9
  gRNA
ccagttaacaccacccaagc

SEQ ID NO: 72387 - DNA, 20 bp, Artificial Sequence
  MKO10072387_B_Arhgap9
  gRNA
gcgccctccttgagcaatct

SEQ ID NO: 72388 - DNA, 20 bp, Artificial Sequence
  MKO10072388_B_Arhgdia
  gRNA
tggggcagtgctgcatacca

SEQ ID NO: 72389 - DNA, 20 bp, Artificial Sequence
  MKO10072389_B_Arhgdia
  gRNA
gaaacagtcgtttgtcttga

SEQ ID NO: 72390 - DNA, 20 bp, Artificial Sequence
  MKO10072390_B_Arhgdia
  gRNA
accggataaaaatctctttc

SEQ ID NO: 72391 - DNA, 20 bp, Artificial Sequence
  MKO10072391_B_Arhgdib
  gRNA
gtgaggaattcgtactcctc

SEQ ID NO: 72392 - DNA, 20 bp, Artificial Sequence
  MKO10072392_B_Arhgdib
  gRNA
ttcccaacgtgactgttacc

SEQ ID NO: 72393 - DNA, 20 bp, Artificial Sequence
  MKO10072393_B_Arhgdib
  gRNA
tcttacctctcatgccagtc

SEQ ID NO: 72394 - DNA, 20 bp, Artificial Sequence
  MKO10072394_B_Arhgdig
  gRNA
cagcctagtcacctgcacgt

SEQ ID NO: 72395 - DNA, 20 bp, Artificial Sequence
  MKO10072395_B_Arhgdig
  gRNA
tcgtccagcacctcatctga

SEQ ID NO: 72396 - DNA, 20 bp, Artificial Sequence
  MKO10072396_B_Arhgdig
  gRNA
ggctccagggcctatcatca

SEQ ID NO: 72397 - DNA, 20 bp, Artificial Sequence
  MKO10072397_B_Arhgef10l
  gRNA
ctgtgtccctctcaggggcg

SEQ ID NO: 72398 - DNA, 20 bp, Artificial Sequence
  MKO10072398_B_Arhgef10l
  gRNA
ctcacttactctgtctgggg

SEQ ID NO: 72399 - DNA, 20 bp, Artificial Sequence
  MKO10072399_B_Arhgef10l
  gRNA
acagtacctatggcaggctg

SEQ ID NO: 72400 - DNA, 20 bp, Artificial Sequence
  MKO10072400_B_Arhgef10
  gRNA
gtggggaccacaagtttcgc

SEQ ID NO: 72401 - DNA, 20 bp, Artificial Sequence
  MKO10072401_B_Arhgef10
  gRNA
gtgcaattccctaagctccg

SEQ ID NO: 72402 - DNA, 20 bp, Artificial Sequence
  MKO10072402_B_Arhgef10
  gRNA
ggtcccttacctgcaggaac

SEQ ID NO: 72403 - DNA, 20 bp, Artificial Sequence
  MKO10072403_B_Arhgef11
  gRNA
ctggtgcagtctgtgcgccc

SEQ ID NO: 72404 - DNA, 20 bp, Artificial Sequence
  MKO10072404_B_Arhgef11
  gRNA
tgataagcttcactacctcc

SEQ ID NO: 72405 - DNA, 20 bp, Artificial Sequence
  MKO10072405_B_Arhgef11
  gRNA
ggaggcgcagccatgagagc

SEQ ID NO: 72406 - DNA, 20 bp, Artificial Sequence
  MKO10072406_B_Arhgef12
  gRNA
ttcccctcaaaaaacctata

SEQ ID NO: 72407 - DNA, 20 bp, Artificial Sequence
  MKO10072407_B_Arhgef12
  gRNA
gaagacaaagtctagttcag

SEQ ID NO: 72408 - DNA, 20 bp, Artificial Sequence
  MKO10072408_B_Arhgef12
  gRNA
actttctgtttcttatctgt

SEQ ID NO: 72409 - DNA, 20 bp, Artificial Sequence
  MKO10072409_B_Arhgef15
  gRNA
actggagggtgactgatgac

SEQ ID NO: 72410 - DNA, 20 bp, Artificial Sequence
  MKO10072410_B_Arhgef15
  gRNA
agttcggtaccttccctcca

SEQ ID NO: 72411 - DNA, 20 bp, Artificial Sequence
  MKO10072411_B_Arhgef15
  gRNA
gaatgctccccctgtagcct

SEQ ID NO: 72412 - DNA, 20 bp, Artificial Sequence
  MKO10072412_B_Arhgef16
  gRNA
ccatcgtggtcaagagctat

SEQ ID NO: 72413 - DNA, 20 bp, Artificial Sequence
  MKO10072413_B_Arhgef16
  gRNA
agaggtggtggtgttccgtc

SEQ ID NO: 72414 - DNA, 20 bp, Artificial Sequence
  MKO10072414_B_Arhgef16
  gRNA
gagggccactatgacccaga

SEQ ID NO: 72415 - DNA, 20 bp, Artificial Sequence
  MKO10072415_B_Arhgef17
  gRNA
aatcccacgctatgagcttc

SEQ ID NO: 72416 - DNA, 20 bp, Artificial Sequence
  MKO10072416_B_Arhgef17
  gRNA
ttcaccagaagctcatagcg

SEQ ID NO: 72417 - DNA, 20 bp, Artificial Sequence
  MKO10072417_B_Arhgef17
  gRNA
tgataacttcctcaatgcaa

SEQ ID NO: 72418 - DNA, 20 bp, Artificial Sequence
  MKO10072418_B_Arhgef18
  gRNA
actgaccgactgcatcattg

SEQ ID NO: 72419 - DNA, 20 bp, Artificial Sequence
  MKO10072419_B_Arhgef18
  gRNA
gaaaacagactcagcattcg

SEQ ID NO: 72420 - DNA, 20 bp, Artificial Sequence
  MKO10072420_B_Arhgef18
  gRNA
aaatacgctgtgttctgtag

SEQ ID NO: 72421 - DNA, 20 bp, Artificial Sequence
  MKO10072421_B_Arhgef19
  gRNA
gtcgatctaaacgaggtcca

SEQ ID NO: 72422 - DNA, 20 bp, Artificial Sequence
  MKO10072422_B_Arhgef19
  gRNA
cacgcaagacaagccgactc

SEQ ID NO: 72423 - DNA, 20 bp, Artificial Sequence
  MKO10072423_B_Arhgef19
  gRNA
acccttagggcgcaagatgc

SEQ ID NO: 72424 - DNA, 20 bp, Artificial Sequence
  MKO10072424_B_Arhgef1
  gRNA
atctcaccgcagtcttctcc

SEQ ID NO: 72425 - DNA, 20 bp, Artificial Sequence
  MKO10072425_B_Arhgef1
  gRNA
aggccagaccggggaggccc

SEQ ID NO: 72426 - DNA, 20 bp, Artificial Sequence
  MKO10072426_B_Arhgef1
  gRNA
ctggagatgggagaagtcgc

SEQ ID NO: 72427 - DNA, 20 bp, Artificial Sequence
  MKO10072427_B_Arhgef25
  gRNA
ctctgtccagaactggacgc

SEQ ID NO: 72428 - DNA, 20 bp, Artificial Sequence
  MKO10072428_B_Arhgef25
  gRNA
gacagagagtgattgtatcg

SEQ ID NO: 72429 - DNA, 20 bp, Artificial Sequence
  MKO10072429_B_Arhgef25
  gRNA
ctattctattgccgtcagtg

SEQ ID NO: 72430 - DNA, 20 bp, Artificial Sequence
  MKO10072430_B_Arhgef26
  gRNA
atacaatgactaagaccgag

SEQ ID NO: 72431 - DNA, 20 bp, Artificial Sequence
  MKO10072431_B_Arhgef26
  gRNA
gctgtctcagacagtgagcc

SEQ ID NO: 72432 - DNA, 20 bp, Artificial Sequence
  MKO10072432_B_Arhgef26
  gRNA
caaggaacatttgatgggga

SEQ ID NO: 72433 - DNA, 20 bp, Artificial Sequence
  MKO10072433_B_Arhgef28
  gRNA
cgtgtatctacccgaagatg

SEQ ID NO: 72434 - DNA, 20 bp, Artificial Sequence
  MKO10072434_B_Arhgef28
  gRNA
caaacggggtcagcagcgtc

SEQ ID NO: 72435 - DNA, 20 bp, Artificial Sequence
  MKO10072435_B_Arhgef28
  gRNA
cactcaggctgaccgactca

SEQ ID NO: 72436 - DNA, 20 bp, Artificial Sequence
  MKO10072436_B_Arhgef2
  gRNA
ggtggtgaagaggtggccgt

SEQ ID NO: 72437 - DNA, 20 bp, Artificial Sequence
  MKO10072437_B_Arhgef2
  gRNA
tttacccttccgacagcttc

SEQ ID NO: 72438 - DNA, 20 bp, Artificial Sequence
  MKO10072438_B_Arhgef2
  gRNA
ctgtaccaaggtcaagcaga

SEQ ID NO: 72439 - DNA, 20 bp, Artificial Sequence
  MKO10072439_B_Arhgef33
  gRNA
ctttacctggtaaatctgtg

SEQ ID NO: 72440 - DNA, 20 bp, Artificial Sequence
  MKO10072440_B_Arhgef33
  gRNA
ccaaagcgtattctccatgt

SEQ ID NO: 72441 - DNA, 20 bp, Artificial Sequence
  MKO10072441_B_Arhgef33
  gRNA
gaaaatcgaacagctgcagc

SEQ ID NO: 72442 - DNA, 20 bp, Artificial Sequence
  MKO10072442_B_Arhgef37
  gRNA
gccgtcaggtaacttattct

SEQ ID NO: 72443 - DNA, 20 bp, Artificial Sequence
  MKO10072443_B_Arhgef37
  gRNA
tgatattgccgttcacatcc

SEQ ID NO: 72444 - DNA, 20 bp, Artificial Sequence
  MKO10072444_B_Arhgef37
  gRNA
gaggagcaagcgcacctgat

SEQ ID NO: 72445 - DNA, 20 bp, Artificial Sequence
  MKO10072445_B_Arhgef38
  gRNA
tgtattcggtcctgtcagac

SEQ ID NO: 72446 - DNA, 20 bp, Artificial Sequence
  MKO10072446_B_Arhgef38
  gRNA
ggccacaacagacgtggaac

SEQ ID NO: 72447 - DNA, 20 bp, Artificial Sequence
  MKO10072447_B_Arhgef38
  gRNA
cgtcctagagtcctatgaaa

SEQ ID NO: 72448 - DNA, 20 bp, Artificial Sequence
  MKO10072448_B_Arhgef39
  gRNA
agtctgagatctctctgcgt

SEQ ID NO: 72449 - DNA, 20 bp, Artificial Sequence
  MKO10072449_B_Arhgef39
  gRNA
cactgttggagccgctgcag

SEQ ID NO: 72450 - DNA, 20 bp, Artificial Sequence
  MKO10072450_B_Arhgef39
  gRNA
ccagaactccagaccctgtt

SEQ ID NO: 72451 - DNA, 20 bp, Artificial Sequence
  MKO10072451_B_Arhgef3
  gRNA
cacttatgtcaagactgcac

SEQ ID NO: 72452 - DNA, 20 bp, Artificial Sequence
  MKO10072452_B_Arhgef3
  gRNA
gttcccttacctgcaaggtc

SEQ ID NO: 72453 - DNA, 20 bp, Artificial Sequence
  MKO10072453_B_Arhgef3
  gRNA
gcgatctttgaactttctca

SEQ ID NO: 72454 - DNA, 20 bp, Artificial Sequence
  MKO10072454_B_Arhgef40
  gRNA
atcaagtcccaagctacaac

SEQ ID NO: 72455 - DNA, 20 bp, Artificial Sequence
  MKO10072455_B_Arhgef40
  gRNA
tgtacctcagcgcatcctcc

SEQ ID NO: 72456 - DNA, 20 bp, Artificial Sequence
  MKO10072456_B_Arhgef40
  gRNA
agttgtagcttgggacttga

SEQ ID NO: 72457 - DNA, 20 bp, Artificial Sequence
  MKO10072457_B_Arhgef4
  gRNA
gcggccacacctgagcgagt

SEQ ID NO: 72458 - DNA, 20 bp, Artificial Sequence
  MKO10072458_B_Arhgef4
  gRNA
gtttccgttcgttgatgagc

SEQ ID NO: 72459 - DNA, 20 bp, Artificial Sequence
  MKO10072459_B_Arhgef4
  gRNA
acttgctgagcttcgtgagc

SEQ ID NO: 72460 - DNA, 20 bp, Artificial Sequence
  MKO10072460_B_Arhgef5
  gRNA
gcgcagtctaaacatagctg

SEQ ID NO: 72461 - DNA, 20 bp, Artificial Sequence
  MKO10072461_B_Arhgef5
  gRNA
agatttacgaaatccagctg

SEQ ID NO: 72462 - DNA, 20 bp, Artificial Sequence
  MKO10072462_B_Arhgef5
  gRNA
aagcctcccatcccctcctt

SEQ ID NO: 72463 - DNA, 20 bp, Artificial Sequence
  MKO10072463_B_Arhgef6
  gRNA
attgatgttgtcgatgcagt

SEQ ID NO: 72464 - DNA, 20 bp, Artificial Sequence
  MKO10072464_B_Arhgef6
  gRNA
gaagagttgcacatcctttc

SEQ ID NO: 72465 - DNA, 20 bp, Artificial Sequence
  MKO10072465_B_Arhgef6
  gRNA
tatgtcacacgagttgaaga

SEQ ID NO: 72466 - DNA, 20 bp, Artificial Sequence
  MKO10072466_B_Arhgef7
  gRNA
gttgtaatagctcttgttga

SEQ ID NO: 72467 - DNA, 20 bp, Artificial Sequence
  MKO10072467_B_Arhgef7
  gRNA
ctgtgctgtccacctacctg

SEQ ID NO: 72468 - DNA, 20 bp, Artificial Sequence
  MKO10072468_B_Arhgef7
  gRNA
cttacttcgtgcattcttct

SEQ ID NO: 72469 - DNA, 20 bp, Artificial Sequence
  MKO10072469_B_Arhgef9
  gRNA
agtatgggatcacgtcacca

SEQ ID NO: 72470 - DNA, 20 bp, Artificial Sequence
  MKO10072470_B_Arhgef9
  gRNA
tacagaaccgggaccagatg

SEQ ID NO: 72471 - DNA, 20 bp, Artificial Sequence
  MKO10072471_B_Arhgef9
  gRNA
atctggtcccggttctgtag

SEQ ID NO: 72472 - DNA, 20 bp, Artificial Sequence
  MKO10072472_B_Arid1a
  gRNA
agtgtcgcgcagtctcgctc

SEQ ID NO: 72473 - DNA, 20 bp, Artificial Sequence
  MKO10072473_B_Arid1a
  gRNA
tgagcgagactgcgcgacac

SEQ ID NO: 72474 - DNA, 20 bp, Artificial Sequence
  MKO10072474_B_Arid1a
  gRNA
ctgctgctgatacgaaggct

SEQ ID NO: 72475 - DNA, 20 bp, Artificial Sequence
  MKO10072475_B_Arid1b
  gRNA
atctcccctgcgagtattcc

SEQ ID NO: 72476 - DNA, 20 bp, Artificial Sequence
  MKO10072476_B_Arid1b
  gRNA
acagcttgctgtccgtactg

SEQ ID NO: 72477 - DNA, 20 bp, Artificial Sequence
  MKO10072477_B_Arid1b
  gRNA
acggtcccccaggtgcacag

SEQ ID NO: 72478 - DNA, 20 bp, Artificial Sequence
  MKO10072478_B_Arid2
  gRNA
tacctgacacgctgtgttgc

SEQ ID NO: 72479 - DNA, 20 bp, Artificial Sequence
  MKO10072479_B_Arid2
  gRNA
gccgtttaagaagatccctg

SEQ ID NO: 72480 - DNA, 20 bp, Artificial Sequence
  MKO10072480_B_Arid2
  gRNA
tccgcctaaagtagtgactc

SEQ ID NO: 72481 - DNA, 20 bp, Artificial Sequence
  MKO10072481_B_Arid3a
  gRNA
cagatgccaccaccggacca

SEQ ID NO: 72482 - DNA, 20 bp, Artificial Sequence
  MKO10072482_B_Arid3a
  gRNA
gaggacctgcttcgccatga

SEQ ID NO: 72483 - DNA, 20 bp, Artificial Sequence
  MKO10072483_B_Arid3a
  gRNA
tcttgttgataacctctacc

SEQ ID NO: 72484 - DNA, 20 bp, Artificial Sequence
  MKO10072484_B_Arid3b
  gRNA
ccagcgctgccttcaccctc

SEQ ID NO: 72485 - DNA, 20 bp, Artificial Sequence
  MKO10072485_B_Arid3b
  gRNA
tccatcagcatcgtcactcc

SEQ ID NO: 72486 - DNA, 20 bp, Artificial Sequence
  MKO10072486_B_Arid3b
  gRNA
tggagtgacgatgctgatgg

SEQ ID NO: 72487 - DNA, 20 bp, Artificial Sequence
  MKO10072487_B_Arid3c
  gRNA
tctgtatgcgttgtttcgct

SEQ ID NO: 72488 - DNA, 20 bp, Artificial Sequence
  MKO10072488_B_Arid3c
  gRNA
tcactgtgtacggagcgtga

SEQ ID NO: 72489 - DNA, 20 bp, Artificial Sequence
  MKO10072489_B_Arid3c
  gRNA
ccagctgtatgaactcgatg

SEQ ID NO: 72490 - DNA, 20 bp, Artificial Sequence
  MKO10072490_B_Arid4a
  gRNA
cggacctcactttgcctgaa

SEQ ID NO: 72491 - DNA, 20 bp, Artificial Sequence
  MKO10072491_B_Arid4a
  gRNA
gcaaattgacagatgctagt

SEQ ID NO: 72492 - DNA, 20 bp, Artificial Sequence
  MKO10072492_B_Arid4a
  gRNA
tgagcctgcctacctgacag

SEQ ID NO: 72493 - DNA, 20 bp, Artificial Sequence
  MKO10072493_B_Arid4b
  gRNA
tcagtgcccactgtcaaata

SEQ ID NO: 72494 - DNA, 20 bp, Artificial Sequence
  MKO10072494_B_Arid4b
  gRNA
agttcaggatgaccacataa

SEQ ID NO: 72495 - DNA, 20 bp, Artificial Sequence
  MKO10072495_B_Arid4b
  gRNA
acagaaggctcctctgtatt

SEQ ID NO: 72496 - DNA, 20 bp, Artificial Sequence
  MKO10072496_B_Arid5a
  gRNA
ggctggtcctcccatatgtg

SEQ ID NO: 72497 - DNA, 20 bp, Artificial Sequence
  MKO10072497_B_Arid5a
  gRNA
ctcctgctctgctcatcatc

SEQ ID NO: 72498 - DNA, 20 bp, Artificial Sequence
  MKO10072498_B_Arid5a
  gRNA
ctaactcacctggagctggg

SEQ ID NO: 72499 - DNA, 20 bp, Artificial Sequence
  MKO10072499_B_Arid5b
  gRNA
cagtgggtcggctcaccgtg

SEQ ID NO: 72500 - DNA, 20 bp, Artificial Sequence
  MKO10072500_B_Arid5b
  gRNA
cttcgggagaaacggacaga

SEQ ID NO: 72501 - DNA, 20 bp, Artificial Sequence
  MKO10072501_B_Arid5b
  gRNA
aattagaggaccttgtcaaa

SEQ ID NO: 72502 - DNA, 20 bp, Artificial Sequence
  MKO10072502_B_Arih1
  gRNA
tactccttagccacttcaat

SEQ ID NO: 72503 - DNA, 20 bp, Artificial Sequence
  MKO10072503_B_Arih1
  gRNA
aaaacttatgtccacattca

SEQ ID NO: 72504 - DNA, 20 bp, Artificial Sequence
  MKO10072504_B_Arih1
  gRNA
atatttaactacaaaaataa

SEQ ID NO: 72505 - DNA, 20 bp, Artificial Sequence
  MKO10072505_B_Arih2
  gRNA
aatgctgttcccaacagctt

SEQ ID NO: 72506 - DNA, 20 bp, Artificial Sequence
  MKO10072506_B_Arih2
  gRNA
gttggcaggccagagagagt

SEQ ID NO: 72507 - DNA, 20 bp, Artificial Sequence
  MKO10072507_B_Arih2
  gRNA
ttatattagttaatttccac

SEQ ID NO: 72508 - DNA, 20 bp, Artificial Sequence
  MKO10072508_B_Arl10
  gRNA
tcccaggccaaatggcgccg

SEQ ID NO: 72509 - DNA, 20 bp, Artificial Sequence
  MKO10072509_B_Arl10
  gRNA
actccttccagtaaaagcgc

SEQ ID NO: 72510 - DNA, 20 bp, Artificial Sequence
  MKO10072510_B_Arl10
  gRNA
caggtccacctcgaaattct

SEQ ID NO: 72511 - DNA, 20 bp, Artificial Sequence
  MKO10072511_B_Arl11
  gRNA
catggccggcgtccccttct

SEQ ID NO: 72512 - DNA, 20 bp, Artificial Sequence
  MKO10072512_B_Arl11
  gRNA
tgctgtccagcacgtacaca

SEQ ID NO: 72513 - DNA, 20 bp, Artificial Sequence
  MKO10072513_B_Arl11
  gRNA
cgggcttgcagcgctctcac

SEQ ID NO: 72514 - DNA, 20 bp, Artificial Sequence
  MKO10072514_B_Arl13a
  gRNA
gccactcaccacgcggcaca

SEQ ID NO: 72515 - DNA, 20 bp, Artificial Sequence
  MKO10072515_B_Arl13a
  gRNA
gtatctatctatgacctaac

SEQ ID NO: 72516 - DNA, 20 bp, Artificial Sequence
  MKO10072516_B_Arl13a
  gRNA
ccataaaacgcattccaaag

SEQ ID NO: 72517 - DNA, 20 bp, Artificial Sequence
  MKO10072517_B_Arl13b
  gRNA
ccgaagtgctaagacacccg

SEQ ID NO: 72518 - DNA, 20 bp, Artificial Sequence
  MKO10072518_B_Arl13b
  gRNA
gctactgcatatcattgcaa

SEQ ID NO: 72519 - DNA, 20 bp, Artificial Sequence
  MKO10072519_B_Arl13b
  gRNA
gctggccaacaagcaagaca

SEQ ID NO: 72520 - DNA, 20 bp, Artificial Sequence
  MKO10072520_B_Arl14epl
  gRNA
gaagaacaactccactcaac

SEQ ID NO: 72521 - DNA, 20 bp, Artificial Sequence
  MKO10072521_B_Arl14epl
  gRNA
tttcacagcaacagatagaa

SEQ ID NO: 72522 - DNA, 20 bp, Artificial Sequence
  MKO10072522_B_Arl14epl
  gRNA
tgcttggcatttcaaaaccc

SEQ ID NO: 72523 - DNA, 20 bp, Artificial Sequence
  MKO10072523_B_Arl14ep
  gRNA
ttctacgcttgccccacttg

SEQ ID NO: 72524 - DNA, 20 bp, Artificial Sequence
  MKO10072524_B_Arl14ep
  gRNA
ttctccctcttaccgccttc

SEQ ID NO: 72525 - DNA, 20 bp, Artificial Sequence
  MKO10072525_B_Arl14ep
  gRNA
ccacaagcgctgcttctgac

SEQ ID NO: 72526 - DNA, 20 bp, Artificial Sequence
  MKO10072526_B_Arl14
  gRNA
ttgttggccagtatgacgac

SEQ ID NO: 72527 - DNA, 20 bp, Artificial Sequence
  MKO10072527_B_Arl14
  gRNA
cgtcatactggccaacaaac

SEQ ID NO: 72528 - DNA, 20 bp, Artificial Sequence
  MKO10072528_B_Arl14
  gRNA
tgctactgtgagaacgctca

SEQ ID NO: 72529 - DNA, 20 bp, Artificial Sequence
  MKO10072529_B_Arl15
  gRNA
agtagcggctccagtatttc

SEQ ID NO: 72530 - DNA, 20 bp, Artificial Sequence
  MKO10072530_B_Arl15
  gRNA
gcaggatccagcgctttcca

SEQ ID NO: 72531 - DNA, 20 bp, Artificial Sequence
  MKO10072531_B_Arl15
  gRNA
ctcacattctcactgcctcg

SEQ ID NO: 72532 - DNA, 20 bp, Artificial Sequence
  MKO10072532_B_Arl16
  gRNA
attaactcaccaagagcgaa

SEQ ID NO: 72533 - DNA, 20 bp, Artificial Sequence
  MKO10072533_B_Arl16
  gRNA
ccgcagtagaaataagtgcc

SEQ ID NO: 72534 - DNA, 20 bp, Artificial Sequence
  MKO10072534_B_Arl16
  gRNA
gcttggcaacagtattgctc

SEQ ID NO: 72535 - DNA, 20 bp, Artificial Sequence
  MKO10072535_B_Arl1
  gRNA
atttgcaaacaccactaaaa

SEQ ID NO: 72536 - DNA, 20 bp, Artificial Sequence
  MKO10072536_B_Arl1
  gRNA
gccattccattgcctcatca

SEQ ID NO: 72537 - DNA, 20 bp, Artificial Sequence
  MKO10072537_B_Arl1
  gRNA
aattaaaatcctcatttctc

SEQ ID NO: 72538 - DNA, 20 bp, Artificial Sequence
  MKO10072538_B_Arl2bp
  gRNA
ggctttcaaggagatgttcc

SEQ ID NO: 72539 - DNA, 20 bp, Artificial Sequence
  MKO10072539_B_Arl2bp
  gRNA
tgaagtttctctgcaataac

SEQ ID NO: 72540 - DNA, 20 bp, Artificial Sequence
  MKO10072540_B_Arl2bp
  gRNA
gttattgcagagaaacttca

SEQ ID NO: 72541 - DNA, 20 bp, Artificial Sequence
  MKO10072541_B_Arl2
  gRNA
tcaaggagccagtcgatgcc

SEQ ID NO: 72542 - DNA, 20 bp, Artificial Sequence
  MKO10072542_B_Arl2
  gRNA
acctgctgcctggcatcgac

SEQ ID NO: 72543 - DNA, 20 bp, Artificial Sequence
  MKO10072543_B_Arl2
  gRNA
ctactcacccgcggtgctcc

SEQ ID NO: 72544 - DNA, 20 bp, Artificial Sequence
  MKO10072544_B_Arl3
  gRNA
aggattcgcacctcctggtc

SEQ ID NO: 72545 - DNA, 20 bp, Artificial Sequence
  MKO10072545_B_Arl3
  gRNA
atcaaaagcgtgcagtcaca

SEQ ID NO: 72546 - DNA, 20 bp, Artificial Sequence
  MKO10072546_B_Arl3
  gRNA
aagctgaatgtatgggacat

SEQ ID NO: 72547 - DNA, 20 bp, Artificial Sequence
  MKO10072547_B_Arl4a
  gRNA
ttattagcaactataagcac

SEQ ID NO: 72548 - DNA, 20 bp, Artificial Sequence
  MKO10072548_B_Arl4a
  gRNA
ttgctaataaacaagacctg

SEQ ID NO: 72549 - DNA, 20 bp, Artificial Sequence
  MKO10072549_B_Arl4a
  gRNA
tcatacacccgatgcacaga

SEQ ID NO: 72550 - DNA, 20 bp, Artificial Sequence
  MKO10072550_B_Arl4c
  gRNA
agatgatgccgtccgtgcag

SEQ ID NO: 72551 - DNA, 20 bp, Artificial Sequence
  MKO10072551_B_Arl4c
  gRNA
catcggcgagggcctcaccg

SEQ ID NO: 72552 - DNA, 20 bp, Artificial Sequence
  MKO10072552_B_Arl4c
  gRNA
gaaccagggcacaccgctcc

SEQ ID NO: 72553 - DNA, 20 bp, Artificial Sequence
  MKO10072553_B_Arl4d
  gRNA
cgggtgtaggagcgccacag

SEQ ID NO: 72554 - DNA, 20 bp, Artificial Sequence
  MKO10072554_B_Arl4d
  gRNA
tgagaagatccgcgtgcccc

SEQ ID NO: 72555 - DNA, 20 bp, Artificial Sequence
  MKO10072555_B_Arl4d
  gRNA
ctgcactcagtgcccccggt

SEQ ID NO: 72556 - DNA, 20 bp, Artificial Sequence
  MKO10072556_B_Arl5a
  gRNA
ctacaagatgctagcccacg

SEQ ID NO: 72557 - DNA, 20 bp, Artificial Sequence
  MKO10072557_B_Arl5a
  gRNA
ttaatacttacaactggtaa

SEQ ID NO: 72558 - DNA, 20 bp, Artificial Sequence
  MKO10072558_B_Arl5a
  gRNA
ttacaggacctaagaaaagc

SEQ ID NO: 72559 - DNA, 20 bp, Artificial Sequence
  MKO10072559_B_Arl5b
  gRNA
gttcatacttctccaaccat

SEQ ID NO: 72560 - DNA, 20 bp, Artificial Sequence
  MKO10072560_B_Arl5b
  gRNA
gaccaccgatatcccacata

SEQ ID NO: 72561 - DNA, 20 bp, Artificial Sequence
  MKO10072561_B_Arl5b
  gRNA
ctagttcatcattcttgttg

SEQ ID NO: 72562 - DNA, 20 bp, Artificial Sequence
  MKO10072562_B_Arl5c
  gRNA
agagcacaaagtcattatcg

SEQ ID NO: 72563 - DNA, 20 bp, Artificial Sequence
  MKO10072563_B_Arl5c
  gRNA
cacttactactctaatgctg

SEQ ID NO: 72564 - DNA, 20 bp, Artificial Sequence
  MKO10072564_B_Arl5c
  gRNA
atgccacgggtggtctttga

SEQ ID NO: 72565 - DNA, 20 bp, Artificial Sequence
  MKO10072565_B_Arl6ip1
  gRNA
tgggaacaaggtagtcagcc

SEQ ID NO: 72566 - DNA, 20 bp, Artificial Sequence
  MKO10072566_B_Arl6ip1
  gRNA
aaaaactcgacgcagagctg

SEQ ID NO: 72567 - DNA, 20 bp, Artificial Sequence
  MKO10072567_B_Arl6ip1
  gRNA
tccacctgccatcatgggtg

SEQ ID NO: 72568 - DNA, 20 bp, Artificial Sequence
  MKO10072568_B_Arl6ip4
  gRNA
ggccgggcagagcctcggcc

SEQ ID NO: 72569 - DNA, 20 bp, Artificial Sequence
  MKO10072569_B_Arl6ip4
  gRNA
ctggccttccagatgcgaac

SEQ ID NO: 72570 - DNA, 20 bp, Artificial Sequence
  MKO10072570_B_Arl6ip4
  gRNA
ggctgagccctcagggaagt

SEQ ID NO: 72571 - DNA, 20 bp, Artificial Sequence
  MKO10072571_B_Arl6ip5
  gRNA
gaccatgacacccccgaaca

SEQ ID NO: 72572 - DNA, 20 bp, Artificial Sequence
  MKO10072572_B_Arl6ip5
  gRNA
cggcctgaagaaaactccga

SEQ ID NO: 72573 - DNA, 20 bp, Artificial Sequence
  MKO10072573_B_Arl6ip5
  gRNA
ctgactacatcagcaaagcg

SEQ ID NO: 72574 - DNA, 20 bp, Artificial Sequence
  MKO10072574_B_Arl6ip6
  gRNA
aacacttacttgaacctagc

SEQ ID NO: 72575 - DNA, 20 bp, Artificial Sequence
  MKO10072575_B_Arl6ip6
  gRNA
tattgtcgctgctctcactg

SEQ ID NO: 72576 - DNA, 20 bp, Artificial Sequence
  MKO10072576_B_Arl6ip6
  gRNA
aatgaagatgatatacatac

SEQ ID NO: 72577 - DNA, 20 bp, Artificial Sequence
  MKO10072577_B_Arl6
  gRNA
tttctctatgctaaatccta

SEQ ID NO: 72578 - DNA, 20 bp, Artificial Sequence
  MKO10072578_B_Arl6
  gRNA
tagagaaattcaagtcctcc

SEQ ID NO: 72579 - DNA, 20 bp, Artificial Sequence
  MKO10072579_B_Arl6
  gRNA
caactgagacactttcacag

SEQ ID NO: 72580 - DNA, 20 bp, Artificial Sequence
  MKO10072580_B_Arl8a
  gRNA
caggttgtggagctcattct

SEQ ID NO: 72581 - DNA, 20 bp, Artificial Sequence
  MKO10072581_B_Arl8a
  gRNA
agtagcgttcccacatgctt

SEQ ID NO: 72582 - DNA, 20 bp, Artificial Sequence
  MKO10072582_B_Arl8a
  gRNA
aacatgcgaaaaatcaccaa

SEQ ID NO: 72583 - DNA, 20 bp, Artificial Sequence
  MKO10072583_B_Arl8b
  gRNA
catatcttcactgaattgac

SEQ ID NO: 72584 - DNA, 20 bp, Artificial Sequence
  MKO10072584_B_Arl8b
  gRNA
gagagatcttccaaatgcct

SEQ ID NO: 72585 - DNA, 20 bp, Artificial Sequence
  MKO10072585_B_Arl8b
  gRNA
tgaagatatgatacccacag

SEQ ID NO: 72586 - DNA, 20 bp, Artificial Sequence
  MKO10072586_B_Arl9
  gRNA
tagaattgatgaagtgtgac

SEQ ID NO: 72587 - DNA, 20 bp, Artificial Sequence
  MKO10072587_B_Arl9
  gRNA
ctccatccagacctagtact

SEQ ID NO: 72588 - DNA, 20 bp, Artificial Sequence
  MKO10072588_B_Arl9
  gRNA
tgtgaactgcatttaaacct

SEQ ID NO: 72589 - DNA, 20 bp, Artificial Sequence
  MKO10072589_B_Armc10
  gRNA
gtttgtcagcagcctcagtc

SEQ ID NO: 72590 - DNA, 20 bp, Artificial Sequence
  MKO10072590_B_Armc10
  gRNA
tgctgaccccctgaactctg

SEQ ID NO: 72591 - DNA, 20 bp, Artificial Sequence
  MKO10072591_B_Armc10
  gRNA
tgaaaatcaaactaagataa

SEQ ID NO: 72592 - DNA, 20 bp, Artificial Sequence
  MKO10072592_B_Armc12
  gRNA
gtaggcctcttcttgtacta

SEQ ID NO: 72593 - DNA, 20 bp, Artificial Sequence
  MKO10072593_B_Armc12
  gRNA
gacttggaattgcacgtagc

SEQ ID NO: 72594 - DNA, 20 bp, Artificial Sequence
  MKO10072594_B_Armc12
  gRNA
ttatgacattctcaactgtc

SEQ ID NO: 72595 - DNA, 20 bp, Artificial Sequence
  MKO10072595_B_Armc1
  gRNA
ctgttcaaagatgcgtggtg

SEQ ID NO: 72596 - DNA, 20 bp, Artificial Sequence
  MKO10072596_B_Armc1
  gRNA
actatcaccatcagccaaat

SEQ ID NO: 72597 - DNA, 20 bp, Artificial Sequence
  MKO10072597_B_Armc1
  gRNA
gtcagcaatagcatcaacca

SEQ ID NO: 72598 - DNA, 20 bp, Artificial Sequence
  MKO10072598_B_Armc2
  gRNA
ggcccgagcacgcttctaca

SEQ ID NO: 72599 - DNA, 20 bp, Artificial Sequence
  MKO10072599_B_Armc2
  gRNA
ttacaccccgtgaagaccaa

SEQ ID NO: 72600 - DNA, 20 bp, Artificial Sequence
  MKO10072600_B_Armc2
  gRNA
tgtagaactccccacgctaa

SEQ ID NO: 72601 - DNA, 20 bp, Artificial Sequence
  MKO10072601_B_Armc3
  gRNA
ttggctaagatgtcttcctc

SEQ ID NO: 72602 - DNA, 20 bp, Artificial Sequence
  MKO10072602_B_Armc3
  gRNA
agaaatgctatgatgatctt

SEQ ID NO: 72603 - DNA, 20 bp, Artificial Sequence
  MKO10072603_B_Armc3
  gRNA
gtgatgttaagaagctcttg

SEQ ID NO: 72604 - DNA, 20 bp, Artificial Sequence
  MKO10072604_B_Armc4
  gRNA
ctgtaccttatattaaagtg

SEQ ID NO: 72605 - DNA, 20 bp, Artificial Sequence
  MKO10072605_B_Armc4
  gRNA
cacagagtttccatgtcatg

SEQ ID NO: 72606 - DNA, 20 bp, Artificial Sequence
  MKO10072606_B_Armc4
  gRNA
aagctcctcactttaatata

SEQ ID NO: 72607 - DNA, 20 bp, Artificial Sequence
  MKO10072607_B_Armc5
  gRNA
gccaagatacgaagtgcgcg

SEQ ID NO: 72608 - DNA, 20 bp, Artificial Sequence
  MKO10072608_B_Armc5
  gRNA
gggtcagtgcacaggcgacg

SEQ ID NO: 72609 - DNA, 20 bp, Artificial Sequence
  MKO10072609_B_Armc5
  gRNA
tccccctcaccggcagatga

SEQ ID NO: 72610 - DNA, 20 bp, Artificial Sequence
  MKO10072610_B_Armc6
  gRNA
gtgtaatagccgctgtgagc

SEQ ID NO: 72611 - DNA, 20 bp, Artificial Sequence
  MKO10072611_B_Armc6
  gRNA
ctgcagcaccctatcccgcc

SEQ ID NO: 72612 - DNA, 20 bp, Artificial Sequence
  MKO10072612_B_Armc6
  gRNA
gacaataccgaaagtatcac

SEQ ID NO: 72613 - DNA, 20 bp, Artificial Sequence
  MKO10072613_B_Armc7
  gRNA
gggggcctcccgctcatcat

SEQ ID NO: 72614 - DNA, 20 bp, Artificial Sequence
  MKO10072614_B_Armc7
  gRNA
tcggcgagcagaagtcctct

SEQ ID NO: 72615 - DNA, 20 bp, Artificial Sequence
  MKO10072615_B_Armc7
  gRNA
cccaagatagacccccacgt

SEQ ID NO: 72616 - DNA, 20 bp, Artificial Sequence
  MKO10072616_B_Armc8
  gRNA
aagcttgcctccgatgcctc

SEQ ID NO: 72617 - DNA, 20 bp, Artificial Sequence
  MKO10072617_B_Armc8
  gRNA
atactacttacatgacacct

SEQ ID NO: 72618 - DNA, 20 bp, Artificial Sequence
  MKO10072618_B_Armc8
  gRNA
ggcaagcttcaatgaacttc

SEQ ID NO: 72619 - DNA, 20 bp, Artificial Sequence
  MKO10072619_B_Armc9
  gRNA
ctccaagtcgctcgtaatcc

SEQ ID NO: 72620 - DNA, 20 bp, Artificial Sequence
  MKO10072620_B_Armc9
  gRNA
acaagtcaaagaacgccttc

SEQ ID NO: 72621 - DNA, 20 bp, Artificial Sequence
  MKO10072621_B_Armc9
  gRNA
tcttccgcagagggatttgg

SEQ ID NO: 72622 - DNA, 20 bp, Artificial Sequence
  MKO10072622_B_Armcx1
  gRNA
tcaagtgtgtgacgatacca

SEQ ID NO: 72623 - DNA, 20 bp, Artificial Sequence
  MKO10072623_B_Armcx1
  gRNA
gactccacccagctcacgga

SEQ ID NO: 72624 - DNA, 20 bp, Artificial Sequence
  MKO10072624_B_Armcx1
  gRNA
tgagtccaagcggcaaacca

SEQ ID NO: 72625 - DNA, 20 bp, Artificial Sequence
  MKO10072625_B_Armcx2
  gRNA
cacccccctgagataacaag

SEQ ID NO: 72626 - DNA, 20 bp, Artificial Sequence
  MKO10072626_B_Armcx2
  gRNA
gcactactaccccagtagat

SEQ ID NO: 72627 - DNA, 20 bp, Artificial Sequence
  MKO10072627_B_Armcx2
  gRNA
ccccatcatcagtacttccc

SEQ ID NO: 72628 - DNA, 20 bp, Artificial Sequence
  MKO10072628_B_Armcx3
  gRNA
acgattgcatgggctacgcc

SEQ ID NO: 72629 - DNA, 20 bp, Artificial Sequence
  MKO10072629_B_Armcx3
  gRNA
ctcgttagtaacagtcatat

SEQ ID NO: 72630 - DNA, 20 bp, Artificial Sequence
  MKO10072630_B_Armcx3
  gRNA
ctcgaagagctgtacagaaa

SEQ ID NO: 72631 - DNA, 20 bp, Artificial Sequence
  MKO10072631_B_Armcx4
  gRNA
tgattacatgggccgtgtac

SEQ ID NO: 72632 - DNA, 20 bp, Artificial Sequence
  MKO10072632_B_Armcx4
  gRNA
actagtggctgtactaaatc

SEQ ID NO: 72633 - DNA, 20 bp, Artificial Sequence
  MKO10072633_B_Armcx4
  gRNA
gtctggggcaagtacaatac

SEQ ID NO: 72634 - DNA, 20 bp, Artificial Sequence
  MKO10072634_B_Armcx5
  gRNA
acgagcttatcaaagtcaac

SEQ ID NO: 72635 - DNA, 20 bp, Artificial Sequence
  MKO10072635_B_Armcx5
  gRNA
ttcacttcttcgggggcatc

SEQ ID NO: 72636 - DNA, 20 bp, Artificial Sequence
  MKO10072636_B_Armcx5
  gRNA
aaccttaattgaaactcccc

SEQ ID NO: 72637 - DNA, 20 bp, Artificial Sequence
  MKO10072637_B_Armcx6
  gRNA
cagtttgtacatgcagtaac

SEQ ID NO: 72638 - DNA, 20 bp, Artificial Sequence
  MKO10072638_B_Armcx6
  gRNA
aagaagtgaggggaacgagc

SEQ ID NO: 72639 - DNA, 20 bp, Artificial Sequence
  MKO10072639_B_Armcx6
  gRNA
ccccaatatcagtaaacatc

SEQ ID NO: 72640 - DNA, 20 bp, Artificial Sequence
  MKO10072640_B_Arnt2
  gRNA
accggcaacaaatcgactga

SEQ ID NO: 72641 - DNA, 20 bp, Artificial Sequence
  MKO10072641_B_Arnt2
  gRNA
tgtgcgagaccgccatgcgc

SEQ ID NO: 72642 - DNA, 20 bp, Artificial Sequence
  MKO10072642_B_Arnt2
  gRNA
ggggccatgcctgcccgagg

SEQ ID NO: 72643 - DNA, 20 bp, Artificial Sequence
  MKO10072643_B_Arntl2
  gRNA
tatcagcgcccagtggcatc

SEQ ID NO: 72644 - DNA, 20 bp, Artificial Sequence
  MKO10072644_B_Arntl2
  gRNA
cgctgagcttgtccagtttg

SEQ ID NO: 72645 - DNA, 20 bp, Artificial Sequence
  MKO10072645_B_Arntl2
  gRNA
ggaaacttacctgatgccac

SEQ ID NO: 72646 - DNA, 20 bp, Artificial Sequence
  MKO10072646_B_Arntl
  gRNA
cccacagtcagattgaaaag

SEQ ID NO: 72647 - DNA, 20 bp, Artificial Sequence
  MKO10072647_B_Arntl
  gRNA
aactgaaacacctaattctc

SEQ ID NO: 72648 - DNA, 20 bp, Artificial Sequence
  MKO10072648_B_Arntl
  gRNA
acagacaaagatgaccctca

SEQ ID NO: 72649 - DNA, 20 bp, Artificial Sequence
  MKO10072649_B_Arnt
  gRNA
gctcctccaccttgaatccc

SEQ ID NO: 72650 - DNA, 20 bp, Artificial Sequence
  MKO10072650_B_Arnt
  gRNA
gctctttgtcattacacatc

SEQ ID NO: 72651 - DNA, 20 bp, Artificial Sequence
  MKO10072651_B_Arnt
  gRNA
agatgtgtaatgacaaagag

SEQ ID NO: 72652 - DNA, 20 bp, Artificial Sequence
  MKO10072652_B_Arpc1a
  gRNA
cctgagccccaataaccatg

SEQ ID NO: 72653 - DNA, 20 bp, Artificial Sequence
  MKO10072653_B_Arpc1a
  gRNA
tggcagtggcaccggcggct

SEQ ID NO: 72654 - DNA, 20 bp, Artificial Sequence
  MKO10072654_B_Arpc1a
  gRNA
tggcatctggaagcccaccc

SEQ ID NO: 72655 - DNA, 20 bp, Artificial Sequence
  MKO10072655_B_Arpc1b
  gRNA
ggtgcatggggtctgcttct

SEQ ID NO: 72656 - DNA, 20 bp, Artificial Sequence
  MKO10072656_B_Arpc1b
  gRNA
ccgctccacagtgctcagcc

SEQ ID NO: 72657 - DNA, 20 bp, Artificial Sequence
  MKO10072657_B_Arpc1b
  gRNA
tcacctgcacttgaagtcac

SEQ ID NO: 72658 - DNA, 20 bp, Artificial Sequence
  MKO10072658_B_Arpc2
  gRNA
gctgtagaagtaacatttgc

SEQ ID NO: 72659 - DNA, 20 bp, Artificial Sequence
  MKO10072659_B_Arpc2
  gRNA
gaagtatttctcaaacacag

SEQ ID NO: 72660 - DNA, 20 bp, Artificial Sequence
  MKO10072660_B_Arpc2
  gRNA
tatcatatttcaaatcctaa

SEQ ID NO: 72661 - DNA, 20 bp, Artificial Sequence
  MKO10072661_B_Arpc3
  gRNA
ccttgtagaatgaagcggac

SEQ ID NO: 72662 - DNA, 20 bp, Artificial Sequence
  MKO10072662_B_Arpc3
  gRNA
atccacaatgtccgtgtctt

SEQ ID NO: 72663 - DNA, 20 bp, Artificial Sequence
  MKO10072663_B_Arpc3
  gRNA
tgccaagcctgcgagcaaac

SEQ ID NO: 72664 - DNA, 20 bp, Artificial Sequence
  MKO10072664_B_Arpc4
  gRNA
agaacttctttatccttcga

SEQ ID NO: 72665 - DNA, 20 bp, Artificial Sequence
  MKO10072665_B_Arpc4
  gRNA
cctcagctacgatacgagcc

SEQ ID NO: 72666 - DNA, 20 bp, Artificial Sequence
  MKO10072666_B_Arpc4
  gRNA
tgtcgatctcctccatgaag

SEQ ID NO: 72667 - DNA, 20 bp, Artificial Sequence
  MKO10072667_B_Arpc5l
  gRNA
gtgagttccgcaaagctgca

SEQ ID NO: 72668 - DNA, 20 bp, Artificial Sequence
  MKO10072668_B_Arpc5l
  gRNA
gcagtgcagtgctactccag

SEQ ID NO: 72669 - DNA, 20 bp, Artificial Sequence
  MKO10072669_B_Arpc5l
  gRNA
tctccacaggccttagctgt

SEQ ID NO: 72670 - DNA, 20 bp, Artificial Sequence
  MKO10072670_B_Arpc5
  gRNA
tgcaggcagcatcgtcttga

SEQ ID NO: 72671 - DNA, 20 bp, Artificial Sequence
  MKO10072671_B_Arpc5
  gRNA
atatgacgagaacaagttcg

SEQ ID NO: 72672 - DNA, 20 bp, Artificial Sequence
  MKO10072672_B_Arpc5
  gRNA
accccactcctccagcagca

SEQ ID NO: 72673 - DNA, 20 bp, Artificial Sequence
  MKO10072673_B_Arpp19
  gRNA
ccctcagcggaaaccgtccc

SEQ ID NO: 72674 - DNA, 20 bp, Artificial Sequence
  MKO10072674_B_Arpp19
  gRNA
agcgtctgcggaggagcaaa

SEQ ID NO: 72675 - DNA, 20 bp, Artificial Sequence
  MKO10072675_B_Arpp19
  gRNA
cagccagcttgctagcaacc

SEQ ID NO: 72676 - DNA, 20 bp, Artificial Sequence
  MKO10072676_B_Arpp21
  gRNA
tagatttatcctcctcttgc

SEQ ID NO: 72677 - DNA, 20 bp, Artificial Sequence
  MKO10072677_B_Arpp21
  gRNA
cgtctgcccttcttccagta

SEQ ID NO: 72678 - DNA, 20 bp, Artificial Sequence
  MKO10072678_B_Arpp21
  gRNA
aggggaaagtcaccaggatc

SEQ ID NO: 72679 - DNA, 20 bp, Artificial Sequence
  MKO10072679_B_Arr3
  gRNA
gtcagtacctgaagtgtaaa

SEQ ID NO: 72680 - DNA, 20 bp, Artificial Sequence
  MKO10072680_B_Arr3
  gRNA
cgtgatgacttggatgtgat

SEQ ID NO: 72681 - DNA, 20 bp, Artificial Sequence
  MKO10072681_B_Arr3
  gRNA
tttaagaagactagctccaa

SEQ ID NO: 72682 - DNA, 20 bp, Artificial Sequence
  MKO10072682_B_Arrb1
  gRNA
cgcctttctttgagatactc

SEQ ID NO: 72683 - DNA, 20 bp, Artificial Sequence
  MKO10072683_B_Arrb1
  gRNA
tgtggaccacattgacctcg

SEQ ID NO: 72684 - DNA, 20 bp, Artificial Sequence
  MKO10072684_B_Arrb1
  gRNA
tcccccagatggtgtggtcc

SEQ ID NO: 72685 - DNA, 20 bp, Artificial Sequence
  MKO10072685_B_Arrb2
  gRNA
ccgagaagacctggatgtac

SEQ ID NO: 72686 - DNA, 20 bp, Artificial Sequence
  MKO10072686_B_Arrb2
  gRNA
tcctcagctcaccgtgtact

SEQ ID NO: 72687 - DNA, 20 bp, Artificial Sequence
  MKO10072687_B_Arrb2
  gRNA
ttccggtccttcaagtagtc

SEQ ID NO: 72688 - DNA, 20 bp, Artificial Sequence
  MKO10072688_B_Arrdc1
  gRNA
ctttgggaagattgtacacc

SEQ ID NO: 72689 - DNA, 20 bp, Artificial Sequence
  MKO10072689_B_Arrdc1
  gRNA
caccacccatgccccatcgt

SEQ ID NO: 72690 - DNA, 20 bp, Artificial Sequence
  MKO10072690_B_Arrdc1
  gRNA
agctatccgggtgacctgca

SEQ ID NO: 72691 - DNA, 20 bp, Artificial Sequence
  MKO10072691_B_Arrdc2
  gRNA
gggaaactcgtggcgtccag

SEQ ID NO: 72692 - DNA, 20 bp, Artificial Sequence
  MKO10072692_B_Arrdc2
  gRNA
gggagaaggtggcacgatcc

SEQ ID NO: 72693 - DNA, 20 bp, Artificial Sequence
  MKO10072693_B_Arrdc2
  gRNA
aggatcgtgccaccttctcc

SEQ ID NO: 72694 - DNA, 20 bp, Artificial Sequence
  MKO10072694_B_Arrdc3
  gRNA
gacatggcagtgtgcgctat

SEQ ID NO: 72695 - DNA, 20 bp, Artificial Sequence
  MKO10072695_B_Arrdc3
  gRNA
gccttcctgaatgaatagtg

SEQ ID NO: 72696 - DNA, 20 bp, Artificial Sequence
  MKO10072696_B_Arrdc3
  gRNA
gtagcccttcctttcaatct

SEQ ID NO: 72697 - DNA, 20 bp, Artificial Sequence
  MKO10072697_B_Arrdc4
  gRNA
cctttggcaacatcgtttac

SEQ ID NO: 72698 - DNA, 20 bp, Artificial Sequence
  MKO10072698_B_Arrdc4
  gRNA
gactcctatgctgaagacgc

SEQ ID NO: 72699 - DNA, 20 bp, Artificial Sequence
  MKO10072699_B_Arrdc4
  gRNA
gagcgtcaagatcgagagaa

SEQ ID NO: 72700 - DNA, 20 bp, Artificial Sequence
  MKO10072700_B_Arrdc5
  gRNA
cttggaccgggagcatatcc

SEQ ID NO: 72701 - DNA, 20 bp, Artificial Sequence
  MKO10072701_B_Arrdc5
  gRNA
tagtgccttcaacctgccgc

SEQ ID NO: 72702 - DNA, 20 bp, Artificial Sequence
  MKO10072702_B_Arrdc5
  gRNA
gtggccgatcttactgttga

SEQ ID NO: 72703 - DNA, 20 bp, Artificial Sequence
  MKO10072703_B_Arsa
  gRNA
gagttgatgcgcatgtccaa

SEQ ID NO: 72704 - DNA, 20 bp, Artificial Sequence
  MKO10072704_B_Arsa
  gRNA
tgcctgatcgaactgggagc

SEQ ID NO: 72705 - DNA, 20 bp, Artificial Sequence
  MKO10072705_B_Arsa
  gRNA
caaagcttcaccaagcgctc

SEQ ID NO: 72706 - DNA, 20 bp, Artificial Sequence
  MKO10072706_B_Arsb
  gRNA
tatgacggttgtagcccttt

SEQ ID NO: 72707 - DNA, 20 bp, Artificial Sequence
  MKO10072707_B_Arsb
  gRNA
cgaagtaggtatcgaatcct

SEQ ID NO: 72708 - DNA, 20 bp, Artificial Sequence
  MKO10072708_B_Arsb
  gRNA
tgaagactattacacccacg

SEQ ID NO: 72709 - DNA, 20 bp, Artificial Sequence
  MKO10072709_B_Arsg
  gRNA
cttccccaccgtgatagctc

SEQ ID NO: 72710 - DNA, 20 bp, Artificial Sequence
  MKO10072710_B_Arsg
  gRNA
aactacctgccgttgccaac

SEQ ID NO: 72711 - DNA, 20 bp, Artificial Sequence
  MKO10072711_B_Arsg
  gRNA
acgttggctggaactctgcc

SEQ ID NO: 72712 - DNA, 20 bp, Artificial Sequence
  MKO10072712_B_Arsi
  gRNA
agcagctgagggcgtcaaac

SEQ ID NO: 72713 - DNA, 20 bp, Artificial Sequence
  MKO10072713_B_Arsi
  gRNA
tagcggtataggtattctcg

SEQ ID NO: 72714 - DNA, 20 bp, Artificial Sequence
  MKO10072714_B_Arsi
  gRNA
gccaggtcctctcgttcgta

SEQ ID NO: 72715 - DNA, 20 bp, Artificial Sequence
  MKO10072715_B_Arsj
  gRNA
ctcctggacggtgtgcaaat

SEQ ID NO: 72716 - DNA, 20 bp, Artificial Sequence
  MKO10072716_B_Arsj
  gRNA
acgaaaacgacaatgcagct

SEQ ID NO: 72717 - DNA, 20 bp, Artificial Sequence
  MKO10072717_B_Arsj
  gRNA
agtgccacttcccaaccata

SEQ ID NO: 72718 - DNA, 20 bp, Artificial Sequence
  MKO10072718_B_Arsk
  gRNA
tcctatacaaaaaactgcac

SEQ ID NO: 72719 - DNA, 20 bp, Artificial Sequence
  MKO10072719_B_Arsk
  gRNA
tggatccaaattatacgaca

SEQ ID NO: 72720 - DNA, 20 bp, Artificial Sequence
  MKO10072720_B_Arsk
  gRNA
tcagtaaccgtgtggaagca

SEQ ID NO: 72721 - DNA, 20 bp, Artificial Sequence
  MKO10072721_B_Art1
  gRNA
ctggaagggcgctcagcaca

SEQ ID NO: 72722 - DNA, 20 bp, Artificial Sequence
  MKO10072722_B_Art1
  gRNA
tgctatgatgtctctcctac

SEQ ID NO: 72723 - DNA, 20 bp, Artificial Sequence
  MKO10072723_B_Art1
  gRNA
catcatagcaggaatcttca

SEQ ID NO: 72724 - DNA, 20 bp, Artificial Sequence
  MKO10072724_B_Art2a-ps
  gRNA
gctgggttagccaccaagtt

SEQ ID NO: 72725 - DNA, 20 bp, Artificial Sequence
  MKO10072725_B_Art2a-ps
  gRNA
ctgtgtatccctgttccttg

SEQ ID NO: 72726 - DNA, 20 bp, Artificial Sequence
  MKO10072726_B_Art2a-ps
  gRNA
gctcagcaagagtaagctgc

SEQ ID NO: 72727 - DNA, 20 bp, Artificial Sequence
  MKO10072727_B_Art2b
  gRNA
ctgtgtatccctgttccttg

SEQ ID NO: 72728 - DNA, 20 bp, Artificial Sequence
  MKO10072728_B_Art2b
  gRNA
gctcagcaagagtaagctgc

SEQ ID NO: 72729 - DNA, 20 bp, Artificial Sequence
  MKO10072729_B_Art2b
  gRNA
ctcctcattccctcgtgaag

SEQ ID NO: 72730 - DNA, 20 bp, Artificial Sequence
  MKO10072730_B_Art3
  gRNA
tttcagaatatattgaccct

SEQ ID NO: 72731 - DNA, 20 bp, Artificial Sequence
  MKO10072731_B_Art3
  gRNA
aatcagaagcttgaagactc

SEQ ID NO: 72732 - DNA, 20 bp, Artificial Sequence
  MKO10072732_B_Art3
  gRNA
cctgggttgtagagatacct

SEQ ID NO: 72733 - DNA, 20 bp, Artificial Sequence
  MKO10072733_B_Art4
  gRNA
gacacccgcggggagcactg

SEQ ID NO: 72734 - DNA, 20 bp, Artificial Sequence
  MKO10072734_B_Art4
  gRNA
ccctacctcagtgctccccg

SEQ ID NO: 72735 - DNA, 20 bp, Artificial Sequence
  MKO10072735_B_Art4
  gRNA
cagccgataaccactggagc

SEQ ID NO: 72736 - DNA, 20 bp, Artificial Sequence
  MKO10072736_B_Art5
  gRNA
tcgtcctaggatgattctgg

SEQ ID NO: 72737 - DNA, 20 bp, Artificial Sequence
  MKO10072737_B_Art5
  gRNA
agacactgctcttggaccca

SEQ ID NO: 72738 - DNA, 20 bp, Artificial Sequence
  MKO10072738_B_Art5
  gRNA
tccagcagtcgggcagccag

SEQ ID NO: 72739 - DNA, 20 bp, Artificial Sequence
  MKO10072739_B_Artn
  gRNA
gcacggaccacagatgcgcg

SEQ ID NO: 72740 - DNA, 20 bp, Artificial Sequence
  MKO10072740_B_Artn
  gRNA
cagcgactcacctgccacct

SEQ ID NO: 72741 - DNA, 20 bp, Artificial Sequence
  MKO10072741_B_Artn
  gRNA
aggcagtgggacaatgcagt

SEQ ID NO: 72742 - DNA, 20 bp, Artificial Sequence
  MKO10072742_B_Arv1
  gRNA
cagcccccgatgacgtgatc

SEQ ID NO: 72743 - DNA, 20 bp, Artificial Sequence
  MKO10072743_B_Arv1
  gRNA
tagcaggagcttcccgtagc

SEQ ID NO: 72744 - DNA, 20 bp, Artificial Sequence
  MKO10072744_B_Arv1
  gRNA
agagcctccggtttgtgttc

SEQ ID NO: 72745 - DNA, 20 bp, Artificial Sequence
  MKO10072745_B_Arvcf
  gRNA
cggcgactccgtgagtgcga

SEQ ID NO: 72746 - DNA, 20 bp, Artificial Sequence
  MKO10072746_B_Arvcf
  gRNA
ctgactatagcacggcaacc

SEQ ID NO: 72747 - DNA, 20 bp, Artificial Sequence
  MKO10072747_B_Arvcf
  gRNA
ataccttagtctcagtccgc

SEQ ID NO: 72748 - DNA, 20 bp, Artificial Sequence
  MKO10072748_B_Arxes1
  gRNA
caaaagcaacgctgtgaacc

SEQ ID NO: 72749 - DNA, 20 bp, Artificial Sequence
  MKO10072749_B_Arxes1
  gRNA
tgggacaagatccttctgcg

SEQ ID NO: 72750 - DNA, 20 bp, Artificial Sequence
  MKO10072750_B_Arxes1
  gRNA
cctggagacgtgcaggcgca

SEQ ID NO: 72751 - DNA, 20 bp, Artificial Sequence
  MKO10072751_B_Arxes2
  gRNA
caaaagcaacgctgtgaacc

SEQ ID NO: 72752 - DNA, 20 bp, Artificial Sequence
  MKO10072752_B_Arxes2
  gRNA
tgggacaagatccttctgcg

SEQ ID NO: 72753 - DNA, 20 bp, Artificial Sequence
  MKO10072753_B_Arxes2
  gRNA
cctggagacgtgcaggcgca

SEQ ID NO: 72754 - DNA, 20 bp, Artificial Sequence
  MKO10072754_B_Arx
  gRNA
cgtcaagcatagccgcgctg

SEQ ID NO: 72755 - DNA, 20 bp, Artificial Sequence
  MKO10072755_B_Arx
  gRNA
gcatcaccctgcgcttgatt

SEQ ID NO: 72756 - DNA, 20 bp, Artificial Sequence
  MKO10072756_B_Arx
  gRNA
gtccaggccgaatcaagcgc

SEQ ID NO: 72757 - DNA, 20 bp, Artificial Sequence
  MKO10072757_B_Ar
  gRNA
tgtccggcacacaccactcc

SEQ ID NO: 72758 - DNA, 20 bp, Artificial Sequence
  MKO10072758_B_Ar
  gRNA
attgcccatcttgtcgtctc

SEQ ID NO: 72759 - DNA, 20 bp, Artificial Sequence
  MKO10072759_B_Ar
  gRNA
gggtggaaagtaatagtcga

SEQ ID NO: 72760 - DNA, 20 bp, Artificial Sequence
  MKO10072760_B_As3mt
  gRNA
cactacccagatccaaaatt

SEQ ID NO: 72761 - DNA, 20 bp, Artificial Sequence
  MKO10072761_B_As3mt
  gRNA
tccctcaggtattatggctg

SEQ ID NO: 72762 - DNA, 20 bp, Artificial Sequence
  MKO10072762_B_As3mt
  gRNA
aacctatcttgaacaccaca

SEQ ID NO: 72763 - DNA, 20 bp, Artificial Sequence
  MKO10072763_B_Asah1
  gRNA
ggaaggctgccaatcatacc

SEQ ID NO: 72764 - DNA, 20 bp, Artificial Sequence
  MKO10072764_B_Asah1
  gRNA
aggggaattgcagatgttac

SEQ ID NO: 72765 - DNA, 20 bp, Artificial Sequence
  MKO10072765_B_Asah1
  gRNA
gctatagaggaccagttccg

SEQ ID NO: 72766 - DNA, 20 bp, Artificial Sequence
  MKO10072766_B_Asah2
  gRNA
tccagatgggtcaaatcgaa

SEQ ID NO: 72767 - DNA, 20 bp, Artificial Sequence
  MKO10072767_B_Asah2
  gRNA
ccactgaagttccgaaatga

SEQ ID NO: 72768 - DNA, 20 bp, Artificial Sequence
  MKO10072768_B_Asah2
  gRNA
acaagtgtcagatatcaatt

SEQ ID NO: 72769 - DNA, 20 bp, Artificial Sequence
  MKO10072769_B_Asap1
  gRNA
ccacaatgtgatcttcacct

SEQ ID NO: 72770 - DNA, 20 bp, Artificial Sequence
  MKO10072770_B_Asap1
  gRNA
ccaaggtgaagatcacattg

SEQ ID NO: 72771 - DNA, 20 bp, Artificial Sequence
  MKO10072771_B_Asap1
  gRNA
agaaaactatgcacaagttc

SEQ ID NO: 72772 - DNA, 20 bp, Artificial Sequence
  MKO10072772_B_Asap2
  gRNA
ttgctgaaaggagatctgaa

SEQ ID NO: 72773 - DNA, 20 bp, Artificial Sequence
  MKO10072773_B_Asap2
  gRNA
caaaatgaagaaatctgtga

SEQ ID NO: 72774 - DNA, 20 bp, Artificial Sequence
  MKO10072774_B_Asap2
  gRNA
cacctcctcgatggccgcca

SEQ ID NO: 72775 - DNA, 20 bp, Artificial Sequence
  MKO10072775_B_Asap3
  gRNA
gcattaccgagaggccgtgg

SEQ ID NO: 72776 - DNA, 20 bp, Artificial Sequence
  MKO10072776_B_Asap3
  gRNA
cctctctggtgaatacagcc

SEQ ID NO: 72777 - DNA, 20 bp, Artificial Sequence
  MKO10072777_B_Asap3
  gRNA
ccaggattccaaaaagcatc

SEQ ID NO: 72778 - DNA, 20 bp, Artificial Sequence
  MKO10072778_B_Asb10
  gRNA
tcttgcaggtgctggatcgc

SEQ ID NO: 72779 - DNA, 20 bp, Artificial Sequence
  MKO10072779_B_Asb10
  gRNA
catgtccccacggaccatcg

SEQ ID NO: 72780 - DNA, 20 bp, Artificial Sequence
  MKO10072780_B_Asb10
  gRNA
ttgtgcgctccgcagtcacc

SEQ ID NO: 72781 - DNA, 20 bp, Artificial Sequence
  MKO10072781_B_Asb11
  gRNA
atccacgaagcagtgaagcg

SEQ ID NO: 72782 - DNA, 20 bp, Artificial Sequence
  MKO10072782_B_Asb11
  gRNA
gctgggaacgcctctgtatg

SEQ ID NO: 72783 - DNA, 20 bp, Artificial Sequence
  MKO10072783_B_Asb11
  gRNA
tcttcacacaatcaactctc

SEQ ID NO: 72784 - DNA, 20 bp, Artificial Sequence
  MKO10072784_B_Asb12
  gRNA
tggcttgtgactggttcgcc

SEQ ID NO: 72785 - DNA, 20 bp, Artificial Sequence
  MKO10072785_B_Asb12
  gRNA
tgaaccgtttataacgttcc

SEQ ID NO: 72786 - DNA, 20 bp, Artificial Sequence
  MKO10072786_B_Asb12
  gRNA
gaacacgacttaaaaggccc

SEQ ID NO: 72787 - DNA, 20 bp, Artificial Sequence
  MKO10072787_B_Asb13
  gRNA
gcgcacgcccgttcatgagg

SEQ ID NO: 72788 - DNA, 20 bp, Artificial Sequence
  MKO10072788_B_Asb13
  gRNA
agaagccctcggactacacg

SEQ ID NO: 72789 - DNA, 20 bp, Artificial Sequence
  MKO10072789_B_Asb13
  gRNA
ccgctgagccgcctcatgaa

SEQ ID NO: 72790 - DNA, 20 bp, Artificial Sequence
  MKO10072790_B_Asb14
  gRNA
tgcactgctgccttatgcag

SEQ ID NO: 72791 - DNA, 20 bp, Artificial Sequence
  MKO10072791_B_Asb14
  gRNA
attcccattggcttcatcaa

SEQ ID NO: 72792 - DNA, 20 bp, Artificial Sequence
  MKO10072792_B_Asb14
  gRNA
atcttcttataatcatcact

SEQ ID NO: 72793 - DNA, 20 bp, Artificial Sequence
  MKO10072793_B_Asb15
  gRNA
caagggtgtttctccatcac

SEQ ID NO: 72794 - DNA, 20 bp, Artificial Sequence
  MKO10072794_B_Asb15
  gRNA
tgcccactcaccttgcctta

SEQ ID NO: 72795 - DNA, 20 bp, Artificial Sequence
  MKO10072795_B_Asb15
  gRNA
cgtctcaagtatctgttgaa

SEQ ID NO: 72796 - DNA, 20 bp, Artificial Sequence
  MKO10072796_B_Asb16
  gRNA
ctcgaacagccaagcgtgcc

SEQ ID NO: 72797 - DNA, 20 bp, Artificial Sequence
  MKO10072797_B_Asb16
  gRNA
ttgggcacacgcctcgtgca

SEQ ID NO: 72798 - DNA, 20 bp, Artificial Sequence
  MKO10072798_B_Asb16
  gRNA
gggccgcagcctgacgacag

SEQ ID NO: 72799 - DNA, 20 bp, Artificial Sequence
  MKO10072799_B_Asb17
  gRNA
caaaagcaatatagtccgtg

SEQ ID NO: 72800 - DNA, 20 bp, Artificial Sequence
  MKO10072800_B_Asb17
  gRNA
gacgcccaattattcaaaat

SEQ ID NO: 72801 - DNA, 20 bp, Artificial Sequence
  MKO10072801_B_Asb17
  gRNA
catcccgccaacaagataca

SEQ ID NO: 72802 - DNA, 20 bp, Artificial Sequence
  MKO10072802_B_Asb18
  gRNA
ggcggtatggttcccgagac

SEQ ID NO: 72803 - DNA, 20 bp, Artificial Sequence
  MKO10072803_B_Asb18
  gRNA
actgatctcaaacaccgcgt

SEQ ID NO: 72804 - DNA, 20 bp, Artificial Sequence
  MKO10072804_B_Asb18
  gRNA
catccctgaagaagtatacc

SEQ ID NO: 72805 - DNA, 20 bp, Artificial Sequence
  MKO10072805_B_Asb1
  gRNA
cctcggcccctttgcgtatg

SEQ ID NO: 72806 - DNA, 20 bp, Artificial Sequence
  MKO10072806_B_Asb1
  gRNA
ggaccttgctgagtttgtgc

SEQ ID NO: 72807 - DNA, 20 bp, Artificial Sequence
  MKO10072807_B_Asb1
  gRNA
cagtgcaggtcctaatctga

SEQ ID NO: 72808 - DNA, 20 bp, Artificial Sequence
  MKO10072808_B_Asb2
  gRNA
cattgaccaacgcacactgc

SEQ ID NO: 72809 - DNA, 20 bp, Artificial Sequence
  MKO10072809_B_Asb2
  gRNA
ttcgtctcccgagaacccac

SEQ ID NO: 72810 - DNA, 20 bp, Artificial Sequence
  MKO10072810_B_Asb2
  gRNA
ggccatagtaggcagcctcg

SEQ ID NO: 72811 - DNA, 20 bp, Artificial Sequence
  MKO10072811_B_Asb3
  gRNA
aaatgtcaattgccaagcct

SEQ ID NO: 72812 - DNA, 20 bp, Artificial Sequence
  MKO10072812_B_Asb3
  gRNA
tcttgtgcagcaataaacaa

SEQ ID NO: 72813 - DNA, 20 bp, Artificial Sequence
  MKO10072813_B_Asb3
  gRNA
ctgtttgtggctgctcagta

SEQ ID NO: 72814 - DNA, 20 bp, Artificial Sequence
  MKO10072814_B_Asb4
  gRNA
atgcctatgaacacattcga

SEQ ID NO: 72815 - DNA, 20 bp, Artificial Sequence
  MKO10072815_B_Asb4
  gRNA
accatcaactgtcgtcccaa

SEQ ID NO: 72816 - DNA, 20 bp, Artificial Sequence
  MKO10072816_B_Asb4
  gRNA
gttccatcgaatgtgttcat

SEQ ID NO: 72817 - DNA, 20 bp, Artificial Sequence
  MKO10072817_B_Asb5
  gRNA
gagtccttgcacaggccacg

SEQ ID NO: 72818 - DNA, 20 bp, Artificial Sequence
  MKO10072818_B_Asb5
  gRNA
cctaggcaggcctcatggag

SEQ ID NO: 72819 - DNA, 20 bp, Artificial Sequence
  MKO10072819_B_Asb5
  gRNA
cacagcagttccattgcatc

SEQ ID NO: 72820 - DNA, 20 bp, Artificial Sequence
  MKO10072820_B_Asb6
  gRNA
accagcagctcaaccatgtc

SEQ ID NO: 72821 - DNA, 20 bp, Artificial Sequence
  MKO10072821_B_Asb6
  gRNA
gctgctgaccttcgaaattg

SEQ ID NO: 72822 - DNA, 20 bp, Artificial Sequence
  MKO10072822_B_Asb6
  gRNA
gccctgcctgcagcgcctct

SEQ ID NO: 72823 - DNA, 20 bp, Artificial Sequence
  MKO10072823_B_Asb7
  gRNA
gtagctcatcaagcagcttc

SEQ ID NO: 72824 - DNA, 20 bp, Artificial Sequence
  MKO10072824_B_Asb7
  gRNA
attaaaattcgacagtgtat

SEQ ID NO: 72825 - DNA, 20 bp, Artificial Sequence
  MKO10072825_B_Asb7
  gRNA
ccaaatggccgagatgccaa

SEQ ID NO: 72826 - DNA, 20 bp, Artificial Sequence
  MKO10072826_B_Asb8
  gRNA
cttcccacatgacaacgtag

SEQ ID NO: 72827 - DNA, 20 bp, Artificial Sequence
  MKO10072827_B_Asb8
  gRNA
ctctacgttgtcatgtggga

SEQ ID NO: 72828 - DNA, 20 bp, Artificial Sequence
  MKO10072828_B_Asb8
  gRNA
cgactgcgtagagctcctcc

SEQ ID NO: 72829 - DNA, 20 bp, Artificial Sequence
  MKO10072829_B_Asb9
  gRNA
atccatgaggctgctaaaag

SEQ ID NO: 72830 - DNA, 20 bp, Artificial Sequence
  MKO10072830_B_Asb9
  gRNA
gtgaatctgctgctacagca

SEQ ID NO: 72831 - DNA, 20 bp, Artificial Sequence
  MKO10072831_B_Asb9
  gRNA
gctgatgttatagtcaatat

SEQ ID NO: 72832 - DNA, 20 bp, Artificial Sequence
  MKO10072832_B_Ascc1
  gRNA
gatcctgcagcgctgtaaag

SEQ ID NO: 72833 - DNA, 20 bp, Artificial Sequence
  MKO10072833_B_Ascc1
  gRNA
tctattaacattccgaagca

SEQ ID NO: 72834 - DNA, 20 bp, Artificial Sequence
  MKO10072834_B_Ascc1
  gRNA
gttggtacttctaagtgagc

SEQ ID NO: 72835 - DNA, 20 bp, Artificial Sequence
  MKO10072835_B_Ascc2
  gRNA
taccccgaaagtttgatgag

SEQ ID NO: 72836 - DNA, 20 bp, Artificial Sequence
  MKO10072836_B_Ascc2
  gRNA
ggatcttcgggatgtcaaag

SEQ ID NO: 72837 - DNA, 20 bp, Artificial Sequence
  MKO10072837_B_Ascc2
  gRNA
gccaagttactatactgacc

SEQ ID NO: 72838 - DNA, 20 bp, Artificial Sequence
  MKO10072838_B_Ascc3
  gRNA
tcaatcagatccagtccttc

SEQ ID NO: 72839 - DNA, 20 bp, Artificial Sequence
  MKO10072839_B_Ascc3
  gRNA
gtgacttgacatccataatt

SEQ ID NO: 72840 - DNA, 20 bp, Artificial Sequence
  MKO10072840_B_Ascc3
  gRNA
ttgtttactacctctgtatc

SEQ ID NO: 72841 - DNA, 20 bp, Artificial Sequence
  MKO10072841_B_Ascl1
  gRNA
cgcggtgagcgctgcctttc

SEQ ID NO: 72842 - DNA, 20 bp, Artificial Sequence
  MKO10072842_B_Ascl1
  gRNA
gcgctcgttgcggcgcgcca

SEQ ID NO: 72843 - DNA, 20 bp, Artificial Sequence
  MKO10072843_B_Ascl1
  gRNA
cgaagccgctgaagttgagc

SEQ ID NO: 72844 - DNA, 20 bp, Artificial Sequence
  MKO10072844_B_Ascl2
  gRNA
cccgcgctccgcctactcgt

SEQ ID NO: 72845 - DNA, 20 bp, Artificial Sequence
  MKO10072845_B_Ascl2
  gRNA
gccgcaccagaactcgtagc

SEQ ID NO: 72846 - DNA, 20 bp, Artificial Sequence
  MKO10072846_B_Ascl2
  gRNA
agtacattcgtgcgctgcag

SEQ ID NO: 72847 - DNA, 20 bp, Artificial Sequence
  MKO10072847_B_Ascl3
  gRNA
cggcccacttaccactgtcc

SEQ ID NO: 72848 - DNA, 20 bp, Artificial Sequence
  MKO10072848_B_Ascl3
  gRNA
ccatgccttacaccaactac

SEQ ID NO: 72849 - DNA, 20 bp, Artificial Sequence
  MKO10072849_B_Ascl3
  gRNA
gagccgcagctggctgttcg

SEQ ID NO: 72850 - DNA, 20 bp, Artificial Sequence
  MKO10072850_B_Ascl4
  gRNA
gccgctcgcgctcgttgcgt

SEQ ID NO: 72851 - DNA, 20 bp, Artificial Sequence
  MKO10072851_B_Ascl4
  gRNA
gcgcgtgcgctgtgtgaacg

SEQ ID NO: 72852 - DNA, 20 bp, Artificial Sequence
  MKO10072852_B_Ascl4
  gRNA
ctcgccctgcagcgagtctg

SEQ ID NO: 72853 - DNA, 20 bp, Artificial Sequence
  MKO10072853_B_Ascl5
  gRNA
gcgcgtcaagtgcgtgaatg

SEQ ID NO: 72854 - DNA, 20 bp, Artificial Sequence
  MKO10072854_B_Ascl5
  gRNA
agaagcgcaacgagcgagag

SEQ ID NO: 72855 - DNA, 20 bp, Artificial Sequence
  MKO10072855_B_Ascl5
  gRNA
ggcgggaggtggcgcgccgt

SEQ ID NO: 72856 - DNA, 20 bp, Artificial Sequence
  MKO10072856_B_Asf1a
  gRNA
taggctgatgcaccgaatgc

SEQ ID NO: 72857 - DNA, 20 bp, Artificial Sequence
  MKO10072857_B_Asf1a
  gRNA
tgcattaccgtcagcgtcaa

SEQ ID NO: 72858 - DNA, 20 bp, Artificial Sequence
  MKO10072858_B_Asf1a
  gRNA
tgttatgttagaatcccaca

SEQ ID NO: 72859 - DNA, 20 bp, Artificial Sequence
  MKO10072859_B_Asf1b
  gRNA
tgtcccagttgatatggaat

SEQ ID NO: 72860 - DNA, 20 bp, Artificial Sequence
  MKO10072860_B_Asf1b
  gRNA
tgttgacatagtagcccaca

SEQ ID NO: 72861 - DNA, 20 bp, Artificial Sequence
  MKO10072861_B_Asf1b
  gRNA
cataaatgatcttccactcc

SEQ ID NO: 72862 - DNA, 20 bp, Artificial Sequence
  MKO10072862_B_Asgr1
  gRNA
ttagagccagcagatcttcc

SEQ ID NO: 72863 - DNA, 20 bp, Artificial Sequence
  MKO10072863_B_Asgr1
  gRNA
gagcctcagcattctgttgc

SEQ ID NO: 72864 - DNA, 20 bp, Artificial Sequence
  MKO10072864_B_Asgr1
  gRNA
cttgcttagattcccaactc

SEQ ID NO: 72865 - DNA, 20 bp, Artificial Sequence
  MKO10072865_B_Asgr2
  gRNA
ccagagccccgaactccatc

SEQ ID NO: 72866 - DNA, 20 bp, Artificial Sequence
  MKO10072866_B_Asgr2
  gRNA
aacgtggagcagaggcgctg

SEQ ID NO: 72867 - DNA, 20 bp, Artificial Sequence
  MKO10072867_B_Asgr2
  gRNA
tacagctgcaagaagagttt

SEQ ID NO: 72868 - DNA, 20 bp, Artificial Sequence
  MKO10072868_B_Ash1l
  gRNA
attgtagccctactcgtaaa

SEQ ID NO: 72869 - DNA, 20 bp, Artificial Sequence
  MKO10072869_B_Ash1l
  gRNA
aaggtttatcggaagctgac

SEQ ID NO: 72870 - DNA, 20 bp, Artificial Sequence
  MKO10072870_B_Ash1l
  gRNA
ggccgcccagtttgtcagcc

SEQ ID NO: 72871 - DNA, 20 bp, Artificial Sequence
  MKO10072871_B_Ash2l
  gRNA
tcacgacgtgtctattccaa

SEQ ID NO: 72872 - DNA, 20 bp, Artificial Sequence
  MKO10072872_B_Ash2l
  gRNA
attgcaatggaagctgtagt

SEQ ID NO: 72873 - DNA, 20 bp, Artificial Sequence
  MKO10072873_B_Ash2l
  gRNA
caataacattgtcaaaacaa

SEQ ID NO: 72874 - DNA, 20 bp, Artificial Sequence
  MKO10072874_B_Asic1
  gRNA
gggcttgaagctacggaagt

SEQ ID NO: 72875 - DNA, 20 bp, Artificial Sequence
  MKO10072875_B_Asic1
  gRNA
ggaaaactgcaactgccgta

SEQ ID NO: 72876 - DNA, 20 bp, Artificial Sequence
  MKO10072876_B_Asic1
  gRNA
tgattgtgaaacccgttacc

SEQ ID NO: 72877 - DNA, 20 bp, Artificial Sequence
  MKO10072877_B_Asic2
  gRNA
tcaagggggggacgggcaac

SEQ ID NO: 72878 - DNA, 20 bp, Artificial Sequence
  MKO10072878_B_Asic2
  gRNA
gaggaaacaacgtttgaagc

SEQ ID NO: 72879 - DNA, 20 bp, Artificial Sequence
  MKO10072879_B_Asic2
  gRNA
tccggggttccagaccttcg

SEQ ID NO: 72880 - DNA, 20 bp, Artificial Sequence
  MKO10072880_B_Asic3
  gRNA
gccaacatacttgctgttgc

SEQ ID NO: 72881 - DNA, 20 bp, Artificial Sequence
  MKO10072881_B_Asic3
  gRNA
actcggatccccacctcaaa

SEQ ID NO: 72882 - DNA, 20 bp, Artificial Sequence
  MKO10072882_B_Asic3
  gRNA
agagctgctcaccactccta

SEQ ID NO: 72883 - DNA, 20 bp, Artificial Sequence
  MKO10072883_B_Asic4
  gRNA
gccgggcggaaagcgagctc

SEQ ID NO: 72884 - DNA, 20 bp, Artificial Sequence
  MKO10072884_B_Asic4
  gRNA
aggcggcatgggtagtggcc

SEQ ID NO: 72885 - DNA, 20 bp, Artificial Sequence
  MKO10072885_B_Asic4
  gRNA
ggatgctcacccgctgttcc

SEQ ID NO: 72886 - DNA, 20 bp, Artificial Sequence
  MKO10072886_B_Asic5
  gRNA
ctccaaagtcctccgccttc

SEQ ID NO: 72887 - DNA, 20 bp, Artificial Sequence
  MKO10072887_B_Asic5
  gRNA
gaaccagaacaaagttcgaa

SEQ ID NO: 72888 - DNA, 20 bp, Artificial Sequence
  MKO10072888_B_Asic5
  gRNA
ttatctcaataacgacactt

SEQ ID NO: 72889 - DNA, 20 bp, Artificial Sequence
  MKO10072889_B_Asl
  gRNA
gggtgctgtcgaccccatca

SEQ ID NO: 72890 - DNA, 20 bp, Artificial Sequence
  MKO10072890_B_Asl
  gRNA
ttggccagagcgggaagcta

SEQ ID NO: 72891 - DNA, 20 bp, Artificial Sequence
  MKO10072891_B_Asl
  gRNA
cacaggtggtcacggacctc

SEQ ID NO: 72892 - DNA, 20 bp, Artificial Sequence
  MKO10072892_B_Asmt
  gRNA
gcgagaggtcgaaggccgtg

SEQ ID NO: 72893 - DNA, 20 bp, Artificial Sequence
  MKO10072893_B_Asmt
  gRNA
aagggcggagccagtacgcg

SEQ ID NO: 72894 - DNA, 20 bp, Artificial Sequence
  MKO10072894_B_Asmt
  gRNA
acaggtaggtggtgcccgcc

SEQ ID NO: 72895 - DNA, 20 bp, Artificial Sequence
  MKO10072895_B_Asna1
  gRNA
gtcttcctcgaagaactcgt

SEQ ID NO: 72896 - DNA, 20 bp, Artificial Sequence
  MKO10072896_B_Asna1
  gRNA
atctgttagcgaacagttca

SEQ ID NO: 72897 - DNA, 20 bp, Artificial Sequence
  MKO10072897_B_Asna1
  gRNA
cctggcagtccagctgtcga

SEQ ID NO: 72898 - DNA, 20 bp, Artificial Sequence
  MKO10072898_B_Asnsd1
  gRNA
gtagacctcactctgccccg

SEQ ID NO: 72899 - DNA, 20 bp, Artificial Sequence
  MKO10072899_B_Asnsd1
  gRNA
taactctgtcatcacgacca

SEQ ID NO: 72900 - DNA, 20 bp, Artificial Sequence
  MKO10072900_B_Asnsd1
  gRNA
gacagagttattggtgatca

SEQ ID NO: 72901 - DNA, 20 bp, Artificial Sequence
  MKO10072901_B_Asns
  gRNA
cgatgcctcctttgtcatag

SEQ ID NO: 72902 - DNA, 20 bp, Artificial Sequence
  MKO10072902_B_Asns
  gRNA
cagcaaccaagctcgagtcc

SEQ ID NO: 72903 - DNA, 20 bp, Artificial Sequence
  MKO10072903_B_Asns
  gRNA
cgagaaaaccatctgtatgc

SEQ ID NO: 72904 - DNA, 20 bp, Artificial Sequence
  MKO10072904_B_Aspa
  gRNA
tcagctctaaggacaccgtg

SEQ ID NO: 72905 - DNA, 20 bp, Artificial Sequence
  MKO10072905_B_Aspa
  gRNA
gtggttgcatatttgagtga

SEQ ID NO: 72906 - DNA, 20 bp, Artificial Sequence
  MKO10072906_B_Aspa
  gRNA
tcagatgtttcactatatta

SEQ ID NO: 72907 - DNA, 20 bp, Artificial Sequence
  MKO10072907_B_Aspdh
  gRNA
ccgtgtcattggggtgcttg

SEQ ID NO: 72908 - DNA, 20 bp, Artificial Sequence
  MKO10072908_B_Aspdh
  gRNA
ctcgggccacaaacacagtg

SEQ ID NO: 72909 - DNA, 20 bp, Artificial Sequence
  MKO10072909_B_Aspdh
  gRNA
ccttcgccatgcaaacctcc

SEQ ID NO: 72910 - DNA, 20 bp, Artificial Sequence
  MKO10072910_B_Aspg
  gRNA
gcaccgtgtagatgatcctc

SEQ ID NO: 72911 - DNA, 20 bp, Artificial Sequence
  MKO10072911_B_Aspg
  gRNA
ccacgatgaagagtatgcac

SEQ ID NO: 72912 - DNA, 20 bp, Artificial Sequence
  MKO10072912_B_Aspg
  gRNA
caccctctacctctatggtt

SEQ ID NO: 72913 - DNA, 20 bp, Artificial Sequence
  MKO10072913_B_Asphd1
  gRNA
gcctcgagtggtcttcattg

SEQ ID NO: 72914 - DNA, 20 bp, Artificial Sequence
  MKO10072914_B_Asphd1
  gRNA
ccaacaaccaactcacaacc

SEQ ID NO: 72915 - DNA, 20 bp, Artificial Sequence
  MKO10072915_B_Asphd1
  gRNA
acaggcctgaagatccctcc

SEQ ID NO: 72916 - DNA, 20 bp, Artificial Sequence
  MKO10072916_B_Asphd2
  gRNA
acgttcagcagctgccacgt

SEQ ID NO: 72917 - DNA, 20 bp, Artificial Sequence
  MKO10072917_B_Asphd2
  gRNA
cttcatggaacgcagtgtgc

SEQ ID NO: 72918 - DNA, 20 bp, Artificial Sequence
  MKO10072918_B_Asphd2
  gRNA
tggggggcgagccccagtgc

SEQ ID NO: 72919 - DNA, 20 bp, Artificial Sequence
  MKO10072919_B_Asph
  gRNA
tggcgatggagactttgatg

SEQ ID NO: 72920 - DNA, 20 bp, Artificial Sequence
  MKO10072920_B_Asph
  gRNA
gtacctctgataagttataa

SEQ ID NO: 72921 - DNA, 20 bp, Artificial Sequence
  MKO10072921_B_Asph
  gRNA
gtacttgcctaataaaactt

SEQ ID NO: 72922 - DNA, 20 bp, Artificial Sequence
  MKO10072922_B_Aspm
  gRNA
ctgcaactgttgtcgttgct

SEQ ID NO: 72923 - DNA, 20 bp, Artificial Sequence
  MKO10072923_B_Aspm
  gRNA
catttcctagtaatatagcc

SEQ ID NO: 72924 - DNA, 20 bp, Artificial Sequence
  MKO10072924_B_Aspm
  gRNA
ccgtttacctttagaaacat

SEQ ID NO: 72925 - DNA, 20 bp, Artificial Sequence
  MKO10072925_B_Aspn
  gRNA
gcaaaccctcttgagaacaa

SEQ ID NO: 72926 - DNA, 20 bp, Artificial Sequence
  MKO10072926_B_Aspn
  gRNA
taagtggaatttcacttagt

SEQ ID NO: 72927 - DNA, 20 bp, Artificial Sequence
  MKO10072927_B_Aspn
  gRNA
aaatgaagctccagcaaagt

SEQ ID NO: 72928 - DNA, 20 bp, Artificial Sequence
  MKO10072928_B_Asprv1
  gRNA
tcccttcaactcgtccaggc

SEQ ID NO: 72929 - DNA, 20 bp, Artificial Sequence
  MKO10072929_B_Asprv1
  gRNA
tcctccaaggagctcccgac

SEQ ID NO: 72930 - DNA, 20 bp, Artificial Sequence
  MKO10072930_B_Asprv1
  gRNA
gttcctgaaagagtcgctca

SEQ ID NO: 72931 - DNA, 20 bp, Artificial Sequence
  MKO10072931_B_Aspscr1
  gRNA
acagaaagcgtcctgcaacc

SEQ ID NO: 72932 - DNA, 20 bp, Artificial Sequence
  MKO10072932_B_Aspscr1
  gRNA
gaacacaacccttcagtcac

SEQ ID NO: 72933 - DNA, 20 bp, Artificial Sequence
  MKO10072933_B_Aspscr1
  gRNA
ctgaagggttgtgttctgta

SEQ ID NO: 72934 - DNA, 20 bp, Artificial Sequence
  MKO10072934_B_Asrgl1
  gRNA
gcgcgagggcatcgccagag

SEQ ID NO: 72935 - DNA, 20 bp, Artificial Sequence
  MKO10072935_B_Asrgl1
  gRNA
gttggagactcgccttgcat

SEQ ID NO: 72936 - DNA, 20 bp, Artificial Sequence
  MKO10072936_B_Asrgl1
  gRNA
aacaagccgtgcaagtttaa

SEQ ID NO: 72937 - DNA, 20 bp, Artificial Sequence
  MKO10072937_B_Ass1
  gRNA
taacatcttaccttaatctg

SEQ ID NO: 72938 - DNA, 20 bp, Artificial Sequence
  MKO10072938_B_Ass1
  gRNA
acaggccaacattggccaga

SEQ ID NO: 72939 - DNA, 20 bp, Artificial Sequence
  MKO10072939_B_Ass1
  gRNA
aagcttcagcgccttcttcc

SEQ ID NO: 72940 - DNA, 20 bp, Artificial Sequence
  MKO10072940_B_Aste1
  gRNA
cctaccagggctgttgacga

SEQ ID NO: 72941 - DNA, 20 bp, Artificial Sequence
  MKO10072941_B_Aste1
  gRNA
catgcggccgggtccaagag

SEQ ID NO: 72942 - DNA, 20 bp, Artificial Sequence
  MKO10072942_B_Aste1
  gRNA
ggtgcttaccaagttaggtt

SEQ ID NO: 72943 - DNA, 20 bp, Artificial Sequence
  MKO10072943_B_Astl
  gRNA
accgctacatccaagtcaac

SEQ ID NO: 72944 - DNA, 20 bp, Artificial Sequence
  MKO10072944_B_Astl
  gRNA
tcccagatgaactcagccgc

SEQ ID NO: 72945 - DNA, 20 bp, Artificial Sequence
  MKO10072945_B_Astl
  gRNA
ggataatgtccccttctacc

SEQ ID NO: 72946 - DNA, 20 bp, Artificial Sequence
  MKO10072946_B_Astn1
  gRNA
attgctgcctccagcgcacc

SEQ ID NO: 72947 - DNA, 20 bp, Artificial Sequence
  MKO10072947_B_Astn1
  gRNA
gtccccttcagggttcaaga

SEQ ID NO: 72948 - DNA, 20 bp, Artificial Sequence
  MKO10072948_B_Astn1
  gRNA
tatcatagccacaagccccg

SEQ ID NO: 72949 - DNA, 20 bp, Artificial Sequence
  MKO10072949_B_Astn2
  gRNA
agccaaccacgtctcccgtg

SEQ ID NO: 72950 - DNA, 20 bp, Artificial Sequence
  MKO10072950_B_Astn2
  gRNA
cactgtatgcccagcgacgc

SEQ ID NO: 72951 - DNA, 20 bp, Artificial Sequence
  MKO10072951_B_Astn2
  gRNA
gcggtactgctctgtgtaga

SEQ ID NO: 72952 - DNA, 20 bp, Artificial Sequence
  MKO10072952_B_Asun
  gRNA
acaaggctatcttcaccaac

SEQ ID NO: 72953 - DNA, 20 bp, Artificial Sequence
  MKO10072953_B_Asun
  gRNA
ttgattcacacctacccagt

SEQ ID NO: 72954 - DNA, 20 bp, Artificial Sequence
  MKO10072954_B_Asun
  gRNA
gaatttcattgttagtgatt

SEQ ID NO: 72955 - DNA, 20 bp, Artificial Sequence
  MKO10072955_B_Asxl1
  gRNA
atgacctgcagaatctgttt

SEQ ID NO: 72956 - DNA, 20 bp, Artificial Sequence
  MKO10072956_B_Asxl1
  gRNA
gacaccaaaacagattctgc

SEQ ID NO: 72957 - DNA, 20 bp, Artificial Sequence
  MKO10072957_B_Asxl1
  gRNA
cccacagctttccacatcag

SEQ ID NO: 72958 - DNA, 20 bp, Artificial Sequence
  MKO10072958_B_Asxl2
  gRNA
gagtcataaagaaattcttc

SEQ ID NO: 72959 - DNA, 20 bp, Artificial Sequence
  MKO10072959_B_Asxl2
  gRNA
aagaatttctttatgactca

SEQ ID NO: 72960 - DNA, 20 bp, Artificial Sequence
  MKO10072960_B_Asxl2
  gRNA
tttcagaaagatgtgccaga

SEQ ID NO: 72961 - DNA, 20 bp, Artificial Sequence
  MKO10072961_B_Asxl3
  gRNA
ttaggatccgagtctaaaaa

SEQ ID NO: 72962 - DNA, 20 bp, Artificial Sequence
  MKO10072962_B_Asxl3
  gRNA
ctgccatctcagcgccatcc

SEQ ID NO: 72963 - DNA, 20 bp, Artificial Sequence
  MKO10072963_B_Asxl3
  gRNA
tgctcatcagacacctttaa

SEQ ID NO: 72964 - DNA, 20 bp, Artificial Sequence
  MKO10072964_B_Asz1
  gRNA
agagctggttcgcttccttt

SEQ ID NO: 72965 - DNA, 20 bp, Artificial Sequence
  MKO10072965_B_Asz1
  gRNA
ataagtgcttgttctgctcg

SEQ ID NO: 72966 - DNA, 20 bp, Artificial Sequence
  MKO10072966_B_Asz1
  gRNA
tcttacctacaagcagtatt

SEQ ID NO: 72967 - DNA, 20 bp, Artificial Sequence
  MKO10072967_B_Atad1
  gRNA
tcatcatcgctgtagcttcg

SEQ ID NO: 72968 - DNA, 20 bp, Artificial Sequence
  MKO10072968_B_Atad1
  gRNA
agactactgcagcctccaaa

SEQ ID NO: 72969 - DNA, 20 bp, Artificial Sequence
  MKO10072969_B_Atad1
  gRNA
atacgcacatgcatattaag

SEQ ID NO: 72970 - DNA, 20 bp, Artificial Sequence
  MKO10072970_B_Atad2b
  gRNA
tgtttcaaagtgcgtttggc

SEQ ID NO: 72971 - DNA, 20 bp, Artificial Sequence
  MKO10072971_B_Atad2b
  gRNA
ggcgacctttcatgtataaa

SEQ ID NO: 72972 - DNA, 20 bp, Artificial Sequence
  MKO10072972_B_Atad2b
  gRNA
cttcgaagccacccccttcg

SEQ ID NO: 72973 - DNA, 20 bp, Artificial Sequence
  MKO10072973_B_Atad2
  gRNA
accttaaagagcgcgtgttg

SEQ ID NO: 72974 - DNA, 20 bp, Artificial Sequence
  MKO10072974_B_Atad2
  gRNA
tcgtgcaaatgttctgcagt

SEQ ID NO: 72975 - DNA, 20 bp, Artificial Sequence
  MKO10072975_B_Atad2
  gRNA
tgaaaaagatgcgcagacag

SEQ ID NO: 72976 - DNA, 20 bp, Artificial Sequence
  MKO10072976_B_Atad3a
  gRNA
gttccctgcaggccatgcca

SEQ ID NO: 72977 - DNA, 20 bp, Artificial Sequence
  MKO10072977_B_Atad3a
  gRNA
tgcgagactcagtgcctcct

SEQ ID NO: 72978 - DNA, 20 bp, Artificial Sequence
  MKO10072978_B_Atad3a
  gRNA
ttcgctcttcagctgctcta

SEQ ID NO: 72979 - DNA, 20 bp, Artificial Sequence
  MKO10072979_B_Atad5
  gRNA
tgcctagaggaccgcctcaa

SEQ ID NO: 72980 - DNA, 20 bp, Artificial Sequence
  MKO10072980_B_Atad5
  gRNA
cagaatctgaatgatgtact

SEQ ID NO: 72981 - DNA, 20 bp, Artificial Sequence
  MKO10072981_B_Atad5
  gRNA
taagaaatctgaaacaactg

SEQ ID NO: 72982 - DNA, 20 bp, Artificial Sequence
  MKO10072982_B_Atat1
  gRNA
taagactcacggtcgggctg

SEQ ID NO: 72983 - DNA, 20 bp, Artificial Sequence
  MKO10072983_B_Atat1
  gRNA
catgactattgtagatgagc

SEQ ID NO: 72984 - DNA, 20 bp, Artificial Sequence
  MKO10072984_B_Atat1
  gRNA
gcttcttgtatccaactttg

SEQ ID NO: 72985 - DNA, 20 bp, Artificial Sequence
  MKO10072985_B_Atcay
  gRNA
acagcagagagccctcgctt

SEQ ID NO: 72986 - DNA, 20 bp, Artificial Sequence
  MKO10072986_B_Atcay
  gRNA
tccatgatgtagtgatagtc

SEQ ID NO: 72987 - DNA, 20 bp, Artificial Sequence
  MKO10072987_B_Atcay
  gRNA
cccagactatcactacatca

SEQ ID NO: 72988 - DNA, 20 bp, Artificial Sequence
  MKO10072988_B_Ate1
  gRNA
cagcatgtttgatccatgac

SEQ ID NO: 72989 - DNA, 20 bp, Artificial Sequence
  MKO10072989_B_Ate1
  gRNA
ctgataatcctgcactgtca

SEQ ID NO: 72990 - DNA, 20 bp, Artificial Sequence
  MKO10072990_B_Ate1
  gRNA
gctgtcctcagtatacaata

SEQ ID NO: 72991 - DNA, 20 bp, Artificial Sequence
  MKO10072991_B_Atf1
  gRNA
aaagtactgacctgtaggat

SEQ ID NO: 72992 - DNA, 20 bp, Artificial Sequence
  MKO10072992_B_Atf1
  gRNA
acttactctgtacaaccacc

SEQ ID NO: 72993 - DNA, 20 bp, Artificial Sequence
  MKO10072993_B_Atf1
  gRNA
gtcatcgttatcagaaagtg

SEQ ID NO: 72994 - DNA, 20 bp, Artificial Sequence
  MKO10072994_B_Atf2
  gRNA
cgttcgtccagcatcattac

SEQ ID NO: 72995 - DNA, 20 bp, Artificial Sequence
  MKO10072995_B_Atf2
  gRNA
tatgttacctggccacaccc

SEQ ID NO: 72996 - DNA, 20 bp, Artificial Sequence
  MKO10072996_B_Atf2
  gRNA
cctaaaaaactgtgaagaag

SEQ ID NO: 72997 - DNA, 20 bp, Artificial Sequence
  MKO10072997_B_Atf3
  gRNA
gatggcagaggtgtttattc

SEQ ID NO: 72998 - DNA, 20 bp, Artificial Sequence
  MKO10072998_B_Atf3
  gRNA
cggcccctgaagaagatgag

SEQ ID NO: 72999 - DNA, 20 bp, Artificial Sequence
  MKO10072999_B_Atf3
  gRNA
caagtgtcgaaacaagaaaa

SEQ ID NO: 73000 - DNA, 20 bp, Artificial Sequence
  MKO10073000_B_Atf4
  gRNA
gggtcataaggtttgggccg

SEQ ID NO: 73001 - DNA, 20 bp, Artificial Sequence
  MKO10073001_B_Atf4
  gRNA
cttcagcccccaaacccgac

SEQ ID NO: 73002 - DNA, 20 bp, Artificial Sequence
  MKO10073002_B_Atf4
  gRNA
gctccttacactcgccagtg

SEQ ID NO: 73003 - DNA, 20 bp, Artificial Sequence
  MKO10073003_B_Atf5
  gRNA
agactatgggaaactccccc

SEQ ID NO: 73004 - DNA, 20 bp, Artificial Sequence
  MKO10073004_B_Atf5
  gRNA
cctagtcctgccagcacacg

SEQ ID NO: 73005 - DNA, 20 bp, Artificial Sequence
  MKO10073005_B_Atf5
  gRNA
cgtgaaggacctgctaattg

SEQ ID NO: 73006 - DNA, 20 bp, Artificial Sequence
  MKO10073006_B_Atf6b
  gRNA
atgctggatcatcccccagc

SEQ ID NO: 73007 - DNA, 20 bp, Artificial Sequence
  MKO10073007_B_Atf6b
  gRNA
agagggtcccaagggggctc

SEQ ID NO: 73008 - DNA, 20 bp, Artificial Sequence
  MKO10073008_B_Atf6b
  gRNA
gggcgccttacctgggaaga

SEQ ID NO: 73009 - DNA, 20 bp, Artificial Sequence
  MKO10073009_B_Atf6
  gRNA
gcactttgatgcagcacatg

SEQ ID NO: 73010 - DNA, 20 bp, Artificial Sequence
  MKO10073010_B_Atf6
  gRNA
cagtcccccctttccttata

SEQ ID NO: 73011 - DNA, 20 bp, Artificial Sequence
  MKO10073011_B_Atf6
  gRNA
tgccttgggagtcagaccta

SEQ ID NO: 73012 - DNA, 20 bp, Artificial Sequence
  MKO10073012_B_Atf7ip2
  gRNA
caacattcgttgacttgttc

SEQ ID NO: 73013 - DNA, 20 bp, Artificial Sequence
  MKO10073013_B_Atf7ip2
  gRNA
aaaaaacaaagaaaatgtta

SEQ ID NO: 73014 - DNA, 20 bp, Artificial Sequence
  MKO10073014_B_Atf7ip2
  gRNA
cttcatgtctactcttgcac

SEQ ID NO: 73015 - DNA, 20 bp, Artificial Sequence
  MKO10073015_B_Atf7ip
  gRNA
tgctgtgtttgataagacgt

SEQ ID NO: 73016 - DNA, 20 bp, Artificial Sequence
  MKO10073016_B_Atf7ip
  gRNA
attcttcatccatatatcgc

SEQ ID NO: 73017 - DNA, 20 bp, Artificial Sequence
  MKO10073017_B_Atf7ip
  gRNA
agaggagcgagttccagccg

SEQ ID NO: 73018 - DNA, 20 bp, Artificial Sequence
  MKO10073018_B_Atf7
  gRNA
gcttatgtttatgaactgcc

SEQ ID NO: 73019 - DNA, 20 bp, Artificial Sequence
  MKO10073019_B_Atf7
  gRNA
acggactcagtcatcattgc

SEQ ID NO: 73020 - DNA, 20 bp, Artificial Sequence
  MKO10073020_B_Atf7
  gRNA
tttcctaacagggtgctgct

SEQ ID NO: 73021 - DNA, 20 bp, Artificial Sequence
  MKO10073021_B_Atg10
  gRNA
atcacttctgccaccgctgc

SEQ ID NO: 73022 - DNA, 20 bp, Artificial Sequence
  MKO10073022_B_Atg10
  gRNA
ttacaggaacatccaatact

SEQ ID NO: 73023 - DNA, 20 bp, Artificial Sequence
  MKO10073023_B_Atg10
  gRNA
aaaaatggttgcccaagtat

SEQ ID NO: 73024 - DNA, 20 bp, Artificial Sequence
  MKO10073024_B_Atg12
  gRNA
tcatcataccaactgttccg

SEQ ID NO: 73025 - DNA, 20 bp, Artificial Sequence
  MKO10073025_B_Atg12
  gRNA
cctgcattactgcaaatccc

SEQ ID NO: 73026 - DNA, 20 bp, Artificial Sequence
  MKO10073026_B_Atg12
  gRNA
ttctggctcatccccatgcc

SEQ ID NO: 73027 - DNA, 20 bp, Artificial Sequence
  MKO10073027_B_Atg13
  gRNA
ccgtctgtagggagattcta

SEQ ID NO: 73028 - DNA, 20 bp, Artificial Sequence
  MKO10073028_B_Atg13
  gRNA
cacatagatcgccccacagc

SEQ ID NO: 73029 - DNA, 20 bp, Artificial Sequence
  MKO10073029_B_Atg13
  gRNA
agtctcttctcgctattaca

SEQ ID NO: 73030 - DNA, 20 bp, Artificial Sequence
  MKO10073030_B_Atg14
  gRNA
aaacaggtttattgacaaga

SEQ ID NO: 73031 - DNA, 20 bp, Artificial Sequence
  MKO10073031_B_Atg14
  gRNA
ctgaagcaaacaatatgtaa

SEQ ID NO: 73032 - DNA, 20 bp, Artificial Sequence
  MKO10073032_B_Atg14
  gRNA
atacagagtactaaaagcta

SEQ ID NO: 73033 - DNA, 20 bp, Artificial Sequence
  MKO10073033_B_Atg16l1
  gRNA
accgaactgcacaagaagcg

SEQ ID NO: 73034 - DNA, 20 bp, Artificial Sequence
  MKO10073034_B_Atg16l1
  gRNA
taccttatttcatgcctatt

SEQ ID NO: 73035 - DNA, 20 bp, Artificial Sequence
  MKO10073035_B_Atg16l1
  gRNA
atatacagataccaagttgc

SEQ ID NO: 73036 - DNA, 20 bp, Artificial Sequence
  MKO10073036_B_Atg16l2
  gRNA
tgccatctccacccgacatg

SEQ ID NO: 73037 - DNA, 20 bp, Artificial Sequence
  MKO10073037_B_Atg16l2
  gRNA
ctgcgctcttcttcaccacc

SEQ ID NO: 73038 - DNA, 20 bp, Artificial Sequence
  MKO10073038_B_Atg16l2
  gRNA
ctgccacttcaccctcagag

SEQ ID NO: 73039 - DNA, 20 bp, Artificial Sequence
  MKO10073039_B_Atg2a
  gRNA
catgaccacaagcttgcagc

SEQ ID NO: 73040 - DNA, 20 bp, Artificial Sequence
  MKO10073040_B_Atg2a
  gRNA
aagcagaacgaggcctttcc

SEQ ID NO: 73041 - DNA, 20 bp, Artificial Sequence
  MKO10073041_B_Atg2a
  gRNA
cacagtgctccggaggatca

SEQ ID NO: 73042 - DNA, 20 bp, Artificial Sequence
  MKO10073042_B_Atg2b
  gRNA
atagtgcaaacctgtttcga

SEQ ID NO: 73043 - DNA, 20 bp, Artificial Sequence
  MKO10073043_B_Atg2b
  gRNA
cgtgtgttcaactgcaccag

SEQ ID NO: 73044 - DNA, 20 bp, Artificial Sequence
  MKO10073044_B_Atg2b
  gRNA
cacttgaaatccgagtagac

SEQ ID NO: 73045 - DNA, 20 bp, Artificial Sequence
  MKO10073045_B_Atg3
  gRNA
cctgcatagtttgtggcagc

SEQ ID NO: 73046 - DNA, 20 bp, Artificial Sequence
  MKO10073046_B_Atg3
  gRNA
tagtccaccactgtccaaca

SEQ ID NO: 73047 - DNA, 20 bp, Artificial Sequence
  MKO10073047_B_Atg3
  gRNA
accaaaaattgtttgtctgt

SEQ ID NO: 73048 - DNA, 20 bp, Artificial Sequence
  MKO10073048_B_Atg4a
  gRNA
ctctatgaattctgcccctg

SEQ ID NO: 73049 - DNA, 20 bp, Artificial Sequence
  MKO10073049_B_Atg4a
  gRNA
gctcattgtgccccttcgct

SEQ ID NO: 73050 - DNA, 20 bp, Artificial Sequence
  MKO10073050_B_Atg4a
  gRNA
ctgatataagtgctcgccta

SEQ ID NO: 73051 - DNA, 20 bp, Artificial Sequence
  MKO10073051_B_Atg4b
  gRNA
agtagctgtccttcctgtcg

SEQ ID NO: 73052 - DNA, 20 bp, Artificial Sequence
  MKO10073052_B_Atg4b
  gRNA
gatgatctttgcccaggccc

SEQ ID NO: 73053 - DNA, 20 bp, Artificial Sequence
  MKO10073053_B_Atg4b
  gRNA
ctgatgttgcatccagactt

SEQ ID NO: 73054 - DNA, 20 bp, Artificial Sequence
  MKO10073054_B_Atg4c
  gRNA
gctaactatttatgttgccc

SEQ ID NO: 73055 - DNA, 20 bp, Artificial Sequence
  MKO10073055_B_Atg4c
  gRNA
gaatgtggaagagttccgta

SEQ ID NO: 73056 - DNA, 20 bp, Artificial Sequence
  MKO10073056_B_Atg4c
  gRNA
acaccatacctgtacagtcc

SEQ ID NO: 73057 - DNA, 20 bp, Artificial Sequence
  MKO10073057_B_Atg4d
  gRNA
gggactttgtatctcgacta

SEQ ID NO: 73058 - DNA, 20 bp, Artificial Sequence
  MKO10073058_B_Atg4d
  gRNA
cgggacttcccaccccttgc

SEQ ID NO: 73059 - DNA, 20 bp, Artificial Sequence
  MKO10073059_B_Atg4d
  gRNA
atgctaccatttcgagggag

SEQ ID NO: 73060 - DNA, 20 bp, Artificial Sequence
  MKO10073060_B_Atg5
  gRNA
gtcccatccagagctgcttg

SEQ ID NO: 73061 - DNA, 20 bp, Artificial Sequence
  MKO10073061_B_Atg5
  gRNA
gtgagcctcaaccgcatcct

SEQ ID NO: 73062 - DNA, 20 bp, Artificial Sequence
  MKO10073062_B_Atg5
  gRNA
aaatgtactgtgatgttcca

SEQ ID NO: 73063 - DNA, 20 bp, Artificial Sequence
  MKO10073063_B_Atg7
  gRNA
tctgcccacccgcttgacgt

SEQ ID NO: 73064 - DNA, 20 bp, Artificial Sequence
  MKO10073064_B_Atg7
  gRNA
cactgaactccaacgtcaag

SEQ ID NO: 73065 - DNA, 20 bp, Artificial Sequence
  MKO10073065_B_Atg7
  gRNA
gagagcagcacctgacttta

SEQ ID NO: 73066 - DNA, 20 bp, Artificial Sequence
  MKO10073066_B_Atg9a
  gRNA
tctataacatttgctgctat

SEQ ID NO: 73067 - DNA, 20 bp, Artificial Sequence
  MKO10073067_B_Atg9a
  gRNA
tacatgtgaagccattcttc

SEQ ID NO: 73068 - DNA, 20 bp, Artificial Sequence
  MKO10073068_B_Atg9a
  gRNA
aggatattcgagagaagaag

SEQ ID NO: 73069 - DNA, 20 bp, Artificial Sequence
  MKO10073069_B_Atg9b
  gRNA
tgcagaccgagcgaagcagc

SEQ ID NO: 73070 - DNA, 20 bp, Artificial Sequence
  MKO10073070_B_Atg9b
  gRNA
ctggcatcacatccagaacc

SEQ ID NO: 73071 - DNA, 20 bp, Artificial Sequence
  MKO10073071_B_Atg9b
  gRNA
tggctttgcctgtatcctgc

SEQ ID NO: 73072 - DNA, 20 bp, Artificial Sequence
  MKO10073072_B_Athl1
  gRNA
tgttccacccagaagccgcc

SEQ ID NO: 73073 - DNA, 20 bp, Artificial Sequence
  MKO10073073_B_Athl1
  gRNA
ggggagaagtctgcccgtaa

SEQ ID NO: 73074 - DNA, 20 bp, Artificial Sequence
  MKO10073074_B_Athl1
  gRNA
ctgatgaatccttgagtgcc

SEQ ID NO: 73075 - DNA, 20 bp, Artificial Sequence
  MKO10073075_B_Atic
  gRNA
accaagagacgcgagacttc

SEQ ID NO: 73076 - DNA, 20 bp, Artificial Sequence
  MKO10073076_B_Atic
  gRNA
ggcttgatttcaaccttgta

SEQ ID NO: 73077 - DNA, 20 bp, Artificial Sequence
  MKO10073077_B_Atic
  gRNA
tacaaggttgaaatcaagcc

SEQ ID NO: 73078 - DNA, 20 bp, Artificial Sequence
  MKO10073078_B_Atl1
  gRNA
tgtgctaagcgcaaatactg

SEQ ID NO: 73079 - DNA, 20 bp, Artificial Sequence
  MKO10073079_B_Atl1
  gRNA
cacaatgataagctcaatac

SEQ ID NO: 73080 - DNA, 20 bp, Artificial Sequence
  MKO10073080_B_Atl1
  gRNA
gatcatcctcctggacattc

SEQ ID NO: 73081 - DNA, 20 bp, Artificial Sequence
  MKO10073081_B_Atl2
  gRNA
agatgatcttcaacatctac

SEQ ID NO: 73082 - DNA, 20 bp, Artificial Sequence
  MKO10073082_B_Atl2
  gRNA
actggctatcaaaggcaccc

SEQ ID NO: 73083 - DNA, 20 bp, Artificial Sequence
  MKO10073083_B_Atl2
  gRNA
tgcttacctgaaatggcttc

SEQ ID NO: 73084 - DNA, 20 bp, Artificial Sequence
  MKO10073084_B_Atl3
  gRNA
agatgatcttcagcagctac

SEQ ID NO: 73085 - DNA, 20 bp, Artificial Sequence
  MKO10073085_B_Atl3
  gRNA
cactatgactagttctgttc

SEQ ID NO: 73086 - DNA, 20 bp, Artificial Sequence
  MKO10073086_B_Atl3
  gRNA
atctgaatcccagtagtttc

SEQ ID NO: 73087 - DNA, 20 bp, Artificial Sequence
  MKO10073087_B_Atmin
  gRNA
tgacttccttctagccgatc

SEQ ID NO: 73088 - DNA, 20 bp, Artificial Sequence
  MKO10073088_B_Atmin
  gRNA
cagtctcacatctaccgaac

SEQ ID NO: 73089 - DNA, 20 bp, Artificial Sequence
  MKO10073089_B_Atmin
  gRNA
agggacagccgcacgtacac

SEQ ID NO: 73090 - DNA, 20 bp, Artificial Sequence
  MKO10073090_B_Atm
  gRNA
actctattaatgtcctgtga

SEQ ID NO: 73091 - DNA, 20 bp, Artificial Sequence
  MKO10073091_B_Atm
  gRNA
aaacagttcaacatttagat

SEQ ID NO: 73092 - DNA, 20 bp, Artificial Sequence
  MKO10073092_B_Atm
  gRNA
tatccatgacataattcaag

SEQ ID NO: 73093 - DNA, 20 bp, Artificial Sequence
  MKO10073093_B_Atn1
  gRNA
cgaggcacctctccgccagc

SEQ ID NO: 73094 - DNA, 20 bp, Artificial Sequence
  MKO10073094_B_Atn1
  gRNA
ctaacagaaggcccggatag

SEQ ID NO: 73095 - DNA, 20 bp, Artificial Sequence
  MKO10073095_B_Atn1
  gRNA
gcccaaaaagaccaaaaccg

SEQ ID NO: 73096 - DNA, 20 bp, Artificial Sequence
  MKO10073096_B_Atoh1
  gRNA
aggatgcccccgggcagcga

SEQ ID NO: 73097 - DNA, 20 bp, Artificial Sequence
  MKO10073097_B_Atoh1
  gRNA
cggcggttgctctccgacat

SEQ ID NO: 73098 - DNA, 20 bp, Artificial Sequence
  MKO10073098_B_Atoh1
  gRNA
ctgggcctgagaagcgagtc

SEQ ID NO: 73099 - DNA, 20 bp, Artificial Sequence
  MKO10073099_B_Atoh7
  gRNA
tcgcggcgcgcccccgtgcg

SEQ ID NO: 73100 - DNA, 20 bp, Artificial Sequence
  MKO10073100_B_Atoh7
  gRNA
tcgggctgcgctgcgagcag

SEQ ID NO: 73101 - DNA, 20 bp, Artificial Sequence
  MKO10073101_B_Atoh7
  gRNA
gcatcctagccgaagccgag

SEQ ID NO: 73102 - DNA, 20 bp, Artificial Sequence
  MKO10073102_B_Atoh8
  gRNA
aatcctcaggatggccagtt

SEQ ID NO: 73103 - DNA, 20 bp, Artificial Sequence
  MKO10073103_B_Atoh8
  gRNA
tacgtgtgaaattgacgagt

SEQ ID NO: 73104 - DNA, 20 bp, Artificial Sequence
  MKO10073104_B_Atoh8
  gRNA
attgtgtgggacgcgcggga

SEQ ID NO: 73105 - DNA, 20 bp, Artificial Sequence
  MKO10073105_B_Atox1
  gRNA
ggcttcagcacagccctcac

SEQ ID NO: 73106 - DNA, 20 bp, Artificial Sequence
  MKO10073106_B_Atox1
  gRNA
gtcctggctacttggggcca

SEQ ID NO: 73107 - DNA, 20 bp, Artificial Sequence
  MKO10073107_B_Atox1
  gRNA
actcacctcccagcttgttg

SEQ ID NO: 73108 - DNA, 20 bp, Artificial Sequence
  MKO10073108_B_Atp10a
  gRNA
cttctcacactcgattacac

SEQ ID NO: 73109 - DNA, 20 bp, Artificial Sequence
  MKO10073109_B_Atp10a
  gRNA
tgtagccacgaaacctactc

SEQ ID NO: 73110 - DNA, 20 bp, Artificial Sequence
  MKO10073110_B_Atp10a
  gRNA
agatgaactgcgatgtcctc

SEQ ID NO: 73111 - DNA, 20 bp, Artificial Sequence
  MKO10073111_B_Atp10b
  gRNA
gacaatgccagccgccacct

SEQ ID NO: 73112 - DNA, 20 bp, Artificial Sequence
  MKO10073112_B_Atp10b
  gRNA
ggaaatcaccatatttccac

SEQ ID NO: 73113 - DNA, 20 bp, Artificial Sequence
  MKO10073113_B_Atp10b
  gRNA
tctgaactggatgccctcca

SEQ ID NO: 73114 - DNA, 20 bp, Artificial Sequence
  MKO10073114_B_Atp10d
  gRNA
aatcggctgaggtcattgtt

SEQ ID NO: 73115 - DNA, 20 bp, Artificial Sequence
  MKO10073115_B_Atp10d
  gRNA
cactcacctactgtaaactt

SEQ ID NO: 73116 - DNA, 20 bp, Artificial Sequence
  MKO10073116_B_Atp10d
  gRNA
ctaccaaaggcacccagttc

SEQ ID NO: 73117 - DNA, 20 bp, Artificial Sequence
  MKO10073117_B_Atp11a
  gRNA
cccgtgcactttatccagca

SEQ ID NO: 73118 - DNA, 20 bp, Artificial Sequence
  MKO10073118_B_Atp11a
  gRNA
cccgcttgtcactggacttg

SEQ ID NO: 73119 - DNA, 20 bp, Artificial Sequence
  MKO10073119_B_Atp11a
  gRNA
gaactgttcaaataagttct

SEQ ID NO: 73120 - DNA, 20 bp, Artificial Sequence
  MKO10073120_B_Atp11b
  gRNA
ctttctcctagtatactata

SEQ ID NO: 73121 - DNA, 20 bp, Artificial Sequence
  MKO10073121_B_Atp11b
  gRNA
cctaccagtccaattaccag

SEQ ID NO: 73122 - DNA, 20 bp, Artificial Sequence
  MKO10073122_B_Atp11b
  gRNA
taaatttctgaggtgtgtaa

SEQ ID NO: 73123 - DNA, 20 bp, Artificial Sequence
  MKO10073123_B_Atp11c
  gRNA
gttggcaatcatcccatttc

SEQ ID NO: 73124 - DNA, 20 bp, Artificial Sequence
  MKO10073124_B_Atp11c
  gRNA
aactgttacagcaatcaagc

SEQ ID NO: 73125 - DNA, 20 bp, Artificial Sequence
  MKO10073125_B_Atp11c
  gRNA
aagtccactggtaactgggc

SEQ ID NO: 73126 - DNA, 20 bp, Artificial Sequence
  MKO10073126_B_Atp12a
  gRNA
cacatatgcgatccagcaca

SEQ ID NO: 73127 - DNA, 20 bp, Artificial Sequence
  MKO10073127_B_Atp12a
  gRNA
atctattctgtagagctcaa

SEQ ID NO: 73128 - DNA, 20 bp, Artificial Sequence
  MKO10073128_B_Atp12a
  gRNA
ctcagaacccaacaagagtc

SEQ ID NO: 73129 - DNA, 20 bp, Artificial Sequence
  MKO10073129_B_Atp13a1
  gRNA
ggttggcaccaccttcacaa

SEQ ID NO: 73130 - DNA, 20 bp, Artificial Sequence
  MKO10073130_B_Atp13a1
  gRNA
agcccctttcttcgtgtttc

SEQ ID NO: 73131 - DNA, 20 bp, Artificial Sequence
  MKO10073131_B_Atp13a1
  gRNA
caaatattcctatgatgccc

SEQ ID NO: 73132 - DNA, 20 bp, Artificial Sequence
  MKO10073132_B_Atp13a2
  gRNA
gcagcacgccccccagctat

SEQ ID NO: 73133 - DNA, 20 bp, Artificial Sequence
  MKO10073133_B_Atp13a2
  gRNA
tagctccagacagctcttca

SEQ ID NO: 73134 - DNA, 20 bp, Artificial Sequence
  MKO10073134_B_Atp13a2
  gRNA
gcagactgaggctgttgttc

SEQ ID NO: 73135 - DNA, 20 bp, Artificial Sequence
  MKO10073135_B_Atp13a3
  gRNA
ctcacagagtcagtcacaac

SEQ ID NO: 73136 - DNA, 20 bp, Artificial Sequence
  MKO10073136_B_Atp13a3
  gRNA
tgcaaaatgtttagttaatg

SEQ ID NO: 73137 - DNA, 20 bp, Artificial Sequence
  MKO10073137_B_Atp13a3
  gRNA
tccagaaatatcttatgcta

SEQ ID NO: 73138 - DNA, 20 bp, Artificial Sequence
  MKO10073138_B_Atp13a4
  gRNA
tgcagaaaatacgatatgtt

SEQ ID NO: 73139 - DNA, 20 bp, Artificial Sequence
  MKO10073139_B_Atp13a4
  gRNA
cttcattgagtaaagcatgc

SEQ ID NO: 73140 - DNA, 20 bp, Artificial Sequence
  MKO10073140_B_Atp13a4
  gRNA
cttctcaaggtggtcaccca

SEQ ID NO: 73141 - DNA, 20 bp, Artificial Sequence
  MKO10073141_B_Atp13a5
  gRNA
tcagctaccagaggttcctc

SEQ ID NO: 73142 - DNA, 20 bp, Artificial Sequence
  MKO10073142_B_Atp13a5
  gRNA
cagttcagctgatgttctac

SEQ ID NO: 73143 - DNA, 20 bp, Artificial Sequence
  MKO10073143_B_Atp13a5
  gRNA
tcctataagcaagaacccag

SEQ ID NO: 73144 - DNA, 20 bp, Artificial Sequence
  MKO10073144_B_Atp1a1
  gRNA
tttcacccattcgggagtag

SEQ ID NO: 73145 - DNA, 20 bp, Artificial Sequence
  MKO10073145_B_Atp1a1
  gRNA
acacaactcacatcatcgtt

SEQ ID NO: 73146 - DNA, 20 bp, Artificial Sequence
  MKO10073146_B_Atp1a1
  gRNA
ggacgaccataaactcagcc

SEQ ID NO: 73147 - DNA, 20 bp, Artificial Sequence
  MKO10073147_B_Atp1a2
  gRNA
gctgggccgaaaataccaag

SEQ ID NO: 73148 - DNA, 20 bp, Artificial Sequence
  MKO10073148_B_Atp1a2
  gRNA
tcaccttagacagatccact

SEQ ID NO: 73149 - DNA, 20 bp, Artificial Sequence
  MKO10073149_B_Atp1a2
  gRNA
gctcgatgagctgaagaagg

SEQ ID NO: 73150 - DNA, 20 bp, Artificial Sequence
  MKO10073150_B_Atp1a3
  gRNA
cgcagtcagtattgtatttc

SEQ ID NO: 73151 - DNA, 20 bp, Artificial Sequence
  MKO10073151_B_Atp1a3
  gRNA
gggacggaggatgacccttc

SEQ ID NO: 73152 - DNA, 20 bp, Artificial Sequence
  MKO10073152_B_Atp1a3
  gRNA
gagctcgcccaagaagagca

SEQ ID NO: 73153 - DNA, 20 bp, Artificial Sequence
  MKO10073153_B_Atp1a4
  gRNA
tctgccgtggtcatcattac

SEQ ID NO: 73154 - DNA, 20 bp, Artificial Sequence
  MKO10073154_B_Atp1a4
  gRNA
cggcagatagtacaatcccc

SEQ ID NO: 73155 - DNA, 20 bp, Artificial Sequence
  MKO10073155_B_Atp1a4
  gRNA
ggaggaggagttagtacatt

SEQ ID NO: 73156 - DNA, 20 bp, Artificial Sequence
  MKO10073156_B_Atp1b1
  gRNA
taatgaccccaagagctacg

SEQ ID NO: 73157 - DNA, 20 bp, Artificial Sequence
  MKO10073157_B_Atp1b1
  gRNA
accttgccagtgcactgaac

SEQ ID NO: 73158 - DNA, 20 bp, Artificial Sequence
  MKO10073158_B_Atp1b1
  gRNA
tcccgatgaagatgccagcc

SEQ ID NO: 73159 - DNA, 20 bp, Artificial Sequence
  MKO10073159_B_Atp1b2
  gRNA
taggtcatcaacttctatgc

SEQ ID NO: 73160 - DNA, 20 bp, Artificial Sequence
  MKO10073160_B_Atp1b2
  gRNA
tgaccatacccccaagtacc

SEQ ID NO: 73161 - DNA, 20 bp, Artificial Sequence
  MKO10073161_B_Atp1b2
  gRNA
tcagaagctcaacaagttct

SEQ ID NO: 73162 - DNA, 20 bp, Artificial Sequence
  MKO10073162_B_Atp1b3
  gRNA
ttcagcatggtcctgactat

SEQ ID NO: 73163 - DNA, 20 bp, Artificial Sequence
  MKO10073163_B_Atp1b3
  gRNA
aacctcacaagttgtcctga

SEQ ID NO: 73164 - DNA, 20 bp, Artificial Sequence
  MKO10073164_B_Atp1b3
  gRNA
ccaagaacccataaaaaact

SEQ ID NO: 73165 - DNA, 20 bp, Artificial Sequence
  MKO10073165_B_Atp1b4
  gRNA
gatgatggtgcctggtctag

SEQ ID NO: 73166 - DNA, 20 bp, Artificial Sequence
  MKO10073166_B_Atp1b4
  gRNA
ggtcggcatgtaaggactga

SEQ ID NO: 73167 - DNA, 20 bp, Artificial Sequence
  MKO10073167_B_Atp1b4
  gRNA
gcatcctcctcaagatgaac

SEQ ID NO: 73168 - DNA, 20 bp, Artificial Sequence
  MKO10073168_B_Atp2a1
  gRNA
ggagaagaatccgcacaagc

SEQ ID NO: 73169 - DNA, 20 bp, Artificial Sequence
  MKO10073169_B_Atp2a1
  gRNA
ggtaacttaccttcctcagc

SEQ ID NO: 73170 - DNA, 20 bp, Artificial Sequence
  MKO10073170_B_Atp2a1
  gRNA
agttcgaagacctgcttgtg

SEQ ID NO: 73171 - DNA, 20 bp, Artificial Sequence
  MKO10073171_B_Atp2a2
  gRNA
ccaatgcaatcgtgggtgtg

SEQ ID NO: 73172 - DNA, 20 bp, Artificial Sequence
  MKO10073172_B_Atp2a2
  gRNA
ccacacacccacgattgcat

SEQ ID NO: 73173 - DNA, 20 bp, Artificial Sequence
  MKO10073173_B_Atp2a2
  gRNA
ctcaatcacaagttccagca

SEQ ID NO: 73174 - DNA, 20 bp, Artificial Sequence
  MKO10073174_B_Atp2a3
  gRNA
cgagaattagcatgatgacc

SEQ ID NO: 73175 - DNA, 20 bp, Artificial Sequence
  MKO10073175_B_Atp2a3
  gRNA
ggtcatcatgctaattctcg

SEQ ID NO: 73176 - DNA, 20 bp, Artificial Sequence
  MKO10073176_B_Atp2a3
  gRNA
catgcctcaccttcctcggt

SEQ ID NO: 73177 - DNA, 20 bp, Artificial Sequence
  MKO10073177_B_Atp2b1
  gRNA
tgggcttaccgtacttcact

SEQ ID NO: 73178 - DNA, 20 bp, Artificial Sequence
  MKO10073178_B_Atp2b1
  gRNA
ggaatcatcttcaccttact

SEQ ID NO: 73179 - DNA, 20 bp, Artificial Sequence
  MKO10073179_B_Atp2b1
  gRNA
tgctataggtactcatgtga

SEQ ID NO: 73180 - DNA, 20 bp, Artificial Sequence
  MKO10073180_B_Atp2b2
  gRNA
ggcatcatatttaccctgct

SEQ ID NO: 73181 - DNA, 20 bp, Artificial Sequence
  MKO10073181_B_Atp2b2
  gRNA
tgaccaggtgcgcaagtctg

SEQ ID NO: 73182 - DNA, 20 bp, Artificial Sequence
  MKO10073182_B_Atp2b2
  gRNA
aatgtccccgaccacgatct

SEQ ID NO: 73183 - DNA, 20 bp, Artificial Sequence
  MKO10073183_B_Atp2b3
  gRNA
cctaccaccagggccgccac

SEQ ID NO: 73184 - DNA, 20 bp, Artificial Sequence
  MKO10073184_B_Atp2b3
  gRNA
tgatgagagtcacgtcctgc

SEQ ID NO: 73185 - DNA, 20 bp, Artificial Sequence
  MKO10073185_B_Atp2b3
  gRNA
ggagatcttctgcctgccga

SEQ ID NO: 73186 - DNA, 20 bp, Artificial Sequence
  MKO10073186_B_Atp2b4
  gRNA
cagatcagtgcccactacgg

SEQ ID NO: 73187 - DNA, 20 bp, Artificial Sequence
  MKO10073187_B_Atp2b4
  gRNA
tactatacccgagagcaaca

SEQ ID NO: 73188 - DNA, 20 bp, Artificial Sequence
  MKO10073188_B_Atp2b4
  gRNA
cctgtccttctaccgacctc

SEQ ID NO: 73189 - DNA, 20 bp, Artificial Sequence
  MKO10073189_B_Atp2c1
  gRNA
tgatgccgtcagtatcactg

SEQ ID NO: 73190 - DNA, 20 bp, Artificial Sequence
  MKO10073190_B_Atp2c1
  gRNA
taataggctgatcttcagaa

SEQ ID NO: 73191 - DNA, 20 bp, Artificial Sequence
  MKO10073191_B_Atp2c1
  gRNA
tatcaaattcattccaacca

SEQ ID NO: 73192 - DNA, 20 bp, Artificial Sequence
  MKO10073192_B_Atp2c2
  gRNA
cttccaggcagttctcatcg

SEQ ID NO: 73193 - DNA, 20 bp, Artificial Sequence
  MKO10073193_B_Atp2c2
  gRNA
aatttgcagtggcccagcgc

SEQ ID NO: 73194 - DNA, 20 bp, Artificial Sequence
  MKO10073194_B_Atp2c2
  gRNA
acgcacctggatgaagccaa

SEQ ID NO: 73195 - DNA, 20 bp, Artificial Sequence
  MKO10073195_B_Atp4a
  gRNA
cttcaagaatcttgtacccc

SEQ ID NO: 73196 - DNA, 20 bp, Artificial Sequence
  MKO10073196_B_Atp4a
  gRNA
cagcaatgagtgccaccgcc

SEQ ID NO: 73197 - DNA, 20 bp, Artificial Sequence
  MKO10073197_B_Atp4a
  gRNA
ccagctcagacactgatagc

SEQ ID NO: 73198 - DNA, 20 bp, Artificial Sequence
  MKO10073198_B_Atp4b
  gRNA
catagaaacctgcgtagtac

SEQ ID NO: 73199 - DNA, 20 bp, Artificial Sequence
  MKO10073199_B_Atp4b
  gRNA
caacaacacagctccccgag

SEQ ID NO: 73200 - DNA, 20 bp, Artificial Sequence
  MKO10073200_B_Atp4b
  gRNA
cccctcctcgaagccgaagc

SEQ ID NO: 73201 - DNA, 20 bp, Artificial Sequence
  MKO10073201_B_Atp5a1
  gRNA
taatcagctcacgctgaccc

SEQ ID NO: 73202 - DNA, 20 bp, Artificial Sequence
  MKO10073202_B_Atp5a1
  gRNA
cacgacaactccaacattgt

SEQ ID NO: 73203 - DNA, 20 bp, Artificial Sequence
  MKO10073203_B_Atp5a1
  gRNA
cttctgaagtcgagtgttag

SEQ ID NO: 73204 - DNA, 20 bp, Artificial Sequence
  MKO10073204_B_Atp5b
  gRNA
cttaaactaggactctttgg

SEQ ID NO: 73205 - DNA, 20 bp, Artificial Sequence
  MKO10073205_B_Atp5b
  gRNA
cccctgaatccagtactttc

SEQ ID NO: 73206 - DNA, 20 bp, Artificial Sequence
  MKO10073206_B_Atp5b
  gRNA
gcaccaatcaaaattcctgt

SEQ ID NO: 73207 - DNA, 20 bp, Artificial Sequence
  MKO10073207_B_Atp5c1
  gRNA
aagaacctgtcccatacact

SEQ ID NO: 73208 - DNA, 20 bp, Artificial Sequence
  MKO10073208_B_Atp5c1
  gRNA
tgtcattcaaagatgtggga

SEQ ID NO: 73209 - DNA, 20 bp, Artificial Sequence
  MKO10073209_B_Atp5c1
  gRNA
aaatcaagggcatactttat

SEQ ID NO: 73210 - DNA, 20 bp, Artificial Sequence
  MKO10073210_B_Atp5d
  gRNA
cacgtccacttgcttgacgt

SEQ ID NO: 73211 - DNA, 20 bp, Artificial Sequence
  MKO10073211_B_Atp5d
  gRNA
tgcggcggacgaggcagcac

SEQ ID NO: 73212 - DNA, 20 bp, Artificial Sequence
  MKO10073212_B_Atp5d
  gRNA
ctcaccaaagtacttagtcg

SEQ ID NO: 73213 - DNA, 20 bp, Artificial Sequence
  MKO10073213_B_Atp5e
  gRNA
agcgaacgctgagaagactt

SEQ ID NO: 73214 - DNA, 20 bp, Artificial Sequence
  MKO10073214_B_Atp5e
  gRNA
ctcagcgttcgctttgaact

SEQ ID NO: 73215 - DNA, 20 bp, Artificial Sequence
  MKO10073215_B_Atp5e
  gRNA
agatctgtgcaaaagcagtg

SEQ ID NO: 73216 - DNA, 20 bp, Artificial Sequence
  MKO10073216_B_Atp5f1
  gRNA
agccccgtgtctgaagaacg

SEQ ID NO: 73217 - DNA, 20 bp, Artificial Sequence
  MKO10073217_B_Atp5f1
  gRNA
tttctaggaccttatgtgct

SEQ ID NO: 73218 - DNA, 20 bp, Artificial Sequence
  MKO10073218_B_Atp5f1
  gRNA
attacctcttcgatgtgcag

SEQ ID NO: 73219 - DNA, 20 bp, Artificial Sequence
  MKO10073219_B_Atp5g1
  gRNA
ttgaaaaatgcagaccacca

SEQ ID NO: 73220 - DNA, 20 bp, Artificial Sequence
  MKO10073220_B_Atp5g1
  gRNA
ctgcagcagctcccctctcc

SEQ ID NO: 73221 - DNA, 20 bp, Artificial Sequence
  MKO10073221_B_Atp5g1
  gRNA
tgatccagccacaccaactg

SEQ ID NO: 73222 - DNA, 20 bp, Artificial Sequence
  MKO10073222_B_Atp5g2
  gRNA
agatcaggagcacctctctc

SEQ ID NO: 73223 - DNA, 20 bp, Artificial Sequence
  MKO10073223_B_Atp5g2
  gRNA
ggagcgggtagagacgaact

SEQ ID NO: 73224 - DNA, 20 bp, Artificial Sequence
  MKO10073224_B_Atp5g2
  gRNA
agccccagctccaatgaact

SEQ ID NO: 73225 - DNA, 20 bp, Artificial Sequence
  MKO10073225_B_Atp5g3
  gRNA
tacgcaccagagcgggggtg

SEQ ID NO: 73226 - DNA, 20 bp, Artificial Sequence
  MKO10073226_B_Atp5g3
  gRNA
acctctccagtcctagtctc

SEQ ID NO: 73227 - DNA, 20 bp, Artificial Sequence
  MKO10073227_B_Atp5g3
  gRNA
atgcaactctggatccagct

SEQ ID NO: 73228 - DNA, 20 bp, Artificial Sequence
  MKO10073228_B_Atp5h
  gRNA
acaaaaagaagtacccgtac

SEQ ID NO: 73229 - DNA, 20 bp, Artificial Sequence
  MKO10073229_B_Atp5h
  gRNA
ttacatcctccttctcctcc

SEQ ID NO: 73230 - DNA, 20 bp, Artificial Sequence
  MKO10073230_B_Atp5h
  gRNA
agaaaccacctgcgattgac

SEQ ID NO: 73231 - DNA, 20 bp, Artificial Sequence
  MKO10073231_B_Atp5j2
  gRNA
aagctcatggaagtcaaact

SEQ ID NO: 73232 - DNA, 20 bp, Artificial Sequence
  MKO10073232_B_Atp5j2
  gRNA
gcagtagctgaaaaccacgt

SEQ ID NO: 73233 - DNA, 20 bp, Artificial Sequence
  MKO10073233_B_Atp5j2
  gRNA
atgagcttcttctccttcag

SEQ ID NO: 73234 - DNA, 20 bp, Artificial Sequence
  MKO10073234_B_Atp5j
  gRNA
ttatacaccagggcatctgg

SEQ ID NO: 73235 - DNA, 20 bp, Artificial Sequence
  MKO10073235_B_Atp5j
  gRNA
atcgacaaaccccagtcctg

SEQ ID NO: 73236 - DNA, 20 bp, Artificial Sequence
  MKO10073236_B_Atp5j
  gRNA
ttgtatgttcctcaggactg

SEQ ID NO: 73237 - DNA, 20 bp, Artificial Sequence
  MKO10073237_B_Atp5k
  gRNA
tgaggattcaccttgatgag

SEQ ID NO: 73238 - DNA, 20 bp, Artificial Sequence
  MKO10073238_B_Atp5k
  gRNA
cggtactccgctctgatcat

SEQ ID NO: 73239 - DNA, 20 bp, Artificial Sequence
  MKO10073239_B_Atp5k
  gRNA
tcaggtctctccactcatca

SEQ ID NO: 73240 - DNA, 20 bp, Artificial Sequence
  MKO10073240_B_Atp5l
  gRNA
ttccaggaagctgtgctgaa

SEQ ID NO: 73241 - DNA, 20 bp, Artificial Sequence
  MKO10073241_B_Atp5l
  gRNA
gacttactcgaagcctcgat

SEQ ID NO: 73242 - DNA, 20 bp, Artificial Sequence
  MKO10073242_B_Atp5l
  gRNA
aaaccacatccacacctcag

SEQ ID NO: 73243 - DNA, 20 bp, Artificial Sequence
  MKO10073243_B_Atp5o
  gRNA
cgcccactcactcatgaggt

SEQ ID NO: 73244 - DNA, 20 bp, Artificial Sequence
  MKO10073244_B_Atp5o
  gRNA
cctgtactctgctgcatcta

SEQ ID NO: 73245 - DNA, 20 bp, Artificial Sequence
  MKO10073245_B_Atp5o
  gRNA
ccagatttacttgctgaaaa

SEQ ID NO: 73246 - DNA, 20 bp, Artificial Sequence
  MKO10073246_B_Atp5sl
  gRNA
aaggccccgttctgagattc

SEQ ID NO: 73247 - DNA, 20 bp, Artificial Sequence
  MKO10073247_B_Atp5sl
  gRNA
cagatccttcactaacatcc

SEQ ID NO: 73248 - DNA, 20 bp, Artificial Sequence
  MKO10073248_B_Atp5sl
  gRNA
ttcttctcccgactgctgtc

SEQ ID NO: 73249 - DNA, 20 bp, Artificial Sequence
  MKO10073249_B_Atp5s
  gRNA
aaatttacgaaaaagcctat

SEQ ID NO: 73250 - DNA, 20 bp, Artificial Sequence
  MKO10073250_B_Atp5s
  gRNA
tctagatcaatgatgatgtt

SEQ ID NO: 73251 - DNA, 20 bp, Artificial Sequence
  MKO10073251_B_Atp5s
  gRNA
caaccattcccagaagtatc

SEQ ID NO: 73252 - DNA, 20 bp, Artificial Sequence
  MKO10073252_B_Atp6ap1l
  gRNA
gaccaagtgcttcgtctgtg

SEQ ID NO: 73253 - DNA, 20 bp, Artificial Sequence
  MKO10073253_B_Atp6ap1l
  gRNA
atcccaaggatattgacata

SEQ ID NO: 73254 - DNA, 20 bp, Artificial Sequence
  MKO10073254_B_Atp6ap1l
  gRNA
gacagccatacctgtgcaat

SEQ ID NO: 73255 - DNA, 20 bp, Artificial Sequence
  MKO10073255_B_Atp6ap1
  gRNA
cattacggggacccagctcc

SEQ ID NO: 73256 - DNA, 20 bp, Artificial Sequence
  MKO10073256_B_Atp6ap1
  gRNA
tggggctagccccttgcatg

SEQ ID NO: 73257 - DNA, 20 bp, Artificial Sequence
  MKO10073257_B_Atp6ap1
  gRNA
attgcataccagtccacagc

SEQ ID NO: 73258 - DNA, 20 bp, Artificial Sequence
  MKO10073258_B_Atp6ap2
  gRNA
acgggctaccattatggtga

SEQ ID NO: 73259 - DNA, 20 bp, Artificial Sequence
  MKO10073259_B_Atp6ap2
  gRNA
ttgtcacttacctcctcgct

SEQ ID NO: 73260 - DNA, 20 bp, Artificial Sequence
  MKO10073260_B_Atp6ap2
  gRNA
ctccttgcagagagtgtata

SEQ ID NO: 73261 - DNA, 20 bp, Artificial Sequence
  MKO10073261_B_Atp6v0a1
  gRNA
tgacctcatcgaaaaactgc

SEQ ID NO: 73262 - DNA, 20 bp, Artificial Sequence
  MKO10073262_B_Atp6v0a1
  gRNA
aacatcccaattatggacac

SEQ ID NO: 73263 - DNA, 20 bp, Artificial Sequence
  MKO10073263_B_Atp6v0a1
  gRNA
cttcattcacaaatttcctc

SEQ ID NO: 73264 - DNA, 20 bp, Artificial Sequence
  MKO10073264_B_Atp6v0a2
  gRNA
tcttcgtgaccctcagcatg

SEQ ID NO: 73265 - DNA, 20 bp, Artificial Sequence
  MKO10073265_B_Atp6v0a2
  gRNA
tgtactccaccagctccaac

SEQ ID NO: 73266 - DNA, 20 bp, Artificial Sequence
  MKO10073266_B_Atp6v0a2
  gRNA
ctctggtgatttcctgcacc

SEQ ID NO: 73267 - DNA, 20 bp, Artificial Sequence
  MKO10073267_B_Atp6v0a4
  gRNA
tctccagtgactcacacctt

SEQ ID NO: 73268 - DNA, 20 bp, Artificial Sequence
  MKO10073268_B_Atp6v0a4
  gRNA
ccccaactttccagtcatga

SEQ ID NO: 73269 - DNA, 20 bp, Artificial Sequence
  MKO10073269_B_Atp6v0a4
  gRNA
aaagaaatcttcacctaagt

SEQ ID NO: 73270 - DNA, 20 bp, Artificial Sequence
  MKO10073270_B_Atp6v0b
  gRNA
ctgctacaccatctttgacc

SEQ ID NO: 73271 - DNA, 20 bp, Artificial Sequence
  MKO10073271_B_Atp6v0b
  gRNA
ccacatcaaagcgaaagccc

SEQ ID NO: 73272 - DNA, 20 bp, Artificial Sequence
  MKO10073272_B_Atp6v0b
  gRNA
ggccatctatggcatcatca

SEQ ID NO: 73273 - DNA, 20 bp, Artificial Sequence
  MKO10073273_B_Atp6v0c
  gRNA
catgggcgcctcgtccgcca

SEQ ID NO: 73274 - DNA, 20 bp, Artificial Sequence
  MKO10073274_B_Atp6v0c
  gRNA
aaaaggactactttgtggag

SEQ ID NO: 73275 - DNA, 20 bp, Artificial Sequence
  MKO10073275_B_Atp6v0c
  gRNA
ggcctgagtgtggggctgag

SEQ ID NO: 73276 - DNA, 20 bp, Artificial Sequence
  MKO10073276_B_Atp6v0d1
  gRNA
ctaccttgtaaagcgtattt

SEQ ID NO: 73277 - DNA, 20 bp, Artificial Sequence
  MKO10073277_B_Atp6v0d1
  gRNA
aatccgaaatacgctttaca

SEQ ID NO: 73278 - DNA, 20 bp, Artificial Sequence
  MKO10073278_B_Atp6v0d1
  gRNA
gtgcccaagtgccatccgct

SEQ ID NO: 73279 - DNA, 20 bp, Artificial Sequence
  MKO10073279_B_Atp6v0d2
  gRNA
agttgccatagtccgtggtc

SEQ ID NO: 73280 - DNA, 20 bp, Artificial Sequence
  MKO10073280_B_Atp6v0d2
  gRNA
tctagccaagtgtcacccac

SEQ ID NO: 73281 - DNA, 20 bp, Artificial Sequence
  MKO10073281_B_Atp6v0d2
  gRNA
actgcgcaataaactataca

SEQ ID NO: 73282 - DNA, 20 bp, Artificial Sequence
  MKO10073282_B_Atp6v0e2
  gRNA
accccaggggtcactcccac

SEQ ID NO: 73283 - DNA, 20 bp, Artificial Sequence
  MKO10073283_B_Atp6v0e2
  gRNA
cagggtgatcatcaccatgc

SEQ ID NO: 73284 - DNA, 20 bp, Artificial Sequence
  MKO10073284_B_Atp6v0e2
  gRNA
gacagcagtagctaccagca

SEQ ID NO: 73285 - DNA, 20 bp, Artificial Sequence
  MKO10073285_B_Atp6v0e
  gRNA
tagagttatcatcaccatgt

SEQ ID NO: 73286 - DNA, 20 bp, Artificial Sequence
  MKO10073286_B_Atp6v0e
  gRNA
aactgaacaagtcaccaaca

SEQ ID NO: 73287 - DNA, 20 bp, Artificial Sequence
  MKO10073287_B_Atp6v0e
  gRNA
ctgaagtaccactggccttg

SEQ ID NO: 73288 - DNA, 20 bp, Artificial Sequence
  MKO10073288_B_Atp6v1a
  gRNA
cttacgggaaaagggcatcg

SEQ ID NO: 73289 - DNA, 20 bp, Artificial Sequence
  MKO10073289_B_Atp6v1a
  gRNA
acggatgcatcataattccc

SEQ ID NO: 73290 - DNA, 20 bp, Artificial Sequence
  MKO10073290_B_Atp6v1a
  gRNA
ggagaaattattcgattgga

SEQ ID NO: 73291 - DNA, 20 bp, Artificial Sequence
  MKO10073291_B_Atp6v1b1
  gRNA
tctggcaaacccattgacaa

SEQ ID NO: 73292 - DNA, 20 bp, Artificial Sequence
  MKO10073292_B_Atp6v1b1
  gRNA
ccactcctctgagtaccatc

SEQ ID NO: 73293 - DNA, 20 bp, Artificial Sequence
  MKO10073293_B_Atp6v1b1
  gRNA
gcctctggtggtgctggacc

SEQ ID NO: 73294 - DNA, 20 bp, Artificial Sequence
  MKO10073294_B_Atp6v1b2
  gRNA
gtccacttgacattaccaga

SEQ ID NO: 73295 - DNA, 20 bp, Artificial Sequence
  MKO10073295_B_Atp6v1b2
  gRNA
gcagcctacaagactgtctc

SEQ ID NO: 73296 - DNA, 20 bp, Artificial Sequence
  MKO10073296_B_Atp6v1b2
  gRNA
tgtataggtcgagtattcaa

SEQ ID NO: 73297 - DNA, 20 bp, Artificial Sequence
  MKO10073297_B_Atp6v1c1
  gRNA
atgcagacgcccgagacttt

SEQ ID NO: 73298 - DNA, 20 bp, Artificial Sequence
  MKO10073298_B_Atp6v1c1
  gRNA
tcagtacatggctgatgtgc

SEQ ID NO: 73299 - DNA, 20 bp, Artificial Sequence
  MKO10073299_B_Atp6v1c1
  gRNA
ggacagcaaagataaagttc

SEQ ID NO: 73300 - DNA, 20 bp, Artificial Sequence
  MKO10073300_B_Atp6v1c2
  gRNA
ccactcgaagtgcgtcacga

SEQ ID NO: 73301 - DNA, 20 bp, Artificial Sequence
  MKO10073301_B_Atp6v1c2
  gRNA
gaaagcacacgagaccctcc

SEQ ID NO: 73302 - DNA, 20 bp, Artificial Sequence
  MKO10073302_B_Atp6v1c2
  gRNA
ggatatcttaccttgaagtc

SEQ ID NO: 73303 - DNA, 20 bp, Artificial Sequence
  MKO10073303_B_Atp6v1d
  gRNA
cgattaaaaggagcacagac

SEQ ID NO: 73304 - DNA, 20 bp, Artificial Sequence
  MKO10073304_B_Atp6v1d
  gRNA
gagagaagctgccttctcat

SEQ ID NO: 73305 - DNA, 20 bp, Artificial Sequence
  MKO10073305_B_Atp6v1d
  gRNA
gaagtcccctgctgtgaatt

SEQ ID NO: 73306 - DNA, 20 bp, Artificial Sequence
  MKO10073306_B_Atp6v1e1
  gRNA
tcagtctttgcgtttgcaca

SEQ ID NO: 73307 - DNA, 20 bp, Artificial Sequence
  MKO10073307_B_Atp6v1e1
  gRNA
tttgtaggatctgctaaatg

SEQ ID NO: 73308 - DNA, 20 bp, Artificial Sequence
  MKO10073308_B_Atp6v1e1
  gRNA
aacgcaaagactgaagatta

SEQ ID NO: 73309 - DNA, 20 bp, Artificial Sequence
  MKO10073309_B_Atp6v1e2
  gRNA
aacagaatccctcgtatttc

SEQ ID NO: 73310 - DNA, 20 bp, Artificial Sequence
  MKO10073310_B_Atp6v1e2
  gRNA
tcaggaccgtgatgcgagcc

SEQ ID NO: 73311 - DNA, 20 bp, Artificial Sequence
  MKO10073311_B_Atp6v1e2
  gRNA
ctgtgatgattgtccgctgc

SEQ ID NO: 73312 - DNA, 20 bp, Artificial Sequence
  MKO10073312_B_Atp6v1f
  gRNA
ccaacaggcaatttctaaac

SEQ ID NO: 73313 - DNA, 20 bp, Artificial Sequence
  MKO10073313_B_Atp6v1f
  gRNA
gaaccgccaccctaatttcc

SEQ ID NO: 73314 - DNA, 20 bp, Artificial Sequence
  MKO10073314_B_Atp6v1f
  gRNA
agtgtcttcgatctcattga

SEQ ID NO: 73315 - DNA, 20 bp, Artificial Sequence
  MKO10073315_B_Atp6v1g1
  gRNA
ctgcaggcattgggctccca

SEQ ID NO: 73316 - DNA, 20 bp, Artificial Sequence
  MKO10073316_B_Atp6v1g1
  gRNA
agcaatggcgagtcagtcgc

SEQ ID NO: 73317 - DNA, 20 bp, Artificial Sequence
  MKO10073317_B_Atp6v1g1
  gRNA
ccacctcctatccgtttatg

SEQ ID NO: 73318 - DNA, 20 bp, Artificial Sequence
  MKO10073318_B_Atp6v1g2
  gRNA
gaaggcccggcgactgaagc

SEQ ID NO: 73319 - DNA, 20 bp, Artificial Sequence
  MKO10073319_B_Atp6v1g2
  gRNA
ccgctgcccgcttctcagcc

SEQ ID NO: 73320 - DNA, 20 bp, Artificial Sequence
  MKO10073320_B_Atp6v1g2
  gRNA
cggagaaggtggccgatgcc

SEQ ID NO: 73321 - DNA, 20 bp, Artificial Sequence
  MKO10073321_B_Atp6v1g3
  gRNA
tgctcaccttagcctgcttc

SEQ ID NO: 73322 - DNA, 20 bp, Artificial Sequence
  MKO10073322_B_Atp6v1g3
  gRNA
tgcctcatctagcttgtcct

SEQ ID NO: 73323 - DNA, 20 bp, Artificial Sequence
  MKO10073323_B_Atp6v1g3
  gRNA
caccatgaccagccagtctc

SEQ ID NO: 73324 - DNA, 20 bp, Artificial Sequence
  MKO10073324_B_Atp6v1h
  gRNA
tttcccccaagcagctaact

SEQ ID NO: 73325 - DNA, 20 bp, Artificial Sequence
  MKO10073325_B_Atp6v1h
  gRNA
gtactgcactgtctgttctt

SEQ ID NO: 73326 - DNA, 20 bp, Artificial Sequence
  MKO10073326_B_Atp6v1h
  gRNA
tgaaatgaaaagaagttccg

SEQ ID NO: 73327 - DNA, 20 bp, Artificial Sequence
  MKO10073327_B_Atp7a
  gRNA
cttcaggcgctcaacatcaa

SEQ ID NO: 73328 - DNA, 20 bp, Artificial Sequence
  MKO10073328_B_Atp7a
  gRNA
gtttgctacacaagaagcac

SEQ ID NO: 73329 - DNA, 20 bp, Artificial Sequence
  MKO10073329_B_Atp7a
  gRNA
cgcaatttaagacgagaaga

SEQ ID NO: 73330 - DNA, 20 bp, Artificial Sequence
  MKO10073330_B_Atp7b
  gRNA
cttcgaagcgtcagtcatgg

SEQ ID NO: 73331 - DNA, 20 bp, Artificial Sequence
  MKO10073331_B_Atp7b
  gRNA
tggcatcacttacgcctctg

SEQ ID NO: 73332 - DNA, 20 bp, Artificial Sequence
  MKO10073332_B_Atp7b
  gRNA
aagtgcttcgtacagatcaa

SEQ ID NO: 73333 - DNA, 20 bp, Artificial Sequence
  MKO10073333_B_Atp8a1
  gRNA
attcctgatgtgtcgccgac

SEQ ID NO: 73334 - DNA, 20 bp, Artificial Sequence
  MKO10073334_B_Atp8a1
  gRNA
agaacgaattagccgctctt

SEQ ID NO: 73335 - DNA, 20 bp, Artificial Sequence
  MKO10073335_B_Atp8a1
  gRNA
aattctgcaacaaccacgtc

SEQ ID NO: 73336 - DNA, 20 bp, Artificial Sequence
  MKO10073336_B_Atp8a2
  gRNA
cctgtaacagaaacgacata

SEQ ID NO: 73337 - DNA, 20 bp, Artificial Sequence
  MKO10073337_B_Atp8a2
  gRNA
gattcctgtatgagcagatt

SEQ ID NO: 73338 - DNA, 20 bp, Artificial Sequence
  MKO10073338_B_Atp8a2
  gRNA
gcacactatcatgtggaaag

SEQ ID NO: 73339 - DNA, 20 bp, Artificial Sequence
  MKO10073339_B_Atp8b1
  gRNA
tcatgaaatgaggttgttcg

SEQ ID NO: 73340 - DNA, 20 bp, Artificial Sequence
  MKO10073340_B_Atp8b1
  gRNA
tccttaccacatcatctacc

SEQ ID NO: 73341 - DNA, 20 bp, Artificial Sequence
  MKO10073341_B_Atp8b1
  gRNA
catcacggccatcaaagacc

SEQ ID NO: 73342 - DNA, 20 bp, Artificial Sequence
  MKO10073342_B_Atp8b2
  gRNA
agtaggtgttggcaacttcc

SEQ ID NO: 73343 - DNA, 20 bp, Artificial Sequence
  MKO10073343_B_Atp8b2
  gRNA
gaaggtgacaatattgtact

SEQ ID NO: 73344 - DNA, 20 bp, Artificial Sequence
  MKO10073344_B_Atp8b2
  gRNA
accaggacagggacgagatc

SEQ ID NO: 73345 - DNA, 20 bp, Artificial Sequence
  MKO10073345_B_Atp8b3
  gRNA
gtcatccacaagatcacgag

SEQ ID NO: 73346 - DNA, 20 bp, Artificial Sequence
  MKO10073346_B_Atp8b3
  gRNA
aactgctcgtacaggttcag

SEQ ID NO: 73347 - DNA, 20 bp, Artificial Sequence
  MKO10073347_B_Atp8b3
  gRNA
gcgataagatcatcaacaac

SEQ ID NO: 73348 - DNA, 20 bp, Artificial Sequence
  MKO10073348_B_Atp8b4
  gRNA
agattacctgtagtatcaga

SEQ ID NO: 73349 - DNA, 20 bp, Artificial Sequence
  MKO10073349_B_Atp8b4
  gRNA
tgatgagcaccttagactgc

SEQ ID NO: 73350 - DNA, 20 bp, Artificial Sequence
  MKO10073350_B_Atp8b4
  gRNA
gtgataatcaagtgaataac

SEQ ID NO: 73351 - DNA, 20 bp, Artificial Sequence
  MKO10073351_B_Atp8b5
  gRNA
actgctctgcaatgcaagag

SEQ ID NO: 73352 - DNA, 20 bp, Artificial Sequence
  MKO10073352_B_Atp8b5
  gRNA
aactgttcaaacaggttcat

SEQ ID NO: 73353 - DNA, 20 bp, Artificial Sequence
  MKO10073353_B_Atp8b5
  gRNA
accatactttgatgtcttga

SEQ ID NO: 73354 - DNA, 20 bp, Artificial Sequence
  MKO10073354_B_Atp9a
  gRNA
tgacatttcgagggtaccgc

SEQ ID NO: 73355 - DNA, 20 bp, Artificial Sequence
  MKO10073355_B_Atp9a
  gRNA
actgcgagcaggcgagaagc

SEQ ID NO: 73356 - DNA, 20 bp, Artificial Sequence
  MKO10073356_B_Atp9a
  gRNA
ggttgggacaccccgagaag

SEQ ID NO: 73357 - DNA, 20 bp, Artificial Sequence
  MKO10073357_B_Atp9b
  gRNA
ctccgtgttatcctagctcg

SEQ ID NO: 73358 - DNA, 20 bp, Artificial Sequence
  MKO10073358_B_Atp9b
  gRNA
tatagcaagcttacagtaag

SEQ ID NO: 73359 - DNA, 20 bp, Artificial Sequence
  MKO10073359_B_Atp9b
  gRNA
ctacacctactgggctcctc

SEQ ID NO: 73360 - DNA, 20 bp, Artificial Sequence
  MKO10073360_B_Atpaf1
  gRNA
agtgccccactggctgcttt

SEQ ID NO: 73361 - DNA, 20 bp, Artificial Sequence
  MKO10073361_B_Atpaf1
  gRNA
ttagtgaatcctttgctcac

SEQ ID NO: 73362 - DNA, 20 bp, Artificial Sequence
  MKO10073362_B_Atpaf1
  gRNA
ttcagtcttcaacgttgaga

SEQ ID NO: 73363 - DNA, 20 bp, Artificial Sequence
  MKO10073363_B_Atpaf2
  gRNA
tactgtccccagcgaagccc

SEQ ID NO: 73364 - DNA, 20 bp, Artificial Sequence
  MKO10073364_B_Atpaf2
  gRNA
caaggatgtgttgcacaatg

SEQ ID NO: 73365 - DNA, 20 bp, Artificial Sequence
  MKO10073365_B_Atpaf2
  gRNA
tgaagttccactaatgtctc

SEQ ID NO: 73366 - DNA, 20 bp, Artificial Sequence
  MKO10073366_B_Atpif1
  gRNA
atgaaggtcctgcaaacccg

SEQ ID NO: 73367 - DNA, 20 bp, Artificial Sequence
  MKO10073367_B_Atpif1
  gRNA
tgagattgaccaccattcga

SEQ ID NO: 73368 - DNA, 20 bp, Artificial Sequence
  MKO10073368_B_Atpif1
  gRNA
catcttcatggtgtttcctc

SEQ ID NO: 73369 - DNA, 20 bp, Artificial Sequence
  MKO10073369_B_Atraid
  gRNA
ggcttccagtgctattgcaa

SEQ ID NO: 73370 - DNA, 20 bp, Artificial Sequence
  MKO10073370_B_Atraid
  gRNA
tgcaatagcactggaagccc

SEQ ID NO: 73371 - DNA, 20 bp, Artificial Sequence
  MKO10073371_B_Atraid
  gRNA
ccttcaggcaaatcctctca

SEQ ID NO: 73372 - DNA, 20 bp, Artificial Sequence
  MKO10073372_B_Atrip
  gRNA
cagatttctggtgggccaag

SEQ ID NO: 73373 - DNA, 20 bp, Artificial Sequence
  MKO10073373_B_Atrip
  gRNA
ctccctccgtctcccacgtc

SEQ ID NO: 73374 - DNA, 20 bp, Artificial Sequence
  MKO10073374_B_Atrip
  gRNA
cttccacccctgtcagactg

SEQ ID NO: 73375 - DNA, 20 bp, Artificial Sequence
  MKO10073375_B_Atrnl1
  gRNA
ccttactgtaaagccaattg

SEQ ID NO: 73376 - DNA, 20 bp, Artificial Sequence
  MKO10073376_B_Atrnl1
  gRNA
cacctaagtacagctactaa

SEQ ID NO: 73377 - DNA, 20 bp, Artificial Sequence
  MKO10073377_B_Atrnl1
  gRNA
cttaaccttagcactgcatt

SEQ ID NO: 73378 - DNA, 20 bp, Artificial Sequence
  MKO10073378_B_Atrn
  gRNA
gatgctgcttataatctgac

SEQ ID NO: 73379 - DNA, 20 bp, Artificial Sequence
  MKO10073379_B_Atrn
  gRNA
tacagactaactggctcttc

SEQ ID NO: 73380 - DNA, 20 bp, Artificial Sequence
  MKO10073380_B_Atrn
  gRNA
cacctctgattgctgccttt

SEQ ID NO: 73381 - DNA, 20 bp, Artificial Sequence
  MKO10073381_B_Atrx
  gRNA
tggacttaattctgatatga

SEQ ID NO: 73382 - DNA, 20 bp, Artificial Sequence
  MKO10073382_B_Atrx
  gRNA
actatgcaaagcttgccaaa

SEQ ID NO: 73383 - DNA, 20 bp, Artificial Sequence
  MKO10073383_B_Atrx
  gRNA
ccttgatgaacctgaagatc

SEQ ID NO: 73384 - DNA, 20 bp, Artificial Sequence
  MKO10073384_B_Atr
  gRNA
aattcaatgccaagctcaac

SEQ ID NO: 73385 - DNA, 20 bp, Artificial Sequence
  MKO10073385_B_Atr
  gRNA
cttaccaatacaactgtctt

SEQ ID NO: 73386 - DNA, 20 bp, Artificial Sequence
  MKO10073386_B_Atr
  gRNA
tgagattctcctgttgagct

SEQ ID NO: 73387 - DNA, 20 bp, Artificial Sequence
  MKO10073387_B_Atxn10
  gRNA
cagcaactccgatcgtatcc

SEQ ID NO: 73388 - DNA, 20 bp, Artificial Sequence
  MKO10073388_B_Atxn10
  gRNA
tgacgttaattgcaatattg

SEQ ID NO: 73389 - DNA, 20 bp, Artificial Sequence
  MKO10073389_B_Atxn10
  gRNA
gtctactcatgctgttgagc

SEQ ID NO: 73390 - DNA, 20 bp, Artificial Sequence
  MKO10073390_B_Atxn1l
  gRNA
gttctacccgcagtcccatc

SEQ ID NO: 73391 - DNA, 20 bp, Artificial Sequence
  MKO10073391_B_Atxn1l
  gRNA
aattgactctagcacagtcg

SEQ ID NO: 73392 - DNA, 20 bp, Artificial Sequence
  MKO10073392_B_Atxn1l
  gRNA
tcctgactccgctcatgaac

SEQ ID NO: 73393 - DNA, 20 bp, Artificial Sequence
  MKO10073393_B_Atxn1
  gRNA
tggggaggcctctcgatgcg

SEQ ID NO: 73394 - DNA, 20 bp, Artificial Sequence
  MKO10073394_B_Atxn1
  gRNA
tctacttgcccacgttagat

SEQ ID NO: 73395 - DNA, 20 bp, Artificial Sequence
  MKO10073395_B_Atxn1
  gRNA
ccagcagaccacgcatcgag

SEQ ID NO: 73396 - DNA, 20 bp, Artificial Sequence
  MKO10073396_B_Atxn2l
  gRNA
tttaataggggacagaccac

SEQ ID NO: 73397 - DNA, 20 bp, Artificial Sequence
  MKO10073397_B_Atxn2l
  gRNA
gaaaaatggcaccacttacg

SEQ ID NO: 73398 - DNA, 20 bp, Artificial Sequence
  MKO10073398_B_Atxn2l
  gRNA
aaggtgtctataacaattcc

SEQ ID NO: 73399 - DNA, 20 bp, Artificial Sequence
  MKO10073399_B_Atxn2
  gRNA
agaggtcggaacagtagcaa

SEQ ID NO: 73400 - DNA, 20 bp, Artificial Sequence
  MKO10073400_B_Atxn2
  gRNA
aatctatgcaaacgtgagga

SEQ ID NO: 73401 - DNA, 20 bp, Artificial Sequence
  MKO10073401_B_Atxn2
  gRNA
tgtgaagtacaagtgaaaaa

SEQ ID NO: 73402 - DNA, 20 bp, Artificial Sequence
  MKO10073402_B_Atxn3
  gRNA
acagcagccttctggaaata

SEQ ID NO: 73403 - DNA, 20 bp, Artificial Sequence
  MKO10073403_B_Atxn3
  gRNA
taggatcaattctgagcctc

SEQ ID NO: 73404 - DNA, 20 bp, Artificial Sequence
  MKO10073404_B_Atxn3
  gRNA
ctgtcatccatatttccaga

SEQ ID NO: 73405 - DNA, 20 bp, Artificial Sequence
  MKO10073405_B_Atxn7l1
  gRNA
aggtgctgctgacagcgcta

SEQ ID NO: 73406 - DNA, 20 bp, Artificial Sequence
  MKO10073406_B_Atxn7l1
  gRNA
ttgcctgtgctagcgatgtc

SEQ ID NO: 73407 - DNA, 20 bp, Artificial Sequence
  MKO10073407_B_Atxn7l1
  gRNA
gttatgaggcttaataaaga

SEQ ID NO: 73408 - DNA, 20 bp, Artificial Sequence
  MKO10073408_B_Atxn7l2
  gRNA
actactcacgagccatcttt

SEQ ID NO: 73409 - DNA, 20 bp, Artificial Sequence
  MKO10073409_B_Atxn7l2
  gRNA
ggccctgcccattcactaca

SEQ ID NO: 73410 - DNA, 20 bp, Artificial Sequence
  MKO10073410_B_Atxn7l2
  gRNA
tacacgcctattgacttgca

SEQ ID NO: 73411 - DNA, 20 bp, Artificial Sequence
  MKO10073411_B_Atxn7l3b
  gRNA
ggcccgtccccgggatcccc

SEQ ID NO: 73412 - DNA, 20 bp, Artificial Sequence
  MKO10073412_B_Atxn7l3b
  gRNA
taagatggaggagatttcgt

SEQ ID NO: 73413 - DNA, 20 bp, Artificial Sequence
  MKO10073413_B_Atxn7l3b
  gRNA
tttcggcatccagccagtgg

SEQ ID NO: 73414 - DNA, 20 bp, Artificial Sequence
  MKO10073414_B_Atxn7l3
  gRNA
cggggcccaggccatcgctc

SEQ ID NO: 73415 - DNA, 20 bp, Artificial Sequence
  MKO10073415_B_Atxn7l3
  gRNA
cctctagtttgctgttatcc

SEQ ID NO: 73416 - DNA, 20 bp, Artificial Sequence
  MKO10073416_B_Atxn7l3
  gRNA
atgacatcaatgacaatgac

SEQ ID NO: 73417 - DNA, 20 bp, Artificial Sequence
  MKO10073417_B_Atxn7
  gRNA
caaccaagttgtcaaaccgc

SEQ ID NO: 73418 - DNA, 20 bp, Artificial Sequence
  MKO10073418_B_Atxn7
  gRNA
ccaaagagaaacttccgctc

SEQ ID NO: 73419 - DNA, 20 bp, Artificial Sequence
  MKO10073419_B_Atxn7
  gRNA
gcgaagtcatggggctctgc

SEQ ID NO: 73420 - DNA, 20 bp, Artificial Sequence
  MKO10073420_B_Auh
  gRNA
ctttgtctccaagatccgat

SEQ ID NO: 73421 - DNA, 20 bp, Artificial Sequence
  MKO10073421_B_Auh
  gRNA
ctaccagcacagaatatccc

SEQ ID NO: 73422 - DNA, 20 bp, Artificial Sequence
  MKO10073422_B_Auh
  gRNA
atcatcagaagtgaagtccc

SEQ ID NO: 73423 - DNA, 20 bp, Artificial Sequence
  MKO10073423_B_Aup1
  gRNA
gacgcggtgatcgcggagtc

SEQ ID NO: 73424 - DNA, 20 bp, Artificial Sequence
  MKO10073424_B_Aup1
  gRNA
accacgtcctgaatagaaaa

SEQ ID NO: 73425 - DNA, 20 bp, Artificial Sequence
  MKO10073425_B_Aup1
  gRNA
gaggccaccaatggccgaga

SEQ ID NO: 73426 - DNA, 20 bp, Artificial Sequence
  MKO10073426_B_Aurkaip1
  gRNA
agaaagacttgaagcgcatc

SEQ ID NO: 73427 - DNA, 20 bp, Artificial Sequence
  MKO10073427_B_Aurkaip1
  gRNA
tcctggcgcgcctgacttca

SEQ ID NO: 73428 - DNA, 20 bp, Artificial Sequence
  MKO10073428_B_Aurkaip1
  gRNA
ttcggggtctgccagttctc

SEQ ID NO: 73429 - DNA, 20 bp, Artificial Sequence
  MKO10073429_B_Aurka
  gRNA
cgaacgtggagcaccagctt

SEQ ID NO: 73430 - DNA, 20 bp, Artificial Sequence
  MKO10073430_B_Aurka
  gRNA
attctgtaccttaacaggcc

SEQ ID NO: 73431 - DNA, 20 bp, Artificial Sequence
  MKO10073431_B_Aurka
  gRNA
gtaaagaaaactgtgtctcc

SEQ ID NO: 73432 - DNA, 20 bp, Artificial Sequence
  MKO10073432_B_Aurkb
  gRNA
tcgccgagagatcgaaatcc

SEQ ID NO: 73433 - DNA, 20 bp, Artificial Sequence
  MKO10073433_B_Aurkb
  gRNA
gagagcaagcgcagatgtcg

SEQ ID NO: 73434 - DNA, 20 bp, Artificial Sequence
  MKO10073434_B_Aurkb
  gRNA
cagggctccactgcctcgca

SEQ ID NO: 73435 - DNA, 20 bp, Artificial Sequence
  MKO10073435_B_Aurkc
  gRNA
aggcttactgtaggtgtgcc

SEQ ID NO: 73436 - DNA, 20 bp, Artificial Sequence
  MKO10073436_B_Aurkc
  gRNA
accatcaatgactttgaaat

SEQ ID NO: 73437 - DNA, 20 bp, Artificial Sequence
  MKO10073437_B_Aurkc
  gRNA
actacttctatgatgacact

SEQ ID NO: 73438 - DNA, 20 bp, Artificial Sequence
  MKO10073438_B_Auts2
  gRNA
gtgcgacagtgacagcgacc

SEQ ID NO: 73439 - DNA, 20 bp, Artificial Sequence
  MKO10073439_B_Auts2
  gRNA
tctcccgagagctgctccgc

SEQ ID NO: 73440 - DNA, 20 bp, Artificial Sequence
  MKO10073440_B_Auts2
  gRNA
gaagtagcctgtccccaagc

SEQ ID NO: 73441 - DNA, 20 bp, Artificial Sequence
  MKO10073441_B_Aven
  gRNA
ttcacagttccgatttgctg

SEQ ID NO: 73442 - DNA, 20 bp, Artificial Sequence
  MKO10073442_B_Aven
  gRNA
gctttctgcaaaccttctaa

SEQ ID NO: 73443 - DNA, 20 bp, Artificial Sequence
  MKO10073443_B_Aven
  gRNA
tgttgcttcagaattgatcc

SEQ ID NO: 73444 - DNA, 20 bp, Artificial Sequence
  MKO10073444_B_Avil
  gRNA
ccagcaggaagacatcgcct

SEQ ID NO: 73445 - DNA, 20 bp, Artificial Sequence
  MKO10073445_B_Avil
  gRNA
agactgctacatcgtcctct

SEQ ID NO: 73446 - DNA, 20 bp, Artificial Sequence
  MKO10073446_B_Avil
  gRNA
acacgcaggtggaaatgagc

SEQ ID NO: 73447 - DNA, 20 bp, Artificial Sequence
  MKO10073447_B_Avl9
  gRNA
gcttgaagtaagccataaag

SEQ ID NO: 73448 - DNA, 20 bp, Artificial Sequence
  MKO10073448_B_Avl9
  gRNA
acaagagataccatatactg

SEQ ID NO: 73449 - DNA, 20 bp, Artificial Sequence
  MKO10073449_B_Avl9
  gRNA
ttcccaaatttccattctaa

SEQ ID NO: 73450 - DNA, 20 bp, Artificial Sequence
  MKO10073450_B_Avpi1
  gRNA
gggtcagacgctgtagaacc

SEQ ID NO: 73451 - DNA, 20 bp, Artificial Sequence
  MKO10073451_B_Avpi1
  gRNA
ggctcgctcacgacagaggc

SEQ ID NO: 73452 - DNA, 20 bp, Artificial Sequence
  MKO10073452_B_Avpi1
  gRNA
cctacctaagccggctgcag

SEQ ID NO: 73453 - DNA, 20 bp, Artificial Sequence
  MKO10073453_B_Avpr1a
  gRNA
catagcgcagaaattcgcca

SEQ ID NO: 73454 - DNA, 20 bp, Artificial Sequence
  MKO10073454_B_Avpr1a
  gRNA
tcctcgttgcgtacgtcccc

SEQ ID NO: 73455 - DNA, 20 bp, Artificial Sequence
  MKO10073455_B_Avpr1a
  gRNA
gccgggggacgtacgcaacg

SEQ ID NO: 73456 - DNA, 20 bp, Artificial Sequence
  MKO10073456_B_Avpr1b
  gRNA
tttcaccatctcgatgcttc

SEQ ID NO: 73457 - DNA, 20 bp, Artificial Sequence
  MKO10073457_B_Avpr1b
  gRNA
gcgccacgcccaggtcggtc

SEQ ID NO: 73458 - DNA, 20 bp, Artificial Sequence
  MKO10073458_B_Avpr1b
  gRNA
ccgggctgtcaaatatctac

SEQ ID NO: 73459 - DNA, 20 bp, Artificial Sequence
  MKO10073459_B_Avpr2
  gRNA
ttaacagctgtaccaacccc

SEQ ID NO: 73460 - DNA, 20 bp, Artificial Sequence
  MKO10073460_B_Avpr2
  gRNA
aggggttggtacagctgtta

SEQ ID NO: 73461 - DNA, 20 bp, Artificial Sequence
  MKO10073461_B_Avpr2
  gRNA
atcctggtgtctaccacgtc

SEQ ID NO: 73462 - DNA, 20 bp, Artificial Sequence
  MKO10073462_B_Avp
  gRNA
cgcttgtttcctgagcctgc

SEQ ID NO: 73463 - DNA, 20 bp, Artificial Sequence
  MKO10073463_B_Avp
  gRNA
gtcgctgcagcagatgccca

SEQ ID NO: 73464 - DNA, 20 bp, Artificial Sequence
  MKO10073464_B_Avp
  gRNA
ctggccggactggcagggcg

SEQ ID NO: 73465 - DNA, 20 bp, Artificial Sequence
  MKO10073465_B_Awat1
  gRNA
gcctattgttcacacccttg

SEQ ID NO: 73466 - DNA, 20 bp, Artificial Sequence
  MKO10073466_B_Awat1
  gRNA
tcttcaagatccccattatt

SEQ ID NO: 73467 - DNA, 20 bp, Artificial Sequence
  MKO10073467_B_Awat1
  gRNA
gttgcagatcctgaagacta

SEQ ID NO: 73468 - DNA, 20 bp, Artificial Sequence
  MKO10073468_B_Awat2
  gRNA
gctatccttacccatgttta

SEQ ID NO: 73469 - DNA, 20 bp, Artificial Sequence
  MKO10073469_B_Awat2
  gRNA
gagtgcagatacagcacgcc

SEQ ID NO: 73470 - DNA, 20 bp, Artificial Sequence
  MKO10073470_B_Awat2
  gRNA
gactggaagacccctgagcg

SEQ ID NO: 73471 - DNA, 20 bp, Artificial Sequence
  MKO10073471_B_Axin1
  gRNA
gcgcacttaccgaatgccaa

SEQ ID NO: 73472 - DNA, 20 bp, Artificial Sequence
  MKO10073472_B_Axin1
  gRNA
aacccctactacgtcaactc

SEQ ID NO: 73473 - DNA, 20 bp, Artificial Sequence
  MKO10073473_B_Axin1
  gRNA
tgctgcttacggatcctgta

SEQ ID NO: 73474 - DNA, 20 bp, Artificial Sequence
  MKO10073474_B_Axin2
  gRNA
tcgccgccgagctcatctcc

SEQ ID NO: 73475 - DNA, 20 bp, Artificial Sequence
  MKO10073475_B_Axin2
  gRNA
tggagtccctccttaccgca

SEQ ID NO: 73476 - DNA, 20 bp, Artificial Sequence
  MKO10073476_B_Axin2
  gRNA
gggctatagcgacccacacc

SEQ ID NO: 73477 - DNA, 20 bp, Artificial Sequence
  MKO10073477_B_Axl
  gRNA
tcacgggttccgggggtccc

SEQ ID NO: 73478 - DNA, 20 bp, Artificial Sequence
  MKO10073478_B_Axl
  gRNA
agcccgtttgtggggaaccc

SEQ ID NO: 73479 - DNA, 20 bp, Artificial Sequence
  MKO10073479_B_Axl
  gRNA
cttctagatgcaccatacac

SEQ ID NO: 73480 - DNA, 20 bp, Artificial Sequence
  MKO10073480_B_Aym1
  gRNA
ttccattatctcttagagag

SEQ ID NO: 73481 - DNA, 20 bp, Artificial Sequence
  MKO10073481_B_Aym1
  gRNA
cagaaagttctgtgagagca

SEQ ID NO: 73482 - DNA, 20 bp, Artificial Sequence
  MKO10073482_B_Aym1
  gRNA
ctgagcttgttgctgtgctc

SEQ ID NO: 73483 - DNA, 20 bp, Artificial Sequence
  MKO10073483_B_Azgp1
  gRNA
ggacaacccggtgtagagaa

SEQ ID NO: 73484 - DNA, 20 bp, Artificial Sequence
  MKO10073484_B_Azgp1
  gRNA
cccaatctctctcggtgcag

SEQ ID NO: 73485 - DNA, 20 bp, Artificial Sequence
  MKO10073485_B_Azgp1
  gRNA
cccactgcaccgagagagat

SEQ ID NO: 73486 - DNA, 20 bp, Artificial Sequence
  MKO10073486_B_Azi1
  gRNA
gggcgacaccatcttcgagg

SEQ ID NO: 73487 - DNA, 20 bp, Artificial Sequence
  MKO10073487_B_Azi1
  gRNA
ccactatgcctcctcgaaga

SEQ ID NO: 73488 - DNA, 20 bp, Artificial Sequence
  MKO10073488_B_Azi1
  gRNA
agtcatggacgggctccccc

SEQ ID NO: 73489 - DNA, 20 bp, Artificial Sequence
  MKO10073489_B_Azi2
  gRNA
atcttctactagcgtgtcca

SEQ ID NO: 73490 - DNA, 20 bp, Artificial Sequence
  MKO10073490_B_Azi2
  gRNA
taaacccaccctcatccagc

SEQ ID NO: 73491 - DNA, 20 bp, Artificial Sequence
  MKO10073491_B_Azi2
  gRNA
agcaagagctgggactactg

SEQ ID NO: 73492 - DNA, 20 bp, Artificial Sequence
  MKO10073492_B_Azin1
  gRNA
gaacttgatgtccaaataat

SEQ ID NO: 73493 - DNA, 20 bp, Artificial Sequence
  MKO10073493_B_Azin1
  gRNA
aatggctttagtgcaagaat

SEQ ID NO: 73494 - DNA, 20 bp, Artificial Sequence
  MKO10073494_B_Azin1
  gRNA
ctcacttaaccccaattatt

SEQ ID NO: 73495 - DNA, 20 bp, Artificial Sequence
  MKO10073495_B_B020004C17Rik
  gRNA
ttagcagtcgcctttctaat

SEQ ID NO: 73496 - DNA, 20 bp, Artificial Sequence
  MKO10073496_B_B020004C17Rik
  gRNA
tctgaatacctgaggaactt

SEQ ID NO: 73497 - DNA, 20 bp, Artificial Sequence
  MKO10073497_B_B020004C17Rik
  gRNA
gaaacgaccaagaagccaat

SEQ ID NO: 73498 - DNA, 20 bp, Artificial Sequence
  MKO10073498_B_B020004J07Rik
  gRNA
ccccgtccagtgcgagctgc

SEQ ID NO: 73499 - DNA, 20 bp, Artificial Sequence
  MKO10073499_B_B020004J07Rik
  gRNA
atctgcaactctacagaccc

SEQ ID NO: 73500 - DNA, 20 bp, Artificial Sequence
  MKO10073500_B_B020004J07Rik
  gRNA
cacactcctgcagctcgcac

SEQ ID NO: 73501 - DNA, 20 bp, Artificial Sequence
  MKO10073501_B_B020031M17Rik
  gRNA
ctcacttcttcttcttcttc

SEQ ID NO: 73502 - DNA, 20 bp, Artificial Sequence
  MKO10073502_B_B020031M17Rik
  gRNA
aaccctcgccaagcttgctt

SEQ ID NO: 73503 - DNA, 20 bp, Artificial Sequence
  MKO10073503_B_B020031M17Rik
  gRNA
tccagccttcctcagagcag

SEQ ID NO: 73504 - DNA, 20 bp, Artificial Sequence
  MKO10073504_B_B230118H07Rik
  gRNA
tccacagaaggatcataaga

SEQ ID NO: 73505 - DNA, 20 bp, Artificial Sequence
  MKO10073505_B_B230118H07Rik
  gRNA
agttccatgtgctccccatt

SEQ ID NO: 73506 - DNA, 20 bp, Artificial Sequence
  MKO10073506_B_B230118H07Rik
  gRNA
gaaaggaactcccaactttg

SEQ ID NO: 73507 - DNA, 20 bp, Artificial Sequence
  MKO10073507_B_B230216G23Rik
  gRNA
cattacctgtggagcaccgc

SEQ ID NO: 73508 - DNA, 20 bp, Artificial Sequence
  MKO10073508_B_B230216G23Rik
  gRNA
tgcagcgactctctgagaag

SEQ ID NO: 73509 - DNA, 20 bp, Artificial Sequence
  MKO10073509_B_B230216G23Rik
  gRNA
tgaactgctgactctcccag

SEQ ID NO: 73510 - DNA, 20 bp, Artificial Sequence
  MKO10073510_B_B230217C12Rik
  gRNA
atacactggaagagatcagt

SEQ ID NO: 73511 - DNA, 20 bp, Artificial Sequence
  MKO10073511_B_B230217C12Rik
  gRNA
cagaggagtcccctcgattc

SEQ ID NO: 73512 - DNA, 20 bp, Artificial Sequence
  MKO10073512_B_B230217C12Rik
  gRNA
ctgcttgtactgagccatgc

SEQ ID NO: 73513 - DNA, 20 bp, Artificial Sequence
  MKO10073513_B_B230219D22Rik
  gRNA
aaaatgatgcaccccgttgc

SEQ ID NO: 73514 - DNA, 20 bp, Artificial Sequence
  MKO10073514_B_B230219D22Rik
  gRNA
ctgtcccgccttgcagatct

SEQ ID NO: 73515 - DNA, 20 bp, Artificial Sequence
  MKO10073515_B_B230219D22Rik
  gRNA
aatccagcgttctgtgggcc

SEQ ID NO: 73516 - DNA, 20 bp, Artificial Sequence
  MKO10073516_B_B2m
  gRNA
ctggtgcttgtctcactgac

SEQ ID NO: 73517 - DNA, 20 bp, Artificial Sequence
  MKO10073517_B_B2m
  gRNA
acgtagcagttcagtatgtt

SEQ ID NO: 73518 - DNA, 20 bp, Artificial Sequence
  MKO10073518_B_B2m
  gRNA
cgtatgtatcagtctcagtg

SEQ ID NO: 73519 - DNA, 20 bp, Artificial Sequence
  MKO10073519_B_B3galnt1
  gRNA
cgcgctcgatcacattgtag

SEQ ID NO: 73520 - DNA, 20 bp, Artificial Sequence
  MKO10073520_B_B3galnt1
  gRNA
gagaacagttcgagtgttcg

SEQ ID NO: 73521 - DNA, 20 bp, Artificial Sequence
  MKO10073521_B_B3galnt1
  gRNA
ataccaagagtaccccttca

SEQ ID NO: 73522 - DNA, 20 bp, Artificial Sequence
  MKO10073522_B_B3galnt2
  gRNA
atcgtagaacactccaagac

SEQ ID NO: 73523 - DNA, 20 bp, Artificial Sequence
  MKO10073523_B_B3galnt2
  gRNA
ttcacttgtacgccacaact

SEQ ID NO: 73524 - DNA, 20 bp, Artificial Sequence
  MKO10073524_B_B3galnt2
  gRNA
ccaatcgtgattaccagtct

SEQ ID NO: 73525 - DNA, 20 bp, Artificial Sequence
  MKO10073525_B_B3galt1
  gRNA
atgtattgaccgttgtgtgc

SEQ ID NO: 73526 - DNA, 20 bp, Artificial Sequence
  MKO10073526_B_B3galt1
  gRNA
tctggtggacagtgatgacg

SEQ ID NO: 73527 - DNA, 20 bp, Artificial Sequence
  MKO10073527_B_B3galt1
  gRNA
tcagggatgtccgcagtaag

SEQ ID NO: 73528 - DNA, 20 bp, Artificial Sequence
  MKO10073528_B_B3galt2
  gRNA
ctagagaaagcacacccgta

SEQ ID NO: 73529 - DNA, 20 bp, Artificial Sequence
  MKO10073529_B_B3galt2
  gRNA
cttcttgcttcgatttgtcc

SEQ ID NO: 73530 - DNA, 20 bp, Artificial Sequence
  MKO10073530_B_B3galt2
  gRNA
catcttccaagtgcaaacga

SEQ ID NO: 73531 - DNA, 20 bp, Artificial Sequence
  MKO10073531_B_B3galt4
  gRNA
cctcctggcggtcctactac

SEQ ID NO: 73532 - DNA, 20 bp, Artificial Sequence
  MKO10073532_B_B3galt4
  gRNA
cagtacatatcctgtgcccg

SEQ ID NO: 73533 - DNA, 20 bp, Artificial Sequence
  MKO10073533_B_B3galt4
  gRNA
cccttctgccattgctccga

SEQ ID NO: 73534 - DNA, 20 bp, Artificial Sequence
  MKO10073534_B_B3galt5
  gRNA
gcatggccatccgcaagacg

SEQ ID NO: 73535 - DNA, 20 bp, Artificial Sequence
  MKO10073535_B_B3galt5
  gRNA
gagtgcgcccatcatgagaa

SEQ ID NO: 73536 - DNA, 20 bp, Artificial Sequence
  MKO10073536_B_B3galt5
  gRNA
caagcagaagccgcctttcc

SEQ ID NO: 73537 - DNA, 20 bp, Artificial Sequence
  MKO10073537_B_B3galt6
  gRNA
atagccaccgcccaacgcgt

SEQ ID NO: 73538 - DNA, 20 bp, Artificial Sequence
  MKO10073538_B_B3galt6
  gRNA
tcctggtggacctacgcgca

SEQ ID NO: 73539 - DNA, 20 bp, Artificial Sequence
  MKO10073539_B_B3galt6
  gRNA
cttcactgtgccacgcgcgc

SEQ ID NO: 73540 - DNA, 20 bp, Artificial Sequence
  MKO10073540_B_B3galtl
  gRNA
agtcctccttctccatcagt

SEQ ID NO: 73541 - DNA, 20 bp, Artificial Sequence
  MKO10073541_B_B3galtl
  gRNA
gaaaggaattactttgactc

SEQ ID NO: 73542 - DNA, 20 bp, Artificial Sequence
  MKO10073542_B_B3galtl
  gRNA
tttcaactgttctgctctct

SEQ ID NO: 73543 - DNA, 20 bp, Artificial Sequence
  MKO10073543_B_B3gat1
  gRNA
cggatatgcagatcttggtc

SEQ ID NO: 73544 - DNA, 20 bp, Artificial Sequence
  MKO10073544_B_B3gat1
  gRNA
agacagtcttcgacccccac

SEQ ID NO: 73545 - DNA, 20 bp, Artificial Sequence
  MKO10073545_B_B3gat1
  gRNA
gcaaggatgtcccgtctctt

SEQ ID NO: 73546 - DNA, 20 bp, Artificial Sequence
  MKO10073546_B_B3gat2
  gRNA
gcgacgctatgaacgtccgt

SEQ ID NO: 73547 - DNA, 20 bp, Artificial Sequence
  MKO10073547_B_B3gat2
  gRNA
aaagctgtatttaagcgccg

SEQ ID NO: 73548 - DNA, 20 bp, Artificial Sequence
  MKO10073548_B_B3gat2
  gRNA
cgcccaccaactagtcccac

SEQ ID NO: 73549 - DNA, 20 bp, Artificial Sequence
  MKO10073549_B_B3gat3
  gRNA
gacggagatcagcttgcaac

SEQ ID NO: 73550 - DNA, 20 bp, Artificial Sequence
  MKO10073550_B_B3gat3
  gRNA
acgcggccatcctgtacctg

SEQ ID NO: 73551 - DNA, 20 bp, Artificial Sequence
  MKO10073551_B_B3gat3
  gRNA
cagcaaaatacacgactcct

SEQ ID NO: 73552 - DNA, 20 bp, Artificial Sequence
  MKO10073552_B_B3gnt1
  gRNA
cctttaccgccagttcaaac

SEQ ID NO: 73553 - DNA, 20 bp, Artificial Sequence
  MKO10073553_B_B3gnt1
  gRNA
cgtgtgcccctcgcgctatg

SEQ ID NO: 73554 - DNA, 20 bp, Artificial Sequence
  MKO10073554_B_B3gnt1
  gRNA
gtctccgcgatccgtagacc

SEQ ID NO: 73555 - DNA, 20 bp, Artificial Sequence
  MKO10073555_B_B3gnt2
  gRNA
cgtcgaagagtcaagttgct

SEQ ID NO: 73556 - DNA, 20 bp, Artificial Sequence
  MKO10073556_B_B3gnt2
  gRNA
caagcaattcgggagtcttg

SEQ ID NO: 73557 - DNA, 20 bp, Artificial Sequence
  MKO10073557_B_B3gnt2
  gRNA
ctattgtgaaccagactcga

SEQ ID NO: 73558 - DNA, 20 bp, Artificial Sequence
  MKO10073558_B_B3gnt3
  gRNA
cacgtcgtcgattgggaaca

SEQ ID NO: 73559 - DNA, 20 bp, Artificial Sequence
  MKO10073559_B_B3gnt3
  gRNA
gccagatgctgcgcacgacg

SEQ ID NO: 73560 - DNA, 20 bp, Artificial Sequence
  MKO10073560_B_B3gnt3
  gRNA
gcgcccatagtttgcaggcg

SEQ ID NO: 73561 - DNA, 20 bp, Artificial Sequence
  MKO10073561_B_B3gnt4
  gRNA
gtagtggcgggccctgtaca

SEQ ID NO: 73562 - DNA, 20 bp, Artificial Sequence
  MKO10073562_B_B3gnt4
  gRNA
agctctcatagaccaacagc

SEQ ID NO: 73563 - DNA, 20 bp, Artificial Sequence
  MKO10073563_B_B3gnt4
  gRNA
cgtctccctttagtatgaag

SEQ ID NO: 73564 - DNA, 20 bp, Artificial Sequence
  MKO10073564_B_B3gnt5
  gRNA
ctgcgatgcctcatagattt

SEQ ID NO: 73565 - DNA, 20 bp, Artificial Sequence
  MKO10073565_B_B3gnt5
  gRNA
agattggagttcgagacttt

SEQ ID NO: 73566 - DNA, 20 bp, Artificial Sequence
  MKO10073566_B_B3gnt5
  gRNA
gttctgcaatcagaaaaacg

SEQ ID NO: 73567 - DNA, 20 bp, Artificial Sequence
  MKO10073567_B_B3gnt6
  gRNA
cgacgacgtcttcgtgcaca

SEQ ID NO: 73568 - DNA, 20 bp, Artificial Sequence
  MKO10073568_B_B3gnt6
  gRNA
tcgcgagccgcctcctcggg

SEQ ID NO: 73569 - DNA, 20 bp, Artificial Sequence
  MKO10073569_B_B3gnt6
  gRNA
tctgtgcctgttcgcgaaag

SEQ ID NO: 73570 - DNA, 20 bp, Artificial Sequence
  MKO10073570_B_B3gnt7
  gRNA
cccgactcaccacagagaca

SEQ ID NO: 73571 - DNA, 20 bp, Artificial Sequence
  MKO10073571_B_B3gnt7
  gRNA
agcatagagacggtcctcgt

SEQ ID NO: 73572 - DNA, 20 bp, Artificial Sequence
  MKO10073572_B_B3gnt7
  gRNA
agtaaatgtcgagccacttg

SEQ ID NO: 73573 - DNA, 20 bp, Artificial Sequence
  MKO10073573_B_B3gnt8
  gRNA
ttagcaccccgtgcccatcc

SEQ ID NO: 73574 - DNA, 20 bp, Artificial Sequence
  MKO10073574_B_B3gnt8
  gRNA
ccaagtctgacagtccgtac

SEQ ID NO: 73575 - DNA, 20 bp, Artificial Sequence
  MKO10073575_B_B3gnt8
  gRNA
atccgagtcctggcttaaaa

SEQ ID NO: 73576 - DNA, 20 bp, Artificial Sequence
  MKO10073576_B_B3gnt9
  gRNA
cgtgcgccgagtgttcttgt

SEQ ID NO: 73577 - DNA, 20 bp, Artificial Sequence
  MKO10073577_B_B3gnt9
  gRNA
cccgtttaccctgcctacgc

SEQ ID NO: 73578 - DNA, 20 bp, Artificial Sequence
  MKO10073578_B_B3gnt9
  gRNA
gctccctaacaccgcccgcg

SEQ ID NO: 73579 - DNA, 20 bp, Artificial Sequence
  MKO10073579_B_B3gntl1
  gRNA
ccgtgcacaacgctgagcag

SEQ ID NO: 73580 - DNA, 20 bp, Artificial Sequence
  MKO10073580_B_B3gntl1
  gRNA
tctggaatctctgtagtcat

SEQ ID NO: 73581 - DNA, 20 bp, Artificial Sequence
  MKO10073581_B_B3gntl1
  gRNA
catacttacaggacaagtct

SEQ ID NO: 73582 - DNA, 20 bp, Artificial Sequence
  MKO10073582_B_B430306N03Rik
  gRNA
accagagttacttcgagcac

SEQ ID NO: 73583 - DNA, 20 bp, Artificial Sequence
  MKO10073583_B_B430306N03Rik
  gRNA
cctgcagtacctgttagtga

SEQ ID NO: 73584 - DNA, 20 bp, Artificial Sequence
  MKO10073584_B_B430306N03Rik
  gRNA
accactccgatgagaagatc

SEQ ID NO: 73585 - DNA, 20 bp, Artificial Sequence
  MKO10073585_B_B4galnt1
  gRNA
tgagggctgtttctgtcgcc

SEQ ID NO: 73586 - DNA, 20 bp, Artificial Sequence
  MKO10073586_B_B4galnt1
  gRNA
cctcagctcctcagcgtcaa

SEQ ID NO: 73587 - DNA, 20 bp, Artificial Sequence
  MKO10073587_B_B4galnt1
  gRNA
gacgtggcaggggaagtaac

SEQ ID NO: 73588 - DNA, 20 bp, Artificial Sequence
  MKO10073588_B_B4galnt2
  gRNA
tctcaccataaacgcaacag

SEQ ID NO: 73589 - DNA, 20 bp, Artificial Sequence
  MKO10073589_B_B4galnt2
  gRNA
catctggcccttcatactgg

SEQ ID NO: 73590 - DNA, 20 bp, Artificial Sequence
  MKO10073590_B_B4galnt2
  gRNA
ctgcatacaattctcatccc

SEQ ID NO: 73591 - DNA, 20 bp, Artificial Sequence
  MKO10073591_B_B4galnt3
  gRNA
accaagaaattgcccgaagt

SEQ ID NO: 73592 - DNA, 20 bp, Artificial Sequence
  MKO10073592_B_B4galnt3
  gRNA
gtactcacgtgggggtagag

SEQ ID NO: 73593 - DNA, 20 bp, Artificial Sequence
  MKO10073593_B_B4galnt3
  gRNA
aacggctgggatgttcctgc

SEQ ID NO: 73594 - DNA, 20 bp, Artificial Sequence
  MKO10073594_B_B4galnt4
  gRNA
gagcttacctcttcccgcca

SEQ ID NO: 73595 - DNA, 20 bp, Artificial Sequence
  MKO10073595_B_B4galnt4
  gRNA
accagtcctcaaacacgtgc

SEQ ID NO: 73596 - DNA, 20 bp, Artificial Sequence
  MKO10073596_B_B4galnt4
  gRNA
acctgcacgtgtttgaggac

SEQ ID NO: 73597 - DNA, 20 bp, Artificial Sequence
  MKO10073597_B_B4galt1
  gRNA
tggacgaccgtaatgcctac

SEQ ID NO: 73598 - DNA, 20 bp, Artificial Sequence
  MKO10073598_B_B4galt1
  gRNA
tcacgtccaaatgctgtagt

SEQ ID NO: 73599 - DNA, 20 bp, Artificial Sequence
  MKO10073599_B_B4galt1
  gRNA
ccccaaccccaataattatt

SEQ ID NO: 73600 - DNA, 20 bp, Artificial Sequence
  MKO10073600_B_B4galt2
  gRNA
gatagtggagccaatagcgt

SEQ ID NO: 73601 - DNA, 20 bp, Artificial Sequence
  MKO10073601_B_B4galt2
  gRNA
ccgccactttgccatcgcca

SEQ ID NO: 73602 - DNA, 20 bp, Artificial Sequence
  MKO10073602_B_B4galt2
  gRNA
cggtgtctatgtcatcaacc

SEQ ID NO: 73603 - DNA, 20 bp, Artificial Sequence
  MKO10073603_B_B4galt3
  gRNA
acctgtatgtgtgcgacccc

SEQ ID NO: 73604 - DNA, 20 bp, Artificial Sequence
  MKO10073604_B_B4galt3
  gRNA
ctgaaactccgccaaagtac

SEQ ID NO: 73605 - DNA, 20 bp, Artificial Sequence
  MKO10073605_B_B4galt3
  gRNA
aggatgacgacattgctacc

SEQ ID NO: 73606 - DNA, 20 bp, Artificial Sequence
  MKO10073606_B_B4galt4
  gRNA
cctctatttcctccaacgtg

SEQ ID NO: 73607 - DNA, 20 bp, Artificial Sequence
  MKO10073607_B_B4galt4
  gRNA
cctcacgttggaggaaatag

SEQ ID NO: 73608 - DNA, 20 bp, Artificial Sequence
  MKO10073608_B_B4galt4
  gRNA
atggattctctaacaactac

SEQ ID NO: 73609 - DNA, 20 bp, Artificial Sequence
  MKO10073609_B_B4galt5
  gRNA
aaacatgagtgagatcgcaa

SEQ ID NO: 73610 - DNA, 20 bp, Artificial Sequence
  MKO10073610_B_B4galt5
  gRNA
tgtgaggaccatcggtgccc

SEQ ID NO: 73611 - DNA, 20 bp, Artificial Sequence
  MKO10073611_B_B4galt5
  gRNA
ccattaagctcggagggcac

SEQ ID NO: 73612 - DNA, 20 bp, Artificial Sequence
  MKO10073612_B_B4galt6
  gRNA
aataaaaacactacgctcaa

SEQ ID NO: 73613 - DNA, 20 bp, Artificial Sequence
  MKO10073613_B_B4galt6
  gRNA
tcacttgtattattgccttc

SEQ ID NO: 73614 - DNA, 20 bp, Artificial Sequence
  MKO10073614_B_B4galt6
  gRNA
cgcatgtaaggcagcttctc

SEQ ID NO: 73615 - DNA, 20 bp, Artificial Sequence
  MKO10073615_B_B4galt7
  gRNA
gccctttcgtgagcgctttg

SEQ ID NO: 73616 - DNA, 20 bp, Artificial Sequence
  MKO10073616_B_B4galt7
  gRNA
gagggaccaaaaacgcattg

SEQ ID NO: 73617 - DNA, 20 bp, Artificial Sequence
  MKO10073617_B_B4galt7
  gRNA
gccacttgcatgaccctgcc

SEQ ID NO: 73618 - DNA, 20 bp, Artificial Sequence
  MKO10073618_B_B630005N14Rik
  gRNA
ctggagtggtcttagtggcg

SEQ ID NO: 73619 - DNA, 20 bp, Artificial Sequence
  MKO10073619_B_B630005N14Rik
  gRNA
gtcgcattgaatggtgttgt

SEQ ID NO: 73620 - DNA, 20 bp, Artificial Sequence
  MKO10073620_B_B630005N14Rik
  gRNA
tcactgggcaaaaacttgtg

SEQ ID NO: 73621 - DNA, 20 bp, Artificial Sequence
  MKO10073621_B_B930041F14Rik
  gRNA
cgcacgctgtcgtgcacgtc

SEQ ID NO: 73622 - DNA, 20 bp, Artificial Sequence
  MKO10073622_B_B930041F14Rik
  gRNA
cccaaaagcacgcgatcgca

SEQ ID NO: 73623 - DNA, 20 bp, Artificial Sequence
  MKO10073623_B_B930041F14Rik
  gRNA
tagcaggtagtcgcggcaag

SEQ ID NO: 73624 - DNA, 20 bp, Artificial Sequence
  MKO10073624_B_B9d1
  gRNA
agactcacagccataggggt

SEQ ID NO: 73625 - DNA, 20 bp, Artificial Sequence
  MKO10073625_B_B9d1
  gRNA
ctacactacagaagttcaca

SEQ ID NO: 73626 - DNA, 20 bp, Artificial Sequence
  MKO10073626_B_B9d1
  gRNA
gcacctaccgtcctggagag

SEQ ID NO: 73627 - DNA, 20 bp, Artificial Sequence
  MKO10073627_B_B9d2
  gRNA
atggctgaagtgcacgtgat

SEQ ID NO: 73628 - DNA, 20 bp, Artificial Sequence
  MKO10073628_B_B9d2
  gRNA
gacctttagtagcgaagtgc

SEQ ID NO: 73629 - DNA, 20 bp, Artificial Sequence
  MKO10073629_B_B9d2
  gRNA
cataggggccaccggtttct

SEQ ID NO: 73630 - DNA, 20 bp, Artificial Sequence
  MKO10073630_B_BB287469
  gRNA
acatgccaaaatcaatgaaa

SEQ ID NO: 73631 - DNA, 20 bp, Artificial Sequence
  MKO10073631_B_BB287469
  gRNA
gaaatcgtgtttgatgatat

SEQ ID NO: 73632 - DNA, 20 bp, Artificial Sequence
  MKO10073632_B_BB287469
  gRNA
atgttctggaagttctccat

SEQ ID NO: 73633 - DNA, 20 bp, Artificial Sequence
  MKO10073633_B_BC003331
  gRNA
caaacagccgagagctaagt

SEQ ID NO: 73634 - DNA, 20 bp, Artificial Sequence
  MKO10073634_B_BC003331
  gRNA
taggtgtccagaatgctccc

SEQ ID NO: 73635 - DNA, 20 bp, Artificial Sequence
  MKO10073635_B_BC003331
  gRNA
ccaagaaccacaagtcctcc

SEQ ID NO: 73636 - DNA, 20 bp, Artificial Sequence
  MKO10073636_B_BC003965
  gRNA
tgaacagtgtcctgtgctca

SEQ ID NO: 73637 - DNA, 20 bp, Artificial Sequence
  MKO10073637_B_BC003965
  gRNA
agtttgcatccgccgccccg

SEQ ID NO: 73638 - DNA, 20 bp, Artificial Sequence
  MKO10073638_B_BC003965
  gRNA
tgctccacggtccagcggat

SEQ ID NO: 73639 - DNA, 20 bp, Artificial Sequence
  MKO10073639_B_BC004004
  gRNA
gctcactcgttcatcacatt

SEQ ID NO: 73640 - DNA, 20 bp, Artificial Sequence
  MKO10073640_B_BC004004
  gRNA
aggaaagcagcgccaccact

SEQ ID NO: 73641 - DNA, 20 bp, Artificial Sequence
  MKO10073641_B_BC004004
  gRNA
tgaatctctgcagacgacag

SEQ ID NO: 73642 - DNA, 20 bp, Artificial Sequence
  MKO10073642_B_BC005537
  gRNA
gcgagattccagctattcct

SEQ ID NO: 73643 - DNA, 20 bp, Artificial Sequence
  MKO10073643_B_BC005537
  gRNA
caaacctgaacaggcctaaa

SEQ ID NO: 73644 - DNA, 20 bp, Artificial Sequence
  MKO10073644_B_BC005537
  gRNA
accgtgatgaaattcaaatt

SEQ ID NO: 73645 - DNA, 20 bp, Artificial Sequence
  MKO10073645_B_BC005561
  gRNA
ccctaattcaacaatcagct

SEQ ID NO: 73646 - DNA, 20 bp, Artificial Sequence
  MKO10073646_B_BC005561
  gRNA
gcagtttaaccttatcgatt

SEQ ID NO: 73647 - DNA, 20 bp, Artificial Sequence
  MKO10073647_B_BC005561
  gRNA
gagcctatttaccgaagagt

SEQ ID NO: 73648 - DNA, 20 bp, Artificial Sequence
  MKO10073648_B_BC005624
  gRNA
gcaggatgatcctttccaaa

SEQ ID NO: 73649 - DNA, 20 bp, Artificial Sequence
  MKO10073649_B_BC005624
  gRNA
ctgcagaaaacgatgtcccc

SEQ ID NO: 73650 - DNA, 20 bp, Artificial Sequence
  MKO10073650_B_BC005624
  gRNA
gaaccttctctcctaccagc

SEQ ID NO: 73651 - DNA, 20 bp, Artificial Sequence
  MKO10073651_B_BC005764
  gRNA
gaagtactcactgaggccgc

SEQ ID NO: 73652 - DNA, 20 bp, Artificial Sequence
  MKO10073652_B_BC005764
  gRNA
gtcgaacccttacatcacac

SEQ ID NO: 73653 - DNA, 20 bp, Artificial Sequence
  MKO10073653_B_BC005764
  gRNA
ccacaaagcgcactgtgcgc

SEQ ID NO: 73654 - DNA, 20 bp, Artificial Sequence
  MKO10073654_B_BC016423
  gRNA
catacttaaaatctagttcc

SEQ ID NO: 73655 - DNA, 20 bp, Artificial Sequence
  MKO10073655_B_BC016423
  gRNA
gttgaattgacaaacaaaca

SEQ ID NO: 73656 - DNA, 20 bp, Artificial Sequence
  MKO10073656_B_BC016423
  gRNA
agaaaacatagataagctaa

SEQ ID NO: 73657 - DNA, 20 bp, Artificial Sequence
  MKO10073657_B_BC016579
  gRNA
catcacgctcaagattccag

SEQ ID NO: 73658 - DNA, 20 bp, Artificial Sequence
  MKO10073658_B_BC016579
  gRNA
atatctacctgtgagagtct

SEQ ID NO: 73659 - DNA, 20 bp, Artificial Sequence
  MKO10073659_B_BC016579
  gRNA
gtgaaaaaacgactcagaga

SEQ ID NO: 73660 - DNA, 20 bp, Artificial Sequence
  MKO10073660_B_BC017158
  gRNA
tttcagctgccacgtccacc

SEQ ID NO: 73661 - DNA, 20 bp, Artificial Sequence
  MKO10073661_B_BC017158
  gRNA
acatgggagccataatctct

SEQ ID NO: 73662 - DNA, 20 bp, Artificial Sequence
  MKO10073662_B_BC017158
  gRNA
cccagattcaactggcatgt

SEQ ID NO: 73663 - DNA, 20 bp, Artificial Sequence
  MKO10073663_B_BC017643
  gRNA
tctcactcagagtgcagtca

SEQ ID NO: 73664 - DNA, 20 bp, Artificial Sequence
  MKO10073664_B_BC017643
  gRNA
agttctgtacagccacaaat

SEQ ID NO: 73665 - DNA, 20 bp, Artificial Sequence
  MKO10073665_B_BC017643
  gRNA
tctacaggaatattatccac

SEQ ID NO: 73666 - DNA, 20 bp, Artificial Sequence
  MKO10073666_B_BC018242
  gRNA
ttgtcccgcatttgcaaaaa

SEQ ID NO: 73667 - DNA, 20 bp, Artificial Sequence
  MKO10073667_B_BC018242
  gRNA
ggagagcaccatcgtgtccg

SEQ ID NO: 73668 - DNA, 20 bp, Artificial Sequence
  MKO10073668_B_BC018242
  gRNA
acaccatctcaccgtgaggg

SEQ ID NO: 73669 - DNA, 20 bp, Artificial Sequence
  MKO10073669_B_BC018507
  gRNA
cctttgcagtaacctgctga

SEQ ID NO: 73670 - DNA, 20 bp, Artificial Sequence
  MKO10073670_B_BC018507
  gRNA
cagcacactgcatcaccaag

SEQ ID NO: 73671 - DNA, 20 bp, Artificial Sequence
  MKO10073671_B_BC018507
  gRNA
gcagaagtgtcaagaagaat

SEQ ID NO: 73672 - DNA, 20 bp, Artificial Sequence
  MKO10073672_B_BC021614
  gRNA
cacctggtcaccaacaatga

SEQ ID NO: 73673 - DNA, 20 bp, Artificial Sequence
  MKO10073673_B_BC021614
  gRNA
accaatccaatactatccta

SEQ ID NO: 73674 - DNA, 20 bp, Artificial Sequence
  MKO10073674_B_BC021614
  gRNA
ggtggccagtccttcattgt

SEQ ID NO: 73675 - DNA, 20 bp, Artificial Sequence
  MKO10073675_B_BC021785
  gRNA
taccgcgaacaccgagtcta

SEQ ID NO: 73676 - DNA, 20 bp, Artificial Sequence
  MKO10073676_B_BC021785
  gRNA
gaggtgctgctcaacagacg

SEQ ID NO: 73677 - DNA, 20 bp, Artificial Sequence
  MKO10073677_B_BC021785
  gRNA
cagagccgcacaagtagccg

SEQ ID NO: 73678 - DNA, 20 bp, Artificial Sequence
  MKO10073678_B_BC021891
  gRNA
gatggactggctgtggcgta

SEQ ID NO: 73679 - DNA, 20 bp, Artificial Sequence
  MKO10073679_B_BC021891
  gRNA
accaccaggatgagcgcagc

SEQ ID NO: 73680 - DNA, 20 bp, Artificial Sequence
  MKO10073680_B_BC021891
  gRNA
actttgggctagcgagggaa

SEQ ID NO: 73681 - DNA, 20 bp, Artificial Sequence
  MKO10073681_B_BC022687
  gRNA
ctgcatctgtgccgagactc

SEQ ID NO: 73682 - DNA, 20 bp, Artificial Sequence
  MKO10073682_B_BC022687
  gRNA
tactccacgcaacctgaaaa

SEQ ID NO: 73683 - DNA, 20 bp, Artificial Sequence
  MKO10073683_B_BC022687
  gRNA
cgctcaccttggtctgaatc

SEQ ID NO: 73684 - DNA, 20 bp, Artificial Sequence
  MKO10073684_B_BC023829
  gRNA
attaacttccacaaccatat

SEQ ID NO: 73685 - DNA, 20 bp, Artificial Sequence
  MKO10073685_B_BC023829
  gRNA
gaatgatgccatccaaacga

SEQ ID NO: 73686 - DNA, 20 bp, Artificial Sequence
  MKO10073686_B_BC023829
  gRNA
catccagtttgtgaaccagc

SEQ ID NO: 73687 - DNA, 20 bp, Artificial Sequence
  MKO10073687_B_BC024139
  gRNA
gtaggcgcctctagcagccc

SEQ ID NO: 73688 - DNA, 20 bp, Artificial Sequence
  MKO10073688_B_BC024139
  gRNA
caacgactcctcaaggccct

SEQ ID NO: 73689 - DNA, 20 bp, Artificial Sequence
  MKO10073689_B_BC024139
  gRNA
tgcttctcagctgcgggaac

SEQ ID NO: 73690 - DNA, 20 bp, Artificial Sequence
  MKO10073690_B_BC024978
  gRNA
gttctacagcacctcatcac

SEQ ID NO: 73691 - DNA, 20 bp, Artificial Sequence
  MKO10073691_B_BC024978
  gRNA
ctctgggatgcggaatgagc

SEQ ID NO: 73692 - DNA, 20 bp, Artificial Sequence
  MKO10073692_B_BC024978
  gRNA
gttcttactgagggccttcc

SEQ ID NO: 73693 - DNA, 20 bp, Artificial Sequence
  MKO10073693_B_BC026585
  gRNA
gcggggagccacctcttgaa

SEQ ID NO: 73694 - DNA, 20 bp, Artificial Sequence
  MKO10073694_B_BC026585
  gRNA
ctccagggagatcgagttat

SEQ ID NO: 73695 - DNA, 20 bp, Artificial Sequence
  MKO10073695_B_BC026585
  gRNA
gcagtgcatcacggaccaga

SEQ ID NO: 73696 - DNA, 20 bp, Artificial Sequence
  MKO10073696_B_BC026590
  gRNA
tcccatccagttcttcaaag

SEQ ID NO: 73697 - DNA, 20 bp, Artificial Sequence
  MKO10073697_B_BC026590
  gRNA
gagcagtatatcttacacag

SEQ ID NO: 73698 - DNA, 20 bp, Artificial Sequence
  MKO10073698_B_BC026590
  gRNA
tgtaagatatactgctctga

SEQ ID NO: 73699 - DNA, 20 bp, Artificial Sequence
  MKO10073699_B_BC027072
  gRNA
ccgcggttcattcgggcttc

SEQ ID NO: 73700 - DNA, 20 bp, Artificial Sequence
  MKO10073700_B_BC027072
  gRNA
gatgtcccgttcgttgtccc

SEQ ID NO: 73701 - DNA, 20 bp, Artificial Sequence
  MKO10073701_B_BC027072
  gRNA
ttgacgatgacgttgtgtga

SEQ ID NO: 73702 - DNA, 20 bp, Artificial Sequence
  MKO10073702_B_BC027231
  gRNA
gcgtttgaaacatatgaatt

SEQ ID NO: 73703 - DNA, 20 bp, Artificial Sequence
  MKO10073703_B_BC027231
  gRNA
ccgcgtcgtccccagccagc

SEQ ID NO: 73704 - DNA, 20 bp, Artificial Sequence
  MKO10073704_B_BC027231
  gRNA
aggttgactgtgaagcactt

SEQ ID NO: 73705 - DNA, 20 bp, Artificial Sequence
  MKO10073705_B_BC028528
  gRNA
ttactccgtgtttgagtcag

SEQ ID NO: 73706 - DNA, 20 bp, Artificial Sequence
  MKO10073706_B_BC028528
  gRNA
gacatggcatcattctgatt

SEQ ID NO: 73707 - DNA, 20 bp, Artificial Sequence
  MKO10073707_B_BC028528
  gRNA
ttcgtggttacaggattctg

SEQ ID NO: 73708 - DNA, 20 bp, Artificial Sequence
  MKO10073708_B_BC029214
  gRNA
tcccagcagaaagcccgatt

SEQ ID NO: 73709 - DNA, 20 bp, Artificial Sequence
  MKO10073709_B_BC029214
  gRNA
agcatgtatgcaacctagag

SEQ ID NO: 73710 - DNA, 20 bp, Artificial Sequence
  MKO10073710_B_BC029214
  gRNA
tacctgccagccgcctctct

SEQ ID NO: 73711 - DNA, 20 bp, Artificial Sequence
  MKO10073711_B_BC030307
  gRNA
gaagctccatgacgaagtag

SEQ ID NO: 73712 - DNA, 20 bp, Artificial Sequence
  MKO10073712_B_BC030307
  gRNA
tgtaggtccccggcttgaaa

SEQ ID NO: 73713 - DNA, 20 bp, Artificial Sequence
  MKO10073713_B_BC030307
  gRNA
cttcgatcccgtctagtacc

SEQ ID NO: 73714 - DNA, 20 bp, Artificial Sequence
  MKO10073714_B_BC030336
  gRNA
ttgtctgacactgccgcacc

SEQ ID NO: 73715 - DNA, 20 bp, Artificial Sequence
  MKO10073715_B_BC030336
  gRNA
ttagggcagccatacagaaa

SEQ ID NO: 73716 - DNA, 20 bp, Artificial Sequence
  MKO10073716_B_BC030336
  gRNA
ttacccaacaacacagtagt

SEQ ID NO: 73717 - DNA, 20 bp, Artificial Sequence
  MKO10073717_B_BC030476
  gRNA
cagcagcgccctcaacaaag

SEQ ID NO: 73718 - DNA, 20 bp, Artificial Sequence
  MKO10073718_B_BC030476
  gRNA
gctgtggatcttggagcagc

SEQ ID NO: 73719 - DNA, 20 bp, Artificial Sequence
  MKO10073719_B_BC030476
  gRNA
tctaggtgagacaggagaaa

SEQ ID NO: 73720 - DNA, 20 bp, Artificial Sequence
  MKO10073720_B_BC030499
  gRNA
cgggaaactctggtagaaag

SEQ ID NO: 73721 - DNA, 20 bp, Artificial Sequence
  MKO10073721_B_BC030499
  gRNA
tcccccaaactgtgtacaaa

SEQ ID NO: 73722 - DNA, 20 bp, Artificial Sequence
  MKO10073722_B_BC030499
  gRNA
tcagtcactcactaataaag

SEQ ID NO: 73723 - DNA, 20 bp, Artificial Sequence
  MKO10073723_B_BC030500
  gRNA
tcccacttgcctgtaaagcc

SEQ ID NO: 73724 - DNA, 20 bp, Artificial Sequence
  MKO10073724_B_BC030500
  gRNA
ttcctcgctgcgatcccatc

SEQ ID NO: 73725 - DNA, 20 bp, Artificial Sequence
  MKO10073725_B_BC030500
  gRNA
ggctaacaacgctgtccacg

SEQ ID NO: 73726 - DNA, 20 bp, Artificial Sequence
  MKO10073726_B_BC030867
  gRNA
aggtggggtctccctcgtcc

SEQ ID NO: 73727 - DNA, 20 bp, Artificial Sequence
  MKO10073727_B_BC030867
  gRNA
cctcagtctggaatttagcc

SEQ ID NO: 73728 - DNA, 20 bp, Artificial Sequence
  MKO10073728_B_BC030867
  gRNA
tagcaccatgacaatactgt

SEQ ID NO: 73729 - DNA, 20 bp, Artificial Sequence
  MKO10073729_B_BC031181
  gRNA
aaaaggaccaacagaagtct

SEQ ID NO: 73730 - DNA, 20 bp, Artificial Sequence
  MKO10073730_B_BC031181
  gRNA
ttgtcattccagtcctgctc

SEQ ID NO: 73731 - DNA, 20 bp, Artificial Sequence
  MKO10073731_B_BC031181
  gRNA
cttgctcatattcttatcgc

SEQ ID NO: 73732 - DNA, 20 bp, Artificial Sequence
  MKO10073732_B_BC035044
  gRNA
ccattccatgaagcagatca

SEQ ID NO: 73733 - DNA, 20 bp, Artificial Sequence
  MKO10073733_B_BC035044
  gRNA
cctttccagatgacttaaaa

SEQ ID NO: 73734 - DNA, 20 bp, Artificial Sequence
  MKO10073734_B_BC035044
  gRNA
aaggtgactactcatggctg

SEQ ID NO: 73735 - DNA, 20 bp, Artificial Sequence
  MKO10073735_B_BC037034
  gRNA
aaagcacttgaccgtgctca

SEQ ID NO: 73736 - DNA, 20 bp, Artificial Sequence
  MKO10073736_B_BC037034
  gRNA
tatctacctgtcatgcctga

SEQ ID NO: 73737 - DNA, 20 bp, Artificial Sequence
  MKO10073737_B_BC037034
  gRNA
cttcccactcaccgtttcac

SEQ ID NO: 73738 - DNA, 20 bp, Artificial Sequence
  MKO10073738_B_BC048403
  gRNA
gggtatcttctcttacgaca

SEQ ID NO: 73739 - DNA, 20 bp, Artificial Sequence
  MKO10073739_B_BC048403
  gRNA
ccgttccgcccggggcgccg

SEQ ID NO: 73740 - DNA, 20 bp, Artificial Sequence
  MKO10073740_B_BC048403
  gRNA
gggagaagctcctccacgtg

SEQ ID NO: 73741 - DNA, 20 bp, Artificial Sequence
  MKO10073741_B_BC048502
  gRNA
ccccaagacttgaagctgtt

SEQ ID NO: 73742 - DNA, 20 bp, Artificial Sequence
  MKO10073742_B_BC048502
  gRNA
tgcagtcctgttgatacagt

SEQ ID NO: 73743 - DNA, 20 bp, Artificial Sequence
  MKO10073743_B_BC048502
  gRNA
caaagaagctagtttgtgag

SEQ ID NO: 73744 - DNA, 20 bp, Artificial Sequence
  MKO10073744_B_BC048507
  gRNA
tgctgtacttctccagcgcc

SEQ ID NO: 73745 - DNA, 20 bp, Artificial Sequence
  MKO10073745_B_BC048507
  gRNA
tgcattgtgggccggaactt

SEQ ID NO: 73746 - DNA, 20 bp, Artificial Sequence
  MKO10073746_B_BC048507
  gRNA
agatgcagcaggactcggtg

SEQ ID NO: 73747 - DNA, 20 bp, Artificial Sequence
  MKO10073747_B_BC048546
  gRNA
tcttacctgaacggtgatca

SEQ ID NO: 73748 - DNA, 20 bp, Artificial Sequence
  MKO10073748_B_BC048546
  gRNA
gcgttgtgacactgaacatc

SEQ ID NO: 73749 - DNA, 20 bp, Artificial Sequence
  MKO10073749_B_BC048546
  gRNA
gaactcaccaagtcatcaac

SEQ ID NO: 73750 - DNA, 20 bp, Artificial Sequence
  MKO10073750_B_BC048562
  gRNA
tagcacaacagtggtttcta

SEQ ID NO: 73751 - DNA, 20 bp, Artificial Sequence
  MKO10073751_B_BC048562
  gRNA
aagatgcaaggtgctttaat

SEQ ID NO: 73752 - DNA, 20 bp, Artificial Sequence
  MKO10073752_B_BC048562
  gRNA
tcactttgtcgaaggaagtg

SEQ ID NO: 73753 - DNA, 20 bp, Artificial Sequence
  MKO10073753_B_BC048609
  gRNA
tctggccatcaattaccgag

SEQ ID NO: 73754 - DNA, 20 bp, Artificial Sequence
  MKO10073754_B_BC048609
  gRNA
gttcttcaaccgcctgtgcc

SEQ ID NO: 73755 - DNA, 20 bp, Artificial Sequence
  MKO10073755_B_BC048609
  gRNA
gcatctaagaaacttgtcac

SEQ ID NO: 73756 - DNA, 20 bp, Artificial Sequence
  MKO10073756_B_BC048644
  gRNA
gccgcttcatacgtgacgta

SEQ ID NO: 73757 - DNA, 20 bp, Artificial Sequence
  MKO10073757_B_BC048644
  gRNA
ccgtgactccgcgaagtcca

SEQ ID NO: 73758 - DNA, 20 bp, Artificial Sequence
  MKO10073758_B_BC048644
  gRNA
gcaaacttcgctcgtccttc

SEQ ID NO: 73759 - DNA, 20 bp, Artificial Sequence
  MKO10073759_B_BC048671
  gRNA
ccctctgtgatggactcaaa

SEQ ID NO: 73760 - DNA, 20 bp, Artificial Sequence
  MKO10073760_B_BC048671
  gRNA
ttctaggttacctcatttga

SEQ ID NO: 73761 - DNA, 20 bp, Artificial Sequence
  MKO10073761_B_BC048671
  gRNA
tggcaccagattcttctgta

SEQ ID NO: 73762 - DNA, 20 bp, Artificial Sequence
  MKO10073762_B_BC048679
  gRNA
gaaaactacgagcctcagcc

SEQ ID NO: 73763 - DNA, 20 bp, Artificial Sequence
  MKO10073763_B_BC048679
  gRNA
ctggtacctgggttgagatg

SEQ ID NO: 73764 - DNA, 20 bp, Artificial Sequence
  MKO10073764_B_BC048679
  gRNA
ctagatgagcttcaagtgcc

SEQ ID NO: 73765 - DNA, 20 bp, Artificial Sequence
  MKO10073765_B_BC048943
  gRNA
cagaaaacgatgtacttccc

SEQ ID NO: 73766 - DNA, 20 bp, Artificial Sequence
  MKO10073766_B_BC048943
  gRNA
agcgtagcgtgtttgtttgt

SEQ ID NO: 73767 - DNA, 20 bp, Artificial Sequence
  MKO10073767_B_BC048943
  gRNA
caagtacaaccttgtcaagc

SEQ ID NO: 73768 - DNA, 20 bp, Artificial Sequence
  MKO10073768_B_BC049352
  gRNA
tcttcaacttatatcaaatc

SEQ ID NO: 73769 - DNA, 20 bp, Artificial Sequence
  MKO10073769_B_BC049352
  gRNA
gctccatcagactctgtcat

SEQ ID NO: 73770 - DNA, 20 bp, Artificial Sequence
  MKO10073770_B_BC049352
  gRNA
tataagttgaagacaaagtt

SEQ ID NO: 73771 - DNA, 20 bp, Artificial Sequence
  MKO10073771_B_BC049635
  gRNA
tgaagtgaaatgcgacagac

SEQ ID NO: 73772 - DNA, 20 bp, Artificial Sequence
  MKO10073772_B_BC049635
  gRNA
ttctgccaaagtccgagcag

SEQ ID NO: 73773 - DNA, 20 bp, Artificial Sequence
  MKO10073773_B_BC049635
  gRNA
cctcttagcgttctatcact

SEQ ID NO: 73774 - DNA, 20 bp, Artificial Sequence
  MKO10073774_B_BC049715
  gRNA
cttcttccacatacgagacc

SEQ ID NO: 73775 - DNA, 20 bp, Artificial Sequence
  MKO10073775_B_BC049715
  gRNA
acttaatcgaagacccatga

SEQ ID NO: 73776 - DNA, 20 bp, Artificial Sequence
  MKO10073776_B_BC049715
  gRNA
ggatatctttgtacttacgc

SEQ ID NO: 73777 - DNA, 20 bp, Artificial Sequence
  MKO10073777_B_BC049730
  gRNA
taagatgcactcactattcc

SEQ ID NO: 73778 - DNA, 20 bp, Artificial Sequence
  MKO10073778_B_BC049730
  gRNA
gcatagcatttcgtgtcctt

SEQ ID NO: 73779 - DNA, 20 bp, Artificial Sequence
  MKO10073779_B_BC049730
  gRNA
agtttggccaaaacttcagt

SEQ ID NO: 73780 - DNA, 20 bp, Artificial Sequence
  MKO10073780_B_BC049762
  gRNA
aaggcgcctgcaaagagccc

SEQ ID NO: 73781 - DNA, 20 bp, Artificial Sequence
  MKO10073781_B_BC049762
  gRNA
accctagcttccagcaaccg

SEQ ID NO: 73782 - DNA, 20 bp, Artificial Sequence
  MKO10073782_B_BC049762
  gRNA
ctctcaggtcctctcgatga

SEQ ID NO: 73783 - DNA, 20 bp, Artificial Sequence
  MKO10073783_B_BC051019
  gRNA
gtgacaaggtgttggcaccc

SEQ ID NO: 73784 - DNA, 20 bp, Artificial Sequence
  MKO10073784_B_BC051019
  gRNA
ccgctgctgccccggttccc

SEQ ID NO: 73785 - DNA, 20 bp, Artificial Sequence
  MKO10073785_B_BC051019
  gRNA
ttattatctggctcagataa

SEQ ID NO: 73786 - DNA, 20 bp, Artificial Sequence
  MKO10073786_B_BC051142
  gRNA
ttcataaaaggtatttccca

SEQ ID NO: 73787 - DNA, 20 bp, Artificial Sequence
  MKO10073787_B_BC051142
  gRNA
tcttatttcagaaatagttt

SEQ ID NO: 73788 - DNA, 20 bp, Artificial Sequence
  MKO10073788_B_BC051142
  gRNA
tcagaatagtcagaatagca

SEQ ID NO: 73789 - DNA, 20 bp, Artificial Sequence
  MKO10073789_B_BC051628
  gRNA
gtctcttccaggagagcccc

SEQ ID NO: 73790 - DNA, 20 bp, Artificial Sequence
  MKO10073790_B_BC051628
  gRNA
ggaactcacgcagcacgttg

SEQ ID NO: 73791 - DNA, 20 bp, Artificial Sequence
  MKO10073791_B_BC051628
  gRNA
ggatggttacaaaccagcgc

SEQ ID NO: 73792 - DNA, 20 bp, Artificial Sequence
  MKO10073792_B_BC051665
  gRNA
cactggccacggcattcatc

SEQ ID NO: 73793 - DNA, 20 bp, Artificial Sequence
  MKO10073793_B_BC051665
  gRNA
atgttaactgcagagtactt

SEQ ID NO: 73794 - DNA, 20 bp, Artificial Sequence
  MKO10073794_B_BC051665
  gRNA
atgtccccaagtctgttgat

SEQ ID NO: 73795 - DNA, 20 bp, Artificial Sequence
  MKO10073795_B_BC052040
  gRNA
actaaccaaagcccagtacg

SEQ ID NO: 73796 - DNA, 20 bp, Artificial Sequence
  MKO10073796_B_BC052040
  gRNA
cgattgaaagttactaccag

SEQ ID NO: 73797 - DNA, 20 bp, Artificial Sequence
  MKO10073797_B_BC052040
  gRNA
aacttctaacctggtactcc

SEQ ID NO: 73798 - DNA, 20 bp, Artificial Sequence
  MKO10073798_B_BC053393
  gRNA
ctctaggaagcagttcagcc

SEQ ID NO: 73799 - DNA, 20 bp, Artificial Sequence
  MKO10073799_B_BC053393
  gRNA
cagaactttactaaataaag

SEQ ID NO: 73800 - DNA, 20 bp, Artificial Sequence
  MKO10073800_B_BC053393
  gRNA
attacatccttatgaaaaag

SEQ ID NO: 73801 - DNA, 20 bp, Artificial Sequence
  MKO10073801_B_BC053749
  gRNA
tgaccactcgagtctgctgt

SEQ ID NO: 73802 - DNA, 20 bp, Artificial Sequence
  MKO10073802_B_BC053749
  gRNA
cagctcggctttgtaggctt

SEQ ID NO: 73803 - DNA, 20 bp, Artificial Sequence
  MKO10073803_B_BC053749
  gRNA
gcctacaaagccgagctgcc

SEQ ID NO: 73804 - DNA, 20 bp, Artificial Sequence
  MKO10073804_B_BC055111
  gRNA
cagttccaccgaatgatgtc

SEQ ID NO: 73805 - DNA, 20 bp, Artificial Sequence
  MKO10073805_B_BC055111
  gRNA
gccctgcagaattattatcc

SEQ ID NO: 73806 - DNA, 20 bp, Artificial Sequence
  MKO10073806_B_BC055111
  gRNA
cacgtaccccaataaaacct

SEQ ID NO: 73807 - DNA, 20 bp, Artificial Sequence
  MKO10073807_B_BC055324
  gRNA
cagccaaaatttagaaatcc

SEQ ID NO: 73808 - DNA, 20 bp, Artificial Sequence
  MKO10073808_B_BC055324
  gRNA
cagagtataaaattgtttga

SEQ ID NO: 73809 - DNA, 20 bp, Artificial Sequence
  MKO10073809_B_BC055324
  gRNA
tgatttacaggcaatggtgc

SEQ ID NO: 73810 - DNA, 20 bp, Artificial Sequence
  MKO10073810_B_BC056474
  gRNA
ccccacccaccttaagcatg

SEQ ID NO: 73811 - DNA, 20 bp, Artificial Sequence
  MKO10073811_B_BC056474
  gRNA
aaagccgggttgcactcact

SEQ ID NO: 73812 - DNA, 20 bp, Artificial Sequence
  MKO10073812_B_BC056474
  gRNA
gctcttctagctgtgaaaga

SEQ ID NO: 73813 - DNA, 20 bp, Artificial Sequence
  MKO10073813_B_BC061194
  gRNA
tatattgcaaggcataatgc

SEQ ID NO: 73814 - DNA, 20 bp, Artificial Sequence
  MKO10073814_B_BC061194
  gRNA
tcgagctgtaccagaacgcc

SEQ ID NO: 73815 - DNA, 20 bp, Artificial Sequence
  MKO10073815_B_BC061194
  gRNA
agcccgagactgctttgaaa

SEQ ID NO: 73816 - DNA, 20 bp, Artificial Sequence
  MKO10073816_B_BC061212
  gRNA
acctgaagacctgactcatg

SEQ ID NO: 73817 - DNA, 20 bp, Artificial Sequence
  MKO10073817_B_BC061212
  gRNA
taggtgcttgatgacaccct

SEQ ID NO: 73818 - DNA, 20 bp, Artificial Sequence
  MKO10073818_B_BC061212
  gRNA
ccgccagcaaaaacaaagtc

SEQ ID NO: 73819 - DNA, 20 bp, Artificial Sequence
  MKO10073819_B_BC061237
  gRNA
tatatttgtctttgatcttc

SEQ ID NO: 73820 - DNA, 20 bp, Artificial Sequence
  MKO10073820_B_BC061237
  gRNA
caactgcttgtacttgtaca

SEQ ID NO: 73821 - DNA, 20 bp, Artificial Sequence
  MKO10073821_B_BC061237
  gRNA
gtcattcaaatccttgtact

SEQ ID NO: 73822 - DNA, 20 bp, Artificial Sequence
  MKO10073822_B_BC068157
  gRNA
cccaattcagcatcgctaag

SEQ ID NO: 73823 - DNA, 20 bp, Artificial Sequence
  MKO10073823_B_BC068157
  gRNA
gagactccaacctccgacta

SEQ ID NO: 73824 - DNA, 20 bp, Artificial Sequence
  MKO10073824_B_BC068157
  gRNA
ctgaactctggaacacgaag

SEQ ID NO: 73825 - DNA, 20 bp, Artificial Sequence
  MKO10073825_B_BC068281
  gRNA
gaggccaaacatctgttgaa

SEQ ID NO: 73826 - DNA, 20 bp, Artificial Sequence
  MKO10073826_B_BC068281
  gRNA
actcacaacctccatggacc

SEQ ID NO: 73827 - DNA, 20 bp, Artificial Sequence
  MKO10073827_B_BC068281
  gRNA
gtcttcagacactccagaag

SEQ ID NO: 73828 - DNA, 20 bp, Artificial Sequence
  MKO10073828_B_BC080695
  gRNA
atcttccttacagtgtgcat

SEQ ID NO: 73829 - DNA, 20 bp, Artificial Sequence
  MKO10073829_B_BC080695
  gRNA
ctcctatttactggcaacaa

SEQ ID NO: 73830 - DNA, 20 bp, Artificial Sequence
  MKO10073830_B_BC080695
  gRNA
taggtgtctgaagactccgc

SEQ ID NO: 73831 - DNA, 20 bp, Artificial Sequence
  MKO10073831_B_BC089491
  gRNA
acccacaagtttcttcagac

SEQ ID NO: 73832 - DNA, 20 bp, Artificial Sequence
  MKO10073832_B_BC089491
  gRNA
gaagctgatccattccaaga

SEQ ID NO: 73833 - DNA, 20 bp, Artificial Sequence
  MKO10073833_B_BC089491
  gRNA
gcatcaattcccaaaccttc

SEQ ID NO: 73834 - DNA, 20 bp, Artificial Sequence
  MKO10073834_B_BC089597
  gRNA
agctttcacagggctttgtc

SEQ ID NO: 73835 - DNA, 20 bp, Artificial Sequence
  MKO10073835_B_BC089597
  gRNA
cgccaccatgtagagccaca

SEQ ID NO: 73836 - DNA, 20 bp, Artificial Sequence
  MKO10073836_B_BC089597
  gRNA
tgacactctgcccaagatgc

SEQ ID NO: 73837 - DNA, 20 bp, Artificial Sequence
  MKO10073837_B_BC094916
  gRNA
aagagaattgttcttctgac

SEQ ID NO: 73838 - DNA, 20 bp, Artificial Sequence
  MKO10073838_B_BC094916
  gRNA
ttagcaatgtctccaagtcc

SEQ ID NO: 73839 - DNA, 20 bp, Artificial Sequence
  MKO10073839_B_BC094916
  gRNA
agccaccatacctgtgtgtc

SEQ ID NO: 73840 - DNA, 20 bp, Artificial Sequence
  MKO10073840_B_BC100451
  gRNA
aaactcttgcaagcgtttcc

SEQ ID NO: 73841 - DNA, 20 bp, Artificial Sequence
  MKO10073841_B_BC100451
  gRNA
gagacgggtgtcttcaagta

SEQ ID NO: 73842 - DNA, 20 bp, Artificial Sequence
  MKO10073842_B_BC100451
  gRNA
gcaccccaagtcccggaaaa

SEQ ID NO: 73843 - DNA, 20 bp, Artificial Sequence
  MKO10073843_B_BC100530
  gRNA
tttcagatggatgtaggtca

SEQ ID NO: 73844 - DNA, 20 bp, Artificial Sequence
  MKO10073844_B_BC100530
  gRNA
gtaggtcagctcatcatcct

SEQ ID NO: 73845 - DNA, 20 bp, Artificial Sequence
  MKO10073845_B_BC100530
  gRNA
aatccagaagattgctgaca

SEQ ID NO: 73846 - DNA, 20 bp, Artificial Sequence
  MKO10073846_B_BC107364
  gRNA
gttctgccaccatgacacgt

SEQ ID NO: 73847 - DNA, 20 bp, Artificial Sequence
  MKO10073847_B_BC107364
  gRNA
caggcgagtaactcaaattc

SEQ ID NO: 73848 - DNA, 20 bp, Artificial Sequence
  MKO10073848_B_BC107364
  gRNA
cactgcagttcgcttctgtg

SEQ ID NO: 73849 - DNA, 20 bp, Artificial Sequence
  MKO10073849_B_BC117090
  gRNA
tcaccttgtcagcaatcttc

SEQ ID NO: 73850 - DNA, 20 bp, Artificial Sequence
  MKO10073850_B_BC117090
  gRNA
tataaaactcaagccgtcgc

SEQ ID NO: 73851 - DNA, 20 bp, Artificial Sequence
  MKO10073851_B_BC117090
  gRNA
attcacataaaagtcttcag

SEQ ID NO: 73852 - DNA, 20 bp, Artificial Sequence
  MKO10073852_B_BC147527
  gRNA
aagatgatgctgtccttccc

SEQ ID NO: 73853 - DNA, 20 bp, Artificial Sequence
  MKO10073853_B_BC147527
  gRNA
gaaggacagcatcatcttct

SEQ ID NO: 73854 - DNA, 20 bp, Artificial Sequence
  MKO10073854_B_BC147527
  gRNA
actccctctgacactcactc

SEQ ID NO: 73855 - DNA, 20 bp, Artificial Sequence
  MKO10073855_B_Baalc
  gRNA
ggtgctccgacctgcagccc

SEQ ID NO: 73856 - DNA, 20 bp, Artificial Sequence
  MKO10073856_B_Baalc
  gRNA
aaacacgttctcactctgcg

SEQ ID NO: 73857 - DNA, 20 bp, Artificial Sequence
  MKO10073857_B_Baalc
  gRNA
tggcacacgtgatacccctt

SEQ ID NO: 73858 - DNA, 20 bp, Artificial Sequence
  MKO10073858_B_Baat
  gRNA
acctgaccatgatatacatg

SEQ ID NO: 73859 - DNA, 20 bp, Artificial Sequence
  MKO10073859_B_Baat
  gRNA
ctgacgactatgtcttgtaa

SEQ ID NO: 73860 - DNA, 20 bp, Artificial Sequence
  MKO10073860_B_Baat
  gRNA
gatcaaaatgggcatccttg

SEQ ID NO: 73861 - DNA, 20 bp, Artificial Sequence
  MKO10073861_B_Babam1
  gRNA
tatgtttcagatcatctgtc

SEQ ID NO: 73862 - DNA, 20 bp, Artificial Sequence
  MKO10073862_B_Babam1
  gRNA
gcagagctcacgtgggtcag

SEQ ID NO: 73863 - DNA, 20 bp, Artificial Sequence
  MKO10073863_B_Babam1
  gRNA
ggagatgtctgtgccaaagc

SEQ ID NO: 73864 - DNA, 20 bp, Artificial Sequence
  MKO10073864_B_Bace1
  gRNA
gaccaccttaccgtctgtgg

SEQ ID NO: 73865 - DNA, 20 bp, Artificial Sequence
  MKO10073865_B_Bace1
  gRNA
gaagggctccaaagagtcgt

SEQ ID NO: 73866 - DNA, 20 bp, Artificial Sequence
  MKO10073866_B_Bace1
  gRNA
gttggcacgcacagtgacgt

SEQ ID NO: 73867 - DNA, 20 bp, Artificial Sequence
  MKO10073867_B_Bace2
  gRNA
attctcagactcgaaaatag

SEQ ID NO: 73868 - DNA, 20 bp, Artificial Sequence
  MKO10073868_B_Bace2
  gRNA
ggattgccagtagctggttc

SEQ ID NO: 73869 - DNA, 20 bp, Artificial Sequence
  MKO10073869_B_Bace2
  gRNA
tagtaccattcctctttaat

SEQ ID NO: 73870 - DNA, 20 bp, Artificial Sequence
  MKO10073870_B_Bach1
  gRNA
tgtaaaagcaagctcgccgt

SEQ ID NO: 73871 - DNA, 20 bp, Artificial Sequence
  MKO10073871_B_Bach1
  gRNA
tctaagcgtacacaatatcg

SEQ ID NO: 73872 - DNA, 20 bp, Artificial Sequence
  MKO10073872_B_Bach1
  gRNA
tcggagtagtgtggagcgag

SEQ ID NO: 73873 - DNA, 20 bp, Artificial Sequence
  MKO10073873_B_Bach2
  gRNA
cagcccagcgctgtcgaaag

SEQ ID NO: 73874 - DNA, 20 bp, Artificial Sequence
  MKO10073874_B_Bach2
  gRNA
tgcggttcttactccgcctc

SEQ ID NO: 73875 - DNA, 20 bp, Artificial Sequence
  MKO10073875_B_Bach2
  gRNA
agagaatgtccttcttccgt

SEQ ID NO: 73876 - DNA, 20 bp, Artificial Sequence
  MKO10073876_B_Bad
  gRNA
ggacgcgcattatccagtcc

SEQ ID NO: 73877 - DNA, 20 bp, Artificial Sequence
  MKO10073877_B_Bad
  gRNA
gatcggacttcctcaagcct

SEQ ID NO: 73878 - DNA, 20 bp, Artificial Sequence
  MKO10073878_B_Bad
  gRNA
ctggataatgcgcgtccagc

SEQ ID NO: 73879 - DNA, 20 bp, Artificial Sequence
  MKO10073879_B_Bag1
  gRNA
tgagccagttgtccaagact

SEQ ID NO: 73880 - DNA, 20 bp, Artificial Sequence
  MKO10073880_B_Bag1
  gRNA
tttcaccaattaacatgact

SEQ ID NO: 73881 - DNA, 20 bp, Artificial Sequence
  MKO10073881_B_Bag1
  gRNA
gtgtttccatttcctccgtc

SEQ ID NO: 73882 - DNA, 20 bp, Artificial Sequence
  MKO10073882_B_Bag2
  gRNA
gaagcggccctcgtgggcct

SEQ ID NO: 73883 - DNA, 20 bp, Artificial Sequence
  MKO10073883_B_Bag2
  gRNA
cgctaatctgcctcatgtcc

SEQ ID NO: 73884 - DNA, 20 bp, Artificial Sequence
  MKO10073884_B_Bag2
  gRNA
cgcagctactgctgttgagc

SEQ ID NO: 73885 - DNA, 20 bp, Artificial Sequence
  MKO10073885_B_Bag3
  gRNA
tgtttcggcttctcccgatt

SEQ ID NO: 73886 - DNA, 20 bp, Artificial Sequence
  MKO10073886_B_Bag3
  gRNA
cgacccgcgtgtgccccccg

SEQ ID NO: 73887 - DNA, 20 bp, Artificial Sequence
  MKO10073887_B_Bag3
  gRNA
gaaggctcgcccgccagaag

SEQ ID NO: 73888 - DNA, 20 bp, Artificial Sequence
  MKO10073888_B_Bag4
  gRNA
tatggaccgccttaccctcc

SEQ ID NO: 73889 - DNA, 20 bp, Artificial Sequence
  MKO10073889_B_Bag4
  gRNA
ccaaacacctaccgttcacc

SEQ ID NO: 73890 - DNA, 20 bp, Artificial Sequence
  MKO10073890_B_Bag4
  gRNA
ttcatactgatggacgctgc

SEQ ID NO: 73891 - DNA, 20 bp, Artificial Sequence
  MKO10073891_B_Bag5
  gRNA
ctcctgtaccgcgcagatct

SEQ ID NO: 73892 - DNA, 20 bp, Artificial Sequence
  MKO10073892_B_Bag5
  gRNA
gcggtacctggctttccgca

SEQ ID NO: 73893 - DNA, 20 bp, Artificial Sequence
  MKO10073893_B_Bag5
  gRNA
gcagatcctgatcacgtacc

SEQ ID NO: 73894 - DNA, 20 bp, Artificial Sequence
  MKO10073894_B_Bag6
  gRNA
gcatcccttccgagaaacag

SEQ ID NO: 73895 - DNA, 20 bp, Artificial Sequence
  MKO10073895_B_Bag6
  gRNA
cggtcatgaacagaagcccc

SEQ ID NO: 73896 - DNA, 20 bp, Artificial Sequence
  MKO10073896_B_Bag6
  gRNA
gccaacagctatgtcatggt

SEQ ID NO: 73897 - DNA, 20 bp, Artificial Sequence
  MKO10073897_B_Bahcc1
  gRNA
tcctcggtaggccggctcag

SEQ ID NO: 73898 - DNA, 20 bp, Artificial Sequence
  MKO10073898_B_Bahcc1
  gRNA
tctagcgcatggctggcacg

SEQ ID NO: 73899 - DNA, 20 bp, Artificial Sequence
  MKO10073899_B_Bahcc1
  gRNA
gatccaagtggctcacgggt

SEQ ID NO: 73900 - DNA, 20 bp, Artificial Sequence
  MKO10073900_B_Bahd1
  gRNA
cagagcgccaagcctccgag

SEQ ID NO: 73901 - DNA, 20 bp, Artificial Sequence
  MKO10073901_B_Bahd1
  gRNA
aaagacgtctacaccttatg

SEQ ID NO: 73902 - DNA, 20 bp, Artificial Sequence
  MKO10073902_B_Bahd1
  gRNA
atagcacttctcttcaatgc

SEQ ID NO: 73903 - DNA, 20 bp, Artificial Sequence
  MKO10073903_B_Bai1
  gRNA
ccccagcggccccgcgagct

SEQ ID NO: 73904 - DNA, 20 bp, Artificial Sequence
  MKO10073904_B_Bai1
  gRNA
ccccaaactcctcacgtcgc

SEQ ID NO: 73905 - DNA, 20 bp, Artificial Sequence
  MKO10073905_B_Bai1
  gRNA
actgcactgagtactgtacg

SEQ ID NO: 73906 - DNA, 20 bp, Artificial Sequence
  MKO10073906_B_Bai2
  gRNA
gcgctactgacccgggcagg

SEQ ID NO: 73907 - DNA, 20 bp, Artificial Sequence
  MKO10073907_B_Bai2
  gRNA
gtctgcgccatgtatagccc

SEQ ID NO: 73908 - DNA, 20 bp, Artificial Sequence
  MKO10073908_B_Bai2
  gRNA
cgtgagggcacctgcgcacg

SEQ ID NO: 73909 - DNA, 20 bp, Artificial Sequence
  MKO10073909_B_Bai3
  gRNA
gaggccaaagaacacgaacc

SEQ ID NO: 73910 - DNA, 20 bp, Artificial Sequence
  MKO10073910_B_Bai3
  gRNA
tgctacaaccctgaatgtac

SEQ ID NO: 73911 - DNA, 20 bp, Artificial Sequence
  MKO10073911_B_Bai3
  gRNA
ctcgatctgtccatgagaaa

SEQ ID NO: 73912 - DNA, 20 bp, Artificial Sequence
  MKO10073912_B_Baiap2l1
  gRNA
aattatgaaaaagcggtgaa

SEQ ID NO: 73913 - DNA, 20 bp, Artificial Sequence
  MKO10073913_B_Baiap2l1
  gRNA
gagtctcattgagtttcttg

SEQ ID NO: 73914 - DNA, 20 bp, Artificial Sequence
  MKO10073914_B_Baiap2l1
  gRNA
acagttcaaaaaattccata

SEQ ID NO: 73915 - DNA, 20 bp, Artificial Sequence
  MKO10073915_B_Baiap2l2
  gRNA
ttcagcgccatacagaagat

SEQ ID NO: 73916 - DNA, 20 bp, Artificial Sequence
  MKO10073916_B_Baiap2l2
  gRNA
tgtgctgaagcaagtctccg

SEQ ID NO: 73917 - DNA, 20 bp, Artificial Sequence
  MKO10073917_B_Baiap2l2
  gRNA
gatgaactgcatgtccagct

SEQ ID NO: 73918 - DNA, 20 bp, Artificial Sequence
  MKO10073918_B_Baiap2
  gRNA
cgatgaagttgcggaggctg

SEQ ID NO: 73919 - DNA, 20 bp, Artificial Sequence
  MKO10073919_B_Baiap2
  gRNA
ggtgtcaccttcgctgccaa

SEQ ID NO: 73920 - DNA, 20 bp, Artificial Sequence
  MKO10073920_B_Baiap2
  gRNA
cctccgcaacttcatcgcca

SEQ ID NO: 73921 - DNA, 20 bp, Artificial Sequence
  MKO10073921_B_Baiap3
  gRNA
tcacaggttcttcttcgaag

SEQ ID NO: 73922 - DNA, 20 bp, Artificial Sequence
  MKO10073922_B_Baiap3
  gRNA
cttgctaagctaccttcagc

SEQ ID NO: 73923 - DNA, 20 bp, Artificial Sequence
  MKO10073923_B_Baiap3
  gRNA
ggccttcttcacacgcatga

SEQ ID NO: 73924 - DNA, 20 bp, Artificial Sequence
  MKO10073924_B_Bak1
  gRNA
ctggtacctggaggcgatct

SEQ ID NO: 73925 - DNA, 20 bp, Artificial Sequence
  MKO10073925_B_Bak1
  gRNA
tcttcaccaagatcgcctcc

SEQ ID NO: 73926 - DNA, 20 bp, Artificial Sequence
  MKO10073926_B_Bak1
  gRNA
cgcccctgccaaccccgaga

SEQ ID NO: 73927 - DNA, 20 bp, Artificial Sequence
  MKO10073927_B_Bambi
  gRNA
agacatctgccgagccaaac

SEQ ID NO: 73928 - DNA, 20 bp, Artificial Sequence
  MKO10073928_B_Bambi
  gRNA
cagccagatgaagaagtagc

SEQ ID NO: 73929 - DNA, 20 bp, Artificial Sequence
  MKO10073929_B_Bambi
  gRNA
gcagctggagctctgcgcca

SEQ ID NO: 73930 - DNA, 20 bp, Artificial Sequence
  MKO10073930_B_Banf1
  gRNA
aaagcagtcccgggactgct

SEQ ID NO: 73931 - DNA, 20 bp, Artificial Sequence
  MKO10073931_B_Banf1
  gRNA
gctttgggtgccttcgagaa

SEQ ID NO: 73932 - DNA, 20 bp, Artificial Sequence
  MKO10073932_B_Banf1
  gRNA
ctttctttagcaccagaaac

SEQ ID NO: 73933 - DNA, 20 bp, Artificial Sequence
  MKO10073933_B_Banf2
  gRNA
cagagatatctataggaaac

SEQ ID NO: 73934 - DNA, 20 bp, Artificial Sequence
  MKO10073934_B_Banf2
  gRNA
gcctttctctctgaacccat

SEQ ID NO: 73935 - DNA, 20 bp, Artificial Sequence
  MKO10073935_B_Banf2
  gRNA
tcagaagaaactgtcccagc

SEQ ID NO: 73936 - DNA, 20 bp, Artificial Sequence
  MKO10073936_B_Bank1
  gRNA
ctcaagagccaagtatcctg

SEQ ID NO: 73937 - DNA, 20 bp, Artificial Sequence
  MKO10073937_B_Bank1
  gRNA
acctggcacaaactcttgcc

SEQ ID NO: 73938 - DNA, 20 bp, Artificial Sequence
  MKO10073938_B_Bank1
  gRNA
ttgacagtgaccgagccagc

SEQ ID NO: 73939 - DNA, 20 bp, Artificial Sequence
  MKO10073939_B_Banp
  gRNA
ccacacggtacctttataga

SEQ ID NO: 73940 - DNA, 20 bp, Artificial Sequence
  MKO10073940_B_Banp
  gRNA
agacctgcaacaaagtgcga

SEQ ID NO: 73941 - DNA, 20 bp, Artificial Sequence
  MKO10073941_B_Banp
  gRNA
tccggtgccctgttgctcaa

SEQ ID NO: 73942 - DNA, 20 bp, Artificial Sequence
  MKO10073942_B_Bap1
  gRNA
atccttcattcggctcagcg

SEQ ID NO: 73943 - DNA, 20 bp, Artificial Sequence
  MKO10073943_B_Bap1
  gRNA
cctgatcgtaggtgtcaaag

SEQ ID NO: 73944 - DNA, 20 bp, Artificial Sequence
  MKO10073944_B_Bap1
  gRNA
tcttaccgaaatcttccacc

SEQ ID NO: 73945 - DNA, 20 bp, Artificial Sequence
  MKO10073945_B_Bard1
  gRNA
ccaacggtgtccatccagca

SEQ ID NO: 73946 - DNA, 20 bp, Artificial Sequence
  MKO10073946_B_Bard1
  gRNA
ccaattgtcggtttatcttg

SEQ ID NO: 73947 - DNA, 20 bp, Artificial Sequence
  MKO10073947_B_Bard1
  gRNA
aatcagtgctaatattctga

SEQ ID NO: 73948 - DNA, 20 bp, Artificial Sequence
  MKO10073948_B_Barhl1
  gRNA
cgccttcaccgaccatcagc

SEQ ID NO: 73949 - DNA, 20 bp, Artificial Sequence
  MKO10073949_B_Barhl1
  gRNA
tacagatagagtgcggcacc

SEQ ID NO: 73950 - DNA, 20 bp, Artificial Sequence
  MKO10073950_B_Barhl1
  gRNA
gtctggagaccagtacctcg

SEQ ID NO: 73951 - DNA, 20 bp, Artificial Sequence
  MKO10073951_B_Barhl2
  gRNA
ttgagggccggctgtccccc

SEQ ID NO: 73952 - DNA, 20 bp, Artificial Sequence
  MKO10073952_B_Barhl2
  gRNA
ctgcagcgcggagtagttcc

SEQ ID NO: 73953 - DNA, 20 bp, Artificial Sequence
  MKO10073953_B_Barhl2
  gRNA
gctctcctcaccttcggttc

SEQ ID NO: 73954 - DNA, 20 bp, Artificial Sequence
  MKO10073954_B_Barx1
  gRNA
gcgggcgagctgctcaagtt

SEQ ID NO: 73955 - DNA, 20 bp, Artificial Sequence
  MKO10073955_B_Barx1
  gRNA
cctggcgcgaaagccaagaa

SEQ ID NO: 73956 - DNA, 20 bp, Artificial Sequence
  MKO10073956_B_Barx1
  gRNA
agcagccgagcggcgccagt

SEQ ID NO: 73957 - DNA, 20 bp, Artificial Sequence
  MKO10073957_B_Barx2
  gRNA
aagatggtgcgacttctgcg

SEQ ID NO: 73958 - DNA, 20 bp, Artificial Sequence
  MKO10073958_B_Barx2
  gRNA
tcgccatccagtcgccgctg

SEQ ID NO: 73959 - DNA, 20 bp, Artificial Sequence
  MKO10073959_B_Barx2
  gRNA
caaagcgtgccttgtcccct

SEQ ID NO: 73960 - DNA, 20 bp, Artificial Sequence
  MKO10073960_B_Basp1
  gRNA
cgaagcgagcgccgagagca

SEQ ID NO: 73961 - DNA, 20 bp, Artificial Sequence
  MKO10073961_B_Basp1
  gRNA
tttagagtctgaagccgccg

SEQ ID NO: 73962 - DNA, 20 bp, Artificial Sequence
  MKO10073962_B_Basp1
  gRNA
gggggccttggccgcggaac

SEQ ID NO: 73963 - DNA, 20 bp, Artificial Sequence
  MKO10073963_B_Batf2
  gRNA
atctgtggcccctagcccac

SEQ ID NO: 73964 - DNA, 20 bp, Artificial Sequence
  MKO10073964_B_Batf2
  gRNA
gctactcccacagagttgca

SEQ ID NO: 73965 - DNA, 20 bp, Artificial Sequence
  MKO10073965_B_Batf2
  gRNA
gcctaagccatgcaactctg

SEQ ID NO: 73966 - DNA, 20 bp, Artificial Sequence
  MKO10073966_B_Batf3
  gRNA
tctctgcagcacgctgaccg

SEQ ID NO: 73967 - DNA, 20 bp, Artificial Sequence
  MKO10073967_B_Batf3
  gRNA
ggagctgcgtcacctgagcg

SEQ ID NO: 73968 - DNA, 20 bp, Artificial Sequence
  MKO10073968_B_Batf3
  gRNA
aactttcctgtcatcgtcct

SEQ ID NO: 73969 - DNA, 20 bp, Artificial Sequence
  MKO10073969_B_Batf
  gRNA
agagatcaaacagctcaccg

SEQ ID NO: 73970 - DNA, 20 bp, Artificial Sequence
  MKO10073970_B_Batf
  gRNA
gaagggggtacctgtttgcc

SEQ ID NO: 73971 - DNA, 20 bp, Artificial Sequence
  MKO10073971_B_Batf
  gRNA
ttcagccgctctcctccccc

SEQ ID NO: 73972 - DNA, 20 bp, Artificial Sequence
  MKO10073972_B_Bax
  gRNA
cactcacccctgtagcaaaa

SEQ ID NO: 73973 - DNA, 20 bp, Artificial Sequence
  MKO10073973_B_Bax
  gRNA
ccccccgagaggtcttcttc

SEQ ID NO: 73974 - DNA, 20 bp, Artificial Sequence
  MKO10073974_B_Bax
  gRNA
gcttgtctggatccaagacc

SEQ ID NO: 73975 - DNA, 20 bp, Artificial Sequence
  MKO10073975_B_Baz1a
  gRNA
gcaaaaccattctgatgtaa

SEQ ID NO: 73976 - DNA, 20 bp, Artificial Sequence
  MKO10073976_B_Baz1a
  gRNA
aaccctgtatctgaataata

SEQ ID NO: 73977 - DNA, 20 bp, Artificial Sequence
  MKO10073977_B_Baz1a
  gRNA
caacactgtgaagcacaaga

SEQ ID NO: 73978 - DNA, 20 bp, Artificial Sequence
  MKO10073978_B_Baz1b
  gRNA
aaagatacagtgaacgcatt

SEQ ID NO: 73979 - DNA, 20 bp, Artificial Sequence
  MKO10073979_B_Baz1b
  gRNA
gatagtgaagattcatcctt

SEQ ID NO: 73980 - DNA, 20 bp, Artificial Sequence
  MKO10073980_B_Baz1b
  gRNA
tgcgttcactgtatctttcc

SEQ ID NO: 73981 - DNA, 20 bp, Artificial Sequence
  MKO10073981_B_Baz2a
  gRNA
gctgatcgagaagagacgac

SEQ ID NO: 73982 - DNA, 20 bp, Artificial Sequence
  MKO10073982_B_Baz2a
  gRNA
acaccaagaagtctccgtcc

SEQ ID NO: 73983 - DNA, 20 bp, Artificial Sequence
  MKO10073983_B_Baz2a
  gRNA
aagacagactcccctaagac

SEQ ID NO: 73984 - DNA, 20 bp, Artificial Sequence
  MKO10073984_B_Baz2b
  gRNA
gctgctaatgccttcactcg

SEQ ID NO: 73985 - DNA, 20 bp, Artificial Sequence
  MKO10073985_B_Baz2b
  gRNA
agccgacagaatcaaagata

SEQ ID NO: 73986 - DNA, 20 bp, Artificial Sequence
  MKO10073986_B_Baz2b
  gRNA
gtatcacctgactcagtgtc

SEQ ID NO: 73987 - DNA, 20 bp, Artificial Sequence
  MKO10073987_B_Bbc3
  gRNA
acctcaacgcgcagtacgag

SEQ ID NO: 73988 - DNA, 20 bp, Artificial Sequence
  MKO10073988_B_Bbc3
  gRNA
gagattgtacatgaccctcc

SEQ ID NO: 73989 - DNA, 20 bp, Artificial Sequence
  MKO10073989_B_Bbc3
  gRNA
atcgacaccgaccctcaccc

SEQ ID NO: 73990 - DNA, 20 bp, Artificial Sequence
  MKO10073990_B_Bbip1
  gRNA
tacagtccgtcaacaagaaa

SEQ ID NO: 73991 - DNA, 20 bp, Artificial Sequence
  MKO10073991_B_Bbip1
  gRNA
attaatagggcagttgtctg

SEQ ID NO: 73992 - DNA, 20 bp, Artificial Sequence
  MKO10073992_B_Bbip1
  gRNA
gaaaatgcagcaagcagcac

SEQ ID NO: 73993 - DNA, 20 bp, Artificial Sequence
  MKO10073993_B_Bbox1
  gRNA
caagattgatgccaacaatg

SEQ ID NO: 73994 - DNA, 20 bp, Artificial Sequence
  MKO10073994_B_Bbox1
  gRNA
cagacacacttggcaagtgc

SEQ ID NO: 73995 - DNA, 20 bp, Artificial Sequence
  MKO10073995_B_Bbox1
  gRNA
aatacacagaatgtcagtac

SEQ ID NO: 73996 - DNA, 20 bp, Artificial Sequence
  MKO10073996_B_Bbs10
  gRNA
ttacattctgaccacgcaag

SEQ ID NO: 73997 - DNA, 20 bp, Artificial Sequence
  MKO10073997_B_Bbs10
  gRNA
aagccgccgtcaccgacccc

SEQ ID NO: 73998 - DNA, 20 bp, Artificial Sequence
  MKO10073998_B_Bbs10
  gRNA
gctctaagtgcagcgcctcc

SEQ ID NO: 73999 - DNA, 20 bp, Artificial Sequence
  MKO10073999_B_Bbs12
  gRNA
gctgagcaatctttaaatag

SEQ ID NO: 74000 - DNA, 20 bp, Artificial Sequence
  MKO10074000_B_Bbs12
  gRNA
gttctagaaatccatcatgt

SEQ ID NO: 74001 - DNA, 20 bp, Artificial Sequence
  MKO10074001_B_Bbs12
  gRNA
attcaacagcaccaccgcca

SEQ ID NO: 74002 - DNA, 20 bp, Artificial Sequence
  MKO10074002_B_Bbs1
  gRNA
tgcgtccagccatttagaat

SEQ ID NO: 74003 - DNA, 20 bp, Artificial Sequence
  MKO10074003_B_Bbs1
  gRNA
ctagcactggcagatttgca

SEQ ID NO: 74004 - DNA, 20 bp, Artificial Sequence
  MKO10074004_B_Bbs1
  gRNA
gattgaccccttaaccctga

SEQ ID NO: 74005 - DNA, 20 bp, Artificial Sequence
  MKO10074005_B_Bbs2
  gRNA
tttccaccgatgattgcaag

SEQ ID NO: 74006 - DNA, 20 bp, Artificial Sequence
  MKO10074006_B_Bbs2
  gRNA
ctgtgtgactttgacggtga

SEQ ID NO: 74007 - DNA, 20 bp, Artificial Sequence
  MKO10074007_B_Bbs2
  gRNA
tggagacaatgtgcattcct

SEQ ID NO: 74008 - DNA, 20 bp, Artificial Sequence
  MKO10074008_B_Bbs4
  gRNA
gtgtgctgataatctcaagc

SEQ ID NO: 74009 - DNA, 20 bp, Artificial Sequence
  MKO10074009_B_Bbs4
  gRNA
ttgagattatcagcacactg

SEQ ID NO: 74010 - DNA, 20 bp, Artificial Sequence
  MKO10074010_B_Bbs4
  gRNA
ctgttgaatctcaaaaacct

SEQ ID NO: 74011 - DNA, 20 bp, Artificial Sequence
  MKO10074011_B_Bbs5
  gRNA
gactcttagtcacaaactta

SEQ ID NO: 74012 - DNA, 20 bp, Artificial Sequence
  MKO10074012_B_Bbs5
  gRNA
acagtcaatgaggacttccc

SEQ ID NO: 74013 - DNA, 20 bp, Artificial Sequence
  MKO10074013_B_Bbs5
  gRNA
gattccattgaagacacaaa

SEQ ID NO: 74014 - DNA, 20 bp, Artificial Sequence
  MKO10074014_B_Bbs7
  gRNA
ccgggtgctccgagtcttac

SEQ ID NO: 74015 - DNA, 20 bp, Artificial Sequence
  MKO10074015_B_Bbs7
  gRNA
tagctttaatgctttccgtg

SEQ ID NO: 74016 - DNA, 20 bp, Artificial Sequence
  MKO10074016_B_Bbs7
  gRNA
gtggttgttggagatcaaga

SEQ ID NO: 74017 - DNA, 20 bp, Artificial Sequence
  MKO10074017_B_Bbs9
  gRNA
tacttctagaagtgcatctg

SEQ ID NO: 74018 - DNA, 20 bp, Artificial Sequence
  MKO10074018_B_Bbs9
  gRNA
tgcaggccgtcctctgaaga

SEQ ID NO: 74019 - DNA, 20 bp, Artificial Sequence
  MKO10074019_B_Bbs9
  gRNA
gtgcggggactgtaagcaag

SEQ ID NO: 74020 - DNA, 20 bp, Artificial Sequence
  MKO10074020_B_Bbx
  gRNA
aaggcccaaagtttcttccg

SEQ ID NO: 74021 - DNA, 20 bp, Artificial Sequence
  MKO10074021_B_Bbx
  gRNA
ctctttagatcctactcaga

SEQ ID NO: 74022 - DNA, 20 bp, Artificial Sequence
  MKO10074022_B_Bbx
  gRNA
accattgtttcagtttgccg

SEQ ID NO: 74023 - DNA, 20 bp, Artificial Sequence
  MKO10074023_B_Bcam
  gRNA
accccgtgcctcggatcaca

SEQ ID NO: 74024 - DNA, 20 bp, Artificial Sequence
  MKO10074024_B_Bcam
  gRNA
cttccagacgctgcccgttt

SEQ ID NO: 74025 - DNA, 20 bp, Artificial Sequence
  MKO10074025_B_Bcam
  gRNA
gctcccgtggagtgcagtcc

SEQ ID NO: 74026 - DNA, 20 bp, Artificial Sequence
  MKO10074026_B_Bcan
  gRNA
actccgtagttccgcacgcc

SEQ ID NO: 74027 - DNA, 20 bp, Artificial Sequence
  MKO10074027_B_Bcan
  gRNA
cgtgcggaactacggagtgg

SEQ ID NO: 74028 - DNA, 20 bp, Artificial Sequence
  MKO10074028_B_Bcan
  gRNA
ggtgcacagatcgctagcac

SEQ ID NO: 74029 - DNA, 20 bp, Artificial Sequence
  MKO10074029_B_Bcap29
  gRNA
tcaagcagaaaataccaata

SEQ ID NO: 74030 - DNA, 20 bp, Artificial Sequence
  MKO10074030_B_Bcap29
  gRNA
cctcagagtgttgagacgtc

SEQ ID NO: 74031 - DNA, 20 bp, Artificial Sequence
  MKO10074031_B_Bcap29
  gRNA
acacacagatgaagctcttc

SEQ ID NO: 74032 - DNA, 20 bp, Artificial Sequence
  MKO10074032_B_Bcap31
  gRNA
gtggagttggtagtgaccta

SEQ ID NO: 74033 - DNA, 20 bp, Artificial Sequence
  MKO10074033_B_Bcap31
  gRNA
catcgtcatccttgtactgt

SEQ ID NO: 74034 - DNA, 20 bp, Artificial Sequence
  MKO10074034_B_Bcap31
  gRNA
ccagaacaatccaggtgcca

SEQ ID NO: 74035 - DNA, 20 bp, Artificial Sequence
  MKO10074035_B_Bcar1
  gRNA
gtatgacgtgccccctagtg

SEQ ID NO: 74036 - DNA, 20 bp, Artificial Sequence
  MKO10074036_B_Bcar1
  gRNA
gacaggcgcttgccatccgt

SEQ ID NO: 74037 - DNA, 20 bp, Artificial Sequence
  MKO10074037_B_Bcar1
  gRNA
ttaggaagcagtcctcgaac

SEQ ID NO: 74038 - DNA, 20 bp, Artificial Sequence
  MKO10074038_B_Bcar3
  gRNA
cgcatacctgtcgggggatc

SEQ ID NO: 74039 - DNA, 20 bp, Artificial Sequence
  MKO10074039_B_Bcar3
  gRNA
ttggcaggtgactctccgac

SEQ ID NO: 74040 - DNA, 20 bp, Artificial Sequence
  MKO10074040_B_Bcar3
  gRNA
cgcctgcctggatcacgtgc

SEQ ID NO: 74041 - DNA, 20 bp, Artificial Sequence
  MKO10074041_B_Bcas1
  gRNA
agaggtgccggggaccacga

SEQ ID NO: 74042 - DNA, 20 bp, Artificial Sequence
  MKO10074042_B_Bcas1
  gRNA
tctgtggtatcgaccacctg

SEQ ID NO: 74043 - DNA, 20 bp, Artificial Sequence
  MKO10074043_B_Bcas1
  gRNA
atagtgttgaattacacgag

SEQ ID NO: 74044 - DNA, 20 bp, Artificial Sequence
  MKO10074044_B_Bcas2
  gRNA
tgcgcgtctcctcctccacc

SEQ ID NO: 74045 - DNA, 20 bp, Artificial Sequence
  MKO10074045_B_Bcas2
  gRNA
ttcatgctgagtaattcaat

SEQ ID NO: 74046 - DNA, 20 bp, Artificial Sequence
  MKO10074046_B_Bcas2
  gRNA
ttgaattactcagcatgaaa

SEQ ID NO: 74047 - DNA, 20 bp, Artificial Sequence
  MKO10074047_B_Bcas3
  gRNA
ttaatttgcaggcttacagt

SEQ ID NO: 74048 - DNA, 20 bp, Artificial Sequence
  MKO10074048_B_Bcas3
  gRNA
acagtgacggaatgcaggtc

SEQ ID NO: 74049 - DNA, 20 bp, Artificial Sequence
  MKO10074049_B_Bcas3
  gRNA
cctcctctgctggttatgat

SEQ ID NO: 74050 - DNA, 20 bp, Artificial Sequence
  MKO10074050_B_Bcat1
  gRNA
tacctcagttccgataaatg

SEQ ID NO: 74051 - DNA, 20 bp, Artificial Sequence
  MKO10074051_B_Bcat1
  gRNA
gcgccgtttgctggagaaag

SEQ ID NO: 74052 - DNA, 20 bp, Artificial Sequence
  MKO10074052_B_Bcat1
  gRNA
ataacaagatccgattgttc

SEQ ID NO: 74053 - DNA, 20 bp, Artificial Sequence
  MKO10074053_B_Bcat2
  gRNA
cagggcacagaatgacgtac

SEQ ID NO: 74054 - DNA, 20 bp, Artificial Sequence
  MKO10074054_B_Bcat2
  gRNA
acaggatgctacgttctgct

SEQ ID NO: 74055 - DNA, 20 bp, Artificial Sequence
  MKO10074055_B_Bcat2
  gRNA
gaggctcgttccgttgccat

SEQ ID NO: 74056 - DNA, 20 bp, Artificial Sequence
  MKO10074056_B_Bccip
  gRNA
ccttaatcacactcccaatg

SEQ ID NO: 74057 - DNA, 20 bp, Artificial Sequence
  MKO10074057_B_Bccip
  gRNA
tgcatgggcagggcaatctg

SEQ ID NO: 74058 - DNA, 20 bp, Artificial Sequence
  MKO10074058_B_Bccip
  gRNA
tgctgaacaaattaaagagt

SEQ ID NO: 74059 - DNA, 20 bp, Artificial Sequence
  MKO10074059_B_Bcdin3d
  gRNA
catctgaaccacggggaccg

SEQ ID NO: 74060 - DNA, 20 bp, Artificial Sequence
  MKO10074060_B_Bcdin3d
  gRNA
ccgatcctagggctcgacgt

SEQ ID NO: 74061 - DNA, 20 bp, Artificial Sequence
  MKO10074061_B_Bcdin3d
  gRNA
caagatccgcacgatctgct

SEQ ID NO: 74062 - DNA, 20 bp, Artificial Sequence
  MKO10074062_B_Bche
  gRNA
gtgctccccaatgtcagttc

SEQ ID NO: 74063 - DNA, 20 bp, Artificial Sequence
  MKO10074063_B_Bche
  gRNA
atagtctccagaactgacat

SEQ ID NO: 74064 - DNA, 20 bp, Artificial Sequence
  MKO10074064_B_Bche
  gRNA
tacaggagatattgatgaaa

SEQ ID NO: 74065 - DNA, 20 bp, Artificial Sequence
  MKO10074065_B_Bckdha
  gRNA
tgtcccctcctcgccatagt

SEQ ID NO: 74066 - DNA, 20 bp, Artificial Sequence
  MKO10074066_B_Bckdha
  gRNA
actcacgtggggatcttcac

SEQ ID NO: 74067 - DNA, 20 bp, Artificial Sequence
  MKO10074067_B_Bckdha
  gRNA
acatacctgcctcccggtac

SEQ ID NO: 74068 - DNA, 20 bp, Artificial Sequence
  MKO10074068_B_Bckdhb
  gRNA
caccggtgctacagctattg

SEQ ID NO: 74069 - DNA, 20 bp, Artificial Sequence
  MKO10074069_B_Bckdhb
  gRNA
ggagtcttccgatgcactgt

SEQ ID NO: 74070 - DNA, 20 bp, Artificial Sequence
  MKO10074070_B_Bckdhb
  gRNA
aataccccgaagccctttcc

SEQ ID NO: 74071 - DNA, 20 bp, Artificial Sequence
  MKO10074071_B_Bckdk
  gRNA
agtactgggcctcatctgcc

SEQ ID NO: 74072 - DNA, 20 bp, Artificial Sequence
  MKO10074072_B_Bckdk
  gRNA
gctgccatcctgtgagcgac

SEQ ID NO: 74073 - DNA, 20 bp, Artificial Sequence
  MKO10074073_B_Bckdk
  gRNA
cacgaagaccctcagctaac

SEQ ID NO: 74074 - DNA, 20 bp, Artificial Sequence
  MKO10074074_B_Bcl10
  gRNA
ccccaggggcctggacaccc

SEQ ID NO: 74075 - DNA, 20 bp, Artificial Sequence
  MKO10074075_B_Bcl10
  gRNA
cagtcaaatcctcctccgtg

SEQ ID NO: 74076 - DNA, 20 bp, Artificial Sequence
  MKO10074076_B_Bcl10
  gRNA
tgaaagagcccgtgaccgta

SEQ ID NO: 74077 - DNA, 20 bp, Artificial Sequence
  MKO10074077_B_Bcl11a
  gRNA
gagtgcagaatatgccccgc

SEQ ID NO: 74078 - DNA, 20 bp, Artificial Sequence
  MKO10074078_B_Bcl11a
  gRNA
tgtttatcaacgtcatctag

SEQ ID NO: 74079 - DNA, 20 bp, Artificial Sequence
  MKO10074079_B_Bcl11a
  gRNA
ggcatattctgcactcatcc

SEQ ID NO: 74080 - DNA, 20 bp, Artificial Sequence
  MKO10074080_B_Bcl11b
  gRNA
ggcaatgtcccgccgcaaac

SEQ ID NO: 74081 - DNA, 20 bp, Artificial Sequence
  MKO10074081_B_Bcl11b
  gRNA
gcacgccccatctcgggcga

SEQ ID NO: 74082 - DNA, 20 bp, Artificial Sequence
  MKO10074082_B_Bcl11b
  gRNA
tacgcgtgatgagttccctc

SEQ ID NO: 74083 - DNA, 20 bp, Artificial Sequence
  MKO10074083_B_Bcl2a1a
  gRNA
aagaagtttgaacccaaatc

SEQ ID NO: 74084 - DNA, 20 bp, Artificial Sequence
  MKO10074084_B_Bcl2a1a
  gRNA
tatgaattctgccacaaaac

SEQ ID NO: 74085 - DNA, 20 bp, Artificial Sequence
  MKO10074085_B_Bcl2a1a
  gRNA
gctcatgcatatccactccc

SEQ ID NO: 74086 - DNA, 20 bp, Artificial Sequence
  MKO10074086_B_Bcl2a1b
  gRNA
aagaagtttgaacccaaatc

SEQ ID NO: 74087 - DNA, 20 bp, Artificial Sequence
  MKO10074087_B_Bcl2a1b
  gRNA
ctatcttcagtatgtgctac

SEQ ID NO: 74088 - DNA, 20 bp, Artificial Sequence
  MKO10074088_B_Bcl2a1b
  gRNA
tccgcaagagcagattgccc

SEQ ID NO: 74089 - DNA, 20 bp, Artificial Sequence
  MKO10074089_B_Bcl2a1c
  gRNA
gtttgtaagcacgtacatcc

SEQ ID NO: 74090 - DNA, 20 bp, Artificial Sequence
  MKO10074090_B_Bcl2a1c
  gRNA
aaagaacctaaagtcatact

SEQ ID NO: 74091 - DNA, 20 bp, Artificial Sequence
  MKO10074091_B_Bcl2a1c
  gRNA
tttgtagcactctgaatgct

SEQ ID NO: 74092 - DNA, 20 bp, Artificial Sequence
  MKO10074092_B_Bcl2a1d
  gRNA
aaaagtcagccagccagatt

SEQ ID NO: 74093 - DNA, 20 bp, Artificial Sequence
  MKO10074093_B_Bcl2a1d
  gRNA
gaattcataatgaataacac

SEQ ID NO: 74094 - DNA, 20 bp, Artificial Sequence
  MKO10074094_B_Bcl2a1d
  gRNA
gaatggatacggcggaatgg

SEQ ID NO: 74095 - DNA, 20 bp, Artificial Sequence
  MKO10074095_B_Bcl2l10
  gRNA
aatcttctccagaagccgag

SEQ ID NO: 74096 - DNA, 20 bp, Artificial Sequence
  MKO10074096_B_Bcl2l10
  gRNA
gcctcgacagacgtgggcgg

SEQ ID NO: 74097 - DNA, 20 bp, Artificial Sequence
  MKO10074097_B_Bcl2l10
  gRNA
ccaaaggatggccgactcgc

SEQ ID NO: 74098 - DNA, 20 bp, Artificial Sequence
  MKO10074098_B_Bcl2l11
  gRNA
tcctgtgcaatccgtatctc

SEQ ID NO: 74099 - DNA, 20 bp, Artificial Sequence
  MKO10074099_B_Bcl2l11
  gRNA
tccctacagacagaaccgca

SEQ ID NO: 74100 - DNA, 20 bp, Artificial Sequence
  MKO10074100_B_Bcl2l11
  gRNA
taccttgcggttctgtctgt

SEQ ID NO: 74101 - DNA, 20 bp, Artificial Sequence
  MKO10074101_B_Bcl2l12
  gRNA
ggccccgggcacggcagaga

SEQ ID NO: 74102 - DNA, 20 bp, Artificial Sequence
  MKO10074102_B_Bcl2l12
  gRNA
ctgaagtccccgcccagttc

SEQ ID NO: 74103 - DNA, 20 bp, Artificial Sequence
  MKO10074103_B_Bcl2l12
  gRNA
accaggctcggaaccatagc

SEQ ID NO: 74104 - DNA, 20 bp, Artificial Sequence
  MKO10074104_B_Bcl2l13
  gRNA
cgatatgcctcatatgtcac

SEQ ID NO: 74105 - DNA, 20 bp, Artificial Sequence
  MKO10074105_B_Bcl2l13
  gRNA
ttcaggagttcaactagatg

SEQ ID NO: 74106 - DNA, 20 bp, Artificial Sequence
  MKO10074106_B_Bcl2l13
  gRNA
gagctccatagaagactgct

SEQ ID NO: 74107 - DNA, 20 bp, Artificial Sequence
  MKO10074107_B_Bcl2l14
  gRNA
caacaatcttgcttattatt

SEQ ID NO: 74108 - DNA, 20 bp, Artificial Sequence
  MKO10074108_B_Bcl2l14
  gRNA
ttcagttgtggattccaaag

SEQ ID NO: 74109 - DNA, 20 bp, Artificial Sequence
  MKO10074109_B_Bcl2l14
  gRNA
tccctttaggaaaaaatact

SEQ ID NO: 74110 - DNA, 20 bp, Artificial Sequence
  MKO10074110_B_Bcl2l15
  gRNA
agccatccgcgagtttatcc

SEQ ID NO: 74111 - DNA, 20 bp, Artificial Sequence
  MKO10074111_B_Bcl2l15
  gRNA
cggttagcagcgtgggatag

SEQ ID NO: 74112 - DNA, 20 bp, Artificial Sequence
  MKO10074112_B_Bcl2l15
  gRNA
actgatcacccagtattcga

SEQ ID NO: 74113 - DNA, 20 bp, Artificial Sequence
  MKO10074113_B_Bcl2l1
  gRNA
gccaggagcgcttcaaccgc

SEQ ID NO: 74114 - DNA, 20 bp, Artificial Sequence
  MKO10074114_B_Bcl2l1
  gRNA
ctttggcggggcactgtgcg

SEQ ID NO: 74115 - DNA, 20 bp, Artificial Sequence
  MKO10074115_B_Bcl2l1
  gRNA
ttagatcactgaacgctctc

SEQ ID NO: 74116 - DNA, 20 bp, Artificial Sequence
  MKO10074116_B_Bcl2l2
  gRNA
gcggagttcacagctctata

SEQ ID NO: 74117 - DNA, 20 bp, Artificial Sequence
  MKO10074117_B_Bcl2l2
  gRNA
acccgctgcaccaagccatg

SEQ ID NO: 74118 - DNA, 20 bp, Artificial Sequence
  MKO10074118_B_Bcl2l2
  gRNA
ggcctacctggagacacgtc

SEQ ID NO: 74119 - DNA, 20 bp, Artificial Sequence
  MKO10074119_B_Bcl2
  gRNA
gtcgacctcacttgtggccc

SEQ ID NO: 74120 - DNA, 20 bp, Artificial Sequence
  MKO10074120_B_Bcl2
  gRNA
acctgacgcccttcaccgcg

SEQ ID NO: 74121 - DNA, 20 bp, Artificial Sequence
  MKO10074121_B_Bcl2
  gRNA
tgtacttcatcacgatctcc

SEQ ID NO: 74122 - DNA, 20 bp, Artificial Sequence
  MKO10074122_B_Bcl3
  gRNA
cgatgtccgcgccacgctcc

SEQ ID NO: 74123 - DNA, 20 bp, Artificial Sequence
  MKO10074123_B_Bcl3
  gRNA
cggccagactgcaattcacc

SEQ ID NO: 74124 - DNA, 20 bp, Artificial Sequence
  MKO10074124_B_Bcl3
  gRNA
cgtgaacaccgggtgccagg

SEQ ID NO: 74125 - DNA, 20 bp, Artificial Sequence
  MKO10074125_B_Bcl6b
  gRNA
gtcaccgtttcatccaagcc

SEQ ID NO: 74126 - DNA, 20 bp, Artificial Sequence
  MKO10074126_B_Bcl6b
  gRNA
catccaccccgagtcccgct

SEQ ID NO: 74127 - DNA, 20 bp, Artificial Sequence
  MKO10074127_B_Bcl6b
  gRNA
accactgcacgattcaagtg

SEQ ID NO: 74128 - DNA, 20 bp, Artificial Sequence
  MKO10074128_B_Bcl6
  gRNA
gagccgcaggatgtgcactt

SEQ ID NO: 74129 - DNA, 20 bp, Artificial Sequence
  MKO10074129_B_Bcl6
  gRNA
tagaatccgaatactctgac

SEQ ID NO: 74130 - DNA, 20 bp, Artificial Sequence
  MKO10074130_B_Bcl6
  gRNA
tacccgtgtggacagtcttg

SEQ ID NO: 74131 - DNA, 20 bp, Artificial Sequence
  MKO10074131_B_Bcl7a
  gRNA
agaaacgtcggcagtctctc

SEQ ID NO: 74132 - DNA, 20 bp, Artificial Sequence
  MKO10074132_B_Bcl7a
  gRNA
ggacccacttgtagattcgt

SEQ ID NO: 74133 - DNA, 20 bp, Artificial Sequence
  MKO10074133_B_Bcl7a
  gRNA
atactcacatcatcaacctt

SEQ ID NO: 74134 - DNA, 20 bp, Artificial Sequence
  MKO10074134_B_Bcl7b
  gRNA
gccagtgccggtggagacac

SEQ ID NO: 74135 - DNA, 20 bp, Artificial Sequence
  MKO10074135_B_Bcl7b
  gRNA
ggggctgggagtcatcagtg

SEQ ID NO: 74136 - DNA, 20 bp, Artificial Sequence
  MKO10074136_B_Bcl7b
  gRNA
actcaccctccaggatctcc

SEQ ID NO: 74137 - DNA, 20 bp, Artificial Sequence
  MKO10074137_B_Bcl7c
  gRNA
acataccattgagatccagt

SEQ ID NO: 74138 - DNA, 20 bp, Artificial Sequence
  MKO10074138_B_Bcl7c
  gRNA
gggaggccccctcatcctac

SEQ ID NO: 74139 - DNA, 20 bp, Artificial Sequence
  MKO10074139_B_Bcl7c
  gRNA
aaccagagtttccattctga

SEQ ID NO: 74140 - DNA, 20 bp, Artificial Sequence
  MKO10074140_B_Bcl9l
  gRNA
ttgtcgtcctcctcgctgtc

SEQ ID NO: 74141 - DNA, 20 bp, Artificial Sequence
  MKO10074141_B_Bcl9l
  gRNA
ccttcggccagacgttcctg

SEQ ID NO: 74142 - DNA, 20 bp, Artificial Sequence
  MKO10074142_B_Bcl9l
  gRNA
cccgaggcacattctgctgg

SEQ ID NO: 74143 - DNA, 20 bp, Artificial Sequence
  MKO10074143_B_Bcl9
  gRNA
cgtcaactgctacagccccc

SEQ ID NO: 74144 - DNA, 20 bp, Artificial Sequence
  MKO10074144_B_Bcl9
  gRNA
catacccctaaagcactccc

SEQ ID NO: 74145 - DNA, 20 bp, Artificial Sequence
  MKO10074145_B_Bcl9
  gRNA
ggattccaaattctccaatc

SEQ ID NO: 74146 - DNA, 20 bp, Artificial Sequence
  MKO10074146_B_Bclaf1
  gRNA
gaccgtgaccgacctcgtct

SEQ ID NO: 74147 - DNA, 20 bp, Artificial Sequence
  MKO10074147_B_Bclaf1
  gRNA
cagcttaatgtggtcaaaga

SEQ ID NO: 74148 - DNA, 20 bp, Artificial Sequence
  MKO10074148_B_Bclaf1
  gRNA
ctgcctccttgactaaagac

SEQ ID NO: 74149 - DNA, 20 bp, Artificial Sequence
  MKO10074149_B_Bcmo1
  gRNA
ctgatcaacatcatgaaatg

SEQ ID NO: 74150 - DNA, 20 bp, Artificial Sequence
  MKO10074150_B_Bcmo1
  gRNA
ggttccatggagataatatt

SEQ ID NO: 74151 - DNA, 20 bp, Artificial Sequence
  MKO10074151_B_Bcmo1
  gRNA
cccccagaccctagagacct

SEQ ID NO: 74152 - DNA, 20 bp, Artificial Sequence
  MKO10074152_B_Bco2
  gRNA
tgctccgtgaatcgtctccc

SEQ ID NO: 74153 - DNA, 20 bp, Artificial Sequence
  MKO10074153_B_Bco2
  gRNA
cgttcaaagatgctcttgca

SEQ ID NO: 74154 - DNA, 20 bp, Artificial Sequence
  MKO10074154_B_Bco2
  gRNA
atgttgtatgctgtcccatc

SEQ ID NO: 74155 - DNA, 20 bp, Artificial Sequence
  MKO10074155_B_Bcorl1
  gRNA
tcctgaatctaaagcccctc

SEQ ID NO: 74156 - DNA, 20 bp, Artificial Sequence
  MKO10074156_B_Bcorl1
  gRNA
actcggacacgcagtcagtc

SEQ ID NO: 74157 - DNA, 20 bp, Artificial Sequence
  MKO10074157_B_Bcorl1
  gRNA
aaaacgaacagatggtcatg

SEQ ID NO: 74158 - DNA, 20 bp, Artificial Sequence
  MKO10074158_B_Bcor
  gRNA
ctgtgaacgttcccatacag

SEQ ID NO: 74159 - DNA, 20 bp, Artificial Sequence
  MKO10074159_B_Bcor
  gRNA
gaagcgtcgccatcattcac

SEQ ID NO: 74160 - DNA, 20 bp, Artificial Sequence
  MKO10074160_B_Bcor
  gRNA
acagctggatgaacagcgag

SEQ ID NO: 74161 - DNA, 20 bp, Artificial Sequence
  MKO10074161_B_Bcr
  gRNA
tgaggaacagcgccggcacc

SEQ ID NO: 74162 - DNA, 20 bp, Artificial Sequence
  MKO10074162_B_Bcr
  gRNA
gacgtacctgagccatctgg

SEQ ID NO: 74163 - DNA, 20 bp, Artificial Sequence
  MKO10074163_B_Bcr
  gRNA
cgagcctttgtggataacta

SEQ ID NO: 74164 - DNA, 20 bp, Artificial Sequence
  MKO10074164_B_Bcs1l
  gRNA
aagaaggtagccacgtctgt

SEQ ID NO: 74165 - DNA, 20 bp, Artificial Sequence
  MKO10074165_B_Bcs1l
  gRNA
atctgtcaccttcacggccc

SEQ ID NO: 74166 - DNA, 20 bp, Artificial Sequence
  MKO10074166_B_Bcs1l
  gRNA
acttgcaaacagggactcct

SEQ ID NO: 74167 - DNA, 20 bp, Artificial Sequence
  MKO10074167_B_Bdh1
  gRNA
ccccttctccgaagagccaa

SEQ ID NO: 74168 - DNA, 20 bp, Artificial Sequence
  MKO10074168_B_Bdh1
  gRNA
actcaccgcatctgcctgac

SEQ ID NO: 74169 - DNA, 20 bp, Artificial Sequence
  MKO10074169_B_Bdh1
  gRNA
ggcaaagctatcctgatcac

SEQ ID NO: 74170 - DNA, 20 bp, Artificial Sequence
  MKO10074170_B_Bdh2
  gRNA
ctcggtaactttccagctcc

SEQ ID NO: 74171 - DNA, 20 bp, Artificial Sequence
  MKO10074171_B_Bdh2
  gRNA
tggattgcgaggaaaaagac

SEQ ID NO: 74172 - DNA, 20 bp, Artificial Sequence
  MKO10074172_B_Bdh2
  gRNA
atcaattctctcgatttctg

SEQ ID NO: 74173 - DNA, 20 bp, Artificial Sequence
  MKO10074173_B_Bdkrb1
  gRNA
ttccggggcgccctcgcagg

SEQ ID NO: 74174 - DNA, 20 bp, Artificial Sequence
  MKO10074174_B_Bdkrb1
  gRNA
tggtataccccatgaccagc

SEQ ID NO: 74175 - DNA, 20 bp, Artificial Sequence
  MKO10074175_B_Bdkrb1
  gRNA
ttacaaagtgccaagcttcg

SEQ ID NO: 74176 - DNA, 20 bp, Artificial Sequence
  MKO10074176_B_Bdkrb2
  gRNA
cagaaacccgagtagcttcc

SEQ ID NO: 74177 - DNA, 20 bp, Artificial Sequence
  MKO10074177_B_Bdkrb2
  gRNA
tgatcgtgggcaagcgcttc

SEQ ID NO: 74178 - DNA, 20 bp, Artificial Sequence
  MKO10074178_B_Bdkrb2
  gRNA
ggtcgatactcacgagcatc

SEQ ID NO: 74179 - DNA, 20 bp, Artificial Sequence
  MKO10074179_B_Bdnf
  gRNA
aggtctgacgacgacatcac

SEQ ID NO: 74180 - DNA, 20 bp, Artificial Sequence
  MKO10074180_B_Bdnf
  gRNA
ttcatacttcggttgcatga

SEQ ID NO: 74181 - DNA, 20 bp, Artificial Sequence
  MKO10074181_B_Bdnf
  gRNA
atgccgcaaacatgtctatg

SEQ ID NO: 74182 - DNA, 20 bp, Artificial Sequence
  MKO10074182_B_Bdp1
  gRNA
atcgtgatcaactgtagata

SEQ ID NO: 74183 - DNA, 20 bp, Artificial Sequence
  MKO10074183_B_Bdp1
  gRNA
ggtggatgatgggccacttc

SEQ ID NO: 74184 - DNA, 20 bp, Artificial Sequence
  MKO10074184_B_Bdp1
  gRNA
cgagtaaaagtggcagaaga

SEQ ID NO: 74185 - DNA, 20 bp, Artificial Sequence
  MKO10074185_B_Bean1
  gRNA
acaggggcaagggcgtttga

SEQ ID NO: 74186 - DNA, 20 bp, Artificial Sequence
  MKO10074186_B_Bean1
  gRNA
gtagggcggtggtgcatccg

SEQ ID NO: 74187 - DNA, 20 bp, Artificial Sequence
  MKO10074187_B_Bean1
  gRNA
ggcgcccttgactcagacag

SEQ ID NO: 74188 - DNA, 20 bp, Artificial Sequence
  MKO10074188_B_Becn1
  gRNA
gctaatagcttcactctgat

SEQ ID NO: 74189 - DNA, 20 bp, Artificial Sequence
  MKO10074189_B_Becn1
  gRNA
gaacctcagccggagactca

SEQ ID NO: 74190 - DNA, 20 bp, Artificial Sequence
  MKO10074190_B_Becn1
  gRNA
tcctggtttcgcctgggctg

SEQ ID NO: 74191 - DNA, 20 bp, Artificial Sequence
  MKO10074191_B_Begain
  gRNA
gtcctccgacagcttgtcaa

SEQ ID NO: 74192 - DNA, 20 bp, Artificial Sequence
  MKO10074192_B_Begain
  gRNA
caggattcagagcaactaca

SEQ ID NO: 74193 - DNA, 20 bp, Artificial Sequence
  MKO10074193_B_Begain
  gRNA
gcagaggatcaaccaagagc

SEQ ID NO: 74194 - DNA, 20 bp, Artificial Sequence
  MKO10074194_B_Bend3
  gRNA
gtccagctgcttgcgcttgc

SEQ ID NO: 74195 - DNA, 20 bp, Artificial Sequence
  MKO10074195_B_Bend3
  gRNA
atcagtgaagatgtagaaga

SEQ ID NO: 74196 - DNA, 20 bp, Artificial Sequence
  MKO10074196_B_Bend3
  gRNA
cgacaccgctcatcaatgct

SEQ ID NO: 74197 - DNA, 20 bp, Artificial Sequence
  MKO10074197_B_Bend4
  gRNA
gatgagcttaagtactcatg

SEQ ID NO: 74198 - DNA, 20 bp, Artificial Sequence
  MKO10074198_B_Bend4
  gRNA
aaaacgagccaccgttgtgc

SEQ ID NO: 74199 - DNA, 20 bp, Artificial Sequence
  MKO10074199_B_Bend4
  gRNA
gcactgtcttcaggtaatcg

SEQ ID NO: 74200 - DNA, 20 bp, Artificial Sequence
  MKO10074200_B_Bend5
  gRNA
agaatgtctcgagcccgagc

SEQ ID NO: 74201 - DNA, 20 bp, Artificial Sequence
  MKO10074201_B_Bend5
  gRNA
caccagctacaagttaccca

SEQ ID NO: 74202 - DNA, 20 bp, Artificial Sequence
  MKO10074202_B_Bend5
  gRNA
tttacagcttagacacatca

SEQ ID NO: 74203 - DNA, 20 bp, Artificial Sequence
  MKO10074203_B_Bend6
  gRNA
tgaccaaagactgtcgaagc

SEQ ID NO: 74204 - DNA, 20 bp, Artificial Sequence
  MKO10074204_B_Bend6
  gRNA
tgtagttcacgattgagaga

SEQ ID NO: 74205 - DNA, 20 bp, Artificial Sequence
  MKO10074205_B_Bend6
  gRNA
gctctccagagagtagacgc

SEQ ID NO: 74206 - DNA, 20 bp, Artificial Sequence
  MKO10074206_B_Bend7
  gRNA
acgccccacgtgaattagag

SEQ ID NO: 74207 - DNA, 20 bp, Artificial Sequence
  MKO10074207_B_Bend7
  gRNA
tcacgcttaggagaacttcc

SEQ ID NO: 74208 - DNA, 20 bp, Artificial Sequence
  MKO10074208_B_Bend7
  gRNA
tgcagagcgcacctccaccg

SEQ ID NO: 74209 - DNA, 20 bp, Artificial Sequence
  MKO10074209_B_Best1
  gRNA
ggggcgctcacccagaacga

SEQ ID NO: 74210 - DNA, 20 bp, Artificial Sequence
  MKO10074210_B_Best1
  gRNA
ccggattcgacctccaagat

SEQ ID NO: 74211 - DNA, 20 bp, Artificial Sequence
  MKO10074211_B_Best1
  gRNA
cgactggataagtatcccat

SEQ ID NO: 74212 - DNA, 20 bp, Artificial Sequence
  MKO10074212_B_Best2
  gRNA
catacccctcgtctacaccc

SEQ ID NO: 74213 - DNA, 20 bp, Artificial Sequence
  MKO10074213_B_Best2
  gRNA
atccccgtctctttcgtact

SEQ ID NO: 74214 - DNA, 20 bp, Artificial Sequence
  MKO10074214_B_Best2
  gRNA
attcgtcctacaacaaatac

SEQ ID NO: 74215 - DNA, 20 bp, Artificial Sequence
  MKO10074215_B_Best3
  gRNA
acttcagatgaggcgatttg

SEQ ID NO: 74216 - DNA, 20 bp, Artificial Sequence
  MKO10074216_B_Best3
  gRNA
aatcgcctcatctgaagtac

SEQ ID NO: 74217 - DNA, 20 bp, Artificial Sequence
  MKO10074217_B_Best3
  gRNA
cccagtcgtaaccaaataag

SEQ ID NO: 74218 - DNA, 20 bp, Artificial Sequence
  MKO10074218_B_Bet1l
  gRNA
accactgaccgatttaagcc

SEQ ID NO: 74219 - DNA, 20 bp, Artificial Sequence
  MKO10074219_B_Bet1l
  gRNA
ttaccatgccgtctaagtaa

SEQ ID NO: 74220 - DNA, 20 bp, Artificial Sequence
  MKO10074220_B_Bet1l
  gRNA
tggagggcgcgatggcagat

SEQ ID NO: 74221 - DNA, 20 bp, Artificial Sequence
  MKO10074221_B_Bet1
  gRNA
gtaggtgatggagcacctcc

SEQ ID NO: 74222 - DNA, 20 bp, Artificial Sequence
  MKO10074222_B_Bet1
  gRNA
caaaatcttcagtcttccca

SEQ ID NO: 74223 - DNA, 20 bp, Artificial Sequence
  MKO10074223_B_Bet1
  gRNA
tcatagctttccattgaaat

SEQ ID NO: 74224 - DNA, 20 bp, Artificial Sequence
  MKO10074224_B_Bex1
  gRNA
gtaatggagtccaaagatca

SEQ ID NO: 74225 - DNA, 20 bp, Artificial Sequence
  MKO10074225_B_Bex1
  gRNA
agctgtggccctgacctccg

SEQ ID NO: 74226 - DNA, 20 bp, Artificial Sequence
  MKO10074226_B_Bex1
  gRNA
cacagctggctcccttctga

SEQ ID NO: 74227 - DNA, 20 bp, Artificial Sequence
  MKO10074227_B_Bex2
  gRNA
tttcacgccttgttccactt

SEQ ID NO: 74228 - DNA, 20 bp, Artificial Sequence
  MKO10074228_B_Bex2
  gRNA
agccacaggatgctagcaaa

SEQ ID NO: 74229 - DNA, 20 bp, Artificial Sequence
  MKO10074229_B_Bex2
  gRNA
agcccatcgtgcactacaga

SEQ ID NO: 74230 - DNA, 20 bp, Artificial Sequence
  MKO10074230_B_Bex4
  gRNA
agcagcaggtgaggccttac

SEQ ID NO: 74231 - DNA, 20 bp, Artificial Sequence
  MKO10074231_B_Bex4
  gRNA
caaaagtcgtaatgattgtc

SEQ ID NO: 74232 - DNA, 20 bp, Artificial Sequence
  MKO10074232_B_Bex4
  gRNA
aaagacaaaaaagacaaaaa

SEQ ID NO: 74233 - DNA, 20 bp, Artificial Sequence
  MKO10074233_B_Bex6
  gRNA
ggattcttcttcactgtgtc

SEQ ID NO: 74234 - DNA, 20 bp, Artificial Sequence
  MKO10074234_B_Bex6
  gRNA
agtcatacaagatctcactg

SEQ ID NO: 74235 - DNA, 20 bp, Artificial Sequence
  MKO10074235_B_Bex6
  gRNA
ttgtatgacttgtttgactt

SEQ ID NO: 74236 - DNA, 20 bp, Artificial Sequence
  MKO10074236_B_Bfar
  gRNA
aactcgctcacagaaatctg

SEQ ID NO: 74237 - DNA, 20 bp, Artificial Sequence
  MKO10074237_B_Bfar
  gRNA
tcacacgctccagctccgtg

SEQ ID NO: 74238 - DNA, 20 bp, Artificial Sequence
  MKO10074238_B_Bfar
  gRNA
caggtatagcaagccaagtc

SEQ ID NO: 74239 - DNA, 20 bp, Artificial Sequence
  MKO10074239_B_Bfsp1
  gRNA
ggctgccctgcagaaccagc

SEQ ID NO: 74240 - DNA, 20 bp, Artificial Sequence
  MKO10074240_B_Bfsp1
  gRNA
agaggcagtcacccacctgc

SEQ ID NO: 74241 - DNA, 20 bp, Artificial Sequence
  MKO10074241_B_Bfsp1
  gRNA
cctccctcatcccagtaacc

SEQ ID NO: 74242 - DNA, 20 bp, Artificial Sequence
  MKO10074242_B_Bfsp2
  gRNA
atgaaaacgagcagccattc

SEQ ID NO: 74243 - DNA, 20 bp, Artificial Sequence
  MKO10074243_B_Bfsp2
  gRNA
cttcatcgatgactttgtac

SEQ ID NO: 74244 - DNA, 20 bp, Artificial Sequence
  MKO10074244_B_Bfsp2
  gRNA
aggctgtcctagaaaacgcc

SEQ ID NO: 74245 - DNA, 20 bp, Artificial Sequence
  MKO10074245_B_Bglap2
  gRNA
cagagagacagagcgcagcc

SEQ ID NO: 74246 - DNA, 20 bp, Artificial Sequence
  MKO10074246_B_Bglap2
  gRNA
tttacagatgccaagcccag

SEQ ID NO: 74247 - DNA, 20 bp, Artificial Sequence
  MKO10074247_B_Bglap2
  gRNA
cacagccttcatgtccaagc

SEQ ID NO: 74248 - DNA, 20 bp, Artificial Sequence
  MKO10074248_B_Bglap3
  gRNA
cctctctctgctcactctgc

SEQ ID NO: 74249 - DNA, 20 bp, Artificial Sequence
  MKO10074249_B_Bglap3
  gRNA
cagagagacagagcgcagcc

SEQ ID NO: 74250 - DNA, 20 bp, Artificial Sequence
  MKO10074250_B_Bglap3
  gRNA
ccagtacctttgtcagactc

SEQ ID NO: 74251 - DNA, 20 bp, Artificial Sequence
  MKO10074251_B_Bglap
  gRNA
tttacagatgccaagcccag

SEQ ID NO: 74252 - DNA, 20 bp, Artificial Sequence
  MKO10074252_B_Bglap
  gRNA
ccagtacctttgtcagactc

SEQ ID NO: 74253 - DNA, 20 bp, Artificial Sequence
  MKO10074253_B_Bglap
  gRNA
cacagccttcatgtccaagc

SEQ ID NO: 74254 - DNA, 20 bp, Artificial Sequence
  MKO10074254_B_Bgn
  gRNA
ggtccaggtgaagttcgttc

SEQ ID NO: 74255 - DNA, 20 bp, Artificial Sequence
  MKO10074255_B_Bgn
  gRNA
ggaggcttacgtagaggtgc

SEQ ID NO: 74256 - DNA, 20 bp, Artificial Sequence
  MKO10074256_B_Bgn
  gRNA
agagatgggcgggaatcccc

SEQ ID NO: 74257 - DNA, 20 bp, Artificial Sequence
  MKO10074257_B_Bhlha15
  gRNA
tctgtgtagagtagcgttgc

SEQ ID NO: 74258 - DNA, 20 bp, Artificial Sequence
  MKO10074258_B_Bhlha15
  gRNA
gtgttcggcgccgagggggc

SEQ ID NO: 74259 - DNA, 20 bp, Artificial Sequence
  MKO10074259_B_Bhlha15
  gRNA
cagcgtgagggtctcgatct

SEQ ID NO: 74260 - DNA, 20 bp, Artificial Sequence
  MKO10074260_B_Bhlha9
  gRNA
aggcgttcaacgcgctccgc

SEQ ID NO: 74261 - DNA, 20 bp, Artificial Sequence
  MKO10074261_B_Bhlha9
  gRNA
ataggagacggcgctgaccg

SEQ ID NO: 74262 - DNA, 20 bp, Artificial Sequence
  MKO10074262_B_Bhlha9
  gRNA
acggtccaaggctcggcgca

SEQ ID NO: 74263 - DNA, 20 bp, Artificial Sequence
  MKO10074263_B_Bhlhb9
  gRNA
actggtccgaggtaactata

SEQ ID NO: 74264 - DNA, 20 bp, Artificial Sequence
  MKO10074264_B_Bhlhb9
  gRNA
cgggctcctcagcacgagcc

SEQ ID NO: 74265 - DNA, 20 bp, Artificial Sequence
  MKO10074265_B_Bhlhb9
  gRNA
ccagaaccagttatcactac

SEQ ID NO: 74266 - DNA, 20 bp, Artificial Sequence
  MKO10074266_B_Bhlhe22
  gRNA
ttcgagcccgctgatcccga

SEQ ID NO: 74267 - DNA, 20 bp, Artificial Sequence
  MKO10074267_B_Bhlhe22
  gRNA
ccccgacccgcgggcatcgc

SEQ ID NO: 74268 - DNA, 20 bp, Artificial Sequence
  MKO10074268_B_Bhlhe22
  gRNA
gctcatccagagcgtcgttc

SEQ ID NO: 74269 - DNA, 20 bp, Artificial Sequence
  MKO10074269_B_Bhlhe23
  gRNA
ccgtgcgtcaaccgcaaccc

SEQ ID NO: 74270 - DNA, 20 bp, Artificial Sequence
  MKO10074270_B_Bhlhe23
  gRNA
ccggagaccacacgcggctt

SEQ ID NO: 74271 - DNA, 20 bp, Artificial Sequence
  MKO10074271_B_Bhlhe23
  gRNA
gccgcgcctctaacgccctt

SEQ ID NO: 74272 - DNA, 20 bp, Artificial Sequence
  MKO10074272_B_Bhlhe40
  gRNA
acattcgtccctcgactctt

SEQ ID NO: 74273 - DNA, 20 bp, Artificial Sequence
  MKO10074273_B_Bhlhe40
  gRNA
aaacttacaaactgccgcac

SEQ ID NO: 74274 - DNA, 20 bp, Artificial Sequence
  MKO10074274_B_Bhlhe40
  gRNA
tgtaccaagtgtacaagtcc

SEQ ID NO: 74275 - DNA, 20 bp, Artificial Sequence
  MKO10074275_B_Bhlhe41
  gRNA
gtctcgcttcaagctccttt

SEQ ID NO: 74276 - DNA, 20 bp, Artificial Sequence
  MKO10074276_B_Bhlhe41
  gRNA
actgcagacactggggcatt

SEQ ID NO: 74277 - DNA, 20 bp, Artificial Sequence
  MKO10074277_B_Bhlhe41
  gRNA
gagcaatgcattcattaatt

SEQ ID NO: 74278 - DNA, 20 bp, Artificial Sequence
  MKO10074278_B_Bhmt2
  gRNA
ggatgttctaccactgcttc

SEQ ID NO: 74279 - DNA, 20 bp, Artificial Sequence
  MKO10074279_B_Bhmt2
  gRNA
ttctgctactgaagacaata

SEQ ID NO: 74280 - DNA, 20 bp, Artificial Sequence
  MKO10074280_B_Bhmt2
  gRNA
aaagagaggcttcgtgaagg

SEQ ID NO: 74281 - DNA, 20 bp, Artificial Sequence
  MKO10074281_B_Bhmt
  gRNA
tctcagttcgtcagcttcat

SEQ ID NO: 74282 - DNA, 20 bp, Artificial Sequence
  MKO10074282_B_Bhmt
  gRNA
ccttgctcacctctgcaatg

SEQ ID NO: 74283 - DNA, 20 bp, Artificial Sequence
  MKO10074283_B_Bhmt
  gRNA
acctgctttcaccagacgca

SEQ ID NO: 74284 - DNA, 20 bp, Artificial Sequence
  MKO10074284_B_Bicc1
  gRNA
atcggggctaaatccaagaa

SEQ ID NO: 74285 - DNA, 20 bp, Artificial Sequence
  MKO10074285_B_Bicc1
  gRNA
ttatttacagctgcagctga

SEQ ID NO: 74286 - DNA, 20 bp, Artificial Sequence
  MKO10074286_B_Bicc1
  gRNA
ctttccagatccccacatca

SEQ ID NO: 74287 - DNA, 20 bp, Artificial Sequence
  MKO10074287_B_Bicd1
  gRNA
tgcaatctctttcagtcgaa

SEQ ID NO: 74288 - DNA, 20 bp, Artificial Sequence
  MKO10074288_B_Bicd1
  gRNA
tatccaccgtaaagtagctg

SEQ ID NO: 74289 - DNA, 20 bp, Artificial Sequence
  MKO10074289_B_Bicd1
  gRNA
cctcccggaatttatattct

SEQ ID NO: 74290 - DNA, 20 bp, Artificial Sequence
  MKO10074290_B_Bicd2
  gRNA
actccttgatgtcatcccgc

SEQ ID NO: 74291 - DNA, 20 bp, Artificial Sequence
  MKO10074291_B_Bicd2
  gRNA
gaatgagcgcctcacgtctg

SEQ ID NO: 74292 - DNA, 20 bp, Artificial Sequence
  MKO10074292_B_Bicd2
  gRNA
agatccagcgtggtcgcctg

SEQ ID NO: 74293 - DNA, 20 bp, Artificial Sequence
  MKO10074293_B_Bid
  gRNA
ctgtgatgtgctcggccccc

SEQ ID NO: 74294 - DNA, 20 bp, Artificial Sequence
  MKO10074294_B_Bid
  gRNA
taataaagttgacagtcgtg

SEQ ID NO: 74295 - DNA, 20 bp, Artificial Sequence
  MKO10074295_B_Bid
  gRNA
tctaaccaagttcctcacat

SEQ ID NO: 74296 - DNA, 20 bp, Artificial Sequence
  MKO10074296_B_Bik
  gRNA
gactcgctgtcacctacagc

SEQ ID NO: 74297 - DNA, 20 bp, Artificial Sequence
  MKO10074297_B_Bik
  gRNA
caagactgttccacacgacc

SEQ ID NO: 74298 - DNA, 20 bp, Artificial Sequence
  MKO10074298_B_Bik
  gRNA
aaggtgcttacccaggcgcc

SEQ ID NO: 74299 - DNA, 20 bp, Artificial Sequence
  MKO10074299_B_Bin1
  gRNA
gtgtatgagcccgagtggcc

SEQ ID NO: 74300 - DNA, 20 bp, Artificial Sequence
  MKO10074300_B_Bin1
  gRNA
cagcttcttctgtacgttgc

SEQ ID NO: 74301 - DNA, 20 bp, Artificial Sequence
  MKO10074301_B_Bin1
  gRNA
gcggcaggtcctgcagaaac

SEQ ID NO: 74302 - DNA, 20 bp, Artificial Sequence
  MKO10074302_B_Bin2
  gRNA
acccacctttgactgcacta

SEQ ID NO: 74303 - DNA, 20 bp, Artificial Sequence
  MKO10074303_B_Bin2
  gRNA
gtctacagcagcgactggga

SEQ ID NO: 74304 - DNA, 20 bp, Artificial Sequence
  MKO10074304_B_Bin2
  gRNA
cgctgctgtagacctcctgc

SEQ ID NO: 74305 - DNA, 20 bp, Artificial Sequence
  MKO10074305_B_Bin3
  gRNA
tacaggattccatttaagat

SEQ ID NO: 74306 - DNA, 20 bp, Artificial Sequence
  MKO10074306_B_Bin3
  gRNA
ggtcaccttctcctggttga

SEQ ID NO: 74307 - DNA, 20 bp, Artificial Sequence
  MKO10074307_B_Bin3
  gRNA
aggtggagagagactttgaa

SEQ ID NO: 74308 - DNA, 20 bp, Artificial Sequence
  MKO10074308_B_Birc2
  gRNA
tactgagacaatatcattga

SEQ ID NO: 74309 - DNA, 20 bp, Artificial Sequence
  MKO10074309_B_Birc2
  gRNA
atatcctcatcttcttgagc

SEQ ID NO: 74310 - DNA, 20 bp, Artificial Sequence
  MKO10074310_B_Birc2
  gRNA
gaagaaaatgctgaccctac

SEQ ID NO: 74311 - DNA, 20 bp, Artificial Sequence
  MKO10074311_B_Birc3
  gRNA
cctacctgctcaagtagatg

SEQ ID NO: 74312 - DNA, 20 bp, Artificial Sequence
  MKO10074312_B_Birc3
  gRNA
gcagatggagcaggcggccg

SEQ ID NO: 74313 - DNA, 20 bp, Artificial Sequence
  MKO10074313_B_Birc3
  gRNA
gggctgaggtgctgggaatc

SEQ ID NO: 74314 - DNA, 20 bp, Artificial Sequence
  MKO10074314_B_Birc5
  gRNA
ccagctgctcaattgactga

SEQ ID NO: 74315 - DNA, 20 bp, Artificial Sequence
  MKO10074315_B_Birc5
  gRNA
actcactcgctctggggtgc

SEQ ID NO: 74316 - DNA, 20 bp, Artificial Sequence
  MKO10074316_B_Birc5
  gRNA
ccgtcagtcaattgagcagc

SEQ ID NO: 74317 - DNA, 20 bp, Artificial Sequence
  MKO10074317_B_Birc6
  gRNA
atagacttcaatacgtgatg

SEQ ID NO: 74318 - DNA, 20 bp, Artificial Sequence
  MKO10074318_B_Birc6
  gRNA
gctggaacttcccgtcacag

SEQ ID NO: 74319 - DNA, 20 bp, Artificial Sequence
  MKO10074319_B_Birc6
  gRNA
gatagatgtttctagtacag

SEQ ID NO: 74320 - DNA, 20 bp, Artificial Sequence
  MKO10074320_B_Birc7
  gRNA
gcccttacctgggaaaccat

SEQ ID NO: 74321 - DNA, 20 bp, Artificial Sequence
  MKO10074321_B_Birc7
  gRNA
cttctggatctgagtaactc

SEQ ID NO: 74322 - DNA, 20 bp, Artificial Sequence
  MKO10074322_B_Birc7
  gRNA
cctggctcactgacatcttc

SEQ ID NO: 74323 - DNA, 20 bp, Artificial Sequence
  MKO10074323_B_Bivm
  gRNA
cccacctattacccaagaag

SEQ ID NO: 74324 - DNA, 20 bp, Artificial Sequence
  MKO10074324_B_Bivm
  gRNA
ccacatgaagtcttgtactg

SEQ ID NO: 74325 - DNA, 20 bp, Artificial Sequence
  MKO10074325_B_Bivm
  gRNA
tatgttctatataagcccca

SEQ ID NO: 74326 - DNA, 20 bp, Artificial Sequence
  MKO10074326_B_Blcap
  gRNA
ctgctccgattccccacttc

SEQ ID NO: 74327 - DNA, 20 bp, Artificial Sequence
  MKO10074327_B_Blcap
  gRNA
acgttaggtgcccacaacac

SEQ ID NO: 74328 - DNA, 20 bp, Artificial Sequence
  MKO10074328_B_Blcap
  gRNA
agcccctcaaccccgctctg

SEQ ID NO: 74329 - DNA, 20 bp, Artificial Sequence
  MKO10074329_B_Blk
  gRNA
tcttcctgtgacgagtgacc

SEQ ID NO: 74330 - DNA, 20 bp, Artificial Sequence
  MKO10074330_B_Blk
  gRNA
aaatttacctcctcaagacc

SEQ ID NO: 74331 - DNA, 20 bp, Artificial Sequence
  MKO10074331_B_Blk
  gRNA
tcagccggaaggatgctgag

SEQ ID NO: 74332 - DNA, 20 bp, Artificial Sequence
  MKO10074332_B_Blmh
  gRNA
gtttcaacacgttgtgcctc

SEQ ID NO: 74333 - DNA, 20 bp, Artificial Sequence
  MKO10074333_B_Blmh
  gRNA
gatatgcttgtcaatattgt

SEQ ID NO: 74334 - DNA, 20 bp, Artificial Sequence
  MKO10074334_B_Blmh
  gRNA
cttatgaaccctacaaatga

SEQ ID NO: 74335 - DNA, 20 bp, Artificial Sequence
  MKO10074335_B_Blm
  gRNA
tgttcttgtagattgttcag

SEQ ID NO: 74336 - DNA, 20 bp, Artificial Sequence
  MKO10074336_B_Blm
  gRNA
cataccatcacagtctttac

SEQ ID NO: 74337 - DNA, 20 bp, Artificial Sequence
  MKO10074337_B_Blm
  gRNA
cttcctcgttgaaatgttcc

SEQ ID NO: 74338 - DNA, 20 bp, Artificial Sequence
  MKO10074338_B_Blnk
  gRNA
tacatactcgcccctcgtga

SEQ ID NO: 74339 - DNA, 20 bp, Artificial Sequence
  MKO10074339_B_Blnk
  gRNA
ttacagacagcttcaaaaga

SEQ ID NO: 74340 - DNA, 20 bp, Artificial Sequence
  MKO10074340_B_Blnk
  gRNA
catgatattaagaacaatga

SEQ ID NO: 74341 - DNA, 20 bp, Artificial Sequence
  MKO10074341_B_Bloc1s1
  gRNA
ctgggctaggagcatcgagc

SEQ ID NO: 74342 - DNA, 20 bp, Artificial Sequence
  MKO10074342_B_Bloc1s1
  gRNA
gtagacgtattccagcgcag

SEQ ID NO: 74343 - DNA, 20 bp, Artificial Sequence
  MKO10074343_B_Bloc1s1
  gRNA
cttggtgttctttgagcagg

SEQ ID NO: 74344 - DNA, 20 bp, Artificial Sequence
  MKO10074344_B_Bloc1s2
  gRNA
cagtgaagactacaaactcc

SEQ ID NO: 74345 - DNA, 20 bp, Artificial Sequence
  MKO10074345_B_Bloc1s2
  gRNA
atttctggtttaagtccttc

SEQ ID NO: 74346 - DNA, 20 bp, Artificial Sequence
  MKO10074346_B_Bloc1s2
  gRNA
tgctgaactacagccatatc

SEQ ID NO: 74347 - DNA, 20 bp, Artificial Sequence
  MKO10074347_B_Bloc1s3
  gRNA
ccgccgtgcgggtcgcgatg

SEQ ID NO: 74348 - DNA, 20 bp, Artificial Sequence
  MKO10074348_B_Bloc1s3
  gRNA
tcaccgcagccgctacgtcg

SEQ ID NO: 74349 - DNA, 20 bp, Artificial Sequence
  MKO10074349_B_Bloc1s3
  gRNA
agccgcccacagcgtgcgcc

SEQ ID NO: 74350 - DNA, 20 bp, Artificial Sequence
  MKO10074350_B_Bloc1s4
  gRNA
ccgctccacgcggcgcccaa

SEQ ID NO: 74351 - DNA, 20 bp, Artificial Sequence
  MKO10074351_B_Bloc1s4
  gRNA
tcggggccgtcatcgtccca

SEQ ID NO: 74352 - DNA, 20 bp, Artificial Sequence
  MKO10074352_B_Bloc1s4
  gRNA
cgtgccccggatccacgcta

SEQ ID NO: 74353 - DNA, 20 bp, Artificial Sequence
  MKO10074353_B_Bloc1s5
  gRNA
cgctcacgaactcctcccac

SEQ ID NO: 74354 - DNA, 20 bp, Artificial Sequence
  MKO10074354_B_Bloc1s5
  gRNA
gatcacagaccagttaccca

SEQ ID NO: 74355 - DNA, 20 bp, Artificial Sequence
  MKO10074355_B_Bloc1s5
  gRNA
atcttggagagattcattcc

SEQ ID NO: 74356 - DNA, 20 bp, Artificial Sequence
  MKO10074356_B_Bloc1s6
  gRNA
agcgacacgtctccagatga

SEQ ID NO: 74357 - DNA, 20 bp, Artificial Sequence
  MKO10074357_B_Bloc1s6
  gRNA
agttgtgttactagatacac

SEQ ID NO: 74358 - DNA, 20 bp, Artificial Sequence
  MKO10074358_B_Bloc1s6
  gRNA
gtgtatctagtaacacaact

SEQ ID NO: 74359 - DNA, 20 bp, Artificial Sequence
  MKO10074359_B_Blvra
  gRNA
aaaggatctcttcgcttcac

SEQ ID NO: 74360 - DNA, 20 bp, Artificial Sequence
  MKO10074360_B_Blvra
  gRNA
ttctgaaacagacgagaact

SEQ ID NO: 74361 - DNA, 20 bp, Artificial Sequence
  MKO10074361_B_Blvra
  gRNA
ccagccacgaagactatata

SEQ ID NO: 74362 - DNA, 20 bp, Artificial Sequence
  MKO10074362_B_Blvrb
  gRNA
ggtgtgtccgtcatactcat

SEQ ID NO: 74363 - DNA, 20 bp, Artificial Sequence
  MKO10074363_B_Blvrb
  gRNA
tcccactacagtaatgtccg

SEQ ID NO: 74364 - DNA, 20 bp, Artificial Sequence
  MKO10074364_B_Blvrb
  gRNA
tgctggttcgagactccagc

SEQ ID NO: 74365 - DNA, 20 bp, Artificial Sequence
  MKO10074365_B_Blzf1
  gRNA
atcactttgaacgtctagcc

SEQ ID NO: 74366 - DNA, 20 bp, Artificial Sequence
  MKO10074366_B_Blzf1
  gRNA
agatgcccagagcgctatcc

SEQ ID NO: 74367 - DNA, 20 bp, Artificial Sequence
  MKO10074367_B_Blzf1
  gRNA
cttacttcgaccccaatccg

SEQ ID NO: 74368 - DNA, 20 bp, Artificial Sequence
  MKO10074368_B_Bmf
  gRNA
gtattgcagaccagttccat

SEQ ID NO: 74369 - DNA, 20 bp, Artificial Sequence
  MKO10074369_B_Bmf
  gRNA
gaagagctggagtcgactga

SEQ ID NO: 74370 - DNA, 20 bp, Artificial Sequence
  MKO10074370_B_Bmf
  gRNA
cccccgagtgttcttcaccc

SEQ ID NO: 74371 - DNA, 20 bp, Artificial Sequence
  MKO10074371_B_Bmi1
  gRNA
aatggctccaatgaagaccg

SEQ ID NO: 74372 - DNA, 20 bp, Artificial Sequence
  MKO10074372_B_Bmi1
  gRNA
ttgagttctttgatcagagc

SEQ ID NO: 74373 - DNA, 20 bp, Artificial Sequence
  MKO10074373_B_Bmi1
  gRNA
caaaatttaccatcagctga

SEQ ID NO: 74374 - DNA, 20 bp, Artificial Sequence
  MKO10074374_B_Bmp10
  gRNA
cagaagccgagtgagccacc

SEQ ID NO: 74375 - DNA, 20 bp, Artificial Sequence
  MKO10074375_B_Bmp10
  gRNA
cccactatacatcgacttca

SEQ ID NO: 74376 - DNA, 20 bp, Artificial Sequence
  MKO10074376_B_Bmp10
  gRNA
tccttgaagtcgatgtatag

SEQ ID NO: 74377 - DNA, 20 bp, Artificial Sequence
  MKO10074377_B_Bmp15
  gRNA
tgtactcgggtattacccta

SEQ ID NO: 74378 - DNA, 20 bp, Artificial Sequence
  MKO10074378_B_Bmp15
  gRNA
gcaatgtagggtcgtcagca

SEQ ID NO: 74379 - DNA, 20 bp, Artificial Sequence
  MKO10074379_B_Bmp15
  gRNA
atgagactcgtgagttccgg

SEQ ID NO: 74380 - DNA, 20 bp, Artificial Sequence
  MKO10074380_B_Bmp1
  gRNA
gcactagtggacagccgcag

SEQ ID NO: 74381 - DNA, 20 bp, Artificial Sequence
  MKO10074381_B_Bmp1
  gRNA
tccctgctcacccgcagggt

SEQ ID NO: 74382 - DNA, 20 bp, Artificial Sequence
  MKO10074382_B_Bmp1
  gRNA
gtacgcgagaacatacagcc

SEQ ID NO: 74383 - DNA, 20 bp, Artificial Sequence
  MKO10074383_B_Bmp2k
  gRNA
ccgacctcaacatttgtaaa

SEQ ID NO: 74384 - DNA, 20 bp, Artificial Sequence
  MKO10074384_B_Bmp2k
  gRNA
atcttaatggaatattgtcg

SEQ ID NO: 74385 - DNA, 20 bp, Artificial Sequence
  MKO10074385_B_Bmp2k
  gRNA
gatttgtaggacttctgact

SEQ ID NO: 74386 - DNA, 20 bp, Artificial Sequence
  MKO10074386_B_Bmp2
  gRNA
ttaaattgaagaagaagcgc

SEQ ID NO: 74387 - DNA, 20 bp, Artificial Sequence
  MKO10074387_B_Bmp2
  gRNA
gggcaccacgacgtccttgc

SEQ ID NO: 74388 - DNA, 20 bp, Artificial Sequence
  MKO10074388_B_Bmp2
  gRNA
gtcttccgaaggccgggaca

SEQ ID NO: 74389 - DNA, 20 bp, Artificial Sequence
  MKO10074389_B_Bmp3
  gRNA
gagcacacgagctacccaag

SEQ ID NO: 74390 - DNA, 20 bp, Artificial Sequence
  MKO10074390_B_Bmp3
  gRNA
ccaccgctcgcactatgctc

SEQ ID NO: 74391 - DNA, 20 bp, Artificial Sequence
  MKO10074391_B_Bmp3
  gRNA
catccagagcatagtgcgag

SEQ ID NO: 74392 - DNA, 20 bp, Artificial Sequence
  MKO10074392_B_Bmp4
  gRNA
atcagccgatcgttacctca

SEQ ID NO: 74393 - DNA, 20 bp, Artificial Sequence
  MKO10074393_B_Bmp4
  gRNA
gaaaaaagtcgccgagattc

SEQ ID NO: 74394 - DNA, 20 bp, Artificial Sequence
  MKO10074394_B_Bmp4
  gRNA
gtgtcgcctcgaagtcccgc

SEQ ID NO: 74395 - DNA, 20 bp, Artificial Sequence
  MKO10074395_B_Bmp5
  gRNA
aagacacaagctttagatgt

SEQ ID NO: 74396 - DNA, 20 bp, Artificial Sequence
  MKO10074396_B_Bmp5
  gRNA
ttctatcttacctccagcac

SEQ ID NO: 74397 - DNA, 20 bp, Artificial Sequence
  MKO10074397_B_Bmp5
  gRNA
ttcccttgtccttataaatc

SEQ ID NO: 74398 - DNA, 20 bp, Artificial Sequence
  MKO10074398_B_Bmp6
  gRNA
tcctctagtggagtacgaca

SEQ ID NO: 74399 - DNA, 20 bp, Artificial Sequence
  MKO10074399_B_Bmp6
  gRNA
gccgtcaccgcctcaccctc

SEQ ID NO: 74400 - DNA, 20 bp, Artificial Sequence
  MKO10074400_B_Bmp6
  gRNA
ggtgacaccgcagcacaaca

SEQ ID NO: 74401 - DNA, 20 bp, Artificial Sequence
  MKO10074401_B_Bmp7
  gRNA
ggagtcggacctcttcttgc

SEQ ID NO: 74402 - DNA, 20 bp, Artificial Sequence
  MKO10074402_B_Bmp7
  gRNA
gctgcgctgcttgccccccg

SEQ ID NO: 74403 - DNA, 20 bp, Artificial Sequence
  MKO10074403_B_Bmp7
  gRNA
ggtcaaccctcggcacaacc

SEQ ID NO: 74404 - DNA, 20 bp, Artificial Sequence
  MKO10074404_B_Bmp8a
  gRNA
gggcagcgagaccactgaag

SEQ ID NO: 74405 - DNA, 20 bp, Artificial Sequence
  MKO10074405_B_Bmp8a
  gRNA
catccgcggtttccacatag

SEQ ID NO: 74406 - DNA, 20 bp, Artificial Sequence
  MKO10074406_B_Bmp8a
  gRNA
tgtgttgagcgggtgggtgc

SEQ ID NO: 74407 - DNA, 20 bp, Artificial Sequence
  MKO10074407_B_Bmp8b
  gRNA
cttctctgccgtgagaaccg

SEQ ID NO: 74408 - DNA, 20 bp, Artificial Sequence
  MKO10074408_B_Bmp8b
  gRNA
catcctcggtttccacatag

SEQ ID NO: 74409 - DNA, 20 bp, Artificial Sequence
  MKO10074409_B_Bmp8b
  gRNA
tgtgttgagcgggtgggtac

SEQ ID NO: 74410 - DNA, 20 bp, Artificial Sequence
  MKO10074410_B_Bmper
  gRNA
tggtcattacctgggcaggt

SEQ ID NO: 74411 - DNA, 20 bp, Artificial Sequence
  MKO10074411_B_Bmper
  gRNA
aaaaatcccgcagagcatca

SEQ ID NO: 74412 - DNA, 20 bp, Artificial Sequence
  MKO10074412_B_Bmper
  gRNA
tgtttaggttgtacccatga

SEQ ID NO: 74413 - DNA, 20 bp, Artificial Sequence
  MKO10074413_B_Bmpr1a
  gRNA
tggagtgactttagcaccag

SEQ ID NO: 74414 - DNA, 20 bp, Artificial Sequence
  MKO10074414_B_Bmpr1a
  gRNA
aatctagatagtatgctcca

SEQ ID NO: 74415 - DNA, 20 bp, Artificial Sequence
  MKO10074415_B_Bmpr1a
  gRNA
catacacccagaagttaatg

SEQ ID NO: 74416 - DNA, 20 bp, Artificial Sequence
  MKO10074416_B_Bmpr1b
  gRNA
ttctagtcctagacatccag

SEQ ID NO: 74417 - DNA, 20 bp, Artificial Sequence
  MKO10074417_B_Bmpr1b
  gRNA
caattgaatgctgcacagaa

SEQ ID NO: 74418 - DNA, 20 bp, Artificial Sequence
  MKO10074418_B_Bmpr1b
  gRNA
ctcttacctctgtccttgag

SEQ ID NO: 74419 - DNA, 20 bp, Artificial Sequence
  MKO10074419_B_Bmpr2
  gRNA
tccaaagggagcacgtgtta

SEQ ID NO: 74420 - DNA, 20 bp, Artificial Sequence
  MKO10074420_B_Bmpr2
  gRNA
tgaaacgataatcattgctt

SEQ ID NO: 74421 - DNA, 20 bp, Artificial Sequence
  MKO10074421_B_Bmpr2
  gRNA
accccaccctcaattcagaa

SEQ ID NO: 74422 - DNA, 20 bp, Artificial Sequence
  MKO10074422_B_Bms1
  gRNA
tatgggagttctcacccatt

SEQ ID NO: 74423 - DNA, 20 bp, Artificial Sequence
  MKO10074423_B_Bms1
  gRNA
agacttacaattattgagtg

SEQ ID NO: 74424 - DNA, 20 bp, Artificial Sequence
  MKO10074424_B_Bms1
  gRNA
ctccatgcaccattccagaa

SEQ ID NO: 74425 - DNA, 20 bp, Artificial Sequence
  MKO10074425_B_Bmx
  gRNA
agccgctccttgtaattatt

SEQ ID NO: 74426 - DNA, 20 bp, Artificial Sequence
  MKO10074426_B_Bmx
  gRNA
aatgggtactgtctctccac

SEQ ID NO: 74427 - DNA, 20 bp, Artificial Sequence
  MKO10074427_B_Bmx
  gRNA
atgcagattgtgtataaaga

SEQ ID NO: 74428 - DNA, 20 bp, Artificial Sequence
  MKO10074428_B_Bmyc
  gRNA
tgccgttagcgaggctcacg

SEQ ID NO: 74429 - DNA, 20 bp, Artificial Sequence
  MKO10074429_B_Bmyc
  gRNA
atacttcatgtgcgacgatg

SEQ ID NO: 74430 - DNA, 20 bp, Artificial Sequence
  MKO10074430_B_Bmyc
  gRNA
cagctcgggcaggtctgcga

SEQ ID NO: 74431 - DNA, 20 bp, Artificial Sequence
  MKO10074431_B_Bnc1
  gRNA
tgttcgcctgaaaatcctat

SEQ ID NO: 74432 - DNA, 20 bp, Artificial Sequence
  MKO10074432_B_Bnc1
  gRNA
accgtcagtgtgaacagtgc

SEQ ID NO: 74433 - DNA, 20 bp, Artificial Sequence
  MKO10074433_B_Bnc1
  gRNA
caactctggcccccctagcg

SEQ ID NO: 74434 - DNA, 20 bp, Artificial Sequence
  MKO10074434_B_Bnc2
  gRNA
cctgcgtcccgtagagcatc

SEQ ID NO: 74435 - DNA, 20 bp, Artificial Sequence
  MKO10074435_B_Bnc2
  gRNA
accctgagggactatgtccg

SEQ ID NO: 74436 - DNA, 20 bp, Artificial Sequence
  MKO10074436_B_Bnc2
  gRNA
tcaggccatccgctgcacat

SEQ ID NO: 74437 - DNA, 20 bp, Artificial Sequence
  MKO10074437_B_Bnip1
  gRNA
aggagctcgaacagtcagca

SEQ ID NO: 74438 - DNA, 20 bp, Artificial Sequence
  MKO10074438_B_Bnip1
  gRNA
cagttcagtaagctcactta

SEQ ID NO: 74439 - DNA, 20 bp, Artificial Sequence
  MKO10074439_B_Bnip1
  gRNA
ggtctgggccaaactctctt

SEQ ID NO: 74440 - DNA, 20 bp, Artificial Sequence
  MKO10074440_B_Bnip2
  gRNA
attgaagcagatacactaga

SEQ ID NO: 74441 - DNA, 20 bp, Artificial Sequence
  MKO10074441_B_Bnip2
  gRNA
tccagcttcatccaaatcat

SEQ ID NO: 74442 - DNA, 20 bp, Artificial Sequence
  MKO10074442_B_Bnip2
  gRNA
gtcttaccaggctgtctgtc

SEQ ID NO: 74443 - DNA, 20 bp, Artificial Sequence
  MKO10074443_B_Bnip3l
  gRNA
ccgactcatgctgtgcatcc

SEQ ID NO: 74444 - DNA, 20 bp, Artificial Sequence
  MKO10074444_B_Bnip3l
  gRNA
agcccttcaccacaagaaga

SEQ ID NO: 74445 - DNA, 20 bp, Artificial Sequence
  MKO10074445_B_Bnip3l
  gRNA
tcagaagaagaagttgtaga

SEQ ID NO: 74446 - DNA, 20 bp, Artificial Sequence
  MKO10074446_B_Bnip3
  gRNA
gaaatagacagccacagctt

SEQ ID NO: 74447 - DNA, 20 bp, Artificial Sequence
  MKO10074447_B_Bnip3
  gRNA
tcagctctgttggtatcttg

SEQ ID NO: 74448 - DNA, 20 bp, Artificial Sequence
  MKO10074448_B_Bnip3
  gRNA
tcctgaagaaaaactcagat

SEQ ID NO: 74449 - DNA, 20 bp, Artificial Sequence
  MKO10074449_B_Bnipl
  gRNA
tgtgtggccagcgccctatg

SEQ ID NO: 74450 - DNA, 20 bp, Artificial Sequence
  MKO10074450_B_Bnipl
  gRNA
acaggaagagagacgttaga

SEQ ID NO: 74451 - DNA, 20 bp, Artificial Sequence
  MKO10074451_B_Bnipl
  gRNA
cccctctagattgcttcctg

SEQ ID NO: 74452 - DNA, 20 bp, Artificial Sequence
  MKO10074452_B_Boc
  gRNA
caccatggatgaacgtgact

SEQ ID NO: 74453 - DNA, 20 bp, Artificial Sequence
  MKO10074453_B_Boc
  gRNA
gcgcacgcgcagcctgtcgc

SEQ ID NO: 74454 - DNA, 20 bp, Artificial Sequence
  MKO10074454_B_Boc
  gRNA
actggtaccgtcccacagtg

SEQ ID NO: 74455 - DNA, 20 bp, Artificial Sequence
  MKO10074455_B_Bod1l
  gRNA
tccatgtatgagttgccaag

SEQ ID NO: 74456 - DNA, 20 bp, Artificial Sequence
  MKO10074456_B_Bod1l
  gRNA
gaatcttctgtcattaccca

SEQ ID NO: 74457 - DNA, 20 bp, Artificial Sequence
  MKO10074457_B_Bod1l
  gRNA
agttgtcgtgtctgagagca

SEQ ID NO: 74458 - DNA, 20 bp, Artificial Sequence
  MKO10074458_B_Bod1
  gRNA
tctccacaggtcaggtatgt

SEQ ID NO: 74459 - DNA, 20 bp, Artificial Sequence
  MKO10074459_B_Bod1
  gRNA
gcagaccttaggaagcatcc

SEQ ID NO: 74460 - DNA, 20 bp, Artificial Sequence
  MKO10074460_B_Bod1
  gRNA
gcctcagcccatttcgcaac

SEQ ID NO: 74461 - DNA, 20 bp, Artificial Sequence
  MKO10074461_B_Bok
  gRNA
gccgcgcgtgcacgtactcc

SEQ ID NO: 74462 - DNA, 20 bp, Artificial Sequence
  MKO10074462_B_Bok
  gRNA
tcttgcgtacaaactccccc

SEQ ID NO: 74463 - DNA, 20 bp, Artificial Sequence
  MKO10074463_B_Bok
  gRNA
ggcacgctctggagcgctcc

SEQ ID NO: 74464 - DNA, 20 bp, Artificial Sequence
  MKO10074464_B_Bola1
  gRNA
ggtggtgagctctcgtttcg

SEQ ID NO: 74465 - DNA, 20 bp, Artificial Sequence
  MKO10074465_B_Bola1
  gRNA
agcgcgggatctgcggctgc

SEQ ID NO: 74466 - DNA, 20 bp, Artificial Sequence
  MKO10074466_B_Bola1
  gRNA
ccgcgatacacacgagcgcg

SEQ ID NO: 74467 - DNA, 20 bp, Artificial Sequence
  MKO10074467_B_Bola2
  gRNA
cccctcattcacgccgctgt

SEQ ID NO: 74468 - DNA, 20 bp, Artificial Sequence
  MKO10074468_B_Bola2
  gRNA
cgcgaccagcttccgagtcc

SEQ ID NO: 74469 - DNA, 20 bp, Artificial Sequence
  MKO10074469_B_Bola2
  gRNA
attacctccgcgagaagctg

SEQ ID NO: 74470 - DNA, 20 bp, Artificial Sequence
  MKO10074470_B_Bola3
  gRNA
gccgctgcgcctctgctgcg

SEQ ID NO: 74471 - DNA, 20 bp, Artificial Sequence
  MKO10074471_B_Bola3
  gRNA
cgctgcgcacagtgccacag

SEQ ID NO: 74472 - DNA, 20 bp, Artificial Sequence
  MKO10074472_B_Bola3
  gRNA
gtatgaaattaaaatcgaat

SEQ ID NO: 74473 - DNA, 20 bp, Artificial Sequence
  MKO10074473_B_Boll
  gRNA
tacccttatacttaccataa

SEQ ID NO: 74474 - DNA, 20 bp, Artificial Sequence
  MKO10074474_B_Boll
  gRNA
cctacctgatagtgatatgc

SEQ ID NO: 74475 - DNA, 20 bp, Artificial Sequence
  MKO10074475_B_Boll
  gRNA
acagcctgcatatcactatc

SEQ ID NO: 74476 - DNA, 20 bp, Artificial Sequence
  MKO10074476_B_Bop1
  gRNA
tgaagcctgaatctccgaac

SEQ ID NO: 74477 - DNA, 20 bp, Artificial Sequence
  MKO10074477_B_Bop1
  gRNA
gcggtgacgaagacaaccat

SEQ ID NO: 74478 - DNA, 20 bp, Artificial Sequence
  MKO10074478_B_Bop1
  gRNA
ctctctgaagccggtgtacc

SEQ ID NO: 74479 - DNA, 20 bp, Artificial Sequence
  MKO10074479_B_Bora
  gRNA
cttccctcacagaagtgcaa

SEQ ID NO: 74480 - DNA, 20 bp, Artificial Sequence
  MKO10074480_B_Bora
  gRNA
ttactgggatgaagctctga

SEQ ID NO: 74481 - DNA, 20 bp, Artificial Sequence
  MKO10074481_B_Bora
  gRNA
gtatagaatagataaagatg

SEQ ID NO: 74482 - DNA, 20 bp, Artificial Sequence
  MKO10074482_B_Bpgm
  gRNA
gtccgtcgttgttaagtttc

SEQ ID NO: 74483 - DNA, 20 bp, Artificial Sequence
  MKO10074483_B_Bpgm
  gRNA
cgtgaccccacctcctatag

SEQ ID NO: 74484 - DNA, 20 bp, Artificial Sequence
  MKO10074484_B_Bpgm
  gRNA
gaccagaaacttaacaacga

SEQ ID NO: 74485 - DNA, 20 bp, Artificial Sequence
  MKO10074485_B_Bphl
  gRNA
atgtgaagcgcttcttattt

SEQ ID NO: 74486 - DNA, 20 bp, Artificial Sequence
  MKO10074486_B_Bphl
  gRNA
tccatatcctcgagggtccc

SEQ ID NO: 74487 - DNA, 20 bp, Artificial Sequence
  MKO10074487_B_Bphl
  gRNA
caaggtagtcatatccatac

SEQ ID NO: 74488 - DNA, 20 bp, Artificial Sequence
  MKO10074488_B_Bpifa1
  gRNA
ctccagactttataacatcc

SEQ ID NO: 74489 - DNA, 20 bp, Artificial Sequence
  MKO10074489_B_Bpifa1
  gRNA
ggtgactgcacccactcccc

SEQ ID NO: 74490 - DNA, 20 bp, Artificial Sequence
  MKO10074490_B_Bpifa1
  gRNA
gatccgcagctgctagaact

SEQ ID NO: 74491 - DNA, 20 bp, Artificial Sequence
  MKO10074491_B_Bpifa2
  gRNA
cggttgacaatgtacttgta

SEQ ID NO: 74492 - DNA, 20 bp, Artificial Sequence
  MKO10074492_B_Bpifa2
  gRNA
acccatcatcaacagtattc

SEQ ID NO: 74493 - DNA, 20 bp, Artificial Sequence
  MKO10074493_B_Bpifa2
  gRNA
tgtccctcagaacctgaatc

SEQ ID NO: 74494 - DNA, 20 bp, Artificial Sequence
  MKO10074494_B_Bpifa3
  gRNA
ggtgatgggcaggtgtcgaa

SEQ ID NO: 74495 - DNA, 20 bp, Artificial Sequence
  MKO10074495_B_Bpifa3
  gRNA
acctgactttctaccagatt

SEQ ID NO: 74496 - DNA, 20 bp, Artificial Sequence
  MKO10074496_B_Bpifa3
  gRNA
caacattaccaatgtgcagc

SEQ ID NO: 74497 - DNA, 20 bp, Artificial Sequence
  MKO10074497_B_Bpifa5
  gRNA
atcttgactagagtcattcc

SEQ ID NO: 74498 - DNA, 20 bp, Artificial Sequence
  MKO10074498_B_Bpifa5
  gRNA
caagaccaatttccagtagc

SEQ ID NO: 74499 - DNA, 20 bp, Artificial Sequence
  MKO10074499_B_Bpifa5
  gRNA
cacttaccacaccctgcacc

SEQ ID NO: 74500 - DNA, 20 bp, Artificial Sequence
  MKO10074500_B_Bpifa6
  gRNA
gtcgagttccccagaattca

SEQ ID NO: 74501 - DNA, 20 bp, Artificial Sequence
  MKO10074501_B_Bpifa6
  gRNA
tactgcccggcagctcttca

SEQ ID NO: 74502 - DNA, 20 bp, Artificial Sequence
  MKO10074502_B_Bpifa6
  gRNA
ggtgatacaggattggatgc

SEQ ID NO: 74503 - DNA, 20 bp, Artificial Sequence
  MKO10074503_B_Bpifb1
  gRNA
gcagccttcaacttatgacc

SEQ ID NO: 74504 - DNA, 20 bp, Artificial Sequence
  MKO10074504_B_Bpifb1
  gRNA
gcgcagggtgctctcattgc

SEQ ID NO: 74505 - DNA, 20 bp, Artificial Sequence
  MKO10074505_B_Bpifb1
  gRNA
ttagtccagccaccatgtcc

SEQ ID NO: 74506 - DNA, 20 bp, Artificial Sequence
  MKO10074506_B_Bpifb2
  gRNA
cacgtggcccgggactctat

SEQ ID NO: 74507 - DNA, 20 bp, Artificial Sequence
  MKO10074507_B_Bpifb2
  gRNA
ctttgatgtgctcctgcacc

SEQ ID NO: 74508 - DNA, 20 bp, Artificial Sequence
  MKO10074508_B_Bpifb2
  gRNA
ccctctccagcgggccctgc

SEQ ID NO: 74509 - DNA, 20 bp, Artificial Sequence
  MKO10074509_B_Bpifb3
  gRNA
ccctattctgcaaaacgtgc

SEQ ID NO: 74510 - DNA, 20 bp, Artificial Sequence
  MKO10074510_B_Bpifb3
  gRNA
acacttacccggagccatgc

SEQ ID NO: 74511 - DNA, 20 bp, Artificial Sequence
  MKO10074511_B_Bpifb3
  gRNA
tgttctacgagcccaaagat

SEQ ID NO: 74512 - DNA, 20 bp, Artificial Sequence
  MKO10074512_B_Bpifb4
  gRNA
cagcgctcaatgaccaaccg

SEQ ID NO: 74513 - DNA, 20 bp, Artificial Sequence
  MKO10074513_B_Bpifb4
  gRNA
tgcatgcaggttgcgcatcg

SEQ ID NO: 74514 - DNA, 20 bp, Artificial Sequence
  MKO10074514_B_Bpifb4
  gRNA
acgccttccgctccgccctg

SEQ ID NO: 74515 - DNA, 20 bp, Artificial Sequence
  MKO10074515_B_Bpifb5
  gRNA
ccatcctgatcataccctcc

SEQ ID NO: 74516 - DNA, 20 bp, Artificial Sequence
  MKO10074516_B_Bpifb5
  gRNA
gccaaaccaactgctgaaac

SEQ ID NO: 74517 - DNA, 20 bp, Artificial Sequence
  MKO10074517_B_Bpifb5
  gRNA
agcgcagtgtgatctgcagc

SEQ ID NO: 74518 - DNA, 20 bp, Artificial Sequence
  MKO10074518_B_Bpifb6
  gRNA
atcacattgaactttgtacc

SEQ ID NO: 74519 - DNA, 20 bp, Artificial Sequence
  MKO10074519_B_Bpifb6
  gRNA
actgtccacaaacttgttga

SEQ ID NO: 74520 - DNA, 20 bp, Artificial Sequence
  MKO10074520_B_Bpifb6
  gRNA
ccctcccagtatgaaggtaa

SEQ ID NO: 74521 - DNA, 20 bp, Artificial Sequence
  MKO10074521_B_Bpifb9a
  gRNA
tcactctgcagactgaaggt

SEQ ID NO: 74522 - DNA, 20 bp, Artificial Sequence
  MKO10074522_B_Bpifb9a
  gRNA
acaagtaactttggacgaca

SEQ ID NO: 74523 - DNA, 20 bp, Artificial Sequence
  MKO10074523_B_Bpifb9a
  gRNA
tcatttccttgacatgcatg

SEQ ID NO: 74524 - DNA, 20 bp, Artificial Sequence
  MKO10074524_B_Bpifb9b
  gRNA
tcactctgcagactgaaggt

SEQ ID NO: 74525 - DNA, 20 bp, Artificial Sequence
  MKO10074525_B_Bpifb9b
  gRNA
acaagtaactttggacgaca

SEQ ID NO: 74526 - DNA, 20 bp, Artificial Sequence
  MKO10074526_B_Bpifb9b
  gRNA
tcatttccttgacatgcatg

SEQ ID NO: 74527 - DNA, 20 bp, Artificial Sequence
  MKO10074527_B_Bpifc
  gRNA
tggagccttgacgctccagt

SEQ ID NO: 74528 - DNA, 20 bp, Artificial Sequence
  MKO10074528_B_Bpifc
  gRNA
agtgctctgatgcctacccc

SEQ ID NO: 74529 - DNA, 20 bp, Artificial Sequence
  MKO10074529_B_Bpifc
  gRNA
atcgtcatcccagatttgaa

SEQ ID NO: 74530 - DNA, 20 bp, Artificial Sequence
  MKO10074530_B_Bpi
  gRNA
actgggcagcatctcgatct

SEQ ID NO: 74531 - DNA, 20 bp, Artificial Sequence
  MKO10074531_B_Bpi
  gRNA
ggctgatccgactgttccac

SEQ ID NO: 74532 - DNA, 20 bp, Artificial Sequence
  MKO10074532_B_Bpi
  gRNA
gtcaatgtgactgtcgcagt

SEQ ID NO: 74533 - DNA, 20 bp, Artificial Sequence
  MKO10074533_B_Bpnt1
  gRNA
ttcccgaagctgaccatcat

SEQ ID NO: 74534 - DNA, 20 bp, Artificial Sequence
  MKO10074534_B_Bpnt1
  gRNA
ctcgcagtacagtgctatca

SEQ ID NO: 74535 - DNA, 20 bp, Artificial Sequence
  MKO10074535_B_Bpnt1
  gRNA
cttgatagcactgtactgcg

SEQ ID NO: 74536 - DNA, 20 bp, Artificial Sequence
  MKO10074536_B_Bptf
  gRNA
agtctattagctctgctaac

SEQ ID NO: 74537 - DNA, 20 bp, Artificial Sequence
  MKO10074537_B_Bptf
  gRNA
ctcgtatcatcaccagactg

SEQ ID NO: 74538 - DNA, 20 bp, Artificial Sequence
  MKO10074538_B_Bptf
  gRNA
ggactcggaaacttctccat

SEQ ID NO: 74539 - DNA, 20 bp, Artificial Sequence
  MKO10074539_B_Braf
  gRNA
gcaaatgattaagttgacac

SEQ ID NO: 74540 - DNA, 20 bp, Artificial Sequence
  MKO10074540_B_Braf
  gRNA
tcttcctgcccaacaaacag

SEQ ID NO: 74541 - DNA, 20 bp, Artificial Sequence
  MKO10074541_B_Braf
  gRNA
cttgctggtgtactcttcat

SEQ ID NO: 74542 - DNA, 20 bp, Artificial Sequence
  MKO10074542_B_Brap
  gRNA
catcttcgattgagttgaac

SEQ ID NO: 74543 - DNA, 20 bp, Artificial Sequence
  MKO10074543_B_Brap
  gRNA
cctccctaaaagaagacgtt

SEQ ID NO: 74544 - DNA, 20 bp, Artificial Sequence
  MKO10074544_B_Brap
  gRNA
cgaagatgacgtctgccagc

SEQ ID NO: 74545 - DNA, 20 bp, Artificial Sequence
  MKO10074545_B_Brat1
  gRNA
cgcctgagccccatacaagc

SEQ ID NO: 74546 - DNA, 20 bp, Artificial Sequence
  MKO10074546_B_Brat1
  gRNA
gtctagcctccaactactac

SEQ ID NO: 74547 - DNA, 20 bp, Artificial Sequence
  MKO10074547_B_Brat1
  gRNA
ccctagcgccctgcacttcc

SEQ ID NO: 74548 - DNA, 20 bp, Artificial Sequence
  MKO10074548_B_Brca1
  gRNA
attgtgaaggccctttcttc

SEQ ID NO: 74549 - DNA, 20 bp, Artificial Sequence
  MKO10074549_B_Brca1
  gRNA
tctgatttcaggagcctaca

SEQ ID NO: 74550 - DNA, 20 bp, Artificial Sequence
  MKO10074550_B_Brca1
  gRNA
tcacttacttgcaaaatatg

SEQ ID NO: 74551 - DNA, 20 bp, Artificial Sequence
  MKO10074551_B_Brca2
  gRNA
tgtgtgcaccgcagagtaag

SEQ ID NO: 74552 - DNA, 20 bp, Artificial Sequence
  MKO10074552_B_Brca2
  gRNA
gtactacaacgagaaaagcc

SEQ ID NO: 74553 - DNA, 20 bp, Artificial Sequence
  MKO10074553_B_Brca2
  gRNA
tcactgagacaagatttcag

SEQ ID NO: 74554 - DNA, 20 bp, Artificial Sequence
  MKO10074554_B_Brcc3
  gRNA
tacaggttggctgaactaac

SEQ ID NO: 74555 - DNA, 20 bp, Artificial Sequence
  MKO10074555_B_Brcc3
  gRNA
gccgcaagatgatgacagaa

SEQ ID NO: 74556 - DNA, 20 bp, Artificial Sequence
  MKO10074556_B_Brcc3
  gRNA
gtcccatgagagttgttggc

SEQ ID NO: 74557 - DNA, 20 bp, Artificial Sequence
  MKO10074557_B_Brd1
  gRNA
tggactggagccgccgcaac

SEQ ID NO: 74558 - DNA, 20 bp, Artificial Sequence
  MKO10074558_B_Brd1
  gRNA
agcgacccatcgcagcccct

SEQ ID NO: 74559 - DNA, 20 bp, Artificial Sequence
  MKO10074559_B_Brd1
  gRNA
gagcgtagcagcacagttag

SEQ ID NO: 74560 - DNA, 20 bp, Artificial Sequence
  MKO10074560_B_Brd2
  gRNA
caccgatgatattgtcctaa

SEQ ID NO: 74561 - DNA, 20 bp, Artificial Sequence
  MKO10074561_B_Brd2
  gRNA
agtagcatccatgccacaag

SEQ ID NO: 74562 - DNA, 20 bp, Artificial Sequence
  MKO10074562_B_Brd2
  gRNA
gcaggggccagttgtaaagc

SEQ ID NO: 74563 - DNA, 20 bp, Artificial Sequence
  MKO10074563_B_Brd3
  gRNA
actattgccccctgctccaa

SEQ ID NO: 74564 - DNA, 20 bp, Artificial Sequence
  MKO10074564_B_Brd3
  gRNA
acacggtggggggtatgttc

SEQ ID NO: 74565 - DNA, 20 bp, Artificial Sequence
  MKO10074565_B_Brd3
  gRNA
cacagatgatatagtgctaa

SEQ ID NO: 74566 - DNA, 20 bp, Artificial Sequence
  MKO10074566_B_Brd4
  gRNA
aactgagatcatgatagtcc

SEQ ID NO: 74567 - DNA, 20 bp, Artificial Sequence
  MKO10074567_B_Brd4
  gRNA
accggtgaaggagtctgaag

SEQ ID NO: 74568 - DNA, 20 bp, Artificial Sequence
  MKO10074568_B_Brd4
  gRNA
attaagacgatgtcatctcc

SEQ ID NO: 74569 - DNA, 20 bp, Artificial Sequence
  MKO10074569_B_Brd7
  gRNA
atcttatagggacatgacac

SEQ ID NO: 74570 - DNA, 20 bp, Artificial Sequence
  MKO10074570_B_Brd7
  gRNA
tcgagaccgtgcagagaatg

SEQ ID NO: 74571 - DNA, 20 bp, Artificial Sequence
  MKO10074571_B_Brd7
  gRNA
ccagtccatagaagaactaa

SEQ ID NO: 74572 - DNA, 20 bp, Artificial Sequence
  MKO10074572_B_Brd8
  gRNA
agaactgaagaaagtcataa

SEQ ID NO: 74573 - DNA, 20 bp, Artificial Sequence
  MKO10074573_B_Brd8
  gRNA
aggccggccaggttctgcaa

SEQ ID NO: 74574 - DNA, 20 bp, Artificial Sequence
  MKO10074574_B_Brd8
  gRNA
gtttagcatcttctgtcatg

SEQ ID NO: 74575 - DNA, 20 bp, Artificial Sequence
  MKO10074575_B_Brd9
  gRNA
gaaggaacactgcgactcag

SEQ ID NO: 74576 - DNA, 20 bp, Artificial Sequence
  MKO10074576_B_Brd9
  gRNA
ttcatcgtgccaaagtccat

SEQ ID NO: 74577 - DNA, 20 bp, Artificial Sequence
  MKO10074577_B_Brd9
  gRNA
acgagagcacacctatccag

SEQ ID NO: 74578 - DNA, 20 bp, Artificial Sequence
  MKO10074578_B_Brdt
  gRNA
ctcttggcctttccaacagc

SEQ ID NO: 74579 - DNA, 20 bp, Artificial Sequence
  MKO10074579_B_Brdt
  gRNA
gccacaagaagagcaagttg

SEQ ID NO: 74580 - DNA, 20 bp, Artificial Sequence
  MKO10074580_B_Brdt
  gRNA
aaactgctacttatacaaca

SEQ ID NO: 74581 - DNA, 20 bp, Artificial Sequence
  MKO10074581_B_Bre
  gRNA
gtgccacctgctcaccaaca

SEQ ID NO: 74582 - DNA, 20 bp, Artificial Sequence
  MKO10074582_B_Bre
  gRNA
cattcccacataccttctca

SEQ ID NO: 74583 - DNA, 20 bp, Artificial Sequence
  MKO10074583_B_Bre
  gRNA
agtacaacttggggtacacc

SEQ ID NO: 74584 - DNA, 20 bp, Artificial Sequence
  MKO10074584_B_Brf1
  gRNA
gcggcgccacatccaccacc

SEQ ID NO: 74585 - DNA, 20 bp, Artificial Sequence
  MKO10074585_B_Brf1
  gRNA
tgacctcagcgacttgctcc

SEQ ID NO: 74586 - DNA, 20 bp, Artificial Sequence
  MKO10074586_B_Brf1
  gRNA
ctacctggagcaagtcgctg

SEQ ID NO: 74587 - DNA, 20 bp, Artificial Sequence
  MKO10074587_B_Brf2
  gRNA
gttagtcgctgccagcaacg

SEQ ID NO: 74588 - DNA, 20 bp, Artificial Sequence
  MKO10074588_B_Brf2
  gRNA
actggcgggacgtttcctct

SEQ ID NO: 74589 - DNA, 20 bp, Artificial Sequence
  MKO10074589_B_Brf2
  gRNA
ttgcggctcctccgagctcg

SEQ ID NO: 74590 - DNA, 20 bp, Artificial Sequence
  MKO10074590_B_Bri3bp
  gRNA
cactccctgcacgaaccgct

SEQ ID NO: 74591 - DNA, 20 bp, Artificial Sequence
  MKO10074591_B_Bri3bp
  gRNA
ctgaccgagcggttcgtgca

SEQ ID NO: 74592 - DNA, 20 bp, Artificial Sequence
  MKO10074592_B_Bri3bp
  gRNA
gcagcacccgcaacccggcc

SEQ ID NO: 74593 - DNA, 20 bp, Artificial Sequence
  MKO10074593_B_Bri3
  gRNA
gggatggccccgtagccgtg

SEQ ID NO: 74594 - DNA, 20 bp, Artificial Sequence
  MKO10074594_B_Bri3
  gRNA
ggccacttctgggcgtctta

SEQ ID NO: 74595 - DNA, 20 bp, Artificial Sequence
  MKO10074595_B_Bri3
  gRNA
ggccagggcgactacgcgtg

SEQ ID NO: 74596 - DNA, 20 bp, Artificial Sequence
  MKO10074596_B_Bricd5
  gRNA
gtagggggtcttagtctggg

SEQ ID NO: 74597 - DNA, 20 bp, Artificial Sequence
  MKO10074597_B_Bricd5
  gRNA
ggtagatcagccgctgtctc

SEQ ID NO: 74598 - DNA, 20 bp, Artificial Sequence
  MKO10074598_B_Bricd5
  gRNA
gcccaagagtcacatgtacc

SEQ ID NO: 74599 - DNA, 20 bp, Artificial Sequence
  MKO10074599_B_Brinp1
  gRNA
ggggcactgggtgacggacc

SEQ ID NO: 74600 - DNA, 20 bp, Artificial Sequence
  MKO10074600_B_Brinp1
  gRNA
caaaggagcatccgtctgct

SEQ ID NO: 74601 - DNA, 20 bp, Artificial Sequence
  MKO10074601_B_Brinp1
  gRNA
gccttctcatggtgccatca

SEQ ID NO: 74602 - DNA, 20 bp, Artificial Sequence
  MKO10074602_B_Brinp2
  gRNA
acagttgcattccgggaatg

SEQ ID NO: 74603 - DNA, 20 bp, Artificial Sequence
  MKO10074603_B_Brinp2
  gRNA
ttcccagtgcccccaactac

SEQ ID NO: 74604 - DNA, 20 bp, Artificial Sequence
  MKO10074604_B_Brinp2
  gRNA
tgttacctttatggcccctg

SEQ ID NO: 74605 - DNA, 20 bp, Artificial Sequence
  MKO10074605_B_Brinp3
  gRNA
atggaagggcaattacattc

SEQ ID NO: 74606 - DNA, 20 bp, Artificial Sequence
  MKO10074606_B_Brinp3
  gRNA
cttccgcaacataagacttt

SEQ ID NO: 74607 - DNA, 20 bp, Artificial Sequence
  MKO10074607_B_Brinp3
  gRNA
tctgtgatttgctgtagagt

SEQ ID NO: 74608 - DNA, 20 bp, Artificial Sequence
  MKO10074608_B_Brip1
  gRNA
tacctacagcgacacaaacc

SEQ ID NO: 74609 - DNA, 20 bp, Artificial Sequence
  MKO10074609_B_Brip1
  gRNA
gtgtatagatgcctgtttct

SEQ ID NO: 74610 - DNA, 20 bp, Artificial Sequence
  MKO10074610_B_Brip1
  gRNA
tgctaatgcagaacaaagta

SEQ ID NO: 74611 - DNA, 20 bp, Artificial Sequence
  MKO10074611_B_Brix1
  gRNA
tctctttatagatactaaaa

SEQ ID NO: 74612 - DNA, 20 bp, Artificial Sequence
  MKO10074612_B_Brix1
  gRNA
taaattatttgtgataaatg

SEQ ID NO: 74613 - DNA, 20 bp, Artificial Sequence
  MKO10074613_B_Brix1
  gRNA
ctttgaagctaagaaaaaac

SEQ ID NO: 74614 - DNA, 20 bp, Artificial Sequence
  MKO10074614_B_Brk1
  gRNA
tggtgaatctcccgctgcac

SEQ ID NO: 74615 - DNA, 20 bp, Artificial Sequence
  MKO10074615_B_Brk1
  gRNA
ggtgcagcgggagattcacc

SEQ ID NO: 74616 - DNA, 20 bp, Artificial Sequence
  MKO10074616_B_Brk1
  gRNA
tgatgatctcaatgtactcc

SEQ ID NO: 74617 - DNA, 20 bp, Artificial Sequence
  MKO10074617_B_Brms1l
  gRNA
tacagtccagagtgagcttg

SEQ ID NO: 74618 - DNA, 20 bp, Artificial Sequence
  MKO10074618_B_Brms1l
  gRNA
caagtacgaatgtgaaatcc

SEQ ID NO: 74619 - DNA, 20 bp, Artificial Sequence
  MKO10074619_B_Brms1l
  gRNA
tttagatgagatgtccaacc

SEQ ID NO: 74620 - DNA, 20 bp, Artificial Sequence
  MKO10074620_B_Brms1
  gRNA
tccctctgcagggatctaca

SEQ ID NO: 74621 - DNA, 20 bp, Artificial Sequence
  MKO10074621_B_Brms1
  gRNA
tggatgatgaagactatgag

SEQ ID NO: 74622 - DNA, 20 bp, Artificial Sequence
  MKO10074622_B_Brms1
  gRNA
ctgctgtatgacacactgct

SEQ ID NO: 74623 - DNA, 20 bp, Artificial Sequence
  MKO10074623_B_Brox
  gRNA
gccgcattcttcattgtttc

SEQ ID NO: 74624 - DNA, 20 bp, Artificial Sequence
  MKO10074624_B_Brox
  gRNA
cagcgctacattaaatccca

SEQ ID NO: 74625 - DNA, 20 bp, Artificial Sequence
  MKO10074625_B_Brox
  gRNA
cacaaaatatgcttcaagat

SEQ ID NO: 74626 - DNA, 20 bp, Artificial Sequence
  MKO10074626_B_Brpf1
  gRNA
ttggcacctgtctcccgcac

SEQ ID NO: 74627 - DNA, 20 bp, Artificial Sequence
  MKO10074627_B_Brpf1
  gRNA
catcctcctccgaaaaacct

SEQ ID NO: 74628 - DNA, 20 bp, Artificial Sequence
  MKO10074628_B_Brpf1
  gRNA
cgagccggtccctctgtctg

SEQ ID NO: 74629 - DNA, 20 bp, Artificial Sequence
  MKO10074629_B_Brpf3
  gRNA
cttgcccgaatcacccagat

SEQ ID NO: 74630 - DNA, 20 bp, Artificial Sequence
  MKO10074630_B_Brpf3
  gRNA
accgagcagctgtccgcctc

SEQ ID NO: 74631 - DNA, 20 bp, Artificial Sequence
  MKO10074631_B_Brpf3
  gRNA
gcagaaacttcgccatgacc

SEQ ID NO: 74632 - DNA, 20 bp, Artificial Sequence
  MKO10074632_B_Brs3
  gRNA
tccaacgatactacacataa

SEQ ID NO: 74633 - DNA, 20 bp, Artificial Sequence
  MKO10074633_B_Brs3
  gRNA
attagtgtgaccctgttcag

SEQ ID NO: 74634 - DNA, 20 bp, Artificial Sequence
  MKO10074634_B_Brs3
  gRNA
tggctctgttcgcactctgc

SEQ ID NO: 74635 - DNA, 20 bp, Artificial Sequence
  MKO10074635_B_Brsk1
  gRNA
tcgctgtcaagatcgtgaac

SEQ ID NO: 74636 - DNA, 20 bp, Artificial Sequence
  MKO10074636_B_Brsk1
  gRNA
ttggttcttgagcacgtttc

SEQ ID NO: 74637 - DNA, 20 bp, Artificial Sequence
  MKO10074637_B_Brsk1
  gRNA
agtccagtgctgacacgatc

SEQ ID NO: 74638 - DNA, 20 bp, Artificial Sequence
  MKO10074638_B_Brsk2
  gRNA
gaagggccggctgaccccca

SEQ ID NO: 74639 - DNA, 20 bp, Artificial Sequence
  MKO10074639_B_Brsk2
  gRNA
atgctcgatgagcttcaaga

SEQ ID NO: 74640 - DNA, 20 bp, Artificial Sequence
  MKO10074640_B_Brsk2
  gRNA
tcatgcagcttcagtacatg

SEQ ID NO: 74641 - DNA, 20 bp, Artificial Sequence
  MKO10074641_B_Brwd1
  gRNA
atcgcccgctacctctcagc

SEQ ID NO: 74642 - DNA, 20 bp, Artificial Sequence
  MKO10074642_B_Brwd1
  gRNA
cattccagctgttgccgaag

SEQ ID NO: 74643 - DNA, 20 bp, Artificial Sequence
  MKO10074643_B_Brwd1
  gRNA
gggagggcaacgagcacaac

SEQ ID NO: 74644 - DNA, 20 bp, Artificial Sequence
  MKO10074644_B_Brwd3
  gRNA
agagcaccgaagaagcttcg

SEQ ID NO: 74645 - DNA, 20 bp, Artificial Sequence
  MKO10074645_B_Brwd3
  gRNA
cctagtaatgtctgtacccc

SEQ ID NO: 74646 - DNA, 20 bp, Artificial Sequence
  MKO10074646_B_Brwd3
  gRNA
gcaagagctcgaagagcatc

SEQ ID NO: 74647 - DNA, 20 bp, Artificial Sequence
  MKO10074647_B_Bscl2
  gRNA
ttcgggcagttcaagctcta

SEQ ID NO: 74648 - DNA, 20 bp, Artificial Sequence
  MKO10074648_B_Bscl2
  gRNA
ttaccgctcgcagctgctcc

SEQ ID NO: 74649 - DNA, 20 bp, Artificial Sequence
  MKO10074649_B_Bscl2
  gRNA
atgcccaagtcttgattcac

SEQ ID NO: 74650 - DNA, 20 bp, Artificial Sequence
  MKO10074650_B_Bsdc1
  gRNA
tgccagagggtgtacccatc

SEQ ID NO: 74651 - DNA, 20 bp, Artificial Sequence
  MKO10074651_B_Bsdc1
  gRNA
gtcttccacagggaggacgt

SEQ ID NO: 74652 - DNA, 20 bp, Artificial Sequence
  MKO10074652_B_Bsdc1
  gRNA
tccatagtccacggaagctt

SEQ ID NO: 74653 - DNA, 20 bp, Artificial Sequence
  MKO10074653_B_Bsg
  gRNA
ttgatctcgcttctgcccac

SEQ ID NO: 74654 - DNA, 20 bp, Artificial Sequence
  MKO10074654_B_Bsg
  gRNA
ctcacatgtacttcgtatgc

SEQ ID NO: 74655 - DNA, 20 bp, Artificial Sequence
  MKO10074655_B_Bsg
  gRNA
cccgctcttacccgccgcgc

SEQ ID NO: 74656 - DNA, 20 bp, Artificial Sequence
  MKO10074656_B_Bsnd
  gRNA
attccatgacgacctggacg

SEQ ID NO: 74657 - DNA, 20 bp, Artificial Sequence
  MKO10074657_B_Bsnd
  gRNA
agcccacgtccaggtcgtca

SEQ ID NO: 74658 - DNA, 20 bp, Artificial Sequence
  MKO10074658_B_Bsnd
  gRNA
cccctaccttaggatagcat

SEQ ID NO: 74659 - DNA, 20 bp, Artificial Sequence
  MKO10074659_B_Bsn
  gRNA
ctttaacccaacaccgcatc

SEQ ID NO: 74660 - DNA, 20 bp, Artificial Sequence
  MKO10074660_B_Bsn
  gRNA
tggacatgaccactgcgcct

SEQ ID NO: 74661 - DNA, 20 bp, Artificial Sequence
  MKO10074661_B_Bsn
  gRNA
caagacctctagcagcgccc

SEQ ID NO: 74662 - DNA, 20 bp, Artificial Sequence
  MKO10074662_B_Bsph1
  gRNA
cacagtatttccagtaacct

SEQ ID NO: 74663 - DNA, 20 bp, Artificial Sequence
  MKO10074663_B_Bsph1
  gRNA
gatctactgggattgcacag

SEQ ID NO: 74664 - DNA, 20 bp, Artificial Sequence
  MKO10074664_B_Bsph1
  gRNA
atcaacttaccttctgtctc

SEQ ID NO: 74665 - DNA, 20 bp, Artificial Sequence
  MKO10074665_B_Bsph2
  gRNA
gtggcggtactgtacagcac

SEQ ID NO: 74666 - DNA, 20 bp, Artificial Sequence
  MKO10074666_B_Bsph2
  gRNA
ggttgcttaccttgttctgg

SEQ ID NO: 74667 - DNA, 20 bp, Artificial Sequence
  MKO10074667_B_Bsph2
  gRNA
catttacatcctccagaaca

SEQ ID NO: 74668 - DNA, 20 bp, Artificial Sequence
  MKO10074668_B_Bspry
  gRNA
gcccacagttgcgtcagtag

SEQ ID NO: 74669 - DNA, 20 bp, Artificial Sequence
  MKO10074669_B_Bspry
  gRNA
cccagtgtgcccgctgagtc

SEQ ID NO: 74670 - DNA, 20 bp, Artificial Sequence
  MKO10074670_B_Bspry
  gRNA
caggacctcggccatatact

SEQ ID NO: 74671 - DNA, 20 bp, Artificial Sequence
  MKO10074671_B_Bst1
  gRNA
tccttaccctctcgtgggat

SEQ ID NO: 74672 - DNA, 20 bp, Artificial Sequence
  MKO10074672_B_Bst1
  gRNA
aaaggagcctatcccacgag

SEQ ID NO: 74673 - DNA, 20 bp, Artificial Sequence
  MKO10074673_B_Bst1
  gRNA
cttcaagggggtgctggaca

SEQ ID NO: 74674 - DNA, 20 bp, Artificial Sequence
  MKO10074674_B_Bst2
  gRNA
tgaagtcacgaagctgaacc

SEQ ID NO: 74675 - DNA, 20 bp, Artificial Sequence
  MKO10074675_B_Bst2
  gRNA
ttctgatcaggtgacccttc

SEQ ID NO: 74676 - DNA, 20 bp, Artificial Sequence
  MKO10074676_B_Bst2
  gRNA
ggagacttctagcacagtgc

SEQ ID NO: 74677 - DNA, 20 bp, Artificial Sequence
  MKO10074677_B_Bsx
  gRNA
cccgacatcaggtgaaaacg

SEQ ID NO: 74678 - DNA, 20 bp, Artificial Sequence
  MKO10074678_B_Bsx
  gRNA
gtcctcgatgaaaaacgacg

SEQ ID NO: 74679 - DNA, 20 bp, Artificial Sequence
  MKO10074679_B_Bsx
  gRNA
cgctcatcatcctctgcata

SEQ ID NO: 74680 - DNA, 20 bp, Artificial Sequence
  MKO10074680_B_Btaf1
  gRNA
actcttcaacgatgaagatt

SEQ ID NO: 74681 - DNA, 20 bp, Artificial Sequence
  MKO10074681_B_Btaf1
  gRNA
tactactccagttacaagaa

SEQ ID NO: 74682 - DNA, 20 bp, Artificial Sequence
  MKO10074682_B_Btaf1
  gRNA
tcttctgtaataatttccgt

SEQ ID NO: 74683 - DNA, 20 bp, Artificial Sequence
  MKO10074683_B_Btbd10
  gRNA
tcacatgcttctcgcagttc

SEQ ID NO: 74684 - DNA, 20 bp, Artificial Sequence
  MKO10074684_B_Btbd10
  gRNA
ctcgtgatctgtcacttgac

SEQ ID NO: 74685 - DNA, 20 bp, Artificial Sequence
  MKO10074685_B_Btbd10
  gRNA
gacgtgtgaaattatgttcc

SEQ ID NO: 74686 - DNA, 20 bp, Artificial Sequence
  MKO10074686_B_Btbd11
  gRNA
tccacctacttgagctggcg

SEQ ID NO: 74687 - DNA, 20 bp, Artificial Sequence
  MKO10074687_B_Btbd11
  gRNA
tccaccccgagacccgccat

SEQ ID NO: 74688 - DNA, 20 bp, Artificial Sequence
  MKO10074688_B_Btbd11
  gRNA
gattggtacctgttcgctca

SEQ ID NO: 74689 - DNA, 20 bp, Artificial Sequence
  MKO10074689_B_Btbd16
  gRNA
ggagttcccacttgaagccg

SEQ ID NO: 74690 - DNA, 20 bp, Artificial Sequence
  MKO10074690_B_Btbd16
  gRNA
gacccggcagtcaccagagt

SEQ ID NO: 74691 - DNA, 20 bp, Artificial Sequence
  MKO10074691_B_Btbd16
  gRNA
gctcacctgcttccccgctt

SEQ ID NO: 74692 - DNA, 20 bp, Artificial Sequence
  MKO10074692_B_Btbd17
  gRNA
ccaggctgtgggcaccgacg

SEQ ID NO: 74693 - DNA, 20 bp, Artificial Sequence
  MKO10074693_B_Btbd17
  gRNA
acgagtgaccagtcccacca

SEQ ID NO: 74694 - DNA, 20 bp, Artificial Sequence
  MKO10074694_B_Btbd17
  gRNA
aatagcccagaagctgcccc

SEQ ID NO: 74695 - DNA, 20 bp, Artificial Sequence
  MKO10074695_B_Btbd1
  gRNA
gttgttcgatgagccccagc

SEQ ID NO: 74696 - DNA, 20 bp, Artificial Sequence
  MKO10074696_B_Btbd1
  gRNA
tgcctttatgttgcttactc

SEQ ID NO: 74697 - DNA, 20 bp, Artificial Sequence
  MKO10074697_B_Btbd1
  gRNA
tgacggtaaaatgaagaaag

SEQ ID NO: 74698 - DNA, 20 bp, Artificial Sequence
  MKO10074698_B_Btbd2
  gRNA
gtacgcagtgcccgcgctcg

SEQ ID NO: 74699 - DNA, 20 bp, Artificial Sequence
  MKO10074699_B_Btbd2
  gRNA
cacacagtgggcctcgagcg

SEQ ID NO: 74700 - DNA, 20 bp, Artificial Sequence
  MKO10074700_B_Btbd2
  gRNA
acacgtacttgagcagcgcc

SEQ ID NO: 74701 - DNA, 20 bp, Artificial Sequence
  MKO10074701_B_Btbd3
  gRNA
ttcgatctttgcgctgtact

SEQ ID NO: 74702 - DNA, 20 bp, Artificial Sequence
  MKO10074702_B_Btbd3
  gRNA
tttatcccaccatccgagaa

SEQ ID NO: 74703 - DNA, 20 bp, Artificial Sequence
  MKO10074703_B_Btbd3
  gRNA
atgcttacttcagcatggcg

SEQ ID NO: 74704 - DNA, 20 bp, Artificial Sequence
  MKO10074704_B_Btbd6
  gRNA
gtctgactgggcggcaccat

SEQ ID NO: 74705 - DNA, 20 bp, Artificial Sequence
  MKO10074705_B_Btbd6
  gRNA
cgcaagatccccgtagaaca

SEQ ID NO: 74706 - DNA, 20 bp, Artificial Sequence
  MKO10074706_B_Btbd6
  gRNA
agaaatccacattcccgatg

SEQ ID NO: 74707 - DNA, 20 bp, Artificial Sequence
  MKO10074707_B_Btbd7
  gRNA
tatccagtctgactacctac

SEQ ID NO: 74708 - DNA, 20 bp, Artificial Sequence
  MKO10074708_B_Btbd7
  gRNA
tgcacccacttagagccgta

SEQ ID NO: 74709 - DNA, 20 bp, Artificial Sequence
  MKO10074709_B_Btbd7
  gRNA
gcagtgccactcagtaagtt

SEQ ID NO: 74710 - DNA, 20 bp, Artificial Sequence
  MKO10074710_B_Btbd8
  gRNA
caagagtgtattactcttca

SEQ ID NO: 74711 - DNA, 20 bp, Artificial Sequence
  MKO10074711_B_Btbd8
  gRNA
ctcgctgttcaaagtgcaca

SEQ ID NO: 74712 - DNA, 20 bp, Artificial Sequence
  MKO10074712_B_Btbd8
  gRNA
tctcctcctaactcagacgc

SEQ ID NO: 74713 - DNA, 20 bp, Artificial Sequence
  MKO10074713_B_Btbd9
  gRNA
ctgagcttctgaacgtcgtg

SEQ ID NO: 74714 - DNA, 20 bp, Artificial Sequence
  MKO10074714_B_Btbd9
  gRNA
gctctccgaccgcactttga

SEQ ID NO: 74715 - DNA, 20 bp, Artificial Sequence
  MKO10074715_B_Btbd9
  gRNA
gaaggactcaccggctgtca

SEQ ID NO: 74716 - DNA, 20 bp, Artificial Sequence
  MKO10074716_B_Btc
  gRNA
cctggtggtctgcttgatag

SEQ ID NO: 74717 - DNA, 20 bp, Artificial Sequence
  MKO10074717_B_Btc
  gRNA
gcagtaatgcttgtactgct

SEQ ID NO: 74718 - DNA, 20 bp, Artificial Sequence
  MKO10074718_B_Btc
  gRNA
agctccacaaagagagccat

SEQ ID NO: 74719 - DNA, 20 bp, Artificial Sequence
  MKO10074719_B_Btd
  gRNA
acccgtgtctggagcccttt

SEQ ID NO: 74720 - DNA, 20 bp, Artificial Sequence
  MKO10074720_B_Btd
  gRNA
gagcggtagctggttcatcc

SEQ ID NO: 74721 - DNA, 20 bp, Artificial Sequence
  MKO10074721_B_Btd
  gRNA
ggccgcgtcctatgcgaagc

SEQ ID NO: 74722 - DNA, 20 bp, Artificial Sequence
  MKO10074722_B_Btf3l4
  gRNA
actgttcagctaactttcta

SEQ ID NO: 74723 - DNA, 20 bp, Artificial Sequence
  MKO10074723_B_Btf3l4
  gRNA
accagaagacatcgatgaag

SEQ ID NO: 74724 - DNA, 20 bp, Artificial Sequence
  MKO10074724_B_Btf3l4
  gRNA
tcctcttcatcgatgtcttc

SEQ ID NO: 74725 - DNA, 20 bp, Artificial Sequence
  MKO10074725_B_Btf3
  gRNA
gaaagaaacaatcatgaacc

SEQ ID NO: 74726 - DNA, 20 bp, Artificial Sequence
  MKO10074726_B_Btf3
  gRNA
gcgcacttgtgcctgcagtt

SEQ ID NO: 74727 - DNA, 20 bp, Artificial Sequence
  MKO10074727_B_Btf3
  gRNA
gttcacccctaacttcttta

SEQ ID NO: 74728 - DNA, 20 bp, Artificial Sequence
  MKO10074728_B_Btg1
  gRNA
gactgctcagtccaatccgc

SEQ ID NO: 74729 - DNA, 20 bp, Artificial Sequence
  MKO10074729_B_Btg1
  gRNA
ctgtacgaagcctcaccagc

SEQ ID NO: 74730 - DNA, 20 bp, Artificial Sequence
  MKO10074730_B_Btg1
  gRNA
cggtaacctgatcccttgca

SEQ ID NO: 74731 - DNA, 20 bp, Artificial Sequence
  MKO10074731_B_Btg2
  gRNA
ggcgatctccgggagcatgt

SEQ ID NO: 74732 - DNA, 20 bp, Artificial Sequence
  MKO10074732_B_Btg2
  gRNA
gcgctccaggacgcactgac

SEQ ID NO: 74733 - DNA, 20 bp, Artificial Sequence
  MKO10074733_B_Btg2
  gRNA
gctcaccggtcagtgcgtcc

SEQ ID NO: 74734 - DNA, 20 bp, Artificial Sequence
  MKO10074734_B_Btg3
  gRNA
caccggcagcacacctcaca

SEQ ID NO: 74735 - DNA, 20 bp, Artificial Sequence
  MKO10074735_B_Btg3
  gRNA
aaaaatgaagaacgaaattg

SEQ ID NO: 74736 - DNA, 20 bp, Artificial Sequence
  MKO10074736_B_Btg3
  gRNA
ctgcatcttgtacagcgacc

SEQ ID NO: 74737 - DNA, 20 bp, Artificial Sequence
  MKO10074737_B_Btg4
  gRNA
acaacctggtagacgctctt

SEQ ID NO: 74738 - DNA, 20 bp, Artificial Sequence
  MKO10074738_B_Btg4
  gRNA
atccctatgaggtgtgctgt

SEQ ID NO: 74739 - DNA, 20 bp, Artificial Sequence
  MKO10074739_B_Btg4
  gRNA
tcacctacagcacacctcat

SEQ ID NO: 74740 - DNA, 20 bp, Artificial Sequence
  MKO10074740_B_Btk
  gRNA
cttaccggaatctgtctttc

SEQ ID NO: 74741 - DNA, 20 bp, Artificial Sequence
  MKO10074741_B_Btk
  gRNA
cccaccagaaagacagattc

SEQ ID NO: 74742 - DNA, 20 bp, Artificial Sequence
  MKO10074742_B_Btk
  gRNA
ctgaagagctgagaaagcgc

SEQ ID NO: 74743 - DNA, 20 bp, Artificial Sequence
  MKO10074743_B_Btla
  gRNA
ccagatgccaccaatgcctc

SEQ ID NO: 74744 - DNA, 20 bp, Artificial Sequence
  MKO10074744_B_Btla
  gRNA
taaagcagccaagtcctgcc

SEQ ID NO: 74745 - DNA, 20 bp, Artificial Sequence
  MKO10074745_B_Btla
  gRNA
tcttagtagctttctcacaa

SEQ ID NO: 74746 - DNA, 20 bp, Artificial Sequence
  MKO10074746_B_Btn1a1
  gRNA
gaagtagagatctccttacc

SEQ ID NO: 74747 - DNA, 20 bp, Artificial Sequence
  MKO10074747_B_Btn1a1
  gRNA
gatagccacagctactatcc

SEQ ID NO: 74748 - DNA, 20 bp, Artificial Sequence
  MKO10074748_B_Btn1a1
  gRNA
tgcatccagaatatcctcct

SEQ ID NO: 74749 - DNA, 20 bp, Artificial Sequence
  MKO10074749_B_Btn2a2
  gRNA
atgctgattctcctcacatc

SEQ ID NO: 74750 - DNA, 20 bp, Artificial Sequence
  MKO10074750_B_Btn2a2
  gRNA
gctgatgtctgtgcgcatga

SEQ ID NO: 74751 - DNA, 20 bp, Artificial Sequence
  MKO10074751_B_Btn2a2
  gRNA
ctggtcctatgacagtaaac

SEQ ID NO: 74752 - DNA, 20 bp, Artificial Sequence
  MKO10074752_B_Btnl10
  gRNA
cgggccgagtgcacctcagc

SEQ ID NO: 74753 - DNA, 20 bp, Artificial Sequence
  MKO10074753_B_Btnl10
  gRNA
gatatggcaagggcacaccc

SEQ ID NO: 74754 - DNA, 20 bp, Artificial Sequence
  MKO10074754_B_Btnl10
  gRNA
gctcacagataccttaacta

SEQ ID NO: 74755 - DNA, 20 bp, Artificial Sequence
  MKO10074755_B_Btnl1
  gRNA
cgatttctcctggtcataca

SEQ ID NO: 74756 - DNA, 20 bp, Artificial Sequence
  MKO10074756_B_Btnl1
  gRNA
cgagcaggaccaatagtatg

SEQ ID NO: 74757 - DNA, 20 bp, Artificial Sequence
  MKO10074757_B_Btnl1
  gRNA
tagactcacctaggtcggcc

SEQ ID NO: 74758 - DNA, 20 bp, Artificial Sequence
  MKO10074758_B_Btnl2
  gRNA
ctcgggacgtgcatacaagc

SEQ ID NO: 74759 - DNA, 20 bp, Artificial Sequence
  MKO10074759_B_Btnl2
  gRNA
ggaggagctgacacgttagc

SEQ ID NO: 74760 - DNA, 20 bp, Artificial Sequence
  MKO10074760_B_Btnl2
  gRNA
cagcttgtatgcacgtcccg

SEQ ID NO: 74761 - DNA, 20 bp, Artificial Sequence
  MKO10074761_B_Btnl4
  gRNA
ggacaagctatcttctcaga

SEQ ID NO: 74762 - DNA, 20 bp, Artificial Sequence
  MKO10074762_B_Btnl4
  gRNA
gctgtctctcacaaccagca

SEQ ID NO: 74763 - DNA, 20 bp, Artificial Sequence
  MKO10074763_B_Btnl4
  gRNA
agacaagggatgatgctctg

SEQ ID NO: 74764 - DNA, 20 bp, Artificial Sequence
  MKO10074764_B_Btnl6
  gRNA
gtattcacagcgcacctctc

SEQ ID NO: 74765 - DNA, 20 bp, Artificial Sequence
  MKO10074765_B_Btnl6
  gRNA
gttcagaacggagacctcgc

SEQ ID NO: 74766 - DNA, 20 bp, Artificial Sequence
  MKO10074766_B_Btnl6
  gRNA
acacatactccaccgtcttc

SEQ ID NO: 74767 - DNA, 20 bp, Artificial Sequence
  MKO10074767_B_Btnl9
  gRNA
gcacaatcagactgagcggc

SEQ ID NO: 74768 - DNA, 20 bp, Artificial Sequence
  MKO10074768_B_Btnl9
  gRNA
actccaccgcttccccgacg

SEQ ID NO: 74769 - DNA, 20 bp, Artificial Sequence
  MKO10074769_B_Btnl9
  gRNA
tcctacccagaatgtccccc

SEQ ID NO: 74770 - DNA, 20 bp, Artificial Sequence
  MKO10074770_B_Btrc
  gRNA
gatttcataactgcactgcc

SEQ ID NO: 74771 - DNA, 20 bp, Artificial Sequence
  MKO10074771_B_Btrc
  gRNA
agacttacaacagctgtgcc

SEQ ID NO: 74772 - DNA, 20 bp, Artificial Sequence
  MKO10074772_B_Btrc
  gRNA
agagaagaattcacttagac

SEQ ID NO: 74773 - DNA, 20 bp, Artificial Sequence
  MKO10074773_B_Bub1b
  gRNA
agagcgatagaagcactcca

SEQ ID NO: 74774 - DNA, 20 bp, Artificial Sequence
  MKO10074774_B_Bub1b
  gRNA
ccttgcgttcaatcccttcc

SEQ ID NO: 74775 - DNA, 20 bp, Artificial Sequence
  MKO10074775_B_Bub1b
  gRNA
agatgaccctctggatgtgt

SEQ ID NO: 74776 - DNA, 20 bp, Artificial Sequence
  MKO10074776_B_Bub1
  gRNA
tgatgaatcttgaatcattg

SEQ ID NO: 74777 - DNA, 20 bp, Artificial Sequence
  MKO10074777_B_Bub1
  gRNA
agcccatatgcaaagctaca

SEQ ID NO: 74778 - DNA, 20 bp, Artificial Sequence
  MKO10074778_B_Bub1
  gRNA
catcatatatatacatgtcc

SEQ ID NO: 74779 - DNA, 20 bp, Artificial Sequence
  MKO10074779_B_Bub3
  gRNA
ggggtgggtacctgcttgtt

SEQ ID NO: 74780 - DNA, 20 bp, Artificial Sequence
  MKO10074780_B_Bub3
  gRNA
cgggccgccgagtgctggtg

SEQ ID NO: 74781 - DNA, 20 bp, Artificial Sequence
  MKO10074781_B_Bub3
  gRNA
tgtaggatccaacgcatgcc

SEQ ID NO: 74782 - DNA, 20 bp, Artificial Sequence
  MKO10074782_B_Bud13
  gRNA
ggctatctctactgctaagc

SEQ ID NO: 74783 - DNA, 20 bp, Artificial Sequence
  MKO10074783_B_Bud13
  gRNA
ctgacctctctccacctcga

SEQ ID NO: 74784 - DNA, 20 bp, Artificial Sequence
  MKO10074784_B_Bud13
  gRNA
ccttccgctccagtgccaag

SEQ ID NO: 74785 - DNA, 20 bp, Artificial Sequence
  MKO10074785_B_Bud31
  gRNA
ttggcaccaactgcatttgc

SEQ ID NO: 74786 - DNA, 20 bp, Artificial Sequence
  MKO10074786_B_Bud31
  gRNA
atcatcgagtgcacacactg

SEQ ID NO: 74787 - DNA, 20 bp, Artificial Sequence
  MKO10074787_B_Bud31
  gRNA
ggtgtcagccagagcaaccc

SEQ ID NO: 74788 - DNA, 20 bp, Artificial Sequence
  MKO10074788_B_Bves
  gRNA
cacaggatgtaccctttatg

SEQ ID NO: 74789 - DNA, 20 bp, Artificial Sequence
  MKO10074789_B_Bves
  gRNA
gcagttatcatctgcaacaa

SEQ ID NO: 74790 - DNA, 20 bp, Artificial Sequence
  MKO10074790_B_Bves
  gRNA
cttaccttatcatttaaagt

SEQ ID NO: 74791 - DNA, 20 bp, Artificial Sequence
  MKO10074791_B_Bysl
  gRNA
tggaagtttaccgaggagtc

SEQ ID NO: 74792 - DNA, 20 bp, Artificial Sequence
  MKO10074792_B_Bysl
  gRNA
tcatccctgcactgtccaac

SEQ ID NO: 74793 - DNA, 20 bp, Artificial Sequence
  MKO10074793_B_Bysl
  gRNA
cagcaatgtcatctcgcact

SEQ ID NO: 74794 - DNA, 20 bp, Artificial Sequence
  MKO10074794_B_Bzrap1
  gRNA
cactgaggtctcgggctcgc

SEQ ID NO: 74795 - DNA, 20 bp, Artificial Sequence
  MKO10074795_B_Bzrap1
  gRNA
gcagcgctgtaccatcctga

SEQ ID NO: 74796 - DNA, 20 bp, Artificial Sequence
  MKO10074796_B_Bzrap1
  gRNA
cttacggcacaactccaaac

SEQ ID NO: 74797 - DNA, 20 bp, Artificial Sequence
  MKO10074797_B_Bzw1
  gRNA
cctatccagatgaaaaagag

SEQ ID NO: 74798 - DNA, 20 bp, Artificial Sequence
  MKO10074798_B_Bzw1
  gRNA
tacctgagcgaatgcttgca

SEQ ID NO: 74799 - DNA, 20 bp, Artificial Sequence
  MKO10074799_B_Bzw1
  gRNA
cagaaggacaccagtcaaca

SEQ ID NO: 74800 - DNA, 20 bp, Artificial Sequence
  MKO10074800_B_Bzw2
  gRNA
gtccaggggcttaatgaagc

SEQ ID NO: 74801 - DNA, 20 bp, Artificial Sequence
  MKO10074801_B_Bzw2
  gRNA
acagacagcttagtcaaaga

SEQ ID NO: 74802 - DNA, 20 bp, Artificial Sequence
  MKO10074802_B_Bzw2
  gRNA
ggagggtcccattgcccagc

SEQ ID NO: 74803 - DNA, 20 bp, Artificial Sequence
  MKO10074803_B_C030006K11Rik
  gRNA
ccgcgagtatttctactatg

SEQ ID NO: 74804 - DNA, 20 bp, Artificial Sequence
  MKO10074804_B_C030006K11Rik
  gRNA
gtaagcaatacctttgaagc

SEQ ID NO: 74805 - DNA, 20 bp, Artificial Sequence
  MKO10074805_B_C030006K11Rik
  gRNA
aactttatcacctgcttcaa

SEQ ID NO: 74806 - DNA, 20 bp, Artificial Sequence
  MKO10074806_B_C030039L03Rik
  gRNA
acaccttctgagtagcatcc

SEQ ID NO: 74807 - DNA, 20 bp, Artificial Sequence
  MKO10074807_B_C030039L03Rik
  gRNA
acagaccatgtgttgagaac

SEQ ID NO: 74808 - DNA, 20 bp, Artificial Sequence
  MKO10074808_B_C030039L03Rik
  gRNA
cagctccagttctcaacaca

SEQ ID NO: 74809 - DNA, 20 bp, Artificial Sequence
  MKO10074809_B_C030046E11Rik
  gRNA
tatgttacaattaacacact

SEQ ID NO: 74810 - DNA, 20 bp, Artificial Sequence
  MKO10074810_B_C030046E11Rik
  gRNA
gtccatcagaagttgcaaca

SEQ ID NO: 74811 - DNA, 20 bp, Artificial Sequence
  MKO10074811_B_C030046E11Rik
  gRNA
tggtactgtagacagattga

SEQ ID NO: 74812 - DNA, 20 bp, Artificial Sequence
  MKO10074812_B_C130026I21Rik
  gRNA
tcaagaaacatgtaagaacc

SEQ ID NO: 74813 - DNA, 20 bp, Artificial Sequence
  MKO10074813_B_C130026I21Rik
  gRNA
atgtacagaagaagtttagc

SEQ ID NO: 74814 - DNA, 20 bp, Artificial Sequence
  MKO10074814_B_C130026I21Rik
  gRNA
aacgaatgatgaacaagcag

SEQ ID NO: 74815 - DNA, 20 bp, Artificial Sequence
  MKO10074815_B_C130050O18Rik
  gRNA
acacaacgctctgtcagcac

SEQ ID NO: 74816 - DNA, 20 bp, Artificial Sequence
  MKO10074816_B_C130050O18Rik
  gRNA
gctcatgaacctcgcagagc

SEQ ID NO: 74817 - DNA, 20 bp, Artificial Sequence
  MKO10074817_B_C130050O18Rik
  gRNA
atcgggcccgcctgaagctg

SEQ ID NO: 74818 - DNA, 20 bp, Artificial Sequence
  MKO10074818_B_C130060K24Rik
  gRNA
aagtcgctgcacatgccaca

SEQ ID NO: 74819 - DNA, 20 bp, Artificial Sequence
  MKO10074819_B_C130060K24Rik
  gRNA
tactatgacctgcattgctg

SEQ ID NO: 74820 - DNA, 20 bp, Artificial Sequence
  MKO10074820_B_C130060K24Rik
  gRNA
gaagcgagctgtgatcatga

SEQ ID NO: 74821 - DNA, 20 bp, Artificial Sequence
  MKO10074821_B_C130074G19Rik
  gRNA
gcagcgtactccgccccatt

SEQ ID NO: 74822 - DNA, 20 bp, Artificial Sequence
  MKO10074822_B_C130074G19Rik
  gRNA
cggggactccgagcgcacgc

SEQ ID NO: 74823 - DNA, 20 bp, Artificial Sequence
  MKO10074823_B_C130074G19Rik
  gRNA
gcgatcgccccaggggcctt

SEQ ID NO: 74824 - DNA, 20 bp, Artificial Sequence
  MKO10074824_B_C130079G13Rik
  gRNA
tcccataatacagatgcgtg

SEQ ID NO: 74825 - DNA, 20 bp, Artificial Sequence
  MKO10074825_B_C130079G13Rik
  gRNA
ccatctgttcagatcatcat

SEQ ID NO: 74826 - DNA, 20 bp, Artificial Sequence
  MKO10074826_B_C130079G13Rik
  gRNA
cctatgatgatctgaacaga

SEQ ID NO: 74827 - DNA, 20 bp, Artificial Sequence
  MKO10074827_B_C1d
  gRNA
tcacgagtctttaacagccc

SEQ ID NO: 74828 - DNA, 20 bp, Artificial Sequence
  MKO10074828_B_C1d
  gRNA
ttccctttattagccacttt

SEQ ID NO: 74829 - DNA, 20 bp, Artificial Sequence
  MKO10074829_B_C1d
  gRNA
tccacctttgcttgttccaa

SEQ ID NO: 74830 - DNA, 20 bp, Artificial Sequence
  MKO10074830_B_C1galt1c1
  gRNA
gtgtaccggcttagggcatt

SEQ ID NO: 74831 - DNA, 20 bp, Artificial Sequence
  MKO10074831_B_C1galt1c1
  gRNA
aatatgcttatgatcaatac

SEQ ID NO: 74832 - DNA, 20 bp, Artificial Sequence
  MKO10074832_B_C1galt1c1
  gRNA
tgtgccttgatcactatgct

SEQ ID NO: 74833 - DNA, 20 bp, Artificial Sequence
  MKO10074833_B_C1galt1
  gRNA
gtgaagcatgttaggctgaa

SEQ ID NO: 74834 - DNA, 20 bp, Artificial Sequence
  MKO10074834_B_C1galt1
  gRNA
gcagattccagccaacataa

SEQ ID NO: 74835 - DNA, 20 bp, Artificial Sequence
  MKO10074835_B_C1galt1
  gRNA
gcaatatcagaacagcatcc

SEQ ID NO: 74836 - DNA, 20 bp, Artificial Sequence
  MKO10074836_B_C1qa
  gRNA
tgctgaccatgaccctagta

SEQ ID NO: 74837 - DNA, 20 bp, Artificial Sequence
  MKO10074837_B_C1qa
  gRNA
taaaacctcggataccagtc

SEQ ID NO: 74838 - DNA, 20 bp, Artificial Sequence
  MKO10074838_B_C1qa
  gRNA
accgtgcttcagctgcgacg

SEQ ID NO: 74839 - DNA, 20 bp, Artificial Sequence
  MKO10074839_B_C1qbp
  gRNA
aagtcccttcccaagatgtc

SEQ ID NO: 74840 - DNA, 20 bp, Artificial Sequence
  MKO10074840_B_C1qbp
  gRNA
tcagattggacacgaagatg

SEQ ID NO: 74841 - DNA, 20 bp, Artificial Sequence
  MKO10074841_B_C1qbp
  gRNA
tcctcctcaccatcaaatgt

SEQ ID NO: 74842 - DNA, 20 bp, Artificial Sequence
  MKO10074842_B_C1qb
  gRNA
accaggcactccagggataa

SEQ ID NO: 74843 - DNA, 20 bp, Artificial Sequence
  MKO10074843_B_C1qb
  gRNA
cgcggtcccaaaggcgattc

SEQ ID NO: 74844 - DNA, 20 bp, Artificial Sequence
  MKO10074844_B_C1qb
  gRNA
gtagtccccagaatcgcctt

SEQ ID NO: 74845 - DNA, 20 bp, Artificial Sequence
  MKO10074845_B_C1qc
  gRNA
acgggcatgatggactccag

SEQ ID NO: 74846 - DNA, 20 bp, Artificial Sequence
  MKO10074846_B_C1qc
  gRNA
cgttctagtcgggaaacagt

SEQ ID NO: 74847 - DNA, 20 bp, Artificial Sequence
  MKO10074847_B_C1qc
  gRNA
gggtgactgtgaataccgac

SEQ ID NO: 74848 - DNA, 20 bp, Artificial Sequence
  MKO10074848_B_C1ql1
  gRNA
gcgggccagtgcaattgccc

SEQ ID NO: 74849 - DNA, 20 bp, Artificial Sequence
  MKO10074849_B_C1ql1
  gRNA
ccgcatcgtagttgttgcct

SEQ ID NO: 74850 - DNA, 20 bp, Artificial Sequence
  MKO10074850_B_C1ql1
  gRNA
ccacgcgtggccttctacgc

SEQ ID NO: 74851 - DNA, 20 bp, Artificial Sequence
  MKO10074851_B_C1ql2
  gRNA
cgactacgccagcaacagcg

SEQ ID NO: 74852 - DNA, 20 bp, Artificial Sequence
  MKO10074852_B_C1ql2
  gRNA
catctcgtagtgagccgctc

SEQ ID NO: 74853 - DNA, 20 bp, Artificial Sequence
  MKO10074853_B_C1ql2
  gRNA
ggtcgccccggatcaccctt

SEQ ID NO: 74854 - DNA, 20 bp, Artificial Sequence
  MKO10074854_B_C1ql3
  gRNA
gtgaaggaccacactgttac

SEQ ID NO: 74855 - DNA, 20 bp, Artificial Sequence
  MKO10074855_B_C1ql3
  gRNA
gcgttcaggccgggcgcccc

SEQ ID NO: 74856 - DNA, 20 bp, Artificial Sequence
  MKO10074856_B_C1ql3
  gRNA
cccgggagagcccggaccgc

SEQ ID NO: 74857 - DNA, 20 bp, Artificial Sequence
  MKO10074857_B_C1ql4
  gRNA
acggtgggaaggtgcacggc

SEQ ID NO: 74858 - DNA, 20 bp, Artificial Sequence
  MKO10074858_B_C1ql4
  gRNA
caacgtgggcaacgcttacg

SEQ ID NO: 74859 - DNA, 20 bp, Artificial Sequence
  MKO10074859_B_C1ql4
  gRNA
accccgaattgccttctacg

SEQ ID NO: 74860 - DNA, 20 bp, Artificial Sequence
  MKO10074860_B_C1qtnf1
  gRNA
taccttgtcacaggatccag

SEQ ID NO: 74861 - DNA, 20 bp, Artificial Sequence
  MKO10074861_B_C1qtnf1
  gRNA
tacttctctcgtgtttcttc

SEQ ID NO: 74862 - DNA, 20 bp, Artificial Sequence
  MKO10074862_B_C1qtnf1
  gRNA
gagccttgtgccacgagttc

SEQ ID NO: 74863 - DNA, 20 bp, Artificial Sequence
  MKO10074863_B_C1qtnf2
  gRNA
ggcacaggccaagagtaccc

SEQ ID NO: 74864 - DNA, 20 bp, Artificial Sequence
  MKO10074864_B_C1qtnf2
  gRNA
ggccactacaacgcgtccag

SEQ ID NO: 74865 - DNA, 20 bp, Artificial Sequence
  MKO10074865_B_C1qtnf2
  gRNA
cggcagtagccgagccaagt

SEQ ID NO: 74866 - DNA, 20 bp, Artificial Sequence
  MKO10074866_B_C1qtnf3
  gRNA
tgctgcccccgttctcctcg

SEQ ID NO: 74867 - DNA, 20 bp, Artificial Sequence
  MKO10074867_B_C1qtnf3
  gRNA
gggtggtttacctgcagttc

SEQ ID NO: 74868 - DNA, 20 bp, Artificial Sequence
  MKO10074868_B_C1qtnf3
  gRNA
cacgaaatccataatctcca

SEQ ID NO: 74869 - DNA, 20 bp, Artificial Sequence
  MKO10074869_B_C1qtnf4
  gRNA
ggcgcgccgagcgcgtactg

SEQ ID NO: 74870 - DNA, 20 bp, Artificial Sequence
  MKO10074870_B_C1qtnf4
  gRNA
tggctttcgacgagcagcga

SEQ ID NO: 74871 - DNA, 20 bp, Artificial Sequence
  MKO10074871_B_C1qtnf4
  gRNA
ctacttagccacgatcacga

SEQ ID NO: 74872 - DNA, 20 bp, Artificial Sequence
  MKO10074872_B_C1qtnf5
  gRNA
ggtaccgagcactcccccgc

SEQ ID NO: 74873 - DNA, 20 bp, Artificial Sequence
  MKO10074873_B_C1qtnf5
  gRNA
gggatcttgttgtcgtccag

SEQ ID NO: 74874 - DNA, 20 bp, Artificial Sequence
  MKO10074874_B_C1qtnf5
  gRNA
tacccggctctcggatcgct

SEQ ID NO: 74875 - DNA, 20 bp, Artificial Sequence
  MKO10074875_B_C1qtnf6
  gRNA
ttcaagcgggagcgggaaaa

SEQ ID NO: 74876 - DNA, 20 bp, Artificial Sequence
  MKO10074876_B_C1qtnf6
  gRNA
tgaagaagtagaggccgcgc

SEQ ID NO: 74877 - DNA, 20 bp, Artificial Sequence
  MKO10074877_B_C1qtnf6
  gRNA
agttccagctgtgtacgttg

SEQ ID NO: 74878 - DNA, 20 bp, Artificial Sequence
  MKO10074878_B_C1qtnf7
  gRNA
acctcgggccaatcaggcta

SEQ ID NO: 74879 - DNA, 20 bp, Artificial Sequence
  MKO10074879_B_C1qtnf7
  gRNA
aacccagcaatgcccaggaa

SEQ ID NO: 74880 - DNA, 20 bp, Artificial Sequence
  MKO10074880_B_C1qtnf7
  gRNA
aagttcatttgcgctttccc

SEQ ID NO: 74881 - DNA, 20 bp, Artificial Sequence
  MKO10074881_B_C1qtnf9
  gRNA
gccggagtgcccttgccggc

SEQ ID NO: 74882 - DNA, 20 bp, Artificial Sequence
  MKO10074882_B_C1qtnf9
  gRNA
ccaggaaaggatggaattcg

SEQ ID NO: 74883 - DNA, 20 bp, Artificial Sequence
  MKO10074883_B_C1qtnf9
  gRNA
ccacgaattccatcctttcc

SEQ ID NO: 74884 - DNA, 20 bp, Artificial Sequence
  MKO10074884_B_C1ra
  gRNA
ttctgctgataagcaaacac

SEQ ID NO: 74885 - DNA, 20 bp, Artificial Sequence
  MKO10074885_B_C1ra
  gRNA
tctttctgaagctcatagcc

SEQ ID NO: 74886 - DNA, 20 bp, Artificial Sequence
  MKO10074886_B_C1ra
  gRNA
tgcatcgcagcccaactcag

SEQ ID NO: 74887 - DNA, 20 bp, Artificial Sequence
  MKO10074887_B_C1rb
  gRNA
ttctgctgataagcaaacac

SEQ ID NO: 74888 - DNA, 20 bp, Artificial Sequence
  MKO10074888_B_C1rb
  gRNA
tctttctgaagctcatagcc

SEQ ID NO: 74889 - DNA, 20 bp, Artificial Sequence
  MKO10074889_B_C1rb
  gRNA
tgcatcgcagcccaactcag

SEQ ID NO: 74890 - DNA, 20 bp, Artificial Sequence
  MKO10074890_B_C1rl
  gRNA
ctctttcagatttcaactgg

SEQ ID NO: 74891 - DNA, 20 bp, Artificial Sequence
  MKO10074891_B_C1rl
  gRNA
aaccttgccgcccacacagc

SEQ ID NO: 74892 - DNA, 20 bp, Artificial Sequence
  MKO10074892_B_C1rl
  gRNA
gaccttccaggactttgatc

SEQ ID NO: 74893 - DNA, 20 bp, Artificial Sequence
  MKO10074893_B_C1s
  gRNA
cctgtcccctaattatcccc

SEQ ID NO: 74894 - DNA, 20 bp, Artificial Sequence
  MKO10074894_B_C1s
  gRNA
acttcctccacgatgacatg

SEQ ID NO: 74895 - DNA, 20 bp, Artificial Sequence
  MKO10074895_B_C1s
  gRNA
tgaataccagattcagctgc

SEQ ID NO: 74896 - DNA, 20 bp, Artificial Sequence
  MKO10074896_B_C230052I12Rik
  gRNA
ggtctagcacagtaaacttc

SEQ ID NO: 74897 - DNA, 20 bp, Artificial Sequence
  MKO10074897_B_C230052I12Rik
  gRNA
gaatgcaagatttgctagac

SEQ ID NO: 74898 - DNA, 20 bp, Artificial Sequence
  MKO10074898_B_C230052I12Rik
  gRNA
tcgcttaggctgggtgaaga

SEQ ID NO: 74899 - DNA, 20 bp, Artificial Sequence
  MKO10074899_B_C2cd2l
  gRNA
tgaccaatcagagcgcacca

SEQ ID NO: 74900 - DNA, 20 bp, Artificial Sequence
  MKO10074900_B_C2cd2l
  gRNA
cagcactcagcccgccatga

SEQ ID NO: 74901 - DNA, 20 bp, Artificial Sequence
  MKO10074901_B_C2cd2l
  gRNA
ccgcccagaactcagcctaa

SEQ ID NO: 74902 - DNA, 20 bp, Artificial Sequence
  MKO10074902_B_C2cd2
  gRNA
aaagatggacatcatacagc

SEQ ID NO: 74903 - DNA, 20 bp, Artificial Sequence
  MKO10074903_B_C2cd2
  gRNA
ctgagcttctttgacctgcg

SEQ ID NO: 74904 - DNA, 20 bp, Artificial Sequence
  MKO10074904_B_C2cd2
  gRNA
ctcataggtagaattccaca

SEQ ID NO: 74905 - DNA, 20 bp, Artificial Sequence
  MKO10074905_B_C2cd3
  gRNA
tctccaagtttcttcgatgc

SEQ ID NO: 74906 - DNA, 20 bp, Artificial Sequence
  MKO10074906_B_C2cd3
  gRNA
gatcatagactgggtgttgc

SEQ ID NO: 74907 - DNA, 20 bp, Artificial Sequence
  MKO10074907_B_C2cd3
  gRNA
caaagaaccctttactgcat

SEQ ID NO: 74908 - DNA, 20 bp, Artificial Sequence
  MKO10074908_B_C2cd4a
  gRNA
cgcgcgctggccagacgtcg

SEQ ID NO: 74909 - DNA, 20 bp, Artificial Sequence
  MKO10074909_B_C2cd4a
  gRNA
cggctcttgcgggaccgaga

SEQ ID NO: 74910 - DNA, 20 bp, Artificial Sequence
  MKO10074910_B_C2cd4a
  gRNA
agcgcgcgccccccgtgccg

SEQ ID NO: 74911 - DNA, 20 bp, Artificial Sequence
  MKO10074911_B_C2cd4b
  gRNA
gctggagcgcggacgaccgc

SEQ ID NO: 74912 - DNA, 20 bp, Artificial Sequence
  MKO10074912_B_C2cd4b
  gRNA
aggcggcgcatacggggcac

SEQ ID NO: 74913 - DNA, 20 bp, Artificial Sequence
  MKO10074913_B_C2cd4b
  gRNA
tcgagagcccgcacacgcgc

SEQ ID NO: 74914 - DNA, 20 bp, Artificial Sequence
  MKO10074914_B_C2cd4c
  gRNA
tatctgaatcacatgtcgtg

SEQ ID NO: 74915 - DNA, 20 bp, Artificial Sequence
  MKO10074915_B_C2cd4c
  gRNA
catcacagggccggtcatac

SEQ ID NO: 74916 - DNA, 20 bp, Artificial Sequence
  MKO10074916_B_C2cd4c
  gRNA
tgctggccgccggcgagcag

SEQ ID NO: 74917 - DNA, 20 bp, Artificial Sequence
  MKO10074917_B_C2cd4d
  gRNA
tgcggtccgtaccctataac

SEQ ID NO: 74918 - DNA, 20 bp, Artificial Sequence
  MKO10074918_B_C2cd4d
  gRNA
gactcgcggcgacgcgtgtg

SEQ ID NO: 74919 - DNA, 20 bp, Artificial Sequence
  MKO10074919_B_C2cd4d
  gRNA
tgagctccaggcctaacgcg

SEQ ID NO: 74920 - DNA, 20 bp, Artificial Sequence
  MKO10074920_B_C2cd5
  gRNA
ggtggacgatgaagatttac

SEQ ID NO: 74921 - DNA, 20 bp, Artificial Sequence
  MKO10074921_B_C2cd5
  gRNA
tgtggccggtcgccatttgc

SEQ ID NO: 74922 - DNA, 20 bp, Artificial Sequence
  MKO10074922_B_C2cd5
  gRNA
acctgtttgaatcattgaag

SEQ ID NO: 74923 - DNA, 20 bp, Artificial Sequence
  MKO10074923_B_C2
  gRNA
gactgctttaaccatccgag

SEQ ID NO: 74924 - DNA, 20 bp, Artificial Sequence
  MKO10074924_B_C2
  gRNA
gctgagggtgaaattaccac

SEQ ID NO: 74925 - DNA, 20 bp, Artificial Sequence
  MKO10074925_B_C2
  gRNA
tcagtgggcacagctcggac

SEQ ID NO: 74926 - DNA, 20 bp, Artificial Sequence
  MKO10074926_B_C330006A16Rik
  gRNA
gcgcggccagcgcgccccaa

SEQ ID NO: 74927 - DNA, 20 bp, Artificial Sequence
  MKO10074927_B_C330006A16Rik
  gRNA
tgatcttgctccgtaaattg

SEQ ID NO: 74928 - DNA, 20 bp, Artificial Sequence
  MKO10074928_B_C330006A16Rik
  gRNA
aatttacggagcaagatcag

SEQ ID NO: 74929 - DNA, 20 bp, Artificial Sequence
  MKO10074929_B_C330007P06Rik
  gRNA
acaaaacttgtgagcatgtt

SEQ ID NO: 74930 - DNA, 20 bp, Artificial Sequence
  MKO10074930_B_C330007P06Rik
  gRNA
agggcattgaacgtcagtac

SEQ ID NO: 74931 - DNA, 20 bp, Artificial Sequence
  MKO10074931_B_C330007P06Rik
  gRNA
tactgacgttcaatgccctc

SEQ ID NO: 74932 - DNA, 20 bp, Artificial Sequence
  MKO10074932_B_C330018D20Rik
  gRNA
ctttggtacctttgtgaata

SEQ ID NO: 74933 - DNA, 20 bp, Artificial Sequence
  MKO10074933_B_C330018D20Rik
  gRNA
tctttagcttcatcacacag

SEQ ID NO: 74934 - DNA, 20 bp, Artificial Sequence
  MKO10074934_B_C330018D20Rik
  gRNA
cagattgccaaatcctcctt

SEQ ID NO: 74935 - DNA, 20 bp, Artificial Sequence
  MKO10074935_B_C330021F23Rik
  gRNA
tgaggaaaatgatgaagttc

SEQ ID NO: 74936 - DNA, 20 bp, Artificial Sequence
  MKO10074936_B_C330021F23Rik
  gRNA
tattcctggagtccgcttta

SEQ ID NO: 74937 - DNA, 20 bp, Artificial Sequence
  MKO10074937_B_C330021F23Rik
  gRNA
agtagccaatgtttctctgt

SEQ ID NO: 74938 - DNA, 20 bp, Artificial Sequence
  MKO10074938_B_C330027C09Rik
  gRNA
tatcagtttgctgtctcaac

SEQ ID NO: 74939 - DNA, 20 bp, Artificial Sequence
  MKO10074939_B_C330027C09Rik
  gRNA
atcagtgaagcacttatgtt

SEQ ID NO: 74940 - DNA, 20 bp, Artificial Sequence
  MKO10074940_B_C330027C09Rik
  gRNA
agtgcattcaactgctgcaa

SEQ ID NO: 74941 - DNA, 20 bp, Artificial Sequence
  MKO10074941_B_C3ar1
  gRNA
ttcgcattctgaagacgatg

SEQ ID NO: 74942 - DNA, 20 bp, Artificial Sequence
  MKO10074942_B_C3ar1
  gRNA
atcttcaacaggaaacccgc

SEQ ID NO: 74943 - DNA, 20 bp, Artificial Sequence
  MKO10074943_B_C3ar1
  gRNA
gttccgagacttggtgaagt

SEQ ID NO: 74944 - DNA, 20 bp, Artificial Sequence
  MKO10074944_B_C3
  gRNA
gacagtcgtcatcctcattg

SEQ ID NO: 74945 - DNA, 20 bp, Artificial Sequence
  MKO10074945_B_C3
  gRNA
ctgtgcaagacttcctaaag

SEQ ID NO: 74946 - DNA, 20 bp, Artificial Sequence
  MKO10074946_B_C3
  gRNA
cgcatagattccagccagta

SEQ ID NO: 74947 - DNA, 20 bp, Artificial Sequence
  MKO10074947_B_C4a
  gRNA
ttgctctactcttcccgacg

SEQ ID NO: 74948 - DNA, 20 bp, Artificial Sequence
  MKO10074948_B_C4a
  gRNA
cagagccccctacatccagc

SEQ ID NO: 74949 - DNA, 20 bp, Artificial Sequence
  MKO10074949_B_C4a
  gRNA
tccttctcttagttcgttat

SEQ ID NO: 74950 - DNA, 20 bp, Artificial Sequence
  MKO10074950_B_C4bp
  gRNA
ctcgttggcagccccttcat

SEQ ID NO: 74951 - DNA, 20 bp, Artificial Sequence
  MKO10074951_B_C4bp
  gRNA
ctcatccactagttcttgtg

SEQ ID NO: 74952 - DNA, 20 bp, Artificial Sequence
  MKO10074952_B_C4bp
  gRNA
tccgaggcaaaggagttgcc

SEQ ID NO: 74953 - DNA, 20 bp, Artificial Sequence
  MKO10074953_B_C4b
  gRNA
cagagccccccacatccagc

SEQ ID NO: 74954 - DNA, 20 bp, Artificial Sequence
  MKO10074954_B_C4b
  gRNA
ggtgaaggcatcttggaaga

SEQ ID NO: 74955 - DNA, 20 bp, Artificial Sequence
  MKO10074955_B_C4b
  gRNA
ccttctcttagttcgttatc

SEQ ID NO: 74956 - DNA, 20 bp, Artificial Sequence
  MKO10074956_B_C530008M17Rik
  gRNA
actgttgtccagacgagcga

SEQ ID NO: 74957 - DNA, 20 bp, Artificial Sequence
  MKO10074957_B_C530008M17Rik
  gRNA
cctctgaatctacctgaagc

SEQ ID NO: 74958 - DNA, 20 bp, Artificial Sequence
  MKO10074958_B_C530008M17Rik
  gRNA
gaacgccattcccatgaaga

SEQ ID NO: 74959 - DNA, 20 bp, Artificial Sequence
  MKO10074959_B_C5ar1
  gRNA
ggccgacctcctctcgtgct

SEQ ID NO: 74960 - DNA, 20 bp, Artificial Sequence
  MKO10074960_B_C5ar1
  gRNA
tagtgccgaccgtttcctgc

SEQ ID NO: 74961 - DNA, 20 bp, Artificial Sequence
  MKO10074961_B_C5ar1
  gRNA
catacgaaacgctctctctg

SEQ ID NO: 74962 - DNA, 20 bp, Artificial Sequence
  MKO10074962_B_C5ar2
  gRNA
gtcttctgggatgaaatatg

SEQ ID NO: 74963 - DNA, 20 bp, Artificial Sequence
  MKO10074963_B_C5ar2
  gRNA
gggcagtctacgggcacgtc

SEQ ID NO: 74964 - DNA, 20 bp, Artificial Sequence
  MKO10074964_B_C5ar2
  gRNA
ctcatagtcataatactcgc

SEQ ID NO: 74965 - DNA, 20 bp, Artificial Sequence
  MKO10074965_B_C6
  gRNA
ggttgccccccaaactgact

SEQ ID NO: 74966 - DNA, 20 bp, Artificial Sequence
  MKO10074966_B_C6
  gRNA
tccattgcattctaacttgc

SEQ ID NO: 74967 - DNA, 20 bp, Artificial Sequence
  MKO10074967_B_C6
  gRNA
gtcctgcgcccaagtcagtt

SEQ ID NO: 74968 - DNA, 20 bp, Artificial Sequence
  MKO10074968_B_C77080
  gRNA
agcgaaggagcacggtgctg

SEQ ID NO: 74969 - DNA, 20 bp, Artificial Sequence
  MKO10074969_B_C77080
  gRNA
aaatgagtcatggggtctga

SEQ ID NO: 74970 - DNA, 20 bp, Artificial Sequence
  MKO10074970_B_C77080
  gRNA
ggctgggccctgcgccctga

SEQ ID NO: 74971 - DNA, 20 bp, Artificial Sequence
  MKO10074971_B_C77370
  gRNA
aatcagattgttgtctccat

SEQ ID NO: 74972 - DNA, 20 bp, Artificial Sequence
  MKO10074972_B_C77370
  gRNA
acaaacatcaaatgtctttc

SEQ ID NO: 74973 - DNA, 20 bp, Artificial Sequence
  MKO10074973_B_C77370
  gRNA
tgagtctcttcttcaaacac

SEQ ID NO: 74974 - DNA, 20 bp, Artificial Sequence
  MKO10074974_B_C78339
  gRNA
acagcctatgacattgtagc

SEQ ID NO: 74975 - DNA, 20 bp, Artificial Sequence
  MKO10074975_B_C78339
  gRNA
ttgagcatcatgcatctcag

SEQ ID NO: 74976 - DNA, 20 bp, Artificial Sequence
  MKO10074976_B_C78339
  gRNA
gattgatgaagacacatcaa

SEQ ID NO: 74977 - DNA, 20 bp, Artificial Sequence
  MKO10074977_B_C7
  gRNA
caatcctgcaaacctgaacg

SEQ ID NO: 74978 - DNA, 20 bp, Artificial Sequence
  MKO10074978_B_C7
  gRNA
aggaggcttatcaatgttgc

SEQ ID NO: 74979 - DNA, 20 bp, Artificial Sequence
  MKO10074979_B_C7
  gRNA
gagtcccacttgcagttgac

SEQ ID NO: 74980 - DNA, 20 bp, Artificial Sequence
  MKO10074980_B_C86695
  gRNA
ttacagccaagttgacctgc

SEQ ID NO: 74981 - DNA, 20 bp, Artificial Sequence
  MKO10074981_B_C86695
  gRNA
tgttccagctcaaacagccc

SEQ ID NO: 74982 - DNA, 20 bp, Artificial Sequence
  MKO10074982_B_C86695
  gRNA
gactgagtttctgtagacca

SEQ ID NO: 74983 - DNA, 20 bp, Artificial Sequence
  MKO10074983_B_C87414
  gRNA
tgagctgagtacattgactg

SEQ ID NO: 74984 - DNA, 20 bp, Artificial Sequence
  MKO10074984_B_C87414
  gRNA
gcatttgttatattgataat

SEQ ID NO: 74985 - DNA, 20 bp, Artificial Sequence
  MKO10074985_B_C87414
  gRNA
ccacaggagggcaaaacttc

SEQ ID NO: 74986 - DNA, 20 bp, Artificial Sequence
  MKO10074986_B_C87436
  gRNA
accatcaaactgatagtgca

SEQ ID NO: 74987 - DNA, 20 bp, Artificial Sequence
  MKO10074987_B_C87436
  gRNA
atgcagtaaacagcaatcta

SEQ ID NO: 74988 - DNA, 20 bp, Artificial Sequence
  MKO10074988_B_C87436
  gRNA
ctgtggtcagctgttagatg

SEQ ID NO: 74989 - DNA, 20 bp, Artificial Sequence
  MKO10074989_B_C87499
  gRNA
gacttacctgatcgggacac

SEQ ID NO: 74990 - DNA, 20 bp, Artificial Sequence
  MKO10074990_B_C87499
  gRNA
gatttctatgaatgcgtctt

SEQ ID NO: 74991 - DNA, 20 bp, Artificial Sequence
  MKO10074991_B_C87499
  gRNA
agctggagctaagttgtatc

SEQ ID NO: 74992 - DNA, 20 bp, Artificial Sequence
  MKO10074992_B_C87977
  gRNA
gactgaagttcttctcatga

SEQ ID NO: 74993 - DNA, 20 bp, Artificial Sequence
  MKO10074993_B_C87977
  gRNA
ctggagggtgggtggagaat

SEQ ID NO: 74994 - DNA, 20 bp, Artificial Sequence
  MKO10074994_B_C87977
  gRNA
tgaaggccatgatacctgcg

SEQ ID NO: 74995 - DNA, 20 bp, Artificial Sequence
  MKO10074995_B_C8a
  gRNA
gtttacgatgctaagtatta

SEQ ID NO: 74996 - DNA, 20 bp, Artificial Sequence
  MKO10074996_B_C8a
  gRNA
ccatctgcagtggtgatatc

SEQ ID NO: 74997 - DNA, 20 bp, Artificial Sequence
  MKO10074997_B_C8a
  gRNA
tgtcctgtcagttgagtgac

SEQ ID NO: 74998 - DNA, 20 bp, Artificial Sequence
  MKO10074998_B_C8b
  gRNA
attgtgtgacttgtccgaca

SEQ ID NO: 74999 - DNA, 20 bp, Artificial Sequence
  MKO10074999_B_C8b
  gRNA
agcagtactgggcaattgac

SEQ ID NO: 75000 - DNA, 20 bp, Artificial Sequence
  MKO10075000_B_C8b
  gRNA
acatcgtacttgactcctgc

SEQ ID NO: 75001 - DNA, 20 bp, Artificial Sequence
  MKO10075001_B_C8g
  gRNA
cgccaactctttgagaacac

SEQ ID NO: 75002 - DNA, 20 bp, Artificial Sequence
  MKO10075002_B_C8g
  gRNA
ctcttcgtgccgctttcttc

SEQ ID NO: 75003 - DNA, 20 bp, Artificial Sequence
  MKO10075003_B_C8g
  gRNA
tgggactcacagctttcgga

SEQ ID NO: 75004 - DNA, 20 bp, Artificial Sequence
  MKO10075004_B_C920025E04Rik
  gRNA
gctccatacatacctacagc

SEQ ID NO: 75005 - DNA, 20 bp, Artificial Sequence
  MKO10075005_B_C920025E04Rik
  gRNA
aacagcaatgattaccatgt

SEQ ID NO: 75006 - DNA, 20 bp, Artificial Sequence
  MKO10075006_B_C920025E04Rik
  gRNA
acatggagtttgtggagacc

SEQ ID NO: 75007 - DNA, 20 bp, Artificial Sequence
  MKO10075007_B_C9
  gRNA
agacatactatcgcaaacct

SEQ ID NO: 75008 - DNA, 20 bp, Artificial Sequence
  MKO10075008_B_C9
  gRNA
gctctgattcttccgctact

SEQ ID NO: 75009 - DNA, 20 bp, Artificial Sequence
  MKO10075009_B_C9
  gRNA
gtgatccttgcctcaaacaa

SEQ ID NO: 75010 - DNA, 20 bp, Artificial Sequence
  MKO10075010_B_CK137956
  gRNA
tgtcgggagtagcaccccag

SEQ ID NO: 75011 - DNA, 20 bp, Artificial Sequence
  MKO10075011_B_CK137956
  gRNA
cagcccgtccatatccactt

SEQ ID NO: 75012 - DNA, 20 bp, Artificial Sequence
  MKO10075012_B_CK137956
  gRNA
aaagaggctctctcgacttt

SEQ ID NO: 75013 - DNA, 20 bp, Artificial Sequence
  MKO10075013_B_Caap1
  gRNA
gaaagtaccttcagtacatc

SEQ ID NO: 75014 - DNA, 20 bp, Artificial Sequence
  MKO10075014_B_Caap1
  gRNA
acaaatcttgaagattcttg

SEQ ID NO: 75015 - DNA, 20 bp, Artificial Sequence
  MKO10075015_B_Caap1
  gRNA
acttactgactgattaaatc

SEQ ID NO: 75016 - DNA, 20 bp, Artificial Sequence
  MKO10075016_B_Cab39l
  gRNA
tggttactaggcttcagaag

SEQ ID NO: 75017 - DNA, 20 bp, Artificial Sequence
  MKO10075017_B_Cab39l
  gRNA
gaactgatgtactcgacagt

SEQ ID NO: 75018 - DNA, 20 bp, Artificial Sequence
  MKO10075018_B_Cab39l
  gRNA
tgctaccaatactttatgtc

SEQ ID NO: 75019 - DNA, 20 bp, Artificial Sequence
  MKO10075019_B_Cab39
  gRNA
agatgcatttgctacattca

SEQ ID NO: 75020 - DNA, 20 bp, Artificial Sequence
  MKO10075020_B_Cab39
  gRNA
gtgcagatgtattcaacagt

SEQ ID NO: 75021 - DNA, 20 bp, Artificial Sequence
  MKO10075021_B_Cab39
  gRNA
ccacaattaagagctatttc

SEQ ID NO: 75022 - DNA, 20 bp, Artificial Sequence
  MKO10075022_B_Cabin1
  gRNA
cggtctccaggtcctctcgc

SEQ ID NO: 75023 - DNA, 20 bp, Artificial Sequence
  MKO10075023_B_Cabin1
  gRNA
aaatgccagctccacgattg

SEQ ID NO: 75024 - DNA, 20 bp, Artificial Sequence
  MKO10075024_B_Cabin1
  gRNA
agtgcctcacctcccgcagc

SEQ ID NO: 75025 - DNA, 20 bp, Artificial Sequence
  MKO10075025_B_Cables1
  gRNA
cgacagcacgataccaagaa

SEQ ID NO: 75026 - DNA, 20 bp, Artificial Sequence
  MKO10075026_B_Cables1
  gRNA
cacccagttccacaccttca

SEQ ID NO: 75027 - DNA, 20 bp, Artificial Sequence
  MKO10075027_B_Cables1
  gRNA
ggaaaacttacctccggaga

SEQ ID NO: 75028 - DNA, 20 bp, Artificial Sequence
  MKO10075028_B_Cables2
  gRNA
acattgcagtgacctgaggg

SEQ ID NO: 75029 - DNA, 20 bp, Artificial Sequence
  MKO10075029_B_Cables2
  gRNA
tacagaaccaagcatgcatc

SEQ ID NO: 75030 - DNA, 20 bp, Artificial Sequence
  MKO10075030_B_Cables2
  gRNA
cccacttcatcaagaacatg

SEQ ID NO: 75031 - DNA, 20 bp, Artificial Sequence
  MKO10075031_B_Cabp1
  gRNA
ttacatcaactgccgggacc

SEQ ID NO: 75032 - DNA, 20 bp, Artificial Sequence
  MKO10075032_B_Cabp1
  gRNA
gcggatggcggcgagctcca

SEQ ID NO: 75033 - DNA, 20 bp, Artificial Sequence
  MKO10075033_B_Cabp1
  gRNA
ccctaaactcctggcggaga

SEQ ID NO: 75034 - DNA, 20 bp, Artificial Sequence
  MKO10075034_B_Cabp2
  gRNA
gggagcttcgagacgccttc

SEQ ID NO: 75035 - DNA, 20 bp, Artificial Sequence
  MKO10075035_B_Cabp2
  gRNA
ctaccacagttcgacaccaa

SEQ ID NO: 75036 - DNA, 20 bp, Artificial Sequence
  MKO10075036_B_Cabp2
  gRNA
ccattaccttcgatctcttc

SEQ ID NO: 75037 - DNA, 20 bp, Artificial Sequence
  MKO10075037_B_Cabp4
  gRNA
tgactcaccgtcaaagtcta

SEQ ID NO: 75038 - DNA, 20 bp, Artificial Sequence
  MKO10075038_B_Cabp4
  gRNA
gcgagctaggtgactgcatg

SEQ ID NO: 75039 - DNA, 20 bp, Artificial Sequence
  MKO10075039_B_Cabp4
  gRNA
gatggcaccatagactttga

SEQ ID NO: 75040 - DNA, 20 bp, Artificial Sequence
  MKO10075040_B_Cabp5
  gRNA
gattgctgaggtggtacagg

SEQ ID NO: 75041 - DNA, 20 bp, Artificial Sequence
  MKO10075041_B_Cabp5
  gRNA
tgctgtctctgcaagcaatt

SEQ ID NO: 75042 - DNA, 20 bp, Artificial Sequence
  MKO10075042_B_Cabp5
  gRNA
tgggggagaagctcacaccc

SEQ ID NO: 75043 - DNA, 20 bp, Artificial Sequence
  MKO10075043_B_Cabp7
  gRNA
tcttgcgcacacacgtctgg

SEQ ID NO: 75044 - DNA, 20 bp, Artificial Sequence
  MKO10075044_B_Cabp7
  gRNA
cgatggcgaaggcgcagatc

SEQ ID NO: 75045 - DNA, 20 bp, Artificial Sequence
  MKO10075045_B_Cabp7
  gRNA
ctgcgagcacttgtccatga

SEQ ID NO: 75046 - DNA, 20 bp, Artificial Sequence
  MKO10075046_B_Cabs1
  gRNA
agtccccccctcaactgaaa

SEQ ID NO: 75047 - DNA, 20 bp, Artificial Sequence
  MKO10075047_B_Cabs1
  gRNA
gggcgatccatcttcagcca

SEQ ID NO: 75048 - DNA, 20 bp, Artificial Sequence
  MKO10075048_B_Cabs1
  gRNA
gacttatctaccaccaactc

SEQ ID NO: 75049 - DNA, 20 bp, Artificial Sequence
  MKO10075049_B_Cabyr
  gRNA
ccatagggtacaacaagtct

SEQ ID NO: 75050 - DNA, 20 bp, Artificial Sequence
  MKO10075050_B_Cabyr
  gRNA
cccagacttgttgtacccta

SEQ ID NO: 75051 - DNA, 20 bp, Artificial Sequence
  MKO10075051_B_Cabyr
  gRNA
gatgtagctaaaaagagttc

SEQ ID NO: 75052 - DNA, 20 bp, Artificial Sequence
  MKO10075052_B_Cacfd1
  gRNA
acgccagctgcgatgttcag

SEQ ID NO: 75053 - DNA, 20 bp, Artificial Sequence
  MKO10075053_B_Cacfd1
  gRNA
caccctctgaacatcgcagc

SEQ ID NO: 75054 - DNA, 20 bp, Artificial Sequence
  MKO10075054_B_Cacfd1
  gRNA
aggcatggtgaagccttgcg

SEQ ID NO: 75055 - DNA, 20 bp, Artificial Sequence
  MKO10075055_B_Cachd1
  gRNA
cacaattccgccttccatga

SEQ ID NO: 75056 - DNA, 20 bp, Artificial Sequence
  MKO10075056_B_Cachd1
  gRNA
gctcgtagctgcccttacac

SEQ ID NO: 75057 - DNA, 20 bp, Artificial Sequence
  MKO10075057_B_Cachd1
  gRNA
gtagaggatcttcaattcgt

SEQ ID NO: 75058 - DNA, 20 bp, Artificial Sequence
  MKO10075058_B_Cacna1a
  gRNA
agtttgacctacggacactg

SEQ ID NO: 75059 - DNA, 20 bp, Artificial Sequence
  MKO10075059_B_Cacna1a
  gRNA
gacacggaaccatacttcat

SEQ ID NO: 75060 - DNA, 20 bp, Artificial Sequence
  MKO10075060_B_Cacna1a
  gRNA
actttgtcgtggtgctaaca

SEQ ID NO: 75061 - DNA, 20 bp, Artificial Sequence
  MKO10075061_B_Cacna1b
  gRNA
gcacagccctcagtgtgcgc

SEQ ID NO: 75062 - DNA, 20 bp, Artificial Sequence
  MKO10075062_B_Cacna1b
  gRNA
actcactagtcgctcagaca

SEQ ID NO: 75063 - DNA, 20 bp, Artificial Sequence
  MKO10075063_B_Cacna1b
  gRNA
ctggaatgtcatggacttcg

SEQ ID NO: 75064 - DNA, 20 bp, Artificial Sequence
  MKO10075064_B_Cacna1c
  gRNA
cccaacgcttacctccgcaa

SEQ ID NO: 75065 - DNA, 20 bp, Artificial Sequence
  MKO10075065_B_Cacna1c
  gRNA
gccgcagtggacggagcacg

SEQ ID NO: 75066 - DNA, 20 bp, Artificial Sequence
  MKO10075066_B_Cacna1c
  gRNA
tccgcgtgctccgtccactg

SEQ ID NO: 75067 - DNA, 20 bp, Artificial Sequence
  MKO10075067_B_Cacna1d
  gRNA
ccattcctaacgtaagcatt

SEQ ID NO: 75068 - DNA, 20 bp, Artificial Sequence
  MKO10075068_B_Cacna1d
  gRNA
gttggtccttcaccagaaat

SEQ ID NO: 75069 - DNA, 20 bp, Artificial Sequence
  MKO10075069_B_Cacna1d
  gRNA
tgcatcctaatgcttacgtt

SEQ ID NO: 75070 - DNA, 20 bp, Artificial Sequence
  MKO10075070_B_Cacna1e
  gRNA
ggtccacgtgggtgttgaag

SEQ ID NO: 75071 - DNA, 20 bp, Artificial Sequence
  MKO10075071_B_Cacna1e
  gRNA
cgtgctgaagtctatcatga

SEQ ID NO: 75072 - DNA, 20 bp, Artificial Sequence
  MKO10075072_B_Cacna1e
  gRNA
tctagggttcatcttccata

SEQ ID NO: 75073 - DNA, 20 bp, Artificial Sequence
  MKO10075073_B_Cacna1f
  gRNA
actgataccagcggggcgtc

SEQ ID NO: 75074 - DNA, 20 bp, Artificial Sequence
  MKO10075074_B_Cacna1f
  gRNA
ttagggtgctacgacctcta

SEQ ID NO: 75075 - DNA, 20 bp, Artificial Sequence
  MKO10075075_B_Cacna1f
  gRNA
gccaggaggcttcgatgtaa

SEQ ID NO: 75076 - DNA, 20 bp, Artificial Sequence
  MKO10075076_B_Cacna1g
  gRNA
gttcgagcgagtcagcatgc

SEQ ID NO: 75077 - DNA, 20 bp, Artificial Sequence
  MKO10075077_B_Cacna1g
  gRNA
tggagcgggcgccgaggagt

SEQ ID NO: 75078 - DNA, 20 bp, Artificial Sequence
  MKO10075078_B_Cacna1g
  gRNA
ggtggtgaagatggtcgctt

SEQ ID NO: 75079 - DNA, 20 bp, Artificial Sequence
  MKO10075079_B_Cacna1h
  gRNA
agatgctgcaacgttctgaa

SEQ ID NO: 75080 - DNA, 20 bp, Artificial Sequence
  MKO10075080_B_Cacna1h
  gRNA
cagcatgatggaatactctc

SEQ ID NO: 75081 - DNA, 20 bp, Artificial Sequence
  MKO10075081_B_Cacna1h
  gRNA
gttcggccagaaatgctacc

SEQ ID NO: 75082 - DNA, 20 bp, Artificial Sequence
  MKO10075082_B_Cacna1i
  gRNA
taggatggtcgagtactctc

SEQ ID NO: 75083 - DNA, 20 bp, Artificial Sequence
  MKO10075083_B_Cacna1i
  gRNA
tctcccaggcatgcggattc

SEQ ID NO: 75084 - DNA, 20 bp, Artificial Sequence
  MKO10075084_B_Cacna1i
  gRNA
tttggcaagaagtgctacct

SEQ ID NO: 75085 - DNA, 20 bp, Artificial Sequence
  MKO10075085_B_Cacna1s
  gRNA
gaacgttccagccactgcgc

SEQ ID NO: 75086 - DNA, 20 bp, Artificial Sequence
  MKO10075086_B_Cacna1s
  gRNA
ctgttcctgagattctgccg

SEQ ID NO: 75087 - DNA, 20 bp, Artificial Sequence
  MKO10075087_B_Cacna1s
  gRNA
gcacccccgacaccagccgc

SEQ ID NO: 75088 - DNA, 20 bp, Artificial Sequence
  MKO10075088_B_Cacna2d1
  gRNA
aaccagttggcgtgcattgt

SEQ ID NO: 75089 - DNA, 20 bp, Artificial Sequence
  MKO10075089_B_Cacna2d1
  gRNA
ctgcaaaatcttccctccat

SEQ ID NO: 75090 - DNA, 20 bp, Artificial Sequence
  MKO10075090_B_Cacna2d1
  gRNA
aagtccaagcagcccaccaa

SEQ ID NO: 75091 - DNA, 20 bp, Artificial Sequence
  MKO10075091_B_Cacna2d2
  gRNA
aggcgtgcagcagctccgag

SEQ ID NO: 75092 - DNA, 20 bp, Artificial Sequence
  MKO10075092_B_Cacna2d2
  gRNA
atttccagaaagcccatcgc

SEQ ID NO: 75093 - DNA, 20 bp, Artificial Sequence
  MKO10075093_B_Cacna2d2
  gRNA
tctagatctacaaggacaat

SEQ ID NO: 75094 - DNA, 20 bp, Artificial Sequence
  MKO10075094_B_Cacna2d3
  gRNA
ccaacgaacatgtacaacaa

SEQ ID NO: 75095 - DNA, 20 bp, Artificial Sequence
  MKO10075095_B_Cacna2d3
  gRNA
aagactcaccctcactgcct

SEQ ID NO: 75096 - DNA, 20 bp, Artificial Sequence
  MKO10075096_B_Cacna2d3
  gRNA
atccatcgctgccaagtact

SEQ ID NO: 75097 - DNA, 20 bp, Artificial Sequence
  MKO10075097_B_Cacna2d4
  gRNA
ctcgactttcctccgaagca

SEQ ID NO: 75098 - DNA, 20 bp, Artificial Sequence
  MKO10075098_B_Cacna2d4
  gRNA
ggtcactgaccttctgcagc

SEQ ID NO: 75099 - DNA, 20 bp, Artificial Sequence
  MKO10075099_B_Cacna2d4
  gRNA
tcatgagttcaatgcatctc

SEQ ID NO: 75100 - DNA, 20 bp, Artificial Sequence
  MKO10075100_B_Cacnb1
  gRNA
ggacagccttcgtctgctgc

SEQ ID NO: 75101 - DNA, 20 bp, Artificial Sequence
  MKO10075101_B_Cacnb1
  gRNA
tttgctgttcggacaaatgt

SEQ ID NO: 75102 - DNA, 20 bp, Artificial Sequence
  MKO10075102_B_Cacnb1
  gRNA
gcggctcttaccactggcag

SEQ ID NO: 75103 - DNA, 20 bp, Artificial Sequence
  MKO10075103_B_Cacnb2
  gRNA
atccgattcagatgtgtctt

SEQ ID NO: 75104 - DNA, 20 bp, Artificial Sequence
  MKO10075104_B_Cacnb2
  gRNA
ataggacggctggttaaaga

SEQ ID NO: 75105 - DNA, 20 bp, Artificial Sequence
  MKO10075105_B_Cacnb2
  gRNA
ctcatgttctctagtttgac

SEQ ID NO: 75106 - DNA, 20 bp, Artificial Sequence
  MKO10075106_B_Cacnb3
  gRNA
ggaagactacctagagacgg

SEQ ID NO: 75107 - DNA, 20 bp, Artificial Sequence
  MKO10075107_B_Cacnb3
  gRNA
aaccccacagtagctgacat

SEQ ID NO: 75108 - DNA, 20 bp, Artificial Sequence
  MKO10075108_B_Cacnb3
  gRNA
ctacaccagccgcccctctc

SEQ ID NO: 75109 - DNA, 20 bp, Artificial Sequence
  MKO10075109_B_Cacnb4
  gRNA
ccgtgttctaggaaatcgag

SEQ ID NO: 75110 - DNA, 20 bp, Artificial Sequence
  MKO10075110_B_Cacnb4
  gRNA
catcccaagtccactgcgct

SEQ ID NO: 75111 - DNA, 20 bp, Artificial Sequence
  MKO10075111_B_Cacnb4
  gRNA
ggtgttacccgccatgaaaa

SEQ ID NO: 75112 - DNA, 20 bp, Artificial Sequence
  MKO10075112_B_Cacng1
  gRNA
acctgcgaaggcataaaaca

SEQ ID NO: 75113 - DNA, 20 bp, Artificial Sequence
  MKO10075113_B_Cacng1
  gRNA
gtaatcacgcttattcccga

SEQ ID NO: 75114 - DNA, 20 bp, Artificial Sequence
  MKO10075114_B_Cacng1
  gRNA
gatgaacgcggcacatgcac

SEQ ID NO: 75115 - DNA, 20 bp, Artificial Sequence
  MKO10075115_B_Cacng2
  gRNA
ccacggtcttcatacgggcg

SEQ ID NO: 75116 - DNA, 20 bp, Artificial Sequence
  MKO10075116_B_Cacng2
  gRNA
attatggggctgtttgatcg

SEQ ID NO: 75117 - DNA, 20 bp, Artificial Sequence
  MKO10075117_B_Cacng2
  gRNA
actcgctcgccgcgatgcag

SEQ ID NO: 75118 - DNA, 20 bp, Artificial Sequence
  MKO10075118_B_Cacng3
  gRNA
gtaagtaccttccaagcagc

SEQ ID NO: 75119 - DNA, 20 bp, Artificial Sequence
  MKO10075119_B_Cacng3
  gRNA
ccagcgagttccaccgcagc

SEQ ID NO: 75120 - DNA, 20 bp, Artificial Sequence
  MKO10075120_B_Cacng3
  gRNA
cgaagaagatgccagcgctg

SEQ ID NO: 75121 - DNA, 20 bp, Artificial Sequence
  MKO10075121_B_Cacng4
  gRNA
acacccgccacagtcccgaa

SEQ ID NO: 75122 - DNA, 20 bp, Artificial Sequence
  MKO10075122_B_Cacng4
  gRNA
ggctctgcatcggcgctggg

SEQ ID NO: 75123 - DNA, 20 bp, Artificial Sequence
  MKO10075123_B_Cacng4
  gRNA
tggtcgtaatcattgtcctc

SEQ ID NO: 75124 - DNA, 20 bp, Artificial Sequence
  MKO10075124_B_Cacng5
  gRNA
cgtcgctggagatgtccgag

SEQ ID NO: 75125 - DNA, 20 bp, Artificial Sequence
  MKO10075125_B_Cacng5
  gRNA
acctatttcaactacaagta

SEQ ID NO: 75126 - DNA, 20 bp, Artificial Sequence
  MKO10075126_B_Cacng5
  gRNA
gagcatctcgtcattgatgc

SEQ ID NO: 75127 - DNA, 20 bp, Artificial Sequence
  MKO10075127_B_Cacng6
  gRNA
ccctcttgcagaggtaaacc

SEQ ID NO: 75128 - DNA, 20 bp, Artificial Sequence
  MKO10075128_B_Cacng6
  gRNA
ttccgtaggagccctgctgc

SEQ ID NO: 75129 - DNA, 20 bp, Artificial Sequence
  MKO10075129_B_Cacng6
  gRNA
tgcagagtccctgctccgat

SEQ ID NO: 75130 - DNA, 20 bp, Artificial Sequence
  MKO10075130_B_Cacng7
  gRNA
cagtactttcactatcgcta

SEQ ID NO: 75131 - DNA, 20 bp, Artificial Sequence
  MKO10075131_B_Cacng7
  gRNA
tcccccagagacagtgcgca

SEQ ID NO: 75132 - DNA, 20 bp, Artificial Sequence
  MKO10075132_B_Cacng7
  gRNA
cttcccaccaggtcgggaga

SEQ ID NO: 75133 - DNA, 20 bp, Artificial Sequence
  MKO10075133_B_Cacng8
  gRNA
catgaggccaaaagccgcga

SEQ ID NO: 75134 - DNA, 20 bp, Artificial Sequence
  MKO10075134_B_Cacng8
  gRNA
gggcgcagggatcctgttcg

SEQ ID NO: 75135 - DNA, 20 bp, Artificial Sequence
  MKO10075135_B_Cacng8
  gRNA
aactggagtcattgaaacgc

SEQ ID NO: 75136 - DNA, 20 bp, Artificial Sequence
  MKO10075136_B_Cactin
  gRNA
gctcgtgcatctccaccgcc

SEQ ID NO: 75137 - DNA, 20 bp, Artificial Sequence
  MKO10075137_B_Cactin
  gRNA
ggtgtacatggaactagagc

SEQ ID NO: 75138 - DNA, 20 bp, Artificial Sequence
  MKO10075138_B_Cactin
  gRNA
gattgccaagctccgcaagc

SEQ ID NO: 75139 - DNA, 20 bp, Artificial Sequence
  MKO10075139_B_Cacul1
  gRNA
aagattataagagcacatac

SEQ ID NO: 75140 - DNA, 20 bp, Artificial Sequence
  MKO10075140_B_Cacul1
  gRNA
ccacttagagcgagtctcca

SEQ ID NO: 75141 - DNA, 20 bp, Artificial Sequence
  MKO10075141_B_Cacul1
  gRNA
tgaaagatttaatatagctc

SEQ ID NO: 75142 - DNA, 20 bp, Artificial Sequence
  MKO10075142_B_Cacybp
  gRNA
gttgcagaaagacctagaag

SEQ ID NO: 75143 - DNA, 20 bp, Artificial Sequence
  MKO10075143_B_Cacybp
  gRNA
tattgctggaaaagtccact

SEQ ID NO: 75144 - DNA, 20 bp, Artificial Sequence
  MKO10075144_B_Cacybp
  gRNA
gaactgctttccacagagat

SEQ ID NO: 75145 - DNA, 20 bp, Artificial Sequence
  MKO10075145_B_Cadm1
  gRNA
agtcgtcactcttattgacc

SEQ ID NO: 75146 - DNA, 20 bp, Artificial Sequence
  MKO10075146_B_Cadm1
  gRNA
atcccagtgtgcggcggcag

SEQ ID NO: 75147 - DNA, 20 bp, Artificial Sequence
  MKO10075147_B_Cadm1
  gRNA
tgtcttacccaggactgtga

SEQ ID NO: 75148 - DNA, 20 bp, Artificial Sequence
  MKO10075148_B_Cadm2
  gRNA
cgcgctgcgtttccaaatca

SEQ ID NO: 75149 - DNA, 20 bp, Artificial Sequence
  MKO10075149_B_Cadm2
  gRNA
catgatttggaaacgcagcg

SEQ ID NO: 75150 - DNA, 20 bp, Artificial Sequence
  MKO10075150_B_Cadm2
  gRNA
aagtacagagtctgttgagc

SEQ ID NO: 75151 - DNA, 20 bp, Artificial Sequence
  MKO10075151_B_Cadm3
  gRNA
actactcaccgtggagttct

SEQ ID NO: 75152 - DNA, 20 bp, Artificial Sequence
  MKO10075152_B_Cadm3
  gRNA
aggggaccaaacacgaatcc

SEQ ID NO: 75153 - DNA, 20 bp, Artificial Sequence
  MKO10075153_B_Cadm3
  gRNA
ctctcttctccccgaagtat

SEQ ID NO: 75154 - DNA, 20 bp, Artificial Sequence
  MKO10075154_B_Cadm4
  gRNA
caagcagacgcagtacgtgc

SEQ ID NO: 75155 - DNA, 20 bp, Artificial Sequence
  MKO10075155_B_Cadm4
  gRNA
tgggttctgaatgacgacta

SEQ ID NO: 75156 - DNA, 20 bp, Artificial Sequence
  MKO10075156_B_Cadm4
  gRNA
gaaggacgagcgattccagc

SEQ ID NO: 75157 - DNA, 20 bp, Artificial Sequence
  MKO10075157_B_Cadps2
  gRNA
atttgtgcaaacagccgaac

SEQ ID NO: 75158 - DNA, 20 bp, Artificial Sequence
  MKO10075158_B_Cadps2
  gRNA
acttgatggccgcctgcagt

SEQ ID NO: 75159 - DNA, 20 bp, Artificial Sequence
  MKO10075159_B_Cadps2
  gRNA
aagccttctgcaatgccgtc

SEQ ID NO: 75160 - DNA, 20 bp, Artificial Sequence
  MKO10075160_B_Cadps
  gRNA
tgcttacctcatagtagctc

SEQ ID NO: 75161 - DNA, 20 bp, Artificial Sequence
  MKO10075161_B_Cadps
  gRNA
aggcttcatcagctacgatt

SEQ ID NO: 75162 - DNA, 20 bp, Artificial Sequence
  MKO10075162_B_Cadps
  gRNA
agcccagatcagacgagagc

SEQ ID NO: 75163 - DNA, 20 bp, Artificial Sequence
  MKO10075163_B_Cad
  gRNA
ccacgtggcgggacttgtag

SEQ ID NO: 75164 - DNA, 20 bp, Artificial Sequence
  MKO10075164_B_Cad
  gRNA
ccactacaagtcccgccacg

SEQ ID NO: 75165 - DNA, 20 bp, Artificial Sequence
  MKO10075165_B_Cad
  gRNA
gtgctaacgtatcctctcat

SEQ ID NO: 75166 - DNA, 20 bp, Artificial Sequence
  MKO10075166_B_Cage1
  gRNA
aacttgttcccgcgccagtg

SEQ ID NO: 75167 - DNA, 20 bp, Artificial Sequence
  MKO10075167_B_Cage1
  gRNA
tctgaagaaaacttctccgc

SEQ ID NO: 75168 - DNA, 20 bp, Artificial Sequence
  MKO10075168_B_Cage1
  gRNA
ctttacaagaagagcgattc

SEQ ID NO: 75169 - DNA, 20 bp, Artificial Sequence
  MKO10075169_B_Calb1
  gRNA
ttcgcgcctgcagaagctcc

SEQ ID NO: 75170 - DNA, 20 bp, Artificial Sequence
  MKO10075170_B_Calb1
  gRNA
ctgtccatattgatccacaa

SEQ ID NO: 75171 - DNA, 20 bp, Artificial Sequence
  MKO10075171_B_Calb1
  gRNA
taccttcatgaattcctcgc

SEQ ID NO: 75172 - DNA, 20 bp, Artificial Sequence
  MKO10075172_B_Calb2
  gRNA
ccctcataccttgagctcat

SEQ ID NO: 75173 - DNA, 20 bp, Artificial Sequence
  MKO10075173_B_Calb2
  gRNA
gggctccagcgctgagttta

SEQ ID NO: 75174 - DNA, 20 bp, Artificial Sequence
  MKO10075174_B_Calb2
  gRNA
catcgaagccaatgagctca

SEQ ID NO: 75175 - DNA, 20 bp, Artificial Sequence
  MKO10075175_B_Calca
  gRNA
cgtacctcaaaggcactgcc

SEQ ID NO: 75176 - DNA, 20 bp, Artificial Sequence
  MKO10075176_B_Calca
  gRNA
tcagcagacctgccagccga

SEQ ID NO: 75177 - DNA, 20 bp, Artificial Sequence
  MKO10075177_B_Calca
  gRNA
aagccttcggccgccgccgc

SEQ ID NO: 75178 - DNA, 20 bp, Artificial Sequence
  MKO10075178_B_Calcb
  gRNA
caactttgtgcccaccgatg

SEQ ID NO: 75179 - DNA, 20 bp, Artificial Sequence
  MKO10075179_B_Calcb
  gRNA
gcagacctgctgagcagatc

SEQ ID NO: 75180 - DNA, 20 bp, Artificial Sequence
  MKO10075180_B_Calcb
  gRNA
acagagacatcatggacttt

SEQ ID NO: 75181 - DNA, 20 bp, Artificial Sequence
  MKO10075181_B_Calcoco1
  gRNA
agaccatgtggcccgtatcc

SEQ ID NO: 75182 - DNA, 20 bp, Artificial Sequence
  MKO10075182_B_Calcoco1
  gRNA
gttccggtatgtgaaccgcc

SEQ ID NO: 75183 - DNA, 20 bp, Artificial Sequence
  MKO10075183_B_Calcoco1
  gRNA
ggatgtcatcctctaactcc

SEQ ID NO: 75184 - DNA, 20 bp, Artificial Sequence
  MKO10075184_B_Calcoco2
  gRNA
ttcagcttattaccttccca

SEQ ID NO: 75185 - DNA, 20 bp, Artificial Sequence
  MKO10075185_B_Calcoco2
  gRNA
ggtagggtggaagaccactc

SEQ ID NO: 75186 - DNA, 20 bp, Artificial Sequence
  MKO10075186_B_Calcoco2
  gRNA
ggagctttaccaacaaaacc

SEQ ID NO: 75187 - DNA, 20 bp, Artificial Sequence
  MKO10075187_B_Calcrl
  gRNA
atgttaccagaagatcatgc

SEQ ID NO: 75188 - DNA, 20 bp, Artificial Sequence
  MKO10075188_B_Calcrl
  gRNA
cctgggacggatggctatgc

SEQ ID NO: 75189 - DNA, 20 bp, Artificial Sequence
  MKO10075189_B_Calcrl
  gRNA
aggcgtgaaccaaacagact

SEQ ID NO: 75190 - DNA, 20 bp, Artificial Sequence
  MKO10075190_B_Calcr
  gRNA
gcactgccctgactacttcc

SEQ ID NO: 75191 - DNA, 20 bp, Artificial Sequence
  MKO10075191_B_Calcr
  gRNA
acaggaatggctcctgatca

SEQ ID NO: 75192 - DNA, 20 bp, Artificial Sequence
  MKO10075192_B_Calcr
  gRNA
acttacactctggacctcct

SEQ ID NO: 75193 - DNA, 20 bp, Artificial Sequence
  MKO10075193_B_Cald1
  gRNA
gtctctcttctcgtctagcc

SEQ ID NO: 75194 - DNA, 20 bp, Artificial Sequence
  MKO10075194_B_Cald1
  gRNA
aggaggctgatcgaaaagct

SEQ ID NO: 75195 - DNA, 20 bp, Artificial Sequence
  MKO10075195_B_Cald1
  gRNA
aacaaaccgagaatgctttc

SEQ ID NO: 75196 - DNA, 20 bp, Artificial Sequence
  MKO10075196_B_Calhm1
  gRNA
tccagaacttgctcgcctac

SEQ ID NO: 75197 - DNA, 20 bp, Artificial Sequence
  MKO10075197_B_Calhm1
  gRNA
tgcgctcaatgtcaatgtag

SEQ ID NO: 75198 - DNA, 20 bp, Artificial Sequence
  MKO10075198_B_Calhm1
  gRNA
ctctcatcgcccctgtcgtc

SEQ ID NO: 75199 - DNA, 20 bp, Artificial Sequence
  MKO10075199_B_Calhm2
  gRNA
ctcgccactcagctaccgtc

SEQ ID NO: 75200 - DNA, 20 bp, Artificial Sequence
  MKO10075200_B_Calhm2
  gRNA
tagttccgggcgggtgagca

SEQ ID NO: 75201 - DNA, 20 bp, Artificial Sequence
  MKO10075201_B_Calhm2
  gRNA
ggtactggcactcggcgact

SEQ ID NO: 75202 - DNA, 20 bp, Artificial Sequence
  MKO10075202_B_Calm1
  gRNA
cgccacgtcatgacaaactt

SEQ ID NO: 75203 - DNA, 20 bp, Artificial Sequence
  MKO10075203_B_Calm1
  gRNA
tagcgaagaagagatccgcg

SEQ ID NO: 75204 - DNA, 20 bp, Artificial Sequence
  MKO10075204_B_Calm1
  gRNA
cccagagttcttgactatga

SEQ ID NO: 75205 - DNA, 20 bp, Artificial Sequence
  MKO10075205_B_Calm2
  gRNA
gtcctgcagttctgcttctg

SEQ ID NO: 75206 - DNA, 20 bp, Artificial Sequence
  MKO10075206_B_Calm2
  gRNA
ctgactgaagagcagattgc

SEQ ID NO: 75207 - DNA, 20 bp, Artificial Sequence
  MKO10075207_B_Calm2
  gRNA
caatctgctcttcagtcagt

SEQ ID NO: 75208 - DNA, 20 bp, Artificial Sequence
  MKO10075208_B_Calm3
  gRNA
gtcctgcagctccgcctcag

SEQ ID NO: 75209 - DNA, 20 bp, Artificial Sequence
  MKO10075209_B_Calm3
  gRNA
gatgaaggatacagacagcg

SEQ ID NO: 75210 - DNA, 20 bp, Artificial Sequence
  MKO10075210_B_Calm3
  gRNA
caatctgttcctcagtcagc

SEQ ID NO: 75211 - DNA, 20 bp, Artificial Sequence
  MKO10075211_B_Calm4
  gRNA
catatcagcgtcgaggaact

SEQ ID NO: 75212 - DNA, 20 bp, Artificial Sequence
  MKO10075212_B_Calm4
  gRNA
gggcaagaacctcccagaga

SEQ ID NO: 75213 - DNA, 20 bp, Artificial Sequence
  MKO10075213_B_Calm4
  gRNA
caataggtttgacaagaata

SEQ ID NO: 75214 - DNA, 20 bp, Artificial Sequence
  MKO10075214_B_Calm5
  gRNA
cctctcacatgaggaactga

SEQ ID NO: 75215 - DNA, 20 bp, Artificial Sequence
  MKO10075215_B_Calm5
  gRNA
gagggcatgatccatgtgtt

SEQ ID NO: 75216 - DNA, 20 bp, Artificial Sequence
  MKO10075216_B_Calm5
  gRNA
ctacattgagactgtataca

SEQ ID NO: 75217 - DNA, 20 bp, Artificial Sequence
  MKO10075217_B_Calml3
  gRNA
ggccttccgagtgttcgaca

SEQ ID NO: 75218 - DNA, 20 bp, Artificial Sequence
  MKO10075218_B_Calml3
  gRNA
cgatttgctcctcagtcagc

SEQ ID NO: 75219 - DNA, 20 bp, Artificial Sequence
  MKO10075219_B_Calml3
  gRNA
cagtatcaccacccaagaat

SEQ ID NO: 75220 - DNA, 20 bp, Artificial Sequence
  MKO10075220_B_Calml4
  gRNA
cctagacaagaacggagagc

SEQ ID NO: 75221 - DNA, 20 bp, Artificial Sequence
  MKO10075221_B_Calml4
  gRNA
acatcatggcgtctgagctg

SEQ ID NO: 75222 - DNA, 20 bp, Artificial Sequence
  MKO10075222_B_Calml4
  gRNA
acaggccaagttcctttccc

SEQ ID NO: 75223 - DNA, 20 bp, Artificial Sequence
  MKO10075223_B_Caln1
  gRNA
catgccgagcgaagtggagc

SEQ ID NO: 75224 - DNA, 20 bp, Artificial Sequence
  MKO10075224_B_Caln1
  gRNA
ccgttccaccatgtaaccgc

SEQ ID NO: 75225 - DNA, 20 bp, Artificial Sequence
  MKO10075225_B_Caln1
  gRNA
acatcctgtaccacgccttc

SEQ ID NO: 75226 - DNA, 20 bp, Artificial Sequence
  MKO10075226_B_Calr3
  gRNA
gatggccagtccattgagtc

SEQ ID NO: 75227 - DNA, 20 bp, Artificial Sequence
  MKO10075227_B_Calr3
  gRNA
gcactcaccttgcatctgat

SEQ ID NO: 75228 - DNA, 20 bp, Artificial Sequence
  MKO10075228_B_Calr3
  gRNA
caccagaagatgagacctgc

SEQ ID NO: 75229 - DNA, 20 bp, Artificial Sequence
  MKO10075229_B_Calr4
  gRNA
gataccaaacgtcaagtaca

SEQ ID NO: 75230 - DNA, 20 bp, Artificial Sequence
  MKO10075230_B_Calr4
  gRNA
attgctgaatggcttaaacc

SEQ ID NO: 75231 - DNA, 20 bp, Artificial Sequence
  MKO10075231_B_Calr4
  gRNA
ttaacctcataagtagcatt

SEQ ID NO: 75232 - DNA, 20 bp, Artificial Sequence
  MKO10075232_B_Calr
  gRNA
gtgcgtaaaatcgggcatct

SEQ ID NO: 75233 - DNA, 20 bp, Artificial Sequence
  MKO10075233_B_Calr
  gRNA
gccaaaatcggacttatgtt

SEQ ID NO: 75234 - DNA, 20 bp, Artificial Sequence
  MKO10075234_B_Calr
  gRNA
gccgcacaatcagtgtgtat

SEQ ID NO: 75235 - DNA, 20 bp, Artificial Sequence
  MKO10075235_B_Calu
  gRNA
agatgagcggaggtttaaaa

SEQ ID NO: 75236 - DNA, 20 bp, Artificial Sequence
  MKO10075236_B_Calu
  gRNA
attgatctagaggagtacat

SEQ ID NO: 75237 - DNA, 20 bp, Artificial Sequence
  MKO10075237_B_Calu
  gRNA
ggcacataagaaactgacgc

SEQ ID NO: 75238 - DNA, 20 bp, Artificial Sequence
  MKO10075238_B_Caly
  gRNA
gctgcagcctagcttcacca

SEQ ID NO: 75239 - DNA, 20 bp, Artificial Sequence
  MKO10075239_B_Caly
  gRNA
acccgaagtaggaagccatc

SEQ ID NO: 75240 - DNA, 20 bp, Artificial Sequence
  MKO10075240_B_Caly
  gRNA
ggtaaactggtcataccaga

SEQ ID NO: 75241 - DNA, 20 bp, Artificial Sequence
  MKO10075241_B_Camk1d
  gRNA
agtgaagtgcatcccgaaga

SEQ ID NO: 75242 - DNA, 20 bp, Artificial Sequence
  MKO10075242_B_Camk1d
  gRNA
aagcccaaatcacctctacc

SEQ ID NO: 75243 - DNA, 20 bp, Artificial Sequence
  MKO10075243_B_Camk1d
  gRNA
tgccagcactctcatccgcc

SEQ ID NO: 75244 - DNA, 20 bp, Artificial Sequence
  MKO10075244_B_Camk1g
  gRNA
acacagcgatctcattctct

SEQ ID NO: 75245 - DNA, 20 bp, Artificial Sequence
  MKO10075245_B_Camk1g
  gRNA
ctgtgtagacaccacgctct

SEQ ID NO: 75246 - DNA, 20 bp, Artificial Sequence
  MKO10075246_B_Camk1g
  gRNA
atgagatcgctgtgttgaaa

SEQ ID NO: 75247 - DNA, 20 bp, Artificial Sequence
  MKO10075247_B_Camk1
  gRNA
gaacctgctgtactacagtc

SEQ ID NO: 75248 - DNA, 20 bp, Artificial Sequence
  MKO10075248_B_Camk1
  gRNA
tgccacatacttgtgtaaga

SEQ ID NO: 75249 - DNA, 20 bp, Artificial Sequence
  MKO10075249_B_Camk1
  gRNA
cactctcatagatgtcatcc

SEQ ID NO: 75250 - DNA, 20 bp, Artificial Sequence
  MKO10075250_B_Camk2a
  gRNA
tttggtgtcttcgtcctcaa

SEQ ID NO: 75251 - DNA, 20 bp, Artificial Sequence
  MKO10075251_B_Camk2a
  gRNA
gagcaccaacaccaccattg

SEQ ID NO: 75252 - DNA, 20 bp, Artificial Sequence
  MKO10075252_B_Camk2a
  gRNA
caagaagaacgatggtgtga

SEQ ID NO: 75253 - DNA, 20 bp, Artificial Sequence
  MKO10075253_B_Camk2b
  gRNA
tacagagcttgacacagcgt

SEQ ID NO: 75254 - DNA, 20 bp, Artificial Sequence
  MKO10075254_B_Camk2b
  gRNA
caatgttggaatgcttcagc

SEQ ID NO: 75255 - DNA, 20 bp, Artificial Sequence
  MKO10075255_B_Camk2b
  gRNA
ctgctgaagcattccaacat

SEQ ID NO: 75256 - DNA, 20 bp, Artificial Sequence
  MKO10075256_B_Camk2d
  gRNA
ttccaggggggcgttctcag

SEQ ID NO: 75257 - DNA, 20 bp, Artificial Sequence
  MKO10075257_B_Camk2d
  gRNA
agatgtatgaaaatccctac

SEQ ID NO: 75258 - DNA, 20 bp, Artificial Sequence
  MKO10075258_B_Camk2d
  gRNA
ttcaacagaccatcagaaac

SEQ ID NO: 75259 - DNA, 20 bp, Artificial Sequence
  MKO10075259_B_Camk2g
  gRNA
gcacttacaggtcaaacacg

SEQ ID NO: 75260 - DNA, 20 bp, Artificial Sequence
  MKO10075260_B_Camk2g
  gRNA
gtcgtcggtgaagcgggtgc

SEQ ID NO: 75261 - DNA, 20 bp, Artificial Sequence
  MKO10075261_B_Camk2g
  gRNA
tcatcagaaactagaacgag

SEQ ID NO: 75262 - DNA, 20 bp, Artificial Sequence
  MKO10075262_B_Camk2n1
  gRNA
ctttggggcagttagacacc

SEQ ID NO: 75263 - DNA, 20 bp, Artificial Sequence
  MKO10075263_B_Camk2n1
  gRNA
cacgtcgccgccgtcgccgt

SEQ ID NO: 75264 - DNA, 20 bp, Artificial Sequence
  MKO10075264_B_Camk2n1
  gRNA
gcaggcggcacgagaagatc

SEQ ID NO: 75265 - DNA, 20 bp, Artificial Sequence
  MKO10075265_B_Camk2n2
  gRNA
atgtccgagatcctacccta

SEQ ID NO: 75266 - DNA, 20 bp, Artificial Sequence
  MKO10075266_B_Camk2n2
  gRNA
ccttcagcacgtcgtctatc

SEQ ID NO: 75267 - DNA, 20 bp, Artificial Sequence
  MKO10075267_B_Camk2n2
  gRNA
atgggggagaagcctccgtc

SEQ ID NO: 75268 - DNA, 20 bp, Artificial Sequence
  MKO10075268_B_Camk4
  gRNA
caggaggagaactgtttgac

SEQ ID NO: 75269 - DNA, 20 bp, Artificial Sequence
  MKO10075269_B_Camk4
  gRNA
ctttaacactttgagagcat

SEQ ID NO: 75270 - DNA, 20 bp, Artificial Sequence
  MKO10075270_B_Camk4
  gRNA
ttgtccccagataaaactca

SEQ ID NO: 75271 - DNA, 20 bp, Artificial Sequence
  MKO10075271_B_Camkk1
  gRNA
tctgcagggtgcctatggtg

SEQ ID NO: 75272 - DNA, 20 bp, Artificial Sequence
  MKO10075272_B_Camkk1
  gRNA
tacaagctgcagagtgagat

SEQ ID NO: 75273 - DNA, 20 bp, Artificial Sequence
  MKO10075273_B_Camkk1
  gRNA
tctcactctgcagcttgtac

SEQ ID NO: 75274 - DNA, 20 bp, Artificial Sequence
  MKO10075274_B_Camkk2
  gRNA
ctcctatggtgttgtcaagc

SEQ ID NO: 75275 - DNA, 20 bp, Artificial Sequence
  MKO10075275_B_Camkk2
  gRNA
gctgaatcagtacaccctga

SEQ ID NO: 75276 - DNA, 20 bp, Artificial Sequence
  MKO10075276_B_Camkk2
  gRNA
cacgtgggaagccagcctgt

SEQ ID NO: 75277 - DNA, 20 bp, Artificial Sequence
  MKO10075277_B_Camkmt
  gRNA
ggtggcatgacatgcttggc

SEQ ID NO: 75278 - DNA, 20 bp, Artificial Sequence
  MKO10075278_B_Camkmt
  gRNA
ttccttcgcaggcataatag

SEQ ID NO: 75279 - DNA, 20 bp, Artificial Sequence
  MKO10075279_B_Camkmt
  gRNA
cttaccagctttgacaacac

SEQ ID NO: 75280 - DNA, 20 bp, Artificial Sequence
  MKO10075280_B_Camkv
  gRNA
gaggattccaatctcgttct

SEQ ID NO: 75281 - DNA, 20 bp, Artificial Sequence
  MKO10075281_B_Camkv
  gRNA
ctgtggaaccccggagtatc

SEQ ID NO: 75282 - DNA, 20 bp, Artificial Sequence
  MKO10075282_B_Camkv
  gRNA
agatgtgtttgtgacccgca

SEQ ID NO: 75283 - DNA, 20 bp, Artificial Sequence
  MKO10075283_B_Caml
  gRNA
ttcccgctgaggtgatcaac

SEQ ID NO: 75284 - DNA, 20 bp, Artificial Sequence
  MKO10075284_B_Caml
  gRNA
ggaccggttgatcacctcag

SEQ ID NO: 75285 - DNA, 20 bp, Artificial Sequence
  MKO10075285_B_Caml
  gRNA
cttctgccacaccaccgagc

SEQ ID NO: 75286 - DNA, 20 bp, Artificial Sequence
  MKO10075286_B_Camp
  gRNA
aagaaaatttcccggctggc

SEQ ID NO: 75287 - DNA, 20 bp, Artificial Sequence
  MKO10075287_B_Camp
  gRNA
acctgagcaatgtgccttca

SEQ ID NO: 75288 - DNA, 20 bp, Artificial Sequence
  MKO10075288_B_Camp
  gRNA
tgggaaccatgcagttccag

SEQ ID NO: 75289 - DNA, 20 bp, Artificial Sequence
  MKO10075289_B_Camsap1
  gRNA
ttacatcgaccagtatgagc

SEQ ID NO: 75290 - DNA, 20 bp, Artificial Sequence
  MKO10075290_B_Camsap1
  gRNA
atcaactgcaggtccgttat

SEQ ID NO: 75291 - DNA, 20 bp, Artificial Sequence
  MKO10075291_B_Camsap1
  gRNA
gatggtggatgccctgatga

SEQ ID NO: 75292 - DNA, 20 bp, Artificial Sequence
  MKO10075292_B_Camsap2
  gRNA
gacagcatcctcaatatcat

SEQ ID NO: 75293 - DNA, 20 bp, Artificial Sequence
  MKO10075293_B_Camsap2
  gRNA
caccacccagctgaagctcc

SEQ ID NO: 75294 - DNA, 20 bp, Artificial Sequence
  MKO10075294_B_Camsap2
  gRNA
tgaacacttgaaagacataa

SEQ ID NO: 75295 - DNA, 20 bp, Artificial Sequence
  MKO10075295_B_Camsap3
  gRNA
tctctgcggaactatactgt

SEQ ID NO: 75296 - DNA, 20 bp, Artificial Sequence
  MKO10075296_B_Camsap3
  gRNA
ctgacccctagactgttcgg

SEQ ID NO: 75297 - DNA, 20 bp, Artificial Sequence
  MKO10075297_B_Camsap3
  gRNA
tgagagcatcgatgacagct

SEQ ID NO: 75298 - DNA, 20 bp, Artificial Sequence
  MKO10075298_B_Camta1
  gRNA
aatggctgccgaaaacaagc

SEQ ID NO: 75299 - DNA, 20 bp, Artificial Sequence
  MKO10075299_B_Camta1
  gRNA
gaggaggaggatgtggcgcg

SEQ ID NO: 75300 - DNA, 20 bp, Artificial Sequence
  MKO10075300_B_Camta1
  gRNA
ttgggtaaacttgaacattt

SEQ ID NO: 75301 - DNA, 20 bp, Artificial Sequence
  MKO10075301_B_Camta2
  gRNA
cctttgagaaacacgatgag

SEQ ID NO: 75302 - DNA, 20 bp, Artificial Sequence
  MKO10075302_B_Camta2
  gRNA
cttcctccccaagaaattgc

SEQ ID NO: 75303 - DNA, 20 bp, Artificial Sequence
  MKO10075303_B_Camta2
  gRNA
aagacactccagcaatttct

SEQ ID NO: 75304 - DNA, 20 bp, Artificial Sequence
  MKO10075304_B_Cand1
  gRNA
tcatggctgacatgttgagc

SEQ ID NO: 75305 - DNA, 20 bp, Artificial Sequence
  MKO10075305_B_Cand1
  gRNA
agcagcaatacactgtatgt

SEQ ID NO: 75306 - DNA, 20 bp, Artificial Sequence
  MKO10075306_B_Cand1
  gRNA
ttctgttcagctcgaagcct

SEQ ID NO: 75307 - DNA, 20 bp, Artificial Sequence
  MKO10075307_B_Cand2
  gRNA
gagcagctccgggacatcgc

SEQ ID NO: 75308 - DNA, 20 bp, Artificial Sequence
  MKO10075308_B_Cand2
  gRNA
tgaggacagcgagcgtaagg

SEQ ID NO: 75309 - DNA, 20 bp, Artificial Sequence
  MKO10075309_B_Cand2
  gRNA
caccagtgccatcgcccagc

SEQ ID NO: 75310 - DNA, 20 bp, Artificial Sequence
  MKO10075310_B_Cant1
  gRNA
tgtaatgagagatgcgctgc

SEQ ID NO: 75311 - DNA, 20 bp, Artificial Sequence
  MKO10075311_B_Cant1
  gRNA
accctcgcttccgcccccgc

SEQ ID NO: 75312 - DNA, 20 bp, Artificial Sequence
  MKO10075312_B_Cant1
  gRNA
tgctctcagggcgttgtagc

SEQ ID NO: 75313 - DNA, 20 bp, Artificial Sequence
  MKO10075313_B_Canx
  gRNA
gcaaaataaacctcccctgt

SEQ ID NO: 75314 - DNA, 20 bp, Artificial Sequence
  MKO10075314_B_Canx
  gRNA
tgaacttactgaacaatgag

SEQ ID NO: 75315 - DNA, 20 bp, Artificial Sequence
  MKO10075315_B_Canx
  gRNA
tttgctgactcctttgacag

SEQ ID NO: 75316 - DNA, 20 bp, Artificial Sequence
  MKO10075316_B_Cap1
  gRNA
ggagagctcgctccaacttc

SEQ ID NO: 75317 - DNA, 20 bp, Artificial Sequence
  MKO10075317_B_Cap1
  gRNA
cccggaaggttataacttct

SEQ ID NO: 75318 - DNA, 20 bp, Artificial Sequence
  MKO10075318_B_Cap1
  gRNA
ctcgctgcttgccaatcccg

SEQ ID NO: 75319 - DNA, 20 bp, Artificial Sequence
  MKO10075319_B_Cap2
  gRNA
tcctgaaagactacaagcac

SEQ ID NO: 75320 - DNA, 20 bp, Artificial Sequence
  MKO10075320_B_Cap2
  gRNA
gagtctctacgtcaccagca

SEQ ID NO: 75321 - DNA, 20 bp, Artificial Sequence
  MKO10075321_B_Cap2
  gRNA
acctgtgcttgtagtctttc

SEQ ID NO: 75322 - DNA, 20 bp, Artificial Sequence
  MKO10075322_B_Capg
  gRNA
gttggactttccaccacacc

SEQ ID NO: 75323 - DNA, 20 bp, Artificial Sequence
  MKO10075323_B_Capg
  gRNA
ctctctcgtgctatgggcac

SEQ ID NO: 75324 - DNA, 20 bp, Artificial Sequence
  MKO10075324_B_Capg
  gRNA
gctcatcccgggaggactgc

SEQ ID NO: 75325 - DNA, 20 bp, Artificial Sequence
  MKO10075325_B_Capn10
  gRNA
atggaactctccgagttccc

SEQ ID NO: 75326 - DNA, 20 bp, Artificial Sequence
  MKO10075326_B_Capn10
  gRNA
acaaggcagacgatcatcta

SEQ ID NO: 75327 - DNA, 20 bp, Artificial Sequence
  MKO10075327_B_Capn10
  gRNA
actcttctgaagggcggcac

SEQ ID NO: 75328 - DNA, 20 bp, Artificial Sequence
  MKO10075328_B_Capn11
  gRNA
ccccaaactgctgtaccgtg

SEQ ID NO: 75329 - DNA, 20 bp, Artificial Sequence
  MKO10075329_B_Capn11
  gRNA
caccacacggtacagcagtt

SEQ ID NO: 75330 - DNA, 20 bp, Artificial Sequence
  MKO10075330_B_Capn11
  gRNA
tctatcggtgtcaagaacct

SEQ ID NO: 75331 - DNA, 20 bp, Artificial Sequence
  MKO10075331_B_Capn12
  gRNA
agacccccgcgtagccatct

SEQ ID NO: 75332 - DNA, 20 bp, Artificial Sequence
  MKO10075332_B_Capn12
  gRNA
tgttcgtgcgctcagaacaa

SEQ ID NO: 75333 - DNA, 20 bp, Artificial Sequence
  MKO10075333_B_Capn12
  gRNA
cgacaaactgcctgtgcgtg

SEQ ID NO: 75334 - DNA, 20 bp, Artificial Sequence
  MKO10075334_B_Capn13
  gRNA
aattccttgttgcctcctcg

SEQ ID NO: 75335 - DNA, 20 bp, Artificial Sequence
  MKO10075335_B_Capn13
  gRNA
gtggcctgtgccaccgaaaa

SEQ ID NO: 75336 - DNA, 20 bp, Artificial Sequence
  MKO10075336_B_Capn13
  gRNA
aaggaagttatcgcctatga

SEQ ID NO: 75337 - DNA, 20 bp, Artificial Sequence
  MKO10075337_B_Capn15
  gRNA
ccagtactgccaacgcactc

SEQ ID NO: 75338 - DNA, 20 bp, Artificial Sequence
  MKO10075338_B_Capn15
  gRNA
ctgcgggggaggtaacatga

SEQ ID NO: 75339 - DNA, 20 bp, Artificial Sequence
  MKO10075339_B_Capn15
  gRNA
agactgaccacggagtgccg

SEQ ID NO: 75340 - DNA, 20 bp, Artificial Sequence
  MKO10075340_B_Capn1
  gRNA
cgagactattctgcaccgag

SEQ ID NO: 75341 - DNA, 20 bp, Artificial Sequence
  MKO10075341_B_Capn1
  gRNA
tgagtggtacgacctgcaga

SEQ ID NO: 75342 - DNA, 20 bp, Artificial Sequence
  MKO10075342_B_Capn1
  gRNA
gtcaaacccccagttcatcg

SEQ ID NO: 75343 - DNA, 20 bp, Artificial Sequence
  MKO10075343_B_Capn2
  gRNA
cgcctccctcaccttgaatg

SEQ ID NO: 75344 - DNA, 20 bp, Artificial Sequence
  MKO10075344_B_Capn2
  gRNA
gacaggctgcccactaagga

SEQ ID NO: 75345 - DNA, 20 bp, Artificial Sequence
  MKO10075345_B_Capn2
  gRNA
gggtgctatgaagcactctc

SEQ ID NO: 75346 - DNA, 20 bp, Artificial Sequence
  MKO10075346_B_Capn3
  gRNA
acttggcataagccttctca

SEQ ID NO: 75347 - DNA, 20 bp, Artificial Sequence
  MKO10075347_B_Capn3
  gRNA
tggctccaccaatgataaac

SEQ ID NO: 75348 - DNA, 20 bp, Artificial Sequence
  MKO10075348_B_Capn3
  gRNA
ggaaaagcagccgctcattc

SEQ ID NO: 75349 - DNA, 20 bp, Artificial Sequence
  MKO10075349_B_Capn5
  gRNA
aggcaacacggccgatgcat

SEQ ID NO: 75350 - DNA, 20 bp, Artificial Sequence
  MKO10075350_B_Capn5
  gRNA
tgaacccattgacctgaccg

SEQ ID NO: 75351 - DNA, 20 bp, Artificial Sequence
  MKO10075351_B_Capn5
  gRNA
tggcctcccgagagtcactc

SEQ ID NO: 75352 - DNA, 20 bp, Artificial Sequence
  MKO10075352_B_Capn6
  gRNA
gaagaccagatctccgttga

SEQ ID NO: 75353 - DNA, 20 bp, Artificial Sequence
  MKO10075353_B_Capn6
  gRNA
tgctgatgttgcccacaatc

SEQ ID NO: 75354 - DNA, 20 bp, Artificial Sequence
  MKO10075354_B_Capn6
  gRNA
ccacaagtctttctccgaga

SEQ ID NO: 75355 - DNA, 20 bp, Artificial Sequence
  MKO10075355_B_Capn7
  gRNA
agctttcgatgaagatgaaa

SEQ ID NO: 75356 - DNA, 20 bp, Artificial Sequence
  MKO10075356_B_Capn7
  gRNA
gtgcaagcccttcactctgc

SEQ ID NO: 75357 - DNA, 20 bp, Artificial Sequence
  MKO10075357_B_Capn7
  gRNA
agaattatatacagaagctg

SEQ ID NO: 75358 - DNA, 20 bp, Artificial Sequence
  MKO10075358_B_Capn8
  gRNA
gttactcaccaagacccccc

SEQ ID NO: 75359 - DNA, 20 bp, Artificial Sequence
  MKO10075359_B_Capn8
  gRNA
tgaaaagctgctttatcgag

SEQ ID NO: 75360 - DNA, 20 bp, Artificial Sequence
  MKO10075360_B_Capn8
  gRNA
ctcttcctacactccgaaga

SEQ ID NO: 75361 - DNA, 20 bp, Artificial Sequence
  MKO10075361_B_Capn9
  gRNA
accaggaccgacatttgcca

SEQ ID NO: 75362 - DNA, 20 bp, Artificial Sequence
  MKO10075362_B_Capn9
  gRNA
ttagggaggcaatggccgcc

SEQ ID NO: 75363 - DNA, 20 bp, Artificial Sequence
  MKO10075363_B_Capn9
  gRNA
tgccgggatatttcatttcc

SEQ ID NO: 75364 - DNA, 20 bp, Artificial Sequence
  MKO10075364_B_Capns1
  gRNA
actctcgttggcctcaatat

SEQ ID NO: 75365 - DNA, 20 bp, Artificial Sequence
  MKO10075365_B_Capns1
  gRNA
gacccggatctgaaaactga

SEQ ID NO: 75366 - DNA, 20 bp, Artificial Sequence
  MKO10075366_B_Capns1
  gRNA
ggctgctgcgcagtacaacc

SEQ ID NO: 75367 - DNA, 20 bp, Artificial Sequence
  MKO10075367_B_Capns2
  gRNA
ggcaagcatgtttctcgcaa

SEQ ID NO: 75368 - DNA, 20 bp, Artificial Sequence
  MKO10075368_B_Capns2
  gRNA
tgctatgtttcgagctttca

SEQ ID NO: 75369 - DNA, 20 bp, Artificial Sequence
  MKO10075369_B_Capns2
  gRNA
tttacctaatgattgtccgt

SEQ ID NO: 75370 - DNA, 20 bp, Artificial Sequence
  MKO10075370_B_Caprin1
  gRNA
cccctttattcattcgttcc

SEQ ID NO: 75371 - DNA, 20 bp, Artificial Sequence
  MKO10075371_B_Caprin1
  gRNA
aactcctcctcagacaatat

SEQ ID NO: 75372 - DNA, 20 bp, Artificial Sequence
  MKO10075372_B_Caprin1
  gRNA
ccaaattatttgtgacttcc

SEQ ID NO: 75373 - DNA, 20 bp, Artificial Sequence
  MKO10075373_B_Caprin2
  gRNA
tcagcatatgctcccttctc

SEQ ID NO: 75374 - DNA, 20 bp, Artificial Sequence
  MKO10075374_B_Caprin2
  gRNA
gctgctgaaagcgcagaaaa

SEQ ID NO: 75375 - DNA, 20 bp, Artificial Sequence
  MKO10075375_B_Caprin2
  gRNA
agcagtcatccttgtacttt

SEQ ID NO: 75376 - DNA, 20 bp, Artificial Sequence
  MKO10075376_B_Caps2
  gRNA
tagggtcccaccacttgatc

SEQ ID NO: 75377 - DNA, 20 bp, Artificial Sequence
  MKO10075377_B_Caps2
  gRNA
taacagtcagcatcgactac

SEQ ID NO: 75378 - DNA, 20 bp, Artificial Sequence
  MKO10075378_B_Caps2
  gRNA
tatagcttacataggtaggc

SEQ ID NO: 75379 - DNA, 20 bp, Artificial Sequence
  MKO10075379_B_Capsl
  gRNA
cagggacagcgcgccatgac

SEQ ID NO: 75380 - DNA, 20 bp, Artificial Sequence
  MKO10075380_B_Capsl
  gRNA
cttcagagtgtttcgaatta

SEQ ID NO: 75381 - DNA, 20 bp, Artificial Sequence
  MKO10075381_B_Capsl
  gRNA
gactcaccctatgataaaga

SEQ ID NO: 75382 - DNA, 20 bp, Artificial Sequence
  MKO10075382_B_Capza1
  gRNA
ttcatcacccatgcaccccc

SEQ ID NO: 75383 - DNA, 20 bp, Artificial Sequence
  MKO10075383_B_Capza1
  gRNA
ttaacaatgacaatctcctc

SEQ ID NO: 75384 - DNA, 20 bp, Artificial Sequence
  MKO10075384_B_Capza1
  gRNA
actgtgctgccccttccctg

SEQ ID NO: 75385 - DNA, 20 bp, Artificial Sequence
  MKO10075385_B_Capza2
  gRNA
tgcatttgcacagtataacc

SEQ ID NO: 75386 - DNA, 20 bp, Artificial Sequence
  MKO10075386_B_Capza2
  gRNA
tttacaccagtaaaaattga

SEQ ID NO: 75387 - DNA, 20 bp, Artificial Sequence
  MKO10075387_B_Capza2
  gRNA
aaaacctcattaaattctcc

SEQ ID NO: 75388 - DNA, 20 bp, Artificial Sequence
  MKO10075388_B_Capza3
  gRNA
gtgaatgatcactacccaaa

SEQ ID NO: 75389 - DNA, 20 bp, Artificial Sequence
  MKO10075389_B_Capza3
  gRNA
tgtgtcccactctgcatcga

SEQ ID NO: 75390 - DNA, 20 bp, Artificial Sequence
  MKO10075390_B_Capza3
  gRNA
tccaaagtcacggaatcatt

SEQ ID NO: 75391 - DNA, 20 bp, Artificial Sequence
  MKO10075391_B_Capzb
  gRNA
taacaagtatgaccctcctt

SEQ ID NO: 75392 - DNA, 20 bp, Artificial Sequence
  MKO10075392_B_Capzb
  gRNA
ctctgttgtagtcacacaaa

SEQ ID NO: 75393 - DNA, 20 bp, Artificial Sequence
  MKO10075393_B_Capzb
  gRNA
cctgaaaattgccagagaca

SEQ ID NO: 75394 - DNA, 20 bp, Artificial Sequence
  MKO10075394_B_Car10
  gRNA
ggggtcgaagatcatgtgac

SEQ ID NO: 75395 - DNA, 20 bp, Artificial Sequence
  MKO10075395_B_Car10
  gRNA
aagaaatccggctacacttt

SEQ ID NO: 75396 - DNA, 20 bp, Artificial Sequence
  MKO10075396_B_Car10
  gRNA
gaagctgcgaagagcccgaa

SEQ ID NO: 75397 - DNA, 20 bp, Artificial Sequence
  MKO10075397_B_Car11
  gRNA
ctgagaatggccaggccgtt

SEQ ID NO: 75398 - DNA, 20 bp, Artificial Sequence
  MKO10075398_B_Car11
  gRNA
cggggaaccttgtacaacac

SEQ ID NO: 75399 - DNA, 20 bp, Artificial Sequence
  MKO10075399_B_Car11
  gRNA
cccccgctcagactcagcac

SEQ ID NO: 75400 - DNA, 20 bp, Artificial Sequence
  MKO10075400_B_Car12
  gRNA
gggaaccgcaatgaccccca

SEQ ID NO: 75401 - DNA, 20 bp, Artificial Sequence
  MKO10075401_B_Car12
  gRNA
tgcaggaggcctccacacga

SEQ ID NO: 75402 - DNA, 20 bp, Artificial Sequence
  MKO10075402_B_Car12
  gRNA
gaggccttcggacttgtcac

SEQ ID NO: 75403 - DNA, 20 bp, Artificial Sequence
  MKO10075403_B_Car13
  gRNA
agcatgtggtagacggagtg

SEQ ID NO: 75404 - DNA, 20 bp, Artificial Sequence
  MKO10075404_B_Car13
  gRNA
caaatacccgagctttgtag

SEQ ID NO: 75405 - DNA, 20 bp, Artificial Sequence
  MKO10075405_B_Car13
  gRNA
gtcgtcaaagtcaacgttga

SEQ ID NO: 75406 - DNA, 20 bp, Artificial Sequence
  MKO10075406_B_Car14
  gRNA
tgggcatcgcctccacactc

SEQ ID NO: 75407 - DNA, 20 bp, Artificial Sequence
  MKO10075407_B_Car14
  gRNA
gggagtcatagtgaaccacg

SEQ ID NO: 75408 - DNA, 20 bp, Artificial Sequence
  MKO10075408_B_Car14
  gRNA
ggtcaccactggacatatga

SEQ ID NO: 75409 - DNA, 20 bp, Artificial Sequence
  MKO10075409_B_Car15
  gRNA
ggctcccgtcaccagagtac

SEQ ID NO: 75410 - DNA, 20 bp, Artificial Sequence
  MKO10075410_B_Car15
  gRNA
tgctcggagccttggtgccc

SEQ ID NO: 75411 - DNA, 20 bp, Artificial Sequence
  MKO10075411_B_Car15
  gRNA
gatgcacggagccaaccaga

SEQ ID NO: 75412 - DNA, 20 bp, Artificial Sequence
  MKO10075412_B_Car1
  gRNA
tctaaactcagttaaaacta

SEQ ID NO: 75413 - DNA, 20 bp, Artificial Sequence
  MKO10075413_B_Car1
  gRNA
agaatatctagttccatcca

SEQ ID NO: 75414 - DNA, 20 bp, Artificial Sequence
  MKO10075414_B_Car1
  gRNA
tggaactagatattctggag

SEQ ID NO: 75415 - DNA, 20 bp, Artificial Sequence
  MKO10075415_B_Car2
  gRNA
agccccagtgaaagtgaaac

SEQ ID NO: 75416 - DNA, 20 bp, Artificial Sequence
  MKO10075416_B_Car2
  gRNA
gccgttgttgacaatgctct

SEQ ID NO: 75417 - DNA, 20 bp, Artificial Sequence
  MKO10075417_B_Car2
  gRNA
tgatccagtttcactttcac

SEQ ID NO: 75418 - DNA, 20 bp, Artificial Sequence
  MKO10075418_B_Car3
  gRNA
gtctttagtatgcagttcaa

SEQ ID NO: 75419 - DNA, 20 bp, Artificial Sequence
  MKO10075419_B_Car3
  gRNA
ctcagagccgtggtcatcag

SEQ ID NO: 75420 - DNA, 20 bp, Artificial Sequence
  MKO10075420_B_Car3
  gRNA
aatccaaagtataacacctt

SEQ ID NO: 75421 - DNA, 20 bp, Artificial Sequence
  MKO10075421_B_Car4
  gRNA
gaaggacaagtttgcagtgc

SEQ ID NO: 75422 - DNA, 20 bp, Artificial Sequence
  MKO10075422_B_Car4
  gRNA
caagaagttgacatctagca

SEQ ID NO: 75423 - DNA, 20 bp, Artificial Sequence
  MKO10075423_B_Car4
  gRNA
gtgtgttgattgttcttaat

SEQ ID NO: 75424 - DNA, 20 bp, Artificial Sequence
  MKO10075424_B_Car5a
  gRNA
acagctcggggcgcatcacc

SEQ ID NO: 75425 - DNA, 20 bp, Artificial Sequence
  MKO10075425_B_Car5a
  gRNA
tttacgaacctcagctgggt

SEQ ID NO: 75426 - DNA, 20 bp, Artificial Sequence
  MKO10075426_B_Car5a
  gRNA
gagaacgggctggcggtcat

SEQ ID NO: 75427 - DNA, 20 bp, Artificial Sequence
  MKO10075427_B_Car5b
  gRNA
attaccttgtgcttaattga

SEQ ID NO: 75428 - DNA, 20 bp, Artificial Sequence
  MKO10075428_B_Car5b
  gRNA
cagtaaatgctacccagcag

SEQ ID NO: 75429 - DNA, 20 bp, Artificial Sequence
  MKO10075429_B_Car5b
  gRNA
ttggggctctgagcacaccg

SEQ ID NO: 75430 - DNA, 20 bp, Artificial Sequence
  MKO10075430_B_Car6
  gRNA
gatgaactcagtgccgtcag

SEQ ID NO: 75431 - DNA, 20 bp, Artificial Sequence
  MKO10075431_B_Car6
  gRNA
aacacaccattgatgggatc

SEQ ID NO: 75432 - DNA, 20 bp, Artificial Sequence
  MKO10075432_B_Car6
  gRNA
tgtgttagccgtcttgttta

SEQ ID NO: 75433 - DNA, 20 bp, Artificial Sequence
  MKO10075433_B_Car7
  gRNA
cactgtcattgaagtccacc

SEQ ID NO: 75434 - DNA, 20 bp, Artificial Sequence
  MKO10075434_B_Car7
  gRNA
cccaaaagtgctgtacttct

SEQ ID NO: 75435 - DNA, 20 bp, Artificial Sequence
  MKO10075435_B_Car7
  gRNA
gtggagctgcttgagacgat

SEQ ID NO: 75436 - DNA, 20 bp, Artificial Sequence
  MKO10075436_B_Car8
  gRNA
ccgtgtgctcagaaccacgc

SEQ ID NO: 75437 - DNA, 20 bp, Artificial Sequence
  MKO10075437_B_Car8
  gRNA
atcgatgctgccaaacagtg

SEQ ID NO: 75438 - DNA, 20 bp, Artificial Sequence
  MKO10075438_B_Car8
  gRNA
cagatcgggaaggaacatgt

SEQ ID NO: 75439 - DNA, 20 bp, Artificial Sequence
  MKO10075439_B_Car9
  gRNA
ccagtgtagatgcaactgca

SEQ ID NO: 75440 - DNA, 20 bp, Artificial Sequence
  MKO10075440_B_Car9
  gRNA
ctccatagctccaatgactg

SEQ ID NO: 75441 - DNA, 20 bp, Artificial Sequence
  MKO10075441_B_Car9
  gRNA
ctccgaacttcatgaagcct

SEQ ID NO: 75442 - DNA, 20 bp, Artificial Sequence
  MKO10075442_B_Card10
  gRNA
cccagtcctcccgcagtcgc

SEQ ID NO: 75443 - DNA, 20 bp, Artificial Sequence
  MKO10075443_B_Card10
  gRNA
gcagtgaagccgtcagccgc

SEQ ID NO: 75444 - DNA, 20 bp, Artificial Sequence
  MKO10075444_B_Card10
  gRNA
agcttcgtgcagagaaccag

SEQ ID NO: 75445 - DNA, 20 bp, Artificial Sequence
  MKO10075445_B_Card11
  gRNA
tccatgtagtcatccatagc

SEQ ID NO: 75446 - DNA, 20 bp, Artificial Sequence
  MKO10075446_B_Card11
  gRNA
cttctccccaggccgattgt

SEQ ID NO: 75447 - DNA, 20 bp, Artificial Sequence
  MKO10075447_B_Card11
  gRNA
aagccacttacccacaatgg

SEQ ID NO: 75448 - DNA, 20 bp, Artificial Sequence
  MKO10075448_B_Card14
  gRNA
agagagcagtggccgcggag

SEQ ID NO: 75449 - DNA, 20 bp, Artificial Sequence
  MKO10075449_B_Card14
  gRNA
ctctttcacatgacgataca

SEQ ID NO: 75450 - DNA, 20 bp, Artificial Sequence
  MKO10075450_B_Card14
  gRNA
caaccctgatgtctacaccc

SEQ ID NO: 75451 - DNA, 20 bp, Artificial Sequence
  MKO10075451_B_Card6
  gRNA
acagctgtcggcgtttcctc

SEQ ID NO: 75452 - DNA, 20 bp, Artificial Sequence
  MKO10075452_B_Card6
  gRNA
tcttggacacgttaacctct

SEQ ID NO: 75453 - DNA, 20 bp, Artificial Sequence
  MKO10075453_B_Card6
  gRNA
attgatctctgaacagctac

SEQ ID NO: 75454 - DNA, 20 bp, Artificial Sequence
  MKO10075454_B_Card9
  gRNA
ggtctctcacccgggcccgg

SEQ ID NO: 75455 - DNA, 20 bp, Artificial Sequence
  MKO10075455_B_Card9
  gRNA
catggagcagcggcctagtc

SEQ ID NO: 75456 - DNA, 20 bp, Artificial Sequence
  MKO10075456_B_Card9
  gRNA
ctccttgatgaagtcgtcct

SEQ ID NO: 75457 - DNA, 20 bp, Artificial Sequence
  MKO10075457_B_Carf
  gRNA
ctgccgtcttaggagttgtg

SEQ ID NO: 75458 - DNA, 20 bp, Artificial Sequence
  MKO10075458_B_Carf
  gRNA
agggctatgttcatctgcaa

SEQ ID NO: 75459 - DNA, 20 bp, Artificial Sequence
  MKO10075459_B_Carf
  gRNA
tcacctcacaactcctaaga

SEQ ID NO: 75460 - DNA, 20 bp, Artificial Sequence
  MKO10075460_B_Carhsp1
  gRNA
acgctgagaaggtccttgtc

SEQ ID NO: 75461 - DNA, 20 bp, Artificial Sequence
  MKO10075461_B_Carhsp1
  gRNA
tgggatagagcacatcttat

SEQ ID NO: 75462 - DNA, 20 bp, Artificial Sequence
  MKO10075462_B_Carhsp1
  gRNA
acccaagaacgagaagctgc

SEQ ID NO: 75463 - DNA, 20 bp, Artificial Sequence
  MKO10075463_B_Carkd
  gRNA
tctgacgtcgaagaagcaca

SEQ ID NO: 75464 - DNA, 20 bp, Artificial Sequence
  MKO10075464_B_Carkd
  gRNA
gggctgtaggacttgatcac

SEQ ID NO: 75465 - DNA, 20 bp, Artificial Sequence
  MKO10075465_B_Carkd
  gRNA
gctgagattcctgcaaaata

SEQ ID NO: 75466 - DNA, 20 bp, Artificial Sequence
  MKO10075466_B_Carm1
  gRNA
tgaggacgctgttgcagccc

SEQ ID NO: 75467 - DNA, 20 bp, Artificial Sequence
  MKO10075467_B_Carm1
  gRNA
ccttgtccttgaagtccgtg

SEQ ID NO: 75468 - DNA, 20 bp, Artificial Sequence
  MKO10075468_B_Carm1
  gRNA
atccagtttgccacacccca

SEQ ID NO: 75469 - DNA, 20 bp, Artificial Sequence
  MKO10075469_B_Carns1
  gRNA
gcacggccacaccactctgc

SEQ ID NO: 75470 - DNA, 20 bp, Artificial Sequence
  MKO10075470_B_Carns1
  gRNA
cagcaccgtgttcaccactg

SEQ ID NO: 75471 - DNA, 20 bp, Artificial Sequence
  MKO10075471_B_Carns1
  gRNA
ggctctacccgcaggtgcag

SEQ ID NO: 75472 - DNA, 20 bp, Artificial Sequence
  MKO10075472_B_Cars2
  gRNA
aagcatggccaagatgtgca

SEQ ID NO: 75473 - DNA, 20 bp, Artificial Sequence
  MKO10075473_B_Cars2
  gRNA
atgttagatttgacattatc

SEQ ID NO: 75474 - DNA, 20 bp, Artificial Sequence
  MKO10075474_B_Cars2
  gRNA
gtgtacgaccatgcacatct

SEQ ID NO: 75475 - DNA, 20 bp, Artificial Sequence
  MKO10075475_B_Cars
  gRNA
tgagacgcatcatagacagt

SEQ ID NO: 75476 - DNA, 20 bp, Artificial Sequence
  MKO10075476_B_Cars
  gRNA
agtgatggcaggttcctccg

SEQ ID NO: 75477 - DNA, 20 bp, Artificial Sequence
  MKO10075477_B_Cars
  gRNA
gcctctataatagcctcacc

SEQ ID NO: 75478 - DNA, 20 bp, Artificial Sequence
  MKO10075478_B_Cartpt
  gRNA
gtcacacagcttcccgatcc

SEQ ID NO: 75479 - DNA, 20 bp, Artificial Sequence
  MKO10075479_B_Cartpt
  gRNA
tactgaccagctccttctcg

SEQ ID NO: 75480 - DNA, 20 bp, Artificial Sequence
  MKO10075480_B_Cartpt
  gRNA
ctggagagcagtgcgcagtg

SEQ ID NO: 75481 - DNA, 20 bp, Artificial Sequence
  MKO10075481_B_Casc1
  gRNA
gagcaagctcttcaagctct

SEQ ID NO: 75482 - DNA, 20 bp, Artificial Sequence
  MKO10075482_B_Casc1
  gRNA
tgaagagcttgctctgctcg

SEQ ID NO: 75483 - DNA, 20 bp, Artificial Sequence
  MKO10075483_B_Casc1
  gRNA
gaaatttgaaaaagaagaac

SEQ ID NO: 75484 - DNA, 20 bp, Artificial Sequence
  MKO10075484_B_Casc3
  gRNA
atcttctgcactttcataat

SEQ ID NO: 75485 - DNA, 20 bp, Artificial Sequence
  MKO10075485_B_Casc3
  gRNA
tgattcctctgcgaaagaaa

SEQ ID NO: 75486 - DNA, 20 bp, Artificial Sequence
  MKO10075486_B_Casc3
  gRNA
tcctcccaggagagtgaaga

SEQ ID NO: 75487 - DNA, 20 bp, Artificial Sequence
  MKO10075487_B_Casc4
  gRNA
aagatcagcttcaagactac

SEQ ID NO: 75488 - DNA, 20 bp, Artificial Sequence
  MKO10075488_B_Casc4
  gRNA
aaacaacatatcatatcaga

SEQ ID NO: 75489 - DNA, 20 bp, Artificial Sequence
  MKO10075489_B_Casc4
  gRNA
gaccgtaatcggcctccttc

SEQ ID NO: 75490 - DNA, 20 bp, Artificial Sequence
  MKO10075490_B_Casc5
  gRNA
aacctaatcctccaagaaaa

SEQ ID NO: 75491 - DNA, 20 bp, Artificial Sequence
  MKO10075491_B_Casc5
  gRNA
gagagaaattcagaaatttc

SEQ ID NO: 75492 - DNA, 20 bp, Artificial Sequence
  MKO10075492_B_Casc5
  gRNA
ttgtttgatttccacatttg

SEQ ID NO: 75493 - DNA, 20 bp, Artificial Sequence
  MKO10075493_B_Casd1
  gRNA
acgcaatgtgtttatctaca

SEQ ID NO: 75494 - DNA, 20 bp, Artificial Sequence
  MKO10075494_B_Casd1
  gRNA
caccttgatacattgtttca

SEQ ID NO: 75495 - DNA, 20 bp, Artificial Sequence
  MKO10075495_B_Casd1
  gRNA
ttccatgaaacaatgtatca

SEQ ID NO: 75496 - DNA, 20 bp, Artificial Sequence
  MKO10075496_B_Caskin1
  gRNA
ccacatcgtagtgaccatgc

SEQ ID NO: 75497 - DNA, 20 bp, Artificial Sequence
  MKO10075497_B_Caskin1
  gRNA
caactcacccatccgggtcc

SEQ ID NO: 75498 - DNA, 20 bp, Artificial Sequence
  MKO10075498_B_Caskin1
  gRNA
tgatcttcttggtagagccc

SEQ ID NO: 75499 - DNA, 20 bp, Artificial Sequence
  MKO10075499_B_Caskin2
  gRNA
gagactcaacattaactacc

SEQ ID NO: 75500 - DNA, 20 bp, Artificial Sequence
  MKO10075500_B_Caskin2
  gRNA
ctagacctagcctgtgaatt

SEQ ID NO: 75501 - DNA, 20 bp, Artificial Sequence
  MKO10075501_B_Caskin2
  gRNA
ggaactcatagccttgctgc

SEQ ID NO: 75502 - DNA, 20 bp, Artificial Sequence
  MKO10075502_B_Cask
  gRNA
ggggtcccttcagtgttgta

SEQ ID NO: 75503 - DNA, 20 bp, Artificial Sequence
  MKO10075503_B_Cask
  gRNA
acatcgccgtacaacactga

SEQ ID NO: 75504 - DNA, 20 bp, Artificial Sequence
  MKO10075504_B_Cask
  gRNA
tccacacattgtagagctgt

SEQ ID NO: 75505 - DNA, 20 bp, Artificial Sequence
  MKO10075505_B_Casp12
  gRNA
atcttacaaaactgatcacg

SEQ ID NO: 75506 - DNA, 20 bp, Artificial Sequence
  MKO10075506_B_Casp12
  gRNA
tgtacaccttcttctccatc

SEQ ID NO: 75507 - DNA, 20 bp, Artificial Sequence
  MKO10075507_B_Casp12
  gRNA
tcagcattagatgtgattca

SEQ ID NO: 75508 - DNA, 20 bp, Artificial Sequence
  MKO10075508_B_Casp14
  gRNA
tatgaatgaacacatccgtc

SEQ ID NO: 75509 - DNA, 20 bp, Artificial Sequence
  MKO10075509_B_Casp14
  gRNA
ctgttcaatacctgggcggt

SEQ ID NO: 75510 - DNA, 20 bp, Artificial Sequence
  MKO10075510_B_Casp14
  gRNA
agagctcataccctctaccg

SEQ ID NO: 75511 - DNA, 20 bp, Artificial Sequence
  MKO10075511_B_Casp1
  gRNA
agtttcaacatctttctccg

SEQ ID NO: 75512 - DNA, 20 bp, Artificial Sequence
  MKO10075512_B_Casp1
  gRNA
gcaacaaatgtttcagctga

SEQ ID NO: 75513 - DNA, 20 bp, Artificial Sequence
  MKO10075513_B_Casp1
  gRNA
gtatgggtacctgaggatga

SEQ ID NO: 75514 - DNA, 20 bp, Artificial Sequence
  MKO10075514_B_Casp2
  gRNA
caggactcacacaccgagaa

SEQ ID NO: 75515 - DNA, 20 bp, Artificial Sequence
  MKO10075515_B_Casp2
  gRNA
gtacgtgctgaatatctgag

SEQ ID NO: 75516 - DNA, 20 bp, Artificial Sequence
  MKO10075516_B_Casp2
  gRNA
gttagaacacctcctagaga

SEQ ID NO: 75517 - DNA, 20 bp, Artificial Sequence
  MKO10075517_B_Casp3
  gRNA
agtggactctgggatctatc

SEQ ID NO: 75518 - DNA, 20 bp, Artificial Sequence
  MKO10075518_B_Casp3
  gRNA
gactactgccggagtctgac

SEQ ID NO: 75519 - DNA, 20 bp, Artificial Sequence
  MKO10075519_B_Casp3
  gRNA
attatgcatatgcccatttc

SEQ ID NO: 75520 - DNA, 20 bp, Artificial Sequence
  MKO10075520_B_Casp4
  gRNA
tgataagagcctttcgtgta

SEQ ID NO: 75521 - DNA, 20 bp, Artificial Sequence
  MKO10075521_B_Casp4
  gRNA
tgccatgagacattagcacc

SEQ ID NO: 75522 - DNA, 20 bp, Artificial Sequence
  MKO10075522_B_Casp4
  gRNA
gctgggcaaagaagtcctta

SEQ ID NO: 75523 - DNA, 20 bp, Artificial Sequence
  MKO10075523_B_Casp6
  gRNA
gcgttggtgccccgcctctc

SEQ ID NO: 75524 - DNA, 20 bp, Artificial Sequence
  MKO10075524_B_Casp6
  gRNA
attgaaattcagacgttgac

SEQ ID NO: 75525 - DNA, 20 bp, Artificial Sequence
  MKO10075525_B_Casp6
  gRNA
caacgtctgaatttcaattt

SEQ ID NO: 75526 - DNA, 20 bp, Artificial Sequence
  MKO10075526_B_Casp7
  gRNA
tcggtcccggccggtcctga

SEQ ID NO: 75527 - DNA, 20 bp, Artificial Sequence
  MKO10075527_B_Casp7
  gRNA
gcccacttatctgtaccgca

SEQ ID NO: 75528 - DNA, 20 bp, Artificial Sequence
  MKO10075528_B_Casp7
  gRNA
ttgcacaagagcagtcattg

SEQ ID NO: 75529 - DNA, 20 bp, Artificial Sequence
  MKO10075529_B_Casp8ap2
  gRNA
gatttatctcttcatcctta

SEQ ID NO: 75530 - DNA, 20 bp, Artificial Sequence
  MKO10075530_B_Casp8ap2
  gRNA
acagtttctgaatgacacac

SEQ ID NO: 75531 - DNA, 20 bp, Artificial Sequence
  MKO10075531_B_Casp8ap2
  gRNA
tcgcagttccttcttcagtc

SEQ ID NO: 75532 - DNA, 20 bp, Artificial Sequence
  MKO10075532_B_Casp8
  gRNA
tgcagagatgagcctcaaaa

SEQ ID NO: 75533 - DNA, 20 bp, Artificial Sequence
  MKO10075533_B_Casp8
  gRNA
agagttgccaccttcagttt

SEQ ID NO: 75534 - DNA, 20 bp, Artificial Sequence
  MKO10075534_B_Casp8
  gRNA
cctaaaatcaatctgtgacc

SEQ ID NO: 75535 - DNA, 20 bp, Artificial Sequence
  MKO10075535_B_Casp9
  gRNA
tctaggggtttaacagcctc

SEQ ID NO: 75536 - DNA, 20 bp, Artificial Sequence
  MKO10075536_B_Casp9
  gRNA
ccgtgccctggactgctttg

SEQ ID NO: 75537 - DNA, 20 bp, Artificial Sequence
  MKO10075537_B_Casp9
  gRNA
tcccttgcagaaaatggtca

SEQ ID NO: 75538 - DNA, 20 bp, Artificial Sequence
  MKO10075538_B_Casq1
  gRNA
gaccctgtagagttgattga

SEQ ID NO: 75539 - DNA, 20 bp, Artificial Sequence
  MKO10075539_B_Casq1
  gRNA
tcaccttcaatcaactctac

SEQ ID NO: 75540 - DNA, 20 bp, Artificial Sequence
  MKO10075540_B_Casq1
  gRNA
catccttctctgagtccacc

SEQ ID NO: 75541 - DNA, 20 bp, Artificial Sequence
  MKO10075541_B_Casq2
  gRNA
ctggtcctcgatgcgctcaa

SEQ ID NO: 75542 - DNA, 20 bp, Artificial Sequence
  MKO10075542_B_Casq2
  gRNA
ttgttattcacgatctccac

SEQ ID NO: 75543 - DNA, 20 bp, Artificial Sequence
  MKO10075543_B_Casq2
  gRNA
acccagcctcttagcaagct

SEQ ID NO: 75544 - DNA, 20 bp, Artificial Sequence
  MKO10075544_B_Casr
  gRNA
tcaccactgtactcgccgtc

SEQ ID NO: 75545 - DNA, 20 bp, Artificial Sequence
  MKO10075545_B_Casr
  gRNA
cgcaaaaggacctttacccg

SEQ ID NO: 75546 - DNA, 20 bp, Artificial Sequence
  MKO10075546_B_Casr
  gRNA
ggttgctcccaccactgcga

SEQ ID NO: 75547 - DNA, 20 bp, Artificial Sequence
  MKO10075547_B_Cass4
  gRNA
atggttgtcgtagagtgccc

SEQ ID NO: 75548 - DNA, 20 bp, Artificial Sequence
  MKO10075548_B_Cass4
  gRNA
actcaggcaattcgtagact

SEQ ID NO: 75549 - DNA, 20 bp, Artificial Sequence
  MKO10075549_B_Cass4
  gRNA
ctgtgcttcccagaccgacg

SEQ ID NO: 75550 - DNA, 20 bp, Artificial Sequence
  MKO10075550_B_Cast
  gRNA
agcttcaccaacatgtggtc

SEQ ID NO: 75551 - DNA, 20 bp, Artificial Sequence
  MKO10075551_B_Cast
  gRNA
taagaaaccacaatcaagtg

SEQ ID NO: 75552 - DNA, 20 bp, Artificial Sequence
  MKO10075552_B_Cast
  gRNA
catgagtaccacagagacta

SEQ ID NO: 75553 - DNA, 20 bp, Artificial Sequence
  MKO10075553_B_Casz1
  gRNA
aaggtagcccactacatccc

SEQ ID NO: 75554 - DNA, 20 bp, Artificial Sequence
  MKO10075554_B_Casz1
  gRNA
cctacctggcaatatatttc

SEQ ID NO: 75555 - DNA, 20 bp, Artificial Sequence
  MKO10075555_B_Casz1
  gRNA
tttacatcttcggtgacagc

SEQ ID NO: 75556 - DNA, 20 bp, Artificial Sequence
  MKO10075556_B_Catsper1
  gRNA
cctgaccagcctccacgaag

SEQ ID NO: 75557 - DNA, 20 bp, Artificial Sequence
  MKO10075557_B_Catsper1
  gRNA
tcccggtgtgtgccttcttg

SEQ ID NO: 75558 - DNA, 20 bp, Artificial Sequence
  MKO10075558_B_Catsper1
  gRNA
ccccacagaatggtacttca

SEQ ID NO: 75559 - DNA, 20 bp, Artificial Sequence
  MKO10075559_B_Catsper2
  gRNA
cccgacagaccctcagcagc

SEQ ID NO: 75560 - DNA, 20 bp, Artificial Sequence
  MKO10075560_B_Catsper2
  gRNA
tctgaacacctttgtgctga

SEQ ID NO: 75561 - DNA, 20 bp, Artificial Sequence
  MKO10075561_B_Catsper2
  gRNA
tatttcaaccatcagcacaa

SEQ ID NO: 75562 - DNA, 20 bp, Artificial Sequence
  MKO10075562_B_Catsper3
  gRNA
tgtctgcgagttcctcatga

SEQ ID NO: 75563 - DNA, 20 bp, Artificial Sequence
  MKO10075563_B_Catsper3
  gRNA
caaccctgtacgagtcaagt

SEQ ID NO: 75564 - DNA, 20 bp, Artificial Sequence
  MKO10075564_B_Catsper3
  gRNA
ccgtggtgatcatcacaatc

SEQ ID NO: 75565 - DNA, 20 bp, Artificial Sequence
  MKO10075565_B_Catsper4
  gRNA
caagcagttgctccgccatc

SEQ ID NO: 75566 - DNA, 20 bp, Artificial Sequence
  MKO10075566_B_Catsper4
  gRNA
cttgctcctcatgccgaccc

SEQ ID NO: 75567 - DNA, 20 bp, Artificial Sequence
  MKO10075567_B_Catsper4
  gRNA
ggctctctaccttagggccc

SEQ ID NO: 75568 - DNA, 20 bp, Artificial Sequence
  MKO10075568_B_Catsperb
  gRNA
attacgaacagtacattcta

SEQ ID NO: 75569 - DNA, 20 bp, Artificial Sequence
  MKO10075569_B_Catsperb
  gRNA
ggactttaccaaattgtcca

SEQ ID NO: 75570 - DNA, 20 bp, Artificial Sequence
  MKO10075570_B_Catsperb
  gRNA
aatcaagttgttccttacca

SEQ ID NO: 75571 - DNA, 20 bp, Artificial Sequence
  MKO10075571_B_Catsperd
  gRNA
gctcaccgttcccaagtcat

SEQ ID NO: 75572 - DNA, 20 bp, Artificial Sequence
  MKO10075572_B_Catsperd
  gRNA
aatatctaccgccaatgact

SEQ ID NO: 75573 - DNA, 20 bp, Artificial Sequence
  MKO10075573_B_Catsperd
  gRNA
tgtgctcaagaacgtgtgca

SEQ ID NO: 75574 - DNA, 20 bp, Artificial Sequence
  MKO10075574_B_Catsperg1
  gRNA
aggccatgtgcatcctgaac

SEQ ID NO: 75575 - DNA, 20 bp, Artificial Sequence
  MKO10075575_B_Catsperg1
  gRNA
ggaaaatttgcagattctga

SEQ ID NO: 75576 - DNA, 20 bp, Artificial Sequence
  MKO10075576_B_Catsperg1
  gRNA
aactcttacctgtcccggac

SEQ ID NO: 75577 - DNA, 20 bp, Artificial Sequence
  MKO10075577_B_Catsperg2
  gRNA
aagttgatttgcaggtagta

SEQ ID NO: 75578 - DNA, 20 bp, Artificial Sequence
  MKO10075578_B_Catsperg2
  gRNA
ggaaaatgtacagattctga

SEQ ID NO: 75579 - DNA, 20 bp, Artificial Sequence
  MKO10075579_B_Catsperg2
  gRNA
aactcttacctgtcccggac

SEQ ID NO: 75580 - DNA, 20 bp, Artificial Sequence
  MKO10075580_B_Cat
  gRNA
tttgcgtgtaccactctctc

SEQ ID NO: 75581 - DNA, 20 bp, Artificial Sequence
  MKO10075581_B_Cat
  gRNA
cgatatcaccagatactcca

SEQ ID NO: 75582 - DNA, 20 bp, Artificial Sequence
  MKO10075582_B_Cat
  gRNA
tcgtcccgagtctctccatc

SEQ ID NO: 75583 - DNA, 20 bp, Artificial Sequence
  MKO10075583_B_Cav1
  gRNA
gggcaaatacgtagactccg

SEQ ID NO: 75584 - DNA, 20 bp, Artificial Sequence
  MKO10075584_B_Cav1
  gRNA
cgcttgttgtctacgatctt

SEQ ID NO: 75585 - DNA, 20 bp, Artificial Sequence
  MKO10075585_B_Cav1
  gRNA
agtgtatgacgcgcacacca

SEQ ID NO: 75586 - DNA, 20 bp, Artificial Sequence
  MKO10075586_B_Cav2
  gRNA
aaacaggatacccgcaatga

SEQ ID NO: 75587 - DNA, 20 bp, Artificial Sequence
  MKO10075587_B_Cav2
  gRNA
caagttcctgaccgtatttc

SEQ ID NO: 75588 - DNA, 20 bp, Artificial Sequence
  MKO10075588_B_Cav2
  gRNA
tgccttccgtgcagacaata

SEQ ID NO: 75589 - DNA, 20 bp, Artificial Sequence
  MKO10075589_B_Cav3
  gRNA
cgaccccaagaacatcaatg

SEQ ID NO: 75590 - DNA, 20 bp, Artificial Sequence
  MKO10075590_B_Cav3
  gRNA
tgatgcactggatctcgatc

SEQ ID NO: 75591 - DNA, 20 bp, Artificial Sequence
  MKO10075591_B_Cav3
  gRNA
agcgaagagcgggttgcaga

SEQ ID NO: 75592 - DNA, 20 bp, Artificial Sequence
  MKO10075592_B_Cbfa2t2
  gRNA
ctcagaattaccttgagaaa

SEQ ID NO: 75593 - DNA, 20 bp, Artificial Sequence
  MKO10075593_B_Cbfa2t2
  gRNA
attcgttagtgctgacgatg

SEQ ID NO: 75594 - DNA, 20 bp, Artificial Sequence
  MKO10075594_B_Cbfa2t2
  gRNA
ttacagttggttgtgagaaa

SEQ ID NO: 75595 - DNA, 20 bp, Artificial Sequence
  MKO10075595_B_Cbfa2t3
  gRNA
ctgaagtgaagacgcagccc

SEQ ID NO: 75596 - DNA, 20 bp, Artificial Sequence
  MKO10075596_B_Cbfa2t3
  gRNA
cgttctcgttgacttccagc

SEQ ID NO: 75597 - DNA, 20 bp, Artificial Sequence
  MKO10075597_B_Cbfa2t3
  gRNA
aaacggcctcagtggaaagt

SEQ ID NO: 75598 - DNA, 20 bp, Artificial Sequence
  MKO10075598_B_Cbfb
  gRNA
ttccagaacgcctgccgcga

SEQ ID NO: 75599 - DNA, 20 bp, Artificial Sequence
  MKO10075599_B_Cbfb
  gRNA
aacccataccatccaatctg

SEQ ID NO: 75600 - DNA, 20 bp, Artificial Sequence
  MKO10075600_B_Cbfb
  gRNA
ctggattgatctccacagat

SEQ ID NO: 75601 - DNA, 20 bp, Artificial Sequence
  MKO10075601_B_Cblb
  gRNA
atcaaggcgatctttcccaa

SEQ ID NO: 75602 - DNA, 20 bp, Artificial Sequence
  MKO10075602_B_Cblb
  gRNA
cgtatgatgaagttaaagct

SEQ ID NO: 75603 - DNA, 20 bp, Artificial Sequence
  MKO10075603_B_Cblb
  gRNA
agttccagggagataacttc

SEQ ID NO: 75604 - DNA, 20 bp, Artificial Sequence
  MKO10075604_B_Cblc
  gRNA
ggtggcaaaggcccggcgcg

SEQ ID NO: 75605 - DNA, 20 bp, Artificial Sequence
  MKO10075605_B_Cblc
  gRNA
caggcgacaactggccaagc

SEQ ID NO: 75606 - DNA, 20 bp, Artificial Sequence
  MKO10075606_B_Cblc
  gRNA
ttgagtttgacgtcttcacc

SEQ ID NO: 75607 - DNA, 20 bp, Artificial Sequence
  MKO10075607_B_Cbll1
  gRNA
gaacagcgatatgactgtaa

SEQ ID NO: 75608 - DNA, 20 bp, Artificial Sequence
  MKO10075608_B_Cbll1
  gRNA
gggaatcagcgaagatttcc

SEQ ID NO: 75609 - DNA, 20 bp, Artificial Sequence
  MKO10075609_B_Cbll1
  gRNA
attctcccatagactttaat

SEQ ID NO: 75610 - DNA, 20 bp, Artificial Sequence
  MKO10075610_B_Cbln1
  gRNA
tgagacagagcccatcgtac

SEQ ID NO: 75611 - DNA, 20 bp, Artificial Sequence
  MKO10075611_B_Cbln1
  gRNA
tgttgtagactttcaccacg

SEQ ID NO: 75612 - DNA, 20 bp, Artificial Sequence
  MKO10075612_B_Cbln1
  gRNA
tactcatctcggacggctca

SEQ ID NO: 75613 - DNA, 20 bp, Artificial Sequence
  MKO10075613_B_Cbln2
  gRNA
taggtcagcttaatgcagaa

SEQ ID NO: 75614 - DNA, 20 bp, Artificial Sequence
  MKO10075614_B_Cbln2
  gRNA
tgttgtacactttgaccacg

SEQ ID NO: 75615 - DNA, 20 bp, Artificial Sequence
  MKO10075615_B_Cbln2
  gRNA
ttatagcttcagcttccacg

SEQ ID NO: 75616 - DNA, 20 bp, Artificial Sequence
  MKO10075616_B_Cbln3
  gRNA
gaaaccggcaacggtaccag

SEQ ID NO: 75617 - DNA, 20 bp, Artificial Sequence
  MKO10075617_B_Cbln3
  gRNA
tgcttcgtggcccctgtccg

SEQ ID NO: 75618 - DNA, 20 bp, Artificial Sequence
  MKO10075618_B_Cbln3
  gRNA
cgacctactgcaggaggacc

SEQ ID NO: 75619 - DNA, 20 bp, Artificial Sequence
  MKO10075619_B_Cbln4
  gRNA
attgcagatcctggttaacg

SEQ ID NO: 75620 - DNA, 20 bp, Artificial Sequence
  MKO10075620_B_Cbln4
  gRNA
acccgtgaagccgccactaa

SEQ ID NO: 75621 - DNA, 20 bp, Artificial Sequence
  MKO10075621_B_Cbln4
  gRNA
caggagcactccattagtgg

SEQ ID NO: 75622 - DNA, 20 bp, Artificial Sequence
  MKO10075622_B_Cbl
  gRNA
gcctgtcgaaagctcttcca

SEQ ID NO: 75623 - DNA, 20 bp, Artificial Sequence
  MKO10075623_B_Cbl
  gRNA
agccttgctgtaactcaccc

SEQ ID NO: 75624 - DNA, 20 bp, Artificial Sequence
  MKO10075624_B_Cbl
  gRNA
tcactgacctgccaggtttg

SEQ ID NO: 75625 - DNA, 20 bp, Artificial Sequence
  MKO10075625_B_Cbr1
  gRNA
ggacgaggagcggggccaaa

SEQ ID NO: 75626 - DNA, 20 bp, Artificial Sequence
  MKO10075626_B_Cbr1
  gRNA
ccccttccacattcaagcag

SEQ ID NO: 75627 - DNA, 20 bp, Artificial Sequence
  MKO10075627_B_Cbr1
  gRNA
ttgtcacctctgcttgaatg

SEQ ID NO: 75628 - DNA, 20 bp, Artificial Sequence
  MKO10075628_B_Cbr2
  gRNA
actggtgaacaatgcagcgc

SEQ ID NO: 75629 - DNA, 20 bp, Artificial Sequence
  MKO10075629_B_Cbr2
  gRNA
cctggtcagccttgccaaag

SEQ ID NO: 75630 - DNA, 20 bp, Artificial Sequence
  MKO10075630_B_Cbr2
  gRNA
ccgagtcaccgccaccactt

SEQ ID NO: 75631 - DNA, 20 bp, Artificial Sequence
  MKO10075631_B_Cbr3
  gRNA
gcagaaagtcgcgcagcgca

SEQ ID NO: 75632 - DNA, 20 bp, Artificial Sequence
  MKO10075632_B_Cbr3
  gRNA
cacctcagcttgaatgtcga

SEQ ID NO: 75633 - DNA, 20 bp, Artificial Sequence
  MKO10075633_B_Cbr3
  gRNA
acccttcgacattcaagctg

SEQ ID NO: 75634 - DNA, 20 bp, Artificial Sequence
  MKO10075634_B_Cbr4
  gRNA
catgttcttatcgtggatgg

SEQ ID NO: 75635 - DNA, 20 bp, Artificial Sequence
  MKO10075635_B_Cbr4
  gRNA
tcagctgcacactaacctcc

SEQ ID NO: 75636 - DNA, 20 bp, Artificial Sequence
  MKO10075636_B_Cbr4
  gRNA
tttgaccaacctgttgatac

SEQ ID NO: 75637 - DNA, 20 bp, Artificial Sequence
  MKO10075637_B_Cbs
  gRNA
atcgaagatgctgagcgagc

SEQ ID NO: 75638 - DNA, 20 bp, Artificial Sequence
  MKO10075638_B_Cbs
  gRNA
atctgcttggggtatcaggc

SEQ ID NO: 75639 - DNA, 20 bp, Artificial Sequence
  MKO10075639_B_Cbs
  gRNA
gactcgatccttgtcccctg

SEQ ID NO: 75640 - DNA, 20 bp, Artificial Sequence
  MKO10075640_B_Cbwd1
  gRNA
gggagtgatatttatcttga

SEQ ID NO: 75641 - DNA, 20 bp, Artificial Sequence
  MKO10075641_B_Cbwd1
  gRNA
tccaccttgactgacagcta

SEQ ID NO: 75642 - DNA, 20 bp, Artificial Sequence
  MKO10075642_B_Cbwd1
  gRNA
agaactctatgaagaatggc

SEQ ID NO: 75643 - DNA, 20 bp, Artificial Sequence
  MKO10075643_B_Cbx1
  gRNA
gtttcagtgaggacaacact

SEQ ID NO: 75644 - DNA, 20 bp, Artificial Sequence
  MKO10075644_B_Cbx1
  gRNA
agccaatgtcaagtgcccac

SEQ ID NO: 75645 - DNA, 20 bp, Artificial Sequence
  MKO10075645_B_Cbx1
  gRNA
tggtggaaaaagttcttgat

SEQ ID NO: 75646 - DNA, 20 bp, Artificial Sequence
  MKO10075646_B_Cbx2
  gRNA
tcaccttgagcttggagcgc

SEQ ID NO: 75647 - DNA, 20 bp, Artificial Sequence
  MKO10075647_B_Cbx2
  gRNA
gagttctcacttcttctgga

SEQ ID NO: 75648 - DNA, 20 bp, Artificial Sequence
  MKO10075648_B_Cbx2
  gRNA
gcagggcaagctggagtacc

SEQ ID NO: 75649 - DNA, 20 bp, Artificial Sequence
  MKO10075649_B_Cbx3
  gRNA
taactctccgctgctgtctg

SEQ ID NO: 75650 - DNA, 20 bp, Artificial Sequence
  MKO10075650_B_Cbx3
  gRNA
ctgtgaaccccttccacttc

SEQ ID NO: 75651 - DNA, 20 bp, Artificial Sequence
  MKO10075651_B_Cbx3
  gRNA
aaaatgggaaagaaacaaaa

SEQ ID NO: 75652 - DNA, 20 bp, Artificial Sequence
  MKO10075652_B_Cbx4
  gRNA
cacttgcaagatataacacg

SEQ ID NO: 75653 - DNA, 20 bp, Artificial Sequence
  MKO10075653_B_Cbx4
  gRNA
tgctgatcgccttccagaac

SEQ ID NO: 75654 - DNA, 20 bp, Artificial Sequence
  MKO10075654_B_Cbx4
  gRNA
acagggcagagtggagtatc

SEQ ID NO: 75655 - DNA, 20 bp, Artificial Sequence
  MKO10075655_B_Cbx5
  gRNA
agcaaagcaatgatatcgct

SEQ ID NO: 75656 - DNA, 20 bp, Artificial Sequence
  MKO10075656_B_Cbx5
  gRNA
agggtgaaaacaataagccc

SEQ ID NO: 75657 - DNA, 20 bp, Artificial Sequence
  MKO10075657_B_Cbx5
  gRNA
agccgacagctcttcttcag

SEQ ID NO: 75658 - DNA, 20 bp, Artificial Sequence
  MKO10075658_B_Cbx6
  gRNA
tccaactcacttctgctcga

SEQ ID NO: 75659 - DNA, 20 bp, Artificial Sequence
  MKO10075659_B_Cbx6
  gRNA
gactcggcaggtacagcact

SEQ ID NO: 75660 - DNA, 20 bp, Artificial Sequence
  MKO10075660_B_Cbx6
  gRNA
gaaagggaacgtgagctgta

SEQ ID NO: 75661 - DNA, 20 bp, Artificial Sequence
  MKO10075661_B_Cbx7
  gRNA
gggtccttacttctcctcgt

SEQ ID NO: 75662 - DNA, 20 bp, Artificial Sequence
  MKO10075662_B_Cbx7
  gRNA
ggaagagaggtccgaaaccc

SEQ ID NO: 75663 - DNA, 20 bp, Artificial Sequence
  MKO10075663_B_Cbx7
  gRNA
ccagacgttgtgcagacccc

SEQ ID NO: 75664 - DNA, 20 bp, Artificial Sequence
  MKO10075664_B_Cbx8
  gRNA
gcatggaatatctcgtgaaa

SEQ ID NO: 75665 - DNA, 20 bp, Artificial Sequence
  MKO10075665_B_Cbx8
  gRNA
tttcctttaggtacagcacg

SEQ ID NO: 75666 - DNA, 20 bp, Artificial Sequence
  MKO10075666_B_Cbx8
  gRNA
tttctttagggaacgggaga

SEQ ID NO: 75667 - DNA, 20 bp, Artificial Sequence
  MKO10075667_B_Cby1
  gRNA
agagaggccgacttccgagg

SEQ ID NO: 75668 - DNA, 20 bp, Artificial Sequence
  MKO10075668_B_Cby1
  gRNA
tgcactcacagaatgtaggt

SEQ ID NO: 75669 - DNA, 20 bp, Artificial Sequence
  MKO10075669_B_Cby1
  gRNA
ctggagctggggctcgacta

SEQ ID NO: 75670 - DNA, 20 bp, Artificial Sequence
  MKO10075670_B_Cc2d1a
  gRNA
tgcagcgtggcctctactcc

SEQ ID NO: 75671 - DNA, 20 bp, Artificial Sequence
  MKO10075671_B_Cc2d1a
  gRNA
gggaggtatacctgggccac

SEQ ID NO: 75672 - DNA, 20 bp, Artificial Sequence
  MKO10075672_B_Cc2d1a
  gRNA
gagccgggccatcttctcaa

SEQ ID NO: 75673 - DNA, 20 bp, Artificial Sequence
  MKO10075673_B_Cc2d1b
  gRNA
tcacaggggaaacagcgagc

SEQ ID NO: 75674 - DNA, 20 bp, Artificial Sequence
  MKO10075674_B_Cc2d1b
  gRNA
cactgaactacctgtagagc

SEQ ID NO: 75675 - DNA, 20 bp, Artificial Sequence
  MKO10075675_B_Cc2d1b
  gRNA
agcaagtccagacctctgtg

SEQ ID NO: 75676 - DNA, 20 bp, Artificial Sequence
  MKO10075676_B_Cc2d2a
  gRNA
caagctcaggaggttggtct

SEQ ID NO: 75677 - DNA, 20 bp, Artificial Sequence
  MKO10075677_B_Cc2d2a
  gRNA
ctccctcattcgttccctca

SEQ ID NO: 75678 - DNA, 20 bp, Artificial Sequence
  MKO10075678_B_Cc2d2a
  gRNA
aagccggttctagaagctga

SEQ ID NO: 75679 - DNA, 20 bp, Artificial Sequence
  MKO10075679_B_Ccar1
  gRNA
gcaatattcacaacctcagc

SEQ ID NO: 75680 - DNA, 20 bp, Artificial Sequence
  MKO10075680_B_Ccar1
  gRNA
ttatacccagcagactgcat

SEQ ID NO: 75681 - DNA, 20 bp, Artificial Sequence
  MKO10075681_B_Ccar1
  gRNA
caaactaacctgtgttaaaa

SEQ ID NO: 75682 - DNA, 20 bp, Artificial Sequence
  MKO10075682_B_Ccar2
  gRNA
cgtgccctggaatgctgtca

SEQ ID NO: 75683 - DNA, 20 bp, Artificial Sequence
  MKO10075683_B_Ccar2
  gRNA
accagcttgcatgactactt

SEQ ID NO: 75684 - DNA, 20 bp, Artificial Sequence
  MKO10075684_B_Ccar2
  gRNA
ggagtaagtagaccaggggg

SEQ ID NO: 75685 - DNA, 20 bp, Artificial Sequence
  MKO10075685_B_Ccbe1
  gRNA
gtatttgtctccccttgtgc

SEQ ID NO: 75686 - DNA, 20 bp, Artificial Sequence
  MKO10075686_B_Ccbe1
  gRNA
accgcgagagacaccaaaag

SEQ ID NO: 75687 - DNA, 20 bp, Artificial Sequence
  MKO10075687_B_Ccbe1
  gRNA
ggctacatccttgaggacga

SEQ ID NO: 75688 - DNA, 20 bp, Artificial Sequence
  MKO10075688_B_Ccbl1
  gRNA
tcacaaacgctgaggtgtac

SEQ ID NO: 75689 - DNA, 20 bp, Artificial Sequence
  MKO10075689_B_Ccbl1
  gRNA
gtcaccagcacattcttgag

SEQ ID NO: 75690 - DNA, 20 bp, Artificial Sequence
  MKO10075690_B_Ccbl1
  gRNA
gcttgccaaagaaacttgcc

SEQ ID NO: 75691 - DNA, 20 bp, Artificial Sequence
  MKO10075691_B_Ccbl2
  gRNA
gtccacttcatcccgtcagt

SEQ ID NO: 75692 - DNA, 20 bp, Artificial Sequence
  MKO10075692_B_Ccbl2
  gRNA
cagggttgaatttactaagt

SEQ ID NO: 75693 - DNA, 20 bp, Artificial Sequence
  MKO10075693_B_Ccbl2
  gRNA
gagagatccatatgccccca

SEQ ID NO: 75694 - DNA, 20 bp, Artificial Sequence
  MKO10075694_B_Ccdc101
  gRNA
tagcatcctccgcaaagcgc

SEQ ID NO: 75695 - DNA, 20 bp, Artificial Sequence
  MKO10075695_B_Ccdc101
  gRNA
cacaaccgccaagactgatg

SEQ ID NO: 75696 - DNA, 20 bp, Artificial Sequence
  MKO10075696_B_Ccdc101
  gRNA
tctctgtctgcatccgctcg

SEQ ID NO: 75697 - DNA, 20 bp, Artificial Sequence
  MKO10075697_B_Ccdc102a
  gRNA
gaacaagaagctgcgcgcac

SEQ ID NO: 75698 - DNA, 20 bp, Artificial Sequence
  MKO10075698_B_Ccdc102a
  gRNA
tcgggtcagctcaggacgcc

SEQ ID NO: 75699 - DNA, 20 bp, Artificial Sequence
  MKO10075699_B_Ccdc102a
  gRNA
acatgcggcccaactcatcc

SEQ ID NO: 75700 - DNA, 20 bp, Artificial Sequence
  MKO10075700_B_Ccdc103
  gRNA
ccgagtagtgtgacaattcc

SEQ ID NO: 75701 - DNA, 20 bp, Artificial Sequence
  MKO10075701_B_Ccdc103
  gRNA
agttacgggcagttgagcaa

SEQ ID NO: 75702 - DNA, 20 bp, Artificial Sequence
  MKO10075702_B_Ccdc103
  gRNA
attgtcacactactcgggaa

SEQ ID NO: 75703 - DNA, 20 bp, Artificial Sequence
  MKO10075703_B_Ccdc104
  gRNA
ttacctgactgcttaactga

SEQ ID NO: 75704 - DNA, 20 bp, Artificial Sequence
  MKO10075704_B_Ccdc104
  gRNA
gcaccatcagttaagcagtc

SEQ ID NO: 75705 - DNA, 20 bp, Artificial Sequence
  MKO10075705_B_Ccdc104
  gRNA
aaatcttctgctgccaacac

SEQ ID NO: 75706 - DNA, 20 bp, Artificial Sequence
  MKO10075706_B_Ccdc105
  gRNA
taatgagggggactatccac

SEQ ID NO: 75707 - DNA, 20 bp, Artificial Sequence
  MKO10075707_B_Ccdc105
  gRNA
caaccgtgtatgctcctcgc

SEQ ID NO: 75708 - DNA, 20 bp, Artificial Sequence
  MKO10075708_B_Ccdc105
  gRNA
acgcatcttctgtgccagcg

SEQ ID NO: 75709 - DNA, 20 bp, Artificial Sequence
  MKO10075709_B_Ccdc106
  gRNA
ttcagcggggtttccgaaga

SEQ ID NO: 75710 - DNA, 20 bp, Artificial Sequence
  MKO10075710_B_Ccdc106
  gRNA
gtggttgcagaagcgcattg

SEQ ID NO: 75711 - DNA, 20 bp, Artificial Sequence
  MKO10075711_B_Ccdc106
  gRNA
agccttcgagcaccaccgtg

SEQ ID NO: 75712 - DNA, 20 bp, Artificial Sequence
  MKO10075712_B_Ccdc107
  gRNA
tttctacagggtgacgactt

SEQ ID NO: 75713 - DNA, 20 bp, Artificial Sequence
  MKO10075713_B_Ccdc107
  gRNA
gctcaacccacctgactgcg

SEQ ID NO: 75714 - DNA, 20 bp, Artificial Sequence
  MKO10075714_B_Ccdc107
  gRNA
ggagtggaagttccagaacc

SEQ ID NO: 75715 - DNA, 20 bp, Artificial Sequence
  MKO10075715_B_Ccdc108
  gRNA
aggtcgccgagaagctgcac

SEQ ID NO: 75716 - DNA, 20 bp, Artificial Sequence
  MKO10075716_B_Ccdc108
  gRNA
tgaacagcttgtagatcccc

SEQ ID NO: 75717 - DNA, 20 bp, Artificial Sequence
  MKO10075717_B_Ccdc108
  gRNA
atttcagatactacccacta

SEQ ID NO: 75718 - DNA, 20 bp, Artificial Sequence
  MKO10075718_B_Ccdc109b
  gRNA
ggtcgatcttcgccatcaga

SEQ ID NO: 75719 - DNA, 20 bp, Artificial Sequence
  MKO10075719_B_Ccdc109b
  gRNA
gtggctccactgtcccataa

SEQ ID NO: 75720 - DNA, 20 bp, Artificial Sequence
  MKO10075720_B_Ccdc109b
  gRNA
taccaccaagcactccatta

SEQ ID NO: 75721 - DNA, 20 bp, Artificial Sequence
  MKO10075721_B_Ccdc110
  gRNA
ctaggtcctacaacatcagc

SEQ ID NO: 75722 - DNA, 20 bp, Artificial Sequence
  MKO10075722_B_Ccdc110
  gRNA
cttactttcagtgctgattg

SEQ ID NO: 75723 - DNA, 20 bp, Artificial Sequence
  MKO10075723_B_Ccdc110
  gRNA
agaaaccccacaatttaact

SEQ ID NO: 75724 - DNA, 20 bp, Artificial Sequence
  MKO10075724_B_Ccdc112
  gRNA
agtcatttctacaaccaaag

SEQ ID NO: 75725 - DNA, 20 bp, Artificial Sequence
  MKO10075725_B_Ccdc112
  gRNA
ctttacgttgttatgtatct

SEQ ID NO: 75726 - DNA, 20 bp, Artificial Sequence
  MKO10075726_B_Ccdc112
  gRNA
cgagaagctcagagaaatga

SEQ ID NO: 75727 - DNA, 20 bp, Artificial Sequence
  MKO10075727_B_Ccdc113
  gRNA
tatctgacaaccgtgtcatt

SEQ ID NO: 75728 - DNA, 20 bp, Artificial Sequence
  MKO10075728_B_Ccdc113
  gRNA
aacttcattccaccgaatgt

SEQ ID NO: 75729 - DNA, 20 bp, Artificial Sequence
  MKO10075729_B_Ccdc113
  gRNA
ccagggaccaccgaatgaca

SEQ ID NO: 75730 - DNA, 20 bp, Artificial Sequence
  MKO10075730_B_Ccdc114
  gRNA
tgtaggagatccacctactc

SEQ ID NO: 75731 - DNA, 20 bp, Artificial Sequence
  MKO10075731_B_Ccdc114
  gRNA
gttccctccagatccaggac

SEQ ID NO: 75732 - DNA, 20 bp, Artificial Sequence
  MKO10075732_B_Ccdc114
  gRNA
tgagagctccaaccatctcc

SEQ ID NO: 75733 - DNA, 20 bp, Artificial Sequence
  MKO10075733_B_Ccdc115
  gRNA
aaactcaccatcccggaagc

SEQ ID NO: 75734 - DNA, 20 bp, Artificial Sequence
  MKO10075734_B_Ccdc115
  gRNA
tctctcaccaggcctacagc

SEQ ID NO: 75735 - DNA, 20 bp, Artificial Sequence
  MKO10075735_B_Ccdc115
  gRNA
ctcaggtctgcgtgcgtgcc

SEQ ID NO: 75736 - DNA, 20 bp, Artificial Sequence
  MKO10075736_B_Ccdc116
  gRNA
tatacttaccggggccacat

SEQ ID NO: 75737 - DNA, 20 bp, Artificial Sequence
  MKO10075737_B_Ccdc116
  gRNA
tgcagaagatcggagtttcc

SEQ ID NO: 75738 - DNA, 20 bp, Artificial Sequence
  MKO10075738_B_Ccdc116
  gRNA
gccatctggactgcattagg

SEQ ID NO: 75739 - DNA, 20 bp, Artificial Sequence
  MKO10075739_B_Ccdc117
  gRNA
gtcagtcgtttctttcttac

SEQ ID NO: 75740 - DNA, 20 bp, Artificial Sequence
  MKO10075740_B_Ccdc117
  gRNA
ttgatgaagtcttcacaaag

SEQ ID NO: 75741 - DNA, 20 bp, Artificial Sequence
  MKO10075741_B_Ccdc117
  gRNA
gataattgacgaagatgaag

SEQ ID NO: 75742 - DNA, 20 bp, Artificial Sequence
  MKO10075742_B_Ccdc11
  gRNA
ggacttgaacatgaaactcg

SEQ ID NO: 75743 - DNA, 20 bp, Artificial Sequence
  MKO10075743_B_Ccdc11
  gRNA
cagatcattacctgaactgc

SEQ ID NO: 75744 - DNA, 20 bp, Artificial Sequence
  MKO10075744_B_Ccdc11
  gRNA
tcttgtgcaagcgagagtcc

SEQ ID NO: 75745 - DNA, 20 bp, Artificial Sequence
  MKO10075745_B_Ccdc120
  gRNA
cctcttgcaaggctcgctgg

SEQ ID NO: 75746 - DNA, 20 bp, Artificial Sequence
  MKO10075746_B_Ccdc120
  gRNA
gaagtgcatcaacctgtacc

SEQ ID NO: 75747 - DNA, 20 bp, Artificial Sequence
  MKO10075747_B_Ccdc120
  gRNA
gcctggtgaacgacctcagt

SEQ ID NO: 75748 - DNA, 20 bp, Artificial Sequence
  MKO10075748_B_Ccdc121
  gRNA
gaagtgcgcctcccggtcct

SEQ ID NO: 75749 - DNA, 20 bp, Artificial Sequence
  MKO10075749_B_Ccdc121
  gRNA
ccgaagtgagactgcgacca

SEQ ID NO: 75750 - DNA, 20 bp, Artificial Sequence
  MKO10075750_B_Ccdc121
  gRNA
aaagcaccggcagctggcga

SEQ ID NO: 75751 - DNA, 20 bp, Artificial Sequence
  MKO10075751_B_Ccdc122
  gRNA
gcatcggcaagatgctgcaa

SEQ ID NO: 75752 - DNA, 20 bp, Artificial Sequence
  MKO10075752_B_Ccdc122
  gRNA
aaaaattctgttccagttgc

SEQ ID NO: 75753 - DNA, 20 bp, Artificial Sequence
  MKO10075753_B_Ccdc122
  gRNA
tgtttgtgactgttgttgtt

SEQ ID NO: 75754 - DNA, 20 bp, Artificial Sequence
  MKO10075754_B_Ccdc124
  gRNA
tcctgagcgccggatgcgag

SEQ ID NO: 75755 - DNA, 20 bp, Artificial Sequence
  MKO10075755_B_Ccdc124
  gRNA
cacagatcgaggactcgctg

SEQ ID NO: 75756 - DNA, 20 bp, Artificial Sequence
  MKO10075756_B_Ccdc124
  gRNA
cgcccacctgagcactgcga

SEQ ID NO: 75757 - DNA, 20 bp, Artificial Sequence
  MKO10075757_B_Ccdc125
  gRNA
gcgtctcaaagacaacttga

SEQ ID NO: 75758 - DNA, 20 bp, Artificial Sequence
  MKO10075758_B_Ccdc125
  gRNA
attgaaaatcctccaaagca

SEQ ID NO: 75759 - DNA, 20 bp, Artificial Sequence
  MKO10075759_B_Ccdc125
  gRNA
atacaaacctgtcacatttc

SEQ ID NO: 75760 - DNA, 20 bp, Artificial Sequence
  MKO10075760_B_Ccdc126
  gRNA
caacaaaaggacgagtgttt

SEQ ID NO: 75761 - DNA, 20 bp, Artificial Sequence
  MKO10075761_B_Ccdc126
  gRNA
tgtggacagcggcgcgtcca

SEQ ID NO: 75762 - DNA, 20 bp, Artificial Sequence
  MKO10075762_B_Ccdc126
  gRNA
actacactttgcaacagccg

SEQ ID NO: 75763 - DNA, 20 bp, Artificial Sequence
  MKO10075763_B_Ccdc127
  gRNA
ggggtcgtttaagttattca

SEQ ID NO: 75764 - DNA, 20 bp, Artificial Sequence
  MKO10075764_B_Ccdc127
  gRNA
acagctgagccacagcgcgc

SEQ ID NO: 75765 - DNA, 20 bp, Artificial Sequence
  MKO10075765_B_Ccdc127
  gRNA
aatgctgccaatccgagcat

SEQ ID NO: 75766 - DNA, 20 bp, Artificial Sequence
  MKO10075766_B_Ccdc129
  gRNA
aactcgtgttattccaccac

SEQ ID NO: 75767 - DNA, 20 bp, Artificial Sequence
  MKO10075767_B_Ccdc129
  gRNA
tgaccgtgaaagactacatg

SEQ ID NO: 75768 - DNA, 20 bp, Artificial Sequence
  MKO10075768_B_Ccdc129
  gRNA
tgccttaccagtatggttga

SEQ ID NO: 75769 - DNA, 20 bp, Artificial Sequence
  MKO10075769_B_Ccdc12
  gRNA
tcgccctctagtggaggaga

SEQ ID NO: 75770 - DNA, 20 bp, Artificial Sequence
  MKO10075770_B_Ccdc12
  gRNA
acactcaccaatcaggtttc

SEQ ID NO: 75771 - DNA, 20 bp, Artificial Sequence
  MKO10075771_B_Ccdc12
  gRNA
ctcacaggggactcaggctc

SEQ ID NO: 75772 - DNA, 20 bp, Artificial Sequence
  MKO10075772_B_Ccdc130
  gRNA
ccgtcacaccagatgttgta

SEQ ID NO: 75773 - DNA, 20 bp, Artificial Sequence
  MKO10075773_B_Ccdc130
  gRNA
cccagacttcaaccccgaaa

SEQ ID NO: 75774 - DNA, 20 bp, Artificial Sequence
  MKO10075774_B_Ccdc130
  gRNA
attacacgactccaatctac

SEQ ID NO: 75775 - DNA, 20 bp, Artificial Sequence
  MKO10075775_B_Ccdc132
  gRNA
tctcaatctgcaagagttag

SEQ ID NO: 75776 - DNA, 20 bp, Artificial Sequence
  MKO10075776_B_Ccdc132
  gRNA
aaatcaaatctctcatgacc

SEQ ID NO: 75777 - DNA, 20 bp, Artificial Sequence
  MKO10075777_B_Ccdc132
  gRNA
caagggtctgaagagccctc

SEQ ID NO: 75778 - DNA, 20 bp, Artificial Sequence
  MKO10075778_B_Ccdc134
  gRNA
ggatgtcattcagctgcgcc

SEQ ID NO: 75779 - DNA, 20 bp, Artificial Sequence
  MKO10075779_B_Ccdc134
  gRNA
gctgccgatgtgcttccaga

SEQ ID NO: 75780 - DNA, 20 bp, Artificial Sequence
  MKO10075780_B_Ccdc134
  gRNA
catgcttaagggactcttca

SEQ ID NO: 75781 - DNA, 20 bp, Artificial Sequence
  MKO10075781_B_Ccdc135
  gRNA
atagcacttaccggcttgag

SEQ ID NO: 75782 - DNA, 20 bp, Artificial Sequence
  MKO10075782_B_Ccdc135
  gRNA
agttcgtgagcaccaccctg

SEQ ID NO: 75783 - DNA, 20 bp, Artificial Sequence
  MKO10075783_B_Ccdc135
  gRNA
aatactccatcaagccgccc

SEQ ID NO: 75784 - DNA, 20 bp, Artificial Sequence
  MKO10075784_B_Ccdc136
  gRNA
gcgctacaacttactgaatg

SEQ ID NO: 75785 - DNA, 20 bp, Artificial Sequence
  MKO10075785_B_Ccdc136
  gRNA
gaggagacccgtgagcttgc

SEQ ID NO: 75786 - DNA, 20 bp, Artificial Sequence
  MKO10075786_B_Ccdc136
  gRNA
gcagcatgaagatgactccc

SEQ ID NO: 75787 - DNA, 20 bp, Artificial Sequence
  MKO10075787_B_Ccdc137
  gRNA
ctgctccatgcgctggacgt

SEQ ID NO: 75788 - DNA, 20 bp, Artificial Sequence
  MKO10075788_B_Ccdc137
  gRNA
gaattgcaagcctaagaacc

SEQ ID NO: 75789 - DNA, 20 bp, Artificial Sequence
  MKO10075789_B_Ccdc137
  gRNA
ttggagcaggagctactgaa

SEQ ID NO: 75790 - DNA, 20 bp, Artificial Sequence
  MKO10075790_B_Ccdc138
  gRNA
ggctgctctgatgaatcaac

SEQ ID NO: 75791 - DNA, 20 bp, Artificial Sequence
  MKO10075791_B_Ccdc138
  gRNA
agaagaattgtgacctcccc

SEQ ID NO: 75792 - DNA, 20 bp, Artificial Sequence
  MKO10075792_B_Ccdc138
  gRNA
aagaatccagttcatcatct

SEQ ID NO: 75793 - DNA, 20 bp, Artificial Sequence
  MKO10075793_B_Ccdc13
  gRNA
tgcgcaggtcactcatcttc

SEQ ID NO: 75794 - DNA, 20 bp, Artificial Sequence
  MKO10075794_B_Ccdc13
  gRNA
ccaaagctctgtctcccgtc

SEQ ID NO: 75795 - DNA, 20 bp, Artificial Sequence
  MKO10075795_B_Ccdc13
  gRNA
agcatcttcgcagtgagctc

SEQ ID NO: 75796 - DNA, 20 bp, Artificial Sequence
  MKO10075796_B_Ccdc141
  gRNA
cttcatgaccgacatgccaa

SEQ ID NO: 75797 - DNA, 20 bp, Artificial Sequence
  MKO10075797_B_Ccdc141
  gRNA
cccatgcctcacccagcgtc

SEQ ID NO: 75798 - DNA, 20 bp, Artificial Sequence
  MKO10075798_B_Ccdc141
  gRNA
acaagtacttgcagcaacag

SEQ ID NO: 75799 - DNA, 20 bp, Artificial Sequence
  MKO10075799_B_Ccdc142
  gRNA
ctccagagtgagcgctgctt

SEQ ID NO: 75800 - DNA, 20 bp, Artificial Sequence
  MKO10075800_B_Ccdc142
  gRNA
gtacagagccccagagcgac

SEQ ID NO: 75801 - DNA, 20 bp, Artificial Sequence
  MKO10075801_B_Ccdc142
  gRNA
ctccgaagcagcgctcactc

SEQ ID NO: 75802 - DNA, 20 bp, Artificial Sequence
  MKO10075802_B_Ccdc144b
  gRNA
ctgcgtctgcaagcttctta

SEQ ID NO: 75803 - DNA, 20 bp, Artificial Sequence
  MKO10075803_B_Ccdc144b
  gRNA
aatctcatcctgtatgattc

SEQ ID NO: 75804 - DNA, 20 bp, Artificial Sequence
  MKO10075804_B_Ccdc144b
  gRNA
agaagagaaaaaatgtcgtc

SEQ ID NO: 75805 - DNA, 20 bp, Artificial Sequence
  MKO10075805_B_Ccdc146
  gRNA
caccactgtatcgtgtagca

SEQ ID NO: 75806 - DNA, 20 bp, Artificial Sequence
  MKO10075806_B_Ccdc146
  gRNA
tgagcaccacatcttcccgc

SEQ ID NO: 75807 - DNA, 20 bp, Artificial Sequence
  MKO10075807_B_Ccdc146
  gRNA
aagcactgaggaactgcgca

SEQ ID NO: 75808 - DNA, 20 bp, Artificial Sequence
  MKO10075808_B_Ccdc147
  gRNA
cctgaccaaactagttgagc

SEQ ID NO: 75809 - DNA, 20 bp, Artificial Sequence
  MKO10075809_B_Ccdc147
  gRNA
tcagaccatcgaaaagcagc

SEQ ID NO: 75810 - DNA, 20 bp, Artificial Sequence
  MKO10075810_B_Ccdc147
  gRNA
ggtggactcggcatatgaca

SEQ ID NO: 75811 - DNA, 20 bp, Artificial Sequence
  MKO10075811_B_Ccdc148
  gRNA
cccgttctcagctgctgaat

SEQ ID NO: 75812 - DNA, 20 bp, Artificial Sequence
  MKO10075812_B_Ccdc148
  gRNA
tgcctttgaaagacttcatc

SEQ ID NO: 75813 - DNA, 20 bp, Artificial Sequence
  MKO10075813_B_Ccdc148
  gRNA
gcacttagaggaagaccttt

SEQ ID NO: 75814 - DNA, 20 bp, Artificial Sequence
  MKO10075814_B_Ccdc149
  gRNA
gctctcgatacttcttcttc

SEQ ID NO: 75815 - DNA, 20 bp, Artificial Sequence
  MKO10075815_B_Ccdc149
  gRNA
tgtagtacctggtgtgtaaa

SEQ ID NO: 75816 - DNA, 20 bp, Artificial Sequence
  MKO10075816_B_Ccdc149
  gRNA
acagctgctgagagaatcgc

SEQ ID NO: 75817 - DNA, 20 bp, Artificial Sequence
  MKO10075817_B_Ccdc14
  gRNA
cctacagacggacactctcc

SEQ ID NO: 75818 - DNA, 20 bp, Artificial Sequence
  MKO10075818_B_Ccdc14
  gRNA
tcaatctgattcagaaagtc

SEQ ID NO: 75819 - DNA, 20 bp, Artificial Sequence
  MKO10075819_B_Ccdc14
  gRNA
tgcaattctaaacctttaga

SEQ ID NO: 75820 - DNA, 20 bp, Artificial Sequence
  MKO10075820_B_Ccdc150
  gRNA
gaagaatgcggctgttattg

SEQ ID NO: 75821 - DNA, 20 bp, Artificial Sequence
  MKO10075821_B_Ccdc150
  gRNA
agagatgacctaataatgct

SEQ ID NO: 75822 - DNA, 20 bp, Artificial Sequence
  MKO10075822_B_Ccdc150
  gRNA
tagttcctccacaaattacc

SEQ ID NO: 75823 - DNA, 20 bp, Artificial Sequence
  MKO10075823_B_Ccdc151
  gRNA
ggttcaccgaagcaagtcta

SEQ ID NO: 75824 - DNA, 20 bp, Artificial Sequence
  MKO10075824_B_Ccdc151
  gRNA
gaccaccacggtgactagcc

SEQ ID NO: 75825 - DNA, 20 bp, Artificial Sequence
  MKO10075825_B_Ccdc151
  gRNA
agaaaccgttcttgaagaac

SEQ ID NO: 75826 - DNA, 20 bp, Artificial Sequence
  MKO10075826_B_Ccdc152
  gRNA
attcttcatactatgataaa

SEQ ID NO: 75827 - DNA, 20 bp, Artificial Sequence
  MKO10075827_B_Ccdc152
  gRNA
aagataaagtttgctcattt

SEQ ID NO: 75828 - DNA, 20 bp, Artificial Sequence
  MKO10075828_B_Ccdc152
  gRNA
tatcttgatatgcagaaaaa

SEQ ID NO: 75829 - DNA, 20 bp, Artificial Sequence
  MKO10075829_B_Ccdc153
  gRNA
ggctcagcttcatgcccacg

SEQ ID NO: 75830 - DNA, 20 bp, Artificial Sequence
  MKO10075830_B_Ccdc153
  gRNA
tcgctgtcttagcctccctt

SEQ ID NO: 75831 - DNA, 20 bp, Artificial Sequence
  MKO10075831_B_Ccdc153
  gRNA
gatactcacagctctacaga

SEQ ID NO: 75832 - DNA, 20 bp, Artificial Sequence
  MKO10075832_B_Ccdc154
  gRNA
acgctgtgagcatgccacat

SEQ ID NO: 75833 - DNA, 20 bp, Artificial Sequence
  MKO10075833_B_Ccdc154
  gRNA
aggctttaacacacatcagg

SEQ ID NO: 75834 - DNA, 20 bp, Artificial Sequence
  MKO10075834_B_Ccdc154
  gRNA
tgaaggtgaaagccttagtg

SEQ ID NO: 75835 - DNA, 20 bp, Artificial Sequence
  MKO10075835_B_Ccdc155
  gRNA
ccaagctccgggccagtgtt

SEQ ID NO: 75836 - DNA, 20 bp, Artificial Sequence
  MKO10075836_B_Ccdc155
  gRNA
agaagccagggctccctcgt

SEQ ID NO: 75837 - DNA, 20 bp, Artificial Sequence
  MKO10075837_B_Ccdc155
  gRNA
agcttcgacagcagctgtag

SEQ ID NO: 75838 - DNA, 20 bp, Artificial Sequence
  MKO10075838_B_Ccdc157
  gRNA
catgtttattgagacgagtc

SEQ ID NO: 75839 - DNA, 20 bp, Artificial Sequence
  MKO10075839_B_Ccdc157
  gRNA
cgacagcatggtccgtcatc

SEQ ID NO: 75840 - DNA, 20 bp, Artificial Sequence
  MKO10075840_B_Ccdc157
  gRNA
gggctagccagcagatccgc

SEQ ID NO: 75841 - DNA, 20 bp, Artificial Sequence
  MKO10075841_B_Ccdc158
  gRNA
ccccaacctgatatcagcca

SEQ ID NO: 75842 - DNA, 20 bp, Artificial Sequence
  MKO10075842_B_Ccdc158
  gRNA
agagcatattgaacgtgttt

SEQ ID NO: 75843 - DNA, 20 bp, Artificial Sequence
  MKO10075843_B_Ccdc158
  gRNA
gagatgccatggctgatatc

SEQ ID NO: 75844 - DNA, 20 bp, Artificial Sequence
  MKO10075844_B_Ccdc159
  gRNA
cttagcagcccaagatgtga

SEQ ID NO: 75845 - DNA, 20 bp, Artificial Sequence
  MKO10075845_B_Ccdc159
  gRNA
gatgggagagcatgaacggg

SEQ ID NO: 75846 - DNA, 20 bp, Artificial Sequence
  MKO10075846_B_Ccdc159
  gRNA
cccagctcagccaaagtaaa

SEQ ID NO: 75847 - DNA, 20 bp, Artificial Sequence
  MKO10075847_B_Ccdc15
  gRNA
aaccaggccataataccagt

SEQ ID NO: 75848 - DNA, 20 bp, Artificial Sequence
  MKO10075848_B_Ccdc15
  gRNA
gcttaacccgctgattgacc

SEQ ID NO: 75849 - DNA, 20 bp, Artificial Sequence
  MKO10075849_B_Ccdc15
  gRNA
aattaatatacctcttgggt

SEQ ID NO: 75850 - DNA, 20 bp, Artificial Sequence
  MKO10075850_B_Ccdc160
  gRNA
caaagtcccgttcaatctcc

SEQ ID NO: 75851 - DNA, 20 bp, Artificial Sequence
  MKO10075851_B_Ccdc160
  gRNA
aaatcgtgctcgtttaaaaa

SEQ ID NO: 75852 - DNA, 20 bp, Artificial Sequence
  MKO10075852_B_Ccdc160
  gRNA
aatcctgctgaccactttac

SEQ ID NO: 75853 - DNA, 20 bp, Artificial Sequence
  MKO10075853_B_Ccdc162
  gRNA
aggcatttgcgttgttcccg

SEQ ID NO: 75854 - DNA, 20 bp, Artificial Sequence
  MKO10075854_B_Ccdc162
  gRNA
gggacatcactacatcacat

SEQ ID NO: 75855 - DNA, 20 bp, Artificial Sequence
  MKO10075855_B_Ccdc162
  gRNA
aagtgactgtgaccgcagag

SEQ ID NO: 75856 - DNA, 20 bp, Artificial Sequence
  MKO10075856_B_Ccdc163
  gRNA
acctgtagaggaaactcgaa

SEQ ID NO: 75857 - DNA, 20 bp, Artificial Sequence
  MKO10075857_B_Ccdc163
  gRNA
taaactccgatcccagcttc

SEQ ID NO: 75858 - DNA, 20 bp, Artificial Sequence
  MKO10075858_B_Ccdc163
  gRNA
gttgctcccgatccttcaac

SEQ ID NO: 75859 - DNA, 20 bp, Artificial Sequence
  MKO10075859_B_Ccdc166
  gRNA
agcgtcgcttcaccccgtgg

SEQ ID NO: 75860 - DNA, 20 bp, Artificial Sequence
  MKO10075860_B_Ccdc166
  gRNA
gtccttctaccacggccgtg

SEQ ID NO: 75861 - DNA, 20 bp, Artificial Sequence
  MKO10075861_B_Ccdc166
  gRNA
gcgccagatccatgcggttc

SEQ ID NO: 75862 - DNA, 20 bp, Artificial Sequence
  MKO10075862_B_Ccdc167
  gRNA
agctgcttcgacatgagaac

SEQ ID NO: 75863 - DNA, 20 bp, Artificial Sequence
  MKO10075863_B_Ccdc167
  gRNA
tagtccagtaagcatagagc

SEQ ID NO: 75864 - DNA, 20 bp, Artificial Sequence
  MKO10075864_B_Ccdc167
  gRNA
aactttcttaccatacttgg

SEQ ID NO: 75865 - DNA, 20 bp, Artificial Sequence
  MKO10075865_B_Ccdc169
  gRNA
gctccagctgggtctcgtac

SEQ ID NO: 75866 - DNA, 20 bp, Artificial Sequence
  MKO10075866_B_Ccdc169
  gRNA
catcttctcatagacacgaa

SEQ ID NO: 75867 - DNA, 20 bp, Artificial Sequence
  MKO10075867_B_Ccdc169
  gRNA
gctggagctgaatgaccaat

SEQ ID NO: 75868 - DNA, 20 bp, Artificial Sequence
  MKO10075868_B_Ccdc170
  gRNA
aaaccgctgctgattcctcc

SEQ ID NO: 75869 - DNA, 20 bp, Artificial Sequence
  MKO10075869_B_Ccdc170
  gRNA
agagcacctccggaggcacg

SEQ ID NO: 75870 - DNA, 20 bp, Artificial Sequence
  MKO10075870_B_Ccdc170
  gRNA
ggctggcagccgaagtcagc

SEQ ID NO: 75871 - DNA, 20 bp, Artificial Sequence
  MKO10075871_B_Ccdc171
  gRNA
atttctccttcttagcccga

SEQ ID NO: 75872 - DNA, 20 bp, Artificial Sequence
  MKO10075872_B_Ccdc171
  gRNA
agaatacgagtcacttatgc

SEQ ID NO: 75873 - DNA, 20 bp, Artificial Sequence
  MKO10075873_B_Ccdc171
  gRNA
ccggctacaaaaaactctac

SEQ ID NO: 75874 - DNA, 20 bp, Artificial Sequence
  MKO10075874_B_Ccdc172
  gRNA
cccttctcaaaacatctgcc

SEQ ID NO: 75875 - DNA, 20 bp, Artificial Sequence
  MKO10075875_B_Ccdc172
  gRNA
actctccagaaaaagcttaa

SEQ ID NO: 75876 - DNA, 20 bp, Artificial Sequence
  MKO10075876_B_Ccdc172
  gRNA
tcggagattaccagatgtcg

SEQ ID NO: 75877 - DNA, 20 bp, Artificial Sequence
  MKO10075877_B_Ccdc173
  gRNA
gtactgtttcagatgatcct

SEQ ID NO: 75878 - DNA, 20 bp, Artificial Sequence
  MKO10075878_B_Ccdc173
  gRNA
agaaagagtagctcttgccg

SEQ ID NO: 75879 - DNA, 20 bp, Artificial Sequence
  MKO10075879_B_Ccdc173
  gRNA
gcactgcctagcactctcaa

SEQ ID NO: 75880 - DNA, 20 bp, Artificial Sequence
  MKO10075880_B_Ccdc174
  gRNA
ttctgcagaagccaagtatc

SEQ ID NO: 75881 - DNA, 20 bp, Artificial Sequence
  MKO10075881_B_Ccdc174
  gRNA
tttaccttattaattgtctt

SEQ ID NO: 75882 - DNA, 20 bp, Artificial Sequence
  MKO10075882_B_Ccdc174
  gRNA
agaagactctagacaaagca

SEQ ID NO: 75883 - DNA, 20 bp, Artificial Sequence
  MKO10075883_B_Ccdc175
  gRNA
cggctttctcttccaaggtt

SEQ ID NO: 75884 - DNA, 20 bp, Artificial Sequence
  MKO10075884_B_Ccdc175
  gRNA
tacagtaatgtccttaagaa

SEQ ID NO: 75885 - DNA, 20 bp, Artificial Sequence
  MKO10075885_B_Ccdc175
  gRNA
tctccagcagaaagtaaagt

SEQ ID NO: 75886 - DNA, 20 bp, Artificial Sequence
  MKO10075886_B_Ccdc176
  gRNA
tgctctgcaagtgagtgagt

SEQ ID NO: 75887 - DNA, 20 bp, Artificial Sequence
  MKO10075887_B_Ccdc176
  gRNA
tttagctgaaagaaaattta

SEQ ID NO: 75888 - DNA, 20 bp, Artificial Sequence
  MKO10075888_B_Ccdc176
  gRNA
agaaaaactgaagcagcagt

SEQ ID NO: 75889 - DNA, 20 bp, Artificial Sequence
  MKO10075889_B_Ccdc177
  gRNA
gctcgtagttctcttgcgcg

SEQ ID NO: 75890 - DNA, 20 bp, Artificial Sequence
  MKO10075890_B_Ccdc177
  gRNA
agtccttcgagcaactcgcg

SEQ ID NO: 75891 - DNA, 20 bp, Artificial Sequence
  MKO10075891_B_Ccdc177
  gRNA
agcgcgtgcgcgccgaacag

SEQ ID NO: 75892 - DNA, 20 bp, Artificial Sequence
  MKO10075892_B_Ccdc178
  gRNA
ttctgacaagccttgcattc

SEQ ID NO: 75893 - DNA, 20 bp, Artificial Sequence
  MKO10075893_B_Ccdc178
  gRNA
attcttcttctccagacatg

SEQ ID NO: 75894 - DNA, 20 bp, Artificial Sequence
  MKO10075894_B_Ccdc178
  gRNA
taaaacatgtcttcaaataa

SEQ ID NO: 75895 - DNA, 20 bp, Artificial Sequence
  MKO10075895_B_Ccdc17
  gRNA
atctctgcagccagcgtttc

SEQ ID NO: 75896 - DNA, 20 bp, Artificial Sequence
  MKO10075896_B_Ccdc17
  gRNA
ggagaggctgcgagtcttgc

SEQ ID NO: 75897 - DNA, 20 bp, Artificial Sequence
  MKO10075897_B_Ccdc17
  gRNA
acaagaaaagagccgtgatc

SEQ ID NO: 75898 - DNA, 20 bp, Artificial Sequence
  MKO10075898_B_Ccdc181
  gRNA
ccgggtggcttcagttgtag

SEQ ID NO: 75899 - DNA, 20 bp, Artificial Sequence
  MKO10075899_B_Ccdc181
  gRNA
cataaccgaaaagcttgctg

SEQ ID NO: 75900 - DNA, 20 bp, Artificial Sequence
  MKO10075900_B_Ccdc181
  gRNA
gtacagcatacccgaagcca

SEQ ID NO: 75901 - DNA, 20 bp, Artificial Sequence
  MKO10075901_B_Ccdc18
  gRNA
aaaggagcacagtttacaag

SEQ ID NO: 75902 - DNA, 20 bp, Artificial Sequence
  MKO10075902_B_Ccdc18
  gRNA
ttgattgtgtcaattcaaag

SEQ ID NO: 75903 - DNA, 20 bp, Artificial Sequence
  MKO10075903_B_Ccdc18
  gRNA
ataatctgttcttctaagat

SEQ ID NO: 75904 - DNA, 20 bp, Artificial Sequence
  MKO10075904_B_Ccdc19
  gRNA
caagagcgacagccctatcg

SEQ ID NO: 75905 - DNA, 20 bp, Artificial Sequence
  MKO10075905_B_Ccdc19
  gRNA
tttgatccgctcaaactcct

SEQ ID NO: 75906 - DNA, 20 bp, Artificial Sequence
  MKO10075906_B_Ccdc19
  gRNA
atcgctaatcatcagccccg

SEQ ID NO: 75907 - DNA, 20 bp, Artificial Sequence
  MKO10075907_B_Ccdc22
  gRNA
catgtctgcccgcttccgcc

SEQ ID NO: 75908 - DNA, 20 bp, Artificial Sequence
  MKO10075908_B_Ccdc22
  gRNA
tcgagtgattaatcctgatg

SEQ ID NO: 75909 - DNA, 20 bp, Artificial Sequence
  MKO10075909_B_Ccdc22
  gRNA
actacccagcgatgcctctg

SEQ ID NO: 75910 - DNA, 20 bp, Artificial Sequence
  MKO10075910_B_Ccdc23
  gRNA
tgctctcaacagagtcatga

SEQ ID NO: 75911 - DNA, 20 bp, Artificial Sequence
  MKO10075911_B_Ccdc23
  gRNA
tgtaagcagatgcagccgcc

SEQ ID NO: 75912 - DNA, 20 bp, Artificial Sequence
  MKO10075912_B_Ccdc23
  gRNA
taagcagaaatctgcccagc

SEQ ID NO: 75913 - DNA, 20 bp, Artificial Sequence
  MKO10075913_B_Ccdc24
  gRNA
gaacgagatctctgacctgc

SEQ ID NO: 75914 - DNA, 20 bp, Artificial Sequence
  MKO10075914_B_Ccdc24
  gRNA
tttgggtgtccttagagggc

SEQ ID NO: 75915 - DNA, 20 bp, Artificial Sequence
  MKO10075915_B_Ccdc24
  gRNA
cctgtctagaagccttctgg

SEQ ID NO: 75916 - DNA, 20 bp, Artificial Sequence
  MKO10075916_B_Ccdc25
  gRNA
gctacttaccaaatatcttc

SEQ ID NO: 75917 - DNA, 20 bp, Artificial Sequence
  MKO10075917_B_Ccdc25
  gRNA
atctacttacactatttaca

SEQ ID NO: 75918 - DNA, 20 bp, Artificial Sequence
  MKO10075918_B_Ccdc25
  gRNA
tcacgtggacaaactctctt

SEQ ID NO: 75919 - DNA, 20 bp, Artificial Sequence
  MKO10075919_B_Ccdc27
  gRNA
ttgactgaggaccatcccct

SEQ ID NO: 75920 - DNA, 20 bp, Artificial Sequence
  MKO10075920_B_Ccdc27
  gRNA
atgttgtcctggtactaaac

SEQ ID NO: 75921 - DNA, 20 bp, Artificial Sequence
  MKO10075921_B_Ccdc27
  gRNA
cttgtgagctcaactaccca

SEQ ID NO: 75922 - DNA, 20 bp, Artificial Sequence
  MKO10075922_B_Ccdc28a
  gRNA
gctgctttccgcttatcctc

SEQ ID NO: 75923 - DNA, 20 bp, Artificial Sequence
  MKO10075923_B_Ccdc28a
  gRNA
gctttagctgctggacgcat

SEQ ID NO: 75924 - DNA, 20 bp, Artificial Sequence
  MKO10075924_B_Ccdc28a
  gRNA
atccagacagaaactgcact

SEQ ID NO: 75925 - DNA, 20 bp, Artificial Sequence
  MKO10075925_B_Ccdc28b
  gRNA
ggaatgttccttcgagcagc

SEQ ID NO: 75926 - DNA, 20 bp, Artificial Sequence
  MKO10075926_B_Ccdc28b
  gRNA
tgaggaccagccagctgcgt

SEQ ID NO: 75927 - DNA, 20 bp, Artificial Sequence
  MKO10075927_B_Ccdc28b
  gRNA
aggcaaggagaaatgccgac

SEQ ID NO: 75928 - DNA, 20 bp, Artificial Sequence
  MKO10075928_B_Ccdc30
  gRNA
cctgtggatctcctccagcg

SEQ ID NO: 75929 - DNA, 20 bp, Artificial Sequence
  MKO10075929_B_Ccdc30
  gRNA
gaggcgctgcagctctactc

SEQ ID NO: 75930 - DNA, 20 bp, Artificial Sequence
  MKO10075930_B_Ccdc30
  gRNA
attgtactttaattgtctct

SEQ ID NO: 75931 - DNA, 20 bp, Artificial Sequence
  MKO10075931_B_Ccdc32
  gRNA
tgtttccgacaatgccttct

SEQ ID NO: 75932 - DNA, 20 bp, Artificial Sequence
  MKO10075932_B_Ccdc32
  gRNA
atttattgttctgctgccgc

SEQ ID NO: 75933 - DNA, 20 bp, Artificial Sequence
  MKO10075933_B_Ccdc32
  gRNA
ggcttctcagcctgcgactc

SEQ ID NO: 75934 - DNA, 20 bp, Artificial Sequence
  MKO10075934_B_Ccdc33
  gRNA
tacccgagcaattaccacca

SEQ ID NO: 75935 - DNA, 20 bp, Artificial Sequence
  MKO10075935_B_Ccdc33
  gRNA
gaagatgcgcaggtatttaa

SEQ ID NO: 75936 - DNA, 20 bp, Artificial Sequence
  MKO10075936_B_Ccdc33
  gRNA
cttctgcaggtctttcttcg

SEQ ID NO: 75937 - DNA, 20 bp, Artificial Sequence
  MKO10075937_B_Ccdc34
  gRNA
aagagctatggttactccag

SEQ ID NO: 75938 - DNA, 20 bp, Artificial Sequence
  MKO10075938_B_Ccdc34
  gRNA
aattgctgaagtaaagcaca

SEQ ID NO: 75939 - DNA, 20 bp, Artificial Sequence
  MKO10075939_B_Ccdc34
  gRNA
ggttcaaaagaaaaataagc

SEQ ID NO: 75940 - DNA, 20 bp, Artificial Sequence
  MKO10075940_B_Ccdc36
  gRNA
agagactctgctaccgtcct

SEQ ID NO: 75941 - DNA, 20 bp, Artificial Sequence
  MKO10075941_B_Ccdc36
  gRNA
acactcacaagtcttggcta

SEQ ID NO: 75942 - DNA, 20 bp, Artificial Sequence
  MKO10075942_B_Ccdc36
  gRNA
cttaccttgttaatgacttc

SEQ ID NO: 75943 - DNA, 20 bp, Artificial Sequence
  MKO10075943_B_Ccdc37
  gRNA
gcgaagcatgttcctcctcc

SEQ ID NO: 75944 - DNA, 20 bp, Artificial Sequence
  MKO10075944_B_Ccdc37
  gRNA
atgtagtcattcagtgtttc

SEQ ID NO: 75945 - DNA, 20 bp, Artificial Sequence
  MKO10075945_B_Ccdc37
  gRNA
agctgttgtttattaaatcc

SEQ ID NO: 75946 - DNA, 20 bp, Artificial Sequence
  MKO10075946_B_Ccdc38
  gRNA
aaaagatgctgtactcaaaa

SEQ ID NO: 75947 - DNA, 20 bp, Artificial Sequence
  MKO10075947_B_Ccdc38
  gRNA
aagagacagatttctacttg

SEQ ID NO: 75948 - DNA, 20 bp, Artificial Sequence
  MKO10075948_B_Ccdc38
  gRNA
aagaaaatgaaattgctgcc

SEQ ID NO: 75949 - DNA, 20 bp, Artificial Sequence
  MKO10075949_B_Ccdc39
  gRNA
ccatttggctcttgcgctcc

SEQ ID NO: 75950 - DNA, 20 bp, Artificial Sequence
  MKO10075950_B_Ccdc39
  gRNA
agcaagacgataacaaaatc

SEQ ID NO: 75951 - DNA, 20 bp, Artificial Sequence
  MKO10075951_B_Ccdc39
  gRNA
acagttggcaaagctccgag

SEQ ID NO: 75952 - DNA, 20 bp, Artificial Sequence
  MKO10075952_B_Ccdc3
  gRNA
tcagcagcacattaacgctc

SEQ ID NO: 75953 - DNA, 20 bp, Artificial Sequence
  MKO10075953_B_Ccdc3
  gRNA
gtgcgtgccccctatctgca

SEQ ID NO: 75954 - DNA, 20 bp, Artificial Sequence
  MKO10075954_B_Ccdc3
  gRNA
aagtcgtcagctgctgccct

SEQ ID NO: 75955 - DNA, 20 bp, Artificial Sequence
  MKO10075955_B_Ccdc40
  gRNA
gggaagatcgtccgtgtccg

SEQ ID NO: 75956 - DNA, 20 bp, Artificial Sequence
  MKO10075956_B_Ccdc40
  gRNA
ccaccagagagtgccggtca

SEQ ID NO: 75957 - DNA, 20 bp, Artificial Sequence
  MKO10075957_B_Ccdc40
  gRNA
aagtctgactccctcggaca

SEQ ID NO: 75958 - DNA, 20 bp, Artificial Sequence
  MKO10075958_B_Ccdc41
  gRNA
aactgctccttgaagactta

SEQ ID NO: 75959 - DNA, 20 bp, Artificial Sequence
  MKO10075959_B_Ccdc41
  gRNA
ggtactaacaccacaaaaat

SEQ ID NO: 75960 - DNA, 20 bp, Artificial Sequence
  MKO10075960_B_Ccdc41
  gRNA
attctccccttaagtcttca

SEQ ID NO: 75961 - DNA, 20 bp, Artificial Sequence
  MKO10075961_B_Ccdc42b
  gRNA
tcacggactctatcgtgctg

SEQ ID NO: 75962 - DNA, 20 bp, Artificial Sequence
  MKO10075962_B_Ccdc42b
  gRNA
tagagtccgtgaaccagcgc

SEQ ID NO: 75963 - DNA, 20 bp, Artificial Sequence
  MKO10075963_B_Ccdc42b
  gRNA
ttcggtcttgcagcttatat

SEQ ID NO: 75964 - DNA, 20 bp, Artificial Sequence
  MKO10075964_B_Ccdc42
  gRNA
cccggtcgaagcgcatctgc

SEQ ID NO: 75965 - DNA, 20 bp, Artificial Sequence
  MKO10075965_B_Ccdc42
  gRNA
gcggctggcccgctacatgg

SEQ ID NO: 75966 - DNA, 20 bp, Artificial Sequence
  MKO10075966_B_Ccdc42
  gRNA
cttcagttcacgctccttgt

SEQ ID NO: 75967 - DNA, 20 bp, Artificial Sequence
  MKO10075967_B_Ccdc43
  gRNA
tggagcgatggtcagaaaca

SEQ ID NO: 75968 - DNA, 20 bp, Artificial Sequence
  MKO10075968_B_Ccdc43
  gRNA
cgccaccttgattgagaagc

SEQ ID NO: 75969 - DNA, 20 bp, Artificial Sequence
  MKO10075969_B_Ccdc43
  gRNA
tgtcaccaccaaagtcaaaa

SEQ ID NO: 75970 - DNA, 20 bp, Artificial Sequence
  MKO10075970_B_Ccdc47
  gRNA
cttaccacttgatcactcac

SEQ ID NO: 75971 - DNA, 20 bp, Artificial Sequence
  MKO10075971_B_Ccdc47
  gRNA
cagtcaccatcaaaatttct

SEQ ID NO: 75972 - DNA, 20 bp, Artificial Sequence
  MKO10075972_B_Ccdc47
  gRNA
atgagcacatctataacctg

SEQ ID NO: 75973 - DNA, 20 bp, Artificial Sequence
  MKO10075973_B_Ccdc50
  gRNA
acttactctcttgttcctgc

SEQ ID NO: 75974 - DNA, 20 bp, Artificial Sequence
  MKO10075974_B_Ccdc50
  gRNA
gcagatcatgttgtaccaga

SEQ ID NO: 75975 - DNA, 20 bp, Artificial Sequence
  MKO10075975_B_Ccdc50
  gRNA
gggccagggtgtggtcctcc

SEQ ID NO: 75976 - DNA, 20 bp, Artificial Sequence
  MKO10075976_B_Ccdc51
  gRNA
accgcttggaccgagtctcc

SEQ ID NO: 75977 - DNA, 20 bp, Artificial Sequence
  MKO10075977_B_Ccdc51
  gRNA
cgtgttcgcaatgcagcacg

SEQ ID NO: 75978 - DNA, 20 bp, Artificial Sequence
  MKO10075978_B_Ccdc51
  gRNA
caggtactggttgtcctccc

SEQ ID NO: 75979 - DNA, 20 bp, Artificial Sequence
  MKO10075979_B_Ccdc53
  gRNA
acactgtgcagtttctcaac

SEQ ID NO: 75980 - DNA, 20 bp, Artificial Sequence
  MKO10075980_B_Ccdc53
  gRNA
gcacagtgtgcaccacaaac

SEQ ID NO: 75981 - DNA, 20 bp, Artificial Sequence
  MKO10075981_B_Ccdc53
  gRNA
ttgtttcaatttgctgaatc

SEQ ID NO: 75982 - DNA, 20 bp, Artificial Sequence
  MKO10075982_B_Ccdc54
  gRNA
cggtgaaggcgtagtctctc

SEQ ID NO: 75983 - DNA, 20 bp, Artificial Sequence
  MKO10075983_B_Ccdc54
  gRNA
tgcaacccactgatgcattt

SEQ ID NO: 75984 - DNA, 20 bp, Artificial Sequence
  MKO10075984_B_Ccdc54
  gRNA
aaaagagtaagagctgccgc

SEQ ID NO: 75985 - DNA, 20 bp, Artificial Sequence
  MKO10075985_B_Ccdc55
  gRNA
gctgtcatactcatacacag

SEQ ID NO: 75986 - DNA, 20 bp, Artificial Sequence
  MKO10075986_B_Ccdc55
  gRNA
ccgtgagcgaaagccttcag

SEQ ID NO: 75987 - DNA, 20 bp, Artificial Sequence
  MKO10075987_B_Ccdc55
  gRNA
ctaaccttccgatccttccc

SEQ ID NO: 75988 - DNA, 20 bp, Artificial Sequence
  MKO10075988_B_Ccdc57
  gRNA
tcatgtcgtcagccctcagc

SEQ ID NO: 75989 - DNA, 20 bp, Artificial Sequence
  MKO10075989_B_Ccdc57
  gRNA
gcgggaacagaatgagcgcc

SEQ ID NO: 75990 - DNA, 20 bp, Artificial Sequence
  MKO10075990_B_Ccdc57
  gRNA
gctcattctgttcccgctgg

SEQ ID NO: 75991 - DNA, 20 bp, Artificial Sequence
  MKO10075991_B_Ccdc58
  gRNA
acttagaaaagaacagacaa

SEQ ID NO: 75992 - DNA, 20 bp, Artificial Sequence
  MKO10075992_B_Ccdc58
  gRNA
agaagagagagaaaagaacc

SEQ ID NO: 75993 - DNA, 20 bp, Artificial Sequence
  MKO10075993_B_Ccdc58
  gRNA
ttaataacgttaagtcatcc

SEQ ID NO: 75994 - DNA, 20 bp, Artificial Sequence
  MKO10075994_B_Ccdc59
  gRNA
aactgggactcctgtgacgc

SEQ ID NO: 75995 - DNA, 20 bp, Artificial Sequence
  MKO10075995_B_Ccdc59
  gRNA
gatactccatctgtaaattc

SEQ ID NO: 75996 - DNA, 20 bp, Artificial Sequence
  MKO10075996_B_Ccdc59
  gRNA
gcctaacctgaatttacaga

SEQ ID NO: 75997 - DNA, 20 bp, Artificial Sequence
  MKO10075997_B_Ccdc60
  gRNA
ccggcttacacgtgagactc

SEQ ID NO: 75998 - DNA, 20 bp, Artificial Sequence
  MKO10075998_B_Ccdc60
  gRNA
ctacttcaacatcctgcgag

SEQ ID NO: 75999 - DNA, 20 bp, Artificial Sequence
  MKO10075999_B_Ccdc60
  gRNA
ggtcgatggtcagggcctct

SEQ ID NO: 76000 - DNA, 20 bp, Artificial Sequence
  MKO10076000_B_Ccdc61
  gRNA
cggccaggatgctcgggaga

SEQ ID NO: 76001 - DNA, 20 bp, Artificial Sequence
  MKO10076001_B_Ccdc61
  gRNA
cccgctgcccctcccgtacc

SEQ ID NO: 76002 - DNA, 20 bp, Artificial Sequence
  MKO10076002_B_Ccdc61
  gRNA
gtctctgcgcagccgcaagc

SEQ ID NO: 76003 - DNA, 20 bp, Artificial Sequence
  MKO10076003_B_Ccdc62
  gRNA
caacctcaaggtcttccgag

SEQ ID NO: 76004 - DNA, 20 bp, Artificial Sequence
  MKO10076004_B_Ccdc62
  gRNA
actctgcttgattggactcc

SEQ ID NO: 76005 - DNA, 20 bp, Artificial Sequence
  MKO10076005_B_Ccdc62
  gRNA
aaatctcagcagcacgttag

SEQ ID NO: 76006 - DNA, 20 bp, Artificial Sequence
  MKO10076006_B_Ccdc63
  gRNA
cgtgaagtctccgaagaacc

SEQ ID NO: 76007 - DNA, 20 bp, Artificial Sequence
  MKO10076007_B_Ccdc63
  gRNA
tgccccccagatcgttcaga

SEQ ID NO: 76008 - DNA, 20 bp, Artificial Sequence
  MKO10076008_B_Ccdc63
  gRNA
cgtaggcggccttctcaaag

SEQ ID NO: 76009 - DNA, 20 bp, Artificial Sequence
  MKO10076009_B_Ccdc64b
  gRNA
tcatgagctccgtcgaggac

SEQ ID NO: 76010 - DNA, 20 bp, Artificial Sequence
  MKO10076010_B_Ccdc64b
  gRNA
ctgaccgctgttcgccaagc

SEQ ID NO: 76011 - DNA, 20 bp, Artificial Sequence
  MKO10076011_B_Ccdc64b
  gRNA
accagatgctgcaagaccgc

SEQ ID NO: 76012 - DNA, 20 bp, Artificial Sequence
  MKO10076012_B_Ccdc64
  gRNA
gcctttctaggatcagcacc

SEQ ID NO: 76013 - DNA, 20 bp, Artificial Sequence
  MKO10076013_B_Ccdc64
  gRNA
ccaccaaccagcatatcatc

SEQ ID NO: 76014 - DNA, 20 bp, Artificial Sequence
  MKO10076014_B_Ccdc64
  gRNA
tgtgactcaccctgctgagt

SEQ ID NO: 76015 - DNA, 20 bp, Artificial Sequence
  MKO10076015_B_Ccdc65
  gRNA
acagtccaccacgcgttcaa

SEQ ID NO: 76016 - DNA, 20 bp, Artificial Sequence
  MKO10076016_B_Ccdc65
  gRNA
tcttgaccctgcaacgacgc

SEQ ID NO: 76017 - DNA, 20 bp, Artificial Sequence
  MKO10076017_B_Ccdc65
  gRNA
ggcgatcttccggtcctccg

SEQ ID NO: 76018 - DNA, 20 bp, Artificial Sequence
  MKO10076018_B_Ccdc66
  gRNA
atatggggacagtattaact

SEQ ID NO: 76019 - DNA, 20 bp, Artificial Sequence
  MKO10076019_B_Ccdc66
  gRNA
gaaatgcctcttgagctctc

SEQ ID NO: 76020 - DNA, 20 bp, Artificial Sequence
  MKO10076020_B_Ccdc66
  gRNA
aagttaatactgtccccata

SEQ ID NO: 76021 - DNA, 20 bp, Artificial Sequence
  MKO10076021_B_Ccdc67
  gRNA
gatggaacaaatcgacatca

SEQ ID NO: 76022 - DNA, 20 bp, Artificial Sequence
  MKO10076022_B_Ccdc67
  gRNA
taatgtaggtggggttgctt

SEQ ID NO: 76023 - DNA, 20 bp, Artificial Sequence
  MKO10076023_B_Ccdc67
  gRNA
aggagttccgagcaaagtcg

SEQ ID NO: 76024 - DNA, 20 bp, Artificial Sequence
  MKO10076024_B_Ccdc68
  gRNA
ggaaaaccgtgtacagagga

SEQ ID NO: 76025 - DNA, 20 bp, Artificial Sequence
  MKO10076025_B_Ccdc68
  gRNA
agacctggagaaaaagcacg

SEQ ID NO: 76026 - DNA, 20 bp, Artificial Sequence
  MKO10076026_B_Ccdc68
  gRNA
ttccatgagcaaatccagac

SEQ ID NO: 76027 - DNA, 20 bp, Artificial Sequence
  MKO10076027_B_Ccdc69
  gRNA
ctctaggattatgggagtcc

SEQ ID NO: 76028 - DNA, 20 bp, Artificial Sequence
  MKO10076028_B_Ccdc69
  gRNA
tgcaagtcatgtctcaccac

SEQ ID NO: 76029 - DNA, 20 bp, Artificial Sequence
  MKO10076029_B_Ccdc69
  gRNA
cttctttgtccagtgcctcc

SEQ ID NO: 76030 - DNA, 20 bp, Artificial Sequence
  MKO10076030_B_Ccdc6
  gRNA
gatatgcctcatcatgttct

SEQ ID NO: 76031 - DNA, 20 bp, Artificial Sequence
  MKO10076031_B_Ccdc6
  gRNA
gagacgggagaagattgacc

SEQ ID NO: 76032 - DNA, 20 bp, Artificial Sequence
  MKO10076032_B_Ccdc6
  gRNA
ctcttccttctcgtaattca

SEQ ID NO: 76033 - DNA, 20 bp, Artificial Sequence
  MKO10076033_B_Ccdc70
  gRNA
catccacttgctcaccttga

SEQ ID NO: 76034 - DNA, 20 bp, Artificial Sequence
  MKO10076034_B_Ccdc70
  gRNA
ttcaggaggacaaggcccta

SEQ ID NO: 76035 - DNA, 20 bp, Artificial Sequence
  MKO10076035_B_Ccdc70
  gRNA
ggaaagccctgatcttgcct

SEQ ID NO: 76036 - DNA, 20 bp, Artificial Sequence
  MKO10076036_B_Ccdc71l
  gRNA
actgtcgctggccggaagca

SEQ ID NO: 76037 - DNA, 20 bp, Artificial Sequence
  MKO10076037_B_Ccdc71l
  gRNA
cgtagacgtccttgctgcgc

SEQ ID NO: 76038 - DNA, 20 bp, Artificial Sequence
  MKO10076038_B_Ccdc71l
  gRNA
gcgcatcacagccggtgcac

SEQ ID NO: 76039 - DNA, 20 bp, Artificial Sequence
  MKO10076039_B_Ccdc71
  gRNA
cccaaagcaacggcgcccaa

SEQ ID NO: 76040 - DNA, 20 bp, Artificial Sequence
  MKO10076040_B_Ccdc71
  gRNA
gagcgcgagcagctttgatc

SEQ ID NO: 76041 - DNA, 20 bp, Artificial Sequence
  MKO10076041_B_Ccdc71
  gRNA
cctggggctggtctccgacg

SEQ ID NO: 76042 - DNA, 20 bp, Artificial Sequence
  MKO10076042_B_Ccdc73
  gRNA
acaagaactgaaatggcaaa

SEQ ID NO: 76043 - DNA, 20 bp, Artificial Sequence
  MKO10076043_B_Ccdc73
  gRNA
ggaggctcttcagaatcaaa

SEQ ID NO: 76044 - DNA, 20 bp, Artificial Sequence
  MKO10076044_B_Ccdc73
  gRNA
aaagcaacacaaagaagcaa

SEQ ID NO: 76045 - DNA, 20 bp, Artificial Sequence
  MKO10076045_B_Ccdc74a
  gRNA
gggccatccccgtcccttgc

SEQ ID NO: 76046 - DNA, 20 bp, Artificial Sequence
  MKO10076046_B_Ccdc74a
  gRNA
cattcatgattagcttgtag

SEQ ID NO: 76047 - DNA, 20 bp, Artificial Sequence
  MKO10076047_B_Ccdc74a
  gRNA
agccctccaaaagacagacc

SEQ ID NO: 76048 - DNA, 20 bp, Artificial Sequence
  MKO10076048_B_Ccdc77
  gRNA
gccagacgatcctcgactga

SEQ ID NO: 76049 - DNA, 20 bp, Artificial Sequence
  MKO10076049_B_Ccdc77
  gRNA
taggtcacttcaccagcatc

SEQ ID NO: 76050 - DNA, 20 bp, Artificial Sequence
  MKO10076050_B_Ccdc77
  gRNA
aaattacttactctgtgggg

SEQ ID NO: 76051 - DNA, 20 bp, Artificial Sequence
  MKO10076051_B_Ccdc78
  gRNA
gagtgaagaacagcggttgc

SEQ ID NO: 76052 - DNA, 20 bp, Artificial Sequence
  MKO10076052_B_Ccdc78
  gRNA
cctagcctgggccactagcc

SEQ ID NO: 76053 - DNA, 20 bp, Artificial Sequence
  MKO10076053_B_Ccdc78
  gRNA
aagctgaagtctttgagctg

SEQ ID NO: 76054 - DNA, 20 bp, Artificial Sequence
  MKO10076054_B_Ccdc79
  gRNA
acatcaaaccaccaatttcc

SEQ ID NO: 76055 - DNA, 20 bp, Artificial Sequence
  MKO10076055_B_Ccdc79
  gRNA
gacattccaacagtaacttc

SEQ ID NO: 76056 - DNA, 20 bp, Artificial Sequence
  MKO10076056_B_Ccdc79
  gRNA
aagttctgtcacagatgttc

SEQ ID NO: 76057 - DNA, 20 bp, Artificial Sequence
  MKO10076057_B_Ccdc7
  gRNA
tatggagcttgctatgataa

SEQ ID NO: 76058 - DNA, 20 bp, Artificial Sequence
  MKO10076058_B_Ccdc7
  gRNA
ttcacaatttacatctcagc

SEQ ID NO: 76059 - DNA, 20 bp, Artificial Sequence
  MKO10076059_B_Ccdc7
  gRNA
gtttggattactgaaaattt

SEQ ID NO: 76060 - DNA, 20 bp, Artificial Sequence
  MKO10076060_B_Ccdc80
  gRNA
gacctacgatgacttcttca

SEQ ID NO: 76061 - DNA, 20 bp, Artificial Sequence
  MKO10076061_B_Ccdc80
  gRNA
ccaatcccgaatcaaagata

SEQ ID NO: 76062 - DNA, 20 bp, Artificial Sequence
  MKO10076062_B_Ccdc80
  gRNA
ccagctgatcaccactccca

SEQ ID NO: 76063 - DNA, 20 bp, Artificial Sequence
  MKO10076063_B_Ccdc81
  gRNA
aaagcgtcccaacagtgcga

SEQ ID NO: 76064 - DNA, 20 bp, Artificial Sequence
  MKO10076064_B_Ccdc81
  gRNA
tctattgtatccctgttaaa

SEQ ID NO: 76065 - DNA, 20 bp, Artificial Sequence
  MKO10076065_B_Ccdc81
  gRNA
tttcagaagtctctactatc

SEQ ID NO: 76066 - DNA, 20 bp, Artificial Sequence
  MKO10076066_B_Ccdc82
  gRNA
ctctttcaaagtgagtataa

SEQ ID NO: 76067 - DNA, 20 bp, Artificial Sequence
  MKO10076067_B_Ccdc82
  gRNA
gatgcactgaaaatttacag

SEQ ID NO: 76068 - DNA, 20 bp, Artificial Sequence
  MKO10076068_B_Ccdc82
  gRNA
gacgagaatagcaatcaaca

SEQ ID NO: 76069 - DNA, 20 bp, Artificial Sequence
  MKO10076069_B_Ccdc83
  gRNA
tctcctcagtcgtgaaataa

SEQ ID NO: 76070 - DNA, 20 bp, Artificial Sequence
  MKO10076070_B_Ccdc83
  gRNA
ctcgaagctgcctgtcagtg

SEQ ID NO: 76071 - DNA, 20 bp, Artificial Sequence
  MKO10076071_B_Ccdc83
  gRNA
aatgcgcatacaaataaatg

SEQ ID NO: 76072 - DNA, 20 bp, Artificial Sequence
  MKO10076072_B_Ccdc84
  gRNA
gatggcagctcagatccgtg

SEQ ID NO: 76073 - DNA, 20 bp, Artificial Sequence
  MKO10076073_B_Ccdc84
  gRNA
gaagggcttggattcctatg

SEQ ID NO: 76074 - DNA, 20 bp, Artificial Sequence
  MKO10076074_B_Ccdc84
  gRNA
gaagtttctgatctcccccc

SEQ ID NO: 76075 - DNA, 20 bp, Artificial Sequence
  MKO10076075_B_Ccdc85a
  gRNA
gctcccactcaacacgtgct

SEQ ID NO: 76076 - DNA, 20 bp, Artificial Sequence
  MKO10076076_B_Ccdc85a
  gRNA
ttcacataggccctttgtac

SEQ ID NO: 76077 - DNA, 20 bp, Artificial Sequence
  MKO10076077_B_Ccdc85a
  gRNA
agaaaatcgcatgctgcccc

SEQ ID NO: 76078 - DNA, 20 bp, Artificial Sequence
  MKO10076078_B_Ccdc85b
  gRNA
aacttccatcgcctaggtcg

SEQ ID NO: 76079 - DNA, 20 bp, Artificial Sequence
  MKO10076079_B_Ccdc85b
  gRNA
gcgccgcacgccgtcctcgt

SEQ ID NO: 76080 - DNA, 20 bp, Artificial Sequence
  MKO10076080_B_Ccdc85b
  gRNA
ctggcagcgctagtgcagcg

SEQ ID NO: 76081 - DNA, 20 bp, Artificial Sequence
  MKO10076081_B_Ccdc85c
  gRNA
gttgcacatctctcgcacga

SEQ ID NO: 76082 - DNA, 20 bp, Artificial Sequence
  MKO10076082_B_Ccdc85c
  gRNA
gaattccgtacccttcggaa

SEQ ID NO: 76083 - DNA, 20 bp, Artificial Sequence
  MKO10076083_B_Ccdc85c
  gRNA
agggcggcagggatgcgagc

SEQ ID NO: 76084 - DNA, 20 bp, Artificial Sequence
  MKO10076084_B_Ccdc86
  gRNA
acaagcccctgcgtacctcc

SEQ ID NO: 76085 - DNA, 20 bp, Artificial Sequence
  MKO10076085_B_Ccdc86
  gRNA
tattgaaaaacgagacaccc

SEQ ID NO: 76086 - DNA, 20 bp, Artificial Sequence
  MKO10076086_B_Ccdc86
  gRNA
ccgtctagaaaatgagcgca

SEQ ID NO: 76087 - DNA, 20 bp, Artificial Sequence
  MKO10076087_B_Ccdc87
  gRNA
tgaatcgagaccctcaccga

SEQ ID NO: 76088 - DNA, 20 bp, Artificial Sequence
  MKO10076088_B_Ccdc87
  gRNA
cgtacgctacctgcacctgc

SEQ ID NO: 76089 - DNA, 20 bp, Artificial Sequence
  MKO10076089_B_Ccdc87
  gRNA
gtggagtcgatactccctgc

SEQ ID NO: 76090 - DNA, 20 bp, Artificial Sequence
  MKO10076090_B_Ccdc88a
  gRNA
ttgccaatgattaagatatc

SEQ ID NO: 76091 - DNA, 20 bp, Artificial Sequence
  MKO10076091_B_Ccdc88a
  gRNA
ttgccagatatcttaatcat

SEQ ID NO: 76092 - DNA, 20 bp, Artificial Sequence
  MKO10076092_B_Ccdc88a
  gRNA
aattcacaatctgtccattt

SEQ ID NO: 76093 - DNA, 20 bp, Artificial Sequence
  MKO10076093_B_Ccdc88b
  gRNA
aggggtcacaccccattgtc

SEQ ID NO: 76094 - DNA, 20 bp, Artificial Sequence
  MKO10076094_B_Ccdc88b
  gRNA
acgagctggaaagcatcctt

SEQ ID NO: 76095 - DNA, 20 bp, Artificial Sequence
  MKO10076095_B_Ccdc88b
  gRNA
ttccacatccgacaggctgc

SEQ ID NO: 76096 - DNA, 20 bp, Artificial Sequence
  MKO10076096_B_Ccdc88c
  gRNA
aattcattacgatcagctgc

SEQ ID NO: 76097 - DNA, 20 bp, Artificial Sequence
  MKO10076097_B_Ccdc88c
  gRNA
tttgccaatcatcaagacat

SEQ ID NO: 76098 - DNA, 20 bp, Artificial Sequence
  MKO10076098_B_Ccdc88c
  gRNA
aaacatcaagacctactacc

SEQ ID NO: 76099 - DNA, 20 bp, Artificial Sequence
  MKO10076099_B_Ccdc89
  gRNA
ccaccccccgacgagatctt

SEQ ID NO: 76100 - DNA, 20 bp, Artificial Sequence
  MKO10076100_B_Ccdc89
  gRNA
cctgaaacgcagatccgacg

SEQ ID NO: 76101 - DNA, 20 bp, Artificial Sequence
  MKO10076101_B_Ccdc89
  gRNA
gctgaagctcgcgaactctc

SEQ ID NO: 76102 - DNA, 20 bp, Artificial Sequence
  MKO10076102_B_Ccdc8
  gRNA
cgaaaccatgagaagcgtcc

SEQ ID NO: 76103 - DNA, 20 bp, Artificial Sequence
  MKO10076103_B_Ccdc8
  gRNA
agcgtctagtacccagcatc

SEQ ID NO: 76104 - DNA, 20 bp, Artificial Sequence
  MKO10076104_B_Ccdc8
  gRNA
agccatccaaggccgacaga

SEQ ID NO: 76105 - DNA, 20 bp, Artificial Sequence
  MKO10076105_B_Ccdc90b
  gRNA
ccaagtcctgcaccaacgca

SEQ ID NO: 76106 - DNA, 20 bp, Artificial Sequence
  MKO10076106_B_Ccdc90b
  gRNA
tctccttgtagatagtatcc

SEQ ID NO: 76107 - DNA, 20 bp, Artificial Sequence
  MKO10076107_B_Ccdc90b
  gRNA
atcataatctgacttagttg

SEQ ID NO: 76108 - DNA, 20 bp, Artificial Sequence
  MKO10076108_B_Ccdc91
  gRNA
agctggtgagagtcgcactc

SEQ ID NO: 76109 - DNA, 20 bp, Artificial Sequence
  MKO10076109_B_Ccdc91
  gRNA
ggtagtagtacctgcaggaa

SEQ ID NO: 76110 - DNA, 20 bp, Artificial Sequence
  MKO10076110_B_Ccdc91
  gRNA
agccagataccgtgagcttc

SEQ ID NO: 76111 - DNA, 20 bp, Artificial Sequence
  MKO10076111_B_Ccdc92
  gRNA
gtgcagccccttgagtgtgc

SEQ ID NO: 76112 - DNA, 20 bp, Artificial Sequence
  MKO10076112_B_Ccdc92
  gRNA
gagcacgccagcacactcaa

SEQ ID NO: 76113 - DNA, 20 bp, Artificial Sequence
  MKO10076113_B_Ccdc92
  gRNA
gaacgccgccatcgctgtgc

SEQ ID NO: 76114 - DNA, 20 bp, Artificial Sequence
  MKO10076114_B_Ccdc93
  gRNA
gaagccctcacctgcacgac

SEQ ID NO: 76115 - DNA, 20 bp, Artificial Sequence
  MKO10076115_B_Ccdc93
  gRNA
tcctcacctccgggagtccc

SEQ ID NO: 76116 - DNA, 20 bp, Artificial Sequence
  MKO10076116_B_Ccdc93
  gRNA
aggtagtaggaggaatgacg

SEQ ID NO: 76117 - DNA, 20 bp, Artificial Sequence
  MKO10076117_B_Ccdc94
  gRNA
gcagtatgtggtgcgtctga

SEQ ID NO: 76118 - DNA, 20 bp, Artificial Sequence
  MKO10076118_B_Ccdc94
  gRNA
acccccaggtcctagagaac

SEQ ID NO: 76119 - DNA, 20 bp, Artificial Sequence
  MKO10076119_B_Ccdc94
  gRNA
agggattcacctcatgttga

SEQ ID NO: 76120 - DNA, 20 bp, Artificial Sequence
  MKO10076120_B_Ccdc96
  gRNA
gatcgattacgcgcatgttg

SEQ ID NO: 76121 - DNA, 20 bp, Artificial Sequence
  MKO10076121_B_Ccdc96
  gRNA
cgttataatctgcacgttgc

SEQ ID NO: 76122 - DNA, 20 bp, Artificial Sequence
  MKO10076122_B_Ccdc96
  gRNA
tcacgagaccctacgcaaga

SEQ ID NO: 76123 - DNA, 20 bp, Artificial Sequence
  MKO10076123_B_Ccdc97
  gRNA
ccgagtctttatccgacctc

SEQ ID NO: 76124 - DNA, 20 bp, Artificial Sequence
  MKO10076124_B_Ccdc97
  gRNA
actttagcgacgagcagatg

SEQ ID NO: 76125 - DNA, 20 bp, Artificial Sequence
  MKO10076125_B_Ccdc97
  gRNA
agtaccggtcctcctcatca

SEQ ID NO: 76126 - DNA, 20 bp, Artificial Sequence
  MKO10076126_B_Ccdc9
  gRNA
ggctcttcgtcggaagaatg

SEQ ID NO: 76127 - DNA, 20 bp, Artificial Sequence
  MKO10076127_B_Ccdc9
  gRNA
gcgtggcagtgacagccccc

SEQ ID NO: 76128 - DNA, 20 bp, Artificial Sequence
  MKO10076128_B_Ccdc9
  gRNA
tcggaaaaaagctgaactgg

SEQ ID NO: 76129 - DNA, 20 bp, Artificial Sequence
  MKO10076129_B_Ccer1
  gRNA
cggtatcgccgcttggacac

SEQ ID NO: 76130 - DNA, 20 bp, Artificial Sequence
  MKO10076130_B_Ccer1
  gRNA
cgaagaagattcgcagttgc

SEQ ID NO: 76131 - DNA, 20 bp, Artificial Sequence
  MKO10076131_B_Ccer1
  gRNA
ccgggcgaagcatcttgctc

SEQ ID NO: 76132 - DNA, 20 bp, Artificial Sequence
  MKO10076132_B_Cchcr1
  gRNA
cccctgcccgtttcgtttcc

SEQ ID NO: 76133 - DNA, 20 bp, Artificial Sequence
  MKO10076133_B_Cchcr1
  gRNA
aacgtctgaagcccaggtcg

SEQ ID NO: 76134 - DNA, 20 bp, Artificial Sequence
  MKO10076134_B_Cchcr1
  gRNA
ccagaaggctctcgacagtc

SEQ ID NO: 76135 - DNA, 20 bp, Artificial Sequence
  MKO10076135_B_Ccin
  gRNA
cttcgcacatcgcaacgtgc

SEQ ID NO: 76136 - DNA, 20 bp, Artificial Sequence
  MKO10076136_B_Ccin
  gRNA
ccccatcgttgaacttaccg

SEQ ID NO: 76137 - DNA, 20 bp, Artificial Sequence
  MKO10076137_B_Ccin
  gRNA
tattgaaatactgtgcgccc

SEQ ID NO: 76138 - DNA, 20 bp, Artificial Sequence
  MKO10076138_B_Cckar
  gRNA
cggtgctgattcgaaacaag

SEQ ID NO: 76139 - DNA, 20 bp, Artificial Sequence
  MKO10076139_B_Cckar
  gRNA
catgaacaaacgctttcgcc

SEQ ID NO: 76140 - DNA, 20 bp, Artificial Sequence
  MKO10076140_B_Cckar
  gRNA
caagactaccacctacttca

SEQ ID NO: 76141 - DNA, 20 bp, Artificial Sequence
  MKO10076141_B_Cckbr
  gRNA
gacccccttggtttcggacc

SEQ ID NO: 76142 - DNA, 20 bp, Artificial Sequence
  MKO10076142_B_Cckbr
  gRNA
cccctaccccgtgtacaccg

SEQ ID NO: 76143 - DNA, 20 bp, Artificial Sequence
  MKO10076143_B_Cckbr
  gRNA
actgagccgacgcctaagaa

SEQ ID NO: 76144 - DNA, 20 bp, Artificial Sequence
  MKO10076144_B_Cck
  gRNA
ggttcttaagaacggacatg

SEQ ID NO: 76145 - DNA, 20 bp, Artificial Sequence
  MKO10076145_B_Cck
  gRNA
cgtggagcagcgggcgcaag

SEQ ID NO: 76146 - DNA, 20 bp, Artificial Sequence
  MKO10076146_B_Cck
  gRNA
gagcggcgtatgtctgtgcg

SEQ ID NO: 76147 - DNA, 20 bp, Artificial Sequence
  MKO10076147_B_Ccl11
  gRNA
atcctggacccacttcttct

SEQ ID NO: 76148 - DNA, 20 bp, Artificial Sequence
  MKO10076148_B_Ccl11
  gRNA
aagcgctgtggagctctgca

SEQ ID NO: 76149 - DNA, 20 bp, Artificial Sequence
  MKO10076149_B_Ccl11
  gRNA
aggaagtgaccgtgagcagc

SEQ ID NO: 76150 - DNA, 20 bp, Artificial Sequence
  MKO10076150_B_Ccl12
  gRNA
acattataacagcacgtgac

SEQ ID NO: 76151 - DNA, 20 bp, Artificial Sequence
  MKO10076151_B_Ccl12
  gRNA
cctggtccagccaatacctg

SEQ ID NO: 76152 - DNA, 20 bp, Artificial Sequence
  MKO10076152_B_Ccl12
  gRNA
tgatggtggtagctatgagc

SEQ ID NO: 76153 - DNA, 20 bp, Artificial Sequence
  MKO10076153_B_Ccl17
  gRNA
tcagattggtgaaaaaccca

SEQ ID NO: 76154 - DNA, 20 bp, Artificial Sequence
  MKO10076154_B_Ccl17
  gRNA
cagcgggaaggtcatggcct

SEQ ID NO: 76155 - DNA, 20 bp, Artificial Sequence
  MKO10076155_B_Ccl17
  gRNA
tttctgcagcatgccagagc

SEQ ID NO: 76156 - DNA, 20 bp, Artificial Sequence
  MKO10076156_B_Ccl19
  gRNA
tgcagccatcttcattaaga

SEQ ID NO: 76157 - DNA, 20 bp, Artificial Sequence
  MKO10076157_B_Ccl19
  gRNA
gctacaggttcaccacacta

SEQ ID NO: 76158 - DNA, 20 bp, Artificial Sequence
  MKO10076158_B_Ccl19
  gRNA
cagaagacttcttcagtctt

SEQ ID NO: 76159 - DNA, 20 bp, Artificial Sequence
  MKO10076159_B_Ccl1
  gRNA
ggctcactcacaccacagct

SEQ ID NO: 76160 - DNA, 20 bp, Artificial Sequence
  MKO10076160_B_Ccl1
  gRNA
ctgtcctgatcccccagctg

SEQ ID NO: 76161 - DNA, 20 bp, Artificial Sequence
  MKO10076161_B_Ccl1
  gRNA
gtcaacatcctgtatccaca

SEQ ID NO: 76162 - DNA, 20 bp, Artificial Sequence
  MKO10076162_B_Ccl20
  gRNA
attaatgtcacaagcttcat

SEQ ID NO: 76163 - DNA, 20 bp, Artificial Sequence
  MKO10076163_B_Ccl20
  gRNA
aaagggctgtgaacctcctc

SEQ ID NO: 76164 - DNA, 20 bp, Artificial Sequence
  MKO10076164_B_Ccl20
  gRNA
gagctgagaatggcctgcgg

SEQ ID NO: 76165 - DNA, 20 bp, Artificial Sequence
  MKO10076165_B_Ccl21a
  gRNA
agcgcactcacaggattgcc

SEQ ID NO: 76166 - DNA, 20 bp, Artificial Sequence
  MKO10076166_B_Ccl21a
  gRNA
caaccctcaggttctcaccc

SEQ ID NO: 76167 - DNA, 20 bp, Artificial Sequence
  MKO10076167_B_Ccl21a
  gRNA
gcctcacctcttgcagccct

SEQ ID NO: 76168 - DNA, 20 bp, Artificial Sequence
  MKO10076168_B_Ccl21b
  gRNA
taccttgcaggcagtgatgg

SEQ ID NO: 76169 - DNA, 20 bp, Artificial Sequence
  MKO10076169_B_Ccl21b
  gRNA
gcctcacctcttgcagccct

SEQ ID NO: 76170 - DNA, 20 bp, Artificial Sequence
  MKO10076170_B_Ccl21b
  gRNA
caaccctcaggttcttaccc

SEQ ID NO: 76171 - DNA, 20 bp, Artificial Sequence
  MKO10076171_B_Ccl22
  gRNA
tcaaaatcctgccgcaagcc

SEQ ID NO: 76172 - DNA, 20 bp, Artificial Sequence
  MKO10076172_B_Ccl22
  gRNA
acagatatctcggttcttga

SEQ ID NO: 76173 - DNA, 20 bp, Artificial Sequence
  MKO10076173_B_Ccl22
  gRNA
ccaccaggagtgggacacgc

SEQ ID NO: 76174 - DNA, 20 bp, Artificial Sequence
  MKO10076174_B_Ccl24
  gRNA
aaacctcggtgctattgcca

SEQ ID NO: 76175 - DNA, 20 bp, Artificial Sequence
  MKO10076175_B_Ccl24
  gRNA
tttgctgtccagagacgccg

SEQ ID NO: 76176 - DNA, 20 bp, Artificial Sequence
  MKO10076176_B_Ccl24
  gRNA
tactcacatgacccctgcct

SEQ ID NO: 76177 - DNA, 20 bp, Artificial Sequence
  MKO10076177_B_Ccl25
  gRNA
cattccatttgatcctgtgc

SEQ ID NO: 76178 - DNA, 20 bp, Artificial Sequence
  MKO10076178_B_Ccl25
  gRNA
gtcaaaccatatgaagtcca

SEQ ID NO: 76179 - DNA, 20 bp, Artificial Sequence
  MKO10076179_B_Ccl25
  gRNA
ttccgccagaaagtagtgtg

SEQ ID NO: 76180 - DNA, 20 bp, Artificial Sequence
  MKO10076180_B_Ccl26
  gRNA
gatgaatctctgcacccatt

SEQ ID NO: 76181 - DNA, 20 bp, Artificial Sequence
  MKO10076181_B_Ccl26
  gRNA
tcagctactatgtgatccca

SEQ ID NO: 76182 - DNA, 20 bp, Artificial Sequence
  MKO10076182_B_Ccl26
  gRNA
ctctagaatgttcttcgatt

SEQ ID NO: 76183 - DNA, 20 bp, Artificial Sequence
  MKO10076183_B_Ccl27a
  gRNA
actttaaatctttaatgcac

SEQ ID NO: 76184 - DNA, 20 bp, Artificial Sequence
  MKO10076184_B_Ccl27a
  gRNA
aacaagccagagactaagtc

SEQ ID NO: 76185 - DNA, 20 bp, Artificial Sequence
  MKO10076185_B_Ccl27a
  gRNA
ttctgcttagtcttgttcca

SEQ ID NO: 76186 - DNA, 20 bp, Artificial Sequence
  MKO10076186_B_Ccl27b
  gRNA
atagacagccactcccaagc

SEQ ID NO: 76187 - DNA, 20 bp, Artificial Sequence
  MKO10076187_B_Ccl27b
  gRNA
ttctcaggcttcacctggct

SEQ ID NO: 76188 - DNA, 20 bp, Artificial Sequence
  MKO10076188_B_Ccl27b
  gRNA
ttgtagtaccagatttaaac

SEQ ID NO: 76189 - DNA, 20 bp, Artificial Sequence
  MKO10076189_B_Ccl28
  gRNA
gaggtgtctcatcatgtttc

SEQ ID NO: 76190 - DNA, 20 bp, Artificial Sequence
  MKO10076190_B_Ccl28
  gRNA
caggcgggaatgcagcaagc

SEQ ID NO: 76191 - DNA, 20 bp, Artificial Sequence
  MKO10076191_B_Ccl28
  gRNA
catggctgtggctgtgtgtg

SEQ ID NO: 76192 - DNA, 20 bp, Artificial Sequence
  MKO10076192_B_Ccl2
  gRNA
gctggtgaatgagtagcagc

SEQ ID NO: 76193 - DNA, 20 bp, Artificial Sequence
  MKO10076193_B_Ccl2
  gRNA
gtgctgaccccaagaaggaa

SEQ ID NO: 76194 - DNA, 20 bp, Artificial Sequence
  MKO10076194_B_Ccl2
  gRNA
gcaagatgatcccaatgagt

SEQ ID NO: 76195 - DNA, 20 bp, Artificial Sequence
  MKO10076195_B_Ccl3
  gRNA
tggagtcagcgcagatctgc

SEQ ID NO: 76196 - DNA, 20 bp, Artificial Sequence
  MKO10076196_B_Ccl3
  gRNA
cacatggcgctgagaagact

SEQ ID NO: 76197 - DNA, 20 bp, Artificial Sequence
  MKO10076197_B_Ccl3
  gRNA
tggtacagagaagaacagca

SEQ ID NO: 76198 - DNA, 20 bp, Artificial Sequence
  MKO10076198_B_Ccl4
  gRNA
agaaggcagccacgagcaag

SEQ ID NO: 76199 - DNA, 20 bp, Artificial Sequence
  MKO10076199_B_Ccl4
  gRNA
ttacttggtgctgagaaccc

SEQ ID NO: 76200 - DNA, 20 bp, Artificial Sequence
  MKO10076200_B_Ccl4
  gRNA
tctttgctccaagccagctg

SEQ ID NO: 76201 - DNA, 20 bp, Artificial Sequence
  MKO10076201_B_Ccl5
  gRNA
ctcgacttacatggtgaggc

SEQ ID NO: 76202 - DNA, 20 bp, Artificial Sequence
  MKO10076202_B_Ccl5
  gRNA
tcaagaatacatcaactatt

SEQ ID NO: 76203 - DNA, 20 bp, Artificial Sequence
  MKO10076203_B_Ccl5
  gRNA
tgcagagggcggctgcagtg

SEQ ID NO: 76204 - DNA, 20 bp, Artificial Sequence
  MKO10076204_B_Ccl6
  gRNA
aaccctccaataattcatca

SEQ ID NO: 76205 - DNA, 20 bp, Artificial Sequence
  MKO10076205_B_Ccl6
  gRNA
atatattatttccccaccag

SEQ ID NO: 76206 - DNA, 20 bp, Artificial Sequence
  MKO10076206_B_Ccl6
  gRNA
catttcattctttatccttg

SEQ ID NO: 76207 - DNA, 20 bp, Artificial Sequence
  MKO10076207_B_Ccl7
  gRNA
aagcagcggctatgagcagc

SEQ ID NO: 76208 - DNA, 20 bp, Artificial Sequence
  MKO10076208_B_Ccl7
  gRNA
tacttacataacagcttccc

SEQ ID NO: 76209 - DNA, 20 bp, Artificial Sequence
  MKO10076209_B_Ccl7
  gRNA
cctcctcgacccacttctga

SEQ ID NO: 76210 - DNA, 20 bp, Artificial Sequence
  MKO10076210_B_Ccl8
  gRNA
gtgtagaccccacacagaag

SEQ ID NO: 76211 - DNA, 20 bp, Artificial Sequence
  MKO10076211_B_Ccl8
  gRNA
cctggcccagtcagcttctc

SEQ ID NO: 76212 - DNA, 20 bp, Artificial Sequence
  MKO10076212_B_Ccl8
  gRNA
ccacagtttccagaccaagc

SEQ ID NO: 76213 - DNA, 20 bp, Artificial Sequence
  MKO10076213_B_Ccl9
  gRNA
tcagagatgcattgaaagat

SEQ ID NO: 76214 - DNA, 20 bp, Artificial Sequence
  MKO10076214_B_Ccl9
  gRNA
tctctgaactctccgatcac

SEQ ID NO: 76215 - DNA, 20 bp, Artificial Sequence
  MKO10076215_B_Ccl9
  gRNA
caagagcagttgtaagaatg

SEQ ID NO: 76216 - DNA, 20 bp, Artificial Sequence
  MKO10076216_B_Ccm2l
  gRNA
gatgcagagcgtcgtcctgc

SEQ ID NO: 76217 - DNA, 20 bp, Artificial Sequence
  MKO10076217_B_Ccm2l
  gRNA
gttcccgaaggctgcacgcc

SEQ ID NO: 76218 - DNA, 20 bp, Artificial Sequence
  MKO10076218_B_Ccm2l
  gRNA
tgtgtcccccatccgaagac

SEQ ID NO: 76219 - DNA, 20 bp, Artificial Sequence
  MKO10076219_B_Ccm2
  gRNA
tgcagcatcatctcggacat

SEQ ID NO: 76220 - DNA, 20 bp, Artificial Sequence
  MKO10076220_B_Ccm2
  gRNA
acataccactgtgcagcgac

SEQ ID NO: 76221 - DNA, 20 bp, Artificial Sequence
  MKO10076221_B_Ccm2
  gRNA
accaggcaacatgcctctac

SEQ ID NO: 76222 - DNA, 20 bp, Artificial Sequence
  MKO10076222_B_Ccna1
  gRNA
ctatatggatgatcctgaac

SEQ ID NO: 76223 - DNA, 20 bp, Artificial Sequence
  MKO10076223_B_Ccna1
  gRNA
gatgccctctttccccgagc

SEQ ID NO: 76224 - DNA, 20 bp, Artificial Sequence
  MKO10076224_B_Ccna1
  gRNA
tcgcacagagaccctgtact

SEQ ID NO: 76225 - DNA, 20 bp, Artificial Sequence
  MKO10076225_B_Ccna2
  gRNA
ctcatgctgttagtgatgtc

SEQ ID NO: 76226 - DNA, 20 bp, Artificial Sequence
  MKO10076226_B_Ccna2
  gRNA
tacacaaactctgctacttc

SEQ ID NO: 76227 - DNA, 20 bp, Artificial Sequence
  MKO10076227_B_Ccna2
  gRNA
cgatacctattccaagaagc

SEQ ID NO: 76228 - DNA, 20 bp, Artificial Sequence
  MKO10076228_B_Ccnb1ip1
  gRNA
aagtgtcggatcaagctctc

SEQ ID NO: 76229 - DNA, 20 bp, Artificial Sequence
  MKO10076229_B_Ccnb1ip1
  gRNA
catataccagttggaaatca

SEQ ID NO: 76230 - DNA, 20 bp, Artificial Sequence
  MKO10076230_B_Ccnb1ip1
  gRNA
ccaccaccttgatttccaac

SEQ ID NO: 76231 - DNA, 20 bp, Artificial Sequence
  MKO10076231_B_Ccnb1
  gRNA
taatccctctccaagcccga

SEQ ID NO: 76232 - DNA, 20 bp, Artificial Sequence
  MKO10076232_B_Ccnb1
  gRNA
gaaaattaacgcagaaaata

SEQ ID NO: 76233 - DNA, 20 bp, Artificial Sequence
  MKO10076233_B_Ccnb1
  gRNA
gttactgctgcttccaagcc

SEQ ID NO: 76234 - DNA, 20 bp, Artificial Sequence
  MKO10076234_B_Ccnb2
  gRNA
gctctgcagtgactacgtga

SEQ ID NO: 76235 - DNA, 20 bp, Artificial Sequence
  MKO10076235_B_Ccnb2
  gRNA
tgttaccttcgccacctgag

SEQ ID NO: 76236 - DNA, 20 bp, Artificial Sequence
  MKO10076236_B_Ccnb2
  gRNA
tttcttctaaaactgcccgc

SEQ ID NO: 76237 - DNA, 20 bp, Artificial Sequence
  MKO10076237_B_Ccnb3
  gRNA
tgaagatccaaccatcattg

SEQ ID NO: 76238 - DNA, 20 bp, Artificial Sequence
  MKO10076238_B_Ccnb3
  gRNA
tagtcaatgtgtccagtcaa

SEQ ID NO: 76239 - DNA, 20 bp, Artificial Sequence
  MKO10076239_B_Ccnb3
  gRNA
ctatattgtcttcctttgac

SEQ ID NO: 76240 - DNA, 20 bp, Artificial Sequence
  MKO10076240_B_Ccnc
  gRNA
gtttctggcatccaaagtag

SEQ ID NO: 76241 - DNA, 20 bp, Artificial Sequence
  MKO10076241_B_Ccnc
  gRNA
ctctagtttgcagtggattt

SEQ ID NO: 76242 - DNA, 20 bp, Artificial Sequence
  MKO10076242_B_Ccnc
  gRNA
taagatgttcacctaatgct

SEQ ID NO: 76243 - DNA, 20 bp, Artificial Sequence
  MKO10076243_B_Ccnd1
  gRNA
ggaagtgttcgatgaaatcg

SEQ ID NO: 76244 - DNA, 20 bp, Artificial Sequence
  MKO10076244_B_Ccnd1
  gRNA
gttcgtggcctctaagatga

SEQ ID NO: 76245 - DNA, 20 bp, Artificial Sequence
  MKO10076245_B_Ccnd1
  gRNA
agcgtggtggctgcgatgca

SEQ ID NO: 76246 - DNA, 20 bp, Artificial Sequence
  MKO10076246_B_Ccnd2
  gRNA
tctgcgcatgcttgcggatc

SEQ ID NO: 76247 - DNA, 20 bp, Artificial Sequence
  MKO10076247_B_Ccnd2
  gRNA
cggcgttatgctgctcttga

SEQ ID NO: 76248 - DNA, 20 bp, Artificial Sequence
  MKO10076248_B_Ccnd2
  gRNA
agagaccatcccgctgactg

SEQ ID NO: 76249 - DNA, 20 bp, Artificial Sequence
  MKO10076249_B_Ccnd3
  gRNA
gggcagcttcgatctgttcc

SEQ ID NO: 76250 - DNA, 20 bp, Artificial Sequence
  MKO10076250_B_Ccnd3
  gRNA
cctccatccatgatcgccac

SEQ ID NO: 76251 - DNA, 20 bp, Artificial Sequence
  MKO10076251_B_Ccnd3
  gRNA
ggctcttacctgtagcacag

SEQ ID NO: 76252 - DNA, 20 bp, Artificial Sequence
  MKO10076252_B_Ccndbp1
  gRNA
cactataattatttcctcga

SEQ ID NO: 76253 - DNA, 20 bp, Artificial Sequence
  MKO10076253_B_Ccndbp1
  gRNA
gaatgctgccctggacatcg

SEQ ID NO: 76254 - DNA, 20 bp, Artificial Sequence
  MKO10076254_B_Ccndbp1
  gRNA
gaagtgcgttgtcagaacag

SEQ ID NO: 76255 - DNA, 20 bp, Artificial Sequence
  MKO10076255_B_Ccne1
  gRNA
ctgctctcatcctcgcctgc

SEQ ID NO: 76256 - DNA, 20 bp, Artificial Sequence
  MKO10076256_B_Ccne1
  gRNA
tttcagtccgctccagaaaa

SEQ ID NO: 76257 - DNA, 20 bp, Artificial Sequence
  MKO10076257_B_Ccne1
  gRNA
gaggatgagagcagttcttc

SEQ ID NO: 76258 - DNA, 20 bp, Artificial Sequence
  MKO10076258_B_Ccne2
  gRNA
agaagcatcagtatgagatt

SEQ ID NO: 76259 - DNA, 20 bp, Artificial Sequence
  MKO10076259_B_Ccne2
  gRNA
catgttgcttagcttgtaaa

SEQ ID NO: 76260 - DNA, 20 bp, Artificial Sequence
  MKO10076260_B_Ccne2
  gRNA
agagtctggctggttgggct

SEQ ID NO: 76261 - DNA, 20 bp, Artificial Sequence
  MKO10076261_B_Ccnf
  gRNA
aacttacagctcggacagca

SEQ ID NO: 76262 - DNA, 20 bp, Artificial Sequence
  MKO10076262_B_Ccnf
  gRNA
actcaagatggttaagtttc

SEQ ID NO: 76263 - DNA, 20 bp, Artificial Sequence
  MKO10076263_B_Ccnf
  gRNA
ggttgtccaccaggtacttg

SEQ ID NO: 76264 - DNA, 20 bp, Artificial Sequence
  MKO10076264_B_Ccng1
  gRNA
catttcaacttctgaccgtt

SEQ ID NO: 76265 - DNA, 20 bp, Artificial Sequence
  MKO10076265_B_Ccng1
  gRNA
tgaacctatactgacttatt

SEQ ID NO: 76266 - DNA, 20 bp, Artificial Sequence
  MKO10076266_B_Ccng1
  gRNA
aagactagaagcccaactta

SEQ ID NO: 76267 - DNA, 20 bp, Artificial Sequence
  MKO10076267_B_Ccng2
  gRNA
tggcactgaaactttcgttc

SEQ ID NO: 76268 - DNA, 20 bp, Artificial Sequence
  MKO10076268_B_Ccng2
  gRNA
aatagaaacgataaaatccg

SEQ ID NO: 76269 - DNA, 20 bp, Artificial Sequence
  MKO10076269_B_Ccng2
  gRNA
agaagtttaactaacttctt

SEQ ID NO: 76270 - DNA, 20 bp, Artificial Sequence
  MKO10076270_B_Ccnh
  gRNA
ctagactcggtaccccatgt

SEQ ID NO: 76271 - DNA, 20 bp, Artificial Sequence
  MKO10076271_B_Ccnh
  gRNA
ctcgaagatttccaacaaac

SEQ ID NO: 76272 - DNA, 20 bp, Artificial Sequence
  MKO10076272_B_Ccnh
  gRNA
cacttgataaaatggcggtc

SEQ ID NO: 76273 - DNA, 20 bp, Artificial Sequence
  MKO10076273_B_Ccni
  gRNA
taagactgttgaggaagatg

SEQ ID NO: 76274 - DNA, 20 bp, Artificial Sequence
  MKO10076274_B_Ccni
  gRNA
atagaaaattccagtgctaa

SEQ ID NO: 76275 - DNA, 20 bp, Artificial Sequence
  MKO10076275_B_Ccni
  gRNA
agagagatgaagtaattcaa

SEQ ID NO: 76276 - DNA, 20 bp, Artificial Sequence
  MKO10076276_B_Ccnjl
  gRNA
gaatgtctacaaagaatcga

SEQ ID NO: 76277 - DNA, 20 bp, Artificial Sequence
  MKO10076277_B_Ccnjl
  gRNA
ctccaagcagctgtatactg

SEQ ID NO: 76278 - DNA, 20 bp, Artificial Sequence
  MKO10076278_B_Ccnjl
  gRNA
ttacaaattccagccttccg

SEQ ID NO: 76279 - DNA, 20 bp, Artificial Sequence
  MKO10076279_B_Ccnj
  gRNA
tgtcatagcggtccatgaac

SEQ ID NO: 76280 - DNA, 20 bp, Artificial Sequence
  MKO10076280_B_Ccnj
  gRNA
cacgagacagaccttcacga

SEQ ID NO: 76281 - DNA, 20 bp, Artificial Sequence
  MKO10076281_B_Ccnj
  gRNA
gtgaaggtctgtctcgtgca

SEQ ID NO: 76282 - DNA, 20 bp, Artificial Sequence
  MKO10076282_B_Ccnk
  gRNA
ccagtttggagatgacccaa

SEQ ID NO: 76283 - DNA, 20 bp, Artificial Sequence
  MKO10076283_B_Ccnk
  gRNA
gctgctttgcatatttgagc

SEQ ID NO: 76284 - DNA, 20 bp, Artificial Sequence
  MKO10076284_B_Ccnk
  gRNA
catggacatttgtaaatgac

SEQ ID NO: 76285 - DNA, 20 bp, Artificial Sequence
  MKO10076285_B_Ccnl1
  gRNA
cttaccaggcagtttgaacc

SEQ ID NO: 76286 - DNA, 20 bp, Artificial Sequence
  MKO10076286_B_Ccnl1
  gRNA
tcatgtcaagcatccccata

SEQ ID NO: 76287 - DNA, 20 bp, Artificial Sequence
  MKO10076287_B_Ccnl1
  gRNA
tgttaatgtagttctgatca

SEQ ID NO: 76288 - DNA, 20 bp, Artificial Sequence
  MKO10076288_B_Ccnl2
  gRNA
atgacatccctgattcgtct

SEQ ID NO: 76289 - DNA, 20 bp, Artificial Sequence
  MKO10076289_B_Ccnl2
  gRNA
gataatcgttatgtaccttc

SEQ ID NO: 76290 - DNA, 20 bp, Artificial Sequence
  MKO10076290_B_Ccnl2
  gRNA
acttagtgtaaaagaaccgc

SEQ ID NO: 76291 - DNA, 20 bp, Artificial Sequence
  MKO10076291_B_Ccno
  gRNA
cacgcgttcagcggccgcag

SEQ ID NO: 76292 - DNA, 20 bp, Artificial Sequence
  MKO10076292_B_Ccno
  gRNA
cttgcaagcgatgagcagac

SEQ ID NO: 76293 - DNA, 20 bp, Artificial Sequence
  MKO10076293_B_Ccno
  gRNA
ctgcaagtccaccgccagtt

SEQ ID NO: 76294 - DNA, 20 bp, Artificial Sequence
  MKO10076294_B_Ccnt1
  gRNA
acttcctgacacgaggagtg

SEQ ID NO: 76295 - DNA, 20 bp, Artificial Sequence
  MKO10076295_B_Ccnt1
  gRNA
ctcacctcactcctcgtgtc

SEQ ID NO: 76296 - DNA, 20 bp, Artificial Sequence
  MKO10076296_B_Ccnt1
  gRNA
cctacaacaagttcaagatc

SEQ ID NO: 76297 - DNA, 20 bp, Artificial Sequence
  MKO10076297_B_Ccnt2
  gRNA
acccagtgtttgtagcatta

SEQ ID NO: 76298 - DNA, 20 bp, Artificial Sequence
  MKO10076298_B_Ccnt2
  gRNA
gcagccaaaaacaatgcagt

SEQ ID NO: 76299 - DNA, 20 bp, Artificial Sequence
  MKO10076299_B_Ccnt2
  gRNA
tcttcagcagactcaagaac

SEQ ID NO: 76300 - DNA, 20 bp, Artificial Sequence
  MKO10076300_B_Ccnyl1
  gRNA
ttccccttcaggtatctcca

SEQ ID NO: 76301 - DNA, 20 bp, Artificial Sequence
  MKO10076301_B_Ccnyl1
  gRNA
tccttctgtagatctagctt

SEQ ID NO: 76302 - DNA, 20 bp, Artificial Sequence
  MKO10076302_B_Ccnyl1
  gRNA
atttacttacatggtttaaa

SEQ ID NO: 76303 - DNA, 20 bp, Artificial Sequence
  MKO10076303_B_Ccny
  gRNA
tatttccttgatgtctgccc

SEQ ID NO: 76304 - DNA, 20 bp, Artificial Sequence
  MKO10076304_B_Ccny
  gRNA
tatattaccacatcaaaaac

SEQ ID NO: 76305 - DNA, 20 bp, Artificial Sequence
  MKO10076305_B_Ccny
  gRNA
cgtctgtctgagatttgctg

SEQ ID NO: 76306 - DNA, 20 bp, Artificial Sequence
  MKO10076306_B_Ccp110
  gRNA
taccagagttgtttgaagtc

SEQ ID NO: 76307 - DNA, 20 bp, Artificial Sequence
  MKO10076307_B_Ccp110
  gRNA
ctccagacttcaaacaactc

SEQ ID NO: 76308 - DNA, 20 bp, Artificial Sequence
  MKO10076308_B_Ccp110
  gRNA
gtcactcctcatagctgagc

SEQ ID NO: 76309 - DNA, 20 bp, Artificial Sequence
  MKO10076309_B_Ccpg1os
  gRNA
tctgtaaacgcttgctcttg

SEQ ID NO: 76310 - DNA, 20 bp, Artificial Sequence
  MKO10076310_B_Ccpg1os
  gRNA
cagcccgtctccgtggcaac

SEQ ID NO: 76311 - DNA, 20 bp, Artificial Sequence
  MKO10076311_B_Ccpg1os
  gRNA
gtcttgctgttgctttccgt

SEQ ID NO: 76312 - DNA, 20 bp, Artificial Sequence
  MKO10076312_B_Ccpg1
  gRNA
agcgacagcgactcatcttg

SEQ ID NO: 76313 - DNA, 20 bp, Artificial Sequence
  MKO10076313_B_Ccpg1
  gRNA
agctgcccgttctttatgta

SEQ ID NO: 76314 - DNA, 20 bp, Artificial Sequence
  MKO10076314_B_Ccpg1
  gRNA
tacacttgaaccacctaagc

SEQ ID NO: 76315 - DNA, 20 bp, Artificial Sequence
  MKO10076315_B_Ccr10
  gRNA
ccgactcccacctgctctgt

SEQ ID NO: 76316 - DNA, 20 bp, Artificial Sequence
  MKO10076316_B_Ccr10
  gRNA
tatcagcgccgaccgctatg

SEQ ID NO: 76317 - DNA, 20 bp, Artificial Sequence
  MKO10076317_B_Ccr10
  gRNA
gggagatcgggtagttcgtc

SEQ ID NO: 76318 - DNA, 20 bp, Artificial Sequence
  MKO10076318_B_Ccr1l1
  gRNA
gcctccgaaacaactgccag

SEQ ID NO: 76319 - DNA, 20 bp, Artificial Sequence
  MKO10076319_B_Ccr1l1
  gRNA
tgatgccaaaagtgacagtc

SEQ ID NO: 76320 - DNA, 20 bp, Artificial Sequence
  MKO10076320_B_Ccr1l1
  gRNA
cagctataaccctgccacaa

SEQ ID NO: 76321 - DNA, 20 bp, Artificial Sequence
  MKO10076321_B_Ccr1
  gRNA
tcatcaccagtattatcacc

SEQ ID NO: 76322 - DNA, 20 bp, Artificial Sequence
  MKO10076322_B_Ccr1
  gRNA
gctctaaagctaaaccttct

SEQ ID NO: 76323 - DNA, 20 bp, Artificial Sequence
  MKO10076323_B_Ccr1
  gRNA
tgatgaacactagagaatac

SEQ ID NO: 76324 - DNA, 20 bp, Artificial Sequence
  MKO10076324_B_Ccr2
  gRNA
gatgatcaccattacacctg

SEQ ID NO: 76325 - DNA, 20 bp, Artificial Sequence
  MKO10076325_B_Ccr2
  gRNA
gtaatggtgatcatcttgtt

SEQ ID NO: 76326 - DNA, 20 bp, Artificial Sequence
  MKO10076326_B_Ccr2
  gRNA
tacacttgttatcaccccaa

SEQ ID NO: 76327 - DNA, 20 bp, Artificial Sequence
  MKO10076327_B_Ccr3
  gRNA
cagaaatgtggcagtttacc

SEQ ID NO: 76328 - DNA, 20 bp, Artificial Sequence
  MKO10076328_B_Ccr3
  gRNA
agaggttccggaaacacctt

SEQ ID NO: 76329 - DNA, 20 bp, Artificial Sequence
  MKO10076329_B_Ccr3
  gRNA
gaaaaagatctcgctgtaca

SEQ ID NO: 76330 - DNA, 20 bp, Artificial Sequence
  MKO10076330_B_Ccr4
  gRNA
gtacctagactacgccatcc

SEQ ID NO: 76331 - DNA, 20 bp, Artificial Sequence
  MKO10076331_B_Ccr4
  gRNA
gcacgcggtattctccttga

SEQ ID NO: 76332 - DNA, 20 bp, Artificial Sequence
  MKO10076332_B_Ccr4
  gRNA
gctactacgccgccgaccag

SEQ ID NO: 76333 - DNA, 20 bp, Artificial Sequence
  MKO10076333_B_Ccr5
  gRNA
ataatcgatgtcatagctat

SEQ ID NO: 76334 - DNA, 20 bp, Artificial Sequence
  MKO10076334_B_Ccr5
  gRNA
tagttctaatagactagacc

SEQ ID NO: 76335 - DNA, 20 bp, Artificial Sequence
  MKO10076335_B_Ccr5
  gRNA
agtgttcttccgaaaacaca

SEQ ID NO: 76336 - DNA, 20 bp, Artificial Sequence
  MKO10076336_B_Ccr6
  gRNA
cccgtgttgtatgcgtttat

SEQ ID NO: 76337 - DNA, 20 bp, Artificial Sequence
  MKO10076337_B_Ccr6
  gRNA
ccgtgttgaccgcagtcacg

SEQ ID NO: 76338 - DNA, 20 bp, Artificial Sequence
  MKO10076338_B_Ccr6
  gRNA
gaaccacagcgatcacgact

SEQ ID NO: 76339 - DNA, 20 bp, Artificial Sequence
  MKO10076339_B_Ccr7
  gRNA
gcctcacctggaaaatgaca

SEQ ID NO: 76340 - DNA, 20 bp, Artificial Sequence
  MKO10076340_B_Ccr7
  gRNA
agcttacttacctgggtcca

SEQ ID NO: 76341 - DNA, 20 bp, Artificial Sequence
  MKO10076341_B_Ccr7
  gRNA
gagcaggtaggtatccgtca

SEQ ID NO: 76342 - DNA, 20 bp, Artificial Sequence
  MKO10076342_B_Ccr8
  gRNA
ccactttgaaatcaacgcct

SEQ ID NO: 76343 - DNA, 20 bp, Artificial Sequence
  MKO10076343_B_Ccr8
  gRNA
cttcatcaccctaatgagtg

SEQ ID NO: 76344 - DNA, 20 bp, Artificial Sequence
  MKO10076344_B_Ccr8
  gRNA
acaaatgcccgtgggggcgt

SEQ ID NO: 76345 - DNA, 20 bp, Artificial Sequence
  MKO10076345_B_Ccr9
  gRNA
cagatacattgccattgtac

SEQ ID NO: 76346 - DNA, 20 bp, Artificial Sequence
  MKO10076346_B_Ccr9
  gRNA
ttgtgcaataccagtagaca

SEQ ID NO: 76347 - DNA, 20 bp, Artificial Sequence
  MKO10076347_B_Ccr9
  gRNA
ccccactgacttgactgtac

SEQ ID NO: 76348 - DNA, 20 bp, Artificial Sequence
  MKO10076348_B_Ccrl2
  gRNA
cacctcgctgtataagcccg

SEQ ID NO: 76349 - DNA, 20 bp, Artificial Sequence
  MKO10076349_B_Ccrl2
  gRNA
cctaatcttagacgactacc

SEQ ID NO: 76350 - DNA, 20 bp, Artificial Sequence
  MKO10076350_B_Ccrl2
  gRNA
acagtacgacctccacaagc

SEQ ID NO: 76351 - DNA, 20 bp, Artificial Sequence
  MKO10076351_B_Ccrn4l
  gRNA
ttgggccgagatccgagcac

SEQ ID NO: 76352 - DNA, 20 bp, Artificial Sequence
  MKO10076352_B_Ccrn4l
  gRNA
aagatccccctgatcgtctg

SEQ ID NO: 76353 - DNA, 20 bp, Artificial Sequence
  MKO10076353_B_Ccrn4l
  gRNA
gtcaactgaccccgaacatc

SEQ ID NO: 76354 - DNA, 20 bp, Artificial Sequence
  MKO10076354_B_Ccsap
  gRNA
atcttgctcgtcgatctctg

SEQ ID NO: 76355 - DNA, 20 bp, Artificial Sequence
  MKO10076355_B_Ccsap
  gRNA
cgcagacgttgtgtgtcttc

SEQ ID NO: 76356 - DNA, 20 bp, Artificial Sequence
  MKO10076356_B_Ccsap
  gRNA
cagacgccggctttaccctc

SEQ ID NO: 76357 - DNA, 20 bp, Artificial Sequence
  MKO10076357_B_Ccser1
  gRNA
tcttcactgccgtgcactcc

SEQ ID NO: 76358 - DNA, 20 bp, Artificial Sequence
  MKO10076358_B_Ccser1
  gRNA
ctgtacaggacattacagag

SEQ ID NO: 76359 - DNA, 20 bp, Artificial Sequence
  MKO10076359_B_Ccser1
  gRNA
gtcatcttcatccagttcac

SEQ ID NO: 76360 - DNA, 20 bp, Artificial Sequence
  MKO10076360_B_Ccser2
  gRNA
tcctggtagcatgacggaag

SEQ ID NO: 76361 - DNA, 20 bp, Artificial Sequence
  MKO10076361_B_Ccser2
  gRNA
gaggacgcacctcttgaaaa

SEQ ID NO: 76362 - DNA, 20 bp, Artificial Sequence
  MKO10076362_B_Ccser2
  gRNA
tgatgaccttatgttggatg

SEQ ID NO: 76363 - DNA, 20 bp, Artificial Sequence
  MKO10076363_B_Ccs
  gRNA
gcaggctgtactcaagggta

SEQ ID NO: 76364 - DNA, 20 bp, Artificial Sequence
  MKO10076364_B_Ccs
  gRNA
cccgccaggtgtccagaatg

SEQ ID NO: 76365 - DNA, 20 bp, Artificial Sequence
  MKO10076365_B_Ccs
  gRNA
cccccatgagatgctccatc

SEQ ID NO: 76366 - DNA, 20 bp, Artificial Sequence
  MKO10076366_B_Cct2
  gRNA
gagggccgagacagctcgcc

SEQ ID NO: 76367 - DNA, 20 bp, Artificial Sequence
  MKO10076367_B_Cct2
  gRNA
gaagagcactttgggaccga

SEQ ID NO: 76368 - DNA, 20 bp, Artificial Sequence
  MKO10076368_B_Cct2
  gRNA
gcttaccaggcgagctgtct

SEQ ID NO: 76369 - DNA, 20 bp, Artificial Sequence
  MKO10076369_B_Cct3
  gRNA
ccaaccttcatcatagattt

SEQ ID NO: 76370 - DNA, 20 bp, Artificial Sequence
  MKO10076370_B_Cct3
  gRNA
accaagaataattactgatg

SEQ ID NO: 76371 - DNA, 20 bp, Artificial Sequence
  MKO10076371_B_Cct3
  gRNA
tggaaatatcaatgctgcaa

SEQ ID NO: 76372 - DNA, 20 bp, Artificial Sequence
  MKO10076372_B_Cct4
  gRNA
tctctgtcgctcagttgcac

SEQ ID NO: 76373 - DNA, 20 bp, Artificial Sequence
  MKO10076373_B_Cct4
  gRNA
acacttaccattctggctgc

SEQ ID NO: 76374 - DNA, 20 bp, Artificial Sequence
  MKO10076374_B_Cct4
  gRNA
gatgtgaccattacaaatga

SEQ ID NO: 76375 - DNA, 20 bp, Artificial Sequence
  MKO10076375_B_Cct5
  gRNA
ctttatcgctgatcttgtcc

SEQ ID NO: 76376 - DNA, 20 bp, Artificial Sequence
  MKO10076376_B_Cct5
  gRNA
gatgtgactataacaaacga

SEQ ID NO: 76377 - DNA, 20 bp, Artificial Sequence
  MKO10076377_B_Cct5
  gRNA
ggacagttcaaccatcagct

SEQ ID NO: 76378 - DNA, 20 bp, Artificial Sequence
  MKO10076378_B_Cct6a
  gRNA
cagagaaacactcatcgatg

SEQ ID NO: 76379 - DNA, 20 bp, Artificial Sequence
  MKO10076379_B_Cct6a
  gRNA
catcgccagttatgtcatcc

SEQ ID NO: 76380 - DNA, 20 bp, Artificial Sequence
  MKO10076380_B_Cct6a
  gRNA
cgagcccattgacctcttca

SEQ ID NO: 76381 - DNA, 20 bp, Artificial Sequence
  MKO10076381_B_Cct6b
  gRNA
caatgtactgcttcatgaga

SEQ ID NO: 76382 - DNA, 20 bp, Artificial Sequence
  MKO10076382_B_Cct6b
  gRNA
ttagcaactctccaatgatc

SEQ ID NO: 76383 - DNA, 20 bp, Artificial Sequence
  MKO10076383_B_Cct6b
  gRNA
acctcaaatgtcctgatcat

SEQ ID NO: 76384 - DNA, 20 bp, Artificial Sequence
  MKO10076384_B_Cct7
  gRNA
ttacagcctcagcaatcact

SEQ ID NO: 76385 - DNA, 20 bp, Artificial Sequence
  MKO10076385_B_Cct7
  gRNA
ctgaccttacctcagcatcc

SEQ ID NO: 76386 - DNA, 20 bp, Artificial Sequence
  MKO10076386_B_Cct7
  gRNA
atcgaggagtttcagaattg

SEQ ID NO: 76387 - DNA, 20 bp, Artificial Sequence
  MKO10076387_B_Cct8l1
  gRNA
aatagcccaactagccatta

SEQ ID NO: 76388 - DNA, 20 bp, Artificial Sequence
  MKO10076388_B_Cct8l1
  gRNA
ccttaggggacccaccatcc

SEQ ID NO: 76389 - DNA, 20 bp, Artificial Sequence
  MKO10076389_B_Cct8l1
  gRNA
acgcacacgacaatactctc

SEQ ID NO: 76390 - DNA, 20 bp, Artificial Sequence
  MKO10076390_B_Cct8
  gRNA
tgatggcacaaacttcgttc

SEQ ID NO: 76391 - DNA, 20 bp, Artificial Sequence
  MKO10076391_B_Cct8
  gRNA
gccgtactgcttactcatga

SEQ ID NO: 76392 - DNA, 20 bp, Artificial Sequence
  MKO10076392_B_Cct8
  gRNA
tacttgcctctgatactgac

SEQ ID NO: 76393 - DNA, 20 bp, Artificial Sequence
  MKO10076393_B_Ccz1
  gRNA
aagcaattgtacagtttaca

SEQ ID NO: 76394 - DNA, 20 bp, Artificial Sequence
  MKO10076394_B_Ccz1
  gRNA
atgaaccagaagaaaatttc

SEQ ID NO: 76395 - DNA, 20 bp, Artificial Sequence
  MKO10076395_B_Ccz1
  gRNA
aatgaaaaaattagaaatgt

SEQ ID NO: 76396 - DNA, 20 bp, Artificial Sequence
  MKO10076396_B_Cd101
  gRNA
cttacgcagtgtatgcccag

SEQ ID NO: 76397 - DNA, 20 bp, Artificial Sequence
  MKO10076397_B_Cd101
  gRNA
tctccgggccctgcgcaccg

SEQ ID NO: 76398 - DNA, 20 bp, Artificial Sequence
  MKO10076398_B_Cd101
  gRNA
acttccttggtcggggcgct

SEQ ID NO: 76399 - DNA, 20 bp, Artificial Sequence
  MKO10076399_B_Cd109
  gRNA
cctggaaaatagccccccac

SEQ ID NO: 76400 - DNA, 20 bp, Artificial Sequence
  MKO10076400_B_Cd109
  gRNA
agtctaatgtgatccaacag

SEQ ID NO: 76401 - DNA, 20 bp, Artificial Sequence
  MKO10076401_B_Cd109
  gRNA
gctcagatctcaagccttat

SEQ ID NO: 76402 - DNA, 20 bp, Artificial Sequence
  MKO10076402_B_Cd14
  gRNA
ccgcaccgtaagccgcttta

SEQ ID NO: 76403 - DNA, 20 bp, Artificial Sequence
  MKO10076403_B_Cd14
  gRNA
ttgttgcccacgacacgttg

SEQ ID NO: 76404 - DNA, 20 bp, Artificial Sequence
  MKO10076404_B_Cd14
  gRNA
gctccgaatagaatccgact

SEQ ID NO: 76405 - DNA, 20 bp, Artificial Sequence
  MKO10076405_B_Cd151
  gRNA
gtcaagagataccaccagtc

SEQ ID NO: 76406 - DNA, 20 bp, Artificial Sequence
  MKO10076406_B_Cd151
  gRNA
ggatgccagcaatgatctcc

SEQ ID NO: 76407 - DNA, 20 bp, Artificial Sequence
  MKO10076407_B_Cd151
  gRNA
tggtgaggcagacagccgcg

SEQ ID NO: 76408 - DNA, 20 bp, Artificial Sequence
  MKO10076408_B_Cd160
  gRNA
ggtccagtcgccctcctttc

SEQ ID NO: 76409 - DNA, 20 bp, Artificial Sequence
  MKO10076409_B_Cd160
  gRNA
gcaattgtgaacttccaaca

SEQ ID NO: 76410 - DNA, 20 bp, Artificial Sequence
  MKO10076410_B_Cd160
  gRNA
cagcatgcaaagaatcctga

SEQ ID NO: 76411 - DNA, 20 bp, Artificial Sequence
  MKO10076411_B_Cd163l1
  gRNA
aggttcttcggggactgacc

SEQ ID NO: 76412 - DNA, 20 bp, Artificial Sequence
  MKO10076412_B_Cd163l1
  gRNA
agactcaacaacaagctacg

SEQ ID NO: 76413 - DNA, 20 bp, Artificial Sequence
  MKO10076413_B_Cd163l1
  gRNA
taccctcacaggacacgtgg

SEQ ID NO: 76414 - DNA, 20 bp, Artificial Sequence
  MKO10076414_B_Cd163
  gRNA
gactgcaaacaccggggatg

SEQ ID NO: 76415 - DNA, 20 bp, Artificial Sequence
  MKO10076415_B_Cd163
  gRNA
tctgctgtcactaacgctcc

SEQ ID NO: 76416 - DNA, 20 bp, Artificial Sequence
  MKO10076416_B_Cd163
  gRNA
tgtaaaaggtttgtccatct

SEQ ID NO: 76417 - DNA, 20 bp, Artificial Sequence
  MKO10076417_B_Cd164l2
  gRNA
tttgatggagctagcttcat

SEQ ID NO: 76418 - DNA, 20 bp, Artificial Sequence
  MKO10076418_B_Cd164l2
  gRNA
aggaccctacctgtggtact

SEQ ID NO: 76419 - DNA, 20 bp, Artificial Sequence
  MKO10076419_B_Cd164l2
  gRNA
cctccttgaccacttcagct

SEQ ID NO: 76420 - DNA, 20 bp, Artificial Sequence
  MKO10076420_B_Cd164
  gRNA
accattaagtaattgttccc

SEQ ID NO: 76421 - DNA, 20 bp, Artificial Sequence
  MKO10076421_B_Cd164
  gRNA
aaccgcactgacttgtgttc

SEQ ID NO: 76422 - DNA, 20 bp, Artificial Sequence
  MKO10076422_B_Cd164
  gRNA
acagctgttgaagctcgcac

SEQ ID NO: 76423 - DNA, 20 bp, Artificial Sequence
  MKO10076423_B_Cd177
  gRNA
tacacccgtgtgtgtcgcca

SEQ ID NO: 76424 - DNA, 20 bp, Artificial Sequence
  MKO10076424_B_Cd177
  gRNA
ctgccagaaaagcagcgcac

SEQ ID NO: 76425 - DNA, 20 bp, Artificial Sequence
  MKO10076425_B_Cd177
  gRNA
agcgaaaactgtgatcttat

SEQ ID NO: 76426 - DNA, 20 bp, Artificial Sequence
  MKO10076426_B_Cd180
  gRNA
ctcggcaactggccaagaag

SEQ ID NO: 76427 - DNA, 20 bp, Artificial Sequence
  MKO10076427_B_Cd180
  gRNA
ctcagatcagaagtgcattg

SEQ ID NO: 76428 - DNA, 20 bp, Artificial Sequence
  MKO10076428_B_Cd180
  gRNA
tccaaacattctgttgagtt

SEQ ID NO: 76429 - DNA, 20 bp, Artificial Sequence
  MKO10076429_B_Cd19
  gRNA
tgacgtctgaagcattccac

SEQ ID NO: 76430 - DNA, 20 bp, Artificial Sequence
  MKO10076430_B_Cd19
  gRNA
agcacccggtcagagagatg

SEQ ID NO: 76431 - DNA, 20 bp, Artificial Sequence
  MKO10076431_B_Cd19
  gRNA
caatcactagcaagatgccc

SEQ ID NO: 76432 - DNA, 20 bp, Artificial Sequence
  MKO10076432_B_Cd1d1
  gRNA
tttcacagcccgcagacagc

SEQ ID NO: 76433 - DNA, 20 bp, Artificial Sequence
  MKO10076433_B_Cd1d1
  gRNA
catgacacaccagctgccta

SEQ ID NO: 76434 - DNA, 20 bp, Artificial Sequence
  MKO10076434_B_Cd1d1
  gRNA
tcagtactatgaagacgatc

SEQ ID NO: 76435 - DNA, 20 bp, Artificial Sequence
  MKO10076435_B_Cd1d2
  gRNA
acctaccgtgcctgttgctg

SEQ ID NO: 76436 - DNA, 20 bp, Artificial Sequence
  MKO10076436_B_Cd1d2
  gRNA
cttcctttgctaacataagc

SEQ ID NO: 76437 - DNA, 20 bp, Artificial Sequence
  MKO10076437_B_Cd1d2
  gRNA
catgacacaccagctgcaga

SEQ ID NO: 76438 - DNA, 20 bp, Artificial Sequence
  MKO10076438_B_Cd200r1
  gRNA
tgcattgtctctcatttgac

SEQ ID NO: 76439 - DNA, 20 bp, Artificial Sequence
  MKO10076439_B_Cd200r1
  gRNA
accacctctactcagttcta

SEQ ID NO: 76440 - DNA, 20 bp, Artificial Sequence
  MKO10076440_B_Cd200r1
  gRNA
aaactatgacctccaagtgc

SEQ ID NO: 76441 - DNA, 20 bp, Artificial Sequence
  MKO10076441_B_Cd200r2
  gRNA
tgcattgtctctcattcgac

SEQ ID NO: 76442 - DNA, 20 bp, Artificial Sequence
  MKO10076442_B_Cd200r2
  gRNA
cctgaagtaacctactttct

SEQ ID NO: 76443 - DNA, 20 bp, Artificial Sequence
  MKO10076443_B_Cd200r2
  gRNA
tccagaagagaaatgttacc

SEQ ID NO: 76444 - DNA, 20 bp, Artificial Sequence
  MKO10076444_B_Cd200r3
  gRNA
gagcattctctatgtgaaac

SEQ ID NO: 76445 - DNA, 20 bp, Artificial Sequence
  MKO10076445_B_Cd200r3
  gRNA
gatgataatatcttccctga

SEQ ID NO: 76446 - DNA, 20 bp, Artificial Sequence
  MKO10076446_B_Cd200r3
  gRNA
actcatcttcatcactattt

SEQ ID NO: 76447 - DNA, 20 bp, Artificial Sequence
  MKO10076447_B_Cd200r4
  gRNA
acctggcaaaatttctcttc

SEQ ID NO: 76448 - DNA, 20 bp, Artificial Sequence
  MKO10076448_B_Cd200r4
  gRNA
attaatactgcatttatcag

SEQ ID NO: 76449 - DNA, 20 bp, Artificial Sequence
  MKO10076449_B_Cd200r4
  gRNA
cactacaatgtctgtacaga

SEQ ID NO: 76450 - DNA, 20 bp, Artificial Sequence
  MKO10076450_B_Cd200
  gRNA
aacgtcaccgaaatcaggag

SEQ ID NO: 76451 - DNA, 20 bp, Artificial Sequence
  MKO10076451_B_Cd200
  gRNA
gattctcaccatagagggta

SEQ ID NO: 76452 - DNA, 20 bp, Artificial Sequence
  MKO10076452_B_Cd200
  gRNA
cagatgtagtcccatttgaa

SEQ ID NO: 76453 - DNA, 20 bp, Artificial Sequence
  MKO10076453_B_Cd207
  gRNA
aaatctagatcctaggttga

SEQ ID NO: 76454 - DNA, 20 bp, Artificial Sequence
  MKO10076454_B_Cd207
  gRNA
cttaccaaagcagggagcga

SEQ ID NO: 76455 - DNA, 20 bp, Artificial Sequence
  MKO10076455_B_Cd207
  gRNA
ggaccagacatcattcaaca

SEQ ID NO: 76456 - DNA, 20 bp, Artificial Sequence
  MKO10076456_B_Cd209a
  gRNA
ggcagtggcagaatcattcc

SEQ ID NO: 76457 - DNA, 20 bp, Artificial Sequence
  MKO10076457_B_Cd209a
  gRNA
aagagcacctgcagtgccaa

SEQ ID NO: 76458 - DNA, 20 bp, Artificial Sequence
  MKO10076458_B_Cd209a
  gRNA
ccaagaactgacccagttga

SEQ ID NO: 76459 - DNA, 20 bp, Artificial Sequence
  MKO10076459_B_Cd209b
  gRNA
ctcagacgatgatgagttga

SEQ ID NO: 76460 - DNA, 20 bp, Artificial Sequence
  MKO10076460_B_Cd209b
  gRNA
ggaacaagagaagatcctcc

SEQ ID NO: 76461 - DNA, 20 bp, Artificial Sequence
  MKO10076461_B_Cd209b
  gRNA
gtccaggattcccatcttcc

SEQ ID NO: 76462 - DNA, 20 bp, Artificial Sequence
  MKO10076462_B_Cd209c
  gRNA
tatcaaaagtgatgatgaac

SEQ ID NO: 76463 - DNA, 20 bp, Artificial Sequence
  MKO10076463_B_Cd209c
  gRNA
gccatctgccttcatgcttc

SEQ ID NO: 76464 - DNA, 20 bp, Artificial Sequence
  MKO10076464_B_Cd209c
  gRNA
tctccaagttccaacagaac

SEQ ID NO: 76465 - DNA, 20 bp, Artificial Sequence
  MKO10076465_B_Cd209d
  gRNA
tcccgattacaaacaaaatt

SEQ ID NO: 76466 - DNA, 20 bp, Artificial Sequence
  MKO10076466_B_Cd209d
  gRNA
ccttcagttgcatgagctcc

SEQ ID NO: 76467 - DNA, 20 bp, Artificial Sequence
  MKO10076467_B_Cd209d
  gRNA
gtcaaaggtccccagctcag

SEQ ID NO: 76468 - DNA, 20 bp, Artificial Sequence
  MKO10076468_B_Cd209e
  gRNA
cttgcaggatttctagacaa

SEQ ID NO: 76469 - DNA, 20 bp, Artificial Sequence
  MKO10076469_B_Cd209e
  gRNA
ccaagaaaaatagctacacc

SEQ ID NO: 76470 - DNA, 20 bp, Artificial Sequence
  MKO10076470_B_Cd209e
  gRNA
atcctgaccttggatgatga

SEQ ID NO: 76471 - DNA, 20 bp, Artificial Sequence
  MKO10076471_B_Cd209f
  gRNA
ctctgacttaccttgaacca

SEQ ID NO: 76472 - DNA, 20 bp, Artificial Sequence
  MKO10076472_B_Cd209f
  gRNA
caggattcgtgcatactcac

SEQ ID NO: 76473 - DNA, 20 bp, Artificial Sequence
  MKO10076473_B_Cd209f
  gRNA
ccagttacccttgtccaagc

SEQ ID NO: 76474 - DNA, 20 bp, Artificial Sequence
  MKO10076474_B_Cd209g
  gRNA
caggattcgtgcatactcac

SEQ ID NO: 76475 - DNA, 20 bp, Artificial Sequence
  MKO10076475_B_Cd209g
  gRNA
tcagctgctgctgaatctgc

SEQ ID NO: 76476 - DNA, 20 bp, Artificial Sequence
  MKO10076476_B_Cd209g
  gRNA
tccttgtagttgccgttcct

SEQ ID NO: 76477 - DNA, 20 bp, Artificial Sequence
  MKO10076477_B_Cd226
  gRNA
tgaaactaaccctccaacga

SEQ ID NO: 76478 - DNA, 20 bp, Artificial Sequence
  MKO10076478_B_Cd226
  gRNA
gctattcttcatgtgcacaa

SEQ ID NO: 76479 - DNA, 20 bp, Artificial Sequence
  MKO10076479_B_Cd226
  gRNA
cagagatggcttatgttact

SEQ ID NO: 76480 - DNA, 20 bp, Artificial Sequence
  MKO10076480_B_Cd22
  gRNA
ctcagagcgcactgtgcgtc

SEQ ID NO: 76481 - DNA, 20 bp, Artificial Sequence
  MKO10076481_B_Cd22
  gRNA
ctacccttcccccgctgaag

SEQ ID NO: 76482 - DNA, 20 bp, Artificial Sequence
  MKO10076482_B_Cd22
  gRNA
cttgaaccaagacaccgcca

SEQ ID NO: 76483 - DNA, 20 bp, Artificial Sequence
  MKO10076483_B_Cd244
  gRNA
gtgagctacgctttgtacag

SEQ ID NO: 76484 - DNA, 20 bp, Artificial Sequence
  MKO10076484_B_Cd244
  gRNA
cgagccagcagggatcaaca

SEQ ID NO: 76485 - DNA, 20 bp, Artificial Sequence
  MKO10076485_B_Cd244
  gRNA
gcatccttgttgatccctgc

SEQ ID NO: 76486 - DNA, 20 bp, Artificial Sequence
  MKO10076486_B_Cd247
  gRNA
ctgctcctgggaaccgcacg

SEQ ID NO: 76487 - DNA, 20 bp, Artificial Sequence
  MKO10076487_B_Cd247
  gRNA
aaactctgctacttgctaga

SEQ ID NO: 76488 - DNA, 20 bp, Artificial Sequence
  MKO10076488_B_Cd247
  gRNA
agagactgctgccaacctgc

SEQ ID NO: 76489 - DNA, 20 bp, Artificial Sequence
  MKO10076489_B_Cd248
  gRNA
actcatccgtgtccacgcag

SEQ ID NO: 76490 - DNA, 20 bp, Artificial Sequence
  MKO10076490_B_Cd248
  gRNA
ccggagcctcgagccgcgtg

SEQ ID NO: 76491 - DNA, 20 bp, Artificial Sequence
  MKO10076491_B_Cd248
  gRNA
tgggggtcgggccggccaac

SEQ ID NO: 76492 - DNA, 20 bp, Artificial Sequence
  MKO10076492_B_Cd24a
  gRNA
agcggacatgggcagagcga

SEQ ID NO: 76493 - DNA, 20 bp, Artificial Sequence
  MKO10076493_B_Cd24a
  gRNA
cagggagctgccaccccctc

SEQ ID NO: 76494 - DNA, 20 bp, Artificial Sequence
  MKO10076494_B_Cd24a
  gRNA
gaagagagagagagagagcc

SEQ ID NO: 76495 - DNA, 20 bp, Artificial Sequence
  MKO10076495_B_Cd274
  gRNA
ggaccgtggacactacaatg

SEQ ID NO: 76496 - DNA, 20 bp, Artificial Sequence
  MKO10076496_B_Cd274
  gRNA
ggatgatcagctccgctgtg

SEQ ID NO: 76497 - DNA, 20 bp, Artificial Sequence
  MKO10076497_B_Cd274
  gRNA
tttagtgagaatgctagatg

SEQ ID NO: 76498 - DNA, 20 bp, Artificial Sequence
  MKO10076498_B_Cd276
  gRNA
tcggacgcgctgcagcctca

SEQ ID NO: 76499 - DNA, 20 bp, Artificial Sequence
  MKO10076499_B_Cd276
  gRNA
ccttgtaggtgccgaggacc

SEQ ID NO: 76500 - DNA, 20 bp, Artificial Sequence
  MKO10076500_B_Cd276
  gRNA
ttctccagcacacgaaagcc

SEQ ID NO: 76501 - DNA, 20 bp, Artificial Sequence
  MKO10076501_B_Cd27
  gRNA
ccagtccagtagtgtttgtc

SEQ ID NO: 76502 - DNA, 20 bp, Artificial Sequence
  MKO10076502_B_Cd27
  gRNA
gctgtccagacaaacactac

SEQ ID NO: 76503 - DNA, 20 bp, Artificial Sequence
  MKO10076503_B_Cd27
  gRNA
ttgcacagatgaagaccggc

SEQ ID NO: 76504 - DNA, 20 bp, Artificial Sequence
  MKO10076504_B_Cd28
  gRNA
ctagcaagccataacaaaac

SEQ ID NO: 76505 - DNA, 20 bp, Artificial Sequence
  MKO10076505_B_Cd28
  gRNA
ccccctagacaaatagtaga

SEQ ID NO: 76506 - DNA, 20 bp, Artificial Sequence
  MKO10076506_B_Cd28
  gRNA
cagtggctctttgtgttatc

SEQ ID NO: 76507 - DNA, 20 bp, Artificial Sequence
  MKO10076507_B_Cd2ap
  gRNA
gtgagtttcaccatcctctg

SEQ ID NO: 76508 - DNA, 20 bp, Artificial Sequence
  MKO10076508_B_Cd2ap
  gRNA
gaaagaattagagtccacag

SEQ ID NO: 76509 - DNA, 20 bp, Artificial Sequence
  MKO10076509_B_Cd2ap
  gRNA
cagaaatgtgaaaaaactac

SEQ ID NO: 76510 - DNA, 20 bp, Artificial Sequence
  MKO10076510_B_Cd2bp2
  gRNA
atcctcacaccgccctcact

SEQ ID NO: 76511 - DNA, 20 bp, Artificial Sequence
  MKO10076511_B_Cd2bp2
  gRNA
ggtcctgggagccgcttcaa

SEQ ID NO: 76512 - DNA, 20 bp, Artificial Sequence
  MKO10076512_B_Cd2bp2
  gRNA
gtccagcaaatatgatatcc

SEQ ID NO: 76513 - DNA, 20 bp, Artificial Sequence
  MKO10076513_B_Cd2
  gRNA
tacgtttctgatatcaaaaa

SEQ ID NO: 76514 - DNA, 20 bp, Artificial Sequence
  MKO10076514_B_Cd2
  gRNA
caacacaaccctgacctgtg

SEQ ID NO: 76515 - DNA, 20 bp, Artificial Sequence
  MKO10076515_B_Cd2
  gRNA
gttcagccaaaacctccctg

SEQ ID NO: 76516 - DNA, 20 bp, Artificial Sequence
  MKO10076516_B_Cd300a
  gRNA
catatcgacatgacacactc

SEQ ID NO: 76517 - DNA, 20 bp, Artificial Sequence
  MKO10076517_B_Cd300a
  gRNA
cacctttgaccagccgcttc

SEQ ID NO: 76518 - DNA, 20 bp, Artificial Sequence
  MKO10076518_B_Cd300a
  gRNA
ccgtgaacatgactattccc

SEQ ID NO: 76519 - DNA, 20 bp, Artificial Sequence
  MKO10076519_B_Cd300c
  gRNA
caatttcttctcatactgac

SEQ ID NO: 76520 - DNA, 20 bp, Artificial Sequence
  MKO10076520_B_Cd300c
  gRNA
aaggagagtagcacagctga

SEQ ID NO: 76521 - DNA, 20 bp, Artificial Sequence
  MKO10076521_B_Cd300c
  gRNA
ttctgagcagcccccacttc

SEQ ID NO: 76522 - DNA, 20 bp, Artificial Sequence
  MKO10076522_B_Cd300e
  gRNA
atcctcccactagtgaattc

SEQ ID NO: 76523 - DNA, 20 bp, Artificial Sequence
  MKO10076523_B_Cd300e
  gRNA
gcatgctctgtgctatcttc

SEQ ID NO: 76524 - DNA, 20 bp, Artificial Sequence
  MKO10076524_B_Cd300e
  gRNA
aggaggatgaggctatgtgc

SEQ ID NO: 76525 - DNA, 20 bp, Artificial Sequence
  MKO10076525_B_Cd300lb
  gRNA
acacactctctgtagcgatt

SEQ ID NO: 76526 - DNA, 20 bp, Artificial Sequence
  MKO10076526_B_Cd300lb
  gRNA
ttgggtatcccgctgagatt

SEQ ID NO: 76527 - DNA, 20 bp, Artificial Sequence
  MKO10076527_B_Cd300lb
  gRNA
aagttgattagaagtcgaca

SEQ ID NO: 76528 - DNA, 20 bp, Artificial Sequence
  MKO10076528_B_Cd300ld
  gRNA
acttacctgggaggaagaat

SEQ ID NO: 76529 - DNA, 20 bp, Artificial Sequence
  MKO10076529_B_Cd300ld
  gRNA
ttgccagtgttctcagcgct

SEQ ID NO: 76530 - DNA, 20 bp, Artificial Sequence
  MKO10076530_B_Cd300ld
  gRNA
cctctcccaaagcatctctg

SEQ ID NO: 76531 - DNA, 20 bp, Artificial Sequence
  MKO10076531_B_Cd300lf
  gRNA
actagctactactctgataa

SEQ ID NO: 76532 - DNA, 20 bp, Artificial Sequence
  MKO10076532_B_Cd300lf
  gRNA
catcctccaagcaaagagcg

SEQ ID NO: 76533 - DNA, 20 bp, Artificial Sequence
  MKO10076533_B_Cd300lf
  gRNA
ccctttctcttctggatcac

SEQ ID NO: 76534 - DNA, 20 bp, Artificial Sequence
  MKO10076534_B_Cd300lg
  gRNA
ctccagtgtgtccatcccga

SEQ ID NO: 76535 - DNA, 20 bp, Artificial Sequence
  MKO10076535_B_Cd300lg
  gRNA
ggggcagccagacgactgga

SEQ ID NO: 76536 - DNA, 20 bp, Artificial Sequence
  MKO10076536_B_Cd300lg
  gRNA
agcacccaccatgaggcctc

SEQ ID NO: 76537 - DNA, 20 bp, Artificial Sequence
  MKO10076537_B_Cd300lh
  gRNA
ggatccagtcacaggtccag

SEQ ID NO: 76538 - DNA, 20 bp, Artificial Sequence
  MKO10076538_B_Cd300lh
  gRNA
gacacccacaacaccaacca

SEQ ID NO: 76539 - DNA, 20 bp, Artificial Sequence
  MKO10076539_B_Cd300lh
  gRNA
agagagagttctgagtcacc

SEQ ID NO: 76540 - DNA, 20 bp, Artificial Sequence
  MKO10076540_B_Cd302
  gRNA
agaggaaaacgcgtttatac

SEQ ID NO: 76541 - DNA, 20 bp, Artificial Sequence
  MKO10076541_B_Cd302
  gRNA
gaggacctagttgatacctg

SEQ ID NO: 76542 - DNA, 20 bp, Artificial Sequence
  MKO10076542_B_Cd302
  gRNA
cactttgcaaaagcgatgga

SEQ ID NO: 76543 - DNA, 20 bp, Artificial Sequence
  MKO10076543_B_Cd320
  gRNA
aatgtaacatttacctctgc

SEQ ID NO: 76544 - DNA, 20 bp, Artificial Sequence
  MKO10076544_B_Cd320
  gRNA
accttccagtgtcttaccag

SEQ ID NO: 76545 - DNA, 20 bp, Artificial Sequence
  MKO10076545_B_Cd320
  gRNA
cccctttcctggcgctgtga

SEQ ID NO: 76546 - DNA, 20 bp, Artificial Sequence
  MKO10076546_B_Cd33
  gRNA
ctgaggtgtgaacgtcagca

SEQ ID NO: 76547 - DNA, 20 bp, Artificial Sequence
  MKO10076547_B_Cd33
  gRNA
cgagacagagcccaagaatc

SEQ ID NO: 76548 - DNA, 20 bp, Artificial Sequence
  MKO10076548_B_Cd33
  gRNA
ccgctgttcttgctgtgtgc

SEQ ID NO: 76549 - DNA, 20 bp, Artificial Sequence
  MKO10076549_B_Cd34
  gRNA
tcacccaccttaatggcact

SEQ ID NO: 76550 - DNA, 20 bp, Artificial Sequence
  MKO10076550_B_Cd34
  gRNA
gtcaactttacagttacctc

SEQ ID NO: 76551 - DNA, 20 bp, Artificial Sequence
  MKO10076551_B_Cd34
  gRNA
ccgagaagtgaggttggccc

SEQ ID NO: 76552 - DNA, 20 bp, Artificial Sequence
  MKO10076552_B_Cd36
  gRNA
tgtgcaaaacccagatgacg

SEQ ID NO: 76553 - DNA, 20 bp, Artificial Sequence
  MKO10076553_B_Cd36
  gRNA
cagtacaatgacactgtaga

SEQ ID NO: 76554 - DNA, 20 bp, Artificial Sequence
  MKO10076554_B_Cd36
  gRNA
aaatataactcaggaccccg

SEQ ID NO: 76555 - DNA, 20 bp, Artificial Sequence
  MKO10076555_B_Cd37
  gRNA
gatgcccagggtaatctgtg

SEQ ID NO: 76556 - DNA, 20 bp, Artificial Sequence
  MKO10076556_B_Cd37
  gRNA
aggtgccgaagcagaaaatc

SEQ ID NO: 76557 - DNA, 20 bp, Artificial Sequence
  MKO10076557_B_Cd37
  gRNA
accttggaccaagtctgcag

SEQ ID NO: 76558 - DNA, 20 bp, Artificial Sequence
  MKO10076558_B_Cd38
  gRNA
ctacgccccacttgttaaat

SEQ ID NO: 76559 - DNA, 20 bp, Artificial Sequence
  MKO10076559_B_Cd38
  gRNA
tgtggagaccctagtacttc

SEQ ID NO: 76560 - DNA, 20 bp, Artificial Sequence
  MKO10076560_B_Cd38
  gRNA
tcaaaccataccatgtaaca

SEQ ID NO: 76561 - DNA, 20 bp, Artificial Sequence
  MKO10076561_B_Cd3d
  gRNA
aaaggcgttctggacccacg

SEQ ID NO: 76562 - DNA, 20 bp, Artificial Sequence
  MKO10076562_B_Cd3d
  gRNA
tccctccaagacggctgtac

SEQ ID NO: 76563 - DNA, 20 bp, Artificial Sequence
  MKO10076563_B_Cd3d
  gRNA
catgagaccggaaggccttc

SEQ ID NO: 76564 - DNA, 20 bp, Artificial Sequence
  MKO10076564_B_Cd3eap
  gRNA
ggaaccctcccgtttctcct

SEQ ID NO: 76565 - DNA, 20 bp, Artificial Sequence
  MKO10076565_B_Cd3eap
  gRNA
agctggaatggcgggtaccc

SEQ ID NO: 76566 - DNA, 20 bp, Artificial Sequence
  MKO10076566_B_Cd3eap
  gRNA
gctccactcactgcaggcct

SEQ ID NO: 76567 - DNA, 20 bp, Artificial Sequence
  MKO10076567_B_Cd3e
  gRNA
tcgggtcacaggcttggcct

SEQ ID NO: 76568 - DNA, 20 bp, Artificial Sequence
  MKO10076568_B_Cd3e
  gRNA
aatcttcttaccaatgttct

SEQ ID NO: 76569 - DNA, 20 bp, Artificial Sequence
  MKO10076569_B_Cd3e
  gRNA
ctttcagatgccgagaacat

SEQ ID NO: 76570 - DNA, 20 bp, Artificial Sequence
  MKO10076570_B_Cd3g
  gRNA
aacaatgccaaagaccctcg

SEQ ID NO: 76571 - DNA, 20 bp, Artificial Sequence
  MKO10076571_B_Cd3g
  gRNA
gcaaaatgaacagctgtacc

SEQ ID NO: 76572 - DNA, 20 bp, Artificial Sequence
  MKO10076572_B_Cd3g
  gRNA
actgtagcccagacaaataa

SEQ ID NO: 76573 - DNA, 20 bp, Artificial Sequence
  MKO10076573_B_Cd40lg
  gRNA
accggatgctgcattactgt

SEQ ID NO: 76574 - DNA, 20 bp, Artificial Sequence
  MKO10076574_B_Cd40lg
  gRNA
gcaatttgaagaccttgtca

SEQ ID NO: 76575 - DNA, 20 bp, Artificial Sequence
  MKO10076575_B_Cd40lg
  gRNA
catctcctcacagttcagca

SEQ ID NO: 76576 - DNA, 20 bp, Artificial Sequence
  MKO10076576_B_Cd40
  gRNA
gacaaacagtacctccacga

SEQ ID NO: 76577 - DNA, 20 bp, Artificial Sequence
  MKO10076577_B_Cd40
  gRNA
agcgaatctccctgttccac

SEQ ID NO: 76578 - DNA, 20 bp, Artificial Sequence
  MKO10076578_B_Cd40
  gRNA
gcagtgttgtccttccttac

SEQ ID NO: 76579 - DNA, 20 bp, Artificial Sequence
  MKO10076579_B_Cd44
  gRNA
ctacagtatctcccggactg

SEQ ID NO: 76580 - DNA, 20 bp, Artificial Sequence
  MKO10076580_B_Cd44
  gRNA
aggtacatacttatggtaac

SEQ ID NO: 76581 - DNA, 20 bp, Artificial Sequence
  MKO10076581_B_Cd44
  gRNA
agcacgccatggacaagttt

SEQ ID NO: 76582 - DNA, 20 bp, Artificial Sequence
  MKO10076582_B_Cd46
  gRNA
tacagttgtgatcctacccc

SEQ ID NO: 76583 - DNA, 20 bp, Artificial Sequence
  MKO10076583_B_Cd46
  gRNA
atgttacaagacccttcatt

SEQ ID NO: 76584 - DNA, 20 bp, Artificial Sequence
  MKO10076584_B_Cd46
  gRNA
cctgtgagccaaatcataca

SEQ ID NO: 76585 - DNA, 20 bp, Artificial Sequence
  MKO10076585_B_Cd47
  gRNA
gaatgattctcttattcgta

SEQ ID NO: 76586 - DNA, 20 bp, Artificial Sequence
  MKO10076586_B_Cd47
  gRNA
tttctcctcctcgtaagaac

SEQ ID NO: 76587 - DNA, 20 bp, Artificial Sequence
  MKO10076587_B_Cd47
  gRNA
atcagcctgttcttacgagg

SEQ ID NO: 76588 - DNA, 20 bp, Artificial Sequence
  MKO10076588_B_Cd48
  gRNA
accagcatgttgactatact

SEQ ID NO: 76589 - DNA, 20 bp, Artificial Sequence
  MKO10076589_B_Cd48
  gRNA
tcacaacactcatcattcac

SEQ ID NO: 76590 - DNA, 20 bp, Artificial Sequence
  MKO10076590_B_Cd48
  gRNA
agagttcttgtcaggttaac

SEQ ID NO: 76591 - DNA, 20 bp, Artificial Sequence
  MKO10076591_B_Cd4
  gRNA
tcgcttcagtttgctggttc

SEQ ID NO: 76592 - DNA, 20 bp, Artificial Sequence
  MKO10076592_B_Cd4
  gRNA
tcaaaacgatcaaactgcga

SEQ ID NO: 76593 - DNA, 20 bp, Artificial Sequence
  MKO10076593_B_Cd4
  gRNA
tcagacttatatctgtgagc

SEQ ID NO: 76594 - DNA, 20 bp, Artificial Sequence
  MKO10076594_B_Cd52
  gRNA
cttcctcactatcattcttc

SEQ ID NO: 76595 - DNA, 20 bp, Artificial Sequence
  MKO10076595_B_Cd52
  gRNA
atgaggccccactctttaag

SEQ ID NO: 76596 - DNA, 20 bp, Artificial Sequence
  MKO10076596_B_Cd52
  gRNA
ggcctcatccatcatcgatg

SEQ ID NO: 76597 - DNA, 20 bp, Artificial Sequence
  MKO10076597_B_Cd53
  gRNA
ggctcaagtgattggaccag

SEQ ID NO: 76598 - DNA, 20 bp, Artificial Sequence
  MKO10076598_B_Cd53
  gRNA
ctctgacaacagcactatga

SEQ ID NO: 76599 - DNA, 20 bp, Artificial Sequence
  MKO10076599_B_Cd53
  gRNA
gcaggaagatggtggaccac

SEQ ID NO: 76600 - DNA, 20 bp, Artificial Sequence
  MKO10076600_B_Cd55
  gRNA
ctccagacattcctaatgcc

SEQ ID NO: 76601 - DNA, 20 bp, Artificial Sequence
  MKO10076601_B_Cd55
  gRNA
tactctcacagaatgtttcg

SEQ ID NO: 76602 - DNA, 20 bp, Artificial Sequence
  MKO10076602_B_Cd55
  gRNA
ctattgtggaatatgagtgt

SEQ ID NO: 76603 - DNA, 20 bp, Artificial Sequence
  MKO10076603_B_Cd59a
  gRNA
caggaatgcaagtgtatcaa

SEQ ID NO: 76604 - DNA, 20 bp, Artificial Sequence
  MKO10076604_B_Cd59a
  gRNA
agaacacagccagaagcagc

SEQ ID NO: 76605 - DNA, 20 bp, Artificial Sequence
  MKO10076605_B_Cd59a
  gRNA
ccagcacaatgagagctcag

SEQ ID NO: 76606 - DNA, 20 bp, Artificial Sequence
  MKO10076606_B_Cd59b
  gRNA
atgctacaactgtttagacc

SEQ ID NO: 76607 - DNA, 20 bp, Artificial Sequence
  MKO10076607_B_Cd59b
  gRNA
agaagacagccagaagcagc

SEQ ID NO: 76608 - DNA, 20 bp, Artificial Sequence
  MKO10076608_B_Cd59b
  gRNA
ccagcacaatgagagctcag

SEQ ID NO: 76609 - DNA, 20 bp, Artificial Sequence
  MKO10076609_B_Cd5l
  gRNA
ggctgatatgatgcgccacg

SEQ ID NO: 76610 - DNA, 20 bp, Artificial Sequence
  MKO10076610_B_Cd5l
  gRNA
ctggatgacgtcaactgctc

SEQ ID NO: 76611 - DNA, 20 bp, Artificial Sequence
  MKO10076611_B_Cd5l
  gRNA
cccaccagcttcagctcaaa

SEQ ID NO: 76612 - DNA, 20 bp, Artificial Sequence
  MKO10076612_B_Cd5
  gRNA
gcgctcaccgtcatctgctc

SEQ ID NO: 76613 - DNA, 20 bp, Artificial Sequence
  MKO10076613_B_Cd5
  gRNA
caccccttccagactgtccg

SEQ ID NO: 76614 - DNA, 20 bp, Artificial Sequence
  MKO10076614_B_Cd5
  gRNA
caccccacccaccaccgtgc

SEQ ID NO: 76615 - DNA, 20 bp, Artificial Sequence
  MKO10076615_B_Cd63
  gRNA
gagacagtagttctccttgc

SEQ ID NO: 76616 - DNA, 20 bp, Artificial Sequence
  MKO10076616_B_Cd63
  gRNA
tctaaacacatagccagcaa

SEQ ID NO: 76617 - DNA, 20 bp, Artificial Sequence
  MKO10076617_B_Cd63
  gRNA
cctgtctcttatcatgcttg

SEQ ID NO: 76618 - DNA, 20 bp, Artificial Sequence
  MKO10076618_B_Cd68
  gRNA
cttggactaggcgagggtgg

SEQ ID NO: 76619 - DNA, 20 bp, Artificial Sequence
  MKO10076619_B_Cd68
  gRNA
gagcccgagtacagtctacc

SEQ ID NO: 76620 - DNA, 20 bp, Artificial Sequence
  MKO10076620_B_Cd68
  gRNA
attccaccgccatgtagtcc

SEQ ID NO: 76621 - DNA, 20 bp, Artificial Sequence
  MKO10076621_B_Cd69
  gRNA
tccaacttctcgtacaagcc

SEQ ID NO: 76622 - DNA, 20 bp, Artificial Sequence
  MKO10076622_B_Cd69
  gRNA
gcttgacaggttcaacttga

SEQ ID NO: 76623 - DNA, 20 bp, Artificial Sequence
  MKO10076623_B_Cd69
  gRNA
accactattaacacagccca

SEQ ID NO: 76624 - DNA, 20 bp, Artificial Sequence
  MKO10076624_B_Cd6
  gRNA
agcgactgctcccgttcacc

SEQ ID NO: 76625 - DNA, 20 bp, Artificial Sequence
  MKO10076625_B_Cd6
  gRNA
ggtttgcttacctaggtcca

SEQ ID NO: 76626 - DNA, 20 bp, Artificial Sequence
  MKO10076626_B_Cd6
  gRNA
caccatcccgaacatgacct

SEQ ID NO: 76627 - DNA, 20 bp, Artificial Sequence
  MKO10076627_B_Cd70
  gRNA
gcccttgcccctgggttcgc

SEQ ID NO: 76628 - DNA, 20 bp, Artificial Sequence
  MKO10076628_B_Cd70
  gRNA
agctgtaactcagctgtgtg

SEQ ID NO: 76629 - DNA, 20 bp, Artificial Sequence
  MKO10076629_B_Cd70
  gRNA
gagttacagctgaatctcac

SEQ ID NO: 76630 - DNA, 20 bp, Artificial Sequence
  MKO10076630_B_Cd72
  gRNA
agacacttgcacattctcgt

SEQ ID NO: 76631 - DNA, 20 bp, Artificial Sequence
  MKO10076631_B_Cd72
  gRNA
ctcgagccaggacacattac

SEQ ID NO: 76632 - DNA, 20 bp, Artificial Sequence
  MKO10076632_B_Cd72
  gRNA
cctgctttgtccgctagtgc

SEQ ID NO: 76633 - DNA, 20 bp, Artificial Sequence
  MKO10076633_B_Cd74
  gRNA
agggagtagccatccgcatc

SEQ ID NO: 76634 - DNA, 20 bp, Artificial Sequence
  MKO10076634_B_Cd74
  gRNA
ctgggtcatgttgccgtact

SEQ ID NO: 76635 - DNA, 20 bp, Artificial Sequence
  MKO10076635_B_Cd74
  gRNA
accgccctagagagccagaa

SEQ ID NO: 76636 - DNA, 20 bp, Artificial Sequence
  MKO10076636_B_Cd79a
  gRNA
catacatagaacagtcatca

SEQ ID NO: 76637 - DNA, 20 bp, Artificial Sequence
  MKO10076637_B_Cd79a
  gRNA
aaccgcatcatcacagcaga

SEQ ID NO: 76638 - DNA, 20 bp, Artificial Sequence
  MKO10076638_B_Cd79a
  gRNA
tcccttctgctgtgatgatg

SEQ ID NO: 76639 - DNA, 20 bp, Artificial Sequence
  MKO10076639_B_Cd79b
  gRNA
tcccccaggattcagcacgt

SEQ ID NO: 76640 - DNA, 20 bp, Artificial Sequence
  MKO10076640_B_Cd79b
  gRNA
cattgtgcaggatgacggca

SEQ ID NO: 76641 - DNA, 20 bp, Artificial Sequence
  MKO10076641_B_Cd79b
  gRNA
aggtcactgcttgtcattgc

SEQ ID NO: 76642 - DNA, 20 bp, Artificial Sequence
  MKO10076642_B_Cd7
  gRNA
atgtcttcatacactacgca

SEQ ID NO: 76643 - DNA, 20 bp, Artificial Sequence
  MKO10076643_B_Cd7
  gRNA
tggggatgcatggcgtcttg

SEQ ID NO: 76644 - DNA, 20 bp, Artificial Sequence
  MKO10076644_B_Cd7
  gRNA
gatgcttaccttgggcatcc

SEQ ID NO: 76645 - DNA, 20 bp, Artificial Sequence
  MKO10076645_B_Cd80
  gRNA
tgtggcccgagtataagaac

SEQ ID NO: 76646 - DNA, 20 bp, Artificial Sequence
  MKO10076646_B_Cd80
  gRNA
tgttcagctaatgcttcttc

SEQ ID NO: 76647 - DNA, 20 bp, Artificial Sequence
  MKO10076647_B_Cd80
  gRNA
acaagtgtgttcttgctatc

SEQ ID NO: 76648 - DNA, 20 bp, Artificial Sequence
  MKO10076648_B_Cd81
  gRNA
ttaccgtccccagcagacac

SEQ ID NO: 76649 - DNA, 20 bp, Artificial Sequence
  MKO10076649_B_Cd81
  gRNA
ggatggccccatagcacccc

SEQ ID NO: 76650 - DNA, 20 bp, Artificial Sequence
  MKO10076650_B_Cd81
  gRNA
tgtgaagcagttctatgacc

SEQ ID NO: 76651 - DNA, 20 bp, Artificial Sequence
  MKO10076651_B_Cd82
  gRNA
ggcttacgtcttcatcggtg

SEQ ID NO: 76652 - DNA, 20 bp, Artificial Sequence
  MKO10076652_B_Cd82
  gRNA
gaatccacaccccgaagccc

SEQ ID NO: 76653 - DNA, 20 bp, Artificial Sequence
  MKO10076653_B_Cd82
  gRNA
ctgcgcctgcacgtagtccc

SEQ ID NO: 76654 - DNA, 20 bp, Artificial Sequence
  MKO10076654_B_Cd83
  gRNA
ggagggcagcgcaacttgag

SEQ ID NO: 76655 - DNA, 20 bp, Artificial Sequence
  MKO10076655_B_Cd83
  gRNA
caagcaaaacagctccttcg

SEQ ID NO: 76656 - DNA, 20 bp, Artificial Sequence
  MKO10076656_B_Cd83
  gRNA
actggccccaaatgtttgct

SEQ ID NO: 76657 - DNA, 20 bp, Artificial Sequence
  MKO10076657_B_Cd84
  gRNA
catagatcagaagtatgacc

SEQ ID NO: 76658 - DNA, 20 bp, Artificial Sequence
  MKO10076658_B_Cd84
  gRNA
ggttacctgtacatggctgc

SEQ ID NO: 76659 - DNA, 20 bp, Artificial Sequence
  MKO10076659_B_Cd84
  gRNA
acatggcccagcgccatctg

SEQ ID NO: 76660 - DNA, 20 bp, Artificial Sequence
  MKO10076660_B_Cd86
  gRNA
cgagctttgacaggaacaac

SEQ ID NO: 76661 - DNA, 20 bp, Artificial Sequence
  MKO10076661_B_Cd86
  gRNA
gaaataagcttgcgtctcca

SEQ ID NO: 76662 - DNA, 20 bp, Artificial Sequence
  MKO10076662_B_Cd86
  gRNA
atctccttccaatacgtttg

SEQ ID NO: 76663 - DNA, 20 bp, Artificial Sequence
  MKO10076663_B_Cd8a
  gRNA
cagaagggccacgcagattc

SEQ ID NO: 76664 - DNA, 20 bp, Artificial Sequence
  MKO10076664_B_Cd8a
  gRNA
gggagttcgcagcactggct

SEQ ID NO: 76665 - DNA, 20 bp, Artificial Sequence
  MKO10076665_B_Cd8a
  gRNA
gagcacctaacctgagccac

SEQ ID NO: 76666 - DNA, 20 bp, Artificial Sequence
  MKO10076666_B_Cd8b1
  gRNA
tgactcacagtaaaagtaga

SEQ ID NO: 76667 - DNA, 20 bp, Artificial Sequence
  MKO10076667_B_Cd8b1
  gRNA
tgcagactaccagcaggctg

SEQ ID NO: 76668 - DNA, 20 bp, Artificial Sequence
  MKO10076668_B_Cd8b1
  gRNA
actgtttcatgaagtgaatt

SEQ ID NO: 76669 - DNA, 20 bp, Artificial Sequence
  MKO10076669_B_Cd93
  gRNA
cgtaccatgatttgccaatg

SEQ ID NO: 76670 - DNA, 20 bp, Artificial Sequence
  MKO10076670_B_Cd93
  gRNA
acatacctccccacgacctc

SEQ ID NO: 76671 - DNA, 20 bp, Artificial Sequence
  MKO10076671_B_Cd93
  gRNA
tgtgggacccccgaagctcc

SEQ ID NO: 76672 - DNA, 20 bp, Artificial Sequence
  MKO10076672_B_Cd96
  gRNA
cttaccaaaaaccttgactg

SEQ ID NO: 76673 - DNA, 20 bp, Artificial Sequence
  MKO10076673_B_Cd96
  gRNA
gaacctaggtggaatttctg

SEQ ID NO: 76674 - DNA, 20 bp, Artificial Sequence
  MKO10076674_B_Cd96
  gRNA
aacagcaccatggatgtctt

SEQ ID NO: 76675 - DNA, 20 bp, Artificial Sequence
  MKO10076675_B_Cd97
  gRNA
cgaggtctcaccaagcaggc

SEQ ID NO: 76676 - DNA, 20 bp, Artificial Sequence
  MKO10076676_B_Cd97
  gRNA
gtaccttcacagctctctgc

SEQ ID NO: 76677 - DNA, 20 bp, Artificial Sequence
  MKO10076677_B_Cd97
  gRNA
atgaggggcgtcagatgccc

SEQ ID NO: 76678 - DNA, 20 bp, Artificial Sequence
  MKO10076678_B_Cd99l2
  gRNA
ttgccactactacaactaga

SEQ ID NO: 76679 - DNA, 20 bp, Artificial Sequence
  MKO10076679_B_Cd99l2
  gRNA
tagatcatttcgatcatcca

SEQ ID NO: 76680 - DNA, 20 bp, Artificial Sequence
  MKO10076680_B_Cd99l2
  gRNA
ccaccttacctctctggaca

SEQ ID NO: 76681 - DNA, 20 bp, Artificial Sequence
  MKO10076681_B_Cd9
  gRNA
ataggtgattaaagaactcc

SEQ ID NO: 76682 - DNA, 20 bp, Artificial Sequence
  MKO10076682_B_Cd9
  gRNA
aaccattccagtttctacac

SEQ ID NO: 76683 - DNA, 20 bp, Artificial Sequence
  MKO10076683_B_Cd9
  gRNA
cctctcacctgtgtagaaac

SEQ ID NO: 76684 - DNA, 20 bp, Artificial Sequence
  MKO10076684_B_Cdadc1
  gRNA
cccagtatgtaagtcttcac

SEQ ID NO: 76685 - DNA, 20 bp, Artificial Sequence
  MKO10076685_B_Cdadc1
  gRNA
aggttcactttagaaagcct

SEQ ID NO: 76686 - DNA, 20 bp, Artificial Sequence
  MKO10076686_B_Cdadc1
  gRNA
gctccatccagagactgagc

SEQ ID NO: 76687 - DNA, 20 bp, Artificial Sequence
  MKO10076687_B_Cdan1
  gRNA
gcagaacgaagccttctcga

SEQ ID NO: 76688 - DNA, 20 bp, Artificial Sequence
  MKO10076688_B_Cdan1
  gRNA
gttgggttgatccttcgaga

SEQ ID NO: 76689 - DNA, 20 bp, Artificial Sequence
  MKO10076689_B_Cdan1
  gRNA
agtgtcttctcgacagcgcc

SEQ ID NO: 76690 - DNA, 20 bp, Artificial Sequence
  MKO10076690_B_Cda
  gRNA
cttctggatggcagtccgct

SEQ ID NO: 76691 - DNA, 20 bp, Artificial Sequence
  MKO10076691_B_Cda
  gRNA
agagaagatcctcccgtccc

SEQ ID NO: 76692 - DNA, 20 bp, Artificial Sequence
  MKO10076692_B_Cda
  gRNA
ctgccgacaagtcatgagag

SEQ ID NO: 76693 - DNA, 20 bp, Artificial Sequence
  MKO10076693_B_Cdc123
  gRNA
agatagtctttcacattctg

SEQ ID NO: 76694 - DNA, 20 bp, Artificial Sequence
  MKO10076694_B_Cdc123
  gRNA
tgagagcacagccacactta

SEQ ID NO: 76695 - DNA, 20 bp, Artificial Sequence
  MKO10076695_B_Cdc123
  gRNA
aaagactatctacttgatga

SEQ ID NO: 76696 - DNA, 20 bp, Artificial Sequence
  MKO10076696_B_Cdc14a
  gRNA
gcaaacgcagcattcttgat

SEQ ID NO: 76697 - DNA, 20 bp, Artificial Sequence
  MKO10076697_B_Cdc14a
  gRNA
ggggcttgcgagttcatgaa

SEQ ID NO: 76698 - DNA, 20 bp, Artificial Sequence
  MKO10076698_B_Cdc14a
  gRNA
cttaagatggcagcggagtc

SEQ ID NO: 76699 - DNA, 20 bp, Artificial Sequence
  MKO10076699_B_Cdc14b
  gRNA
ttaccatataacacccgaca

SEQ ID NO: 76700 - DNA, 20 bp, Artificial Sequence
  MKO10076700_B_Cdc14b
  gRNA
atacagcctatattcctttc

SEQ ID NO: 76701 - DNA, 20 bp, Artificial Sequence
  MKO10076701_B_Cdc14b
  gRNA
tgttcgtttgttgcactctt

SEQ ID NO: 76702 - DNA, 20 bp, Artificial Sequence
  MKO10076702_B_Cdc16
  gRNA
tcgagccattgtcatccttc

SEQ ID NO: 76703 - DNA, 20 bp, Artificial Sequence
  MKO10076703_B_Cdc16
  gRNA
tctggacatccttgacatgg

SEQ ID NO: 76704 - DNA, 20 bp, Artificial Sequence
  MKO10076704_B_Cdc16
  gRNA
aaggtagcttcactctctca

SEQ ID NO: 76705 - DNA, 20 bp, Artificial Sequence
  MKO10076705_B_Cdc20b
  gRNA
cgatttgctgagctcccttc

SEQ ID NO: 76706 - DNA, 20 bp, Artificial Sequence
  MKO10076706_B_Cdc20b
  gRNA
tgtcttgcaaaaacggagag

SEQ ID NO: 76707 - DNA, 20 bp, Artificial Sequence
  MKO10076707_B_Cdc20b
  gRNA
tcacccaaaaccctctctaa

SEQ ID NO: 76708 - DNA, 20 bp, Artificial Sequence
  MKO10076708_B_Cdc20
  gRNA
cacctggacctcagcattgc

SEQ ID NO: 76709 - DNA, 20 bp, Artificial Sequence
  MKO10076709_B_Cdc20
  gRNA
ttaccttctggggcattctg

SEQ ID NO: 76710 - DNA, 20 bp, Artificial Sequence
  MKO10076710_B_Cdc20
  gRNA
cccaggcaaatctagttcca

SEQ ID NO: 76711 - DNA, 20 bp, Artificial Sequence
  MKO10076711_B_Cdc23
  gRNA
gccgccgccgcctctgacag

SEQ ID NO: 76712 - DNA, 20 bp, Artificial Sequence
  MKO10076712_B_Cdc23
  gRNA
atccatcaagtccccgagcc

SEQ ID NO: 76713 - DNA, 20 bp, Artificial Sequence
  MKO10076713_B_Cdc23
  gRNA
gacgaaacagttgatagcct

SEQ ID NO: 76714 - DNA, 20 bp, Artificial Sequence
  MKO10076714_B_Cdc25a
  gRNA
cgatgaggtgaaaggtgtcg

SEQ ID NO: 76715 - DNA, 20 bp, Artificial Sequence
  MKO10076715_B_Cdc25a
  gRNA
cacctttcacctcatcgacc

SEQ ID NO: 76716 - DNA, 20 bp, Artificial Sequence
  MKO10076716_B_Cdc25a
  gRNA
ggtttctgtctagattctcc

SEQ ID NO: 76717 - DNA, 20 bp, Artificial Sequence
  MKO10076717_B_Cdc25b
  gRNA
acctgcatccgaagattctg

SEQ ID NO: 76718 - DNA, 20 bp, Artificial Sequence
  MKO10076718_B_Cdc25b
  gRNA
taggtttgaacaggccattc

SEQ ID NO: 76719 - DNA, 20 bp, Artificial Sequence
  MKO10076719_B_Cdc25b
  gRNA
ataggtctgccagcctgttc

SEQ ID NO: 76720 - DNA, 20 bp, Artificial Sequence
  MKO10076720_B_Cdc25c
  gRNA
ctccactgctaagattcgaa

SEQ ID NO: 76721 - DNA, 20 bp, Artificial Sequence
  MKO10076721_B_Cdc25c
  gRNA
agcagaagtagtaagcggag

SEQ ID NO: 76722 - DNA, 20 bp, Artificial Sequence
  MKO10076722_B_Cdc25c
  gRNA
actccgaatgctatgaatca

SEQ ID NO: 76723 - DNA, 20 bp, Artificial Sequence
  MKO10076723_B_Cdc26
  gRNA
agtttccaaactgagatgtg

SEQ ID NO: 76724 - DNA, 20 bp, Artificial Sequence
  MKO10076724_B_Cdc26
  gRNA
tgagagcattcgcaaggacc

SEQ ID NO: 76725 - DNA, 20 bp, Artificial Sequence
  MKO10076725_B_Cdc26
  gRNA
gctcaagctcgacgacattg

SEQ ID NO: 76726 - DNA, 20 bp, Artificial Sequence
  MKO10076726_B_Cdc27
  gRNA
tatttcacataacgattcaa

SEQ ID NO: 76727 - DNA, 20 bp, Artificial Sequence
  MKO10076727_B_Cdc27
  gRNA
tttgaatcgttatgtgaaat

SEQ ID NO: 76728 - DNA, 20 bp, Artificial Sequence
  MKO10076728_B_Cdc27
  gRNA
ctgttactaccgctcaggaa

SEQ ID NO: 76729 - DNA, 20 bp, Artificial Sequence
  MKO10076729_B_Cdc34
  gRNA
caccttctcgcctgccaacg

SEQ ID NO: 76730 - DNA, 20 bp, Artificial Sequence
  MKO10076730_B_Cdc34
  gRNA
ccagttgacgacccacagag

SEQ ID NO: 76731 - DNA, 20 bp, Artificial Sequence
  MKO10076731_B_Cdc34
  gRNA
cgtattccccaccagccttc

SEQ ID NO: 76732 - DNA, 20 bp, Artificial Sequence
  MKO10076732_B_Cdc37l1
  gRNA
acacgccaaagcacagaccg

SEQ ID NO: 76733 - DNA, 20 bp, Artificial Sequence
  MKO10076733_B_Cdc37l1
  gRNA
aactgcaatgtggatccaag

SEQ ID NO: 76734 - DNA, 20 bp, Artificial Sequence
  MKO10076734_B_Cdc37l1
  gRNA
taaactgcattaccacagct

SEQ ID NO: 76735 - DNA, 20 bp, Artificial Sequence
  MKO10076735_B_Cdc37
  gRNA
ctaccttgcgcttgcactcc

SEQ ID NO: 76736 - DNA, 20 bp, Artificial Sequence
  MKO10076736_B_Cdc37
  gRNA
tcgacccccgagcctgcttc

SEQ ID NO: 76737 - DNA, 20 bp, Artificial Sequence
  MKO10076737_B_Cdc37
  gRNA
ggggtcgaccttcagactct

SEQ ID NO: 76738 - DNA, 20 bp, Artificial Sequence
  MKO10076738_B_Cdc40
  gRNA
tcttacctcaggagcgaaca

SEQ ID NO: 76739 - DNA, 20 bp, Artificial Sequence
  MKO10076739_B_Cdc40
  gRNA
agccatttgctgtgttcgaa

SEQ ID NO: 76740 - DNA, 20 bp, Artificial Sequence
  MKO10076740_B_Cdc40
  gRNA
gcccctagaaatatgctttc

SEQ ID NO: 76741 - DNA, 20 bp, Artificial Sequence
  MKO10076741_B_Cdc42bpa
  gRNA
ttactaagttattgtcatcc

SEQ ID NO: 76742 - DNA, 20 bp, Artificial Sequence
  MKO10076742_B_Cdc42bpa
  gRNA
ccatgaaaattctgaacaag

SEQ ID NO: 76743 - DNA, 20 bp, Artificial Sequence
  MKO10076743_B_Cdc42bpa
  gRNA
tgcttcactttagaagtaaa

SEQ ID NO: 76744 - DNA, 20 bp, Artificial Sequence
  MKO10076744_B_Cdc42bpb
  gRNA
gctgcatgtccttcacgagc

SEQ ID NO: 76745 - DNA, 20 bp, Artificial Sequence
  MKO10076745_B_Cdc42bpb
  gRNA
gcctttcacccagctcgtga

SEQ ID NO: 76746 - DNA, 20 bp, Artificial Sequence
  MKO10076746_B_Cdc42bpb
  gRNA
tgatttgcagtacttggtca

SEQ ID NO: 76747 - DNA, 20 bp, Artificial Sequence
  MKO10076747_B_Cdc42bpg
  gRNA
cacgctgctgagccgctttg

SEQ ID NO: 76748 - DNA, 20 bp, Artificial Sequence
  MKO10076748_B_Cdc42bpg
  gRNA
ccatgaagatgctgcataag

SEQ ID NO: 76749 - DNA, 20 bp, Artificial Sequence
  MKO10076749_B_Cdc42bpg
  gRNA
gtgggaggcggtcctcaaag

SEQ ID NO: 76750 - DNA, 20 bp, Artificial Sequence
  MKO10076750_B_Cdc42ep1
  gRNA
gatggggagcttgccaccgc

SEQ ID NO: 76751 - DNA, 20 bp, Artificial Sequence
  MKO10076751_B_Cdc42ep1
  gRNA
ccgctcaccccgaagtttcc

SEQ ID NO: 76752 - DNA, 20 bp, Artificial Sequence
  MKO10076752_B_Cdc42ep1
  gRNA
cacctatgacagtctggtga

SEQ ID NO: 76753 - DNA, 20 bp, Artificial Sequence
  MKO10076753_B_Cdc42ep2
  gRNA
ttgaaacgtggcagccgcaa

SEQ ID NO: 76754 - DNA, 20 bp, Artificial Sequence
  MKO10076754_B_Cdc42ep2
  gRNA
ctgccacgtttcaaatagat

SEQ ID NO: 76755 - DNA, 20 bp, Artificial Sequence
  MKO10076755_B_Cdc42ep2
  gRNA
ctaggtcgtgatccataatc

SEQ ID NO: 76756 - DNA, 20 bp, Artificial Sequence
  MKO10076756_B_Cdc42ep3
  gRNA
atgctcaaacatgtcgtccg

SEQ ID NO: 76757 - DNA, 20 bp, Artificial Sequence
  MKO10076757_B_Cdc42ep3
  gRNA
agtcggaggactgttccgac

SEQ ID NO: 76758 - DNA, 20 bp, Artificial Sequence
  MKO10076758_B_Cdc42ep3
  gRNA
ttgggcgtcctaagttgcca

SEQ ID NO: 76759 - DNA, 20 bp, Artificial Sequence
  MKO10076759_B_Cdc42ep4
  gRNA
aagccgaggcctgttcatcc

SEQ ID NO: 76760 - DNA, 20 bp, Artificial Sequence
  MKO10076760_B_Cdc42ep4
  gRNA
ccgttccgatggggactctt

SEQ ID NO: 76761 - DNA, 20 bp, Artificial Sequence
  MKO10076761_B_Cdc42ep4
  gRNA
cgagatgatcagtgccccgc

SEQ ID NO: 76762 - DNA, 20 bp, Artificial Sequence
  MKO10076762_B_Cdc42ep5
  gRNA
gggcccctctatgctggacg

SEQ ID NO: 76763 - DNA, 20 bp, Artificial Sequence
  MKO10076763_B_Cdc42ep5
  gRNA
acctcattcctgagtcgcca

SEQ ID NO: 76764 - DNA, 20 bp, Artificial Sequence
  MKO10076764_B_Cdc42ep5
  gRNA
cgggaggcggaccgcccccg

SEQ ID NO: 76765 - DNA, 20 bp, Artificial Sequence
  MKO10076765_B_Cdc42se1
  gRNA
tctgtcacggtggtttccct

SEQ ID NO: 76766 - DNA, 20 bp, Artificial Sequence
  MKO10076766_B_Cdc42se1
  gRNA
ccccagagccgatgtgagtc

SEQ ID NO: 76767 - DNA, 20 bp, Artificial Sequence
  MKO10076767_B_Cdc42se1
  gRNA
cagggaacatgagcgagttt

SEQ ID NO: 76768 - DNA, 20 bp, Artificial Sequence
  MKO10076768_B_Cdc42se2
  gRNA
ctgagttcatcccactaaat

SEQ ID NO: 76769 - DNA, 20 bp, Artificial Sequence
  MKO10076769_B_Cdc42se2
  gRNA
ctgagagcatgagtgaattc

SEQ ID NO: 76770 - DNA, 20 bp, Artificial Sequence
  MKO10076770_B_Cdc42se2
  gRNA
tttgtgcacacagctcacgt

SEQ ID NO: 76771 - DNA, 20 bp, Artificial Sequence
  MKO10076771_B_Cdc42
  gRNA
actagaaaaacatctgtctg

SEQ ID NO: 76772 - DNA, 20 bp, Artificial Sequence
  MKO10076772_B_Cdc42
  gRNA
atttgaaaatgtgaaagaaa

SEQ ID NO: 76773 - DNA, 20 bp, Artificial Sequence
  MKO10076773_B_Cdc42
  gRNA
tatgcagtcacagttatgat

SEQ ID NO: 76774 - DNA, 20 bp, Artificial Sequence
  MKO10076774_B_Cdc45
  gRNA
aaccgtgtgcgcttctctga

SEQ ID NO: 76775 - DNA, 20 bp, Artificial Sequence
  MKO10076775_B_Cdc45
  gRNA
agccttcagagaagcgcaca

SEQ ID NO: 76776 - DNA, 20 bp, Artificial Sequence
  MKO10076776_B_Cdc45
  gRNA
ggacgtggtcacactgaaac

SEQ ID NO: 76777 - DNA, 20 bp, Artificial Sequence
  MKO10076777_B_Cdc5l
  gRNA
tcaccctcatccatgtctat

SEQ ID NO: 76778 - DNA, 20 bp, Artificial Sequence
  MKO10076778_B_Cdc5l
  gRNA
tgaacttgagatgctctccg

SEQ ID NO: 76779 - DNA, 20 bp, Artificial Sequence
  MKO10076779_B_Cdc5l
  gRNA
ggatgaaattctgaaagcag

SEQ ID NO: 76780 - DNA, 20 bp, Artificial Sequence
  MKO10076780_B_Cdc6
  gRNA
tcctgagcagaaatgtccgc

SEQ ID NO: 76781 - DNA, 20 bp, Artificial Sequence
  MKO10076781_B_Cdc6
  gRNA
gatccgggacagctgtattc

SEQ ID NO: 76782 - DNA, 20 bp, Artificial Sequence
  MKO10076782_B_Cdc6
  gRNA
ctcatcaagtccttcccagc

SEQ ID NO: 76783 - DNA, 20 bp, Artificial Sequence
  MKO10076783_B_Cdc73
  gRNA
gcgaaaggtgcacattatta

SEQ ID NO: 76784 - DNA, 20 bp, Artificial Sequence
  MKO10076784_B_Cdc73
  gRNA
ccgctgaagacctatttcca

SEQ ID NO: 76785 - DNA, 20 bp, Artificial Sequence
  MKO10076785_B_Cdc73
  gRNA
caacatcagcaagcatagac

SEQ ID NO: 76786 - DNA, 20 bp, Artificial Sequence
  MKO10076786_B_Cdc7
  gRNA
aaggactcatgttccagata

SEQ ID NO: 76787 - DNA, 20 bp, Artificial Sequence
  MKO10076787_B_Cdc7
  gRNA
caccttcagctctgtttatt

SEQ ID NO: 76788 - DNA, 20 bp, Artificial Sequence
  MKO10076788_B_Cdc7
  gRNA
ttgaacacattgactagttg

SEQ ID NO: 76789 - DNA, 20 bp, Artificial Sequence
  MKO10076789_B_Cdca2
  gRNA
aggaagcatacctcgaagtg

SEQ ID NO: 76790 - DNA, 20 bp, Artificial Sequence
  MKO10076790_B_Cdca2
  gRNA
ggccatcttagtttcctgta

SEQ ID NO: 76791 - DNA, 20 bp, Artificial Sequence
  MKO10076791_B_Cdca2
  gRNA
tgatacctttaagtcacctt

SEQ ID NO: 76792 - DNA, 20 bp, Artificial Sequence
  MKO10076792_B_Cdca3
  gRNA
agatcctcagttatcccctg

SEQ ID NO: 76793 - DNA, 20 bp, Artificial Sequence
  MKO10076793_B_Cdca3
  gRNA
gtccgtgcaatgccaagagt

SEQ ID NO: 76794 - DNA, 20 bp, Artificial Sequence
  MKO10076794_B_Cdca3
  gRNA
ctttacctgtcgtagtgtca

SEQ ID NO: 76795 - DNA, 20 bp, Artificial Sequence
  MKO10076795_B_Cdca4
  gRNA
agatcctgtgtcgtacagtg

SEQ ID NO: 76796 - DNA, 20 bp, Artificial Sequence
  MKO10076796_B_Cdca4
  gRNA
tcctcatcgccaacacagtc

SEQ ID NO: 76797 - DNA, 20 bp, Artificial Sequence
  MKO10076797_B_Cdca4
  gRNA
cccatcgttggctcagcacc

SEQ ID NO: 76798 - DNA, 20 bp, Artificial Sequence
  MKO10076798_B_Cdca5
  gRNA
accaagtccttcgtactatc

SEQ ID NO: 76799 - DNA, 20 bp, Artificial Sequence
  MKO10076799_B_Cdca5
  gRNA
gttccggctagaacgctccc

SEQ ID NO: 76800 - DNA, 20 bp, Artificial Sequence
  MKO10076800_B_Cdca5
  gRNA
agccttcgaagtcgtccaag

SEQ ID NO: 76801 - DNA, 20 bp, Artificial Sequence
  MKO10076801_B_Cdca7l
  gRNA
tcagttccccaccaaaaaat

SEQ ID NO: 76802 - DNA, 20 bp, Artificial Sequence
  MKO10076802_B_Cdca7l
  gRNA
gtttcacttacagaagccga

SEQ ID NO: 76803 - DNA, 20 bp, Artificial Sequence
  MKO10076803_B_Cdca7l
  gRNA
gtccgaacagggaagaaatc

SEQ ID NO: 76804 - DNA, 20 bp, Artificial Sequence
  MKO10076804_B_Cdca7
  gRNA
cacttacatctttggctctg

SEQ ID NO: 76805 - DNA, 20 bp, Artificial Sequence
  MKO10076805_B_Cdca7
  gRNA
tctcaaagtaaagaacttaa

SEQ ID NO: 76806 - DNA, 20 bp, Artificial Sequence
  MKO10076806_B_Cdca7
  gRNA
cggagtgccggcactgactt

SEQ ID NO: 76807 - DNA, 20 bp, Artificial Sequence
  MKO10076807_B_Cdca8
  gRNA
ttgcagatcgaagattctta

SEQ ID NO: 76808 - DNA, 20 bp, Artificial Sequence
  MKO10076808_B_Cdca8
  gRNA
agccctaggaggaaacaagc

SEQ ID NO: 76809 - DNA, 20 bp, Artificial Sequence
  MKO10076809_B_Cdca8
  gRNA
cgacagacagaccctcctca

SEQ ID NO: 76810 - DNA, 20 bp, Artificial Sequence
  MKO10076810_B_Cdcp1
  gRNA
gcttcgtgtgtctagagtct

SEQ ID NO: 76811 - DNA, 20 bp, Artificial Sequence
  MKO10076811_B_Cdcp1
  gRNA
catcatcgagtcagtatttg

SEQ ID NO: 76812 - DNA, 20 bp, Artificial Sequence
  MKO10076812_B_Cdcp1
  gRNA
cgcgttgaatactatatccc

SEQ ID NO: 76813 - DNA, 20 bp, Artificial Sequence
  MKO10076813_B_Cdcp2
  gRNA
ctgaggcgcggatcagccag

SEQ ID NO: 76814 - DNA, 20 bp, Artificial Sequence
  MKO10076814_B_Cdcp2
  gRNA
tactgttggactccgatcct

SEQ ID NO: 76815 - DNA, 20 bp, Artificial Sequence
  MKO10076815_B_Cdcp2
  gRNA
cactggctgatccgcgcctc

SEQ ID NO: 76816 - DNA, 20 bp, Artificial Sequence
  MKO10076816_B_Cdh10
  gRNA
ggccagatggggggtttgtc

SEQ ID NO: 76817 - DNA, 20 bp, Artificial Sequence
  MKO10076817_B_Cdh10
  gRNA
ttgtgcacgtagagtataaa

SEQ ID NO: 76818 - DNA, 20 bp, Artificial Sequence
  MKO10076818_B_Cdh10
  gRNA
ggatacttcaggtacttctg

SEQ ID NO: 76819 - DNA, 20 bp, Artificial Sequence
  MKO10076819_B_Cdh11
  gRNA
accttcagaattcattgtta

SEQ ID NO: 76820 - DNA, 20 bp, Artificial Sequence
  MKO10076820_B_Cdh11
  gRNA
acaaccctatttctcggtgg

SEQ ID NO: 76821 - DNA, 20 bp, Artificial Sequence
  MKO10076821_B_Cdh11
  gRNA
cagggacaccaacagaccac

SEQ ID NO: 76822 - DNA, 20 bp, Artificial Sequence
  MKO10076822_B_Cdh12
  gRNA
cctcattcaagcgaaagaca

SEQ ID NO: 76823 - DNA, 20 bp, Artificial Sequence
  MKO10076823_B_Cdh12
  gRNA
agagcagtagatcctgattt

SEQ ID NO: 76824 - DNA, 20 bp, Artificial Sequence
  MKO10076824_B_Cdh12
  gRNA
ggtaggatcgtctgcatctg

SEQ ID NO: 76825 - DNA, 20 bp, Artificial Sequence
  MKO10076825_B_Cdh13
  gRNA
tggtcctcgatgaattcggc

SEQ ID NO: 76826 - DNA, 20 bp, Artificial Sequence
  MKO10076826_B_Cdh13
  gRNA
cacttcaaggtgaacagcga

SEQ ID NO: 76827 - DNA, 20 bp, Artificial Sequence
  MKO10076827_B_Cdh13
  gRNA
gatcatctgcagacgtgacc

SEQ ID NO: 76828 - DNA, 20 bp, Artificial Sequence
  MKO10076828_B_Cdh15
  gRNA
gatccaccacaacgatctcc

SEQ ID NO: 76829 - DNA, 20 bp, Artificial Sequence
  MKO10076829_B_Cdh15
  gRNA
cacggacctggagatcgttg

SEQ ID NO: 76830 - DNA, 20 bp, Artificial Sequence
  MKO10076830_B_Cdh15
  gRNA
tcgtcgatgctgaagaactc

SEQ ID NO: 76831 - DNA, 20 bp, Artificial Sequence
  MKO10076831_B_Cdh16
  gRNA
tttaccagacatgttccagc

SEQ ID NO: 76832 - DNA, 20 bp, Artificial Sequence
  MKO10076832_B_Cdh16
  gRNA
cttaccttgagtatgtaaaa

SEQ ID NO: 76833 - DNA, 20 bp, Artificial Sequence
  MKO10076833_B_Cdh16
  gRNA
acttaccaggcctggtgccc

SEQ ID NO: 76834 - DNA, 20 bp, Artificial Sequence
  MKO10076834_B_Cdh17
  gRNA
aagagcggttcatcatctgc

SEQ ID NO: 76835 - DNA, 20 bp, Artificial Sequence
  MKO10076835_B_Cdh17
  gRNA
gtatgtcaatgctacagatc

SEQ ID NO: 76836 - DNA, 20 bp, Artificial Sequence
  MKO10076836_B_Cdh17
  gRNA
tattaacagacctgtggata

SEQ ID NO: 76837 - DNA, 20 bp, Artificial Sequence
  MKO10076837_B_Cdh18
  gRNA
tctgtcaagtacatcctgac

SEQ ID NO: 76838 - DNA, 20 bp, Artificial Sequence
  MKO10076838_B_Cdh18
  gRNA
aactcgagcactgttcccat

SEQ ID NO: 76839 - DNA, 20 bp, Artificial Sequence
  MKO10076839_B_Cdh18
  gRNA
gaaccaacttgagcagactc

SEQ ID NO: 76840 - DNA, 20 bp, Artificial Sequence
  MKO10076840_B_Cdh19
  gRNA
attcctagatgaaccatatg

SEQ ID NO: 76841 - DNA, 20 bp, Artificial Sequence
  MKO10076841_B_Cdh19
  gRNA
cagattcagatatagtgaag

SEQ ID NO: 76842 - DNA, 20 bp, Artificial Sequence
  MKO10076842_B_Cdh19
  gRNA
tttccctattgatgttccaa

SEQ ID NO: 76843 - DNA, 20 bp, Artificial Sequence
  MKO10076843_B_Cdh1
  gRNA
ttccgaggtctacaccttcc

SEQ ID NO: 76844 - DNA, 20 bp, Artificial Sequence
  MKO10076844_B_Cdh1
  gRNA
atgtttcccagcgtgtaccc

SEQ ID NO: 76845 - DNA, 20 bp, Artificial Sequence
  MKO10076845_B_Cdh1
  gRNA
caccgggaaggtgtagacct

SEQ ID NO: 76846 - DNA, 20 bp, Artificial Sequence
  MKO10076846_B_Cdh20
  gRNA
agagatgaagtataccattg

SEQ ID NO: 76847 - DNA, 20 bp, Artificial Sequence
  MKO10076847_B_Cdh20
  gRNA
ttctcggtcgagcctctgaa

SEQ ID NO: 76848 - DNA, 20 bp, Artificial Sequence
  MKO10076848_B_Cdh20
  gRNA
ggagaatgctgtacactacc

SEQ ID NO: 76849 - DNA, 20 bp, Artificial Sequence
  MKO10076849_B_Cdh22
  gRNA
taaccacctcgtagcgttcc

SEQ ID NO: 76850 - DNA, 20 bp, Artificial Sequence
  MKO10076850_B_Cdh22
  gRNA
cacctgtcaactcgtcaatc

SEQ ID NO: 76851 - DNA, 20 bp, Artificial Sequence
  MKO10076851_B_Cdh22
  gRNA
agcccccatcggtacggctg

SEQ ID NO: 76852 - DNA, 20 bp, Artificial Sequence
  MKO10076852_B_Cdh23
  gRNA
catcagtgaagacacgccag

SEQ ID NO: 76853 - DNA, 20 bp, Artificial Sequence
  MKO10076853_B_Cdh23
  gRNA
gcgtgtcttcactgatgagc

SEQ ID NO: 76854 - DNA, 20 bp, Artificial Sequence
  MKO10076854_B_Cdh23
  gRNA
ctacagcgtgcgcatccctg

SEQ ID NO: 76855 - DNA, 20 bp, Artificial Sequence
  MKO10076855_B_Cdh24
  gRNA
cgggctccttactgtccgca

SEQ ID NO: 76856 - DNA, 20 bp, Artificial Sequence
  MKO10076856_B_Cdh24
  gRNA
ggttgtcgttgacatcgctg

SEQ ID NO: 76857 - DNA, 20 bp, Artificial Sequence
  MKO10076857_B_Cdh24
  gRNA
tgcctgacagcccccccatg

SEQ ID NO: 76858 - DNA, 20 bp, Artificial Sequence
  MKO10076858_B_Cdh26
  gRNA
tttcggattgatctcatcag

SEQ ID NO: 76859 - DNA, 20 bp, Artificial Sequence
  MKO10076859_B_Cdh26
  gRNA
gtgaaagagagccaagccgc

SEQ ID NO: 76860 - DNA, 20 bp, Artificial Sequence
  MKO10076860_B_Cdh26
  gRNA
gtggacgaatttccagagat

SEQ ID NO: 76861 - DNA, 20 bp, Artificial Sequence
  MKO10076861_B_Cdh2
  gRNA
gctatcagctctcgatccag

SEQ ID NO: 76862 - DNA, 20 bp, Artificial Sequence
  MKO10076862_B_Cdh2
  gRNA
taaggtactaccattgagaa

SEQ ID NO: 76863 - DNA, 20 bp, Artificial Sequence
  MKO10076863_B_Cdh2
  gRNA
cagcgagccagcagatttca

SEQ ID NO: 76864 - DNA, 20 bp, Artificial Sequence
  MKO10076864_B_Cdh3
  gRNA
ggcgcagacagtccccccga

SEQ ID NO: 76865 - DNA, 20 bp, Artificial Sequence
  MKO10076865_B_Cdh3
  gRNA
ccaatattcgtccccgagaa

SEQ ID NO: 76866 - DNA, 20 bp, Artificial Sequence
  MKO10076866_B_Cdh3
  gRNA
agacatcattatgctgacta

SEQ ID NO: 76867 - DNA, 20 bp, Artificial Sequence
  MKO10076867_B_Cdh4
  gRNA
ttcccgcgcagtgacggtaa

SEQ ID NO: 76868 - DNA, 20 bp, Artificial Sequence
  MKO10076868_B_Cdh4
  gRNA
gggcgccgaccagcccccca

SEQ ID NO: 76869 - DNA, 20 bp, Artificial Sequence
  MKO10076869_B_Cdh4
  gRNA
tgggccgagtgacatacatc

SEQ ID NO: 76870 - DNA, 20 bp, Artificial Sequence
  MKO10076870_B_Cdh5
  gRNA
acaggctgaatacaagatcg

SEQ ID NO: 76871 - DNA, 20 bp, Artificial Sequence
  MKO10076871_B_Cdh5
  gRNA
agtggcgtggccggccacag

SEQ ID NO: 76872 - DNA, 20 bp, Artificial Sequence
  MKO10076872_B_Cdh5
  gRNA
aatacctggtgcgaaaacac

SEQ ID NO: 76873 - DNA, 20 bp, Artificial Sequence
  MKO10076873_B_Cdh6
  gRNA
tgtggctgtgtaaacgtcct

SEQ ID NO: 76874 - DNA, 20 bp, Artificial Sequence
  MKO10076874_B_Cdh6
  gRNA
tgttgacagcttgagctcga

SEQ ID NO: 76875 - DNA, 20 bp, Artificial Sequence
  MKO10076875_B_Cdh6
  gRNA
tccccgacagtcctcccatc

SEQ ID NO: 76876 - DNA, 20 bp, Artificial Sequence
  MKO10076876_B_Cdh7
  gRNA
aaggatatggttggtcaaaa

SEQ ID NO: 76877 - DNA, 20 bp, Artificial Sequence
  MKO10076877_B_Cdh7
  gRNA
ttacctacaggagacatctc

SEQ ID NO: 76878 - DNA, 20 bp, Artificial Sequence
  MKO10076878_B_Cdh7
  gRNA
atgtcacctagggacttcag

SEQ ID NO: 76879 - DNA, 20 bp, Artificial Sequence
  MKO10076879_B_Cdh8
  gRNA
gatgctgacgacccagttta

SEQ ID NO: 76880 - DNA, 20 bp, Artificial Sequence
  MKO10076880_B_Cdh8
  gRNA
tacgaccaggtattcctcct

SEQ ID NO: 76881 - DNA, 20 bp, Artificial Sequence
  MKO10076881_B_Cdh8
  gRNA
aaaggctgaatatacgttaa

SEQ ID NO: 76882 - DNA, 20 bp, Artificial Sequence
  MKO10076882_B_Cdh9
  gRNA
tccgggtccactgaaaagta

SEQ ID NO: 76883 - DNA, 20 bp, Artificial Sequence
  MKO10076883_B_Cdh9
  gRNA
gcagtaccaagttgttattc

SEQ ID NO: 76884 - DNA, 20 bp, Artificial Sequence
  MKO10076884_B_Cdh9
  gRNA
atgtcaacaacaaccctcct

SEQ ID NO: 76885 - DNA, 20 bp, Artificial Sequence
  MKO10076885_B_Cdhr1
  gRNA
gggcagcaccaacgggaaca

SEQ ID NO: 76886 - DNA, 20 bp, Artificial Sequence
  MKO10076886_B_Cdhr1
  gRNA
gccatcatcagcatttccga

SEQ ID NO: 76887 - DNA, 20 bp, Artificial Sequence
  MKO10076887_B_Cdhr1
  gRNA
actcaccaggttcaggccat

SEQ ID NO: 76888 - DNA, 20 bp, Artificial Sequence
  MKO10076888_B_Cdhr2
  gRNA
gccaactcgccaccatcatt

SEQ ID NO: 76889 - DNA, 20 bp, Artificial Sequence
  MKO10076889_B_Cdhr2
  gRNA
gatgttgagaccatcacttg

SEQ ID NO: 76890 - DNA, 20 bp, Artificial Sequence
  MKO10076890_B_Cdhr2
  gRNA
ttccacaatcacttgcatct

SEQ ID NO: 76891 - DNA, 20 bp, Artificial Sequence
  MKO10076891_B_Cdhr3
  gRNA
atctgcaaatcgaatgcttt

SEQ ID NO: 76892 - DNA, 20 bp, Artificial Sequence
  MKO10076892_B_Cdhr3
  gRNA
cctgcctgccactagcaacg

SEQ ID NO: 76893 - DNA, 20 bp, Artificial Sequence
  MKO10076893_B_Cdhr3
  gRNA
ctgggtcaaatgcctccacc

SEQ ID NO: 76894 - DNA, 20 bp, Artificial Sequence
  MKO10076894_B_Cdhr5
  gRNA
agctgccgccatgggggctc

SEQ ID NO: 76895 - DNA, 20 bp, Artificial Sequence
  MKO10076895_B_Cdhr5
  gRNA
agtgctgtttggccaacctc

SEQ ID NO: 76896 - DNA, 20 bp, Artificial Sequence
  MKO10076896_B_Cdhr5
  gRNA
tcttacactccacatctgcc

SEQ ID NO: 76897 - DNA, 20 bp, Artificial Sequence
  MKO10076897_B_Cdip1
  gRNA
acatccttacctggggtaag

SEQ ID NO: 76898 - DNA, 20 bp, Artificial Sequence
  MKO10076898_B_Cdip1
  gRNA
cccccccatatgaatgcaga

SEQ ID NO: 76899 - DNA, 20 bp, Artificial Sequence
  MKO10076899_B_Cdip1
  gRNA
gctgtgatgcagcctccacc

SEQ ID NO: 76900 - DNA, 20 bp, Artificial Sequence
  MKO10076900_B_Cdipt
  gRNA
gtccgtcagcatgtcgagca

SEQ ID NO: 76901 - DNA, 20 bp, Artificial Sequence
  MKO10076901_B_Cdipt
  gRNA
ggccatgctcgacatgctga

SEQ ID NO: 76902 - DNA, 20 bp, Artificial Sequence
  MKO10076902_B_Cdipt
  gRNA
tccgctgagtagatagaagg

SEQ ID NO: 76903 - DNA, 20 bp, Artificial Sequence
  MKO10076903_B_Cdk10
  gRNA
aaatatgccaacacccttct

SEQ ID NO: 76904 - DNA, 20 bp, Artificial Sequence
  MKO10076904_B_Cdk10
  gRNA
tctcaaactccttaacgctt

SEQ ID NO: 76905 - DNA, 20 bp, Artificial Sequence
  MKO10076905_B_Cdk10
  gRNA
tgaaattgtcgccctgaaga

SEQ ID NO: 76906 - DNA, 20 bp, Artificial Sequence
  MKO10076906_B_Cdk11b
  gRNA
tacgcgcttctctctctttg

SEQ ID NO: 76907 - DNA, 20 bp, Artificial Sequence
  MKO10076907_B_Cdk11b
  gRNA
aaccaccccagcaaatgtct

SEQ ID NO: 76908 - DNA, 20 bp, Artificial Sequence
  MKO10076908_B_Cdk11b
  gRNA
accgcctggagcagttagaa

SEQ ID NO: 76909 - DNA, 20 bp, Artificial Sequence
  MKO10076909_B_Cdk12
  gRNA
catagtaaaaagaagcgatc

SEQ ID NO: 76910 - DNA, 20 bp, Artificial Sequence
  MKO10076910_B_Cdk12
  gRNA
agaatttgttgtccacgtta

SEQ ID NO: 76911 - DNA, 20 bp, Artificial Sequence
  MKO10076911_B_Cdk12
  gRNA
tgaggtggtgtaattgcctt

SEQ ID NO: 76912 - DNA, 20 bp, Artificial Sequence
  MKO10076912_B_Cdk13
  gRNA
gccaccgcttcaagtaacaa

SEQ ID NO: 76913 - DNA, 20 bp, Artificial Sequence
  MKO10076913_B_Cdk13
  gRNA
cacagttacatagcaaacga

SEQ ID NO: 76914 - DNA, 20 bp, Artificial Sequence
  MKO10076914_B_Cdk13
  gRNA
gagtaaacctgctgctacaa

SEQ ID NO: 76915 - DNA, 20 bp, Artificial Sequence
  MKO10076915_B_Cdk14
  gRNA
agctgactcatacgaaaaac

SEQ ID NO: 76916 - DNA, 20 bp, Artificial Sequence
  MKO10076916_B_Cdk14
  gRNA
tagccaacgagtcccaaatt

SEQ ID NO: 76917 - DNA, 20 bp, Artificial Sequence
  MKO10076917_B_Cdk14
  gRNA
ttagcctacctcatcaaagg

SEQ ID NO: 76918 - DNA, 20 bp, Artificial Sequence
  MKO10076918_B_Cdk15
  gRNA
gagtccctttcacagccatc

SEQ ID NO: 76919 - DNA, 20 bp, Artificial Sequence
  MKO10076919_B_Cdk15
  gRNA
tggcatgcttcaagcccttc

SEQ ID NO: 76920 - DNA, 20 bp, Artificial Sequence
  MKO10076920_B_Cdk15
  gRNA
ttcatttcaccccaggggac

SEQ ID NO: 76921 - DNA, 20 bp, Artificial Sequence
  MKO10076921_B_Cdk16
  gRNA
ggcaccctgtactgctatcc

SEQ ID NO: 76922 - DNA, 20 bp, Artificial Sequence
  MKO10076922_B_Cdk16
  gRNA
acctcagtggagatcttgcg

SEQ ID NO: 76923 - DNA, 20 bp, Artificial Sequence
  MKO10076923_B_Cdk16
  gRNA
tgtcactaccagctgacata

SEQ ID NO: 76924 - DNA, 20 bp, Artificial Sequence
  MKO10076924_B_Cdk17
  gRNA
gtctatgtatacgatttctg

SEQ ID NO: 76925 - DNA, 20 bp, Artificial Sequence
  MKO10076925_B_Cdk17
  gRNA
ttgaccagcccatgagccgc

SEQ ID NO: 76926 - DNA, 20 bp, Artificial Sequence
  MKO10076926_B_Cdk17
  gRNA
gatgaagtccagtcacctac

SEQ ID NO: 76927 - DNA, 20 bp, Artificial Sequence
  MKO10076927_B_Cdk18
  gRNA
accctctcgaatagcagtgc

SEQ ID NO: 76928 - DNA, 20 bp, Artificial Sequence
  MKO10076928_B_Cdk18
  gRNA
cgttgttgatactgcatgcc

SEQ ID NO: 76929 - DNA, 20 bp, Artificial Sequence
  MKO10076929_B_Cdk18
  gRNA
catggacatccgcctacccc

SEQ ID NO: 76930 - DNA, 20 bp, Artificial Sequence
  MKO10076930_B_Cdk19
  gRNA
cgccttgtagacatgcccgt

SEQ ID NO: 76931 - DNA, 20 bp, Artificial Sequence
  MKO10076931_B_Cdk19
  gRNA
tatgcacttaagcaaatcga

SEQ ID NO: 76932 - DNA, 20 bp, Artificial Sequence
  MKO10076932_B_Cdk19
  gRNA
ttctgcaatgcgatcacatt

SEQ ID NO: 76933 - DNA, 20 bp, Artificial Sequence
  MKO10076933_B_Cdk1
  gRNA
tctgagtcgccgtggaaaag

SEQ ID NO: 76934 - DNA, 20 bp, Artificial Sequence
  MKO10076934_B_Cdk1
  gRNA
agtctctgtgaagaactcgc

SEQ ID NO: 76935 - DNA, 20 bp, Artificial Sequence
  MKO10076935_B_Cdk1
  gRNA
ctcggctcgttactccactc

SEQ ID NO: 76936 - DNA, 20 bp, Artificial Sequence
  MKO10076936_B_Cdk20
  gRNA
aacccgatgcacaatgttgt

SEQ ID NO: 76937 - DNA, 20 bp, Artificial Sequence
  MKO10076937_B_Cdk20
  gRNA
ctcaccataggtcaacgccc

SEQ ID NO: 76938 - DNA, 20 bp, Artificial Sequence
  MKO10076938_B_Cdk20
  gRNA
tggtcgcctctacacacatc

SEQ ID NO: 76939 - DNA, 20 bp, Artificial Sequence
  MKO10076939_B_Cdk2ap1
  gRNA
atagggaactggaaatagcc

SEQ ID NO: 76940 - DNA, 20 bp, Artificial Sequence
  MKO10076940_B_Cdk2ap1
  gRNA
cccgccgccgccctcaacgc

SEQ ID NO: 76941 - DNA, 20 bp, Artificial Sequence
  MKO10076941_B_Cdk2ap1
  gRNA
ccactcaccctctactagca

SEQ ID NO: 76942 - DNA, 20 bp, Artificial Sequence
  MKO10076942_B_Cdk2ap2
  gRNA
ctctgactagtgcccgagcg

SEQ ID NO: 76943 - DNA, 20 bp, Artificial Sequence
  MKO10076943_B_Cdk2ap2
  gRNA
acctctcttcaggcgctcca

SEQ ID NO: 76944 - DNA, 20 bp, Artificial Sequence
  MKO10076944_B_Cdk2ap2
  gRNA
ggagcctcacctgtagggac

SEQ ID NO: 76945 - DNA, 20 bp, Artificial Sequence
  MKO10076945_B_Cdk2
  gRNA
acccctctgcattgataagc

SEQ ID NO: 76946 - DNA, 20 bp, Artificial Sequence
  MKO10076946_B_Cdk2
  gRNA
ttgtggcgcttaagaagatc

SEQ ID NO: 76947 - DNA, 20 bp, Artificial Sequence
  MKO10076947_B_Cdk2
  gRNA
ccgagagatctctctcctta

SEQ ID NO: 76948 - DNA, 20 bp, Artificial Sequence
  MKO10076948_B_Cdk4
  gRNA
ccggtggaggtgctttgtcc

SEQ ID NO: 76949 - DNA, 20 bp, Artificial Sequence
  MKO10076949_B_Cdk4
  gRNA
ctaatgcgtcagtttctaag

SEQ ID NO: 76950 - DNA, 20 bp, Artificial Sequence
  MKO10076950_B_Cdk4
  gRNA
aaactctgaagccgaccagt

SEQ ID NO: 76951 - DNA, 20 bp, Artificial Sequence
  MKO10076951_B_Cdk5r1
  gRNA
gcagctcactagtggacgcc

SEQ ID NO: 76952 - DNA, 20 bp, Artificial Sequence
  MKO10076952_B_Cdk5r1
  gRNA
cgtgctctggctgcgcagcg

SEQ ID NO: 76953 - DNA, 20 bp, Artificial Sequence
  MKO10076953_B_Cdk5r1
  gRNA
tgagatgcgcgatgttgctc

SEQ ID NO: 76954 - DNA, 20 bp, Artificial Sequence
  MKO10076954_B_Cdk5r2
  gRNA
cgtcgcggcccttgcggaga

SEQ ID NO: 76955 - DNA, 20 bp, Artificial Sequence
  MKO10076955_B_Cdk5r2
  gRNA
cgcgacggccccgacggtgg

SEQ ID NO: 76956 - DNA, 20 bp, Artificial Sequence
  MKO10076956_B_Cdk5r2
  gRNA
cttggctgttccgccaccgt

SEQ ID NO: 76957 - DNA, 20 bp, Artificial Sequence
  MKO10076957_B_Cdk5rap1
  gRNA
gcagtctacctcgagaccta

SEQ ID NO: 76958 - DNA, 20 bp, Artificial Sequence
  MKO10076958_B_Cdk5rap1
  gRNA
ggaaggtctcggtaggcgtc

SEQ ID NO: 76959 - DNA, 20 bp, Artificial Sequence
  MKO10076959_B_Cdk5rap1
  gRNA
ttcttgtcacgtgttctatc

SEQ ID NO: 76960 - DNA, 20 bp, Artificial Sequence
  MKO10076960_B_Cdk5rap2
  gRNA
caccgagcacatctacaaga

SEQ ID NO: 76961 - DNA, 20 bp, Artificial Sequence
  MKO10076961_B_Cdk5rap2
  gRNA
catcagtgacacttctggct

SEQ ID NO: 76962 - DNA, 20 bp, Artificial Sequence
  MKO10076962_B_Cdk5rap2
  gRNA
caccagagcccggaacatga

SEQ ID NO: 76963 - DNA, 20 bp, Artificial Sequence
  MKO10076963_B_Cdk5rap3
  gRNA
tcatccgttgtgaagagtac

SEQ ID NO: 76964 - DNA, 20 bp, Artificial Sequence
  MKO10076964_B_Cdk5rap3
  gRNA
ttctcgtgcagactggctgg

SEQ ID NO: 76965 - DNA, 20 bp, Artificial Sequence
  MKO10076965_B_Cdk5rap3
  gRNA
taagaaggtccactattctt

SEQ ID NO: 76966 - DNA, 20 bp, Artificial Sequence
  MKO10076966_B_Cdk5
  gRNA
aaatatttcgacagctgcaa

SEQ ID NO: 76967 - DNA, 20 bp, Artificial Sequence
  MKO10076967_B_Cdk5
  gRNA
ccgggaaactcatgagattg

SEQ ID NO: 76968 - DNA, 20 bp, Artificial Sequence
  MKO10076968_B_Cdk5
  gRNA
cctggaccctgagattgtga

SEQ ID NO: 76969 - DNA, 20 bp, Artificial Sequence
  MKO10076969_B_Cdk6
  gRNA
agttcagacgtggatcaact

SEQ ID NO: 76970 - DNA, 20 bp, Artificial Sequence
  MKO10076970_B_Cdk6
  gRNA
tggaactttatccaagtaag

SEQ ID NO: 76971 - DNA, 20 bp, Artificial Sequence
  MKO10076971_B_Cdk6
  gRNA
agatgcaaccgacactccag

SEQ ID NO: 76972 - DNA, 20 bp, Artificial Sequence
  MKO10076972_B_Cdk7
  gRNA
atactcacaccaattatatt

SEQ ID NO: 76973 - DNA, 20 bp, Artificial Sequence
  MKO10076973_B_Cdk7
  gRNA
ctaagtcatccaaatataat

SEQ ID NO: 76974 - DNA, 20 bp, Artificial Sequence
  MKO10076974_B_Cdk7
  gRNA
ttgcagctccttgatgcatt

SEQ ID NO: 76975 - DNA, 20 bp, Artificial Sequence
  MKO10076975_B_Cdk8
  gRNA
tacgctttaaaacaaataga

SEQ ID NO: 76976 - DNA, 20 bp, Artificial Sequence
  MKO10076976_B_Cdk8
  gRNA
gagacagaaacaccttcaga

SEQ ID NO: 76977 - DNA, 20 bp, Artificial Sequence
  MKO10076977_B_Cdk8
  gRNA
aaacgtcatctcccttctga

SEQ ID NO: 76978 - DNA, 20 bp, Artificial Sequence
  MKO10076978_B_Cdk9
  gRNA
ctttcttcagagccaccttc

SEQ ID NO: 76979 - DNA, 20 bp, Artificial Sequence
  MKO10076979_B_Cdk9
  gRNA
tggtccgacaaatctcaatt

SEQ ID NO: 76980 - DNA, 20 bp, Artificial Sequence
  MKO10076980_B_Cdk9
  gRNA
agttccccatcacagccttg

SEQ ID NO: 76981 - DNA, 20 bp, Artificial Sequence
  MKO10076981_B_Cdkal1
  gRNA
ggttcagcagatagatcgtg

SEQ ID NO: 76982 - DNA, 20 bp, Artificial Sequence
  MKO10076982_B_Cdkal1
  gRNA
acttgattgagtttctaaag

SEQ ID NO: 76983 - DNA, 20 bp, Artificial Sequence
  MKO10076983_B_Cdkal1
  gRNA
atgcatcagatgcagatctg

SEQ ID NO: 76984 - DNA, 20 bp, Artificial Sequence
  MKO10076984_B_Cdkl1
  gRNA
ggacacttacgttatgttta

SEQ ID NO: 76985 - DNA, 20 bp, Artificial Sequence
  MKO10076985_B_Cdkl1
  gRNA
caagttatgttcttcacgag

SEQ ID NO: 76986 - DNA, 20 bp, Artificial Sequence
  MKO10076986_B_Cdkl1
  gRNA
ccaattgcccagacatctac

SEQ ID NO: 76987 - DNA, 20 bp, Artificial Sequence
  MKO10076987_B_Cdkl2
  gRNA
acttgatagtctagtccatt

SEQ ID NO: 76988 - DNA, 20 bp, Artificial Sequence
  MKO10076988_B_Cdkl2
  gRNA
tcccctctccaaccaatcct

SEQ ID NO: 76989 - DNA, 20 bp, Artificial Sequence
  MKO10076989_B_Cdkl2
  gRNA
ttcaatgaccagacaaccaa

SEQ ID NO: 76990 - DNA, 20 bp, Artificial Sequence
  MKO10076990_B_Cdkl3
  gRNA
ccttcctagcagttccgatt

SEQ ID NO: 76991 - DNA, 20 bp, Artificial Sequence
  MKO10076991_B_Cdkl3
  gRNA
gcagctcatctaagaccgtg

SEQ ID NO: 76992 - DNA, 20 bp, Artificial Sequence
  MKO10076992_B_Cdkl3
  gRNA
gggctgtatgatcattgaaa

SEQ ID NO: 76993 - DNA, 20 bp, Artificial Sequence
  MKO10076993_B_Cdkl4
  gRNA
aaacctcgtgaacctcatcg

SEQ ID NO: 76994 - DNA, 20 bp, Artificial Sequence
  MKO10076994_B_Cdkl4
  gRNA
aatctttatcatcccttgct

SEQ ID NO: 76995 - DNA, 20 bp, Artificial Sequence
  MKO10076995_B_Cdkl4
  gRNA
atatcttacagtgtattcat

SEQ ID NO: 76996 - DNA, 20 bp, Artificial Sequence
  MKO10076996_B_Cdkl5
  gRNA
tctcaacatattcaaacacc

SEQ ID NO: 76997 - DNA, 20 bp, Artificial Sequence
  MKO10076997_B_Cdkl5
  gRNA
gcatttaagtacaactccat

SEQ ID NO: 76998 - DNA, 20 bp, Artificial Sequence
  MKO10076998_B_Cdkl5
  gRNA
tcaggaaacacatgaaattg

SEQ ID NO: 76999 - DNA, 20 bp, Artificial Sequence
  MKO10076999_B_Cdkn1a
  gRNA
gcagaagaccaatctgcgct

SEQ ID NO: 77000 - DNA, 20 bp, Artificial Sequence
  MKO10077000_B_Cdkn1a
  gRNA
gtcccgcagccgtgacgacc

SEQ ID NO: 77001 - DNA, 20 bp, Artificial Sequence
  MKO10077001_B_Cdkn1a
  gRNA
agtcaaagttccaccgttct

SEQ ID NO: 77002 - DNA, 20 bp, Artificial Sequence
  MKO10077002_B_Cdkn1b
  gRNA
tgctccacagtgccagcgtt

SEQ ID NO: 77003 - DNA, 20 bp, Artificial Sequence
  MKO10077003_B_Cdkn1b
  gRNA
tcaaacgtgagagtgtctaa

SEQ ID NO: 77004 - DNA, 20 bp, Artificial Sequence
  MKO10077004_B_Cdkn1b
  gRNA
gcctgactcgtcagacaatc

SEQ ID NO: 77005 - DNA, 20 bp, Artificial Sequence
  MKO10077005_B_Cdkn1c
  gRNA
actcatctcagacgtttgcg

SEQ ID NO: 77006 - DNA, 20 bp, Artificial Sequence
  MKO10077006_B_Cdkn1c
  gRNA
cgtggcgactcgggacggcg

SEQ ID NO: 77007 - DNA, 20 bp, Artificial Sequence
  MKO10077007_B_Cdkn1c
  gRNA
ccgtcccgagtcgccacgtc

SEQ ID NO: 77008 - DNA, 20 bp, Artificial Sequence
  MKO10077008_B_Cdkn2aipnl
  gRNA
cagaagcgaactaatgagaa

SEQ ID NO: 77009 - DNA, 20 bp, Artificial Sequence
  MKO10077009_B_Cdkn2aipnl
  gRNA
tttcttcagcatcaaagcta

SEQ ID NO: 77010 - DNA, 20 bp, Artificial Sequence
  MKO10077010_B_Cdkn2aipnl
  gRNA
cgagcagtttcgttcctact

SEQ ID NO: 77011 - DNA, 20 bp, Artificial Sequence
  MKO10077011_B_Cdkn2aip
  gRNA
ctccgcgtccgcagtctcgt

SEQ ID NO: 77012 - DNA, 20 bp, Artificial Sequence
  MKO10077012_B_Cdkn2aip
  gRNA
ccagttcgtctcgtgtggta

SEQ ID NO: 77013 - DNA, 20 bp, Artificial Sequence
  MKO10077013_B_Cdkn2aip
  gRNA
acaaacactggcgccaccgc

SEQ ID NO: 77014 - DNA, 20 bp, Artificial Sequence
  MKO10077014_B_Cdkn2a
  gRNA
ggctggatgtgcgcgatgcc

SEQ ID NO: 77015 - DNA, 20 bp, Artificial Sequence
  MKO10077015_B_Cdkn2a
  gRNA
tcgtgcgatcccggagaccc

SEQ ID NO: 77016 - DNA, 20 bp, Artificial Sequence
  MKO10077016_B_Cdkn2a
  gRNA
ccgcaccggaatcctggacc

SEQ ID NO: 77017 - DNA, 20 bp, Artificial Sequence
  MKO10077017_B_Cdkn2b
  gRNA
aacccgcagtcaatctccag

SEQ ID NO: 77018 - DNA, 20 bp, Artificial Sequence
  MKO10077018_B_Cdkn2b
  gRNA
ggctggatgtgtgtgacgcc

SEQ ID NO: 77019 - DNA, 20 bp, Artificial Sequence
  MKO10077019_B_Cdkn2b
  gRNA
gcagcacgacaagcgtgtcc

SEQ ID NO: 77020 - DNA, 20 bp, Artificial Sequence
  MKO10077020_B_Cdkn2c
  gRNA
cgaaggcggtgtccccctta

SEQ ID NO: 77021 - DNA, 20 bp, Artificial Sequence
  MKO10077021_B_Cdkn2c
  gRNA
atttgggagaactgcgctgc

SEQ ID NO: 77022 - DNA, 20 bp, Artificial Sequence
  MKO10077022_B_Cdkn2c
  gRNA
agttggcgtccgcagctgcc

SEQ ID NO: 77023 - DNA, 20 bp, Artificial Sequence
  MKO10077023_B_Cdkn2d
  gRNA
aggtccgccgccttcttcac

SEQ ID NO: 77024 - DNA, 20 bp, Artificial Sequence
  MKO10077024_B_Cdkn2d
  gRNA
cgaccggttgagtggcgcag

SEQ ID NO: 77025 - DNA, 20 bp, Artificial Sequence
  MKO10077025_B_Cdkn2d
  gRNA
ggccctctcttatcgccaga

SEQ ID NO: 77026 - DNA, 20 bp, Artificial Sequence
  MKO10077026_B_Cdkn3
  gRNA
ctcccgacattggcagctgc

SEQ ID NO: 77027 - DNA, 20 bp, Artificial Sequence
  MKO10077027_B_Cdkn3
  gRNA
ctcacttgcttgtattgaaa

SEQ ID NO: 77028 - DNA, 20 bp, Artificial Sequence
  MKO10077028_B_Cdkn3
  gRNA
acataccatgaaatttgaat

SEQ ID NO: 77029 - DNA, 20 bp, Artificial Sequence
  MKO10077029_B_Cdnf
  gRNA
cgtgaacctcattagagagc

SEQ ID NO: 77030 - DNA, 20 bp, Artificial Sequence
  MKO10077030_B_Cdnf
  gRNA
tgggacgagtgacttctcct

SEQ ID NO: 77031 - DNA, 20 bp, Artificial Sequence
  MKO10077031_B_Cdnf
  gRNA
agtctatgcctctgcttagc

SEQ ID NO: 77032 - DNA, 20 bp, Artificial Sequence
  MKO10077032_B_Cdo1
  gRNA
tagaatgttaccattaatgt

SEQ ID NO: 77033 - DNA, 20 bp, Artificial Sequence
  MKO10077033_B_Cdo1
  gRNA
aaccagtgtgcctacattaa

SEQ ID NO: 77034 - DNA, 20 bp, Artificial Sequence
  MKO10077034_B_Cdo1
  gRNA
ttaatctgatgattctgtgc

SEQ ID NO: 77035 - DNA, 20 bp, Artificial Sequence
  MKO10077035_B_Cdon
  gRNA
ttgatgaatcgaaatcaccc

SEQ ID NO: 77036 - DNA, 20 bp, Artificial Sequence
  MKO10077036_B_Cdon
  gRNA
acctgcagcggacactgttg

SEQ ID NO: 77037 - DNA, 20 bp, Artificial Sequence
  MKO10077037_B_Cdon
  gRNA
cttatagcgcacctcagctt

SEQ ID NO: 77038 - DNA, 20 bp, Artificial Sequence
  MKO10077038_B_Cdpf1
  gRNA
cgaatactcacacaacagcc

SEQ ID NO: 77039 - DNA, 20 bp, Artificial Sequence
  MKO10077039_B_Cdpf1
  gRNA
tcatgatgtagctctcctcc

SEQ ID NO: 77040 - DNA, 20 bp, Artificial Sequence
  MKO10077040_B_Cdpf1
  gRNA
gaacatgagtgctttccctc

SEQ ID NO: 77041 - DNA, 20 bp, Artificial Sequence
  MKO10077041_B_Cdr1
  gRNA
agtggatctttgggaagact

SEQ ID NO: 77042 - DNA, 20 bp, Artificial Sequence
  MKO10077042_B_Cdr1
  gRNA
tctggaaagacacagattac

SEQ ID NO: 77043 - DNA, 20 bp, Artificial Sequence
  MKO10077043_B_Cdr1
  gRNA
ttcgggaagacatggatctt

SEQ ID NO: 77044 - DNA, 20 bp, Artificial Sequence
  MKO10077044_B_Cdr2l
  gRNA
gccgggaaaaacgggaacgc

SEQ ID NO: 77045 - DNA, 20 bp, Artificial Sequence
  MKO10077045_B_Cdr2l
  gRNA
tgctaaagtgtacgagcagc

SEQ ID NO: 77046 - DNA, 20 bp, Artificial Sequence
  MKO10077046_B_Cdr2l
  gRNA
ggcctcgaagttgctccacc

SEQ ID NO: 77047 - DNA, 20 bp, Artificial Sequence
  MKO10077047_B_Cdr2
  gRNA
ccgtagaagctccacctgct

SEQ ID NO: 77048 - DNA, 20 bp, Artificial Sequence
  MKO10077048_B_Cdr2
  gRNA
tttacagtacctgaccaagc

SEQ ID NO: 77049 - DNA, 20 bp, Artificial Sequence
  MKO10077049_B_Cdr2
  gRNA
gagctgaagtcttccagcca

SEQ ID NO: 77050 - DNA, 20 bp, Artificial Sequence
  MKO10077050_B_Cdrt4
  gRNA
agaaaaagacgtggaacccc

SEQ ID NO: 77051 - DNA, 20 bp, Artificial Sequence
  MKO10077051_B_Cdrt4
  gRNA
tatggtggagcattcccacg

SEQ ID NO: 77052 - DNA, 20 bp, Artificial Sequence
  MKO10077052_B_Cdrt4
  gRNA
ctatgtttgctgcgctttac

SEQ ID NO: 77053 - DNA, 20 bp, Artificial Sequence
  MKO10077053_B_Cds1
  gRNA
tatggagatctcgatgccag

SEQ ID NO: 77054 - DNA, 20 bp, Artificial Sequence
  MKO10077054_B_Cds1
  gRNA
acccgatggtgatgatctca

SEQ ID NO: 77055 - DNA, 20 bp, Artificial Sequence
  MKO10077055_B_Cds1
  gRNA
ggtcgtaggagtggtagacc

SEQ ID NO: 77056 - DNA, 20 bp, Artificial Sequence
  MKO10077056_B_Cds2
  gRNA
ctccgtagatgacaccccag

SEQ ID NO: 77057 - DNA, 20 bp, Artificial Sequence
  MKO10077057_B_Cds2
  gRNA
tgaaccggtggtatttactg

SEQ ID NO: 77058 - DNA, 20 bp, Artificial Sequence
  MKO10077058_B_Cds2
  gRNA
ctctacgtaggtggaagaac

SEQ ID NO: 77059 - DNA, 20 bp, Artificial Sequence
  MKO10077059_B_Cdsn
  gRNA
tgtgcacaatgggttcctct

SEQ ID NO: 77060 - DNA, 20 bp, Artificial Sequence
  MKO10077060_B_Cdsn
  gRNA
aaccctatcaggggctcgcc

SEQ ID NO: 77061 - DNA, 20 bp, Artificial Sequence
  MKO10077061_B_Cdsn
  gRNA
cccctggcgagcccctgata

SEQ ID NO: 77062 - DNA, 20 bp, Artificial Sequence
  MKO10077062_B_Cdt1
  gRNA
tgtcctaccctacaagtatc

SEQ ID NO: 77063 - DNA, 20 bp, Artificial Sequence
  MKO10077063_B_Cdt1
  gRNA
ccaacttccgtgcccgcctc

SEQ ID NO: 77064 - DNA, 20 bp, Artificial Sequence
  MKO10077064_B_Cdt1
  gRNA
gatgggcaaacgggggagcc

SEQ ID NO: 77065 - DNA, 20 bp, Artificial Sequence
  MKO10077065_B_Cdv3
  gRNA
agatcacctgttactggagc

SEQ ID NO: 77066 - DNA, 20 bp, Artificial Sequence
  MKO10077066_B_Cdv3
  gRNA
cttccggctctctacatgct

SEQ ID NO: 77067 - DNA, 20 bp, Artificial Sequence
  MKO10077067_B_Cdv3
  gRNA
aatgagaagagagaagatcc

SEQ ID NO: 77068 - DNA, 20 bp, Artificial Sequence
  MKO10077068_B_Cdx1
  gRNA
gcgggcaccgggctaaagtc

SEQ ID NO: 77069 - DNA, 20 bp, Artificial Sequence
  MKO10077069_B_Cdx1
  gRNA
agtctatgccctactaatgc

SEQ ID NO: 77070 - DNA, 20 bp, Artificial Sequence
  MKO10077070_B_Cdx1
  gRNA
tagtagggcatagacttcct

SEQ ID NO: 77071 - DNA, 20 bp, Artificial Sequence
  MKO10077071_B_Cdx2
  gRNA
cctctcggagagcccaagtg

SEQ ID NO: 77072 - DNA, 20 bp, Artificial Sequence
  MKO10077072_B_Cdx2
  gRNA
ctccgcagggcacccggctg

SEQ ID NO: 77073 - DNA, 20 bp, Artificial Sequence
  MKO10077073_B_Cdx2
  gRNA
gtcatctctaggttaaaatt

SEQ ID NO: 77074 - DNA, 20 bp, Artificial Sequence
  MKO10077074_B_Cdx4
  gRNA
tcagccaatcgagatacagc

SEQ ID NO: 77075 - DNA, 20 bp, Artificial Sequence
  MKO10077075_B_Cdx4
  gRNA
ctacacagatcatcaacggc

SEQ ID NO: 77076 - DNA, 20 bp, Artificial Sequence
  MKO10077076_B_Cdx4
  gRNA
gcaatagatacatcaccatc

SEQ ID NO: 77077 - DNA, 20 bp, Artificial Sequence
  MKO10077077_B_Cdyl2
  gRNA
accatccgactcacgcctgc

SEQ ID NO: 77078 - DNA, 20 bp, Artificial Sequence
  MKO10077078_B_Cdyl2
  gRNA
ctcgaatcgcagaagctatc

SEQ ID NO: 77079 - DNA, 20 bp, Artificial Sequence
  MKO10077079_B_Cdyl2
  gRNA
cccattaatggctaccacga

SEQ ID NO: 77080 - DNA, 20 bp, Artificial Sequence
  MKO10077080_B_Cdyl
  gRNA
tcctcggcaccctgatccac

SEQ ID NO: 77081 - DNA, 20 bp, Artificial Sequence
  MKO10077081_B_Cdyl
  gRNA
tgcagccgacgacagcaagc

SEQ ID NO: 77082 - DNA, 20 bp, Artificial Sequence
  MKO10077082_B_Cdyl
  gRNA
agatgctcctcccataatct

SEQ ID NO: 77083 - DNA, 20 bp, Artificial Sequence
  MKO10077083_B_Ceacam10
  gRNA
tgtgagcagtagtccaaccc

SEQ ID NO: 77084 - DNA, 20 bp, Artificial Sequence
  MKO10077084_B_Ceacam10
  gRNA
gatttgtaacatccattaat

SEQ ID NO: 77085 - DNA, 20 bp, Artificial Sequence
  MKO10077085_B_Ceacam10
  gRNA
ttccacagctaaaaagcagt

SEQ ID NO: 77086 - DNA, 20 bp, Artificial Sequence
  MKO10077086_B_Ceacam11
  gRNA
gacagctaccaattctactg

SEQ ID NO: 77087 - DNA, 20 bp, Artificial Sequence
  MKO10077087_B_Ceacam11
  gRNA
gcaatttcacaattcttgag

SEQ ID NO: 77088 - DNA, 20 bp, Artificial Sequence
  MKO10077088_B_Ceacam11
  gRNA
cactccccagcatagttgaa

SEQ ID NO: 77089 - DNA, 20 bp, Artificial Sequence
  MKO10077089_B_Ceacam12
  gRNA
gcactgattcaatagttatc

SEQ ID NO: 77090 - DNA, 20 bp, Artificial Sequence
  MKO10077090_B_Ceacam12
  gRNA
taaatatgtgcgccccagca

SEQ ID NO: 77091 - DNA, 20 bp, Artificial Sequence
  MKO10077091_B_Ceacam12
  gRNA
cctgtaaagactgtacatcc

SEQ ID NO: 77092 - DNA, 20 bp, Artificial Sequence
  MKO10077092_B_Ceacam13
  gRNA
gaacagaagcccctgccaag

SEQ ID NO: 77093 - DNA, 20 bp, Artificial Sequence
  MKO10077093_B_Ceacam13
  gRNA
agctcccgagtaccaggaaa

SEQ ID NO: 77094 - DNA, 20 bp, Artificial Sequence
  MKO10077094_B_Ceacam13
  gRNA
gcaatttcacaacacttgaa

SEQ ID NO: 77095 - DNA, 20 bp, Artificial Sequence
  MKO10077095_B_Ceacam14
  gRNA
agtagtgggaatcagccagc

SEQ ID NO: 77096 - DNA, 20 bp, Artificial Sequence
  MKO10077096_B_Ceacam14
  gRNA
cctgtaaagtctgtacctcc

SEQ ID NO: 77097 - DNA, 20 bp, Artificial Sequence
  MKO10077097_B_Ceacam14
  gRNA
tgtgagcaggagcccctgcc

SEQ ID NO: 77098 - DNA, 20 bp, Artificial Sequence
  MKO10077098_B_Ceacam15
  gRNA
acctgcgtgtcgcctgacac

SEQ ID NO: 77099 - DNA, 20 bp, Artificial Sequence
  MKO10077099_B_Ceacam15
  gRNA
cctttgcagagaaacaaaga

SEQ ID NO: 77100 - DNA, 20 bp, Artificial Sequence
  MKO10077100_B_Ceacam15
  gRNA
ccttctttgtttctctgcaa

SEQ ID NO: 77101 - DNA, 20 bp, Artificial Sequence
  MKO10077101_B_Ceacam16
  gRNA
ggctgctacagacgagacga

SEQ ID NO: 77102 - DNA, 20 bp, Artificial Sequence
  MKO10077102_B_Ceacam16
  gRNA
aagaccgcgccacacaccac

SEQ ID NO: 77103 - DNA, 20 bp, Artificial Sequence
  MKO10077103_B_Ceacam16
  gRNA
cgaggcaggtccacgatacc

SEQ ID NO: 77104 - DNA, 20 bp, Artificial Sequence
  MKO10077104_B_Ceacam18
  gRNA
cgtgagaatgtgacccgtgc

SEQ ID NO: 77105 - DNA, 20 bp, Artificial Sequence
  MKO10077105_B_Ceacam18
  gRNA
gggcagttaccggtgtgttg

SEQ ID NO: 77106 - DNA, 20 bp, Artificial Sequence
  MKO10077106_B_Ceacam18
  gRNA
cctcccaatacccgacaccc

SEQ ID NO: 77107 - DNA, 20 bp, Artificial Sequence
  MKO10077107_B_Ceacam19
  gRNA
ttgggcatttcgaagcagca

SEQ ID NO: 77108 - DNA, 20 bp, Artificial Sequence
  MKO10077108_B_Ceacam19
  gRNA
gtgaacctgagtcctgaatc

SEQ ID NO: 77109 - DNA, 20 bp, Artificial Sequence
  MKO10077109_B_Ceacam19
  gRNA
gcttaccagattcaggactc

SEQ ID NO: 77110 - DNA, 20 bp, Artificial Sequence
  MKO10077110_B_Ceacam1
  gRNA
tccaatcacgatgccagcaa

SEQ ID NO: 77111 - DNA, 20 bp, Artificial Sequence
  MKO10077111_B_Ceacam1
  gRNA
acctgcttgtcgaatgacat

SEQ ID NO: 77112 - DNA, 20 bp, Artificial Sequence
  MKO10077112_B_Ceacam1
  gRNA
cactgctgaagtcaccattg

SEQ ID NO: 77113 - DNA, 20 bp, Artificial Sequence
  MKO10077113_B_Ceacam20
  gRNA
agggggctggatgaagtcgc

SEQ ID NO: 77114 - DNA, 20 bp, Artificial Sequence
  MKO10077114_B_Ceacam20
  gRNA
aaggttgggaactcgatatt

SEQ ID NO: 77115 - DNA, 20 bp, Artificial Sequence
  MKO10077115_B_Ceacam20
  gRNA
gacagtgtcaggcggtcact

SEQ ID NO: 77116 - DNA, 20 bp, Artificial Sequence
  MKO10077116_B_Ceacam2
  gRNA
gaaattgtacgatttgtaac

SEQ ID NO: 77117 - DNA, 20 bp, Artificial Sequence
  MKO10077117_B_Ceacam2
  gRNA
gtcctaccagcgagacttcc

SEQ ID NO: 77118 - DNA, 20 bp, Artificial Sequence
  MKO10077118_B_Ceacam2
  gRNA
accgtcaagcccacatccat

SEQ ID NO: 77119 - DNA, 20 bp, Artificial Sequence
  MKO10077119_B_Ceacam3
  gRNA
gttctcgtagattgaaagac

SEQ ID NO: 77120 - DNA, 20 bp, Artificial Sequence
  MKO10077120_B_Ceacam3
  gRNA
tccgagtgacattctgaatc

SEQ ID NO: 77121 - DNA, 20 bp, Artificial Sequence
  MKO10077121_B_Ceacam3
  gRNA
agggcgtccacaggtcaaaa

SEQ ID NO: 77122 - DNA, 20 bp, Artificial Sequence
  MKO10077122_B_Ceacam5
  gRNA
actgtatgcactccccaaaa

SEQ ID NO: 77123 - DNA, 20 bp, Artificial Sequence
  MKO10077123_B_Ceacam5
  gRNA
gtgccaccgagcattgttga

SEQ ID NO: 77124 - DNA, 20 bp, Artificial Sequence
  MKO10077124_B_Ceacam5
  gRNA
cgagaaacagtatacaacaa

SEQ ID NO: 77125 - DNA, 20 bp, Artificial Sequence
  MKO10077125_B_Ceacam9
  gRNA
agaaccagcttctgttaccg

SEQ ID NO: 77126 - DNA, 20 bp, Artificial Sequence
  MKO10077126_B_Ceacam9
  gRNA
ccttctctgtttctctgcaa

SEQ ID NO: 77127 - DNA, 20 bp, Artificial Sequence
  MKO10077127_B_Ceacam9
  gRNA
cctttgcagagaaacagaga

SEQ ID NO: 77128 - DNA, 20 bp, Artificial Sequence
  MKO10077128_B_Cebpa
  gRNA
cgcggacatgaccgcgccgc

SEQ ID NO: 77129 - DNA, 20 bp, Artificial Sequence
  MKO10077129_B_Cebpa
  gRNA
aactcgtcgttgaaggcggc

SEQ ID NO: 77130 - DNA, 20 bp, Artificial Sequence
  MKO10077130_B_Cebpa
  gRNA
gtagaagtcggccgactcca

SEQ ID NO: 77131 - DNA, 20 bp, Artificial Sequence
  MKO10077131_B_Cebpb
  gRNA
gtcgggctcgtagtagaagt

SEQ ID NO: 77132 - DNA, 20 bp, Artificial Sequence
  MKO10077132_B_Cebpb
  gRNA
gtccgcgcgcttgcagtccg

SEQ ID NO: 77133 - DNA, 20 bp, Artificial Sequence
  MKO10077133_B_Cebpb
  gRNA
gacctcttcgccgacgacta

SEQ ID NO: 77134 - DNA, 20 bp, Artificial Sequence
  MKO10077134_B_Cebpd
  gRNA
ggtcggcgaagagttcgtcg

SEQ ID NO: 77135 - DNA, 20 bp, Artificial Sequence
  MKO10077135_B_Cebpd
  gRNA
ctcgcggtctctattgcccg

SEQ ID NO: 77136 - DNA, 20 bp, Artificial Sequence
  MKO10077136_B_Cebpd
  gRNA
ctctcgtcgtcgtacatggc

SEQ ID NO: 77137 - DNA, 20 bp, Artificial Sequence
  MKO10077137_B_Cebpe
  gRNA
agcccccgacacccttgatg

SEQ ID NO: 77138 - DNA, 20 bp, Artificial Sequence
  MKO10077138_B_Cebpe
  gRNA
ccgaggctcgcactcatagt

SEQ ID NO: 77139 - DNA, 20 bp, Artificial Sequence
  MKO10077139_B_Cebpe
  gRNA
tctgcccgcagtgtgccact

SEQ ID NO: 77140 - DNA, 20 bp, Artificial Sequence
  MKO10077140_B_Cebpg
  gRNA
tcgcagccagccactactcc

SEQ ID NO: 77141 - DNA, 20 bp, Artificial Sequence
  MKO10077141_B_Cebpg
  gRNA
aggaacctgctgtaagccgc

SEQ ID NO: 77142 - DNA, 20 bp, Artificial Sequence
  MKO10077142_B_Cebpg
  gRNA
tggaaggagatctactgccc

SEQ ID NO: 77143 - DNA, 20 bp, Artificial Sequence
  MKO10077143_B_Cebpz
  gRNA
agaagccgaaggccgcttcc

SEQ ID NO: 77144 - DNA, 20 bp, Artificial Sequence
  MKO10077144_B_Cebpz
  gRNA
tcttcacaaacgccttcacc

SEQ ID NO: 77145 - DNA, 20 bp, Artificial Sequence
  MKO10077145_B_Cebpz
  gRNA
cttgcttggaacatgtcgtc

SEQ ID NO: 77146 - DNA, 20 bp, Artificial Sequence
  MKO10077146_B_Cecr2
  gRNA
acaattcaggtgcactctac

SEQ ID NO: 77147 - DNA, 20 bp, Artificial Sequence
  MKO10077147_B_Cecr2
  gRNA
gcacaaggagagttctccat

SEQ ID NO: 77148 - DNA, 20 bp, Artificial Sequence
  MKO10077148_B_Cecr2
  gRNA
agctcttcacagagatgacg

SEQ ID NO: 77149 - DNA, 20 bp, Artificial Sequence
  MKO10077149_B_Cecr5
  gRNA
cttgcagcataacaaagccc

SEQ ID NO: 77150 - DNA, 20 bp, Artificial Sequence
  MKO10077150_B_Cecr5
  gRNA
gggcctttaccttcaatggc

SEQ ID NO: 77151 - DNA, 20 bp, Artificial Sequence
  MKO10077151_B_Cecr5
  gRNA
gtccgtattaccatggtctt

SEQ ID NO: 77152 - DNA, 20 bp, Artificial Sequence
  MKO10077152_B_Cecr6
  gRNA
agccccggcgccgaccccta

SEQ ID NO: 77153 - DNA, 20 bp, Artificial Sequence
  MKO10077153_B_Cecr6
  gRNA
catggtaaggcgaaagcccg

SEQ ID NO: 77154 - DNA, 20 bp, Artificial Sequence
  MKO10077154_B_Cecr6
  gRNA
ggacggccgcgtgccgcttc

SEQ ID NO: 77155 - DNA, 20 bp, Artificial Sequence
  MKO10077155_B_Cela1
  gRNA
cagccccatgacttatcgag

SEQ ID NO: 77156 - DNA, 20 bp, Artificial Sequence
  MKO10077156_B_Cela1
  gRNA
cttcagcccctccaaccacg

SEQ ID NO: 77157 - DNA, 20 bp, Artificial Sequence
  MKO10077157_B_Cela1
  gRNA
tgacatcgccctgctgcgct

SEQ ID NO: 77158 - DNA, 20 bp, Artificial Sequence
  MKO10077158_B_Cela2a
  gRNA
ccagggagcctccgcagttg

SEQ ID NO: 77159 - DNA, 20 bp, Artificial Sequence
  MKO10077159_B_Cela2a
  gRNA
ggaaggtggcgccacaactg

SEQ ID NO: 77160 - DNA, 20 bp, Artificial Sequence
  MKO10077160_B_Cela2a
  gRNA
tgggctggccagtttgatta

SEQ ID NO: 77161 - DNA, 20 bp, Artificial Sequence
  MKO10077161_B_Cela3b
  gRNA
aaagaggtctccagcgttga

SEQ ID NO: 77162 - DNA, 20 bp, Artificial Sequence
  MKO10077162_B_Cela3b
  gRNA
tcccatccttctcatactga

SEQ ID NO: 77163 - DNA, 20 bp, Artificial Sequence
  MKO10077163_B_Cela3b
  gRNA
cacttcttgagagcttgacc

SEQ ID NO: 77164 - DNA, 20 bp, Artificial Sequence
  MKO10077164_B_Celf1
  gRNA
atcttgatagcatcaagatc

SEQ ID NO: 77165 - DNA, 20 bp, Artificial Sequence
  MKO10077165_B_Celf1
  gRNA
aaagaaaatgaacggcaccc

SEQ ID NO: 77166 - DNA, 20 bp, Artificial Sequence
  MKO10077166_B_Celf1
  gRNA
gagcttctaatgcagcttta

SEQ ID NO: 77167 - DNA, 20 bp, Artificial Sequence
  MKO10077167_B_Celf2
  gRNA
gagggttctgactccggtcc

SEQ ID NO: 77168 - DNA, 20 bp, Artificial Sequence
  MKO10077168_B_Celf2
  gRNA
taatattgtgcagtgcattc

SEQ ID NO: 77169 - DNA, 20 bp, Artificial Sequence
  MKO10077169_B_Celf2
  gRNA
cacaatattaaaactttacc

SEQ ID NO: 77170 - DNA, 20 bp, Artificial Sequence
  MKO10077170_B_Celf3
  gRNA
ctacctttgctggtaccgtc

SEQ ID NO: 77171 - DNA, 20 bp, Artificial Sequence
  MKO10077171_B_Celf3
  gRNA
atagatgaacaggccgatcc

SEQ ID NO: 77172 - DNA, 20 bp, Artificial Sequence
  MKO10077172_B_Celf3
  gRNA
ccagccgacagcgagagtcg

SEQ ID NO: 77173 - DNA, 20 bp, Artificial Sequence
  MKO10077173_B_Celf4
  gRNA
tcgacgggttccccgggctg

SEQ ID NO: 77174 - DNA, 20 bp, Artificial Sequence
  MKO10077174_B_Celf4
  gRNA
cgctgactcacgctcgcagt

SEQ ID NO: 77175 - DNA, 20 bp, Artificial Sequence
  MKO10077175_B_Celf4
  gRNA
tctgctcgtgcagcgcgctc

SEQ ID NO: 77176 - DNA, 20 bp, Artificial Sequence
  MKO10077176_B_Celf5
  gRNA
gtgggaagaaaacttcacga

SEQ ID NO: 77177 - DNA, 20 bp, Artificial Sequence
  MKO10077177_B_Celf5
  gRNA
tctcactcaccggcatagtc

SEQ ID NO: 77178 - DNA, 20 bp, Artificial Sequence
  MKO10077178_B_Celf5
  gRNA
cagggtcttctgctcgtgca

SEQ ID NO: 77179 - DNA, 20 bp, Artificial Sequence
  MKO10077179_B_Celf6
  gRNA
gttacctcctcggccctcac

SEQ ID NO: 77180 - DNA, 20 bp, Artificial Sequence
  MKO10077180_B_Celf6
  gRNA
ggcagagtcccgggcgcagt

SEQ ID NO: 77181 - DNA, 20 bp, Artificial Sequence
  MKO10077181_B_Celf6
  gRNA
tcgtccgatccaagtgaagc

SEQ ID NO: 77182 - DNA, 20 bp, Artificial Sequence
  MKO10077182_B_Celsr1
  gRNA
agctgacgtccgtgtcgttc

SEQ ID NO: 77183 - DNA, 20 bp, Artificial Sequence
  MKO10077183_B_Celsr1
  gRNA
ctgcggtgtcaccgtggttg

SEQ ID NO: 77184 - DNA, 20 bp, Artificial Sequence
  MKO10077184_B_Celsr1
  gRNA
gctggtgcagtactacaaca

SEQ ID NO: 77185 - DNA, 20 bp, Artificial Sequence
  MKO10077185_B_Celsr2
  gRNA
aacgggctactgctgtacaa

SEQ ID NO: 77186 - DNA, 20 bp, Artificial Sequence
  MKO10077186_B_Celsr2
  gRNA
tgaagtggaagcgctggcgc

SEQ ID NO: 77187 - DNA, 20 bp, Artificial Sequence
  MKO10077187_B_Celsr2
  gRNA
cgctccttcatcaccttccg

SEQ ID NO: 77188 - DNA, 20 bp, Artificial Sequence
  MKO10077188_B_Celsr3
  gRNA
accctcgaaagcgccgcccg

SEQ ID NO: 77189 - DNA, 20 bp, Artificial Sequence
  MKO10077189_B_Celsr3
  gRNA
gttgtagaagagtagcccgc

SEQ ID NO: 77190 - DNA, 20 bp, Artificial Sequence
  MKO10077190_B_Celsr3
  gRNA
tatgccattgtccgtcactc

SEQ ID NO: 77191 - DNA, 20 bp, Artificial Sequence
  MKO10077191_B_Cel
  gRNA
cttgcccataggtgttgtcc

SEQ ID NO: 77192 - DNA, 20 bp, Artificial Sequence
  MKO10077192_B_Cel
  gRNA
tctcactgtagggacgctga

SEQ ID NO: 77193 - DNA, 20 bp, Artificial Sequence
  MKO10077193_B_Cel
  gRNA
tggtcttcgagatcagcaca

SEQ ID NO: 77194 - DNA, 20 bp, Artificial Sequence
  MKO10077194_B_Cend1
  gRNA
ggtcaagttctcacaaggcc

SEQ ID NO: 77195 - DNA, 20 bp, Artificial Sequence
  MKO10077195_B_Cend1
  gRNA
tgagaacttgacccctttgc

SEQ ID NO: 77196 - DNA, 20 bp, Artificial Sequence
  MKO10077196_B_Cend1
  gRNA
cttgaccaagcctgtgaaga

SEQ ID NO: 77197 - DNA, 20 bp, Artificial Sequence
  MKO10077197_B_Cenpa
  gRNA
agaatccgaggcttcgaggg

SEQ ID NO: 77198 - DNA, 20 bp, Artificial Sequence
  MKO10077198_B_Cenpa
  gRNA
tacctcctgaagggccaaca

SEQ ID NO: 77199 - DNA, 20 bp, Artificial Sequence
  MKO10077199_B_Cenpa
  gRNA
atatgtgagaagttcagccg

SEQ ID NO: 77200 - DNA, 20 bp, Artificial Sequence
  MKO10077200_B_Cenpb
  gRNA
tacgcaagggcgagatcgcg

SEQ ID NO: 77201 - DNA, 20 bp, Artificial Sequence
  MKO10077201_B_Cenpb
  gRNA
ttgctgtgcgccaacgccga

SEQ ID NO: 77202 - DNA, 20 bp, Artificial Sequence
  MKO10077202_B_Cenpb
  gRNA
ccgacagaaagtcgtaccac

SEQ ID NO: 77203 - DNA, 20 bp, Artificial Sequence
  MKO10077203_B_Cenpc1
  gRNA
tagtcaatcatcaagcaaaa

SEQ ID NO: 77204 - DNA, 20 bp, Artificial Sequence
  MKO10077204_B_Cenpc1
  gRNA
aaaaatggtacctggaagac

SEQ ID NO: 77205 - DNA, 20 bp, Artificial Sequence
  MKO10077205_B_Cenpc1
  gRNA
cccaacattcatacaaaaaa

SEQ ID NO: 77206 - DNA, 20 bp, Artificial Sequence
  MKO10077206_B_Cenpe
  gRNA
caaaccattgtagccttgta

SEQ ID NO: 77207 - DNA, 20 bp, Artificial Sequence
  MKO10077207_B_Cenpe
  gRNA
tctccatgtaagaaactcgt

SEQ ID NO: 77208 - DNA, 20 bp, Artificial Sequence
  MKO10077208_B_Cenpe
  gRNA
aacgctatttatcagagcga

SEQ ID NO: 77209 - DNA, 20 bp, Artificial Sequence
  MKO10077209_B_Cenpf
  gRNA
cctgatgtctcgcaatgtcc

SEQ ID NO: 77210 - DNA, 20 bp, Artificial Sequence
  MKO10077210_B_Cenpf
  gRNA
ttctttcagatcttcgtatg

SEQ ID NO: 77211 - DNA, 20 bp, Artificial Sequence
  MKO10077211_B_Cenpf
  gRNA
taccccaagtcgcctttcat

SEQ ID NO: 77212 - DNA, 20 bp, Artificial Sequence
  MKO10077212_B_Cenph
  gRNA
agaacatgggacctgagaat

SEQ ID NO: 77213 - DNA, 20 bp, Artificial Sequence
  MKO10077213_B_Cenph
  gRNA
ttatagtaaaattgaagagc

SEQ ID NO: 77214 - DNA, 20 bp, Artificial Sequence
  MKO10077214_B_Cenpi
  gRNA
tgttatatttactgaccaaa

SEQ ID NO: 77215 - DNA, 20 bp, Artificial Sequence
  MKO10077215_B_Cenpi
  gRNA
agcttcactaagtaaagata

SEQ ID NO: 77216 - DNA, 20 bp, Artificial Sequence
  MKO10077216_B_Cenpi
  gRNA
ctctgtgttgacaagtgttc

SEQ ID NO: 77217 - DNA, 20 bp, Artificial Sequence
  MKO10077217_B_Cenpj
  gRNA
agccagaagcatcgctctcc

SEQ ID NO: 77218 - DNA, 20 bp, Artificial Sequence
  MKO10077218_B_Cenpj
  gRNA
cgcgtgctgtgcagacacca

SEQ ID NO: 77219 - DNA, 20 bp, Artificial Sequence
  MKO10077219_B_Cenpj
  gRNA
taagctcccgctcttccagt

SEQ ID NO: 77220 - DNA, 20 bp, Artificial Sequence
  MKO10077220_B_Cenpk
  gRNA
ttaacaaaacgtcttcattt

SEQ ID NO: 77221 - DNA, 20 bp, Artificial Sequence
  MKO10077221_B_Cenpk
  gRNA
tccagatactattacagatg

SEQ ID NO: 77222 - DNA, 20 bp, Artificial Sequence
  MKO10077222_B_Cenpk
  gRNA
tccacatctgtaatagtatc

SEQ ID NO: 77223 - DNA, 20 bp, Artificial Sequence
  MKO10077223_B_Cenpl
  gRNA
cctggacaagaaacgcttca

SEQ ID NO: 77224 - DNA, 20 bp, Artificial Sequence
  MKO10077224_B_Cenpl
  gRNA
ccatgaagcgtttcttgtcc

SEQ ID NO: 77225 - DNA, 20 bp, Artificial Sequence
  MKO10077225_B_Cenpl
  gRNA
cacccctctgcagaaacgac

SEQ ID NO: 77226 - DNA, 20 bp, Artificial Sequence
  MKO10077226_B_Cenpm
  gRNA
ttcgcagctggtgagcaccg

SEQ ID NO: 77227 - DNA, 20 bp, Artificial Sequence
  MKO10077227_B_Cenpm
  gRNA
ttaacctgcacagcaaatac

SEQ ID NO: 77228 - DNA, 20 bp, Artificial Sequence
  MKO10077228_B_Cenpm
  gRNA
caaacttaccccctgtgaca

SEQ ID NO: 77229 - DNA, 20 bp, Artificial Sequence
  MKO10077229_B_Cenpn
  gRNA
acttacacacgatgtctaaa

SEQ ID NO: 77230 - DNA, 20 bp, Artificial Sequence
  MKO10077230_B_Cenpn
  gRNA
ggaactgttccatatcaaaa

SEQ ID NO: 77231 - DNA, 20 bp, Artificial Sequence
  MKO10077231_B_Cenpn
  gRNA
gaaaaacattccaaagcttc

SEQ ID NO: 77232 - DNA, 20 bp, Artificial Sequence
  MKO10077232_B_Cenpo
  gRNA
gctgtcgttcacctataaag

SEQ ID NO: 77233 - DNA, 20 bp, Artificial Sequence
  MKO10077233_B_Cenpo
  gRNA
agaaccagcagttcgtaaaa

SEQ ID NO: 77234 - DNA, 20 bp, Artificial Sequence
  MKO10077234_B_Cenpo
  gRNA
tgaacgacagcaagttgcac

SEQ ID NO: 77235 - DNA, 20 bp, Artificial Sequence
  MKO10077235_B_Cenpp
  gRNA
caacatggtgacatttcaac

SEQ ID NO: 77236 - DNA, 20 bp, Artificial Sequence
  MKO10077236_B_Cenpp
  gRNA
acttaattctgaatattctg

SEQ ID NO: 77237 - DNA, 20 bp, Artificial Sequence
  MKO10077237_B_Cenpp
  gRNA
gaacacatttaagcatttca

SEQ ID NO: 77238 - DNA, 20 bp, Artificial Sequence
  MKO10077238_B_Cenpq
  gRNA
atctcaaccagttgaagaaa

SEQ ID NO: 77239 - DNA, 20 bp, Artificial Sequence
  MKO10077239_B_Cenpq
  gRNA
agagtatttgcaaagtatga

SEQ ID NO: 77240 - DNA, 20 bp, Artificial Sequence
  MKO10077240_B_Cenpq
  gRNA
tgtgtcaaaaatgctgaaaa

SEQ ID NO: 77241 - DNA, 20 bp, Artificial Sequence
  MKO10077241_B_Cenpt
  gRNA
ggctgttagacccggagcca

SEQ ID NO: 77242 - DNA, 20 bp, Artificial Sequence
  MKO10077242_B_Cenpt
  gRNA
tccccgactgctctcccgtc

SEQ ID NO: 77243 - DNA, 20 bp, Artificial Sequence
  MKO10077243_B_Cenpt
  gRNA
gtctaacagcccctggcaaa

SEQ ID NO: 77244 - DNA, 20 bp, Artificial Sequence
  MKO10077244_B_Cenpu
  gRNA
agacccccctctgcacagta

SEQ ID NO: 77245 - DNA, 20 bp, Artificial Sequence
  MKO10077245_B_Cenpu
  gRNA
tatcaaggtcagcacaaaaa

SEQ ID NO: 77246 - DNA, 20 bp, Artificial Sequence
  MKO10077246_B_Cenpu
  gRNA
ctttgagaagcacatattcc

SEQ ID NO: 77247 - DNA, 20 bp, Artificial Sequence
  MKO10077247_B_Cenpv
  gRNA
caaaacgaactgctccacag

SEQ ID NO: 77248 - DNA, 20 bp, Artificial Sequence
  MKO10077248_B_Cenpv
  gRNA
tccgcacagtgccttcgtcc

SEQ ID NO: 77249 - DNA, 20 bp, Artificial Sequence
  MKO10077249_B_Cenpv
  gRNA
aggaatcgccccccactgcc

SEQ ID NO: 77250 - DNA, 20 bp, Artificial Sequence
  MKO10077250_B_Cenpw
  gRNA
ccaatcgctgaataaaaagt

SEQ ID NO: 77251 - DNA, 20 bp, Artificial Sequence
  MKO10077251_B_Cenpw
  gRNA
gtaattctgaagaagagcag

SEQ ID NO: 77252 - DNA, 20 bp, Artificial Sequence
  MKO10077252_B_Cenpw
  gRNA
aagcagaagaagcctcacct

SEQ ID NO: 77253 - DNA, 20 bp, Artificial Sequence
  MKO10077253_B_Cep104
  gRNA
tggtatggcaccaagtactc

SEQ ID NO: 77254 - DNA, 20 bp, Artificial Sequence
  MKO10077254_B_Cep104
  gRNA
ggagctcaagtctgtttatg

SEQ ID NO: 77255 - DNA, 20 bp, Artificial Sequence
  MKO10077255_B_Cep104
  gRNA
cataaacagacttgagctcc

SEQ ID NO: 77256 - DNA, 20 bp, Artificial Sequence
  MKO10077256_B_Cep110
  gRNA
tacttacctgagtacgcctt

SEQ ID NO: 77257 - DNA, 20 bp, Artificial Sequence
  MKO10077257_B_Cep110
  gRNA
tgatggtctgattcacccag

SEQ ID NO: 77258 - DNA, 20 bp, Artificial Sequence
  MKO10077258_B_Cep110
  gRNA
gtagcttcctgcactcattc

SEQ ID NO: 77259 - DNA, 20 bp, Artificial Sequence
  MKO10077259_B_Cep112
  gRNA
cacttcgcacctgatgagag

SEQ ID NO: 77260 - DNA, 20 bp, Artificial Sequence
  MKO10077260_B_Cep112
  gRNA
tgaccacctaccaaagcaga

SEQ ID NO: 77261 - DNA, 20 bp, Artificial Sequence
  MKO10077261_B_Cep112
  gRNA
aggtcaactttctacaaaag

SEQ ID NO: 77262 - DNA, 20 bp, Artificial Sequence
  MKO10077262_B_Cep120
  gRNA
agcctcaccggtgctgatga

SEQ ID NO: 77263 - DNA, 20 bp, Artificial Sequence
  MKO10077263_B_Cep120
  gRNA
ctaccatcagattggaccag

SEQ ID NO: 77264 - DNA, 20 bp, Artificial Sequence
  MKO10077264_B_Cep120
  gRNA
ttgctttataactatccacc

SEQ ID NO: 77265 - DNA, 20 bp, Artificial Sequence
  MKO10077265_B_Cep128
  gRNA
tgtttcgtttaatcccctgt

SEQ ID NO: 77266 - DNA, 20 bp, Artificial Sequence
  MKO10077266_B_Cep128
  gRNA
tacaggggattaaacgaaac

SEQ ID NO: 77267 - DNA, 20 bp, Artificial Sequence
  MKO10077267_B_Cep128
  gRNA
gtaagcgctgactcctcagt

SEQ ID NO: 77268 - DNA, 20 bp, Artificial Sequence
  MKO10077268_B_Cep135
  gRNA
agtgctggactacagcaagc

SEQ ID NO: 77269 - DNA, 20 bp, Artificial Sequence
  MKO10077269_B_Cep135
  gRNA
ttcatacgacagaaagcctg

SEQ ID NO: 77270 - DNA, 20 bp, Artificial Sequence
  MKO10077270_B_Cep135
  gRNA
gaacaaccagtatgttcaca

SEQ ID NO: 77271 - DNA, 20 bp, Artificial Sequence
  MKO10077271_B_Cep152
  gRNA
ccacgattctgactgcagta

SEQ ID NO: 77272 - DNA, 20 bp, Artificial Sequence
  MKO10077272_B_Cep152
  gRNA
tagcaatttggtttatctcg

SEQ ID NO: 77273 - DNA, 20 bp, Artificial Sequence
  MKO10077273_B_Cep152
  gRNA
acacttacgttcatgctgtg

SEQ ID NO: 77274 - DNA, 20 bp, Artificial Sequence
  MKO10077274_B_Cep164
  gRNA
ggcatccccaaggcctcgta

SEQ ID NO: 77275 - DNA, 20 bp, Artificial Sequence
  MKO10077275_B_Cep164
  gRNA
tctcttcccctaaagtcaag

SEQ ID NO: 77276 - DNA, 20 bp, Artificial Sequence
  MKO10077276_B_Cep164
  gRNA
agggtcaataccaatcactc

SEQ ID NO: 77277 - DNA, 20 bp, Artificial Sequence
  MKO10077277_B_Cep170b
  gRNA
actgaccttgagcgcctcct

SEQ ID NO: 77278 - DNA, 20 bp, Artificial Sequence
  MKO10077278_B_Cep170b
  gRNA
acgctctaacacgtacatgt

SEQ ID NO: 77279 - DNA, 20 bp, Artificial Sequence
  MKO10077279_B_Cep170b
  gRNA
tgccgtcatcaactacgacc

SEQ ID NO: 77280 - DNA, 20 bp, Artificial Sequence
  MKO10077280_B_Cep170
  gRNA
ccaaaatcagcaagtgccaa

SEQ ID NO: 77281 - DNA, 20 bp, Artificial Sequence
  MKO10077281_B_Cep170
  gRNA
tatccttacatcattcacaa

SEQ ID NO: 77282 - DNA, 20 bp, Artificial Sequence
  MKO10077282_B_Cep170
  gRNA
ggtccctgaagaagctctta

SEQ ID NO: 77283 - DNA, 20 bp, Artificial Sequence
  MKO10077283_B_Cep192
  gRNA
gaaatcacggtttggattca

SEQ ID NO: 77284 - DNA, 20 bp, Artificial Sequence
  MKO10077284_B_Cep192
  gRNA
atacctggtacctgttgcag

SEQ ID NO: 77285 - DNA, 20 bp, Artificial Sequence
  MKO10077285_B_Cep192
  gRNA
agggttgtcactctggcaac

SEQ ID NO: 77286 - DNA, 20 bp, Artificial Sequence
  MKO10077286_B_Cep19
  gRNA
acgctggcggctctttcctt

SEQ ID NO: 77287 - DNA, 20 bp, Artificial Sequence
  MKO10077287_B_Cep19
  gRNA
ctttaactgttccgcagctc

SEQ ID NO: 77288 - DNA, 20 bp, Artificial Sequence
  MKO10077288_B_Cep19
  gRNA
cctgaacaaactggacgaca

SEQ ID NO: 77289 - DNA, 20 bp, Artificial Sequence
  MKO10077289_B_Cep250
  gRNA
caccgagcttcggctgcaca

SEQ ID NO: 77290 - DNA, 20 bp, Artificial Sequence
  MKO10077290_B_Cep250
  gRNA
gggcccgagatgagttagtg

SEQ ID NO: 77291 - DNA, 20 bp, Artificial Sequence
  MKO10077291_B_Cep250
  gRNA
gttcttcagtttccgccagg

SEQ ID NO: 77292 - DNA, 20 bp, Artificial Sequence
  MKO10077292_B_Cep290
  gRNA
tcgccaacttgagaagcagc

SEQ ID NO: 77293 - DNA, 20 bp, Artificial Sequence
  MKO10077293_B_Cep290
  gRNA
gttccagctgcttctcaagt

SEQ ID NO: 77294 - DNA, 20 bp, Artificial Sequence
  MKO10077294_B_Cep290
  gRNA
aattacccagtctctaatga

SEQ ID NO: 77295 - DNA, 20 bp, Artificial Sequence
  MKO10077295_B_Cep350
  gRNA
ggtcaatatgacctagagtc

SEQ ID NO: 77296 - DNA, 20 bp, Artificial Sequence
  MKO10077296_B_Cep350
  gRNA
agctgtaatcgattctgtga

SEQ ID NO: 77297 - DNA, 20 bp, Artificial Sequence
  MKO10077297_B_Cep350
  gRNA
gtgaacctttggtttcttat

SEQ ID NO: 77298 - DNA, 20 bp, Artificial Sequence
  MKO10077298_B_Cep41
  gRNA
ttctagcttctcaatgtatt

SEQ ID NO: 77299 - DNA, 20 bp, Artificial Sequence
  MKO10077299_B_Cep41
  gRNA
cttccagtgtttgatctgac

SEQ ID NO: 77300 - DNA, 20 bp, Artificial Sequence
  MKO10077300_B_Cep41
  gRNA
tcaacatgtcaagtcaagac

SEQ ID NO: 77301 - DNA, 20 bp, Artificial Sequence
  MKO10077301_B_Cep44
  gRNA
ttggcattgacatcacgggc

SEQ ID NO: 77302 - DNA, 20 bp, Artificial Sequence
  MKO10077302_B_Cep44
  gRNA
ccacctgtacactgacgaga

SEQ ID NO: 77303 - DNA, 20 bp, Artificial Sequence
  MKO10077303_B_Cep44
  gRNA
cagtgagaaacgccctgcag

SEQ ID NO: 77304 - DNA, 20 bp, Artificial Sequence
  MKO10077304_B_Cep55
  gRNA
cagtacactccacctgtcac

SEQ ID NO: 77305 - DNA, 20 bp, Artificial Sequence
  MKO10077305_B_Cep55
  gRNA
ctctaatgcagtgtctgact

SEQ ID NO: 77306 - DNA, 20 bp, Artificial Sequence
  MKO10077306_B_Cep55
  gRNA
tgcagcctttaaaacatccc

SEQ ID NO: 77307 - DNA, 20 bp, Artificial Sequence
  MKO10077307_B_Cep57l1
  gRNA
gactatgatcctagaacaac

SEQ ID NO: 77308 - DNA, 20 bp, Artificial Sequence
  MKO10077308_B_Cep57l1
  gRNA
gcatttcagaattgccaccc

SEQ ID NO: 77309 - DNA, 20 bp, Artificial Sequence
  MKO10077309_B_Cep57l1
  gRNA
tttaatagtccaaacaacca

SEQ ID NO: 77310 - DNA, 20 bp, Artificial Sequence
  MKO10077310_B_Cep57
  gRNA
caacaaactcaccgccatgc

SEQ ID NO: 77311 - DNA, 20 bp, Artificial Sequence
  MKO10077311_B_Cep57
  gRNA
aacccatgttcagagccagc

SEQ ID NO: 77312 - DNA, 20 bp, Artificial Sequence
  MKO10077312_B_Cep57
  gRNA
tttagaactggcatcccagt

SEQ ID NO: 77313 - DNA, 20 bp, Artificial Sequence
  MKO10077313_B_Cep63
  gRNA
gatggaaaagccgaagttcg

SEQ ID NO: 77314 - DNA, 20 bp, Artificial Sequence
  MKO10077314_B_Cep63
  gRNA
agctctgtgtcctcgaactt

SEQ ID NO: 77315 - DNA, 20 bp, Artificial Sequence
  MKO10077315_B_Cep63
  gRNA
ccctagttgccaaaacaaag

SEQ ID NO: 77316 - DNA, 20 bp, Artificial Sequence
  MKO10077316_B_Cep68
  gRNA
cacctggggtgttatccaac

SEQ ID NO: 77317 - DNA, 20 bp, Artificial Sequence
  MKO10077317_B_Cep68
  gRNA
gcagcagaacacccacatga

SEQ ID NO: 77318 - DNA, 20 bp, Artificial Sequence
  MKO10077318_B_Cep68
  gRNA
gcaccctcatccctgacaac

SEQ ID NO: 77319 - DNA, 20 bp, Artificial Sequence
  MKO10077319_B_Cep70
  gRNA
gctcctttgactagacataa

SEQ ID NO: 77320 - DNA, 20 bp, Artificial Sequence
  MKO10077320_B_Cep70
  gRNA
aaacctttatgtctagtcaa

SEQ ID NO: 77321 - DNA, 20 bp, Artificial Sequence
  MKO10077321_B_Cep70
  gRNA
gctgttcctggtgtgccgct

SEQ ID NO: 77322 - DNA, 20 bp, Artificial Sequence
  MKO10077322_B_Cep72
  gRNA
taagccggaagtccacgtcc

SEQ ID NO: 77323 - DNA, 20 bp, Artificial Sequence
  MKO10077323_B_Cep72
  gRNA
accttattgccgagtgtgaa

SEQ ID NO: 77324 - DNA, 20 bp, Artificial Sequence
  MKO10077324_B_Cep72
  gRNA
ataccttccaacggttaaag

SEQ ID NO: 77325 - DNA, 20 bp, Artificial Sequence
  MKO10077325_B_Cep76
  gRNA
tatacgagaagaattagcac

SEQ ID NO: 77326 - DNA, 20 bp, Artificial Sequence
  MKO10077326_B_Cep76
  gRNA
tcttctccaaagcaaaccgt

SEQ ID NO: 77327 - DNA, 20 bp, Artificial Sequence
  MKO10077327_B_Cep76
  gRNA
ttgattagtaccatgtgaat

SEQ ID NO: 77328 - DNA, 20 bp, Artificial Sequence
  MKO10077328_B_Cep78
  gRNA
ctgatacacaccgaatttgt

SEQ ID NO: 77329 - DNA, 20 bp, Artificial Sequence
  MKO10077329_B_Cep78
  gRNA
agaggctgcttaagtgtatc

SEQ ID NO: 77330 - DNA, 20 bp, Artificial Sequence
  MKO10077330_B_Cep78
  gRNA
atggcaaggagcctgtcata

SEQ ID NO: 77331 - DNA, 20 bp, Artificial Sequence
  MKO10077331_B_Cep85l
  gRNA
tttcaagcctagtcgatcat

SEQ ID NO: 77332 - DNA, 20 bp, Artificial Sequence
  MKO10077332_B_Cep85l
  gRNA
cacttcttgttctgacagcg

SEQ ID NO: 77333 - DNA, 20 bp, Artificial Sequence
  MKO10077333_B_Cep85l
  gRNA
cgggcccagcatgctatgct

SEQ ID NO: 77334 - DNA, 20 bp, Artificial Sequence
  MKO10077334_B_Cep85
  gRNA
cgccatcttacttgtcaatg

SEQ ID NO: 77335 - DNA, 20 bp, Artificial Sequence
  MKO10077335_B_Cep85
  gRNA
tgctcaagcattgctgacag

SEQ ID NO: 77336 - DNA, 20 bp, Artificial Sequence
  MKO10077336_B_Cep85
  gRNA
ggcggcccaaaagggcactg

SEQ ID NO: 77337 - DNA, 20 bp, Artificial Sequence
  MKO10077337_B_Cep89
  gRNA
gtgcgtggcaccgctggctt

SEQ ID NO: 77338 - DNA, 20 bp, Artificial Sequence
  MKO10077338_B_Cep89
  gRNA
cagcatcgctccgaagccag

SEQ ID NO: 77339 - DNA, 20 bp, Artificial Sequence
  MKO10077339_B_Cep89
  gRNA
tgatgcctccgacattgaaa

SEQ ID NO: 77340 - DNA, 20 bp, Artificial Sequence
  MKO10077340_B_Cep95
  gRNA
tgccctttatcaatccattt

SEQ ID NO: 77341 - DNA, 20 bp, Artificial Sequence
  MKO10077341_B_Cep95
  gRNA
agactcaccagcctctgagc

SEQ ID NO: 77342 - DNA, 20 bp, Artificial Sequence
  MKO10077342_B_Cep95
  gRNA
gcaatccatcaaatatttct

SEQ ID NO: 77343 - DNA, 20 bp, Artificial Sequence
  MKO10077343_B_Cep97
  gRNA
tttagcgggcaataatctga

SEQ ID NO: 77344 - DNA, 20 bp, Artificial Sequence
  MKO10077344_B_Cep97
  gRNA
ctcaaggatcagtggtgaac

SEQ ID NO: 77345 - DNA, 20 bp, Artificial Sequence
  MKO10077345_B_Cep97
  gRNA
tgatgtccataccttgattc

SEQ ID NO: 77346 - DNA, 20 bp, Artificial Sequence
  MKO10077346_B_Cept1
  gRNA
tacttccgtgtaatcttcac

SEQ ID NO: 77347 - DNA, 20 bp, Artificial Sequence
  MKO10077347_B_Cept1
  gRNA
aactaacagtagctctcctc

SEQ ID NO: 77348 - DNA, 20 bp, Artificial Sequence
  MKO10077348_B_Cept1
  gRNA
acttgtattgcagtacaact

SEQ ID NO: 77349 - DNA, 20 bp, Artificial Sequence
  MKO10077349_B_Cer1
  gRNA
tgaatttggtgggcgagcag

SEQ ID NO: 77350 - DNA, 20 bp, Artificial Sequence
  MKO10077350_B_Cer1
  gRNA
tctccacgtggccaaccacg

SEQ ID NO: 77351 - DNA, 20 bp, Artificial Sequence
  MKO10077351_B_Cer1
  gRNA
agaatgcatacctggttgaa

SEQ ID NO: 77352 - DNA, 20 bp, Artificial Sequence
  MKO10077352_B_Cercam
  gRNA
caggtcctacccagatgaac

SEQ ID NO: 77353 - DNA, 20 bp, Artificial Sequence
  MKO10077353_B_Cercam
  gRNA
cactgaagcttctcatagat

SEQ ID NO: 77354 - DNA, 20 bp, Artificial Sequence
  MKO10077354_B_Cercam
  gRNA
caaaaactgatgccgttctt

SEQ ID NO: 77355 - DNA, 20 bp, Artificial Sequence
  MKO10077355_B_Cerkl
  gRNA
tgtccacgtctattacgaga

SEQ ID NO: 77356 - DNA, 20 bp, Artificial Sequence
  MKO10077356_B_Cerkl
  gRNA
agctctgctccaacgagagt

SEQ ID NO: 77357 - DNA, 20 bp, Artificial Sequence
  MKO10077357_B_Cerkl
  gRNA
taacctacccatcaaatcct

SEQ ID NO: 77358 - DNA, 20 bp, Artificial Sequence
  MKO10077358_B_Cerk
  gRNA
tgcgagaaacacgcctccag

SEQ ID NO: 77359 - DNA, 20 bp, Artificial Sequence
  MKO10077359_B_Cerk
  gRNA
ttcaagaccgaagcacttgc

SEQ ID NO: 77360 - DNA, 20 bp, Artificial Sequence
  MKO10077360_B_Cerk
  gRNA
actgatgatctccgtagtga

SEQ ID NO: 77361 - DNA, 20 bp, Artificial Sequence
  MKO10077361_B_Cers1
  gRNA
tgacgtcagcgatgtgcagc

SEQ ID NO: 77362 - DNA, 20 bp, Artificial Sequence
  MKO10077362_B_Cers1
  gRNA
atgaactcaccggaaggcgt

SEQ ID NO: 77363 - DNA, 20 bp, Artificial Sequence
  MKO10077363_B_Cers1
  gRNA
gtaagcgcagtagctccaac

SEQ ID NO: 77364 - DNA, 20 bp, Artificial Sequence
  MKO10077364_B_Cers2
  gRNA
ttgggagggatatcccatac

SEQ ID NO: 77365 - DNA, 20 bp, Artificial Sequence
  MKO10077365_B_Cers2
  gRNA
ctgcttgggctgcttgccgc

SEQ ID NO: 77366 - DNA, 20 bp, Artificial Sequence
  MKO10077366_B_Cers2
  gRNA
tacctaattgcctttgttgc

SEQ ID NO: 77367 - DNA, 20 bp, Artificial Sequence
  MKO10077367_B_Cers3
  gRNA
atgccaagtgcatttgctag

SEQ ID NO: 77368 - DNA, 20 bp, Artificial Sequence
  MKO10077368_B_Cers3
  gRNA
atggaattgtgatgtataag

SEQ ID NO: 77369 - DNA, 20 bp, Artificial Sequence
  MKO10077369_B_Cers3
  gRNA
acacctctagcaaatgcact

SEQ ID NO: 77370 - DNA, 20 bp, Artificial Sequence
  MKO10077370_B_Cers4
  gRNA
tgggtgtgcaggatccaatc

SEQ ID NO: 77371 - DNA, 20 bp, Artificial Sequence
  MKO10077371_B_Cers4
  gRNA
ctgggagaattacccacatc

SEQ ID NO: 77372 - DNA, 20 bp, Artificial Sequence
  MKO10077372_B_Cers4
  gRNA
cttcataggaatcatggttg

SEQ ID NO: 77373 - DNA, 20 bp, Artificial Sequence
  MKO10077373_B_Cers5
  gRNA
gatagttgtaccagcactgt

SEQ ID NO: 77374 - DNA, 20 bp, Artificial Sequence
  MKO10077374_B_Cers5
  gRNA
aatgccaacacggagtgcac

SEQ ID NO: 77375 - DNA, 20 bp, Artificial Sequence
  MKO10077375_B_Cers5
  gRNA
aagccctgtgcactccgtgt

SEQ ID NO: 77376 - DNA, 20 bp, Artificial Sequence
  MKO10077376_B_Cers6
  gRNA
gccctcaacatccaagccaa

SEQ ID NO: 77377 - DNA, 20 bp, Artificial Sequence
  MKO10077377_B_Cers6
  gRNA
ctgggcagtttgtggtccat

SEQ ID NO: 77378 - DNA, 20 bp, Artificial Sequence
  MKO10077378_B_Cers6
  gRNA
tacctctatgtatttagcta

SEQ ID NO: 77379 - DNA, 20 bp, Artificial Sequence
  MKO10077379_B_Ces1a
  gRNA
catggaggcggtttactctc

SEQ ID NO: 77380 - DNA, 20 bp, Artificial Sequence
  MKO10077380_B_Ces1a
  gRNA
caccacagcctgccgagacc

SEQ ID NO: 77381 - DNA, 20 bp, Artificial Sequence
  MKO10077381_B_Ces1a
  gRNA
cagtcttcagaatactcaag

SEQ ID NO: 77382 - DNA, 20 bp, Artificial Sequence
  MKO10077382_B_Ces1b
  gRNA
catggtggtggattgatgac

SEQ ID NO: 77383 - DNA, 20 bp, Artificial Sequence
  MKO10077383_B_Ces1b
  gRNA
tcctgctgatgacccaaaga

SEQ ID NO: 77384 - DNA, 20 bp, Artificial Sequence
  MKO10077384_B_Ces1b
  gRNA
ctgtcatcaatccaccacca

SEQ ID NO: 77385 - DNA, 20 bp, Artificial Sequence
  MKO10077385_B_Ces1c
  gRNA
cagtcttccgaaatcttgag

SEQ ID NO: 77386 - DNA, 20 bp, Artificial Sequence
  MKO10077386_B_Ces1c
  gRNA
ccttgtgtggtgtccaccac

SEQ ID NO: 77387 - DNA, 20 bp, Artificial Sequence
  MKO10077387_B_Ces1c
  gRNA
ctgggctcacctggaccaac

SEQ ID NO: 77388 - DNA, 20 bp, Artificial Sequence
  MKO10077388_B_Ces1d
  gRNA
gtgaccattcagtatcgcct

SEQ ID NO: 77389 - DNA, 20 bp, Artificial Sequence
  MKO10077389_B_Ces1d
  gRNA
tctcagagctcttcaccaac

SEQ ID NO: 77390 - DNA, 20 bp, Artificial Sequence
  MKO10077390_B_Ces1d
  gRNA
ctgttctttgtcaagtcagc

SEQ ID NO: 77391 - DNA, 20 bp, Artificial Sequence
  MKO10077391_B_Ces1e
  gRNA
tgacctcctaactaacagaa

SEQ ID NO: 77392 - DNA, 20 bp, Artificial Sequence
  MKO10077392_B_Ces1e
  gRNA
ggcaacttacataggagggt

SEQ ID NO: 77393 - DNA, 20 bp, Artificial Sequence
  MKO10077393_B_Ces1e
  gRNA
tcactctttgtcaagtcagc

SEQ ID NO: 77394 - DNA, 20 bp, Artificial Sequence
  MKO10077394_B_Ces1f
  gRNA
tctctctgcatacgaaaatg

SEQ ID NO: 77395 - DNA, 20 bp, Artificial Sequence
  MKO10077395_B_Ces1f
  gRNA
ctgttctttgaaaagtccgc

SEQ ID NO: 77396 - DNA, 20 bp, Artificial Sequence
  MKO10077396_B_Ces1f
  gRNA
ttcaatatcgcctgagtatc

SEQ ID NO: 77397 - DNA, 20 bp, Artificial Sequence
  MKO10077397_B_Ces1g
  gRNA
ccgaagatagtcacagatcc

SEQ ID NO: 77398 - DNA, 20 bp, Artificial Sequence
  MKO10077398_B_Ces1g
  gRNA
ctgagctcttcaccaaccaa

SEQ ID NO: 77399 - DNA, 20 bp, Artificial Sequence
  MKO10077399_B_Ces1g
  gRNA
tgtaccacaggcggtaagga

SEQ ID NO: 77400 - DNA, 20 bp, Artificial Sequence
  MKO10077400_B_Ces2a
  gRNA
atgccattggctagacttcc

SEQ ID NO: 77401 - DNA, 20 bp, Artificial Sequence
  MKO10077401_B_Ces2a
  gRNA
gcctcccatctctatgtccg

SEQ ID NO: 77402 - DNA, 20 bp, Artificial Sequence
  MKO10077402_B_Ces2a
  gRNA
cagtttagatacatcattca

SEQ ID NO: 77403 - DNA, 20 bp, Artificial Sequence
  MKO10077403_B_Ces2b
  gRNA
tggacatgggggacacaaca

SEQ ID NO: 77404 - DNA, 20 bp, Artificial Sequence
  MKO10077404_B_Ces2b
  gRNA
cagtgataaggtaaggaagc

SEQ ID NO: 77405 - DNA, 20 bp, Artificial Sequence
  MKO10077405_B_Ces2b
  gRNA
gccacctgtctctacgtccg

SEQ ID NO: 77406 - DNA, 20 bp, Artificial Sequence
  MKO10077406_B_Ces2c
  gRNA
tcaggaggtgcaaatcgcag

SEQ ID NO: 77407 - DNA, 20 bp, Artificial Sequence
  MKO10077407_B_Ces2c
  gRNA
caccccagcccatgcccatg

SEQ ID NO: 77408 - DNA, 20 bp, Artificial Sequence
  MKO10077408_B_Ces2c
  gRNA
caaagtgagcgatgttctgc

SEQ ID NO: 77409 - DNA, 20 bp, Artificial Sequence
  MKO10077409_B_Ces2e
  gRNA
caacagtgagtgcaccacca

SEQ ID NO: 77410 - DNA, 20 bp, Artificial Sequence
  MKO10077410_B_Ces2e
  gRNA
tgtaccagcccatgcccatg

SEQ ID NO: 77411 - DNA, 20 bp, Artificial Sequence
  MKO10077411_B_Ces2e
  gRNA
tgaagaatcccagaacaccc

SEQ ID NO: 77412 - DNA, 20 bp, Artificial Sequence
  MKO10077412_B_Ces2f
  gRNA
ccaaaaagtgtgacagaatc

SEQ ID NO: 77413 - DNA, 20 bp, Artificial Sequence
  MKO10077413_B_Ces2f
  gRNA
tatgctcacctgtaaaagcc

SEQ ID NO: 77414 - DNA, 20 bp, Artificial Sequence
  MKO10077414_B_Ces2f
  gRNA
cagctttgatgtctgtcaag

SEQ ID NO: 77415 - DNA, 20 bp, Artificial Sequence
  MKO10077415_B_Ces2g
  gRNA
gggtcagtttcaactccttc

SEQ ID NO: 77416 - DNA, 20 bp, Artificial Sequence
  MKO10077416_B_Ces2g
  gRNA
cacctcagagaagctaaata

SEQ ID NO: 77417 - DNA, 20 bp, Artificial Sequence
  MKO10077417_B_Ces2g
  gRNA
tcacgtgaatgagcctgcct

SEQ ID NO: 77418 - DNA, 20 bp, Artificial Sequence
  MKO10077418_B_Ces2h
  gRNA
tggatccatgctagcagcca

SEQ ID NO: 77419 - DNA, 20 bp, Artificial Sequence
  MKO10077419_B_Ces2h
  gRNA
catcactgcaatgaatatgc

SEQ ID NO: 77420 - DNA, 20 bp, Artificial Sequence
  MKO10077420_B_Ces2h
  gRNA
aagagtggacacccacatca

SEQ ID NO: 77421 - DNA, 20 bp, Artificial Sequence
  MKO10077421_B_Ces3a
  gRNA
tgctgatccatcatgagatg

SEQ ID NO: 77422 - DNA, 20 bp, Artificial Sequence
  MKO10077422_B_Ces3a
  gRNA
cccctttgctcaagcaccac

SEQ ID NO: 77423 - DNA, 20 bp, Artificial Sequence
  MKO10077423_B_Ces3a
  gRNA
caaagtcactcagcctgaag

SEQ ID NO: 77424 - DNA, 20 bp, Artificial Sequence
  MKO10077424_B_Ces3b
  gRNA
cccctttgctcaagcaccag

SEQ ID NO: 77425 - DNA, 20 bp, Artificial Sequence
  MKO10077425_B_Ces3b
  gRNA
atctcaggatggatcagcac

SEQ ID NO: 77426 - DNA, 20 bp, Artificial Sequence
  MKO10077426_B_Ces3b
  gRNA
tcccactggtgcttgagcaa

SEQ ID NO: 77427 - DNA, 20 bp, Artificial Sequence
  MKO10077427_B_Ces4a
  gRNA
ggaagccgaaccggcgagga

SEQ ID NO: 77428 - DNA, 20 bp, Artificial Sequence
  MKO10077428_B_Ces4a
  gRNA
tatactgtttccgagtgtta

SEQ ID NO: 77429 - DNA, 20 bp, Artificial Sequence
  MKO10077429_B_Ces4a
  gRNA
gcgggagcgatgagcgtctc

SEQ ID NO: 77430 - DNA, 20 bp, Artificial Sequence
  MKO10077430_B_Ces5a
  gRNA
tcccgctgagttaccgaaga

SEQ ID NO: 77431 - DNA, 20 bp, Artificial Sequence
  MKO10077431_B_Ces5a
  gRNA
tcccagaaggcccaattccc

SEQ ID NO: 77432 - DNA, 20 bp, Artificial Sequence
  MKO10077432_B_Ces5a
  gRNA
aaagtaagttaccctatact

SEQ ID NO: 77433 - DNA, 20 bp, Artificial Sequence
  MKO10077433_B_Cetn1
  gRNA
gctcattggccacacgcttg

SEQ ID NO: 77434 - DNA, 20 bp, Artificial Sequence
  MKO10077434_B_Cetn1
  gRNA
attcaaaaacctcaagcgtg

SEQ ID NO: 77435 - DNA, 20 bp, Artificial Sequence
  MKO10077435_B_Cetn1
  gRNA
cttcagctccttcacatcga

SEQ ID NO: 77436 - DNA, 20 bp, Artificial Sequence
  MKO10077436_B_Cetn2
  gRNA
tttcattgtaggtggcaatg

SEQ ID NO: 77437 - DNA, 20 bp, Artificial Sequence
  MKO10077437_B_Cetn2
  gRNA
tttgatctctttgatgctga

SEQ ID NO: 77438 - DNA, 20 bp, Artificial Sequence
  MKO10077438_B_Cetn2
  gRNA
attgatgaagctgatcgaga

SEQ ID NO: 77439 - DNA, 20 bp, Artificial Sequence
  MKO10077439_B_Cetn3
  gRNA
ttcaaatgtgatcttgccag

SEQ ID NO: 77440 - DNA, 20 bp, Artificial Sequence
  MKO10077440_B_Cetn3
  gRNA
gggtgagaacatgagcgatg

SEQ ID NO: 77441 - DNA, 20 bp, Artificial Sequence
  MKO10077441_B_Cetn3
  gRNA
aaaggtggcaatgagagcct

SEQ ID NO: 77442 - DNA, 20 bp, Artificial Sequence
  MKO10077442_B_Cetn4
  gRNA
catagatctgaaagaactga

SEQ ID NO: 77443 - DNA, 20 bp, Artificial Sequence
  MKO10077443_B_Cetn4
  gRNA
cttgatgaagctgatcgtga

SEQ ID NO: 77444 - DNA, 20 bp, Artificial Sequence
  MKO10077444_B_Cetn4
  gRNA
agcgcataactttagaccaa

SEQ ID NO: 77445 - DNA, 20 bp, Artificial Sequence
  MKO10077445_B_Cfb
  gRNA
agccacgcaggacaagtccc

SEQ ID NO: 77446 - DNA, 20 bp, Artificial Sequence
  MKO10077446_B_Cfb
  gRNA
accgccttggagaagttgaa

SEQ ID NO: 77447 - DNA, 20 bp, Artificial Sequence
  MKO10077447_B_Cfb
  gRNA
aggtgcgattagcagagccc

SEQ ID NO: 77448 - DNA, 20 bp, Artificial Sequence
  MKO10077448_B_Cfc1
  gRNA
agttctgtccagtgtcgtcc

SEQ ID NO: 77449 - DNA, 20 bp, Artificial Sequence
  MKO10077449_B_Cfc1
  gRNA
actgtcgcgctgcagctcat

SEQ ID NO: 77450 - DNA, 20 bp, Artificial Sequence
  MKO10077450_B_Cfc1
  gRNA
tttaaaggttatcagagcga

SEQ ID NO: 77451 - DNA, 20 bp, Artificial Sequence
  MKO10077451_B_Cfdp1
  gRNA
actttggtcctacatcatta

SEQ ID NO: 77452 - DNA, 20 bp, Artificial Sequence
  MKO10077452_B_Cfdp1
  gRNA
cttaccttagtttgtgaacc

SEQ ID NO: 77453 - DNA, 20 bp, Artificial Sequence
  MKO10077453_B_Cfdp1
  gRNA
catactcaccctgacccagc

SEQ ID NO: 77454 - DNA, 20 bp, Artificial Sequence
  MKO10077454_B_Cfd
  gRNA
gacactcgggtatagacgcc

SEQ ID NO: 77455 - DNA, 20 bp, Artificial Sequence
  MKO10077455_B_Cfd
  gRNA
agcccatgctcggccctaca

SEQ ID NO: 77456 - DNA, 20 bp, Artificial Sequence
  MKO10077456_B_Cfd
  gRNA
cccctgaaccctacaagcga

SEQ ID NO: 77457 - DNA, 20 bp, Artificial Sequence
  MKO10077457_B_Cfhr1
  gRNA
agaaggtgacattgtacaag

SEQ ID NO: 77458 - DNA, 20 bp, Artificial Sequence
  MKO10077458_B_Cfhr1
  gRNA
ccttaagtacataatagttc

SEQ ID NO: 77459 - DNA, 20 bp, Artificial Sequence
  MKO10077459_B_Cfhr1
  gRNA
aggtacttacatatacaggt

SEQ ID NO: 77460 - DNA, 20 bp, Artificial Sequence
  MKO10077460_B_Cfhr2
  gRNA
tcacctccttatattctaaa

SEQ ID NO: 77461 - DNA, 20 bp, Artificial Sequence
  MKO10077461_B_Cfhr2
  gRNA
tgaagcttacaggtacatct

SEQ ID NO: 77462 - DNA, 20 bp, Artificial Sequence
  MKO10077462_B_Cfhr2
  gRNA
gaatttccacaattcaaata

SEQ ID NO: 77463 - DNA, 20 bp, Artificial Sequence
  MKO10077463_B_Cfh
  gRNA
agatccaactgccagcctaa

SEQ ID NO: 77464 - DNA, 20 bp, Artificial Sequence
  MKO10077464_B_Cfh
  gRNA
gtgtctccgggatgcccaca

SEQ ID NO: 77465 - DNA, 20 bp, Artificial Sequence
  MKO10077465_B_Cfh
  gRNA
aatgatattccactatgtga

SEQ ID NO: 77466 - DNA, 20 bp, Artificial Sequence
  MKO10077466_B_Cfi
  gRNA
ccgtggcagagatgtatcga

SEQ ID NO: 77467 - DNA, 20 bp, Artificial Sequence
  MKO10077467_B_Cfi
  gRNA
ctcagttctcctcttcgtaa

SEQ ID NO: 77468 - DNA, 20 bp, Artificial Sequence
  MKO10077468_B_Cfi
  gRNA
cggagtgtgcctttacgaag

SEQ ID NO: 77469 - DNA, 20 bp, Artificial Sequence
  MKO10077469_B_Cfl1
  gRNA
tccccccagcccctccggtc

SEQ ID NO: 77470 - DNA, 20 bp, Artificial Sequence
  MKO10077470_B_Cfl1
  gRNA
tgtccctcaggcctctggtg

SEQ ID NO: 77471 - DNA, 20 bp, Artificial Sequence
  MKO10077471_B_Cfl1
  gRNA
tggcagcgccgtcatttccc

SEQ ID NO: 77472 - DNA, 20 bp, Artificial Sequence
  MKO10077472_B_Cfl2
  gRNA
cagatcttggtgggtgacat

SEQ ID NO: 77473 - DNA, 20 bp, Artificial Sequence
  MKO10077473_B_Cfl2
  gRNA
gccattaaaaagaaatttac

SEQ ID NO: 77474 - DNA, 20 bp, Artificial Sequence
  MKO10077474_B_Cfl2
  gRNA
ctcgacgctgggagagaaac

SEQ ID NO: 77475 - DNA, 20 bp, Artificial Sequence
  MKO10077475_B_Cflar
  gRNA
ttcttagagtttcttggatc

SEQ ID NO: 77476 - DNA, 20 bp, Artificial Sequence
  MKO10077476_B_Cflar
  gRNA
ccagagccctgtgtctgccg

SEQ ID NO: 77477 - DNA, 20 bp, Artificial Sequence
  MKO10077477_B_Cflar
  gRNA
tgcctgtgtaatcccttgta

SEQ ID NO: 77478 - DNA, 20 bp, Artificial Sequence
  MKO10077478_B_Cfp
  gRNA
gctgcgacacaggcgctgtg

SEQ ID NO: 77479 - DNA, 20 bp, Artificial Sequence
  MKO10077479_B_Cfp
  gRNA
agtggcctaccaccttgccc

SEQ ID NO: 77480 - DNA, 20 bp, Artificial Sequence
  MKO10077480_B_Cfp
  gRNA
gcatgatggtggcctctgtc

SEQ ID NO: 77481 - DNA, 20 bp, Artificial Sequence
  MKO10077481_B_Cftr
  gRNA
cgttccattgccatttacct

SEQ ID NO: 77482 - DNA, 20 bp, Artificial Sequence
  MKO10077482_B_Cftr
  gRNA
atatgtctgacaactccaag

SEQ ID NO: 77483 - DNA, 20 bp, Artificial Sequence
  MKO10077483_B_Cftr
  gRNA
gttcttgataaaataagtat

SEQ ID NO: 77484 - DNA, 20 bp, Artificial Sequence
  MKO10077484_B_Cga
  gRNA
ctccgtatgattctccactc

SEQ ID NO: 77485 - DNA, 20 bp, Artificial Sequence
  MKO10077485_B_Cga
  gRNA
tgaataataaagtctccatc

SEQ ID NO: 77486 - DNA, 20 bp, Artificial Sequence
  MKO10077486_B_Cga
  gRNA
aaaatatgcagctgtcattc

SEQ ID NO: 77487 - DNA, 20 bp, Artificial Sequence
  MKO10077487_B_Cggbp1
  gRNA
aattcagtgactcgatccag

SEQ ID NO: 77488 - DNA, 20 bp, Artificial Sequence
  MKO10077488_B_Cggbp1
  gRNA
cgcctcagctggtctgactt

SEQ ID NO: 77489 - DNA, 20 bp, Artificial Sequence
  MKO10077489_B_Cggbp1
  gRNA
accctccgttcttcacatgc

SEQ ID NO: 77490 - DNA, 20 bp, Artificial Sequence
  MKO10077490_B_Cgnl1
  gRNA
gctccgaattctccctctga

SEQ ID NO: 77491 - DNA, 20 bp, Artificial Sequence
  MKO10077491_B_Cgnl1
  gRNA
caccctgcagagacggctgg

SEQ ID NO: 77492 - DNA, 20 bp, Artificial Sequence
  MKO10077492_B_Cgnl1
  gRNA
gctgtagttcagacacttct

SEQ ID NO: 77493 - DNA, 20 bp, Artificial Sequence
  MKO10077493_B_Cgn
  gRNA
ctccagaagctcggagagtg

SEQ ID NO: 77494 - DNA, 20 bp, Artificial Sequence
  MKO10077494_B_Cgn
  gRNA
catagatggtggccttcaca

SEQ ID NO: 77495 - DNA, 20 bp, Artificial Sequence
  MKO10077495_B_Cgn
  gRNA
tctccagcaactcctgcagt

SEQ ID NO: 77496 - DNA, 20 bp, Artificial Sequence
  MKO10077496_B_Cgref1
  gRNA
gtgagctgctgttgtacctc

SEQ ID NO: 77497 - DNA, 20 bp, Artificial Sequence
  MKO10077497_B_Cgref1
  gRNA
cctaaagggagcagcaatag

SEQ ID NO: 77498 - DNA, 20 bp, Artificial Sequence
  MKO10077498_B_Cgref1
  gRNA
tgctcccggtccatgtgctc

SEQ ID NO: 77499 - DNA, 20 bp, Artificial Sequence
  MKO10077499_B_Cgrrf1
  gRNA
tgaacgctcttgtgctgaac

SEQ ID NO: 77500 - DNA, 20 bp, Artificial Sequence
  MKO10077500_B_Cgrrf1
  gRNA
gcccagatctcgctatcctt

SEQ ID NO: 77501 - DNA, 20 bp, Artificial Sequence
  MKO10077501_B_Cgrrf1
  gRNA
ggaagtttgtaagtcttatc

SEQ ID NO: 77502 - DNA, 20 bp, Artificial Sequence
  MKO10077502_B_Ch25h
  gRNA
gcgacgctacaagatccacc

SEQ ID NO: 77503 - DNA, 20 bp, Artificial Sequence
  MKO10077503_B_Ch25h
  gRNA
gttcacgcagcgctcaccgc

SEQ ID NO: 77504 - DNA, 20 bp, Artificial Sequence
  MKO10077504_B_Ch25h
  gRNA
actgagagtgatgcatgtcg

SEQ ID NO: 77505 - DNA, 20 bp, Artificial Sequence
  MKO10077505_B_Chac1
  gRNA
ggtgtggcataccaagttcg

SEQ ID NO: 77506 - DNA, 20 bp, Artificial Sequence
  MKO10077506_B_Chac1
  gRNA
ccctgtctagcctggccgag

SEQ ID NO: 77507 - DNA, 20 bp, Artificial Sequence
  MKO10077507_B_Chac1
  gRNA
cacttacctcacggtcttca

SEQ ID NO: 77508 - DNA, 20 bp, Artificial Sequence
  MKO10077508_B_Chac2
  gRNA
ataccccaggatcttcaaca

SEQ ID NO: 77509 - DNA, 20 bp, Artificial Sequence
  MKO10077509_B_Chac2
  gRNA
agatgctcgtctgcatcttc

SEQ ID NO: 77510 - DNA, 20 bp, Artificial Sequence
  MKO10077510_B_Chac2
  gRNA
gtgacccttgttgaagatcc

SEQ ID NO: 77511 - DNA, 20 bp, Artificial Sequence
  MKO10077511_B_Chadl
  gRNA
ccggcaccagaacctcaccg

SEQ ID NO: 77512 - DNA, 20 bp, Artificial Sequence
  MKO10077512_B_Chadl
  gRNA
cccagcctcagccgacattg

SEQ ID NO: 77513 - DNA, 20 bp, Artificial Sequence
  MKO10077513_B_Chadl
  gRNA
ctgttcctcaatgtcggctg

SEQ ID NO: 77514 - DNA, 20 bp, Artificial Sequence
  MKO10077514_B_Chad
  gRNA
gctgcaaatccccgaccaag

SEQ ID NO: 77515 - DNA, 20 bp, Artificial Sequence
  MKO10077515_B_Chad
  gRNA
attctcaccgccgaaggcca

SEQ ID NO: 77516 - DNA, 20 bp, Artificial Sequence
  MKO10077516_B_Chad
  gRNA
tcggggatttgcagctgcga

SEQ ID NO: 77517 - DNA, 20 bp, Artificial Sequence
  MKO10077517_B_Chaf1a
  gRNA
tgccctcaagaagctatcaa

SEQ ID NO: 77518 - DNA, 20 bp, Artificial Sequence
  MKO10077518_B_Chaf1a
  gRNA
gtggattgcaaagacagacc

SEQ ID NO: 77519 - DNA, 20 bp, Artificial Sequence
  MKO10077519_B_Chaf1a
  gRNA
ccagtgaagaggttaataca

SEQ ID NO: 77520 - DNA, 20 bp, Artificial Sequence
  MKO10077520_B_Chaf1b
  gRNA
gatgctaaaatctccccagt

SEQ ID NO: 77521 - DNA, 20 bp, Artificial Sequence
  MKO10077521_B_Chaf1b
  gRNA
cgcagctgaataaggagaac

SEQ ID NO: 77522 - DNA, 20 bp, Artificial Sequence
  MKO10077522_B_Chaf1b
  gRNA
cagatgccgtcattctgttg

SEQ ID NO: 77523 - DNA, 20 bp, Artificial Sequence
  MKO10077523_B_Champ1
  gRNA
gggaaaagtgcgcgtttccg

SEQ ID NO: 77524 - DNA, 20 bp, Artificial Sequence
  MKO10077524_B_Champ1
  gRNA
taatgcaaaatgcgatagtc

SEQ ID NO: 77525 - DNA, 20 bp, Artificial Sequence
  MKO10077525_B_Champ1
  gRNA
ataagaggaccagcgccctg

SEQ ID NO: 77526 - DNA, 20 bp, Artificial Sequence
  MKO10077526_B_Chat
  gRNA
acgatgacatgctcgggctc

SEQ ID NO: 77527 - DNA, 20 bp, Artificial Sequence
  MKO10077527_B_Chat
  gRNA
tgagcccgagcatgtcatcg

SEQ ID NO: 77528 - DNA, 20 bp, Artificial Sequence
  MKO10077528_B_Chat
  gRNA
ccttcagtgcatgcaacacc

SEQ ID NO: 77529 - DNA, 20 bp, Artificial Sequence
  MKO10077529_B_Chchd10
  gRNA
tgcccagcctgccgtccagc

SEQ ID NO: 77530 - DNA, 20 bp, Artificial Sequence
  MKO10077530_B_Chchd10
  gRNA
gagcgacctaaccctgtgtg

SEQ ID NO: 77531 - DNA, 20 bp, Artificial Sequence
  MKO10077531_B_Chchd10
  gRNA
gattgtatttgcactgtttg

SEQ ID NO: 77532 - DNA, 20 bp, Artificial Sequence
  MKO10077532_B_Chchd1
  gRNA
catcgacatctccgtgatac

SEQ ID NO: 77533 - DNA, 20 bp, Artificial Sequence
  MKO10077533_B_Chchd1
  gRNA
caggaagatgagatcaatcc

SEQ ID NO: 77534 - DNA, 20 bp, Artificial Sequence
  MKO10077534_B_Chchd1
  gRNA
cggactgtcccagagactcc

SEQ ID NO: 77535 - DNA, 20 bp, Artificial Sequence
  MKO10077535_B_Chchd2
  gRNA
gctcacctggtaagtgatgt

SEQ ID NO: 77536 - DNA, 20 bp, Artificial Sequence
  MKO10077536_B_Chchd2
  gRNA
ctgcagaaccagcagtcttt

SEQ ID NO: 77537 - DNA, 20 bp, Artificial Sequence
  MKO10077537_B_Chchd2
  gRNA
cacagagcttgacatcgctc

SEQ ID NO: 77538 - DNA, 20 bp, Artificial Sequence
  MKO10077538_B_Chchd3
  gRNA
cagtgaagaggagcgcatga

SEQ ID NO: 77539 - DNA, 20 bp, Artificial Sequence
  MKO10077539_B_Chchd3
  gRNA
ggcattggagcaagccaaaa

SEQ ID NO: 77540 - DNA, 20 bp, Artificial Sequence
  MKO10077540_B_Chchd3
  gRNA
catcctgcttccgcatcact

SEQ ID NO: 77541 - DNA, 20 bp, Artificial Sequence
  MKO10077541_B_Chchd4
  gRNA
ggggtcatcagctaccagct

SEQ ID NO: 77542 - DNA, 20 bp, Artificial Sequence
  MKO10077542_B_Chchd4
  gRNA
ctcaccttcctgccggcagt

SEQ ID NO: 77543 - DNA, 20 bp, Artificial Sequence
  MKO10077543_B_Chchd4
  gRNA
cagactgtatagaccagttc

SEQ ID NO: 77544 - DNA, 20 bp, Artificial Sequence
  MKO10077544_B_Chchd5
  gRNA
gaagtgtcttcgcttgaatg

SEQ ID NO: 77545 - DNA, 20 bp, Artificial Sequence
  MKO10077545_B_Chchd5
  gRNA
ccaaggggttgtcaggaggc

SEQ ID NO: 77546 - DNA, 20 bp, Artificial Sequence
  MKO10077546_B_Chchd5
  gRNA
caatctcgatgccacgactc

SEQ ID NO: 77547 - DNA, 20 bp, Artificial Sequence
  MKO10077547_B_Chchd6
  gRNA
acctgtcagagggcctttac

SEQ ID NO: 77548 - DNA, 20 bp, Artificial Sequence
  MKO10077548_B_Chchd6
  gRNA
cagtccaggatgagatggtc

SEQ ID NO: 77549 - DNA, 20 bp, Artificial Sequence
  MKO10077549_B_Chchd6
  gRNA
taggttccaacaggagcagt

SEQ ID NO: 77550 - DNA, 20 bp, Artificial Sequence
  MKO10077550_B_Chchd7
  gRNA
agcagaaagagacgaaattt

SEQ ID NO: 77551 - DNA, 20 bp, Artificial Sequence
  MKO10077551_B_Chchd7
  gRNA
tttgtacttcaagaagtaac

SEQ ID NO: 77552 - DNA, 20 bp, Artificial Sequence
  MKO10077552_B_Chchd7
  gRNA
tcgtctctttctgctgctgt

SEQ ID NO: 77553 - DNA, 20 bp, Artificial Sequence
  MKO10077553_B_Chd1l
  gRNA
tatcgctctcctcatttact

SEQ ID NO: 77554 - DNA, 20 bp, Artificial Sequence
  MKO10077554_B_Chd1l
  gRNA
gtcacctgtgtatgtcacac

SEQ ID NO: 77555 - DNA, 20 bp, Artificial Sequence
  MKO10077555_B_Chd1l
  gRNA
cagtgcttccattgccagaa

SEQ ID NO: 77556 - DNA, 20 bp, Artificial Sequence
  MKO10077556_B_Chd1
  gRNA
gatccactattagatgaagc

SEQ ID NO: 77557 - DNA, 20 bp, Artificial Sequence
  MKO10077557_B_Chd1
  gRNA
gtcgtcggagtcttcactgc

SEQ ID NO: 77558 - DNA, 20 bp, Artificial Sequence
  MKO10077558_B_Chd1
  gRNA
gcaaaaccaccaaaagtcga

SEQ ID NO: 77559 - DNA, 20 bp, Artificial Sequence
  MKO10077559_B_Chd2
  gRNA
ctagaagaccggtccctaga

SEQ ID NO: 77560 - DNA, 20 bp, Artificial Sequence
  MKO10077560_B_Chd2
  gRNA
agaagactccgaactgctat

SEQ ID NO: 77561 - DNA, 20 bp, Artificial Sequence
  MKO10077561_B_Chd2
  gRNA
ccacactgaaggcaagtagc

SEQ ID NO: 77562 - DNA, 20 bp, Artificial Sequence
  MKO10077562_B_Chd3
  gRNA
gccacccccatagcaccatc

SEQ ID NO: 77563 - DNA, 20 bp, Artificial Sequence
  MKO10077563_B_Chd3
  gRNA
acgagcttcttccgtttcct

SEQ ID NO: 77564 - DNA, 20 bp, Artificial Sequence
  MKO10077564_B_Chd3
  gRNA
ttccttcttcgtttccgacc

SEQ ID NO: 77565 - DNA, 20 bp, Artificial Sequence
  MKO10077565_B_Chd4
  gRNA
ttgcggatcggcacctccac

SEQ ID NO: 77566 - DNA, 20 bp, Artificial Sequence
  MKO10077566_B_Chd4
  gRNA
taagagcaagcgccaaaaaa

SEQ ID NO: 77567 - DNA, 20 bp, Artificial Sequence
  MKO10077567_B_Chd4
  gRNA
ggctctgcgctcagacagtg

SEQ ID NO: 77568 - DNA, 20 bp, Artificial Sequence
  MKO10077568_B_Chd5
  gRNA
tgacgagatgtcagacaacg

SEQ ID NO: 77569 - DNA, 20 bp, Artificial Sequence
  MKO10077569_B_Chd5
  gRNA
gccgggcatgcggggcccgc

SEQ ID NO: 77570 - DNA, 20 bp, Artificial Sequence
  MKO10077570_B_Chd5
  gRNA
aaagagagcaagtcctccaa

SEQ ID NO: 77571 - DNA, 20 bp, Artificial Sequence
  MKO10077571_B_Chd6
  gRNA
accgacctcctggacagtct

SEQ ID NO: 77572 - DNA, 20 bp, Artificial Sequence
  MKO10077572_B_Chd6
  gRNA
gggctgtacctcagcctgcc

SEQ ID NO: 77573 - DNA, 20 bp, Artificial Sequence
  MKO10077573_B_Chd6
  gRNA
atgtcttgtagcagggagca

SEQ ID NO: 77574 - DNA, 20 bp, Artificial Sequence
  MKO10077574_B_Chd7
  gRNA
tgtagaagaggcggtccagc

SEQ ID NO: 77575 - DNA, 20 bp, Artificial Sequence
  MKO10077575_B_Chd7
  gRNA
cagccgcctagtgaaaaagc

SEQ ID NO: 77576 - DNA, 20 bp, Artificial Sequence
  MKO10077576_B_Chd7
  gRNA
gaagcgatacactgaagatt

SEQ ID NO: 77577 - DNA, 20 bp, Artificial Sequence
  MKO10077577_B_Chd8
  gRNA
catacctcgagtcctgaatg

SEQ ID NO: 77578 - DNA, 20 bp, Artificial Sequence
  MKO10077578_B_Chd8
  gRNA
ttatgcctgcacaatcgccc

SEQ ID NO: 77579 - DNA, 20 bp, Artificial Sequence
  MKO10077579_B_Chd8
  gRNA
ccagtcttccctgcagtatg

SEQ ID NO: 77580 - DNA, 20 bp, Artificial Sequence
  MKO10077580_B_Chd9
  gRNA
cactaagctgcagaataccc

SEQ ID NO: 77581 - DNA, 20 bp, Artificial Sequence
  MKO10077581_B_Chd9
  gRNA
gatcaaatcgacaaattaag

SEQ ID NO: 77582 - DNA, 20 bp, Artificial Sequence
  MKO10077582_B_Chd9
  gRNA
tagacaaaatactagcttgt

SEQ ID NO: 77583 - DNA, 20 bp, Artificial Sequence
  MKO10077583_B_Chdh
  gRNA
ccatcgcaagtgattgacca

SEQ ID NO: 77584 - DNA, 20 bp, Artificial Sequence
  MKO10077584_B_Chdh
  gRNA
tcttccaggcttacgtcagc

SEQ ID NO: 77585 - DNA, 20 bp, Artificial Sequence
  MKO10077585_B_Chdh
  gRNA
agcctgcgcctacttgcacc

SEQ ID NO: 77586 - DNA, 20 bp, Artificial Sequence
  MKO10077586_B_Chek1
  gRNA
agaatttcactacattctcg

SEQ ID NO: 77587 - DNA, 20 bp, Artificial Sequence
  MKO10077587_B_Chek1
  gRNA
gagaatgtagtgaaattcta

SEQ ID NO: 77588 - DNA, 20 bp, Artificial Sequence
  MKO10077588_B_Chek1
  gRNA
tcttacccctttcatccaag

SEQ ID NO: 77589 - DNA, 20 bp, Artificial Sequence
  MKO10077589_B_Chek2
  gRNA
ttgtccgtccttctcaacag

SEQ ID NO: 77590 - DNA, 20 bp, Artificial Sequence
  MKO10077590_B_Chek2
  gRNA
tttccccttagtggtgcgtg

SEQ ID NO: 77591 - DNA, 20 bp, Artificial Sequence
  MKO10077591_B_Chek2
  gRNA
ttcgtaaataccgagcttat

SEQ ID NO: 77592 - DNA, 20 bp, Artificial Sequence
  MKO10077592_B_Cherp
  gRNA
tggatgagctcgtccattga

SEQ ID NO: 77593 - DNA, 20 bp, Artificial Sequence
  MKO10077593_B_Cherp
  gRNA
cgagttcgagaaaatgacga

SEQ ID NO: 77594 - DNA, 20 bp, Artificial Sequence
  MKO10077594_B_Cherp
  gRNA
gctagtaatctgcaagcagc

SEQ ID NO: 77595 - DNA, 20 bp, Artificial Sequence
  MKO10077595_B_Chfr
  gRNA
atatcatctatttggtgtac

SEQ ID NO: 77596 - DNA, 20 bp, Artificial Sequence
  MKO10077596_B_Chfr
  gRNA
tccagagaccagtttattgc

SEQ ID NO: 77597 - DNA, 20 bp, Artificial Sequence
  MKO10077597_B_Chfr
  gRNA
tgccacttaaagattcatag

SEQ ID NO: 77598 - DNA, 20 bp, Artificial Sequence
  MKO10077598_B_Chga
  gRNA
ctgaaataccttggagagcc

SEQ ID NO: 77599 - DNA, 20 bp, Artificial Sequence
  MKO10077599_B_Chga
  gRNA
tcctacaaggtgccaaggag

SEQ ID NO: 77600 - DNA, 20 bp, Artificial Sequence
  MKO10077600_B_Chga
  gRNA
gtgaacagccccatgacaaa

SEQ ID NO: 77601 - DNA, 20 bp, Artificial Sequence
  MKO10077601_B_Chgb
  gRNA
aggggtgatcgttggaacac

SEQ ID NO: 77602 - DNA, 20 bp, Artificial Sequence
  MKO10077602_B_Chgb
  gRNA
tctccaactgtcagccccgc

SEQ ID NO: 77603 - DNA, 20 bp, Artificial Sequence
  MKO10077603_B_Chgb
  gRNA
caacgatcacccctgagtgc

SEQ ID NO: 77604 - DNA, 20 bp, Artificial Sequence
  MKO10077604_B_Chia1
  gRNA
acgcagaaatttgatgactg

SEQ ID NO: 77605 - DNA, 20 bp, Artificial Sequence
  MKO10077605_B_Chia1
  gRNA
agttccagcctccaattgcc

SEQ ID NO: 77606 - DNA, 20 bp, Artificial Sequence
  MKO10077606_B_Chia1
  gRNA
tcttctgctgaatgctcagc

SEQ ID NO: 77607 - DNA, 20 bp, Artificial Sequence
  MKO10077607_B_Chic1
  gRNA
cgattcagaagttactagaa

SEQ ID NO: 77608 - DNA, 20 bp, Artificial Sequence
  MKO10077608_B_Chic1
  gRNA
ctctccctgtcaatgtgaaa

SEQ ID NO: 77609 - DNA, 20 bp, Artificial Sequence
  MKO10077609_B_Chic1
  gRNA
atgtgaaactagcaatatga

SEQ ID NO: 77610 - DNA, 20 bp, Artificial Sequence
  MKO10077610_B_Chic2
  gRNA
gctgttaactctgttgatgc

SEQ ID NO: 77611 - DNA, 20 bp, Artificial Sequence
  MKO10077611_B_Chic2
  gRNA
atgtgaaacgaacaacatga

SEQ ID NO: 77612 - DNA, 20 bp, Artificial Sequence
  MKO10077612_B_Chic2
  gRNA
cgattgagaagttattagaa

SEQ ID NO: 77613 - DNA, 20 bp, Artificial Sequence
  MKO10077613_B_Chid1
  gRNA
ctcttcagttgcaaccagac

SEQ ID NO: 77614 - DNA, 20 bp, Artificial Sequence
  MKO10077614_B_Chid1
  gRNA
cgtgagatgtttgaaattac

SEQ ID NO: 77615 - DNA, 20 bp, Artificial Sequence
  MKO10077615_B_Chid1
  gRNA
gctgtcaagaagcatgccaa

SEQ ID NO: 77616 - DNA, 20 bp, Artificial Sequence
  MKO10077616_B_Chil1
  gRNA
gcgacaacatgcttagcaca

SEQ ID NO: 77617 - DNA, 20 bp, Artificial Sequence
  MKO10077617_B_Chil1
  gRNA
agaagcttccaacgccttcc

SEQ ID NO: 77618 - DNA, 20 bp, Artificial Sequence
  MKO10077618_B_Chil1
  gRNA
atttccaccctccaacagac

SEQ ID NO: 77619 - DNA, 20 bp, Artificial Sequence
  MKO10077619_B_Chil3
  gRNA
ctgactgaatgaatatctga

SEQ ID NO: 77620 - DNA, 20 bp, Artificial Sequence
  MKO10077620_B_Chil3
  gRNA
cactgagctaaaaactctcc

SEQ ID NO: 77621 - DNA, 20 bp, Artificial Sequence
  MKO10077621_B_Chil3
  gRNA
tccaaacttccatcctccaa

SEQ ID NO: 77622 - DNA, 20 bp, Artificial Sequence
  MKO10077622_B_Chil4
  gRNA
aattcttctgaatgtacagc

SEQ ID NO: 77623 - DNA, 20 bp, Artificial Sequence
  MKO10077623_B_Chil4
  gRNA
atgcataaggttcagttcca

SEQ ID NO: 77624 - DNA, 20 bp, Artificial Sequence
  MKO10077624_B_Chil4
  gRNA
cactgagctaaaaactctcc

SEQ ID NO: 77625 - DNA, 20 bp, Artificial Sequence
  MKO10077625_B_Chil6
  gRNA
tgatgtgttacttcaacaac

SEQ ID NO: 77626 - DNA, 20 bp, Artificial Sequence
  MKO10077626_B_Chil6
  gRNA
cctccttctgaatgctcaaa

SEQ ID NO: 77627 - DNA, 20 bp, Artificial Sequence
  MKO10077627_B_Chil6
  gRNA
tgttgaagtaacacatcagc

SEQ ID NO: 77628 - DNA, 20 bp, Artificial Sequence
  MKO10077628_B_Chit1
  gRNA
catcaaaaccttgagtgcgc

SEQ ID NO: 77629 - DNA, 20 bp, Artificial Sequence
  MKO10077629_B_Chit1
  gRNA
ctccggctcacttagtcttt

SEQ ID NO: 77630 - DNA, 20 bp, Artificial Sequence
  MKO10077630_B_Chit1
  gRNA
tccagcctccaacggctaac

SEQ ID NO: 77631 - DNA, 20 bp, Artificial Sequence
  MKO10077631_B_Chka
  gRNA
agccgcaagagcactttccg

SEQ ID NO: 77632 - DNA, 20 bp, Artificial Sequence
  MKO10077632_B_Chka
  gRNA
ctcaggttctcgagctcaag

SEQ ID NO: 77633 - DNA, 20 bp, Artificial Sequence
  MKO10077633_B_Chka
  gRNA
ctgtttccagagccggcgat

SEQ ID NO: 77634 - DNA, 20 bp, Artificial Sequence
  MKO10077634_B_Chkb
  gRNA
ctcccgacaacactgggtcc

SEQ ID NO: 77635 - DNA, 20 bp, Artificial Sequence
  MKO10077635_B_Chkb
  gRNA
tgttcgccattctcgcagag

SEQ ID NO: 77636 - DNA, 20 bp, Artificial Sequence
  MKO10077636_B_Chkb
  gRNA
acatctctaccaggttcatc

SEQ ID NO: 77637 - DNA, 20 bp, Artificial Sequence
  MKO10077637_B_Chl1
  gRNA
ttaccctgcaaccctccaaa

SEQ ID NO: 77638 - DNA, 20 bp, Artificial Sequence
  MKO10077638_B_Chl1
  gRNA
tgtacaatcgttcttaattt

SEQ ID NO: 77639 - DNA, 20 bp, Artificial Sequence
  MKO10077639_B_Chl1
  gRNA
caaattgaatgtgaagcgaa

SEQ ID NO: 77640 - DNA, 20 bp, Artificial Sequence
  MKO10077640_B_Chml
  gRNA
gcagagaagttcccccctag

SEQ ID NO: 77641 - DNA, 20 bp, Artificial Sequence
  MKO10077641_B_Chml
  gRNA
gtgagccgaagctcatactg

SEQ ID NO: 77642 - DNA, 20 bp, Artificial Sequence
  MKO10077642_B_Chml
  gRNA
tcaaagccgctgtattctca

SEQ ID NO: 77643 - DNA, 20 bp, Artificial Sequence
  MKO10077643_B_Chmp1a
  gRNA
atcccaggtgaccaagaata

SEQ ID NO: 77644 - DNA, 20 bp, Artificial Sequence
  MKO10077644_B_Chmp1a
  gRNA
ttagttcacagcgaagcagc

SEQ ID NO: 77645 - DNA, 20 bp, Artificial Sequence
  MKO10077645_B_Chmp1a
  gRNA
gccatccgcaagaagaatga

SEQ ID NO: 77646 - DNA, 20 bp, Artificial Sequence
  MKO10077646_B_Chmp1b
  gRNA
cgaacaccagttcgagactc

SEQ ID NO: 77647 - DNA, 20 bp, Artificial Sequence
  MKO10077647_B_Chmp1b
  gRNA
atacacagttacgctaactc

SEQ ID NO: 77648 - DNA, 20 bp, Artificial Sequence
  MKO10077648_B_Chmp1b
  gRNA
ccgcacgacgatgtccaaca

SEQ ID NO: 77649 - DNA, 20 bp, Artificial Sequence
  MKO10077649_B_Chmp2a
  gRNA
tagtgatgctgttgtgtccc

SEQ ID NO: 77650 - DNA, 20 bp, Artificial Sequence
  MKO10077650_B_Chmp2a
  gRNA
cacttgacagctcatctgtg

SEQ ID NO: 77651 - DNA, 20 bp, Artificial Sequence
  MKO10077651_B_Chmp2a
  gRNA
ggctcactcagtgtggcagc

SEQ ID NO: 77652 - DNA, 20 bp, Artificial Sequence
  MKO10077652_B_Chmp2b
  gRNA
gttcctcatagatgtcataa

SEQ ID NO: 77653 - DNA, 20 bp, Artificial Sequence
  MKO10077653_B_Chmp2b
  gRNA
ccgagcagccttagagaaac

SEQ ID NO: 77654 - DNA, 20 bp, Artificial Sequence
  MKO10077654_B_Chmp2b
  gRNA
agccatcaaagatgtcatcc

SEQ ID NO: 77655 - DNA, 20 bp, Artificial Sequence
  MKO10077655_B_Chmp3
  gRNA
ccttgacctgatcatctcct

SEQ ID NO: 77656 - DNA, 20 bp, Artificial Sequence
  MKO10077656_B_Chmp3
  gRNA
gcagagaaccagctactcgc

SEQ ID NO: 77657 - DNA, 20 bp, Artificial Sequence
  MKO10077657_B_Chmp3
  gRNA
tgtgaaagatgcagccaaga

SEQ ID NO: 77658 - DNA, 20 bp, Artificial Sequence
  MKO10077658_B_Chmp4b
  gRNA
gcagcacatacatgttgtcg

SEQ ID NO: 77659 - DNA, 20 bp, Artificial Sequence
  MKO10077659_B_Chmp4b
  gRNA
gtagccctaccatccaaacc

SEQ ID NO: 77660 - DNA, 20 bp, Artificial Sequence
  MKO10077660_B_Chmp4b
  gRNA
ctggaacagttacatggatc

SEQ ID NO: 77661 - DNA, 20 bp, Artificial Sequence
  MKO10077661_B_Chmp4c
  gRNA
gtttgccgatggcttcgatg

SEQ ID NO: 77662 - DNA, 20 bp, Artificial Sequence
  MKO10077662_B_Chmp4c
  gRNA
ggaacagacctgctcgagac

SEQ ID NO: 77663 - DNA, 20 bp, Artificial Sequence
  MKO10077663_B_Chmp4c
  gRNA
gcatgccctcctccgtgcac

SEQ ID NO: 77664 - DNA, 20 bp, Artificial Sequence
  MKO10077664_B_Chmp5
  gRNA
ttaggttgatgccatgaagt

SEQ ID NO: 77665 - DNA, 20 bp, Artificial Sequence
  MKO10077665_B_Chmp5
  gRNA
ttacaccatccagtcactaa

SEQ ID NO: 77666 - DNA, 20 bp, Artificial Sequence
  MKO10077666_B_Chmp5
  gRNA
ggaaatgaagaaggcatata

SEQ ID NO: 77667 - DNA, 20 bp, Artificial Sequence
  MKO10077667_B_Chmp6
  gRNA
gctgctgcgtgaccctcttc

SEQ ID NO: 77668 - DNA, 20 bp, Artificial Sequence
  MKO10077668_B_Chmp6
  gRNA
gaggatcctggacgagaccc

SEQ ID NO: 77669 - DNA, 20 bp, Artificial Sequence
  MKO10077669_B_Chmp6
  gRNA
atgtctgaataagatgcacc

SEQ ID NO: 77670 - DNA, 20 bp, Artificial Sequence
  MKO10077670_B_Chmp7
  gRNA
aagactcgaccttccgagag

SEQ ID NO: 77671 - DNA, 20 bp, Artificial Sequence
  MKO10077671_B_Chmp7
  gRNA
caggaagacgccgacccccc

SEQ ID NO: 77672 - DNA, 20 bp, Artificial Sequence
  MKO10077672_B_Chmp7
  gRNA
ggtgcaaagaggaagcccgc

SEQ ID NO: 77673 - DNA, 20 bp, Artificial Sequence
  MKO10077673_B_Chm
  gRNA
agctattcttcttagtagca

SEQ ID NO: 77674 - DNA, 20 bp, Artificial Sequence
  MKO10077674_B_Chm
  gRNA
tgaacatgcagctgcaatga

SEQ ID NO: 77675 - DNA, 20 bp, Artificial Sequence
  MKO10077675_B_Chm
  gRNA
cagtcctgaaaagctgaaac

SEQ ID NO: 77676 - DNA, 20 bp, Artificial Sequence
  MKO10077676_B_Chn1
  gRNA
taggcatcgtatgtgatgag

SEQ ID NO: 77677 - DNA, 20 bp, Artificial Sequence
  MKO10077677_B_Chn1
  gRNA
tctgatagcgtatgtcgttc

SEQ ID NO: 77678 - DNA, 20 bp, Artificial Sequence
  MKO10077678_B_Chn1
  gRNA
gtgcacttaaactgtacttc

SEQ ID NO: 77679 - DNA, 20 bp, Artificial Sequence
  MKO10077679_B_Chn2
  gRNA
ggctcatcgcccagggagtc

SEQ ID NO: 77680 - DNA, 20 bp, Artificial Sequence
  MKO10077680_B_Chn2
  gRNA
cctgcaggattaaagtcaga

SEQ ID NO: 77681 - DNA, 20 bp, Artificial Sequence
  MKO10077681_B_Chn2
  gRNA
ctgttcacagatctcttcac

SEQ ID NO: 77682 - DNA, 20 bp, Artificial Sequence
  MKO10077682_B_Chodl
  gRNA
ctgggcaggcacccgatgtt

SEQ ID NO: 77683 - DNA, 20 bp, Artificial Sequence
  MKO10077683_B_Chodl
  gRNA
aggtagggacctcctaggcc

SEQ ID NO: 77684 - DNA, 20 bp, Artificial Sequence
  MKO10077684_B_Chodl
  gRNA
tcaggttggtttgtaagata

SEQ ID NO: 77685 - DNA, 20 bp, Artificial Sequence
  MKO10077685_B_Chordc1
  gRNA
gataaacttaaactgtcatc

SEQ ID NO: 77686 - DNA, 20 bp, Artificial Sequence
  MKO10077686_B_Chordc1
  gRNA
gttggtcttgctgtaaaaga

SEQ ID NO: 77687 - DNA, 20 bp, Artificial Sequence
  MKO10077687_B_Chordc1
  gRNA
gatgcttgcacataccaccc

SEQ ID NO: 77688 - DNA, 20 bp, Artificial Sequence
  MKO10077688_B_Chp1
  gRNA
cactcacccctctgagaaga

SEQ ID NO: 77689 - DNA, 20 bp, Artificial Sequence
  MKO10077689_B_Chp1
  gRNA
ggctcatttccgacccattg

SEQ ID NO: 77690 - DNA, 20 bp, Artificial Sequence
  MKO10077690_B_Chp1
  gRNA
gcagccgggaagatttccag

SEQ ID NO: 77691 - DNA, 20 bp, Artificial Sequence
  MKO10077691_B_Chp2
  gRNA
atcgggatgggaagatctcc

SEQ ID NO: 77692 - DNA, 20 bp, Artificial Sequence
  MKO10077692_B_Chp2
  gRNA
ggaagaagctgtctataatg

SEQ ID NO: 77693 - DNA, 20 bp, Artificial Sequence
  MKO10077693_B_Chp2
  gRNA
cgcctagacctccagcagat

SEQ ID NO: 77694 - DNA, 20 bp, Artificial Sequence
  MKO10077694_B_Chpf2
  gRNA
cgggggcagatttgaccggc

SEQ ID NO: 77695 - DNA, 20 bp, Artificial Sequence
  MKO10077695_B_Chpf2
  gRNA
gagtgccttcgccgttcacc

SEQ ID NO: 77696 - DNA, 20 bp, Artificial Sequence
  MKO10077696_B_Chpf2
  gRNA
acagtatcgctccttcgaac

SEQ ID NO: 77697 - DNA, 20 bp, Artificial Sequence
  MKO10077697_B_Chpf
  gRNA
cggccgcaggacttcatcgg

SEQ ID NO: 77698 - DNA, 20 bp, Artificial Sequence
  MKO10077698_B_Chpf
  gRNA
gcgcagaacctcaaagcgtg

SEQ ID NO: 77699 - DNA, 20 bp, Artificial Sequence
  MKO10077699_B_Chpf
  gRNA
agcccggatccgagcgcgag

SEQ ID NO: 77700 - DNA, 20 bp, Artificial Sequence
  MKO10077700_B_Chpt1
  gRNA
agcaacaatgtgggactata

SEQ ID NO: 77701 - DNA, 20 bp, Artificial Sequence
  MKO10077701_B_Chpt1
  gRNA
agacgatcactaaagctacc

SEQ ID NO: 77702 - DNA, 20 bp, Artificial Sequence
  MKO10077702_B_Chpt1
  gRNA
gcttccattgctgttcgcct

SEQ ID NO: 77703 - DNA, 20 bp, Artificial Sequence
  MKO10077703_B_Chrac1
  gRNA
ttactagctaaaatcttctt

SEQ ID NO: 77704 - DNA, 20 bp, Artificial Sequence
  MKO10077704_B_Chrac1
  gRNA
aagcgaccttggtgaagccc

SEQ ID NO: 77705 - DNA, 20 bp, Artificial Sequence
  MKO10077705_B_Chrac1
  gRNA
cgacttagccagcactgcag

SEQ ID NO: 77706 - DNA, 20 bp, Artificial Sequence
  MKO10077706_B_Chrdl1
  gRNA
tgagaaatggcatccctacc

SEQ ID NO: 77707 - DNA, 20 bp, Artificial Sequence
  MKO10077707_B_Chrdl1
  gRNA
gaagacttggacatctgact

SEQ ID NO: 77708 - DNA, 20 bp, Artificial Sequence
  MKO10077708_B_Chrdl1
  gRNA
aactggattacctgggcagc

SEQ ID NO: 77709 - DNA, 20 bp, Artificial Sequence
  MKO10077709_B_Chrdl2
  gRNA
gtcttacaatacagctacac

SEQ ID NO: 77710 - DNA, 20 bp, Artificial Sequence
  MKO10077710_B_Chrdl2
  gRNA
acctttgcaggtctgacagc

SEQ ID NO: 77711 - DNA, 20 bp, Artificial Sequence
  MKO10077711_B_Chrdl2
  gRNA
aagctacttacccacacacc

SEQ ID NO: 77712 - DNA, 20 bp, Artificial Sequence
  MKO10077712_B_Chrd
  gRNA
tctatgccttggacgagacg

SEQ ID NO: 77713 - DNA, 20 bp, Artificial Sequence
  MKO10077713_B_Chrd
  gRNA
cagcctcagtgggctcgccg

SEQ ID NO: 77714 - DNA, 20 bp, Artificial Sequence
  MKO10077714_B_Chrd
  gRNA
cccttggatactcgaagacc

SEQ ID NO: 77715 - DNA, 20 bp, Artificial Sequence
  MKO10077715_B_Chrm1
  gRNA
cagtcatgtgtacgctgtac

SEQ ID NO: 77716 - DNA, 20 bp, Artificial Sequence
  MKO10077716_B_Chrm1
  gRNA
accaagaaaggccgagaccg

SEQ ID NO: 77717 - DNA, 20 bp, Artificial Sequence
  MKO10077717_B_Chrm1
  gRNA
gccagcgccgcttgtcccag

SEQ ID NO: 77718 - DNA, 20 bp, Artificial Sequence
  MKO10077718_B_Chrm2
  gRNA
gacctgtagtgtgcgacctt

SEQ ID NO: 77719 - DNA, 20 bp, Artificial Sequence
  MKO10077719_B_Chrm2
  gRNA
accgggtcttggttggccac

SEQ ID NO: 77720 - DNA, 20 bp, Artificial Sequence
  MKO10077720_B_Chrm2
  gRNA
gcatgatgattgcagctgcg

SEQ ID NO: 77721 - DNA, 20 bp, Artificial Sequence
  MKO10077721_B_Chrm3
  gRNA
acccggcagcttgagtacaa

SEQ ID NO: 77722 - DNA, 20 bp, Artificial Sequence
  MKO10077722_B_Chrm3
  gRNA
taatgatgtaggtcgtgaac

SEQ ID NO: 77723 - DNA, 20 bp, Artificial Sequence
  MKO10077723_B_Chrm3
  gRNA
cggcaacatccttgtcattg

SEQ ID NO: 77724 - DNA, 20 bp, Artificial Sequence
  MKO10077724_B_Chrm4
  gRNA
tcctctcgagaagcgccccc

SEQ ID NO: 77725 - DNA, 20 bp, Artificial Sequence
  MKO10077725_B_Chrm4
  gRNA
tgttcacaagcatcgacccg

SEQ ID NO: 77726 - DNA, 20 bp, Artificial Sequence
  MKO10077726_B_Chrm4
  gRNA
cgtgtgcagatctcatcata

SEQ ID NO: 77727 - DNA, 20 bp, Artificial Sequence
  MKO10077727_B_Chrm5
  gRNA
acgctgggttctcgggagtc

SEQ ID NO: 77728 - DNA, 20 bp, Artificial Sequence
  MKO10077728_B_Chrm5
  gRNA
gaccaagacattgccgacaa

SEQ ID NO: 77729 - DNA, 20 bp, Artificial Sequence
  MKO10077729_B_Chrm5
  gRNA
agtatggtcatgacggagac

SEQ ID NO: 77730 - DNA, 20 bp, Artificial Sequence
  MKO10077730_B_Chrna10
  gRNA
ctcatgacaagggcccgctg

SEQ ID NO: 77731 - DNA, 20 bp, Artificial Sequence
  MKO10077731_B_Chrna10
  gRNA
aattgcatccaagtcaccgt

SEQ ID NO: 77732 - DNA, 20 bp, Artificial Sequence
  MKO10077732_B_Chrna10
  gRNA
ccccaaagcctacggtgact

SEQ ID NO: 77733 - DNA, 20 bp, Artificial Sequence
  MKO10077733_B_Chrna1
  gRNA
ctggacctatgacggctctg

SEQ ID NO: 77734 - DNA, 20 bp, Artificial Sequence
  MKO10077734_B_Chrna1
  gRNA
tacctgtttcagacgtacat

SEQ ID NO: 77735 - DNA, 20 bp, Artificial Sequence
  MKO10077735_B_Chrna1
  gRNA
gctgcagttctgctcatcga

SEQ ID NO: 77736 - DNA, 20 bp, Artificial Sequence
  MKO10077736_B_Chrna2
  gRNA
ggaatgactacaagctgcgc

SEQ ID NO: 77737 - DNA, 20 bp, Artificial Sequence
  MKO10077737_B_Chrna2
  gRNA
tgaacaggcggtcctcggca

SEQ ID NO: 77738 - DNA, 20 bp, Artificial Sequence
  MKO10077738_B_Chrna2
  gRNA
gcgtcccctcagagatgatc

SEQ ID NO: 77739 - DNA, 20 bp, Artificial Sequence
  MKO10077739_B_Chrna3
  gRNA
tctcgttgtaatcttcaaac

SEQ ID NO: 77740 - DNA, 20 bp, Artificial Sequence
  MKO10077740_B_Chrna3
  gRNA
ctcgcatgaactccacccct

SEQ ID NO: 77741 - DNA, 20 bp, Artificial Sequence
  MKO10077741_B_Chrna3
  gRNA
accctctgactaccaagggg

SEQ ID NO: 77742 - DNA, 20 bp, Artificial Sequence
  MKO10077742_B_Chrna4
  gRNA
gtgacattctcgtagtcacc

SEQ ID NO: 77743 - DNA, 20 bp, Artificial Sequence
  MKO10077743_B_Chrna4
  gRNA
ggcatgactacaaactgcgc

SEQ ID NO: 77744 - DNA, 20 bp, Artificial Sequence
  MKO10077744_B_Chrna4
  gRNA
tacctgcttcacccacacgt

SEQ ID NO: 77745 - DNA, 20 bp, Artificial Sequence
  MKO10077745_B_Chrna5
  gRNA
ttatcaaacaaaacgatgtc

SEQ ID NO: 77746 - DNA, 20 bp, Artificial Sequence
  MKO10077746_B_Chrna5
  gRNA
ccttgcaatatctcagttag

SEQ ID NO: 77747 - DNA, 20 bp, Artificial Sequence
  MKO10077747_B_Chrna5
  gRNA
agctaatgaccaccaacgtc

SEQ ID NO: 77748 - DNA, 20 bp, Artificial Sequence
  MKO10077748_B_Chrna6
  gRNA
cagtgctgtcggcgacttcc

SEQ ID NO: 77749 - DNA, 20 bp, Artificial Sequence
  MKO10077749_B_Chrna6
  gRNA
ctcactacaaccgcttcatc

SEQ ID NO: 77750 - DNA, 20 bp, Artificial Sequence
  MKO10077750_B_Chrna6
  gRNA
ggaaggactacagattgcgt

SEQ ID NO: 77751 - DNA, 20 bp, Artificial Sequence
  MKO10077751_B_Chrna7
  gRNA
ttggccaccggcctctccag

SEQ ID NO: 77752 - DNA, 20 bp, Artificial Sequence
  MKO10077752_B_Chrna7
  gRNA
agatgcattcaccaagacgt

SEQ ID NO: 77753 - DNA, 20 bp, Artificial Sequence
  MKO10077753_B_Chrna7
  gRNA
gaatgtctggtttccaaatc

SEQ ID NO: 77754 - DNA, 20 bp, Artificial Sequence
  MKO10077754_B_Chrna9
  gRNA
aagcccggccagtaccacac

SEQ ID NO: 77755 - DNA, 20 bp, Artificial Sequence
  MKO10077755_B_Chrna9
  gRNA
cgatgacgagtcttcagagc

SEQ ID NO: 77756 - DNA, 20 bp, Artificial Sequence
  MKO10077756_B_Chrna9
  gRNA
tgatgagcccatcgtaccgc

SEQ ID NO: 77757 - DNA, 20 bp, Artificial Sequence
  MKO10077757_B_Chrnb1
  gRNA
cgggaggtgggagaccgcgt

SEQ ID NO: 77758 - DNA, 20 bp, Artificial Sequence
  MKO10077758_B_Chrnb1
  gRNA
tgggaccccgcagaacatga

SEQ ID NO: 77759 - DNA, 20 bp, Artificial Sequence
  MKO10077759_B_Chrnb1
  gRNA
tctgtgcgctggcaaccccc

SEQ ID NO: 77760 - DNA, 20 bp, Artificial Sequence
  MKO10077760_B_Chrnb2
  gRNA
gggaagattatcgcctcaca

SEQ ID NO: 77761 - DNA, 20 bp, Artificial Sequence
  MKO10077761_B_Chrnb2
  gRNA
agctcagagccattagtagc

SEQ ID NO: 77762 - DNA, 20 bp, Artificial Sequence
  MKO10077762_B_Chrnb2
  gRNA
aacctgggtcagccagacgt

SEQ ID NO: 77763 - DNA, 20 bp, Artificial Sequence
  MKO10077763_B_Chrnb3
  gRNA
ggacagaccaaaaattacga

SEQ ID NO: 77764 - DNA, 20 bp, Artificial Sequence
  MKO10077764_B_Chrnb3
  gRNA
tgagagccaagaagacccgt

SEQ ID NO: 77765 - DNA, 20 bp, Artificial Sequence
  MKO10077765_B_Chrnb3
  gRNA
acgtcatgacaggcttccta

SEQ ID NO: 77766 - DNA, 20 bp, Artificial Sequence
  MKO10077766_B_Chrnb4
  gRNA
ggcggatcaggttgttgtag

SEQ ID NO: 77767 - DNA, 20 bp, Artificial Sequence
  MKO10077767_B_Chrnb4
  gRNA
ggattcctgcaaagcgagtc

SEQ ID NO: 77768 - DNA, 20 bp, Artificial Sequence
  MKO10077768_B_Chrnb4
  gRNA
tttcccaggggactgccgcc

SEQ ID NO: 77769 - DNA, 20 bp, Artificial Sequence
  MKO10077769_B_Chrnd
  gRNA
tcacctacttccctttcgac

SEQ ID NO: 77770 - DNA, 20 bp, Artificial Sequence
  MKO10077770_B_Chrnd
  gRNA
ctacgacaaagacctgcggc

SEQ ID NO: 77771 - DNA, 20 bp, Artificial Sequence
  MKO10077771_B_Chrnd
  gRNA
agaccctcaccaccaacgtg

SEQ ID NO: 77772 - DNA, 20 bp, Artificial Sequence
  MKO10077772_B_Chrne
  gRNA
cacaatgccaatccagacac

SEQ ID NO: 77773 - DNA, 20 bp, Artificial Sequence
  MKO10077773_B_Chrne
  gRNA
cagcaatgttctagtctatg

SEQ ID NO: 77774 - DNA, 20 bp, Artificial Sequence
  MKO10077774_B_Chrne
  gRNA
gatcataattgtcgaagaga

SEQ ID NO: 77775 - DNA, 20 bp, Artificial Sequence
  MKO10077775_B_Chrng
  gRNA
acatctgagtcgcgctcagc

SEQ ID NO: 77776 - DNA, 20 bp, Artificial Sequence
  MKO10077776_B_Chrng
  gRNA
ggtgcgactatcgcctgcgc

SEQ ID NO: 77777 - DNA, 20 bp, Artificial Sequence
  MKO10077777_B_Chrng
  gRNA
cagccagtagatacaaccgt

SEQ ID NO: 77778 - DNA, 20 bp, Artificial Sequence
  MKO10077778_B_Chst10
  gRNA
gttcatcacgttgaccttta

SEQ ID NO: 77779 - DNA, 20 bp, Artificial Sequence
  MKO10077779_B_Chst10
  gRNA
cacagacaaatattcgatcc

SEQ ID NO: 77780 - DNA, 20 bp, Artificial Sequence
  MKO10077780_B_Chst10
  gRNA
tccagggtatagtgccaaac

SEQ ID NO: 77781 - DNA, 20 bp, Artificial Sequence
  MKO10077781_B_Chst11
  gRNA
gcagcagatgtccacaccga

SEQ ID NO: 77782 - DNA, 20 bp, Artificial Sequence
  MKO10077782_B_Chst11
  gRNA
ttccaaagtatgttgcaccc

SEQ ID NO: 77783 - DNA, 20 bp, Artificial Sequence
  MKO10077783_B_Chst11
  gRNA
agccatgaagccggcgctgc

SEQ ID NO: 77784 - DNA, 20 bp, Artificial Sequence
  MKO10077784_B_Chst12
  gRNA
cgaactgaaccacctgatcg

SEQ ID NO: 77785 - DNA, 20 bp, Artificial Sequence
  MKO10077785_B_Chst12
  gRNA
cttccgcagcaagttcgagc

SEQ ID NO: 77786 - DNA, 20 bp, Artificial Sequence
  MKO10077786_B_Chst12
  gRNA
ccagatagactatgacttcg

SEQ ID NO: 77787 - DNA, 20 bp, Artificial Sequence
  MKO10077787_B_Chst13
  gRNA
cctcactccaccgaaccagc

SEQ ID NO: 77788 - DNA, 20 bp, Artificial Sequence
  MKO10077788_B_Chst13
  gRNA
cttgccggtggtggcaagtc

SEQ ID NO: 77789 - DNA, 20 bp, Artificial Sequence
  MKO10077789_B_Chst13
  gRNA
cctacagctgttgcgtgacc

SEQ ID NO: 77790 - DNA, 20 bp, Artificial Sequence
  MKO10077790_B_Chst14
  gRNA
ccgaaattgtcaggcgctac

SEQ ID NO: 77791 - DNA, 20 bp, Artificial Sequence
  MKO10077791_B_Chst14
  gRNA
ggcggacatccacgttgttc

SEQ ID NO: 77792 - DNA, 20 bp, Artificial Sequence
  MKO10077792_B_Chst14
  gRNA
gaaggggtttcatctccgat

SEQ ID NO: 77793 - DNA, 20 bp, Artificial Sequence
  MKO10077793_B_Chst15
  gRNA
ctcgtagtccgtcccgcagg

SEQ ID NO: 77794 - DNA, 20 bp, Artificial Sequence
  MKO10077794_B_Chst15
  gRNA
aggccagcgcctctacaatg

SEQ ID NO: 77795 - DNA, 20 bp, Artificial Sequence
  MKO10077795_B_Chst15
  gRNA
gagcctccgtcactttctcg

SEQ ID NO: 77796 - DNA, 20 bp, Artificial Sequence
  MKO10077796_B_Chst1
  gRNA
cagctggtgcgagaccctcg

SEQ ID NO: 77797 - DNA, 20 bp, Artificial Sequence
  MKO10077797_B_Chst1
  gRNA
cttctcgcagtgagaccttc

SEQ ID NO: 77798 - DNA, 20 bp, Artificial Sequence
  MKO10077798_B_Chst1
  gRNA
actggatccagaacaatacg

SEQ ID NO: 77799 - DNA, 20 bp, Artificial Sequence
  MKO10077799_B_Chst2
  gRNA
ttgcgagctgacaccacgaa

SEQ ID NO: 77800 - DNA, 20 bp, Artificial Sequence
  MKO10077800_B_Chst2
  gRNA
gagcgcggtccgccaggcat

SEQ ID NO: 77801 - DNA, 20 bp, Artificial Sequence
  MKO10077801_B_Chst2
  gRNA
tctctaccgctgcgatcttt

SEQ ID NO: 77802 - DNA, 20 bp, Artificial Sequence
  MKO10077802_B_Chst3
  gRNA
gtacacagcctaaagattcg

SEQ ID NO: 77803 - DNA, 20 bp, Artificial Sequence
  MKO10077803_B_Chst3
  gRNA
catgtaacgaccgcgcagcc

SEQ ID NO: 77804 - DNA, 20 bp, Artificial Sequence
  MKO10077804_B_Chst3
  gRNA
gtgcacacccttcgtcaaga

SEQ ID NO: 77805 - DNA, 20 bp, Artificial Sequence
  MKO10077805_B_Chst4
  gRNA
cccgggccgtgttccgatcc

SEQ ID NO: 77806 - DNA, 20 bp, Artificial Sequence
  MKO10077806_B_Chst4
  gRNA
ctgccgctctcacggcttcg

SEQ ID NO: 77807 - DNA, 20 bp, Artificial Sequence
  MKO10077807_B_Chst4
  gRNA
atgccttccatactaacgcc

SEQ ID NO: 77808 - DNA, 20 bp, Artificial Sequence
  MKO10077808_B_Chst5
  gRNA
cttgcaagatcgctaccgcc

SEQ ID NO: 77809 - DNA, 20 bp, Artificial Sequence
  MKO10077809_B_Chst5
  gRNA
ccggctgcgcgtggtcaacg

SEQ ID NO: 77810 - DNA, 20 bp, Artificial Sequence
  MKO10077810_B_Chst5
  gRNA
tgagcggatcaggtcacgca

SEQ ID NO: 77811 - DNA, 20 bp, Artificial Sequence
  MKO10077811_B_Chst7
  gRNA
aacgcgacaggaagaccgtc

SEQ ID NO: 77812 - DNA, 20 bp, Artificial Sequence
  MKO10077812_B_Chst7
  gRNA
cgcggacgtgggactcgtcg

SEQ ID NO: 77813 - DNA, 20 bp, Artificial Sequence
  MKO10077813_B_Chst7
  gRNA
acttgcggcactcggcctcc

SEQ ID NO: 77814 - DNA, 20 bp, Artificial Sequence
  MKO10077814_B_Chst8
  gRNA
ccccggatgaccccacgact

SEQ ID NO: 77815 - DNA, 20 bp, Artificial Sequence
  MKO10077815_B_Chst8
  gRNA
caggtataaagttcagcatc

SEQ ID NO: 77816 - DNA, 20 bp, Artificial Sequence
  MKO10077816_B_Chst8
  gRNA
aacttacatgctggggttgc

SEQ ID NO: 77817 - DNA, 20 bp, Artificial Sequence
  MKO10077817_B_Chst9
  gRNA
ccagaaacagatcacgaatc

SEQ ID NO: 77818 - DNA, 20 bp, Artificial Sequence
  MKO10077818_B_Chst9
  gRNA
gccctgctgtcccaaacagc

SEQ ID NO: 77819 - DNA, 20 bp, Artificial Sequence
  MKO10077819_B_Chst9
  gRNA
tcttcatgtacttgcaagca

SEQ ID NO: 77820 - DNA, 20 bp, Artificial Sequence
  MKO10077820_B_Chsy1
  gRNA
gctcgtgctgggcttcgtgc

SEQ ID NO: 77821 - DNA, 20 bp, Artificial Sequence
  MKO10077821_B_Chsy1
  gRNA
atacctgcagacccgcgccg

SEQ ID NO: 77822 - DNA, 20 bp, Artificial Sequence
  MKO10077822_B_Chsy1
  gRNA
ggtggagttcttctctagcg

SEQ ID NO: 77823 - DNA, 20 bp, Artificial Sequence
  MKO10077823_B_Chsy3
  gRNA
agaactcgacgtcaaccgtc

SEQ ID NO: 77824 - DNA, 20 bp, Artificial Sequence
  MKO10077824_B_Chsy3
  gRNA
tcacgctccatccgaacaaa

SEQ ID NO: 77825 - DNA, 20 bp, Artificial Sequence
  MKO10077825_B_Chsy3
  gRNA
aggtgtgttcgccgtttcgg

SEQ ID NO: 77826 - DNA, 20 bp, Artificial Sequence
  MKO10077826_B_Chtf18
  gRNA
atcggacatactggagggcg

SEQ ID NO: 77827 - DNA, 20 bp, Artificial Sequence
  MKO10077827_B_Chtf18
  gRNA
gacagtgtccccaccagcga

SEQ ID NO: 77828 - DNA, 20 bp, Artificial Sequence
  MKO10077828_B_Chtf18
  gRNA
gttggccacagcctcgccag

SEQ ID NO: 77829 - DNA, 20 bp, Artificial Sequence
  MKO10077829_B_Chtf8
  gRNA
tgatggcccacgatcagcac

SEQ ID NO: 77830 - DNA, 20 bp, Artificial Sequence
  MKO10077830_B_Chtf8
  gRNA
tggtgcaaattgttatttcc

SEQ ID NO: 77831 - DNA, 20 bp, Artificial Sequence
  MKO10077831_B_Chtf8
  gRNA
gggaatccctgtgctgatcg

SEQ ID NO: 77832 - DNA, 20 bp, Artificial Sequence
  MKO10077832_B_Chtop
  gRNA
gtcccccacgtagtcctcct

SEQ ID NO: 77833 - DNA, 20 bp, Artificial Sequence
  MKO10077833_B_Chtop
  gRNA
atccagagaggcttgccccg

SEQ ID NO: 77834 - DNA, 20 bp, Artificial Sequence
  MKO10077834_B_Chtop
  gRNA
ggagaatagaccctctgtcc

SEQ ID NO: 77835 - DNA, 20 bp, Artificial Sequence
  MKO10077835_B_Chuk
  gRNA
aggcctttacaacattcgca

SEQ ID NO: 77836 - DNA, 20 bp, Artificial Sequence
  MKO10077836_B_Chuk
  gRNA
gttccaaaaacagagagcga

SEQ ID NO: 77837 - DNA, 20 bp, Artificial Sequence
  MKO10077837_B_Chuk
  gRNA
aacaaaccagaaaattgttg

SEQ ID NO: 77838 - DNA, 20 bp, Artificial Sequence
  MKO10077838_B_Churc1
  gRNA
gtattctccctgatgacccc

SEQ ID NO: 77839 - DNA, 20 bp, Artificial Sequence
  MKO10077839_B_Churc1
  gRNA
cgagtatacattcagcatca

SEQ ID NO: 77840 - DNA, 20 bp, Artificial Sequence
  MKO10077840_B_Churc1
  gRNA
accatgctgtgtctgttgtg

SEQ ID NO: 77841 - DNA, 20 bp, Artificial Sequence
  MKO10077841_B_Ciao1
  gRNA
ggccccatctggcaacctct

SEQ ID NO: 77842 - DNA, 20 bp, Artificial Sequence
  MKO10077842_B_Ciao1
  gRNA
tgtcctcagctctcatacgc

SEQ ID NO: 77843 - DNA, 20 bp, Artificial Sequence
  MKO10077843_B_Ciao1
  gRNA
ttgatgccaccacttgtatt

SEQ ID NO: 77844 - DNA, 20 bp, Artificial Sequence
  MKO10077844_B_Ciapin1
  gRNA
ctgagatggcccggatcctc

SEQ ID NO: 77845 - DNA, 20 bp, Artificial Sequence
  MKO10077845_B_Ciapin1
  gRNA
cctctcagcaaatgacatgg

SEQ ID NO: 77846 - DNA, 20 bp, Artificial Sequence
  MKO10077846_B_Ciapin1
  gRNA
tgactcagtgaagcctgttg

SEQ ID NO: 77847 - DNA, 20 bp, Artificial Sequence
  MKO10077847_B_Cib1
  gRNA
atgcagattcgctccttgaa

SEQ ID NO: 77848 - DNA, 20 bp, Artificial Sequence
  MKO10077848_B_Cib1
  gRNA
cctgacgttcctgaccaagc

SEQ ID NO: 77849 - DNA, 20 bp, Artificial Sequence
  MKO10077849_B_Cib1
  gRNA
tcctccacggtccgctgctc

SEQ ID NO: 77850 - DNA, 20 bp, Artificial Sequence
  MKO10077850_B_Cib2
  gRNA
cctggatggtgacggcaagc

SEQ ID NO: 77851 - DNA, 20 bp, Artificial Sequence
  MKO10077851_B_Cib2
  gRNA
ctctcacctacccggagctc

SEQ ID NO: 77852 - DNA, 20 bp, Artificial Sequence
  MKO10077852_B_Cib2
  gRNA
agaagacttagagatgacgc

SEQ ID NO: 77853 - DNA, 20 bp, Artificial Sequence
  MKO10077853_B_Cib3
  gRNA
ggactggtcgtgtagtcaag

SEQ ID NO: 77854 - DNA, 20 bp, Artificial Sequence
  MKO10077854_B_Cib3
  gRNA
tgcgagctccagacttcctc

SEQ ID NO: 77855 - DNA, 20 bp, Artificial Sequence
  MKO10077855_B_Cib3
  gRNA
gagcatgtcagatgcggatg

SEQ ID NO: 77856 - DNA, 20 bp, Artificial Sequence
  MKO10077856_B_Cib4
  gRNA
gagtatgcctttcgtatcta

SEQ ID NO: 77857 - DNA, 20 bp, Artificial Sequence
  MKO10077857_B_Cib4
  gRNA
gtcttagcacaatctcctcg

SEQ ID NO: 77858 - DNA, 20 bp, Artificial Sequence
  MKO10077858_B_Cib4
  gRNA
tccagactcaccctcagagc

SEQ ID NO: 77859 - DNA, 20 bp, Artificial Sequence
  MKO10077859_B_Cic
  gRNA
aaatgtcgaacctcgttctg

SEQ ID NO: 77860 - DNA, 20 bp, Artificial Sequence
  MKO10077860_B_Cic
  gRNA
agaagatgagtctcgttcct

SEQ ID NO: 77861 - DNA, 20 bp, Artificial Sequence
  MKO10077861_B_Cic
  gRNA
gttgctcatgagcagccacc

SEQ ID NO: 77862 - DNA, 20 bp, Artificial Sequence
  MKO10077862_B_Cidea
  gRNA
tgtatgtgcccgcatagacc

SEQ ID NO: 77863 - DNA, 20 bp, Artificial Sequence
  MKO10077863_B_Cidea
  gRNA
gaaatgcgtgttgtccctta

SEQ ID NO: 77864 - DNA, 20 bp, Artificial Sequence
  MKO10077864_B_Cidea
  gRNA
gcgagctggatgtatgaggg

SEQ ID NO: 77865 - DNA, 20 bp, Artificial Sequence
  MKO10077865_B_Cideb
  gRNA
tccgcttatgatcacagaca

SEQ ID NO: 77866 - DNA, 20 bp, Artificial Sequence
  MKO10077866_B_Cideb
  gRNA
agggggctgatcgatggcag

SEQ ID NO: 77867 - DNA, 20 bp, Artificial Sequence
  MKO10077867_B_Cideb
  gRNA
acgtgtcgtcctccagcagc

SEQ ID NO: 77868 - DNA, 20 bp, Artificial Sequence
  MKO10077868_B_Cidec
  gRNA
gtcgtgttagcaccgcagat

SEQ ID NO: 77869 - DNA, 20 bp, Artificial Sequence
  MKO10077869_B_Cidec
  gRNA
aaggccgtcacctgttctga

SEQ ID NO: 77870 - DNA, 20 bp, Artificial Sequence
  MKO10077870_B_Cidec
  gRNA
ggaggaagatggcacaatcg

SEQ ID NO: 77871 - DNA, 20 bp, Artificial Sequence
  MKO10077871_B_Ciita
  gRNA
atagagatccctgtagaagc

SEQ ID NO: 77872 - DNA, 20 bp, Artificial Sequence
  MKO10077872_B_Ciita
  gRNA
ccagttcagcaagctgttgc

SEQ ID NO: 77873 - DNA, 20 bp, Artificial Sequence
  MKO10077873_B_Ciita
  gRNA
tactgaagaggtccttgctc

SEQ ID NO: 77874 - DNA, 20 bp, Artificial Sequence
  MKO10077874_B_Cilp2
  gRNA
gtggttcaacgtggatcacc

SEQ ID NO: 77875 - DNA, 20 bp, Artificial Sequence
  MKO10077875_B_Cilp2
  gRNA
gggtgtagctccgacacctg

SEQ ID NO: 77876 - DNA, 20 bp, Artificial Sequence
  MKO10077876_B_Cilp2
  gRNA
ggcgagggctggccggtatc

SEQ ID NO: 77877 - DNA, 20 bp, Artificial Sequence
  MKO10077877_B_Cilp
  gRNA
agccctcacggggactgccg

SEQ ID NO: 77878 - DNA, 20 bp, Artificial Sequence
  MKO10077878_B_Cilp
  gRNA
cctcacaaactccgcattga

SEQ ID NO: 77879 - DNA, 20 bp, Artificial Sequence
  MKO10077879_B_Cilp
  gRNA
gatcataattggggcaaact

SEQ ID NO: 77880 - DNA, 20 bp, Artificial Sequence
  MKO10077880_B_Cinp
  gRNA
gcaggccatcttggacggct

SEQ ID NO: 77881 - DNA, 20 bp, Artificial Sequence
  MKO10077881_B_Cinp
  gRNA
tcttaccaagccgtccaaga

SEQ ID NO: 77882 - DNA, 20 bp, Artificial Sequence
  MKO10077882_B_Cinp
  gRNA
ctgtcttatcagtcagtgcg

SEQ ID NO: 77883 - DNA, 20 bp, Artificial Sequence
  MKO10077883_B_Cir1
  gRNA
atgcaatcaagaaaacaaag

SEQ ID NO: 77884 - DNA, 20 bp, Artificial Sequence
  MKO10077884_B_Cir1
  gRNA
gcaacagtaccttaaagagc

SEQ ID NO: 77885 - DNA, 20 bp, Artificial Sequence
  MKO10077885_B_Cir1
  gRNA
catacgactcctgctcttta

SEQ ID NO: 77886 - DNA, 20 bp, Artificial Sequence
  MKO10077886_B_Cirbp
  gRNA
agggagacccagcgatcccg

SEQ ID NO: 77887 - DNA, 20 bp, Artificial Sequence
  MKO10077887_B_Cirbp
  gRNA
agcggccacctccatagccc

SEQ ID NO: 77888 - DNA, 20 bp, Artificial Sequence
  MKO10077888_B_Cirbp
  gRNA
gaggtggccgctttgagtcc

SEQ ID NO: 77889 - DNA, 20 bp, Artificial Sequence
  MKO10077889_B_Cirh1a
  gRNA
ggtgttgccttcttgtccga

SEQ ID NO: 77890 - DNA, 20 bp, Artificial Sequence
  MKO10077890_B_Cirh1a
  gRNA
agggagcataattcgtaaga

SEQ ID NO: 77891 - DNA, 20 bp, Artificial Sequence
  MKO10077891_B_Cirh1a
  gRNA
atgcctttggaggacccatc

SEQ ID NO: 77892 - DNA, 20 bp, Artificial Sequence
  MKO10077892_B_Cisd1
  gRNA
ggtgcatgccttcgacatgg

SEQ ID NO: 77893 - DNA, 20 bp, Artificial Sequence
  MKO10077893_B_Cisd1
  gRNA
tcctagttccccttctgcga

SEQ ID NO: 77894 - DNA, 20 bp, Artificial Sequence
  MKO10077894_B_Cisd1
  gRNA
tatgtgagccccatcgcaga

SEQ ID NO: 77895 - DNA, 20 bp, Artificial Sequence
  MKO10077895_B_Cisd2
  gRNA
gtttatctcattcaccacct

SEQ ID NO: 77896 - DNA, 20 bp, Artificial Sequence
  MKO10077896_B_Cisd2
  gRNA
gctatacttctttcttcttc

SEQ ID NO: 77897 - DNA, 20 bp, Artificial Sequence
  MKO10077897_B_Cisd2
  gRNA
aataagcataatgaattgac

SEQ ID NO: 77898 - DNA, 20 bp, Artificial Sequence
  MKO10077898_B_Cisd3
  gRNA
cagcggcccccttactgtga

SEQ ID NO: 77899 - DNA, 20 bp, Artificial Sequence
  MKO10077899_B_Cisd3
  gRNA
tcccttccctgatgggcttc

SEQ ID NO: 77900 - DNA, 20 bp, Artificial Sequence
  MKO10077900_B_Cisd3
  gRNA
gagatttcccgcctctgata

SEQ ID NO: 77901 - DNA, 20 bp, Artificial Sequence
  MKO10077901_B_Cish
  gRNA
ggacatggtcctttgcgtac

SEQ ID NO: 77902 - DNA, 20 bp, Artificial Sequence
  MKO10077902_B_Cish
  gRNA
ctgtggagcaaattgggcgg

SEQ ID NO: 77903 - DNA, 20 bp, Artificial Sequence
  MKO10077903_B_Cish
  gRNA
gagactcaccagattcccga

SEQ ID NO: 77904 - DNA, 20 bp, Artificial Sequence
  MKO10077904_B_Cited1
  gRNA
cctgcacttgatgtcaaggg

SEQ ID NO: 77905 - DNA, 20 bp, Artificial Sequence
  MKO10077905_B_Cited1
  gRNA
tgtcgatccagaggagctag

SEQ ID NO: 77906 - DNA, 20 bp, Artificial Sequence
  MKO10077906_B_Cited1
  gRNA
gtcaccgcccctctggtagt

SEQ ID NO: 77907 - DNA, 20 bp, Artificial Sequence
  MKO10077907_B_Cited2
  gRNA
aaccacgggcgcttccccga

SEQ ID NO: 77908 - DNA, 20 bp, Artificial Sequence
  MKO10077908_B_Cited2
  gRNA
cgagcacatacactacggcg

SEQ ID NO: 77909 - DNA, 20 bp, Artificial Sequence
  MKO10077909_B_Cited2
  gRNA
ggtgcaaatccggcatgtag

SEQ ID NO: 77910 - DNA, 20 bp, Artificial Sequence
  MKO10077910_B_Cited4
  gRNA
caccgagctcatcgacgaag

SEQ ID NO: 77911 - DNA, 20 bp, Artificial Sequence
  MKO10077911_B_Cited4
  gRNA
cggactctgcagccatacgc

SEQ ID NO: 77912 - DNA, 20 bp, Artificial Sequence
  MKO10077912_B_Cited4
  gRNA
acgtcgctggaactcgagct

SEQ ID NO: 77913 - DNA, 20 bp, Artificial Sequence
  MKO10077913_B_Cit
  gRNA
ccagttacagtacgcctttc

SEQ ID NO: 77914 - DNA, 20 bp, Artificial Sequence
  MKO10077914_B_Cit
  gRNA
ggatcatgctctcatctaat

SEQ ID NO: 77915 - DNA, 20 bp, Artificial Sequence
  MKO10077915_B_Cit
  gRNA
actcttcaaagagagcgaag

SEQ ID NO: 77916 - DNA, 20 bp, Artificial Sequence
  MKO10077916_B_Ciz1
  gRNA
gcagagactgtcgagtagcc

SEQ ID NO: 77917 - DNA, 20 bp, Artificial Sequence
  MKO10077917_B_Ciz1
  gRNA
ccataccttgcaactgctgt

SEQ ID NO: 77918 - DNA, 20 bp, Artificial Sequence
  MKO10077918_B_Ciz1
  gRNA
cactcgacctccctgctcaa

SEQ ID NO: 77919 - DNA, 20 bp, Artificial Sequence
  MKO10077919_B_Ckap2l
  gRNA
ggcagccaagggaaagctaa

SEQ ID NO: 77920 - DNA, 20 bp, Artificial Sequence
  MKO10077920_B_Ckap2l
  gRNA
tggtttggggcagatattct

SEQ ID NO: 77921 - DNA, 20 bp, Artificial Sequence
  MKO10077921_B_Ckap2l
  gRNA
tctttcaatgctcttccaga

SEQ ID NO: 77922 - DNA, 20 bp, Artificial Sequence
  MKO10077922_B_Ckap2
  gRNA
tagtccaaaaggacccaact

SEQ ID NO: 77923 - DNA, 20 bp, Artificial Sequence
  MKO10077923_B_Ckap2
  gRNA
aacaagaaaatcagatatcc

SEQ ID NO: 77924 - DNA, 20 bp, Artificial Sequence
  MKO10077924_B_Ckap2
  gRNA
tcagaaaatgataacatctg

SEQ ID NO: 77925 - DNA, 20 bp, Artificial Sequence
  MKO10077925_B_Ckap4
  gRNA
tctgtagaacttcgctaatt

SEQ ID NO: 77926 - DNA, 20 bp, Artificial Sequence
  MKO10077926_B_Ckap4
  gRNA
tgacgtggcgaagaagccgc

SEQ ID NO: 77927 - DNA, 20 bp, Artificial Sequence
  MKO10077927_B_Ckap4
  gRNA
ccctctgacgggagaagtcc

SEQ ID NO: 77928 - DNA, 20 bp, Artificial Sequence
  MKO10077928_B_Ckap5
  gRNA
tctcgagattcaaatagttt

SEQ ID NO: 77929 - DNA, 20 bp, Artificial Sequence
  MKO10077929_B_Ckap5
  gRNA
tgttcacatttctgatcaac

SEQ ID NO: 77930 - DNA, 20 bp, Artificial Sequence
  MKO10077930_B_Ckap5
  gRNA
gttgaaaatgctcatgttgc

SEQ ID NO: 77931 - DNA, 20 bp, Artificial Sequence
  MKO10077931_B_Ckb
  gRNA
taccatatgccacgagcatc

SEQ ID NO: 77932 - DNA, 20 bp, Artificial Sequence
  MKO10077932_B_Ckb
  gRNA
cctccggcatggcccgggac

SEQ ID NO: 77933 - DNA, 20 bp, Artificial Sequence
  MKO10077933_B_Ckb
  gRNA
ccacccgtacatcatgactg

SEQ ID NO: 77934 - DNA, 20 bp, Artificial Sequence
  MKO10077934_B_Cklf
  gRNA
ttaggatgttattaactcaa

SEQ ID NO: 77935 - DNA, 20 bp, Artificial Sequence
  MKO10077935_B_Cklf
  gRNA
gcatttcagagtacagcaga

SEQ ID NO: 77936 - DNA, 20 bp, Artificial Sequence
  MKO10077936_B_Cklf
  gRNA
tccaaggattgtctttgttg

SEQ ID NO: 77937 - DNA, 20 bp, Artificial Sequence
  MKO10077937_B_Ckmt1
  gRNA
taccagatccctcgagcatc

SEQ ID NO: 77938 - DNA, 20 bp, Artificial Sequence
  MKO10077938_B_Ckmt1
  gRNA
cagagccgtgcatagactgc

SEQ ID NO: 77939 - DNA, 20 bp, Artificial Sequence
  MKO10077939_B_Ckmt1
  gRNA
ttgaccctgtgatccaagag

SEQ ID NO: 77940 - DNA, 20 bp, Artificial Sequence
  MKO10077940_B_Ckmt2
  gRNA
cccgtgactggcctgatgcc

SEQ ID NO: 77941 - DNA, 20 bp, Artificial Sequence
  MKO10077941_B_Ckmt2
  gRNA
gtaggatgcttcatcaccct

SEQ ID NO: 77942 - DNA, 20 bp, Artificial Sequence
  MKO10077942_B_Ckmt2
  gRNA
tgtcatcttgtttcggagtt

SEQ ID NO: 77943 - DNA, 20 bp, Artificial Sequence
  MKO10077943_B_Ckm
  gRNA
caggtccttgaagaccgtgt

SEQ ID NO: 77944 - DNA, 20 bp, Artificial Sequence
  MKO10077944_B_Ckm
  gRNA
cgctctccacgggagcagtg

SEQ ID NO: 77945 - DNA, 20 bp, Artificial Sequence
  MKO10077945_B_Ckm
  gRNA
tccccagggtggagacgacc

SEQ ID NO: 77946 - DNA, 20 bp, Artificial Sequence
  MKO10077946_B_Cks1b
  gRNA
cgtcggaacagtaagatgtg

SEQ ID NO: 77947 - DNA, 20 bp, Artificial Sequence
  MKO10077947_B_Cks1b
  gRNA
acgacgaggagttcgaatac

SEQ ID NO: 77948 - DNA, 20 bp, Artificial Sequence
  MKO10077948_B_Cks1b
  gRNA
ccacaaacaaatctactatt

SEQ ID NO: 77949 - DNA, 20 bp, Artificial Sequence
  MKO10077949_B_Cks2
  gRNA
gaacccatcctagactctgt

SEQ ID NO: 77950 - DNA, 20 bp, Artificial Sequence
  MKO10077950_B_Cks2
  gRNA
cgtctaaagagaagaatatg

SEQ ID NO: 77951 - DNA, 20 bp, Artificial Sequence
  MKO10077951_B_Cks2
  gRNA
aactcatctgatgtccgaag

SEQ ID NO: 77952 - DNA, 20 bp, Artificial Sequence
  MKO10077952_B_Clasp1
  gRNA
tggatggactcgctacctct

SEQ ID NO: 77953 - DNA, 20 bp, Artificial Sequence
  MKO10077953_B_Clasp1
  gRNA
catggacatcctgtcggcac

SEQ ID NO: 77954 - DNA, 20 bp, Artificial Sequence
  MKO10077954_B_Clasp1
  gRNA
gcggagtgatgatctacaac

SEQ ID NO: 77955 - DNA, 20 bp, Artificial Sequence
  MKO10077955_B_Clasp2
  gRNA
aaggctgaagcagctgacga

SEQ ID NO: 77956 - DNA, 20 bp, Artificial Sequence
  MKO10077956_B_Clasp2
  gRNA
aagagacgttaaataagatc

SEQ ID NO: 77957 - DNA, 20 bp, Artificial Sequence
  MKO10077957_B_Clasp2
  gRNA
ggaaaccttacctgaacaga

SEQ ID NO: 77958 - DNA, 20 bp, Artificial Sequence
  MKO10077958_B_Clasrp
  gRNA
gatgtgcacgaacatcaaag

SEQ ID NO: 77959 - DNA, 20 bp, Artificial Sequence
  MKO10077959_B_Clasrp
  gRNA
acgtacatggtggtgagcag

SEQ ID NO: 77960 - DNA, 20 bp, Artificial Sequence
  MKO10077960_B_Clasrp
  gRNA
agaccccgctcagttcctgc

SEQ ID NO: 77961 - DNA, 20 bp, Artificial Sequence
  MKO10077961_B_Clca1
  gRNA
ttctgaaataaactcttcct

SEQ ID NO: 77962 - DNA, 20 bp, Artificial Sequence
  MKO10077962_B_Clca1
  gRNA
ttaggcagacgtcatagttg

SEQ ID NO: 77963 - DNA, 20 bp, Artificial Sequence
  MKO10077963_B_Clca1
  gRNA
tacgcaagttatcagtgagt

SEQ ID NO: 77964 - DNA, 20 bp, Artificial Sequence
  MKO10077964_B_Clca2
  gRNA
ttctttctagaaatgtagaa

SEQ ID NO: 77965 - DNA, 20 bp, Artificial Sequence
  MKO10077965_B_Clca2
  gRNA
tcctgaaataaactcttcct

SEQ ID NO: 77966 - DNA, 20 bp, Artificial Sequence
  MKO10077966_B_Clca2
  gRNA
ttaggcagacgtcatagttg

SEQ ID NO: 77967 - DNA, 20 bp, Artificial Sequence
  MKO10077967_B_Clca3
  gRNA
gtgagcccactcatggacaa

SEQ ID NO: 77968 - DNA, 20 bp, Artificial Sequence
  MKO10077968_B_Clca3
  gRNA
tagggctcatcattgcctag

SEQ ID NO: 77969 - DNA, 20 bp, Artificial Sequence
  MKO10077969_B_Clca3
  gRNA
gagaagttctacttatccaa

SEQ ID NO: 77970 - DNA, 20 bp, Artificial Sequence
  MKO10077970_B_Clca4
  gRNA
agaacactgtcgaagcaaca

SEQ ID NO: 77971 - DNA, 20 bp, Artificial Sequence
  MKO10077971_B_Clca4
  gRNA
tggtcatatgattcttgttt

SEQ ID NO: 77972 - DNA, 20 bp, Artificial Sequence
  MKO10077972_B_Clca4
  gRNA
agtatttgatgagtataaca

SEQ ID NO: 77973 - DNA, 20 bp, Artificial Sequence
  MKO10077973_B_Clca5
  gRNA
acctcgcgcaccatagcctg

SEQ ID NO: 77974 - DNA, 20 bp, Artificial Sequence
  MKO10077974_B_Clca5
  gRNA
gacaaaccgttctacgtgaa

SEQ ID NO: 77975 - DNA, 20 bp, Artificial Sequence
  MKO10077975_B_Clca5
  gRNA
aggtgttcatctgacattac

SEQ ID NO: 77976 - DNA, 20 bp, Artificial Sequence
  MKO10077976_B_Clca6
  gRNA
ttcacactgtgtgaattgcc

SEQ ID NO: 77977 - DNA, 20 bp, Artificial Sequence
  MKO10077977_B_Clca6
  gRNA
ttgccttacaggaaaagtgt

SEQ ID NO: 77978 - DNA, 20 bp, Artificial Sequence
  MKO10077978_B_Clca6
  gRNA
gggctcatctctgccctcaa

SEQ ID NO: 77979 - DNA, 20 bp, Artificial Sequence
  MKO10077979_B_Clcc1
  gRNA
gcttccactcctctccgctg

SEQ ID NO: 77980 - DNA, 20 bp, Artificial Sequence
  MKO10077980_B_Clcc1
  gRNA
cttaactatgacgctgcttc

SEQ ID NO: 77981 - DNA, 20 bp, Artificial Sequence
  MKO10077981_B_Clcc1
  gRNA
tttagatatctcctgaaaac

SEQ ID NO: 77982 - DNA, 20 bp, Artificial Sequence
  MKO10077982_B_Clcf1
  gRNA
cctattcacaggggactcgt

SEQ ID NO: 77983 - DNA, 20 bp, Artificial Sequence
  MKO10077983_B_Clcf1
  gRNA
agccccatggacctccgagc

SEQ ID NO: 77984 - DNA, 20 bp, Artificial Sequence
  MKO10077984_B_Clcf1
  gRNA
cctacctgctcggaggtcca

SEQ ID NO: 77985 - DNA, 20 bp, Artificial Sequence
  MKO10077985_B_Clcn1
  gRNA
tcctgatggctctagtcagc

SEQ ID NO: 77986 - DNA, 20 bp, Artificial Sequence
  MKO10077986_B_Clcn1
  gRNA
cgggggaatgcccaagaaga

SEQ ID NO: 77987 - DNA, 20 bp, Artificial Sequence
  MKO10077987_B_Clcn1
  gRNA
caccttgacatttagaatag

SEQ ID NO: 77988 - DNA, 20 bp, Artificial Sequence
  MKO10077988_B_Clcn2
  gRNA
ctttcagcaccactccccga

SEQ ID NO: 77989 - DNA, 20 bp, Artificial Sequence
  MKO10077989_B_Clcn2
  gRNA
ctggatcttactgcgacatc

SEQ ID NO: 77990 - DNA, 20 bp, Artificial Sequence
  MKO10077990_B_Clcn2
  gRNA
tgtccagggtcggtgaagac

SEQ ID NO: 77991 - DNA, 20 bp, Artificial Sequence
  MKO10077991_B_Clcn3
  gRNA
caaaaagtctgtatgacgcc

SEQ ID NO: 77992 - DNA, 20 bp, Artificial Sequence
  MKO10077992_B_Clcn3
  gRNA
atggcttgttgttacactga

SEQ ID NO: 77993 - DNA, 20 bp, Artificial Sequence
  MKO10077993_B_Clcn3
  gRNA
gttaatcattggccaagcag

SEQ ID NO: 77994 - DNA, 20 bp, Artificial Sequence
  MKO10077994_B_Clcn4-2
  gRNA
gtgttcgcaccgtatgcctg

SEQ ID NO: 77995 - DNA, 20 bp, Artificial Sequence
  MKO10077995_B_Clcn4-2
  gRNA
tcatcgatctcgctgtggat

SEQ ID NO: 77996 - DNA, 20 bp, Artificial Sequence
  MKO10077996_B_Clcn4-2
  gRNA
gggtctgtctgtccgcattc

SEQ ID NO: 77997 - DNA, 20 bp, Artificial Sequence
  MKO10077997_B_Clcn5
  gRNA
atcgctcacactgtgaatta

SEQ ID NO: 77998 - DNA, 20 bp, Artificial Sequence
  MKO10077998_B_Clcn5
  gRNA
agtgagcagagatgtctatc

SEQ ID NO: 77999 - DNA, 20 bp, Artificial Sequence
  MKO10077999_B_Clcn5
  gRNA
agtgtgagcgatgctttctc

SEQ ID NO: 78000 - DNA, 20 bp, Artificial Sequence
  MKO10078000_B_Clcn6
  gRNA
ctgcatcaatgacccttacc

SEQ ID NO: 78001 - DNA, 20 bp, Artificial Sequence
  MKO10078001_B_Clcn6
  gRNA
tgagctcaccttattatcca

SEQ ID NO: 78002 - DNA, 20 bp, Artificial Sequence
  MKO10078002_B_Clcn6
  gRNA
ctcttcacccaactgaagtt

SEQ ID NO: 78003 - DNA, 20 bp, Artificial Sequence
  MKO10078003_B_Clcn7
  gRNA
gagaggagcttctcgttgtg

SEQ ID NO: 78004 - DNA, 20 bp, Artificial Sequence
  MKO10078004_B_Clcn7
  gRNA
cattctgcactgttccgaat

SEQ ID NO: 78005 - DNA, 20 bp, Artificial Sequence
  MKO10078005_B_Clcn7
  gRNA
gagagcccacctcatacttg

SEQ ID NO: 78006 - DNA, 20 bp, Artificial Sequence
  MKO10078006_B_Clcnka
  gRNA
cagagcattacgcccttctc

SEQ ID NO: 78007 - DNA, 20 bp, Artificial Sequence
  MKO10078007_B_Clcnka
  gRNA
ccttacctcagtatccccga

SEQ ID NO: 78008 - DNA, 20 bp, Artificial Sequence
  MKO10078008_B_Clcnka
  gRNA
caggactactccagacagca

SEQ ID NO: 78009 - DNA, 20 bp, Artificial Sequence
  MKO10078009_B_Clcnkb
  gRNA
gaagaccatcttgaccggag

SEQ ID NO: 78010 - DNA, 20 bp, Artificial Sequence
  MKO10078010_B_Clcnkb
  gRNA
gaaagagcggctcttccgtg

SEQ ID NO: 78011 - DNA, 20 bp, Artificial Sequence
  MKO10078011_B_Clcnkb
  gRNA
tagcacacaagtggctgtac

SEQ ID NO: 78012 - DNA, 20 bp, Artificial Sequence
  MKO10078012_B_Cldn10
  gRNA
accaagtatcaaggcggaga

SEQ ID NO: 78013 - DNA, 20 bp, Artificial Sequence
  MKO10078013_B_Cldn10
  gRNA
ttgatctgagcctccgactt

SEQ ID NO: 78014 - DNA, 20 bp, Artificial Sequence
  MKO10078014_B_Cldn10
  gRNA
tccttctccgccttgatact

SEQ ID NO: 78015 - DNA, 20 bp, Artificial Sequence
  MKO10078015_B_Cldn11
  gRNA
tgacgaaacccaccacctga

SEQ ID NO: 78016 - DNA, 20 bp, Artificial Sequence
  MKO10078016_B_Cldn11
  gRNA
ctccaggctcgtggcccatt

SEQ ID NO: 78017 - DNA, 20 bp, Artificial Sequence
  MKO10078017_B_Cldn11
  gRNA
cttgttcccaggctacgtgc

SEQ ID NO: 78018 - DNA, 20 bp, Artificial Sequence
  MKO10078018_B_Cldn12
  gRNA
tctcagcatcgtgatcgcaa

SEQ ID NO: 78019 - DNA, 20 bp, Artificial Sequence
  MKO10078019_B_Cldn12
  gRNA
ttccgtgcctaacatcaaac

SEQ ID NO: 78020 - DNA, 20 bp, Artificial Sequence
  MKO10078020_B_Cldn12
  gRNA
ccgctgtactctcacgctcc

SEQ ID NO: 78021 - DNA, 20 bp, Artificial Sequence
  MKO10078021_B_Cldn13
  gRNA
tgtcctgtgctaccagtatc

SEQ ID NO: 78022 - DNA, 20 bp, Artificial Sequence
  MKO10078022_B_Cldn13
  gRNA
aaaagtgtctcgagtcttta

SEQ ID NO: 78023 - DNA, 20 bp, Artificial Sequence
  MKO10078023_B_Cldn13
  gRNA
tgagctgcgtgctgcccgtt

SEQ ID NO: 78024 - DNA, 20 bp, Artificial Sequence
  MKO10078024_B_Cldn14
  gRNA
attctgcaccacgtcattcg

SEQ ID NO: 78025 - DNA, 20 bp, Artificial Sequence
  MKO10078025_B_Cldn14
  gRNA
gtctgtagggggcctcgtcc

SEQ ID NO: 78026 - DNA, 20 bp, Artificial Sequence
  MKO10078026_B_Cldn14
  gRNA
gactgccgtatcctacctga

SEQ ID NO: 78027 - DNA, 20 bp, Artificial Sequence
  MKO10078027_B_Cldn15
  gRNA
gagatccatgttgcccacgt

SEQ ID NO: 78028 - DNA, 20 bp, Artificial Sequence
  MKO10078028_B_Cldn15
  gRNA
aggcactccagcccaagtag

SEQ ID NO: 78029 - DNA, 20 bp, Artificial Sequence
  MKO10078029_B_Cldn15
  gRNA
cgagatagccaccatcccac

SEQ ID NO: 78030 - DNA, 20 bp, Artificial Sequence
  MKO10078030_B_Cldn16
  gRNA
tatattgtgtaaaacgagag

SEQ ID NO: 78031 - DNA, 20 bp, Artificial Sequence
  MKO10078031_B_Cldn16
  gRNA
actttaatttgtgggtcatc

SEQ ID NO: 78032 - DNA, 20 bp, Artificial Sequence
  MKO10078032_B_Cldn16
  gRNA
gtccgcctttgctttgttgc

SEQ ID NO: 78033 - DNA, 20 bp, Artificial Sequence
  MKO10078033_B_Cldn17
  gRNA
tacgacccaaccgttcatgc

SEQ ID NO: 78034 - DNA, 20 bp, Artificial Sequence
  MKO10078034_B_Cldn17
  gRNA
aagtaagccttagacgtagc

SEQ ID NO: 78035 - DNA, 20 bp, Artificial Sequence
  MKO10078035_B_Cldn17
  gRNA
tgcataccgcgtgccacaga

SEQ ID NO: 78036 - DNA, 20 bp, Artificial Sequence
  MKO10078036_B_Cldn18
  gRNA
agcgggttacctggtctgaa

SEQ ID NO: 78037 - DNA, 20 bp, Artificial Sequence
  MKO10078037_B_Cldn18
  gRNA
atgatgtgcatcgcctgccg

SEQ ID NO: 78038 - DNA, 20 bp, Artificial Sequence
  MKO10078038_B_Cldn18
  gRNA
ggtgaagtatggccggcact

SEQ ID NO: 78039 - DNA, 20 bp, Artificial Sequence
  MKO10078039_B_Cldn19
  gRNA
caaactctacgattcactcc

SEQ ID NO: 78040 - DNA, 20 bp, Artificial Sequence
  MKO10078040_B_Cldn19
  gRNA
ggagcacagccacgaccatc

SEQ ID NO: 78041 - DNA, 20 bp, Artificial Sequence
  MKO10078041_B_Cldn19
  gRNA
ccccactgccaagagccgtg

SEQ ID NO: 78042 - DNA, 20 bp, Artificial Sequence
  MKO10078042_B_Cldn1
  gRNA
ggacaacatcgtgaccgctc

SEQ ID NO: 78043 - DNA, 20 bp, Artificial Sequence
  MKO10078043_B_Cldn1
  gRNA
cagcggcccagccagtaaag

SEQ ID NO: 78044 - DNA, 20 bp, Artificial Sequence
  MKO10078044_B_Cldn1
  gRNA
agattgcgatcagccccagc

SEQ ID NO: 78045 - DNA, 20 bp, Artificial Sequence
  MKO10078045_B_Cldn20
  gRNA
ccgtccatgtgcagactgcg

SEQ ID NO: 78046 - DNA, 20 bp, Artificial Sequence
  MKO10078046_B_Cldn20
  gRNA
ccgaaataaacccaatgtac

SEQ ID NO: 78047 - DNA, 20 bp, Artificial Sequence
  MKO10078047_B_Cldn20
  gRNA
agtaacatcatggcctcggc

SEQ ID NO: 78048 - DNA, 20 bp, Artificial Sequence
  MKO10078048_B_Cldn22
  gRNA
ttacaaactacttgccgcac

SEQ ID NO: 78049 - DNA, 20 bp, Artificial Sequence
  MKO10078049_B_Cldn22
  gRNA
agtgcggcaagtagtttgta

SEQ ID NO: 78050 - DNA, 20 bp, Artificial Sequence
  MKO10078050_B_Cldn22
  gRNA
aggataaaacccatcccagc

SEQ ID NO: 78051 - DNA, 20 bp, Artificial Sequence
  MKO10078051_B_Cldn23
  gRNA
gcgttgtcgccgctgtcgca

SEQ ID NO: 78052 - DNA, 20 bp, Artificial Sequence
  MKO10078052_B_Cldn23
  gRNA
tgagccccactacgggctag

SEQ ID NO: 78053 - DNA, 20 bp, Artificial Sequence
  MKO10078053_B_Cldn23
  gRNA
aagattaagcagcaacccgc

SEQ ID NO: 78054 - DNA, 20 bp, Artificial Sequence
  MKO10078054_B_Cldn24
  gRNA
tgcaggagctgggctcgagc

SEQ ID NO: 78055 - DNA, 20 bp, Artificial Sequence
  MKO10078055_B_Cldn24
  gRNA
cttccagtgtggtagatatg

SEQ ID NO: 78056 - DNA, 20 bp, Artificial Sequence
  MKO10078056_B_Cldn24
  gRNA
ttaccacatatctaccacac

SEQ ID NO: 78057 - DNA, 20 bp, Artificial Sequence
  MKO10078057_B_Cldn25
  gRNA
cacacgataagccttcatta

SEQ ID NO: 78058 - DNA, 20 bp, Artificial Sequence
  MKO10078058_B_Cldn25
  gRNA
gccccaagctgccgttgtat

SEQ ID NO: 78059 - DNA, 20 bp, Artificial Sequence
  MKO10078059_B_Cldn25
  gRNA
gatgccgctattgtggttgc

SEQ ID NO: 78060 - DNA, 20 bp, Artificial Sequence
  MKO10078060_B_Cldn26
  gRNA
catcatcgacaccgagaggc

SEQ ID NO: 78061 - DNA, 20 bp, Artificial Sequence
  MKO10078061_B_Cldn26
  gRNA
gccactcagtctgatcgtga

SEQ ID NO: 78062 - DNA, 20 bp, Artificial Sequence
  MKO10078062_B_Cldn26
  gRNA
ctgggagatgcgggtgcgcc

SEQ ID NO: 78063 - DNA, 20 bp, Artificial Sequence
  MKO10078063_B_Cldn2
  gRNA
gggtactgtagatatcgcac

SEQ ID NO: 78064 - DNA, 20 bp, Artificial Sequence
  MKO10078064_B_Cldn2
  gRNA
acgattgccctggggcgagc

SEQ ID NO: 78065 - DNA, 20 bp, Artificial Sequence
  MKO10078065_B_Cldn2
  gRNA
tcgggacttctactcgccgc

SEQ ID NO: 78066 - DNA, 20 bp, Artificial Sequence
  MKO10078066_B_Cldn3
  gRNA
cgaccaggacaccggtacta

SEQ ID NO: 78067 - DNA, 20 bp, Artificial Sequence
  MKO10078067_B_Cldn3
  gRNA
ccgaaacgcgccacatggga

SEQ ID NO: 78068 - DNA, 20 bp, Artificial Sequence
  MKO10078068_B_Cldn3
  gRNA
caaaatgtacgactcgctgc

SEQ ID NO: 78069 - DNA, 20 bp, Artificial Sequence
  MKO10078069_B_Cldn4
  gRNA
tagggcttgtcgttgctacg

SEQ ID NO: 78070 - DNA, 20 bp, Artificial Sequence
  MKO10078070_B_Cldn4
  gRNA
tgagttgtgcgctccccatg

SEQ ID NO: 78071 - DNA, 20 bp, Artificial Sequence
  MKO10078071_B_Cldn4
  gRNA
tccggcggtgatcatgatct

SEQ ID NO: 78072 - DNA, 20 bp, Artificial Sequence
  MKO10078072_B_Cldn5
  gRNA
gcctcgtgtgttgcggcgcc

SEQ ID NO: 78073 - DNA, 20 bp, Artificial Sequence
  MKO10078073_B_Cldn5
  gRNA
cttcttgtcgtaatcgccat

SEQ ID NO: 78074 - DNA, 20 bp, Artificial Sequence
  MKO10078074_B_Cldn5
  gRNA
cgcggcgcagagtacttgac

SEQ ID NO: 78075 - DNA, 20 bp, Artificial Sequence
  MKO10078075_B_Cldn6
  gRNA
tgatgctcaaaagcgggagc

SEQ ID NO: 78076 - DNA, 20 bp, Artificial Sequence
  MKO10078076_B_Cldn6
  gRNA
tcggagggtccccgagaatg

SEQ ID NO: 78077 - DNA, 20 bp, Artificial Sequence
  MKO10078077_B_Cldn6
  gRNA
ccaggacttctacaacccct

SEQ ID NO: 78078 - DNA, 20 bp, Artificial Sequence
  MKO10078078_B_Cldn7
  gRNA
caccaccattaaggctcgag

SEQ ID NO: 78079 - DNA, 20 bp, Artificial Sequence
  MKO10078079_B_Cldn7
  gRNA
acctgccatctttatcggct

SEQ ID NO: 78080 - DNA, 20 bp, Artificial Sequence
  MKO10078080_B_Cldn7
  gRNA
ggagacttacttaacgttca

SEQ ID NO: 78081 - DNA, 20 bp, Artificial Sequence
  MKO10078081_B_Cldn8
  gRNA
ctcatcgtcccccgtgcatc

SEQ ID NO: 78082 - DNA, 20 bp, Artificial Sequence
  MKO10078082_B_Cldn8
  gRNA
aactccgttgagtggtgcga

SEQ ID NO: 78083 - DNA, 20 bp, Artificial Sequence
  MKO10078083_B_Cldn8
  gRNA
cttctcccagctcgcgcttt

SEQ ID NO: 78084 - DNA, 20 bp, Artificial Sequence
  MKO10078084_B_Cldn9
  gRNA
cgcccgtgatagccaccagc

SEQ ID NO: 78085 - DNA, 20 bp, Artificial Sequence
  MKO10078085_B_Cldn9
  gRNA
cggggacgctcaaagtgtga

SEQ ID NO: 78086 - DNA, 20 bp, Artificial Sequence
  MKO10078086_B_Cldn9
  gRNA
cgtatactttgcactgcatc

SEQ ID NO: 78087 - DNA, 20 bp, Artificial Sequence
  MKO10078087_B_Cldnd2
  gRNA
tgccaacaccatgcacgctg

SEQ ID NO: 78088 - DNA, 20 bp, Artificial Sequence
  MKO10078088_B_Cldnd2
  gRNA
ggtgctctgcaagatcatgt

SEQ ID NO: 78089 - DNA, 20 bp, Artificial Sequence
  MKO10078089_B_Cldnd2
  gRNA
ggcagtgtccgcagcgtgca

SEQ ID NO: 78090 - DNA, 20 bp, Artificial Sequence
  MKO10078090_B_Clec10a
  gRNA
tctcacctttaccaggctct

SEQ ID NO: 78091 - DNA, 20 bp, Artificial Sequence
  MKO10078091_B_Clec10a
  gRNA
gcagctgacagcttcgaaaa

SEQ ID NO: 78092 - DNA, 20 bp, Artificial Sequence
  MKO10078092_B_Clec10a
  gRNA
ccttatcagattcccagtta

SEQ ID NO: 78093 - DNA, 20 bp, Artificial Sequence
  MKO10078093_B_Clec11a
  gRNA
gcacgtccgtctgcacgttt

SEQ ID NO: 78094 - DNA, 20 bp, Artificial Sequence
  MKO10078094_B_Clec11a
  gRNA
cctagggctgcccactgggg

SEQ ID NO: 78095 - DNA, 20 bp, Artificial Sequence
  MKO10078095_B_Clec11a
  gRNA
tctgacccagaatctccagg

SEQ ID NO: 78096 - DNA, 20 bp, Artificial Sequence
  MKO10078096_B_Clec12a
  gRNA
tcggaatgccagcctcctga

SEQ ID NO: 78097 - DNA, 20 bp, Artificial Sequence
  MKO10078097_B_Clec12a
  gRNA
ccattccaatgaacagcaga

SEQ ID NO: 78098 - DNA, 20 bp, Artificial Sequence
  MKO10078098_B_Clec12a
  gRNA
caaagacttactcttcagag

SEQ ID NO: 78099 - DNA, 20 bp, Artificial Sequence
  MKO10078099_B_Clec12b
  gRNA
agattgacagcaccgaagaa

SEQ ID NO: 78100 - DNA, 20 bp, Artificial Sequence
  MKO10078100_B_Clec12b
  gRNA
tccataccattgccatgtct

SEQ ID NO: 78101 - DNA, 20 bp, Artificial Sequence
  MKO10078101_B_Clec12b
  gRNA
gtcccagatctctgccctac

SEQ ID NO: 78102 - DNA, 20 bp, Artificial Sequence
  MKO10078102_B_Clec14a
  gRNA
cgctgtcatctgcgcaccga

SEQ ID NO: 78103 - DNA, 20 bp, Artificial Sequence
  MKO10078103_B_Clec14a
  gRNA
cgggacctgcacgcaagagc

SEQ ID NO: 78104 - DNA, 20 bp, Artificial Sequence
  MKO10078104_B_Clec14a
  gRNA
cgttgtggctcttccaccca

SEQ ID NO: 78105 - DNA, 20 bp, Artificial Sequence
  MKO10078105_B_Clec16a
  gRNA
atacgccatgatctcctcgt

SEQ ID NO: 78106 - DNA, 20 bp, Artificial Sequence
  MKO10078106_B_Clec16a
  gRNA
tgttgcgggaggacttgctg

SEQ ID NO: 78107 - DNA, 20 bp, Artificial Sequence
  MKO10078107_B_Clec16a
  gRNA
ccatcactgagatcctgatt

SEQ ID NO: 78108 - DNA, 20 bp, Artificial Sequence
  MKO10078108_B_Clec18a
  gRNA
cacacaaccgactgcgcagc

SEQ ID NO: 78109 - DNA, 20 bp, Artificial Sequence
  MKO10078109_B_Clec18a
  gRNA
gaatgtgcagctaatgccca

SEQ ID NO: 78110 - DNA, 20 bp, Artificial Sequence
  MKO10078110_B_Clec18a
  gRNA
tgggcggcagccatgctttg

SEQ ID NO: 78111 - DNA, 20 bp, Artificial Sequence
  MKO10078111_B_Clec1a
  gRNA
ccgacagctacagtctctcc

SEQ ID NO: 78112 - DNA, 20 bp, Artificial Sequence
  MKO10078112_B_Clec1a
  gRNA
aacgagcagcaccaaacaca

SEQ ID NO: 78113 - DNA, 20 bp, Artificial Sequence
  MKO10078113_B_Clec1a
  gRNA
gcagtccttgcccagaaaaa

SEQ ID NO: 78114 - DNA, 20 bp, Artificial Sequence
  MKO10078114_B_Clec1b
  gRNA
cacacagcaaaagtatctac

SEQ ID NO: 78115 - DNA, 20 bp, Artificial Sequence
  MKO10078115_B_Clec1b
  gRNA
ggttgttggactcgtggctc

SEQ ID NO: 78116 - DNA, 20 bp, Artificial Sequence
  MKO10078116_B_Clec1b
  gRNA
tcactttaaacatcaagccc

SEQ ID NO: 78117 - DNA, 20 bp, Artificial Sequence
  MKO10078117_B_Clec2d
  gRNA
gctaagctttactgctacta

SEQ ID NO: 78118 - DNA, 20 bp, Artificial Sequence
  MKO10078118_B_Clec2d
  gRNA
cattgcttaccagctcatcc

SEQ ID NO: 78119 - DNA, 20 bp, Artificial Sequence
  MKO10078119_B_Clec2d
  gRNA
taaagcttagcacaagactc

SEQ ID NO: 78120 - DNA, 20 bp, Artificial Sequence
  MKO10078120_B_Clec2e
  gRNA
cttgagcatacagcatagca

SEQ ID NO: 78121 - DNA, 20 bp, Artificial Sequence
  MKO10078121_B_Clec2e
  gRNA
aagtttaacacaagatgcag

SEQ ID NO: 78122 - DNA, 20 bp, Artificial Sequence
  MKO10078122_B_Clec2e
  gRNA
aaactccaagcaaaatgtct

SEQ ID NO: 78123 - DNA, 20 bp, Artificial Sequence
  MKO10078123_B_Clec2f
  gRNA
gacacatgaattctagccac

SEQ ID NO: 78124 - DNA, 20 bp, Artificial Sequence
  MKO10078124_B_Clec2f
  gRNA
cacaactacaatgaggacca

SEQ ID NO: 78125 - DNA, 20 bp, Artificial Sequence
  MKO10078125_B_Clec2f
  gRNA
atgctgcttgcctgcaaaac

SEQ ID NO: 78126 - DNA, 20 bp, Artificial Sequence
  MKO10078126_B_Clec2g
  gRNA
atgctgcttgcccgaaaaac

SEQ ID NO: 78127 - DNA, 20 bp, Artificial Sequence
  MKO10078127_B_Clec2g
  gRNA
agaatgtacacctccagttc

SEQ ID NO: 78128 - DNA, 20 bp, Artificial Sequence
  MKO10078128_B_Clec2g
  gRNA
gctaagctttactgctgctg

SEQ ID NO: 78129 - DNA, 20 bp, Artificial Sequence
  MKO10078129_B_Clec2h
  gRNA
tgctgatcccattatcactc

SEQ ID NO: 78130 - DNA, 20 bp, Artificial Sequence
  MKO10078130_B_Clec2h
  gRNA
gagcatcaacacagcaccct

SEQ ID NO: 78131 - DNA, 20 bp, Artificial Sequence
  MKO10078131_B_Clec2h
  gRNA
gctgtgttgatgctctgtgc

SEQ ID NO: 78132 - DNA, 20 bp, Artificial Sequence
  MKO10078132_B_Clec2i
  gRNA
attgcacacctccagttcca

SEQ ID NO: 78133 - DNA, 20 bp, Artificial Sequence
  MKO10078133_B_Clec2i
  gRNA
gtgttgtttgtccacttcca

SEQ ID NO: 78134 - DNA, 20 bp, Artificial Sequence
  MKO10078134_B_Clec2i
  gRNA
aatggaccccttggaactgg

SEQ ID NO: 78135 - DNA, 20 bp, Artificial Sequence
  MKO10078135_B_Clec2l
  gRNA
aatgtctgacaacccgtccc

SEQ ID NO: 78136 - DNA, 20 bp, Artificial Sequence
  MKO10078136_B_Clec2l
  gRNA
gcagtactgccatacacacg

SEQ ID NO: 78137 - DNA, 20 bp, Artificial Sequence
  MKO10078137_B_Clec2l
  gRNA
acattccgttgacaccagcc

SEQ ID NO: 78138 - DNA, 20 bp, Artificial Sequence
  MKO10078138_B_Clec3a
  gRNA
tgcagtcttcgttggcttcg

SEQ ID NO: 78139 - DNA, 20 bp, Artificial Sequence
  MKO10078139_B_Clec3a
  gRNA
aatctcaagttgaaaagctg

SEQ ID NO: 78140 - DNA, 20 bp, Artificial Sequence
  MKO10078140_B_Clec3a
  gRNA
gagatgcaagctctgcagac

SEQ ID NO: 78141 - DNA, 20 bp, Artificial Sequence
  MKO10078141_B_Clec3b
  gRNA
cctgcacttaccagtctgta

SEQ ID NO: 78142 - DNA, 20 bp, Artificial Sequence
  MKO10078142_B_Clec3b
  gRNA
tgggtgactctgcaatgacc

SEQ ID NO: 78143 - DNA, 20 bp, Artificial Sequence
  MKO10078143_B_Clec3b
  gRNA
gcagcagcagtatgggattt

SEQ ID NO: 78144 - DNA, 20 bp, Artificial Sequence
  MKO10078144_B_Clec4a1
  gRNA
cttcccgtgacactgcatcc

SEQ ID NO: 78145 - DNA, 20 bp, Artificial Sequence
  MKO10078145_B_Clec4a1
  gRNA
actattcacaaaagtaaccc

SEQ ID NO: 78146 - DNA, 20 bp, Artificial Sequence
  MKO10078146_B_Clec4a1
  gRNA
cacgggaagtgaagtagcag

SEQ ID NO: 78147 - DNA, 20 bp, Artificial Sequence
  MKO10078147_B_Clec4a2
  gRNA
tctagtggtgatccaaagcc

SEQ ID NO: 78148 - DNA, 20 bp, Artificial Sequence
  MKO10078148_B_Clec4a2
  gRNA
acctactcagaatctcctgc

SEQ ID NO: 78149 - DNA, 20 bp, Artificial Sequence
  MKO10078149_B_Clec4a2
  gRNA
agaatgtgattgccagcagc

SEQ ID NO: 78150 - DNA, 20 bp, Artificial Sequence
  MKO10078150_B_Clec4a3
  gRNA
aagttgtcacaaattctcta

SEQ ID NO: 78151 - DNA, 20 bp, Artificial Sequence
  MKO10078151_B_Clec4a3
  gRNA
ctgttgacaatcttattctc

SEQ ID NO: 78152 - DNA, 20 bp, Artificial Sequence
  MKO10078152_B_Clec4a3
  gRNA
ctacttcacttcaactgact

SEQ ID NO: 78153 - DNA, 20 bp, Artificial Sequence
  MKO10078153_B_Clec4a4
  gRNA
acaaatggtttccaatcctt

SEQ ID NO: 78154 - DNA, 20 bp, Artificial Sequence
  MKO10078154_B_Clec4a4
  gRNA
tgaggagaagtgctcccaca

SEQ ID NO: 78155 - DNA, 20 bp, Artificial Sequence
  MKO10078155_B_Clec4a4
  gRNA
tgcaaaaaatataatgtaca

SEQ ID NO: 78156 - DNA, 20 bp, Artificial Sequence
  MKO10078156_B_Clec4b1
  gRNA
gttcaggaaagacagctaca

SEQ ID NO: 78157 - DNA, 20 bp, Artificial Sequence
  MKO10078157_B_Clec4b1
  gRNA
cacgtgacactttcttcata

SEQ ID NO: 78158 - DNA, 20 bp, Artificial Sequence
  MKO10078158_B_Clec4b1
  gRNA
ttcccttaggatttcatcac

SEQ ID NO: 78159 - DNA, 20 bp, Artificial Sequence
  MKO10078159_B_Clec4b2
  gRNA
tgacagggcaggtagtctgc

SEQ ID NO: 78160 - DNA, 20 bp, Artificial Sequence
  MKO10078160_B_Clec4b2
  gRNA
tgtttcattgcgagttgtgt

SEQ ID NO: 78161 - DNA, 20 bp, Artificial Sequence
  MKO10078161_B_Clec4b2
  gRNA
acttctcctcactcttattc

SEQ ID NO: 78162 - DNA, 20 bp, Artificial Sequence
  MKO10078162_B_Clec4d
  gRNA
gaaacaacagcgaagacgca

SEQ ID NO: 78163 - DNA, 20 bp, Artificial Sequence
  MKO10078163_B_Clec4d
  gRNA
catcaacaccgaagcagaac

SEQ ID NO: 78164 - DNA, 20 bp, Artificial Sequence
  MKO10078164_B_Clec4d
  gRNA
gttcctctcgctctcatgcc

SEQ ID NO: 78165 - DNA, 20 bp, Artificial Sequence
  MKO10078165_B_Clec4e
  gRNA
tcagaacccaccgacacatc

SEQ ID NO: 78166 - DNA, 20 bp, Artificial Sequence
  MKO10078166_B_Clec4e
  gRNA
ttatattggactgacagacc

SEQ ID NO: 78167 - DNA, 20 bp, Artificial Sequence
  MKO10078167_B_Clec4e
  gRNA
gccactgaccctccaccacc

SEQ ID NO: 78168 - DNA, 20 bp, Artificial Sequence
  MKO10078168_B_Clec4f
  gRNA
gagaactaacattgtccatt

SEQ ID NO: 78169 - DNA, 20 bp, Artificial Sequence
  MKO10078169_B_Clec4f
  gRNA
agttgttgcttccccgaagc

SEQ ID NO: 78170 - DNA, 20 bp, Artificial Sequence
  MKO10078170_B_Clec4f
  gRNA
aaatgcaagtggctatccag

SEQ ID NO: 78171 - DNA, 20 bp, Artificial Sequence
  MKO10078171_B_Clec4g
  gRNA
gatgacgttgagttccctga

SEQ ID NO: 78172 - DNA, 20 bp, Artificial Sequence
  MKO10078172_B_Clec4g
  gRNA
tttcttacagcaattcctgc

SEQ ID NO: 78173 - DNA, 20 bp, Artificial Sequence
  MKO10078173_B_Clec4g
  gRNA
ctgagcaccctactgtccag

SEQ ID NO: 78174 - DNA, 20 bp, Artificial Sequence
  MKO10078174_B_Clec4n
  gRNA
ctttcggatccacaaggtaa

SEQ ID NO: 78175 - DNA, 20 bp, Artificial Sequence
  MKO10078175_B_Clec4n
  gRNA
ctcctttcagtcaaaatgtc

SEQ ID NO: 78176 - DNA, 20 bp, Artificial Sequence
  MKO10078176_B_Clec4n
  gRNA
ccaaatgacttccagtgatt

SEQ ID NO: 78177 - DNA, 20 bp, Artificial Sequence
  MKO10078177_B_Clec5a
  gRNA
cctgttccatagctccttgt

SEQ ID NO: 78178 - DNA, 20 bp, Artificial Sequence
  MKO10078178_B_Clec5a
  gRNA
agtgttgacaattgccagtg

SEQ ID NO: 78179 - DNA, 20 bp, Artificial Sequence
  MKO10078179_B_Clec5a
  gRNA
ggtattgagaattactttat

SEQ ID NO: 78180 - DNA, 20 bp, Artificial Sequence
  MKO10078180_B_Clec7a
  gRNA
ttcccatgcatgatccaatt

SEQ ID NO: 78181 - DNA, 20 bp, Artificial Sequence
  MKO10078181_B_Clec7a
  gRNA
aggcccattgcagtgggttt

SEQ ID NO: 78182 - DNA, 20 bp, Artificial Sequence
  MKO10078182_B_Clec7a
  gRNA
tccaaggcatcccaaactac

SEQ ID NO: 78183 - DNA, 20 bp, Artificial Sequence
  MKO10078183_B_Clec9a
  gRNA
caatcccctagcaaatgttc

SEQ ID NO: 78184 - DNA, 20 bp, Artificial Sequence
  MKO10078184_B_Clec9a
  gRNA
taggagttcatcagcagtat

SEQ ID NO: 78185 - DNA, 20 bp, Artificial Sequence
  MKO10078185_B_Clec9a
  gRNA
ctgctgctccaagacaagag

SEQ ID NO: 78186 - DNA, 20 bp, Artificial Sequence
  MKO10078186_B_Clgn
  gRNA
agaaccagccctctgtcgcc

SEQ ID NO: 78187 - DNA, 20 bp, Artificial Sequence
  MKO10078187_B_Clgn
  gRNA
tttacagaaacatttgatag

SEQ ID NO: 78188 - DNA, 20 bp, Artificial Sequence
  MKO10078188_B_Clgn
  gRNA
ggtcttatcaaaagcaaaga

SEQ ID NO: 78189 - DNA, 20 bp, Artificial Sequence
  MKO10078189_B_Clhc1
  gRNA
gcggccgccatgaggcatag

SEQ ID NO: 78190 - DNA, 20 bp, Artificial Sequence
  MKO10078190_B_Clhc1
  gRNA
cgtgacaaaagatgcaatgc

SEQ ID NO: 78191 - DNA, 20 bp, Artificial Sequence
  MKO10078191_B_Clhc1
  gRNA
cagacacatttaatcaaact

SEQ ID NO: 78192 - DNA, 20 bp, Artificial Sequence
  MKO10078192_B_Clic1
  gRNA
cacagacaccaacaagatcg

SEQ ID NO: 78193 - DNA, 20 bp, Artificial Sequence
  MKO10078193_B_Clic1
  gRNA
caccttcaacgttaccactg

SEQ ID NO: 78194 - DNA, 20 bp, Artificial Sequence
  MKO10078194_B_Clic1
  gRNA
gccaaagcttcacatagtac

SEQ ID NO: 78195 - DNA, 20 bp, Artificial Sequence
  MKO10078195_B_Clic3
  gRNA
tcaccttcgagtgtccactg

SEQ ID NO: 78196 - DNA, 20 bp, Artificial Sequence
  MKO10078196_B_Clic3
  gRNA
tgacatccccatcgtacagc

SEQ ID NO: 78197 - DNA, 20 bp, Artificial Sequence
  MKO10078197_B_Clic3
  gRNA
ctgcccatcctgctgtacga

SEQ ID NO: 78198 - DNA, 20 bp, Artificial Sequence
  MKO10078198_B_Clic4
  gRNA
gctgttctcgtcgatttcgt

SEQ ID NO: 78199 - DNA, 20 bp, Artificial Sequence
  MKO10078199_B_Clic4
  gRNA
cttcaacagcgaagtcaaga

SEQ ID NO: 78200 - DNA, 20 bp, Artificial Sequence
  MKO10078200_B_Clic4
  gRNA
tgcctccaggccggaagtga

SEQ ID NO: 78201 - DNA, 20 bp, Artificial Sequence
  MKO10078201_B_Clic5
  gRNA
cgtgttcaatgtcaccaccg

SEQ ID NO: 78202 - DNA, 20 bp, Artificial Sequence
  MKO10078202_B_Clic5
  gRNA
ccccatccaggaacttgcgc

SEQ ID NO: 78203 - DNA, 20 bp, Artificial Sequence
  MKO10078203_B_Clic5
  gRNA
tgcccgcggtgttagattcc

SEQ ID NO: 78204 - DNA, 20 bp, Artificial Sequence
  MKO10078204_B_Clic6
  gRNA
atataacaccctttagccag

SEQ ID NO: 78205 - DNA, 20 bp, Artificial Sequence
  MKO10078205_B_Clic6
  gRNA
aatcgatgccgacagttcag

SEQ ID NO: 78206 - DNA, 20 bp, Artificial Sequence
  MKO10078206_B_Clic6
  gRNA
catcgatttcgtctggcagc

SEQ ID NO: 78207 - DNA, 20 bp, Artificial Sequence
  MKO10078207_B_Clint1
  gRNA
gctccgatccatttcttatg

SEQ ID NO: 78208 - DNA, 20 bp, Artificial Sequence
  MKO10078208_B_Clint1
  gRNA
aagcaacgaatgatgatccc

SEQ ID NO: 78209 - DNA, 20 bp, Artificial Sequence
  MKO10078209_B_Clint1
  gRNA
tgagtaattcataaccacat

SEQ ID NO: 78210 - DNA, 20 bp, Artificial Sequence
  MKO10078210_B_Clip1
  gRNA
ctaatttgaggtgtagccga

SEQ ID NO: 78211 - DNA, 20 bp, Artificial Sequence
  MKO10078211_B_Clip1
  gRNA
gggggcttactagtcctgtc

SEQ ID NO: 78212 - DNA, 20 bp, Artificial Sequence
  MKO10078212_B_Clip1
  gRNA
tgtggagttagacgagcctt

SEQ ID NO: 78213 - DNA, 20 bp, Artificial Sequence
  MKO10078213_B_Clip2
  gRNA
agccaattcggatgaccttg

SEQ ID NO: 78214 - DNA, 20 bp, Artificial Sequence
  MKO10078214_B_Clip2
  gRNA
aagaacgacggggcggtggc

SEQ ID NO: 78215 - DNA, 20 bp, Artificial Sequence
  MKO10078215_B_Clip2
  gRNA
tggtgcaaagagaccgaact

SEQ ID NO: 78216 - DNA, 20 bp, Artificial Sequence
  MKO10078216_B_Clip3
  gRNA
ggggacccactggcgtacaa

SEQ ID NO: 78217 - DNA, 20 bp, Artificial Sequence
  MKO10078217_B_Clip3
  gRNA
tgttcgccattgtacgccag

SEQ ID NO: 78218 - DNA, 20 bp, Artificial Sequence
  MKO10078218_B_Clip3
  gRNA
caaaataggcggcatagtga

SEQ ID NO: 78219 - DNA, 20 bp, Artificial Sequence
  MKO10078219_B_Clip4
  gRNA
gcagcacataacttgtgtgc

SEQ ID NO: 78220 - DNA, 20 bp, Artificial Sequence
  MKO10078220_B_Clip4
  gRNA
tcctggcatgatgcatcgtt

SEQ ID NO: 78221 - DNA, 20 bp, Artificial Sequence
  MKO10078221_B_Clip4
  gRNA
ccctaacgatgcatcatgcc

SEQ ID NO: 78222 - DNA, 20 bp, Artificial Sequence
  MKO10078222_B_Clk1
  gRNA
atactgtgaagctgctcaat

SEQ ID NO: 78223 - DNA, 20 bp, Artificial Sequence
  MKO10078223_B_Clk1
  gRNA
gtgatacttacaaagtacta

SEQ ID NO: 78224 - DNA, 20 bp, Artificial Sequence
  MKO10078224_B_Clk1
  gRNA
gtgtccagaagagtcaccga

SEQ ID NO: 78225 - DNA, 20 bp, Artificial Sequence
  MKO10078225_B_Clk2
  gRNA
cttaccttcgggaccgaacg

SEQ ID NO: 78226 - DNA, 20 bp, Artificial Sequence
  MKO10078226_B_Clk2
  gRNA
tccagatgccccatccccga

SEQ ID NO: 78227 - DNA, 20 bp, Artificial Sequence
  MKO10078227_B_Clk2
  gRNA
gagtgtagaggacgacgctg

SEQ ID NO: 78228 - DNA, 20 bp, Artificial Sequence
  MKO10078228_B_Clk3
  gRNA
accgtgacagtgatacgtat

SEQ ID NO: 78229 - DNA, 20 bp, Artificial Sequence
  MKO10078229_B_Clk3
  gRNA
cttggagccaatcgccgatc

SEQ ID NO: 78230 - DNA, 20 bp, Artificial Sequence
  MKO10078230_B_Clk3
  gRNA
acccatacctgagctaccgc

SEQ ID NO: 78231 - DNA, 20 bp, Artificial Sequence
  MKO10078231_B_Clk4
  gRNA
tacagaaatgactactgcga

SEQ ID NO: 78232 - DNA, 20 bp, Artificial Sequence
  MKO10078232_B_Clk4
  gRNA
gcactctacaactttgccaa

SEQ ID NO: 78233 - DNA, 20 bp, Artificial Sequence
  MKO10078233_B_Clk4
  gRNA
tgttcaagtgctccaatact

SEQ ID NO: 78234 - DNA, 20 bp, Artificial Sequence
  MKO10078234_B_Clmn
  gRNA
gataaacctacacctcgaaa

SEQ ID NO: 78235 - DNA, 20 bp, Artificial Sequence
  MKO10078235_B_Clmn
  gRNA
tgacccacctctagaagtta

SEQ ID NO: 78236 - DNA, 20 bp, Artificial Sequence
  MKO10078236_B_Clmn
  gRNA
ccgaaaaatacgatgtgatg

SEQ ID NO: 78237 - DNA, 20 bp, Artificial Sequence
  MKO10078237_B_Clmp
  gRNA
tgtctacaataacttgaccg

SEQ ID NO: 78238 - DNA, 20 bp, Artificial Sequence
  MKO10078238_B_Clmp
  gRNA
cctacagattacaacaaccc

SEQ ID NO: 78239 - DNA, 20 bp, Artificial Sequence
  MKO10078239_B_Clmp
  gRNA
tctcgggaagccccagttga

SEQ ID NO: 78240 - DNA, 20 bp, Artificial Sequence
  MKO10078240_B_Cln3
  gRNA
cacccttgtcatcaaactcc

SEQ ID NO: 78241 - DNA, 20 bp, Artificial Sequence
  MKO10078241_B_Cln3
  gRNA
caaatcgagatgagctgttg

SEQ ID NO: 78242 - DNA, 20 bp, Artificial Sequence
  MKO10078242_B_Cln3
  gRNA
cagacgcctgctcctgcttg

SEQ ID NO: 78243 - DNA, 20 bp, Artificial Sequence
  MKO10078243_B_Cln5
  gRNA
gacaaaattcgaacagtcgt

SEQ ID NO: 78244 - DNA, 20 bp, Artificial Sequence
  MKO10078244_B_Cln5
  gRNA
agtcggtaaatgttgtatgt

SEQ ID NO: 78245 - DNA, 20 bp, Artificial Sequence
  MKO10078245_B_Cln5
  gRNA
gaaacttatgcatgacgccg

SEQ ID NO: 78246 - DNA, 20 bp, Artificial Sequence
  MKO10078246_B_Cln6
  gRNA
tgaaagtagtccccgacact

SEQ ID NO: 78247 - DNA, 20 bp, Artificial Sequence
  MKO10078247_B_Cln6
  gRNA
cttcacctcagcttattgag

SEQ ID NO: 78248 - DNA, 20 bp, Artificial Sequence
  MKO10078248_B_Cln6
  gRNA
cctctcaacaagccaagtgt

SEQ ID NO: 78249 - DNA, 20 bp, Artificial Sequence
  MKO10078249_B_Cln8
  gRNA
tcattcgacagtgaaacatg

SEQ ID NO: 78250 - DNA, 20 bp, Artificial Sequence
  MKO10078250_B_Cln8
  gRNA
tcttccacgaagcgtagtcc

SEQ ID NO: 78251 - DNA, 20 bp, Artificial Sequence
  MKO10078251_B_Cln8
  gRNA
ctctatgccgacaaagctct

SEQ ID NO: 78252 - DNA, 20 bp, Artificial Sequence
  MKO10078252_B_Clnk
  gRNA
ctcatcccaggggcaataaa

SEQ ID NO: 78253 - DNA, 20 bp, Artificial Sequence
  MKO10078253_B_Clnk
  gRNA
tttaccagccagacctatcc

SEQ ID NO: 78254 - DNA, 20 bp, Artificial Sequence
  MKO10078254_B_Clnk
  gRNA
actcacctttggcactgctg

SEQ ID NO: 78255 - DNA, 20 bp, Artificial Sequence
  MKO10078255_B_Clns1a
  gRNA
cccttctaatctctccaacg

SEQ ID NO: 78256 - DNA, 20 bp, Artificial Sequence
  MKO10078256_B_Clns1a
  gRNA
gtttgtttagaacaaggaca

SEQ ID NO: 78257 - DNA, 20 bp, Artificial Sequence
  MKO10078257_B_Clns1a
  gRNA
ctcacatgctgacttatcac

SEQ ID NO: 78258 - DNA, 20 bp, Artificial Sequence
  MKO10078258_B_Clock
  gRNA
actagcatctgactgtgcag

SEQ ID NO: 78259 - DNA, 20 bp, Artificial Sequence
  MKO10078259_B_Clock
  gRNA
attggtggaagaagatgaca

SEQ ID NO: 78260 - DNA, 20 bp, Artificial Sequence
  MKO10078260_B_Clock
  gRNA
tagaccccagctccttaatg

SEQ ID NO: 78261 - DNA, 20 bp, Artificial Sequence
  MKO10078261_B_Clp1
  gRNA
gactgtacaacgaattgaaa

SEQ ID NO: 78262 - DNA, 20 bp, Artificial Sequence
  MKO10078262_B_Clp1
  gRNA
tctagttcaaacttagtcgt

SEQ ID NO: 78263 - DNA, 20 bp, Artificial Sequence
  MKO10078263_B_Clp1
  gRNA
ctccaactgaaccgattgag

SEQ ID NO: 78264 - DNA, 20 bp, Artificial Sequence
  MKO10078264_B_Clpb
  gRNA
ctcagtcctagtcactcgag

SEQ ID NO: 78265 - DNA, 20 bp, Artificial Sequence
  MKO10078265_B_Clpb
  gRNA
catccatcagccacaatgag

SEQ ID NO: 78266 - DNA, 20 bp, Artificial Sequence
  MKO10078266_B_Clpb
  gRNA
gtgcaggtcctgcttgctgc

SEQ ID NO: 78267 - DNA, 20 bp, Artificial Sequence
  MKO10078267_B_Clpp
  gRNA
cctgcagattgacgacagtg

SEQ ID NO: 78268 - DNA, 20 bp, Artificial Sequence
  MKO10078268_B_Clpp
  gRNA
atcatgatccaccagccctc

SEQ ID NO: 78269 - DNA, 20 bp, Artificial Sequence
  MKO10078269_B_Clpp
  gRNA
acacaccaagcagagcctac

SEQ ID NO: 78270 - DNA, 20 bp, Artificial Sequence
  MKO10078270_B_Clpsl2
  gRNA
gcaagcaccccatgcctatg

SEQ ID NO: 78271 - DNA, 20 bp, Artificial Sequence
  MKO10078271_B_Clpsl2
  gRNA
accgtcctggctttgcttgc

SEQ ID NO: 78272 - DNA, 20 bp, Artificial Sequence
  MKO10078272_B_Clpsl2
  gRNA
gggtcccagcaagcaaagcc

SEQ ID NO: 78273 - DNA, 20 bp, Artificial Sequence
  MKO10078273_B_Clps
  gRNA
cctatgcagctcccggaccc

SEQ ID NO: 78274 - DNA, 20 bp, Artificial Sequence
  MKO10078274_B_Clps
  gRNA
ccaggttgataataagaccc

SEQ ID NO: 78275 - DNA, 20 bp, Artificial Sequence
  MKO10078275_B_Clps
  gRNA
cattgcccgttgcacacaca

SEQ ID NO: 78276 - DNA, 20 bp, Artificial Sequence
  MKO10078276_B_Clptm1l
  gRNA
caaacccccaggattcagct

SEQ ID NO: 78277 - DNA, 20 bp, Artificial Sequence
  MKO10078277_B_Clptm1l
  gRNA
gaagaaattaacttgctcac

SEQ ID NO: 78278 - DNA, 20 bp, Artificial Sequence
  MKO10078278_B_Clptm1l
  gRNA
acatccacacctttcaaatt

SEQ ID NO: 78279 - DNA, 20 bp, Artificial Sequence
  MKO10078279_B_Clptm1
  gRNA
ttaacttactccgggacatg

SEQ ID NO: 78280 - DNA, 20 bp, Artificial Sequence
  MKO10078280_B_Clptm1
  gRNA
gctctgagatgtacacgtgc

SEQ ID NO: 78281 - DNA, 20 bp, Artificial Sequence
  MKO10078281_B_Clptm1
  gRNA
cacagacttcaacgccacct

SEQ ID NO: 78282 - DNA, 20 bp, Artificial Sequence
  MKO10078282_B_Clpx
  gRNA
ctccctgcaggtatttcgtg

SEQ ID NO: 78283 - DNA, 20 bp, Artificial Sequence
  MKO10078283_B_Clpx
  gRNA
cgcttgtacctgcggcgctg

SEQ ID NO: 78284 - DNA, 20 bp, Artificial Sequence
  MKO10078284_B_Clpx
  gRNA
cagcttcgctgtcctaaatg

SEQ ID NO: 78285 - DNA, 20 bp, Artificial Sequence
  MKO10078285_B_Clrn1
  gRNA
ggttaagacgacaagaatca

SEQ ID NO: 78286 - DNA, 20 bp, Artificial Sequence
  MKO10078286_B_Clrn1
  gRNA
gattcttgtcgtcttaacca

SEQ ID NO: 78287 - DNA, 20 bp, Artificial Sequence
  MKO10078287_B_Clrn1
  gRNA
aaaactataccacctcattc

SEQ ID NO: 78288 - DNA, 20 bp, Artificial Sequence
  MKO10078288_B_Clrn2
  gRNA
ccacaaccaagtttgctgcg

SEQ ID NO: 78289 - DNA, 20 bp, Artificial Sequence
  MKO10078289_B_Clrn2
  gRNA
ggagcaagagaattgtgacg

SEQ ID NO: 78290 - DNA, 20 bp, Artificial Sequence
  MKO10078290_B_Clrn2
  gRNA
ttcatcggggacatttacta

SEQ ID NO: 78291 - DNA, 20 bp, Artificial Sequence
  MKO10078291_B_Clrn3
  gRNA
caacccttaccagacgttcc

SEQ ID NO: 78292 - DNA, 20 bp, Artificial Sequence
  MKO10078292_B_Clrn3
  gRNA
agccggtggaatatgctcca

SEQ ID NO: 78293 - DNA, 20 bp, Artificial Sequence
  MKO10078293_B_Clrn3
  gRNA
gacctatgggtgtctatacc

SEQ ID NO: 78294 - DNA, 20 bp, Artificial Sequence
  MKO10078294_B_Clspn
  gRNA
taccttcctcgcactgcctt

SEQ ID NO: 78295 - DNA, 20 bp, Artificial Sequence
  MKO10078295_B_Clspn
  gRNA
aaacaaggtgaaaaatcgca

SEQ ID NO: 78296 - DNA, 20 bp, Artificial Sequence
  MKO10078296_B_Clspn
  gRNA
agttatccaaaggcagtgcg

SEQ ID NO: 78297 - DNA, 20 bp, Artificial Sequence
  MKO10078297_B_Clstn1
  gRNA
agtggataagtccacgggtg

SEQ ID NO: 78298 - DNA, 20 bp, Artificial Sequence
  MKO10078298_B_Clstn1
  gRNA
gattcaccgctccgctttgc

SEQ ID NO: 78299 - DNA, 20 bp, Artificial Sequence
  MKO10078299_B_Clstn1
  gRNA
tgcatacctgcaaagcggag

SEQ ID NO: 78300 - DNA, 20 bp, Artificial Sequence
  MKO10078300_B_Clstn2
  gRNA
gtttcacgtccacctgcacc

SEQ ID NO: 78301 - DNA, 20 bp, Artificial Sequence
  MKO10078301_B_Clstn2
  gRNA
actcattgacatccttcacc

SEQ ID NO: 78302 - DNA, 20 bp, Artificial Sequence
  MKO10078302_B_Clstn2
  gRNA
aggccccgcaccacagtcat

SEQ ID NO: 78303 - DNA, 20 bp, Artificial Sequence
  MKO10078303_B_Clstn3
  gRNA
taaggagcccgtggactgtg

SEQ ID NO: 78304 - DNA, 20 bp, Artificial Sequence
  MKO10078304_B_Clstn3
  gRNA
cttcacccgttgccttgtcc

SEQ ID NO: 78305 - DNA, 20 bp, Artificial Sequence
  MKO10078305_B_Clstn3
  gRNA
gatgctccactgcgctatgc

SEQ ID NO: 78306 - DNA, 20 bp, Artificial Sequence
  MKO10078306_B_Clta
  gRNA
cgcttcttgcttccgagaat

SEQ ID NO: 78307 - DNA, 20 bp, Artificial Sequence
  MKO10078307_B_Clta
  gRNA
caatcgatccacttctgaaa

SEQ ID NO: 78308 - DNA, 20 bp, Artificial Sequence
  MKO10078308_B_Clta
  gRNA
gatgaatggtgaatactacc

SEQ ID NO: 78309 - DNA, 20 bp, Artificial Sequence
  MKO10078309_B_Cltb
  gRNA
acgggcacctagcgggacag

SEQ ID NO: 78310 - DNA, 20 bp, Artificial Sequence
  MKO10078310_B_Cltb
  gRNA
gctcacagacgctgcctcga

SEQ ID NO: 78311 - DNA, 20 bp, Artificial Sequence
  MKO10078311_B_Cltb
  gRNA
cgaacaggagtggcgggaga

SEQ ID NO: 78312 - DNA, 20 bp, Artificial Sequence
  MKO10078312_B_Cltc
  gRNA
ttatttgcagcaaaatcgtg

SEQ ID NO: 78313 - DNA, 20 bp, Artificial Sequence
  MKO10078313_B_Cltc
  gRNA
cagttacatatcattgaagt

SEQ ID NO: 78314 - DNA, 20 bp, Artificial Sequence
  MKO10078314_B_Cltc
  gRNA
ctagctgcatgcccttcaat

SEQ ID NO: 78315 - DNA, 20 bp, Artificial Sequence
  MKO10078315_B_Cluap1
  gRNA
ggagggctccaatgtaggag

SEQ ID NO: 78316 - DNA, 20 bp, Artificial Sequence
  MKO10078316_B_Cluap1
  gRNA
gcgtctgaaatcactgccaa

SEQ ID NO: 78317 - DNA, 20 bp, Artificial Sequence
  MKO10078317_B_Cluap1
  gRNA
gatttcagacgcaagctgtc

SEQ ID NO: 78318 - DNA, 20 bp, Artificial Sequence
  MKO10078318_B_Cluh
  gRNA
accattcaacagcatgaccg

SEQ ID NO: 78319 - DNA, 20 bp, Artificial Sequence
  MKO10078319_B_Cluh
  gRNA
tgcagccccagaaccgtgac

SEQ ID NO: 78320 - DNA, 20 bp, Artificial Sequence
  MKO10078320_B_Cluh
  gRNA
tacgatgacaagtatcctca

SEQ ID NO: 78321 - DNA, 20 bp, Artificial Sequence
  MKO10078321_B_Clu
  gRNA
atggtctcgttacacacttc

SEQ ID NO: 78322 - DNA, 20 bp, Artificial Sequence
  MKO10078322_B_Clu
  gRNA
agatgaccgcactgtgtgca

SEQ ID NO: 78323 - DNA, 20 bp, Artificial Sequence
  MKO10078323_B_Clu
  gRNA
agtgtgtaacgagaccatga

SEQ ID NO: 78324 - DNA, 20 bp, Artificial Sequence
  MKO10078324_B_Clvs1
  gRNA
ttaaaatgaaaccgtttatc

SEQ ID NO: 78325 - DNA, 20 bp, Artificial Sequence
  MKO10078325_B_Clvs1
  gRNA
actcatcaagccattcctta

SEQ ID NO: 78326 - DNA, 20 bp, Artificial Sequence
  MKO10078326_B_Clvs1
  gRNA
atggcttgatgagtgtgtac

SEQ ID NO: 78327 - DNA, 20 bp, Artificial Sequence
  MKO10078327_B_Clvs2
  gRNA
tgatgacagtgagtacaacg

SEQ ID NO: 78328 - DNA, 20 bp, Artificial Sequence
  MKO10078328_B_Clvs2
  gRNA
atgggcgtatcacagtgtac

SEQ ID NO: 78329 - DNA, 20 bp, Artificial Sequence
  MKO10078329_B_Clvs2
  gRNA
agcatacctcttcatggatt

SEQ ID NO: 78330 - DNA, 20 bp, Artificial Sequence
  MKO10078330_B_Clybl
  gRNA
acccattgcagtctccacaa

SEQ ID NO: 78331 - DNA, 20 bp, Artificial Sequence
  MKO10078331_B_Clybl
  gRNA
gcttgtagacactgaccacg

SEQ ID NO: 78332 - DNA, 20 bp, Artificial Sequence
  MKO10078332_B_Clybl
  gRNA
ctccaaaaacgactgcatct

SEQ ID NO: 78333 - DNA, 20 bp, Artificial Sequence
  MKO10078333_B_Cma1
  gRNA
tcccacacctagggttagct

SEQ ID NO: 78334 - DNA, 20 bp, Artificial Sequence
  MKO10078334_B_Cma1
  gRNA
aacttcaactttatcccacc

SEQ ID NO: 78335 - DNA, 20 bp, Artificial Sequence
  MKO10078335_B_Cma1
  gRNA
gcacaaagtttcttcttatc

SEQ ID NO: 78336 - DNA, 20 bp, Artificial Sequence
  MKO10078336_B_Cma2
  gRNA
agaagaatgactgtcactct

SEQ ID NO: 78337 - DNA, 20 bp, Artificial Sequence
  MKO10078337_B_Cma2
  gRNA
ttggcaaagtcagagggggc

SEQ ID NO: 78338 - DNA, 20 bp, Artificial Sequence
  MKO10078338_B_Cma2
  gRNA
ctctatgactctgttaatcc

SEQ ID NO: 78339 - DNA, 20 bp, Artificial Sequence
  MKO10078339_B_Cmah
  gRNA
aactgaaccctcctaacccc

SEQ ID NO: 78340 - DNA, 20 bp, Artificial Sequence
  MKO10078340_B_Cmah
  gRNA
cctgttcatgaaagacatcg

SEQ ID NO: 78341 - DNA, 20 bp, Artificial Sequence
  MKO10078341_B_Cmah
  gRNA
ttcgcttgtctcccaacttg

SEQ ID NO: 78342 - DNA, 20 bp, Artificial Sequence
  MKO10078342_B_Cmas
  gRNA
cctcgtcgacaagactggga

SEQ ID NO: 78343 - DNA, 20 bp, Artificial Sequence
  MKO10078343_B_Cmas
  gRNA
tttcactccatcgaaactga

SEQ ID NO: 78344 - DNA, 20 bp, Artificial Sequence
  MKO10078344_B_Cmas
  gRNA
tcataccattgtgataattc

SEQ ID NO: 78345 - DNA, 20 bp, Artificial Sequence
  MKO10078345_B_Cmbl
  gRNA
catacccggacatcagggcg

SEQ ID NO: 78346 - DNA, 20 bp, Artificial Sequence
  MKO10078346_B_Cmbl
  gRNA
tgcctactcacctgctcaag

SEQ ID NO: 78347 - DNA, 20 bp, Artificial Sequence
  MKO10078347_B_Cmbl
  gRNA
caaggaggaacctaattgaa

SEQ ID NO: 78348 - DNA, 20 bp, Artificial Sequence
  MKO10078348_B_Cmc1
  gRNA
cagtttgcattcttcataga

SEQ ID NO: 78349 - DNA, 20 bp, Artificial Sequence
  MKO10078349_B_Cmc1
  gRNA
tccttatggtattaaaatgc

SEQ ID NO: 78350 - DNA, 20 bp, Artificial Sequence
  MKO10078350_B_Cmc1
  gRNA
cttctatgaagaatgcaaac

SEQ ID NO: 78351 - DNA, 20 bp, Artificial Sequence
  MKO10078351_B_Cmc2
  gRNA
aatcaggacgttgcattctt

SEQ ID NO: 78352 - DNA, 20 bp, Artificial Sequence
  MKO10078352_B_Cmc2
  gRNA
cgttcttccagtactcagag

SEQ ID NO: 78353 - DNA, 20 bp, Artificial Sequence
  MKO10078353_B_Cmc2
  gRNA
gaggaagtgtttgaagaatg

SEQ ID NO: 78354 - DNA, 20 bp, Artificial Sequence
  MKO10078354_B_Cmip
  gRNA
tcctgagtaacccaagccgc

SEQ ID NO: 78355 - DNA, 20 bp, Artificial Sequence
  MKO10078355_B_Cmip
  gRNA
gatgttctcgtgctcctgag

SEQ ID NO: 78356 - DNA, 20 bp, Artificial Sequence
  MKO10078356_B_Cmip
  gRNA
acagctacctgcgagatcag

SEQ ID NO: 78357 - DNA, 20 bp, Artificial Sequence
  MKO10078357_B_Cmklr1
  gRNA
tctccgtgctgctccccgtc

SEQ ID NO: 78358 - DNA, 20 bp, Artificial Sequence
  MKO10078358_B_Cmklr1
  gRNA
cactcgcaagtagtttccac

SEQ ID NO: 78359 - DNA, 20 bp, Artificial Sequence
  MKO10078359_B_Cmklr1
  gRNA
caagctgcagcgcaaccgcc

SEQ ID NO: 78360 - DNA, 20 bp, Artificial Sequence
  MKO10078360_B_Cml1
  gRNA
agaatatactcatgaagtac

SEQ ID NO: 78361 - DNA, 20 bp, Artificial Sequence
  MKO10078361_B_Cml1
  gRNA
agccacccctcctaggcaga

SEQ ID NO: 78362 - DNA, 20 bp, Artificial Sequence
  MKO10078362_B_Cml1
  gRNA
tggtactgtcggatgtgata

SEQ ID NO: 78363 - DNA, 20 bp, Artificial Sequence
  MKO10078363_B_Cml2
  gRNA
cagtgtcagcatctgtcgga

SEQ ID NO: 78364 - DNA, 20 bp, Artificial Sequence
  MKO10078364_B_Cml2
  gRNA
cagtgtgcaacatagtgctc

SEQ ID NO: 78365 - DNA, 20 bp, Artificial Sequence
  MKO10078365_B_Cml2
  gRNA
gttgcacactgccagtctca

SEQ ID NO: 78366 - DNA, 20 bp, Artificial Sequence
  MKO10078366_B_Cml3
  gRNA
gctgcagttgcttcttctgc

SEQ ID NO: 78367 - DNA, 20 bp, Artificial Sequence
  MKO10078367_B_Cml3
  gRNA
tcattgcagcaccgaagaga

SEQ ID NO: 78368 - DNA, 20 bp, Artificial Sequence
  MKO10078368_B_Cml3
  gRNA
agactcagctacccagaagc

SEQ ID NO: 78369 - DNA, 20 bp, Artificial Sequence
  MKO10078369_B_Cml5
  gRNA
gatgcctctaaccatagtcc

SEQ ID NO: 78370 - DNA, 20 bp, Artificial Sequence
  MKO10078370_B_Cml5
  gRNA
acatataacagccagtagcc

SEQ ID NO: 78371 - DNA, 20 bp, Artificial Sequence
  MKO10078371_B_Cml5
  gRNA
ttatcagatccgccagtacc

SEQ ID NO: 78372 - DNA, 20 bp, Artificial Sequence
  MKO10078372_B_Cmpk1
  gRNA
ttaggaaatggaccaaacaa

SEQ ID NO: 78373 - DNA, 20 bp, Artificial Sequence
  MKO10078373_B_Cmpk1
  gRNA
agaaatcaagacaaccttca

SEQ ID NO: 78374 - DNA, 20 bp, Artificial Sequence
  MKO10078374_B_Cmpk1
  gRNA
tgacgacaacagagagagct

SEQ ID NO: 78375 - DNA, 20 bp, Artificial Sequence
  MKO10078375_B_Cmpk2
  gRNA
acccacctgtctacaataac

SEQ ID NO: 78376 - DNA, 20 bp, Artificial Sequence
  MKO10078376_B_Cmpk2
  gRNA
acaattaacgaccagaactc

SEQ ID NO: 78377 - DNA, 20 bp, Artificial Sequence
  MKO10078377_B_Cmpk2
  gRNA
cctagttgaccagtgcccaa

SEQ ID NO: 78378 - DNA, 20 bp, Artificial Sequence
  MKO10078378_B_Cmss1
  gRNA
cttccgagagtcctctgctt

SEQ ID NO: 78379 - DNA, 20 bp, Artificial Sequence
  MKO10078379_B_Cmss1
  gRNA
ggtctctgatcagcttctga

SEQ ID NO: 78380 - DNA, 20 bp, Artificial Sequence
  MKO10078380_B_Cmss1
  gRNA
ggacacggaaatgacacagc

SEQ ID NO: 78381 - DNA, 20 bp, Artificial Sequence
  MKO10078381_B_Cmtm1
  gRNA
atagttggtatagtagtcat

SEQ ID NO: 78382 - DNA, 20 bp, Artificial Sequence
  MKO10078382_B_Cmtm1
  gRNA
gtttgtagtcatcatgattc

SEQ ID NO: 78383 - DNA, 20 bp, Artificial Sequence
  MKO10078383_B_Cmtm1
  gRNA
tacaggccatcgtggtttga

SEQ ID NO: 78384 - DNA, 20 bp, Artificial Sequence
  MKO10078384_B_Cmtm2a
  gRNA
ccgcttccatacagatgagc

SEQ ID NO: 78385 - DNA, 20 bp, Artificial Sequence
  MKO10078385_B_Cmtm2a
  gRNA
ctttaccatagcagttaagt

SEQ ID NO: 78386 - DNA, 20 bp, Artificial Sequence
  MKO10078386_B_Cmtm2a
  gRNA
acacatacttccttaaccta

SEQ ID NO: 78387 - DNA, 20 bp, Artificial Sequence
  MKO10078387_B_Cmtm2b
  gRNA
tggctgcgcagtcaccatcc

SEQ ID NO: 78388 - DNA, 20 bp, Artificial Sequence
  MKO10078388_B_Cmtm2b
  gRNA
tcaggatctgatgaacgacc

SEQ ID NO: 78389 - DNA, 20 bp, Artificial Sequence
  MKO10078389_B_Cmtm2b
  gRNA
agagtgcaagtctctgatta

SEQ ID NO: 78390 - DNA, 20 bp, Artificial Sequence
  MKO10078390_B_Cmtm3
  gRNA
gtaagccccatctgagtatt

SEQ ID NO: 78391 - DNA, 20 bp, Artificial Sequence
  MKO10078391_B_Cmtm3
  gRNA
ccatttgtcattcagctgca

SEQ ID NO: 78392 - DNA, 20 bp, Artificial Sequence
  MKO10078392_B_Cmtm3
  gRNA
ttcagaagagaactccaact

SEQ ID NO: 78393 - DNA, 20 bp, Artificial Sequence
  MKO10078393_B_Cmtm4
  gRNA
tcgcaccgagtcgagagatg

SEQ ID NO: 78394 - DNA, 20 bp, Artificial Sequence
  MKO10078394_B_Cmtm4
  gRNA
tagagcagccaacacgattg

SEQ ID NO: 78395 - DNA, 20 bp, Artificial Sequence
  MKO10078395_B_Cmtm4
  gRNA
tatctgcatcgagactatca

SEQ ID NO: 78396 - DNA, 20 bp, Artificial Sequence
  MKO10078396_B_Cmtm5
  gRNA
cagcgccatcgtcatcttcc

SEQ ID NO: 78397 - DNA, 20 bp, Artificial Sequence
  MKO10078397_B_Cmtm5
  gRNA
cctttgctgctgtgacctcg

SEQ ID NO: 78398 - DNA, 20 bp, Artificial Sequence
  MKO10078398_B_Cmtm5
  gRNA
caactcaccctcagtggtac

SEQ ID NO: 78399 - DNA, 20 bp, Artificial Sequence
  MKO10078399_B_Cmtm6
  gRNA
gtatccactctgtcgtgcac

SEQ ID NO: 78400 - DNA, 20 bp, Artificial Sequence
  MKO10078400_B_Cmtm6
  gRNA
ctgtgtctttaagcgttcag

SEQ ID NO: 78401 - DNA, 20 bp, Artificial Sequence
  MKO10078401_B_Cmtm6
  gRNA
tgcagtacacgatcagcagg

SEQ ID NO: 78402 - DNA, 20 bp, Artificial Sequence
  MKO10078402_B_Cmtm7
  gRNA
gcacacggtagaagcggaag

SEQ ID NO: 78403 - DNA, 20 bp, Artificial Sequence
  MKO10078403_B_Cmtm7
  gRNA
tcctctgcctagcgagcttg

SEQ ID NO: 78404 - DNA, 20 bp, Artificial Sequence
  MKO10078404_B_Cmtm7
  gRNA
aggacagccacaagctcgct

SEQ ID NO: 78405 - DNA, 20 bp, Artificial Sequence
  MKO10078405_B_Cmtm8
  gRNA
ggggaatcctggtgtaagtc

SEQ ID NO: 78406 - DNA, 20 bp, Artificial Sequence
  MKO10078406_B_Cmtm8
  gRNA
cgtacttcagtttcatagcc

SEQ ID NO: 78407 - DNA, 20 bp, Artificial Sequence
  MKO10078407_B_Cmtm8
  gRNA
gtacttctcagctgccatag

SEQ ID NO: 78408 - DNA, 20 bp, Artificial Sequence
  MKO10078408_B_Cmtr1
  gRNA
tcactcatttcccgagagtc

SEQ ID NO: 78409 - DNA, 20 bp, Artificial Sequence
  MKO10078409_B_Cmtr1
  gRNA
cttcaaagcagattcccttg

SEQ ID NO: 78410 - DNA, 20 bp, Artificial Sequence
  MKO10078410_B_Cmtr1
  gRNA
gcatctgctacaagcctcag

SEQ ID NO: 78411 - DNA, 20 bp, Artificial Sequence
  MKO10078411_B_Cmtr2
  gRNA
ggttccgcaccctgttcgtc

SEQ ID NO: 78412 - DNA, 20 bp, Artificial Sequence
  MKO10078412_B_Cmtr2
  gRNA
taagattgtcgtttgcctcg

SEQ ID NO: 78413 - DNA, 20 bp, Artificial Sequence
  MKO10078413_B_Cmtr2
  gRNA
ctgggtcaccatcgtgaagc

SEQ ID NO: 78414 - DNA, 20 bp, Artificial Sequence
  MKO10078414_B_Cmya5
  gRNA
agtggaccatctggtcatgc

SEQ ID NO: 78415 - DNA, 20 bp, Artificial Sequence
  MKO10078415_B_Cmya5
  gRNA
acctacaagaaaaatccttg

SEQ ID NO: 78416 - DNA, 20 bp, Artificial Sequence
  MKO10078416_B_Cmya5
  gRNA
tacctcaatggtattaaaaa

SEQ ID NO: 78417 - DNA, 20 bp, Artificial Sequence
  MKO10078417_B_Cnbd2
  gRNA
ccgtatctcgtttgttaccg

SEQ ID NO: 78418 - DNA, 20 bp, Artificial Sequence
  MKO10078418_B_Cnbd2
  gRNA
ccaaggtcatacgctttgaa

SEQ ID NO: 78419 - DNA, 20 bp, Artificial Sequence
  MKO10078419_B_Cnbd2
  gRNA
ctcctgtgcagcaaagtcct

SEQ ID NO: 78420 - DNA, 20 bp, Artificial Sequence
  MKO10078420_B_Cnbp
  gRNA
gaagtcaactgttaccgctg

SEQ ID NO: 78421 - DNA, 20 bp, Artificial Sequence
  MKO10078421_B_Cnbp
  gRNA
agcaacgaatgcttcaagtg

SEQ ID NO: 78422 - DNA, 20 bp, Artificial Sequence
  MKO10078422_B_Cnbp
  gRNA
cctgacatctgctaccgctg

SEQ ID NO: 78423 - DNA, 20 bp, Artificial Sequence
  MKO10078423_B_Cndp1
  gRNA
ccccatacctcctatcctat

SEQ ID NO: 78424 - DNA, 20 bp, Artificial Sequence
  MKO10078424_B_Cndp1
  gRNA
ggcattgatccaagccaaga

SEQ ID NO: 78425 - DNA, 20 bp, Artificial Sequence
  MKO10078425_B_Cndp1
  gRNA
tggggtggagtccatagact

SEQ ID NO: 78426 - DNA, 20 bp, Artificial Sequence
  MKO10078426_B_Cndp2
  gRNA
ccatgcggacacgctctgga

SEQ ID NO: 78427 - DNA, 20 bp, Artificial Sequence
  MKO10078427_B_Cndp2
  gRNA
ccatccagagcgtgtccgca

SEQ ID NO: 78428 - DNA, 20 bp, Artificial Sequence
  MKO10078428_B_Cndp2
  gRNA
ggacagcgagcccttcacct

SEQ ID NO: 78429 - DNA, 20 bp, Artificial Sequence
  MKO10078429_B_Cnep1r1
  gRNA
tgtccttcttcacgtcatta

SEQ ID NO: 78430 - DNA, 20 bp, Artificial Sequence
  MKO10078430_B_Cnep1r1
  gRNA
cattgcttgcaacctgccac

SEQ ID NO: 78431 - DNA, 20 bp, Artificial Sequence
  MKO10078431_B_Cnep1r1
  gRNA
tctgtacagctactggtgcc

SEQ ID NO: 78432 - DNA, 20 bp, Artificial Sequence
  MKO10078432_B_Cnfn
  gRNA
gggcatgtcgttgcaacagt

SEQ ID NO: 78433 - DNA, 20 bp, Artificial Sequence
  MKO10078433_B_Cnfn
  gRNA
tagcaggtgttggcgcactg

SEQ ID NO: 78434 - DNA, 20 bp, Artificial Sequence
  MKO10078434_B_Cnfn
  gRNA
gagatgcacgaccacgtgaa

SEQ ID NO: 78435 - DNA, 20 bp, Artificial Sequence
  MKO10078435_B_Cnga1
  gRNA
tccagggagcagcacttgcc

SEQ ID NO: 78436 - DNA, 20 bp, Artificial Sequence
  MKO10078436_B_Cnga1
  gRNA
ttactcttctttcttctctt

SEQ ID NO: 78437 - DNA, 20 bp, Artificial Sequence
  MKO10078437_B_Cnga1
  gRNA
cccagagaagaaaaagaaga

SEQ ID NO: 78438 - DNA, 20 bp, Artificial Sequence
  MKO10078438_B_Cnga2
  gRNA
tccctctaggattgtccgcc

SEQ ID NO: 78439 - DNA, 20 bp, Artificial Sequence
  MKO10078439_B_Cnga2
  gRNA
cagagatggatactccacgc

SEQ ID NO: 78440 - DNA, 20 bp, Artificial Sequence
  MKO10078440_B_Cnga2
  gRNA
ccatgcctgttctttacaac

SEQ ID NO: 78441 - DNA, 20 bp, Artificial Sequence
  MKO10078441_B_Cnga3
  gRNA
ccagcaacatctactaccgc

SEQ ID NO: 78442 - DNA, 20 bp, Artificial Sequence
  MKO10078442_B_Cnga3
  gRNA
acgcacgaatcgagatgatg

SEQ ID NO: 78443 - DNA, 20 bp, Artificial Sequence
  MKO10078443_B_Cnga3
  gRNA
gcgcgatggcagtcagccag

SEQ ID NO: 78444 - DNA, 20 bp, Artificial Sequence
  MKO10078444_B_Cnga4
  gRNA
cgaatacgtatgccgcaaag

SEQ ID NO: 78445 - DNA, 20 bp, Artificial Sequence
  MKO10078445_B_Cnga4
  gRNA
agcgtaccccaatatctagt

SEQ ID NO: 78446 - DNA, 20 bp, Artificial Sequence
  MKO10078446_B_Cnga4
  gRNA
atctcatcatcgttgtatgc

SEQ ID NO: 78447 - DNA, 20 bp, Artificial Sequence
  MKO10078447_B_Cngb1
  gRNA
ttgctgttgccaaggtgaac

SEQ ID NO: 78448 - DNA, 20 bp, Artificial Sequence
  MKO10078448_B_Cngb1
  gRNA
tcagcactcaccttgaaggc

SEQ ID NO: 78449 - DNA, 20 bp, Artificial Sequence
  MKO10078449_B_Cngb1
  gRNA
cctgggtccccagtgccaca

SEQ ID NO: 78450 - DNA, 20 bp, Artificial Sequence
  MKO10078450_B_Cngb3
  gRNA
gtttgaaagaaaacgtgtct

SEQ ID NO: 78451 - DNA, 20 bp, Artificial Sequence
  MKO10078451_B_Cngb3
  gRNA
tgtgtaggagtctatgcttc

SEQ ID NO: 78452 - DNA, 20 bp, Artificial Sequence
  MKO10078452_B_Cngb3
  gRNA
agcagaactcaccagaacaa

SEQ ID NO: 78453 - DNA, 20 bp, Artificial Sequence
  MKO10078453_B_Cnih1
  gRNA
cagggttcagggtattgcac

SEQ ID NO: 78454 - DNA, 20 bp, Artificial Sequence
  MKO10078454_B_Cnih1
  gRNA
gggcctcaatatgccccttt

SEQ ID NO: 78455 - DNA, 20 bp, Artificial Sequence
  MKO10078455_B_Cnih1
  gRNA
tttcagcatgatctatgttc

SEQ ID NO: 78456 - DNA, 20 bp, Artificial Sequence
  MKO10078456_B_Cnih2
  gRNA
caggtacttccaccgtcctg

SEQ ID NO: 78457 - DNA, 20 bp, Artificial Sequence
  MKO10078457_B_Cnih2
  gRNA
aacgcatctgctgcctcctg

SEQ ID NO: 78458 - DNA, 20 bp, Artificial Sequence
  MKO10078458_B_Cnih2
  gRNA
tcacactgaccttcctcagg

SEQ ID NO: 78459 - DNA, 20 bp, Artificial Sequence
  MKO10078459_B_Cnih3
  gRNA
catcatgttcctgtgcgctc

SEQ ID NO: 78460 - DNA, 20 bp, Artificial Sequence
  MKO10078460_B_Cnih3
  gRNA
tgagcgcagcgcagagcacc

SEQ ID NO: 78461 - DNA, 20 bp, Artificial Sequence
  MKO10078461_B_Cnih3
  gRNA
atccccagagagaacggctg

SEQ ID NO: 78462 - DNA, 20 bp, Artificial Sequence
  MKO10078462_B_Cnih4
  gRNA
atgttgctcaaaattaaaca

SEQ ID NO: 78463 - DNA, 20 bp, Artificial Sequence
  MKO10078463_B_Cnih4
  gRNA
gtttcttcatgtatctctat

SEQ ID NO: 78464 - DNA, 20 bp, Artificial Sequence
  MKO10078464_B_Cnih4
  gRNA
tggactgcagtgggtgatcc

SEQ ID NO: 78465 - DNA, 20 bp, Artificial Sequence
  MKO10078465_B_Cnksr1
  gRNA
cgcacagcacgccaatctcc

SEQ ID NO: 78466 - DNA, 20 bp, Artificial Sequence
  MKO10078466_B_Cnksr1
  gRNA
tagatggggtggaacagctc

SEQ ID NO: 78467 - DNA, 20 bp, Artificial Sequence
  MKO10078467_B_Cnksr1
  gRNA
tggcgtgctgtgcggggagc

SEQ ID NO: 78468 - DNA, 20 bp, Artificial Sequence
  MKO10078468_B_Cnksr2
  gRNA
agaaggagcggccattatga

SEQ ID NO: 78469 - DNA, 20 bp, Artificial Sequence
  MKO10078469_B_Cnksr2
  gRNA
taacgtcatacagctctgct

SEQ ID NO: 78470 - DNA, 20 bp, Artificial Sequence
  MKO10078470_B_Cnksr2
  gRNA
aatctacaaaacttcataac

SEQ ID NO: 78471 - DNA, 20 bp, Artificial Sequence
  MKO10078471_B_Cnksr3
  gRNA
cccccagttcctcgagatcc

SEQ ID NO: 78472 - DNA, 20 bp, Artificial Sequence
  MKO10078472_B_Cnksr3
  gRNA
ggattgcctcatagcagaaa

SEQ ID NO: 78473 - DNA, 20 bp, Artificial Sequence
  MKO10078473_B_Cnksr3
  gRNA
tcgaggaactgggggtcaca

SEQ ID NO: 78474 - DNA, 20 bp, Artificial Sequence
  MKO10078474_B_Cnn1
  gRNA
caggaacatcattggactgc

SEQ ID NO: 78475 - DNA, 20 bp, Artificial Sequence
  MKO10078475_B_Cnn1
  gRNA
gaaaccccacgacatctttg

SEQ ID NO: 78476 - DNA, 20 bp, Artificial Sequence
  MKO10078476_B_Cnn1
  gRNA
gtggggtttcaccccatact

SEQ ID NO: 78477 - DNA, 20 bp, Artificial Sequence
  MKO10078477_B_Cnn2
  gRNA
agttaagtattcggagaaac

SEQ ID NO: 78478 - DNA, 20 bp, Artificial Sequence
  MKO10078478_B_Cnn2
  gRNA
tcaaccgctctatgcagaac

SEQ ID NO: 78479 - DNA, 20 bp, Artificial Sequence
  MKO10078479_B_Cnn2
  gRNA
gccaatgacctgttcgagag

SEQ ID NO: 78480 - DNA, 20 bp, Artificial Sequence
  MKO10078480_B_Cnn3
  gRNA
gacccaggttcagacgacgc

SEQ ID NO: 78481 - DNA, 20 bp, Artificial Sequence
  MKO10078481_B_Cnn3
  gRNA
tgtttacagttggagaatat

SEQ ID NO: 78482 - DNA, 20 bp, Artificial Sequence
  MKO10078482_B_Cnn3
  gRNA
ccagttgcgcagatcttcct

SEQ ID NO: 78483 - DNA, 20 bp, Artificial Sequence
  MKO10078483_B_Cnnm1
  gRNA
ggatcttctccgaaaggtac

SEQ ID NO: 78484 - DNA, 20 bp, Artificial Sequence
  MKO10078484_B_Cnnm1
  gRNA
aggctccgttctcaaagcga

SEQ ID NO: 78485 - DNA, 20 bp, Artificial Sequence
  MKO10078485_B_Cnnm1
  gRNA
gcttgccacacaccgcttca

SEQ ID NO: 78486 - DNA, 20 bp, Artificial Sequence
  MKO10078486_B_Cnnm2
  gRNA
tctcgtcgtacttcagctcc

SEQ ID NO: 78487 - DNA, 20 bp, Artificial Sequence
  MKO10078487_B_Cnnm2
  gRNA
ctcgctgtccgtctgcttaa

SEQ ID NO: 78488 - DNA, 20 bp, Artificial Sequence
  MKO10078488_B_Cnnm2
  gRNA
attgttcactcgctgcacaa

SEQ ID NO: 78489 - DNA, 20 bp, Artificial Sequence
  MKO10078489_B_Cnnm3
  gRNA
tctcgtcaaacgtcacctcc

SEQ ID NO: 78490 - DNA, 20 bp, Artificial Sequence
  MKO10078490_B_Cnnm3
  gRNA
gaggaagaagaccgtcgccc

SEQ ID NO: 78491 - DNA, 20 bp, Artificial Sequence
  MKO10078491_B_Cnnm3
  gRNA
gtttgacgagagcaaccgcc

SEQ ID NO: 78492 - DNA, 20 bp, Artificial Sequence
  MKO10078492_B_Cnnm4
  gRNA
tgtacatgtccgactcatcg

SEQ ID NO: 78493 - DNA, 20 bp, Artificial Sequence
  MKO10078493_B_Cnnm4
  gRNA
gtccgagatcctcgatgagt

SEQ ID NO: 78494 - DNA, 20 bp, Artificial Sequence
  MKO10078494_B_Cnnm4
  gRNA
cttctcgtactatggaacca

SEQ ID NO: 78495 - DNA, 20 bp, Artificial Sequence
  MKO10078495_B_Cnot10
  gRNA
cacttcttaccgtgaaggcc

SEQ ID NO: 78496 - DNA, 20 bp, Artificial Sequence
  MKO10078496_B_Cnot10
  gRNA
cttgtatatattaacccacc

SEQ ID NO: 78497 - DNA, 20 bp, Artificial Sequence
  MKO10078497_B_Cnot10
  gRNA
aggccaatcatctggggtca

SEQ ID NO: 78498 - DNA, 20 bp, Artificial Sequence
  MKO10078498_B_Cnot11
  gRNA
taaagactctgtgatccgag

SEQ ID NO: 78499 - DNA, 20 bp, Artificial Sequence
  MKO10078499_B_Cnot11
  gRNA
catgtttccaacgtccatca

SEQ ID NO: 78500 - DNA, 20 bp, Artificial Sequence
  MKO10078500_B_Cnot11
  gRNA
gtcgtctccccaacagacac

SEQ ID NO: 78501 - DNA, 20 bp, Artificial Sequence
  MKO10078501_B_Cnot1
  gRNA
ttaccaaaacccctgagatc

SEQ ID NO: 78502 - DNA, 20 bp, Artificial Sequence
  MKO10078502_B_Cnot1
  gRNA
taatccattgcactaccaga

SEQ ID NO: 78503 - DNA, 20 bp, Artificial Sequence
  MKO10078503_B_Cnot1
  gRNA
ttgtgtttcagattgtgaat

SEQ ID NO: 78504 - DNA, 20 bp, Artificial Sequence
  MKO10078504_B_Cnot2
  gRNA
taggtgacaaacagcatgtt

SEQ ID NO: 78505 - DNA, 20 bp, Artificial Sequence
  MKO10078505_B_Cnot2
  gRNA
gcatcatgtcaaaaagagat

SEQ ID NO: 78506 - DNA, 20 bp, Artificial Sequence
  MKO10078506_B_Cnot2
  gRNA
gactctatggtgaggactga

SEQ ID NO: 78507 - DNA, 20 bp, Artificial Sequence
  MKO10078507_B_Cnot3
  gRNA
caaaaccaaagcgtatagca

SEQ ID NO: 78508 - DNA, 20 bp, Artificial Sequence
  MKO10078508_B_Cnot3
  gRNA
ttcaaactgctccacccctt

SEQ ID NO: 78509 - DNA, 20 bp, Artificial Sequence
  MKO10078509_B_Cnot3
  gRNA
atgctacccatgtcttgatc

SEQ ID NO: 78510 - DNA, 20 bp, Artificial Sequence
  MKO10078510_B_Cnot4
  gRNA
cgttacctgtgagcctgcat

SEQ ID NO: 78511 - DNA, 20 bp, Artificial Sequence
  MKO10078511_B_Cnot4
  gRNA
ttaaaacgaccagagtattt

SEQ ID NO: 78512 - DNA, 20 bp, Artificial Sequence
  MKO10078512_B_Cnot4
  gRNA
gttacataagcactggcact

SEQ ID NO: 78513 - DNA, 20 bp, Artificial Sequence
  MKO10078513_B_Cnot6l
  gRNA
aagagccggccaagttcata

SEQ ID NO: 78514 - DNA, 20 bp, Artificial Sequence
  MKO10078514_B_Cnot6l
  gRNA
tacctcctctgcggacatga

SEQ ID NO: 78515 - DNA, 20 bp, Artificial Sequence
  MKO10078515_B_Cnot6l
  gRNA
ttatgaagcttggcaatatc

SEQ ID NO: 78516 - DNA, 20 bp, Artificial Sequence
  MKO10078516_B_Cnot6
  gRNA
tcggaaacatggtatcactc

SEQ ID NO: 78517 - DNA, 20 bp, Artificial Sequence
  MKO10078517_B_Cnot6
  gRNA
cattgccaagcttcacaatc

SEQ ID NO: 78518 - DNA, 20 bp, Artificial Sequence
  MKO10078518_B_Cnot6
  gRNA
aacaaccacctccaagatct

SEQ ID NO: 78519 - DNA, 20 bp, Artificial Sequence
  MKO10078519_B_Cnot7
  gRNA
gcagaacttcttatgacttc

SEQ ID NO: 78520 - DNA, 20 bp, Artificial Sequence
  MKO10078520_B_Cnot7
  gRNA
ggatctgactcactgcttac

SEQ ID NO: 78521 - DNA, 20 bp, Artificial Sequence
  MKO10078521_B_Cnot7
  gRNA
gcgcataggccctcagcacc

SEQ ID NO: 78522 - DNA, 20 bp, Artificial Sequence
  MKO10078522_B_Cnot8
  gRNA
ccttacgttcaccaatgaga

SEQ ID NO: 78523 - DNA, 20 bp, Artificial Sequence
  MKO10078523_B_Cnot8
  gRNA
acccgtctggaatcaacaca

SEQ ID NO: 78524 - DNA, 20 bp, Artificial Sequence
  MKO10078524_B_Cnot8
  gRNA
tcctttagtggttatgattt

SEQ ID NO: 78525 - DNA, 20 bp, Artificial Sequence
  MKO10078525_B_Cnppd1
  gRNA
agctaagtgctcgaatccga

SEQ ID NO: 78526 - DNA, 20 bp, Artificial Sequence
  MKO10078526_B_Cnppd1
  gRNA
actctattatggctgggact

SEQ ID NO: 78527 - DNA, 20 bp, Artificial Sequence
  MKO10078527_B_Cnppd1
  gRNA
cccaggctcaccgggacaca

SEQ ID NO: 78528 - DNA, 20 bp, Artificial Sequence
  MKO10078528_B_Cnpy1
  gRNA
gccttgcacagctcatccac

SEQ ID NO: 78529 - DNA, 20 bp, Artificial Sequence
  MKO10078529_B_Cnpy1
  gRNA
accagacccctatgccagaa

SEQ ID NO: 78530 - DNA, 20 bp, Artificial Sequence
  MKO10078530_B_Cnpy1
  gRNA
atgctgtgcaatgaaaaatc

SEQ ID NO: 78531 - DNA, 20 bp, Artificial Sequence
  MKO10078531_B_Cnpy2
  gRNA
gccatctggattgattcgga

SEQ ID NO: 78532 - DNA, 20 bp, Artificial Sequence
  MKO10078532_B_Cnpy2
  gRNA
tatcgaattcttctccagag

SEQ ID NO: 78533 - DNA, 20 bp, Artificial Sequence
  MKO10078533_B_Cnpy2
  gRNA
tccgcagtgtgagagcattg

SEQ ID NO: 78534 - DNA, 20 bp, Artificial Sequence
  MKO10078534_B_Cnpy3
  gRNA
gccggtgtcaatcacttcct

SEQ ID NO: 78535 - DNA, 20 bp, Artificial Sequence
  MKO10078535_B_Cnpy3
  gRNA
ctccagagcccttcccgtcc

SEQ ID NO: 78536 - DNA, 20 bp, Artificial Sequence
  MKO10078536_B_Cnpy3
  gRNA
tcactgagaccatttgcaag

SEQ ID NO: 78537 - DNA, 20 bp, Artificial Sequence
  MKO10078537_B_Cnpy4
  gRNA
cagtgagacgcggctagaag

SEQ ID NO: 78538 - DNA, 20 bp, Artificial Sequence
  MKO10078538_B_Cnpy4
  gRNA
ttcccagtgtgagacgatgc

SEQ ID NO: 78539 - DNA, 20 bp, Artificial Sequence
  MKO10078539_B_Cnpy4
  gRNA
agtggatctgggaatccctt

SEQ ID NO: 78540 - DNA, 20 bp, Artificial Sequence
  MKO10078540_B_Cnp
  gRNA
ccaggtggtgctgaccgatc

SEQ ID NO: 78541 - DNA, 20 bp, Artificial Sequence
  MKO10078541_B_Cnp
  gRNA
cttgagctggtcagctactt

SEQ ID NO: 78542 - DNA, 20 bp, Artificial Sequence
  MKO10078542_B_Cnp
  gRNA
ggcagaagaatacgcccagc

SEQ ID NO: 78543 - DNA, 20 bp, Artificial Sequence
  MKO10078543_B_Cnr1
  gRNA
gagcactgttaagatcgcca

SEQ ID NO: 78544 - DNA, 20 bp, Artificial Sequence
  MKO10078544_B_Cnr1
  gRNA
cctggtgacgatcctcttat

SEQ ID NO: 78545 - DNA, 20 bp, Artificial Sequence
  MKO10078545_B_Cnr1
  gRNA
actcccgcagtctccgatgc

SEQ ID NO: 78546 - DNA, 20 bp, Artificial Sequence
  MKO10078546_B_Cnr2
  gRNA
ctcggatgcggctagacgtg

SEQ ID NO: 78547 - DNA, 20 bp, Artificial Sequence
  MKO10078547_B_Cnr2
  gRNA
gaagtgaccaacggctccaa

SEQ ID NO: 78548 - DNA, 20 bp, Artificial Sequence
  MKO10078548_B_Cnr2
  gRNA
tacaaagctctagtcacccg

SEQ ID NO: 78549 - DNA, 20 bp, Artificial Sequence
  MKO10078549_B_Cnrip1
  gRNA
atgagacccgcagcctcatg

SEQ ID NO: 78550 - DNA, 20 bp, Artificial Sequence
  MKO10078550_B_Cnrip1
  gRNA
gggttgtcgctctccacttt

SEQ ID NO: 78551 - DNA, 20 bp, Artificial Sequence
  MKO10078551_B_Cnrip1
  gRNA
ggtgtagccccaaccaaaag

SEQ ID NO: 78552 - DNA, 20 bp, Artificial Sequence
  MKO10078552_B_Cnst
  gRNA
cttaccccattgttcctgaa

SEQ ID NO: 78553 - DNA, 20 bp, Artificial Sequence
  MKO10078553_B_Cnst
  gRNA
ggtagctgagacctatttcc

SEQ ID NO: 78554 - DNA, 20 bp, Artificial Sequence
  MKO10078554_B_Cnst
  gRNA
aaaggatacagtcctcttcc

SEQ ID NO: 78555 - DNA, 20 bp, Artificial Sequence
  MKO10078555_B_Cntd1
  gRNA
ggagaaatcggtgagctacc

SEQ ID NO: 78556 - DNA, 20 bp, Artificial Sequence
  MKO10078556_B_Cntd1
  gRNA
ccagacaccattgttcagac

SEQ ID NO: 78557 - DNA, 20 bp, Artificial Sequence
  MKO10078557_B_Cntd1
  gRNA
gttcatgcagaagatagacc

SEQ ID NO: 78558 - DNA, 20 bp, Artificial Sequence
  MKO10078558_B_Cntfr
  gRNA
tcagctgagagccgttgagc

SEQ ID NO: 78559 - DNA, 20 bp, Artificial Sequence
  MKO10078559_B_Cntfr
  gRNA
cacgcagaaacacagtccac

SEQ ID NO: 78560 - DNA, 20 bp, Artificial Sequence
  MKO10078560_B_Cntfr
  gRNA
gtgtttctgcgtgtagacag

SEQ ID NO: 78561 - DNA, 20 bp, Artificial Sequence
  MKO10078561_B_Cntf
  gRNA
cacctctgacccttcaccgc

SEQ ID NO: 78562 - DNA, 20 bp, Artificial Sequence
  MKO10078562_B_Cntf
  gRNA
ccaccatctccaattgtgac

SEQ ID NO: 78563 - DNA, 20 bp, Artificial Sequence
  MKO10078563_B_Cntf
  gRNA
gcgccattaactcctctagc

SEQ ID NO: 78564 - DNA, 20 bp, Artificial Sequence
  MKO10078564_B_Cntln
  gRNA
ctgacagtttgagtgagatc

SEQ ID NO: 78565 - DNA, 20 bp, Artificial Sequence
  MKO10078565_B_Cntln
  gRNA
gtcaacacaccttcacttct

SEQ ID NO: 78566 - DNA, 20 bp, Artificial Sequence
  MKO10078566_B_Cntln
  gRNA
aggctgacaaggaatttgta

SEQ ID NO: 78567 - DNA, 20 bp, Artificial Sequence
  MKO10078567_B_Cntn1
  gRNA
gattggctgctcttcaaaaa

SEQ ID NO: 78568 - DNA, 20 bp, Artificial Sequence
  MKO10078568_B_Cntn1
  gRNA
atgaccatatcttctgtgcc

SEQ ID NO: 78569 - DNA, 20 bp, Artificial Sequence
  MKO10078569_B_Cntn1
  gRNA
tctcgacccctttcctcccg

SEQ ID NO: 78570 - DNA, 20 bp, Artificial Sequence
  MKO10078570_B_Cntn2
  gRNA
ggatctcacagccgaagcgg

SEQ ID NO: 78571 - DNA, 20 bp, Artificial Sequence
  MKO10078571_B_Cntn2
  gRNA
tccccacttacctgggtagt

SEQ ID NO: 78572 - DNA, 20 bp, Artificial Sequence
  MKO10078572_B_Cntn2
  gRNA
ttgctgacgacagtgcctac

SEQ ID NO: 78573 - DNA, 20 bp, Artificial Sequence
  MKO10078573_B_Cntn3
  gRNA
ctccattcagtttgtaacga

SEQ ID NO: 78574 - DNA, 20 bp, Artificial Sequence
  MKO10078574_B_Cntn3
  gRNA
ctgtacctgtaatgaggtga

SEQ ID NO: 78575 - DNA, 20 bp, Artificial Sequence
  MKO10078575_B_Cntn3
  gRNA
gagaattcgttgcaaaacac

SEQ ID NO: 78576 - DNA, 20 bp, Artificial Sequence
  MKO10078576_B_Cntn4
  gRNA
ttccgctacagtgttgttga

SEQ ID NO: 78577 - DNA, 20 bp, Artificial Sequence
  MKO10078577_B_Cntn4
  gRNA
tcattcatgttgtgccttgc

SEQ ID NO: 78578 - DNA, 20 bp, Artificial Sequence
  MKO10078578_B_Cntn4
  gRNA
aaactcagttgtgaagttaa

SEQ ID NO: 78579 - DNA, 20 bp, Artificial Sequence
  MKO10078579_B_Cntn5
  gRNA
tatttgtagctgtccacgaa

SEQ ID NO: 78580 - DNA, 20 bp, Artificial Sequence
  MKO10078580_B_Cntn5
  gRNA
gaacagaatgagtctccaac

SEQ ID NO: 78581 - DNA, 20 bp, Artificial Sequence
  MKO10078581_B_Cntn5
  gRNA
tttcactgtcacagctgcta

SEQ ID NO: 78582 - DNA, 20 bp, Artificial Sequence
  MKO10078582_B_Cntn6
  gRNA
gtaccactccttgaccttct

SEQ ID NO: 78583 - DNA, 20 bp, Artificial Sequence
  MKO10078583_B_Cntn6
  gRNA
cctttagtgctgcgcactga

SEQ ID NO: 78584 - DNA, 20 bp, Artificial Sequence
  MKO10078584_B_Cntn6
  gRNA
cttacatgcaaactgtagct

SEQ ID NO: 78585 - DNA, 20 bp, Artificial Sequence
  MKO10078585_B_Cntnap1
  gRNA
tcgctggaagcggtatgaga

SEQ ID NO: 78586 - DNA, 20 bp, Artificial Sequence
  MKO10078586_B_Cntnap1
  gRNA
ggattggggacccgaatccc

SEQ ID NO: 78587 - DNA, 20 bp, Artificial Sequence
  MKO10078587_B_Cntnap1
  gRNA
cattaagtcgatctgcagcc

SEQ ID NO: 78588 - DNA, 20 bp, Artificial Sequence
  MKO10078588_B_Cntnap2
  gRNA
tatgccaagattaataaacg

SEQ ID NO: 78589 - DNA, 20 bp, Artificial Sequence
  MKO10078589_B_Cntnap2
  gRNA
ataaccaggtgcatagctgc

SEQ ID NO: 78590 - DNA, 20 bp, Artificial Sequence
  MKO10078590_B_Cntnap2
  gRNA
gttatatgggaaatcagcac

SEQ ID NO: 78591 - DNA, 20 bp, Artificial Sequence
  MKO10078591_B_Cntnap3
  gRNA
tataatcccgctgttctgca

SEQ ID NO: 78592 - DNA, 20 bp, Artificial Sequence
  MKO10078592_B_Cntnap3
  gRNA
tgcgcttcctccccttaacc

SEQ ID NO: 78593 - DNA, 20 bp, Artificial Sequence
  MKO10078593_B_Cntnap3
  gRNA
agccataagaccagtaagag

SEQ ID NO: 78594 - DNA, 20 bp, Artificial Sequence
  MKO10078594_B_Cntnap4
  gRNA
tcggttgtaattgatcttga

SEQ ID NO: 78595 - DNA, 20 bp, Artificial Sequence
  MKO10078595_B_Cntnap4
  gRNA
gcgatgggatcctactgcac

SEQ ID NO: 78596 - DNA, 20 bp, Artificial Sequence
  MKO10078596_B_Cntnap4
  gRNA
gcaaggctgaatcgaagaga

SEQ ID NO: 78597 - DNA, 20 bp, Artificial Sequence
  MKO10078597_B_Cntnap5a
  gRNA
gattgacctgcaaaacagag

SEQ ID NO: 78598 - DNA, 20 bp, Artificial Sequence
  MKO10078598_B_Cntnap5a
  gRNA
ttcgctttgtgcccctagag

SEQ ID NO: 78599 - DNA, 20 bp, Artificial Sequence
  MKO10078599_B_Cntnap5a
  gRNA
gtccaacttcctctcactga

SEQ ID NO: 78600 - DNA, 20 bp, Artificial Sequence
  MKO10078600_B_Cntnap5b
  gRNA
tccagctcagctcaactgaa

SEQ ID NO: 78601 - DNA, 20 bp, Artificial Sequence
  MKO10078601_B_Cntnap5b
  gRNA
ccttacccaagttcaggtat

SEQ ID NO: 78602 - DNA, 20 bp, Artificial Sequence
  MKO10078602_B_Cntnap5b
  gRNA
tcacagcgtgcagtagcttg

SEQ ID NO: 78603 - DNA, 20 bp, Artificial Sequence
  MKO10078603_B_Cntnap5c
  gRNA
tgagggtgctcattgtcttc

SEQ ID NO: 78604 - DNA, 20 bp, Artificial Sequence
  MKO10078604_B_Cntnap5c
  gRNA
ccagcccagctcaactcaac

SEQ ID NO: 78605 - DNA, 20 bp, Artificial Sequence
  MKO10078605_B_Cntnap5c
  gRNA
tcacagagttcagcagtttg

SEQ ID NO: 78606 - DNA, 20 bp, Artificial Sequence
  MKO10078606_B_Cntrob
  gRNA
gttgcaacaacagctagctg

SEQ ID NO: 78607 - DNA, 20 bp, Artificial Sequence
  MKO10078607_B_Cntrob
  gRNA
catgattgaacaactagaca

SEQ ID NO: 78608 - DNA, 20 bp, Artificial Sequence
  MKO10078608_B_Cntrob
  gRNA
gtctaagcacatctttgaga

SEQ ID NO: 78609 - DNA, 20 bp, Artificial Sequence
  MKO10078609_B_Coa3
  gRNA
agatggttacaccttctact

SEQ ID NO: 78610 - DNA, 20 bp, Artificial Sequence
  MKO10078610_B_Coa3
  gRNA
gggtcgatgcgctgagcgaa

SEQ ID NO: 78611 - DNA, 20 bp, Artificial Sequence
  MKO10078611_B_Coa3
  gRNA
cggacccggaacatcatgac

SEQ ID NO: 78612 - DNA, 20 bp, Artificial Sequence
  MKO10078612_B_Coa4
  gRNA
agccagaccgggtgatgagc

SEQ ID NO: 78613 - DNA, 20 bp, Artificial Sequence
  MKO10078613_B_Coa4
  gRNA
cctgcacttgcggctggcac

SEQ ID NO: 78614 - DNA, 20 bp, Artificial Sequence
  MKO10078614_B_Coa4
  gRNA
tgatgatgaggaagacccgc

SEQ ID NO: 78615 - DNA, 20 bp, Artificial Sequence
  MKO10078615_B_Coa5
  gRNA
tctccctctgaatcttgatc

SEQ ID NO: 78616 - DNA, 20 bp, Artificial Sequence
  MKO10078616_B_Coa5
  gRNA
ccttccttcaaacactgccg

SEQ ID NO: 78617 - DNA, 20 bp, Artificial Sequence
  MKO10078617_B_Coa5
  gRNA
gatgccagatcaagattcag

SEQ ID NO: 78618 - DNA, 20 bp, Artificial Sequence
  MKO10078618_B_Coa6
  gRNA
tttcagtcgactgtgaagac

SEQ ID NO: 78619 - DNA, 20 bp, Artificial Sequence
  MKO10078619_B_Coa6
  gRNA
cgtcctccgcgttgtcgtcc

SEQ ID NO: 78620 - DNA, 20 bp, Artificial Sequence
  MKO10078620_B_Coa6
  gRNA
gcgggacttacccactgctg

SEQ ID NO: 78621 - DNA, 20 bp, Artificial Sequence
  MKO10078621_B_Coasy
  gRNA
gagaggccggagctcccgtc

SEQ ID NO: 78622 - DNA, 20 bp, Artificial Sequence
  MKO10078622_B_Coasy
  gRNA
cagctttcgccagcgaatcc

SEQ ID NO: 78623 - DNA, 20 bp, Artificial Sequence
  MKO10078623_B_Coasy
  gRNA
caggattcgctggcgaaagc

SEQ ID NO: 78624 - DNA, 20 bp, Artificial Sequence
  MKO10078624_B_Cobll1
  gRNA
caagatcttgaaggggtgcg

SEQ ID NO: 78625 - DNA, 20 bp, Artificial Sequence
  MKO10078625_B_Cobll1
  gRNA
acgacagcagtagattctac

SEQ ID NO: 78626 - DNA, 20 bp, Artificial Sequence
  MKO10078626_B_Cobll1
  gRNA
actaagagagttatatgcca

SEQ ID NO: 78627 - DNA, 20 bp, Artificial Sequence
  MKO10078627_B_Cobl
  gRNA
gaactacctgagaacgcaga

SEQ ID NO: 78628 - DNA, 20 bp, Artificial Sequence
  MKO10078628_B_Cobl
  gRNA
atcaccgtggttctgcccag

SEQ ID NO: 78629 - DNA, 20 bp, Artificial Sequence
  MKO10078629_B_Cobl
  gRNA
cagaaccacggtgatgtcca

SEQ ID NO: 78630 - DNA, 20 bp, Artificial Sequence
  MKO10078630_B_Coch
  gRNA
gacagcagcgccgcagatgc

SEQ ID NO: 78631 - DNA, 20 bp, Artificial Sequence
  MKO10078631_B_Coch
  gRNA
gacacgcacaggtccccctg

SEQ ID NO: 78632 - DNA, 20 bp, Artificial Sequence
  MKO10078632_B_Coch
  gRNA
tgtggacactgcccgtcctg

SEQ ID NO: 78633 - DNA, 20 bp, Artificial Sequence
  MKO10078633_B_Cog1
  gRNA
gggtcgggcagcacgccttc

SEQ ID NO: 78634 - DNA, 20 bp, Artificial Sequence
  MKO10078634_B_Cog1
  gRNA
tgatgggatgtgcgagagtt

SEQ ID NO: 78635 - DNA, 20 bp, Artificial Sequence
  MKO10078635_B_Cog1
  gRNA
ctgctgccacctggcggatg

SEQ ID NO: 78636 - DNA, 20 bp, Artificial Sequence
  MKO10078636_B_Cog2
  gRNA
tgctcaccaggtttgttgag

SEQ ID NO: 78637 - DNA, 20 bp, Artificial Sequence
  MKO10078637_B_Cog2
  gRNA
tcttctcgtaactgtcccaa

SEQ ID NO: 78638 - DNA, 20 bp, Artificial Sequence
  MKO10078638_B_Cog2
  gRNA
cagaattccttcactgacag

SEQ ID NO: 78639 - DNA, 20 bp, Artificial Sequence
  MKO10078639_B_Cog3
  gRNA
tacagaagacatcctgttaa

SEQ ID NO: 78640 - DNA, 20 bp, Artificial Sequence
  MKO10078640_B_Cog3
  gRNA
tgcaaaactgcaaactcaga

SEQ ID NO: 78641 - DNA, 20 bp, Artificial Sequence
  MKO10078641_B_Cog3
  gRNA
aggatgaaggaactaaatat

SEQ ID NO: 78642 - DNA, 20 bp, Artificial Sequence
  MKO10078642_B_Cog4
  gRNA
tcttgaagaatcgctccacc

SEQ ID NO: 78643 - DNA, 20 bp, Artificial Sequence
  MKO10078643_B_Cog4
  gRNA
caaagtccgtcagcttgacc

SEQ ID NO: 78644 - DNA, 20 bp, Artificial Sequence
  MKO10078644_B_Cog4
  gRNA
cgtctccctcaatcaactgc

SEQ ID NO: 78645 - DNA, 20 bp, Artificial Sequence
  MKO10078645_B_Cog5
  gRNA
gtcttgccagttgtgcagta

SEQ ID NO: 78646 - DNA, 20 bp, Artificial Sequence
  MKO10078646_B_Cog5
  gRNA
ctctacagggagctgttgat

SEQ ID NO: 78647 - DNA, 20 bp, Artificial Sequence
  MKO10078647_B_Cog5
  gRNA
ttacagcttgatgaatagat

SEQ ID NO: 78648 - DNA, 20 bp, Artificial Sequence
  MKO10078648_B_Cog6
  gRNA
aaagaccactaagctgcaag

SEQ ID NO: 78649 - DNA, 20 bp, Artificial Sequence
  MKO10078649_B_Cog6
  gRNA
aagcatcaatgaagatgtac

SEQ ID NO: 78650 - DNA, 20 bp, Artificial Sequence
  MKO10078650_B_Cog6
  gRNA
cagaagcttagccatcaatg

SEQ ID NO: 78651 - DNA, 20 bp, Artificial Sequence
  MKO10078651_B_Cog7
  gRNA
gacacttgtagtagtatgca

SEQ ID NO: 78652 - DNA, 20 bp, Artificial Sequence
  MKO10078652_B_Cog7
  gRNA
gtccaggatgcagcttgctg

SEQ ID NO: 78653 - DNA, 20 bp, Artificial Sequence
  MKO10078653_B_Cog7
  gRNA
gaacagcttgatgatgcttg

SEQ ID NO: 78654 - DNA, 20 bp, Artificial Sequence
  MKO10078654_B_Cog8
  gRNA
cgctgatgttcacgtgtcca

SEQ ID NO: 78655 - DNA, 20 bp, Artificial Sequence
  MKO10078655_B_Cog8
  gRNA
cgtgaacatcagcgccatcc

SEQ ID NO: 78656 - DNA, 20 bp, Artificial Sequence
  MKO10078656_B_Cog8
  gRNA
tttagagataccccagctta

SEQ ID NO: 78657 - DNA, 20 bp, Artificial Sequence
  MKO10078657_B_Coil
  gRNA
tccagtagagccccccaaga

SEQ ID NO: 78658 - DNA, 20 bp, Artificial Sequence
  MKO10078658_B_Coil
  gRNA
ctatagtctattaccactgt

SEQ ID NO: 78659 - DNA, 20 bp, Artificial Sequence
  MKO10078659_B_Coil
  gRNA
accttgtagtcagagacatc

SEQ ID NO: 78660 - DNA, 20 bp, Artificial Sequence
  MKO10078660_B_Col10a1
  gRNA
ccatacgccataaagagtaa

SEQ ID NO: 78661 - DNA, 20 bp, Artificial Sequence
  MKO10078661_B_Col10a1
  gRNA
ccgcttgtcagtgctaacca

SEQ ID NO: 78662 - DNA, 20 bp, Artificial Sequence
  MKO10078662_B_Col10a1
  gRNA
cctcgaggtccggttgggcc

SEQ ID NO: 78663 - DNA, 20 bp, Artificial Sequence
  MKO10078663_B_Col11a1
  gRNA
gaatgccatgttcattgtag

SEQ ID NO: 78664 - DNA, 20 bp, Artificial Sequence
  MKO10078664_B_Col11a1
  gRNA
cattcagcaactcggtgttg

SEQ ID NO: 78665 - DNA, 20 bp, Artificial Sequence
  MKO10078665_B_Col11a1
  gRNA
agtcacaatctggactgtaa

SEQ ID NO: 78666 - DNA, 20 bp, Artificial Sequence
  MKO10078666_B_Col11a2
  gRNA
aggcttgtggccgtcccctc

SEQ ID NO: 78667 - DNA, 20 bp, Artificial Sequence
  MKO10078667_B_Col11a2
  gRNA
atctctgcagggcgatgttc

SEQ ID NO: 78668 - DNA, 20 bp, Artificial Sequence
  MKO10078668_B_Col11a2
  gRNA
cttggacgcctgggacaacg

SEQ ID NO: 78669 - DNA, 20 bp, Artificial Sequence
  MKO10078669_B_Col12a1
  gRNA
ataacagtggaccctacaac

SEQ ID NO: 78670 - DNA, 20 bp, Artificial Sequence
  MKO10078670_B_Col12a1
  gRNA
gcaagggtaaattctttagt

SEQ ID NO: 78671 - DNA, 20 bp, Artificial Sequence
  MKO10078671_B_Col12a1
  gRNA
tttgactcagttcaaacagg

SEQ ID NO: 78672 - DNA, 20 bp, Artificial Sequence
  MKO10078672_B_Col13a1
  gRNA
cagggggacaagggtgccat

SEQ ID NO: 78673 - DNA, 20 bp, Artificial Sequence
  MKO10078673_B_Col13a1
  gRNA
gagttacttactgggagtcc

SEQ ID NO: 78674 - DNA, 20 bp, Artificial Sequence
  MKO10078674_B_Col13a1
  gRNA
cagggtcccactggaagacc

SEQ ID NO: 78675 - DNA, 20 bp, Artificial Sequence
  MKO10078675_B_Col14a1
  gRNA
gcaacaaaagcgattattca

SEQ ID NO: 78676 - DNA, 20 bp, Artificial Sequence
  MKO10078676_B_Col14a1
  gRNA
agtaaaccaacttcaccaga

SEQ ID NO: 78677 - DNA, 20 bp, Artificial Sequence
  MKO10078677_B_Col14a1
  gRNA
tagccaccaaatttccctct

SEQ ID NO: 78678 - DNA, 20 bp, Artificial Sequence
  MKO10078678_B_Col15a1
  gRNA
ttcttgcaggaggaccgcgc

SEQ ID NO: 78679 - DNA, 20 bp, Artificial Sequence
  MKO10078679_B_Col15a1
  gRNA
ttaccatctattcagacccc

SEQ ID NO: 78680 - DNA, 20 bp, Artificial Sequence
  MKO10078680_B_Col15a1
  gRNA
gctcaccggggcttgtgtgt

SEQ ID NO: 78681 - DNA, 20 bp, Artificial Sequence
  MKO10078681_B_Col16a1
  gRNA
caagtaccatgtgttccgga

SEQ ID NO: 78682 - DNA, 20 bp, Artificial Sequence
  MKO10078682_B_Col16a1
  gRNA
cccagctcttcgatctgcgt

SEQ ID NO: 78683 - DNA, 20 bp, Artificial Sequence
  MKO10078683_B_Col16a1
  gRNA
cacagacgagtgttccctcg

SEQ ID NO: 78684 - DNA, 20 bp, Artificial Sequence
  MKO10078684_B_Col17a1
  gRNA
ctcccctgagtacccacgaa

SEQ ID NO: 78685 - DNA, 20 bp, Artificial Sequence
  MKO10078685_B_Col17a1
  gRNA
gacttaccgagttcctttcg

SEQ ID NO: 78686 - DNA, 20 bp, Artificial Sequence
  MKO10078686_B_Col17a1
  gRNA
tgatgtagccgctgctgcca

SEQ ID NO: 78687 - DNA, 20 bp, Artificial Sequence
  MKO10078687_B_Col18a1
  gRNA
acctcctatagaatctaccg

SEQ ID NO: 78688 - DNA, 20 bp, Artificial Sequence
  MKO10078688_B_Col18a1
  gRNA
tcttcatccagacagtgcac

SEQ ID NO: 78689 - DNA, 20 bp, Artificial Sequence
  MKO10078689_B_Col18a1
  gRNA
ggtgagccctgtgcactgtc

SEQ ID NO: 78690 - DNA, 20 bp, Artificial Sequence
  MKO10078690_B_Col19a1
  gRNA
ttacctgggccatattctgc

SEQ ID NO: 78691 - DNA, 20 bp, Artificial Sequence
  MKO10078691_B_Col19a1
  gRNA
tgataaaacctgtttcaagt

SEQ ID NO: 78692 - DNA, 20 bp, Artificial Sequence
  MKO10078692_B_Col19a1
  gRNA
catagtaagatatttcccaa

SEQ ID NO: 78693 - DNA, 20 bp, Artificial Sequence
  MKO10078693_B_Col1a1
  gRNA
cagggacccgttggcccccc

SEQ ID NO: 78694 - DNA, 20 bp, Artificial Sequence
  MKO10078694_B_Col1a1
  gRNA
cgatgcttacccttgggcct

SEQ ID NO: 78695 - DNA, 20 bp, Artificial Sequence
  MKO10078695_B_Col1a1
  gRNA
tcaccaaactcagaagatgt

SEQ ID NO: 78696 - DNA, 20 bp, Artificial Sequence
  MKO10078696_B_Col1a2
  gRNA
tccctcaacagatttgcaat

SEQ ID NO: 78697 - DNA, 20 bp, Artificial Sequence
  MKO10078697_B_Col1a2
  gRNA
tatcttaccccagtaagacc

SEQ ID NO: 78698 - DNA, 20 bp, Artificial Sequence
  MKO10078698_B_Col1a2
  gRNA
tagggccccactggagacag

SEQ ID NO: 78699 - DNA, 20 bp, Artificial Sequence
  MKO10078699_B_Col20a1
  gRNA
gtggttgtggccgatgctcc

SEQ ID NO: 78700 - DNA, 20 bp, Artificial Sequence
  MKO10078700_B_Col20a1
  gRNA
ttgggggtgtacattggaac

SEQ ID NO: 78701 - DNA, 20 bp, Artificial Sequence
  MKO10078701_B_Col20a1
  gRNA
gcattgcctttaccttaagc

SEQ ID NO: 78702 - DNA, 20 bp, Artificial Sequence
  MKO10078702_B_Col22a1
  gRNA
gtgacaaaggcatactcatc

SEQ ID NO: 78703 - DNA, 20 bp, Artificial Sequence
  MKO10078703_B_Col22a1
  gRNA
gaaggaacccatccgtacat

SEQ ID NO: 78704 - DNA, 20 bp, Artificial Sequence
  MKO10078704_B_Col22a1
  gRNA
gatcggtttaaacataccaa

SEQ ID NO: 78705 - DNA, 20 bp, Artificial Sequence
  MKO10078705_B_Col23a1
  gRNA
ttctcgaactgtcctgagct

SEQ ID NO: 78706 - DNA, 20 bp, Artificial Sequence
  MKO10078706_B_Col23a1
  gRNA
caggggcaatcaggacgaga

SEQ ID NO: 78707 - DNA, 20 bp, Artificial Sequence
  MKO10078707_B_Col23a1
  gRNA
cctgcttaggtccccctgga

SEQ ID NO: 78708 - DNA, 20 bp, Artificial Sequence
  MKO10078708_B_Col24a1
  gRNA
cctgggatacccatcggacc

SEQ ID NO: 78709 - DNA, 20 bp, Artificial Sequence
  MKO10078709_B_Col24a1
  gRNA
ggcaacccgggatttccatg

SEQ ID NO: 78710 - DNA, 20 bp, Artificial Sequence
  MKO10078710_B_Col24a1
  gRNA
aatttacttacctttggacc

SEQ ID NO: 78711 - DNA, 20 bp, Artificial Sequence
  MKO10078711_B_Col25a1
  gRNA
gctgggcagttgcactctaa

SEQ ID NO: 78712 - DNA, 20 bp, Artificial Sequence
  MKO10078712_B_Col25a1
  gRNA
tcaggtcctccagggaaacg

SEQ ID NO: 78713 - DNA, 20 bp, Artificial Sequence
  MKO10078713_B_Col25a1
  gRNA
cctctcttccctcgtttccc

SEQ ID NO: 78714 - DNA, 20 bp, Artificial Sequence
  MKO10078714_B_Col26a1
  gRNA
gactcgctggaccaccgtct

SEQ ID NO: 78715 - DNA, 20 bp, Artificial Sequence
  MKO10078715_B_Col26a1
  gRNA
actccagcgcagtcaccgtg

SEQ ID NO: 78716 - DNA, 20 bp, Artificial Sequence
  MKO10078716_B_Col26a1
  gRNA
ccggggccctggatgtgcga

SEQ ID NO: 78717 - DNA, 20 bp, Artificial Sequence
  MKO10078717_B_Col27a1
  gRNA
ggtgggcctgggttcccgta

SEQ ID NO: 78718 - DNA, 20 bp, Artificial Sequence
  MKO10078718_B_Col27a1
  gRNA
ctagggggtttctcttcgcc

SEQ ID NO: 78719 - DNA, 20 bp, Artificial Sequence
  MKO10078719_B_Col27a1
  gRNA
tcctcttcaagggtccccct

SEQ ID NO: 78720 - DNA, 20 bp, Artificial Sequence
  MKO10078720_B_Col28a1
  gRNA
cctcgctcacctttgatacc

SEQ ID NO: 78721 - DNA, 20 bp, Artificial Sequence
  MKO10078721_B_Col28a1
  gRNA
caagatctgtgaatgtgaaa

SEQ ID NO: 78722 - DNA, 20 bp, Artificial Sequence
  MKO10078722_B_Col28a1
  gRNA
tctagggtgtcttgtttgaa

SEQ ID NO: 78723 - DNA, 20 bp, Artificial Sequence
  MKO10078723_B_Col2a1
  gRNA
ccctttcttacctgagggcc

SEQ ID NO: 78724 - DNA, 20 bp, Artificial Sequence
  MKO10078724_B_Col2a1
  gRNA
acacagatcataggacccag

SEQ ID NO: 78725 - DNA, 20 bp, Artificial Sequence
  MKO10078725_B_Col2a1
  gRNA
cttacatctctgatatctcc

SEQ ID NO: 78726 - DNA, 20 bp, Artificial Sequence
  MKO10078726_B_Col3a1
  gRNA
tctgggttggggcagtctag

SEQ ID NO: 78727 - DNA, 20 bp, Artificial Sequence
  MKO10078727_B_Col3a1
  gRNA
gactcatatgatgtcaagtc

SEQ ID NO: 78728 - DNA, 20 bp, Artificial Sequence
  MKO10078728_B_Col3a1
  gRNA
ccagacatctctagactcat

SEQ ID NO: 78729 - DNA, 20 bp, Artificial Sequence
  MKO10078729_B_Col4a1
  gRNA
tgtggaaaatgtgactgtca

SEQ ID NO: 78730 - DNA, 20 bp, Artificial Sequence
  MKO10078730_B_Col4a1
  gRNA
ttcctggcacaaaagggacg

SEQ ID NO: 78731 - DNA, 20 bp, Artificial Sequence
  MKO10078731_B_Col4a1
  gRNA
ccagggtagccagctgctcc

SEQ ID NO: 78732 - DNA, 20 bp, Artificial Sequence
  MKO10078732_B_Col4a2
  gRNA
acccgtaccacatctccttt

SEQ ID NO: 78733 - DNA, 20 bp, Artificial Sequence
  MKO10078733_B_Col4a2
  gRNA
cccccaagacgctctgagcc

SEQ ID NO: 78734 - DNA, 20 bp, Artificial Sequence
  MKO10078734_B_Col4a2
  gRNA
cagggagcgagaggcgtctc

SEQ ID NO: 78735 - DNA, 20 bp, Artificial Sequence
  MKO10078735_B_Col4a3bp
  gRNA
agcccgacgagttccagctc

SEQ ID NO: 78736 - DNA, 20 bp, Artificial Sequence
  MKO10078736_B_Col4a3bp
  gRNA
tcagtgtaaatgatagtgtt

SEQ ID NO: 78737 - DNA, 20 bp, Artificial Sequence
  MKO10078737_B_Col4a3bp
  gRNA
catttacactgatatcaaac

SEQ ID NO: 78738 - DNA, 20 bp, Artificial Sequence
  MKO10078738_B_Col4a3
  gRNA
ctagggctccccaggacttc

SEQ ID NO: 78739 - DNA, 20 bp, Artificial Sequence
  MKO10078739_B_Col4a3
  gRNA
ccacataccttgggtccctg

SEQ ID NO: 78740 - DNA, 20 bp, Artificial Sequence
  MKO10078740_B_Col4a3
  gRNA
tcattacttactggaagtcc

SEQ ID NO: 78741 - DNA, 20 bp, Artificial Sequence
  MKO10078741_B_Col4a4
  gRNA
acaggtacaccatccacacc

SEQ ID NO: 78742 - DNA, 20 bp, Artificial Sequence
  MKO10078742_B_Col4a4
  gRNA
ctgggacctattgggattcc

SEQ ID NO: 78743 - DNA, 20 bp, Artificial Sequence
  MKO10078743_B_Col4a4
  gRNA
ctcacccgagatcccttctc

SEQ ID NO: 78744 - DNA, 20 bp, Artificial Sequence
  MKO10078744_B_Col4a5
  gRNA
accatacttacaggaagacc

SEQ ID NO: 78745 - DNA, 20 bp, Artificial Sequence
  MKO10078745_B_Col4a5
  gRNA
ggatcaaaatgtgactgcag

SEQ ID NO: 78746 - DNA, 20 bp, Artificial Sequence
  MKO10078746_B_Col4a5
  gRNA
cagggtgatgatggaattcc

SEQ ID NO: 78747 - DNA, 20 bp, Artificial Sequence
  MKO10078747_B_Col4a6
  gRNA
cttatgcttgaccaaagaac

SEQ ID NO: 78748 - DNA, 20 bp, Artificial Sequence
  MKO10078748_B_Col4a6
  gRNA
tgttggcatcagtggtattc

SEQ ID NO: 78749 - DNA, 20 bp, Artificial Sequence
  MKO10078749_B_Col4a6
  gRNA
ccactgatgccaacaaagcc

SEQ ID NO: 78750 - DNA, 20 bp, Artificial Sequence
  MKO10078750_B_Col5a1
  gRNA
tcgaagatcttccagcgagc

SEQ ID NO: 78751 - DNA, 20 bp, Artificial Sequence
  MKO10078751_B_Col5a1
  gRNA
taatcttcttcttacagtcg

SEQ ID NO: 78752 - DNA, 20 bp, Artificial Sequence
  MKO10078752_B_Col5a1
  gRNA
agctcagccagcagatcttc

SEQ ID NO: 78753 - DNA, 20 bp, Artificial Sequence
  MKO10078753_B_Col5a2
  gRNA
cttacaacaggcactaatcc

SEQ ID NO: 78754 - DNA, 20 bp, Artificial Sequence
  MKO10078754_B_Col5a2
  gRNA
gaaatagcctgtactcaaca

SEQ ID NO: 78755 - DNA, 20 bp, Artificial Sequence
  MKO10078755_B_Col5a2
  gRNA
tagggacaaaaaggagaacc

SEQ ID NO: 78756 - DNA, 20 bp, Artificial Sequence
  MKO10078756_B_Col5a3
  gRNA
caggcttccagtacgtccac

SEQ ID NO: 78757 - DNA, 20 bp, Artificial Sequence
  MKO10078757_B_Col5a3
  gRNA
cacagggtgaccgagcattc

SEQ ID NO: 78758 - DNA, 20 bp, Artificial Sequence
  MKO10078758_B_Col5a3
  gRNA
ccccaagcaagtcaacatta

SEQ ID NO: 78759 - DNA, 20 bp, Artificial Sequence
  MKO10078759_B_Col6a1
  gRNA
gtacttgaccgcatccacgc

SEQ ID NO: 78760 - DNA, 20 bp, Artificial Sequence
  MKO10078760_B_Col6a1
  gRNA
gcatagccgcgatgcagaag

SEQ ID NO: 78761 - DNA, 20 bp, Artificial Sequence
  MKO10078761_B_Col6a1
  gRNA
gcaatttcacggcagctgac

SEQ ID NO: 78762 - DNA, 20 bp, Artificial Sequence
  MKO10078762_B_Col6a2
  gRNA
gtgctacaaggtgagctgcc

SEQ ID NO: 78763 - DNA, 20 bp, Artificial Sequence
  MKO10078763_B_Col6a2
  gRNA
acctgtcgtcctttctgtcc

SEQ ID NO: 78764 - DNA, 20 bp, Artificial Sequence
  MKO10078764_B_Col6a2
  gRNA
cccttgggtccgtggggtcc

SEQ ID NO: 78765 - DNA, 20 bp, Artificial Sequence
  MKO10078765_B_Col6a3
  gRNA
agtacccgatatcccccttc

SEQ ID NO: 78766 - DNA, 20 bp, Artificial Sequence
  MKO10078766_B_Col6a3
  gRNA
gcggaacgccctcttctatc

SEQ ID NO: 78767 - DNA, 20 bp, Artificial Sequence
  MKO10078767_B_Col6a3
  gRNA
ccagagaagatcccgtgtac

SEQ ID NO: 78768 - DNA, 20 bp, Artificial Sequence
  MKO10078768_B_Col6a4
  gRNA
tgcccaagtcttacgccatc

SEQ ID NO: 78769 - DNA, 20 bp, Artificial Sequence
  MKO10078769_B_Col6a4
  gRNA
gctcgacgtcagaagcgatc

SEQ ID NO: 78770 - DNA, 20 bp, Artificial Sequence
  MKO10078770_B_Col6a4
  gRNA
tggggtcaaagacgcatctc

SEQ ID NO: 78771 - DNA, 20 bp, Artificial Sequence
  MKO10078771_B_Col6a5
  gRNA
ccttgccgaccttatattct

SEQ ID NO: 78772 - DNA, 20 bp, Artificial Sequence
  MKO10078772_B_Col6a5
  gRNA
tcctacctgtcttatcaacg

SEQ ID NO: 78773 - DNA, 20 bp, Artificial Sequence
  MKO10078773_B_Col6a5
  gRNA
gttcagcacgagtagaaact

SEQ ID NO: 78774 - DNA, 20 bp, Artificial Sequence
  MKO10078774_B_Col6a6
  gRNA
aacatcagagtgcatgcgat

SEQ ID NO: 78775 - DNA, 20 bp, Artificial Sequence
  MKO10078775_B_Col6a6
  gRNA
gtggacagctccgatcacct

SEQ ID NO: 78776 - DNA, 20 bp, Artificial Sequence
  MKO10078776_B_Col6a6
  gRNA
ggcaaacacgctgaggtctc

SEQ ID NO: 78777 - DNA, 20 bp, Artificial Sequence
  MKO10078777_B_Col7a1
  gRNA
agcagttgtgcacaccctcc

SEQ ID NO: 78778 - DNA, 20 bp, Artificial Sequence
  MKO10078778_B_Col7a1
  gRNA
gggaacaccttggggacacc

SEQ ID NO: 78779 - DNA, 20 bp, Artificial Sequence
  MKO10078779_B_Col7a1
  gRNA
cagctgtgtccactaaatct

SEQ ID NO: 78780 - DNA, 20 bp, Artificial Sequence
  MKO10078780_B_Col8a1
  gRNA
gaaaggccatctttgcccaa

SEQ ID NO: 78781 - DNA, 20 bp, Artificial Sequence
  MKO10078781_B_Col8a1
  gRNA
accttgttctccgcgcaaac

SEQ ID NO: 78782 - DNA, 20 bp, Artificial Sequence
  MKO10078782_B_Col8a1
  gRNA
ctcgtcgtatgtgtacatca

SEQ ID NO: 78783 - DNA, 20 bp, Artificial Sequence
  MKO10078783_B_Col8a2
  gRNA
acccccagctccgccgccag

SEQ ID NO: 78784 - DNA, 20 bp, Artificial Sequence
  MKO10078784_B_Col8a2
  gRNA
tacctggaccaggcttcggg

SEQ ID NO: 78785 - DNA, 20 bp, Artificial Sequence
  MKO10078785_B_Col8a2
  gRNA
gaaggcccggttcacccttc

SEQ ID NO: 78786 - DNA, 20 bp, Artificial Sequence
  MKO10078786_B_Col9a1
  gRNA
caaggacggcaaattcaaga

SEQ ID NO: 78787 - DNA, 20 bp, Artificial Sequence
  MKO10078787_B_Col9a1
  gRNA
attggccaagatgacttacc

SEQ ID NO: 78788 - DNA, 20 bp, Artificial Sequence
  MKO10078788_B_Col9a1
  gRNA
gggatccacagccttacaag

SEQ ID NO: 78789 - DNA, 20 bp, Artificial Sequence
  MKO10078789_B_Col9a2
  gRNA
cctggtcccgtggggacccc

SEQ ID NO: 78790 - DNA, 20 bp, Artificial Sequence
  MKO10078790_B_Col9a2
  gRNA
ggggtactcacatcaatgcc

SEQ ID NO: 78791 - DNA, 20 bp, Artificial Sequence
  MKO10078791_B_Col9a2
  gRNA
tgagcacgcaccttgactcc

SEQ ID NO: 78792 - DNA, 20 bp, Artificial Sequence
  MKO10078792_B_Col9a3
  gRNA
gatggacccgcaggacccaa

SEQ ID NO: 78793 - DNA, 20 bp, Artificial Sequence
  MKO10078793_B_Col9a3
  gRNA
ctcccacccagggacccaaa

SEQ ID NO: 78794 - DNA, 20 bp, Artificial Sequence
  MKO10078794_B_Col9a3
  gRNA
cacatcaatgccatccttgc

SEQ ID NO: 78795 - DNA, 20 bp, Artificial Sequence
  MKO10078795_B_Colec10
  gRNA
ccggaaagtggttggacaac

SEQ ID NO: 78796 - DNA, 20 bp, Artificial Sequence
  MKO10078796_B_Colec10
  gRNA
aagggtctgcttggaattcc

SEQ ID NO: 78797 - DNA, 20 bp, Artificial Sequence
  MKO10078797_B_Colec10
  gRNA
tttctatttaggtgacaaag

SEQ ID NO: 78798 - DNA, 20 bp, Artificial Sequence
  MKO10078798_B_Colec11
  gRNA
catggaaaaattggtcccat

SEQ ID NO: 78799 - DNA, 20 bp, Artificial Sequence
  MKO10078799_B_Colec11
  gRNA
tgtcgtaccaggttctccac

SEQ ID NO: 78800 - DNA, 20 bp, Artificial Sequence
  MKO10078800_B_Colec11
  gRNA
tattggggagatggacaacc

SEQ ID NO: 78801 - DNA, 20 bp, Artificial Sequence
  MKO10078801_B_Colec12
  gRNA
tgcagtccttcggttacaag

SEQ ID NO: 78802 - DNA, 20 bp, Artificial Sequence
  MKO10078802_B_Colec12
  gRNA
tcttcttgcaggtattcagg

SEQ ID NO: 78803 - DNA, 20 bp, Artificial Sequence
  MKO10078803_B_Colec12
  gRNA
tgagtttgttgtcataagtc

SEQ ID NO: 78804 - DNA, 20 bp, Artificial Sequence
  MKO10078804_B_Colgalt2
  gRNA
aagcagcccttcgaactgcg

SEQ ID NO: 78805 - DNA, 20 bp, Artificial Sequence
  MKO10078805_B_Colgalt2
  gRNA
gtttcatgacgtgagaaaac

SEQ ID NO: 78806 - DNA, 20 bp, Artificial Sequence
  MKO10078806_B_Colgalt2
  gRNA
acaatacaacggaaatactc

SEQ ID NO: 78807 - DNA, 20 bp, Artificial Sequence
  MKO10078807_B_Colq
  gRNA
tgccccgcttcttctgatcc

SEQ ID NO: 78808 - DNA, 20 bp, Artificial Sequence
  MKO10078808_B_Colq
  gRNA
cagggggaccttggccgccc

SEQ ID NO: 78809 - DNA, 20 bp, Artificial Sequence
  MKO10078809_B_Colq
  gRNA
ccattgtgtagggtccacct

SEQ ID NO: 78810 - DNA, 20 bp, Artificial Sequence
  MKO10078810_B_Commd10
  gRNA
gattcccacgacttctcagc

SEQ ID NO: 78811 - DNA, 20 bp, Artificial Sequence
  MKO10078811_B_Commd10
  gRNA
gctgataaatgcaatagaca

SEQ ID NO: 78812 - DNA, 20 bp, Artificial Sequence
  MKO10078812_B_Commd10
  gRNA
gcagctttgcttgagcagag

SEQ ID NO: 78813 - DNA, 20 bp, Artificial Sequence
  MKO10078813_B_Commd1
  gRNA
ccctgttgccataatagagc

SEQ ID NO: 78814 - DNA, 20 bp, Artificial Sequence
  MKO10078814_B_Commd1
  gRNA
aatcctgaagaagctgtcag

SEQ ID NO: 78815 - DNA, 20 bp, Artificial Sequence
  MKO10078815_B_Commd1
  gRNA
ctacctctgacagcttcttc

SEQ ID NO: 78816 - DNA, 20 bp, Artificial Sequence
  MKO10078816_B_Commd2
  gRNA
caccgagagctcaaagctta

SEQ ID NO: 78817 - DNA, 20 bp, Artificial Sequence
  MKO10078817_B_Commd2
  gRNA
taccataagctttgagctct

SEQ ID NO: 78818 - DNA, 20 bp, Artificial Sequence
  MKO10078818_B_Commd2
  gRNA
ctgctggcttaatctgttgc

SEQ ID NO: 78819 - DNA, 20 bp, Artificial Sequence
  MKO10078819_B_Commd3
  gRNA
aagttgacaagtctactcta

SEQ ID NO: 78820 - DNA, 20 bp, Artificial Sequence
  MKO10078820_B_Commd3
  gRNA
caagaaacatcagttatatg

SEQ ID NO: 78821 - DNA, 20 bp, Artificial Sequence
  MKO10078821_B_Commd3
  gRNA
acagtacctaccttcccagt

SEQ ID NO: 78822 - DNA, 20 bp, Artificial Sequence
  MKO10078822_B_Commd4
  gRNA
gctgcgactgctgtgtagcc

SEQ ID NO: 78823 - DNA, 20 bp, Artificial Sequence
  MKO10078823_B_Commd4
  gRNA
agtccagatcgccacagaac

SEQ ID NO: 78824 - DNA, 20 bp, Artificial Sequence
  MKO10078824_B_Commd4
  gRNA
ccagaagctcctttagcacc

SEQ ID NO: 78825 - DNA, 20 bp, Artificial Sequence
  MKO10078825_B_Commd5
  gRNA
ccagatctccaatcatatct

SEQ ID NO: 78826 - DNA, 20 bp, Artificial Sequence
  MKO10078826_B_Commd5
  gRNA
caagttcctggagttcgtcc

SEQ ID NO: 78827 - DNA, 20 bp, Artificial Sequence
  MKO10078827_B_Commd5
  gRNA
aagttgttgaaactcgtagt

SEQ ID NO: 78828 - DNA, 20 bp, Artificial Sequence
  MKO10078828_B_Commd6
  gRNA
cgatggacttgctgcttact

SEQ ID NO: 78829 - DNA, 20 bp, Artificial Sequence
  MKO10078829_B_Commd6
  gRNA
ctccgacttggcatccagca

SEQ ID NO: 78830 - DNA, 20 bp, Artificial Sequence
  MKO10078830_B_Commd6
  gRNA
tcacacagtctcaattacag

SEQ ID NO: 78831 - DNA, 20 bp, Artificial Sequence
  MKO10078831_B_Commd7
  gRNA
actcaccatttggaaccagt

SEQ ID NO: 78832 - DNA, 20 bp, Artificial Sequence
  MKO10078832_B_Commd7
  gRNA
tccactccatatcaatcagc

SEQ ID NO: 78833 - DNA, 20 bp, Artificial Sequence
  MKO10078833_B_Commd7
  gRNA
gagatcagtccgcacctgct

SEQ ID NO: 78834 - DNA, 20 bp, Artificial Sequence
  MKO10078834_B_Commd8
  gRNA
tatcaactatttcccccaac

SEQ ID NO: 78835 - DNA, 20 bp, Artificial Sequence
  MKO10078835_B_Commd8
  gRNA
aacgaccgctttgaaaaacg

SEQ ID NO: 78836 - DNA, 20 bp, Artificial Sequence
  MKO10078836_B_Commd8
  gRNA
caaaaggggcatctgcaagg

SEQ ID NO: 78837 - DNA, 20 bp, Artificial Sequence
  MKO10078837_B_Commd9
  gRNA
cacagtctctctgccacgcc

SEQ ID NO: 78838 - DNA, 20 bp, Artificial Sequence
  MKO10078838_B_Commd9
  gRNA
agtactcactctggtttgct

SEQ ID NO: 78839 - DNA, 20 bp, Artificial Sequence
  MKO10078839_B_Commd9
  gRNA
cctgctgacaaaaatcatcg

SEQ ID NO: 78840 - DNA, 20 bp, Artificial Sequence
  MKO10078840_B_Comp
  gRNA
atgcagcccgcacgcactcc

SEQ ID NO: 78841 - DNA, 20 bp, Artificial Sequence
  MKO10078841_B_Comp
  gRNA
gagagagctgttgcgacagc

SEQ ID NO: 78842 - DNA, 20 bp, Artificial Sequence
  MKO10078842_B_Comp
  gRNA
acagatgctgcgagaacttc

SEQ ID NO: 78843 - DNA, 20 bp, Artificial Sequence
  MKO10078843_B_Comtd1
  gRNA
ccgctccatgagagagcacc

SEQ ID NO: 78844 - DNA, 20 bp, Artificial Sequence
  MKO10078844_B_Comtd1
  gRNA
tggagcagaagatcgacctt

SEQ ID NO: 78845 - DNA, 20 bp, Artificial Sequence
  MKO10078845_B_Comtd1
  gRNA
ggtgctcacccaatgtctgc

SEQ ID NO: 78846 - DNA, 20 bp, Artificial Sequence
  MKO10078846_B_Comt
  gRNA
tggctactcagccgtgcgaa

SEQ ID NO: 78847 - DNA, 20 bp, Artificial Sequence
  MKO10078847_B_Comt
  gRNA
agacccccagagcgtcctgg

SEQ ID NO: 78848 - DNA, 20 bp, Artificial Sequence
  MKO10078848_B_Comt
  gRNA
atgcagtgattcgggagtac

SEQ ID NO: 78849 - DNA, 20 bp, Artificial Sequence
  MKO10078849_B_Copa
  gRNA
tcgcctccagagacgaacag

SEQ ID NO: 78850 - DNA, 20 bp, Artificial Sequence
  MKO10078850_B_Copa
  gRNA
ccccattgtgtaaactggtc

SEQ ID NO: 78851 - DNA, 20 bp, Artificial Sequence
  MKO10078851_B_Copa
  gRNA
aggcgatgattataagatta

SEQ ID NO: 78852 - DNA, 20 bp, Artificial Sequence
  MKO10078852_B_Copb1
  gRNA
cgaagcgaatgattgtcatc

SEQ ID NO: 78853 - DNA, 20 bp, Artificial Sequence
  MKO10078853_B_Copb1
  gRNA
caccatcaaaaagttgctcc

SEQ ID NO: 78854 - DNA, 20 bp, Artificial Sequence
  MKO10078854_B_Copb1
  gRNA
attgatcaagttcagacatt

SEQ ID NO: 78855 - DNA, 20 bp, Artificial Sequence
  MKO10078855_B_Copb2
  gRNA
ggtcctgtcgagagatgcac

SEQ ID NO: 78856 - DNA, 20 bp, Artificial Sequence
  MKO10078856_B_Copb2
  gRNA
acaaactttgcagctcgaac

SEQ ID NO: 78857 - DNA, 20 bp, Artificial Sequence
  MKO10078857_B_Copb2
  gRNA
gagctgcaaagtttgtcgca

SEQ ID NO: 78858 - DNA, 20 bp, Artificial Sequence
  MKO10078858_B_Cope
  gRNA
ctacttccacgaccagaacc

SEQ ID NO: 78859 - DNA, 20 bp, Artificial Sequence
  MKO10078859_B_Cope
  gRNA
cagcaaacatgcgcacagcc

SEQ ID NO: 78860 - DNA, 20 bp, Artificial Sequence
  MKO10078860_B_Cope
  gRNA
gattcagatcctcctcaagc

SEQ ID NO: 78861 - DNA, 20 bp, Artificial Sequence
  MKO10078861_B_Copg1
  gRNA
attcccacagggggagcacc

SEQ ID NO: 78862 - DNA, 20 bp, Artificial Sequence
  MKO10078862_B_Copg1
  gRNA
gtgtacttacatcattggac

SEQ ID NO: 78863 - DNA, 20 bp, Artificial Sequence
  MKO10078863_B_Copg1
  gRNA
gatcctttatctcataaacc

SEQ ID NO: 78864 - DNA, 20 bp, Artificial Sequence
  MKO10078864_B_Copg2
  gRNA
tttacttagggtgaacactt

SEQ ID NO: 78865 - DNA, 20 bp, Artificial Sequence
  MKO10078865_B_Copg2
  gRNA
atgtgatcattgtcacaagc

SEQ ID NO: 78866 - DNA, 20 bp, Artificial Sequence
  MKO10078866_B_Copg2
  gRNA
cagcactcttctccaaatgc

SEQ ID NO: 78867 - DNA, 20 bp, Artificial Sequence
  MKO10078867_B_Coprs
  gRNA
ctacttgcctagtcgatcca

SEQ ID NO: 78868 - DNA, 20 bp, Artificial Sequence
  MKO10078868_B_Coprs
  gRNA
tgacattcctgcccatgccg

SEQ ID NO: 78869 - DNA, 20 bp, Artificial Sequence
  MKO10078869_B_Coprs
  gRNA
ctgatggggagttgtatgcc

SEQ ID NO: 78870 - DNA, 20 bp, Artificial Sequence
  MKO10078870_B_Cops2
  gRNA
gtcatcttctttcagtgctt

SEQ ID NO: 78871 - DNA, 20 bp, Artificial Sequence
  MKO10078871_B_Cops2
  gRNA
atgtcagatggatttactgc

SEQ ID NO: 78872 - DNA, 20 bp, Artificial Sequence
  MKO10078872_B_Cops2
  gRNA
gatcaagattaacttcaagt

SEQ ID NO: 78873 - DNA, 20 bp, Artificial Sequence
  MKO10078873_B_Cops3
  gRNA
agtacatgccgatctctgcc

SEQ ID NO: 78874 - DNA, 20 bp, Artificial Sequence
  MKO10078874_B_Cops3
  gRNA
caagtgcatttgttagctga

SEQ ID NO: 78875 - DNA, 20 bp, Artificial Sequence
  MKO10078875_B_Cops3
  gRNA
cttcgaaacactattctcac

SEQ ID NO: 78876 - DNA, 20 bp, Artificial Sequence
  MKO10078876_B_Cops4
  gRNA
atgtcagcctcgtgatctca

SEQ ID NO: 78877 - DNA, 20 bp, Artificial Sequence
  MKO10078877_B_Cops4
  gRNA
tgcttccataagacagcatc

SEQ ID NO: 78878 - DNA, 20 bp, Artificial Sequence
  MKO10078878_B_Cops4
  gRNA
aaatgcagcccaagtgttgg

SEQ ID NO: 78879 - DNA, 20 bp, Artificial Sequence
  MKO10078879_B_Cops5
  gRNA
accaaccgattgcattctca

SEQ ID NO: 78880 - DNA, 20 bp, Artificial Sequence
  MKO10078880_B_Cops5
  gRNA
agctgctgcgtatgagtata

SEQ ID NO: 78881 - DNA, 20 bp, Artificial Sequence
  MKO10078881_B_Cops5
  gRNA
tacctttggatatgtcctaa

SEQ ID NO: 78882 - DNA, 20 bp, Artificial Sequence
  MKO10078882_B_Cops6
  gRNA
agacatccacgtccataagc

SEQ ID NO: 78883 - DNA, 20 bp, Artificial Sequence
  MKO10078883_B_Cops6
  gRNA
tgagctgctgtcccacaccg

SEQ ID NO: 78884 - DNA, 20 bp, Artificial Sequence
  MKO10078884_B_Cops6
  gRNA
ttagtgattggggctctgat

SEQ ID NO: 78885 - DNA, 20 bp, Artificial Sequence
  MKO10078885_B_Cops7a
  gRNA
tgccgcccccttagccgact

SEQ ID NO: 78886 - DNA, 20 bp, Artificial Sequence
  MKO10078886_B_Cops7a
  gRNA
tttacctaagtagtccgcat

SEQ ID NO: 78887 - DNA, 20 bp, Artificial Sequence
  MKO10078887_B_Cops7a
  gRNA
ttcttctgtgcgtcagtcag

SEQ ID NO: 78888 - DNA, 20 bp, Artificial Sequence
  MKO10078888_B_Cops7b
  gRNA
gccaactcacctatgtaatc

SEQ ID NO: 78889 - DNA, 20 bp, Artificial Sequence
  MKO10078889_B_Cops7b
  gRNA
actagaagaccttatcattg

SEQ ID NO: 78890 - DNA, 20 bp, Artificial Sequence
  MKO10078890_B_Cops7b
  gRNA
ttgcaggtgtgacggctgtg

SEQ ID NO: 78891 - DNA, 20 bp, Artificial Sequence
  MKO10078891_B_Cops8
  gRNA
aaggagacgcgcctttgccc

SEQ ID NO: 78892 - DNA, 20 bp, Artificial Sequence
  MKO10078892_B_Cops8
  gRNA
caaccatcaacgcccaccag

SEQ ID NO: 78893 - DNA, 20 bp, Artificial Sequence
  MKO10078893_B_Cops8
  gRNA
tgcaaaatcatctgcgatga

SEQ ID NO: 78894 - DNA, 20 bp, Artificial Sequence
  MKO10078894_B_Copz1
  gRNA
ttctcaacagctgatgctta

SEQ ID NO: 78895 - DNA, 20 bp, Artificial Sequence
  MKO10078895_B_Copz1
  gRNA
ggccttgacagtgtacaggg

SEQ ID NO: 78896 - DNA, 20 bp, Artificial Sequence
  MKO10078896_B_Copz1
  gRNA
cgacacctaccccagtgtca

SEQ ID NO: 78897 - DNA, 20 bp, Artificial Sequence
  MKO10078897_B_Copz2
  gRNA
gaaattcacctcattctcgg

SEQ ID NO: 78898 - DNA, 20 bp, Artificial Sequence
  MKO10078898_B_Copz2
  gRNA
actctctgagccacatctta

SEQ ID NO: 78899 - DNA, 20 bp, Artificial Sequence
  MKO10078899_B_Copz2
  gRNA
cgacacatttccctccgtga

SEQ ID NO: 78900 - DNA, 20 bp, Artificial Sequence
  MKO10078900_B_Coq10a
  gRNA
tttcaggtgacccttacggc

SEQ ID NO: 78901 - DNA, 20 bp, Artificial Sequence
  MKO10078901_B_Coq10a
  gRNA
atctccaaatagtctctaag

SEQ ID NO: 78902 - DNA, 20 bp, Artificial Sequence
  MKO10078902_B_Coq10a
  gRNA
atgttgctgcctttgagcgc

SEQ ID NO: 78903 - DNA, 20 bp, Artificial Sequence
  MKO10078903_B_Coq10b
  gRNA
ctctggaccatacagtttac

SEQ ID NO: 78904 - DNA, 20 bp, Artificial Sequence
  MKO10078904_B_Coq10b
  gRNA
acccttacctttaccaagtg

SEQ ID NO: 78905 - DNA, 20 bp, Artificial Sequence
  MKO10078905_B_Coq10b
  gRNA
gaaatgtatgacgtagtatc

SEQ ID NO: 78906 - DNA, 20 bp, Artificial Sequence
  MKO10078906_B_Coq2
  gRNA
tctatttctagtatagcaat

SEQ ID NO: 78907 - DNA, 20 bp, Artificial Sequence
  MKO10078907_B_Coq2
  gRNA
gtaggtgacgacaagaagta

SEQ ID NO: 78908 - DNA, 20 bp, Artificial Sequence
  MKO10078908_B_Coq2
  gRNA
caggcatacagccggatcac

SEQ ID NO: 78909 - DNA, 20 bp, Artificial Sequence
  MKO10078909_B_Coq3
  gRNA
agttgttggaattgatcccg

SEQ ID NO: 78910 - DNA, 20 bp, Artificial Sequence
  MKO10078910_B_Coq3
  gRNA
acaagtgctagtcaccatcc

SEQ ID NO: 78911 - DNA, 20 bp, Artificial Sequence
  MKO10078911_B_Coq3
  gRNA
taagtcctttgatccagtcc

SEQ ID NO: 78912 - DNA, 20 bp, Artificial Sequence
  MKO10078912_B_Coq4
  gRNA
ccgtgagtatcttcgcttcc

SEQ ID NO: 78913 - DNA, 20 bp, Artificial Sequence
  MKO10078913_B_Coq4
  gRNA
tctgaagcttgctcaggtcg

SEQ ID NO: 78914 - DNA, 20 bp, Artificial Sequence
  MKO10078914_B_Coq4
  gRNA
ctctacaacccctatcgcca

SEQ ID NO: 78915 - DNA, 20 bp, Artificial Sequence
  MKO10078915_B_Coq5
  gRNA
gcaaatccttccaagctcga

SEQ ID NO: 78916 - DNA, 20 bp, Artificial Sequence
  MKO10078916_B_Coq5
  gRNA
agcgctaacctggatatgag

SEQ ID NO: 78917 - DNA, 20 bp, Artificial Sequence
  MKO10078917_B_Coq5
  gRNA
ttgtcttccaggactggcgt

SEQ ID NO: 78918 - DNA, 20 bp, Artificial Sequence
  MKO10078918_B_Coq6
  gRNA
ggcgggtccaaagaaagccc

SEQ ID NO: 78919 - DNA, 20 bp, Artificial Sequence
  MKO10078919_B_Coq6
  gRNA
aatgttcgacagggacaacc

SEQ ID NO: 78920 - DNA, 20 bp, Artificial Sequence
  MKO10078920_B_Coq6
  gRNA
ttggacccgcctccagcaac

SEQ ID NO: 78921 - DNA, 20 bp, Artificial Sequence
  MKO10078921_B_Coq7
  gRNA
caaccagatccgcatgctga

SEQ ID NO: 78922 - DNA, 20 bp, Artificial Sequence
  MKO10078922_B_Coq7
  gRNA
tgaacaccacgatacaggcc

SEQ ID NO: 78923 - DNA, 20 bp, Artificial Sequence
  MKO10078923_B_Coq7
  gRNA
aggagcaatggcctgcaccg

SEQ ID NO: 78924 - DNA, 20 bp, Artificial Sequence
  MKO10078924_B_Coq9
  gRNA
acggcagtgtggaaggcacg

SEQ ID NO: 78925 - DNA, 20 bp, Artificial Sequence
  MKO10078925_B_Coq9
  gRNA
ccggggccagtgctcaatgt

SEQ ID NO: 78926 - DNA, 20 bp, Artificial Sequence
  MKO10078926_B_Coq9
  gRNA
tgatcccctacattgagcac

SEQ ID NO: 78927 - DNA, 20 bp, Artificial Sequence
  MKO10078927_B_Corin
  gRNA
ctgcgccctcatcgtgctgc

SEQ ID NO: 78928 - DNA, 20 bp, Artificial Sequence
  MKO10078928_B_Corin
  gRNA
gatggggaagctcgagtgcc

SEQ ID NO: 78929 - DNA, 20 bp, Artificial Sequence
  MKO10078929_B_Corin
  gRNA
aggaggagttcaccattccc

SEQ ID NO: 78930 - DNA, 20 bp, Artificial Sequence
  MKO10078930_B_Coro1a
  gRNA
ggccacgatgccaaccctct

SEQ ID NO: 78931 - DNA, 20 bp, Artificial Sequence
  MKO10078931_B_Coro1a
  gRNA
caccaagagggttggcatcg

SEQ ID NO: 78932 - DNA, 20 bp, Artificial Sequence
  MKO10078932_B_Coro1a
  gRNA
actcatgcgactgaaacccg

SEQ ID NO: 78933 - DNA, 20 bp, Artificial Sequence
  MKO10078933_B_Coro1b
  gRNA
ggcctgttctggatattgac

SEQ ID NO: 78934 - DNA, 20 bp, Artificial Sequence
  MKO10078934_B_Coro1b
  gRNA
cccatcaggttgtgacaatg

SEQ ID NO: 78935 - DNA, 20 bp, Artificial Sequence
  MKO10078935_B_Coro1b
  gRNA
acgagggggcccggcccatg

SEQ ID NO: 78936 - DNA, 20 bp, Artificial Sequence
  MKO10078936_B_Coro1c
  gRNA
ccgcatgagcgagcggcagt

SEQ ID NO: 78937 - DNA, 20 bp, Artificial Sequence
  MKO10078937_B_Coro1c
  gRNA
gacggcaacgtcttcactac

SEQ ID NO: 78938 - DNA, 20 bp, Artificial Sequence
  MKO10078938_B_Coro1c
  gRNA
aatgaccaggtcattgccag

SEQ ID NO: 78939 - DNA, 20 bp, Artificial Sequence
  MKO10078939_B_Coro2a
  gRNA
cgccaacaaagtactgttcc

SEQ ID NO: 78940 - DNA, 20 bp, Artificial Sequence
  MKO10078940_B_Coro2a
  gRNA
ccatgctcgcagggtggggc

SEQ ID NO: 78941 - DNA, 20 bp, Artificial Sequence
  MKO10078941_B_Coro2a
  gRNA
ccagccccaccctgcgagca

SEQ ID NO: 78942 - DNA, 20 bp, Artificial Sequence
  MKO10078942_B_Coro2b
  gRNA
tgcagtcaacgcccgcttcc

SEQ ID NO: 78943 - DNA, 20 bp, Artificial Sequence
  MKO10078943_B_Coro2b
  gRNA
ttccgcttcagcccaccgtc

SEQ ID NO: 78944 - DNA, 20 bp, Artificial Sequence
  MKO10078944_B_Coro2b
  gRNA
tgcagaggatcacgtcggtg

SEQ ID NO: 78945 - DNA, 20 bp, Artificial Sequence
  MKO10078945_B_Coro6
  gRNA
agaacctgtcatcacactcg

SEQ ID NO: 78946 - DNA, 20 bp, Artificial Sequence
  MKO10078946_B_Coro6
  gRNA
tgctctgccgaacaacacgc

SEQ ID NO: 78947 - DNA, 20 bp, Artificial Sequence
  MKO10078947_B_Coro6
  gRNA
tggccctcgagtgtgatgac

SEQ ID NO: 78948 - DNA, 20 bp, Artificial Sequence
  MKO10078948_B_Coro7
  gRNA
caccgtcctgtcagctgaac

SEQ ID NO: 78949 - DNA, 20 bp, Artificial Sequence
  MKO10078949_B_Coro7
  gRNA
tggaactgcagtacctccac

SEQ ID NO: 78950 - DNA, 20 bp, Artificial Sequence
  MKO10078950_B_Coro7
  gRNA
ctccggttcagctgacagga

SEQ ID NO: 78951 - DNA, 20 bp, Artificial Sequence
  MKO10078951_B_Cort
  gRNA
gtgcactcaccacactgtcc

SEQ ID NO: 78952 - DNA, 20 bp, Artificial Sequence
  MKO10078952_B_Cort
  gRNA
gccagctccagcacccccgt

SEQ ID NO: 78953 - DNA, 20 bp, Artificial Sequence
  MKO10078953_B_Cort
  gRNA
ggaagcccactcgtgccacc

SEQ ID NO: 78954 - DNA, 20 bp, Artificial Sequence
  MKO10078954_B_Cotl1
  gRNA
gccggtggtgaagcgcacaa

SEQ ID NO: 78955 - DNA, 20 bp, Artificial Sequence
  MKO10078955_B_Cotl1
  gRNA
caccattgtccccggcgatc

SEQ ID NO: 78956 - DNA, 20 bp, Artificial Sequence
  MKO10078956_B_Cotl1
  gRNA
atttgtgatcagcgaccgga

SEQ ID NO: 78957 - DNA, 20 bp, Artificial Sequence
  MKO10078957_B_Cox10
  gRNA
ctattcatgtttgagtcgaa

SEQ ID NO: 78958 - DNA, 20 bp, Artificial Sequence
  MKO10078958_B_Cox10
  gRNA
aaaggagacgccggtggctc

SEQ ID NO: 78959 - DNA, 20 bp, Artificial Sequence
  MKO10078959_B_Cox10
  gRNA
cttgagcttcctcaagcgca

SEQ ID NO: 78960 - DNA, 20 bp, Artificial Sequence
  MKO10078960_B_Cox11
  gRNA
tgtcaaggaccgggtcatta

SEQ ID NO: 78961 - DNA, 20 bp, Artificial Sequence
  MKO10078961_B_Cox11
  gRNA
cctactgacaaaccagtaat

SEQ ID NO: 78962 - DNA, 20 bp, Artificial Sequence
  MKO10078962_B_Cox11
  gRNA
acagtatttcaataagatac

SEQ ID NO: 78963 - DNA, 20 bp, Artificial Sequence
  MKO10078963_B_Cox14
  gRNA
acctccagctgcgcagtgcc

SEQ ID NO: 78964 - DNA, 20 bp, Artificial Sequence
  MKO10078964_B_Cox14
  gRNA
cacagtgaggagcatcatcg

SEQ ID NO: 78965 - DNA, 20 bp, Artificial Sequence
  MKO10078965_B_Cox14
  gRNA
gctgctctacaggactcctg

SEQ ID NO: 78966 - DNA, 20 bp, Artificial Sequence
  MKO10078966_B_Cox15
  gRNA
ggtagactggcatctgataa

SEQ ID NO: 78967 - DNA, 20 bp, Artificial Sequence
  MKO10078967_B_Cox15
  gRNA
gtaccgcctcgcagcccacc

SEQ ID NO: 78968 - DNA, 20 bp, Artificial Sequence
  MKO10078968_B_Cox15
  gRNA
aggcggtactgactgacccg

SEQ ID NO: 78969 - DNA, 20 bp, Artificial Sequence
  MKO10078969_B_Cox16
  gRNA
tctacagattgatcctgaat

SEQ ID NO: 78970 - DNA, 20 bp, Artificial Sequence
  MKO10078970_B_Cox16
  gRNA
taattgtcacagcatcgtac

SEQ ID NO: 78971 - DNA, 20 bp, Artificial Sequence
  MKO10078971_B_Cox16
  gRNA
gagtttctgggtttcgtcct

SEQ ID NO: 78972 - DNA, 20 bp, Artificial Sequence
  MKO10078972_B_Cox17
  gRNA
acatctcattgaagcccaca

SEQ ID NO: 78973 - DNA, 20 bp, Artificial Sequence
  MKO10078973_B_Cox17
  gRNA
gcctggaaagatgccgggac

SEQ ID NO: 78974 - DNA, 20 bp, Artificial Sequence
  MKO10078974_B_Cox17
  gRNA
ccaagaaggcgcgtgatgcg

SEQ ID NO: 78975 - DNA, 20 bp, Artificial Sequence
  MKO10078975_B_Cox18
  gRNA
caccgacctccactatcagt

SEQ ID NO: 78976 - DNA, 20 bp, Artificial Sequence
  MKO10078976_B_Cox18
  gRNA
gcagtctgtgcccgtcagtt

SEQ ID NO: 78977 - DNA, 20 bp, Artificial Sequence
  MKO10078977_B_Cox18
  gRNA
tgcatacctagccactctct

SEQ ID NO: 78978 - DNA, 20 bp, Artificial Sequence
  MKO10078978_B_Cox19
  gRNA
ctaaagccgagcttctctag

SEQ ID NO: 78979 - DNA, 20 bp, Artificial Sequence
  MKO10078979_B_Cox19
  gRNA
ctaaagagtatttaatgtgc

SEQ ID NO: 78980 - DNA, 20 bp, Artificial Sequence
  MKO10078980_B_Cox19
  gRNA
gctttaaagaaaaattcatg

SEQ ID NO: 78981 - DNA, 20 bp, Artificial Sequence
  MKO10078981_B_Cox20
  gRNA
ttcttacaaggttccactgt

SEQ ID NO: 78982 - DNA, 20 bp, Artificial Sequence
  MKO10078982_B_Cox20
  gRNA
ggtgcccatggcggccgccc

SEQ ID NO: 78983 - DNA, 20 bp, Artificial Sequence
  MKO10078983_B_Cox20
  gRNA
agttgcttagctgctgttgt

SEQ ID NO: 78984 - DNA, 20 bp, Artificial Sequence
  MKO10078984_B_Cox4i1
  gRNA
catgcagaccaagcgaatgc

SEQ ID NO: 78985 - DNA, 20 bp, Artificial Sequence
  MKO10078985_B_Cox4i1
  gRNA
ctcatactttcgatcgtgac

SEQ ID NO: 78986 - DNA, 20 bp, Artificial Sequence
  MKO10078986_B_Cox4i1
  gRNA
ctttccccacttacgctgat

SEQ ID NO: 78987 - DNA, 20 bp, Artificial Sequence
  MKO10078987_B_Cox4i2
  gRNA
tgaaccatcgctccaacgaa

SEQ ID NO: 78988 - DNA, 20 bp, Artificial Sequence
  MKO10078988_B_Cox4i2
  gRNA
ccggcatgggataggagcgc

SEQ ID NO: 78989 - DNA, 20 bp, Artificial Sequence
  MKO10078989_B_Cox4i2
  gRNA
ccctgcagtgttccctaaga

SEQ ID NO: 78990 - DNA, 20 bp, Artificial Sequence
  MKO10078990_B_Cox5a
  gRNA
ctgcattgcgagcatgtaga

SEQ ID NO: 78991 - DNA, 20 bp, Artificial Sequence
  MKO10078991_B_Cox5a
  gRNA
atgaggagtttgatgctcgc

SEQ ID NO: 78992 - DNA, 20 bp, Artificial Sequence
  MKO10078992_B_Cox5a
  gRNA
ggacaaagcaggacctcata

SEQ ID NO: 78993 - DNA, 20 bp, Artificial Sequence
  MKO10078993_B_Cox5b
  gRNA
agtagcctgctcctcatcag

SEQ ID NO: 78994 - DNA, 20 bp, Artificial Sequence
  MKO10078994_B_Cox5b
  gRNA
cactattctcttgttgctga

SEQ ID NO: 78995 - DNA, 20 bp, Artificial Sequence
  MKO10078995_B_Cox5b
  gRNA
atacaatatgctacctccaa

SEQ ID NO: 78996 - DNA, 20 bp, Artificial Sequence
  MKO10078996_B_Cox6a1
  gRNA
gcccacggcgaggagggttc

SEQ ID NO: 78997 - DNA, 20 bp, Artificial Sequence
  MKO10078997_B_Cox6a1
  gRNA
tacctgaaccctcctcgccg

SEQ ID NO: 78998 - DNA, 20 bp, Artificial Sequence
  MKO10078998_B_Cox6a1
  gRNA
tcgctccgcagcccttcccc

SEQ ID NO: 78999 - DNA, 20 bp, Artificial Sequence
  MKO10078999_B_Cox6a2
  gRNA
acatcaagggtgctcataac

SEQ ID NO: 79000 - DNA, 20 bp, Artificial Sequence
  MKO10079000_B_Cox6a2
  gRNA
agcatggccagcgcagccaa

SEQ ID NO: 79001 - DNA, 20 bp, Artificial Sequence
  MKO10079001_B_Cox6a2
  gRNA
acttacctcctgcccctcca

SEQ ID NO: 79002 - DNA, 20 bp, Artificial Sequence
  MKO10079002_B_Cox6b1
  gRNA
atagctgaaggcacatttcc

SEQ ID NO: 79003 - DNA, 20 bp, Artificial Sequence
  MKO10079003_B_Cox6b1
  gRNA
gttggggaagcggctgtcaa

SEQ ID NO: 79004 - DNA, 20 bp, Artificial Sequence
  MKO10079004_B_Cox6b1
  gRNA
agaaccagactaagaactgt

SEQ ID NO: 79005 - DNA, 20 bp, Artificial Sequence
  MKO10079005_B_Cox6b2
  gRNA
ggcgttgtccattggcccgg

SEQ ID NO: 79006 - DNA, 20 bp, Artificial Sequence
  MKO10079006_B_Cox6b2
  gRNA
gatcaagcagggaactttcc

SEQ ID NO: 79007 - DNA, 20 bp, Artificial Sequence
  MKO10079007_B_Cox6b2
  gRNA
tgccactgcaggtgcagcgc

SEQ ID NO: 79008 - DNA, 20 bp, Artificial Sequence
  MKO10079008_B_Cox6c
  gRNA
catctcttcgaaatctttca

SEQ ID NO: 79009 - DNA, 20 bp, Artificial Sequence
  MKO10079009_B_Cox6c
  gRNA
tcttctggccaagcgtctgc

SEQ ID NO: 79010 - DNA, 20 bp, Artificial Sequence
  MKO10079010_B_Cox6c
  gRNA
aatatgaacccgcagacgct

SEQ ID NO: 79011 - DNA, 20 bp, Artificial Sequence
  MKO10079011_B_Cox7a1
  gRNA
gacgcaaaatgagggcccta

SEQ ID NO: 79012 - DNA, 20 bp, Artificial Sequence
  MKO10079012_B_Cox7a1
  gRNA
gcccaagcagtataagcagt

SEQ ID NO: 79013 - DNA, 20 bp, Artificial Sequence
  MKO10079013_B_Cox7a1
  gRNA
aagccacttagaaaaccgtg

SEQ ID NO: 79014 - DNA, 20 bp, Artificial Sequence
  MKO10079014_B_Cox7a2l
  gRNA
aaagtgtacctgcggggtgt

SEQ ID NO: 79015 - DNA, 20 bp, Artificial Sequence
  MKO10079015_B_Cox7a2l
  gRNA
tttacttcagtttggtccgt

SEQ ID NO: 79016 - DNA, 20 bp, Artificial Sequence
  MKO10079016_B_Cox7a2l
  gRNA
tagcagtttcacgcagaagt

SEQ ID NO: 79017 - DNA, 20 bp, Artificial Sequence
  MKO10079017_B_Cox7a2
  gRNA
acgacattagttctgcttct

SEQ ID NO: 79018 - DNA, 20 bp, Artificial Sequence
  MKO10079018_B_Cox7a2
  gRNA
tcctctgggcaatctgacga

SEQ ID NO: 79019 - DNA, 20 bp, Artificial Sequence
  MKO10079019_B_Cox7a2
  gRNA
ttcaaaatgccttcgtgaag

SEQ ID NO: 79020 - DNA, 20 bp, Artificial Sequence
  MKO10079020_B_Cox7b2
  gRNA
tacaatttatatgacacaga

SEQ ID NO: 79021 - DNA, 20 bp, Artificial Sequence
  MKO10079021_B_Cox7b2
  gRNA
gaagaaactcatgacaaata

SEQ ID NO: 79022 - DNA, 20 bp, Artificial Sequence
  MKO10079022_B_Cox7b2
  gRNA
gtcatgagtttcttctgatg

SEQ ID NO: 79023 - DNA, 20 bp, Artificial Sequence
  MKO10079023_B_Cox7b
  gRNA
ccattctattccaatttgtg

SEQ ID NO: 79024 - DNA, 20 bp, Artificial Sequence
  MKO10079024_B_Cox7b
  gRNA
aactaggtgccctcttctgg

SEQ ID NO: 79025 - DNA, 20 bp, Artificial Sequence
  MKO10079025_B_Cox7b
  gRNA
tagcattcccatatttgtca

SEQ ID NO: 79026 - DNA, 20 bp, Artificial Sequence
  MKO10079026_B_Cox7c
  gRNA
tcttactataaagaaaggtg

SEQ ID NO: 79027 - DNA, 20 bp, Artificial Sequence
  MKO10079027_B_Cox7c
  gRNA
ggtccgtcgcagccactatg

SEQ ID NO: 79028 - DNA, 20 bp, Artificial Sequence
  MKO10079028_B_Cox7c
  gRNA
ccacggaggtcgtgaacctc

SEQ ID NO: 79029 - DNA, 20 bp, Artificial Sequence
  MKO10079029_B_Cox8a
  gRNA
tctgtgtaggatatcaccat

SEQ ID NO: 79030 - DNA, 20 bp, Artificial Sequence
  MKO10079030_B_Cox8a
  gRNA
ttcgagtggacctgagcccg

SEQ ID NO: 79031 - DNA, 20 bp, Artificial Sequence
  MKO10079031_B_Cox8a
  gRNA
tcctcagcagcagtggcgtc

SEQ ID NO: 79032 - DNA, 20 bp, Artificial Sequence
  MKO10079032_B_Cox8b
  gRNA
aaccatgaagccaacgacta

SEQ ID NO: 79033 - DNA, 20 bp, Artificial Sequence
  MKO10079033_B_Cox8b
  gRNA
gttacttaccacggcggaag

SEQ ID NO: 79034 - DNA, 20 bp, Artificial Sequence
  MKO10079034_B_Cox8b
  gRNA
gcttggagcagccgcaggat

SEQ ID NO: 79035 - DNA, 20 bp, Artificial Sequence
  MKO10079035_B_Cox8c
  gRNA
agcagtctgaagtatttcaa

SEQ ID NO: 79036 - DNA, 20 bp, Artificial Sequence
  MKO10079036_B_Cox8c
  gRNA
gcagtcctgttctcgaagcc

SEQ ID NO: 79037 - DNA, 20 bp, Artificial Sequence
  MKO10079037_B_Cox8c
  gRNA
aaaaaaaatcctgtcgccca

SEQ ID NO: 79038 - DNA, 20 bp, Artificial Sequence
  MKO10079038_B_Cpa1
  gRNA
cttcaaaggtgctgccgatc

SEQ ID NO: 79039 - DNA, 20 bp, Artificial Sequence
  MKO10079039_B_Cpa1
  gRNA
cttcgtcggtggcagagatt

SEQ ID NO: 79040 - DNA, 20 bp, Artificial Sequence
  MKO10079040_B_Cpa1
  gRNA
tcgtcccatcaatgtgctga

SEQ ID NO: 79041 - DNA, 20 bp, Artificial Sequence
  MKO10079041_B_Cpa2
  gRNA
aattaagactctgctgcaac

SEQ ID NO: 79042 - DNA, 20 bp, Artificial Sequence
  MKO10079042_B_Cpa2
  gRNA
aagtaatcccctgggactcc

SEQ ID NO: 79043 - DNA, 20 bp, Artificial Sequence
  MKO10079043_B_Cpa2
  gRNA
tcggacatggactgtctgcc

SEQ ID NO: 79044 - DNA, 20 bp, Artificial Sequence
  MKO10079044_B_Cpa3
  gRNA
tcagaccatccagtcaacct

SEQ ID NO: 79045 - DNA, 20 bp, Artificial Sequence
  MKO10079045_B_Cpa3
  gRNA
gttatgcaaaatacaatgac

SEQ ID NO: 79046 - DNA, 20 bp, Artificial Sequence
  MKO10079046_B_Cpa3
  gRNA
taatccattatatgtcctca

SEQ ID NO: 79047 - DNA, 20 bp, Artificial Sequence
  MKO10079047_B_Cpa4
  gRNA
cttcatcttcgttatctaaa

SEQ ID NO: 79048 - DNA, 20 bp, Artificial Sequence
  MKO10079048_B_Cpa4
  gRNA
cggagtggtgacttcaacta

SEQ ID NO: 79049 - DNA, 20 bp, Artificial Sequence
  MKO10079049_B_Cpa4
  gRNA
ccttcagatttaccacgaga

SEQ ID NO: 79050 - DNA, 20 bp, Artificial Sequence
  MKO10079050_B_Cpa5
  gRNA
ccggtccattcttgtcctga

SEQ ID NO: 79051 - DNA, 20 bp, Artificial Sequence
  MKO10079051_B_Cpa5
  gRNA
tgcctacagcatcatgataa

SEQ ID NO: 79052 - DNA, 20 bp, Artificial Sequence
  MKO10079052_B_Cpa5
  gRNA
cttcaaataagctttaacac

SEQ ID NO: 79053 - DNA, 20 bp, Artificial Sequence
  MKO10079053_B_Cpa6
  gRNA
cctcgtagttgtattcagac

SEQ ID NO: 79054 - DNA, 20 bp, Artificial Sequence
  MKO10079054_B_Cpa6
  gRNA
gatctgttaccttaagttgg

SEQ ID NO: 79055 - DNA, 20 bp, Artificial Sequence
  MKO10079055_B_Cpa6
  gRNA
aaccctgttagcgttcttac

SEQ ID NO: 79056 - DNA, 20 bp, Artificial Sequence
  MKO10079056_B_Cpb1
  gRNA
agatgacgtcagcttaattc

SEQ ID NO: 79057 - DNA, 20 bp, Artificial Sequence
  MKO10079057_B_Cpb1
  gRNA
cttcatcatgtacactgaca

SEQ ID NO: 79058 - DNA, 20 bp, Artificial Sequence
  MKO10079058_B_Cpb1
  gRNA
ttcacttgtgtagcagaatc

SEQ ID NO: 79059 - DNA, 20 bp, Artificial Sequence
  MKO10079059_B_Cpb2
  gRNA
atactgctcatagtatgaag

SEQ ID NO: 79060 - DNA, 20 bp, Artificial Sequence
  MKO10079060_B_Cpb2
  gRNA
tcgatgaattcagctgtcac

SEQ ID NO: 79061 - DNA, 20 bp, Artificial Sequence
  MKO10079061_B_Cpb2
  gRNA
ttcagttatgacttctatcc

SEQ ID NO: 79062 - DNA, 20 bp, Artificial Sequence
  MKO10079062_B_Cpd
  gRNA
tgctcgggagaatcatcaaa

SEQ ID NO: 79063 - DNA, 20 bp, Artificial Sequence
  MKO10079063_B_Cpd
  gRNA
ctgacatcacagttggccga

SEQ ID NO: 79064 - DNA, 20 bp, Artificial Sequence
  MKO10079064_B_Cpd
  gRNA
gttacagcctcagttgaacc

SEQ ID NO: 79065 - DNA, 20 bp, Artificial Sequence
  MKO10079065_B_Cpeb1
  gRNA
cctggacacccggcccatcc

SEQ ID NO: 79066 - DNA, 20 bp, Artificial Sequence
  MKO10079066_B_Cpeb1
  gRNA
tgtacaacacctataaatcg

SEQ ID NO: 79067 - DNA, 20 bp, Artificial Sequence
  MKO10079067_B_Cpeb1
  gRNA
tctgcgcaagaatctccccg

SEQ ID NO: 79068 - DNA, 20 bp, Artificial Sequence
  MKO10079068_B_Cpeb2
  gRNA
tagcttgaatatgcactctc

SEQ ID NO: 79069 - DNA, 20 bp, Artificial Sequence
  MKO10079069_B_Cpeb2
  gRNA
agcagagcacgatcctctca

SEQ ID NO: 79070 - DNA, 20 bp, Artificial Sequence
  MKO10079070_B_Cpeb2
  gRNA
gacaatctgttaatgttaaa

SEQ ID NO: 79071 - DNA, 20 bp, Artificial Sequence
  MKO10079071_B_Cpeb3
  gRNA
agtggaacgctactctagaa

SEQ ID NO: 79072 - DNA, 20 bp, Artificial Sequence
  MKO10079072_B_Cpeb3
  gRNA
attatatcagcgaaactcat

SEQ ID NO: 79073 - DNA, 20 bp, Artificial Sequence
  MKO10079073_B_Cpeb3
  gRNA
ggaataaatttccaccatcc

SEQ ID NO: 79074 - DNA, 20 bp, Artificial Sequence
  MKO10079074_B_Cpeb4
  gRNA
tcaacctcttcatagtggtc

SEQ ID NO: 79075 - DNA, 20 bp, Artificial Sequence
  MKO10079075_B_Cpeb4
  gRNA
tgtgttcacaggaacgcccc

SEQ ID NO: 79076 - DNA, 20 bp, Artificial Sequence
  MKO10079076_B_Cpeb4
  gRNA
gatagttctctgcttattaa

SEQ ID NO: 79077 - DNA, 20 bp, Artificial Sequence
  MKO10079077_B_Cped1
  gRNA
tcccgaggtttccatacatg

SEQ ID NO: 79078 - DNA, 20 bp, Artificial Sequence
  MKO10079078_B_Cped1
  gRNA
gcagaagggccgtcctccac

SEQ ID NO: 79079 - DNA, 20 bp, Artificial Sequence
  MKO10079079_B_Cped1
  gRNA
aagattacctggaaatcttc

SEQ ID NO: 79080 - DNA, 20 bp, Artificial Sequence
  MKO10079080_B_Cpe
  gRNA
ggtgcatggtacagcgtccc

SEQ ID NO: 79081 - DNA, 20 bp, Artificial Sequence
  MKO10079081_B_Cpe
  gRNA
tgcggctttctcaaagccgt

SEQ ID NO: 79082 - DNA, 20 bp, Artificial Sequence
  MKO10079082_B_Cpe
  gRNA
ctttgagaaagccgcatcgc

SEQ ID NO: 79083 - DNA, 20 bp, Artificial Sequence
  MKO10079083_B_Cphx1
  gRNA
tcagaataaaagagccagat

SEQ ID NO: 79084 - DNA, 20 bp, Artificial Sequence
  MKO10079084_B_Cphx1
  gRNA
agtaagagaatgtgaaatat

SEQ ID NO: 79085 - DNA, 20 bp, Artificial Sequence
  MKO10079085_B_Cphx1
  gRNA
gtgcagcccccaaaagcttc

SEQ ID NO: 79086 - DNA, 20 bp, Artificial Sequence
  MKO10079086_B_Cphx2
  gRNA
tcagaataaaagagccagat

SEQ ID NO: 79087 - DNA, 20 bp, Artificial Sequence
  MKO10079087_B_Cphx2
  gRNA
agtaagagaatgtgaaatat

SEQ ID NO: 79088 - DNA, 20 bp, Artificial Sequence
  MKO10079088_B_Cphx2
  gRNA
gtgcagcccccaaaagcttc

SEQ ID NO: 79089 - DNA, 20 bp, Artificial Sequence
  MKO10079089_B_Cplx1
  gRNA
gccatggaggccaactcgga

SEQ ID NO: 79090 - DNA, 20 bp, Artificial Sequence
  MKO10079090_B_Cplx1
  gRNA
caaagcaaagtacgccaaga

SEQ ID NO: 79091 - DNA, 20 bp, Artificial Sequence
  MKO10079091_B_Cplx1
  gRNA
ttgtttcatcacgaactcca

SEQ ID NO: 79092 - DNA, 20 bp, Artificial Sequence
  MKO10079092_B_Cplx2
  gRNA
tggccttcttgggtcgggtc

SEQ ID NO: 79093 - DNA, 20 bp, Artificial Sequence
  MKO10079093_B_Cplx2
  gRNA
aagcctgacccgacccaaga

SEQ ID NO: 79094 - DNA, 20 bp, Artificial Sequence
  MKO10079094_B_Cplx2
  gRNA
aagccgagcgcgagaaggtc

SEQ ID NO: 79095 - DNA, 20 bp, Artificial Sequence
  MKO10079095_B_Cplx3
  gRNA
gctagccaagatgatcgagg

SEQ ID NO: 79096 - DNA, 20 bp, Artificial Sequence
  MKO10079096_B_Cplx3
  gRNA
tctgaagtgacttcgcagtg

SEQ ID NO: 79097 - DNA, 20 bp, Artificial Sequence
  MKO10079097_B_Cplx3
  gRNA
agacaaataccgtctgccca

SEQ ID NO: 79098 - DNA, 20 bp, Artificial Sequence
  MKO10079098_B_Cplx4
  gRNA
aggcacctcagaccccgcgg

SEQ ID NO: 79099 - DNA, 20 bp, Artificial Sequence
  MKO10079099_B_Cplx4
  gRNA
agtcatccctttagccgccg

SEQ ID NO: 79100 - DNA, 20 bp, Artificial Sequence
  MKO10079100_B_Cplx4
  gRNA
ccacatcgtctccagccagt

SEQ ID NO: 79101 - DNA, 20 bp, Artificial Sequence
  MKO10079101_B_Cpm
  gRNA
gtagccgttgataatcccgt

SEQ ID NO: 79102 - DNA, 20 bp, Artificial Sequence
  MKO10079102_B_Cpm
  gRNA
accttgtacgccattatcaa

SEQ ID NO: 79103 - DNA, 20 bp, Artificial Sequence
  MKO10079103_B_Cpm
  gRNA
gtcctctctgcgaatctcca

SEQ ID NO: 79104 - DNA, 20 bp, Artificial Sequence
  MKO10079104_B_Cpn1
  gRNA
agttcaaggagcgaatccac

SEQ ID NO: 79105 - DNA, 20 bp, Artificial Sequence
  MKO10079105_B_Cpn1
  gRNA
gtctggaagagctcgtcatc

SEQ ID NO: 79106 - DNA, 20 bp, Artificial Sequence
  MKO10079106_B_Cpn1
  gRNA
ggacctgaaccgcaacttcc

SEQ ID NO: 79107 - DNA, 20 bp, Artificial Sequence
  MKO10079107_B_Cpn2
  gRNA
atagtctcccgggcaaggtt

SEQ ID NO: 79108 - DNA, 20 bp, Artificial Sequence
  MKO10079108_B_Cpn2
  gRNA
aaccagctgaccacgctccc

SEQ ID NO: 79109 - DNA, 20 bp, Artificial Sequence
  MKO10079109_B_Cpn2
  gRNA
caacactcaggtccgtcacc

SEQ ID NO: 79110 - DNA, 20 bp, Artificial Sequence
  MKO10079110_B_Cpne1
  gRNA
aagtcgtcatcccccagctc

SEQ ID NO: 79111 - DNA, 20 bp, Artificial Sequence
  MKO10079111_B_Cpne1
  gRNA
ttacccttgatgttgaagcc

SEQ ID NO: 79112 - DNA, 20 bp, Artificial Sequence
  MKO10079112_B_Cpne1
  gRNA
ggacagccgtgtagtaacca

SEQ ID NO: 79113 - DNA, 20 bp, Artificial Sequence
  MKO10079113_B_Cpne2
  gRNA
tctccagcaagaagatcact

SEQ ID NO: 79114 - DNA, 20 bp, Artificial Sequence
  MKO10079114_B_Cpne2
  gRNA
ccgagtcatcacactgagcc

SEQ ID NO: 79115 - DNA, 20 bp, Artificial Sequence
  MKO10079115_B_Cpne2
  gRNA
agatgatggcaaatggatgc

SEQ ID NO: 79116 - DNA, 20 bp, Artificial Sequence
  MKO10079116_B_Cpne3
  gRNA
gtaatactccctttccctgc

SEQ ID NO: 79117 - DNA, 20 bp, Artificial Sequence
  MKO10079117_B_Cpne3
  gRNA
tattgattactactttgaag

SEQ ID NO: 79118 - DNA, 20 bp, Artificial Sequence
  MKO10079118_B_Cpne3
  gRNA
tttaaatgtaggatctgttt

SEQ ID NO: 79119 - DNA, 20 bp, Artificial Sequence
  MKO10079119_B_Cpne4
  gRNA
agcggggaaatcctccatca

SEQ ID NO: 79120 - DNA, 20 bp, Artificial Sequence
  MKO10079120_B_Cpne4
  gRNA
gtaaacagctttgagtacac

SEQ ID NO: 79121 - DNA, 20 bp, Artificial Sequence
  MKO10079121_B_Cpne4
  gRNA
cagtaaatcagacccatttc

SEQ ID NO: 79122 - DNA, 20 bp, Artificial Sequence
  MKO10079122_B_Cpne5
  gRNA
ggagaacaagcaatggcgag

SEQ ID NO: 79123 - DNA, 20 bp, Artificial Sequence
  MKO10079123_B_Cpne5
  gRNA
cgatgttgactccaagagcc

SEQ ID NO: 79124 - DNA, 20 bp, Artificial Sequence
  MKO10079124_B_Cpne5
  gRNA
ctcacgtgtttagatagatc

SEQ ID NO: 79125 - DNA, 20 bp, Artificial Sequence
  MKO10079125_B_Cpne6
  gRNA
aggtgcactccgtagacccg

SEQ ID NO: 79126 - DNA, 20 bp, Artificial Sequence
  MKO10079126_B_Cpne6
  gRNA
cacccgcagctccactcgag

SEQ ID NO: 79127 - DNA, 20 bp, Artificial Sequence
  MKO10079127_B_Cpne6
  gRNA
ggcgggcaagtctactatca

SEQ ID NO: 79128 - DNA, 20 bp, Artificial Sequence
  MKO10079128_B_Cpne7
  gRNA
tatgacacccacgggcctag

SEQ ID NO: 79129 - DNA, 20 bp, Artificial Sequence
  MKO10079129_B_Cpne7
  gRNA
ggagtgagcagctcgtgtac

SEQ ID NO: 79130 - DNA, 20 bp, Artificial Sequence
  MKO10079130_B_Cpne7
  gRNA
ctccttccaggcccggaaac

SEQ ID NO: 79131 - DNA, 20 bp, Artificial Sequence
  MKO10079131_B_Cpne8
  gRNA
taatcaggaggctgctcccc

SEQ ID NO: 79132 - DNA, 20 bp, Artificial Sequence
  MKO10079132_B_Cpne8
  gRNA
tcccaactgcttgtgtatat

SEQ ID NO: 79133 - DNA, 20 bp, Artificial Sequence
  MKO10079133_B_Cpne8
  gRNA
gtcctatatacacaagcagt

SEQ ID NO: 79134 - DNA, 20 bp, Artificial Sequence
  MKO10079134_B_Cpne9
  gRNA
gcttaccggtttggagatat

SEQ ID NO: 79135 - DNA, 20 bp, Artificial Sequence
  MKO10079135_B_Cpne9
  gRNA
taaagccaatatctccaaac

SEQ ID NO: 79136 - DNA, 20 bp, Artificial Sequence
  MKO10079136_B_Cpne9
  gRNA
gactcacctcccgccactcc

SEQ ID NO: 79137 - DNA, 20 bp, Artificial Sequence
  MKO10079137_B_Cpox
  gRNA
tgggcgcataaggattcttg

SEQ ID NO: 79138 - DNA, 20 bp, Artificial Sequence
  MKO10079138_B_Cpox
  gRNA
acgcccgtcctgaagcacac

SEQ ID NO: 79139 - DNA, 20 bp, Artificial Sequence
  MKO10079139_B_Cpox
  gRNA
accgacatacttgaaccaag

SEQ ID NO: 79140 - DNA, 20 bp, Artificial Sequence
  MKO10079140_B_Cpped1
  gRNA
tacctgaggaaaacgcgtcc

SEQ ID NO: 79141 - DNA, 20 bp, Artificial Sequence
  MKO10079141_B_Cpped1
  gRNA
cggctttcagtactcgctgc

SEQ ID NO: 79142 - DNA, 20 bp, Artificial Sequence
  MKO10079142_B_Cpped1
  gRNA
tacctggcatggcatgaacg

SEQ ID NO: 79143 - DNA, 20 bp, Artificial Sequence
  MKO10079143_B_Cpq
  gRNA
tgtccaaatgtccactgacc

SEQ ID NO: 79144 - DNA, 20 bp, Artificial Sequence
  MKO10079144_B_Cpq
  gRNA
ccttatgtagctcataatac

SEQ ID NO: 79145 - DNA, 20 bp, Artificial Sequence
  MKO10079145_B_Cpq
  gRNA
tgcatcttctactgtgatac

SEQ ID NO: 79146 - DNA, 20 bp, Artificial Sequence
  MKO10079146_B_Cps1
  gRNA
ttacaggtccctgcaattta

SEQ ID NO: 79147 - DNA, 20 bp, Artificial Sequence
  MKO10079147_B_Cps1
  gRNA
aagatgaaaggctactcctt

SEQ ID NO: 79148 - DNA, 20 bp, Artificial Sequence
  MKO10079148_B_Cps1
  gRNA
ttcctaggtggcaggtctgc

SEQ ID NO: 79149 - DNA, 20 bp, Artificial Sequence
  MKO10079149_B_Cpsf1
  gRNA
cctgtctctacactactttg

SEQ ID NO: 79150 - DNA, 20 bp, Artificial Sequence
  MKO10079150_B_Cpsf1
  gRNA
ccaccgagagaaactagagc

SEQ ID NO: 79151 - DNA, 20 bp, Artificial Sequence
  MKO10079151_B_Cpsf1
  gRNA
tctcagtttcaaagacgcta

SEQ ID NO: 79152 - DNA, 20 bp, Artificial Sequence
  MKO10079152_B_Cpsf2
  gRNA
agaagaaattgtgtatgccg

SEQ ID NO: 79153 - DNA, 20 bp, Artificial Sequence
  MKO10079153_B_Cpsf2
  gRNA
ccagggaacatccatttaag

SEQ ID NO: 79154 - DNA, 20 bp, Artificial Sequence
  MKO10079154_B_Cpsf2
  gRNA
cctcctatcatatgaccagc

SEQ ID NO: 79155 - DNA, 20 bp, Artificial Sequence
  MKO10079155_B_Cpsf3l
  gRNA
actccgagcccactttaatc

SEQ ID NO: 79156 - DNA, 20 bp, Artificial Sequence
  MKO10079156_B_Cpsf3l
  gRNA
ctatatgacccatcctaccc

SEQ ID NO: 79157 - DNA, 20 bp, Artificial Sequence
  MKO10079157_B_Cpsf3l
  gRNA
tgcagcttcggcctacatcc

SEQ ID NO: 79158 - DNA, 20 bp, Artificial Sequence
  MKO10079158_B_Cpsf3
  gRNA
tctcagactatgtcaaagtc

SEQ ID NO: 79159 - DNA, 20 bp, Artificial Sequence
  MKO10079159_B_Cpsf3
  gRNA
gggctccacagtgatccaaa

SEQ ID NO: 79160 - DNA, 20 bp, Artificial Sequence
  MKO10079160_B_Cpsf3
  gRNA
gaagggcatccattccttcc

SEQ ID NO: 79161 - DNA, 20 bp, Artificial Sequence
  MKO10079161_B_Cpsf4l
  gRNA
agtcgcagcaatcactcttc

SEQ ID NO: 79162 - DNA, 20 bp, Artificial Sequence
  MKO10079162_B_Cpsf4l
  gRNA
atcatacttactgcccaaat

SEQ ID NO: 79163 - DNA, 20 bp, Artificial Sequence
  MKO10079163_B_Cpsf4l
  gRNA
accatgggctttgcctggaa

SEQ ID NO: 79164 - DNA, 20 bp, Artificial Sequence
  MKO10079164_B_Cpsf4
  gRNA
gtgtgccgatgcctacacag

SEQ ID NO: 79165 - DNA, 20 bp, Artificial Sequence
  MKO10079165_B_Cpsf4
  gRNA
gggtctcttacctttgccac

SEQ ID NO: 79166 - DNA, 20 bp, Artificial Sequence
  MKO10079166_B_Cpsf4
  gRNA
ttggagtaaaagtagcactc

SEQ ID NO: 79167 - DNA, 20 bp, Artificial Sequence
  MKO10079167_B_Cpsf6
  gRNA
agaggacggggccggtttcc

SEQ ID NO: 79168 - DNA, 20 bp, Artificial Sequence
  MKO10079168_B_Cpsf6
  gRNA
aactgaggccgttcattctt

SEQ ID NO: 79169 - DNA, 20 bp, Artificial Sequence
  MKO10079169_B_Cpsf6
  gRNA
ttattgcatggagttacaac

SEQ ID NO: 79170 - DNA, 20 bp, Artificial Sequence
  MKO10079170_B_Cpsf7
  gRNA
tgaaggaggacggttaaagt

SEQ ID NO: 79171 - DNA, 20 bp, Artificial Sequence
  MKO10079171_B_Cpsf7
  gRNA
tgtaccctcatctgctcgtg

SEQ ID NO: 79172 - DNA, 20 bp, Artificial Sequence
  MKO10079172_B_Cpsf7
  gRNA
tttgcagagaatcgtgcaaa

SEQ ID NO: 79173 - DNA, 20 bp, Artificial Sequence
  MKO10079173_B_Cpt1a
  gRNA
gcaggcgcggcagagacgtc

SEQ ID NO: 79174 - DNA, 20 bp, Artificial Sequence
  MKO10079174_B_Cpt1a
  gRNA
ctgtcaaagataccgtgagc

SEQ ID NO: 79175 - DNA, 20 bp, Artificial Sequence
  MKO10079175_B_Cpt1a
  gRNA
ggggtccactttggtatgca

SEQ ID NO: 79176 - DNA, 20 bp, Artificial Sequence
  MKO10079176_B_Cpt1b
  gRNA
gcgtgccagccacaattcac

SEQ ID NO: 79177 - DNA, 20 bp, Artificial Sequence
  MKO10079177_B_Cpt1b
  gRNA
gatgcaatcgaccagtccca

SEQ ID NO: 79178 - DNA, 20 bp, Artificial Sequence
  MKO10079178_B_Cpt1b
  gRNA
aggtcccttacctttccggg

SEQ ID NO: 79179 - DNA, 20 bp, Artificial Sequence
  MKO10079179_B_Cpt1c
  gRNA
gctgtcgcgggagcgcgcgt

SEQ ID NO: 79180 - DNA, 20 bp, Artificial Sequence
  MKO10079180_B_Cpt1c
  gRNA
tgtcctcacccacgaagacc

SEQ ID NO: 79181 - DNA, 20 bp, Artificial Sequence
  MKO10079181_B_Cpt1c
  gRNA
acataccagccaggtcttcg

SEQ ID NO: 79182 - DNA, 20 bp, Artificial Sequence
  MKO10079182_B_Cpt2
  gRNA
cgtatgctgttcacgatgac

SEQ ID NO: 79183 - DNA, 20 bp, Artificial Sequence
  MKO10079183_B_Cpt2
  gRNA
tctgtttatcctgagcgagc

SEQ ID NO: 79184 - DNA, 20 bp, Artificial Sequence
  MKO10079184_B_Cpt2
  gRNA
gcatgcgcacctgctcgctc

SEQ ID NO: 79185 - DNA, 20 bp, Artificial Sequence
  MKO10079185_B_Cpvl
  gRNA
atgaacgacaagagttatgc

SEQ ID NO: 79186 - DNA, 20 bp, Artificial Sequence
  MKO10079186_B_Cpvl
  gRNA
catgctctacattgataatc

SEQ ID NO: 79187 - DNA, 20 bp, Artificial Sequence
  MKO10079187_B_Cpvl
  gRNA
cggattatcaatgtagagca

SEQ ID NO: 79188 - DNA, 20 bp, Artificial Sequence
  MKO10079188_B_Cpxcr1
  gRNA
cgaaacaccaaatgcctgtg

SEQ ID NO: 79189 - DNA, 20 bp, Artificial Sequence
  MKO10079189_B_Cpxcr1
  gRNA
attctacataatattaacct

SEQ ID NO: 79190 - DNA, 20 bp, Artificial Sequence
  MKO10079190_B_Cpxcr1
  gRNA
ctaaaaagttgaccattcca

SEQ ID NO: 79191 - DNA, 20 bp, Artificial Sequence
  MKO10079191_B_Cpxm1
  gRNA
cctggatattgagccgtcct

SEQ ID NO: 79192 - DNA, 20 bp, Artificial Sequence
  MKO10079192_B_Cpxm1
  gRNA
tctggctgtcattgctgaac

SEQ ID NO: 79193 - DNA, 20 bp, Artificial Sequence
  MKO10079193_B_Cpxm1
  gRNA
tggaagagtaggaacagtac

SEQ ID NO: 79194 - DNA, 20 bp, Artificial Sequence
  MKO10079194_B_Cpxm2
  gRNA
tgacccctgtgaacttggtc

SEQ ID NO: 79195 - DNA, 20 bp, Artificial Sequence
  MKO10079195_B_Cpxm2
  gRNA
ggtgacatcctataaagtca

SEQ ID NO: 79196 - DNA, 20 bp, Artificial Sequence
  MKO10079196_B_Cpxm2
  gRNA
aaagctgccagtgatgacca

SEQ ID NO: 79197 - DNA, 20 bp, Artificial Sequence
  MKO10079197_B_Cpz
  gRNA
ccagcaggtactccgagcac

SEQ ID NO: 79198 - DNA, 20 bp, Artificial Sequence
  MKO10079198_B_Cpz
  gRNA
acgggaagtgctcatctacc

SEQ ID NO: 79199 - DNA, 20 bp, Artificial Sequence
  MKO10079199_B_Cpz
  gRNA
atcgagttctcgagccgccc

SEQ ID NO: 79200 - DNA, 20 bp, Artificial Sequence
  MKO10079200_B_Cp
  gRNA
gctgcacacatcgagagccc

SEQ ID NO: 79201 - DNA, 20 bp, Artificial Sequence
  MKO10079201_B_Cp
  gRNA
aacgtacaccaaggagtatg

SEQ ID NO: 79202 - DNA, 20 bp, Artificial Sequence
  MKO10079202_B_Cp
  gRNA
caccctaattgatgcttata

SEQ ID NO: 79203 - DNA, 20 bp, Artificial Sequence
  MKO10079203_B_Cr1l
  gRNA
ttgttgtatgaatgtctccc

SEQ ID NO: 79204 - DNA, 20 bp, Artificial Sequence
  MKO10079204_B_Cr1l
  gRNA
acatgtaccaagccattctc

SEQ ID NO: 79205 - DNA, 20 bp, Artificial Sequence
  MKO10079205_B_Cr1l
  gRNA
ttcaacttacactcacaaat

SEQ ID NO: 79206 - DNA, 20 bp, Artificial Sequence
  MKO10079206_B_Cr2
  gRNA
tcacctagctaccgcctcat

SEQ ID NO: 79207 - DNA, 20 bp, Artificial Sequence
  MKO10079207_B_Cr2
  gRNA
atgtacctacctttacatac

SEQ ID NO: 79208 - DNA, 20 bp, Artificial Sequence
  MKO10079208_B_Cr2
  gRNA
gtcttcaggtaccaattaca

SEQ ID NO: 79209 - DNA, 20 bp, Artificial Sequence
  MKO10079209_B_Crabp1
  gRNA
gacatttggcgccgatgatg

SEQ ID NO: 79210 - DNA, 20 bp, Artificial Sequence
  MKO10079210_B_Crabp1
  gRNA
gaatttcgacgagctcctca

SEQ ID NO: 79211 - DNA, 20 bp, Artificial Sequence
  MKO10079211_B_Crabp1
  gRNA
ccagcttacccaacgccttg

SEQ ID NO: 79212 - DNA, 20 bp, Artificial Sequence
  MKO10079212_B_Crabp2
  gRNA
tcctgtttgatctcgactgc

SEQ ID NO: 79213 - DNA, 20 bp, Artificial Sequence
  MKO10079213_B_Crabp2
  gRNA
acaaaatggtgtgcgagcag

SEQ ID NO: 79214 - DNA, 20 bp, Artificial Sequence
  MKO10079214_B_Crabp2
  gRNA
gggagggccccaagacctcc

SEQ ID NO: 79215 - DNA, 20 bp, Artificial Sequence
  MKO10079215_B_Cradd
  gRNA
gtcacagccgagctgcctac

SEQ ID NO: 79216 - DNA, 20 bp, Artificial Sequence
  MKO10079216_B_Cradd
  gRNA
ccacctgcgaatgcacgttg

SEQ ID NO: 79217 - DNA, 20 bp, Artificial Sequence
  MKO10079217_B_Cradd
  gRNA
gcccttgtgtaagcttagga

SEQ ID NO: 79218 - DNA, 20 bp, Artificial Sequence
  MKO10079218_B_Cramp1l
  gRNA
cgctcctcctcccggaacat

SEQ ID NO: 79219 - DNA, 20 bp, Artificial Sequence
  MKO10079219_B_Cramp1l
  gRNA
aagtcatcccaggaactcta

SEQ ID NO: 79220 - DNA, 20 bp, Artificial Sequence
  MKO10079220_B_Cramp1l
  gRNA
ttgttcttcaccatgcttgc

SEQ ID NO: 79221 - DNA, 20 bp, Artificial Sequence
  MKO10079221_B_Crat
  gRNA
caatacaccctcgatgagtt

SEQ ID NO: 79222 - DNA, 20 bp, Artificial Sequence
  MKO10079222_B_Crat
  gRNA
atgggctcacaccaagcaac

SEQ ID NO: 79223 - DNA, 20 bp, Artificial Sequence
  MKO10079223_B_Crat
  gRNA
ggctactcacttgtcaatca

SEQ ID NO: 79224 - DNA, 20 bp, Artificial Sequence
  MKO10079224_B_Crb1
  gRNA
gcttgcacgtagaattgttt

SEQ ID NO: 79225 - DNA, 20 bp, Artificial Sequence
  MKO10079225_B_Crb1
  gRNA
gccacatgtcaggacgctcc

SEQ ID NO: 79226 - DNA, 20 bp, Artificial Sequence
  MKO10079226_B_Crb1
  gRNA
gtttccatatagaccctctg

SEQ ID NO: 79227 - DNA, 20 bp, Artificial Sequence
  MKO10079227_B_Crb2
  gRNA
ctaccgctgcgtgtgcgcgc

SEQ ID NO: 79228 - DNA, 20 bp, Artificial Sequence
  MKO10079228_B_Crb2
  gRNA
ggcctgaacacccccgtaca

SEQ ID NO: 79229 - DNA, 20 bp, Artificial Sequence
  MKO10079229_B_Crb2
  gRNA
ggatgaggacgaatgtgcat

SEQ ID NO: 79230 - DNA, 20 bp, Artificial Sequence
  MKO10079230_B_Crb3
  gRNA
aatagcacaactcaaccccc

SEQ ID NO: 79231 - DNA, 20 bp, Artificial Sequence
  MKO10079231_B_Crb3
  gRNA
ctgggggtgctcttggcgtt

SEQ ID NO: 79232 - DNA, 20 bp, Artificial Sequence
  MKO10079232_B_Crb3
  gRNA
gggagtcctccttatagcag

SEQ ID NO: 79233 - DNA, 20 bp, Artificial Sequence
  MKO10079233_B_Crbn
  gRNA
ctatgcctatcgagaagagc

SEQ ID NO: 79234 - DNA, 20 bp, Artificial Sequence
  MKO10079234_B_Crbn
  gRNA
aaccacctgccgcttctgcc

SEQ ID NO: 79235 - DNA, 20 bp, Artificial Sequence
  MKO10079235_B_Crbn
  gRNA
gcatgacgacgacagctgcc

SEQ ID NO: 79236 - DNA, 20 bp, Artificial Sequence
  MKO10079236_B_Crcp
  gRNA
ctaggtgttccagttactaa

SEQ ID NO: 79237 - DNA, 20 bp, Artificial Sequence
  MKO10079237_B_Crcp
  gRNA
ttacttacttggtcagcttg

SEQ ID NO: 79238 - DNA, 20 bp, Artificial Sequence
  MKO10079238_B_Crcp
  gRNA
gctggactctggttcctaca

SEQ ID NO: 79239 - DNA, 20 bp, Artificial Sequence
  MKO10079239_B_Crct1
  gRNA
gcctgaactctgattgttgc

SEQ ID NO: 79240 - DNA, 20 bp, Artificial Sequence
  MKO10079240_B_Crct1
  gRNA
gcagcctccgccacagcaag

SEQ ID NO: 79241 - DNA, 20 bp, Artificial Sequence
  MKO10079241_B_Crct1
  gRNA
tcctgcaacaatcagagttc

SEQ ID NO: 79242 - DNA, 20 bp, Artificial Sequence
  MKO10079242_B_Creb1
  gRNA
taactgattcccaaaaacga

SEQ ID NO: 79243 - DNA, 20 bp, Artificial Sequence
  MKO10079243_B_Creb1
  gRNA
gatgatgttgcatgagctgc

SEQ ID NO: 79244 - DNA, 20 bp, Artificial Sequence
  MKO10079244_B_Creb1
  gRNA
tttcaaggaggccttcctac

SEQ ID NO: 79245 - DNA, 20 bp, Artificial Sequence
  MKO10079245_B_Creb3l1
  gRNA
gcactcttctcgtccagcac

SEQ ID NO: 79246 - DNA, 20 bp, Artificial Sequence
  MKO10079246_B_Creb3l1
  gRNA
gggggctctgctttgatcac

SEQ ID NO: 79247 - DNA, 20 bp, Artificial Sequence
  MKO10079247_B_Creb3l1
  gRNA
aggggatctacaggcagctc

SEQ ID NO: 79248 - DNA, 20 bp, Artificial Sequence
  MKO10079248_B_Creb3l2
  gRNA
cgttctgggaaaactcgtct

SEQ ID NO: 79249 - DNA, 20 bp, Artificial Sequence
  MKO10079249_B_Creb3l2
  gRNA
tgaaaaagaagagtcccctc

SEQ ID NO: 79250 - DNA, 20 bp, Artificial Sequence
  MKO10079250_B_Creb3l2
  gRNA
agagtcactgctgtgactac

SEQ ID NO: 79251 - DNA, 20 bp, Artificial Sequence
  MKO10079251_B_Creb3l3
  gRNA
ggttcagtgccactacgagg

SEQ ID NO: 79252 - DNA, 20 bp, Artificial Sequence
  MKO10079252_B_Creb3l3
  gRNA
taccaagtccccgctgccac

SEQ ID NO: 79253 - DNA, 20 bp, Artificial Sequence
  MKO10079253_B_Creb3l3
  gRNA
gagcacagataccctgtacc

SEQ ID NO: 79254 - DNA, 20 bp, Artificial Sequence
  MKO10079254_B_Creb3l4
  gRNA
ctatgattcagggaccctac

SEQ ID NO: 79255 - DNA, 20 bp, Artificial Sequence
  MKO10079255_B_Creb3l4
  gRNA
cctgagccgactgcttgttg

SEQ ID NO: 79256 - DNA, 20 bp, Artificial Sequence
  MKO10079256_B_Creb3l4
  gRNA
cgcatagacatatcctgcct

SEQ ID NO: 79257 - DNA, 20 bp, Artificial Sequence
  MKO10079257_B_Creb3
  gRNA
agatactgagagcttcgaaa

SEQ ID NO: 79258 - DNA, 20 bp, Artificial Sequence
  MKO10079258_B_Creb3
  gRNA
aacaagttctgaaacgagtg

SEQ ID NO: 79259 - DNA, 20 bp, Artificial Sequence
  MKO10079259_B_Creb3
  gRNA
tccatccttaggagatgtct

SEQ ID NO: 79260 - DNA, 20 bp, Artificial Sequence
  MKO10079260_B_Creb5
  gRNA
gagcaccatcggacacatga

SEQ ID NO: 79261 - DNA, 20 bp, Artificial Sequence
  MKO10079261_B_Creb5
  gRNA
accttgcatgcccatgatgc

SEQ ID NO: 79262 - DNA, 20 bp, Artificial Sequence
  MKO10079262_B_Creb5
  gRNA
aatgcttacaggcatcaaga

SEQ ID NO: 79263 - DNA, 20 bp, Artificial Sequence
  MKO10079263_B_Crebbp
  gRNA
ccattggggatcagctcatc

SEQ ID NO: 79264 - DNA, 20 bp, Artificial Sequence
  MKO10079264_B_Crebbp
  gRNA
cacgacaaatcatctctcat

SEQ ID NO: 79265 - DNA, 20 bp, Artificial Sequence
  MKO10079265_B_Crebbp
  gRNA
cctgatgagctgatccccaa

SEQ ID NO: 79266 - DNA, 20 bp, Artificial Sequence
  MKO10079266_B_Crebl2
  gRNA
agcctcagcagagctcaagc

SEQ ID NO: 79267 - DNA, 20 bp, Artificial Sequence
  MKO10079267_B_Crebl2
  gRNA
tgcggagatggatgacagca

SEQ ID NO: 79268 - DNA, 20 bp, Artificial Sequence
  MKO10079268_B_Crebl2
  gRNA
aagcgaaacttgagcgaagc

SEQ ID NO: 79269 - DNA, 20 bp, Artificial Sequence
  MKO10079269_B_Crebrf
  gRNA
attacttagtcctctgacgc

SEQ ID NO: 79270 - DNA, 20 bp, Artificial Sequence
  MKO10079270_B_Crebrf
  gRNA
cctaaaaaactacttcagat

SEQ ID NO: 79271 - DNA, 20 bp, Artificial Sequence
  MKO10079271_B_Crebrf
  gRNA
gttaagggaagctcactaac

SEQ ID NO: 79272 - DNA, 20 bp, Artificial Sequence
  MKO10079272_B_Crebzf
  gRNA
caagcgcgtgcaagcactgc

SEQ ID NO: 79273 - DNA, 20 bp, Artificial Sequence
  MKO10079273_B_Crebzf
  gRNA
gcgagctagtccggtctcgt

SEQ ID NO: 79274 - DNA, 20 bp, Artificial Sequence
  MKO10079274_B_Crebzf
  gRNA
tcgctacctacgggccgtcc

SEQ ID NO: 79275 - DNA, 20 bp, Artificial Sequence
  MKO10079275_B_Creg1
  gRNA
aattaaaaataagccgtatc

SEQ ID NO: 79276 - DNA, 20 bp, Artificial Sequence
  MKO10079276_B_Creg1
  gRNA
gtgacgttaaaatattcttc

SEQ ID NO: 79277 - DNA, 20 bp, Artificial Sequence
  MKO10079277_B_Creg1
  gRNA
acatcattatatgaacacac

SEQ ID NO: 79278 - DNA, 20 bp, Artificial Sequence
  MKO10079278_B_Creg2
  gRNA
gaggtgtatctgacatcccg

SEQ ID NO: 79279 - DNA, 20 bp, Artificial Sequence
  MKO10079279_B_Creg2
  gRNA
cagaagacccccgatgtgcc

SEQ ID NO: 79280 - DNA, 20 bp, Artificial Sequence
  MKO10079280_B_Creg2
  gRNA
tccaagaagatgtcgctgtc

SEQ ID NO: 79281 - DNA, 20 bp, Artificial Sequence
  MKO10079281_B_Creld1
  gRNA
ttccacccccgaagttgtcc

SEQ ID NO: 79282 - DNA, 20 bp, Artificial Sequence
  MKO10079282_B_Creld1
  gRNA
ccgcctgctcgagctgagcg

SEQ ID NO: 79283 - DNA, 20 bp, Artificial Sequence
  MKO10079283_B_Creld1
  gRNA
aagcccccgacctcttccag

SEQ ID NO: 79284 - DNA, 20 bp, Artificial Sequence
  MKO10079284_B_Creld2
  gRNA
agcaccccaacctatttgag

SEQ ID NO: 79285 - DNA, 20 bp, Artificial Sequence
  MKO10079285_B_Creld2
  gRNA
gagaggccttgcagcggaaa

SEQ ID NO: 79286 - DNA, 20 bp, Artificial Sequence
  MKO10079286_B_Creld2
  gRNA
tttcagtgagatccggcttc

SEQ ID NO: 79287 - DNA, 20 bp, Artificial Sequence
  MKO10079287_B_Crem
  gRNA
actgccatggtagcaatgtt

SEQ ID NO: 79288 - DNA, 20 bp, Artificial Sequence
  MKO10079288_B_Crem
  gRNA
tggcctacctgagctagagt

SEQ ID NO: 79289 - DNA, 20 bp, Artificial Sequence
  MKO10079289_B_Crem
  gRNA
accacctaacattgctacca

SEQ ID NO: 79290 - DNA, 20 bp, Artificial Sequence
  MKO10079290_B_Crhbp
  gRNA
ccttcaggaaatccccgcct

SEQ ID NO: 79291 - DNA, 20 bp, Artificial Sequence
  MKO10079291_B_Crhbp
  gRNA
gttatcgtgaatccatttcc

SEQ ID NO: 79292 - DNA, 20 bp, Artificial Sequence
  MKO10079292_B_Crhbp
  gRNA
ttcttccgggtccacgaacc

SEQ ID NO: 79293 - DNA, 20 bp, Artificial Sequence
  MKO10079293_B_Crhr1
  gRNA
aatgcctggccaacggcagc

SEQ ID NO: 79294 - DNA, 20 bp, Artificial Sequence
  MKO10079294_B_Crhr1
  gRNA
acgggctgcccagctgccgt

SEQ ID NO: 79295 - DNA, 20 bp, Artificial Sequence
  MKO10079295_B_Crhr1
  gRNA
agttgatgatgacggcaatg

SEQ ID NO: 79296 - DNA, 20 bp, Artificial Sequence
  MKO10079296_B_Crhr2
  gRNA
cggtctctctactagggctc

SEQ ID NO: 79297 - DNA, 20 bp, Artificial Sequence
  MKO10079297_B_Crhr2
  gRNA
ctcacactgcgaacccattt

SEQ ID NO: 79298 - DNA, 20 bp, Artificial Sequence
  MKO10079298_B_Crhr2
  gRNA
agttgacaatgagggcgatt

SEQ ID NO: 79299 - DNA, 20 bp, Artificial Sequence
  MKO10079299_B_Crh
  gRNA
gatccgtcccccgagcgccg

SEQ ID NO: 79300 - DNA, 20 bp, Artificial Sequence
  MKO10079300_B_Crh
  gRNA
tttccaagacttcccgcaga

SEQ ID NO: 79301 - DNA, 20 bp, Artificial Sequence
  MKO10079301_B_Crh
  gRNA
cagccgcccctcgcacgacc

SEQ ID NO: 79302 - DNA, 20 bp, Artificial Sequence
  MKO10079302_B_Crim1
  gRNA
cttgcgtttcgtagctgtcc

SEQ ID NO: 79303 - DNA, 20 bp, Artificial Sequence
  MKO10079303_B_Crim1
  gRNA
cacacgcagcggctgggtaa

SEQ ID NO: 79304 - DNA, 20 bp, Artificial Sequence
  MKO10079304_B_Crim1
  gRNA
catctccacgagagactatt

SEQ ID NO: 79305 - DNA, 20 bp, Artificial Sequence
  MKO10079305_B_Crip1
  gRNA
gtagcagggatgattgcagt

SEQ ID NO: 79306 - DNA, 20 bp, Artificial Sequence
  MKO10079306_B_Crip1
  gRNA
cctcggtctacttgaaagtg

SEQ ID NO: 79307 - DNA, 20 bp, Artificial Sequence
  MKO10079307_B_Crip1
  gRNA
gctgagcgagtgacttcact

SEQ ID NO: 79308 - DNA, 20 bp, Artificial Sequence
  MKO10079308_B_Crip2
  gRNA
tctagtgtcaccacattcac

SEQ ID NO: 79309 - DNA, 20 bp, Artificial Sequence
  MKO10079309_B_Crip2
  gRNA
tacactctcttgttgcatcg

SEQ ID NO: 79310 - DNA, 20 bp, Artificial Sequence
  MKO10079310_B_Crip2
  gRNA
acctttgggtccaaacagcg

SEQ ID NO: 79311 - DNA, 20 bp, Artificial Sequence
  MKO10079311_B_Crip3
  gRNA
ctctctgcaggggtcaacat

SEQ ID NO: 79312 - DNA, 20 bp, Artificial Sequence
  MKO10079312_B_Crip3
  gRNA
acggtgccagttcttgccta

SEQ ID NO: 79313 - DNA, 20 bp, Artificial Sequence
  MKO10079313_B_Crip3
  gRNA
ccaaagagagccccatagca

SEQ ID NO: 79314 - DNA, 20 bp, Artificial Sequence
  MKO10079314_B_Cript
  gRNA
ttctctaggtttgatccata

SEQ ID NO: 79315 - DNA, 20 bp, Artificial Sequence
  MKO10079315_B_Cript
  gRNA
aaacagtacctgtggtgttc

SEQ ID NO: 79316 - DNA, 20 bp, Artificial Sequence
  MKO10079316_B_Cript
  gRNA
ctttgacttcgaaaaaagca

SEQ ID NO: 79317 - DNA, 20 bp, Artificial Sequence
  MKO10079317_B_Crisp1
  gRNA
caaacataatagtatctcag

SEQ ID NO: 79318 - DNA, 20 bp, Artificial Sequence
  MKO10079318_B_Crisp1
  gRNA
gcacaaccaattgagacgaa

SEQ ID NO: 79319 - DNA, 20 bp, Artificial Sequence
  MKO10079319_B_Crisp1
  gRNA
ctcaagtgaatgctcagcaa

SEQ ID NO: 79320 - DNA, 20 bp, Artificial Sequence
  MKO10079320_B_Crisp2
  gRNA
tgtcaactgatcctaccctc

SEQ ID NO: 79321 - DNA, 20 bp, Artificial Sequence
  MKO10079321_B_Crisp2
  gRNA
atacttacataggacagtaa

SEQ ID NO: 79322 - DNA, 20 bp, Artificial Sequence
  MKO10079322_B_Crisp2
  gRNA
atatttcaggttgtcttgat

SEQ ID NO: 79323 - DNA, 20 bp, Artificial Sequence
  MKO10079323_B_Crisp3
  gRNA
tcaaatttacaagttgcatg

SEQ ID NO: 79324 - DNA, 20 bp, Artificial Sequence
  MKO10079324_B_Crisp3
  gRNA
caaacataaaagtatctcag

SEQ ID NO: 79325 - DNA, 20 bp, Artificial Sequence
  MKO10079325_B_Crisp3
  gRNA
gcacaaccaattgagacgaa

SEQ ID NO: 79326 - DNA, 20 bp, Artificial Sequence
  MKO10079326_B_Crisp4
  gRNA
tgcagcttgtcgcagacaaa

SEQ ID NO: 79327 - DNA, 20 bp, Artificial Sequence
  MKO10079327_B_Crisp4
  gRNA
ctgcaacatcacagccaacg

SEQ ID NO: 79328 - DNA, 20 bp, Artificial Sequence
  MKO10079328_B_Crisp4
  gRNA
agtttcgatgtcatcatctg

SEQ ID NO: 79329 - DNA, 20 bp, Artificial Sequence
  MKO10079329_B_Crispld1
  gRNA
tgtttgtacacactacactc

SEQ ID NO: 79330 - DNA, 20 bp, Artificial Sequence
  MKO10079330_B_Crispld1
  gRNA
tactgtcctttcagatgttc

SEQ ID NO: 79331 - DNA, 20 bp, Artificial Sequence
  MKO10079331_B_Crispld1
  gRNA
gcgagcctgctgccctccat

SEQ ID NO: 79332 - DNA, 20 bp, Artificial Sequence
  MKO10079332_B_Crispld2
  gRNA
ctgaacaatctttgccaccg

SEQ ID NO: 79333 - DNA, 20 bp, Artificial Sequence
  MKO10079333_B_Crispld2
  gRNA
acccccacgagtgcactcca

SEQ ID NO: 79334 - DNA, 20 bp, Artificial Sequence
  MKO10079334_B_Crispld2
  gRNA
gccggccttctgaggtccat

SEQ ID NO: 79335 - DNA, 20 bp, Artificial Sequence
  MKO10079335_B_Crkl
  gRNA
cttacgttgaaaagcttgtg

SEQ ID NO: 79336 - DNA, 20 bp, Artificial Sequence
  MKO10079336_B_Crkl
  gRNA
cattcacctcgccttcccat

SEQ ID NO: 79337 - DNA, 20 bp, Artificial Sequence
  MKO10079337_B_Crkl
  gRNA
cagcaatcactcgttgtcat

SEQ ID NO: 79338 - DNA, 20 bp, Artificial Sequence
  MKO10079338_B_Crk
  gRNA
gttgacgctgggttgggcat

SEQ ID NO: 79339 - DNA, 20 bp, Artificial Sequence
  MKO10079339_B_Crk
  gRNA
attcacacatgtccgtctgc

SEQ ID NO: 79340 - DNA, 20 bp, Artificial Sequence
  MKO10079340_B_Crk
  gRNA
cgtcctgcaggtcggtgagc

SEQ ID NO: 79341 - DNA, 20 bp, Artificial Sequence
  MKO10079341_B_Crlf1
  gRNA
gtggaagccaccaatcgcct

SEQ ID NO: 79342 - DNA, 20 bp, Artificial Sequence
  MKO10079342_B_Crlf1
  gRNA
cctccacaggtggtacggtc

SEQ ID NO: 79343 - DNA, 20 bp, Artificial Sequence
  MKO10079343_B_Crlf1
  gRNA
acgtgagatccttcatgttc

SEQ ID NO: 79344 - DNA, 20 bp, Artificial Sequence
  MKO10079344_B_Crlf2
  gRNA
cccggggcgacgcccgaacc

SEQ ID NO: 79345 - DNA, 20 bp, Artificial Sequence
  MKO10079345_B_Crlf2
  gRNA
gagacagtcacgtccccgtc

SEQ ID NO: 79346 - DNA, 20 bp, Artificial Sequence
  MKO10079346_B_Crlf2
  gRNA
aatatcgcgggcagggttgc

SEQ ID NO: 79347 - DNA, 20 bp, Artificial Sequence
  MKO10079347_B_Crlf3
  gRNA
cataccatgaggcaccagtg

SEQ ID NO: 79348 - DNA, 20 bp, Artificial Sequence
  MKO10079348_B_Crlf3
  gRNA
catcgcactatgatgcctcc

SEQ ID NO: 79349 - DNA, 20 bp, Artificial Sequence
  MKO10079349_B_Crlf3
  gRNA
caattcagagtctgcgcccg

SEQ ID NO: 79350 - DNA, 20 bp, Artificial Sequence
  MKO10079350_B_Crls1
  gRNA
ataccgaactctgccaacac

SEQ ID NO: 79351 - DNA, 20 bp, Artificial Sequence
  MKO10079351_B_Crls1
  gRNA
ttaccggtgttggcagagtt

SEQ ID NO: 79352 - DNA, 20 bp, Artificial Sequence
  MKO10079352_B_Crls1
  gRNA
acctatgcagatcttattcc

SEQ ID NO: 79353 - DNA, 20 bp, Artificial Sequence
  MKO10079353_B_Crmp1
  gRNA
tgatgcgtccacctctgatg

SEQ ID NO: 79354 - DNA, 20 bp, Artificial Sequence
  MKO10079354_B_Crmp1
  gRNA
ccttatacgccatgtagact

SEQ ID NO: 79355 - DNA, 20 bp, Artificial Sequence
  MKO10079355_B_Crmp1
  gRNA
gaccacgttgttcctgaacc

SEQ ID NO: 79356 - DNA, 20 bp, Artificial Sequence
  MKO10079356_B_Crnkl1
  gRNA
taccagaactggttgacgcg

SEQ ID NO: 79357 - DNA, 20 bp, Artificial Sequence
  MKO10079357_B_Crnkl1
  gRNA
ctcggccgttatctgcactt

SEQ ID NO: 79358 - DNA, 20 bp, Artificial Sequence
  MKO10079358_B_Crnkl1
  gRNA
actaccgaaatattaccctc

SEQ ID NO: 79359 - DNA, 20 bp, Artificial Sequence
  MKO10079359_B_Crnn
  gRNA
gtaccagagtgcaggctacc

SEQ ID NO: 79360 - DNA, 20 bp, Artificial Sequence
  MKO10079360_B_Crnn
  gRNA
gtgtgtagaagttacctgct

SEQ ID NO: 79361 - DNA, 20 bp, Artificial Sequence
  MKO10079361_B_Crnn
  gRNA
gtggctgcaaagtactcacg

SEQ ID NO: 79362 - DNA, 20 bp, Artificial Sequence
  MKO10079362_B_Crocc
  gRNA
tctgagcgaggacatacgca

SEQ ID NO: 79363 - DNA, 20 bp, Artificial Sequence
  MKO10079363_B_Crocc
  gRNA
tgactggacccgcagctgta

SEQ ID NO: 79364 - DNA, 20 bp, Artificial Sequence
  MKO10079364_B_Crocc
  gRNA
gggccagcaggtcctccacg

SEQ ID NO: 79365 - DNA, 20 bp, Artificial Sequence
  MKO10079365_B_Crot
  gRNA
tgtctttgatgtactacatg

SEQ ID NO: 79366 - DNA, 20 bp, Artificial Sequence
  MKO10079366_B_Crot
  gRNA
aaattgcctgtacataaatc

SEQ ID NO: 79367 - DNA, 20 bp, Artificial Sequence
  MKO10079367_B_Crot
  gRNA
tgtggcacaacttgaactac

SEQ ID NO: 79368 - DNA, 20 bp, Artificial Sequence
  MKO10079368_B_Crp
  gRNA
tgatcatgatcagcttctct

SEQ ID NO: 79369 - DNA, 20 bp, Artificial Sequence
  MKO10079369_B_Crp
  gRNA
tgcccgccagttcaaaacat

SEQ ID NO: 79370 - DNA, 20 bp, Artificial Sequence
  MKO10079370_B_Crp
  gRNA
tggtgctgaagtacgattca

SEQ ID NO: 79371 - DNA, 20 bp, Artificial Sequence
  MKO10079371_B_Crtac1
  gRNA
tgttcaaattccgaaataac

SEQ ID NO: 79372 - DNA, 20 bp, Artificial Sequence
  MKO10079372_B_Crtac1
  gRNA
cacatcaccataggcatagt

SEQ ID NO: 79373 - DNA, 20 bp, Artificial Sequence
  MKO10079373_B_Crtac1
  gRNA
ggacttcgagatcgttgtgg

SEQ ID NO: 79374 - DNA, 20 bp, Artificial Sequence
  MKO10079374_B_Crtam
  gRNA
agcccccgccacaaatcacc

SEQ ID NO: 79375 - DNA, 20 bp, Artificial Sequence
  MKO10079375_B_Crtam
  gRNA
caagtgagagtgaccgtgtt

SEQ ID NO: 79376 - DNA, 20 bp, Artificial Sequence
  MKO10079376_B_Crtam
  gRNA
caaaaaacgtctctctccag

SEQ ID NO: 79377 - DNA, 20 bp, Artificial Sequence
  MKO10079377_B_Crtap
  gRNA
ggcactcgtagaaggccttg

SEQ ID NO: 79378 - DNA, 20 bp, Artificial Sequence
  MKO10079378_B_Crtap
  gRNA
ggagtgtaagattcgttgtg

SEQ ID NO: 79379 - DNA, 20 bp, Artificial Sequence
  MKO10079379_B_Crtap
  gRNA
agcaggtagctgacggcaca

SEQ ID NO: 79380 - DNA, 20 bp, Artificial Sequence
  MKO10079380_B_Crtc1
  gRNA
cccagccgtggccagtacta

SEQ ID NO: 79381 - DNA, 20 bp, Artificial Sequence
  MKO10079381_B_Crtc1
  gRNA
gcagggacccaccgtagtac

SEQ ID NO: 79382 - DNA, 20 bp, Artificial Sequence
  MKO10079382_B_Crtc1
  gRNA
gtccttcacaggcgggtccc

SEQ ID NO: 79383 - DNA, 20 bp, Artificial Sequence
  MKO10079383_B_Crtc2
  gRNA
acaggcccaaaaactgcgac

SEQ ID NO: 79384 - DNA, 20 bp, Artificial Sequence
  MKO10079384_B_Crtc2
  gRNA
gactgccgtctgcacttaac

SEQ ID NO: 79385 - DNA, 20 bp, Artificial Sequence
  MKO10079385_B_Crtc2
  gRNA
tctatcctaggatgatgccc

SEQ ID NO: 79386 - DNA, 20 bp, Artificial Sequence
  MKO10079386_B_Crtc3
  gRNA
gcttccacccccttcaccga

SEQ ID NO: 79387 - DNA, 20 bp, Artificial Sequence
  MKO10079387_B_Crtc3
  gRNA
gcagatgttagcctgaatcc

SEQ ID NO: 79388 - DNA, 20 bp, Artificial Sequence
  MKO10079388_B_Crtc3
  gRNA
accgtggccagctctcatcc

SEQ ID NO: 79389 - DNA, 20 bp, Artificial Sequence
  MKO10079389_B_Crxos
  gRNA
ctcgtgatggaagaaatcga

SEQ ID NO: 79390 - DNA, 20 bp, Artificial Sequence
  MKO10079390_B_Crxos
  gRNA
gacagaccgttgccctaatg

SEQ ID NO: 79391 - DNA, 20 bp, Artificial Sequence
  MKO10079391_B_Crxos
  gRNA
gcctgcagcacagggctttg

SEQ ID NO: 79392 - DNA, 20 bp, Artificial Sequence
  MKO10079392_B_Crx
  gRNA
caatgtggacctgatgcacc

SEQ ID NO: 79393 - DNA, 20 bp, Artificial Sequence
  MKO10079393_B_Crx
  gRNA
catgatggcatatatgaacc

SEQ ID NO: 79394 - DNA, 20 bp, Artificial Sequence
  MKO10079394_B_Crx
  gRNA
gtttgccaagacccagtacc

SEQ ID NO: 79395 - DNA, 20 bp, Artificial Sequence
  MKO10079395_B_Cry1
  gRNA
attctcgtctgtttgtgatt

SEQ ID NO: 79396 - DNA, 20 bp, Artificial Sequence
  MKO10079396_B_Cry1
  gRNA
accatcacatcagatgtgat

SEQ ID NO: 79397 - DNA, 20 bp, Artificial Sequence
  MKO10079397_B_Cry1
  gRNA
agatgcagctatcaagaagc

SEQ ID NO: 79398 - DNA, 20 bp, Artificial Sequence
  MKO10079398_B_Cry2
  gRNA
attcgcgtctgtttgtagtc

SEQ ID NO: 79399 - DNA, 20 bp, Artificial Sequence
  MKO10079399_B_Cry2
  gRNA
cttacctgtctaggtcatag

SEQ ID NO: 79400 - DNA, 20 bp, Artificial Sequence
  MKO10079400_B_Cry2
  gRNA
tccgttccaagtgcttgtcc

SEQ ID NO: 79401 - DNA, 20 bp, Artificial Sequence
  MKO10079401_B_Cryaa
  gRNA
gcagcaggtcgtactcaaaa

SEQ ID NO: 79402 - DNA, 20 bp, Artificial Sequence
  MKO10079402_B_Cryaa
  gRNA
ggtagcgacggtgaaattca

SEQ ID NO: 79403 - DNA, 20 bp, Artificial Sequence
  MKO10079403_B_Cryaa
  gRNA
gtgaggccagctcaggacga

SEQ ID NO: 79404 - DNA, 20 bp, Artificial Sequence
  MKO10079404_B_Cryab
  gRNA
tgagaggatccacatcggct

SEQ ID NO: 79405 - DNA, 20 bp, Artificial Sequence
  MKO10079405_B_Cryab
  gRNA
gaagaaggggcgccggatcc

SEQ ID NO: 79406 - DNA, 20 bp, Artificial Sequence
  MKO10079406_B_Cryab
  gRNA
gtaccggatcccagccgatg

SEQ ID NO: 79407 - DNA, 20 bp, Artificial Sequence
  MKO10079407_B_Cryba1
  gRNA
ctacgatcaagagaacttcc

SEQ ID NO: 79408 - DNA, 20 bp, Artificial Sequence
  MKO10079408_B_Cryba1
  gRNA
cacactccaccttaagtgac

SEQ ID NO: 79409 - DNA, 20 bp, Artificial Sequence
  MKO10079409_B_Cryba1
  gRNA
aaagttctctttctcgaaga

SEQ ID NO: 79410 - DNA, 20 bp, Artificial Sequence
  MKO10079410_B_Cryba2
  gRNA
cgcccgtttgcctcacactc

SEQ ID NO: 79411 - DNA, 20 bp, Artificial Sequence
  MKO10079411_B_Cryba2
  gRNA
ctaatgctggactcttcgaa

SEQ ID NO: 79412 - DNA, 20 bp, Artificial Sequence
  MKO10079412_B_Cryba2
  gRNA
cagccgcgtgacactgtttg

SEQ ID NO: 79413 - DNA, 20 bp, Artificial Sequence
  MKO10079413_B_Cryba4
  gRNA
cttacgccccagattgaaca

SEQ ID NO: 79414 - DNA, 20 bp, Artificial Sequence
  MKO10079414_B_Cryba4
  gRNA
gacagactcacgctccgctc

SEQ ID NO: 79415 - DNA, 20 bp, Artificial Sequence
  MKO10079415_B_Cryba4
  gRNA
aagaaggcttccagggccga

SEQ ID NO: 79416 - DNA, 20 bp, Artificial Sequence
  MKO10079416_B_Crybb1
  gRNA
agcctggcgacttccggcac

SEQ ID NO: 79417 - DNA, 20 bp, Artificial Sequence
  MKO10079417_B_Crybb1
  gRNA
tttgagcaatctgccttccg

SEQ ID NO: 79418 - DNA, 20 bp, Artificial Sequence
  MKO10079418_B_Crybb1
  gRNA
gcaccgggaagcagccctct

SEQ ID NO: 79419 - DNA, 20 bp, Artificial Sequence
  MKO10079419_B_Crybb2
  gRNA
tgcgacgcacagactgcacc

SEQ ID NO: 79420 - DNA, 20 bp, Artificial Sequence
  MKO10079420_B_Crybb2
  gRNA
aaggggcttaccactttgat

SEQ ID NO: 79421 - DNA, 20 bp, Artificial Sequence
  MKO10079421_B_Crybb2
  gRNA
ccagatcatcatcttcgaac

SEQ ID NO: 79422 - DNA, 20 bp, Artificial Sequence
  MKO10079422_B_Crybb3
  gRNA
cttacgtcccgttgatgaca

SEQ ID NO: 79423 - DNA, 20 bp, Artificial Sequence
  MKO10079423_B_Crybb3
  gRNA
ggcgccagtacgtgttcgag

SEQ ID NO: 79424 - DNA, 20 bp, Artificial Sequence
  MKO10079424_B_Crybb3
  gRNA
ctcacggtccagactccact

SEQ ID NO: 79425 - DNA, 20 bp, Artificial Sequence
  MKO10079425_B_Crybg3
  gRNA
acatccgtcactgtgaagtc

SEQ ID NO: 79426 - DNA, 20 bp, Artificial Sequence
  MKO10079426_B_Crybg3
  gRNA
acatccctgatgctacaaca

SEQ ID NO: 79427 - DNA, 20 bp, Artificial Sequence
  MKO10079427_B_Crybg3
  gRNA
gggcactgataaaagttgta

SEQ ID NO: 79428 - DNA, 20 bp, Artificial Sequence
  MKO10079428_B_Cryga
  gRNA
tactcacgtatggaatggaa

SEQ ID NO: 79429 - DNA, 20 bp, Artificial Sequence
  MKO10079429_B_Cryga
  gRNA
gcagccctccagcacgtgca

SEQ ID NO: 79430 - DNA, 20 bp, Artificial Sequence
  MKO10079430_B_Cryga
  gRNA
ccgtctcagagagccgacct

SEQ ID NO: 79431 - DNA, 20 bp, Artificial Sequence
  MKO10079431_B_Crygb
  gRNA
cttacagatcaccttcttcg

SEQ ID NO: 79432 - DNA, 20 bp, Artificial Sequence
  MKO10079432_B_Crygb
  gRNA
acggcagtacctgctaaggc

SEQ ID NO: 79433 - DNA, 20 bp, Artificial Sequence
  MKO10079433_B_Crygb
  gRNA
agatatctcctgtactcccc

SEQ ID NO: 79434 - DNA, 20 bp, Artificial Sequence
  MKO10079434_B_Crygc
  gRNA
caggactcacatgggggatg

SEQ ID NO: 79435 - DNA, 20 bp, Artificial Sequence
  MKO10079435_B_Crygc
  gRNA
gcagcgagcgcacctcactg

SEQ ID NO: 79436 - DNA, 20 bp, Artificial Sequence
  MKO10079436_B_Crygc
  gRNA
tctcatacagccgcattctg

SEQ ID NO: 79437 - DNA, 20 bp, Artificial Sequence
  MKO10079437_B_Crygd
  gRNA
ctatgagcagcccaacttca

SEQ ID NO: 79438 - DNA, 20 bp, Artificial Sequence
  MKO10079438_B_Crygd
  gRNA
ctactccctcaatgtgctag

SEQ ID NO: 79439 - DNA, 20 bp, Artificial Sequence
  MKO10079439_B_Crygd
  gRNA
cctgccaggccggctctcac

SEQ ID NO: 79440 - DNA, 20 bp, Artificial Sequence
  MKO10079440_B_Cryge
  gRNA
cttacagatcaccttctatg

SEQ ID NO: 79441 - DNA, 20 bp, Artificial Sequence
  MKO10079441_B_Cryge
  gRNA
tgtactccccaggcctgagc

SEQ ID NO: 79442 - DNA, 20 bp, Artificial Sequence
  MKO10079442_B_Cryge
  gRNA
cggcagtacctgctcaggcc

SEQ ID NO: 79443 - DNA, 20 bp, Artificial Sequence
  MKO10079443_B_Crygf
  gRNA
agaaactcacgtgggggatg

SEQ ID NO: 79444 - DNA, 20 bp, Artificial Sequence
  MKO10079444_B_Crygf
  gRNA
cgtctgtgatctccaccatc

SEQ ID NO: 79445 - DNA, 20 bp, Artificial Sequence
  MKO10079445_B_Crygf
  gRNA
gatcctgatcctgtgagaag

SEQ ID NO: 79446 - DNA, 20 bp, Artificial Sequence
  MKO10079446_B_Crygn
  gRNA
ctttcccgagcgttgcgcca

SEQ ID NO: 79447 - DNA, 20 bp, Artificial Sequence
  MKO10079447_B_Crygn
  gRNA
atacaccatggcgcaacgct

SEQ ID NO: 79448 - DNA, 20 bp, Artificial Sequence
  MKO10079448_B_Crygn
  gRNA
ggcagtcctccacgaactct

SEQ ID NO: 79449 - DNA, 20 bp, Artificial Sequence
  MKO10079449_B_Crygs
  gRNA
agtaccctgaataccagcgt

SEQ ID NO: 79450 - DNA, 20 bp, Artificial Sequence
  MKO10079450_B_Crygs
  gRNA
gcacatacaatgtctaaaac

SEQ ID NO: 79451 - DNA, 20 bp, Artificial Sequence
  MKO10079451_B_Crygs
  gRNA
cggtcagatgtacgaaacca

SEQ ID NO: 79452 - DNA, 20 bp, Artificial Sequence
  MKO10079452_B_Cryl1
  gRNA
cagctgccgctctgcgctca

SEQ ID NO: 79453 - DNA, 20 bp, Artificial Sequence
  MKO10079453_B_Cryl1
  gRNA
cacagcgccctctactgctt

SEQ ID NO: 79454 - DNA, 20 bp, Artificial Sequence
  MKO10079454_B_Cryl1
  gRNA
acagcagataacagacgccc

SEQ ID NO: 79455 - DNA, 20 bp, Artificial Sequence
  MKO10079455_B_Crym
  gRNA
aagccgggggctcacatcaa

SEQ ID NO: 79456 - DNA, 20 bp, Artificial Sequence
  MKO10079456_B_Crym
  gRNA
aggggaccgctgtgttgctg

SEQ ID NO: 79457 - DNA, 20 bp, Artificial Sequence
  MKO10079457_B_Crym
  gRNA
tcgggtctgttcatcagtgc

SEQ ID NO: 79458 - DNA, 20 bp, Artificial Sequence
  MKO10079458_B_Cryzl1
  gRNA
ccagaaacttctcttccaac

SEQ ID NO: 79459 - DNA, 20 bp, Artificial Sequence
  MKO10079459_B_Cryzl1
  gRNA
cccgtacctttgtgtttatg

SEQ ID NO: 79460 - DNA, 20 bp, Artificial Sequence
  MKO10079460_B_Cryzl1
  gRNA
cctgttggaagagaagtttc

SEQ ID NO: 79461 - DNA, 20 bp, Artificial Sequence
  MKO10079461_B_Cryz
  gRNA
cagggggtagatagtgtcat

SEQ ID NO: 79462 - DNA, 20 bp, Artificial Sequence
  MKO10079462_B_Cryz
  gRNA
ctaatcaaagtccacgcctg

SEQ ID NO: 79463 - DNA, 20 bp, Artificial Sequence
  MKO10079463_B_Cryz
  gRNA
tgcagtgcccgtgctcgagc

SEQ ID NO: 79464 - DNA, 20 bp, Artificial Sequence
  MKO10079464_B_Csad
  gRNA
agcagatcctggagcgctgc

SEQ ID NO: 79465 - DNA, 20 bp, Artificial Sequence
  MKO10079465_B_Csad
  gRNA
caacatgtacgccatgaacc

SEQ ID NO: 79466 - DNA, 20 bp, Artificial Sequence
  MKO10079466_B_Csad
  gRNA
ctgaaagcgggccaggttca

SEQ ID NO: 79467 - DNA, 20 bp, Artificial Sequence
  MKO10079467_B_Csdc2
  gRNA
cttacagacgcccttgaaca

SEQ ID NO: 79468 - DNA, 20 bp, Artificial Sequence
  MKO10079468_B_Csdc2
  gRNA
tctcaggcgtgatgaagccg

SEQ ID NO: 79469 - DNA, 20 bp, Artificial Sequence
  MKO10079469_B_Csdc2
  gRNA
ggggatgggacaaatcttgt

SEQ ID NO: 79470 - DNA, 20 bp, Artificial Sequence
  MKO10079470_B_Csde1
  gRNA
tgtccgttcattcgttcttc

SEQ ID NO: 79471 - DNA, 20 bp, Artificial Sequence
  MKO10079471_B_Csde1
  gRNA
aatttgaagtatcatctgac

SEQ ID NO: 79472 - DNA, 20 bp, Artificial Sequence
  MKO10079472_B_Csde1
  gRNA
attcccttccacatcttcag

SEQ ID NO: 79473 - DNA, 20 bp, Artificial Sequence
  MKO10079473_B_Cse1l
  gRNA
accttgaatagattagtcaa

SEQ ID NO: 79474 - DNA, 20 bp, Artificial Sequence
  MKO10079474_B_Cse1l
  gRNA
cagcatcagatgcactatgt

SEQ ID NO: 79475 - DNA, 20 bp, Artificial Sequence
  MKO10079475_B_Cse1l
  gRNA
gcctttgactaatctattca

SEQ ID NO: 79476 - DNA, 20 bp, Artificial Sequence
  MKO10079476_B_Csf1r
  gRNA
ttcaacgttatcctcaaacg

SEQ ID NO: 79477 - DNA, 20 bp, Artificial Sequence
  MKO10079477_B_Csf1r
  gRNA
gctgtggacttccaagacgc

SEQ ID NO: 79478 - DNA, 20 bp, Artificial Sequence
  MKO10079478_B_Csf1r
  gRNA
tttgaaggtcgcgtttcttg

SEQ ID NO: 79479 - DNA, 20 bp, Artificial Sequence
  MKO10079479_B_Csf1
  gRNA
gagttcctggagcctctcgg

SEQ ID NO: 79480 - DNA, 20 bp, Artificial Sequence
  MKO10079480_B_Csf1
  gRNA
ggtgtccattcccaatcatg

SEQ ID NO: 79481 - DNA, 20 bp, Artificial Sequence
  MKO10079481_B_Csf1
  gRNA
gaacactgtagccacatgat

SEQ ID NO: 79482 - DNA, 20 bp, Artificial Sequence
  MKO10079482_B_Csf2ra
  gRNA
tgcgaacgacttgtcactgc

SEQ ID NO: 79483 - DNA, 20 bp, Artificial Sequence
  MKO10079483_B_Csf2ra
  gRNA
tcgtagccaccacgtcgtcc

SEQ ID NO: 79484 - DNA, 20 bp, Artificial Sequence
  MKO10079484_B_Csf2ra
  gRNA
ccccgcctcccgcgaggtca

SEQ ID NO: 79485 - DNA, 20 bp, Artificial Sequence
  MKO10079485_B_Csf2rb2
  gRNA
ccaaccgtatcatctgcagc

SEQ ID NO: 79486 - DNA, 20 bp, Artificial Sequence
  MKO10079486_B_Csf2rb2
  gRNA
gagatacactccattccagc

SEQ ID NO: 79487 - DNA, 20 bp, Artificial Sequence
  MKO10079487_B_Csf2rb2
  gRNA
acatccacatcagcccctct

SEQ ID NO: 79488 - DNA, 20 bp, Artificial Sequence
  MKO10079488_B_Csf2rb
  gRNA
ggagctgatgctgacgttct

SEQ ID NO: 79489 - DNA, 20 bp, Artificial Sequence
  MKO10079489_B_Csf2rb
  gRNA
ctcccagacaagcttgaacc

SEQ ID NO: 79490 - DNA, 20 bp, Artificial Sequence
  MKO10079490_B_Csf2rb
  gRNA
ccgcccagctgcagatgatg

SEQ ID NO: 79491 - DNA, 20 bp, Artificial Sequence
  MKO10079491_B_Csf2
  gRNA
ccctcactcaccaacgtgac

SEQ ID NO: 79492 - DNA, 20 bp, Artificial Sequence
  MKO10079492_B_Csf2
  gRNA
aacacaagttaccacctatg

SEQ ID NO: 79493 - DNA, 20 bp, Artificial Sequence
  MKO10079493_B_Csf2
  gRNA
ggctgtagaccacaatgccc

SEQ ID NO: 79494 - DNA, 20 bp, Artificial Sequence
  MKO10079494_B_Csf3r
  gRNA
cgctaccagccacagctcaa

SEQ ID NO: 79495 - DNA, 20 bp, Artificial Sequence
  MKO10079495_B_Csf3r
  gRNA
cgtgaagctcagcttgatcc

SEQ ID NO: 79496 - DNA, 20 bp, Artificial Sequence
  MKO10079496_B_Csf3r
  gRNA
gcttcatcctaaagagcttc

SEQ ID NO: 79497 - DNA, 20 bp, Artificial Sequence
  MKO10079497_B_Csf3
  gRNA
tgcactatggtcaggacgag

SEQ ID NO: 79498 - DNA, 20 bp, Artificial Sequence
  MKO10079498_B_Csf3
  gRNA
aaatacccgatagagcctgc

SEQ ID NO: 79499 - DNA, 20 bp, Artificial Sequence
  MKO10079499_B_Csf3
  gRNA
gcagagcgctgacagtgacc

SEQ ID NO: 79500 - DNA, 20 bp, Artificial Sequence
  MKO10079500_B_Csgalnact1
  gRNA
gtcgaaataggacaagtcgc

SEQ ID NO: 79501 - DNA, 20 bp, Artificial Sequence
  MKO10079501_B_Csgalnact1
  gRNA
tgttggagcccgcttctgga

SEQ ID NO: 79502 - DNA, 20 bp, Artificial Sequence
  MKO10079502_B_Csgalnact1
  gRNA
attctcccggggaaagggac

SEQ ID NO: 79503 - DNA, 20 bp, Artificial Sequence
  MKO10079503_B_Csgalnact2
  gRNA
taatatcattgtgccacttg

SEQ ID NO: 79504 - DNA, 20 bp, Artificial Sequence
  MKO10079504_B_Csgalnact2
  gRNA
gtcctggttggcatagacaa

SEQ ID NO: 79505 - DNA, 20 bp, Artificial Sequence
  MKO10079505_B_Csgalnact2
  gRNA
tgccattgtctatgccaacc

SEQ ID NO: 79506 - DNA, 20 bp, Artificial Sequence
  MKO10079506_B_Csk
  gRNA
caactatgtccagaagcgtg

SEQ ID NO: 79507 - DNA, 20 bp, Artificial Sequence
  MKO10079507_B_Csk
  gRNA
cactcgcctcatcaaaccaa

SEQ ID NO: 79508 - DNA, 20 bp, Artificial Sequence
  MKO10079508_B_Csk
  gRNA
taccttggtgacagccacga

SEQ ID NO: 79509 - DNA, 20 bp, Artificial Sequence
  MKO10079509_B_Csl
  gRNA
cagcacgtctttcaagttcg

SEQ ID NO: 79510 - DNA, 20 bp, Artificial Sequence
  MKO10079510_B_Csl
  gRNA
ccagtccagcttagagtcaa

SEQ ID NO: 79511 - DNA, 20 bp, Artificial Sequence
  MKO10079511_B_Csl
  gRNA
tcattccctgcgcatatgcc

SEQ ID NO: 79512 - DNA, 20 bp, Artificial Sequence
  MKO10079512_B_Csmd1
  gRNA
acaataatgccgactgcacg

SEQ ID NO: 79513 - DNA, 20 bp, Artificial Sequence
  MKO10079513_B_Csmd1
  gRNA
tccccttagggttcccccgc

SEQ ID NO: 79514 - DNA, 20 bp, Artificial Sequence
  MKO10079514_B_Csmd1
  gRNA
gcatagttggggtacccatg

SEQ ID NO: 79515 - DNA, 20 bp, Artificial Sequence
  MKO10079515_B_Csmd2os
  gRNA
aagctgagaacgggctgacc

SEQ ID NO: 79516 - DNA, 20 bp, Artificial Sequence
  MKO10079516_B_Csmd2os
  gRNA
tgcatttctagcagtgtcca

SEQ ID NO: 79517 - DNA, 20 bp, Artificial Sequence
  MKO10079517_B_Csmd2os
  gRNA
acaagaccacgctcctgcag

SEQ ID NO: 79518 - DNA, 20 bp, Artificial Sequence
  MKO10079518_B_Csmd2
  gRNA
cccacagcggatgacgcctg

SEQ ID NO: 79519 - DNA, 20 bp, Artificial Sequence
  MKO10079519_B_Csmd2
  gRNA
gctccgagaacagtgccacg

SEQ ID NO: 79520 - DNA, 20 bp, Artificial Sequence
  MKO10079520_B_Csmd2
  gRNA
gttcttccgagtcacacttg

SEQ ID NO: 79521 - DNA, 20 bp, Artificial Sequence
  MKO10079521_B_Csmd3
  gRNA
ttcattaggaaaacccgggc

SEQ ID NO: 79522 - DNA, 20 bp, Artificial Sequence
  MKO10079522_B_Csmd3
  gRNA
atccagttacacagctgtag

SEQ ID NO: 79523 - DNA, 20 bp, Artificial Sequence
  MKO10079523_B_Csmd3
  gRNA
tccacttaccatattgtagg

SEQ ID NO: 79524 - DNA, 20 bp, Artificial Sequence
  MKO10079524_B_Csn1s1
  gRNA
gcaacagcatagcagcagtg

SEQ ID NO: 79525 - DNA, 20 bp, Artificial Sequence
  MKO10079525_B_Csn1s2a
  gRNA
tcatctgccagcatctaccc

SEQ ID NO: 79526 - DNA, 20 bp, Artificial Sequence
  MKO10079526_B_Csn1s2a
  gRNA
acttactcctgggtagatgc

SEQ ID NO: 79527 - DNA, 20 bp, Artificial Sequence
  MKO10079527_B_Csn1s2b
  gRNA
gtagaactttaagcagaata

SEQ ID NO: 79528 - DNA, 20 bp, Artificial Sequence
  MKO10079528_B_Csn1s2b
  gRNA
gaacatttacattccccaaa

SEQ ID NO: 79529 - DNA, 20 bp, Artificial Sequence
  MKO10079529_B_Csn2
  gRNA
tacatttactgtatcctctg

SEQ ID NO: 79530 - DNA, 20 bp, Artificial Sequence
  MKO10079530_B_Csn2
  gRNA
gaatctcatgggacagctgc

SEQ ID NO: 79531 - DNA, 20 bp, Artificial Sequence
  MKO10079531_B_Csn3
  gRNA
tatcgtagttgtgaatattc

SEQ ID NO: 79532 - DNA, 20 bp, Artificial Sequence
  MKO10079532_B_Csn3
  gRNA
atgtatgggctagcagtagc

SEQ ID NO: 79533 - DNA, 20 bp, Artificial Sequence
  MKO10079533_B_Csn3
  gRNA
ggcctgtagtggtagtaatt

SEQ ID NO: 79534 - DNA, 20 bp, Artificial Sequence
  MKO10079534_B_Csnk1a1
  gRNA
tattgggcgtcactgtaata

SEQ ID NO: 79535 - DNA, 20 bp, Artificial Sequence
  MKO10079535_B_Csnk1a1
  gRNA
ctggtcagctaacataagta

SEQ ID NO: 79536 - DNA, 20 bp, Artificial Sequence
  MKO10079536_B_Csnk1a1
  gRNA
agtgacgcccaatacccatt

SEQ ID NO: 79537 - DNA, 20 bp, Artificial Sequence
  MKO10079537_B_Csnk1d
  gRNA
gcgtgcatcccgatacttct

SEQ ID NO: 79538 - DNA, 20 bp, Artificial Sequence
  MKO10079538_B_Csnk1d
  gRNA
gtaaggtacggacattgctg

SEQ ID NO: 79539 - DNA, 20 bp, Artificial Sequence
  MKO10079539_B_Csnk1d
  gRNA
tgggcatccctaccatcaga

SEQ ID NO: 79540 - DNA, 20 bp, Artificial Sequence
  MKO10079540_B_Csnk1e
  gRNA
tggggatcccgtccatcaag

SEQ ID NO: 79541 - DNA, 20 bp, Artificial Sequence
  MKO10079541_B_Csnk1e
  gRNA
gctggtgtgtgcgggcatcg

SEQ ID NO: 79542 - DNA, 20 bp, Artificial Sequence
  MKO10079542_B_Csnk1e
  gRNA
agttgtcgggcttcacatcc

SEQ ID NO: 79543 - DNA, 20 bp, Artificial Sequence
  MKO10079543_B_Csnk1g1
  gRNA
agagagcacaaaagtttgac

SEQ ID NO: 79544 - DNA, 20 bp, Artificial Sequence
  MKO10079544_B_Csnk1g1
  gRNA
ctgtactctaaatgaagttg

SEQ ID NO: 79545 - DNA, 20 bp, Artificial Sequence
  MKO10079545_B_Csnk1g1
  gRNA
tgaatatgtagccattaaac

SEQ ID NO: 79546 - DNA, 20 bp, Artificial Sequence
  MKO10079546_B_Csnk1g2
  gRNA
ttgggcggccgggcagcaag

SEQ ID NO: 79547 - DNA, 20 bp, Artificial Sequence
  MKO10079547_B_Csnk1g2
  gRNA
cgcaggagcccatcaagtcc

SEQ ID NO: 79548 - DNA, 20 bp, Artificial Sequence
  MKO10079548_B_Csnk1g2
  gRNA
tacaagcagctcagcacgac

SEQ ID NO: 79549 - DNA, 20 bp, Artificial Sequence
  MKO10079549_B_Csnk1g3
  gRNA
tacagattctataagcagtt

SEQ ID NO: 79550 - DNA, 20 bp, Artificial Sequence
  MKO10079550_B_Csnk1g3
  gRNA
cagagcaccacagctgcatt

SEQ ID NO: 79551 - DNA, 20 bp, Artificial Sequence
  MKO10079551_B_Csnk1g3
  gRNA
tttatacacaaatgaatatg

SEQ ID NO: 79552 - DNA, 20 bp, Artificial Sequence
  MKO10079552_B_Csnk2a1
  gRNA
tgtaaacaacacagacttca

SEQ ID NO: 79553 - DNA, 20 bp, Artificial Sequence
  MKO10079553_B_Csnk2a1
  gRNA
tatcagcttgttcgaaaatt

SEQ ID NO: 79554 - DNA, 20 bp, Artificial Sequence
  MKO10079554_B_Csnk2a1
  gRNA
gtctgcaagtgtgatgatgt

SEQ ID NO: 79555 - DNA, 20 bp, Artificial Sequence
  MKO10079555_B_Csnk2a2
  gRNA
taatcaagatgattaccaac

SEQ ID NO: 79556 - DNA, 20 bp, Artificial Sequence
  MKO10079556_B_Csnk2a2
  gRNA
tacaaccaccctctcattgt

SEQ ID NO: 79557 - DNA, 20 bp, Artificial Sequence
  MKO10079557_B_Csnk2a2
  gRNA
tcagtcaaagacaccagctt

SEQ ID NO: 79558 - DNA, 20 bp, Artificial Sequence
  MKO10079558_B_Csnk2b
  gRNA
gcctcactatcgacaagctc

SEQ ID NO: 79559 - DNA, 20 bp, Artificial Sequence
  MKO10079559_B_Csnk2b
  gRNA
cctgttcgatcaagtcgctc

SEQ ID NO: 79560 - DNA, 20 bp, Artificial Sequence
  MKO10079560_B_Csnk2b
  gRNA
tccagagcttgtcgatagtg

SEQ ID NO: 79561 - DNA, 20 bp, Artificial Sequence
  MKO10079561_B_Csnka2ip
  gRNA
aagagccccagtctattgac

SEQ ID NO: 79562 - DNA, 20 bp, Artificial Sequence
  MKO10079562_B_Csnka2ip
  gRNA
ttcgagttgtgagacctcac

SEQ ID NO: 79563 - DNA, 20 bp, Artificial Sequence
  MKO10079563_B_Csnka2ip
  gRNA
accggagtgggatctaccca

SEQ ID NO: 79564 - DNA, 20 bp, Artificial Sequence
  MKO10079564_B_Cspg4
  gRNA
atcaccaggtagccggcgtt

SEQ ID NO: 79565 - DNA, 20 bp, Artificial Sequence
  MKO10079565_B_Cspg4
  gRNA
gctcctctgctgaagcgccg

SEQ ID NO: 79566 - DNA, 20 bp, Artificial Sequence
  MKO10079566_B_Cspg4
  gRNA
cacttccatcatgcacgtag

SEQ ID NO: 79567 - DNA, 20 bp, Artificial Sequence
  MKO10079567_B_Cspg5
  gRNA
tccttgtaggtgtaacaccc

SEQ ID NO: 79568 - DNA, 20 bp, Artificial Sequence
  MKO10079568_B_Cspg5
  gRNA
agttcacccccaagtcatcc

SEQ ID NO: 79569 - DNA, 20 bp, Artificial Sequence
  MKO10079569_B_Cspg5
  gRNA
cagcgctccccacaaaatcc

SEQ ID NO: 79570 - DNA, 20 bp, Artificial Sequence
  MKO10079570_B_Cspp1
  gRNA
tgttcataatcttctccaag

SEQ ID NO: 79571 - DNA, 20 bp, Artificial Sequence
  MKO10079571_B_Cspp1
  gRNA
tgaaacagacccatctactc

SEQ ID NO: 79572 - DNA, 20 bp, Artificial Sequence
  MKO10079572_B_Cspp1
  gRNA
gagaatacaatcagtttctc

SEQ ID NO: 79573 - DNA, 20 bp, Artificial Sequence
  MKO10079573_B_Csprs
  gRNA
gaccactgctcagctgtcag

SEQ ID NO: 79574 - DNA, 20 bp, Artificial Sequence
  MKO10079574_B_Csprs
  gRNA
acagtcatactcaagaatgt

SEQ ID NO: 79575 - DNA, 20 bp, Artificial Sequence
  MKO10079575_B_Csprs
  gRNA
aagaatgacagataaaagaa

SEQ ID NO: 79576 - DNA, 20 bp, Artificial Sequence
  MKO10079576_B_Csrnp1
  gRNA
ttcgaacgccggaagcccga

SEQ ID NO: 79577 - DNA, 20 bp, Artificial Sequence
  MKO10079577_B_Csrnp1
  gRNA
attgaattccactcgaccat

SEQ ID NO: 79578 - DNA, 20 bp, Artificial Sequence
  MKO10079578_B_Csrnp1
  gRNA
gctcccgaggagcccgcttc

SEQ ID NO: 79579 - DNA, 20 bp, Artificial Sequence
  MKO10079579_B_Csrnp2
  gRNA
gctgtccgcactatcactgc

SEQ ID NO: 79580 - DNA, 20 bp, Artificial Sequence
  MKO10079580_B_Csrnp2
  gRNA
agaatgggggccgcgaggcc

SEQ ID NO: 79581 - DNA, 20 bp, Artificial Sequence
  MKO10079581_B_Csrnp2
  gRNA
aagccaatggatgcgttctc

SEQ ID NO: 79582 - DNA, 20 bp, Artificial Sequence
  MKO10079582_B_Csrnp3
  gRNA
aatctcgaaattgtctgcga

SEQ ID NO: 79583 - DNA, 20 bp, Artificial Sequence
  MKO10079583_B_Csrnp3
  gRNA
ttccgatgacgatattgatc

SEQ ID NO: 79584 - DNA, 20 bp, Artificial Sequence
  MKO10079584_B_Csrnp3
  gRNA
ctcacgggtgaagtgatttg

SEQ ID NO: 79585 - DNA, 20 bp, Artificial Sequence
  MKO10079585_B_Csrp1
  gRNA
tcggaagcaggacttatgcc

SEQ ID NO: 79586 - DNA, 20 bp, Artificial Sequence
  MKO10079586_B_Csrp1
  gRNA
gcgctgtccccgctgtagcc

SEQ ID NO: 79587 - DNA, 20 bp, Artificial Sequence
  MKO10079587_B_Csrp1
  gRNA
atctattgcaagtcatgtta

SEQ ID NO: 79588 - DNA, 20 bp, Artificial Sequence
  MKO10079588_B_Csrp2bp
  gRNA
agccctgtttatttccggtc

SEQ ID NO: 79589 - DNA, 20 bp, Artificial Sequence
  MKO10079589_B_Csrp2bp
  gRNA
tgaaaaagttatcgcccttc

SEQ ID NO: 79590 - DNA, 20 bp, Artificial Sequence
  MKO10079590_B_Csrp2bp
  gRNA
gtggacgtcaaggttatttc

SEQ ID NO: 79591 - DNA, 20 bp, Artificial Sequence
  MKO10079591_B_Csrp2
  gRNA
tatgctgcggagaagatcat

SEQ ID NO: 79592 - DNA, 20 bp, Artificial Sequence
  MKO10079592_B_Csrp2
  gRNA
ttgaccatagccaaatccct

SEQ ID NO: 79593 - DNA, 20 bp, Artificial Sequence
  MKO10079593_B_Csrp2
  gRNA
aagggatttggctatggtca

SEQ ID NO: 79594 - DNA, 20 bp, Artificial Sequence
  MKO10079594_B_Csrp3
  gRNA
gtcggtatacgctgctgaga

SEQ ID NO: 79595 - DNA, 20 bp, Artificial Sequence
  MKO10079595_B_Csrp3
  gRNA
cagtgacatttgtagactcc

SEQ ID NO: 79596 - DNA, 20 bp, Artificial Sequence
  MKO10079596_B_Csrp3
  gRNA
gtctacaaatgtcactgaca

SEQ ID NO: 79597 - DNA, 20 bp, Artificial Sequence
  MKO10079597_B_Cst10
  gRNA
gagcccctcgatgcctgtgt

SEQ ID NO: 79598 - DNA, 20 bp, Artificial Sequence
  MKO10079598_B_Cst10
  gRNA
tactacttgaaaattgagct

SEQ ID NO: 79599 - DNA, 20 bp, Artificial Sequence
  MKO10079599_B_Cst10
  gRNA
taccaaaactgagtctaatt

SEQ ID NO: 79600 - DNA, 20 bp, Artificial Sequence
  MKO10079600_B_Cst11
  gRNA
cgtacactgagaagtagcac

SEQ ID NO: 79601 - DNA, 20 bp, Artificial Sequence
  MKO10079601_B_Cst11
  gRNA
gctcgtctctgtcttcaagc

SEQ ID NO: 79602 - DNA, 20 bp, Artificial Sequence
  MKO10079602_B_Cst11
  gRNA
tctcagtgtacgccattccc

SEQ ID NO: 79603 - DNA, 20 bp, Artificial Sequence
  MKO10079603_B_Cst12
  gRNA
tgtaggcaaaatcgtcatcc

SEQ ID NO: 79604 - DNA, 20 bp, Artificial Sequence
  MKO10079604_B_Cst12
  gRNA
ggtacgctgcacttacattg

SEQ ID NO: 79605 - DNA, 20 bp, Artificial Sequence
  MKO10079605_B_Cst12
  gRNA
ccccacttaagtctgcacac

SEQ ID NO: 79606 - DNA, 20 bp, Artificial Sequence
  MKO10079606_B_Cst13
  gRNA
acaatgtgcaagaagattgc

SEQ ID NO: 79607 - DNA, 20 bp, Artificial Sequence
  MKO10079607_B_Cst13
  gRNA
ttattgttagctccaaacca

SEQ ID NO: 79608 - DNA, 20 bp, Artificial Sequence
  MKO10079608_B_Cst13
  gRNA
ggtggatatcctaaaatctc

SEQ ID NO: 79609 - DNA, 20 bp, Artificial Sequence
  MKO10079609_B_Cst3
  gRNA
gacagtcagtcaaatttgtc

SEQ ID NO: 79610 - DNA, 20 bp, Artificial Sequence
  MKO10079610_B_Cst3
  gRNA
tccagggcacgctgtagatc

SEQ ID NO: 79611 - DNA, 20 bp, Artificial Sequence
  MKO10079611_B_Cst3
  gRNA
aagtacctaccctcatcaga

SEQ ID NO: 79612 - DNA, 20 bp, Artificial Sequence
  MKO10079612_B_Cst6
  gRNA
tgccgaaagaccagagtctc

SEQ ID NO: 79613 - DNA, 20 bp, Artificial Sequence
  MKO10079613_B_Cst6
  gRNA
ttgagctccttgaagtcccc

SEQ ID NO: 79614 - DNA, 20 bp, Artificial Sequence
  MKO10079614_B_Cst6
  gRNA
aagctgagtagtgttcttcc

SEQ ID NO: 79615 - DNA, 20 bp, Artificial Sequence
  MKO10079615_B_Cst7
  gRNA
tatattgctactctgaagtc

SEQ ID NO: 79616 - DNA, 20 bp, Artificial Sequence
  MKO10079616_B_Cst7
  gRNA
acaatagagaccaataaccc

SEQ ID NO: 79617 - DNA, 20 bp, Artificial Sequence
  MKO10079617_B_Cst7
  gRNA
ctgcttacccgcttcaaggc

SEQ ID NO: 79618 - DNA, 20 bp, Artificial Sequence
  MKO10079618_B_Cst8
  gRNA
gaaaatgagttgcagctttc

SEQ ID NO: 79619 - DNA, 20 bp, Artificial Sequence
  MKO10079619_B_Cst8
  gRNA
gggagatctgaacatcaatt

SEQ ID NO: 79620 - DNA, 20 bp, Artificial Sequence
  MKO10079620_B_Cst8
  gRNA
ctttacattctttgctcaac

SEQ ID NO: 79621 - DNA, 20 bp, Artificial Sequence
  MKO10079621_B_Cst9
  gRNA
tgccgtgaacacattcaacc

SEQ ID NO: 79622 - DNA, 20 bp, Artificial Sequence
  MKO10079622_B_Cst9
  gRNA
gccttacattattcagacca

SEQ ID NO: 79623 - DNA, 20 bp, Artificial Sequence
  MKO10079623_B_Cst9
  gRNA
taacaaaattcaagctcttc

SEQ ID NO: 79624 - DNA, 20 bp, Artificial Sequence
  MKO10079624_B_Cstad
  gRNA
ctgcctggggaattctgtac

SEQ ID NO: 79625 - DNA, 20 bp, Artificial Sequence
  MKO10079625_B_Cstad
  gRNA
ggagctcagctgagccataa

SEQ ID NO: 79626 - DNA, 20 bp, Artificial Sequence
  MKO10079626_B_Cstad
  gRNA
cttccagtacagaattcccc

SEQ ID NO: 79627 - DNA, 20 bp, Artificial Sequence
  MKO10079627_B_Csta
  gRNA
tctttctggaaagaataatt

SEQ ID NO: 79628 - DNA, 20 bp, Artificial Sequence
  MKO10079628_B_Csta
  gRNA
atgtctttcagatggatgta

SEQ ID NO: 79629 - DNA, 20 bp, Artificial Sequence
  MKO10079629_B_Csta
  gRNA
gaatatttcatatttctcat

SEQ ID NO: 79630 - DNA, 20 bp, Artificial Sequence
  MKO10079630_B_Cstb
  gRNA
ttcctccaggttgatgttgg

SEQ ID NO: 79631 - DNA, 20 bp, Artificial Sequence
  MKO10079631_B_Cstb
  gRNA
tggcaccaacctcttcatca

SEQ ID NO: 79632 - DNA, 20 bp, Artificial Sequence
  MKO10079632_B_Cstb
  gRNA
atccttcaagagacagatag

SEQ ID NO: 79633 - DNA, 20 bp, Artificial Sequence
  MKO10079633_B_Cstf1
  gRNA
aaccgtgtcagagcgaccaa

SEQ ID NO: 79634 - DNA, 20 bp, Artificial Sequence
  MKO10079634_B_Cstf1
  gRNA
tcgtaaagagttcggatcac

SEQ ID NO: 79635 - DNA, 20 bp, Artificial Sequence
  MKO10079635_B_Cstf1
  gRNA
ccacgcggcacgggcctttg

SEQ ID NO: 79636 - DNA, 20 bp, Artificial Sequence
  MKO10079636_B_Cstf2t
  gRNA
cctagacctccgatgcctcg

SEQ ID NO: 79637 - DNA, 20 bp, Artificial Sequence
  MKO10079637_B_Cstf2t
  gRNA
tccgatgactggtggaatcc

SEQ ID NO: 79638 - DNA, 20 bp, Artificial Sequence
  MKO10079638_B_Cstf2t
  gRNA
tctctctatcgtagacgaga

SEQ ID NO: 79639 - DNA, 20 bp, Artificial Sequence
  MKO10079639_B_Cstf2
  gRNA
acgcccattcaagttccgca

SEQ ID NO: 79640 - DNA, 20 bp, Artificial Sequence
  MKO10079640_B_Cstf2
  gRNA
cctgtcatagagtcacctta

SEQ ID NO: 79641 - DNA, 20 bp, Artificial Sequence
  MKO10079641_B_Cstf2
  gRNA
gggctgatgctttctccata

SEQ ID NO: 79642 - DNA, 20 bp, Artificial Sequence
  MKO10079642_B_Cstf3
  gRNA
tgagaatgctccaagcatca

SEQ ID NO: 79643 - DNA, 20 bp, Artificial Sequence
  MKO10079643_B_Cstf3
  gRNA
cattctcattcgagaggcac

SEQ ID NO: 79644 - DNA, 20 bp, Artificial Sequence
  MKO10079644_B_Cstf3
  gRNA
gtcttccgtgctttgtctat

SEQ ID NO: 79645 - DNA, 20 bp, Artificial Sequence
  MKO10079645_B_Cstl1
  gRNA
cactgatatactctgtaccc

SEQ ID NO: 79646 - DNA, 20 bp, Artificial Sequence
  MKO10079646_B_Cstl1
  gRNA
tatttggttactgtgaagat

SEQ ID NO: 79647 - DNA, 20 bp, Artificial Sequence
  MKO10079647_B_Cstl1
  gRNA
cttctctgcagttgaccaca

SEQ ID NO: 79648 - DNA, 20 bp, Artificial Sequence
  MKO10079648_B_Cs
  gRNA
tcttaccgtggaagaagcac

SEQ ID NO: 79649 - DNA, 20 bp, Artificial Sequence
  MKO10079649_B_Cs
  gRNA
cagatgtacggtggcatgag

SEQ ID NO: 79650 - DNA, 20 bp, Artificial Sequence
  MKO10079650_B_Cs
  gRNA
cttcccatgttgctgcttga

SEQ ID NO: 79651 - DNA, 20 bp, Artificial Sequence
  MKO10079651_B_Ctag2
  gRNA
gttccgtaacagtgccgttc

SEQ ID NO: 79652 - DNA, 20 bp, Artificial Sequence
  MKO10079652_B_Ctag2
  gRNA
ttggtcaagaaaggcattga

SEQ ID NO: 79653 - DNA, 20 bp, Artificial Sequence
  MKO10079653_B_Ctag2
  gRNA
aaacattgcatgcagaaccc

SEQ ID NO: 79654 - DNA, 20 bp, Artificial Sequence
  MKO10079654_B_Ctage5
  gRNA
caattccaacgaaaaaccac

SEQ ID NO: 79655 - DNA, 20 bp, Artificial Sequence
  MKO10079655_B_Ctage5
  gRNA
acaacttacccacataaaat

SEQ ID NO: 79656 - DNA, 20 bp, Artificial Sequence
  MKO10079656_B_Ctage5
  gRNA
caaagtcagcattgttcaaa

SEQ ID NO: 79657 - DNA, 20 bp, Artificial Sequence
  MKO10079657_B_Ctbp1
  gRNA
cttagaatcatcgtccgaat

SEQ ID NO: 79658 - DNA, 20 bp, Artificial Sequence
  MKO10079658_B_Ctbp1
  gRNA
tgtcaaacccgctgccaatt

SEQ ID NO: 79659 - DNA, 20 bp, Artificial Sequence
  MKO10079659_B_Ctbp1
  gRNA
ggtgtagccaggtggttcgt

SEQ ID NO: 79660 - DNA, 20 bp, Artificial Sequence
  MKO10079660_B_Ctbp2
  gRNA
gcagggggccgttcatgatc

SEQ ID NO: 79661 - DNA, 20 bp, Artificial Sequence
  MKO10079661_B_Ctbp2
  gRNA
gctgttcgagccaaggcctt

SEQ ID NO: 79662 - DNA, 20 bp, Artificial Sequence
  MKO10079662_B_Ctbp2
  gRNA
tcaggagctgctcggatccg

SEQ ID NO: 79663 - DNA, 20 bp, Artificial Sequence
  MKO10079663_B_Ctbs
  gRNA
caccaaagcgcatagacaaa

SEQ ID NO: 79664 - DNA, 20 bp, Artificial Sequence
  MKO10079664_B_Ctbs
  gRNA
tgagcatagcacataagttc

SEQ ID NO: 79665 - DNA, 20 bp, Artificial Sequence
  MKO10079665_B_Ctbs
  gRNA
tagccctaagaaacttgtaa

SEQ ID NO: 79666 - DNA, 20 bp, Artificial Sequence
  MKO10079666_B_Ctc1
  gRNA
ttgcttgtgtgaaggagacg

SEQ ID NO: 79667 - DNA, 20 bp, Artificial Sequence
  MKO10079667_B_Ctc1
  gRNA
aaaattacctgtatctgagc

SEQ ID NO: 79668 - DNA, 20 bp, Artificial Sequence
  MKO10079668_B_Ctc1
  gRNA
taactctgcccttcagctac

SEQ ID NO: 79669 - DNA, 20 bp, Artificial Sequence
  MKO10079669_B_Ctcfl
  gRNA
gtgcaagtacgccagcgtcg

SEQ ID NO: 79670 - DNA, 20 bp, Artificial Sequence
  MKO10079670_B_Ctcfl
  gRNA
tcccggcacacttgtctgat

SEQ ID NO: 79671 - DNA, 20 bp, Artificial Sequence
  MKO10079671_B_Ctcfl
  gRNA
gcgtcacatccgctcacaca

SEQ ID NO: 79672 - DNA, 20 bp, Artificial Sequence
  MKO10079672_B_Ctcf
  gRNA
gacgatccaaatttgaacgc

SEQ ID NO: 79673 - DNA, 20 bp, Artificial Sequence
  MKO10079673_B_Ctcf
  gRNA
gtttgtgcagttatgccagc

SEQ ID NO: 79674 - DNA, 20 bp, Artificial Sequence
  MKO10079674_B_Ctcf
  gRNA
aatgttatatttgtcacgct

SEQ ID NO: 79675 - DNA, 20 bp, Artificial Sequence
  MKO10079675_B_Ctdnep1
  gRNA
tgtacataagaggccccatg

SEQ ID NO: 79676 - DNA, 20 bp, Artificial Sequence
  MKO10079676_B_Ctdnep1
  gRNA
taatagacaaacacccagtc

SEQ ID NO: 79677 - DNA, 20 bp, Artificial Sequence
  MKO10079677_B_Ctdnep1
  gRNA
ctctacttcaggtaagccag

SEQ ID NO: 79678 - DNA, 20 bp, Artificial Sequence
  MKO10079678_B_Ctdp1
  gRNA
aacgtgcagctcatacagct

SEQ ID NO: 79679 - DNA, 20 bp, Artificial Sequence
  MKO10079679_B_Ctdp1
  gRNA
ccatgctgcacacgcgcctg

SEQ ID NO: 79680 - DNA, 20 bp, Artificial Sequence
  MKO10079680_B_Ctdp1
  gRNA
cactcactttgttggacatc

SEQ ID NO: 79681 - DNA, 20 bp, Artificial Sequence
  MKO10079681_B_Ctdsp1
  gRNA
cttacagccagtgaacaatg

SEQ ID NO: 79682 - DNA, 20 bp, Artificial Sequence
  MKO10079682_B_Ctdsp1
  gRNA
gatctgcgtcgtcatcgacc

SEQ ID NO: 79683 - DNA, 20 bp, Artificial Sequence
  MKO10079683_B_Ctdsp1
  gRNA
cccggcagacacagcagaag

SEQ ID NO: 79684 - DNA, 20 bp, Artificial Sequence
  MKO10079684_B_Ctdsp2
  gRNA
cccaggtgcctgtgcagtcc

SEQ ID NO: 79685 - DNA, 20 bp, Artificial Sequence
  MKO10079685_B_Ctdsp2
  gRNA
tgttctcttcactgccagct

SEQ ID NO: 79686 - DNA, 20 bp, Artificial Sequence
  MKO10079686_B_Ctdsp2
  gRNA
tgaccctgtgactgatctcc

SEQ ID NO: 79687 - DNA, 20 bp, Artificial Sequence
  MKO10079687_B_Ctdspl2
  gRNA
ataaacaaacctccattgac

SEQ ID NO: 79688 - DNA, 20 bp, Artificial Sequence
  MKO10079688_B_Ctdspl2
  gRNA
caaatcaagcagttcaagtg

SEQ ID NO: 79689 - DNA, 20 bp, Artificial Sequence
  MKO10079689_B_Ctdspl2
  gRNA
acgtcaggctcagattcccc

SEQ ID NO: 79690 - DNA, 20 bp, Artificial Sequence
  MKO10079690_B_Ctdspl
  gRNA
ccccagtgtgcttccgccac

SEQ ID NO: 79691 - DNA, 20 bp, Artificial Sequence
  MKO10079691_B_Ctdspl
  gRNA
aagatacatacgcttggtac

SEQ ID NO: 79692 - DNA, 20 bp, Artificial Sequence
  MKO10079692_B_Ctdspl
  gRNA
ctgcttccgagactacaatg

SEQ ID NO: 79693 - DNA, 20 bp, Artificial Sequence
  MKO10079693_B_Ctf1
  gRNA
aatctcattcctaccccatt

SEQ ID NO: 79694 - DNA, 20 bp, Artificial Sequence
  MKO10079694_B_Ctf1
  gRNA
tacccagacttccctccctc

SEQ ID NO: 79695 - DNA, 20 bp, Artificial Sequence
  MKO10079695_B_Ctf1
  gRNA
ctggggccagcatgagccag

SEQ ID NO: 79696 - DNA, 20 bp, Artificial Sequence
  MKO10079696_B_Ctf2
  gRNA
gcttgaccgatgggctctga

SEQ ID NO: 79697 - DNA, 20 bp, Artificial Sequence
  MKO10079697_B_Ctf2
  gRNA
agggaggatgtactgcctgc

SEQ ID NO: 79698 - DNA, 20 bp, Artificial Sequence
  MKO10079698_B_Ctf2
  gRNA
actctggggtttgtcccttt

SEQ ID NO: 79699 - DNA, 20 bp, Artificial Sequence
  MKO10079699_B_Ctgf
  gRNA
cagttggctcgcatcatagt

SEQ ID NO: 79700 - DNA, 20 bp, Artificial Sequence
  MKO10079700_B_Ctgf
  gRNA
cgtacatcttcctgtagtac

SEQ ID NO: 79701 - DNA, 20 bp, Artificial Sequence
  MKO10079701_B_Ctgf
  gRNA
gccaactgctgtgcggtcct

SEQ ID NO: 79702 - DNA, 20 bp, Artificial Sequence
  MKO10079702_B_Cthrc1
  gRNA
aggtgtgccaggaatgccgt

SEQ ID NO: 79703 - DNA, 20 bp, Artificial Sequence
  MKO10079703_B_Cthrc1
  gRNA
tgaagcaaaaagcgctgatc

SEQ ID NO: 79704 - DNA, 20 bp, Artificial Sequence
  MKO10079704_B_Cthrc1
  gRNA
tccagtagaagcgtctcctt

SEQ ID NO: 79705 - DNA, 20 bp, Artificial Sequence
  MKO10079705_B_Cth
  gRNA
aaatgatgtctccacgtttg

SEQ ID NO: 79706 - DNA, 20 bp, Artificial Sequence
  MKO10079706_B_Cth
  gRNA
aaagcagtggctgcgttgga

SEQ ID NO: 79707 - DNA, 20 bp, Artificial Sequence
  MKO10079707_B_Cth
  gRNA
atttgcatggatgaagtgta

SEQ ID NO: 79708 - DNA, 20 bp, Artificial Sequence
  MKO10079708_B_Ctif
  gRNA
ggtagctgttccttctccag

SEQ ID NO: 79709 - DNA, 20 bp, Artificial Sequence
  MKO10079709_B_Ctif
  gRNA
tgaggacctacctgccaggt

SEQ ID NO: 79710 - DNA, 20 bp, Artificial Sequence
  MKO10079710_B_Ctif
  gRNA
ccaatacctttgattccttc

SEQ ID NO: 79711 - DNA, 20 bp, Artificial Sequence
  MKO10079711_B_Ctla2a
  gRNA
tccaccccctgatccaagtt

SEQ ID NO: 79712 - DNA, 20 bp, Artificial Sequence
  MKO10079712_B_Ctla2a
  gRNA
tgtcatacctgagcccttcc

SEQ ID NO: 79713 - DNA, 20 bp, Artificial Sequence
  MKO10079713_B_Ctla2a
  gRNA
ccaagtcactaaattgattc

SEQ ID NO: 79714 - DNA, 20 bp, Artificial Sequence
  MKO10079714_B_Ctla2b
  gRNA
tgttatacctgagcccttcc

SEQ ID NO: 79715 - DNA, 20 bp, Artificial Sequence
  MKO10079715_B_Ctla2b
  gRNA
aaagacacagaagactcatg

SEQ ID NO: 79716 - DNA, 20 bp, Artificial Sequence
  MKO10079716_B_Ctla2b
  gRNA
ccaagtcactaaattgattc

SEQ ID NO: 79717 - DNA, 20 bp, Artificial Sequence
  MKO10079717_B_Ctla4
  gRNA
accccaagctaactgcgaca

SEQ ID NO: 79718 - DNA, 20 bp, Artificial Sequence
  MKO10079718_B_Ctla4
  gRNA
acatagacccctgttgtaag

SEQ ID NO: 79719 - DNA, 20 bp, Artificial Sequence
  MKO10079719_B_Ctla4
  gRNA
cactgcagaaggggtaatct

SEQ ID NO: 79720 - DNA, 20 bp, Artificial Sequence
  MKO10079720_B_Ctnna1
  gRNA
gtagaagatgttcgaaaaca

SEQ ID NO: 79721 - DNA, 20 bp, Artificial Sequence
  MKO10079721_B_Ctnna1
  gRNA
gggccgtctaataaaaagag

SEQ ID NO: 79722 - DNA, 20 bp, Artificial Sequence
  MKO10079722_B_Ctnna1
  gRNA
ctttgctctctgccgtcacc

SEQ ID NO: 79723 - DNA, 20 bp, Artificial Sequence
  MKO10079723_B_Ctnna2
  gRNA
gcaaaccgatttaaagagtt

SEQ ID NO: 79724 - DNA, 20 bp, Artificial Sequence
  MKO10079724_B_Ctnna2
  gRNA
atttcaggtcgaggaggcct

SEQ ID NO: 79725 - DNA, 20 bp, Artificial Sequence
  MKO10079725_B_Ctnna2
  gRNA
gtagaggatgtgcggaagca

SEQ ID NO: 79726 - DNA, 20 bp, Artificial Sequence
  MKO10079726_B_Ctnna3
  gRNA
gattctgcggacaattcacc

SEQ ID NO: 79727 - DNA, 20 bp, Artificial Sequence
  MKO10079727_B_Ctnna3
  gRNA
tcctacctgctggcgtttga

SEQ ID NO: 79728 - DNA, 20 bp, Artificial Sequence
  MKO10079728_B_Ctnna3
  gRNA
acccctgttacctcccgaaa

SEQ ID NO: 79729 - DNA, 20 bp, Artificial Sequence
  MKO10079729_B_Ctnnal1
  gRNA
gttcagatattcagccagtt

SEQ ID NO: 79730 - DNA, 20 bp, Artificial Sequence
  MKO10079730_B_Ctnnal1
  gRNA
ccatttggaatcagatggtc

SEQ ID NO: 79731 - DNA, 20 bp, Artificial Sequence
  MKO10079731_B_Ctnnal1
  gRNA
ggcgagggctgtgcttgaaa

SEQ ID NO: 79732 - DNA, 20 bp, Artificial Sequence
  MKO10079732_B_Ctnnb1
  gRNA
gagattatgcagtgtcgtga

SEQ ID NO: 79733 - DNA, 20 bp, Artificial Sequence
  MKO10079733_B_Ctnnb1
  gRNA
agccaagcgctggacattag

SEQ ID NO: 79734 - DNA, 20 bp, Artificial Sequence
  MKO10079734_B_Ctnnb1
  gRNA
ttcacgcaagagcaagtagc

SEQ ID NO: 79735 - DNA, 20 bp, Artificial Sequence
  MKO10079735_B_Ctnnbip1
  gRNA
gccacagcactccatcgacc

SEQ ID NO: 79736 - DNA, 20 bp, Artificial Sequence
  MKO10079736_B_Ctnnbip1
  gRNA
gggcttccagctactgcctc

SEQ ID NO: 79737 - DNA, 20 bp, Artificial Sequence
  MKO10079737_B_Ctnnbip1
  gRNA
gtctgcaggtgcagaggacg

SEQ ID NO: 79738 - DNA, 20 bp, Artificial Sequence
  MKO10079738_B_Ctnnbl1
  gRNA
gcttacttctccggattgtc

SEQ ID NO: 79739 - DNA, 20 bp, Artificial Sequence
  MKO10079739_B_Ctnnbl1
  gRNA
agtgccgtgcagtcacttct

SEQ ID NO: 79740 - DNA, 20 bp, Artificial Sequence
  MKO10079740_B_Ctnnbl1
  gRNA
accctccacgagagtgaaga

SEQ ID NO: 79741 - DNA, 20 bp, Artificial Sequence
  MKO10079741_B_Ctnnd1
  gRNA
cttatgctaccgcaatgaca

SEQ ID NO: 79742 - DNA, 20 bp, Artificial Sequence
  MKO10079742_B_Ctnnd1
  gRNA
gcctataccgctcctcaatt

SEQ ID NO: 79743 - DNA, 20 bp, Artificial Sequence
  MKO10079743_B_Ctnnd1
  gRNA
gcccacctgaggcgtcgtcg

SEQ ID NO: 79744 - DNA, 20 bp, Artificial Sequence
  MKO10079744_B_Ctnnd2
  gRNA
ccttgcctccgtcaaagaac

SEQ ID NO: 79745 - DNA, 20 bp, Artificial Sequence
  MKO10079745_B_Ctnnd2
  gRNA
caagcttgcatcgctccagc

SEQ ID NO: 79746 - DNA, 20 bp, Artificial Sequence
  MKO10079746_B_Ctnnd2
  gRNA
gtcaggcattctggacccac

SEQ ID NO: 79747 - DNA, 20 bp, Artificial Sequence
  MKO10079747_B_Ctns
  gRNA
aatcgttagcatcataaacc

SEQ ID NO: 79748 - DNA, 20 bp, Artificial Sequence
  MKO10079748_B_Ctns
  gRNA
gcatccactaaattcgacct

SEQ ID NO: 79749 - DNA, 20 bp, Artificial Sequence
  MKO10079749_B_Ctns
  gRNA
accagcctaccaggtctggt

SEQ ID NO: 79750 - DNA, 20 bp, Artificial Sequence
  MKO10079750_B_Ctps2
  gRNA
tccccagatatgtgttattg

SEQ ID NO: 79751 - DNA, 20 bp, Artificial Sequence
  MKO10079751_B_Ctps2
  gRNA
tacctggggaaaactgttca

SEQ ID NO: 79752 - DNA, 20 bp, Artificial Sequence
  MKO10079752_B_Ctps2
  gRNA
agcatgtgatcaacaaagag

SEQ ID NO: 79753 - DNA, 20 bp, Artificial Sequence
  MKO10079753_B_Ctps
  gRNA
taagttcccgaacactgttc

SEQ ID NO: 79754 - DNA, 20 bp, Artificial Sequence
  MKO10079754_B_Ctps
  gRNA
gctccttgttaatgacgtac

SEQ ID NO: 79755 - DNA, 20 bp, Artificial Sequence
  MKO10079755_B_Ctps
  gRNA
gtaaaacagccaagttcaac

SEQ ID NO: 79756 - DNA, 20 bp, Artificial Sequence
  MKO10079756_B_Ctr9
  gRNA
aaaagcattgcgcactaacc

SEQ ID NO: 79757 - DNA, 20 bp, Artificial Sequence
  MKO10079757_B_Ctr9
  gRNA
agcacggatagatggcaatt

SEQ ID NO: 79758 - DNA, 20 bp, Artificial Sequence
  MKO10079758_B_Ctr9
  gRNA
ctgatgacttcgtctccctc

SEQ ID NO: 79759 - DNA, 20 bp, Artificial Sequence
  MKO10079759_B_Ctrb1
  gRNA
gttgacgatgacttccctgc

SEQ ID NO: 79760 - DNA, 20 bp, Artificial Sequence
  MKO10079760_B_Ctrb1
  gRNA
ggactcacttgaccccgcag

SEQ ID NO: 79761 - DNA, 20 bp, Artificial Sequence
  MKO10079761_B_Ctrb1
  gRNA
gtccaggatcgtcaacggag

SEQ ID NO: 79762 - DNA, 20 bp, Artificial Sequence
  MKO10079762_B_Ctrc
  gRNA
ctcccactcacttgatgcag

SEQ ID NO: 79763 - DNA, 20 bp, Artificial Sequence
  MKO10079763_B_Ctrc
  gRNA
gactatccctgctatgtcac

SEQ ID NO: 79764 - DNA, 20 bp, Artificial Sequence
  MKO10079764_B_Ctrc
  gRNA
gacacttggaggcacacctg

SEQ ID NO: 79765 - DNA, 20 bp, Artificial Sequence
  MKO10079765_B_Ctrl
  gRNA
tgaagcttgcctcgccagcc

SEQ ID NO: 79766 - DNA, 20 bp, Artificial Sequence
  MKO10079766_B_Ctrl
  gRNA
aggccatcacacaccctaac

SEQ ID NO: 79767 - DNA, 20 bp, Artificial Sequence
  MKO10079767_B_Ctrl
  gRNA
gcagccgtgaccacccagtt

SEQ ID NO: 79768 - DNA, 20 bp, Artificial Sequence
  MKO10079768_B_Cts3
  gRNA
tgagtttatcccaaacaatg

SEQ ID NO: 79769 - DNA, 20 bp, Artificial Sequence
  MKO10079769_B_Cts3
  gRNA
agccatacctgtgtccgcac

SEQ ID NO: 79770 - DNA, 20 bp, Artificial Sequence
  MKO10079770_B_Cts3
  gRNA
taaagacacttgaagaattc

SEQ ID NO: 79771 - DNA, 20 bp, Artificial Sequence
  MKO10079771_B_Cts6
  gRNA
tgatgttctacccaaatttg

SEQ ID NO: 79772 - DNA, 20 bp, Artificial Sequence
  MKO10079772_B_Cts6
  gRNA
gtagaaactgaatctgttaa

SEQ ID NO: 79773 - DNA, 20 bp, Artificial Sequence
  MKO10079773_B_Cts6
  gRNA
attcacagcaaaagcccaac

SEQ ID NO: 79774 - DNA, 20 bp, Artificial Sequence
  MKO10079774_B_Cts7
  gRNA
tcctgaacgttctgttgtta

SEQ ID NO: 79775 - DNA, 20 bp, Artificial Sequence
  MKO10079775_B_Cts7
  gRNA
tgtgactccagtgcgaagac

SEQ ID NO: 79776 - DNA, 20 bp, Artificial Sequence
  MKO10079776_B_Cts7
  gRNA
tctgtgactgcatgcataga

SEQ ID NO: 79777 - DNA, 20 bp, Artificial Sequence
  MKO10079777_B_Cts8
  gRNA
accatggatgtcaatgcctt

SEQ ID NO: 79778 - DNA, 20 bp, Artificial Sequence
  MKO10079778_B_Cts8
  gRNA
atttaaaggacggacactgc

SEQ ID NO: 79779 - DNA, 20 bp, Artificial Sequence
  MKO10079779_B_Cts8
  gRNA
actgagcacacaaaatctag

SEQ ID NO: 79780 - DNA, 20 bp, Artificial Sequence
  MKO10079780_B_Ctsa
  gRNA
ggactcgatatacagcacgt

SEQ ID NO: 79781 - DNA, 20 bp, Artificial Sequence
  MKO10079781_B_Ctsa
  gRNA
ctttggcttaacgggggtcc

SEQ ID NO: 79782 - DNA, 20 bp, Artificial Sequence
  MKO10079782_B_Ctsa
  gRNA
tggagtacaacccctatgct

SEQ ID NO: 79783 - DNA, 20 bp, Artificial Sequence
  MKO10079783_B_Ctsb
  gRNA
ctgggtggacccaaactgcc

SEQ ID NO: 79784 - DNA, 20 bp, Artificial Sequence
  MKO10079784_B_Ctsb
  gRNA
tgtagactccacctgaaacc

SEQ ID NO: 79785 - DNA, 20 bp, Artificial Sequence
  MKO10079785_B_Ctsb
  gRNA
cgaacctgcattcacaccaa

SEQ ID NO: 79786 - DNA, 20 bp, Artificial Sequence
  MKO10079786_B_Ctsc
  gRNA
tcaacacaatctcgaagcct

SEQ ID NO: 79787 - DNA, 20 bp, Artificial Sequence
  MKO10079787_B_Ctsc
  gRNA
gttagccctgttcgaaacca

SEQ ID NO: 79788 - DNA, 20 bp, Artificial Sequence
  MKO10079788_B_Ctsc
  gRNA
aatatgaatgcagcacatct

SEQ ID NO: 79789 - DNA, 20 bp, Artificial Sequence
  MKO10079789_B_Ctsd
  gRNA
tgccgatatcgccatagtac

SEQ ID NO: 79790 - DNA, 20 bp, Artificial Sequence
  MKO10079790_B_Ctsd
  gRNA
atgtaagtctgaccagtcaa

SEQ ID NO: 79791 - DNA, 20 bp, Artificial Sequence
  MKO10079791_B_Ctsd
  gRNA
ggacgtgccgttcttcacat

SEQ ID NO: 79792 - DNA, 20 bp, Artificial Sequence
  MKO10079792_B_Ctse
  gRNA
gggtctgggatacccctcat

SEQ ID NO: 79793 - DNA, 20 bp, Artificial Sequence
  MKO10079793_B_Ctse
  gRNA
gacactcgaatacacattac

SEQ ID NO: 79794 - DNA, 20 bp, Artificial Sequence
  MKO10079794_B_Ctse
  gRNA
tcaggtggaagggttgactg

SEQ ID NO: 79795 - DNA, 20 bp, Artificial Sequence
  MKO10079795_B_Ctsf
  gRNA
cttcccttgattcataagtc

SEQ ID NO: 79796 - DNA, 20 bp, Artificial Sequence
  MKO10079796_B_Ctsf
  gRNA
acttcatgaccacctataac

SEQ ID NO: 79797 - DNA, 20 bp, Artificial Sequence
  MKO10079797_B_Ctsf
  gRNA
aatcccagcacctgtgacct

SEQ ID NO: 79798 - DNA, 20 bp, Artificial Sequence
  MKO10079798_B_Ctsg
  gRNA
gtctcctatggaagcaacaa

SEQ ID NO: 79799 - DNA, 20 bp, Artificial Sequence
  MKO10079799_B_Ctsg
  gRNA
gcttcaccgatccactcctc

SEQ ID NO: 79800 - DNA, 20 bp, Artificial Sequence
  MKO10079800_B_Ctsg
  gRNA
gttgtagaactggaagcgat

SEQ ID NO: 79801 - DNA, 20 bp, Artificial Sequence
  MKO10079801_B_Ctsh
  gRNA
agattcaagcccacaaccag

SEQ ID NO: 79802 - DNA, 20 bp, Artificial Sequence
  MKO10079802_B_Ctsh
  gRNA
ttgaatcttcctccagttgt

SEQ ID NO: 79803 - DNA, 20 bp, Artificial Sequence
  MKO10079803_B_Ctsh
  gRNA
aaaagtttcactttaagtca

SEQ ID NO: 79804 - DNA, 20 bp, Artificial Sequence
  MKO10079804_B_Ctsj
  gRNA
cgattataaggattggagag

SEQ ID NO: 79805 - DNA, 20 bp, Artificial Sequence
  MKO10079805_B_Ctsj
  gRNA
ctctctccaatccttataat

SEQ ID NO: 79806 - DNA, 20 bp, Artificial Sequence
  MKO10079806_B_Ctsj
  gRNA
tctaagtgtgcagaacctat

SEQ ID NO: 79807 - DNA, 20 bp, Artificial Sequence
  MKO10079807_B_Ctsk
  gRNA
aagttgtatgtataacgcca

SEQ ID NO: 79808 - DNA, 20 bp, Artificial Sequence
  MKO10079808_B_Ctsk
  gRNA
gcatttagctgcctttgccg

SEQ ID NO: 79809 - DNA, 20 bp, Artificial Sequence
  MKO10079809_B_Ctsk
  gRNA
tgaagatgcttacccatatg

SEQ ID NO: 79810 - DNA, 20 bp, Artificial Sequence
  MKO10079810_B_Ctsll3
  gRNA
gatgatcgacctgcacaatg

SEQ ID NO: 79811 - DNA, 20 bp, Artificial Sequence
  MKO10079811_B_Ctsll3
  gRNA
tcagatagtcctcattgtgc

SEQ ID NO: 79812 - DNA, 20 bp, Artificial Sequence
  MKO10079812_B_Ctsll3
  gRNA
acttaccctccttgtagaac

SEQ ID NO: 79813 - DNA, 20 bp, Artificial Sequence
  MKO10079813_B_Ctsl
  gRNA
cattacctgaactatagaac

SEQ ID NO: 79814 - DNA, 20 bp, Artificial Sequence
  MKO10079814_B_Ctsl
  gRNA
gaatacagcaacgggcagca

SEQ ID NO: 79815 - DNA, 20 bp, Artificial Sequence
  MKO10079815_B_Ctsl
  gRNA
tgtattccccgttgtgtagc

SEQ ID NO: 79816 - DNA, 20 bp, Artificial Sequence
  MKO10079816_B_Ctsm
  gRNA
tgcatcgattgcaacagaaa

SEQ ID NO: 79817 - DNA, 20 bp, Artificial Sequence
  MKO10079817_B_Ctsm
  gRNA
agccatacctgtgtctgcac

SEQ ID NO: 79818 - DNA, 20 bp, Artificial Sequence
  MKO10079818_B_Ctsm
  gRNA
tgtcactcctgtgcagacac

SEQ ID NO: 79819 - DNA, 20 bp, Artificial Sequence
  MKO10079819_B_Ctso
  gRNA
gaaactccagcttgtgattg

SEQ ID NO: 79820 - DNA, 20 bp, Artificial Sequence
  MKO10079820_B_Ctso
  gRNA
ctttgccattgagatttgac

SEQ ID NO: 79821 - DNA, 20 bp, Artificial Sequence
  MKO10079821_B_Ctso
  gRNA
tccctccagtcaaatctcaa

SEQ ID NO: 79822 - DNA, 20 bp, Artificial Sequence
  MKO10079822_B_Ctsq
  gRNA
aaaggattaaactgcataac

SEQ ID NO: 79823 - DNA, 20 bp, Artificial Sequence
  MKO10079823_B_Ctsq
  gRNA
ctccattgtgcaaaacgtac

SEQ ID NO: 79824 - DNA, 20 bp, Artificial Sequence
  MKO10079824_B_Ctsq
  gRNA
aaggctatgtgactcgtgtg

SEQ ID NO: 79825 - DNA, 20 bp, Artificial Sequence
  MKO10079825_B_Ctsr
  gRNA
agggagattgtgatgcttgt

SEQ ID NO: 79826 - DNA, 20 bp, Artificial Sequence
  MKO10079826_B_Ctsr
  gRNA
tgtgtccctcccccaaagtg

SEQ ID NO: 79827 - DNA, 20 bp, Artificial Sequence
  MKO10079827_B_Ctsr
  gRNA
tgagtctttcaagaactata

SEQ ID NO: 79828 - DNA, 20 bp, Artificial Sequence
  MKO10079828_B_Ctss
  gRNA
ccaatgaagaaatcttgtgt

SEQ ID NO: 79829 - DNA, 20 bp, Artificial Sequence
  MKO10079829_B_Ctss
  gRNA
actgcagagagaccctaccc

SEQ ID NO: 79830 - DNA, 20 bp, Artificial Sequence
  MKO10079830_B_Ctss
  gRNA
ccgacacaagatttcttcat

SEQ ID NO: 79831 - DNA, 20 bp, Artificial Sequence
  MKO10079831_B_Ctsw
  gRNA
gtttgatgcgccacagagcc

SEQ ID NO: 79832 - DNA, 20 bp, Artificial Sequence
  MKO10079832_B_Ctsw
  gRNA
gagcatctttgcccacaatc

SEQ ID NO: 79833 - DNA, 20 bp, Artificial Sequence
  MKO10079833_B_Ctsw
  gRNA
cggagttactggaacccagc

SEQ ID NO: 79834 - DNA, 20 bp, Artificial Sequence
  MKO10079834_B_Ctsz
  gRNA
gaaattcatggggcgaaccc

SEQ ID NO: 79835 - DNA, 20 bp, Artificial Sequence
  MKO10079835_B_Ctsz
  gRNA
cgtaatcacccactctccag

SEQ ID NO: 79836 - DNA, 20 bp, Artificial Sequence
  MKO10079836_B_Ctsz
  gRNA
tcaactatgccagcgtcacc

SEQ ID NO: 79837 - DNA, 20 bp, Artificial Sequence
  MKO10079837_B_Cttnbp2nl
  gRNA
agctggccgcagccgagagc

SEQ ID NO: 79838 - DNA, 20 bp, Artificial Sequence
  MKO10079838_B_Cttnbp2nl
  gRNA
ccttgttatagaagctttaa

SEQ ID NO: 79839 - DNA, 20 bp, Artificial Sequence
  MKO10079839_B_Cttnbp2nl
  gRNA
acactgttcagtatccttga

SEQ ID NO: 79840 - DNA, 20 bp, Artificial Sequence
  MKO10079840_B_Cttnbp2
  gRNA
gtgttcatccaggaacggta

SEQ ID NO: 79841 - DNA, 20 bp, Artificial Sequence
  MKO10079841_B_Cttnbp2
  gRNA
gttcaccttccatcacgcta

SEQ ID NO: 79842 - DNA, 20 bp, Artificial Sequence
  MKO10079842_B_Cttnbp2
  gRNA
ataaattactcctgcgaaga

SEQ ID NO: 79843 - DNA, 20 bp, Artificial Sequence
  MKO10079843_B_Cttn
  gRNA
gtgactcctaccacaaaatc

SEQ ID NO: 79844 - DNA, 20 bp, Artificial Sequence
  MKO10079844_B_Cttn
  gRNA
cacggctatggcgggaagtt

SEQ ID NO: 79845 - DNA, 20 bp, Artificial Sequence
  MKO10079845_B_Cttn
  gRNA
aaagcttcgactggtactca

SEQ ID NO: 79846 - DNA, 20 bp, Artificial Sequence
  MKO10079846_B_Ctu1
  gRNA
ctacagcgcccggcggcagc

SEQ ID NO: 79847 - DNA, 20 bp, Artificial Sequence
  MKO10079847_B_Ctu1
  gRNA
aagtgcgcacccctcgcccg

SEQ ID NO: 79848 - DNA, 20 bp, Artificial Sequence
  MKO10079848_B_Ctu1
  gRNA
cagccatgtcgtcagcgttg

SEQ ID NO: 79849 - DNA, 20 bp, Artificial Sequence
  MKO10079849_B_Ctu2
  gRNA
gccggtggtggtgatacgag

SEQ ID NO: 79850 - DNA, 20 bp, Artificial Sequence
  MKO10079850_B_Ctu2
  gRNA
acacatcgtaccttctcccc

SEQ ID NO: 79851 - DNA, 20 bp, Artificial Sequence
  MKO10079851_B_Ctu2
  gRNA
ccatcaacatagatgactcc

SEQ ID NO: 79852 - DNA, 20 bp, Artificial Sequence
  MKO10079852_B_Ctxn1
  gRNA
cgcgttcgagcgcctccttg

SEQ ID NO: 79853 - DNA, 20 bp, Artificial Sequence
  MKO10079853_B_Ctxn1
  gRNA
cccaccgggggccccgtcga

SEQ ID NO: 79854 - DNA, 20 bp, Artificial Sequence
  MKO10079854_B_Ctxn1
  gRNA
gccgcatgcccgcctcgtcc

SEQ ID NO: 79855 - DNA, 20 bp, Artificial Sequence
  MKO10079855_B_Ctxn2
  gRNA
aaagaccggctttgcctttg

SEQ ID NO: 79856 - DNA, 20 bp, Artificial Sequence
  MKO10079856_B_Ctxn2
  gRNA
aatgcacaagatgcccacaa

SEQ ID NO: 79857 - DNA, 20 bp, Artificial Sequence
  MKO10079857_B_Ctxn2
  gRNA
ttcatcttcccatgtagaag

SEQ ID NO: 79858 - DNA, 20 bp, Artificial Sequence
  MKO10079858_B_Ctxn3
  gRNA
tgcccaaaaagatgaacaac

SEQ ID NO: 79859 - DNA, 20 bp, Artificial Sequence
  MKO10079859_B_Ctxn3
  gRNA
ccaacctcaacatgggctga

SEQ ID NO: 79860 - DNA, 20 bp, Artificial Sequence
  MKO10079860_B_Ctxn3
  gRNA
gatatgggtctagaagaatt

SEQ ID NO: 79861 - DNA, 20 bp, Artificial Sequence
  MKO10079861_B_Cubn
  gRNA
ccctcctccgtagtcatccg

SEQ ID NO: 79862 - DNA, 20 bp, Artificial Sequence
  MKO10079862_B_Cubn
  gRNA
tacaaataaaggagtcgtgc

SEQ ID NO: 79863 - DNA, 20 bp, Artificial Sequence
  MKO10079863_B_Cubn
  gRNA
tgacacaggtgccaccattg

SEQ ID NO: 79864 - DNA, 20 bp, Artificial Sequence
  MKO10079864_B_Cuedc1
  gRNA
cttgcaggttgtccggagcc

SEQ ID NO: 79865 - DNA, 20 bp, Artificial Sequence
  MKO10079865_B_Cuedc1
  gRNA
gaggcccacctccggcgcca

SEQ ID NO: 79866 - DNA, 20 bp, Artificial Sequence
  MKO10079866_B_Cuedc1
  gRNA
tccagtttctgtagcgtctc

SEQ ID NO: 79867 - DNA, 20 bp, Artificial Sequence
  MKO10079867_B_Cuedc2
  gRNA
ctgagcgatgctaggaacaa

SEQ ID NO: 79868 - DNA, 20 bp, Artificial Sequence
  MKO10079868_B_Cuedc2
  gRNA
tacctcatctagggtgttcc

SEQ ID NO: 79869 - DNA, 20 bp, Artificial Sequence
  MKO10079869_B_Cuedc2
  gRNA
ctggaggacctgggcccctc

SEQ ID NO: 79870 - DNA, 20 bp, Artificial Sequence
  MKO10079870_B_Cul1
  gRNA
gttcaggccattgaataaac

SEQ ID NO: 79871 - DNA, 20 bp, Artificial Sequence
  MKO10079871_B_Cul1
  gRNA
tgcatcagtccaaccaagcc

SEQ ID NO: 79872 - DNA, 20 bp, Artificial Sequence
  MKO10079872_B_Cul1
  gRNA
actaatcagtcttgtattga

SEQ ID NO: 79873 - DNA, 20 bp, Artificial Sequence
  MKO10079873_B_Cul2
  gRNA
actatatggactgcttatat

SEQ ID NO: 79874 - DNA, 20 bp, Artificial Sequence
  MKO10079874_B_Cul2
  gRNA
acctctcctatttccataag

SEQ ID NO: 79875 - DNA, 20 bp, Artificial Sequence
  MKO10079875_B_Cul2
  gRNA
agatatgaatgaaccactta

SEQ ID NO: 79876 - DNA, 20 bp, Artificial Sequence
  MKO10079876_B_Cul3
  gRNA
gacctaaaatcattaacatc

SEQ ID NO: 79877 - DNA, 20 bp, Artificial Sequence
  MKO10079877_B_Cul3
  gRNA
tgaaggaagatcagtctatg

SEQ ID NO: 79878 - DNA, 20 bp, Artificial Sequence
  MKO10079878_B_Cul3
  gRNA
ttcaaacactaaatcaagct

SEQ ID NO: 79879 - DNA, 20 bp, Artificial Sequence
  MKO10079879_B_Cul4a
  gRNA
gctctacaagcagctgcgcc

SEQ ID NO: 79880 - DNA, 20 bp, Artificial Sequence
  MKO10079880_B_Cul4a
  gRNA
gtgtcctgagtgtagttgtc

SEQ ID NO: 79881 - DNA, 20 bp, Artificial Sequence
  MKO10079881_B_Cul4a
  gRNA
attccatgctgccttctatc

SEQ ID NO: 79882 - DNA, 20 bp, Artificial Sequence
  MKO10079882_B_Cul4b
  gRNA
cctccaatcaagagcgccga

SEQ ID NO: 79883 - DNA, 20 bp, Artificial Sequence
  MKO10079883_B_Cul4b
  gRNA
caatttagaagaactctacc

SEQ ID NO: 79884 - DNA, 20 bp, Artificial Sequence
  MKO10079884_B_Cul4b
  gRNA
taaattaccagaaaactata

SEQ ID NO: 79885 - DNA, 20 bp, Artificial Sequence
  MKO10079885_B_Cul5
  gRNA
gcaaagctgtgtcatcttga

SEQ ID NO: 79886 - DNA, 20 bp, Artificial Sequence
  MKO10079886_B_Cul5
  gRNA
aggctcatcaaaaattcatc

SEQ ID NO: 79887 - DNA, 20 bp, Artificial Sequence
  MKO10079887_B_Cul5
  gRNA
tgagtttattaagcaagcac

SEQ ID NO: 79888 - DNA, 20 bp, Artificial Sequence
  MKO10079888_B_Cul7
  gRNA
cagtcccgccgtcccagcgc

SEQ ID NO: 79889 - DNA, 20 bp, Artificial Sequence
  MKO10079889_B_Cul7
  gRNA
gctctttgccgagccttacg

SEQ ID NO: 79890 - DNA, 20 bp, Artificial Sequence
  MKO10079890_B_Cul7
  gRNA
caggtgttgtgggattcaac

SEQ ID NO: 79891 - DNA, 20 bp, Artificial Sequence
  MKO10079891_B_Cul9
  gRNA
gctgctcgatgccgtcgtgc

SEQ ID NO: 79892 - DNA, 20 bp, Artificial Sequence
  MKO10079892_B_Cul9
  gRNA
tgacagccgctacactttac

SEQ ID NO: 79893 - DNA, 20 bp, Artificial Sequence
  MKO10079893_B_Cul9
  gRNA
ggattcagcgtccgcagctg

SEQ ID NO: 79894 - DNA, 20 bp, Artificial Sequence
  MKO10079894_B_Cutal
  gRNA
ggccatcctggataagaaga

SEQ ID NO: 79895 - DNA, 20 bp, Artificial Sequence
  MKO10079895_B_Cutal
  gRNA
acgaagccatcttcttatcc

SEQ ID NO: 79896 - DNA, 20 bp, Artificial Sequence
  MKO10079896_B_Cutal
  gRNA
acctcatataggcaaacagc

SEQ ID NO: 79897 - DNA, 20 bp, Artificial Sequence
  MKO10079897_B_Cuta
  gRNA
actcacatggatgtgatctg

SEQ ID NO: 79898 - DNA, 20 bp, Artificial Sequence
  MKO10079898_B_Cuta
  gRNA
cgaacaaactctgtcagagc

SEQ ID NO: 79899 - DNA, 20 bp, Artificial Sequence
  MKO10079899_B_Cuta
  gRNA
aaagatcgaggaagatagtg

SEQ ID NO: 79900 - DNA, 20 bp, Artificial Sequence
  MKO10079900_B_Cutc
  gRNA
gggaggaaccacacccagta

SEQ ID NO: 79901 - DNA, 20 bp, Artificial Sequence
  MKO10079901_B_Cutc
  gRNA
atacttacccatactgggtg

SEQ ID NO: 79902 - DNA, 20 bp, Artificial Sequence
  MKO10079902_B_Cutc
  gRNA
acgcgggaagcatgaagaaa

SEQ ID NO: 79903 - DNA, 20 bp, Artificial Sequence
  MKO10079903_B_Cux1
  gRNA
tctcaagatggcggccaatg

SEQ ID NO: 79904 - DNA, 20 bp, Artificial Sequence
  MKO10079904_B_Cux1
  gRNA
aagagactaattgatgttcc

SEQ ID NO: 79905 - DNA, 20 bp, Artificial Sequence
  MKO10079905_B_Cux1
  gRNA
cctgtttgccaatactgttg

SEQ ID NO: 79906 - DNA, 20 bp, Artificial Sequence
  MKO10079906_B_Cux2
  gRNA
aagcaattgattgaagcacc

SEQ ID NO: 79907 - DNA, 20 bp, Artificial Sequence
  MKO10079907_B_Cux2
  gRNA
gttggctggcgtgtgccccg

SEQ ID NO: 79908 - DNA, 20 bp, Artificial Sequence
  MKO10079908_B_Cux2
  gRNA
tcaattgcttataaacactc

SEQ ID NO: 79909 - DNA, 20 bp, Artificial Sequence
  MKO10079909_B_Cuzd1
  gRNA
cgcaggtcaccaccgcagtt

SEQ ID NO: 79910 - DNA, 20 bp, Artificial Sequence
  MKO10079910_B_Cuzd1
  gRNA
tatctgaaatgtcatcgagt

SEQ ID NO: 79911 - DNA, 20 bp, Artificial Sequence
  MKO10079911_B_Cuzd1
  gRNA
ggtgacctgcgagcattgga

SEQ ID NO: 79912 - DNA, 20 bp, Artificial Sequence
  MKO10079912_B_Cwc15
  gRNA
gaggctgggacgggccagtg

SEQ ID NO: 79913 - DNA, 20 bp, Artificial Sequence
  MKO10079913_B_Cwc15
  gRNA
aaccctctcctaaacctcac

SEQ ID NO: 79914 - DNA, 20 bp, Artificial Sequence
  MKO10079914_B_Cwc15
  gRNA
gggcttctttgacactgaag

SEQ ID NO: 79915 - DNA, 20 bp, Artificial Sequence
  MKO10079915_B_Cwc22
  gRNA
agacccacagttcataccgc

SEQ ID NO: 79916 - DNA, 20 bp, Artificial Sequence
  MKO10079916_B_Cwc22
  gRNA
ttagatacacagagcaagag

SEQ ID NO: 79917 - DNA, 20 bp, Artificial Sequence
  MKO10079917_B_Cwc22
  gRNA
aatcagagtaacctctatcc

SEQ ID NO: 79918 - DNA, 20 bp, Artificial Sequence
  MKO10079918_B_Cwc25
  gRNA
tcaccatgccacccggacct

SEQ ID NO: 79919 - DNA, 20 bp, Artificial Sequence
  MKO10079919_B_Cwc25
  gRNA
gctctgctcatcctcgctgc

SEQ ID NO: 79920 - DNA, 20 bp, Artificial Sequence
  MKO10079920_B_Cwc25
  gRNA
gcaaatgagccttgagaaaa

SEQ ID NO: 79921 - DNA, 20 bp, Artificial Sequence
  MKO10079921_B_Cwc27
  gRNA
aactggctgccattatcatg

SEQ ID NO: 79922 - DNA, 20 bp, Artificial Sequence
  MKO10079922_B_Cwc27
  gRNA
aatgctggtccacatgataa

SEQ ID NO: 79923 - DNA, 20 bp, Artificial Sequence
  MKO10079923_B_Cwc27
  gRNA
tcacaactcttgattctatg

SEQ ID NO: 79924 - DNA, 20 bp, Artificial Sequence
  MKO10079924_B_Cwf19l1
  gRNA
cctattcagacatatgtgct

SEQ ID NO: 79925 - DNA, 20 bp, Artificial Sequence
  MKO10079925_B_Cwf19l1
  gRNA
gagtgggaggagtataagac

SEQ ID NO: 79926 - DNA, 20 bp, Artificial Sequence
  MKO10079926_B_Cwf19l1
  gRNA
ttctctacctttcttgttgc

SEQ ID NO: 79927 - DNA, 20 bp, Artificial Sequence
  MKO10079927_B_Cwf19l2
  gRNA
tggtgctcacctgaatatcg

SEQ ID NO: 79928 - DNA, 20 bp, Artificial Sequence
  MKO10079928_B_Cwf19l2
  gRNA
ttcttacctgctctaacact

SEQ ID NO: 79929 - DNA, 20 bp, Artificial Sequence
  MKO10079929_B_Cwf19l2
  gRNA
ttcagctttgagtgatgatg

SEQ ID NO: 79930 - DNA, 20 bp, Artificial Sequence
  MKO10079930_B_Cwh43
  gRNA
ttcttcttgtcctccgaata

SEQ ID NO: 79931 - DNA, 20 bp, Artificial Sequence
  MKO10079931_B_Cwh43
  gRNA
ctccgaagatccagtgagtt

SEQ ID NO: 79932 - DNA, 20 bp, Artificial Sequence
  MKO10079932_B_Cwh43
  gRNA
ctgtgagctccagcgtttgc

SEQ ID NO: 79933 - DNA, 20 bp, Artificial Sequence
  MKO10079933_B_Cx3cl1
  gRNA
cgctacgtcccccgtagctg

SEQ ID NO: 79934 - DNA, 20 bp, Artificial Sequence
  MKO10079934_B_Cx3cl1
  gRNA
tcttccaatgtggcggattc

SEQ ID NO: 79935 - DNA, 20 bp, Artificial Sequence
  MKO10079935_B_Cx3cl1
  gRNA
aggcgcagcagccacgcgag

SEQ ID NO: 79936 - DNA, 20 bp, Artificial Sequence
  MKO10079936_B_Cx3cr1
  gRNA
gcacggtgtcaccattagtc

SEQ ID NO: 79937 - DNA, 20 bp, Artificial Sequence
  MKO10079937_B_Cx3cr1
  gRNA
gtggcccgtgctccgcaact

SEQ ID NO: 79938 - DNA, 20 bp, Artificial Sequence
  MKO10079938_B_Cx3cr1
  gRNA
tgagtatgacgattctgctg

SEQ ID NO: 79939 - DNA, 20 bp, Artificial Sequence
  MKO10079939_B_Cxadr
  gRNA
acgagtaacgatgtcaagtc

SEQ ID NO: 79940 - DNA, 20 bp, Artificial Sequence
  MKO10079940_B_Cxadr
  gRNA
cccagacaatgcctacgcca

SEQ ID NO: 79941 - DNA, 20 bp, Artificial Sequence
  MKO10079941_B_Cxadr
  gRNA
aagatgcttcgtggatggat

SEQ ID NO: 79942 - DNA, 20 bp, Artificial Sequence
  MKO10079942_B_Cxcl10
  gRNA
cagaaaatgacggcagcact

SEQ ID NO: 79943 - DNA, 20 bp, Artificial Sequence
  MKO10079943_B_Cxcl10
  gRNA
tgagcagagatgtctgaatc

SEQ ID NO: 79944 - DNA, 20 bp, Artificial Sequence
  MKO10079944_B_Cxcl10
  gRNA
gagtcccactcagacccagc

SEQ ID NO: 79945 - DNA, 20 bp, Artificial Sequence
  MKO10079945_B_Cxcl11
  gRNA
ggcaacctacctgcattatg

SEQ ID NO: 79946 - DNA, 20 bp, Artificial Sequence
  MKO10079946_B_Cxcl11
  gRNA
cgctgtctttgcatcggccc

SEQ ID NO: 79947 - DNA, 20 bp, Artificial Sequence
  MKO10079947_B_Cxcl11
  gRNA
gcaagctcgcctcataatgc

SEQ ID NO: 79948 - DNA, 20 bp, Artificial Sequence
  MKO10079948_B_Cxcl12
  gRNA
gcattgacccgaaattaaag

SEQ ID NO: 79949 - DNA, 20 bp, Artificial Sequence
  MKO10079949_B_Cxcl12
  gRNA
cgccgtgctggccctggtgc

SEQ ID NO: 79950 - DNA, 20 bp, Artificial Sequence
  MKO10079950_B_Cxcl12
  gRNA
acttgtttaaagctttctcc

SEQ ID NO: 79951 - DNA, 20 bp, Artificial Sequence
  MKO10079951_B_Cxcl13
  gRNA
gattattaagacatgtccaa

SEQ ID NO: 79952 - DNA, 20 bp, Artificial Sequence
  MKO10079952_B_Cxcl13
  gRNA
ggagtgatttcaactgttgt

SEQ ID NO: 79953 - DNA, 20 bp, Artificial Sequence
  MKO10079953_B_Cxcl13
  gRNA
gcagctcttctcttactcac

SEQ ID NO: 79954 - DNA, 20 bp, Artificial Sequence
  MKO10079954_B_Cxcl14
  gRNA
atgcctggaacgagaagcgc

SEQ ID NO: 79955 - DNA, 20 bp, Artificial Sequence
  MKO10079955_B_Cxcl14
  gRNA
gcaccaaacgcttcatcaag

SEQ ID NO: 79956 - DNA, 20 bp, Artificial Sequence
  MKO10079956_B_Cxcl14
  gRNA
tcccagggtctacgaagaat

SEQ ID NO: 79957 - DNA, 20 bp, Artificial Sequence
  MKO10079957_B_Cxcl15
  gRNA
gtttggatcctgatgctcca

SEQ ID NO: 79958 - DNA, 20 bp, Artificial Sequence
  MKO10079958_B_Cxcl15
  gRNA
ctatacagaagcttcattgc

SEQ ID NO: 79959 - DNA, 20 bp, Artificial Sequence
  MKO10079959_B_Cxcl15
  gRNA
taaatcagcaaagtgtctag

SEQ ID NO: 79960 - DNA, 20 bp, Artificial Sequence
  MKO10079960_B_Cxcl16
  gRNA
tccattaggcgatggcaacc

SEQ ID NO: 79961 - DNA, 20 bp, Artificial Sequence
  MKO10079961_B_Cxcl16
  gRNA
tgctgtaggcgctagggtct

SEQ ID NO: 79962 - DNA, 20 bp, Artificial Sequence
  MKO10079962_B_Cxcl16
  gRNA
gcttccagaccatagcctga

SEQ ID NO: 79963 - DNA, 20 bp, Artificial Sequence
  MKO10079963_B_Cxcl17
  gRNA
atttctcaaacgatgtcacc

SEQ ID NO: 79964 - DNA, 20 bp, Artificial Sequence
  MKO10079964_B_Cxcl17
  gRNA
gacatcgtttgagaaattgc

SEQ ID NO: 79965 - DNA, 20 bp, Artificial Sequence
  MKO10079965_B_Cxcl17
  gRNA
tccagtgatgctcatgtcca

SEQ ID NO: 79966 - DNA, 20 bp, Artificial Sequence
  MKO10079966_B_Cxcl1
  gRNA
ttctgaaccaagggagcttc

SEQ ID NO: 79967 - DNA, 20 bp, Artificial Sequence
  MKO10079967_B_Cxcl1
  gRNA
caagaacatccagagcttga

SEQ ID NO: 79968 - DNA, 20 bp, Artificial Sequence
  MKO10079968_B_Cxcl1
  gRNA
ctgtgcagcgctgctgctgc

SEQ ID NO: 79969 - DNA, 20 bp, Artificial Sequence
  MKO10079969_B_Cxcl2
  gRNA
ttctgaaccaggggggcttc

SEQ ID NO: 79970 - DNA, 20 bp, Artificial Sequence
  MKO10079970_B_Cxcl2
  gRNA
gaatcccacctgtagcctgg

SEQ ID NO: 79971 - DNA, 20 bp, Artificial Sequence
  MKO10079971_B_Cxcl2
  gRNA
ccatggcccctcccacctgc

SEQ ID NO: 79972 - DNA, 20 bp, Artificial Sequence
  MKO10079972_B_Cxcl3
  gRNA
ttcttgaccatccttgagag

SEQ ID NO: 79973 - DNA, 20 bp, Artificial Sequence
  MKO10079973_B_Cxcl3
  gRNA
gaatcccacctgtagcctgg

SEQ ID NO: 79974 - DNA, 20 bp, Artificial Sequence
  MKO10079974_B_Cxcl3
  gRNA
ccatggcccctcccacctgc

SEQ ID NO: 79975 - DNA, 20 bp, Artificial Sequence
  MKO10079975_B_Cxcl5
  gRNA
actcacatgacttccaccgt

SEQ ID NO: 79976 - DNA, 20 bp, Artificial Sequence
  MKO10079976_B_Cxcl5
  gRNA
gatccagacagacctccttc

SEQ ID NO: 79977 - DNA, 20 bp, Artificial Sequence
  MKO10079977_B_Cxcl5
  gRNA
tgcactcgcagtggaaagaa

SEQ ID NO: 79978 - DNA, 20 bp, Artificial Sequence
  MKO10079978_B_Cxcl9
  gRNA
atttgtagtggatcgtgcct

SEQ ID NO: 79979 - DNA, 20 bp, Artificial Sequence
  MKO10079979_B_Cxcl9
  gRNA
ttcttcacatttgccgagtc

SEQ ID NO: 79980 - DNA, 20 bp, Artificial Sequence
  MKO10079980_B_Cxcl9
  gRNA
ctcgaactccacactgctcc

SEQ ID NO: 79981 - DNA, 20 bp, Artificial Sequence
  MKO10079981_B_Cxcr1
  gRNA
cggggtctgtcccacatatt

SEQ ID NO: 79982 - DNA, 20 bp, Artificial Sequence
  MKO10079982_B_Cxcr1
  gRNA
atttaaccaagtagcgcttt

SEQ ID NO: 79983 - DNA, 20 bp, Artificial Sequence
  MKO10079983_B_Cxcr1
  gRNA
tgatgctggttatcttatac

SEQ ID NO: 79984 - DNA, 20 bp, Artificial Sequence
  MKO10079984_B_Cxcr2
  gRNA
gcgccgcgatgacattgaca

SEQ ID NO: 79985 - DNA, 20 bp, Artificial Sequence
  MKO10079985_B_Cxcr2
  gRNA
gacagcgaagatgacccgca

SEQ ID NO: 79986 - DNA, 20 bp, Artificial Sequence
  MKO10079986_B_Cxcr2
  gRNA
gtaacaatacatcccgtttg

SEQ ID NO: 79987 - DNA, 20 bp, Artificial Sequence
  MKO10079987_B_Cxcr3
  gRNA
agaacttacctcaaggtaca

SEQ ID NO: 79988 - DNA, 20 bp, Artificial Sequence
  MKO10079988_B_Cxcr3
  gRNA
tcatagctcgaaaacgcctc

SEQ ID NO: 79989 - DNA, 20 bp, Artificial Sequence
  MKO10079989_B_Cxcr3
  gRNA
acgccacccagatctaccgc

SEQ ID NO: 79990 - DNA, 20 bp, Artificial Sequence
  MKO10079990_B_Cxcr4
  gRNA
catctttgccgacgtcagcc

SEQ ID NO: 79991 - DNA, 20 bp, Artificial Sequence
  MKO10079991_B_Cxcr4
  gRNA
cggcaatggattggtgatcc

SEQ ID NO: 79992 - DNA, 20 bp, Artificial Sequence
  MKO10079992_B_Cxcr4
  gRNA
acgtcggcaaagatgaagtc

SEQ ID NO: 79993 - DNA, 20 bp, Artificial Sequence
  MKO10079993_B_Cxcr5
  gRNA
agcccatgtccagggttagt

SEQ ID NO: 79994 - DNA, 20 bp, Artificial Sequence
  MKO10079994_B_Cxcr5
  gRNA
cggcttcctgttcgccttac

SEQ ID NO: 79995 - DNA, 20 bp, Artificial Sequence
  MKO10079995_B_Cxcr5
  gRNA
gagactactcttgcgccagt

SEQ ID NO: 79996 - DNA, 20 bp, Artificial Sequence
  MKO10079996_B_Cxcr6
  gRNA
gtcatgtgcaaaactcttcg

SEQ ID NO: 79997 - DNA, 20 bp, Artificial Sequence
  MKO10079997_B_Cxcr6
  gRNA
taagtttccagacgttcttc

SEQ ID NO: 79998 - DNA, 20 bp, Artificial Sequence
  MKO10079998_B_Cxcr6
  gRNA
gttctcctggctgttatcac

SEQ ID NO: 79999 - DNA, 20 bp, Artificial Sequence
  MKO10079999_B_Cxx1a
  gRNA
cctgttgtgcctgagcatgt

SEQ ID NO: 80000 - DNA, 20 bp, Artificial Sequence
  MKO10080000_B_Cxx1a
  gRNA
gttcgggtgggaggaggatg

SEQ ID NO: 80001 - DNA, 20 bp, Artificial Sequence
  MKO10080001_B_Cxx1a
  gRNA
tcggcctctttaccttgcct

SEQ ID NO: 80002 - DNA, 20 bp, Artificial Sequence
  MKO10080002_B_Cxx1b
  gRNA
cctgttgtgcctgagcatgt

SEQ ID NO: 80003 - DNA, 20 bp, Artificial Sequence
  MKO10080003_B_Cxx1b
  gRNA
gttcgggtgggaggaggatg

SEQ ID NO: 80004 - DNA, 20 bp, Artificial Sequence
  MKO10080004_B_Cxx1b
  gRNA
tcggcctctttaccttgcct

SEQ ID NO: 80005 - DNA, 20 bp, Artificial Sequence
  MKO10080005_B_Cxx1c
  gRNA
ccgagctgcgtaaaggccgt

SEQ ID NO: 80006 - DNA, 20 bp, Artificial Sequence
  MKO10080006_B_Cxx1c
  gRNA
cttgcgtttgtcggtgtcga

SEQ ID NO: 80007 - DNA, 20 bp, Artificial Sequence
  MKO10080007_B_Cxx1c
  gRNA
gccggagtaattgttgagca

SEQ ID NO: 80008 - DNA, 20 bp, Artificial Sequence
  MKO10080008_B_Cxxc1
  gRNA
cacttctgccggatcttgtt

SEQ ID NO: 80009 - DNA, 20 bp, Artificial Sequence
  MKO10080009_B_Cxxc1
  gRNA
gatgtgacaactgcaacgag

SEQ ID NO: 80010 - DNA, 20 bp, Artificial Sequence
  MKO10080010_B_Cxxc1
  gRNA
tttgcgacagatgcagtaga

SEQ ID NO: 80011 - DNA, 20 bp, Artificial Sequence
  MKO10080011_B_Cxxc4
  gRNA
aacgcttcagcgctgggaac

SEQ ID NO: 80012 - DNA, 20 bp, Artificial Sequence
  MKO10080012_B_Cxxc4
  gRNA
ggtggtgatgcgcgcgatct

SEQ ID NO: 80013 - DNA, 20 bp, Artificial Sequence
  MKO10080013_B_Cxxc4
  gRNA
ctgcgggaaggcgcccccgt

SEQ ID NO: 80014 - DNA, 20 bp, Artificial Sequence
  MKO10080014_B_Cxxc5
  gRNA
actgaaatcactgaaaccac

SEQ ID NO: 80015 - DNA, 20 bp, Artificial Sequence
  MKO10080015_B_Cxxc5
  gRNA
cgtcctgggagccaccgccg

SEQ ID NO: 80016 - DNA, 20 bp, Artificial Sequence
  MKO10080016_B_Cxxc5
  gRNA
ccagtccgacttcccctatc

SEQ ID NO: 80017 - DNA, 20 bp, Artificial Sequence
  MKO10080017_B_Cyb561a3
  gRNA
gaaaagcttctcattgatgc

SEQ ID NO: 80018 - DNA, 20 bp, Artificial Sequence
  MKO10080018_B_Cyb561a3
  gRNA
tccagcccctgttgcatgac

SEQ ID NO: 80019 - DNA, 20 bp, Artificial Sequence
  MKO10080019_B_Cyb561a3
  gRNA
aggagctctgactgatagac

SEQ ID NO: 80020 - DNA, 20 bp, Artificial Sequence
  MKO10080020_B_Cyb561d1
  gRNA
cttggcgcacctgatagctt

SEQ ID NO: 80021 - DNA, 20 bp, Artificial Sequence
  MKO10080021_B_Cyb561d1
  gRNA
ccctgtgttcatggccttgg

SEQ ID NO: 80022 - DNA, 20 bp, Artificial Sequence
  MKO10080022_B_Cyb561d1
  gRNA
gcaccgttactgtagccatc

SEQ ID NO: 80023 - DNA, 20 bp, Artificial Sequence
  MKO10080023_B_Cyb561d2
  gRNA
tggtaaagcctaacgccacg

SEQ ID NO: 80024 - DNA, 20 bp, Artificial Sequence
  MKO10080024_B_Cyb561d2
  gRNA
tcattccaggtctgttctcc

SEQ ID NO: 80025 - DNA, 20 bp, Artificial Sequence
  MKO10080025_B_Cyb561d2
  gRNA
tacagccagagacataagaa

SEQ ID NO: 80026 - DNA, 20 bp, Artificial Sequence
  MKO10080026_B_Cyb561
  gRNA
ggtggttgtgctctacatct

SEQ ID NO: 80027 - DNA, 20 bp, Artificial Sequence
  MKO10080027_B_Cyb561
  gRNA
cttcgccttcatcatcgccc

SEQ ID NO: 80028 - DNA, 20 bp, Artificial Sequence
  MKO10080028_B_Cyb561
  gRNA
cttaccccaatttaaacagc

SEQ ID NO: 80029 - DNA, 20 bp, Artificial Sequence
  MKO10080029_B_Cyb5b
  gRNA
agcagaacctcttccccgcc

SEQ ID NO: 80030 - DNA, 20 bp, Artificial Sequence
  MKO10080030_B_Cyb5b
  gRNA
ccaagaacaattcatgccaa

SEQ ID NO: 80031 - DNA, 20 bp, Artificial Sequence
  MKO10080031_B_Cyb5b
  gRNA
cctttggcatgaattgttct

SEQ ID NO: 80032 - DNA, 20 bp, Artificial Sequence
  MKO10080032_B_Cyb5d1
  gRNA
acacccataggtcctcgagc

SEQ ID NO: 80033 - DNA, 20 bp, Artificial Sequence
  MKO10080033_B_Cyb5d1
  gRNA
tattcttcaggtgggggctc

SEQ ID NO: 80034 - DNA, 20 bp, Artificial Sequence
  MKO10080034_B_Cyb5d1
  gRNA
acaaccagctcgaggaccta

SEQ ID NO: 80035 - DNA, 20 bp, Artificial Sequence
  MKO10080035_B_Cyb5d2
  gRNA
tcccaccatgcaattccgag

SEQ ID NO: 80036 - DNA, 20 bp, Artificial Sequence
  MKO10080036_B_Cyb5d2
  gRNA
acccacttcagaactaaccc

SEQ ID NO: 80037 - DNA, 20 bp, Artificial Sequence
  MKO10080037_B_Cyb5d2
  gRNA
agatactgacgctgcacaac

SEQ ID NO: 80038 - DNA, 20 bp, Artificial Sequence
  MKO10080038_B_Cyb5r1
  gRNA
tacctctctgcccgaattga

SEQ ID NO: 80039 - DNA, 20 bp, Artificial Sequence
  MKO10080039_B_Cyb5r1
  gRNA
tggagttccgggggccgagc

SEQ ID NO: 80040 - DNA, 20 bp, Artificial Sequence
  MKO10080040_B_Cyb5r1
  gRNA
tgaccagactgccatcaatt

SEQ ID NO: 80041 - DNA, 20 bp, Artificial Sequence
  MKO10080041_B_Cyb5r2
  gRNA
gccctcaccagaccatgtcc

SEQ ID NO: 80042 - DNA, 20 bp, Artificial Sequence
  MKO10080042_B_Cyb5r2
  gRNA
cgcctgttctacaatgagcc

SEQ ID NO: 80043 - DNA, 20 bp, Artificial Sequence
  MKO10080043_B_Cyb5r2
  gRNA
ttaacaatgaattggtgatc

SEQ ID NO: 80044 - DNA, 20 bp, Artificial Sequence
  MKO10080044_B_Cyb5r3
  gRNA
acttgatgtcggggttctcg

SEQ ID NO: 80045 - DNA, 20 bp, Artificial Sequence
  MKO10080045_B_Cyb5r3
  gRNA
ctggtagaccagtagcccat

SEQ ID NO: 80046 - DNA, 20 bp, Artificial Sequence
  MKO10080046_B_Cyb5r3
  gRNA
agggaaaatgtctcagtacc

SEQ ID NO: 80047 - DNA, 20 bp, Artificial Sequence
  MKO10080047_B_Cyb5r4
  gRNA
attaaaaagatctgttccat

SEQ ID NO: 80048 - DNA, 20 bp, Artificial Sequence
  MKO10080048_B_Cyb5r4
  gRNA
gtgaagcctgctgttccaaa

SEQ ID NO: 80049 - DNA, 20 bp, Artificial Sequence
  MKO10080049_B_Cyb5r4
  gRNA
ccaaatacagactgtcatga

SEQ ID NO: 80050 - DNA, 20 bp, Artificial Sequence
  MKO10080050_B_Cyb5rl
  gRNA
cctgcatgtaccgtaggatg

SEQ ID NO: 80051 - DNA, 20 bp, Artificial Sequence
  MKO10080051_B_Cyb5rl
  gRNA
cggctgcttcaagaccttcg

SEQ ID NO: 80052 - DNA, 20 bp, Artificial Sequence
  MKO10080052_B_Cyb5rl
  gRNA
tcatataagaagcttccgaa

SEQ ID NO: 80053 - DNA, 20 bp, Artificial Sequence
  MKO10080053_B_Cyb5
  gRNA
ttccccgatgatgtatgttt

SEQ ID NO: 80054 - DNA, 20 bp, Artificial Sequence
  MKO10080054_B_Cyb5
  gRNA
tttctagttggtggaccaac

SEQ ID NO: 80055 - DNA, 20 bp, Artificial Sequence
  MKO10080055_B_Cyb5
  gRNA
atcaaagatagccaagcctt

SEQ ID NO: 80056 - DNA, 20 bp, Artificial Sequence
  MKO10080056_B_Cyba
  gRNA
ctgctggacgtttcacacag

SEQ ID NO: 80057 - DNA, 20 bp, Artificial Sequence
  MKO10080057_B_Cyba
  gRNA
tggccaagcagacggtcccc

SEQ ID NO: 80058 - DNA, 20 bp, Artificial Sequence
  MKO10080058_B_Cyba
  gRNA
cccgaaaagcttcaccacag

SEQ ID NO: 80059 - DNA, 20 bp, Artificial Sequence
  MKO10080059_B_Cybb
  gRNA
catatagtcagcactggctc

SEQ ID NO: 80060 - DNA, 20 bp, Artificial Sequence
  MKO10080060_B_Cybb
  gRNA
ccagagtcgggatttctgac

SEQ ID NO: 80061 - DNA, 20 bp, Artificial Sequence
  MKO10080061_B_Cybb
  gRNA
tcatccaagctaccatctta

SEQ ID NO: 80062 - DNA, 20 bp, Artificial Sequence
  MKO10080062_B_Cybrd1
  gRNA
taactggcacccggtgctcg

SEQ ID NO: 80063 - DNA, 20 bp, Artificial Sequence
  MKO10080063_B_Cybrd1
  gRNA
tggcagtctgtacacgatga

SEQ ID NO: 80064 - DNA, 20 bp, Artificial Sequence
  MKO10080064_B_Cybrd1
  gRNA
aataagctccgcccacagta

SEQ ID NO: 80065 - DNA, 20 bp, Artificial Sequence
  MKO10080065_B_Cyc1
  gRNA
tcgagaagggccagacttcg

SEQ ID NO: 80066 - DNA, 20 bp, Artificial Sequence
  MKO10080066_B_Cyc1
  gRNA
gtgtccttgtcctcgaagtc

SEQ ID NO: 80067 - DNA, 20 bp, Artificial Sequence
  MKO10080067_B_Cyc1
  gRNA
ccgtgtagcacactcccacc

SEQ ID NO: 80068 - DNA, 20 bp, Artificial Sequence
  MKO10080068_B_Cycs
  gRNA
ggataccctgatggagtatt

SEQ ID NO: 80069 - DNA, 20 bp, Artificial Sequence
  MKO10080069_B_Cycs
  gRNA
gtgtgcccagtgccacactg

SEQ ID NO: 80070 - DNA, 20 bp, Artificial Sequence
  MKO10080070_B_Cycs
  gRNA
tgtaagagaatccagcagcc

SEQ ID NO: 80071 - DNA, 20 bp, Artificial Sequence
  MKO10080071_B_Cyct
  gRNA
tacttcacttcatgaggatg

SEQ ID NO: 80072 - DNA, 20 bp, Artificial Sequence
  MKO10080072_B_Cyct
  gRNA
gcatccgtgtaagaaaatcc

SEQ ID NO: 80073 - DNA, 20 bp, Artificial Sequence
  MKO10080073_B_Cyct
  gRNA
ccaaatctctggggcctctt

SEQ ID NO: 80074 - DNA, 20 bp, Artificial Sequence
  MKO10080074_B_Cyfip1
  gRNA
gatacattaccatgctagag

SEQ ID NO: 80075 - DNA, 20 bp, Artificial Sequence
  MKO10080075_B_Cyfip1
  gRNA
tgaaatttatgagaaaaccg

SEQ ID NO: 80076 - DNA, 20 bp, Artificial Sequence
  MKO10080076_B_Cyfip1
  gRNA
acagcatgacagcatactct

SEQ ID NO: 80077 - DNA, 20 bp, Artificial Sequence
  MKO10080077_B_Cyfip2
  gRNA
ctcgctacagaagcgctcga

SEQ ID NO: 80078 - DNA, 20 bp, Artificial Sequence
  MKO10080078_B_Cyfip2
  gRNA
catcgagcgcttctgtagcg

SEQ ID NO: 80079 - DNA, 20 bp, Artificial Sequence
  MKO10080079_B_Cyfip2
  gRNA
acagcatgactgcatagtcg

SEQ ID NO: 80080 - DNA, 20 bp, Artificial Sequence
  MKO10080080_B_Cygb
  gRNA
ggaaggcggttcaggctacg

SEQ ID NO: 80081 - DNA, 20 bp, Artificial Sequence
  MKO10080081_B_Cygb
  gRNA
ccggctgtatgccaactgcg

SEQ ID NO: 80082 - DNA, 20 bp, Artificial Sequence
  MKO10080082_B_Cygb
  gRNA
cattctggaggtgatcgccg

SEQ ID NO: 80083 - DNA, 20 bp, Artificial Sequence
  MKO10080083_B_Cyhr1
  gRNA
actgatctcacaacgacagt

SEQ ID NO: 80084 - DNA, 20 bp, Artificial Sequence
  MKO10080084_B_Cyhr1
  gRNA
tgtgctcacccgaccaagac

SEQ ID NO: 80085 - DNA, 20 bp, Artificial Sequence
  MKO10080085_B_Cyhr1
  gRNA
caggtagttgggcctattgc

SEQ ID NO: 80086 - DNA, 20 bp, Artificial Sequence
  MKO10080086_B_Cylc1
  gRNA
actgcaacttctaattctga

SEQ ID NO: 80087 - DNA, 20 bp, Artificial Sequence
  MKO10080087_B_Cylc1
  gRNA
aaacttcaagttcttcctgt

SEQ ID NO: 80088 - DNA, 20 bp, Artificial Sequence
  MKO10080088_B_Cylc1
  gRNA
ccagataaaaagaagagatc

SEQ ID NO: 80089 - DNA, 20 bp, Artificial Sequence
  MKO10080089_B_Cylc2
  gRNA
gagctgtattgttctgtaac

SEQ ID NO: 80090 - DNA, 20 bp, Artificial Sequence
  MKO10080090_B_Cylc2
  gRNA
tggcatttcccaaaccacca

SEQ ID NO: 80091 - DNA, 20 bp, Artificial Sequence
  MKO10080091_B_Cylc2
  gRNA
gaccactaaaaaagaatcca

SEQ ID NO: 80092 - DNA, 20 bp, Artificial Sequence
  MKO10080092_B_Cyld
  gRNA
catttctaggataaccctat

SEQ ID NO: 80093 - DNA, 20 bp, Artificial Sequence
  MKO10080093_B_Cyld
  gRNA
tctctttaggaagaaggtcg

SEQ ID NO: 80094 - DNA, 20 bp, Artificial Sequence
  MKO10080094_B_Cyld
  gRNA
gcaggttgaacctccccctt

SEQ ID NO: 80095 - DNA, 20 bp, Artificial Sequence
  MKO10080095_B_Cym
  gRNA
aagcccctgtttgtccagta

SEQ ID NO: 80096 - DNA, 20 bp, Artificial Sequence
  MKO10080096_B_Cym
  gRNA
agaacaggtcttgggccacc

SEQ ID NO: 80097 - DNA, 20 bp, Artificial Sequence
  MKO10080097_B_Cym
  gRNA
acttactgtgacagtgtcgt

SEQ ID NO: 80098 - DNA, 20 bp, Artificial Sequence
  MKO10080098_B_Cyp11a1
  gRNA
gtcgatactcttctcatgcg

SEQ ID NO: 80099 - DNA, 20 bp, Artificial Sequence
  MKO10080099_B_Cyp11a1
  gRNA
aacattaccgagatgctggc

SEQ ID NO: 80100 - DNA, 20 bp, Artificial Sequence
  MKO10080100_B_Cyp11a1
  gRNA
gactcctcagaactaagacc

SEQ ID NO: 80101 - DNA, 20 bp, Artificial Sequence
  MKO10080101_B_Cyp11b1
  gRNA
cagagggtcgtccacagtcc

SEQ ID NO: 80102 - DNA, 20 bp, Artificial Sequence
  MKO10080102_B_Cyp11b1
  gRNA
caagaatgtgtatcgagagc

SEQ ID NO: 80103 - DNA, 20 bp, Artificial Sequence
  MKO10080103_B_Cyp11b1
  gRNA
gtgttcaactataccataga

SEQ ID NO: 80104 - DNA, 20 bp, Artificial Sequence
  MKO10080104_B_Cyp11b2
  gRNA
cgccatcaaagcgaactcta

SEQ ID NO: 80105 - DNA, 20 bp, Artificial Sequence
  MKO10080105_B_Cyp11b2
  gRNA
caccgctgggagcgttgaca

SEQ ID NO: 80106 - DNA, 20 bp, Artificial Sequence
  MKO10080106_B_Cyp11b2
  gRNA
tgtccagcgagtcaagctct

SEQ ID NO: 80107 - DNA, 20 bp, Artificial Sequence
  MKO10080107_B_Cyp17a1
  gRNA
aggaaaaggcgtcgcctttg

SEQ ID NO: 80108 - DNA, 20 bp, Artificial Sequence
  MKO10080108_B_Cyp17a1
  gRNA
tcacctcaggattgtgcacc

SEQ ID NO: 80109 - DNA, 20 bp, Artificial Sequence
  MKO10080109_B_Cyp17a1
  gRNA
atatgtccaccagatcgctg

SEQ ID NO: 80110 - DNA, 20 bp, Artificial Sequence
  MKO10080110_B_Cyp19a1
  gRNA
gggcgaagtcaccgacacct

SEQ ID NO: 80111 - DNA, 20 bp, Artificial Sequence
  MKO10080111_B_Cyp19a1
  gRNA
attgggcccctcatttccca

SEQ ID NO: 80112 - DNA, 20 bp, Artificial Sequence
  MKO10080112_B_Cyp19a1
  gRNA
catcttattgtagtagttgc

SEQ ID NO: 80113 - DNA, 20 bp, Artificial Sequence
  MKO10080113_B_Cyp1a1
  gRNA
ggtcatggttaacctgccac

SEQ ID NO: 80114 - DNA, 20 bp, Artificial Sequence
  MKO10080114_B_Cyp1a1
  gRNA
tgtacctggtaaccaaccct

SEQ ID NO: 80115 - DNA, 20 bp, Artificial Sequence
  MKO10080115_B_Cyp1a1
  gRNA
aggggacgaaggatgaatgc

SEQ ID NO: 80116 - DNA, 20 bp, Artificial Sequence
  MKO10080116_B_Cyp1a2
  gRNA
cgtgcagaggaagatccatg

SEQ ID NO: 80117 - DNA, 20 bp, Artificial Sequence
  MKO10080117_B_Cyp1a2
  gRNA
acgagggacacctcactgaa

SEQ ID NO: 80118 - DNA, 20 bp, Artificial Sequence
  MKO10080118_B_Cyp1a2
  gRNA
agttctcgctgtgcttgaac

SEQ ID NO: 80119 - DNA, 20 bp, Artificial Sequence
  MKO10080119_B_Cyp1b1
  gRNA
caaacggaggtgcatcggtg

SEQ ID NO: 80120 - DNA, 20 bp, Artificial Sequence
  MKO10080120_B_Cyp1b1
  gRNA
ctaggaactccgcatcgtcg

SEQ ID NO: 80121 - DNA, 20 bp, Artificial Sequence
  MKO10080121_B_Cyp1b1
  gRNA
ctggaagacgcagcgacgct

SEQ ID NO: 80122 - DNA, 20 bp, Artificial Sequence
  MKO10080122_B_Cyp20a1
  gRNA
aagcaaaaccgagcatatgc

SEQ ID NO: 80123 - DNA, 20 bp, Artificial Sequence
  MKO10080123_B_Cyp20a1
  gRNA
cacgtgaggaggaaactgta

SEQ ID NO: 80124 - DNA, 20 bp, Artificial Sequence
  MKO10080124_B_Cyp20a1
  gRNA
cttccactgtttacaatgtc

SEQ ID NO: 80125 - DNA, 20 bp, Artificial Sequence
  MKO10080125_B_Cyp21a1
  gRNA
agtctcgcatgcccagcatc

SEQ ID NO: 80126 - DNA, 20 bp, Artificial Sequence
  MKO10080126_B_Cyp21a1
  gRNA
ctctcgctcagccctgatgc

SEQ ID NO: 80127 - DNA, 20 bp, Artificial Sequence
  MKO10080127_B_Cyp21a1
  gRNA
tccacagcgcatgcgagccc

SEQ ID NO: 80128 - DNA, 20 bp, Artificial Sequence
  MKO10080128_B_Cyp24a1
  gRNA
tgtacagcgagctgaacaaa

SEQ ID NO: 80129 - DNA, 20 bp, Artificial Sequence
  MKO10080129_B_Cyp24a1
  gRNA
tcagctcgctgtacaagtct

SEQ ID NO: 80130 - DNA, 20 bp, Artificial Sequence
  MKO10080130_B_Cyp24a1
  gRNA
gtccagcttcatgatttcca

SEQ ID NO: 80131 - DNA, 20 bp, Artificial Sequence
  MKO10080131_B_Cyp26a1
  gRNA
ctacgtgcccgtgatcgctg

SEQ ID NO: 80132 - DNA, 20 bp, Artificial Sequence
  MKO10080132_B_Cyp26a1
  gRNA
ccttatacacgcgcgcatcg

SEQ ID NO: 80133 - DNA, 20 bp, Artificial Sequence
  MKO10080133_B_Cyp26a1
  gRNA
accggttggtgtcggtgcac

SEQ ID NO: 80134 - DNA, 20 bp, Artificial Sequence
  MKO10080134_B_Cyp26b1
  gRNA
cgtccgagtagtctttgccc

SEQ ID NO: 80135 - DNA, 20 bp, Artificial Sequence
  MKO10080135_B_Cyp26b1
  gRNA
ccggcttccagtcgtcgcgc

SEQ ID NO: 80136 - DNA, 20 bp, Artificial Sequence
  MKO10080136_B_Cyp26b1
  gRNA
tgtgcttgcactggccgtcg

SEQ ID NO: 80137 - DNA, 20 bp, Artificial Sequence
  MKO10080137_B_Cyp26c1
  gRNA
ctacgtcgactgcgtagtca

SEQ ID NO: 80138 - DNA, 20 bp, Artificial Sequence
  MKO10080138_B_Cyp26c1
  gRNA
tcaccttacgccgttgccga

SEQ ID NO: 80139 - DNA, 20 bp, Artificial Sequence
  MKO10080139_B_Cyp26c1
  gRNA
cgaagcgcgatgcaccgagc

SEQ ID NO: 80140 - DNA, 20 bp, Artificial Sequence
  MKO10080140_B_Cyp27a1
  gRNA
ccagatggagtccgggtatc

SEQ ID NO: 80141 - DNA, 20 bp, Artificial Sequence
  MKO10080141_B_Cyp27a1
  gRNA
gaaggaccaccgagaccaca

SEQ ID NO: 80142 - DNA, 20 bp, Artificial Sequence
  MKO10080142_B_Cyp27a1
  gRNA
cgcgtcctctgctgcccttt

SEQ ID NO: 80143 - DNA, 20 bp, Artificial Sequence
  MKO10080143_B_Cyp27b1
  gRNA
ccaaagctgccagaccatat

SEQ ID NO: 80144 - DNA, 20 bp, Artificial Sequence
  MKO10080144_B_Cyp27b1
  gRNA
cgccgccaccagcgtgcttg

SEQ ID NO: 80145 - DNA, 20 bp, Artificial Sequence
  MKO10080145_B_Cyp27b1
  gRNA
ttagtcgtcgcacaaggtca

SEQ ID NO: 80146 - DNA, 20 bp, Artificial Sequence
  MKO10080146_B_Cyp2a12
  gRNA
gcaggtacttcataactgaa

SEQ ID NO: 80147 - DNA, 20 bp, Artificial Sequence
  MKO10080147_B_Cyp2a12
  gRNA
gaagcagaaccagagtaccc

SEQ ID NO: 80148 - DNA, 20 bp, Artificial Sequence
  MKO10080148_B_Cyp2a12
  gRNA
ctttgtcctcatagttgaag

SEQ ID NO: 80149 - DNA, 20 bp, Artificial Sequence
  MKO10080149_B_Cyp2a22
  gRNA
gagtctgttacctgacctgt

SEQ ID NO: 80150 - DNA, 20 bp, Artificial Sequence
  MKO10080150_B_Cyp2a22
  gRNA
aaggagtcaatgaagcctcg

SEQ ID NO: 80151 - DNA, 20 bp, Artificial Sequence
  MKO10080151_B_Cyp2a22
  gRNA
aattggggtccagggtactg

SEQ ID NO: 80152 - DNA, 20 bp, Artificial Sequence
  MKO10080152_B_Cyp2a4
  gRNA
tcctgtattcaccatctatc

SEQ ID NO: 80153 - DNA, 20 bp, Artificial Sequence
  MKO10080153_B_Cyp2a4
  gRNA
gcttctccatcaccacgctg

SEQ ID NO: 80154 - DNA, 20 bp, Artificial Sequence
  MKO10080154_B_Cyp2a4
  gRNA
ccaggcatagccttcagcag

SEQ ID NO: 80155 - DNA, 20 bp, Artificial Sequence
  MKO10080155_B_Cyp2a5
  gRNA
ccaggcgtagccttcagcag

SEQ ID NO: 80156 - DNA, 20 bp, Artificial Sequence
  MKO10080156_B_Cyp2a5
  gRNA
gtcactgcttcgaatgatgc

SEQ ID NO: 80157 - DNA, 20 bp, Artificial Sequence
  MKO10080157_B_Cyp2a5
  gRNA
gcatcattcgaagcagtgac

SEQ ID NO: 80158 - DNA, 20 bp, Artificial Sequence
  MKO10080158_B_Cyp2ab1
  gRNA
agccctcatcaattcaaccc

SEQ ID NO: 80159 - DNA, 20 bp, Artificial Sequence
  MKO10080159_B_Cyp2ab1
  gRNA
attcgggcaagctgctcccc

SEQ ID NO: 80160 - DNA, 20 bp, Artificial Sequence
  MKO10080160_B_Cyp2ab1
  gRNA
aaccatcatcctgcccaatc

SEQ ID NO: 80161 - DNA, 20 bp, Artificial Sequence
  MKO10080161_B_Cyp2b10
  gRNA
tgtcgttgagccaaccttca

SEQ ID NO: 80162 - DNA, 20 bp, Artificial Sequence
  MKO10080162_B_Cyp2b10
  gRNA
tgtagtcgaggagttcctgc

SEQ ID NO: 80163 - DNA, 20 bp, Artificial Sequence
  MKO10080163_B_Cyp2b10
  gRNA
agtcttaccatattccttga

SEQ ID NO: 80164 - DNA, 20 bp, Artificial Sequence
  MKO10080164_B_Cyp2b13
  gRNA
tcatcgatacctatctgctg

SEQ ID NO: 80165 - DNA, 20 bp, Artificial Sequence
  MKO10080165_B_Cyp2b13
  gRNA
aactagctgagctgcagcaa

SEQ ID NO: 80166 - DNA, 20 bp, Artificial Sequence
  MKO10080166_B_Cyp2b13
  gRNA
tggcagcttcaagaaaaaca

SEQ ID NO: 80167 - DNA, 20 bp, Artificial Sequence
  MKO10080167_B_Cyp2b19
  gRNA
tgatacctaccttctgcgca

SEQ ID NO: 80168 - DNA, 20 bp, Artificial Sequence
  MKO10080168_B_Cyp2b19
  gRNA
agatcagatttagcagatgc

SEQ ID NO: 80169 - DNA, 20 bp, Artificial Sequence
  MKO10080169_B_Cyp2b19
  gRNA
tgtagtcaaggatttcctgc

SEQ ID NO: 80170 - DNA, 20 bp, Artificial Sequence
  MKO10080170_B_Cyp2b23
  gRNA
gagtgccaggaaagtacttc

SEQ ID NO: 80171 - DNA, 20 bp, Artificial Sequence
  MKO10080171_B_Cyp2b23
  gRNA
taaccttctccatgcgcaaa

SEQ ID NO: 80172 - DNA, 20 bp, Artificial Sequence
  MKO10080172_B_Cyp2b23
  gRNA
tcaccttccaggagcccccc

SEQ ID NO: 80173 - DNA, 20 bp, Artificial Sequence
  MKO10080173_B_Cyp2b9
  gRNA
acattgatacctaccttctg

SEQ ID NO: 80174 - DNA, 20 bp, Artificial Sequence
  MKO10080174_B_Cyp2b9
  gRNA
tcactcttaagctcattctc

SEQ ID NO: 80175 - DNA, 20 bp, Artificial Sequence
  MKO10080175_B_Cyp2b9
  gRNA
tcaattcctccaccaaacat

SEQ ID NO: 80176 - DNA, 20 bp, Artificial Sequence
  MKO10080176_B_Cyp2c29
  gRNA
actcatgaccctgcgaaatt

SEQ ID NO: 80177 - DNA, 20 bp, Artificial Sequence
  MKO10080177_B_Cyp2c29
  gRNA
tcactcattgactattgtcc

SEQ ID NO: 80178 - DNA, 20 bp, Artificial Sequence
  MKO10080178_B_Cyp2c29
  gRNA
tccccatgcccaaatttcgc

SEQ ID NO: 80179 - DNA, 20 bp, Artificial Sequence
  MKO10080179_B_Cyp2c37
  gRNA
aaaaattgtttatgacttcc

SEQ ID NO: 80180 - DNA, 20 bp, Artificial Sequence
  MKO10080180_B_Cyp2c37
  gRNA
ttctagttatcaaaagttta

SEQ ID NO: 80181 - DNA, 20 bp, Artificial Sequence
  MKO10080181_B_Cyp2c37
  gRNA
aaataatcaataaagtcacg

SEQ ID NO: 80182 - DNA, 20 bp, Artificial Sequence
  MKO10080182_B_Cyp2c38
  gRNA
aaataatcgataaagtcacg

SEQ ID NO: 80183 - DNA, 20 bp, Artificial Sequence
  MKO10080183_B_Cyp2c38
  gRNA
tttcctgattaaacaaaaac

SEQ ID NO: 80184 - DNA, 20 bp, Artificial Sequence
  MKO10080184_B_Cyp2c38
  gRNA
tccccatgcccaaattcctt

SEQ ID NO: 80185 - DNA, 20 bp, Artificial Sequence
  MKO10080185_B_Cyp2c39
  gRNA
actcacgaccctgcgaaatt

SEQ ID NO: 80186 - DNA, 20 bp, Artificial Sequence
  MKO10080186_B_Cyp2c39
  gRNA
taataatcaataaaatcacg

SEQ ID NO: 80187 - DNA, 20 bp, Artificial Sequence
  MKO10080187_B_Cyp2c39
  gRNA
ttacttgattaaacaaaaac

SEQ ID NO: 80188 - DNA, 20 bp, Artificial Sequence
  MKO10080188_B_Cyp2c40
  gRNA
ctcttgcactttgttctcaa

SEQ ID NO: 80189 - DNA, 20 bp, Artificial Sequence
  MKO10080189_B_Cyp2c40
  gRNA
aaatgtatggaaagccacaa

SEQ ID NO: 80190 - DNA, 20 bp, Artificial Sequence
  MKO10080190_B_Cyp2c40
  gRNA
tgtgatccccaattcatcat

SEQ ID NO: 80191 - DNA, 20 bp, Artificial Sequence
  MKO10080191_B_Cyp2c44
  gRNA
gaatcgctcgttgaaaagga

SEQ ID NO: 80192 - DNA, 20 bp, Artificial Sequence
  MKO10080192_B_Cyp2c44
  gRNA
ctatcttcgataatgggcag

SEQ ID NO: 80193 - DNA, 20 bp, Artificial Sequence
  MKO10080193_B_Cyp2c44
  gRNA
ggatccatatagagttcagt

SEQ ID NO: 80194 - DNA, 20 bp, Artificial Sequence
  MKO10080194_B_Cyp2c50
  gRNA
ttaggcattatatttagtaa

SEQ ID NO: 80195 - DNA, 20 bp, Artificial Sequence
  MKO10080195_B_Cyp2c50
  gRNA
gacaggagagggtgaacacc

SEQ ID NO: 80196 - DNA, 20 bp, Artificial Sequence
  MKO10080196_B_Cyp2c50
  gRNA
tcctagttatcaaaagttta

SEQ ID NO: 80197 - DNA, 20 bp, Artificial Sequence
  MKO10080197_B_Cyp2c54
  gRNA
ttccagcaaagacatcccca

SEQ ID NO: 80198 - DNA, 20 bp, Artificial Sequence
  MKO10080198_B_Cyp2c54
  gRNA
ttaggcattggatttagtaa

SEQ ID NO: 80199 - DNA, 20 bp, Artificial Sequence
  MKO10080199_B_Cyp2c54
  gRNA
ccaagattctgagcaccccc

SEQ ID NO: 80200 - DNA, 20 bp, Artificial Sequence
  MKO10080200_B_Cyp2c55
  gRNA
gcttctcaatcatgaccttg

SEQ ID NO: 80201 - DNA, 20 bp, Artificial Sequence
  MKO10080201_B_Cyp2c55
  gRNA
ctttgactcacctgcatcca

SEQ ID NO: 80202 - DNA, 20 bp, Artificial Sequence
  MKO10080202_B_Cyp2c55
  gRNA
tcttagctcttccacaagac

SEQ ID NO: 80203 - DNA, 20 bp, Artificial Sequence
  MKO10080203_B_Cyp2c65
  gRNA
aaagaagcctttactgatca

SEQ ID NO: 80204 - DNA, 20 bp, Artificial Sequence
  MKO10080204_B_Cyp2c65
  gRNA
aaaacagcatcaagagtcac

SEQ ID NO: 80205 - DNA, 20 bp, Artificial Sequence
  MKO10080205_B_Cyp2c65
  gRNA
caaaaagtaatgttctgcaa

SEQ ID NO: 80206 - DNA, 20 bp, Artificial Sequence
  MKO10080206_B_Cyp2c66
  gRNA
aatacagcataaagagtcac

SEQ ID NO: 80207 - DNA, 20 bp, Artificial Sequence
  MKO10080207_B_Cyp2c66
  gRNA
ttcatttaagatgtctataa

SEQ ID NO: 80208 - DNA, 20 bp, Artificial Sequence
  MKO10080208_B_Cyp2c66
  gRNA
gctatcattgattatctacc

SEQ ID NO: 80209 - DNA, 20 bp, Artificial Sequence
  MKO10080209_B_Cyp2c67
  gRNA
cttcctaattcaaagatgtc

SEQ ID NO: 80210 - DNA, 20 bp, Artificial Sequence
  MKO10080210_B_Cyp2c67
  gRNA
attgattgtgaagacccttg

SEQ ID NO: 80211 - DNA, 20 bp, Artificial Sequence
  MKO10080211_B_Cyp2c67
  gRNA
ttacctgacatctttgaatt

SEQ ID NO: 80212 - DNA, 20 bp, Artificial Sequence
  MKO10080212_B_Cyp2c68
  gRNA
tttgagctctcctgagtgtc

SEQ ID NO: 80213 - DNA, 20 bp, Artificial Sequence
  MKO10080213_B_Cyp2c68
  gRNA
aagtaatcaacgaagtcccg

SEQ ID NO: 80214 - DNA, 20 bp, Artificial Sequence
  MKO10080214_B_Cyp2c68
  gRNA
cttggctttacctgacactc

SEQ ID NO: 80215 - DNA, 20 bp, Artificial Sequence
  MKO10080215_B_Cyp2c69
  gRNA
ttagaaaccttgtcaaaaaa

SEQ ID NO: 80216 - DNA, 20 bp, Artificial Sequence
  MKO10080216_B_Cyp2c69
  gRNA
ctcttgcactttgttctcaa

SEQ ID NO: 80217 - DNA, 20 bp, Artificial Sequence
  MKO10080217_B_Cyp2c69
  gRNA
tgtgatccccaattcatcat

SEQ ID NO: 80218 - DNA, 20 bp, Artificial Sequence
  MKO10080218_B_Cyp2c70
  gRNA
cccaggtatacagtaaacac

SEQ ID NO: 80219 - DNA, 20 bp, Artificial Sequence
  MKO10080219_B_Cyp2c70
  gRNA
ccgaaccaaacctgggacca

SEQ ID NO: 80220 - DNA, 20 bp, Artificial Sequence
  MKO10080220_B_Cyp2c70
  gRNA
ccagggagatagtataaaat

SEQ ID NO: 80221 - DNA, 20 bp, Artificial Sequence
  MKO10080221_B_Cyp2d10
  gRNA
gtactttctgcatcctgatg

SEQ ID NO: 80222 - DNA, 20 bp, Artificial Sequence
  MKO10080222_B_Cyp2d10
  gRNA
cgtcagcttcaaaaccgcta

SEQ ID NO: 80223 - DNA, 20 bp, Artificial Sequence
  MKO10080223_B_Cyp2d10
  gRNA
agccctttaccttgggatcc

SEQ ID NO: 80224 - DNA, 20 bp, Artificial Sequence
  MKO10080224_B_Cyp2d11
  gRNA
ccatgaaggacttctgacct

SEQ ID NO: 80225 - DNA, 20 bp, Artificial Sequence
  MKO10080225_B_Cyp2d11
  gRNA
cttcagcttcaaaaccgcta

SEQ ID NO: 80226 - DNA, 20 bp, Artificial Sequence
  MKO10080226_B_Cyp2d11
  gRNA
agccctttaccttgggatcc

SEQ ID NO: 80227 - DNA, 20 bp, Artificial Sequence
  MKO10080227_B_Cyp2d12
  gRNA
ggttgtgatcaacagaatga

SEQ ID NO: 80228 - DNA, 20 bp, Artificial Sequence
  MKO10080228_B_Cyp2d12
  gRNA
ataacctgttgactgaaaac

SEQ ID NO: 80229 - DNA, 20 bp, Artificial Sequence
  MKO10080229_B_Cyp2d12
  gRNA
tgaaggacttctgactttgc

SEQ ID NO: 80230 - DNA, 20 bp, Artificial Sequence
  MKO10080230_B_Cyp2d22
  gRNA
gtcatcgtactcaaagcggc

SEQ ID NO: 80231 - DNA, 20 bp, Artificial Sequence
  MKO10080231_B_Cyp2d22
  gRNA
acgatgacccacgcttcatc

SEQ ID NO: 80232 - DNA, 20 bp, Artificial Sequence
  MKO10080232_B_Cyp2d22
  gRNA
gtttcaccagtgcctctcgc

SEQ ID NO: 80233 - DNA, 20 bp, Artificial Sequence
  MKO10080233_B_Cyp2d26
  gRNA
gtgtctaccctgcgtgactt

SEQ ID NO: 80234 - DNA, 20 bp, Artificial Sequence
  MKO10080234_B_Cyp2d26
  gRNA
acatcacccaccggcctcct

SEQ ID NO: 80235 - DNA, 20 bp, Artificial Sequence
  MKO10080235_B_Cyp2d26
  gRNA
ccaatgctactacacatccc

SEQ ID NO: 80236 - DNA, 20 bp, Artificial Sequence
  MKO10080236_B_Cyp2d34
  gRNA
ggtgtggtccttgcatctta

SEQ ID NO: 80237 - DNA, 20 bp, Artificial Sequence
  MKO10080237_B_Cyp2d34
  gRNA
gggatttgctcttaaaacct

SEQ ID NO: 80238 - DNA, 20 bp, Artificial Sequence
  MKO10080238_B_Cyp2d34
  gRNA
gtcagcagtgtccttgccac

SEQ ID NO: 80239 - DNA, 20 bp, Artificial Sequence
  MKO10080239_B_Cyp2d40
  gRNA
agtcaccagcttatccacca

SEQ ID NO: 80240 - DNA, 20 bp, Artificial Sequence
  MKO10080240_B_Cyp2d40
  gRNA
cgtctccatctcagccataa

SEQ ID NO: 80241 - DNA, 20 bp, Artificial Sequence
  MKO10080241_B_Cyp2d40
  gRNA
ctttccaggccgagtgcaag

SEQ ID NO: 80242 - DNA, 20 bp, Artificial Sequence
  MKO10080242_B_Cyp2d9
  gRNA
gaaggcatcacagaggtgat

SEQ ID NO: 80243 - DNA, 20 bp, Artificial Sequence
  MKO10080243_B_Cyp2d9
  gRNA
tgacgtgttcagcctacaga

SEQ ID NO: 80244 - DNA, 20 bp, Artificial Sequence
  MKO10080244_B_Cyp2d9
  gRNA
cagcatggggttgggattga

SEQ ID NO: 80245 - DNA, 20 bp, Artificial Sequence
  MKO10080245_B_Cyp2e1
  gRNA
aggcgcatcgtggtcctgca

SEQ ID NO: 80246 - DNA, 20 bp, Artificial Sequence
  MKO10080246_B_Cyp2e1
  gRNA
aatatccgcaatgacattgc

SEQ ID NO: 80247 - DNA, 20 bp, Artificial Sequence
  MKO10080247_B_Cyp2e1
  gRNA
ttacgatgacaagaagtgtc

SEQ ID NO: 80248 - DNA, 20 bp, Artificial Sequence
  MKO10080248_B_Cyp2f2
  gRNA
gtcggtgttcacggtgtacc

SEQ ID NO: 80249 - DNA, 20 bp, Artificial Sequence
  MKO10080249_B_Cyp2f2
  gRNA
ccaggcatcgccttctccga

SEQ ID NO: 80250 - DNA, 20 bp, Artificial Sequence
  MKO10080250_B_Cyp2f2
  gRNA
gtccaaatcctgcggaactt

SEQ ID NO: 80251 - DNA, 20 bp, Artificial Sequence
  MKO10080251_B_Cyp2g1
  gRNA
tccccatcccaaagtttcga

SEQ ID NO: 80252 - DNA, 20 bp, Artificial Sequence
  MKO10080252_B_Cyp2g1
  gRNA
aggccagtggttgtcttatg

SEQ ID NO: 80253 - DNA, 20 bp, Artificial Sequence
  MKO10080253_B_Cyp2g1
  gRNA
tgcagttatatgatatgtac

SEQ ID NO: 80254 - DNA, 20 bp, Artificial Sequence
  MKO10080254_B_Cyp2j11
  gRNA
ggagcagtgtatacaagaag

SEQ ID NO: 80255 - DNA, 20 bp, Artificial Sequence
  MKO10080255_B_Cyp2j11
  gRNA
aaagcgctccccaaagatga

SEQ ID NO: 80256 - DNA, 20 bp, Artificial Sequence
  MKO10080256_B_Cyp2j11
  gRNA
ctgacaatactcaagaattt

SEQ ID NO: 80257 - DNA, 20 bp, Artificial Sequence
  MKO10080257_B_Cyp2j12
  gRNA
tccataattcaatatgttcc

SEQ ID NO: 80258 - DNA, 20 bp, Artificial Sequence
  MKO10080258_B_Cyp2j12
  gRNA
cattgatgcctccaaacacg

SEQ ID NO: 80259 - DNA, 20 bp, Artificial Sequence
  MKO10080259_B_Cyp2j12
  gRNA
aaacgtgtctttaataacaa

SEQ ID NO: 80260 - DNA, 20 bp, Artificial Sequence
  MKO10080260_B_Cyp2j13
  gRNA
aaaccgttccccaaaggtga

SEQ ID NO: 80261 - DNA, 20 bp, Artificial Sequence
  MKO10080261_B_Cyp2j13
  gRNA
ttgacaatcaccgcaaagac

SEQ ID NO: 80262 - DNA, 20 bp, Artificial Sequence
  MKO10080262_B_Cyp2j13
  gRNA
ggaggcctcccacctggtgg

SEQ ID NO: 80263 - DNA, 20 bp, Artificial Sequence
  MKO10080263_B_Cyp2j5
  gRNA
tcaccagtggtggttgtatc

SEQ ID NO: 80264 - DNA, 20 bp, Artificial Sequence
  MKO10080264_B_Cyp2j5
  gRNA
ttatgaggactgccagtttc

SEQ ID NO: 80265 - DNA, 20 bp, Artificial Sequence
  MKO10080265_B_Cyp2j5
  gRNA
agcttcaaatgaggattaaa

SEQ ID NO: 80266 - DNA, 20 bp, Artificial Sequence
  MKO10080266_B_Cyp2j6
  gRNA
cttgtatgattgatgatcac

SEQ ID NO: 80267 - DNA, 20 bp, Artificial Sequence
  MKO10080267_B_Cyp2j6
  gRNA
aagttatgtcaccaagattc

SEQ ID NO: 80268 - DNA, 20 bp, Artificial Sequence
  MKO10080268_B_Cyp2j6
  gRNA
catcggggttccagtctttc

SEQ ID NO: 80269 - DNA, 20 bp, Artificial Sequence
  MKO10080269_B_Cyp2j8
  gRNA
atcatttgttccatcactat

SEQ ID NO: 80270 - DNA, 20 bp, Artificial Sequence
  MKO10080270_B_Cyp2j8
  gRNA
aacctaattagcctggattt

SEQ ID NO: 80271 - DNA, 20 bp, Artificial Sequence
  MKO10080271_B_Cyp2j8
  gRNA
tgatgctttccttacagaaa

SEQ ID NO: 80272 - DNA, 20 bp, Artificial Sequence
  MKO10080272_B_Cyp2j9
  gRNA
gcattgctgatattgaagtg

SEQ ID NO: 80273 - DNA, 20 bp, Artificial Sequence
  MKO10080273_B_Cyp2j9
  gRNA
atgccagttataaccactga

SEQ ID NO: 80274 - DNA, 20 bp, Artificial Sequence
  MKO10080274_B_Cyp2j9
  gRNA
ggaagatactgaagtatcct

SEQ ID NO: 80275 - DNA, 20 bp, Artificial Sequence
  MKO10080275_B_Cyp2r1
  gRNA
ttgtaatgtcatgcccaacc

SEQ ID NO: 80276 - DNA, 20 bp, Artificial Sequence
  MKO10080276_B_Cyp2r1
  gRNA
aatccatcctctaccatatc

SEQ ID NO: 80277 - DNA, 20 bp, Artificial Sequence
  MKO10080277_B_Cyp2r1
  gRNA
atatcaactgtcgttctaaa

SEQ ID NO: 80278 - DNA, 20 bp, Artificial Sequence
  MKO10080278_B_Cyp2s1
  gRNA
aattcaccctgctcgctcta

SEQ ID NO: 80279 - DNA, 20 bp, Artificial Sequence
  MKO10080279_B_Cyp2s1
  gRNA
ctggaactctttatcgtcat

SEQ ID NO: 80280 - DNA, 20 bp, Artificial Sequence
  MKO10080280_B_Cyp2s1
  gRNA
ccagggtgcccaagtggtgc

SEQ ID NO: 80281 - DNA, 20 bp, Artificial Sequence
  MKO10080281_B_Cyp2t4
  gRNA
ctgggcctcaccgtttccgc

SEQ ID NO: 80282 - DNA, 20 bp, Artificial Sequence
  MKO10080282_B_Cyp2t4
  gRNA
tttaggagcctccggaactc

SEQ ID NO: 80283 - DNA, 20 bp, Artificial Sequence
  MKO10080283_B_Cyp2t4
  gRNA
tctgtatcatgagttcccga

SEQ ID NO: 80284 - DNA, 20 bp, Artificial Sequence
  MKO10080284_B_Cyp2u1
  gRNA
cgatgaggacagaagtcgtc

SEQ ID NO: 80285 - DNA, 20 bp, Artificial Sequence
  MKO10080285_B_Cyp2u1
  gRNA
gcatcaggctcacgaacatc

SEQ ID NO: 80286 - DNA, 20 bp, Artificial Sequence
  MKO10080286_B_Cyp2u1
  gRNA
tgtccgtgagggaaggtgca

SEQ ID NO: 80287 - DNA, 20 bp, Artificial Sequence
  MKO10080287_B_Cyp2w1
  gRNA
gagggcgggtcgccaattca

SEQ ID NO: 80288 - DNA, 20 bp, Artificial Sequence
  MKO10080288_B_Cyp2w1
  gRNA
gcggagaccacccttgccaa

SEQ ID NO: 80289 - DNA, 20 bp, Artificial Sequence
  MKO10080289_B_Cyp2w1
  gRNA
agcttctacataactctgcg

SEQ ID NO: 80290 - DNA, 20 bp, Artificial Sequence
  MKO10080290_B_Cyp39a1
  gRNA
ttcaacacacatcactttac

SEQ ID NO: 80291 - DNA, 20 bp, Artificial Sequence
  MKO10080291_B_Cyp39a1
  gRNA
cagttacctgtgtgatagac

SEQ ID NO: 80292 - DNA, 20 bp, Artificial Sequence
  MKO10080292_B_Cyp39a1
  gRNA
tcggtttcccatagcaaaga

SEQ ID NO: 80293 - DNA, 20 bp, Artificial Sequence
  MKO10080293_B_Cyp3a11
  gRNA
cactgtgctgaattattaca

SEQ ID NO: 80294 - DNA, 20 bp, Artificial Sequence
  MKO10080294_B_Cyp3a11
  gRNA
tccccacacaggttgtttga

SEQ ID NO: 80295 - DNA, 20 bp, Artificial Sequence
  MKO10080295_B_Cyp3a11
  gRNA
agcacattcttaatcgtctc

SEQ ID NO: 80296 - DNA, 20 bp, Artificial Sequence
  MKO10080296_B_Cyp3a13
  gRNA
gcaagaatcgtccccaagaa

SEQ ID NO: 80297 - DNA, 20 bp, Artificial Sequence
  MKO10080297_B_Cyp3a13
  gRNA
tgccaatgcaggttgtatga

SEQ ID NO: 80298 - DNA, 20 bp, Artificial Sequence
  MKO10080298_B_Cyp3a13
  gRNA
tacctccttgagcctcccac

SEQ ID NO: 80299 - DNA, 20 bp, Artificial Sequence
  MKO10080299_B_Cyp3a16
  gRNA
atgaaaagtatggaaaaacg

SEQ ID NO: 80300 - DNA, 20 bp, Artificial Sequence
  MKO10080300_B_Cyp3a16
  gRNA
aatacctctctttgtcatca

SEQ ID NO: 80301 - DNA, 20 bp, Artificial Sequence
  MKO10080301_B_Cyp3a16
  gRNA
cactgtcctgaattattaca

SEQ ID NO: 80302 - DNA, 20 bp, Artificial Sequence
  MKO10080302_B_Cyp3a25
  gRNA
gaagattgctataaaaagta

SEQ ID NO: 80303 - DNA, 20 bp, Artificial Sequence
  MKO10080303_B_Cyp3a25
  gRNA
agcacaatcttgatgatctc

SEQ ID NO: 80304 - DNA, 20 bp, Artificial Sequence
  MKO10080304_B_Cyp3a25
  gRNA
acagcctatattggctatca

SEQ ID NO: 80305 - DNA, 20 bp, Artificial Sequence
  MKO10080305_B_Cyp3a41a
  gRNA
atgaaaagtatggaaaaaca

SEQ ID NO: 80306 - DNA, 20 bp, Artificial Sequence
  MKO10080306_B_Cyp3a41a
  gRNA
ttcctacacaggttgtttga

SEQ ID NO: 80307 - DNA, 20 bp, Artificial Sequence
  MKO10080307_B_Cyp3a41a
  gRNA
agaacattcttaatcatctc

SEQ ID NO: 80308 - DNA, 20 bp, Artificial Sequence
  MKO10080308_B_Cyp3a41b
  gRNA
gggtttatggaaatttgaca

SEQ ID NO: 80309 - DNA, 20 bp, Artificial Sequence
  MKO10080309_B_Cyp3a41b
  gRNA
atgaaaagtatggaaaaaca

SEQ ID NO: 80310 - DNA, 20 bp, Artificial Sequence
  MKO10080310_B_Cyp3a41b
  gRNA
ttcctacacaggttgtttga

SEQ ID NO: 80311 - DNA, 20 bp, Artificial Sequence
  MKO10080311_B_Cyp3a44
  gRNA
agatatgggacccgtacaca

SEQ ID NO: 80312 - DNA, 20 bp, Artificial Sequence
  MKO10080312_B_Cyp3a44
  gRNA
ttcagcacagtgcctaaaaa

SEQ ID NO: 80313 - DNA, 20 bp, Artificial Sequence
  MKO10080313_B_Cyp3a44
  gRNA
atgaaaagtatggaaaaaca

SEQ ID NO: 80314 - DNA, 20 bp, Artificial Sequence
  MKO10080314_B_Cyp3a57
  gRNA
ttgataatgttgccaaataa

SEQ ID NO: 80315 - DNA, 20 bp, Artificial Sequence
  MKO10080315_B_Cyp3a57
  gRNA
cttcaccagtagcaaactca

SEQ ID NO: 80316 - DNA, 20 bp, Artificial Sequence
  MKO10080316_B_Cyp3a57
  gRNA
gatgattgctataaaaaata

SEQ ID NO: 80317 - DNA, 20 bp, Artificial Sequence
  MKO10080317_B_Cyp3a59
  gRNA
ccaaataaaggtagaggttt

SEQ ID NO: 80318 - DNA, 20 bp, Artificial Sequence
  MKO10080318_B_Cyp3a59
  gRNA
aaagcctatattggctatca

SEQ ID NO: 80319 - DNA, 20 bp, Artificial Sequence
  MKO10080319_B_Cyp3a59
  gRNA
gaagattgctataaaaagta

SEQ ID NO: 80320 - DNA, 20 bp, Artificial Sequence
  MKO10080320_B_Cyp46a1
  gRNA
ctcagtcattgtcacgagtc

SEQ ID NO: 80321 - DNA, 20 bp, Artificial Sequence
  MKO10080321_B_Cyp46a1
  gRNA
gtccccagggctaagaagta

SEQ ID NO: 80322 - DNA, 20 bp, Artificial Sequence
  MKO10080322_B_Cyp46a1
  gRNA
tgtgctccaagatgtgtttc

SEQ ID NO: 80323 - DNA, 20 bp, Artificial Sequence
  MKO10080323_B_Cyp4a10
  gRNA
agccatggttccagcacagg

SEQ ID NO: 80324 - DNA, 20 bp, Artificial Sequence
  MKO10080324_B_Cyp4a10
  gRNA
gaaatgtgccttcagccaca

SEQ ID NO: 80325 - DNA, 20 bp, Artificial Sequence
  MKO10080325_B_Cyp4a10
  gRNA
cacatttcatgacagtgtct

SEQ ID NO: 80326 - DNA, 20 bp, Artificial Sequence
  MKO10080326_B_Cyp4a12a
  gRNA
atattcctaacctgtccaac

SEQ ID NO: 80327 - DNA, 20 bp, Artificial Sequence
  MKO10080327_B_Cyp4a12a
  gRNA
agaatcagcttcatgtagtc

SEQ ID NO: 80328 - DNA, 20 bp, Artificial Sequence
  MKO10080328_B_Cyp4a12a
  gRNA
atatcagatcttaaaggacc

SEQ ID NO: 80329 - DNA, 20 bp, Artificial Sequence
  MKO10080329_B_Cyp4a12b
  gRNA
atattcctgacctgtccaac

SEQ ID NO: 80330 - DNA, 20 bp, Artificial Sequence
  MKO10080330_B_Cyp4a12b
  gRNA
agaatcagcttcatgtagtc

SEQ ID NO: 80331 - DNA, 20 bp, Artificial Sequence
  MKO10080331_B_Cyp4a12b
  gRNA
atatcagatcttaaaggacc

SEQ ID NO: 80332 - DNA, 20 bp, Artificial Sequence
  MKO10080332_B_Cyp4a14
  gRNA
accacttcttcccattcaac

SEQ ID NO: 80333 - DNA, 20 bp, Artificial Sequence
  MKO10080333_B_Cyp4a14
  gRNA
agatctccagagggtggtcc

SEQ ID NO: 80334 - DNA, 20 bp, Artificial Sequence
  MKO10080334_B_Cyp4a14
  gRNA
catccaactgaacactgcct

SEQ ID NO: 80335 - DNA, 20 bp, Artificial Sequence
  MKO10080335_B_Cyp4a29-ps
  gRNA
gtggcagttcaaagtggatg

SEQ ID NO: 80336 - DNA, 20 bp, Artificial Sequence
  MKO10080336_B_Cyp4a29-ps
  gRNA
gtctgccatgatccccacat

SEQ ID NO: 80337 - DNA, 20 bp, Artificial Sequence
  MKO10080337_B_Cyp4a29-ps
  gRNA
acagttacataccaagccaa

SEQ ID NO: 80338 - DNA, 20 bp, Artificial Sequence
  MKO10080338_B_Cyp4a30b-ps
  gRNA
tgatatccttaagccttatg

SEQ ID NO: 80339 - DNA, 20 bp, Artificial Sequence
  MKO10080339_B_Cyp4a30b-ps
  gRNA
agacatatccttgatgacca

SEQ ID NO: 80340 - DNA, 20 bp, Artificial Sequence
  MKO10080340_B_Cyp4a30b-ps
  gRNA
cctacagtttctttgctccc

SEQ ID NO: 80341 - DNA, 20 bp, Artificial Sequence
  MKO10080341_B_Cyp4a31
  gRNA
ttgctcccccagaaccatcg

SEQ ID NO: 80342 - DNA, 20 bp, Artificial Sequence
  MKO10080342_B_Cyp4a31
  gRNA
gggttagcatcttccggtgc

SEQ ID NO: 80343 - DNA, 20 bp, Artificial Sequence
  MKO10080343_B_Cyp4a31
  gRNA
tcccaagtgcctttcctcga

SEQ ID NO: 80344 - DNA, 20 bp, Artificial Sequence
  MKO10080344_B_Cyp4a32
  gRNA
gggttagcatcctccggtgc

SEQ ID NO: 80345 - DNA, 20 bp, Artificial Sequence
  MKO10080345_B_Cyp4a32
  gRNA
gtgttgaaaaatctctattg

SEQ ID NO: 80346 - DNA, 20 bp, Artificial Sequence
  MKO10080346_B_Cyp4a32
  gRNA
tctacagattgctagctcct

SEQ ID NO: 80347 - DNA, 20 bp, Artificial Sequence
  MKO10080347_B_Cyp4b1
  gRNA
gctaaagctgtatacagccg

SEQ ID NO: 80348 - DNA, 20 bp, Artificial Sequence
  MKO10080348_B_Cyp4b1
  gRNA
tcatacacatatgcagcctt

SEQ ID NO: 80349 - DNA, 20 bp, Artificial Sequence
  MKO10080349_B_Cyp4b1
  gRNA
tttctcaggaaaaggcctac

SEQ ID NO: 80350 - DNA, 20 bp, Artificial Sequence
  MKO10080350_B_Cyp4f13
  gRNA
acacaggtccaacccaagag

SEQ ID NO: 80351 - DNA, 20 bp, Artificial Sequence
  MKO10080351_B_Cyp4f13
  gRNA
acttgtcaccagcactcatc

SEQ ID NO: 80352 - DNA, 20 bp, Artificial Sequence
  MKO10080352_B_Cyp4f13
  gRNA
caggtgtcagcaggcgtcgg

SEQ ID NO: 80353 - DNA, 20 bp, Artificial Sequence
  MKO10080353_B_Cyp4f14
  gRNA
ttcagatggcagtgcccgtc

SEQ ID NO: 80354 - DNA, 20 bp, Artificial Sequence
  MKO10080354_B_Cyp4f14
  gRNA
gtgtcagcatgcgacgatgg

SEQ ID NO: 80355 - DNA, 20 bp, Artificial Sequence
  MKO10080355_B_Cyp4f14
  gRNA
tctacagcatcctaaagcct

SEQ ID NO: 80356 - DNA, 20 bp, Artificial Sequence
  MKO10080356_B_Cyp4f15
  gRNA
acccaagaaccaattccatt

SEQ ID NO: 80357 - DNA, 20 bp, Artificial Sequence
  MKO10080357_B_Cyp4f15
  gRNA
gagactcacatgcattatgt

SEQ ID NO: 80358 - DNA, 20 bp, Artificial Sequence
  MKO10080358_B_Cyp4f15
  gRNA
caggacacgggccaagagcc

SEQ ID NO: 80359 - DNA, 20 bp, Artificial Sequence
  MKO10080359_B_Cyp4f16
  gRNA
tccacttgtcacctgaactc

SEQ ID NO: 80360 - DNA, 20 bp, Artificial Sequence
  MKO10080360_B_Cyp4f16
  gRNA
cgtaaaaatgtcatgtcctt

SEQ ID NO: 80361 - DNA, 20 bp, Artificial Sequence
  MKO10080361_B_Cyp4f16
  gRNA
actcacccagccagggcttc

SEQ ID NO: 80362 - DNA, 20 bp, Artificial Sequence
  MKO10080362_B_Cyp4f17
  gRNA
ggtggtcagacgctgccact

SEQ ID NO: 80363 - DNA, 20 bp, Artificial Sequence
  MKO10080363_B_Cyp4f17
  gRNA
aactgcctgtctggacatgt

SEQ ID NO: 80364 - DNA, 20 bp, Artificial Sequence
  MKO10080364_B_Cyp4f17
  gRNA
cctcccaggggatggactgt

SEQ ID NO: 80365 - DNA, 20 bp, Artificial Sequence
  MKO10080365_B_Cyp4f18
  gRNA
accagctttagttgccccca

SEQ ID NO: 80366 - DNA, 20 bp, Artificial Sequence
  MKO10080366_B_Cyp4f18
  gRNA
ctaggccaagtggcagcgcc

SEQ ID NO: 80367 - DNA, 20 bp, Artificial Sequence
  MKO10080367_B_Cyp4f18
  gRNA
tgtcaccagtactcatcaag

SEQ ID NO: 80368 - DNA, 20 bp, Artificial Sequence
  MKO10080368_B_Cyp4f37
  gRNA
ttctcagattgagcacaatg

SEQ ID NO: 80369 - DNA, 20 bp, Artificial Sequence
  MKO10080369_B_Cyp4f37
  gRNA
tccacttgtcacctgaattc

SEQ ID NO: 80370 - DNA, 20 bp, Artificial Sequence
  MKO10080370_B_Cyp4f37
  gRNA
gatgggctcttcctgaattc

SEQ ID NO: 80371 - DNA, 20 bp, Artificial Sequence
  MKO10080371_B_Cyp4f39
  gRNA
gatggacttctgatcagcaa

SEQ ID NO: 80372 - DNA, 20 bp, Artificial Sequence
  MKO10080372_B_Cyp4f39
  gRNA
caccatgcaccacatcatcc

SEQ ID NO: 80373 - DNA, 20 bp, Artificial Sequence
  MKO10080373_B_Cyp4f39
  gRNA
ctcccttacaggctaaatgg

SEQ ID NO: 80374 - DNA, 20 bp, Artificial Sequence
  MKO10080374_B_Cyp4f40
  gRNA
cgatctgtcctcagcgcctc

SEQ ID NO: 80375 - DNA, 20 bp, Artificial Sequence
  MKO10080375_B_Cyp4f40
  gRNA
ctgtagaagatgtcgtcctt

SEQ ID NO: 80376 - DNA, 20 bp, Artificial Sequence
  MKO10080376_B_Cyp4f40
  gRNA
gcatttctgcaaagtgtcca

SEQ ID NO: 80377 - DNA, 20 bp, Artificial Sequence
  MKO10080377_B_Cyp4v3
  gRNA
ctgccttataaagtgccacc

SEQ ID NO: 80378 - DNA, 20 bp, Artificial Sequence
  MKO10080378_B_Cyp4v3
  gRNA
tgggactaggacttcttaca

SEQ ID NO: 80379 - DNA, 20 bp, Artificial Sequence
  MKO10080379_B_Cyp4v3
  gRNA
tttatcaatttgcttagaac

SEQ ID NO: 80380 - DNA, 20 bp, Artificial Sequence
  MKO10080380_B_Cyp4x1
  gRNA
aaaaccatgtgtggacacga

SEQ ID NO: 80381 - DNA, 20 bp, Artificial Sequence
  MKO10080381_B_Cyp4x1
  gRNA
gcagcggtgttggaaccacc

SEQ ID NO: 80382 - DNA, 20 bp, Artificial Sequence
  MKO10080382_B_Cyp4x1
  gRNA
acataccaatgcatggagtc

SEQ ID NO: 80383 - DNA, 20 bp, Artificial Sequence
  MKO10080383_B_Cyp51
  gRNA
tagaagtcaactcaacgaga

SEQ ID NO: 80384 - DNA, 20 bp, Artificial Sequence
  MKO10080384_B_Cyp51
  gRNA
caagaccttcacttaccttc

SEQ ID NO: 80385 - DNA, 20 bp, Artificial Sequence
  MKO10080385_B_Cyp51
  gRNA
gaaaagtccaattgagtttc

SEQ ID NO: 80386 - DNA, 20 bp, Artificial Sequence
  MKO10080386_B_Cyp7a1
  gRNA
ggatccaagtgcattaactg

SEQ ID NO: 80387 - DNA, 20 bp, Artificial Sequence
  MKO10080387_B_Cyp7a1
  gRNA
tcattacactacttctgcga

SEQ ID NO: 80388 - DNA, 20 bp, Artificial Sequence
  MKO10080388_B_Cyp7a1
  gRNA
caagcatacctagtactggc

SEQ ID NO: 80389 - DNA, 20 bp, Artificial Sequence
  MKO10080389_B_Cyp7b1
  gRNA
caagctgtccaattgttctc

SEQ ID NO: 80390 - DNA, 20 bp, Artificial Sequence
  MKO10080390_B_Cyp7b1
  gRNA
cagcatcatccgagaagtgc

SEQ ID NO: 80391 - DNA, 20 bp, Artificial Sequence
  MKO10080391_B_Cyp7b1
  gRNA
tttggagcatcgaagatttc

SEQ ID NO: 80392 - DNA, 20 bp, Artificial Sequence
  MKO10080392_B_Cyp8b1
  gRNA
gagccaccttatctccgcga

SEQ ID NO: 80393 - DNA, 20 bp, Artificial Sequence
  MKO10080393_B_Cyp8b1
  gRNA
tcctcaacccggatggcacc

SEQ ID NO: 80394 - DNA, 20 bp, Artificial Sequence
  MKO10080394_B_Cyp8b1
  gRNA
cgtgaagacatccccgtgct

SEQ ID NO: 80395 - DNA, 20 bp, Artificial Sequence
  MKO10080395_B_Cypt10
  gRNA
tttggacccattcggagtct

SEQ ID NO: 80396 - DNA, 20 bp, Artificial Sequence
  MKO10080396_B_Cypt10
  gRNA
gccaactcctagactccgaa

SEQ ID NO: 80397 - DNA, 20 bp, Artificial Sequence
  MKO10080397_B_Cypt10
  gRNA
ccaattctccattcggagcc

SEQ ID NO: 80398 - DNA, 20 bp, Artificial Sequence
  MKO10080398_B_Cypt12
  gRNA
gtagagcttcctatggtcga

SEQ ID NO: 80399 - DNA, 20 bp, Artificial Sequence
  MKO10080399_B_Cypt12
  gRNA
tgcgacgacgcgaagcacgt

SEQ ID NO: 80400 - DNA, 20 bp, Artificial Sequence
  MKO10080400_B_Cypt12
  gRNA
aagctgacattctcattcac

SEQ ID NO: 80401 - DNA, 20 bp, Artificial Sequence
  MKO10080401_B_Cypt14
  gRNA
gttacttcagataacaggaa

SEQ ID NO: 80402 - DNA, 20 bp, Artificial Sequence
  MKO10080402_B_Cypt14
  gRNA
gttgctcgtgcataggcagt

SEQ ID NO: 80403 - DNA, 20 bp, Artificial Sequence
  MKO10080403_B_Cypt14
  gRNA
agccttacatttctttggct

SEQ ID NO: 80404 - DNA, 20 bp, Artificial Sequence
  MKO10080404_B_Cypt15
  gRNA
ctcattcacttactggtagg

SEQ ID NO: 80405 - DNA, 20 bp, Artificial Sequence
  MKO10080405_B_Cypt15
  gRNA
gagcaccagtatggcacatg

SEQ ID NO: 80406 - DNA, 20 bp, Artificial Sequence
  MKO10080406_B_Cypt15
  gRNA
gttgcccgtgcataggcagt

SEQ ID NO: 80407 - DNA, 20 bp, Artificial Sequence
  MKO10080407_B_Cypt1
  gRNA
cttctcaagcttcgaaattt

SEQ ID NO: 80408 - DNA, 20 bp, Artificial Sequence
  MKO10080408_B_Cypt1
  gRNA
gatcgaaccggaaccgacca

SEQ ID NO: 80409 - DNA, 20 bp, Artificial Sequence
  MKO10080409_B_Cypt1
  gRNA
tccaaagccatggtcggttc

SEQ ID NO: 80410 - DNA, 20 bp, Artificial Sequence
  MKO10080410_B_Cypt2
  gRNA
tttattcgttctcgttcctg

SEQ ID NO: 80411 - DNA, 20 bp, Artificial Sequence
  MKO10080411_B_Cypt2
  gRNA
tcgattgatgcagagccacc

SEQ ID NO: 80412 - DNA, 20 bp, Artificial Sequence
  MKO10080412_B_Cypt2
  gRNA
aagctggccaagtctacatt

SEQ ID NO: 80413 - DNA, 20 bp, Artificial Sequence
  MKO10080413_B_Cypt3
  gRNA
acctggtcactgtcaatgca

SEQ ID NO: 80414 - DNA, 20 bp, Artificial Sequence
  MKO10080414_B_Cypt3
  gRNA
ctgaaaaagagaacgaatta

SEQ ID NO: 80415 - DNA, 20 bp, Artificial Sequence
  MKO10080415_B_Cypt3
  gRNA
tccaaagccatagtcggttc

SEQ ID NO: 80416 - DNA, 20 bp, Artificial Sequence
  MKO10080416_B_Cypt4
  gRNA
gccaggtctctgtcgaggta

SEQ ID NO: 80417 - DNA, 20 bp, Artificial Sequence
  MKO10080417_B_Cypt4
  gRNA
gagctccgctatgactcggg

SEQ ID NO: 80418 - DNA, 20 bp, Artificial Sequence
  MKO10080418_B_Cypt4
  gRNA
acgagaatgagaacgaatta

SEQ ID NO: 80419 - DNA, 20 bp, Artificial Sequence
  MKO10080419_B_Cypt7
  gRNA
ctgctgctgcgctagaccag

SEQ ID NO: 80420 - DNA, 20 bp, Artificial Sequence
  MKO10080420_B_Cypt7
  gRNA
gacagtgacccatttccgaa

SEQ ID NO: 80421 - DNA, 20 bp, Artificial Sequence
  MKO10080421_B_Cypt7
  gRNA
gccagttcctagaccccgaa

SEQ ID NO: 80422 - DNA, 20 bp, Artificial Sequence
  MKO10080422_B_Cypt8
  gRNA
ctgctgctgcgctagaccag

SEQ ID NO: 80423 - DNA, 20 bp, Artificial Sequence
  MKO10080423_B_Cypt8
  gRNA
gacagtgacccatttccgaa

SEQ ID NO: 80424 - DNA, 20 bp, Artificial Sequence
  MKO10080424_B_Cypt8
  gRNA
gccagttcctagaccccgaa

SEQ ID NO: 80425 - DNA, 20 bp, Artificial Sequence
  MKO10080425_B_Cypt9
  gRNA
tttggacccattcggagtct

SEQ ID NO: 80426 - DNA, 20 bp, Artificial Sequence
  MKO10080426_B_Cypt9
  gRNA
gccaactcctagactccgaa

SEQ ID NO: 80427 - DNA, 20 bp, Artificial Sequence
  MKO10080427_B_Cypt9
  gRNA
ccaattctccattcggagcc

SEQ ID NO: 80428 - DNA, 20 bp, Artificial Sequence
  MKO10080428_B_Cyr61
  gRNA
ctgcgctaaacaactcaacg

SEQ ID NO: 80429 - DNA, 20 bp, Artificial Sequence
  MKO10080429_B_Cyr61
  gRNA
aacaatgagttaatcgcaat

SEQ ID NO: 80430 - DNA, 20 bp, Artificial Sequence
  MKO10080430_B_Cyr61
  gRNA
gcatcgttcagaccacgtct

SEQ ID NO: 80431 - DNA, 20 bp, Artificial Sequence
  MKO10080431_B_Cys1
  gRNA
cgactgcccctcgggtctct

SEQ ID NO: 80432 - DNA, 20 bp, Artificial Sequence
  MKO10080432_B_Cys1
  gRNA
ttgcctttaaccttcttctc

SEQ ID NO: 80433 - DNA, 20 bp, Artificial Sequence
  MKO10080433_B_Cys1
  gRNA
caaggtgtccccagagaaga

SEQ ID NO: 80434 - DNA, 20 bp, Artificial Sequence
  MKO10080434_B_Cysltr1
  gRNA
cctatagccttcctacgact

SEQ ID NO: 80435 - DNA, 20 bp, Artificial Sequence
  MKO10080435_B_Cysltr1
  gRNA
aaagccaggttcgtttgcat

SEQ ID NO: 80436 - DNA, 20 bp, Artificial Sequence
  MKO10080436_B_Cysltr1
  gRNA
aattccaatgcaaacgaacc

SEQ ID NO: 80437 - DNA, 20 bp, Artificial Sequence
  MKO10080437_B_Cysltr2
  gRNA
cccccagcagttatagtaac

SEQ ID NO: 80438 - DNA, 20 bp, Artificial Sequence
  MKO10080438_B_Cysltr2
  gRNA
tccacgtgctgctcatagga

SEQ ID NO: 80439 - DNA, 20 bp, Artificial Sequence
  MKO10080439_B_Cysltr2
  gRNA
gccttcctatgagcagcacg

SEQ ID NO: 80440 - DNA, 20 bp, Artificial Sequence
  MKO10080440_B_Cystm1
  gRNA
cccctccccagtgtacattt

SEQ ID NO: 80441 - DNA, 20 bp, Artificial Sequence
  MKO10080441_B_Cystm1
  gRNA
acgcgcctacctgtggtctt

SEQ ID NO: 80442 - DNA, 20 bp, Artificial Sequence
  MKO10080442_B_Cystm1
  gRNA
ccaccctgccagccgtactg

SEQ ID NO: 80443 - DNA, 20 bp, Artificial Sequence
  MKO10080443_B_Cyth1
  gRNA
gcagctcctgcttcctccgc

SEQ ID NO: 80444 - DNA, 20 bp, Artificial Sequence
  MKO10080444_B_Cyth1
  gRNA
gttaaatttctttctgccca

SEQ ID NO: 80445 - DNA, 20 bp, Artificial Sequence
  MKO10080445_B_Cyth1
  gRNA
tgctaatgaaattgaaagcc

SEQ ID NO: 80446 - DNA, 20 bp, Artificial Sequence
  MKO10080446_B_Cyth2
  gRNA
gttcatgctccaccaagaat

SEQ ID NO: 80447 - DNA, 20 bp, Artificial Sequence
  MKO10080447_B_Cyth2
  gRNA
tgagttcaccgacctcaacc

SEQ ID NO: 80448 - DNA, 20 bp, Artificial Sequence
  MKO10080448_B_Cyth2
  gRNA
tttgcagtaagaccttgcag

SEQ ID NO: 80449 - DNA, 20 bp, Artificial Sequence
  MKO10080449_B_Cyth3
  gRNA
acctctcctccactgaagtc

SEQ ID NO: 80450 - DNA, 20 bp, Artificial Sequence
  MKO10080450_B_Cyth3
  gRNA
gattgacaacctgacttcag

SEQ ID NO: 80451 - DNA, 20 bp, Artificial Sequence
  MKO10080451_B_Cyth3
  gRNA
ccaatagcaaaactactcag

SEQ ID NO: 80452 - DNA, 20 bp, Artificial Sequence
  MKO10080452_B_Cyth4
  gRNA
ggcgatgtcctggacatcag

SEQ ID NO: 80453 - DNA, 20 bp, Artificial Sequence
  MKO10080453_B_Cyth4
  gRNA
ccttctctttctgcgccatc

SEQ ID NO: 80454 - DNA, 20 bp, Artificial Sequence
  MKO10080454_B_Cyth4
  gRNA
ccggatggcgcagaaagaga

SEQ ID NO: 80455 - DNA, 20 bp, Artificial Sequence
  MKO10080455_B_Cytip
  gRNA
aagcaggacaatggaacatt

SEQ ID NO: 80456 - DNA, 20 bp, Artificial Sequence
  MKO10080456_B_Cytip
  gRNA
ttagcagatttcctgatgat

SEQ ID NO: 80457 - DNA, 20 bp, Artificial Sequence
  MKO10080457_B_Cytip
  gRNA
cactatgatctgcaaagtgc

SEQ ID NO: 80458 - DNA, 20 bp, Artificial Sequence
  MKO10080458_B_Cytl1
  gRNA
ggtcagcatccgagagtagc

SEQ ID NO: 80459 - DNA, 20 bp, Artificial Sequence
  MKO10080459_B_Cytl1
  gRNA
ggccgaagtggacactctga

SEQ ID NO: 80460 - DNA, 20 bp, Artificial Sequence
  MKO10080460_B_Cytl1
  gRNA
ccggggcaagtacctcacac

SEQ ID NO: 80461 - DNA, 20 bp, Artificial Sequence
  MKO10080461_B_Cyyr1
  gRNA
actctttgccacactgcgcc

SEQ ID NO: 80462 - DNA, 20 bp, Artificial Sequence
  MKO10080462_B_Cyyr1
  gRNA
tgctcctactacgcctatat

SEQ ID NO: 80463 - DNA, 20 bp, Artificial Sequence
  MKO10080463_B_Cyyr1
  gRNA
ctatacttatgaccacgaga

SEQ ID NO: 80464 - DNA, 20 bp, Artificial Sequence
  MKO10080464_B_D030056L22Rik
  gRNA
taaagcagcctgaagagttt

SEQ ID NO: 80465 - DNA, 20 bp, Artificial Sequence
  MKO10080465_B_D030056L22Rik
  gRNA
tacctggctgtgcaccccgt

SEQ ID NO: 80466 - DNA, 20 bp, Artificial Sequence
  MKO10080466_B_D030056L22Rik
  gRNA
gcaggaggaaccccgggccg

SEQ ID NO: 80467 - DNA, 20 bp, Artificial Sequence
  MKO10080467_B_D10Bwg1379e
  gRNA
acatgctttggcaggaatgc

SEQ ID NO: 80468 - DNA, 20 bp, Artificial Sequence
  MKO10080468_B_D10Bwg1379e
  gRNA
gcattcctgccaaagcatgt

SEQ ID NO: 80469 - DNA, 20 bp, Artificial Sequence
  MKO10080469_B_D10Bwg1379e
  gRNA
ggatcttcacaacagtgtcc

SEQ ID NO: 80470 - DNA, 20 bp, Artificial Sequence
  MKO10080470_B_D10Jhu81e
  gRNA
tggtcaatcacgtgcatctg

SEQ ID NO: 80471 - DNA, 20 bp, Artificial Sequence
  MKO10080471_B_D10Jhu81e
  gRNA
cacctacccaatgggcttct

SEQ ID NO: 80472 - DNA, 20 bp, Artificial Sequence
  MKO10080472_B_D10Jhu81e
  gRNA
ccgaggcaagattaccagcc

SEQ ID NO: 80473 - DNA, 20 bp, Artificial Sequence
  MKO10080473_B_D10Wsu102e
  gRNA
gtcttctgtagcctgctcgc

SEQ ID NO: 80474 - DNA, 20 bp, Artificial Sequence
  MKO10080474_B_D10Wsu102e
  gRNA
ccgaactgtttgaagtgtag

SEQ ID NO: 80475 - DNA, 20 bp, Artificial Sequence
  MKO10080475_B_D10Wsu102e
  gRNA
tcaatattgaagtgaccagc

SEQ ID NO: 80476 - DNA, 20 bp, Artificial Sequence
  MKO10080476_B_D11Wsu47e
  gRNA
ggtctcacgatgctcttcgc

SEQ ID NO: 80477 - DNA, 20 bp, Artificial Sequence
  MKO10080477_B_D11Wsu47e
  gRNA
cacataccgccctcgaactt

SEQ ID NO: 80478 - DNA, 20 bp, Artificial Sequence
  MKO10080478_B_D11Wsu47e
  gRNA
actttatcctgtgctgtaac

SEQ ID NO: 80479 - DNA, 20 bp, Artificial Sequence
  MKO10080479_B_D130040H23Rik
  gRNA
tcatgtcacagttgtctttg

SEQ ID NO: 80480 - DNA, 20 bp, Artificial Sequence
  MKO10080480_B_D130040H23Rik
  gRNA
gcacaacacagtcatcttca

SEQ ID NO: 80481 - DNA, 20 bp, Artificial Sequence
  MKO10080481_B_D130040H23Rik
  gRNA
aagactactgtgacatataa

SEQ ID NO: 80482 - DNA, 20 bp, Artificial Sequence
  MKO10080482_B_D130043K22Rik
  gRNA
tagcccagtgaggactgtac

SEQ ID NO: 80483 - DNA, 20 bp, Artificial Sequence
  MKO10080483_B_D130043K22Rik
  gRNA
cctaccagtacagtcctcac

SEQ ID NO: 80484 - DNA, 20 bp, Artificial Sequence
  MKO10080484_B_D130043K22Rik
  gRNA
atacaacttactcctatgaa

SEQ ID NO: 80485 - DNA, 20 bp, Artificial Sequence
  MKO10080485_B_D14Abb1e
  gRNA
gttcagagcatatgtgaaaa

SEQ ID NO: 80486 - DNA, 20 bp, Artificial Sequence
  MKO10080486_B_D14Abb1e
  gRNA
agaatcttatgcatttctca

SEQ ID NO: 80487 - DNA, 20 bp, Artificial Sequence
  MKO10080487_B_D14Abb1e
  gRNA
agaagagaattgaagtttga

SEQ ID NO: 80488 - DNA, 20 bp, Artificial Sequence
  MKO10080488_B_D15Ertd621e
  gRNA
aagatctgcactgattcatc

SEQ ID NO: 80489 - DNA, 20 bp, Artificial Sequence
  MKO10080489_B_D15Ertd621e
  gRNA
ttgcgctacagaaataacct

SEQ ID NO: 80490 - DNA, 20 bp, Artificial Sequence
  MKO10080490_B_D15Ertd621e
  gRNA
cagtcagcagcagtaaaatt

SEQ ID NO: 80491 - DNA, 20 bp, Artificial Sequence
  MKO10080491_B_D16Ertd472e
  gRNA
gtgtgtaaaagattcgactt

SEQ ID NO: 80492 - DNA, 20 bp, Artificial Sequence
  MKO10080492_B_D16Ertd472e
  gRNA
gatttagctcgaagcaaatg

SEQ ID NO: 80493 - DNA, 20 bp, Artificial Sequence
  MKO10080493_B_D16Ertd472e
  gRNA
gtttatcttcttactcacga

SEQ ID NO: 80494 - DNA, 20 bp, Artificial Sequence
  MKO10080494_B_D17H6S53E
  gRNA
gctcagtcatgttccttcga

SEQ ID NO: 80495 - DNA, 20 bp, Artificial Sequence
  MKO10080495_B_D17H6S53E
  gRNA
ttcacgccacctgaatccac

SEQ ID NO: 80496 - DNA, 20 bp, Artificial Sequence
  MKO10080496_B_D17H6S53E
  gRNA
ggtgcctagtctcccttgag

SEQ ID NO: 80497 - DNA, 20 bp, Artificial Sequence
  MKO10080497_B_D17Wsu104e
  gRNA
tgctgagatcgagtatgcca

SEQ ID NO: 80498 - DNA, 20 bp, Artificial Sequence
  MKO10080498_B_D17Wsu104e
  gRNA
tgatgtccccctgaaaagtg

SEQ ID NO: 80499 - DNA, 20 bp, Artificial Sequence
  MKO10080499_B_D17Wsu104e
  gRNA
ccagcaatggcagatgagcc

SEQ ID NO: 80500 - DNA, 20 bp, Artificial Sequence
  MKO10080500_B_D17Wsu92e
  gRNA
aggaacttacaagcagcgat

SEQ ID NO: 80501 - DNA, 20 bp, Artificial Sequence
  MKO10080501_B_D17Wsu92e
  gRNA
cgctgacgtctgcgatctct

SEQ ID NO: 80502 - DNA, 20 bp, Artificial Sequence
  MKO10080502_B_D17Wsu92e
  gRNA
ccatgttcacatgtccaaac

SEQ ID NO: 80503 - DNA, 20 bp, Artificial Sequence
  MKO10080503_B_D19Bwg1357e
  gRNA
tgcttcacacctttcttgcc

SEQ ID NO: 80504 - DNA, 20 bp, Artificial Sequence
  MKO10080504_B_D19Bwg1357e
  gRNA
caagaccaactatgacatcg

SEQ ID NO: 80505 - DNA, 20 bp, Artificial Sequence
  MKO10080505_B_D19Bwg1357e
  gRNA
gccacaaaacctggcaagaa

SEQ ID NO: 80506 - DNA, 20 bp, Artificial Sequence
  MKO10080506_B_D19Ertd737e
  gRNA
agtcctcaaatgagacccag

SEQ ID NO: 80507 - DNA, 20 bp, Artificial Sequence
  MKO10080507_B_D19Ertd737e
  gRNA
aaaagaaaacgctccaaaaa

SEQ ID NO: 80508 - DNA, 20 bp, Artificial Sequence
  MKO10080508_B_D19Ertd737e
  gRNA
aggcaaattgaagaatgaaa

SEQ ID NO: 80509 - DNA, 20 bp, Artificial Sequence
  MKO10080509_B_D1Ertd622e
  gRNA
ggtgcacttgtctcctgagc

SEQ ID NO: 80510 - DNA, 20 bp, Artificial Sequence
  MKO10080510_B_D1Ertd622e
  gRNA
caccctgctcgcccatgcgc

SEQ ID NO: 80511 - DNA, 20 bp, Artificial Sequence
  MKO10080511_B_D1Ertd622e
  gRNA
cttcagcacctgaccctccg

SEQ ID NO: 80512 - DNA, 20 bp, Artificial Sequence
  MKO10080512_B_D1Pas1
  gRNA
atcatatctactagccgtcc

SEQ ID NO: 80513 - DNA, 20 bp, Artificial Sequence
  MKO10080513_B_D1Pas1
  gRNA
aaggcgttctacgacaaaga

SEQ ID NO: 80514 - DNA, 20 bp, Artificial Sequence
  MKO10080514_B_D1Pas1
  gRNA
agcggggcgggaacagtcgc

SEQ ID NO: 80515 - DNA, 20 bp, Artificial Sequence
  MKO10080515_B_D230025D16Rik
  gRNA
acttggcttacctccaggat

SEQ ID NO: 80516 - DNA, 20 bp, Artificial Sequence
  MKO10080516_B_D230025D16Rik
  gRNA
ctttatttcaggaatgcctc

SEQ ID NO: 80517 - DNA, 20 bp, Artificial Sequence
  MKO10080517_B_D230025D16Rik
  gRNA
caaaagtaaagttaaagtat

SEQ ID NO: 80518 - DNA, 20 bp, Artificial Sequence
  MKO10080518_B_D2Wsu81e
  gRNA
actgtaggatgcgggccagc

SEQ ID NO: 80519 - DNA, 20 bp, Artificial Sequence
  MKO10080519_B_D2Wsu81e
  gRNA
gcttaccttggttgctcctc

SEQ ID NO: 80520 - DNA, 20 bp, Artificial Sequence
  MKO10080520_B_D2Wsu81e
  gRNA
gcggcccagaggagcaacca

SEQ ID NO: 80521 - DNA, 20 bp, Artificial Sequence
  MKO10080521_B_D2hgdh
  gRNA
catcttcttacctaagaatc

SEQ ID NO: 80522 - DNA, 20 bp, Artificial Sequence
  MKO10080522_B_D2hgdh
  gRNA
tgttgttgcaggttgtagta

SEQ ID NO: 80523 - DNA, 20 bp, Artificial Sequence
  MKO10080523_B_D2hgdh
  gRNA
agctgatgacttgattcatg

SEQ ID NO: 80524 - DNA, 20 bp, Artificial Sequence
  MKO10080524_B_D330045A20Rik
  gRNA
atgataactatgttagttgg

SEQ ID NO: 80525 - DNA, 20 bp, Artificial Sequence
  MKO10080525_B_D330045A20Rik
  gRNA
gggtcaggctggattcttaa

SEQ ID NO: 80526 - DNA, 20 bp, Artificial Sequence
  MKO10080526_B_D330045A20Rik
  gRNA
gcatggtgtcagtgattctg

SEQ ID NO: 80527 - DNA, 20 bp, Artificial Sequence
  MKO10080527_B_D3Bwg0562e
  gRNA
tcagttcttaccgtaattgc

SEQ ID NO: 80528 - DNA, 20 bp, Artificial Sequence
  MKO10080528_B_D3Bwg0562e
  gRNA
aggcagcgagggtcgcatgt

SEQ ID NO: 80529 - DNA, 20 bp, Artificial Sequence
  MKO10080529_B_D3Bwg0562e
  gRNA
acaaatatcttccacgatgt

SEQ ID NO: 80530 - DNA, 20 bp, Artificial Sequence
  MKO10080530_B_D3Ertd254e
  gRNA
cccggcaccctacagacgca

SEQ ID NO: 80531 - DNA, 20 bp, Artificial Sequence
  MKO10080531_B_D3Ertd254e
  gRNA
ttcaggaacagttgaccttc

SEQ ID NO: 80532 - DNA, 20 bp, Artificial Sequence
  MKO10080532_B_D3Ertd254e
  gRNA
tgtaaagacgcaaaagacca

SEQ ID NO: 80533 - DNA, 20 bp, Artificial Sequence
  MKO10080533_B_D3Ertd751e
  gRNA
atcttcactccctgctcaca

SEQ ID NO: 80534 - DNA, 20 bp, Artificial Sequence
  MKO10080534_B_D3Ertd751e
  gRNA
cacactggctcatgtctcac

SEQ ID NO: 80535 - DNA, 20 bp, Artificial Sequence
  MKO10080535_B_D3Ertd751e
  gRNA
ttcagtttcaacacactgct

SEQ ID NO: 80536 - DNA, 20 bp, Artificial Sequence
  MKO10080536_B_D430019H16Rik
  gRNA
tactccctgtttaactcccc

SEQ ID NO: 80537 - DNA, 20 bp, Artificial Sequence
  MKO10080537_B_D430019H16Rik
  gRNA
cattgccaggggagttaaac

SEQ ID NO: 80538 - DNA, 20 bp, Artificial Sequence
  MKO10080538_B_D430019H16Rik
  gRNA
catgaacgctcctcccatca

SEQ ID NO: 80539 - DNA, 20 bp, Artificial Sequence
  MKO10080539_B_D430041D05Rik
  gRNA
agctgcgctgacgtccatga

SEQ ID NO: 80540 - DNA, 20 bp, Artificial Sequence
  MKO10080540_B_D430041D05Rik
  gRNA
agcacgtccatcaccacagc

SEQ ID NO: 80541 - DNA, 20 bp, Artificial Sequence
  MKO10080541_B_D430041D05Rik
  gRNA
caccgccacagactgtaagt

SEQ ID NO: 80542 - DNA, 20 bp, Artificial Sequence
  MKO10080542_B_D430042O09Rik
  gRNA
ggcttctctccaccttccgc

SEQ ID NO: 80543 - DNA, 20 bp, Artificial Sequence
  MKO10080543_B_D430042O09Rik
  gRNA
gagaagccggtcctgctctc

SEQ ID NO: 80544 - DNA, 20 bp, Artificial Sequence
  MKO10080544_B_D430042O09Rik
  gRNA
tctgtatgcacagctttccg

SEQ ID NO: 80545 - DNA, 20 bp, Artificial Sequence
  MKO10080545_B_D4Wsu53e
  gRNA
aaggcacttacctccacctt

SEQ ID NO: 80546 - DNA, 20 bp, Artificial Sequence
  MKO10080546_B_D4Wsu53e
  gRNA
gccagcaagtctccgagcca

SEQ ID NO: 80547 - DNA, 20 bp, Artificial Sequence
  MKO10080547_B_D4Wsu53e
  gRNA
ttcacttacattggagctga

SEQ ID NO: 80548 - DNA, 20 bp, Artificial Sequence
  MKO10080548_B_D5Ertd577e
  gRNA
ccacaggaggccaaaacttc

SEQ ID NO: 80549 - DNA, 20 bp, Artificial Sequence
  MKO10080549_B_D5Ertd577e
  gRNA
tatccatgtttactgcaaac

SEQ ID NO: 80550 - DNA, 20 bp, Artificial Sequence
  MKO10080550_B_D5Ertd577e
  gRNA
cctaatttcacagacagact

SEQ ID NO: 80551 - DNA, 20 bp, Artificial Sequence
  MKO10080551_B_D5Ertd579e
  gRNA
caatacctacctgttcctgc

SEQ ID NO: 80552 - DNA, 20 bp, Artificial Sequence
  MKO10080552_B_D5Ertd579e
  gRNA
cgttctgttggaatccggag

SEQ ID NO: 80553 - DNA, 20 bp, Artificial Sequence
  MKO10080553_B_D5Ertd579e
  gRNA
ccctacagcaaaagatcaag

SEQ ID NO: 80554 - DNA, 20 bp, Artificial Sequence
  MKO10080554_B_D630003M21Rik
  gRNA
ggctcctggactccgacttc

SEQ ID NO: 80555 - DNA, 20 bp, Artificial Sequence
  MKO10080555_B_D630003M21Rik
  gRNA
tagtcctagaacactcctcc

SEQ ID NO: 80556 - DNA, 20 bp, Artificial Sequence
  MKO10080556_B_D630003M21Rik
  gRNA
ttcgcctggaggagtgttct

SEQ ID NO: 80557 - DNA, 20 bp, Artificial Sequence
  MKO10080557_B_D630023F18Rik
  gRNA
acacttaccttggtagaatc

SEQ ID NO: 80558 - DNA, 20 bp, Artificial Sequence
  MKO10080558_B_D630023F18Rik
  gRNA
attccaggcccactatgact

SEQ ID NO: 80559 - DNA, 20 bp, Artificial Sequence
  MKO10080559_B_D630023F18Rik
  gRNA
cactgatggccaagtcatag

SEQ ID NO: 80560 - DNA, 20 bp, Artificial Sequence
  MKO10080560_B_D630033O11Rik
  gRNA
agctcagcccaccagttgtg

SEQ ID NO: 80561 - DNA, 20 bp, Artificial Sequence
  MKO10080561_B_D630033O11Rik
  gRNA
cccttccagtcatgcgaatg

SEQ ID NO: 80562 - DNA, 20 bp, Artificial Sequence
  MKO10080562_B_D630033O11Rik
  gRNA
ctcaagtcataagttccata

SEQ ID NO: 80563 - DNA, 20 bp, Artificial Sequence
  MKO10080563_B_D630039A03Rik
  gRNA
cacctaatggtgttccctaa

SEQ ID NO: 80564 - DNA, 20 bp, Artificial Sequence
  MKO10080564_B_D630039A03Rik
  gRNA
ttgacctggcgcctgagtcc

SEQ ID NO: 80565 - DNA, 20 bp, Artificial Sequence
  MKO10080565_B_D630039A03Rik
  gRNA
aaggagctcgctgtcaccag

SEQ ID NO: 80566 - DNA, 20 bp, Artificial Sequence
  MKO10080566_B_D630045J12Rik
  gRNA
gatatcgccgtgtaaacaaa

SEQ ID NO: 80567 - DNA, 20 bp, Artificial Sequence
  MKO10080567_B_D630045J12Rik
  gRNA
atcaatagcaaacttgtgcg

SEQ ID NO: 80568 - DNA, 20 bp, Artificial Sequence
  MKO10080568_B_D630045J12Rik
  gRNA
cagaagccagtatcgacact

SEQ ID NO: 80569 - DNA, 20 bp, Artificial Sequence
  MKO10080569_B_D6Ertd527e
  gRNA
gtctggggccactgttgccg

SEQ ID NO: 80570 - DNA, 20 bp, Artificial Sequence
  MKO10080570_B_D6Ertd527e
  gRNA
cccttaggaaatcattccca

SEQ ID NO: 80571 - DNA, 20 bp, Artificial Sequence
  MKO10080571_B_D6Ertd527e
  gRNA
gttgccatagttgctgatgt

SEQ ID NO: 80572 - DNA, 20 bp, Artificial Sequence
  MKO10080572_B_D6Wsu163e
  gRNA
gtgggccaaagcttacgctg

SEQ ID NO: 80573 - DNA, 20 bp, Artificial Sequence
  MKO10080573_B_D6Wsu163e
  gRNA
atgggtgataaagcttcatc

SEQ ID NO: 80574 - DNA, 20 bp, Artificial Sequence
  MKO10080574_B_D6Wsu163e
  gRNA
accccaacaacagctccctc

SEQ ID NO: 80575 - DNA, 20 bp, Artificial Sequence
  MKO10080575_B_D730048I06Rik
  gRNA
catacatactgctgtagtca

SEQ ID NO: 80576 - DNA, 20 bp, Artificial Sequence
  MKO10080576_B_D730048I06Rik
  gRNA
gagaaatgaaaaacttcctg

SEQ ID NO: 80577 - DNA, 20 bp, Artificial Sequence
  MKO10080577_B_D730048I06Rik
  gRNA
gaagaaagagacacagcctc

SEQ ID NO: 80578 - DNA, 20 bp, Artificial Sequence
  MKO10080578_B_D7Ertd443e
  gRNA
tgtaaagggcaataaaaccc

SEQ ID NO: 80579 - DNA, 20 bp, Artificial Sequence
  MKO10080579_B_D7Ertd443e
  gRNA
gtagcttaccactaagagga

SEQ ID NO: 80580 - DNA, 20 bp, Artificial Sequence
  MKO10080580_B_D7Ertd443e
  gRNA
gcctctcattggactctgaa

SEQ ID NO: 80581 - DNA, 20 bp, Artificial Sequence
  MKO10080581_B_D830030K20Rik
  gRNA
acaacatgagaagacaatgt

SEQ ID NO: 80582 - DNA, 20 bp, Artificial Sequence
  MKO10080582_B_D830030K20Rik
  gRNA
tcatcctacctgctgctcct

SEQ ID NO: 80583 - DNA, 20 bp, Artificial Sequence
  MKO10080583_B_D830030K20Rik
  gRNA
ctcaactcagcgaaaaagta

SEQ ID NO: 80584 - DNA, 20 bp, Artificial Sequence
  MKO10080584_B_D830031N03Rik
  gRNA
ggctccgctccggccgcacg

SEQ ID NO: 80585 - DNA, 20 bp, Artificial Sequence
  MKO10080585_B_D830031N03Rik
  gRNA
gggttccgccttaaacagtc

SEQ ID NO: 80586 - DNA, 20 bp, Artificial Sequence
  MKO10080586_B_D830031N03Rik
  gRNA
gctcgcccccctcgtgcggc

SEQ ID NO: 80587 - DNA, 20 bp, Artificial Sequence
  MKO10080587_B_D8Ertd738e
  gRNA
gaagaagattgagcatgacg

SEQ ID NO: 80588 - DNA, 20 bp, Artificial Sequence
  MKO10080588_B_D8Ertd738e
  gRNA
cgtcatgctcaatcttcttc

SEQ ID NO: 80589 - DNA, 20 bp, Artificial Sequence
  MKO10080589_B_D8Ertd738e
  gRNA
acctaaaagcaaggctgccg

SEQ ID NO: 80590 - DNA, 20 bp, Artificial Sequence
  MKO10080590_B_D8Ertd82e
  gRNA
gcataacctggaggcccgcg

SEQ ID NO: 80591 - DNA, 20 bp, Artificial Sequence
  MKO10080591_B_D8Ertd82e
  gRNA
gttgttacctccatcgctgc

SEQ ID NO: 80592 - DNA, 20 bp, Artificial Sequence
  MKO10080592_B_D8Ertd82e
  gRNA
tggaggtggccgctctgcac

SEQ ID NO: 80593 - DNA, 20 bp, Artificial Sequence
  MKO10080593_B_D930015E06Rik
  gRNA
cagccgtcagttctagattt

SEQ ID NO: 80594 - DNA, 20 bp, Artificial Sequence
  MKO10080594_B_D930015E06Rik
  gRNA
atgtgccgcctgtccattgc

SEQ ID NO: 80595 - DNA, 20 bp, Artificial Sequence
  MKO10080595_B_D930015E06Rik
  gRNA
actacagggtgattctgaag

SEQ ID NO: 80596 - DNA, 20 bp, Artificial Sequence
  MKO10080596_B_D930020B18Rik
  gRNA
atcaagcacaaacgaacccc

SEQ ID NO: 80597 - DNA, 20 bp, Artificial Sequence
  MKO10080597_B_D930020B18Rik
  gRNA
gatgacatcattgtgctcgc

SEQ ID NO: 80598 - DNA, 20 bp, Artificial Sequence
  MKO10080598_B_D930020B18Rik
  gRNA
agcgagcacaatgatgtcat

SEQ ID NO: 80599 - DNA, 20 bp, Artificial Sequence
  MKO10080599_B_DXBay18
  gRNA
tctgcagagtatgtactctg

SEQ ID NO: 80600 - DNA, 20 bp, Artificial Sequence
  MKO10080600_B_DXBay18
  gRNA
gacgatcccttctaaggagt

SEQ ID NO: 80601 - DNA, 20 bp, Artificial Sequence
  MKO10080601_B_DXBay18
  gRNA
gagggaaccagcttgtttca

SEQ ID NO: 80602 - DNA, 20 bp, Artificial Sequence
  MKO10080602_B_Daam1
  gRNA
gagctgatcaatgtagaact

SEQ ID NO: 80603 - DNA, 20 bp, Artificial Sequence
  MKO10080603_B_Daam1
  gRNA
cactgagaaccaagcccatg

SEQ ID NO: 80604 - DNA, 20 bp, Artificial Sequence
  MKO10080604_B_Daam1
  gRNA
tttatagaggaaatctctgc

SEQ ID NO: 80605 - DNA, 20 bp, Artificial Sequence
  MKO10080605_B_Daam2
  gRNA
cattgatcgtatcaatgcca

SEQ ID NO: 80606 - DNA, 20 bp, Artificial Sequence
  MKO10080606_B_Daam2
  gRNA
cctcacagataaaaaccgag

SEQ ID NO: 80607 - DNA, 20 bp, Artificial Sequence
  MKO10080607_B_Daam2
  gRNA
gtcacctcatgggttgtgtc

SEQ ID NO: 80608 - DNA, 20 bp, Artificial Sequence
  MKO10080608_B_Dab1
  gRNA
atcacagatcatcgggcttt

SEQ ID NO: 80609 - DNA, 20 bp, Artificial Sequence
  MKO10080609_B_Dab1
  gRNA
tcccaacagggtgttgttgc

SEQ ID NO: 80610 - DNA, 20 bp, Artificial Sequence
  MKO10080610_B_Dab1
  gRNA
gaaagagatctctcaagtcc

SEQ ID NO: 80611 - DNA, 20 bp, Artificial Sequence
  MKO10080611_B_Dab2ip
  gRNA
catccacttatcgcgctcag

SEQ ID NO: 80612 - DNA, 20 bp, Artificial Sequence
  MKO10080612_B_Dab2ip
  gRNA
agccgacgccatctcctcct

SEQ ID NO: 80613 - DNA, 20 bp, Artificial Sequence
  MKO10080613_B_Dab2ip
  gRNA
cgaagcagtagtcctgaccc

SEQ ID NO: 80614 - DNA, 20 bp, Artificial Sequence
  MKO10080614_B_Dab2
  gRNA
tgtcacatcacgagcaatga

SEQ ID NO: 80615 - DNA, 20 bp, Artificial Sequence
  MKO10080615_B_Dab2
  gRNA
gatgatgtgcctgatgctcg

SEQ ID NO: 80616 - DNA, 20 bp, Artificial Sequence
  MKO10080616_B_Dab2
  gRNA
ttatagcaaaaaattgatgc

SEQ ID NO: 80617 - DNA, 20 bp, Artificial Sequence
  MKO10080617_B_Dach1
  gRNA
cctggaatcattccaccaac

SEQ ID NO: 80618 - DNA, 20 bp, Artificial Sequence
  MKO10080618_B_Dach1
  gRNA
cctgttggtggaatgattcc

SEQ ID NO: 80619 - DNA, 20 bp, Artificial Sequence
  MKO10080619_B_Dach1
  gRNA
catgccagtaacaaccaaca

SEQ ID NO: 80620 - DNA, 20 bp, Artificial Sequence
  MKO10080620_B_Dach2
  gRNA
caggccccctaagcgttctt

SEQ ID NO: 80621 - DNA, 20 bp, Artificial Sequence
  MKO10080621_B_Dach2
  gRNA
tcaccgattgcaccaacgcc

SEQ ID NO: 80622 - DNA, 20 bp, Artificial Sequence
  MKO10080622_B_Dach2
  gRNA
actcacctgtcgtagaatta

SEQ ID NO: 80623 - DNA, 20 bp, Artificial Sequence
  MKO10080623_B_Dact1
  gRNA
tccggctcgcgcgctgcgtc

SEQ ID NO: 80624 - DNA, 20 bp, Artificial Sequence
  MKO10080624_B_Dact1
  gRNA
gcaaccgtctgagatggtca

SEQ ID NO: 80625 - DNA, 20 bp, Artificial Sequence
  MKO10080625_B_Dact1
  gRNA
gcggccttgaccatctcaga

SEQ ID NO: 80626 - DNA, 20 bp, Artificial Sequence
  MKO10080626_B_Dact2
  gRNA
caccattgccgagaccagcg

SEQ ID NO: 80627 - DNA, 20 bp, Artificial Sequence
  MKO10080627_B_Dact2
  gRNA
gccggaacatgcccgtcagc

SEQ ID NO: 80628 - DNA, 20 bp, Artificial Sequence
  MKO10080628_B_Dact2
  gRNA
ttacctcctagtcacggcta

SEQ ID NO: 80629 - DNA, 20 bp, Artificial Sequence
  MKO10080629_B_Dact3
  gRNA
tcaccgggaacgagaaggcc

SEQ ID NO: 80630 - DNA, 20 bp, Artificial Sequence
  MKO10080630_B_Dact3
  gRNA
gacagtggcttctccggatc

SEQ ID NO: 80631 - DNA, 20 bp, Artificial Sequence
  MKO10080631_B_Dact3
  gRNA
agttgcattggctccgagag

SEQ ID NO: 80632 - DNA, 20 bp, Artificial Sequence
  MKO10080632_B_Dad1
  gRNA
gcaggatcgtgctggcaaag

SEQ ID NO: 80633 - DNA, 20 bp, Artificial Sequence
  MKO10080633_B_Dad1
  gRNA
tggagctcaagtactcctcc

SEQ ID NO: 80634 - DNA, 20 bp, Artificial Sequence
  MKO10080634_B_Dad1
  gRNA
gtccgtcatctcccggttcc

SEQ ID NO: 80635 - DNA, 20 bp, Artificial Sequence
  MKO10080635_B_Daf2
  gRNA
ctccagacattcctaatgcc

SEQ ID NO: 80636 - DNA, 20 bp, Artificial Sequence
  MKO10080636_B_Daf2
  gRNA
tactctcacagaatgtttcg

SEQ ID NO: 80637 - DNA, 20 bp, Artificial Sequence
  MKO10080637_B_Daf2
  gRNA
ctattgtggaatatgagtgt

SEQ ID NO: 80638 - DNA, 20 bp, Artificial Sequence
  MKO10080638_B_Dag1
  gRNA
atttcgagtgagcattccaa

SEQ ID NO: 80639 - DNA, 20 bp, Artificial Sequence
  MKO10080639_B_Dag1
  gRNA
cgttaggatcctcatcccgc

SEQ ID NO: 80640 - DNA, 20 bp, Artificial Sequence
  MKO10080640_B_Dag1
  gRNA
ggcgtaggcactatccgcga

SEQ ID NO: 80641 - DNA, 20 bp, Artificial Sequence
  MKO10080641_B_Dagla
  gRNA
caggaatggtcgtctgcaac

SEQ ID NO: 80642 - DNA, 20 bp, Artificial Sequence
  MKO10080642_B_Dagla
  gRNA
ccttcacaggcaccggttag

SEQ ID NO: 80643 - DNA, 20 bp, Artificial Sequence
  MKO10080643_B_Dagla
  gRNA
ctctcagcttgacgaaggtg

SEQ ID NO: 80644 - DNA, 20 bp, Artificial Sequence
  MKO10080644_B_Daglb
  gRNA
cggtgcatataataactgcc

SEQ ID NO: 80645 - DNA, 20 bp, Artificial Sequence
  MKO10080645_B_Daglb
  gRNA
taagctgctctatatccgcc

SEQ ID NO: 80646 - DNA, 20 bp, Artificial Sequence
  MKO10080646_B_Daglb
  gRNA
agcttagacatagacttccg

SEQ ID NO: 80647 - DNA, 20 bp, Artificial Sequence
  MKO10080647_B_Dak
  gRNA
gctcaactttggacttgcca

SEQ ID NO: 80648 - DNA, 20 bp, Artificial Sequence
  MKO10080648_B_Dak
  gRNA
cacgccggcctgccttcttg

SEQ ID NO: 80649 - DNA, 20 bp, Artificial Sequence
  MKO10080649_B_Dak
  gRNA
gagcgtgatcgccaagacca

SEQ ID NO: 80650 - DNA, 20 bp, Artificial Sequence
  MKO10080650_B_Dalrd3
  gRNA
gccattccacccgaagtttc

SEQ ID NO: 80651 - DNA, 20 bp, Artificial Sequence
  MKO10080651_B_Dalrd3
  gRNA
tgactgcgtggttatacacg

SEQ ID NO: 80652 - DNA, 20 bp, Artificial Sequence
  MKO10080652_B_Dalrd3
  gRNA
agccactcaccgggcctggg

SEQ ID NO: 80653 - DNA, 20 bp, Artificial Sequence
  MKO10080653_B_Dand5
  gRNA
gctctgattgatagcagtcc

SEQ ID NO: 80654 - DNA, 20 bp, Artificial Sequence
  MKO10080654_B_Dand5
  gRNA
acacttctggaccaataccg

SEQ ID NO: 80655 - DNA, 20 bp, Artificial Sequence
  MKO10080655_B_Dand5
  gRNA
gctggacatcggtgacgctg

SEQ ID NO: 80656 - DNA, 20 bp, Artificial Sequence
  MKO10080656_B_Dao
  gRNA
cgagagactccaccttccga

SEQ ID NO: 80657 - DNA, 20 bp, Artificial Sequence
  MKO10080657_B_Dao
  gRNA
ggctcaccggaacttcatct

SEQ ID NO: 80658 - DNA, 20 bp, Artificial Sequence
  MKO10080658_B_Dao
  gRNA
cctcttccgagatgaagttc

SEQ ID NO: 80659 - DNA, 20 bp, Artificial Sequence
  MKO10080659_B_Dap3
  gRNA
acagttctgggacgctcagc

SEQ ID NO: 80660 - DNA, 20 bp, Artificial Sequence
  MKO10080660_B_Dap3
  gRNA
agagcaaagaccatgctgac

SEQ ID NO: 80661 - DNA, 20 bp, Artificial Sequence
  MKO10080661_B_Dap3
  gRNA
ccttgttattcctgtcagca

SEQ ID NO: 80662 - DNA, 20 bp, Artificial Sequence
  MKO10080662_B_Dapk1
  gRNA
ggctcatagttgactatctc

SEQ ID NO: 80663 - DNA, 20 bp, Artificial Sequence
  MKO10080663_B_Dapk1
  gRNA
gccggaaaacataatgcttc

SEQ ID NO: 80664 - DNA, 20 bp, Artificial Sequence
  MKO10080664_B_Dapk1
  gRNA
gatagtcaactatgagcccc

SEQ ID NO: 80665 - DNA, 20 bp, Artificial Sequence
  MKO10080665_B_Dapk2
  gRNA
aatcgtgaactatgagccac

SEQ ID NO: 80666 - DNA, 20 bp, Artificial Sequence
  MKO10080666_B_Dapk2
  gRNA
gtgtcttccagagtgtccgg

SEQ ID NO: 80667 - DNA, 20 bp, Artificial Sequence
  MKO10080667_B_Dapk2
  gRNA
catcttctatttcgtgagcc

SEQ ID NO: 80668 - DNA, 20 bp, Artificial Sequence
  MKO10080668_B_Dapk3
  gRNA
ccgggaggagatcgaacgcg

SEQ ID NO: 80669 - DNA, 20 bp, Artificial Sequence
  MKO10080669_B_Dapk3
  gRNA
ctcatagttcacgatctcgg

SEQ ID NO: 80670 - DNA, 20 bp, Artificial Sequence
  MKO10080670_B_Dapk3
  gRNA
atgtcagcctccaagccaag

SEQ ID NO: 80671 - DNA, 20 bp, Artificial Sequence
  MKO10080671_B_Dapl1
  gRNA
agcatccaacatctgtatct

SEQ ID NO: 80672 - DNA, 20 bp, Artificial Sequence
  MKO10080672_B_Dapl1
  gRNA
tctgacggacacactggaca

SEQ ID NO: 80673 - DNA, 20 bp, Artificial Sequence
  MKO10080673_B_Dapl1
  gRNA
ggggcataccgccctttcag

SEQ ID NO: 80674 - DNA, 20 bp, Artificial Sequence
  MKO10080674_B_Dapp1
  gRNA
cctgtctcgcttccaatcaa

SEQ ID NO: 80675 - DNA, 20 bp, Artificial Sequence
  MKO10080675_B_Dapp1
  gRNA
gttcacacagcgatgcagac

SEQ ID NO: 80676 - DNA, 20 bp, Artificial Sequence
  MKO10080676_B_Dapp1
  gRNA
cactttcatgttgaatatac

SEQ ID NO: 80677 - DNA, 20 bp, Artificial Sequence
  MKO10080677_B_Dap
  gRNA
tgttggatatgctgcgttct

SEQ ID NO: 80678 - DNA, 20 bp, Artificial Sequence
  MKO10080678_B_Dap
  gRNA
tccttctggaggcgaagaca

SEQ ID NO: 80679 - DNA, 20 bp, Artificial Sequence
  MKO10080679_B_Dap
  gRNA
tgtatttcagtgaaagccgg

SEQ ID NO: 80680 - DNA, 20 bp, Artificial Sequence
  MKO10080680_B_Darc
  gRNA
cggatacagacagttcccca

SEQ ID NO: 80681 - DNA, 20 bp, Artificial Sequence
  MKO10080681_B_Darc
  gRNA
gagttgaccaatattcagtc

SEQ ID NO: 80682 - DNA, 20 bp, Artificial Sequence
  MKO10080682_B_Darc
  gRNA
tctcaaatggatgcccttgc

SEQ ID NO: 80683 - DNA, 20 bp, Artificial Sequence
  MKO10080683_B_Dars2
  gRNA
acagtaatctcccgtcctcc

SEQ ID NO: 80684 - DNA, 20 bp, Artificial Sequence
  MKO10080684_B_Dars2
  gRNA
ttcttctaagaaaatgccga

SEQ ID NO: 80685 - DNA, 20 bp, Artificial Sequence
  MKO10080685_B_Dars2
  gRNA
cgaaccggattctcttgtcc

SEQ ID NO: 80686 - DNA, 20 bp, Artificial Sequence
  MKO10080686_B_Dars
  gRNA
gtgtattacagatagagttt

SEQ ID NO: 80687 - DNA, 20 bp, Artificial Sequence
  MKO10080687_B_Dars
  gRNA
gattatgctaaagagagata

SEQ ID NO: 80688 - DNA, 20 bp, Artificial Sequence
  MKO10080688_B_Dars
  gRNA
atacaatcacaagaaaagcc

SEQ ID NO: 80689 - DNA, 20 bp, Artificial Sequence
  MKO10080689_B_Daw1
  gRNA
cgccgtgtcccacaccttgc

SEQ ID NO: 80690 - DNA, 20 bp, Artificial Sequence
  MKO10080690_B_Daw1
  gRNA
tgctttgttgagtgccacgt

SEQ ID NO: 80691 - DNA, 20 bp, Artificial Sequence
  MKO10080691_B_Daw1
  gRNA
actgatgtcaacaccctagt

SEQ ID NO: 80692 - DNA, 20 bp, Artificial Sequence
  MKO10080692_B_Daxx
  gRNA
tcctgggatgccattccgct

SEQ ID NO: 80693 - DNA, 20 bp, Artificial Sequence
  MKO10080693_B_Daxx
  gRNA
ccctcagggtcctagcggaa

SEQ ID NO: 80694 - DNA, 20 bp, Artificial Sequence
  MKO10080694_B_Daxx
  gRNA
ccatacctcaccagattccg

SEQ ID NO: 80695 - DNA, 20 bp, Artificial Sequence
  MKO10080695_B_Dazap1
  gRNA
ctggactggagtaccactca

SEQ ID NO: 80696 - DNA, 20 bp, Artificial Sequence
  MKO10080696_B_Dazap1
  gRNA
gtttaaagaccccaattgtg

SEQ ID NO: 80697 - DNA, 20 bp, Artificial Sequence
  MKO10080697_B_Dazap1
  gRNA
cacttacatttcggccatct

SEQ ID NO: 80698 - DNA, 20 bp, Artificial Sequence
  MKO10080698_B_Dazap2
  gRNA
ttcttcatgggtggctcaga

SEQ ID NO: 80699 - DNA, 20 bp, Artificial Sequence
  MKO10080699_B_Dazap2
  gRNA
accaactggataataagcca

SEQ ID NO: 80700 - DNA, 20 bp, Artificial Sequence
  MKO10080700_B_Dazap2
  gRNA
ggccttgcctttgctgttca

SEQ ID NO: 80701 - DNA, 20 bp, Artificial Sequence
  MKO10080701_B_Dazl
  gRNA
agatggatgaaaccgaaatc

SEQ ID NO: 80702 - DNA, 20 bp, Artificial Sequence
  MKO10080702_B_Dazl
  gRNA
caaaacatatccttgacttg

SEQ ID NO: 80703 - DNA, 20 bp, Artificial Sequence
  MKO10080703_B_Dazl
  gRNA
tagtcacagataaatttcca

SEQ ID NO: 80704 - DNA, 20 bp, Artificial Sequence
  MKO10080704_B_Dbf4
  gRNA
tctgcagtatatgcagattc

SEQ ID NO: 80705 - DNA, 20 bp, Artificial Sequence
  MKO10080705_B_Dbf4
  gRNA
aatccaaatataagcccctt

SEQ ID NO: 80706 - DNA, 20 bp, Artificial Sequence
  MKO10080706_B_Dbf4
  gRNA
accatccttgaaatccctga

SEQ ID NO: 80707 - DNA, 20 bp, Artificial Sequence
  MKO10080707_B_Dbh
  gRNA
gtcctccccgtttctccgac

SEQ ID NO: 80708 - DNA, 20 bp, Artificial Sequence
  MKO10080708_B_Dbh
  gRNA
ctgaccgactcaactactgc

SEQ ID NO: 80709 - DNA, 20 bp, Artificial Sequence
  MKO10080709_B_Dbh
  gRNA
tacctcaatgacataatcct

SEQ ID NO: 80710 - DNA, 20 bp, Artificial Sequence
  MKO10080710_B_Dbil5
  gRNA
tttagcaatgtagatcctca

SEQ ID NO: 80711 - DNA, 20 bp, Artificial Sequence
  MKO10080711_B_Dbil5
  gRNA
gaggcctggatggtaaacaa

SEQ ID NO: 80712 - DNA, 20 bp, Artificial Sequence
  MKO10080712_B_Dbil5
  gRNA
catccctttgtttaccatcc

SEQ ID NO: 80713 - DNA, 20 bp, Artificial Sequence
  MKO10080713_B_Dbi
  gRNA
cttgttccacgagtcccact

SEQ ID NO: 80714 - DNA, 20 bp, Artificial Sequence
  MKO10080714_B_Dbi
  gRNA
tgaatttgacaaagccgctg

SEQ ID NO: 80715 - DNA, 20 bp, Artificial Sequence
  MKO10080715_B_Dbi
  gRNA
gacgagctaaagaagaaata

SEQ ID NO: 80716 - DNA, 20 bp, Artificial Sequence
  MKO10080716_B_Dbn1
  gRNA
atgtgcttgcgccagtcatg

SEQ ID NO: 80717 - DNA, 20 bp, Artificial Sequence
  MKO10080717_B_Dbn1
  gRNA
ctcctgacgctgcaagcttg

SEQ ID NO: 80718 - DNA, 20 bp, Artificial Sequence
  MKO10080718_B_Dbn1
  gRNA
ctggaagaattcagccacct

SEQ ID NO: 80719 - DNA, 20 bp, Artificial Sequence
  MKO10080719_B_Dbndd1
  gRNA
atcggagtccgcaaagacct

SEQ ID NO: 80720 - DNA, 20 bp, Artificial Sequence
  MKO10080720_B_Dbndd1
  gRNA
tggccgcatggagtctcccg

SEQ ID NO: 80721 - DNA, 20 bp, Artificial Sequence
  MKO10080721_B_Dbndd1
  gRNA
aggcagctggctcgagatag

SEQ ID NO: 80722 - DNA, 20 bp, Artificial Sequence
  MKO10080722_B_Dbndd2
  gRNA
atttggactgcgcaggttgg

SEQ ID NO: 80723 - DNA, 20 bp, Artificial Sequence
  MKO10080723_B_Dbndd2
  gRNA
gccgcagctgttggcgctcc

SEQ ID NO: 80724 - DNA, 20 bp, Artificial Sequence
  MKO10080724_B_Dbndd2
  gRNA
agcgccaacagctgcggctc

SEQ ID NO: 80725 - DNA, 20 bp, Artificial Sequence
  MKO10080725_B_Dbnl
  gRNA
aggtgatgtacgccttctgc

SEQ ID NO: 80726 - DNA, 20 bp, Artificial Sequence
  MKO10080726_B_Dbnl
  gRNA
tgccaaccacgtcagcacca

SEQ ID NO: 80727 - DNA, 20 bp, Artificial Sequence
  MKO10080727_B_Dbnl
  gRNA
caacagcaatgacatccgtg

SEQ ID NO: 80728 - DNA, 20 bp, Artificial Sequence
  MKO10080728_B_Dbpht2
  gRNA
gagaaatacagagaaaatca

SEQ ID NO: 80729 - DNA, 20 bp, Artificial Sequence
  MKO10080729_B_Dbpht2
  gRNA
gagaaacagacacaaagaga

SEQ ID NO: 80730 - DNA, 20 bp, Artificial Sequence
  MKO10080730_B_Dbpht2
  gRNA
cacacatacacacagagaga

SEQ ID NO: 80731 - DNA, 20 bp, Artificial Sequence
  MKO10080731_B_Dbp
  gRNA
tgctgtgctttcacgctacc

SEQ ID NO: 80732 - DNA, 20 bp, Artificial Sequence
  MKO10080732_B_Dbp
  gRNA
ccaagcagcgctcccccgcc

SEQ ID NO: 80733 - DNA, 20 bp, Artificial Sequence
  MKO10080733_B_Dbp
  gRNA
ctcgccctgtcaagcattcc

SEQ ID NO: 80734 - DNA, 20 bp, Artificial Sequence
  MKO10080734_B_Dbr1
  gRNA
cgcagccctgatgcagcatc

SEQ ID NO: 80735 - DNA, 20 bp, Artificial Sequence
  MKO10080735_B_Dbr1
  gRNA
gctggtgttgtcaaataccg

SEQ ID NO: 80736 - DNA, 20 bp, Artificial Sequence
  MKO10080736_B_Dbr1
  gRNA
cttataattcatctaccata

SEQ ID NO: 80737 - DNA, 20 bp, Artificial Sequence
  MKO10080737_B_Dbt
  gRNA
attgccagccgacgcactgc

SEQ ID NO: 80738 - DNA, 20 bp, Artificial Sequence
  MKO10080738_B_Dbt
  gRNA
tagcaacgcctgcagtgcgt

SEQ ID NO: 80739 - DNA, 20 bp, Artificial Sequence
  MKO10080739_B_Dbt
  gRNA
actcaccggccgctgttctc

SEQ ID NO: 80740 - DNA, 20 bp, Artificial Sequence
  MKO10080740_B_Dbx1
  gRNA
tccagcgtcgtgcctatccc

SEQ ID NO: 80741 - DNA, 20 bp, Artificial Sequence
  MKO10080741_B_Dbx1
  gRNA
ttcgcctttccatacttcga

SEQ ID NO: 80742 - DNA, 20 bp, Artificial Sequence
  MKO10080742_B_Dbx1
  gRNA
tggaacgagccttcgaagta

SEQ ID NO: 80743 - DNA, 20 bp, Artificial Sequence
  MKO10080743_B_Dbx2
  gRNA
taaaatccccctgcgagctt

SEQ ID NO: 80744 - DNA, 20 bp, Artificial Sequence
  MKO10080744_B_Dbx2
  gRNA
gttcccgtcaaatggtgctc

SEQ ID NO: 80745 - DNA, 20 bp, Artificial Sequence
  MKO10080745_B_Dbx2
  gRNA
agctgaccgcgagtttcctt

SEQ ID NO: 80746 - DNA, 20 bp, Artificial Sequence
  MKO10080746_B_Dcaf10
  gRNA
acaagactcttagtaacatc

SEQ ID NO: 80747 - DNA, 20 bp, Artificial Sequence
  MKO10080747_B_Dcaf10
  gRNA
cagatcccatagtgctattg

SEQ ID NO: 80748 - DNA, 20 bp, Artificial Sequence
  MKO10080748_B_Dcaf10
  gRNA
aagattgtgtgaataatatc

SEQ ID NO: 80749 - DNA, 20 bp, Artificial Sequence
  MKO10080749_B_Dcaf11
  gRNA
gggattggccacggggcggc

SEQ ID NO: 80750 - DNA, 20 bp, Artificial Sequence
  MKO10080750_B_Dcaf11
  gRNA
gagaacggggcctctgccac

SEQ ID NO: 80751 - DNA, 20 bp, Artificial Sequence
  MKO10080751_B_Dcaf11
  gRNA
agaagcttccccggtggcag

SEQ ID NO: 80752 - DNA, 20 bp, Artificial Sequence
  MKO10080752_B_Dcaf12l1
  gRNA
gcattcctctgatgcgcgac

SEQ ID NO: 80753 - DNA, 20 bp, Artificial Sequence
  MKO10080753_B_Dcaf12l1
  gRNA
gcagcgccgatggcgacagc

SEQ ID NO: 80754 - DNA, 20 bp, Artificial Sequence
  MKO10080754_B_Dcaf12l1
  gRNA
ccctcgaagccagcgagccc

SEQ ID NO: 80755 - DNA, 20 bp, Artificial Sequence
  MKO10080755_B_Dcaf12l2
  gRNA
cgcctggatgagtgataccg

SEQ ID NO: 80756 - DNA, 20 bp, Artificial Sequence
  MKO10080756_B_Dcaf12l2
  gRNA
gctgggacttcttcgttgcc

SEQ ID NO: 80757 - DNA, 20 bp, Artificial Sequence
  MKO10080757_B_Dcaf12l2
  gRNA
agcgccctgctcgacctccg

SEQ ID NO: 80758 - DNA, 20 bp, Artificial Sequence
  MKO10080758_B_Dcaf12
  gRNA
aacgatactatggcagtgtc

SEQ ID NO: 80759 - DNA, 20 bp, Artificial Sequence
  MKO10080759_B_Dcaf12
  gRNA
ctccttggggatatccttta

SEQ ID NO: 80760 - DNA, 20 bp, Artificial Sequence
  MKO10080760_B_Dcaf12
  gRNA
tctagaacactcctagccac

SEQ ID NO: 80761 - DNA, 20 bp, Artificial Sequence
  MKO10080761_B_Dcaf13
  gRNA
gccctgtgtgctcaatgaac

SEQ ID NO: 80762 - DNA, 20 bp, Artificial Sequence
  MKO10080762_B_Dcaf13
  gRNA
cgaacaatacaagcacatga

SEQ ID NO: 80763 - DNA, 20 bp, Artificial Sequence
  MKO10080763_B_Dcaf13
  gRNA
ccccagttcattgagcacac

SEQ ID NO: 80764 - DNA, 20 bp, Artificial Sequence
  MKO10080764_B_Dcaf15
  gRNA
cactgtagatctcctcgtcc

SEQ ID NO: 80765 - DNA, 20 bp, Artificial Sequence
  MKO10080765_B_Dcaf15
  gRNA
cctcaagaacatcgtagatg

SEQ ID NO: 80766 - DNA, 20 bp, Artificial Sequence
  MKO10080766_B_Dcaf15
  gRNA
cctcatctacgatgttcttg

SEQ ID NO: 80767 - DNA, 20 bp, Artificial Sequence
  MKO10080767_B_Dcaf17
  gRNA
tagccctgactgctcataat

SEQ ID NO: 80768 - DNA, 20 bp, Artificial Sequence
  MKO10080768_B_Dcaf17
  gRNA
tcacctatagcctatgagag

SEQ ID NO: 80769 - DNA, 20 bp, Artificial Sequence
  MKO10080769_B_Dcaf17
  gRNA
tttattatgggaatgcccag

SEQ ID NO: 80770 - DNA, 20 bp, Artificial Sequence
  MKO10080770_B_Dcaf4
  gRNA
tcaacctcgtccagcagaac

SEQ ID NO: 80771 - DNA, 20 bp, Artificial Sequence
  MKO10080771_B_Dcaf4
  gRNA
ttgacggggactcagcatca

SEQ ID NO: 80772 - DNA, 20 bp, Artificial Sequence
  MKO10080772_B_Dcaf4
  gRNA
tgaccggtttaacttcatca

SEQ ID NO: 80773 - DNA, 20 bp, Artificial Sequence
  MKO10080773_B_Dcaf5
  gRNA
gctcatgaagatgcagtata

SEQ ID NO: 80774 - DNA, 20 bp, Artificial Sequence
  MKO10080774_B_Dcaf5
  gRNA
tggaacaagctatccattcc

SEQ ID NO: 80775 - DNA, 20 bp, Artificial Sequence
  MKO10080775_B_Dcaf5
  gRNA
ccggccatcatctgaagagc

SEQ ID NO: 80776 - DNA, 20 bp, Artificial Sequence
  MKO10080776_B_Dcaf6
  gRNA
tttaggttaatacaatctgt

SEQ ID NO: 80777 - DNA, 20 bp, Artificial Sequence
  MKO10080777_B_Dcaf6
  gRNA
tagtaatccatacagcagaa

SEQ ID NO: 80778 - DNA, 20 bp, Artificial Sequence
  MKO10080778_B_Dcaf6
  gRNA
aacagttccatcttcaccac

SEQ ID NO: 80779 - DNA, 20 bp, Artificial Sequence
  MKO10080779_B_Dcaf7
  gRNA
gcacgttgtgtcaatgcttg

SEQ ID NO: 80780 - DNA, 20 bp, Artificial Sequence
  MKO10080780_B_Dcaf7
  gRNA
actagagaccgggcaagtgc

SEQ ID NO: 80781 - DNA, 20 bp, Artificial Sequence
  MKO10080781_B_Dcaf7
  gRNA
ggatagacgccctttgtgtc

SEQ ID NO: 80782 - DNA, 20 bp, Artificial Sequence
  MKO10080782_B_Dcaf8
  gRNA
gttaaacttacgaagctggc

SEQ ID NO: 80783 - DNA, 20 bp, Artificial Sequence
  MKO10080783_B_Dcaf8
  gRNA
ctgcaagaacaccaagcgtg

SEQ ID NO: 80784 - DNA, 20 bp, Artificial Sequence
  MKO10080784_B_Dcaf8
  gRNA
catcccgggcacacatagcc

SEQ ID NO: 80785 - DNA, 20 bp, Artificial Sequence
  MKO10080785_B_Dcakd
  gRNA
ccgcatggccaatcacgttc

SEQ ID NO: 80786 - DNA, 20 bp, Artificial Sequence
  MKO10080786_B_Dcakd
  gRNA
gaatggcgacatcgaccgca

SEQ ID NO: 80787 - DNA, 20 bp, Artificial Sequence
  MKO10080787_B_Dcakd
  gRNA
aggctaccgatacgtgattc

SEQ ID NO: 80788 - DNA, 20 bp, Artificial Sequence
  MKO10080788_B_Dcbld1
  gRNA
atagtcagaagcgcaggtct

SEQ ID NO: 80789 - DNA, 20 bp, Artificial Sequence
  MKO10080789_B_Dcbld1
  gRNA
tcacttcgtttgagttcagc

SEQ ID NO: 80790 - DNA, 20 bp, Artificial Sequence
  MKO10080790_B_Dcbld1
  gRNA
gacatagcaggagatatttc

SEQ ID NO: 80791 - DNA, 20 bp, Artificial Sequence
  MKO10080791_B_Dcbld2
  gRNA
tcattcctaggcaaatactg

SEQ ID NO: 80792 - DNA, 20 bp, Artificial Sequence
  MKO10080792_B_Dcbld2
  gRNA
ctcagtaagtactgcccagc

SEQ ID NO: 80793 - DNA, 20 bp, Artificial Sequence
  MKO10080793_B_Dcbld2
  gRNA
gttccagatatttcagcaaa

SEQ ID NO: 80794 - DNA, 20 bp, Artificial Sequence
  MKO10080794_B_Dcc
  gRNA
tgctctgcagagtccgaccg

SEQ ID NO: 80795 - DNA, 20 bp, Artificial Sequence
  MKO10080795_B_Dcc
  gRNA
tgatagattccgtctgggaa

SEQ ID NO: 80796 - DNA, 20 bp, Artificial Sequence
  MKO10080796_B_Dcc
  gRNA
cgtgtggtcgtcttgccctc

SEQ ID NO: 80797 - DNA, 20 bp, Artificial Sequence
  MKO10080797_B_Dcdc2a
  gRNA
ggcgagaagccgggcttatg

SEQ ID NO: 80798 - DNA, 20 bp, Artificial Sequence
  MKO10080798_B_Dcdc2a
  gRNA
tccaacttacaaaatggtgc

SEQ ID NO: 80799 - DNA, 20 bp, Artificial Sequence
  MKO10080799_B_Dcdc2a
  gRNA
acctgtggacagccccactc

SEQ ID NO: 80800 - DNA, 20 bp, Artificial Sequence
  MKO10080800_B_Dcdc2b
  gRNA
cggggatccttccccttact

SEQ ID NO: 80801 - DNA, 20 bp, Artificial Sequence
  MKO10080801_B_Dcdc2b
  gRNA
ggccatccactttctatgcc

SEQ ID NO: 80802 - DNA, 20 bp, Artificial Sequence
  MKO10080802_B_Dcdc2b
  gRNA
gtggatggcccagtttcccc

SEQ ID NO: 80803 - DNA, 20 bp, Artificial Sequence
  MKO10080803_B_Dcdc2c
  gRNA
gtcctcatgggtccccagtg

SEQ ID NO: 80804 - DNA, 20 bp, Artificial Sequence
  MKO10080804_B_Dcdc2c
  gRNA
ttgcctttcaggagatttgg

SEQ ID NO: 80805 - DNA, 20 bp, Artificial Sequence
  MKO10080805_B_Dcdc2c
  gRNA
ttcaactttctcatctttga

SEQ ID NO: 80806 - DNA, 20 bp, Artificial Sequence
  MKO10080806_B_Dchs1
  gRNA
agaattagcccgtctgccta

SEQ ID NO: 80807 - DNA, 20 bp, Artificial Sequence
  MKO10080807_B_Dchs1
  gRNA
attatgcccacactggtgcc

SEQ ID NO: 80808 - DNA, 20 bp, Artificial Sequence
  MKO10080808_B_Dchs1
  gRNA
aaagtcgcccatggggtccc

SEQ ID NO: 80809 - DNA, 20 bp, Artificial Sequence
  MKO10080809_B_Dck
  gRNA
gctctgcacgttgcaccacc

SEQ ID NO: 80810 - DNA, 20 bp, Artificial Sequence
  MKO10080810_B_Dck
  gRNA
aaggtgaaagaccaccgttc

SEQ ID NO: 80811 - DNA, 20 bp, Artificial Sequence
  MKO10080811_B_Dck
  gRNA
ggctcggatccggctgagac

SEQ ID NO: 80812 - DNA, 20 bp, Artificial Sequence
  MKO10080812_B_Dclk1
  gRNA
cttggtgacttgcccgagcg

SEQ ID NO: 80813 - DNA, 20 bp, Artificial Sequence
  MKO10080813_B_Dclk1
  gRNA
tctttccccagaatgtcgag

SEQ ID NO: 80814 - DNA, 20 bp, Artificial Sequence
  MKO10080814_B_Dclk1
  gRNA
atagcatcagcgtcccgcag

SEQ ID NO: 80815 - DNA, 20 bp, Artificial Sequence
  MKO10080815_B_Dclk2
  gRNA
gcctcagctgcgaagtattc

SEQ ID NO: 80816 - DNA, 20 bp, Artificial Sequence
  MKO10080816_B_Dclk2
  gRNA
ttgtctcaccgctatgatcc

SEQ ID NO: 80817 - DNA, 20 bp, Artificial Sequence
  MKO10080817_B_Dclk2
  gRNA
tggacttcggagtggaaagc

SEQ ID NO: 80818 - DNA, 20 bp, Artificial Sequence
  MKO10080818_B_Dclk3
  gRNA
tgatgttgaagagctcgtct

SEQ ID NO: 80819 - DNA, 20 bp, Artificial Sequence
  MKO10080819_B_Dclk3
  gRNA
ggaggagtcccccaacagtt

SEQ ID NO: 80820 - DNA, 20 bp, Artificial Sequence
  MKO10080820_B_Dclk3
  gRNA
tccctctcaggacttcggaa

SEQ ID NO: 80821 - DNA, 20 bp, Artificial Sequence
  MKO10080821_B_Dclre1a
  gRNA
cttacctcgctgcaatagac

SEQ ID NO: 80822 - DNA, 20 bp, Artificial Sequence
  MKO10080822_B_Dclre1a
  gRNA
cagcatggaacgctctcgcc

SEQ ID NO: 80823 - DNA, 20 bp, Artificial Sequence
  MKO10080823_B_Dclre1a
  gRNA
ttccattctgatcattacgc

SEQ ID NO: 80824 - DNA, 20 bp, Artificial Sequence
  MKO10080824_B_Dclre1b
  gRNA
cacttgcttgtcgaagttcc

SEQ ID NO: 80825 - DNA, 20 bp, Artificial Sequence
  MKO10080825_B_Dclre1b
  gRNA
atctatgagcgttacagtca

SEQ ID NO: 80826 - DNA, 20 bp, Artificial Sequence
  MKO10080826_B_Dclre1b
  gRNA
tcttgcccaatttcatctag

SEQ ID NO: 80827 - DNA, 20 bp, Artificial Sequence
  MKO10080827_B_Dclre1c
  gRNA
ctagcccaaagtacagattc

SEQ ID NO: 80828 - DNA, 20 bp, Artificial Sequence
  MKO10080828_B_Dclre1c
  gRNA
gcagatatctttagttgatg

SEQ ID NO: 80829 - DNA, 20 bp, Artificial Sequence
  MKO10080829_B_Dclre1c
  gRNA
aacaacagctccttagtgac

SEQ ID NO: 80830 - DNA, 20 bp, Artificial Sequence
  MKO10080830_B_Dcn
  gRNA
ttgagggatcgcagttatgt

SEQ ID NO: 80831 - DNA, 20 bp, Artificial Sequence
  MKO10080831_B_Dcn
  gRNA
gatcagcaaaatcagtccag

SEQ ID NO: 80832 - DNA, 20 bp, Artificial Sequence
  MKO10080832_B_Dcn
  gRNA
taggtttggacaaagtgccc

SEQ ID NO: 80833 - DNA, 20 bp, Artificial Sequence
  MKO10080833_B_Dcp1a
  gRNA
tcatcgcatagcaaaactca

SEQ ID NO: 80834 - DNA, 20 bp, Artificial Sequence
  MKO10080834_B_Dcp1a
  gRNA
tgagccagtgaataaagatt

SEQ ID NO: 80835 - DNA, 20 bp, Artificial Sequence
  MKO10080835_B_Dcp1a
  gRNA
acaatggtaaagccatggta

SEQ ID NO: 80836 - DNA, 20 bp, Artificial Sequence
  MKO10080836_B_Dcp1b
  gRNA
tcccccgtgaccttgagctc

SEQ ID NO: 80837 - DNA, 20 bp, Artificial Sequence
  MKO10080837_B_Dcp1b
  gRNA
agaacccattactaaagacc

SEQ ID NO: 80838 - DNA, 20 bp, Artificial Sequence
  MKO10080838_B_Dcp1b
  gRNA
cattatgaataggctcagca

SEQ ID NO: 80839 - DNA, 20 bp, Artificial Sequence
  MKO10080839_B_Dcp2
  gRNA
aagtctcttatcccgcactg

SEQ ID NO: 80840 - DNA, 20 bp, Artificial Sequence
  MKO10080840_B_Dcp2
  gRNA
gctcgcttgtacatcattcc

SEQ ID NO: 80841 - DNA, 20 bp, Artificial Sequence
  MKO10080841_B_Dcp2
  gRNA
tgatgtacaagcgagcaagc

SEQ ID NO: 80842 - DNA, 20 bp, Artificial Sequence
  MKO10080842_B_Dcpp1
  gRNA
atctacccttaagaaatacc

SEQ ID NO: 80843 - DNA, 20 bp, Artificial Sequence
  MKO10080843_B_Dcpp1
  gRNA
tgacttaccttgtgtcaaaa

SEQ ID NO: 80844 - DNA, 20 bp, Artificial Sequence
  MKO10080844_B_Dcpp1
  gRNA
agactttgagatgttccagc

SEQ ID NO: 80845 - DNA, 20 bp, Artificial Sequence
  MKO10080845_B_Dcpp2
  gRNA
cttcaggctagattgattgt

SEQ ID NO: 80846 - DNA, 20 bp, Artificial Sequence
  MKO10080846_B_Dcpp2
  gRNA
agactttgagatgttccagc

SEQ ID NO: 80847 - DNA, 20 bp, Artificial Sequence
  MKO10080847_B_Dcpp2
  gRNA
atctagcctgaagaaatacc

SEQ ID NO: 80848 - DNA, 20 bp, Artificial Sequence
  MKO10080848_B_Dcpp3
  gRNA
aaaaaaatataacaagtatc

SEQ ID NO: 80849 - DNA, 20 bp, Artificial Sequence
  MKO10080849_B_Dcpp3
  gRNA
tgacttaccttgtgtcaaaa

SEQ ID NO: 80850 - DNA, 20 bp, Artificial Sequence
  MKO10080850_B_Dcpp3
  gRNA
agactttgagatgttccagc

SEQ ID NO: 80851 - DNA, 20 bp, Artificial Sequence
  MKO10080851_B_Dcps
  gRNA
gaccatcaccttaccctacc

SEQ ID NO: 80852 - DNA, 20 bp, Artificial Sequence
  MKO10080852_B_Dcps
  gRNA
gccacgtgttctacctgaaa

SEQ ID NO: 80853 - DNA, 20 bp, Artificial Sequence
  MKO10080853_B_Dcps
  gRNA
acacgtggcgcagctcctaa

SEQ ID NO: 80854 - DNA, 20 bp, Artificial Sequence
  MKO10080854_B_Dcst1
  gRNA
ccaataggcttgggggccat

SEQ ID NO: 80855 - DNA, 20 bp, Artificial Sequence
  MKO10080855_B_Dcst1
  gRNA
tcgccacaggaaccggatcc

SEQ ID NO: 80856 - DNA, 20 bp, Artificial Sequence
  MKO10080856_B_Dcst1
  gRNA
aggggaggtgccccagccga

SEQ ID NO: 80857 - DNA, 20 bp, Artificial Sequence
  MKO10080857_B_Dcstamp
  gRNA
cagaatcatggacgactcct

SEQ ID NO: 80858 - DNA, 20 bp, Artificial Sequence
  MKO10080858_B_Dcstamp
  gRNA
catagatcatcttcatttgc

SEQ ID NO: 80859 - DNA, 20 bp, Artificial Sequence
  MKO10080859_B_Dcstamp
  gRNA
ttccagtcctgaaaatgatt

SEQ ID NO: 80860 - DNA, 20 bp, Artificial Sequence
  MKO10080860_B_Dctd
  gRNA
agtttagcacattcgttaca

SEQ ID NO: 80861 - DNA, 20 bp, Artificial Sequence
  MKO10080861_B_Dctd
  gRNA
aggtcatcactgcacccatt

SEQ ID NO: 80862 - DNA, 20 bp, Artificial Sequence
  MKO10080862_B_Dctd
  gRNA
gggtacaatggcatgccaaa

SEQ ID NO: 80863 - DNA, 20 bp, Artificial Sequence
  MKO10080863_B_Dctn1
  gRNA
gctgccagcggagtctgagc

SEQ ID NO: 80864 - DNA, 20 bp, Artificial Sequence
  MKO10080864_B_Dctn1
  gRNA
ctgctccatcttcaaatact

SEQ ID NO: 80865 - DNA, 20 bp, Artificial Sequence
  MKO10080865_B_Dctn1
  gRNA
cagatccaagtatttgaaga

SEQ ID NO: 80866 - DNA, 20 bp, Artificial Sequence
  MKO10080866_B_Dctn2
  gRNA
acagatttctcagatcgcat

SEQ ID NO: 80867 - DNA, 20 bp, Artificial Sequence
  MKO10080867_B_Dctn2
  gRNA
tctctagcttggagagggtc

SEQ ID NO: 80868 - DNA, 20 bp, Artificial Sequence
  MKO10080868_B_Dctn2
  gRNA
cttgtccttgaacttgtcgt

SEQ ID NO: 80869 - DNA, 20 bp, Artificial Sequence
  MKO10080869_B_Dctn3
  gRNA
agactgtagccgctgcacat

SEQ ID NO: 80870 - DNA, 20 bp, Artificial Sequence
  MKO10080870_B_Dctn3
  gRNA
cgctgggtgtacgggccggg

SEQ ID NO: 80871 - DNA, 20 bp, Artificial Sequence
  MKO10080871_B_Dctn3
  gRNA
gcaatgcgatcaatgtactc

SEQ ID NO: 80872 - DNA, 20 bp, Artificial Sequence
  MKO10080872_B_Dctn4
  gRNA
gcgaagaaattacatgcctt

SEQ ID NO: 80873 - DNA, 20 bp, Artificial Sequence
  MKO10080873_B_Dctn4
  gRNA
gtacttacccgttgtgtgtg

SEQ ID NO: 80874 - DNA, 20 bp, Artificial Sequence
  MKO10080874_B_Dctn4
  gRNA
cagaaaaccctcacacacaa

SEQ ID NO: 80875 - DNA, 20 bp, Artificial Sequence
  MKO10080875_B_Dctn5
  gRNA
tgccctttaccttgccattg

SEQ ID NO: 80876 - DNA, 20 bp, Artificial Sequence
  MKO10080876_B_Dctn5
  gRNA
atcaacattacctgggcagc

SEQ ID NO: 80877 - DNA, 20 bp, Artificial Sequence
  MKO10080877_B_Dctn5
  gRNA
agtattacccccagaaactg

SEQ ID NO: 80878 - DNA, 20 bp, Artificial Sequence
  MKO10080878_B_Dctn6
  gRNA
tgtgtagaaagcgaaatcag

SEQ ID NO: 80879 - DNA, 20 bp, Artificial Sequence
  MKO10080879_B_Dctn6
  gRNA
caccaacaacgtatttgaag

SEQ ID NO: 80880 - DNA, 20 bp, Artificial Sequence
  MKO10080880_B_Dctn6
  gRNA
tacagtgtgaagattgctcc

SEQ ID NO: 80881 - DNA, 20 bp, Artificial Sequence
  MKO10080881_B_Dctpp1
  gRNA
cgtcgctaagctcctcctga

SEQ ID NO: 80882 - DNA, 20 bp, Artificial Sequence
  MKO10080882_B_Dctpp1
  gRNA
ctagcagcaggttccgaggc

SEQ ID NO: 80883 - DNA, 20 bp, Artificial Sequence
  MKO10080883_B_Dctpp1
  gRNA
gggagcagttccaccagcct

SEQ ID NO: 80884 - DNA, 20 bp, Artificial Sequence
  MKO10080884_B_Dct
  gRNA
atgacccaacgctgattagt

SEQ ID NO: 80885 - DNA, 20 bp, Artificial Sequence
  MKO10080885_B_Dct
  gRNA
aggtccaggacgcccctata

SEQ ID NO: 80886 - DNA, 20 bp, Artificial Sequence
  MKO10080886_B_Dct
  gRNA
gcttggatgactacaaccgc

SEQ ID NO: 80887 - DNA, 20 bp, Artificial Sequence
  MKO10080887_B_Dcun1d1
  gRNA
gttgtctttctcaaaatgac

SEQ ID NO: 80888 - DNA, 20 bp, Artificial Sequence
  MKO10080888_B_Dcun1d1
  gRNA
cctcaggatgaaaataaaat

SEQ ID NO: 80889 - DNA, 20 bp, Artificial Sequence
  MKO10080889_B_Dcun1d1
  gRNA
tgacagcatagaaaaactaa

SEQ ID NO: 80890 - DNA, 20 bp, Artificial Sequence
  MKO10080890_B_Dcun1d2
  gRNA
ccccgccagtatcagcgttt

SEQ ID NO: 80891 - DNA, 20 bp, Artificial Sequence
  MKO10080891_B_Dcun1d2
  gRNA
cagtttcttccaaaaccccg

SEQ ID NO: 80892 - DNA, 20 bp, Artificial Sequence
  MKO10080892_B_Dcun1d2
  gRNA
cactgctcttcatagactct

SEQ ID NO: 80893 - DNA, 20 bp, Artificial Sequence
  MKO10080893_B_Dcun1d3
  gRNA
ctgttaggaaatttagccac

SEQ ID NO: 80894 - DNA, 20 bp, Artificial Sequence
  MKO10080894_B_Dcun1d3
  gRNA
ggctagccaccgtgaggaac

SEQ ID NO: 80895 - DNA, 20 bp, Artificial Sequence
  MKO10080895_B_Dcun1d3
  gRNA
taccggtttacatttcagtt

SEQ ID NO: 80896 - DNA, 20 bp, Artificial Sequence
  MKO10080896_B_Dcun1d4
  gRNA
ttagcaaagtgatgccaccc

SEQ ID NO: 80897 - DNA, 20 bp, Artificial Sequence
  MKO10080897_B_Dcun1d4
  gRNA
ctaccatacccttaacaagc

SEQ ID NO: 80898 - DNA, 20 bp, Artificial Sequence
  MKO10080898_B_Dcun1d4
  gRNA
cagaatctgacagaagacgt

SEQ ID NO: 80899 - DNA, 20 bp, Artificial Sequence
  MKO10080899_B_Dcun1d5
  gRNA
gaaggtcctgatgaagttgt

SEQ ID NO: 80900 - DNA, 20 bp, Artificial Sequence
  MKO10080900_B_Dcun1d5
  gRNA
taccaaggaagaatggttaa

SEQ ID NO: 80901 - DNA, 20 bp, Artificial Sequence
  MKO10080901_B_Dcun1d5
  gRNA
aaattggaggctgaaagcat

SEQ ID NO: 80902 - DNA, 20 bp, Artificial Sequence
  MKO10080902_B_Dcxr
  gRNA
tccccgagctatcatgccct

SEQ ID NO: 80903 - DNA, 20 bp, Artificial Sequence
  MKO10080903_B_Dcxr
  gRNA
aataacgcagtgtcctggtg

SEQ ID NO: 80904 - DNA, 20 bp, Artificial Sequence
  MKO10080904_B_Dcxr
  gRNA
agcccgaagattcacattga

SEQ ID NO: 80905 - DNA, 20 bp, Artificial Sequence
  MKO10080905_B_Dcx
  gRNA
caatggggaccgttacttca

SEQ ID NO: 80906 - DNA, 20 bp, Artificial Sequence
  MKO10080906_B_Dcx
  gRNA
gcggtagaaacgtaccttct

SEQ ID NO: 80907 - DNA, 20 bp, Artificial Sequence
  MKO10080907_B_Dcx
  gRNA
agaaatcatcttgagcatag

SEQ ID NO: 80908 - DNA, 20 bp, Artificial Sequence
  MKO10080908_B_Dda1
  gRNA
ccacgcggactctgtgtgca

SEQ ID NO: 80909 - DNA, 20 bp, Artificial Sequence
  MKO10080909_B_Dda1
  gRNA
aaaagacgaacatacttctg

SEQ ID NO: 80910 - DNA, 20 bp, Artificial Sequence
  MKO10080910_B_Dda1
  gRNA
cacaggacctaggtgtcctc

SEQ ID NO: 80911 - DNA, 20 bp, Artificial Sequence
  MKO10080911_B_Ddah1
  gRNA
ggacccaacctgattgcaat

SEQ ID NO: 80912 - DNA, 20 bp, Artificial Sequence
  MKO10080912_B_Ddah1
  gRNA
ggccttctgtgcagattcgc

SEQ ID NO: 80913 - DNA, 20 bp, Artificial Sequence
  MKO10080913_B_Ddah1
  gRNA
tccaaaagaacaaatcaacg

SEQ ID NO: 80914 - DNA, 20 bp, Artificial Sequence
  MKO10080914_B_Ddah2
  gRNA
tggagtgcgtaaagccctcc

SEQ ID NO: 80915 - DNA, 20 bp, Artificial Sequence
  MKO10080915_B_Ddah2
  gRNA
gatgagaatgcgacgctgga

SEQ ID NO: 80916 - DNA, 20 bp, Artificial Sequence
  MKO10080916_B_Ddah2
  gRNA
ctaggacttcgctgtctcaa

SEQ ID NO: 80917 - DNA, 20 bp, Artificial Sequence
  MKO10080917_B_Ddb1
  gRNA
ctctcgaagagacacctcat

SEQ ID NO: 80918 - DNA, 20 bp, Artificial Sequence
  MKO10080918_B_Ddb1
  gRNA
gggtcttcggccagtcaaag

SEQ ID NO: 80919 - DNA, 20 bp, Artificial Sequence
  MKO10080919_B_Ddb1
  gRNA
ctgcttatactccaagatac

SEQ ID NO: 80920 - DNA, 20 bp, Artificial Sequence
  MKO10080920_B_Ddb2
  gRNA
ggacgtagtcctcctgtcaa

SEQ ID NO: 80921 - DNA, 20 bp, Artificial Sequence
  MKO10080921_B_Ddb2
  gRNA
gcctttaaaatcctgcagcc

SEQ ID NO: 80922 - DNA, 20 bp, Artificial Sequence
  MKO10080922_B_Ddb2
  gRNA
tcacttgcaagagtttgagc

SEQ ID NO: 80923 - DNA, 20 bp, Artificial Sequence
  MKO10080923_B_Ddc
  gRNA
ggttgcttacacatctgatc

SEQ ID NO: 80924 - DNA, 20 bp, Artificial Sequence
  MKO10080924_B_Ddc
  gRNA
cctccccacaggtgacacac

SEQ ID NO: 80925 - DNA, 20 bp, Artificial Sequence
  MKO10080925_B_Ddc
  gRNA
ccatgagagcttctgccctt

SEQ ID NO: 80926 - DNA, 20 bp, Artificial Sequence
  MKO10080926_B_Ddhd1
  gRNA
agtggtttattgatgggacg

SEQ ID NO: 80927 - DNA, 20 bp, Artificial Sequence
  MKO10080927_B_Ddhd1
  gRNA
acgatatgagaagtctgcga

SEQ ID NO: 80928 - DNA, 20 bp, Artificial Sequence
  MKO10080928_B_Ddhd1
  gRNA
gagaaccgttacccaaaaac

SEQ ID NO: 80929 - DNA, 20 bp, Artificial Sequence
  MKO10080929_B_Ddhd2
  gRNA
gtacaccgtctcacttccga

SEQ ID NO: 80930 - DNA, 20 bp, Artificial Sequence
  MKO10080930_B_Ddhd2
  gRNA
gtgcattaccagccaattgc

SEQ ID NO: 80931 - DNA, 20 bp, Artificial Sequence
  MKO10080931_B_Ddhd2
  gRNA
tttcgaagcattgttcaatg

SEQ ID NO: 80932 - DNA, 20 bp, Artificial Sequence
  MKO10080932_B_Ddi1
  gRNA
aaagcagcatgcttcgaatc

SEQ ID NO: 80933 - DNA, 20 bp, Artificial Sequence
  MKO10080933_B_Ddi1
  gRNA
tagcaaccccaccccaccgt

SEQ ID NO: 80934 - DNA, 20 bp, Artificial Sequence
  MKO10080934_B_Ddi1
  gRNA
ctctactaacccatttgatc

SEQ ID NO: 80935 - DNA, 20 bp, Artificial Sequence
  MKO10080935_B_Ddi2
  gRNA
tgggttgcgctccttcagca

SEQ ID NO: 80936 - DNA, 20 bp, Artificial Sequence
  MKO10080936_B_Ddi2
  gRNA
ggttggccagcagcatgtct

SEQ ID NO: 80937 - DNA, 20 bp, Artificial Sequence
  MKO10080937_B_Ddi2
  gRNA
cccctttgatctcgaagctc

SEQ ID NO: 80938 - DNA, 20 bp, Artificial Sequence
  MKO10080938_B_Ddit3
  gRNA
ggtgcccccaatttcatctg

SEQ ID NO: 80939 - DNA, 20 bp, Artificial Sequence
  MKO10080939_B_Ddit3
  gRNA
gtcgatcagagcccgccgtg

SEQ ID NO: 80940 - DNA, 20 bp, Artificial Sequence
  MKO10080940_B_Ddit3
  gRNA
agcctggtatgaggatctgc

SEQ ID NO: 80941 - DNA, 20 bp, Artificial Sequence
  MKO10080941_B_Ddit4l
  gRNA
caaactgcccgttgcaacca

SEQ ID NO: 80942 - DNA, 20 bp, Artificial Sequence
  MKO10080942_B_Ddit4l
  gRNA
ttctttcagatttcgactac

SEQ ID NO: 80943 - DNA, 20 bp, Artificial Sequence
  MKO10080943_B_Ddit4l
  gRNA
cttcaaataccacctcgttg

SEQ ID NO: 80944 - DNA, 20 bp, Artificial Sequence
  MKO10080944_B_Ddit4
  gRNA
ttcgtcctcgtctcgaactc

SEQ ID NO: 80945 - DNA, 20 bp, Artificial Sequence
  MKO10080945_B_Ddit4
  gRNA
gccgcgagcccaatcgcgcc

SEQ ID NO: 80946 - DNA, 20 bp, Artificial Sequence
  MKO10080946_B_Ddit4
  gRNA
cgtccagcagtgccccccgc

SEQ ID NO: 80947 - DNA, 20 bp, Artificial Sequence
  MKO10080947_B_Ddn
  gRNA
cgctccttctcgacagtcca

SEQ ID NO: 80948 - DNA, 20 bp, Artificial Sequence
  MKO10080948_B_Ddn
  gRNA
gcttcgtctgagtccgaatc

SEQ ID NO: 80949 - DNA, 20 bp, Artificial Sequence
  MKO10080949_B_Ddn
  gRNA
ccgaccatccgtgctcccgc

SEQ ID NO: 80950 - DNA, 20 bp, Artificial Sequence
  MKO10080950_B_Ddost
  gRNA
ttcgcagcacacactcattg

SEQ ID NO: 80951 - DNA, 20 bp, Artificial Sequence
  MKO10080951_B_Ddost
  gRNA
gtggctgccagctctgatat

SEQ ID NO: 80952 - DNA, 20 bp, Artificial Sequence
  MKO10080952_B_Ddost
  gRNA
tcactgcccagctcccgaag

SEQ ID NO: 80953 - DNA, 20 bp, Artificial Sequence
  MKO10080953_B_Ddo
  gRNA
tgtcagctacagcttcgaca

SEQ ID NO: 80954 - DNA, 20 bp, Artificial Sequence
  MKO10080954_B_Ddo
  gRNA
aggcagaagtctcgcacttc

SEQ ID NO: 80955 - DNA, 20 bp, Artificial Sequence
  MKO10080955_B_Ddo
  gRNA
tgcagatgcgggtgttcacc

SEQ ID NO: 80956 - DNA, 20 bp, Artificial Sequence
  MKO10080956_B_Ddr1
  gRNA
tcccgggggagtagtgctga

SEQ ID NO: 80957 - DNA, 20 bp, Artificial Sequence
  MKO10080957_B_Ddr1
  gRNA
ctaccgctgcccgccacagc

SEQ ID NO: 80958 - DNA, 20 bp, Artificial Sequence
  MKO10080958_B_Ddr1
  gRNA
agagatatcgctgtcaggaa

SEQ ID NO: 80959 - DNA, 20 bp, Artificial Sequence
  MKO10080959_B_Ddr2
  gRNA
aaccctcatgcacacgttca

SEQ ID NO: 80960 - DNA, 20 bp, Artificial Sequence
  MKO10080960_B_Ddr2
  gRNA
gtatcctacaatgctccagc

SEQ ID NO: 80961 - DNA, 20 bp, Artificial Sequence
  MKO10080961_B_Ddr2
  gRNA
cagcagtttgtactccctgg

SEQ ID NO: 80962 - DNA, 20 bp, Artificial Sequence
  MKO10080962_B_Ddrgk1
  gRNA
cctgttgggtgaacttctgc

SEQ ID NO: 80963 - DNA, 20 bp, Artificial Sequence
  MKO10080963_B_Ddrgk1
  gRNA
acgcctagagtcccaacgtg

SEQ ID NO: 80964 - DNA, 20 bp, Artificial Sequence
  MKO10080964_B_Ddrgk1
  gRNA
ccagcagaagttcacccaac

SEQ ID NO: 80965 - DNA, 20 bp, Artificial Sequence
  MKO10080965_B_Ddt
  gRNA
ccccgatggaagagaccaga

SEQ ID NO: 80966 - DNA, 20 bp, Artificial Sequence
  MKO10080966_B_Ddt
  gRNA
gcttggcagatcggaaagaa

SEQ ID NO: 80967 - DNA, 20 bp, Artificial Sequence
  MKO10080967_B_Ddt
  gRNA
tccgatctgccaagcctcca

SEQ ID NO: 80968 - DNA, 20 bp, Artificial Sequence
  MKO10080968_B_Ddx10
  gRNA
atgtgttgaagaagtcgacc

SEQ ID NO: 80969 - DNA, 20 bp, Artificial Sequence
  MKO10080969_B_Ddx10
  gRNA
gcaagaagcacagtaccgct

SEQ ID NO: 80970 - DNA, 20 bp, Artificial Sequence
  MKO10080970_B_Ddx10
  gRNA
accttgcaaagccaacccta

SEQ ID NO: 80971 - DNA, 20 bp, Artificial Sequence
  MKO10080971_B_Ddx11
  gRNA
aggctctcctgcgcctcagc

SEQ ID NO: 80972 - DNA, 20 bp, Artificial Sequence
  MKO10080972_B_Ddx11
  gRNA
tcctagggtggacgaggctg

SEQ ID NO: 80973 - DNA, 20 bp, Artificial Sequence
  MKO10080973_B_Ddx11
  gRNA
ggaggaagaacatataacca

SEQ ID NO: 80974 - DNA, 20 bp, Artificial Sequence
  MKO10080974_B_Ddx17
  gRNA
tacgtggaaagttagcatga
